United States Patent Application Publication US 2005/0255487 A1 - sequence listing, part 88

SEQ ID NO: 2419704 - RNA, 19 nt, Homo sapiens
  misc_RNA (1)...(19): siRNA sense strand
uuacagaagaggaagacaa

SEQ ID NO: 2419705 - RNA, 19 nt, Homo sapiens
  misc_RNA (1)...(19): siRNA sense strand
ggaaauguugaaagagaga

SEQ ID NO: 2419706 - RNA, 19 nt, Homo sapiens
  misc_RNA (1)...(19): siRNA sense strand
ggaaauaacaauggaacau

SEQ ID NO: 2419707 - RNA, 19 nt, Homo sapiens
  misc_RNA (1)...(19): siRNA sense strand
aagcaaaggaccaugggaa

SEQ ID NO: 2419708 - RNA, 19 nt, Homo sapiens
  misc_RNA (1)...(19): siRNA sense strand
gaaacuaaaggcugaacaa

SEQ ID NO: 2419709 - RNA, 19 nt, Homo sapiens
  misc_RNA (1)...(19): siRNA sense strand
cagaaaacuuugaugacua

SEQ ID NO: 2419710 - RNA, 19 nt, Homo sapiens
  misc_RNA (1)...(19): siRNA sense strand
gcuauaaucaagagcaaaa

SEQ ID NO: 2419711 - RNA, 19 nt, Homo sapiens
  misc_RNA (1)...(19): siRNA sense strand
guagagaacuguaucgaga

SEQ ID NO: 2419712 - RNA, 19 nt, Homo sapiens
  misc_RNA (1)...(19): siRNA sense strand
ugacagaagaugaaauaga

SEQ ID NO: 2419713 - RNA, 19 nt, Homo sapiens
  misc_RNA (1)...(19): siRNA sense strand
gagauaagccacagccaau

SEQ ID NO: 2419714 - RNA, 19 nt, Homo sapiens
  misc_RNA (1)...(19): siRNA sense strand
cggaguggaguuagauaaa

SEQ ID NO: 2419715 - RNA, 19 nt, Homo sapiens
  misc_RNA (1)...(19): siRNA sense strand
ucacauuggaagagcagaa

SEQ ID NO: 2419716 - RNA, 19 nt, Homo sapiens
  misc_RNA (1)...(19): siRNA sense strand
ggagaaucugacaaagaaa

SEQ ID NO: 2419717 - RNA, 19 nt, Homo sapiens
  misc_RNA (1)...(19): siRNA sense strand
gugaaaagauagagaguuc

SEQ ID NO: 2419718 - RNA, 19 nt, Homo sapiens
  misc_RNA (1)...(19): siRNA sense strand
gaugaugauacaaaggaua

SEQ ID NO: 2419719 - RNA, 19 nt, Homo sapiens
  misc_RNA (1)...(19): siRNA sense strand
gcaaaaggaaagacugaaa

SEQ ID NO: 2419720 - RNA, 19 nt, Homo sapiens
  misc_RNA (1)...(19): siRNA sense strand
caaaacaacaacuggaaaa

SEQ ID NO: 2419721 - RNA, 19 nt, Homo sapiens
  misc_RNA (1)...(19): siRNA sense strand
gguccaaaagacagagaaa

SEQ ID NO: 2419722 - RNA, 19 nt, Homo sapiens
  misc_RNA (1)...(19): siRNA sense strand
ggacagaggaacaucaaca

SEQ ID NO: 2419723 - RNA, 19 nt, Homo sapiens
  misc_RNA (1)...(19): siRNA sense strand
uggcaagguuggagaaucu

SEQ ID NO: 2419724 - RNA, 19 nt, Homo sapiens
  misc_RNA (1)...(19): siRNA sense strand
aggaaauaacaauggaaca

SEQ ID NO: 2419725 - RNA, 19 nt, Homo sapiens
  misc_RNA (1)...(19): siRNA sense strand
ggaugcagccugaaagauu

SEQ ID NO: 2419726 - RNA, 19 nt, Homo sapiens
  misc_RNA (1)...(19): siRNA sense strand
cuggagagucagagacaau

SEQ ID NO: 2419727 - RNA, 19 nt, Homo sapiens
  misc_RNA (1)...(19): siRNA sense strand
caugacagaagaugaaaua

SEQ ID NO: 2419728 - RNA, 19 nt, Homo sapiens
  misc_RNA (1)...(19): siRNA sense strand
gcugaagaaggaacagaaa

SEQ ID NO: 2419729 - RNA, 19 nt, Homo sapiens
  misc_RNA (1)...(19): siRNA sense strand
cuucauuuaaccugaguaa

SEQ ID NO: 2419730 - RNA, 19 nt, Homo sapiens
  misc_RNA (1)...(19): siRNA sense strand
cuacaucgggauaggaaau

SEQ ID NO: 2419731 - RNA, 19 nt, Homo sapiens
  misc_RNA (1)...(19): siRNA sense strand
ugaagaaaauacuggagaa

SEQ ID NO: 2419732 - RNA, 19 nt, Homo sapiens
  misc_RNA (1)...(19): siRNA sense strand
uggcuauaccaguggauuu

SEQ ID NO: 2419733 - RNA, 19 nt, Homo sapiens
  misc_RNA (1)...(19): siRNA sense strand
gaguagaauaugaagcuca

SEQ ID NO: 2419734 - RNA, 19 nt, Homo sapiens
  misc_RNA (1)...(19): siRNA sense strand
caucaugggcagugggauc

SEQ ID NO: 2419735 - RNA, 19 nt, Homo sapiens
  misc_RNA (1)...(19): siRNA sense strand
ccagauagcuacaucggga

SEQ ID NO: 2419736 - RNA, 19 nt, Homo sapiens
  misc_RNA (1)...(19): siRNA sense strand
cgggauaggaaauucagaa

SEQ ID NO: 2419737 - RNA, 19 nt, Homo sapiens
  misc_RNA (1)...(19): siRNA sense strand
augaagacacugaaaguca

SEQ ID NO: 2419738 - RNA, 19 nt, Homo sapiens
  misc_RNA (1)...(19): siRNA sense strand
gcuacaucgggauaggaaa

SEQ ID NO: 2419739 - RNA, 19 nt, Homo sapiens
  misc_RNA (1)...(19): siRNA sense strand
uggaugagaaccaggccaa

SEQ ID NO: 2419740 - RNA, 19 nt, Homo sapiens
  misc_RNA (1)...(19): siRNA sense strand
ucaugggacuugaagaaaa

SEQ ID NO: 2419741 - RNA, 19 nt, Homo sapiens
  misc_RNA (1)...(19): siRNA sense strand
ugagagcagcaguggagaa

SEQ ID NO: 2419742 - RNA, 19 nt, Homo sapiens
  misc_RNA (1)...(19): siRNA sense strand
ggauaggaaauucagaaaa

SEQ ID NO: 2419743 - RNA, 19 nt, Homo sapiens
  misc_RNA (1)...(19): siRNA sense strand
augcagaacauuggagcaa

SEQ ID NO: 2419744 - RNA, 19 nt, Homo sapiens
  misc_RNA (1)...(19): siRNA sense strand
agauagcuacaucgggaua

SEQ ID NO: 2419745 - RNA, 19 nt, Homo sapiens
  misc_RNA (1)...(19): siRNA sense strand
gcagugggauccugggcuu

SEQ ID NO: 2419746 - RNA, 19 nt, Homo sapiens
  misc_RNA (1)...(19): siRNA sense strand
gaagaaaauacuggagaau

SEQ ID NO: 2419747 - RNA, 19 nt, Homo sapiens
  misc_RNA (1)...(19): siRNA sense strand
cuauggagaaguugaagau

SEQ ID NO: 2419748 - RNA, 19 nt, Homo sapiens
  misc_RNA (1)...(19): siRNA sense strand
auaugaacuaccugaagua

SEQ ID NO: 2419749 - RNA, 19 nt, Homo sapiens
  misc_RNA (1)...(19): siRNA sense strand
aaugguaccucaauggcaa

SEQ ID NO: 2419750 - RNA, 19 nt, Homo sapiens
  misc_RNA (1)...(19): siRNA sense strand
gggucuuugauuuaugaaa

SEQ ID NO: 2419751 - RNA, 19 nt, Homo sapiens
  misc_RNA (1)...(19): siRNA sense strand
ccaucuacagugaacuuaa

SEQ ID NO: 2419752 - RNA, 19 nt, Homo sapiens
  misc_RNA (1)...(19): siRNA sense strand
ucuucaugacaguggagua

SEQ ID NO: 2419753 - RNA, 19 nt, Homo sapiens
  misc_RNA (1)...(19): siRNA sense strand
aaaugcaaacggugucaaa

SEQ ID NO: 2419754 - RNA, 19 nt, Homo sapiens
  misc_RNA (1)...(19): siRNA sense strand
cagucaauuugcuaaugaa

SEQ ID NO: 2419755 - RNA, 19 nt, Homo sapiens
  misc_RNA (1)...(19): siRNA sense strand
gcagcaaugagcagucaau

SEQ ID NO: 2419756 - RNA, 19 nt, Homo sapiens
  misc_RNA (1)...(19): siRNA sense strand
agcaaugagcagucaauuu

SEQ ID NO: 2419757 - RNA, 19 nt, Homo sapiens
  misc_RNA (1)...(19): siRNA sense strand
ugaaguaaucagagcauuc

SEQ ID NO: 2419758 - RNA, 19 nt, Homo sapiens
  misc_RNA (1)...(19): siRNA sense strand
uggcaguccuuguggcagu

SEQ ID NO: 2419759 - RNA, 19 nt, Homo sapiens
  misc_RNA (1)...(19): siRNA sense strand
auuugugucuguuggaauu

SEQ ID NO: 2419760 - RNA, 19 nt, Homo sapiens
  misc_RNA (1)...(19): siRNA sense strand
acgagaagaacgagguuau

SEQ ID NO: 2419761 - RNA, 19 nt, Homo sapiens
  misc_RNA (1)...(19): siRNA sense strand
cagcaugauguuuggaaau

SEQ ID NO: 2419762 - RNA, 19 nt, Homo sapiens
  misc_RNA (1)...(19): siRNA sense strand
gcacgaaggaugaacgguu

SEQ ID NO: 2419763 - RNA, 19 nt, Homo sapiens
  misc_RNA (1)...(19): siRNA sense strand
gggaauaagaagugggugg

SEQ ID NO: 2419764 - RNA, 19 nt, Homo sapiens
  misc_RNA (1)...(19): siRNA sense strand
agaaaacugcguuggaaua

SEQ ID NO: 2419765 - RNA, 19 nt, Homo sapiens
  misc_RNA (1)...(19): siRNA sense strand
uggcaaagaaacacagcau

SEQ ID NO: 2419766 - RNA, 19 nt, Homo sapiens
  misc_RNA (1)...(19): siRNA sense strand
ggguugaugcugagaccau

SEQ ID NO: 2419767 - RNA, 19 nt, Homo sapiens
  misc_RNA (1)...(19): siRNA sense strand
aggaaaaguaugagaaaag

SEQ ID NO: 2419768 - RNA, 19 nt, Homo sapiens
  misc_RNA (1)...(19): siRNA sense strand
gaucauuauuaaagggguu

SEQ ID NO: 2419769 - RNA, 19 nt, Homo sapiens
  misc_RNA (1)...(19): siRNA sense strand
cuucagaauggccuggaaa

SEQ ID NO: 2419770 - RNA, 19 nt, Homo sapiens
  misc_RNA (1)...(19): siRNA sense strand
uaacagagcaugagcugga

SEQ ID NO: 2419771 - RNA, 19 nt, Homo sapiens
  misc_RNA (1)...(19): siRNA sense strand
ccgaggaggcucagguguu

SEQ ID NO: 2419772 - RNA, 19 nt, Homo sapiens
  misc_RNA (1)...(19): siRNA sense strand
cuugaagagugaugaccuu

SEQ ID NO: 2419773 - RNA, 19 nt, Homo sapiens
  misc_RNA (1)...(19): siRNA sense strand
ugcaacgauuuaaaggaaa

SEQ ID NO: 2419774 - RNA, 19 nt, Homo sapiens
  misc_RNA (1)...(19): siRNA sense strand
gucuaaagaagcagguuca

SEQ ID NO: 2419775 - RNA, 19 nt, Homo sapiens
  misc_RNA (1)...(19): siRNA sense strand
auaagaaguggguggaguu

SEQ ID NO: 2419776 - RNA, 19 nt, Homo sapiens
  misc_RNA (1)...(19): siRNA sense strand
cagaaaacugcguuggaau

SEQ ID NO: 2419777 - RNA, 19 nt, Homo sapiens
  misc_RNA (1)...(19): siRNA sense strand
cuaugugaucggaggcuuu

SEQ ID NO: 2419778 - RNA, 19 nt, Homo sapiens
  misc_RNA (1)...(19): siRNA sense strand
gcuuacagagaaucaacaa

SEQ ID NO: 2419779 - RNA, 19 nt, Homo sapiens
  misc_RNA (1)...(19): siRNA sense strand
guggauucagauugaguau

SEQ ID NO: 2419780 - RNA, 19 nt, Homo sapiens
  misc_RNA (1)...(19): siRNA sense strand
augaacgguuuguggcaga

SEQ ID NO: 2419781 - RNA, 19 nt, Homo sapiens
  misc_RNA (1)...(19): siRNA sense strand
aaacaggagacuuggucga

SEQ ID NO: 2419782 - RNA, 19 nt, Homo sapiens
  misc_RNA (1)...(19): siRNA sense strand
ggaugaacgguuuguggca

SEQ ID NO: 2419783 - RNA, 19 nt, Homo sapiens
  misc_RNA (1)...(19): siRNA sense strand
gggaaacuggccacagaca

SEQ ID NO: 2419784 - RNA, 19 nt, Homo sapiens
  misc_RNA (1)...(19): siRNA sense strand
ccagccacaucgagcgcua

SEQ ID NO: 2419785 - RNA, 19 nt, Homo sapiens
  misc_RNA (1)...(19): siRNA sense strand
agagcuggguccaagggaa

SEQ ID NO: 2419786 - RNA, 19 nt, Homo sapiens
  misc_RNA (1)...(19): siRNA sense strand
augcaaaccaucacggaaa

SEQ ID NO: 2419787 - RNA, 19 nt, Homo sapiens
  misc_RNA (1)...(19): siRNA sense strand
caguacaucagaagugaaa

SEQ ID NO: 2419788 - RNA, 19 nt, Homo sapiens
  misc_RNA (1)...(19): siRNA sense strand
aggucaugguacaggauau

SEQ ID NO: 2419789 - RNA, 19 nt, Homo sapiens
  misc_RNA (1)...(19): siRNA sense strand
gcgagguggucaugagcca

SEQ ID NO: 2419790 - RNA, 19 nt, Homo sapiens
  misc_RNA (1)...(19): siRNA sense strand
gcacuguggaaaagauaaa

SEQ ID NO: 2419791 - RNA, 19 nt, Homo sapiens
  misc_RNA (1)...(19): siRNA sense strand
ucauagacugggugaguga

SEQ ID NO: 2419792 - RNA, 19 nt, Homo sapiens
  misc_RNA (1)...(19): siRNA sense strand
cugccuggcggcugagaaa

SEQ ID NO: 2419793 - RNA, 19 nt, Homo sapiens
  misc_RNA (1)...(19): siRNA sense strand
gcaaaaguuacuagagcau

SEQ ID NO: 2419794 - RNA, 19 nt, Homo sapiens
  misc_RNA (1)...(19): siRNA sense strand
augaaggaaaguagcaaau

SEQ ID NO: 2419795 - RNA, 19 nt, Homo sapiens
  misc_RNA (1)...(19): siRNA sense strand
cgugggaaguccagcacau

SEQ ID NO: 2419796 - RNA, 19 nt, Homo sapiens
  misc_RNA (1)...(19): siRNA sense strand
aaugaaggaaaguagcaaa

SEQ ID NO: 2419797 - RNA, 19 nt, Homo sapiens
  misc_RNA (1)...(19): siRNA sense strand
ccucaguggaugacauaca

SEQ ID NO: 2419798 - RNA, 19 nt, Homo sapiens
  misc_RNA (1)...(19): siRNA sense strand
acuagagcauucagcacaa

SEQ ID NO: 2419799 - RNA, 19 nt, Homo sapiens
  misc_RNA (1)...(19): siRNA sense strand
cugcugaugauaaggaaaa

SEQ ID NO: 2419800 - RNA, 19 nt, Homo sapiens
  misc_RNA (1)...(19): siRNA sense strand
aacaagaucauguggaaca

SEQ ID NO: 2419801 - RNA, 19 nt, Homo sapiens
  misc_RNA (1)...(19): siRNA sense strand
cguuacagccucaguggau

SEQ ID NO: 2419802 - RNA, 19 nt, Homo sapiens
  misc_RNA (1)...(19): siRNA sense strand
uagaguuggacaaguuaua

SEQ ID NO: 2419803 - RNA, 19 nt, Homo sapiens
  misc_RNA (1)...(19): siRNA sense strand
agagaaggaaaguucgauu

SEQ ID NO: 2419804 - RNA, 19 nt, Homo sapiens
  misc_RNA (1)...(19): siRNA sense strand
gcugcugaugauaaggaaa

SEQ ID NO: 2419805 - RNA, 19 nt, Homo sapiens
  misc_RNA (1)...(19): siRNA sense strand
caguuugaggagacagcua

SEQ ID NO: 2419806 - RNA, 19 nt, Homo sapiens
  misc_RNA (1)...(19): siRNA sense strand
agcuagaguuggacaaguu

SEQ ID NO: 2419807 - RNA, 19 nt, Homo sapiens
  misc_RNA (1)...(19): siRNA sense strand
ugaagaggaaggagcgguu

SEQ ID NO: 2419808 - RNA, 19 nt, Homo sapiens
  misc_RNA (1)...(19): siRNA sense strand
acauacaguuugaggagac

SEQ ID NO: 2419809 - RNA, 19 nt, Homo sapiens
  misc_RNA (1)...(19): siRNA sense strand
ggauggagacaguggcuac

SEQ ID NO: 2419810 - RNA, 19 nt, Homo sapiens
  misc_RNA (1)...(19): siRNA sense strand
ccugaugauggguuuguaa

SEQ ID NO: 2419811 - RNA, 19 nt, Homo sapiens
  misc_RNA (1)...(19): siRNA sense strand
cuauacugaaugaugacaa

SEQ ID NO: 2419812 - RNA, 19 nt, Homo sapiens
  misc_RNA (1)...(19): siRNA sense strand
acuucuaacugaacaagau

SEQ ID NO: 2419813 - RNA, 19 nt, Homo sapiens
  misc_RNA (1)...(19): siRNA sense strand
uggaagagcaugauguuuu

SEQ ID NO: 2419814 - RNA, 19 nt, Homo sapiens
  misc_RNA (1)...(19): siRNA sense strand
ggucaugagccaagccauc

SEQ ID NO: 2419815 - RNA, 19 nt, Homo sapiens
  misc_RNA (1)...(19): siRNA sense strand
uuacuaaaggaaagggaua

SEQ ID NO: 2419816 - RNA, 19 nt, Homo sapiens
  misc_RNA (1)...(19): siRNA sense strand
gcuugaacuuggagcuaau

SEQ ID NO: 2419817 - RNA, 19 nt, Homo sapiens
  misc_RNA (1)...(19): siRNA sense strand
gcucagaggaacagaucuu

SEQ ID NO: 2419818 - RNA, 19 nt, Homo sapiens
  misc_RNA (1)...(19): siRNA sense strand
ccaguaaagaccagcagaa

SEQ ID NO: 2419819 - RNA, 19 nt, Homo sapiens
  misc_RNA (1)...(19): siRNA sense strand
caguaaagaccagcagaaa

SEQ ID NO: 2419820 - RNA, 19 nt, Homo sapiens
  misc_RNA (1)...(19): siRNA sense strand
aggaaaacuucaacagcua

SEQ ID NO: 2419821 - RNA, 19 nt, Homo sapiens
  misc_RNA (1)...(19): siRNA sense strand
gagcagaaguuaauaccca

SEQ ID NO: 2419822 - RNA, 19 nt, Homo sapiens
  misc_RNA (1)...(19): siRNA sense strand
gggauauaacguuaagaca

SEQ ID NO: 2419823 - RNA, 19 nt, Homo sapiens
  misc_RNA (1)...(19): siRNA sense strand
ccaugagggaagaugaauu

SEQ ID NO: 2419824 - RNA, 19 nt, Homo sapiens
  misc_RNA (1)...(19): siRNA sense strand
ggaugauggcugggagauu

SEQ ID NO: 2419825 - RNA, 19 nt, Homo sapiens
  misc_RNA (1)...(19): siRNA sense strand
gcuacaaaccaaagaugga

SEQ ID NO: 2419826 - RNA, 19 nt, Homo sapiens
  misc_RNA (1)...(19): siRNA sense strand
acuaaaggaaagggauaua

SEQ ID NO: 2419827 - RNA, 19 nt, Homo sapiens
  misc_RNA (1)...(19): siRNA sense strand
aaauguugcuuguaggaga

SEQ ID NO: 2419828 - RNA, 19 nt, Homo sapiens
  misc_RNA (1)...(19): siRNA sense strand
aguaaagaccagcagaaaa

SEQ ID NO: 2419829 - RNA, 19 nt, Homo sapiens
  misc_RNA (1)...(19): siRNA sense strand
augcaagcuuugagaagga

SEQ ID NO: 2419830 - RNA, 19 nt, Homo sapiens
  misc_RNA (1)...(19): siRNA sense strand
agguagaagagauacaauu

SEQ ID NO: 2419831 - RNA, 19 nt, Homo sapiens
  misc_RNA (1)...(19): siRNA sense strand
caagcuuugagaaggauaa

SEQ ID NO: 2419832 - RNA, 19 nt, Homo sapiens
  misc_RNA (1)...(19): siRNA sense strand
ccauuuaauaacagcugua

SEQ ID NO: 2419833 - RNA, 19 nt, Homo sapiens
  misc_RNA (1)...(19): siRNA sense strand
gcaaaaugaacgggaaaau

SEQ ID NO: 2419834 - RNA, 19 nt, Homo sapiens
  misc_RNA (1)...(19): siRNA sense strand
ccauugaagaaaagaaaga

SEQ ID NO: 2419835 - RNA, 19 nt, Homo sapiens
  misc_RNA (1)...(19): siRNA sense strand
cgaccggacgucucagaaa

SEQ ID NO: 2419836 - RNA, 19 nt, Homo sapiens
  misc_RNA (1)...(19): siRNA sense strand
gaggaugauggcugggaga

SEQ ID NO: 2419837 - RNA, 19 nt, Homo sapiens
  misc_RNA (1)...(19): siRNA sense strand
aaauaaacaguguggccau

SEQ ID NO: 2419838 - RNA, 19 nt, Homo sapiens
  misc_RNA (1)...(19): siRNA sense strand
gaccaugagggaagaugaa

SEQ ID NO: 2419839 - RNA, 19 nt, Homo sapiens
  misc_RNA (1)...(19): siRNA sense strand
auguugaagauuugaguga

SEQ ID NO: 2419840 - RNA, 19 nt, Homo sapiens
  misc_RNA (1)...(19): siRNA sense strand
aagcaaugaccaucggaga

SEQ ID NO: 2419841 - RNA, 19 nt, Homo sapiens
  misc_RNA (1)...(19): siRNA sense strand
uugcaaaaugaacgggaaa

SEQ ID NO: 2419842 - RNA, 19 nt, Homo sapiens
  misc_RNA (1)...(19): siRNA sense strand
guugcuuguaggagacuua

SEQ ID NO: 2419843 - RNA, 19 nt, Homo sapiens
  misc_RNA (1)...(19): siRNA sense strand
aaguuaauacccaggauga

SEQ ID NO: 2419844 - RNA, 19 nt, Homo sapiens
  misc_RNA (1)...(19): siRNA sense strand
ugaacuuggagcuaauaaa

SEQ ID NO: 2419845 - RNA, 19 nt, Homo sapiens
  misc_RNA (1)...(19): siRNA sense strand
gcuauuaccauaugcggau

SEQ ID NO: 2419846 - RNA, 19 nt, Homo sapiens
  misc_RNA (1)...(19): siRNA sense strand
cugcaaacuaaaagaccua

SEQ ID NO: 2419847 - RNA, 19 nt, Homo sapiens
  misc_RNA (1)...(19): siRNA sense strand
uuaagaaagcaaugaccau

SEQ ID NO: 2419848 - RNA, 19 nt, Homo sapiens
  misc_RNA (1)...(19): siRNA sense strand
gcgagaguagcgagagcga

SEQ ID NO: 2419849 - RNA, 19 nt, Homo sapiens
  misc_RNA (1)...(19): siRNA sense strand
gauccaacucauauacaau

SEQ ID NO: 2419850 - RNA, 19 nt, Homo sapiens
  misc_RNA (1)...(19): siRNA sense strand
ucauggagcagaaguuaau

SEQ ID NO: 2419851 - RNA, 19 nt, Homo sapiens
  misc_RNA (1)...(19): siRNA sense strand
auauacagcauuuggagau

SEQ ID NO: 2419852 - RNA, 19 nt, Homo sapiens
  misc_RNA (1)...(19): siRNA sense strand
uuuacauggucuuggacuu

SEQ ID NO: 2419853 - RNA, 19 nt, Homo sapiens
  misc_RNA (1)...(19): siRNA sense strand
ccauaugcggauucgguuu

SEQ ID NO: 2419854 - RNA, 19 nt, Homo sapiens
  misc_RNA (1)...(19): siRNA sense strand
gcaagcuuugagaaggaua

SEQ ID NO: 2419855 - RNA, 19 nt, Homo sapiens
  misc_RNA (1)...(19): siRNA sense strand
gaacagaucuugaagugug

SEQ ID NO: 2419856 - RNA, 19 nt, Homo sapiens
  misc_RNA (1)...(19): siRNA sense strand
cugaagagacaaaguugga

SEQ ID NO: 2419857 - RNA, 19 nt, Homo sapiens
  misc_RNA (1)...(19): siRNA sense strand
aagagacaaaguuggaaau

SEQ ID NO: 2419858 - RNA, 19 nt, Homo sapiens
  misc_RNA (1)...(19): siRNA sense strand
caaagauguccaugggcaa

SEQ ID NO: 2419859 - RNA, 19 nt, Homo sapiens
  misc_RNA (1)...(19): siRNA sense strand
ccagagagaccgagccaga

SEQ ID NO: 2419860 - RNA, 19 nt, Homo sapiens
  misc_RNA (1)...(19): siRNA sense strand
gcaacaaccuauaugacca

SEQ ID NO: 2419861 - RNA, 19 nt, Homo sapiens
  misc_RNA (1)...(19): siRNA sense strand
ccaaagauguccaugggca

SEQ ID NO: 2419862 - RNA, 19 nt, Homo sapiens
  misc_RNA (1)...(19): siRNA sense strand
gaaauaagggccugggucu

SEQ ID NO: 2419863 - RNA, 19 nt, Homo sapiens
  misc_RNA (1)...(19): siRNA sense strand
gacaaggaggugugggaga

SEQ ID NO: 2419864 - RNA, 19 nt, Homo sapiens
  misc_RNA (1)...(19): siRNA sense strand
agugggagcucuugggcau

SEQ ID NO: 2419865 - RNA, 19 nt, Homo sapiens
  misc_RNA (1)...(19): siRNA sense strand
gauaagccaaugaggguga

SEQ ID NO: 2419866 - RNA, 19 nt, Homo sapiens
  misc_RNA (1)...(19): siRNA sense strand
gggaguuagcagggaagaa

SEQ ID NO: 2419867 - RNA, 19 nt, Homo sapiens
  misc_RNA (1)...(19): siRNA sense strand
uaacacuucugcugggcua

SEQ ID NO: 2419868 - RNA, 19 nt, Homo sapiens
  misc_RNA (1)...(19): siRNA sense strand
ucacaguauuagcugaaaa

SEQ ID NO: 2419869 - RNA, 19 nt, Homo sapiens
  misc_RNA (1)...(19): siRNA sense strand
uggauuugguaugggacaa

SEQ ID NO: 2419870 - RNA, 19 nt, Homo sapiens
  misc_RNA (1)...(19): siRNA sense strand
acucacaguauuagcugaa

SEQ ID NO: 2419871 - RNA, 19 nt, Homo sapiens
  misc_RNA (1)...(19): siRNA sense strand
uggacaaggagguguggga

SEQ ID NO: 2419872 - RNA, 19 nt, Homo sapiens
  misc_RNA (1)...(19): siRNA sense strand
gcaaagucauccaaaccca

SEQ ID NO: 2419873 - RNA, 19 nt, Homo sapiens
  misc_RNA (1)...(19): siRNA sense strand
uggacaaagacccagcuaa

SEQ ID NO: 2419874 - RNA, 19 nt, Homo sapiens
  misc_RNA (1)...(19): siRNA sense strand
aggacaacgaaguggauuu

SEQ ID NO: 2419875 - RNA, 19 nt, Homo sapiens
  misc_RNA (1)...(19): siRNA sense strand
aggaagagauucaagcuca

SEQ ID NO: 2419876 - RNA, 19 nt, Homo sapiens
  misc_RNA (1)...(19): siRNA sense strand
cagcgagagcucacggaau

SEQ ID NO: 2419877 - RNA, 19 nt, Homo sapiens
  misc_RNA (1)...(19): siRNA sense strand
uugauaagauagugcagga

SEQ ID NO: 2419878 - RNA, 19 nt, Homo sapiens
  misc_RNA (1)...(19): siRNA sense strand
aaggcaaggaagagauuca

SEQ ID NO: 2419879 - RNA, 19 nt, Homo sapiens
  misc_RNA (1)...(19): siRNA sense strand
cggaauuccucucgugcca

SEQ ID NO: 2419880 - RNA, 19 nt, Homo sapiens
  misc_RNA (1)...(19): siRNA sense strand
ccuaaaucagggacagaga

SEQ ID NO: 2419881 - RNA, 19 nt, Homo sapiens
  misc_RNA (1)...(19): siRNA sense strand
gugcagaagaugggaagau

SEQ ID NO: 2419882 - RNA, 19 nt, Homo sapiens
  misc_RNA (1)...(19): siRNA sense strand
ggagaaggacugagacccu

SEQ ID NO: 2419883 - RNA, 19 nt, Homo sapiens
  misc_RNA (1)...(19): siRNA sense strand
gcagagagcuggaguccug

SEQ ID NO: 2419884 - RNA, 19 nt, Homo sapiens
  misc_RNA (1)...(19): siRNA sense strand
ggacuugaacagagcucca

SEQ ID NO: 2419885 - RNA, 19 nt, Homo sapiens
  misc_RNA (1)...(19): siRNA sense strand
cgagcaaaguucuggguga

SEQ ID NO: 2419886 - RNA, 19 nt, Homo sapiens
  misc_RNA (1)...(19): siRNA sense strand
gcaaggugcucuaggaggu

SEQ ID NO: 2419887 - RNA, 19 nt, Homo sapiens
  misc_RNA (1)...(19): siRNA sense strand
acauuagguauuugggaca

SEQ ID NO: 2419888 - RNA, 19 nt, Homo sapiens
  misc_RNA (1)...(19): siRNA sense strand
cagcagcagcuuugagcga

SEQ ID NO: 2419889 - RNA, 19 nt, Homo sapiens
  misc_RNA (1)...(19): siRNA sense strand
cuagaggagggcugccaaa

SEQ ID NO: 2419890 - RNA, 19 nt, Homo sapiens
  misc_RNA (1)...(19): siRNA sense strand
ccuuaaagcaaaagcaaua

SEQ ID NO: 2419891 - RNA, 19 nt, Homo sapiens
  misc_RNA (1)...(19): siRNA sense strand
aauacaugguucaggaaaa

SEQ ID NO: 2419892 - RNA, 19 nt, Homo sapiens
  misc_RNA (1)...(19): siRNA sense strand
gggcacuuggccaaagaaa

SEQ ID NO: 2419893 - RNA, 19 nt, Homo sapiens
  misc_RNA (1)...(19): siRNA sense strand
aaaucagagcuaaggaaaa

SEQ ID NO: 2419894 - RNA, 19 nt, Homo sapiens
  misc_RNA (1)...(19): siRNA sense strand
cccugaagaggcagugaaa

SEQ ID NO: 2419895 - RNA, 19 nt, Homo sapiens
  misc_RNA (1)...(19): siRNA sense strand
aaacaagcaaagaagccaa

SEQ ID NO: 2419896 - RNA, 19 nt, Homo sapiens
  misc_RNA (1)...(19): siRNA sense strand
gaucugggcacuuggccaa

SEQ ID NO: 2419897 - RNA, 19 nt, Homo sapiens
  misc_RNA (1)...(19): siRNA sense strand
ugcacaaagcagaguguau

SEQ ID NO: 2419898 - RNA, 19 nt, Homo sapiens
  misc_RNA (1)...(19): siRNA sense strand
guuaauacaugguucagga

SEQ ID NO: 2419899 - RNA, 19 nt, Homo sapiens
  misc_RNA (1)...(19): siRNA sense strand
agacuugauggaaggaaga

SEQ ID NO: 2419900 - RNA, 19 nt, Homo sapiens
  misc_RNA (1)...(19): siRNA sense strand
gccaaagaaacaagagucu

SEQ ID NO: 2419901 - RNA, 19 nt, Homo sapiens
  misc_RNA (1)...(19): siRNA sense strand
ccaacaaaucuuaggagac

SEQ ID NO: 2419902 - RNA, 19 nt, Homo sapiens
  misc_RNA (1)...(19): siRNA sense strand
accaacaaaucuuaggaga

SEQ ID NO: 2419903 - RNA, 19 nt, Homo sapiens
  misc_RNA (1)...(19): siRNA sense strand
gggccguccgugagaacaa

SEQ ID NO: 2419904 - RNA, 19 nt, Homo sapiens
  misc_RNA (1)...(19): siRNA sense strand
ggcaauaacgacacagaca

SEQ ID NO: 2419905 - RNA, 19 nt, Homo sapiens
  misc_RNA (1)...(19): siRNA sense strand
ccaagcacuaccagggcaa

SEQ ID NO: 2419906 - RNA, 19 nt, Homo sapiens
  misc_RNA (1)...(19): siRNA sense strand
gcaucugggucauggugga

SEQ ID NO: 2419907 - RNA, 19 nt, Homo sapiens
  misc_RNA (1)...(19): siRNA sense strand
gcaauaacgacacagacau

SEQ ID NO: 2419908 - RNA, 19 nt, Homo sapiens
  misc_RNA (1)...(19): siRNA sense strand
agauugaagaagagaagaa

SEQ ID NO: 2419909 - RNA, 19 nt, Homo sapiens
  misc_RNA (1)...(19): siRNA sense strand
uugaagaagagaagaacaa

SEQ ID NO: 2419910 - RNA, 19 nt, Homo sapiens
  misc_RNA (1)...(19): siRNA sense strand
aggaagagaagcuggucaa

SEQ ID NO: 2419911 - RNA, 19 nt, Homo sapiens
  misc_RNA (1)...(19): siRNA sense strand
ccaauaaagaccuaggaga

SEQ ID NO: 2419912 - RNA, 19 nt, Homo sapiens
  misc_RNA (1)...(19): siRNA sense strand
agaagaacaaacagagaca

SEQ ID NO: 2419913 - RNA, 19 nt, Homo sapiens
  misc_RNA (1)...(19): siRNA sense strand
cggcagaggcugaaggaag

SEQ ID NO: 2419914 - RNA, 19 nt, Homo sapiens
  misc_RNA (1)...(19): siRNA sense strand
uggaagaucugaugggcca

SEQ ID NO: 2419915 - RNA, 19 nt, Homo sapiens
  misc_RNA (1)...(19): siRNA sense strand
ugaaggaagagcuggaaaa

SEQ ID NO: 2419916 - RNA, 19 nt, Homo sapiens
  misc_RNA (1)...(19): siRNA sense strand
caauaaagaccuaggagag

SEQ ID NO: 2419917 - RNA, 19 nt, Homo sapiens
  misc_RNA (1)...(19): siRNA sense strand
gguuggcauucgaggaaca

SEQ ID NO: 2419918 - RNA, 19 nt, Homo sapiens
  misc_RNA (1)...(19): siRNA sense strand
ggaaaaggaaagugaggca

SEQ ID NO: 2419919 - RNA, 19 nt, Homo sapiens
  misc_RNA (1)...(19): siRNA sense strand
aggagugcaaggagagaau

SEQ ID NO: 2419920 - RNA, 19 nt, Homo sapiens
  misc_RNA (1)...(19): siRNA sense strand
cagaagcggcagaggcuga

SEQ ID NO: 2419921 - RNA, 19 nt, Homo sapiens
  misc_RNA (1)...(19): siRNA sense strand
cugaaggaagagcuggaaa

SEQ ID NO: 2419922 - RNA, 19 nt, Homo sapiens
  misc_RNA (1)...(19): siRNA sense strand
cgacacuggaagacgugaa

SEQ ID NO: 2419923 - RNA, 19 nt, Homo sapiens
  misc_RNA (1)...(19): siRNA sense strand
gauuaaugagguccagcaa

SEQ ID NO: 2419924 - RNA, 19 nt, Homo sapiens
  misc_RNA (1)...(19): siRNA sense strand
cucgcugcauggagagaaa

SEQ ID NO: 2419925 - RNA, 19 nt, Homo sapiens
  misc_RNA (1)...(19): siRNA sense strand
agagcacacaagaggaaga

SEQ ID NO: 2419926 - RNA, 19 nt, Homo sapiens
  misc_RNA (1)...(19): siRNA sense strand
agauugaagaagagaagaa

SEQ ID NO: 2419927 - RNA, 19 nt, Homo sapiens
  misc_RNA (1)...(19): siRNA sense strand
uugaagaagagaagaacaa

SEQ ID NO: 2419928 - RNA, 19 nt, Homo sapiens
  misc_RNA (1)...(19): siRNA sense strand
aggaagagaagcuggucaa

SEQ ID NO: 2419929 - RNA, 19 nt, Homo sapiens
  misc_RNA (1)...(19): siRNA sense strand
agaagaacaaacagagaca

SEQ ID NO: 2419930 - RNA, 19 nt, Homo sapiens
  misc_RNA (1)...(19): siRNA sense strand
cggcagaggcugaaggaag

SEQ ID NO: 2419931 - RNA, 19 nt, Homo sapiens
  misc_RNA (1)...(19): siRNA sense strand
uggaagaucugaugggcca

SEQ ID NO: 2419932 - RNA, 19 nt, Homo sapiens
  misc_RNA (1)...(19): siRNA sense strand
ugaaggaagagcuggaaaa

SEQ ID NO: 2419933 - RNA, 19 nt, Homo sapiens
  misc_RNA (1)...(19): siRNA sense strand
gguuggcauucgaggaaca

SEQ ID NO: 2419934 - RNA, 19 nt, Homo sapiens
  misc_RNA (1)...(19): siRNA sense strand
aggagugcaaggagagaau

SEQ ID NO: 2419935 - RNA, 19 nt, Homo sapiens
  misc_RNA (1)...(19): siRNA sense strand
cagaagcggcagaggcuga

SEQ ID NO: 2419936 - RNA, 19 nt, Homo sapiens
  misc_RNA (1)...(19): siRNA sense strand
cugaaggaagagcuggaaa

SEQ ID NO: 2419937 - RNA, 19 nt, Homo sapiens
  misc_RNA (1)...(19): siRNA sense strand
cgacacuggaagacgugaa

SEQ ID NO: 2419938 - RNA, 19 nt, Homo sapiens
  misc_RNA (1)...(19): siRNA sense strand
agagcacacaagaggaaga

SEQ ID NO: 2419939 - RNA, 19 nt, Homo sapiens
  misc_RNA (1)...(19): siRNA sense strand
gcaauaaauuucagggagu

SEQ ID NO: 2419940 - RNA, 19 nt, Homo sapiens
  misc_RNA (1)...(19): siRNA sense strand
ccaaguaguaauggagaaa

SEQ ID NO: 2419941 - RNA, 19 nt, Homo sapiens
  misc_RNA (1)...(19): siRNA sense strand
augaaaguccacagacaaa

SEQ ID NO: 2419942 - RNA, 19 nt, Homo sapiens
  misc_RNA (1)...(19): siRNA sense strand
aauaaaacccacagcaaua

SEQ ID NO: 2419943 - RNA, 19 nt, Homo sapiens
  misc_RNA (1)...(19): siRNA sense strand
uagaaauccaauugaggaa

SEQ ID NO: 2419944 - RNA, 19 nt, Homo sapiens
  misc_RNA (1)...(19): siRNA sense strand
ucacuguaaaggaggcaaa

SEQ ID NO: 2419945 - RNA, 19 nt, Homo sapiens
  misc_RNA (1)...(19): siRNA sense strand
cagaauuugcuguggagau

SEQ ID NO: 2419946 - RNA, 19 nt, Homo sapiens
  misc_RNA (1)...(19): siRNA sense strand
ccaauaaaacccacagcaa

SEQ ID NO: 2419947 - RNA, 19 nt, Homo sapiens
  misc_RNA (1)...(19): siRNA sense strand
aggaaguaaaugaguggau

SEQ ID NO: 2419948 - RNA, 19 nt, Homo sapiens
  misc_RNA (1)...(19): siRNA sense strand
guaaaugaguggauggcuc

SEQ ID NO: 2419949 - RNA, 19 nt, Homo sapiens
  misc_RNA (1)...(19): siRNA sense strand
ucuaaaaguccaaguagua

SEQ ID NO: 2419950 - RNA, 19 nt, Homo sapiens
  misc_RNA (1)...(19): siRNA sense strand
cuugaaaagcugaugagaa

SEQ ID NO: 2419951 - RNA, 19 nt, Homo sapiens
  misc_RNA (1)...(19): siRNA sense strand
caaacgaauuuaaaggaac

SEQ ID NO: 2419952 - RNA, 19 nt, Homo sapiens
  misc_RNA (1)...(19): siRNA sense strand
caguacuucauuaggaaau

SEQ ID NO: 2419953 - RNA, 19 nt, Homo sapiens
  misc_RNA (1)...(19): siRNA sense strand
uugaggaaguugugcgguu

SEQ ID NO: 2419954 - RNA, 19 nt, Homo sapiens
  misc_RNA (1)...(19): siRNA sense strand
aaugaaaguccacagacaa

SEQ ID NO: 2419955 - RNA, 19 nt, Homo sapiens
  misc_RNA (1)...(19): siRNA sense strand
cuguaaaggaggcaaagga

SEQ ID NO: 2419956 - RNA, 19 nt, Homo sapiens
  misc_RNA (1)...(19): siRNA sense strand
uugaaaagcugaugagaag

SEQ ID NO: 2419957 - RNA, 19 nt, Homo sapiens
  misc_RNA (1)...(19): siRNA sense strand
agaaaggcgaaccaauaaa

SEQ ID NO: 2419958 - RNA, 19 nt, Homo sapiens
  misc_RNA (1)...(19): siRNA sense strand
uggugauguaugugaucua

SEQ ID NO: 2419959 - RNA, 19 nt, Homo sapiens
  misc_RNA (1)...(19): siRNA sense strand
uggagaaaggcgaaccaau

SEQ ID NO: 2419960 - RNA, 19 nt, Homo sapiens
  misc_RNA (1)...(19): siRNA sense strand
aagugaauuuaaaggagca

SEQ ID NO: 2419961 - RNA, 19 nt, Homo sapiens
  misc_RNA (1)...(19): siRNA sense strand
caauaaaacccacagcaau

SEQ ID NO: 2419962 - RNA, 19 nt, Homo sapiens
  misc_RNA (1)...(19): siRNA sense strand
ggacacauuuaguucgacu

SEQ ID NO: 2419963 - RNA, 19 nt, Homo sapiens
  misc_RNA (1)...(19): siRNA sense strand
aaacaaaaggcgauacaca

SEQ ID NO: 2419964 - RNA, 19 nt, Homo sapiens
  misc_RNA (1)...(19): siRNA sense strand
augcagugaaagagcuuau

SEQ ID NO: 2419965 - RNA, 19 nt, Homo sapiens
  misc_RNA (1)...(19): siRNA sense strand
cagcaauaaauuucaggga

SEQ ID NO: 2419966 - RNA, 19 nt, Homo sapiens
  misc_RNA (1)...(19): siRNA sense strand
gcaauaaauuucagggagu

SEQ ID NO: 2419967 - RNA, 19 nt, Homo sapiens
  misc_RNA (1)...(19): siRNA sense strand
ccaaguaguaauggagaaa

SEQ ID NO: 2419968 - RNA, 19 nt, Homo sapiens
  misc_RNA (1)...(19): siRNA sense strand
augaaaguccacagacaaa

SEQ ID NO: 2419969 - RNA, 19 nt, Homo sapiens
  misc_RNA (1)...(19): siRNA sense strand
aauaaaacccacagcaaua

SEQ ID NO: 2419970 - RNA, 19 nt, Homo sapiens
  misc_RNA (1)...(19): siRNA sense strand
uagaaauccaauugaggaa

SEQ ID NO: 2419971 - RNA, 19 nt, Homo sapiens
  misc_RNA (1)...(19): siRNA sense strand
ucacuguaaaggaggcaaa

SEQ ID NO: 2419972 - RNA, 19 nt, Homo sapiens
  misc_RNA (1)...(19): siRNA sense strand
cagaauuugcuguggagau

SEQ ID NO: 2419973 - RNA, 19 nt, Homo sapiens
  misc_RNA (1)...(19): siRNA sense strand
ccaauaaaacccacagcaa

SEQ ID NO: 2419974 - RNA, 19 nt, Homo sapiens
  misc_RNA (1)...(19): siRNA sense strand
aggaaguaaaugaguggau

SEQ ID NO: 2419975 - RNA, 19 nt, Homo sapiens
  misc_RNA (1)...(19): siRNA sense strand
guaaaugaguggauggcuc

SEQ ID NO: 2419976 - RNA, 19 nt, Homo sapiens
  misc_RNA (1)...(19): siRNA sense strand
ucuaaaaguccaaguagua

SEQ ID NO: 2419977 - RNA, 19 nt, Homo sapiens
  misc_RNA (1)...(19): siRNA sense strand
cuugaaaagcugaugagaa

SEQ ID NO: 2419978 - RNA, 19 nt, Homo sapiens
  misc_RNA (1)...(19): siRNA sense strand
caaacgaauuuaaaggaac

SEQ ID NO: 2419979 - RNA, 19 nt, Homo sapiens
  misc_RNA (1)...(19): siRNA sense strand
caguacuucauuaggaaau

SEQ ID NO: 2419980 - RNA, 19 nt, Homo sapiens
  misc_RNA (1)...(19): siRNA sense strand
uugaggaaguugugcgguu

SEQ ID NO: 2419981 - RNA, 19 nt, Homo sapiens
  misc_RNA (1)...(19): siRNA sense strand
aaugaaaguccacagacaa

SEQ ID NO: 2419982 - RNA, 19 nt, Homo sapiens
  misc_RNA (1)...(19): siRNA sense strand
cuguaaaggaggcaaagga

SEQ ID NO: 2419983 - RNA, 19 nt, Homo sapiens
  misc_RNA (1)...(19): siRNA sense strand
uugaaaagcugaugagaag

SEQ ID NO: 2419984 - RNA, 19 nt, Homo sapiens
  misc_RNA (1)...(19): siRNA sense strand
agaaaggcgaaccaauaaa

SEQ ID NO: 2419985 - RNA, 19 nt, Homo sapiens
  misc_RNA (1)...(19): siRNA sense strand
uggugauguaugugaucua

SEQ ID NO: 2419986 - RNA, 19 nt, Homo sapiens
  misc_RNA (1)...(19): siRNA sense strand
uggagaaaggcgaaccaau

SEQ ID NO: 2419987 - RNA, 19 nt, Homo sapiens
  misc_RNA (1)...(19): siRNA sense strand
aagugaauuuaaaggagca

SEQ ID NO: 2419988 - RNA, 19 nt, Homo sapiens
  misc_RNA (1)...(19): siRNA sense strand
caauaaaacccacagcaau

SEQ ID NO: 2419989 - RNA, 19 nt, Homo sapiens
  misc_RNA (1)...(19): siRNA sense strand
ggacacauuuaguucgacu

SEQ ID NO: 2419990 - RNA, 19 nt, Homo sapiens
  misc_RNA (1)...(19): siRNA sense strand
aaacaaaaggcgauacaca

SEQ ID NO: 2419991 - RNA, 19 nt, Homo sapiens
  misc_RNA (1)...(19): siRNA sense strand
augcagugaaagagcuuau

SEQ ID NO: 2419992 - RNA, 19 nt, Homo sapiens
  misc_RNA (1)...(19): siRNA sense strand
cagcaauaaauuucaggga

SEQ ID NO: 2419993 - RNA, 19 nt, Homo sapiens
  misc_RNA (1)...(19): siRNA sense strand
gcaauaaauuucagggagu

SEQ ID NO: 2419994 - RNA, 19 nt, Homo sapiens
  misc_RNA (1)...(19): siRNA sense strand
ccaaguaguaauggagaaa

SEQ ID NO: 2419995 - RNA, 19 nt, Homo sapiens
  misc_RNA (1)...(19): siRNA sense strand
augaaaguccacagacaaa

SEQ ID NO: 2419996 - RNA, 19 nt, Homo sapiens
  misc_RNA (1)...(19): siRNA sense strand
aauaaaacccacagcaaua

SEQ ID NO: 2419997 - RNA, 19 nt, Homo sapiens
  misc_RNA (1)...(19): siRNA sense strand
uagaaauccaauugaggaa

SEQ ID NO: 2419998 - RNA, 19 nt, Homo sapiens
  misc_RNA (1)...(19): siRNA sense strand
ucacuguaaaggaggcaaa

SEQ ID NO: 2419999 - RNA, 19 nt, Homo sapiens
  misc_RNA (1)...(19): siRNA sense strand
ccaauaaaacccacagcaa

SEQ ID NO: 2420000 - RNA, 19 nt, Homo sapiens
  misc_RNA (1)...(19): siRNA sense strand
aggaaguaaaugaguggau

SEQ ID NO: 2420001 - RNA, 19 nt, Homo sapiens
  misc_RNA (1)...(19): siRNA sense strand
guaaaugaguggauggcuc

SEQ ID NO: 2420002 - RNA, 19 nt, Homo sapiens
  misc_RNA (1)...(19): siRNA sense strand
ucuaaaaguccaaguagua

SEQ ID NO: 2420003 - RNA, 19 nt, Homo sapiens
  misc_RNA (1)...(19): siRNA sense strand
cuugaaaagcugaugagaa

SEQ ID NO: 2420004 - RNA, 19 nt, Homo sapiens
  misc_RNA (1)...(19): siRNA sense strand
caaacgaauuuaaaggaac

SEQ ID NO: 2420005 - RNA, 19 nt, Homo sapiens
  misc_RNA (1)...(19): siRNA sense strand
caguacuucauuaggaaau

SEQ ID NO: 2420006 - RNA, 19 nt, Homo sapiens
  misc_RNA (1)...(19): siRNA sense strand
uugaggaaguugugcgguu

SEQ ID NO: 2420007 - RNA, 19 nt, Homo sapiens
  misc_RNA (1)...(19): siRNA sense strand
aaugaaaguccacagacaa

SEQ ID NO: 2420008 - RNA, 19 nt, Homo sapiens
  misc_RNA (1)...(19): siRNA sense strand
cuguaaaggaggcaaagga

SEQ ID NO: 2420009 - RNA, 19 nt, Homo sapiens
  misc_RNA (1)...(19): siRNA sense strand
uugaaaagcugaugagaag

SEQ ID NO: 2420010 - RNA, 19 nt, Homo sapiens
  misc_RNA (1)...(19): siRNA sense strand
agaaaggcgaaccaauaaa

SEQ ID NO: 2420011 - RNA, 19 nt, Homo sapiens
  misc_RNA (1)...(19): siRNA sense strand
uggugauguaugugaucua

SEQ ID NO: 2420012 - RNA, 19 nt, Homo sapiens
  misc_RNA (1)...(19): siRNA sense strand
uggagaaaggcgaaccaau

SEQ ID NO: 2420013 - RNA, 19 nt, Homo sapiens
  misc_RNA (1)...(19): siRNA sense strand
aagugaauuuaaaggagca

SEQ ID NO: 2420014 - RNA, 19 nt, Homo sapiens
  misc_RNA (1)...(19): siRNA sense strand
caauaaaacccacagcaau

SEQ ID NO: 2420015 - RNA, 19 nt, Homo sapiens
  misc_RNA (1)...(19): siRNA sense strand
ggacacauuuaguucgacu

SEQ ID NO: 2420016 - RNA, 19 nt, Homo sapiens
  misc_RNA (1)...(19): siRNA sense strand
aaacaaaaggcgauacaca

SEQ ID NO: 2420017 - RNA, 19 nt, Homo sapiens
  misc_RNA (1)...(19): siRNA sense strand
augcagugaaagagcuuau

SEQ ID NO: 2420018 - RNA, 19 nt, Homo sapiens
  misc_RNA (1)...(19): siRNA sense strand
cagcaauaaauuucaggga

SEQ ID NO: 2420019 - RNA, 19 nt, Homo sapiens
  misc_RNA (1)...(19): siRNA sense strand
gaggaagccuugcggguga

SEQ ID NO: 2420020 - RNA, 19 nt, Homo sapiens
  misc_RNA (1)...(19): siRNA sense strand
agucagaggaggaggaauc

SEQ ID NO: 2420021 - RNA, 19 nt, Homo sapiens
  misc_RNA (1)...(19): siRNA sense strand
gugcagagcaaaagggaca

SEQ ID NO: 2420022 - RNA, 19 nt, Homo sapiens
  misc_RNA (1)...(19): siRNA sense strand
uggccauggugguggacau

SEQ ID NO: 2420023 - RNA, 19 nt, Homo sapiens
  misc_RNA (1)...(19): siRNA sense strand
ccggauggacauucgcaaa

SEQ ID NO: 2420024 - RNA, 19 nt, Homo sapiens
  misc_RNA (1)...(19): siRNA sense strand
ccaaccaguuugaggccga

SEQ ID NO: 2420025 - RNA, 19 nt, Homo sapiens
  misc_RNA (1)...(19): siRNA sense strand
cggauggugcagagcaaaa

SEQ ID NO: 2420026 - RNA, 19 nt, Homo sapiens
  misc_RNA (1)...(19): siRNA sense strand
gguuuugggauuugagauu

SEQ ID NO: 2420027 - RNA, 19 nt, Homo sapiens
  misc_RNA (1)...(19): siRNA sense strand
cgauguacgucccggagga

SEQ ID NO: 2420028 - RNA, 19 nt, Homo sapiens
  misc_RNA (1)...(19): siRNA sense strand
acagguuauacgagggaca

SEQ ID NO: 2420029 - RNA, 19 nt, Homo sapiens
  misc_RNA (1)...(19): siRNA sense strand
gggagucagaggaggagga

SEQ ID NO: 2420030 - RNA, 19 nt, Homo sapiens
  misc_RNA (1)...(19): siRNA sense strand
ugcggauggugcagagcaa

SEQ ID NO: 2420031 - RNA, 19 nt, Homo sapiens
  misc_RNA (1)...(19): siRNA sense strand
gcaacagcagugugggcaa

SEQ ID NO: 2420032 - RNA, 19 nt, Homo sapiens
  misc_RNA (1)...(19): siRNA sense strand
cgccaugacaagaggauca

SEQ ID NO: 2420033 - RNA, 19 nt, Homo sapiens
  misc_RNA (1)...(19): siRNA sense strand
gggacaacgcccaggucau

SEQ ID NO: 2420034 - RNA, 19 nt, Homo sapiens
  misc_RNA (1)...(19): siRNA sense strand
ggacgaacguguugugccu

SEQ ID NO: 2420035 - RNA, 19 nt, Homo sapiens
  misc_RNA (1)...(19): siRNA sense strand
gugccaaggagaacaucaa

SEQ ID NO: 2420036 - RNA, 19 nt, Homo sapiens
  misc_RNA (1)...(19): siRNA sense strand
agugugaccuggaggacga

SEQ ID NO: 2420037 - RNA, 19 nt, Homo sapiens
  misc_RNA (1)...(19): siRNA sense strand
aagccagugccaaggagaa

SEQ ID NO: 2420038 - RNA, 19 nt, Homo sapiens
  misc_RNA (1)...(19): siRNA sense strand
ccaaggagcuggagccacu

SEQ ID NO: 2420039 - RNA, 19 nt, Homo sapiens
  misc_RNA (1)...(19): siRNA sense strand
cugcagacggugcggaaga

SEQ ID NO: 2420040 - RNA, 19 nt, Homo sapiens
  misc_RNA (1)...(19): siRNA sense strand
gagcauaaguuccggaagc

SEQ ID NO: 2420041 - RNA, 19 nt, Homo sapiens
  misc_RNA (1)...(19): siRNA sense strand
cuggagccacugaaagaaa

SEQ ID NO: 2420042 - RNA, 19 nt, Homo sapiens
  misc_RNA (1)...(19): siRNA sense strand
acuauuucgucaaggaguu

SEQ ID NO: 2420043 - RNA, 19 nt, Homo sapiens
  misc_RNA (1)...(19): siRNA sense strand
uugaagaagaagagaggaa

SEQ ID NO: 2420044 - RNA, 19 nt, Homo sapiens
  misc_RNA (1)...(19): siRNA sense strand
aguuaaaggaagacaguau

SEQ ID NO: 2420045 - RNA, 19 nt, Homo sapiens
  misc_RNA (1)...(19): siRNA sense strand
gaagaagaagagaggaaaa

SEQ ID NO: 2420046 - RNA, 19 nt, Homo sapiens
  misc_RNA (1)...(19): siRNA sense strand
cuucuaaggcacuggaauu

SEQ ID NO: 2420047 - RNA, 19 nt, Homo sapiens
  misc_RNA (1)...(19): siRNA sense strand
aauucagagagaagagaaa

SEQ ID NO: 2420048 - RNA, 19 nt, Homo sapiens
  misc_RNA (1)...(19): siRNA sense strand
agggagaaauucagaaaau

SEQ ID NO: 2420049 - RNA, 19 nt, Homo sapiens
  misc_RNA (1)...(19): siRNA sense strand
aauucaaggaacagaacua

SEQ ID NO: 2420050 - RNA, 19 nt, Homo sapiens
  misc_RNA (1)...(19): siRNA sense strand
gcugaggcacgaagagcaa

SEQ ID NO: 2420051 - RNA, 19 nt, Homo sapiens
  misc_RNA (1)...(19): siRNA sense strand
augcaagaaugaaggcaca

SEQ ID NO: 2420052 - RNA, 19 nt, Homo sapiens
  misc_RNA (1)...(19): siRNA sense strand
uuuacaagcacaagagaga

SEQ ID NO: 2420053 - RNA, 19 nt, Homo sapiens
  misc_RNA (1)...(19): siRNA sense strand
aagaaaagcugaggagcaa

SEQ ID NO: 2420054 - RNA, 19 nt, Homo sapiens
  misc_RNA (1)...(19): siRNA sense strand
acauguacgacguggaaca

SEQ ID NO: 2420055 - RNA, 19 nt, Homo sapiens
  misc_RNA (1)...(19): siRNA sense strand
caaagcaaagauugggaau

SEQ ID NO: 2420056 - RNA, 19 nt, Homo sapiens
  misc_RNA (1)...(19): siRNA sense strand
gaugcaaagaauuagagaa

SEQ ID NO: 2420057 - RNA, 19 nt, Homo sapiens
  misc_RNA (1)...(19): siRNA sense strand
aagcaaaagcugcagcaaa

SEQ ID NO: 2420058 - RNA, 19 nt, Homo sapiens
  misc_RNA (1)...(19): siRNA sense strand
caugaugaagauugaagaa

SEQ ID NO: 2420059 - RNA, 19 nt, Homo sapiens
  misc_RNA (1)...(19): siRNA sense strand
acacaaacaagcugaggca

SEQ ID NO: 2420060 - RNA, 19 nt, Homo sapiens
  misc_RNA (1)...(19): siRNA sense strand
ccauagacgaugagagcag

SEQ ID NO: 2420061 - RNA, 19 nt, Homo sapiens
  misc_RNA (1)...(19): siRNA sense strand
cagaagaggaggaguggcu

SEQ ID NO: 2420062 - RNA, 19 nt, Homo sapiens
  misc_RNA (1)...(19): siRNA sense strand
aaagaaaagcugaggagca

SEQ ID NO: 2420063 - RNA, 19 nt, Homo sapiens
  misc_RNA (1)...(19): siRNA sense strand
gcaaagcaaagauugggaa

SEQ ID NO: 2420064 - RNA, 19 nt, Homo sapiens
  misc_RNA (1)...(19): siRNA sense strand
ugguugaaggauaaaggaa

SEQ ID NO: 2420065 - RNA, 19 nt, Homo sapiens
  misc_RNA (1)...(19): siRNA sense strand
ugaagauugaagaagaaga

SEQ ID NO: 2420066 - RNA, 19 nt, Homo sapiens
  misc_RNA (1)...(19): siRNA sense strand
agagaugaugcaaagaauu

SEQ ID NO: 2420067 - RNA, 19 nt, Homo sapiens
  misc_RNA (1)...(19): siRNA sense strand
caagcacaagagagagcaa

SEQ ID NO: 2420068 - RNA, 19 nt, Homo sapiens
  misc_RNA (1)...(19): siRNA sense strand
acugagaaguuaaaggaag

SEQ ID NO: 2420069 - RNA, 19 nt, Homo sapiens
  misc_RNA (1)...(19): siRNA sense strand
gaagaaaagaacccagaau

SEQ ID NO: 2420070 - RNA, 19 nt, Homo sapiens
  misc_RNA (1)...(19): siRNA sense strand
ccacuaaagcauuggaagc

SEQ ID NO: 2420071 - RNA, 19 nt, Homo sapiens
  misc_RNA (1)...(19): siRNA sense strand
cagagagaagagaaauuau

SEQ ID NO: 2420072 - RNA, 19 nt, Homo sapiens
  misc_RNA (1)...(19): siRNA sense strand
gaagcggccaugugggaga

SEQ ID NO: 2420073 - RNA, 19 nt, Homo sapiens
  misc_RNA (1)...(19): siRNA sense strand
uguaauucaaggaacagaa

SEQ ID NO: 2420074 - RNA, 19 nt, Homo sapiens
  misc_RNA (1)...(19): siRNA sense strand
agaaugagcugucgcgcau

SEQ ID NO: 2420075 - RNA, 19 nt, Homo sapiens
  misc_RNA (1)...(19): siRNA sense strand
acggcaaccaccuggaaua

SEQ ID NO: 2420076 - RNA, 19 nt, Homo sapiens
  misc_RNA (1)...(19): siRNA sense strand
cagaacaaccagcuggaga

SEQ ID NO: 2420077 - RNA, 19 nt, Homo sapiens
  misc_RNA (1)...(19): siRNA sense strand
gcucaaucugggcaagaau

SEQ ID NO: 2420078 - RNA, 19 nt, Homo sapiens
  misc_RNA (1)...(19): siRNA sense strand
aagaauagccucacccaca

SEQ ID NO: 2420079 - RNA, 19 nt, Homo sapiens
  misc_RNA (1)...(19): siRNA sense strand
gcagcaaccucaaggagcu

SEQ ID NO: 2420080 - RNA, 19 nt, Homo sapiens
  misc_RNA (1)...(19): siRNA sense strand
gcauauggacugucggaac

SEQ ID NO: 2420081 - RNA, 19 nt, Homo sapiens
  misc_RNA (1)...(19): siRNA sense strand
gagucagcgaggagagcga

SEQ ID NO: 2420082 - RNA, 19 nt, Homo sapiens
  misc_RNA (1)...(19): siRNA sense strand
aguugaggcuacugcccua

SEQ ID NO: 2420083 - RNA, 19 nt, Homo sapiens
  misc_RNA (1)...(19): siRNA sense strand
gcauauggacugucggaac

SEQ ID NO: 2420084 - RNA, 19 nt, Homo sapiens
  misc_RNA (1)...(19): siRNA sense strand
gagucagcgaggagagcga

SEQ ID NO: 2420085 - RNA, 19 nt, Homo sapiens
  misc_RNA (1)...(19): siRNA sense strand
aguugaggcuacugcccua

SEQ ID NO: 2420086 - RNA, 19 nt, Homo sapiens
  misc_RNA (1)...(19): siRNA sense strand
ccaagaaggagaagcacaa

SEQ ID NO: 2420087 - RNA, 19 nt, Homo sapiens
  misc_RNA (1)...(19): siRNA sense strand
ccaaaggaggugagcacaa

SEQ ID NO: 2420088 - RNA, 19 nt, Homo sapiens
  misc_RNA (1)...(19): siRNA sense strand
gggaauagaugaaaggaag

SEQ ID NO: 2420089 - RNA, 19 nt, Homo sapiens
  misc_RNA (1)...(19): siRNA sense strand
gguaugaggcagagaaagu

SEQ ID NO: 2420090 - RNA, 19 nt, Homo sapiens
  misc_RNA (1)...(19): siRNA sense strand
agacaaugcuuuuggagaa

SEQ ID NO: 2420091 - RNA, 19 nt, Homo sapiens
  misc_RNA (1)...(19): siRNA sense strand
uggaagaagcccagcagaa

SEQ ID NO: 2420092 - RNA, 19 nt, Homo sapiens
  misc_RNA (1)...(19): siRNA sense strand
agaaagugacccaggagaa

SEQ ID NO: 2420093 - RNA, 19 nt, Homo sapiens
  misc_RNA (1)...(19): siRNA sense strand
ccaacaaagucgaaaccau

SEQ ID NO: 2420094 - RNA, 19 nt, Homo sapiens
  misc_RNA (1)...(19): siRNA sense strand
cagcggaccuggagagcau

SEQ ID NO: 2420095 - RNA, 19 nt, Homo sapiens
  misc_RNA (1)...(19): siRNA sense strand
gaagaaaggagcugggacu

SEQ ID NO: 2420096 - RNA, 19 nt, Homo sapiens
  misc_RNA (1)...(19): siRNA sense strand
agaaguacguggaggaacu

SEQ ID NO: 2420097 - RNA, 19 nt, Homo sapiens
  misc_RNA (1)...(19): siRNA sense strand
uggagaagaagcagaagaa

SEQ ID NO: 2420098 - RNA, 19 nt, Homo sapiens
  misc_RNA (1)...(19): siRNA sense strand
aggaggaacuggaggaugu

SEQ ID NO: 2420099 - RNA, 19 nt, Homo sapiens
  misc_RNA (1)...(19): siRNA sense strand
uggaagagcugaaggccga

SEQ ID NO: 2420100 - RNA, 19 nt, Homo sapiens
  misc_RNA (1)...(19): siRNA sense strand
ccucagacccagauggaga

SEQ ID NO: 2420101 - RNA, 19 nt, Homo sapiens
  misc_RNA (1)...(19): siRNA sense strand
agggaauagaugaaaggaa

SEQ ID NO: 2420102 - RNA, 19 nt, Homo sapiens
  misc_RNA (1)...(19): siRNA sense strand
cggcaaaaguacugucauu

SEQ ID NO: 2420103 - RNA, 19 nt, Homo sapiens
  misc_RNA (1)...(19): siRNA sense strand
aaucagagaaguugcggaa

SEQ ID NO: 2420104 - RNA, 19 nt, Homo sapiens
  misc_RNA (1)...(19): siRNA sense strand
ucugugaccuagagaacaa

SEQ ID NO: 2420105 - RNA, 19 nt, Homo sapiens
  misc_RNA (1)...(19): siRNA sense strand
acagauacuggaaaggaaa

SEQ ID NO: 2420106 - RNA, 19 nt, Homo sapiens
  misc_RNA (1)...(19): siRNA sense strand
uugaaacggaagaggcuaa

SEQ ID NO: 2420107 - RNA, 19 nt, Homo sapiens
  misc_RNA (1)...(19): siRNA sense strand
gcgaguaugaggagcugaa

SEQ ID NO: 2420108 - RNA, 19 nt, Homo sapiens
  misc_RNA (1)...(19): siRNA sense strand
cuugagaagcagcgagaga

SEQ ID NO: 2420109 - RNA, 19 nt, Homo sapiens
  misc_RNA (1)...(19): siRNA sense strand
gcucggagucagacagaga

SEQ ID NO: 2420110 - RNA, 19 nt, Homo sapiens
  misc_RNA (1)...(19): siRNA sense strand
aggugcagauuaagagauu

SEQ ID NO: 2420111 - RNA, 19 nt, Homo sapiens
  misc_RNA (1)...(19): siRNA sense strand
ggacagaugguaugaggca

SEQ ID NO: 2420112 - RNA, 19 nt, Homo sapiens
  misc_RNA (1)...(19): siRNA sense strand
gggacuuugauguggagaa

SEQ ID NO: 2420113 - RNA, 19 nt, Homo sapiens
  misc_RNA (1)...(19): siRNA sense strand
aggccaaggaagcgagaca

SEQ ID NO: 2420114 - RNA, 19 nt, Homo sapiens
  misc_RNA (1)...(19): siRNA sense strand
cacagauacuggaaaggaa

SEQ ID NO: 2420115 - RNA, 19 nt, Homo sapiens
  misc_RNA (1)...(19): siRNA sense strand
cagggaaagcagagaagga

SEQ ID NO: 2420116 - RNA, 19 nt, Homo sapiens
  misc_RNA (1)...(19): siRNA sense strand
gaggaagccaagaaggaga

SEQ ID NO: 2420117 - RNA, 19 nt, Homo sapiens
  misc_RNA (1)...(19): siRNA sense strand
gccgaaaagagauggauaa

SEQ ID NO: 2420118 - RNA, 19 nt, Homo sapiens
  misc_RNA (1)...(19): siRNA sense strand
cuggcagugacgagggaaa

SEQ ID NO: 2420119 - RNA, 19 nt, Homo sapiens
  misc_RNA (1)...(19): siRNA sense strand
agaucaagcugcagaugga

SEQ ID NO: 2420120 - RNA, 19 nt, Homo sapiens
  misc_RNA (1)...(19): siRNA sense strand
acgagagaucccagaaauu

SEQ ID NO: 2420121 - RNA, 19 nt, Homo sapiens
  misc_RNA (1)...(19): siRNA sense strand
ugacaagcaucaaugguga

SEQ ID NO: 2420122 - RNA, 19 nt, Homo sapiens
  misc_RNA (1)...(19): siRNA sense strand
uuggauugaugcugacaaa

SEQ ID NO: 2420123 - RNA, 19 nt, Homo sapiens
  misc_RNA (1)...(19): siRNA sense strand
agcaagaguaugaagagaa

SEQ ID NO: 2420124 - RNA, 19 nt, Homo sapiens
  misc_RNA (1)...(19): siRNA sense strand
gcaucgaguaccuggaaca

SEQ ID NO: 2420125 - RNA, 19 nt, Homo sapiens
  misc_RNA (1)...(19): siRNA sense strand
gcuaaagccagaugaggga

SEQ ID NO: 2420126 - RNA, 19 nt, Homo sapiens
  misc_RNA (1)...(19): siRNA sense strand
ggaugaagcagaugcacca

SEQ ID NO: 2420127 - RNA, 19 nt, Homo sapiens
  misc_RNA (1)...(19): siRNA sense strand
acagcgauaucaagaggaa

SEQ ID NO: 2420128 - RNA, 19 nt, Homo sapiens
  misc_RNA (1)...(19): siRNA sense strand
gugcucagauggagaacga

SEQ ID NO: 2420129 - RNA, 19 nt, Homo sapiens
  misc_RNA (1)...(19): siRNA sense strand
gagcagaagauucgggaag

SEQ ID NO: 2420130 - RNA, 19 nt, Homo sapiens
  misc_RNA (1)...(19): siRNA sense strand
gagaacaugacgcggaaca

SEQ ID NO: 2420131 - RNA, 19 nt, Homo sapiens
  misc_RNA (1)...(19): siRNA sense strand
aggagaagcacaagcuaca

SEQ ID NO: 2420132 - RNA, 19 nt, Homo sapiens
  misc_RNA (1)...(19): siRNA sense strand
ucgaugaggaccaggauga

SEQ ID NO: 2420133 - RNA, 19 nt, Homo sapiens
  misc_RNA (1)...(19): siRNA sense strand
ggauacggaaggagaacca

SEQ ID NO: 2420134 - RNA, 19 nt, Homo sapiens
  misc_RNA (1)...(19): siRNA sense strand
cugcucagcuccagacaau

SEQ ID NO: 2420135 - RNA, 19 nt, Homo sapiens
  misc_RNA (1)...(19): siRNA sense strand
caggaaagagcuggagcaa

SEQ ID NO: 2420136 - RNA, 19 nt, Homo sapiens
  misc_RNA (1)...(19): siRNA sense strand
gcaagacaucagucagcaa

SEQ ID NO: 2420137 - RNA, 19 nt, Homo sapiens
  misc_RNA (1)...(19): siRNA sense strand
agacagagcuggaaggacc

SEQ ID NO: 2420138 - RNA, 19 nt, Homo sapiens
  misc_RNA (1)...(19): siRNA sense strand
aggaaagagcuggagcaaa

SEQ ID NO: 2420139 - RNA, 19 nt, Homo sapiens
  misc_RNA (1)...(19): siRNA sense strand
ggaaaugcagcuggagcaa

SEQ ID NO: 2420140 - RNA, 19 nt, Homo sapiens
  misc_RNA (1)...(19): siRNA sense strand
acagaugguaugaggcaga

SEQ ID NO: 2420141 - RNA, 19 nt, Homo sapiens
  misc_RNA (1)...(19): siRNA sense strand
gugaauaaacaguuggaag

SEQ ID NO: 2420142 - RNA, 19 nt, Homo sapiens
  misc_RNA (1)...(19): siRNA sense strand
uggagaaagugcacagcca

SEQ ID NO: 2420143 - RNA, 19 nt, Homo sapiens
  misc_RNA (1)...(19): siRNA sense strand
aguaagaagcaaagagaga

SEQ ID NO: 2420144 - RNA, 19 nt, Homo sapiens
  misc_RNA (1)...(19): siRNA sense strand
gcuccaaagacgaugacaa

SEQ ID NO: 2420145 - RNA, 19 nt, Homo sapiens
  misc_RNA (1)...(19): siRNA sense strand
ucgagaagguggaggugga

SEQ ID NO: 2420146 - RNA, 19 nt, Homo sapiens
  misc_RNA (1)...(19): siRNA sense strand
ggaaaagaaaagauggaga

SEQ ID NO: 2420147 - RNA, 19 nt, Homo sapiens
  misc_RNA (1)...(19): siRNA sense strand
agcaaagagagaucaguaa

SEQ ID NO: 2420148 - RNA, 19 nt, Homo sapiens
  misc_RNA (1)...(19): siRNA sense strand
uaccaguaccaaagauaaa

SEQ ID NO: 2420149 - RNA, 19 nt, Homo sapiens
  misc_RNA (1)...(19): siRNA sense strand
auccauaguaagaagcaaa

SEQ ID NO: 2420150 - RNA, 19 nt, Homo sapiens
  misc_RNA (1)...(19): siRNA sense strand
cuuuaagacagcaugggua

SEQ ID NO: 2420151 - RNA, 19 nt, Homo sapiens
  misc_RNA (1)...(19): siRNA sense strand
agauaaagagaguggaggu

SEQ ID NO: 2420152 - RNA, 19 nt, Homo sapiens
  misc_RNA (1)...(19): siRNA sense strand
agaaaauguuggaaaacca

SEQ ID NO: 2420153 - RNA, 19 nt, Homo sapiens
  misc_RNA (1)...(19): siRNA sense strand
cuauuugguugucggaaaa

SEQ ID NO: 2420154 - RNA, 19 nt, Homo sapiens
  misc_RNA (1)...(19): siRNA sense strand
cagugugggcaguuggaau

SEQ ID NO: 2420155 - RNA, 19 nt, Homo sapiens
  misc_RNA (1)...(19): siRNA sense strand
ccguggauccauaguaaga

SEQ ID NO: 2420156 - RNA, 19 nt, Homo sapiens
  misc_RNA (1)...(19): siRNA sense strand
cugucaaguucaucuggaa

SEQ ID NO: 2420157 - RNA, 19 nt, Homo sapiens
  misc_RNA (1)...(19): siRNA sense strand
ccaaagauaaagagagugg

SEQ ID NO: 2420158 - RNA, 19 nt, Homo sapiens
  misc_RNA (1)...(19): siRNA sense strand
uggccggauugcagauuau

SEQ ID NO: 2420159 - RNA, 19 nt, Homo sapiens
  misc_RNA (1)...(19): siRNA sense strand
aguaaaggccauagcgaga

SEQ ID NO: 2420160 - RNA, 19 nt, Homo sapiens
  misc_RNA (1)...(19): siRNA sense strand
aggccauggaggagagcaa

SEQ ID NO: 2420161 - RNA, 19 nt, Homo sapiens
  misc_RNA (1)...(19): siRNA sense strand
gggacgaguauaaggugaa

SEQ ID NO: 2420162 - RNA, 19 nt, Homo sapiens
  misc_RNA (1)...(19): siRNA sense strand
cggaggaagcugaugguca

SEQ ID NO: 2420163 - RNA, 19 nt, Homo sapiens
  misc_RNA (1)...(19): siRNA sense strand
acucaaaguggacgaggaa

SEQ ID NO: 2420164 - RNA, 19 nt, Homo sapiens
  misc_RNA (1)...(19): siRNA sense strand
ucaaaguggacgaggaaac

SEQ ID NO: 2420165 - RNA, 19 nt, Homo sapiens
  misc_RNA (1)...(19): siRNA sense strand
uagccaacagggaggagaa

SEQ ID NO: 2420166 - RNA, 19 nt, Homo sapiens
  misc_RNA (1)...(19): siRNA sense strand
gaguauaaggugaaguuuu

SEQ ID NO: 2420167 - RNA, 19 nt, Homo sapiens
  misc_RNA (1)...(19): siRNA sense strand
acgacaacugggugaaaga

SEQ ID NO: 2420168 - RNA, 19 nt, Homo sapiens
  misc_RNA (1)...(19): siRNA sense strand
ccgacgagaaccagaacca

SEQ ID NO: 2420169 - RNA, 19 nt, Homo sapiens
  misc_RNA (1)...(19): siRNA sense strand
gcgagaaggagguugccga

SEQ ID NO: 2420170 - RNA, 19 nt, Homo sapiens
  misc_RNA (1)...(19): siRNA sense strand
caucaggcucaacgaggaa

SEQ ID NO: 2420171 - RNA, 19 nt, Homo sapiens
  misc_RNA (1)...(19): siRNA sense strand
uggagaaccagcagggcca

SEQ ID NO: 2420172 - RNA, 19 nt, Homo sapiens
  misc_RNA (1)...(19): siRNA sense strand
acgaggaaacacaggaagu

SEQ ID NO: 2420173 - RNA, 19 nt, Homo sapiens
  misc_RNA (1)...(19): siRNA sense strand
acgaguauaaggugaaguu

SEQ ID NO: 2420174 - RNA, 19 nt, Homo sapiens
  misc_RNA (1)...(19): siRNA sense strand
aguacaacgcgcugaacga

SEQ ID NO: 2420175 - RNA, 19 nt, Homo sapiens
  misc_RNA (1)...(19): siRNA sense strand
aguaaaggccauagcgaga

SEQ ID NO: 2420176 - RNA, 19 nt, Homo sapiens
  misc_RNA (1)...(19): siRNA sense strand
aggccauggaggagagcaa

SEQ ID NO: 2420177 - RNA, 19 nt, Homo sapiens
  misc_RNA (1)...(19): siRNA sense strand
gggacgaguauaaggugaa

SEQ ID NO: 2420178 - RNA, 19 nt, Homo sapiens
  misc_RNA (1)...(19): siRNA sense strand
cggaggaagcugaugguca

SEQ ID NO: 2420179 - RNA, 19 nt, Homo sapiens
  misc_RNA (1)...(19): siRNA sense strand
acucaaaguggacgaggaa

SEQ ID NO: 2420180 - RNA, 19 nt, Homo sapiens
  misc_RNA (1)...(19): siRNA sense strand
ucaaaguggacgaggaaac

SEQ ID NO: 2420181 - RNA, 19 nt, Homo sapiens
  misc_RNA (1)...(19): siRNA sense strand
uagccaacagggaggagaa

SEQ ID NO: 2420182 - RNA, 19 nt, Homo sapiens
  misc_RNA (1)...(19): siRNA sense strand
gaguauaaggugaaguuuu

SEQ ID NO: 2420183 - RNA, 19 nt, Homo sapiens
  misc_RNA (1)...(19): siRNA sense strand
acgacaacugggugaaaga

SEQ ID NO: 2420184 - RNA, 19 nt, Homo sapiens
  misc_RNA (1)...(19): siRNA sense strand
gcgagaaggagguugccga

SEQ ID NO: 2420185 - RNA, 19 nt, Homo sapiens
  misc_RNA (1)...(19): siRNA sense strand
caucaggcucaacgaggaa

SEQ ID NO: 2420186 - RNA, 19 nt, Homo sapiens
  misc_RNA (1)...(19): siRNA sense strand
uggagaaccagcagggcca

SEQ ID NO: 2420187 - RNA, 19 nt, Homo sapiens
  misc_RNA (1)...(19): siRNA sense strand
acgaggaaacacaggaagu

SEQ ID NO: 2420188 - RNA, 19 nt, Homo sapiens
  misc_RNA (1)...(19): siRNA sense strand
acgaguauaaggugaaguu

SEQ ID NO: 2420189 - RNA, 19 nt, Homo sapiens
  misc_RNA (1)...(19): siRNA sense strand
gaggaaaccuuaaagagga

SEQ ID NO: 2420190 - RNA, 19 nt, Homo sapiens
  misc_RNA (1)...(19): siRNA sense strand
uuguaaaugcagaagguau

SEQ ID NO: 2420191 - RNA, 19 nt, Homo sapiens
  misc_RNA (1)...(19): siRNA sense strand
aggaaaccuuaaagaggau

SEQ ID NO: 2420192 - RNA, 19 nt, Homo sapiens
  misc_RNA (1)...(19): siRNA sense strand
ccugacaaugaaagccaaa

SEQ ID NO: 2420193 - RNA, 19 nt, Homo sapiens
  misc_RNA (1)...(19): siRNA sense strand
agaaagaacugaaggacca

SEQ ID NO: 2420194 - RNA, 19 nt, Homo sapiens
  misc_RNA (1)...(19): siRNA sense strand
cgucaagacucuagagcuc

SEQ ID NO: 2420195 - RNA, 19 nt, Homo sapiens
  misc_RNA (1)...(19): siRNA sense strand
cagacaucccaguaggaaa

SEQ ID NO: 2420196 - RNA, 19 nt, Homo sapiens
  misc_RNA (1)...(19): siRNA sense strand
aacaaggaaagaagagaaa

SEQ ID NO: 2420197 - RNA, 19 nt, Homo sapiens
  misc_RNA (1)...(19): siRNA sense strand
acaacagaggagaguacaa

SEQ ID NO: 2420198 - RNA, 19 nt, Homo sapiens
  misc_RNA (1)...(19): siRNA sense strand
acgagauggaagccagaaa

SEQ ID NO: 2420199 - RNA, 19 nt, Homo sapiens
  misc_RNA (1)...(19): siRNA sense strand
agacaucccaguaggaaaa

SEQ ID NO: 2420200 - RNA, 19 nt, Homo sapiens
  misc_RNA (1)...(19): siRNA sense strand
agcaaaacauagaggccaa

SEQ ID NO: 2420201 - RNA, 19 nt, Homo sapiens
  misc_RNA (1)...(19): siRNA sense strand
gaauggugacagugggcau

SEQ ID NO: 2420202 - RNA, 19 nt, Homo sapiens
  misc_RNA (1)...(19): siRNA sense strand
cuagaacagauguggcaau

SEQ ID NO: 2420203 - RNA, 19 nt, Homo sapiens
  misc_RNA (1)...(19): siRNA sense strand
uggaaugaaaacaaggaaa

SEQ ID NO: 2420204 - RNA, 19 nt, Homo sapiens
  misc_RNA (1)...(19): siRNA sense strand
aggccaaaguggagaaagc

SEQ ID NO: 2420205 - RNA, 19 nt, Homo sapiens
  misc_RNA (1)...(19): siRNA sense strand
aggaggagcagcaaggaca

SEQ ID NO: 2420206 - RNA, 19 nt, Homo sapiens
  misc_RNA (1)...(19): siRNA sense strand
agcaaugaguccugcaaca

SEQ ID NO: 2420207 - RNA, 19 nt, Homo sapiens
  misc_RNA (1)...(19): siRNA sense strand
caacaugccucccacggaa

SEQ ID NO: 2420208 - RNA, 19 nt, Homo sapiens
  misc_RNA (1)...(19): siRNA sense strand
gagaaaaugaauccagcaa

SEQ ID NO: 2420209 - RNA, 19 nt, Homo sapiens
  misc_RNA (1)...(19): siRNA sense strand
aggaaagaagagaaaagaa

SEQ ID NO: 2420210 - RNA, 19 nt, Homo sapiens
  misc_RNA (1)...(19): siRNA sense strand
cgcaagagcuccacccaca

SEQ ID NO: 2420211 - RNA, 19 nt, Homo sapiens
  misc_RNA (1)...(19): siRNA sense strand
cgucaugguucuggcccaa

SEQ ID NO: 2420212 - RNA, 19 nt, Homo sapiens
  misc_RNA (1)...(19): siRNA sense strand
cgagaacaacucaggaacu

SEQ ID NO: 2420213 - RNA, 19 nt, Homo sapiens
  misc_RNA (1)...(19): siRNA sense strand
acauagaggccaaagugga

SEQ ID NO: 2420214 - RNA, 19 nt, Homo sapiens
  misc_RNA (1)...(19): siRNA sense strand
uuaaggagccucagggcca

SEQ ID NO: 2420215 - RNA, 19 nt, Homo sapiens
  misc_RNA (1)...(19): siRNA sense strand
agacgguggagaagcaaaa

SEQ ID NO: 2420216 - RNA, 19 nt, Homo sapiens
  misc_RNA (1)...(19): siRNA sense strand
gcuacaugagugaacgaga

SEQ ID NO: 2420217 - RNA, 19 nt, Homo sapiens
  misc_RNA (1)...(19): siRNA sense strand
ucaucuacacggugggcua

SEQ ID NO: 2420218 - RNA, 19 nt, Homo sapiens
  misc_RNA (1)...(19): siRNA sense strand
uugcacauccagagggaca

SEQ ID NO: 2420219 - RNA, 19 nt, Homo sapiens
  misc_RNA (1)...(19): siRNA sense strand
gggacuugucggagugcga

SEQ ID NO: 2420220 - RNA, 19 nt, Homo sapiens
  misc_RNA (1)...(19): siRNA sense strand
cggagugcgaggaguccaa

SEQ ID NO: 2420221 - RNA, 19 nt, Homo sapiens
  misc_RNA (1)...(19): siRNA sense strand
ucguggagacguugagaaa

SEQ ID NO: 2420222 - RNA, 19 nt, Homo sapiens
  misc_RNA (1)...(19): siRNA sense strand
acaaggaaugggaggauau

SEQ ID NO: 2420223 - RNA, 19 nt, Homo sapiens
  misc_RNA (1)...(19): siRNA sense strand
gcccugagucugaggacaa

SEQ ID NO: 2420224 - RNA, 19 nt, Homo sapiens
  misc_RNA (1)...(19): siRNA sense strand
ccgcaugagagccggacaa

SEQ ID NO: 2420225 - RNA, 19 nt, Homo sapiens
  misc_RNA (1)...(19): siRNA sense strand
aggcaaagauugugugcug

SEQ ID NO: 2420226 - RNA, 19 nt, Homo sapiens
  misc_RNA (1)...(19): siRNA sense strand
gaagaaggcuuaugagcug

SEQ ID NO: 2420227 - RNA, 19 nt, Homo sapiens
  misc_RNA (1)...(19): siRNA sense strand
caagaauaugcaagcaaaa

SEQ ID NO: 2420228 - RNA, 19 nt, Homo sapiens
  misc_RNA (1)...(19): siRNA sense strand
cugcagaggaauaguaugu

SEQ ID NO: 2420229 - RNA, 19 nt, Homo sapiens
  misc_RNA (1)...(19): siRNA sense strand
ucgccggacgaaagggaaa

SEQ ID NO: 2420230 - RNA, 19 nt, Homo sapiens
  misc_RNA (1)...(19): siRNA sense strand
cagacaucguggagacguu

SEQ ID NO: 2420231 - RNA, 19 nt, Homo sapiens
  misc_RNA (1)...(19): siRNA sense strand
cugucagcucacugggaaa

SEQ ID NO: 2420232 - RNA, 19 nt, Homo sapiens
  misc_RNA (1)...(19): siRNA sense strand
gaacguaacagacagguga

SEQ ID NO: 2420233 - RNA, 19 nt, Homo sapiens
  misc_RNA (1)...(19): siRNA sense strand
ggguugaugaagaaggcuu

SEQ ID NO: 2420234 - RNA, 19 nt, Homo sapiens
  misc_RNA (1)...(19): siRNA sense strand
ucuaaugaucagcaggcaa

SEQ ID NO: 2420235 - RNA, 19 nt, Homo sapiens
  misc_RNA (1)...(19): siRNA sense strand
uggacaaagugcuucucaa

SEQ ID NO: 2420236 - RNA, 19 nt, Homo sapiens
  misc_RNA (1)...(19): siRNA sense strand
caggaaaauuaacgaagau

SEQ ID NO: 2420237 - RNA, 19 nt, Homo sapiens
  misc_RNA (1)...(19): siRNA sense strand
cagggaacggguauggcaa

SEQ ID NO: 2420238 - RNA, 19 nt, Homo sapiens
  misc_RNA (1)...(19): siRNA sense strand
aacaagaauaugcaagcaa

SEQ ID NO: 2420239 - RNA, 19 nt, Homo sapiens
  misc_RNA (1)...(19): siRNA sense strand
cugaggacaaguacaggaa

SEQ ID NO: 2420240 - RNA, 19 nt, Homo sapiens
  misc_RNA (1)...(19): siRNA sense strand
ccacaaacuccuaaagaaa

SEQ ID NO: 2420241 - RNA, 19 nt, Homo sapiens
  misc_RNA (1)...(19): siRNA sense strand
caaagaaggcugaggacaa

SEQ ID NO: 2420242 - RNA, 19 nt, Homo sapiens
  misc_RNA (1)...(19): siRNA sense strand
cggcaguguauuagagaaa

SEQ ID NO: 2420243 - RNA, 19 nt, Homo sapiens
  misc_RNA (1)...(19): siRNA sense strand
cuacaaacucguaaggaaa

SEQ ID NO: 2420244 - RNA, 19 nt, Homo sapiens
  misc_RNA (1)...(19): siRNA sense strand
agcaguaaguggugagaaa

SEQ ID NO: 2420245 - RNA, 19 nt, Homo sapiens
  misc_RNA (1)...(19): siRNA sense strand
ccucaaaggucaaugaaca

SEQ ID NO: 2420246 - RNA, 19 nt, Homo sapiens
  misc_RNA (1)...(19): siRNA sense strand
ggaaaggagaagcaggaaa

SEQ ID NO: 2420247 - RNA, 19 nt, Homo sapiens
  misc_RNA (1)...(19): siRNA sense strand
aagcagauguagagggaga

SEQ ID NO: 2420248 - RNA, 19 nt, Homo sapiens
  misc_RNA (1)...(19): siRNA sense strand
agcaguaggugaagagaaa

SEQ ID NO: 2420249 - RNA, 19 nt, Homo sapiens
  misc_RNA (1)...(19): siRNA sense strand
aagcagacguagaggaaga

SEQ ID NO: 2420250 - RNA, 19 nt, Homo sapiens
  misc_RNA (1)...(19): siRNA sense strand
agcaguaggugaagagaaa

SEQ ID NO: 2420251 - RNA, 19 nt, Homo sapiens
  misc_RNA (1)...(19): siRNA sense strand
aagcagacguagaggaaga

SEQ ID NO: 2420252 - RNA, 19 nt, Homo sapiens
  misc_RNA (1)...(19): siRNA sense strand
aagcagacguagaggaaga

SEQ ID NO: 2420253 - RNA, 19 nt, Homo sapiens
  misc_RNA (1)...(19): siRNA sense strand
ggagagaaggagagaugaa

SEQ ID NO: 2420254 - RNA, 19 nt, Homo sapiens
  misc_RNA (1)...(19): siRNA sense strand
ggaaaguaggugugaaaga

SEQ ID NO: 2420255 - RNA, 19 nt, Homo sapiens
  misc_RNA (1)...(19): siRNA sense strand
aagcagauguagaggaaga

SEQ ID NO: 2420256 - RNA, 19 nt, Homo sapiens
  misc_RNA (1)...(19): siRNA sense strand
ggaaagugggcgugaaaga

SEQ ID NO: 2420257 - RNA, 19 nt, Homo sapiens
  misc_RNA (1)...(19): siRNA sense strand
ggaaaguaggugugaaaga

SEQ ID NO: 2420258 - RNA, 19 nt, Homo sapiens
  misc_RNA (1)...(19): siRNA sense strand
gguaagagcaugaaagcau

SEQ ID NO: 2420259 - RNA, 19 nt, Homo sapiens
  misc_RNA (1)...(19): siRNA sense strand
ggaaaguaagagugaagaa

SEQ ID NO: 2420260 - RNA, 19 nt, Homo sapiens
  misc_RNA (1)...(19): siRNA sense strand
ggaaugaagaaguggccaa

SEQ ID NO: 2420261 - RNA, 19 nt, Homo sapiens
  misc_RNA (1)...(19): siRNA sense strand
aguaaaacuuggugcaaaa

SEQ ID NO: 2420262 - RNA, 19 nt, Homo sapiens
  misc_RNA (1)...(19): siRNA sense strand
acccauaccuagagacaaa

SEQ ID NO: 2420263 - RNA, 19 nt, Homo sapiens
  misc_RNA (1)...(19): siRNA sense strand
agcaguaagugaugagaaa

SEQ ID NO: 2420264 - RNA, 19 nt, Homo sapiens
  misc_RNA (1)...(19): siRNA sense strand
aaguaagagugaagaaaca

SEQ ID NO: 2420265 - RNA, 19 nt, Homo sapiens
  misc_RNA (1)...(19): siRNA sense strand
aaggagagaugaaggaaau

SEQ ID NO: 2420266 - RNA, 19 nt, Homo sapiens
  misc_RNA (1)...(19): siRNA sense strand
ggagauaguaagagcauca

SEQ ID NO: 2420267 - RNA, 19 nt, Homo sapiens
  misc_RNA (1)...(19): siRNA sense strand
gcagaaucagaaagggaaa

SEQ ID NO: 2420268 - RNA, 19 nt, Homo sapiens
  misc_RNA (1)...(19): siRNA sense strand
ucuacagaguucaggaaua

SEQ ID NO: 2420269 - RNA, 19 nt, Homo sapiens
  misc_RNA (1)...(19): siRNA sense strand
ggggaaaguaggugugaaa

SEQ ID NO: 2420270 - RNA, 19 nt, Homo sapiens
  misc_RNA (1)...(19): siRNA sense strand
ggggaaaguaggugugaaa

SEQ ID NO: 2420271 - RNA, 19 nt, Homo sapiens
  misc_RNA (1)...(19): siRNA sense strand
aaguagaacccgugggaga

SEQ ID NO: 2420272 - RNA, 19 nt, Homo sapiens
  misc_RNA (1)...(19): siRNA sense strand
ccaagagcacccagggaaa

SEQ ID NO: 2420273 - RNA, 19 nt, Homo sapiens
  misc_RNA (1)...(19): siRNA sense strand
gcaccuaagaccugaacua

SEQ ID NO: 2420274 - RNA, 19 nt, Homo sapiens
  misc_RNA (1)...(19): siRNA sense strand
gaaggagagaugaaggaaa

SEQ ID NO: 2420275 - RNA, 19 nt, Homo sapiens
  misc_RNA (1)...(19): siRNA sense strand
agcaggaggugaugagaaa

SEQ ID NO: 2420276 - RNA, 19 nt, Homo sapiens
  misc_RNA (1)...(19): siRNA sense strand
ggaaaguggacguagaaga

SEQ ID NO: 2420277 - RNA, 19 nt, Homo sapiens
  misc_RNA (1)...(19): siRNA sense strand
agcaggaggugaugagaaa

SEQ ID NO: 2420278 - RNA, 19 nt, Homo sapiens
  misc_RNA (1)...(19): siRNA sense strand
caaagaagccugugggcga

SEQ ID NO: 2420279 - RNA, 19 nt, Homo sapiens
  misc_RNA (1)...(19): siRNA sense strand
aucaguaggugaagagaaa

SEQ ID NO: 2420280 - RNA, 19 nt, Homo sapiens
  misc_RNA (1)...(19): siRNA sense strand
agacaaaguaccaggagau

SEQ ID NO: 2420281 - RNA, 19 nt, Homo sapiens
  misc_RNA (1)...(19): siRNA sense strand
gagaaagacaugaaagcau

SEQ ID NO: 2420282 - RNA, 19 nt, Homo sapiens
  misc_RNA (1)...(19): siRNA sense strand
uaagagaggaggagaaaga

SEQ ID NO: 2420283 - RNA, 19 nt, Homo sapiens
  misc_RNA (1)...(19): siRNA sense strand
gggaaagcucauacugaaa

SEQ ID NO: 2420284 - RNA, 19 nt, Homo sapiens
  misc_RNA (1)...(19): siRNA sense strand
gagaugaaggaaauagaaa

SEQ ID NO: 2420285 - RNA, 19 nt, Homo sapiens
  misc_RNA (1)...(19): siRNA sense strand
cagaaauuguugagugcau

SEQ ID NO: 2420286 - RNA, 19 nt, Homo sapiens
  misc_RNA (1)...(19): siRNA sense strand
acaaagagccgguagguga

SEQ ID NO: 2420287 - RNA, 19 nt, Homo sapiens
  misc_RNA (1)...(19): siRNA sense strand
cagagaauuugcuuggaaa

SEQ ID NO: 2420288 - RNA, 19 nt, Homo sapiens
  misc_RNA (1)...(19): siRNA sense strand
augaagagaucaagaacuu

SEQ ID NO: 2420289 - RNA, 19 nt, Homo sapiens
  misc_RNA (1)...(19): siRNA sense strand
gugcaaagaagaaaccaaa

SEQ ID NO: 2420290 - RNA, 19 nt, Homo sapiens
  misc_RNA (1)...(19): siRNA sense strand
caagagaaaccucaggaaa

SEQ ID NO: 2420291 - RNA, 19 nt, Homo sapiens
  misc_RNA (1)...(19): siRNA sense strand
ccaacaaagaggaacacaa

SEQ ID NO: 2420292 - RNA, 19 nt, Homo sapiens
  misc_RNA (1)...(19): siRNA sense strand
ucagaaagggaaaggagaa

SEQ ID NO: 2420293 - RNA, 19 nt, Homo sapiens
  misc_RNA (1)...(19): siRNA sense strand
caagaacuccuaagggaaa

SEQ ID NO: 2420294 - RNA, 19 nt, Homo sapiens
  misc_RNA (1)...(19): siRNA sense strand
gagaaagacauuaaagcau

SEQ ID NO: 2420295 - RNA, 19 nt, Homo sapiens
  misc_RNA (1)...(19): siRNA sense strand
cugagaacucguaaggaaa

SEQ ID NO: 2420296 - RNA, 19 nt, Homo sapiens
  misc_RNA (1)...(19): siRNA sense strand
gaugaaggaaauagaaaga

SEQ ID NO: 2420297 - RNA, 19 nt, Homo sapiens
  misc_RNA (1)...(19): siRNA sense strand
gugaagagaaagacaucaa

SEQ ID NO: 2420298 - RNA, 19 nt, Homo sapiens
  misc_RNA (1)...(19): siRNA sense strand
gugaagagaaagacaucaa

SEQ ID NO: 2420299 - RNA, 19 nt, Homo sapiens
  misc_RNA (1)...(19): siRNA sense strand
gcccacgacugaugagaaa

SEQ ID NO: 2420300 - RNA, 19 nt, Homo sapiens
  misc_RNA (1)...(19): siRNA sense strand
ccaagagcaccuaaggaaa

SEQ ID NO: 2420301 - RNA, 19 nt, Homo sapiens
  misc_RNA (1)...(19): siRNA sense strand
ccaagagcaccuaaggaaa

SEQ ID NO: 2420302 - RNA, 19 nt, Homo sapiens
  misc_RNA (1)...(19): siRNA sense strand
acaaagaggaacacaaauu

SEQ ID NO: 2420303 - RNA, 19 nt, Homo sapiens
  misc_RNA (1)...(19): siRNA sense strand
gaaucaaugacuaacgaua

SEQ ID NO: 2420304 - RNA, 19 nt, Homo sapiens
  misc_RNA (1)...(19): siRNA sense strand
ucgcguaagucaagaccaa

SEQ ID NO: 2420305 - RNA, 19 nt, Homo sapiens
  misc_RNA (1)...(19): siRNA sense strand
acacagacacacagagaga

SEQ ID NO: 2420306 - RNA, 19 nt, Homo sapiens
  misc_RNA (1)...(19): siRNA sense strand
gaugaaaagaugaaagcaa

SEQ ID NO: 2420307 - RNA, 19 nt, Homo sapiens
  misc_RNA (1)...(19): siRNA sense strand
ggcccaggcucuagaagaa

SEQ ID NO: 2420308 - RNA, 19 nt, Homo sapiens
  misc_RNA (1)...(19): siRNA sense strand
aaguagaagugaaggagga

SEQ ID NO: 2420309 - RNA, 19 nt, Homo sapiens
  misc_RNA (1)...(19): siRNA sense strand
ccaagaacuccuaagggaa

SEQ ID NO: 2420310 - RNA, 19 nt, Homo sapiens
  misc_RNA (1)...(19): siRNA sense strand
gcgaaagaguggauggcaa

SEQ ID NO: 2420311 - RNA, 19 nt, Homo sapiens
  misc_RNA (1)...(19): siRNA sense strand
gguacaaaggcgaaagagu

SEQ ID NO: 2420312 - RNA, 19 nt, Homo sapiens
  misc_RNA (1)...(19): siRNA sense strand
ccuacaagucauaaaguca

SEQ ID NO: 2420313 - RNA, 19 nt, Homo sapiens
  misc_RNA (1)...(19): siRNA sense strand
agucauaaagucagaucuu

SEQ ID NO: 2420314 - RNA, 19 nt, Homo sapiens
  misc_RNA (1)...(19): siRNA sense strand
ggguaaauggucagagccu

SEQ ID NO: 2420315 - RNA, 19 nt, Homo sapiens
  misc_RNA (1)...(19): siRNA sense strand
cgaaagaguggauggcaac

SEQ ID NO: 2420316 - RNA, 19 nt, Homo sapiens
  misc_RNA (1)...(19): siRNA sense strand
guacaaaggcgaaagagug

SEQ ID NO: 2420317 - RNA, 19 nt, Homo sapiens
  misc_RNA (1)...(19): siRNA sense strand
ccuaugaaugugaaauaca

SEQ ID NO: 2420318 - RNA, 19 nt, Homo sapiens
  misc_RNA (1)...(19): siRNA sense strand
cucaauaggaccacaguca

SEQ ID NO: 2420319 - RNA, 19 nt, Homo sapiens
  misc_RNA (1)...(19): siRNA sense strand
aggauauguaauaggaacu

SEQ ID NO: 2420320 - RNA, 19 nt, Homo sapiens
  misc_RNA (1)...(19): siRNA sense strand
aggaagaggugcagcggaa

SEQ ID NO: 2420321 - RNA, 19 nt, Homo sapiens
  misc_RNA (1)...(19): siRNA sense strand
ccacagagauggaggagcu

SEQ ID NO: 2420322 - RNA, 19 nt, Homo sapiens
  misc_RNA (1)...(19): siRNA sense strand
aggccaaagaacugaagaa

SEQ ID NO: 2420323 - RNA, 19 nt, Homo sapiens
  misc_RNA (1)...(19): siRNA sense strand
cagccaagaucgaggugga

SEQ ID NO: 2420324 - RNA, 19 nt, Homo sapiens
  misc_RNA (1)...(19): siRNA sense strand
ggacaagacagcaggcucu

SEQ ID NO: 2420325 - RNA, 19 nt, Homo sapiens
  misc_RNA (1)...(19): siRNA sense strand
ugguggaagacaaggaaga

SEQ ID NO: 2420326 - RNA, 19 nt, Homo sapiens
  misc_RNA (1)...(19): siRNA sense strand
aggugauggaucugaguau

SEQ ID NO: 2420327 - RNA, 19 nt, Homo sapiens
  misc_RNA (1)...(19): siRNA sense strand
gugacuaagaagaacauga

SEQ ID NO: 2420328 - RNA, 19 nt, Homo sapiens
  misc_RNA (1)...(19): siRNA sense strand
gguucuaugaggaugauga

SEQ ID NO: 2420329 - RNA, 19 nt, Homo sapiens
  misc_RNA (1)...(19): siRNA sense strand
cugcaugugacuaagaaga

SEQ ID NO: 2420330 - RNA, 19 nt, Homo sapiens
  misc_RNA (1)...(19): siRNA sense strand
aagacaaggaagaggugca

SEQ ID NO: 2420331 - RNA, 19 nt, Homo sapiens
  misc_RNA (1)...(19): siRNA sense strand
cugaagaaggugauggauc

SEQ ID NO: 2420332 - RNA, 19 nt, Homo sapiens
  misc_RNA (1)...(19): siRNA sense strand
gaaggaagacagugcguac

SEQ ID NO: 2420333 - RNA, 19 nt, Homo sapiens
  misc_RNA (1)...(19): siRNA sense strand
agugagaagggccgaaaga

SEQ ID NO: 2420334 - RNA, 19 nt, Homo sapiens
  misc_RNA (1)...(19): siRNA sense strand
gguaacacacagugaccca

SEQ ID NO: 2420335 - RNA, 19 nt, Homo sapiens
  misc_RNA (1)...(19): siRNA sense strand
gguccagaaacccgagaca

SEQ ID NO: 2420336 - RNA, 19 nt, Homo sapiens
  misc_RNA (1)...(19): siRNA sense strand
agcuggagcaagaggccaa

SEQ ID NO: 2420337 - RNA, 19 nt, Homo sapiens
  misc_RNA (1)...(19): siRNA sense strand
cugaaguggaugauggaaa

SEQ ID NO: 2420338 - RNA, 19 nt, Homo sapiens
  misc_RNA (1)...(19): siRNA sense strand
acaaauucuuccagguaca

SEQ ID NO: 2420339 - RNA, 19 nt, Homo sapiens
  misc_RNA (1)...(19): siRNA sense strand
aguggaugauggaaacaaa

SEQ ID NO: 2420340 - RNA, 19 nt, Homo sapiens
  misc_RNA (1)...(19): siRNA sense strand
guauaugcacagagaggca

SEQ ID NO: 2420341 - RNA, 19 nt, Homo sapiens
  misc_RNA (1)...(19): siRNA sense strand
cccaaacaauaucgaacaa

SEQ ID NO: 2420342 - RNA, 19 nt, Homo sapiens
  misc_RNA (1)...(19): siRNA sense strand
agaccaaucuuuugaccaa

SEQ ID NO: 2420343 - RNA, 19 nt, Homo sapiens
  misc_RNA (1)...(19): siRNA sense strand
cugcuaacaacaacauuaa

SEQ ID NO: 2420344 - RNA, 19 nt, Homo sapiens
  misc_RNA (1)...(19): siRNA sense strand
gcacagagaggcacaggca

SEQ ID NO: 2420345 - RNA, 19 nt, Homo sapiens
  misc_RNA (1)...(19): siRNA sense strand
agacaaccacaaauguaaa

SEQ ID NO: 2420346 - RNA, 19 nt, Homo sapiens
  misc_RNA (1)...(19): siRNA sense strand
cuggacugcaagagaauau

SEQ ID NO: 2420347 - RNA, 19 nt, Homo sapiens
  misc_RNA (1)...(19): siRNA sense strand
cuuucaguugcaagagaua

SEQ ID NO: 2420348 - RNA, 19 nt, Homo sapiens
  misc_RNA (1)...(19): siRNA sense strand
ccacaaauguaaagacucc

SEQ ID NO: 2420349 - RNA, 19 nt, Homo sapiens
  misc_RNA (1)...(19): siRNA sense strand
uacaauaacagguggucau

SEQ ID NO: 2420350 - RNA, 19 nt, Homo sapiens
  misc_RNA (1)...(19): siRNA sense strand
ccucaguaguaacaaacuu

SEQ ID NO: 2420351 - RNA, 19 nt, Homo sapiens
  misc_RNA (1)...(19): siRNA sense strand
acaauaucgaacaaaggaa

SEQ ID NO: 2420352 - RNA, 19 nt, Homo sapiens
  misc_RNA (1)...(19): siRNA sense strand
acuccauguucuacccaaa

SEQ ID NO: 2420353 - RNA, 19 nt, Homo sapiens
  misc_RNA (1)...(19): siRNA sense strand
agggaagagacaaccacaa

SEQ ID NO: 2420354 - RNA, 19 nt, Homo sapiens
  misc_RNA (1)...(19): siRNA sense strand
cuuauggagggaagagaca

SEQ ID NO: 2420355 - RNA, 19 nt, Homo sapiens
  misc_RNA (1)...(19): siRNA sense strand
uggaaaagguuguccucau

SEQ ID NO: 2420356 - RNA, 19 nt, Homo sapiens
  misc_RNA (1)...(19): siRNA sense strand
ugucaauugaggagggaga

SEQ ID NO: 2420357 - RNA, 19 nt, Homo sapiens
  misc_RNA (1)...(19): siRNA sense strand
gggagagaggaaagccaaa

SEQ ID NO: 2420358 - RNA, 19 nt, Homo sapiens
  misc_RNA (1)...(19): siRNA sense strand
caucaugcuaguaggaaau

SEQ ID NO: 2420359 - RNA, 19 nt, Homo sapiens
  misc_RNA (1)...(19): siRNA sense strand
cagaacagaaagaggaagu

SEQ ID NO: 2420360 - RNA, 19 nt, Homo sapiens
  misc_RNA (1)...(19): siRNA sense strand
uugaggagggagagaggaa

SEQ ID NO: 2420361 - RNA, 19 nt, Homo sapiens
  misc_RNA (1)...(19): siRNA sense strand
gaggaaagccaaagagcug

SEQ ID NO: 2420362 - RNA, 19 nt, Homo sapiens
  misc_RNA (1)...(19): siRNA sense strand
uggaaaagccucaggagca

SEQ ID NO: 2420363 - RNA, 19 nt, Homo sapiens
  misc_RNA (1)...(19): siRNA sense strand
ugucagaacagaaagagga

SEQ ID NO: 2420364 - RNA, 19 nt, Homo sapiens
  misc_RNA (1)...(19): siRNA sense strand
agagaagauaugauugaca

SEQ ID NO: 2420365 - RNA, 19 nt, Homo sapiens
  misc_RNA (1)...(19): siRNA sense strand
gacaacaccuaucaggcaa

SEQ ID NO: 2420366 - RNA, 19 nt, Homo sapiens
  misc_RNA (1)...(19): siRNA sense strand
gucagaacagaaagaggaa

SEQ ID NO: 2420367 - RNA, 19 nt, Homo sapiens
  misc_RNA (1)...(19): siRNA sense strand
ugaugaugucagaacagaa

SEQ ID NO: 2420368 - RNA, 19 nt, Homo sapiens
  misc_RNA (1)...(19): siRNA sense strand
acagaagcagagaagauau

SEQ ID NO: 2420369 - RNA, 19 nt, Homo sapiens
  misc_RNA (1)...(19): siRNA sense strand
ugucaauugaggagggaga

SEQ ID NO: 2420370 - RNA, 19 nt, Homo sapiens
  misc_RNA (1)...(19): siRNA sense strand
gggagagaggaaagccaaa

SEQ ID NO: 2420371 - RNA, 19 nt, Homo sapiens
  misc_RNA (1)...(19): siRNA sense strand
caucaugcuaguaggaaau

SEQ ID NO: 2420372 - RNA, 19 nt, Homo sapiens
  misc_RNA (1)...(19): siRNA sense strand
cagaacagaaagaggaagu

SEQ ID NO: 2420373 - RNA, 19 nt, Homo sapiens
  misc_RNA (1)...(19): siRNA sense strand
uugaggagggagagaggaa

SEQ ID NO: 2420374 - RNA, 19 nt, Homo sapiens
  misc_RNA (1)...(19): siRNA sense strand
gaggaaagccaaagagcug

SEQ ID NO: 2420375 - RNA, 19 nt, Homo sapiens
  misc_RNA (1)...(19): siRNA sense strand
uggaaaagccucaggagca

SEQ ID NO: 2420376 - RNA, 19 nt, Homo sapiens
  misc_RNA (1)...(19): siRNA sense strand
ugucagaacagaaagagga

SEQ ID NO: 2420377 - RNA, 19 nt, Homo sapiens
  misc_RNA (1)...(19): siRNA sense strand
agagaagauaugauugaca

SEQ ID NO: 2420378 - RNA, 19 nt, Homo sapiens
  misc_RNA (1)...(19): siRNA sense strand
gacaacaccuaucaggcaa

SEQ ID NO: 2420379 - RNA, 19 nt, Homo sapiens
  misc_RNA (1)...(19): siRNA sense strand
gucagaacagaaagaggaa

SEQ ID NO: 2420380 - RNA, 19 nt, Homo sapiens
  misc_RNA (1)...(19): siRNA sense strand
ugaugaugucagaacagaa

SEQ ID NO: 2420381 - RNA, 19 nt, Homo sapiens
  misc_RNA (1)...(19): siRNA sense strand
acagaagcagagaagauau

SEQ ID NO: 2420382 - RNA, 19 nt, Homo sapiens
  misc_RNA (1)...(19): siRNA sense strand
ggaaaagaacauauggaaa

SEQ ID NO: 2420383 - RNA, 19 nt, Homo sapiens
  misc_RNA (1)...(19): siRNA sense strand
gagaagaugaguaagggaa

SEQ ID NO: 2420384 - RNA, 19 nt, Homo sapiens
  misc_RNA (1)...(19): siRNA sense strand
agaagaaacuugaagagga

SEQ ID NO: 2420385 - RNA, 19 nt, Homo sapiens
  misc_RNA (1)...(19): siRNA sense strand
gguugauagaggagauaau

SEQ ID NO: 2420386 - RNA, 19 nt, Homo sapiens
  misc_RNA (1)...(19): siRNA sense strand
agugauggauuuaaggcaa

SEQ ID NO: 2420387 - RNA, 19 nt, Homo sapiens
  misc_RNA (1)...(19): siRNA sense strand
uggcaaaggaucagugcuu

SEQ ID NO: 2420388 - RNA, 19 nt, Homo sapiens
  misc_RNA (1)...(19): siRNA sense strand
gcaagaaggcuuuagcuga

SEQ ID NO: 2420389 - RNA, 19 nt, Homo sapiens
  misc_RNA (1)...(19): siRNA sense strand
uggcagaagaagcaggcaa

SEQ ID NO: 2420390 - RNA, 19 nt, Homo sapiens
  misc_RNA (1)...(19): siRNA sense strand
cauaaauccuaguggugga

SEQ ID NO: 2420391 - RNA, 19 nt, Homo sapiens
  misc_RNA (1)...(19): siRNA sense strand
gcacaaucacaauggcuga

SEQ ID NO: 2420392 - RNA, 19 nt, Homo sapiens
  misc_RNA (1)...(19): siRNA sense strand
ggguuugagaagaugagua

SEQ ID NO: 2420393 - RNA, 19 nt, Homo sapiens
  misc_RNA (1)...(19): siRNA sense strand
agauaauacauauggagga

SEQ ID NO: 2420394 - RNA, 19 nt, Homo sapiens
  misc_RNA (1)...(19): siRNA sense strand
accaaaugauauugacgua

SEQ ID NO: 2420395 - RNA, 19 nt, Homo sapiens
  misc_RNA (1)...(19): siRNA sense strand
cagaagaagcaggcaagaa

SEQ ID NO: 2420396 - RNA, 19 nt, Homo sapiens
  misc_RNA (1)...(19): siRNA sense strand
ugauagaggagauaauaca

SEQ ID NO: 2420397 - RNA, 19 nt, Homo sapiens
  misc_RNA (1)...(19): siRNA sense strand
gaacaguuugugaagaaaa

SEQ ID NO: 2420398 - RNA, 19 nt, Homo sapiens
  misc_RNA (1)...(19): siRNA sense strand
caacaauaacugugcuacu

SEQ ID NO: 2420399 - RNA, 19 nt, Homo sapiens
  misc_RNA (1)...(19): siRNA sense strand
ugauaugaguaaagaagcu

SEQ ID NO: 2420400 - RNA, 19 nt, Homo sapiens
  misc_RNA (1)...(19): siRNA sense strand
ccaaaugauauugacguaa

SEQ ID NO: 2420401 - RNA, 19 nt, Homo sapiens
  misc_RNA (1)...(19): siRNA sense strand
cagaaugugucuuggcucu

SEQ ID NO: 2420402 - RNA, 19 nt, Homo sapiens
  misc_RNA (1)...(19): siRNA sense strand
gauucagggugguguggca

SEQ ID NO: 2420403 - RNA, 19 nt, Homo sapiens
  misc_RNA (1)...(19): siRNA sense strand
caagaaaaugcuaugagaa

SEQ ID NO: 2420404 - RNA, 19 nt, Homo sapiens
  misc_RNA (1)...(19): siRNA sense strand
ggucauaaauccuaguggu

SEQ ID NO: 2420405 - RNA, 19 nt, Homo sapiens
  misc_RNA (1)...(19): siRNA sense strand
agggaagccuuggaauaaa

SEQ ID NO: 2420406 - RNA, 19 nt, Homo sapiens
  misc_RNA (1)...(19): siRNA sense strand
gcugcaaagcugaaggaaa

SEQ ID NO: 2420407 - RNA, 19 nt, Homo sapiens
  misc_RNA (1)...(19): siRNA sense strand
ccaacaaacaaaugaacaa

SEQ ID NO: 2420408 - RNA, 19 nt, Homo sapiens
  misc_RNA (1)...(19): siRNA sense strand
agauacaaccagugacaaa

SEQ ID NO: 2420409 - RNA, 19 nt, Homo sapiens
  misc_RNA (1)...(19): siRNA sense strand
gcaacaaagaggaagaaaa

SEQ ID NO: 2420410 - RNA, 19 nt, Homo sapiens
  misc_RNA (1)...(19): siRNA sense strand
gugaagaagaagagaggga

SEQ ID NO: 2420411 - RNA, 19 nt, Homo sapiens
  misc_RNA (1)...(19): siRNA sense strand
gugaaacagaacagauaaa

SEQ ID NO: 2420412 - RNA, 19 nt, Homo sapiens
  misc_RNA (1)...(19): siRNA sense strand
ugacaaagaugauucgcua

SEQ ID NO: 2420413 - RNA, 19 nt, Homo sapiens
  misc_RNA (1)...(19): siRNA sense strand
gaaaagagugauaggacaa

SEQ ID NO: 2420414 - RNA, 19 nt, Homo sapiens
  misc_RNA (1)...(19): siRNA sense strand
aggaagaggaagaagauga

SEQ ID NO: 2420415 - RNA, 19 nt, Homo sapiens
  misc_RNA (1)...(19): siRNA sense strand
aagagaaggcauagaucua

SEQ ID NO: 2420416 - RNA, 19 nt, Homo sapiens
  misc_RNA (1)...(19): siRNA sense strand
gaguaauggagaagagcuu

SEQ ID NO: 2420417 - RNA, 19 nt, Homo sapiens
  misc_RNA (1)...(19): siRNA sense strand
aagaagaugaagaggauga

SEQ ID NO: 2420418 - RNA, 19 nt, Homo sapiens
  misc_RNA (1)...(19): siRNA sense strand
agaaagaaagacagaccua

SEQ ID NO: 2420419 - RNA, 19 nt, Homo sapiens
  misc_RNA (1)...(19): siRNA sense strand
gcccauuaugaaagagaaa

SEQ ID NO: 2420420 - RNA, 19 nt, Homo sapiens
  misc_RNA (1)...(19): siRNA sense strand
uugcuaaagagaaaggaaa

SEQ ID NO: 2420421 - RNA, 19 nt, Homo sapiens
  misc_RNA (1)...(19): siRNA sense strand
agaccugaguaauggagaa

SEQ ID NO: 2420422 - RNA, 19 nt, Homo sapiens
  misc_RNA (1)...(19): siRNA sense strand
agaaggaagaggaagaaga

SEQ ID NO: 2420423 - RNA, 19 nt, Homo sapiens
  misc_RNA (1)...(19): siRNA sense strand
agaugaagaggaugaacaa

SEQ ID NO: 2420424 - RNA, 19 nt, Homo sapiens
  misc_RNA (1)...(19): siRNA sense strand
aagaagagggucaggauca

SEQ ID NO: 2420425 - RNA, 19 nt, Homo sapiens
  misc_RNA (1)...(19): siRNA sense strand
gugccaagcccaagcaaga

SEQ ID NO: 2420426 - RNA, 19 nt, Homo sapiens
  misc_RNA (1)...(19): siRNA sense strand
augaacaagaggaggaaaa

SEQ ID NO: 2420427 - RNA, 19 nt, Homo sapiens
  misc_RNA (1)...(19): siRNA sense strand
ucuccaagaaagugaagaa

SEQ ID NO: 2420428 - RNA, 19 nt, Homo sapiens
  misc_RNA (1)...(19): siRNA sense strand
cuggcagggauguggaaua

SEQ ID NO: 2420429 - RNA, 19 nt, Homo sapiens
  misc_RNA (1)...(19): siRNA sense strand
aaaagaaggaagaggaaga

SEQ ID NO: 2420430 - RNA, 19 nt, Homo sapiens
  misc_RNA (1)...(19): siRNA sense strand
aagaaagcccagaggcaga

SEQ ID NO: 2420431 - RNA, 19 nt, Homo sapiens
  misc_RNA (1)...(19): siRNA sense strand
aggaagaagaugaagagga

SEQ ID NO: 2420432 - RNA, 19 nt, Homo sapiens
  misc_RNA (1)...(19): siRNA sense strand
ugaacaaggaacuggugaa

SEQ ID NO: 2420433 - RNA, 19 nt, Homo sapiens
  misc_RNA (1)...(19): siRNA sense strand
ugaagaaagcccagaggca

SEQ ID NO: 2420434 - RNA, 19 nt, Homo sapiens
  misc_RNA (1)...(19): siRNA sense strand
ccaaaagaaaagauggcaa

SEQ ID NO: 2420435 - RNA, 19 nt, Homo sapiens
  misc_RNA (1)...(19): siRNA sense strand
cagauaaaugcaaagagaa

SEQ ID NO: 2420436 - RNA, 19 nt, Homo sapiens
  misc_RNA (1)...(19): siRNA sense strand
agucaaguucucagaguuu

SEQ ID NO: 2420437 - RNA, 19 nt, Homo sapiens
  misc_RNA (1)...(19): siRNA sense strand
gcccagaggcagagcuaca

SEQ ID NO: 2420438 - RNA, 19 nt, Homo sapiens
  misc_RNA (1)...(19): siRNA sense strand
aggcagagcuacacaacca

SEQ ID NO: 2420439 - RNA, 19 nt, Homo sapiens
  misc_RNA (1)...(19): siRNA sense strand
ugaagaaacuggcagggau

SEQ ID NO: 2420440 - RNA, 19 nt, Homo sapiens
  misc_RNA (1)...(19): siRNA sense strand
gcuaggaagccaacaaaca

SEQ ID NO: 2420441 - RNA, 19 nt, Homo sapiens
  misc_RNA (1)...(19): siRNA sense strand
cugaaaguccugauggaga

SEQ ID NO: 2420442 - RNA, 19 nt, Homo sapiens
  misc_RNA (1)...(19): siRNA sense strand
augaagaggaugaacaaga

SEQ ID NO: 2420443 - RNA, 19 nt, Homo sapiens
  misc_RNA (1)...(19): siRNA sense strand
gccaagaagccaagaagca

SEQ ID NO: 2420444 - RNA, 19 nt, Homo sapiens
  misc_RNA (1)...(19): siRNA sense strand
gaucuaaaguaaauggucu

SEQ ID NO: 2420445 - RNA, 19 nt, Homo sapiens
  misc_RNA (1)...(19): siRNA sense strand
agaaaagagugauaggaca

SEQ ID NO: 2420446 - RNA, 19 nt, Homo sapiens
  misc_RNA (1)...(19): siRNA sense strand
guguauacagagugaggau

SEQ ID NO: 2420447 - RNA, 19 nt, Homo sapiens
  misc_RNA (1)...(19): siRNA sense strand
aggaugaacaagaggagga

SEQ ID NO: 2420448 - RNA, 19 nt, Homo sapiens
  misc_RNA (1)...(19): siRNA sense strand
aagaaagugaagaagaaga

SEQ ID NO: 2420449 - RNA, 19 nt, Homo sapiens
  misc_RNA (1)...(19): siRNA sense strand
aagaauucccaaagaugaa

SEQ ID NO: 2420450 - RNA, 19 nt, Homo sapiens
  misc_RNA (1)...(19): siRNA sense strand
cuauauaaggagcgauuca

SEQ ID NO: 2420451 - RNA, 19 nt, Homo sapiens
  misc_RNA (1)...(19): siRNA sense strand
agaaagacagaccuagaaa

SEQ ID NO: 2420452 - RNA, 19 nt, Homo sapiens
  misc_RNA (1)...(19): siRNA sense strand
agacagaccuagaaaacau

SEQ ID NO: 2420453 - RNA, 19 nt, Homo sapiens
  misc_RNA (1)...(19): siRNA sense strand
aaagaaauaagguggagau

SEQ ID NO: 2420454 - RNA, 19 nt, Homo sapiens
  misc_RNA (1)...(19): siRNA sense strand
ugaaaguagucaagcaucu

SEQ ID NO: 2420455 - RNA, 19 nt, Homo sapiens
  misc_RNA (1)...(19): siRNA sense strand
aaagaagugcucagagaca

SEQ ID NO: 2420456 - RNA, 19 nt, Homo sapiens
  misc_RNA (1)...(19): siRNA sense strand
caguagcaaaugagaugaa

SEQ ID NO: 2420457 - RNA, 19 nt, Homo sapiens
  misc_RNA (1)...(19): siRNA sense strand
aagcaagcauggugagaag

SEQ ID NO: 2420458 - RNA, 19 nt, Homo sapiens
  misc_RNA (1)...(19): siRNA sense strand
ccaagaagccaagaagcaa

SEQ ID NO: 2420459 - RNA, 19 nt, Homo sapiens
  misc_RNA (1)...(19): siRNA sense strand
ggaaaaugaagaagaugau

SEQ ID NO: 2420460 - RNA, 19 nt, Homo sapiens
  misc_RNA (1)...(19): siRNA sense strand
ggcauagaucuaaaguaaa

SEQ ID NO: 2420461 - RNA, 19 nt, Homo sapiens
  misc_RNA (1)...(19): siRNA sense strand
aagaggaagaagaugaaga

SEQ ID NO: 2420462 - RNA, 19 nt, Homo sapiens
  misc_RNA (1)...(19): siRNA sense strand
ugcuaaagagaaaggaaaa

SEQ ID NO: 2420463 - RNA, 19 nt, Homo sapiens
  misc_RNA (1)...(19): siRNA sense strand
aagaugaagaggaugaaca

SEQ ID NO: 2420464 - RNA, 19 nt, Homo sapiens
  misc_RNA (1)...(19): siRNA sense strand
aggaaaaugaagaagauga

SEQ ID NO: 2420465 - RNA, 19 nt, Homo sapiens
  misc_RNA (1)...(19): siRNA sense strand
augaugauguagaggaaau

SEQ ID NO: 2420466 - RNA, 19 nt, Homo sapiens
  misc_RNA (1)...(19): siRNA sense strand
ugguugaggaugugaaauu

SEQ ID NO: 2420467 - RNA, 19 nt, Homo sapiens
  misc_RNA (1)...(19): siRNA sense strand
gagugaagugaaagaugaa

SEQ ID NO: 2420468 - RNA, 19 nt, Homo sapiens
  misc_RNA (1)...(19): siRNA sense strand
guugauaguucuucgguca

SEQ ID NO: 2420469 - RNA, 19 nt, Homo sapiens
  misc_RNA (1)...(19): siRNA sense strand
cuuaaagaagcaugagaga

SEQ ID NO: 2420470 - RNA, 19 nt, Homo sapiens
  misc_RNA (1)...(19): siRNA sense strand
aagaagacacagaggggaa

SEQ ID NO: 2420471 - RNA, 19 nt, Homo sapiens
  misc_RNA (1)...(19): siRNA sense strand
gugaagugaaagaugaaca

SEQ ID NO: 2420472 - RNA, 19 nt, Homo sapiens
  misc_RNA (1)...(19): siRNA sense strand
gaaguagaauccauggaga

SEQ ID NO: 2420473 - RNA, 19 nt, Homo sapiens
  misc_RNA (1)...(19): siRNA sense strand
caguaaugaaagaccguuu

SEQ ID NO: 2420474 - RNA, 19 nt, Homo sapiens
  misc_RNA (1)...(19): siRNA sense strand
ggagugaggaaguucggaa

SEQ ID NO: 2420475 - RNA, 19 nt, Homo sapiens
  misc_RNA (1)...(19): siRNA sense strand
aguauuugcuuuaugguca

SEQ ID NO: 2420476 - RNA, 19 nt, Homo sapiens
  misc_RNA (1)...(19): siRNA sense strand
auugaggaagcaugagaaa

SEQ ID NO: 2420477 - RNA, 19 nt, Homo sapiens
  misc_RNA (1)...(19): siRNA sense strand
cgagucaggaggacggcaa

SEQ ID NO: 2420478 - RNA, 19 nt, Homo sapiens
  misc_RNA (1)...(19): siRNA sense strand
acgccuggaaggagaauuu

SEQ ID NO: 2420479 - RNA, 19 nt, Homo sapiens
  misc_RNA (1)...(19): siRNA sense strand
gaggaaguucggaagguca

SEQ ID NO: 2420480 - RNA, 19 nt, Homo sapiens
  misc_RNA (1)...(19): siRNA sense strand
aggaaguucggaaggucaa

SEQ ID NO: 2420481 - RNA, 19 nt, Homo sapiens
  misc_RNA (1)...(19): siRNA sense strand
ugacacaguagaaggcaca

SEQ ID NO: 2420482 - RNA, 19 nt, Homo sapiens
  misc_RNA (1)...(19): siRNA sense strand
ucaugaaagaagacacaga

SEQ ID NO: 2420483 - RNA, 19 nt, Homo sapiens
  misc_RNA (1)...(19): siRNA sense strand
acacaggauauaagcccua

SEQ ID NO: 2420484 - RNA, 19 nt, Homo sapiens
  misc_RNA (1)...(19): siRNA sense strand
ugauauauuugaagagguc

SEQ ID NO: 2420485 - RNA, 19 nt, Homo sapiens
  misc_RNA (1)...(19): siRNA sense strand
cugcugacacccaggauga

SEQ ID NO: 2420486 - RNA, 19 nt, Homo sapiens
  misc_RNA (1)...(19): siRNA sense strand
cugugagguguguggaaaa

SEQ ID NO: 2420487 - RNA, 19 nt, Homo sapiens
  misc_RNA (1)...(19): siRNA sense strand
gggucagauucuugguauc

SEQ ID NO: 2420488 - RNA, 19 nt, Homo sapiens
  misc_RNA (1)...(19): siRNA sense strand
augaaggcagauugaggaa

SEQ ID NO: 2420489 - RNA, 19 nt, Homo sapiens
  misc_RNA (1)...(19): siRNA sense strand
gugaaaggaagcagguuac

SEQ ID NO: 2420490 - RNA, 19 nt, Homo sapiens
  misc_RNA (1)...(19): siRNA sense strand
ccuccaucgaugagaagaa

SEQ ID NO: 2420491 - RNA, 19 nt, Homo sapiens
  misc_RNA (1)...(19): siRNA sense strand
agaagaacaucaaggccuu

SEQ ID NO: 2420492 - RNA, 19 nt, Homo sapiens
  misc_RNA (1)...(19): siRNA sense strand
ggagaagaauccagagcag

SEQ ID NO: 2420493 - RNA, 19 nt, Homo sapiens
  misc_RNA (1)...(19): siRNA sense strand
gcuucaaguucgggcagaa

SEQ ID NO: 2420494 - RNA, 19 nt, Homo sapiens
  misc_RNA (1)...(19): siRNA sense strand
aaguaugggcggaagauca

SEQ ID NO: 2420495 - RNA, 19 nt, Homo sapiens
  misc_RNA (1)...(19): siRNA sense strand
gaugaaagccagagggugc

SEQ ID NO: 2420496 - RNA, 19 nt, Homo sapiens
  misc_RNA (1)...(19): siRNA sense strand
agaagaauccagagcagga

SEQ ID NO: 2420497 - RNA, 19 nt, Homo sapiens
  misc_RNA (1)...(19): siRNA sense strand
agacgcugcccgaggagaa

SEQ ID NO: 2420498 - RNA, 19 nt, Homo sapiens
  misc_RNA (1)...(19): siRNA sense strand
cgcaaguacaagaagaaca

SEQ ID NO: 2420499 - RNA, 19 nt, Homo sapiens
  misc_RNA (1)...(19): siRNA sense strand
acagcaagcuccuggggua

SEQ ID NO: 2420500 - RNA, 19 nt, Homo sapiens
  misc_RNA (1)...(19): siRNA sense strand
aguacaagaagaacaucaa

SEQ ID NO: 2420501 - RNA, 19 nt, Homo sapiens
  misc_RNA (1)...(19): siRNA sense strand
ucguggagguggcaggaga

SEQ ID NO: 2420502 - RNA, 19 nt, Homo sapiens
  misc_RNA (1)...(19): siRNA sense strand
gaccagaacaagaugacca

SEQ ID NO: 2420503 - RNA, 19 nt, Homo sapiens
  misc_RNA (1)...(19): siRNA sense strand
ccaucaacaccuucaccaa

SEQ ID NO: 2420504 - RNA, 19 nt, Homo sapiens
  misc_RNA (1)...(19): siRNA sense strand
ccgagguccaccagagcaa

SEQ ID NO: 2420505 - RNA, 19 nt, Homo sapiens
  misc_RNA (1)...(19): siRNA sense strand
gagaagugcugguuuggca

SEQ ID NO: 2420506 - RNA, 19 nt, Homo sapiens
  misc_RNA (1)...(19): siRNA sense strand
ccgccuucauccugcgcaa

SEQ ID NO: 2420507 - RNA, 19 nt, Homo sapiens
  misc_RNA (1)...(19): siRNA sense strand
ggaagcuguacuacgacaa

SEQ ID NO: 2420508 - RNA, 19 nt, Homo sapiens
  misc_RNA (1)...(19): siRNA sense strand
aggacaaggagaaggagaa

SEQ ID NO: 2420509 - RNA, 19 nt, Homo sapiens
  misc_RNA (1)...(19): siRNA sense strand
gcaaggagaagaaggccaa

SEQ ID NO: 2420510 - RNA, 19 nt, Homo sapiens
  misc_RNA (1)...(19): siRNA sense strand
agaaggagaagcagcgcaa

SEQ ID NO: 2420511 - RNA, 19 nt, Homo sapiens
  misc_RNA (1)...(19): siRNA sense strand
ccaagcagccagagcgaga

SEQ ID NO: 2420512 - RNA, 19 nt, Homo sapiens
  misc_RNA (1)...(19): siRNA sense strand
agaccagcaaagagaacaa

SEQ ID NO: 2420513 - RNA, 19 nt, Homo sapiens
  misc_RNA (1)...(19): siRNA sense strand
gagaccugcuggaaggcaa

SEQ ID NO: 2420514 - RNA, 19 nt, Homo sapiens
  misc_RNA (1)...(19): siRNA sense strand
acggcaaggacaaggagaa

SEQ ID NO: 2420515 - RNA, 19 nt, Homo sapiens
  misc_RNA (1)...(19): siRNA sense strand
acgaggagaugaucggcua

SEQ ID NO: 2420516 - RNA, 19 nt, Homo sapiens
  misc_RNA (1)...(19): siRNA sense strand
guuaagagacucaggugga

SEQ ID NO: 2420517 - RNA, 19 nt, Homo sapiens
  misc_RNA (1)...(19): siRNA sense strand
ggcaagaacggcaaggaca

SEQ ID NO: 2420518 - RNA, 19 nt, Homo sapiens
  misc_RNA (1)...(19): siRNA sense strand
gguucuggccuaugaucaa

SEQ ID NO: 2420519 - RNA, 19 nt, Homo sapiens
  misc_RNA (1)...(19): siRNA sense strand
cgcuagaagccaagcugaa

SEQ ID NO: 2420520 - RNA, 19 nt, Homo sapiens
  misc_RNA (1)...(19): siRNA sense strand
gagaagcagcgcaaggaga

SEQ ID NO: 2420521 - RNA, 19 nt, Homo sapiens
  misc_RNA (1)...(19): siRNA sense strand
agaauaaggaggaggagug

SEQ ID NO: 2420522 - RNA, 19 nt, Homo sapiens
  misc_RNA (1)...(19): siRNA sense strand
uguccauggaacagagaga

SEQ ID NO: 2420523 - RNA, 19 nt, Homo sapiens
  misc_RNA (1)...(19): siRNA sense strand
ccaucguuguuguggcaga

SEQ ID NO: 2420524 - RNA, 19 nt, Homo sapiens
  misc_RNA (1)...(19): siRNA sense strand
agcaauucuaacagcaaua

SEQ ID NO: 2420525 - RNA, 19 nt, Homo sapiens
  misc_RNA (1)...(19): siRNA sense strand
cgccugaacugguggucca

SEQ ID NO: 2420526 - RNA, 19 nt, Homo sapiens
  misc_RNA (1)...(19): siRNA sense strand
cgacauugcccaagaaaag

SEQ ID NO: 2420527 - RNA, 19 nt, Homo sapiens
  misc_RNA (1)...(19): siRNA sense strand
agcgcaaggagaaggacaa

SEQ ID NO: 2420528 - RNA, 19 nt, Homo sapiens
  misc_RNA (1)...(19): siRNA sense strand
auaaggaggaggaguggga

SEQ ID NO: 2420529 - RNA, 19 nt, Homo sapiens
  misc_RNA (1)...(19): siRNA sense strand
ggcaucaagcugaagaaaa

SEQ ID NO: 2420530 - RNA, 19 nt, Homo sapiens
  misc_RNA (1)...(19): siRNA sense strand
ggcaaggagaagaaggcca

SEQ ID NO: 2420531 - RNA, 19 nt, Homo sapiens
  misc_RNA (1)...(19): siRNA sense strand
gauucaaagcauucugcaa

SEQ ID NO: 2420532 - RNA, 19 nt, Homo sapiens
  misc_RNA (1)...(19): siRNA sense strand
cagaaaugcacuaagcagu

SEQ ID NO: 2420533 - RNA, 19 nt, Homo sapiens
  misc_RNA (1)...(19): siRNA sense strand
acucagauuggaauagaau

SEQ ID NO: 2420534 - RNA, 19 nt, Homo sapiens
  misc_RNA (1)...(19): siRNA sense strand
aaauagaaguacaggguca

SEQ ID NO: 2420535 - RNA, 19 nt, Homo sapiens
  misc_RNA (1)...(19): siRNA sense strand
ggauaaagauggaaggccu

SEQ ID NO: 2420536 - RNA, 19 nt, Homo sapiens
  misc_RNA (1)...(19): siRNA sense strand
gcuaaaagugguacagaaa

SEQ ID NO: 2420537 - RNA, 19 nt, Homo sapiens
  misc_RNA (1)...(19): siRNA sense strand
gagcuguagcagaaggaaa

SEQ ID NO: 2420538 - RNA, 19 nt, Homo sapiens
  misc_RNA (1)...(19): siRNA sense strand
aguggaaacuuguggaaaa

SEQ ID NO: 2420539 - RNA, 19 nt, Homo sapiens
  misc_RNA (1)...(19): siRNA sense strand
ggaaauaugaaaagccaaa

SEQ ID NO: 2420540 - RNA, 19 nt, Homo sapiens
  misc_RNA (1)...(19): siRNA sense strand
gaggagggaaagacagaaa

SEQ ID NO: 2420541 - RNA, 19 nt, Homo sapiens
  misc_RNA (1)...(19): siRNA sense strand
gaaauauuguacugggaca

SEQ ID NO: 2420542 - RNA, 19 nt, Homo sapiens
  misc_RNA (1)...(19): siRNA sense strand
auuaacuggaggagggaaa

SEQ ID NO: 2420543 - RNA, 19 nt, Homo sapiens
  misc_RNA (1)...(19): siRNA sense strand
agcaaaaggagcagaaaua

SEQ ID NO: 2420544 - RNA, 19 nt, Homo sapiens
  misc_RNA (1)...(19): siRNA sense strand
ggaaaagacaugagcauca

SEQ ID NO: 2420545 - RNA, 19 nt, Homo sapiens
  misc_RNA (1)...(19): siRNA sense strand
agaaggaucugaugggaca

SEQ ID NO: 2420546 - RNA, 19 nt, Homo sapiens
  misc_RNA (1)...(19): siRNA sense strand
caaaaggagcagaaauaaa

SEQ ID NO: 2420547 - RNA, 19 nt, Homo sapiens
  misc_RNA (1)...(19): siRNA sense strand
gaaugagacuguagcggau

SEQ ID NO: 2420548 - RNA, 19 nt, Homo sapiens
  misc_RNA (1)...(19): siRNA sense strand
ggugauagcuguugccgau

SEQ ID NO: 2420549 - RNA, 19 nt, Homo sapiens
  misc_RNA (1)...(19): siRNA sense strand
agaugauagccguaauaaa

SEQ ID NO: 2420550 - RNA, 19 nt, Homo sapiens
  misc_RNA (1)...(19): siRNA sense strand
ggaagaaaauauagcagau

SEQ ID NO: 2420551 - RNA, 19 nt, Homo sapiens
  misc_RNA (1)...(19): siRNA sense strand
ugugaaaugccuugcuaua

SEQ ID NO: 2420552 - RNA, 19 nt, Homo sapiens
  misc_RNA (1)...(19): siRNA sense strand
gcaaacaaaucaaagcuca

SEQ ID NO: 2420553 - RNA, 19 nt, Homo sapiens
  misc_RNA (1)...(19): siRNA sense strand
gaauccugaaagagaaaua

SEQ ID NO: 2420554 - RNA, 19 nt, Homo sapiens
  misc_RNA (1)...(19): siRNA sense strand
ccacaauagaaaggugaua

SEQ ID NO: 2420555 - RNA, 19 nt, Homo sapiens
  misc_RNA (1)...(19): siRNA sense strand
ggaacaaacuguggagcca

SEQ ID NO: 2420556 - RNA, 19 nt, Homo sapiens
  misc_RNA (1)...(19): siRNA sense strand
cuccaaauacacagacaaa

SEQ ID NO: 2420557 - RNA, 19 nt, Homo sapiens
  misc_RNA (1)...(19): siRNA sense strand
ugcuauacauccugacaaa

SEQ ID NO: 2420558 - RNA, 19 nt, Homo sapiens
  misc_RNA (1)...(19): siRNA sense strand
aaggaaaggcagaucaauu

SEQ ID NO: 2420559 - RNA, 19 nt, Homo sapiens
  misc_RNA (1)...(19): siRNA sense strand
augaaaucacugugcuaaa

SEQ ID NO: 2420560 - RNA, 19 nt, Homo sapiens
  misc_RNA (1)...(19): siRNA sense strand
cuguauaaccaauggaagu

SEQ ID NO: 2420561 - RNA, 19 nt, Homo sapiens
  misc_RNA (1)...(19): siRNA sense strand
ccaaauacacagacaaacu

SEQ ID NO: 2420562 - RNA, 19 nt, Homo sapiens
  misc_RNA (1)...(19): siRNA sense strand
agaugaaaucacugugcua

SEQ ID NO: 2420563 - RNA, 19 nt, Homo sapiens
  misc_RNA (1)...(19): siRNA sense strand
guguauaucaaaucagcaa

SEQ ID NO: 2420564 - RNA, 19 nt, Homo sapiens
  misc_RNA (1)...(19): siRNA sense strand
ucauguggccucagugaaa

SEQ ID NO: 2420565 - RNA, 19 nt, Homo sapiens
  misc_RNA (1)...(19): siRNA sense strand
cugaauccugaaagagaaa

SEQ ID NO: 2420566 - RNA, 19 nt, Homo sapiens
  misc_RNA (1)...(19): siRNA sense strand
ugcagaaaccagagaucua

SEQ ID NO: 2420567 - RNA, 19 nt, Homo sapiens
  misc_RNA (1)...(19): siRNA sense strand
gcugaagaggaaaguagaa

SEQ ID NO: 2420568 - RNA, 19 nt, Homo sapiens
  misc_RNA (1)...(19): siRNA sense strand
agaaggaaaggcagaucaa

SEQ ID NO: 2420569 - RNA, 19 nt, Homo sapiens
  misc_RNA (1)...(19): siRNA sense strand
caauggaaguggugcaaac

SEQ ID NO: 2420570 - RNA, 19 nt, Homo sapiens
  misc_RNA (1)...(19): siRNA sense strand
uggagugggcauaugguua

SEQ ID NO: 2420571 - RNA, 19 nt, Homo sapiens
  misc_RNA (1)...(19): siRNA sense strand
agauagcuggcguggauaa

SEQ ID NO: 2420572 - RNA, 19 nt, Homo sapiens
  misc_RNA (1)...(19): siRNA sense strand
acagcgaggaggagaguga

SEQ ID NO: 2420573 - RNA, 19 nt, Homo sapiens
  misc_RNA (1)...(19): siRNA sense strand
agucucaaguaaaggccaa

SEQ ID NO: 2420574 - RNA, 19 nt, Homo sapiens
  misc_RNA (1)...(19): siRNA sense strand
cgggagacuaugaaauauu

SEQ ID NO: 2420575 - RNA, 19 nt, Homo sapiens
  misc_RNA (1)...(19): siRNA sense strand
uggaaguggugcaaacaga

SEQ ID NO: 2420576 - RNA, 19 nt, Homo sapiens
  misc_RNA (1)...(19): siRNA sense strand
gaguaggaugccuggauuu

SEQ ID NO: 2420577 - RNA, 19 nt, Homo sapiens
  misc_RNA (1)...(19): siRNA sense strand
uagcagaaggaaaggcaga

SEQ ID NO: 2420578 - RNA, 19 nt, Homo sapiens
  misc_RNA (1)...(19): siRNA sense strand
cgaucggauuguaaggaca

SEQ ID NO: 2420579 - RNA, 19 nt, Homo sapiens
  misc_RNA (1)...(19): siRNA sense strand
cggcaauucacuaacaaga

SEQ ID NO: 2420580 - RNA, 19 nt, Homo sapiens
  misc_RNA (1)...(19): siRNA sense strand
cugcaaacuaaucaggaau

SEQ ID NO: 2420581 - RNA, 19 nt, Homo sapiens
  misc_RNA (1)...(19): siRNA sense strand
caucaaccaagaaggagaa

SEQ ID NO: 2420582 - RNA, 19 nt, Homo sapiens
  misc_RNA (1)...(19): siRNA sense strand
gaagaaagcaaaaggagca

SEQ ID NO: 2420583 - RNA, 19 nt, Homo sapiens
  misc_RNA (1)...(19): siRNA sense strand
ggacauugauuggacgaca

SEQ ID NO: 2420584 - RNA, 19 nt, Homo sapiens
  misc_RNA (1)...(19): siRNA sense strand
ggacagauaucaaugcacu

SEQ ID NO: 2420585 - RNA, 19 nt, Homo sapiens
  misc_RNA (1)...(19): siRNA sense strand
ccuucaacacccaaauuaa

SEQ ID NO: 2420586 - RNA, 19 nt, Homo sapiens
  misc_RNA (1)...(19): siRNA sense strand
caaacaaaucaaagcucau

SEQ ID NO: 2420587 - RNA, 19 nt, Homo sapiens
  misc_RNA (1)...(19): siRNA sense strand
ugaucugaauccugaaaga

SEQ ID NO: 2420588 - RNA, 19 nt, Homo sapiens
  misc_RNA (1)...(19): siRNA sense strand
gacauauaccugugugcua

SEQ ID NO: 2420589 - RNA, 19 nt, Homo sapiens
  misc_RNA (1)...(19): siRNA sense strand
ggaaaguagaauaagcagu

SEQ ID NO: 2420590 - RNA, 19 nt, Homo sapiens
  misc_RNA (1)...(19): siRNA sense strand
ggagaacagccuggaacaa

SEQ ID NO: 2420591 - RNA, 19 nt, Homo sapiens
  misc_RNA (1)...(19): siRNA sense strand
ggagcagaaauaaagacaa

SEQ ID NO: 2420592 - RNA, 19 nt, Homo sapiens
  misc_RNA (1)...(19): siRNA sense strand
uaacaagaaaacagggaau

SEQ ID NO: 2420593 - RNA, 19 nt, Homo sapiens
  misc_RNA (1)...(19): siRNA sense strand
ccuaaagguguauaucaaa

SEQ ID NO: 2420594 - RNA, 19 nt, Homo sapiens
  misc_RNA (1)...(19): siRNA sense strand
ccaaauagaaguacagggu

SEQ ID NO: 2420595 - RNA, 19 nt, Homo sapiens
  misc_RNA (1)...(19): siRNA sense strand
cucugaaaauggaagaaaa

SEQ ID NO: 2420596 - RNA, 19 nt, Homo sapiens
  misc_RNA (1)...(19): siRNA sense strand
ucaucaaccaagaaggaga

SEQ ID NO: 2420597 - RNA, 19 nt, Homo sapiens
  misc_RNA (1)...(19): siRNA sense strand
ucugaauccugaaagagaa

SEQ ID NO: 2420598 - RNA, 19 nt, Homo sapiens
  misc_RNA (1)...(19): siRNA sense strand
uggcacaaucagagcugua

SEQ ID NO: 2420599 - RNA, 19 nt, Homo sapiens
  misc_RNA (1)...(19): siRNA sense strand
agggagagguggugaauua

SEQ ID NO: 2420600 - RNA, 19 nt, Homo sapiens
  misc_RNA (1)...(19): siRNA sense strand
ggaaagaagaagaacggaa

SEQ ID NO: 2420601 - RNA, 19 nt, Homo sapiens
  misc_RNA (1)...(19): siRNA sense strand
ggccaaagggaaagaagaa

SEQ ID NO: 2420602 - RNA, 19 nt, Homo sapiens
  misc_RNA (1)...(19): siRNA sense strand
ugacaguacacgugggcaa

SEQ ID NO: 2420603 - RNA, 19 nt, Homo sapiens
  misc_RNA (1)...(19): siRNA sense strand
aagaagaacggaaggaaca

SEQ ID NO: 2420604 - RNA, 19 nt, Homo sapiens
  misc_RNA (1)...(19): siRNA sense strand
ccaaagggaaagaagaaga

SEQ ID NO: 2420605 - RNA, 19 nt, Homo sapiens
  misc_RNA (1)...(19): siRNA sense strand
caggagaagcccaggccaa

SEQ ID NO: 2420606 - RNA, 19 nt, Homo sapiens
  misc_RNA (1)...(19): siRNA sense strand
gcaagggagagguggugaa

SEQ ID NO: 2420607 - RNA, 19 nt, Homo sapiens
  misc_RNA (1)...(19): siRNA sense strand
gggccaaagggaaagaaga

SEQ ID NO: 2420608 - RNA, 19 nt, Homo sapiens
  misc_RNA (1)...(19): siRNA sense strand
gcucgguguuugaggcaga

SEQ ID NO: 2420609 - RNA, 19 nt, Homo sapiens
  misc_RNA (1)...(19): siRNA sense strand
caaagggaaagaagaagaa

SEQ ID NO: 2420610 - RNA, 19 nt, Homo sapiens
  misc_RNA (1)...(19): siRNA sense strand
ggcugaagauggaaacauu

SEQ ID NO: 2420611 - RNA, 19 nt, Homo sapiens
  misc_RNA (1)...(19): siRNA sense strand
gcuuuaacagcaagggaga

SEQ ID NO: 2420612 - RNA, 19 nt, Homo sapiens
  misc_RNA (1)...(19): siRNA sense strand
gcuucgagauccugggcuu

SEQ ID NO: 2420613 - RNA, 19 nt, Homo sapiens
  misc_RNA (1)...(19): siRNA sense strand
agauugggguagaggacaa

SEQ ID NO: 2420614 - RNA, 19 nt, Homo sapiens
  misc_RNA (1)...(19): siRNA sense strand
agacggcagugguggaaaa

SEQ ID NO: 2420615 - RNA, 19 nt, Homo sapiens
  misc_RNA (1)...(19): siRNA sense strand
gaagaagaacggaaggaac

SEQ ID NO: 2420616 - RNA, 19 nt, Homo sapiens
  misc_RNA (1)...(19): siRNA sense strand
auaaauugaagcuggugaa

SEQ ID NO: 2420617 - RNA, 19 nt, Homo sapiens
  misc_RNA (1)...(19): siRNA sense strand
cggcagugguggaaaagau

SEQ ID NO: 2420618 - RNA, 19 nt, Homo sapiens
  misc_RNA (1)...(19): siRNA sense strand
agccauuacagcaggagaa

SEQ ID NO: 2420619 - RNA, 19 nt, Homo sapiens
  misc_RNA (1)...(19): siRNA sense strand
cgacgaggauuccagguga

SEQ ID NO: 2420620 - RNA, 19 nt, Homo sapiens
  misc_RNA (1)...(19): siRNA sense strand
ggacaggcgagaaggcagu

SEQ ID NO: 2420621 - RNA, 19 nt, Homo sapiens
  misc_RNA (1)...(19): siRNA sense strand
ccugaaacacccagaguac

SEQ ID NO: 2420622 - RNA, 19 nt, Homo sapiens
  misc_RNA (1)...(19): siRNA sense strand
ggaauguggacucugggaa

SEQ ID NO: 2420623 - RNA, 19 nt, Homo sapiens
  misc_RNA (1)...(19): siRNA sense strand
gaaagaagaagaacggaag

SEQ ID NO: 2420624 - RNA, 19 nt, Homo sapiens
  misc_RNA (1)...(19): siRNA sense strand
aggaggaacucaugcagca

SEQ ID NO: 2420625 - RNA, 19 nt, Homo sapiens
  misc_RNA (1)...(19): siRNA sense strand
agaagaagaacggaaggaa

SEQ ID NO: 2420626 - RNA, 19 nt, Homo sapiens
  misc_RNA (1)...(19): siRNA sense strand
gaagauggaaacauugaau

SEQ ID NO: 2420627 - RNA, 19 nt, Homo sapiens
  misc_RNA (1)...(19): siRNA sense strand
uggugagcccggagaugaa

SEQ ID NO: 2420628 - RNA, 19 nt, Homo sapiens
  misc_RNA (1)...(19): siRNA sense strand
cggccaugucacugaugua

SEQ ID NO: 2420629 - RNA, 19 nt, Homo sapiens
  misc_RNA (1)...(19): siRNA sense strand
gaauauaaauugaagcugg

SEQ ID NO: 2420630 - RNA, 19 nt, Homo sapiens
  misc_RNA (1)...(19): siRNA sense strand
guggauuaugauagcgaca

SEQ ID NO: 2420631 - RNA, 19 nt, Homo sapiens
  misc_RNA (1)...(19): siRNA sense strand
ccgaggcugaagauggaaa

SEQ ID NO: 2420632 - RNA, 19 nt, Homo sapiens
  misc_RNA (1)...(19): siRNA sense strand
uguuugaggcagagauagu

SEQ ID NO: 2420633 - RNA, 19 nt, Homo sapiens
  misc_RNA (1)...(19): siRNA sense strand
agauccaugccaaggacaa

SEQ ID NO: 2420634 - RNA, 19 nt, Homo sapiens
  misc_RNA (1)...(19): siRNA sense strand
ggacagaaguugcuggguu

SEQ ID NO: 2420635 - RNA, 19 nt, Homo sapiens
  misc_RNA (1)...(19): siRNA sense strand
acuucaaacagcagcaaua

SEQ ID NO: 2420636 - RNA, 19 nt, Homo sapiens
  misc_RNA (1)...(19): siRNA sense strand
aggaaacaguacagccaga

SEQ ID NO: 2420637 - RNA, 19 nt, Homo sapiens
  misc_RNA (1)...(19): siRNA sense strand
gagcagugacagugaugca

SEQ ID NO: 2420638 - RNA, 19 nt, Homo sapiens
  misc_RNA (1)...(19): siRNA sense strand
ugaugcagguuguagguca

SEQ ID NO: 2420639 - RNA, 19 nt, Homo sapiens
  misc_RNA (1)...(19): siRNA sense strand
gaugcagguuguaggucau

SEQ ID NO: 2420640 - RNA, 19 nt, Homo sapiens
  misc_RNA (1)...(19): siRNA sense strand
ugguuuacgucuuggaucu

SEQ ID NO: 2420641 - RNA, 19 nt, Homo sapiens
  misc_RNA (1)...(19): siRNA sense strand
ugauauuaggcaagaugau

SEQ ID NO: 2420642 - RNA, 19 nt, Homo sapiens
  misc_RNA (1)...(19): siRNA sense strand
ugcuacaauaguugguaaa

SEQ ID NO: 2420643 - RNA, 19 nt, Homo sapiens
  misc_RNA (1)...(19): siRNA sense strand
agaugauagaacagcugaa

SEQ ID NO: 2420644 - RNA, 19 nt, Homo sapiens
  misc_RNA (1)...(19): siRNA sense strand
ggaccaagcccuacagcag

SEQ ID NO: 2420645 - RNA, 19 nt, Homo sapiens
  misc_RNA (1)...(19): siRNA sense strand
gugugcagauucagggaca

SEQ ID NO: 2420646 - RNA, 19 nt, Homo sapiens
  misc_RNA (1)...(19): siRNA sense strand
gugcagaaccuacuggaga

SEQ ID NO: 2420647 - RNA, 19 nt, Homo sapiens
  misc_RNA (1)...(19): siRNA sense strand
cagucagccacguggaaau

SEQ ID NO: 2420648 - RNA, 19 nt, Homo sapiens
  misc_RNA (1)...(19): siRNA sense strand
auucagggacagaggauca

SEQ ID NO: 2420649 - RNA, 19 nt, Homo sapiens
  misc_RNA (1)...(19): siRNA sense strand
ugagguuagaagaagcaaa

SEQ ID NO: 2420650 - RNA, 19 nt, Homo sapiens
  misc_RNA (1)...(19): siRNA sense strand
gaacauuccugcuggcaag

SEQ ID NO: 2420651 - RNA, 19 nt, Homo sapiens
  misc_RNA (1)...(19): siRNA sense strand
agaaccuacuggagacaca

SEQ ID NO: 2420652 - RNA, 19 nt, Homo sapiens
  misc_RNA (1)...(19): siRNA sense strand
gagaagacgcuacucgaga

SEQ ID NO: 2420653 - RNA, 19 nt, Homo sapiens
  misc_RNA (1)...(19): siRNA sense strand
agcaggaacaggagauuga

SEQ ID NO: 2420654 - RNA, 19 nt, Homo sapiens
  misc_RNA (1)...(19): siRNA sense strand
gagucaaauacaaaaggaa

SEQ ID NO: 2420655 - RNA, 19 nt, Homo sapiens
  misc_RNA (1)...(19): siRNA sense strand
gcggagagccauagagcac

SEQ ID NO: 2420656 - RNA, 19 nt, Homo sapiens
  misc_RNA (1)...(19): siRNA sense strand
agguuacugaagagcaaua

SEQ ID NO: 2420657 - RNA, 19 nt, Homo sapiens
  misc_RNA (1)...(19): siRNA sense strand
gggccacaucgcagccaaa

SEQ ID NO: 2420658 - RNA, 19 nt, Homo sapiens
  misc_RNA (1)...(19): siRNA sense strand
augauagacacgaugaaau

SEQ ID NO: 2420659 - RNA, 19 nt, Homo sapiens
  misc_RNA (1)...(19): siRNA sense strand
cugaagagcaauagccacu

SEQ ID NO: 2420660 - RNA, 19 nt, Homo sapiens
  misc_RNA (1)...(19): siRNA sense strand
aaacuuaucuugcuggaca

SEQ ID NO: 2420661 - RNA, 19 nt, Homo sapiens
  misc_RNA (1)...(19): siRNA sense strand
uguggaagucccaggcaau

SEQ ID NO: 2420662 - RNA, 19 nt, Homo sapiens
  misc_RNA (1)...(19): siRNA sense strand
ucaggaagcugcaggccca

SEQ ID NO: 2420663 - RNA, 19 nt, Homo sapiens
  misc_RNA (1)...(19): siRNA sense strand
gagugagauccgaagaguu

SEQ ID NO: 2420664 - RNA, 19 nt, Homo sapiens
  misc_RNA (1)...(19): siRNA sense strand
gggugaaggcuauggagga

SEQ ID NO: 2420665 - RNA, 19 nt, Homo sapiens
  misc_RNA (1)...(19): siRNA sense strand
aggcuauggaggauguaua

SEQ ID NO: 2420666 - RNA, 19 nt, Homo sapiens
  misc_RNA (1)...(19): siRNA sense strand
gaaaauaccugcaacguca

SEQ ID NO: 2420667 - RNA, 19 nt, Homo sapiens
  misc_RNA (1)...(19): siRNA sense strand
agcaaauacuccaggacca

SEQ ID NO: 2420668 - RNA, 19 nt, Homo sapiens
  misc_RNA (1)...(19): siRNA sense strand
agcagaaggaguacagauu

SEQ ID NO: 2420669 - RNA, 19 nt, Homo sapiens
  misc_RNA (1)...(19): siRNA sense strand
cagcagaaggaguacagau

SEQ ID NO: 2420670 - RNA, 19 nt, Homo sapiens
  misc_RNA (1)...(19): siRNA sense strand
ccccgaagcacgugagauu

SEQ ID NO: 2420671 - RNA, 19 nt, Homo sapiens
  misc_RNA (1)...(19): siRNA sense strand
cuucugucuuuauggaaau

SEQ ID NO: 2420672 - RNA, 19 nt, Homo sapiens
  misc_RNA (1)...(19): siRNA sense strand
acauggaaugccagcaaau

SEQ ID NO: 2420673 - RNA, 19 nt, Homo sapiens
  misc_RNA (1)...(19): siRNA sense strand
uggcaguccaaacaggaaa

SEQ ID NO: 2420674 - RNA, 19 nt, Homo sapiens
  misc_RNA (1)...(19): siRNA sense strand
gaggugacaugcuggcaga

SEQ ID NO: 2420675 - RNA, 19 nt, Homo sapiens
  misc_RNA (1)...(19): siRNA sense strand
gugaugaggccuaugacca

SEQ ID NO: 2420676 - RNA, 19 nt, Homo sapiens
  misc_RNA (1)...(19): siRNA sense strand
acuacagauucaacgguga

SEQ ID NO: 2420677 - RNA, 19 nt, Homo sapiens
  misc_RNA (1)...(19): siRNA sense strand
gggugaaggcuauggagga

SEQ ID NO: 2420678 - RNA, 19 nt, Homo sapiens
  misc_RNA (1)...(19): siRNA sense strand
aggcuauggaggauguaua

SEQ ID NO: 2420679 - RNA, 19 nt, Homo sapiens
  misc_RNA (1)...(19): siRNA sense strand
gaaaauaccugcaacguca

SEQ ID NO: 2420680 - RNA, 19 nt, Homo sapiens
  misc_RNA (1)...(19): siRNA sense strand
agcaaauacuccaggacca

SEQ ID NO: 2420681 - RNA, 19 nt, Homo sapiens
  misc_RNA (1)...(19): siRNA sense strand
agcagaaggaguacagauu

SEQ ID NO: 2420682 - RNA, 19 nt, Homo sapiens
  misc_RNA (1)...(19): siRNA sense strand
cagcagaaggaguacagau

SEQ ID NO: 2420683 - RNA, 19 nt, Homo sapiens
  misc_RNA (1)...(19): siRNA sense strand
ccccgaagcacgugagauu

SEQ ID NO: 2420684 - RNA, 19 nt, Homo sapiens
  misc_RNA (1)...(19): siRNA sense strand
cuucugucuuuauggaaau

SEQ ID NO: 2420685 - RNA, 19 nt, Homo sapiens
  misc_RNA (1)...(19): siRNA sense strand
acauggaaugccagcaaau

SEQ ID NO: 2420686 - RNA, 19 nt, Homo sapiens
  misc_RNA (1)...(19): siRNA sense strand
uggcaguccaaacaggaaa

SEQ ID NO: 2420687 - RNA, 19 nt, Homo sapiens
  misc_RNA (1)...(19): siRNA sense strand
gaggugacaugcuggcaga

SEQ ID NO: 2420688 - RNA, 19 nt, Homo sapiens
  misc_RNA (1)...(19): siRNA sense strand
gugaugaggccuaugacca

SEQ ID NO: 2420689 - RNA, 19 nt, Homo sapiens
  misc_RNA (1)...(19): siRNA sense strand
acuacagauucaacgguga

SEQ ID NO: 2420690 - RNA, 19 nt, Homo sapiens
  misc_RNA (1)...(19): siRNA sense strand
ggaugaagcugguggugca

SEQ ID NO: 2420691 - RNA, 19 nt, Homo sapiens
  misc_RNA (1)...(19): siRNA sense strand
agcaagagcuggaggacga

SEQ ID NO: 2420692 - RNA, 19 nt, Homo sapiens
  misc_RNA (1)...(19): siRNA sense strand
caucaugauccgagagagu

SEQ ID NO: 2420693 - RNA, 19 nt, Homo sapiens
  misc_RNA (1)...(19): siRNA sense strand
acuacaaggaccagcuuaa

SEQ ID NO: 2420694 - RNA, 19 nt, Homo sapiens
  misc_RNA (1)...(19): siRNA sense strand
gugagaaauuugaacgguu

SEQ ID NO: 2420695 - RNA, 19 nt, Homo sapiens
  misc_RNA (1)...(19): siRNA sense strand
ccaucaagucgcugcggaa

SEQ ID NO: 2420696 - RNA, 19 nt, Homo sapiens
  misc_RNA (1)...(19): siRNA sense strand
aaacagaggaggaggcacu

SEQ ID NO: 2420697 - RNA, 19 nt, Homo sapiens
  misc_RNA (1)...(19): siRNA sense strand
augaguaccuguauggcaa

SEQ ID NO: 2420698 - RNA, 19 nt, Homo sapiens
  misc_RNA (1)...(19): siRNA sense strand
ggcaugaaguccaggagca

SEQ ID NO: 2420699 - RNA, 19 nt, Homo sapiens
  misc_RNA (1)...(19): siRNA sense strand
cggaagaaggccacagugu

SEQ ID NO: 2420700 - RNA, 19 nt, Homo sapiens
  misc_RNA (1)...(19): siRNA sense strand
gugaaagggccuacaccau

SEQ ID NO: 2420701 - RNA, 19 nt, Homo sapiens
  misc_RNA (1)...(19): siRNA sense strand
gcgugaagaagcucaucaa

SEQ ID NO: 2420702 - RNA, 19 nt, Homo sapiens
  misc_RNA (1)...(19): siRNA sense strand
cgugagagcuggaaaacca

SEQ ID NO: 2420703 - RNA, 19 nt, Homo sapiens
  misc_RNA (1)...(19): siRNA sense strand
acguuaaguuugagggcag

SEQ ID NO: 2420704 - RNA, 19 nt, Homo sapiens
  misc_RNA (1)...(19): siRNA sense strand
ccauggaauucuggaccaa

SEQ ID NO: 2420705 - RNA, 19 nt, Homo sapiens
  misc_RNA (1)...(19): siRNA sense strand
gaggagaaucagagcguug

SEQ ID NO: 2420706 - RNA, 19 nt, Homo sapiens
  misc_RNA (1)...(19): siRNA sense strand
cagcaggggaagacuaaua

SEQ ID NO: 2420707 - RNA, 19 nt, Homo sapiens
  misc_RNA (1)...(19): siRNA sense strand
ggaagaaggccacaguguu

SEQ ID NO: 2420708 - RNA, 19 nt, Homo sapiens
  misc_RNA (1)...(19): siRNA sense strand
uggagaagaucuuggagcu

SEQ ID NO: 2420709 - RNA, 19 nt, Homo sapiens
  misc_RNA (1)...(19): siRNA sense strand
gaaucaaccgcgagcgugu

SEQ ID NO: 2420710 - RNA, 19 nt, Homo sapiens
  misc_RNA (1)...(19): siRNA sense strand
gaagaaggccacaguguuc

SEQ ID NO: 2420711 - RNA, 19 nt, Homo sapiens
  misc_RNA (1)...(19): siRNA sense strand
gcagcaaagugaacgccga

SEQ ID NO: 2420712 - RNA, 19 nt, Homo sapiens
  misc_RNA (1)...(19): siRNA sense strand
guucagacaccaucgccaa

SEQ ID NO: 2420713 - RNA, 19 nt, Homo sapiens
  misc_RNA (1)...(19): siRNA sense strand
aggaggaggcacugaagca

SEQ ID NO: 2420714 - RNA, 19 nt, Homo sapiens
  misc_RNA (1)...(19): siRNA sense strand
cgagugaaguuuaacgaag

SEQ ID NO: 2420715 - RNA, 19 nt, Homo sapiens
  misc_RNA (1)...(19): siRNA sense strand
augugaaagagcugggaaa

SEQ ID NO: 2420716 - RNA, 19 nt, Homo sapiens
  misc_RNA (1)...(19): siRNA sense strand
ggacacuaguggagcacca

SEQ ID NO: 2420717 - RNA, 19 nt, Homo sapiens
  misc_RNA (1)...(19): siRNA sense strand
gaaugaaacuaaagagcug

SEQ ID NO: 2420718 - RNA, 19 nt, Homo sapiens
  misc_RNA (1)...(19): siRNA sense strand
gugcagaggacgagcaaac

SEQ ID NO: 2420719 - RNA, 19 nt, Homo sapiens
  misc_RNA (1)...(19): siRNA sense strand
gugaaagagcugggaaaga

SEQ ID NO: 2420720 - RNA, 19 nt, Homo sapiens
  misc_RNA (1)...(19): siRNA sense strand
ggacaagcaaaguggugga

SEQ ID NO: 2420721 - RNA, 19 nt, Homo sapiens
  misc_RNA (1)...(19): siRNA sense strand
cagucaaauggcagucaaa

SEQ ID NO: 2420722 - RNA, 19 nt, Homo sapiens
  misc_RNA (1)...(19): siRNA sense strand
gggcaaacaggacgcguga

SEQ ID NO: 2420723 - RNA, 19 nt, Homo sapiens
  misc_RNA (1)...(19): siRNA sense strand
aagcaaagugguggagauu

SEQ ID NO: 2420724 - RNA, 19 nt, Homo sapiens
  misc_RNA (1)...(19): siRNA sense strand
cagaguaauccaaaggcau

SEQ ID NO: 2420725 - RNA, 19 nt, Homo sapiens
  misc_RNA (1)...(19): siRNA sense strand
cuucaaaggaacccagaca

SEQ ID NO: 2420726 - RNA, 19 nt, Homo sapiens
  misc_RNA (1)...(19): siRNA sense strand
ugaagaugggacaagcaaa

SEQ ID NO: 2420727 - RNA, 19 nt, Homo sapiens
  misc_RNA (1)...(19): siRNA sense strand
ccauggccagugagaguaa

SEQ ID NO: 2420728 - RNA, 19 nt, Homo sapiens
  misc_RNA (1)...(19): siRNA sense strand
cuuuagugaagaugggaca

SEQ ID NO: 2420729 - RNA, 19 nt, Homo sapiens
  misc_RNA (1)...(19): siRNA sense strand
aggacaagguggagcagac

SEQ ID NO: 2420730 - RNA, 19 nt, Homo sapiens
  misc_RNA (1)...(19): siRNA sense strand
agccaaacaaagucaggaa

SEQ ID NO: 2420731 - RNA, 19 nt, Homo sapiens
  misc_RNA (1)...(19): siRNA sense strand
guaguaaggacaaggugga

SEQ ID NO: 2420732 - RNA, 19 nt, Homo sapiens
  misc_RNA (1)...(19): siRNA sense strand
ugauagagaauccggcaga

SEQ ID NO: 2420733 - RNA, 19 nt, Homo sapiens
  misc_RNA (1)...(19): siRNA sense strand
aagucaggaaugaaacuaa

SEQ ID NO: 2420734 - RNA, 19 nt, Homo sapiens
  misc_RNA (1)...(19): siRNA sense strand
ccagaguaauccaaaggca

SEQ ID NO: 2420735 - RNA, 19 nt, Homo sapiens
  misc_RNA (1)...(19): siRNA sense strand
guaaggacaagguggagca

SEQ ID NO: 2420736 - RNA, 19 nt, Homo sapiens
  misc_RNA (1)...(19): siRNA sense strand
aggaggaagaccagcaguu

SEQ ID NO: 2420737 - RNA, 19 nt, Homo sapiens
  misc_RNA (1)...(19): siRNA sense strand
cgcaaagcaggauguuaaa

SEQ ID NO: 2420738 - RNA, 19 nt, Homo sapiens
  misc_RNA (1)...(19): siRNA sense strand
gcaccuaggauuagagagg

SEQ ID NO: 2420739 - RNA, 19 nt, Homo sapiens
  misc_RNA (1)...(19): siRNA sense strand
cagccuagaugacgggaac

SEQ ID NO: 2420740 - RNA, 19 nt, Homo sapiens
  misc_RNA (1)...(19): siRNA sense strand
cggugaagcgggugcucaa

SEQ ID NO: 2420741 - RNA, 19 nt, Homo sapiens
  misc_RNA (1)...(19): siRNA sense strand
cguccuacaugguggggaa

SEQ ID NO: 2420742 - RNA, 19 nt, Homo sapiens
  misc_RNA (1)...(19): siRNA sense strand
uggaaaaguggcugaagaa

SEQ ID NO: 2420743 - RNA, 19 nt, Homo sapiens
  misc_RNA (1)...(19): siRNA sense strand
gcgauguccaccugggcaa

SEQ ID NO: 2420744 - RNA, 19 nt, Homo sapiens
  misc_RNA (1)...(19): siRNA sense strand
aggagaaggaggagaagcu

SEQ ID NO: 2420745 - RNA, 19 nt, Homo sapiens
  misc_RNA (1)...(19): siRNA sense strand
cugcguggcccuggagaaa

SEQ ID NO: 2420746 - RNA, 19 nt, Homo sapiens
  misc_RNA (1)...(19): siRNA sense strand
gcugauugacauuggcuca

SEQ ID NO: 2420747 - RNA, 19 nt, Homo sapiens
  misc_RNA (1)...(19): siRNA sense strand
gugaugaguaccagaagca

SEQ ID NO: 2420748 - RNA, 19 nt, Homo sapiens
  misc_RNA (1)...(19): siRNA sense strand
gcuguagccuugaugccua

SEQ ID NO: 2420749 - RNA, 19 nt, Homo sapiens
  misc_RNA (1)...(19): siRNA sense strand
cuggaaaaguggcugaaga

SEQ ID NO: 2420750 - RNA, 19 nt, Homo sapiens
  misc_RNA (1)...(19): siRNA sense strand
gaugggaggagaaggagga

SEQ ID NO: 2420751 - RNA, 19 nt, Homo sapiens
  misc_RNA (1)...(19): siRNA sense strand
gugaagaugacguggcuaa

SEQ ID NO: 2420752 - RNA, 19 nt, Homo sapiens
  misc_RNA (1)...(19): siRNA sense strand
ggacuauagcucaaguaaa

SEQ ID NO: 2420753 - RNA, 19 nt, Homo sapiens
  misc_RNA (1)...(19): siRNA sense strand
gugaaaaggaagaaguuua

SEQ ID NO: 2420754 - RNA, 19 nt, Homo sapiens
  misc_RNA (1)...(19): siRNA sense strand
ccauuaugcacuugauuua

SEQ ID NO: 2420755 - RNA, 19 nt, Homo sapiens
  misc_RNA (1)...(19): siRNA sense strand
aaagaaagcaacaggauca

SEQ ID NO: 2420756 - RNA, 19 nt, Homo sapiens
  misc_RNA (1)...(19): siRNA sense strand
acuuaaaugaacugggcaa

SEQ ID NO: 2420757 - RNA, 19 nt, Homo sapiens
  misc_RNA (1)...(19): siRNA sense strand
uggaaacauggcagaaaua

SEQ ID NO: 2420758 - RNA, 19 nt, Homo sapiens
  misc_RNA (1)...(19): siRNA sense strand
gcuaaucaggaaauagaua

SEQ ID NO: 2420759 - RNA, 19 nt, Homo sapiens
  misc_RNA (1)...(19): siRNA sense strand
ggaagaagacuuggagaca

SEQ ID NO: 2420760 - RNA, 19 nt, Homo sapiens
  misc_RNA (1)...(19): siRNA sense strand
gaaguauauuugagaacca

SEQ ID NO: 2420761 - RNA, 19 nt, Homo sapiens
  misc_RNA (1)...(19): siRNA sense strand
auacagacugagagaguuu

SEQ ID NO: 2420762 - RNA, 19 nt, Homo sapiens
  misc_RNA (1)...(19): siRNA sense strand
gguuuagucaggaggauuu

SEQ ID NO: 2420763 - RNA, 19 nt, Homo sapiens
  misc_RNA (1)...(19): siRNA sense strand
uggcuauauuggaaacuua

SEQ ID NO: 2420764 - RNA, 19 nt, Homo sapiens
  misc_RNA (1)...(19): siRNA sense strand
gggcaagaugauaaugcaa

SEQ ID NO: 2420765 - RNA, 19 nt, Homo sapiens
  misc_RNA (1)...(19): siRNA sense strand
gcagaaugaugaaaagcaa

SEQ ID NO: 2420766 - RNA, 19 nt, Homo sapiens
  misc_RNA (1)...(19): siRNA sense strand
gcaaauaaguggugacugg

SEQ ID NO: 2420767 - RNA, 19 nt, Homo sapiens
  misc_RNA (1)...(19): siRNA sense strand
aggacauucucuuuggaaa

SEQ ID NO: 2420768 - RNA, 19 nt, Homo sapiens
  misc_RNA (1)...(19): siRNA sense strand
caauuaacagaacgggaua

SEQ ID NO: 2420769 - RNA, 19 nt, Homo sapiens
  misc_RNA (1)...(19): siRNA sense strand
guucacagacauuggauuu

SEQ ID NO: 2420770 - RNA, 19 nt, Homo sapiens
  misc_RNA (1)...(19): siRNA sense strand
ggaaugucuucuagcuaau

SEQ ID NO: 2420771 - RNA, 19 nt, Homo sapiens
  misc_RNA (1)...(19): siRNA sense strand
gcggaauggucaagcaacu

SEQ ID NO: 2420772 - RNA, 19 nt, Homo sapiens
  misc_RNA (1)...(19): siRNA sense strand
ggaaguuugagcaggauuu

SEQ ID NO: 2420773 - RNA, 19 nt, Homo sapiens
  misc_RNA (1)...(19): siRNA sense strand
uggaaaggaaggaugauuu

SEQ ID NO: 2420774 - RNA, 19 nt, Homo sapiens
  misc_RNA (1)...(19): siRNA sense strand
cuagaaugucaucggcaaa

SEQ ID NO: 2420775 - RNA, 19 nt, Homo sapiens
  misc_RNA (1)...(19): siRNA sense strand
aaacaagggaagaagacuu

SEQ ID NO: 2420776 - RNA, 19 nt, Homo sapiens
  misc_RNA (1)...(19): siRNA sense strand
gcguguugaaaguggagaa

SEQ ID NO: 2420777 - RNA, 19 nt, Homo sapiens
  misc_RNA (1)...(19): siRNA sense strand
acuagaaugucaucggcaa

SEQ ID NO: 2420778 - RNA, 19 nt, Homo sapiens
  misc_RNA (1)...(19): siRNA sense strand
gggaagaagacuuggagac

SEQ ID NO: 2420779 - RNA, 19 nt, Homo sapiens
  misc_RNA (1)...(19): siRNA sense strand
cuguaaccaaagaaggaaa

SEQ ID NO: 2420780 - RNA, 19 nt, Homo sapiens
  misc_RNA (1)...(19): siRNA sense strand
ccagaggugcaaugagcua

SEQ ID NO: 2420781 - RNA, 19 nt, Homo sapiens
  misc_RNA (1)...(19): siRNA sense strand
ugauacagacugagagagu

SEQ ID NO: 2420782 - RNA, 19 nt, Homo sapiens
  misc_RNA (1)...(19): siRNA sense strand
cagaaacaauuuggaggaa

SEQ ID NO: 2420783 - RNA, 19 nt, Homo sapiens
  misc_RNA (1)...(19): siRNA sense strand
caucuaaacaagggaagaa

SEQ ID NO: 2420784 - RNA, 19 nt, Homo sapiens
  misc_RNA (1)...(19): siRNA sense strand
cuaaagaagaugcucagaa

SEQ ID NO: 2420785 - RNA, 19 nt, Homo sapiens
  misc_RNA (1)...(19): siRNA sense strand
ugucaggagaagagaaguu

SEQ ID NO: 2420786 - RNA, 19 nt, Homo sapiens
  misc_RNA (1)...(19): siRNA sense strand
acaagaaaggugcuacaaa

SEQ ID NO: 2420787 - RNA, 19 nt, Homo sapiens
  misc_RNA (1)...(19): siRNA sense strand
gcuugugacugaaguugaa

SEQ ID NO: 2420788 - RNA, 19 nt, Homo sapiens
  misc_RNA (1)...(19): siRNA sense strand
cuaaaugaacugauacaga

SEQ ID NO: 2420789 - RNA, 19 nt, Homo sapiens
  misc_RNA (1)...(19): siRNA sense strand
caguucaggcagaagcaaa

SEQ ID NO: 2420790 - RNA, 19 nt, Homo sapiens
  misc_RNA (1)...(19): siRNA sense strand
gauaagcaugugaggccaa

SEQ ID NO: 2420791 - RNA, 19 nt, Homo sapiens
  misc_RNA (1)...(19): siRNA sense strand
ggagacaaaaucagagcaa

SEQ ID NO: 2420792 - RNA, 19 nt, Homo sapiens
  misc_RNA (1)...(19): siRNA sense strand
aaauugaaguggugccuga

SEQ ID NO: 2420793 - RNA, 19 nt, Homo sapiens
  misc_RNA (1)...(19): siRNA sense strand
ggacauucucuuuggaaac

SEQ ID NO: 2420794 - RNA, 19 nt, Homo sapiens
  misc_RNA (1)...(19): siRNA sense strand
gcaucagauugcaauaaau

SEQ ID NO: 2420795 - RNA, 19 nt, Homo sapiens
  misc_RNA (1)...(19): siRNA sense strand
auacauugaugacaagcaa

SEQ ID NO: 2420796 - RNA, 19 nt, Homo sapiens
  misc_RNA (1)...(19): siRNA sense strand
aagaaauggcucagauguu

SEQ ID NO: 2420797 - RNA, 19 nt, Homo sapiens
  misc_RNA (1)...(19): siRNA sense strand
agaacuaccagaugauauu

SEQ ID NO: 2420798 - RNA, 19 nt, Homo sapiens
  misc_RNA (1)...(19): siRNA sense strand
uuugauggauuuugggaaa

SEQ ID NO: 2420799 - RNA, 19 nt, Homo sapiens
  misc_RNA (1)...(19): siRNA sense strand
gggacuauagcucaaguaa

SEQ ID NO: 2420800 - RNA, 19 nt, Homo sapiens
  misc_RNA (1)...(19): siRNA sense strand
aggcccaguuugugauauu

SEQ ID NO: 2420801 - RNA, 19 nt, Homo sapiens
  misc_RNA (1)...(19): siRNA sense strand
ggaugaaguuggaaucacu

SEQ ID NO: 2420802 - RNA, 19 nt, Homo sapiens
  misc_RNA (1)...(19): siRNA sense strand
cagaacuaccagaugauau

SEQ ID NO: 2420803 - RNA, 19 nt, Homo sapiens
  misc_RNA (1)...(19): siRNA sense strand
agacaaaaucagagcaacu

SEQ ID NO: 2420804 - RNA, 19 nt, Homo sapiens
  misc_RNA (1)...(19): siRNA sense strand
cugaauauguaaaagguga

SEQ ID NO: 2420805 - RNA, 19 nt, Homo sapiens
  misc_RNA (1)...(19): siRNA sense strand
cugaacuggcugagacaga

SEQ ID NO: 2420806 - RNA, 19 nt, Homo sapiens
  misc_RNA (1)...(19): siRNA sense strand
aauaaguggugacuggcaa

SEQ ID NO: 2420807 - RNA, 19 nt, Homo sapiens
  misc_RNA (1)...(19): siRNA sense strand
caggaaugucaaagaaagu

SEQ ID NO: 2420808 - RNA, 19 nt, Homo sapiens
  misc_RNA (1)...(19): siRNA sense strand
acacagacuuagacuggau

SEQ ID NO: 2420809 - RNA, 19 nt, Homo sapiens
  misc_RNA (1)...(19): siRNA sense strand
aguuggaaucacugaauau

SEQ ID NO: 2420810 - RNA, 19 nt, Homo sapiens
  misc_RNA (1)...(19): siRNA sense strand
cugaagaaccugcggaaug

SEQ ID NO: 2420811 - RNA, 19 nt, Homo sapiens
  misc_RNA (1)...(19): siRNA sense strand
cagugaaagaaauggcuca

SEQ ID NO: 2420812 - RNA, 19 nt, Homo sapiens
  misc_RNA (1)...(19): siRNA sense strand
ucuucuagcuaaucaggaa

SEQ ID NO: 2420813 - RNA, 19 nt, Homo sapiens
  misc_RNA (1)...(19): siRNA sense strand
aggaagaugaagaggaaga

SEQ ID NO: 2420814 - RNA, 19 nt, Homo sapiens
  misc_RNA (1)...(19): siRNA sense strand
agaagaagauaaagagcga

SEQ ID NO: 2420815 - RNA, 19 nt, Homo sapiens
  misc_RNA (1)...(19): siRNA sense strand
augaagaggaagaugaaga

SEQ ID NO: 2420816 - RNA, 19 nt, Homo sapiens
  misc_RNA (1)...(19): siRNA sense strand
ggaagaaguuugagcugcu

SEQ ID NO: 2420817 - RNA, 19 nt, Homo sapiens
  misc_RNA (1)...(19): siRNA sense strand
aagaugaugaagaggaaga

SEQ ID NO: 2420818 - RNA, 19 nt, Homo sapiens
  misc_RNA (1)...(19): siRNA sense strand
ccaaaggcuaagagcuuga

SEQ ID NO: 2420819 - RNA, 19 nt, Homo sapiens
  misc_RNA (1)...(19): siRNA sense strand
aggcaagacagcagcaguu

SEQ ID NO: 2420820 - RNA, 19 nt, Homo sapiens
  misc_RNA (1)...(19): siRNA sense strand
ccccaaaggcuaagagcuu

SEQ ID NO: 2420821 - RNA, 19 nt, Homo sapiens
  misc_RNA (1)...(19): siRNA sense strand
ggacagugagcgucgcaga

SEQ ID NO: 2420822 - RNA, 19 nt, Homo sapiens
  misc_RNA (1)...(19): siRNA sense strand
augaugaagaugaugaaga

SEQ ID NO: 2420823 - RNA, 19 nt, Homo sapiens
  misc_RNA (1)...(19): siRNA sense strand
augaugaagaggaagauga

SEQ ID NO: 2420824 - RNA, 19 nt, Homo sapiens
  misc_RNA (1)...(19): siRNA sense strand
agaugaugaagaugaugaa

SEQ ID NO: 2420825 - RNA, 19 nt, Homo sapiens
  misc_RNA (1)...(19): siRNA sense strand
augaagaggaagaaaucga

SEQ ID NO: 2420826 - RNA, 19 nt, Homo sapiens
  misc_RNA (1)...(19): siRNA sense strand
acaacauccuggagcgcca

SEQ ID NO: 2420827 - RNA, 19 nt, Homo sapiens
  misc_RNA (1)...(19): siRNA sense strand
gagaggacacccugagcga

SEQ ID NO: 2420828 - RNA, 19 nt, Homo sapiens
  misc_RNA (1)...(19): siRNA sense strand
agaugcugcuugagaacga

SEQ ID NO: 2420829 - RNA, 19 nt, Homo sapiens
  misc_RNA (1)...(19): siRNA sense strand
aggaagaaaucgacguggu

SEQ ID NO: 2420830 - RNA, 19 nt, Homo sapiens
  misc_RNA (1)...(19): siRNA sense strand
gggcaugaucugcaagaac

SEQ ID NO: 2420831 - RNA, 19 nt, Homo sapiens
  misc_RNA (1)...(19): siRNA sense strand
gaaagaacuuggaaggcaa

SEQ ID NO: 2420832 - RNA, 19 nt, Homo sapiens
  misc_RNA (1)...(19): siRNA sense strand
agccagagcuccagccaga

SEQ ID NO: 2420833 - RNA, 19 nt, Homo sapiens
  misc_RNA (1)...(19): siRNA sense strand
gcggagcucaggauggaaa

SEQ ID NO: 2420834 - RNA, 19 nt, Homo sapiens
  misc_RNA (1)...(19): siRNA sense strand
agaaagaacuuggaaggca

SEQ ID NO: 2420835 - RNA, 19 nt, Homo sapiens
  misc_RNA (1)...(19): siRNA sense strand
ugccaaaccuucagccaga

SEQ ID NO: 2420836 - RNA, 19 nt, Homo sapiens
  misc_RNA (1)...(19): siRNA sense strand
ccagaagaucagaguguaa

SEQ ID NO: 2420837 - RNA, 19 nt, Homo sapiens
  misc_RNA (1)...(19): siRNA sense strand
auaaagaaucagagggaga

SEQ ID NO: 2420838 - RNA, 19 nt, Homo sapiens
  misc_RNA (1)...(19): siRNA sense strand
agaagaaagaacaggauau

SEQ ID NO: 2420839 - RNA, 19 nt, Homo sapiens
  misc_RNA (1)...(19): siRNA sense strand
gagaagaaucugaugguga

SEQ ID NO: 2420840 - RNA, 19 nt, Homo sapiens
  misc_RNA (1)...(19): siRNA sense strand
agggagaagaagaggauga

SEQ ID NO: 2420841 - RNA, 19 nt, Homo sapiens
  misc_RNA (1)...(19): siRNA sense strand
agauaaagaaucagaggga

SEQ ID NO: 2420842 - RNA, 19 nt, Homo sapiens
  misc_RNA (1)...(19): siRNA sense strand
ccugagaggaacagaaaga

SEQ ID NO: 2420843 - RNA, 19 nt, Homo sapiens
  misc_RNA (1)...(19): siRNA sense strand
aggaaagacacuugcagaa

SEQ ID NO: 2420844 - RNA, 19 nt, Homo sapiens
  misc_RNA (1)...(19): siRNA sense strand
agaaaagagccgaggccua

SEQ ID NO: 2420845 - RNA, 19 nt, Homo sapiens
  misc_RNA (1)...(19): siRNA sense strand
gagaagaagaggaugagga

SEQ ID NO: 2420846 - RNA, 19 nt, Homo sapiens
  misc_RNA (1)...(19): siRNA sense strand
uagaugaggaugaggauga

SEQ ID NO: 2420847 - RNA, 19 nt, Homo sapiens
  misc_RNA (1)...(19): siRNA sense strand
aaucagagggagaagaaga

SEQ ID NO: 2420848 - RNA, 19 nt, Homo sapiens
  misc_RNA (1)...(19): siRNA sense strand
ucgauguggucgggagaaa

SEQ ID NO: 2420849 - RNA, 19 nt, Homo sapiens
  misc_RNA (1)...(19): siRNA sense strand
agaaucagagggagaagaa

SEQ ID NO: 2420850 - RNA, 19 nt, Homo sapiens
  misc_RNA (1)...(19): siRNA sense strand
gugaauugggccagaagau

SEQ ID NO: 2420851 - RNA, 19 nt, Homo sapiens
  misc_RNA (1)...(19): siRNA sense strand
aguucaaggucuaggucca

SEQ ID NO: 2420852 - RNA, 19 nt, Homo sapiens
  misc_RNA (1)...(19): siRNA sense strand
ggccagaagaucagagugu

SEQ ID NO: 2420853 - RNA, 19 nt, Homo sapiens
  misc_RNA (1)...(19): siRNA sense strand
agaagaucagaguguaaua

SEQ ID NO: 2420854 - RNA, 19 nt, Homo sapiens
  misc_RNA (1)...(19): siRNA sense strand
uagaagaaagaacaggaua

SEQ ID NO: 2420855 - RNA, 19 nt, Homo sapiens
  misc_RNA (1)...(19): siRNA sense strand
ugaugaguuuggacguaaa

SEQ ID NO: 2420856 - RNA, 19 nt, Homo sapiens
  misc_RNA (1)...(19): siRNA sense strand
agaagaagaggaugaggau

SEQ ID NO: 2420857 - RNA, 19 nt, Homo sapiens
  misc_RNA (1)...(19): siRNA sense strand
cccucaaguucaaggucua

SEQ ID NO: 2420858 - RNA, 19 nt, Homo sapiens
  misc_RNA (1)...(19): siRNA sense strand
gggucgaaaucaagaucca

SEQ ID NO: 2420859 - RNA, 19 nt, Homo sapiens
  misc_RNA (1)...(19): siRNA sense strand
auaaguuagaugaggauga

SEQ ID NO: 2420860 - RNA, 19 nt, Homo sapiens
  misc_RNA (1)...(19): siRNA sense strand
ucucgugggucgaaaucaa

SEQ ID NO: 2420861 - RNA, 19 nt, Homo sapiens
  misc_RNA (1)...(19): siRNA sense strand
ugagaggaacagaaagaga

SEQ ID NO: 2420862 - RNA, 19 nt, Homo sapiens
  misc_RNA (1)...(19): siRNA sense strand
agaaaacaacugaggccaa

SEQ ID NO: 2420863 - RNA, 19 nt, Homo sapiens
  misc_RNA (1)...(19): siRNA sense strand
aggauaugguggugguuuu

SEQ ID NO: 2420864 - RNA, 19 nt, Homo sapiens
  misc_RNA (1)...(19): siRNA sense strand
aggaaguugaagauaaaga

SEQ ID NO: 2420865 - RNA, 19 nt, Homo sapiens
  misc_RNA (1)...(19): siRNA sense strand
uagaagaaccagcuguaau

SEQ ID NO: 2420866 - RNA, 19 nt, Homo sapiens
  misc_RNA (1)...(19): siRNA sense strand
accaagaauuuccgaguca

SEQ ID NO: 2420867 - RNA, 19 nt, Homo sapiens
  misc_RNA (1)...(19): siRNA sense strand
guaaacuuugcuagaagaa

SEQ ID NO: 2420868 - RNA, 19 nt, Homo sapiens
  misc_RNA (1)...(19): siRNA sense strand
cagaguguaauauguguaa

SEQ ID NO: 2420869 - RNA, 19 nt, Homo sapiens
  misc_RNA (1)...(19): siRNA sense strand
auacagagggaaagcaguu

SEQ ID NO: 2420870 - RNA, 19 nt, Homo sapiens
  misc_RNA (1)...(19): siRNA sense strand
cagugaagaagaagauagu

SEQ ID NO: 2420871 - RNA, 19 nt, Homo sapiens
  misc_RNA (1)...(19): siRNA sense strand
agagggagaagaagaggau

SEQ ID NO: 2420872 - RNA, 19 nt, Homo sapiens
  misc_RNA (1)...(19): siRNA sense strand
cacugaaauaggaaagaca

SEQ ID NO: 2420873 - RNA, 19 nt, Homo sapiens
  misc_RNA (1)...(19): siRNA sense strand
gguggugguuuuaaugaaa

SEQ ID NO: 2420874 - RNA, 19 nt, Homo sapiens
  misc_RNA (1)...(19): siRNA sense strand
aggaugaagaugacgcuga

SEQ ID NO: 2420875 - RNA, 19 nt, Homo sapiens
  misc_RNA (1)...(19): siRNA sense strand
cuccaaaguaugcuaaauu

SEQ ID NO: 2420876 - RNA, 19 nt, Homo sapiens
  misc_RNA (1)...(19): siRNA sense strand
ccagagaacguucgagauc

SEQ ID NO: 2420877 - RNA, 19 nt, Homo sapiens
  misc_RNA (1)...(19): siRNA sense strand
cugaaauaggaaagacacu

SEQ ID NO: 2420878 - RNA, 19 nt, Homo sapiens
  misc_RNA (1)...(19): siRNA sense strand
cuaaugacuggcaauguaa

SEQ ID NO: 2420879 - RNA, 19 nt, Homo sapiens
  misc_RNA (1)...(19): siRNA sense strand
aggaugaggaugaagaucu

SEQ ID NO: 2420880 - RNA, 19 nt, Homo sapiens
  misc_RNA (1)...(19): siRNA sense strand
ccagaagaucagaguguaa

SEQ ID NO: 2420881 - RNA, 19 nt, Homo sapiens
  misc_RNA (1)...(19): siRNA sense strand
auaaagaaucagagggaga

SEQ ID NO: 2420882 - RNA, 19 nt, Homo sapiens
  misc_RNA (1)...(19): siRNA sense strand
agaagaaagaacaggauau

SEQ ID NO: 2420883 - RNA, 19 nt, Homo sapiens
  misc_RNA (1)...(19): siRNA sense strand
gagaagaaucugaugguga

SEQ ID NO: 2420884 - RNA, 19 nt, Homo sapiens
  misc_RNA (1)...(19): siRNA sense strand
agggagaagaagaggauga

SEQ ID NO: 2420885 - RNA, 19 nt, Homo sapiens
  misc_RNA (1)...(19): siRNA sense strand
agauaaagaaucagaggga

SEQ ID NO: 2420886 - RNA, 19 nt, Homo sapiens
  misc_RNA (1)...(19): siRNA sense strand
ccugagaggaacagaaaga

SEQ ID NO: 2420887 - RNA, 19 nt, Homo sapiens
  misc_RNA (1)...(19): siRNA sense strand
aggaaagacacuugcagaa

SEQ ID NO: 2420888 - RNA, 19 nt, Homo sapiens
  misc_RNA (1)...(19): siRNA sense strand
agaaaagagccgaggccua

SEQ ID NO: 2420889 - RNA, 19 nt, Homo sapiens
  misc_RNA (1)...(19): siRNA sense strand
gagaagaagaggaugagga

SEQ ID NO: 2420890 - RNA, 19 nt, Homo sapiens
  misc_RNA (1)...(19): siRNA sense strand
uagaugaggaugaggauga

SEQ ID NO: 2420891 - RNA, 19 nt, Homo sapiens
  misc_RNA (1)...(19): siRNA sense strand
aaucagagggagaagaaga

SEQ ID NO: 2420892 - RNA, 19 nt, Homo sapiens
  misc_RNA (1)...(19): siRNA sense strand
ucgauguggucgggagaaa

SEQ ID NO: 2420893 - RNA, 19 nt, Homo sapiens
  misc_RNA (1)...(19): siRNA sense strand
agaaucagagggagaagaa

SEQ ID NO: 2420894 - RNA, 19 nt, Homo sapiens
  misc_RNA (1)...(19): siRNA sense strand
gugaauugggccagaagau

SEQ ID NO: 2420895 - RNA, 19 nt, Homo sapiens
  misc_RNA (1)...(19): siRNA sense strand
aguucaaggucuaggucca

SEQ ID NO: 2420896 - RNA, 19 nt, Homo sapiens
  misc_RNA (1)...(19): siRNA sense strand
ggccagaagaucagagugu

SEQ ID NO: 2420897 - RNA, 19 nt, Homo sapiens
  misc_RNA (1)...(19): siRNA sense strand
agaagaucagaguguaaua

SEQ ID NO: 2420898 - RNA, 19 nt, Homo sapiens
  misc_RNA (1)...(19): siRNA sense strand
uagaagaaagaacaggaua

SEQ ID NO: 2420899 - RNA, 19 nt, Homo sapiens
  misc_RNA (1)...(19): siRNA sense strand
ugaugaguuuggacguaaa

SEQ ID NO: 2420900 - RNA, 19 nt, Homo sapiens
  misc_RNA (1)...(19): siRNA sense strand
agaagaagaggaugaggau

SEQ ID NO: 2420901 - RNA, 19 nt, Homo sapiens
  misc_RNA (1)...(19): siRNA sense strand
cccucaaguucaaggucua

SEQ ID NO: 2420902 - RNA, 19 nt, Homo sapiens
  misc_RNA (1)...(19): siRNA sense strand
gggucgaaaucaagaucca

SEQ ID NO: 2420903 - RNA, 19 nt, Homo sapiens
  misc_RNA (1)...(19): siRNA sense strand
auaaguuagaugaggauga

SEQ ID NO: 2420904 - RNA, 19 nt, Homo sapiens
  misc_RNA (1)...(19): siRNA sense strand
ucucgugggucgaaaucaa

SEQ ID NO: 2420905 - RNA, 19 nt, Homo sapiens
  misc_RNA (1)...(19): siRNA sense strand
ugagaggaacagaaagaga

SEQ ID NO: 2420906 - RNA, 19 nt, Homo sapiens
  misc_RNA (1)...(19): siRNA sense strand
agaaaacaacugaggccaa

SEQ ID NO: 2420907 - RNA, 19 nt, Homo sapiens
  misc_RNA (1)...(19): siRNA sense strand
aggauaugguggugguuuu

SEQ ID NO: 2420908 - RNA, 19 nt, Homo sapiens
  misc_RNA (1)...(19): siRNA sense strand
aggaaguugaagauaaaga

SEQ ID NO: 2420909 - RNA, 19 nt, Homo sapiens
  misc_RNA (1)...(19): siRNA sense strand
uagaagaaccagcuguaau

SEQ ID NO: 2420910 - RNA, 19 nt, Homo sapiens
  misc_RNA (1)...(19): siRNA sense strand
accaagaauuuccgaguca

SEQ ID NO: 2420911 - RNA, 19 nt, Homo sapiens
  misc_RNA (1)...(19): siRNA sense strand
guaaacuuugcuagaagaa

SEQ ID NO: 2420912 - RNA, 19 nt, Homo sapiens
  misc_RNA (1)...(19): siRNA sense strand
cagaguguaauauguguaa

SEQ ID NO: 2420913 - RNA, 19 nt, Homo sapiens
  misc_RNA (1)...(19): siRNA sense strand
auacagagggaaagcaguu

SEQ ID NO: 2420914 - RNA, 19 nt, Homo sapiens
  misc_RNA (1)...(19): siRNA sense strand
cagugaagaagaagauagu

SEQ ID NO: 2420915 - RNA, 19 nt, Homo sapiens
  misc_RNA (1)...(19): siRNA sense strand
agagggagaagaagaggau

SEQ ID NO: 2420916 - RNA, 19 nt, Homo sapiens
  misc_RNA (1)...(19): siRNA sense strand
cacugaaauaggaaagaca

SEQ ID NO: 2420917 - RNA, 19 nt, Homo sapiens
  misc_RNA (1)...(19): siRNA sense strand
gguggugguuuuaaugaaa

SEQ ID NO: 2420918 - RNA, 19 nt, Homo sapiens
  misc_RNA (1)...(19): siRNA sense strand
aggaugaagaugacgcuga

SEQ ID NO: 2420919 - RNA, 19 nt, Homo sapiens
  misc_RNA (1)...(19): siRNA sense strand
cuccaaaguaugcuaaauu

SEQ ID NO: 2420920 - RNA, 19 nt, Homo sapiens
  misc_RNA (1)...(19): siRNA sense strand
ccagagaacguucgagauc

SEQ ID NO: 2420921 - RNA, 19 nt, Homo sapiens
  misc_RNA (1)...(19): siRNA sense strand
cugaaauaggaaagacacu

SEQ ID NO: 2420922 - RNA, 19 nt, Homo sapiens
  misc_RNA (1)...(19): siRNA sense strand
cuaaugacuggcaauguaa

SEQ ID NO: 2420923 - RNA, 19 nt, Homo sapiens
  misc_RNA (1)...(19): siRNA sense strand
aggaugaggaugaagaucu

SEQ ID NO: 2420924 - RNA, 19 nt, Homo sapiens
  misc_RNA (1)...(19): siRNA sense strand
uggagaaaauggagaaaca

SEQ ID NO: 2420925 - RNA, 19 nt, Homo sapiens
  misc_RNA (1)...(19): siRNA sense strand
auggagaaacacaggaaau

SEQ ID NO: 2420926 - RNA, 19 nt, Homo sapiens
  misc_RNA (1)...(19): siRNA sense strand
cuaguaaaccaguggcaga

SEQ ID NO: 2420927 - RNA, 19 nt, Homo sapiens
  misc_RNA (1)...(19): siRNA sense strand
acaaagugacaguggcuga

SEQ ID NO: 2420928 - RNA, 19 nt, Homo sapiens
  misc_RNA (1)...(19): siRNA sense strand
ugacaguggcugaaguaca

SEQ ID NO: 2420929 - RNA, 19 nt, Homo sapiens
  misc_RNA (1)...(19): siRNA sense strand
cgggagcagcaaugggaau

SEQ ID NO: 2420930 - RNA, 19 nt, Homo sapiens
  misc_RNA (1)...(19): siRNA sense strand
agauggacgaggugcagaa

SEQ ID NO: 2420931 - RNA, 19 nt, Homo sapiens
  misc_RNA (1)...(19): siRNA sense strand
cggcccagcaacuguguaa

SEQ ID NO: 2420932 - RNA, 19 nt, Homo sapiens
  misc_RNA (1)...(19): siRNA sense strand
acgucuaaauacaaaguga

SEQ ID NO: 2420933 - RNA, 19 nt, Homo sapiens
  misc_RNA (1)...(19): siRNA sense strand
cuaacaaaacccuggagaa

SEQ ID NO: 2420934 - RNA, 19 nt, Homo sapiens
  misc_RNA (1)...(19): siRNA sense strand
gagaaaauggagaaacaca

SEQ ID NO: 2420935 - RNA, 19 nt, Homo sapiens
  misc_RNA (1)...(19): siRNA sense strand
gucuaaauacaaagugaca

SEQ ID NO: 2420936 - RNA, 19 nt, Homo sapiens
  misc_RNA (1)...(19): siRNA sense strand
agaccagaguccagcugau

SEQ ID NO: 2420937 - RNA, 19 nt, Homo sapiens
  misc_RNA (1)...(19): siRNA sense strand
aguuaaaguccuugggcua

SEQ ID NO: 2420938 - RNA, 19 nt, Homo sapiens
  misc_RNA (1)...(19): siRNA sense strand
augagaaccuugagggaga

SEQ ID NO: 2420939 - RNA, 19 nt, Homo sapiens
  misc_RNA (1)...(19): siRNA sense strand
uguaauaaacagagugaca

SEQ ID NO: 2420940 - RNA, 19 nt, Homo sapiens
  misc_RNA (1)...(19): siRNA sense strand
gugaagagcuggaacggau

SEQ ID NO: 2420941 - RNA, 19 nt, Homo sapiens
  misc_RNA (1)...(19): siRNA sense strand
ccgacaaggucacgagcau

SEQ ID NO: 2420942 - RNA, 19 nt, Homo sapiens
  misc_RNA (1)...(19): siRNA sense strand
ucacugaagaggagcgcaa

SEQ ID NO: 2420943 - RNA, 19 nt, Homo sapiens
  misc_RNA (1)...(19): siRNA sense strand
guaugaaauguuugagaga

SEQ ID NO: 2420944 - RNA, 19 nt, Homo sapiens
  misc_RNA (1)...(19): siRNA sense strand
ggauaaagaugaagcacug

SEQ ID NO: 2420945 - RNA, 19 nt, Homo sapiens
  misc_RNA (1)...(19): siRNA sense strand
cccuagagcugcugcacaa

SEQ ID NO: 2420946 - RNA, 19 nt, Homo sapiens
  misc_RNA (1)...(19): siRNA sense strand
augaaauguuugagagaag

SEQ ID NO: 2420947 - RNA, 19 nt, Homo sapiens
  misc_RNA (1)...(19): siRNA sense strand
gaaagaagcauuaucguca

SEQ ID NO: 2420948 - RNA, 19 nt, Homo sapiens
  misc_RNA (1)...(19): siRNA sense strand
gaaaaugaugccaagaaaa

SEQ ID NO: 2420949 - RNA, 19 nt, Homo sapiens
  misc_RNA (1)...(19): siRNA sense strand
ccaagagaaccaauggaau

SEQ ID NO: 2420950 - RNA, 19 nt, Homo sapiens
  misc_RNA (1)...(19): siRNA sense strand
gauauggagaagcgggaau

SEQ ID NO: 2420951 - RNA, 19 nt, Homo sapiens
  misc_RNA (1)...(19): siRNA sense strand
uggacuugugucagagaaa

SEQ ID NO: 2420952 - RNA, 19 nt, Homo sapiens
  misc_RNA (1)...(19): siRNA sense strand
acgugaaggcugagaucuu

SEQ ID NO: 2420953 - RNA, 19 nt, Homo sapiens
  misc_RNA (1)...(19): siRNA sense strand
uggagcagauuguggucaa

SEQ ID NO: 2420954 - RNA, 19 nt, Homo sapiens
  misc_RNA (1)...(19): siRNA sense strand
ggagaagaggacugagcca

SEQ ID NO: 2420955 - RNA, 19 nt, Homo sapiens
  misc_RNA (1)...(19): siRNA sense strand
aagaggagcugcugcccaa

SEQ ID NO: 2420956 - RNA, 19 nt, Homo sapiens
  misc_RNA (1)...(19): siRNA sense strand
ccucaggaacacggaaaua

SEQ ID NO: 2420957 - RNA, 19 nt, Homo sapiens
  misc_RNA (1)...(19): siRNA sense strand
cggaaauauguucaaguuu

SEQ ID NO: 2420958 - RNA, 19 nt, Homo sapiens
  misc_RNA (1)...(19): siRNA sense strand
cagaaaaguuaaaguccuu

SEQ ID NO: 2420959 - RNA, 19 nt, Homo sapiens
  misc_RNA (1)...(19): siRNA sense strand
gauaaagaauggagacagc

SEQ ID NO: 2420960 - RNA, 19 nt, Homo sapiens
  misc_RNA (1)...(19): siRNA sense strand
gugcuggagaucagaauuu

SEQ ID NO: 2420961 - RNA, 19 nt, Homo sapiens
  misc_RNA (1)...(19): siRNA sense strand
uauacaacgugaaggcuga

SEQ ID NO: 2420962 - RNA, 19 nt, Homo sapiens
  misc_RNA (1)...(19): siRNA sense strand
ccuggaagucaguguaaca

SEQ ID NO: 2420963 - RNA, 19 nt, Homo sapiens
  misc_RNA (1)...(19): siRNA sense strand
cacaaaaggcagaaaucua

SEQ ID NO: 2420964 - RNA, 19 nt, Homo sapiens
  misc_RNA (1)...(19): siRNA sense strand
ucuacaccauggagaacaa

SEQ ID NO: 2420965 - RNA, 19 nt, Homo sapiens
  misc_RNA (1)...(19): siRNA sense strand
gggcuaucuauguggacuu

SEQ ID NO: 2420966 - RNA, 19 nt, Homo sapiens
  misc_RNA (1)...(19): siRNA sense strand
agagaaaggaccuaacuca

SEQ ID NO: 2420967 - RNA, 19 nt, Homo sapiens
  misc_RNA (1)...(19): siRNA sense strand
ugaucuacaccauggagaa

SEQ ID NO: 2420968 - RNA, 19 nt, Homo sapiens
  misc_RNA (1)...(19): siRNA sense strand
cgcuggaguuguaugaaau

SEQ ID NO: 2420969 - RNA, 19 nt, Homo sapiens
  misc_RNA (1)...(19): siRNA sense strand
gcacaaaggccuacccaug

SEQ ID NO: 2420970 - RNA, 19 nt, Homo sapiens
  misc_RNA (1)...(19): siRNA sense strand
ggagcugagcgaccagaaa

SEQ ID NO: 2420971 - RNA, 19 nt, Homo sapiens
  misc_RNA (1)...(19): siRNA sense strand
ucaaaagcaccuuggacaa

SEQ ID NO: 2420972 - RNA, 19 nt, Homo sapiens
  misc_RNA (1)...(19): siRNA sense strand
gcucauagcucuguggacu

SEQ ID NO: 2420973 - RNA, 19 nt, Homo sapiens
  misc_RNA (1)...(19): siRNA sense strand
gcucuggacugcugggugu

SEQ ID NO: 2420974 - RNA, 19 nt, Homo sapiens
  misc_RNA (1)...(19): siRNA sense strand
cguuuugugcguugagaua

SEQ ID NO: 2420975 - RNA, 19 nt, Homo sapiens
  misc_RNA (1)...(19): siRNA sense strand
acaggaagcauaaggacca

SEQ ID NO: 2420976 - RNA, 19 nt, Homo sapiens
  misc_RNA (1)...(19): siRNA sense strand
gagaacaagcccaucguca

SEQ ID NO: 2420977 - RNA, 19 nt, Homo sapiens
  misc_RNA (1)...(19): siRNA sense strand
gaggaugacaugagaaccu

SEQ ID NO: 2420978 - RNA, 19 nt, Homo sapiens
  misc_RNA (1)...(19): siRNA sense strand
uggagguguugcagaggau

SEQ ID NO: 2420979 - RNA, 19 nt, Homo sapiens
  misc_RNA (1)...(19): siRNA sense strand
acgauaaagaauggagaca

SEQ ID NO: 2420980 - RNA, 19 nt, Homo sapiens
  misc_RNA (1)...(19): siRNA sense strand
cugaaucugaugagcauuu

SEQ ID NO: 2420981 - RNA, 19 nt, Homo sapiens
  misc_RNA (1)...(19): siRNA sense strand
acgucaggcuguucaagua

SEQ ID NO: 2420982 - RNA, 19 nt, Homo sapiens
  misc_RNA (1)...(19): siRNA sense strand
uggcagagccccacaggaa

SEQ ID NO: 2420983 - RNA, 19 nt, Homo sapiens
  misc_RNA (1)...(19): siRNA sense strand
cauucaggacucaggccaa

SEQ ID NO: 2420984 - RNA, 19 nt, Homo sapiens
  misc_RNA (1)...(19): siRNA sense strand
ccucagagagucaaguuca

SEQ ID NO: 2420985 - RNA, 19 nt, Homo sapiens
  misc_RNA (1)...(19): siRNA sense strand
aagaugaagcacugacuga

SEQ ID NO: 2420986 - RNA, 19 nt, Homo sapiens
  misc_RNA (1)...(19): siRNA sense strand
ugcuaaguuuguuggaaaa

SEQ ID NO: 2420987 - RNA, 19 nt, Homo sapiens
  misc_RNA (1)...(19): siRNA sense strand
ccagauaacauucaggacu

SEQ ID NO: 2420988 - RNA, 19 nt, Homo sapiens
  misc_RNA (1)...(19): siRNA sense strand
cagauaacauucaggacuc

SEQ ID NO: 2420989 - RNA, 19 nt, Homo sapiens
  misc_RNA (1)...(19): siRNA sense strand
gggaauggaguauugcaga

SEQ ID NO: 2420990 - RNA, 19 nt, Homo sapiens
  misc_RNA (1)...(19): siRNA sense strand
agaaacugaaagaagcauu

SEQ ID NO: 2420991 - RNA, 19 nt, Homo sapiens
  misc_RNA (1)...(19): siRNA sense strand
cugaaaugauggagaaaga

SEQ ID NO: 2420992 - RNA, 19 nt, Homo sapiens
  misc_RNA (1)...(19): siRNA sense strand
cuaaagaaacaaaggcaaa

SEQ ID NO: 2420993 - RNA, 19 nt, Homo sapiens
  misc_RNA (1)...(19): siRNA sense strand
caauggaacugaaggguga

SEQ ID NO: 2420994 - RNA, 19 nt, Homo sapiens
  misc_RNA (1)...(19): siRNA sense strand
ccacaggacaagaaagaau

SEQ ID NO: 2420995 - RNA, 19 nt, Homo sapiens
  misc_RNA (1)...(19): siRNA sense strand
gcuaaagaaacaaaggcaa

SEQ ID NO: 2420996 - RNA, 19 nt, Homo sapiens
  misc_RNA (1)...(19): siRNA sense strand
caaacaagcaagaggcaga

SEQ ID NO: 2420997 - RNA, 19 nt, Homo sapiens
  misc_RNA (1)...(19): siRNA sense strand
cgaauaaaggaaagagcuu

SEQ ID NO: 2420998 - RNA, 19 nt, Homo sapiens
  misc_RNA (1)...(19): siRNA sense strand
ugauaugggcuuaggaaaa

SEQ ID NO: 2420999 - RNA, 19 nt, Homo sapiens
  misc_RNA (1)...(19): siRNA sense strand
gcuuauugcaugaggacuu

SEQ ID NO: 2421000 - RNA, 19 nt, Homo sapiens
  misc_RNA (1)...(19): siRNA sense strand
gugccaagguaaugagcuu

SEQ ID NO: 2421001 - RNA, 19 nt, Homo sapiens
  misc_RNA (1)...(19): siRNA sense strand
ggaaagagcuucuacgugu

SEQ ID NO: 2421002 - RNA, 19 nt, Homo sapiens
  misc_RNA (1)...(19): siRNA sense strand
ggaacuaaugagaagagua

SEQ ID NO: 2421003 - RNA, 19 nt, Homo sapiens
  misc_RNA (1)...(19): siRNA sense strand
gaaguaaggcagaggggaa

SEQ ID NO: 2421004 - RNA, 19 nt, Homo sapiens
  misc_RNA (1)...(19): siRNA sense strand
agaagagggagcagagauu

SEQ ID NO: 2421005 - RNA, 19 nt, Homo sapiens
  misc_RNA (1)...(19): siRNA sense strand
acuuagagacgaaggaaaa

SEQ ID NO: 2421006 - RNA, 19 nt, Homo sapiens
  misc_RNA (1)...(19): siRNA sense strand
ccuauagccucguggccaa

SEQ ID NO: 2421007 - RNA, 19 nt, Homo sapiens
  misc_RNA (1)...(19): siRNA sense strand
caaaggugaaggugaggaa

SEQ ID NO: 2421008 - RNA, 19 nt, Homo sapiens
  misc_RNA (1)...(19): siRNA sense strand
acacgaacugggaggcuaa

SEQ ID NO: 2421009 - RNA, 19 nt, Homo sapiens
  misc_RNA (1)...(19): siRNA sense strand
agaaacgggugaacagcaa

SEQ ID NO: 2421010 - RNA, 19 nt, Homo sapiens
  misc_RNA (1)...(19): siRNA sense strand
ggccggagguguuggucua

SEQ ID NO: 2421011 - RNA, 19 nt, Homo sapiens
  misc_RNA (1)...(19): siRNA sense strand
agaucaagcuugugaccga

SEQ ID NO: 2421012 - RNA, 19 nt, Homo sapiens
  misc_RNA (1)...(19): siRNA sense strand
gugacgacgaggaggaaga

SEQ ID NO: 2421013 - RNA, 19 nt, Homo sapiens
  misc_RNA (1)...(19): siRNA sense strand
acuaaugagaagaguaaca

SEQ ID NO: 2421014 - RNA, 19 nt, Homo sapiens
  misc_RNA (1)...(19): siRNA sense strand
cuuccauagcuguguguaa

SEQ ID NO: 2421015 - RNA, 19 nt, Homo sapiens
  misc_RNA (1)...(19): siRNA sense strand
cucaaagaaaggaggagaa

SEQ ID NO: 2421016 - RNA, 19 nt, Homo sapiens
  misc_RNA (1)...(19): siRNA sense strand
uggacuugguagaggcauu

SEQ ID NO: 2421017 - RNA, 19 nt, Homo sapiens
  misc_RNA (1)...(19): siRNA sense strand
ggcagagacuggaggcaca

SEQ ID NO: 2421018 - RNA, 19 nt, Homo sapiens
  misc_RNA (1)...(19): siRNA sense strand
gacuuagagacgaaggaaa

SEQ ID NO: 2421019 - RNA, 19 nt, Homo sapiens
  misc_RNA (1)...(19): siRNA sense strand
ugagggaacaguagaagaa

SEQ ID NO: 2421020 - RNA, 19 nt, Homo sapiens
  misc_RNA (1)...(19): siRNA sense strand
cuguaguucaagagaagaa

SEQ ID NO: 2421021 - RNA, 19 nt, Homo sapiens
  misc_RNA (1)...(19): siRNA sense strand
acaugaaaguagaggcaac

SEQ ID NO: 2421022 - RNA, 19 nt, Homo sapiens
  misc_RNA (1)...(19): siRNA sense strand
uggaagaagcccuaauaau

SEQ ID NO: 2421023 - RNA, 19 nt, Homo sapiens
  misc_RNA (1)...(19): siRNA sense strand
ggaaguacucaguggucuu

SEQ ID NO: 2421024 - RNA, 19 nt, Homo sapiens
  misc_RNA (1)...(19): siRNA sense strand
ccuuacaacacaacugaaa

SEQ ID NO: 2421025 - RNA, 19 nt, Homo sapiens
  misc_RNA (1)...(19): siRNA sense strand
uagcauugcaccugaagaa

SEQ ID NO: 2421026 - RNA, 19 nt, Homo sapiens
  misc_RNA (1)...(19): siRNA sense strand
agagaauggacuugguaga

SEQ ID NO: 2421027 - RNA, 19 nt, Homo sapiens
  misc_RNA (1)...(19): siRNA sense strand
cuuccaacuggcugagaaa

SEQ ID NO: 2421028 - RNA, 19 nt, Homo sapiens
  misc_RNA (1)...(19): siRNA sense strand
cagauuuguuugugaggga

SEQ ID NO: 2421029 - RNA, 19 nt, Homo sapiens
  misc_RNA (1)...(19): siRNA sense strand
aggaaaagaaggcugauaa

SEQ ID NO: 2421030 - RNA, 19 nt, Homo sapiens
  misc_RNA (1)...(19): siRNA sense strand
ccaaagagaaucagaaccu

SEQ ID NO: 2421031 - RNA, 19 nt, Homo sapiens
  misc_RNA (1)...(19): siRNA sense strand
gcucaaagaaaggaggaga

SEQ ID NO: 2421032 - RNA, 19 nt, Homo sapiens
  misc_RNA (1)...(19): siRNA sense strand
agggaacaguagaagaaaa

SEQ ID NO: 2421033 - RNA, 19 nt, Homo sapiens
  misc_RNA (1)...(19): siRNA sense strand
caucaaaggugaaggugag

SEQ ID NO: 2421034 - RNA, 19 nt, Homo sapiens
  misc_RNA (1)...(19): siRNA sense strand
cugauaagaagcaaagaga

SEQ ID NO: 2421035 - RNA, 19 nt, Homo sapiens
  misc_RNA (1)...(19): siRNA sense strand
ggagaaaucaagugguaag

SEQ ID NO: 2421036 - RNA, 19 nt, Homo sapiens
  misc_RNA (1)...(19): siRNA sense strand
cagaaguugaucaaacaaa

SEQ ID NO: 2421037 - RNA, 19 nt, Homo sapiens
  misc_RNA (1)...(19): siRNA sense strand
agacaugaaaguagaggca

SEQ ID NO: 2421038 - RNA, 19 nt, Homo sapiens
  misc_RNA (1)...(19): siRNA sense strand
ggacuuugugguagagcuu

SEQ ID NO: 2421039 - RNA, 19 nt, Homo sapiens
  misc_RNA (1)...(19): siRNA sense strand
gagaaauccauucaaggua

SEQ ID NO: 2421040 - RNA, 19 nt, Homo sapiens
  misc_RNA (1)...(19): siRNA sense strand
cugggaggcuaaagaaaca

SEQ ID NO: 2421041 - RNA, 19 nt, Homo sapiens
  misc_RNA (1)...(19): siRNA sense strand
cagacaagggucagaaguu

SEQ ID NO: 2421042 - RNA, 19 nt, Homo sapiens
  misc_RNA (1)...(19): siRNA sense strand
gugagacgguuguggcaga

SEQ ID NO: 2421043 - RNA, 19 nt, Homo sapiens
  misc_RNA (1)...(19): siRNA sense strand
gaguaacagucaaguacca

SEQ ID NO: 2421044 - RNA, 19 nt, Homo sapiens
  misc_RNA (1)...(19): siRNA sense strand
ugauaagaagcaaagagaa

SEQ ID NO: 2421045 - RNA, 19 nt, Homo sapiens
  misc_RNA (1)...(19): siRNA sense strand
gugcaaaccucaaugugga

SEQ ID NO: 2421046 - RNA, 19 nt, Homo sapiens
  misc_RNA (1)...(19): siRNA sense strand
acugaagggugaaggucuu

SEQ ID NO: 2421047 - RNA, 19 nt, Homo sapiens
  misc_RNA (1)...(19): siRNA sense strand
aaaagaaggcugauaagaa

SEQ ID NO: 2421048 - RNA, 19 nt, Homo sapiens
  misc_RNA (1)...(19): siRNA sense strand
guucaugcaguguggaaaa

SEQ ID NO: 2421049 - RNA, 19 nt, Homo sapiens
  misc_RNA (1)...(19): siRNA sense strand
aggcagaauaagugcaaua

SEQ ID NO: 2421050 - RNA, 19 nt, Homo sapiens
  misc_RNA (1)...(19): siRNA sense strand
agaugaaccaagaaagaaa

SEQ ID NO: 2421051 - RNA, 19 nt, Homo sapiens
  misc_RNA (1)...(19): siRNA sense strand
caugauagcuucuggccaa

SEQ ID NO: 2421052 - RNA, 19 nt, Homo sapiens
  misc_RNA (1)...(19): siRNA sense strand
uaaagaagauggacgggaa

SEQ ID NO: 2421053 - RNA, 19 nt, Homo sapiens
  misc_RNA (1)...(19): siRNA sense strand
cauuaguguuugugcgcaa

SEQ ID NO: 2421054 - RNA, 19 nt, Homo sapiens
  misc_RNA (1)...(19): siRNA sense strand
ccaugaaauuggacgauca

SEQ ID NO: 2421055 - RNA, 19 nt, Homo sapiens
  misc_RNA (1)...(19): siRNA sense strand
agaaauacguggaugcuga

SEQ ID NO: 2421056 - RNA, 19 nt, Homo sapiens
  misc_RNA (1)...(19): siRNA sense strand
cagauaugguauuagacaa

SEQ ID NO: 2421057 - RNA, 19 nt, Homo sapiens
  misc_RNA (1)...(19): siRNA sense strand
gagcagaagaaugaggaaa

SEQ ID NO: 2421058 - RNA, 19 nt, Homo sapiens
  misc_RNA (1)...(19): siRNA sense strand
gcuacagaaggcagaauaa

SEQ ID NO: 2421059 - RNA, 19 nt, Homo sapiens
  misc_RNA (1)...(19): siRNA sense strand
aauuuaagaccaagcguua

SEQ ID NO: 2421060 - RNA, 19 nt, Homo sapiens
  misc_RNA (1)...(19): siRNA sense strand
acagagauggagaagaaua

SEQ ID NO: 2421061 - RNA, 19 nt, Homo sapiens
  misc_RNA (1)...(19): siRNA sense strand
cagagauggagaagaauau

SEQ ID NO: 2421062 - RNA, 19 nt, Homo sapiens
  misc_RNA (1)...(19): siRNA sense strand
gaguaaaccuuauguggca

SEQ ID NO: 2421063 - RNA, 19 nt, Homo sapiens
  misc_RNA (1)...(19): siRNA sense strand
acagaaaggaacacaaauu

SEQ ID NO: 2421064 - RNA, 19 nt, Homo sapiens
  misc_RNA (1)...(19): siRNA sense strand
agaaagucauagagcugua

SEQ ID NO: 2421065 - RNA, 19 nt, Homo sapiens
  misc_RNA (1)...(19): siRNA sense strand
ccagagagaggguggauca

SEQ ID NO: 2421066 - RNA, 19 nt, Homo sapiens
  misc_RNA (1)...(19): siRNA sense strand
cuucauuccucaagcaauu

SEQ ID NO: 2421067 - RNA, 19 nt, Homo sapiens
  misc_RNA (1)...(19): siRNA sense strand
cugauaaaccugugagugu

SEQ ID NO: 2421068 - RNA, 19 nt, Homo sapiens
  misc_RNA (1)...(19): siRNA sense strand
ggagauaauccuuggugga

SEQ ID NO: 2421069 - RNA, 19 nt, Homo sapiens
  misc_RNA (1)...(19): siRNA sense strand
ugaaaggcgaggagcagaa

SEQ ID NO: 2421070 - RNA, 19 nt, Homo sapiens
  misc_RNA (1)...(19): siRNA sense strand
uggaagugguggaagcaga

SEQ ID NO: 2421071 - RNA, 19 nt, Homo sapiens
  misc_RNA (1)...(19): siRNA sense strand
agaugaugaugaagaacau

SEQ ID NO: 2421072 - RNA, 19 nt, Homo sapiens
  misc_RNA (1)...(19): siRNA sense strand
aggagaaacauaugcauuu

SEQ ID NO: 2421073 - RNA, 19 nt, Homo sapiens
  misc_RNA (1)...(19): siRNA sense strand
uguuguggaucuuggcaaa

SEQ ID NO: 2421074 - RNA, 19 nt, Homo sapiens
  misc_RNA (1)...(19): siRNA sense strand
cugaagaugaugaugaaga

SEQ ID NO: 2421075 - RNA, 19 nt, Homo sapiens
  misc_RNA (1)...(19): siRNA sense strand
cagauauaggcaagaaaca

SEQ ID NO: 2421076 - RNA, 19 nt, Homo sapiens
  misc_RNA (1)...(19): siRNA sense strand
agagaaagaggaagcugaa

SEQ ID NO: 2421077 - RNA, 19 nt, Homo sapiens
  misc_RNA (1)...(19): siRNA sense strand
agcagaagaaugaggaaaa

SEQ ID NO: 2421078 - RNA, 19 nt, Homo sapiens
  misc_RNA (1)...(19): siRNA sense strand
ucuacgaggcuuuggagaa

SEQ ID NO: 2421079 - RNA, 19 nt, Homo sapiens
  misc_RNA (1)...(19): siRNA sense strand
gugaacaccaaguuugaaa

SEQ ID NO: 2421080 - RNA, 19 nt, Homo sapiens
  misc_RNA (1)...(19): siRNA sense strand
gcuuaaaaguugaaucuga

SEQ ID NO: 2421081 - RNA, 19 nt, Homo sapiens
  misc_RNA (1)...(19): siRNA sense strand
cacaauggaagaaagauaa

SEQ ID NO: 2421082 - RNA, 19 nt, Homo sapiens
  misc_RNA (1)...(19): siRNA sense strand
aggaacacaaauugaagaa

SEQ ID NO: 2421083 - RNA, 19 nt, Homo sapiens
  misc_RNA (1)...(19): siRNA sense strand
agugguggaagcagagaaa

SEQ ID NO: 2421084 - RNA, 19 nt, Homo sapiens
  misc_RNA (1)...(19): siRNA sense strand
uugaagaggauguugaaga

SEQ ID NO: 2421085 - RNA, 19 nt, Homo sapiens
  misc_RNA (1)...(19): siRNA sense strand
ucaagcaauuuaagaccaa

SEQ ID NO: 2421086 - RNA, 19 nt, Homo sapiens
  misc_RNA (1)...(19): siRNA sense strand
ccugcaggcucaaggugua

SEQ ID NO: 2421087 - RNA, 19 nt, Homo sapiens
  misc_RNA (1)...(19): siRNA sense strand
ggggaagucucuugcaaau

SEQ ID NO: 2421088 - RNA, 19 nt, Homo sapiens
  misc_RNA (1)...(19): siRNA sense strand
agucaugucaacagcuuaa

SEQ ID NO: 2421089 - RNA, 19 nt, Homo sapiens
  misc_RNA (1)...(19): siRNA sense strand
gguuacagggcuaaugauu

SEQ ID NO: 2421090 - RNA, 19 nt, Homo sapiens
  misc_RNA (1)...(19): siRNA sense strand
ugaaauuugaagaggaugu

SEQ ID NO: 2421091 - RNA, 19 nt, Homo sapiens
  misc_RNA (1)...(19): siRNA sense strand
gagacaucaucaucagaau

SEQ ID NO: 2421092 - RNA, 19 nt, Homo sapiens
  misc_RNA (1)...(19): siRNA sense strand
caauaguaaaaguggagaa

SEQ ID NO: 2421093 - RNA, 19 nt, Homo sapiens
  misc_RNA (1)...(19): siRNA sense strand
acagaggacuggacggcuu

SEQ ID NO: 2421094 - RNA, 19 nt, Homo sapiens
  misc_RNA (1)...(19): siRNA sense strand
gguucuugcauuaguguuu

SEQ ID NO: 2421095 - RNA, 19 nt, Homo sapiens
  misc_RNA (1)...(19): siRNA sense strand
caucaccaccggaggagaa

SEQ ID NO: 2421096 - RNA, 19 nt, Homo sapiens
  misc_RNA (1)...(19): siRNA sense strand
ggagcagaagaaugaggaa

SEQ ID NO: 2421097 - RNA, 19 nt, Homo sapiens
  misc_RNA (1)...(19): siRNA sense strand
acacaauauuuccuggaga

SEQ ID NO: 2421098 - RNA, 19 nt, Homo sapiens
  misc_RNA (1)...(19): siRNA sense strand
ccggaggagaaaagauaaa

SEQ ID NO: 2421099 - RNA, 19 nt, Homo sapiens
  misc_RNA (1)...(19): siRNA sense strand
acuuagaagcagcgcugaa

SEQ ID NO: 2421100 - RNA, 19 nt, Homo sapiens
  misc_RNA (1)...(19): siRNA sense strand
cgacuauguacuugagcua

SEQ ID NO: 2421101 - RNA, 19 nt, Homo sapiens
  misc_RNA (1)...(19): siRNA sense strand
cccaagaugacgagaguga

SEQ ID NO: 2421102 - RNA, 19 nt, Homo sapiens
  misc_RNA (1)...(19): siRNA sense strand
ggguucaguuggacgacaa

SEQ ID NO: 2421103 - RNA, 19 nt, Homo sapiens
  misc_RNA (1)...(19): siRNA sense strand
gcgaagucaaugugugcua

SEQ ID NO: 2421104 - RNA, 19 nt, Homo sapiens
  misc_RNA (1)...(19): siRNA sense strand
cgaaaggggcacagccaaa

SEQ ID NO: 2421105 - RNA, 19 nt, Homo sapiens
  misc_RNA (1)...(19): siRNA sense strand
aguaaaagccaaagugaca

SEQ ID NO: 2421106 - RNA, 19 nt, Homo sapiens
  misc_RNA (1)...(19): siRNA sense strand
ccgaagucaccaugggaga

SEQ ID NO: 2421107 - RNA, 19 nt, Homo sapiens
  misc_RNA (1)...(19): siRNA sense strand
guggcaaggauguggcaau

SEQ ID NO: 2421108 - RNA, 19 nt, Homo sapiens
  misc_RNA (1)...(19): siRNA sense strand
aggagaugcugaagaggca

SEQ ID NO: 2421109 - RNA, 19 nt, Homo sapiens
  misc_RNA (1)...(19): siRNA sense strand
gggagaaaaccaacagcaa

SEQ ID NO: 2421110 - RNA, 19 nt, Homo sapiens
  misc_RNA (1)...(19): siRNA sense strand
cagcugaaggaaagcggaa

SEQ ID NO: 2421111 - RNA, 19 nt, Homo sapiens
  misc_RNA (1)...(19): siRNA sense strand
acucagaugccgaggagga

SEQ ID NO: 2421112 - RNA, 19 nt, Homo sapiens
  misc_RNA (1)...(19): siRNA sense strand
ccauggagggcgaagucaa

SEQ ID NO: 2421113 - RNA, 19 nt, Homo sapiens
  misc_RNA (1)...(19): siRNA sense strand
ucaucagaaucgagcaaaa

SEQ ID NO: 2421114 - RNA, 19 nt, Homo sapiens
  misc_RNA (1)...(19): siRNA sense strand
aggagauugaggugaagaa

SEQ ID NO: 2421115 - RNA, 19 nt, Homo sapiens
  misc_RNA (1)...(19): siRNA sense strand
agcagaaaguagaugccua

SEQ ID NO: 2421116 - RNA, 19 nt, Homo sapiens
  misc_RNA (1)...(19): siRNA sense strand
ccaaagacauuguggaugc

SEQ ID NO: 2421117 - RNA, 19 nt, Homo sapiens
  misc_RNA (1)...(19): siRNA sense strand
uggcaauagaaauagaaga

SEQ ID NO: 2421118 - RNA, 19 nt, Homo sapiens
  misc_RNA (1)...(19): siRNA sense strand
aguuuaagucaaagcauga

SEQ ID NO: 2421119 - RNA, 19 nt, Homo sapiens
  misc_RNA (1)...(19): siRNA sense strand
agacguuaucuguggcaau

SEQ ID NO: 2421120 - RNA, 19 nt, Homo sapiens
  misc_RNA (1)...(19): siRNA sense strand
aggcuaagcagaaaguaga

SEQ ID NO: 2421121 - RNA, 19 nt, Homo sapiens
  misc_RNA (1)...(19): siRNA sense strand
caaagaugacagugugcuu

SEQ ID NO: 2421122 - RNA, 19 nt, Homo sapiens
  misc_RNA (1)...(19): siRNA sense strand
cagaaggagaucaccaaau

SEQ ID NO: 2421123 - RNA, 19 nt, Homo sapiens
  misc_RNA (1)...(19): siRNA sense strand
uggcagagaaguaccgaga

SEQ ID NO: 2421124 - RNA, 19 nt, Homo sapiens
  misc_RNA (1)...(19): siRNA sense strand
acgacaaacgcaaggagau

SEQ ID NO: 2421125 - RNA, 19 nt, Homo sapiens
  misc_RNA (1)...(19): siRNA sense strand
ccaacagcaacgaugacaa

SEQ ID NO: 2421126 - RNA, 19 nt, Homo sapiens
  misc_RNA (1)...(19): siRNA sense strand
aaucgaaggcaguguggau

SEQ ID NO: 2421127 - RNA, 19 nt, Homo sapiens
  misc_RNA (1)...(19): siRNA sense strand
ggaaaggggagaaaaccaa

SEQ ID NO: 2421128 - RNA, 19 nt, Homo sapiens
  misc_RNA (1)...(19): siRNA sense strand
gguaaauacuacagugagg

SEQ ID NO: 2421129 - RNA, 19 nt, Homo sapiens
  misc_RNA (1)...(19): siRNA sense strand
ggacccuggcagagacuau

SEQ ID NO: 2421130 - RNA, 19 nt, Homo sapiens
  misc_RNA (1)...(19): siRNA sense strand
caccaaagacauuguggau

SEQ ID NO: 2421131 - RNA, 19 nt, Homo sapiens
  misc_RNA (1)...(19): siRNA sense strand
gauccagagcugugugcau

SEQ ID NO: 2421132 - RNA, 19 nt, Homo sapiens
  misc_RNA (1)...(19): siRNA sense strand
cuaaagaagcuuaaccgau

SEQ ID NO: 2421133 - RNA, 19 nt, Homo sapiens
  misc_RNA (1)...(19): siRNA sense strand
ucacaagcaguaugagaca

SEQ ID NO: 2421134 - RNA, 19 nt, Homo sapiens
  misc_RNA (1)...(19): siRNA sense strand
caauagaaauagaagaacg

SEQ ID NO: 2421135 - RNA, 19 nt, Homo sapiens
  misc_RNA (1)...(19): siRNA sense strand
aagucaaagcaugaagaaa

SEQ ID NO: 2421136 - RNA, 19 nt, Homo sapiens
  misc_RNA (1)...(19): siRNA sense strand
gugaagaaggaguaccuga

SEQ ID NO: 2421137 - RNA, 19 nt, Homo sapiens
  misc_RNA (1)...(19): siRNA sense strand
cucaacaucaugacaguaa

SEQ ID NO: 2421138 - RNA, 19 nt, Homo sapiens
  misc_RNA (1)...(19): siRNA sense strand
ccuauuugugggugcagaa

SEQ ID NO: 2421139 - RNA, 19 nt, Homo sapiens
  misc_RNA (1)...(19): siRNA sense strand
cggaaaaggcuggcagaga

SEQ ID NO: 2421140 - RNA, 19 nt, Homo sapiens
  misc_RNA (1)...(19): siRNA sense strand
guugaagaaaggaagagau

SEQ ID NO: 2421141 - RNA, 19 nt, Homo sapiens
  misc_RNA (1)...(19): siRNA sense strand
cccacgaggcuaagcagaa

SEQ ID NO: 2421142 - RNA, 19 nt, Homo sapiens
  misc_RNA (1)...(19): siRNA sense strand
uguuuggaguuuaagucaa

SEQ ID NO: 2421143 - RNA, 19 nt, Homo sapiens
  misc_RNA (1)...(19): siRNA sense strand
gcaguguggaugaagccaa

SEQ ID NO: 2421144 - RNA, 19 nt, Homo sapiens
  misc_RNA (1)...(19): siRNA sense strand
aaggauguggcaauagaaa

SEQ ID NO: 2421145 - RNA, 19 nt, Homo sapiens
  misc_RNA (1)...(19): siRNA sense strand
caagaugacgagagugacu

SEQ ID NO: 2421146 - RNA, 19 nt, Homo sapiens
  misc_RNA (1)...(19): siRNA sense strand
gguugaagaaaggaagaga

SEQ ID NO: 2421147 - RNA, 19 nt, Homo sapiens
  misc_RNA (1)...(19): siRNA sense strand
cgacaaacgcaaggagaug

SEQ ID NO: 2421148 - RNA, 19 nt, Homo sapiens
  misc_RNA (1)...(19): siRNA sense strand
aggaugaagccauuuaaau

SEQ ID NO: 2421149 - RNA, 19 nt, Homo sapiens
  misc_RNA (1)...(19): siRNA sense strand
aggauguggcaauagaaau

SEQ ID NO: 2421150 - RNA, 19 nt, Homo sapiens
  misc_RNA (1)...(19): siRNA sense strand
cuacagaaggagaucacca

SEQ ID NO: 2421151 - RNA, 19 nt, Homo sapiens
  misc_RNA (1)...(19): siRNA sense strand
aggauuacauggagcugca

SEQ ID NO: 2421152 - RNA, 19 nt, Homo sapiens
  misc_RNA (1)...(19): siRNA sense strand
auguuuaccuggagaccga

SEQ ID NO: 2421153 - RNA, 19 nt, Homo sapiens
  misc_RNA (1)...(19): siRNA sense strand
cgacuauguacuugagcua

SEQ ID NO: 2421154 - RNA, 19 nt, Homo sapiens
  misc_RNA (1)...(19): siRNA sense strand
cccaagaugacgagaguga

SEQ ID NO: 2421155 - RNA, 19 nt, Homo sapiens
  misc_RNA (1)...(19): siRNA sense strand
ggguucaguuggacgacaa

SEQ ID NO: 2421156 - RNA, 19 nt, Homo sapiens
  misc_RNA (1)...(19): siRNA sense strand
gcgaagucaaugugugcua

SEQ ID NO: 2421157 - RNA, 19 nt, Homo sapiens
  misc_RNA (1)...(19): siRNA sense strand
cgaaaggggcacagccaaa

SEQ ID NO: 2421158 - RNA, 19 nt, Homo sapiens
  misc_RNA (1)...(19): siRNA sense strand
aguaaaagccaaagugaca

SEQ ID NO: 2421159 - RNA, 19 nt, Homo sapiens
  misc_RNA (1)...(19): siRNA sense strand
ccgaagucaccaugggaga

SEQ ID NO: 2421160 - RNA, 19 nt, Homo sapiens
  misc_RNA (1)...(19): siRNA sense strand
guggcaaggauguggcaau

SEQ ID NO: 2421161 - RNA, 19 nt, Homo sapiens
  misc_RNA (1)...(19): siRNA sense strand
aggagaugcugaagaggca

SEQ ID NO: 2421162 - RNA, 19 nt, Homo sapiens
  misc_RNA (1)...(19): siRNA sense strand
gggagaaaaccaacagcaa

SEQ ID NO: 2421163 - RNA, 19 nt, Homo sapiens
  misc_RNA (1)...(19): siRNA sense strand
cagcugaaggaaagcggaa

SEQ ID NO: 2421164 - RNA, 19 nt, Homo sapiens
  misc_RNA (1)...(19): siRNA sense strand
acucagaugccgaggagga

SEQ ID NO: 2421165 - RNA, 19 nt, Homo sapiens
  misc_RNA (1)...(19): siRNA sense strand
ccauggagggcgaagucaa

SEQ ID NO: 2421166 - RNA, 19 nt, Homo sapiens
  misc_RNA (1)...(19): siRNA sense strand
ucaucagaaucgagcaaaa

SEQ ID NO: 2421167 - RNA, 19 nt, Homo sapiens
  misc_RNA (1)...(19): siRNA sense strand
aggagauugaggugaagaa

SEQ ID NO: 2421168 - RNA, 19 nt, Homo sapiens
  misc_RNA (1)...(19): siRNA sense strand
agcagaaaguagaugccua

SEQ ID NO: 2421169 - RNA, 19 nt, Homo sapiens
  misc_RNA (1)...(19): siRNA sense strand
ccaaagacauuguggaugc

SEQ ID NO: 2421170 - RNA, 19 nt, Homo sapiens
  misc_RNA (1)...(19): siRNA sense strand
uggcaauagaaauagaaga

SEQ ID NO: 2421171 - RNA, 19 nt, Homo sapiens
  misc_RNA (1)...(19): siRNA sense strand
aguuuaagucaaagcauga

SEQ ID NO: 2421172 - RNA, 19 nt, Homo sapiens
  misc_RNA (1)...(19): siRNA sense strand
agacguuaucuguggcaau

SEQ ID NO: 2421173 - RNA, 19 nt, Homo sapiens
  misc_RNA (1)...(19): siRNA sense strand
aggcuaagcagaaaguaga

SEQ ID NO: 2421174 - RNA, 19 nt, Homo sapiens
  misc_RNA (1)...(19): siRNA sense strand
caaagaugacagugugcuu

SEQ ID NO: 2421175 - RNA, 19 nt, Homo sapiens
  misc_RNA (1)...(19): siRNA sense strand
cagaaggagaucaccaaau

SEQ ID NO: 2421176 - RNA, 19 nt, Homo sapiens
  misc_RNA (1)...(19): siRNA sense strand
uggcagagaaguaccgaga

SEQ ID NO: 2421177 - RNA, 19 nt, Homo sapiens
  misc_RNA (1)...(19): siRNA sense strand
acgacaaacgcaaggagau

SEQ ID NO: 2421178 - RNA, 19 nt, Homo sapiens
  misc_RNA (1)...(19): siRNA sense strand
ccaacagcaacgaugacaa

SEQ ID NO: 2421179 - RNA, 19 nt, Homo sapiens
  misc_RNA (1)...(19): siRNA sense strand
aaucgaaggcaguguggau

SEQ ID NO: 2421180 - RNA, 19 nt, Homo sapiens
  misc_RNA (1)...(19): siRNA sense strand
ggaaaggggagaaaaccaa

SEQ ID NO: 2421181 - RNA, 19 nt, Homo sapiens
  misc_RNA (1)...(19): siRNA sense strand
gguaaauacuacagugagg

SEQ ID NO: 2421182 - RNA, 19 nt, Homo sapiens
  misc_RNA (1)...(19): siRNA sense strand
ggacccuggcagagacuau

SEQ ID NO: 2421183 - RNA, 19 nt, Homo sapiens
  misc_RNA (1)...(19): siRNA sense strand
caccaaagacauuguggau

SEQ ID NO: 2421184 - RNA, 19 nt, Homo sapiens
  misc_RNA (1)...(19): siRNA sense strand
gauccagagcugugugcau

SEQ ID NO: 2421185 - RNA, 19 nt, Homo sapiens
  misc_RNA (1)...(19): siRNA sense strand
cuaaagaagcuuaaccgau

SEQ ID NO: 2421186 - RNA, 19 nt, Homo sapiens
  misc_RNA (1)...(19): siRNA sense strand
ucacaagcaguaugagaca

SEQ ID NO: 2421187 - RNA, 19 nt, Homo sapiens
  misc_RNA (1)...(19): siRNA sense strand
caauagaaauagaagaacg

SEQ ID NO: 2421188 - RNA, 19 nt, Homo sapiens
  misc_RNA (1)...(19): siRNA sense strand
aagucaaagcaugaagaaa

SEQ ID NO: 2421189 - RNA, 19 nt, Homo sapiens
  misc_RNA (1)...(19): siRNA sense strand
gugaagaaggaguaccuga

SEQ ID NO: 2421190 - RNA, 19 nt, Homo sapiens
  misc_RNA (1)...(19): siRNA sense strand
cucaacaucaugacaguaa

SEQ ID NO: 2421191 - RNA, 19 nt, Homo sapiens
  misc_RNA (1)...(19): siRNA sense strand
ccuauuugugggugcagaa

SEQ ID NO: 2421192 - RNA, 19 nt, Homo sapiens
  misc_RNA (1)...(19): siRNA sense strand
cggaaaaggcuggcagaga

SEQ ID NO: 2421193 - RNA, 19 nt, Homo sapiens
  misc_RNA (1)...(19): siRNA sense strand
guugaagaaaggaagagau

SEQ ID NO: 2421194 - RNA, 19 nt, Homo sapiens
  misc_RNA (1)...(19): siRNA sense strand
cccacgaggcuaagcagaa

SEQ ID NO: 2421195 - RNA, 19 nt, Homo sapiens
  misc_RNA (1)...(19): siRNA sense strand
uguuuggaguuuaagucaa

SEQ ID NO: 2421196 - RNA, 19 nt, Homo sapiens
  misc_RNA (1)...(19): siRNA sense strand
gcaguguggaugaagccaa

SEQ ID NO: 2421197 - RNA, 19 nt, Homo sapiens
  misc_RNA (1)...(19): siRNA sense strand
aaggauguggcaauagaaa

SEQ ID NO: 2421198 - RNA, 19 nt, Homo sapiens
  misc_RNA (1)...(19): siRNA sense strand
caagaugacgagagugacu

SEQ ID NO: 2421199 - RNA, 19 nt, Homo sapiens
  misc_RNA (1)...(19): siRNA sense strand
gguugaagaaaggaagaga

SEQ ID NO: 2421200 - RNA, 19 nt, Homo sapiens
  misc_RNA (1)...(19): siRNA sense strand
cgacaaacgcaaggagaug

SEQ ID NO: 2421201 - RNA, 19 nt, Homo sapiens
  misc_RNA (1)...(19): siRNA sense strand
aggaugaagccauuuaaau

SEQ ID NO: 2421202 - RNA, 19 nt, Homo sapiens
  misc_RNA (1)...(19): siRNA sense strand
aggauguggcaauagaaau

SEQ ID NO: 2421203 - RNA, 19 nt, Homo sapiens
  misc_RNA (1)...(19): siRNA sense strand
cuacagaaggagaucacca

SEQ ID NO: 2421204 - RNA, 19 nt, Homo sapiens
  misc_RNA (1)...(19): siRNA sense strand
aggauuacauggagcugca

SEQ ID NO: 2421205 - RNA, 19 nt, Homo sapiens
  misc_RNA (1)...(19): siRNA sense strand
auguuuaccuggagaccga

SEQ ID NO: 2421206 - RNA, 19 nt, Homo sapiens
  misc_RNA (1)...(19): siRNA sense strand
cggcagaagaagacgaaga

SEQ ID NO: 2421207 - RNA, 19 nt, Homo sapiens
  misc_RNA (1)...(19): siRNA sense strand
aggaagaggagcaggagga

SEQ ID NO: 2421208 - RNA, 19 nt, Homo sapiens
  misc_RNA (1)...(19): siRNA sense strand
aagaagaaacgcagggagu

SEQ ID NO: 2421209 - RNA, 19 nt, Homo sapiens
  misc_RNA (1)...(19): siRNA sense strand
cgaagaagcagaagcgucu

SEQ ID NO: 2421210 - RNA, 19 nt, Homo sapiens
  misc_RNA (1)...(19): siRNA sense strand
gagaagaagaagaaacgca

SEQ ID NO: 2421211 - RNA, 19 nt, Homo sapiens
  misc_RNA (1)...(19): siRNA sense strand
ccgaggagcuuacggcaga

SEQ ID NO: 2421212 - RNA, 19 nt, Homo sapiens
  misc_RNA (1)...(19): siRNA sense strand
ggaagaauuaggaaggacu

SEQ ID NO: 2421213 - RNA, 19 nt, Homo sapiens
  misc_RNA (1)...(19): siRNA sense strand
gagaggaagaggagcagga

SEQ ID NO: 2421214 - RNA, 19 nt, Homo sapiens
  misc_RNA (1)...(19): siRNA sense strand
caacaucacucgaggcauc

SEQ ID NO: 2421215 - RNA, 19 nt, Homo sapiens
  misc_RNA (1)...(19): siRNA sense strand
aagaagacgaagaagcaga

SEQ ID NO: 2421216 - RNA, 19 nt, Homo sapiens
  misc_RNA (1)...(19): siRNA sense strand
gauaaauucuacaugcuca

SEQ ID NO: 2421217 - RNA, 19 nt, Homo sapiens
  misc_RNA (1)...(19): siRNA sense strand
acuacgaggcaguugcuaa

SEQ ID NO: 2421218 - RNA, 19 nt, Homo sapiens
  misc_RNA (1)...(19): siRNA sense strand
ccggagaagaagaagaaac

SEQ ID NO: 2421219 - RNA, 19 nt, Homo sapiens
  misc_RNA (1)...(19): siRNA sense strand
gagccggagaagaagaaga

SEQ ID NO: 2421220 - RNA, 19 nt, Homo sapiens
  misc_RNA (1)...(19): siRNA sense strand
ccaacggugugaagagcca

SEQ ID NO: 2421221 - RNA, 19 nt, Homo sapiens
  misc_RNA (1)...(19): siRNA sense strand
gcaggugacgacagggaca

SEQ ID NO: 2421222 - RNA, 19 nt, Homo sapiens
  misc_RNA (1)...(19): siRNA sense strand
auggagaggaagaggagca

SEQ ID NO: 2421223 - RNA, 19 nt, Homo sapiens
  misc_RNA (1)...(19): siRNA sense strand
gugaggagcaggcagguga

SEQ ID NO: 2421224 - RNA, 19 nt, Homo sapiens
  misc_RNA (1)...(19): siRNA sense strand
ggaaauacaucgucgccag

SEQ ID NO: 2421225 - RNA, 19 nt, Homo sapiens
  misc_RNA (1)...(19): siRNA sense strand
acacacaggaugaggaggu

SEQ ID NO: 2421226 - RNA, 19 nt, Homo sapiens
  misc_RNA (1)...(19): siRNA sense strand
cagaagaagacgaagaagc

SEQ ID NO: 2421227 - RNA, 19 nt, Homo sapiens
  misc_RNA (1)...(19): siRNA sense strand
agccggagaagaagaagaa

SEQ ID NO: 2421228 - RNA, 19 nt, Homo sapiens
  misc_RNA (1)...(19): siRNA sense strand
ccgugaaauguuuggauau

SEQ ID NO: 2421229 - RNA, 19 nt, Homo sapiens
  misc_RNA (1)...(19): siRNA sense strand
acaucggcuucuugggcua

SEQ ID NO: 2421230 - RNA, 19 nt, Homo sapiens
  misc_RNA (1)...(19): siRNA sense strand
ccugaagaagauaagaaaa

SEQ ID NO: 2421231 - RNA, 19 nt, Homo sapiens
  misc_RNA (1)...(19): siRNA sense strand
uccugaagaagauaagaaa

SEQ ID NO: 2421232 - RNA, 19 nt, Homo sapiens
  misc_RNA (1)...(19): siRNA sense strand
cugaagaagauaagaaaac

SEQ ID NO: 2421233 - RNA, 19 nt, Homo sapiens
  misc_RNA (1)...(19): siRNA sense strand
cugaagaagucgaggccau

SEQ ID NO: 2421234 - RNA, 19 nt, Homo sapiens
  misc_RNA (1)...(19): siRNA sense strand
cgaaaguaacauugggaga

SEQ ID NO: 2421235 - RNA, 19 nt, Homo sapiens
  misc_RNA (1)...(19): siRNA sense strand
gugcagaaacacugaagaa

SEQ ID NO: 2421236 - RNA, 19 nt, Homo sapiens
  misc_RNA (1)...(19): siRNA sense strand
aggaagaugcagagaugaa

SEQ ID NO: 2421237 - RNA, 19 nt, Homo sapiens
  misc_RNA (1)...(19): siRNA sense strand
ugggagacaaugugaaaua

SEQ ID NO: 2421238 - RNA, 19 nt, Homo sapiens
  misc_RNA (1)...(19): siRNA sense strand
cagagaugaacaagauaaa

SEQ ID NO: 2421239 - RNA, 19 nt, Homo sapiens
  misc_RNA (1)...(19): siRNA sense strand
agauagauaaggagaguga

SEQ ID NO: 2421240 - RNA, 19 nt, Homo sapiens
  misc_RNA (1)...(19): siRNA sense strand
uggccaauauugagaaaga

SEQ ID NO: 2421241 - RNA, 19 nt, Homo sapiens
  misc_RNA (1)...(19): siRNA sense strand
gcggaagauguuagaagaa

SEQ ID NO: 2421242 - RNA, 19 nt, Homo sapiens
  misc_RNA (1)...(19): siRNA sense strand
cugcaggcccagauagaua

SEQ ID NO: 2421243 - RNA, 19 nt, Homo sapiens
  misc_RNA (1)...(19): siRNA sense strand
gggaacugaaggaaauuaa

SEQ ID NO: 2421244 - RNA, 19 nt, Homo sapiens
  misc_RNA (1)...(19): siRNA sense strand
ugacagauuugaaggcaca

SEQ ID NO: 2421245 - RNA, 19 nt, Homo sapiens
  misc_RNA (1)...(19): siRNA sense strand
agauaaggagagugaugaa

SEQ ID NO: 2421246 - RNA, 19 nt, Homo sapiens
  misc_RNA (1)...(19): siRNA sense strand
acgcugauguggaguggaa

SEQ ID NO: 2421247 - RNA, 19 nt, Homo sapiens
  misc_RNA (1)...(19): siRNA sense strand
acguuaacuguguggauua

SEQ ID NO: 2421248 - RNA, 19 nt, Homo sapiens
  misc_RNA (1)...(19): siRNA sense strand
gaagauaaugcguggacca

SEQ ID NO: 2421249 - RNA, 19 nt, Homo sapiens
  misc_RNA (1)...(19): siRNA sense strand
cagcacagauaaugcaaaa

SEQ ID NO: 2421250 - RNA, 19 nt, Homo sapiens
  misc_RNA (1)...(19): siRNA sense strand
cuaugaacuccuugaagaa

SEQ ID NO: 2421251 - RNA, 19 nt, Homo sapiens
  misc_RNA (1)...(19): siRNA sense strand
cggaagauguuagaagaau

SEQ ID NO: 2421252 - RNA, 19 nt, Homo sapiens
  misc_RNA (1)...(19): siRNA sense strand
cucauuauauccuggguaa

SEQ ID NO: 2421253 - RNA, 19 nt, Homo sapiens
  misc_RNA (1)...(19): siRNA sense strand
gggcugaauguaaagaaau

SEQ ID NO: 2421254 - RNA, 19 nt, Homo sapiens
  misc_RNA (1)...(19): siRNA sense strand
cuuccaaagcccagagcau

SEQ ID NO: 2421255 - RNA, 19 nt, Homo sapiens
  misc_RNA (1)...(19): siRNA sense strand
cuacauuggugcaaaacaa

SEQ ID NO: 2421256 - RNA, 19 nt, Homo sapiens
  misc_RNA (1)...(19): siRNA sense strand
cuauagaggaggaacgcuu

SEQ ID NO: 2421257 - RNA, 19 nt, Homo sapiens
  misc_RNA (1)...(19): siRNA sense strand
ugggcugaauguaaagaaa

SEQ ID NO: 2421258 - RNA, 19 nt, Homo sapiens
  misc_RNA (1)...(19): siRNA sense strand
cuuugaaggacuugacgaa

SEQ ID NO: 2421259 - RNA, 19 nt, Homo sapiens
  misc_RNA (1)...(19): siRNA sense strand
gcugauguggaguggaaau

SEQ ID NO: 2421260 - RNA, 19 nt, Homo sapiens
  misc_RNA (1)...(19): siRNA sense strand
gagaacuuggagagaaauu

SEQ ID NO: 2421261 - RNA, 19 nt, Homo sapiens
  misc_RNA (1)...(19): siRNA sense strand
gaaccaaaucaagaggaaa

SEQ ID NO: 2421262 - RNA, 19 nt, Homo sapiens
  misc_RNA (1)...(19): siRNA sense strand
gccaaugagcaucuggaaa

SEQ ID NO: 2421263 - RNA, 19 nt, Homo sapiens
  misc_RNA (1)...(19): siRNA sense strand
ggaauaugaaauugugcau

SEQ ID NO: 2421264 - RNA, 19 nt, Homo sapiens
  misc_RNA (1)...(19): siRNA sense strand
ucagaauacagaagaccua

SEQ ID NO: 2421265 - RNA, 19 nt, Homo sapiens
  misc_RNA (1)...(19): siRNA sense strand
agacaauggcggucaaguu

SEQ ID NO: 2421266 - RNA, 19 nt, Homo sapiens
  misc_RNA (1)...(19): siRNA sense strand
aaucaagaggaaaccaaua

SEQ ID NO: 2421267 - RNA, 19 nt, Homo sapiens
  misc_RNA (1)...(19): siRNA sense strand
cacuccagaucuaggauua

SEQ ID NO: 2421268 - RNA, 19 nt, Homo sapiens
  misc_RNA (1)...(19): siRNA sense strand
ucaugaaguuuguagcaca

SEQ ID NO: 2421269 - RNA, 19 nt, Homo sapiens
  misc_RNA (1)...(19): siRNA sense strand
uccaggaaauugaggauga

SEQ ID NO: 2421270 - RNA, 19 nt, Homo sapiens
  misc_RNA (1)...(19): siRNA sense strand
caaaucaagaggaaaccaa

SEQ ID NO: 2421271 - RNA, 19 nt, Homo sapiens
  misc_RNA (1)...(19): siRNA sense strand
uguuaauugccaugaucaa

SEQ ID NO: 2421272 - RNA, 19 nt, Homo sapiens
  misc_RNA (1)...(19): siRNA sense strand
augcagagaugaacaagau

SEQ ID NO: 2421273 - RNA, 19 nt, Homo sapiens
  misc_RNA (1)...(19): siRNA sense strand
ugaaggaaauuaagcagga

SEQ ID NO: 2421274 - RNA, 19 nt, Homo sapiens
  misc_RNA (1)...(19): siRNA sense strand
aggaaauuaagcaggacau

SEQ ID NO: 2421275 - RNA, 19 nt, Homo sapiens
  misc_RNA (1)...(19): siRNA sense strand
cugaaggucuuuaugcaau

SEQ ID NO: 2421276 - RNA, 19 nt, Homo sapiens
  misc_RNA (1)...(19): siRNA sense strand
acuuggaagaacagucaaa

SEQ ID NO: 2421277 - RNA, 19 nt, Homo sapiens
  misc_RNA (1)...(19): siRNA sense strand
ccagauagauaaggagagu

SEQ ID NO: 2421278 - RNA, 19 nt, Homo sapiens
  misc_RNA (1)...(19): siRNA sense strand
cuacuacauuggugcaaaa

SEQ ID NO: 2421279 - RNA, 19 nt, Homo sapiens
  misc_RNA (1)...(19): siRNA sense strand
uauaaggagcucagaagau

SEQ ID NO: 2421280 - RNA, 19 nt, Homo sapiens
  misc_RNA (1)...(19): siRNA sense strand
ugagaaggggagaagguua

SEQ ID NO: 2421281 - RNA, 19 nt, Homo sapiens
  misc_RNA (1)...(19): siRNA sense strand
caugaaugcagcugacaga

SEQ ID NO: 2421282 - RNA, 19 nt, Homo sapiens
  misc_RNA (1)...(19): siRNA sense strand
agagcaucauugacgcaaa

SEQ ID NO: 2421283 - RNA, 19 nt, Homo sapiens
  misc_RNA (1)...(19): siRNA sense strand
aggaagucaugaagaccuu

SEQ ID NO: 2421284 - RNA, 19 nt, Homo sapiens
  misc_RNA (1)...(19): siRNA sense strand
gagaaauuauccauggaac

SEQ ID NO: 2421285 - RNA, 19 nt, Homo sapiens
  misc_RNA (1)...(19): siRNA sense strand
cugccaggaauaugaaauu

SEQ ID NO: 2421286 - RNA, 19 nt, Homo sapiens
  misc_RNA (1)...(19): siRNA sense strand
ccaaggaauauuuguuuga

SEQ ID NO: 2421287 - RNA, 19 nt, Homo sapiens
  misc_RNA (1)...(19): siRNA sense strand
cuaugaugaagaugggaca

SEQ ID NO: 2421288 - RNA, 19 nt, Homo sapiens
  misc_RNA (1)...(19): siRNA sense strand
aaugauacuuugaaggacu

SEQ ID NO: 2421289 - RNA, 19 nt, Homo sapiens
  misc_RNA (1)...(19): siRNA sense strand
aagugaaaucaguggucau

SEQ ID NO: 2421290 - RNA, 19 nt, Homo sapiens
  misc_RNA (1)...(19): siRNA sense strand
ucauggagcuggagaggca

SEQ ID NO: 2421291 - RNA, 19 nt, Homo sapiens
  misc_RNA (1)...(19): siRNA sense strand
agccagaugaagaggacaa

SEQ ID NO: 2421292 - RNA, 19 nt, Homo sapiens
  misc_RNA (1)...(19): siRNA sense strand
gcuggagaggcaagagaau

SEQ ID NO: 2421293 - RNA, 19 nt, Homo sapiens
  misc_RNA (1)...(19): siRNA sense strand
aagaagaucuggaugccau

SEQ ID NO: 2421294 - RNA, 19 nt, Homo sapiens
  misc_RNA (1)...(19): siRNA sense strand
ggacaauccagacggcuga

SEQ ID NO: 2421295 - RNA, 19 nt, Homo sapiens
  misc_RNA (1)...(19): siRNA sense strand
uggaugugggccagagcua

SEQ ID NO: 2421296 - RNA, 19 nt, Homo sapiens
  misc_RNA (1)...(19): siRNA sense strand
ccacaaacaccacccgaga

SEQ ID NO: 2421297 - RNA, 19 nt, Homo sapiens
  misc_RNA (1)...(19): siRNA sense strand
uggagaggcaagagaaugu

SEQ ID NO: 2421298 - RNA, 19 nt, Homo sapiens
  misc_RNA (1)...(19): siRNA sense strand
augaagagggccugaaaau

SEQ ID NO: 2421299 - RNA, 19 nt, Homo sapiens
  misc_RNA (1)...(19): siRNA sense strand
aggaaaugaccuacgagga

SEQ ID NO: 2421300 - RNA, 19 nt, Homo sapiens
  misc_RNA (1)...(19): siRNA sense strand
cagaauggcuacaagaccu

SEQ ID NO: 2421301 - RNA, 19 nt, Homo sapiens
  misc_RNA (1)...(19): siRNA sense strand
cugccaacaucgugcaagu

SEQ ID NO: 2421302 - RNA, 19 nt, Homo sapiens
  misc_RNA (1)...(19): siRNA sense strand
uuggagaacagaauggcua

SEQ ID NO: 2421303 - RNA, 19 nt, Homo sapiens
  misc_RNA (1)...(19): siRNA sense strand
guguggauccugaggucau

SEQ ID NO: 2421304 - RNA, 19 nt, Homo sapiens
  misc_RNA (1)...(19): siRNA sense strand
agaucauggaugugggcca

SEQ ID NO: 2421305 - RNA, 19 nt, Homo sapiens
  misc_RNA (1)...(19): siRNA sense strand
gugaacacgcaccgggaca

SEQ ID NO: 2421306 - RNA, 19 nt, Homo sapiens
  misc_RNA (1)...(19): siRNA sense strand
ccgacaaugaagagggccu

SEQ ID NO: 2421307 - RNA, 19 nt, Homo sapiens
  misc_RNA (1)...(19): siRNA sense strand
ucgacaaggcagcagaaca

SEQ ID NO: 2421308 - RNA, 19 nt, Homo sapiens
  misc_RNA (1)...(19): siRNA sense strand
gggacaggccucagaacgu

SEQ ID NO: 2421309 - RNA, 19 nt, Homo sapiens
  misc_RNA (1)...(19): siRNA sense strand
gggaguuugccaagagucu

SEQ ID NO: 2421310 - RNA, 19 nt, Homo sapiens
  misc_RNA (1)...(19): siRNA sense strand
agguagaaguugaugaaaa

SEQ ID NO: 2421311 - RNA, 19 nt, Homo sapiens
  misc_RNA (1)...(19): siRNA sense strand
ccgaagagcgagggacaaa

SEQ ID NO: 2421312 - RNA, 19 nt, Homo sapiens
  misc_RNA (1)...(19): siRNA sense strand
gcaaagugcugcugugcca

SEQ ID NO: 2421313 - RNA, 19 nt, Homo sapiens
  misc_RNA (1)...(19): siRNA sense strand
ccagaaucgaagcgagcaa

SEQ ID NO: 2421314 - RNA, 19 nt, Homo sapiens
  misc_RNA (1)...(19): siRNA sense strand
aggauggagaugugagaau

SEQ ID NO: 2421315 - RNA, 19 nt, Homo sapiens
  misc_RNA (1)...(19): siRNA sense strand
guugacaagaauaggagaa

SEQ ID NO: 2421316 - RNA, 19 nt, Homo sapiens
  misc_RNA (1)...(19): siRNA sense strand
acgaagagugugaggggaa

SEQ ID NO: 2421317 - RNA, 19 nt, Homo sapiens
  misc_RNA (1)...(19): siRNA sense strand
gacaagaauaggagaagca

SEQ ID NO: 2421318 - RNA, 19 nt, Homo sapiens
  misc_RNA (1)...(19): siRNA sense strand
ucgaagucgccuagucaaa

SEQ ID NO: 2421319 - RNA, 19 nt, Homo sapiens
  misc_RNA (1)...(19): siRNA sense strand
ugucagacguuuuggucaa

SEQ ID NO: 2421320 - RNA, 19 nt, Homo sapiens
  misc_RNA (1)...(19): siRNA sense strand
uggcaaacggaaagagacu

SEQ ID NO: 2421321 - RNA, 19 nt, Homo sapiens
  misc_RNA (1)...(19): siRNA sense strand
aggauuuaauugaggaucu

SEQ ID NO: 2421322 - RNA, 19 nt, Homo sapiens
  misc_RNA (1)...(19): siRNA sense strand
caaccaagccugauggaac

SEQ ID NO: 2421323 - RNA, 19 nt, Homo sapiens
  misc_RNA (1)...(19): siRNA sense strand
gaauaggagaagcaaccaa

SEQ ID NO: 2421324 - RNA, 19 nt, Homo sapiens
  misc_RNA (1)...(19): siRNA sense strand
aucucaaacuugcaagaaa

SEQ ID NO: 2421325 - RNA, 19 nt, Homo sapiens
  misc_RNA (1)...(19): siRNA sense strand
cagaagaggaacucacaca

SEQ ID NO: 2421326 - RNA, 19 nt, Homo sapiens
  misc_RNA (1)...(19): siRNA sense strand
gguagaaguugaugaaaac

SEQ ID NO: 2421327 - RNA, 19 nt, Homo sapiens
  misc_RNA (1)...(19): siRNA sense strand
caacuugaagaaaggugaa

SEQ ID NO: 2421328 - RNA, 19 nt, Homo sapiens
  misc_RNA (1)...(19): siRNA sense strand
agaggaacucacacauaua

SEQ ID NO: 2421329 - RNA, 19 nt, Homo sapiens
  misc_RNA (1)...(19): siRNA sense strand
gugucacguccuuggcaaa

SEQ ID NO: 2421330 - RNA, 19 nt, Homo sapiens
  misc_RNA (1)...(19): siRNA sense strand
uggucaaacaauacaguca

SEQ ID NO: 2421331 - RNA, 19 nt, Homo sapiens
  misc_RNA (1)...(19): siRNA sense strand
auguuaaaguuguccauca

SEQ ID NO: 2421332 - RNA, 19 nt, Homo sapiens
  misc_RNA (1)...(19): siRNA sense strand
uguuaaaguuguccaucau

SEQ ID NO: 2421333 - RNA, 19 nt, Homo sapiens
  misc_RNA (1)...(19): siRNA sense strand
aagaaauggagcugucaga

SEQ ID NO: 2421334 - RNA, 19 nt, Homo sapiens
  misc_RNA (1)...(19): siRNA sense strand
ucgacaagcuggaguaccu

SEQ ID NO: 2421335 - RNA, 19 nt, Homo sapiens
  misc_RNA (1)...(19): siRNA sense strand
gguggcaaacggaaagaga

SEQ ID NO: 2421336 - RNA, 19 nt, Homo sapiens
  misc_RNA (1)...(19): siRNA sense strand
aaucccaguccaagagcua

SEQ ID NO: 2421337 - RNA, 19 nt, Homo sapiens
  misc_RNA (1)...(19): siRNA sense strand
aguccaagagcuaguccua

SEQ ID NO: 2421338 - RNA, 19 nt, Homo sapiens
  misc_RNA (1)...(19): siRNA sense strand
cagaggacagcaagagcuu

SEQ ID NO: 2421339 - RNA, 19 nt, Homo sapiens
  misc_RNA (1)...(19): siRNA sense strand
agcccuuucugguggcaaa

SEQ ID NO: 2421340 - RNA, 19 nt, Homo sapiens
  misc_RNA (1)...(19): siRNA sense strand
cuuaaagacacaccagaca

SEQ ID NO: 2421341 - RNA, 19 nt, Homo sapiens
  misc_RNA (1)...(19): siRNA sense strand
aggaauaugcacagcaaca

SEQ ID NO: 2421342 - RNA, 19 nt, Homo sapiens
  misc_RNA (1)...(19): siRNA sense strand
aggaagaggaauaugcaca

SEQ ID NO: 2421343 - RNA, 19 nt, Homo sapiens
  misc_RNA (1)...(19): siRNA sense strand
gugaaaggcauaaggugga

SEQ ID NO: 2421344 - RNA, 19 nt, Homo sapiens
  misc_RNA (1)...(19): siRNA sense strand
guucaaaagggaugguaau

SEQ ID NO: 2421345 - RNA, 19 nt, Homo sapiens
  misc_RNA (1)...(19): siRNA sense strand
ccuaaagaacugugcugau

SEQ ID NO: 2421346 - RNA, 19 nt, Homo sapiens
  misc_RNA (1)...(19): siRNA sense strand
augaaauaguugcugugaa

SEQ ID NO: 2421347 - RNA, 19 nt, Homo sapiens
  misc_RNA (1)...(19): siRNA sense strand
gugcugaugugaaaggcau

SEQ ID NO: 2421348 - RNA, 19 nt, Homo sapiens
  misc_RNA (1)...(19): siRNA sense strand
cugcaugguuggaaggaug

SEQ ID NO: 2421349 - RNA, 19 nt, Homo sapiens
  misc_RNA (1)...(19): siRNA sense strand
ggauagaacaccugggacu

SEQ ID NO: 2421350 - RNA, 19 nt, Homo sapiens
  misc_RNA (1)...(19): siRNA sense strand
aagccauccugcagggcaa

SEQ ID NO: 2421351 - RNA, 19 nt, Homo sapiens
  misc_RNA (1)...(19): siRNA sense strand
gagcacagguuuggcgcua

SEQ ID NO: 2421352 - RNA, 19 nt, Homo sapiens
  misc_RNA (1)...(19): siRNA sense strand
aggcccugcuggaggagaa

SEQ ID NO: 2421353 - RNA, 19 nt, Homo sapiens
  misc_RNA (1)...(19): siRNA sense strand
aguucaagcugcugcggau

SEQ ID NO: 2421354 - RNA, 19 nt, Homo sapiens
  misc_RNA (1)...(19): siRNA sense strand
uggcagugucuguggcuga

SEQ ID NO: 2421355 - RNA, 19 nt, Homo sapiens
  misc_RNA (1)...(19): siRNA sense strand
cggaugggcagaucggcua

SEQ ID NO: 2421356 - RNA, 19 nt, Homo sapiens
  misc_RNA (1)...(19): siRNA sense strand
uugucagccuaaugagcaa

SEQ ID NO: 2421357 - RNA, 19 nt, Homo sapiens
  misc_RNA (1)...(19): siRNA sense strand
cuguaugagcauggaguuu

SEQ ID NO: 2421358 - RNA, 19 nt, Homo sapiens
  misc_RNA (1)...(19): siRNA sense strand
ggaacuacgagcagaggcu

SEQ ID NO: 2421359 - RNA, 19 nt, Homo sapiens
  misc_RNA (1)...(19): siRNA sense strand
ccucgaagaaagacggcua

SEQ ID NO: 2421360 - RNA, 19 nt, Homo sapiens
  misc_RNA (1)...(19): siRNA sense strand
gcagauuugcaguggaaca

SEQ ID NO: 2421361 - RNA, 19 nt, Homo sapiens
  misc_RNA (1)...(19): siRNA sense strand
agagagaaguuacuggcaa

SEQ ID NO: 2421362 - RNA, 19 nt, Homo sapiens
  misc_RNA (1)...(19): siRNA sense strand
ugugauaagaaaugccaaa

SEQ ID NO: 2421363 - RNA, 19 nt, Homo sapiens
  misc_RNA (1)...(19): siRNA sense strand
guuaauggcaagcgugcaa

SEQ ID NO: 2421364 - RNA, 19 nt, Homo sapiens
  misc_RNA (1)...(19): siRNA sense strand
gcucuguagaugugcuaua

SEQ ID NO: 2421365 - RNA, 19 nt, Homo sapiens
  misc_RNA (1)...(19): siRNA sense strand
ggacuugaucuuuggccua

SEQ ID NO: 2421366 - RNA, 19 nt, Homo sapiens
  misc_RNA (1)...(19): siRNA sense strand
acucaauggucuaacucua

SEQ ID NO: 2421367 - RNA, 19 nt, Homo sapiens
  misc_RNA (1)...(19): siRNA sense strand
gagaaguuacgguuggaau

SEQ ID NO: 2421368 - RNA, 19 nt, Homo sapiens
  misc_RNA (1)...(19): siRNA sense strand
guauaacauuucuugggaa

SEQ ID NO: 2421369 - RNA, 19 nt, Homo sapiens
  misc_RNA (1)...(19): siRNA sense strand
acugacaauccaagguaua

SEQ ID NO: 2421370 - RNA, 19 nt, Homo sapiens
  misc_RNA (1)...(19): siRNA sense strand
uagaaguggugaugaggca

SEQ ID NO: 2421371 - RNA, 19 nt, Homo sapiens
  misc_RNA (1)...(19): siRNA sense strand
ggaacuaggcaaugaaccu

SEQ ID NO: 2421372 - RNA, 19 nt, Homo sapiens
  misc_RNA (1)...(19): siRNA sense strand
ucaagaaauuggugggcac

SEQ ID NO: 2421373 - RNA, 19 nt, Homo sapiens
  misc_RNA (1)...(19): siRNA sense strand
gguauaaagaaggagauuu

SEQ ID NO: 2421374 - RNA, 19 nt, Homo sapiens
  misc_RNA (1)...(19): siRNA sense strand
ggucugguuaggagaaaca

SEQ ID NO: 2421375 - RNA, 19 nt, Homo sapiens
  misc_RNA (1)...(19): siRNA sense strand
gcaaguauucuuuggagca

SEQ ID NO: 2421376 - RNA, 19 nt, Homo sapiens
  misc_RNA (1)...(19): siRNA sense strand
guuauuaagaacagcagau

SEQ ID NO: 2421377 - RNA, 19 nt, Homo sapiens
  misc_RNA (1)...(19): siRNA sense strand
ggcccuaccaggagcaauu

SEQ ID NO: 2421378 - RNA, 19 nt, Homo sapiens
  misc_RNA (1)...(19): siRNA sense strand
uggcaagaaggucugguua

SEQ ID NO: 2421379 - RNA, 19 nt, Homo sapiens
  misc_RNA (1)...(19): siRNA sense strand
aauccaagguauaaagaag

SEQ ID NO: 2421380 - RNA, 19 nt, Homo sapiens
  misc_RNA (1)...(19): siRNA sense strand
cugauguggaggagaaguu

SEQ ID NO: 2421381 - RNA, 19 nt, Homo sapiens
  misc_RNA (1)...(19): siRNA sense strand
caagguauaaagaaggaga

SEQ ID NO: 2421382 - RNA, 19 nt, Homo sapiens
  misc_RNA (1)...(19): siRNA sense strand
agguauaaagaaggagauu

SEQ ID NO: 2421383 - RNA, 19 nt, Homo sapiens
  misc_RNA (1)...(19): siRNA sense strand
cucaguugcuccuggacua

SEQ ID NO: 2421384 - RNA, 19 nt, Homo sapiens
  misc_RNA (1)...(19): siRNA sense strand
uggagaagugauugauuca

SEQ ID NO: 2421385 - RNA, 19 nt, Homo sapiens
  misc_RNA (1)...(19): siRNA sense strand
gcuaagaugcugaagagcu

SEQ ID NO: 2421386 - RNA, 19 nt, Homo sapiens
  misc_RNA (1)...(19): siRNA sense strand
agugauugauucaguuaca

SEQ ID NO: 2421387 - RNA, 19 nt, Homo sapiens
  misc_RNA (1)...(19): siRNA sense strand
ucucaagucaaccaggaua

SEQ ID NO: 2421388 - RNA, 19 nt, Homo sapiens
  misc_RNA (1)...(19): siRNA sense strand
uugaauggacggacugcua

SEQ ID NO: 2421389 - RNA, 19 nt, Homo sapiens
  misc_RNA (1)...(19): siRNA sense strand
ugggaauagaaguggugau

SEQ ID NO: 2421390 - RNA, 19 nt, Homo sapiens
  misc_RNA (1)...(19): siRNA sense strand
aaagaugguggaugaucaa

SEQ ID NO: 2421391 - RNA, 19 nt, Homo sapiens
  misc_RNA (1)...(19): siRNA sense strand
ggauaaauugggccuguca

SEQ ID NO: 2421392 - RNA, 19 nt, Homo sapiens
  misc_RNA (1)...(19): siRNA sense strand
agaaauaccugcaggagga

SEQ ID NO: 2421393 - RNA, 19 nt, Homo sapiens
  misc_RNA (1)...(19): siRNA sense strand
augaccaguacgagaaaua

SEQ ID NO: 2421394 - RNA, 19 nt, Homo sapiens
  misc_RNA (1)...(19): siRNA sense strand
aggaagaccaaguggggua

SEQ ID NO: 2421395 - RNA, 19 nt, Homo sapiens
  misc_RNA (1)...(19): siRNA sense strand
uuaugaaacgccugagcaa

SEQ ID NO: 2421396 - RNA, 19 nt, Homo sapiens
  misc_RNA (1)...(19): siRNA sense strand
ggcagagcggcuuggguaa

SEQ ID NO: 2421397 - RNA, 19 nt, Homo sapiens
  misc_RNA (1)...(19): siRNA sense strand
agaaggaauuugaugagga

SEQ ID NO: 2421398 - RNA, 19 nt, Homo sapiens
  misc_RNA (1)...(19): siRNA sense strand
augcagaacaucaaggaca

SEQ ID NO: 2421399 - RNA, 19 nt, Homo sapiens
  misc_RNA (1)...(19): siRNA sense strand
gcauccacuucgaggcgua

SEQ ID NO: 2421400 - RNA, 19 nt, Homo sapiens
  misc_RNA (1)...(19): siRNA sense strand
aguaccaggucaacggcaa

SEQ ID NO: 2421401 - RNA, 19 nt, Homo sapiens
  misc_RNA (1)...(19): siRNA sense strand
ggagaaaggcguccggaug

SEQ ID NO: 2421402 - RNA, 19 nt, Homo sapiens
  misc_RNA (1)...(19): siRNA sense strand
aggucaacaucaaccgcaa

SEQ ID NO: 2421403 - RNA, 19 nt, Homo sapiens
  misc_RNA (1)...(19): siRNA sense strand
uggaggagaaggagccaga

SEQ ID NO: 2421404 - RNA, 19 nt, Homo sapiens
  misc_RNA (1)...(19): siRNA sense strand
ugcagaacaucaaggacau

SEQ ID NO: 2421405 - RNA, 19 nt, Homo sapiens
  misc_RNA (1)...(19): siRNA sense strand
aacgagaaguuccgggaga

SEQ ID NO: 2421406 - RNA, 19 nt, Homo sapiens
  misc_RNA (1)...(19): siRNA sense strand
ccacagacacuaaggacaa

SEQ ID NO: 2421407 - RNA, 19 nt, Homo sapiens
  misc_RNA (1)...(19): siRNA sense strand
acugaaacccuaaggauaa

SEQ ID NO: 2421408 - RNA, 19 nt, Homo sapiens
  misc_RNA (1)...(19): siRNA sense strand
gcaccaaauuagagagucu

SEQ ID NO: 2421409 - RNA, 19 nt, Homo sapiens
  misc_RNA (1)...(19): siRNA sense strand
ccauuaugauugaggauga

SEQ ID NO: 2421410 - RNA, 19 nt, Homo sapiens
  misc_RNA (1)...(19): siRNA sense strand
acacuaaggacaaggagua

SEQ ID NO: 2421411 - RNA, 19 nt, Homo sapiens
  misc_RNA (1)...(19): siRNA sense strand
ugaaaaggaagcagagaaa

SEQ ID NO: 2421412 - RNA, 19 nt, Homo sapiens
  misc_RNA (1)...(19): siRNA sense strand
aggaagacucugaggauga

SEQ ID NO: 2421413 - RNA, 19 nt, Homo sapiens
  misc_RNA (1)...(19): siRNA sense strand
cagagauggcagagaaaga

SEQ ID NO: 2421414 - RNA, 19 nt, Homo sapiens
  misc_RNA (1)...(19): siRNA sense strand
ucgaucugguggagggaaa

SEQ ID NO: 2421415 - RNA, 19 nt, Homo sapiens
  misc_RNA (1)...(19): siRNA sense strand
gcccaagagucgaucuaaa

SEQ ID NO: 2421416 - RNA, 19 nt, Homo sapiens
  misc_RNA (1)...(19): siRNA sense strand
auuucaaguuagagagaga

SEQ ID NO: 2421417 - RNA, 19 nt, Homo sapiens
  misc_RNA (1)...(19): siRNA sense strand
uggcagagaaagaagacua

SEQ ID NO: 2421418 - RNA, 19 nt, Homo sapiens
  misc_RNA (1)...(19): siRNA sense strand
guagaaaaugagaaggaaa

SEQ ID NO: 2421419 - RNA, 19 nt, Homo sapiens
  misc_RNA (1)...(19): siRNA sense strand
ccguaaauugggagugauu

SEQ ID NO: 2421420 - RNA, 19 nt, Homo sapiens
  misc_RNA (1)...(19): siRNA sense strand
ggaauuuggcaguggcuuu

SEQ ID NO: 2421421 - RNA, 19 nt, Homo sapiens
  misc_RNA (1)...(19): siRNA sense strand
guucaggcuuggaaagaau

SEQ ID NO: 2421422 - RNA, 19 nt, Homo sapiens
  misc_RNA (1)...(19): siRNA sense strand
caguaaaggaaaucgaaga

SEQ ID NO: 2421423 - RNA, 19 nt, Homo sapiens
  misc_RNA (1)...(19): siRNA sense strand
aauuaacagucuugagaga

SEQ ID NO: 2421424 - RNA, 19 nt, Homo sapiens
  misc_RNA (1)...(19): siRNA sense strand
ggcccaaacucguguaaaa

SEQ ID NO: 2421425 - RNA, 19 nt, Homo sapiens
  misc_RNA (1)...(19): siRNA sense strand
ggaauauggagcugacauu

SEQ ID NO: 2421426 - RNA, 19 nt, Homo sapiens
  misc_RNA (1)...(19): siRNA sense strand
guauggagucccaggguau

SEQ ID NO: 2421427 - RNA, 19 nt, Homo sapiens
  misc_RNA (1)...(19): siRNA sense strand
guaaauugggagugauuga

SEQ ID NO: 2421428 - RNA, 19 nt, Homo sapiens
  misc_RNA (1)...(19): siRNA sense strand
gggaacgaguuaagaaaau

SEQ ID NO: 2421429 - RNA, 19 nt, Homo sapiens
  misc_RNA (1)...(19): siRNA sense strand
agaggaagaucuuggacuu

SEQ ID NO: 2421430 - RNA, 19 nt, Homo sapiens
  misc_RNA (1)...(19): siRNA sense strand
cacagagcuuguugagaaa

SEQ ID NO: 2421431 - RNA, 19 nt, Homo sapiens
  misc_RNA (1)...(19): siRNA sense strand
ugacauugccucaaaggaa

SEQ ID NO: 2421432 - RNA, 19 nt, Homo sapiens
  misc_RNA (1)...(19): siRNA sense strand
gaugaacgucaguguguaa

SEQ ID NO: 2421433 - RNA, 19 nt, Homo sapiens
  misc_RNA (1)...(19): siRNA sense strand
cugaagagacgccuggaaa

SEQ ID NO: 2421434 - RNA, 19 nt, Homo sapiens
  misc_RNA (1)...(19): siRNA sense strand
ucaacagcauagucagaaa

SEQ ID NO: 2421435 - RNA, 19 nt, Homo sapiens
  misc_RNA (1)...(19): siRNA sense strand
gaaaccuccauuagagaaa

SEQ ID NO: 2421436 - RNA, 19 nt, Homo sapiens
  misc_RNA (1)...(19): siRNA sense strand
caaagaucaccaagaagaa

SEQ ID NO: 2421437 - RNA, 19 nt, Homo sapiens
  misc_RNA (1)...(19): siRNA sense strand
guuauauagcagauggcaa

SEQ ID NO: 2421438 - RNA, 19 nt, Homo sapiens
  misc_RNA (1)...(19): siRNA sense strand
gugggaacgaguuaagaaa

SEQ ID NO: 2421439 - RNA, 19 nt, Homo sapiens
  misc_RNA (1)...(19): siRNA sense strand
ccuauugagaggaaagauu

SEQ ID NO: 2421440 - RNA, 19 nt, Homo sapiens
  misc_RNA (1)...(19): siRNA sense strand
aggaugucacaguggaaua

SEQ ID NO: 2421441 - RNA, 19 nt, Homo sapiens
  misc_RNA (1)...(19): siRNA sense strand
ugaagaaauucccagacaa

SEQ ID NO: 2421442 - RNA, 19 nt, Homo sapiens
  misc_RNA (1)...(19): siRNA sense strand
guacaaaccccaugauauu

SEQ ID NO: 2421443 - RNA, 19 nt, Homo sapiens
  misc_RNA (1)...(19): siRNA sense strand
gcagaaucuuacaacgaau

SEQ ID NO: 2421444 - RNA, 19 nt, Homo sapiens
  misc_RNA (1)...(19): siRNA sense strand
gagggaagcgagauggaau

SEQ ID NO: 2421445 - RNA, 19 nt, Homo sapiens
  misc_RNA (1)...(19): siRNA sense strand
gagcagaaucuuacaacga

SEQ ID NO: 2421446 - RNA, 19 nt, Homo sapiens
  misc_RNA (1)...(19): siRNA sense strand
gggcaggaacucugauaca

SEQ ID NO: 2421447 - RNA, 19 nt, Homo sapiens
  misc_RNA (1)...(19): siRNA sense strand
gggaaauggcagaugcguu

SEQ ID NO: 2421448 - RNA, 19 nt, Homo sapiens
  misc_RNA (1)...(19): siRNA sense strand
cuucaacuguucagaaaga

SEQ ID NO: 2421449 - RNA, 19 nt, Homo sapiens
  misc_RNA (1)...(19): siRNA sense strand
ucucauagaccuaggggua

SEQ ID NO: 2421450 - RNA, 19 nt, Homo sapiens
  misc_RNA (1)...(19): siRNA sense strand
gcaugagagcagaggccau

SEQ ID NO: 2421451 - RNA, 19 nt, Homo sapiens
  misc_RNA (1)...(19): siRNA sense strand
agaaauucccagacaauga

SEQ ID NO: 2421452 - RNA, 19 nt, Homo sapiens
  misc_RNA (1)...(19): siRNA sense strand
ugaaugaauuggaggccca

SEQ ID NO: 2421453 - RNA, 19 nt, Homo sapiens
  misc_RNA (1)...(19): siRNA sense strand
cuaaggacaaggaguacaa

SEQ ID NO: 2421454 - RNA, 19 nt, Homo sapiens
  misc_RNA (1)...(19): siRNA sense strand
aacugaaacccuaaggaua

SEQ ID NO: 2421455 - RNA, 19 nt, Homo sapiens
  misc_RNA (1)...(19): siRNA sense strand
gggccuugaaugugaauga

SEQ ID NO: 2421456 - RNA, 19 nt, Homo sapiens
  misc_RNA (1)...(19): siRNA sense strand
cguauucagcaguggagaa

SEQ ID NO: 2421457 - RNA, 19 nt, Homo sapiens
  misc_RNA (1)...(19): siRNA sense strand
caccugaggaagaggagua

SEQ ID NO: 2421458 - RNA, 19 nt, Homo sapiens
  misc_RNA (1)...(19): siRNA sense strand
ggcuucaacuguucagaaa

SEQ ID NO: 2421459 - RNA, 19 nt, Homo sapiens
  misc_RNA (1)...(19): siRNA sense strand
cuugaaucguguagaagau

SEQ ID NO: 2421460 - RNA, 19 nt, Homo sapiens
  misc_RNA (1)...(19): siRNA sense strand
gcuuugaauuugauguuga

SEQ ID NO: 2421461 - RNA, 19 nt, Homo sapiens
  misc_RNA (1)...(19): siRNA sense strand
cgaagagaucccugcauau

SEQ ID NO: 2421462 - RNA, 19 nt, Homo sapiens
  misc_RNA (1)...(19): siRNA sense strand
gggagaugcacuucgauau

SEQ ID NO: 2421463 - RNA, 19 nt, Homo sapiens
  misc_RNA (1)...(19): siRNA sense strand
gcaucaagcaagaaccuau

SEQ ID NO: 2421464 - RNA, 19 nt, Homo sapiens
  misc_RNA (1)...(19): siRNA sense strand
gauacauaguaaaugguca

SEQ ID NO: 2421465 - RNA, 19 nt, Homo sapiens
  misc_RNA (1)...(19): siRNA sense strand
uaugauugaggaugagaaa

SEQ ID NO: 2421466 - RNA, 19 nt, Homo sapiens
  misc_RNA (1)...(19): siRNA sense strand
cuuaauggcaaaaggcaaa

SEQ ID NO: 2421467 - RNA, 19 nt, Homo sapiens
  misc_RNA (1)...(19): siRNA sense strand
cuacggcaguaaaggaaau

SEQ ID NO: 2421468 - RNA, 19 nt, Homo sapiens
  misc_RNA (1)...(19): siRNA sense strand
ggcuauaauuggagcacga

SEQ ID NO: 2421469 - RNA, 19 nt, Homo sapiens
  misc_RNA (1)...(19): siRNA sense strand
agguggagcacgagagcuu

SEQ ID NO: 2421470 - RNA, 19 nt, Homo sapiens
  misc_RNA (1)...(19): siRNA sense strand
ccugcaagguggagcacga

SEQ ID NO: 2421471 - RNA, 19 nt, Homo sapiens
  misc_RNA (1)...(19): siRNA sense strand
caagccagguggacggcaa

SEQ ID NO: 2421472 - RNA, 19 nt, Homo sapiens
  misc_RNA (1)...(19): siRNA sense strand
ccacagacagagggcacaa

SEQ ID NO: 2421473 - RNA, 19 nt, Homo sapiens
  misc_RNA (1)...(19): siRNA sense strand
cguccaggucaaagaggga

SEQ ID NO: 2421474 - RNA, 19 nt, Homo sapiens
  misc_RNA (1)...(19): siRNA sense strand
cuuaaaggaaagagggaaa

SEQ ID NO: 2421475 - RNA, 19 nt, Homo sapiens
  misc_RNA (1)...(19): siRNA sense strand
cagcaaacuagaaaggaaa

SEQ ID NO: 2421476 - RNA, 19 nt, Homo sapiens
  misc_RNA (1)...(19): siRNA sense strand
gcaaagucgaugagaauau

SEQ ID NO: 2421477 - RNA, 19 nt, Homo sapiens
  misc_RNA (1)...(19): siRNA sense strand
gggaaauaucuuaaaggaa

SEQ ID NO: 2421478 - RNA, 19 nt, Homo sapiens
  misc_RNA (1)...(19): siRNA sense strand
aaauagagccugagcaaau

SEQ ID NO: 2421479 - RNA, 19 nt, Homo sapiens
  misc_RNA (1)...(19): siRNA sense strand
cagagaagccuguggaaga

SEQ ID NO: 2421480 - RNA, 19 nt, Homo sapiens
  misc_RNA (1)...(19): siRNA sense strand
ggaaagagggaaaggagau

SEQ ID NO: 2421481 - RNA, 19 nt, Homo sapiens
  misc_RNA (1)...(19): siRNA sense strand
acaaauagagccugagcaa

SEQ ID NO: 2421482 - RNA, 19 nt, Homo sapiens
  misc_RNA (1)...(19): siRNA sense strand
cagcagagcgugugccaaa

SEQ ID NO: 2421483 - RNA, 19 nt, Homo sapiens
  misc_RNA (1)...(19): siRNA sense strand
agaaggaagcccagagcaa

SEQ ID NO: 2421484 - RNA, 19 nt, Homo sapiens
  misc_RNA (1)...(19): siRNA sense strand
ugauguagaagcagaaaua

SEQ ID NO: 2421485 - RNA, 19 nt, Homo sapiens
  misc_RNA (1)...(19): siRNA sense strand
acuaagacugucagagaaa

SEQ ID NO: 2421486 - RNA, 19 nt, Homo sapiens
  misc_RNA (1)...(19): siRNA sense strand
augcaaagucgaugagaau

SEQ ID NO: 2421487 - RNA, 19 nt, Homo sapiens
  misc_RNA (1)...(19): siRNA sense strand
gggaaagauaucacagcaa

SEQ ID NO: 2421488 - RNA, 19 nt, Homo sapiens
  misc_RNA (1)...(19): siRNA sense strand
cagcaagaguuguguggau

SEQ ID NO: 2421489 - RNA, 19 nt, Homo sapiens
  misc_RNA (1)...(19): siRNA sense strand
aagcaaaacuacagggaca

SEQ ID NO: 2421490 - RNA, 19 nt, Homo sapiens
  misc_RNA (1)...(19): siRNA sense strand
gcaggauguugaaggguau

SEQ ID NO: 2421491 - RNA, 19 nt, Homo sapiens
  misc_RNA (1)...(19): siRNA sense strand
ccuuagagcauguggcaga

SEQ ID NO: 2421492 - RNA, 19 nt, Homo sapiens
  misc_RNA (1)...(19): siRNA sense strand
ggagauauucauggagaua

SEQ ID NO: 2421493 - RNA, 19 nt, Homo sapiens
  misc_RNA (1)...(19): siRNA sense strand
gaauaugacccaaaggaca

SEQ ID NO: 2421494 - RNA, 19 nt, Homo sapiens
  misc_RNA (1)...(19): siRNA sense strand
ccaaacaaacugagccaau

SEQ ID NO: 2421495 - RNA, 19 nt, Homo sapiens
  misc_RNA (1)...(19): siRNA sense strand
aaagcaugguggagaauau

SEQ ID NO: 2421496 - RNA, 19 nt, Homo sapiens
  misc_RNA (1)...(19): siRNA sense strand
cugauaaaccugagaagga

SEQ ID NO: 2421497 - RNA, 19 nt, Homo sapiens
  misc_RNA (1)...(19): siRNA sense strand
cuucugagguccaagcaaa

SEQ ID NO: 2421498 - RNA, 19 nt, Homo sapiens
  misc_RNA (1)...(19): siRNA sense strand
acucagaaccagacaaaga

SEQ ID NO: 2421499 - RNA, 19 nt, Homo sapiens
  misc_RNA (1)...(19): siRNA sense strand
uuuaaagcaugguggagaa

SEQ ID NO: 2421500 - RNA, 19 nt, Homo sapiens
  misc_RNA (1)...(19): siRNA sense strand
gucaggaaucuuugagaaa

SEQ ID NO: 2421501 - RNA, 19 nt, Homo sapiens
  misc_RNA (1)...(19): siRNA sense strand
cagaaauccauucgagcua

SEQ ID NO: 2421502 - RNA, 19 nt, Homo sapiens
  misc_RNA (1)...(19): siRNA sense strand
cuaucaggaacgaaggaaa

SEQ ID NO: 2421503 - RNA, 19 nt, Homo sapiens
  misc_RNA (1)...(19): siRNA sense strand
agagcacacuggaaagaaa

SEQ ID NO: 2421504 - RNA, 19 nt, Homo sapiens
  misc_RNA (1)...(19): siRNA sense strand
gagcaaagagccagagaag

SEQ ID NO: 2421505 - RNA, 19 nt, Homo sapiens
  misc_RNA (1)...(19): siRNA sense strand
acacgaaagagcagaccua

SEQ ID NO: 2421506 - RNA, 19 nt, Homo sapiens
  misc_RNA (1)...(19): siRNA sense strand
acagaauaccagaggcuau

SEQ ID NO: 2421507 - RNA, 19 nt, Homo sapiens
  misc_RNA (1)...(19): siRNA sense strand
gcgcaugcuaagaagacaa

SEQ ID NO: 2421508 - RNA, 19 nt, Homo sapiens
  misc_RNA (1)...(19): siRNA sense strand
gcuaagaagacaagcggca

SEQ ID NO: 2421509 - RNA, 19 nt, Homo sapiens
  misc_RNA (1)...(19): siRNA sense strand
agaagaaaccaguaagcuu

SEQ ID NO: 2421510 - RNA, 19 nt, Homo sapiens
  misc_RNA (1)...(19): siRNA sense strand
uggcagagcacacuggaaa

SEQ ID NO: 2421511 - RNA, 19 nt, Homo sapiens
  misc_RNA (1)...(19): siRNA sense strand
ccuagaagagagagaagau

SEQ ID NO: 2421512 - RNA, 19 nt, Homo sapiens
  misc_RNA (1)...(19): siRNA sense strand
ggaauuaucuucaagcaca

SEQ ID NO: 2421513 - RNA, 19 nt, Homo sapiens
  misc_RNA (1)...(19): siRNA sense strand
aggaaacgccggaaagaga

SEQ ID NO: 2421514 - RNA, 19 nt, Homo sapiens
  misc_RNA (1)...(19): siRNA sense strand
ccagaaguucggagcaaau

SEQ ID NO: 2421515 - RNA, 19 nt, Homo sapiens
  misc_RNA (1)...(19): siRNA sense strand
ccaacauccuauaugacaa

SEQ ID NO: 2421516 - RNA, 19 nt, Homo sapiens
  misc_RNA (1)...(19): siRNA sense strand
agaaaagggucaaagaaga

SEQ ID NO: 2421517 - RNA, 19 nt, Homo sapiens
  misc_RNA (1)...(19): siRNA sense strand
gaaaagggucaaagaagaa

SEQ ID NO: 2421518 - RNA, 19 nt, Homo sapiens
  misc_RNA (1)...(19): siRNA sense strand
ccaucagaccagagcagua

SEQ ID NO: 2421519 - RNA, 19 nt, Homo sapiens
  misc_RNA (1)...(19): siRNA sense strand
gaugagaauaugacccaaa

SEQ ID NO: 2421520 - RNA, 19 nt, Homo sapiens
  misc_RNA (1)...(19): siRNA sense strand
gguacaaaucgaaugaaga

SEQ ID NO: 2421521 - RNA, 19 nt, Homo sapiens
  misc_RNA (1)...(19): siRNA sense strand
agaaagagcacaaacccaa

SEQ ID NO: 2421522 - RNA, 19 nt, Homo sapiens
  misc_RNA (1)...(19): siRNA sense strand
cuaugaugucugucggaaa

SEQ ID NO: 2421523 - RNA, 19 nt, Homo sapiens
  misc_RNA (1)...(19): siRNA sense strand
aagaaaagauguacggaca

SEQ ID NO: 2421524 - RNA, 19 nt, Homo sapiens
  misc_RNA (1)...(19): siRNA sense strand
gcagagaagcauagcaugu

SEQ ID NO: 2421525 - RNA, 19 nt, Homo sapiens
  misc_RNA (1)...(19): siRNA sense strand
guuauuaagaugagcacuu

SEQ ID NO: 2421526 - RNA, 19 nt, Homo sapiens
  misc_RNA (1)...(19): siRNA sense strand
ugggaagcauucagaguuu

SEQ ID NO: 2421527 - RNA, 19 nt, Homo sapiens
  misc_RNA (1)...(19): siRNA sense strand
ggagaaacugauaaagcau

SEQ ID NO: 2421528 - RNA, 19 nt, Homo sapiens
  misc_RNA (1)...(19): siRNA sense strand
aaacacagcaucagcacaa

SEQ ID NO: 2421529 - RNA, 19 nt, Homo sapiens
  misc_RNA (1)...(19): siRNA sense strand
aggacaagauucugagcca

SEQ ID NO: 2421530 - RNA, 19 nt, Homo sapiens
  misc_RNA (1)...(19): siRNA sense strand
gugccaacuucuucagcaa

SEQ ID NO: 2421531 - RNA, 19 nt, Homo sapiens
  misc_RNA (1)...(19): siRNA sense strand
ggcaggauguugaagggua

SEQ ID NO: 2421532 - RNA, 19 nt, Homo sapiens
  misc_RNA (1)...(19): siRNA sense strand
ccuucaaauccucgguuua

SEQ ID NO: 2421533 - RNA, 19 nt, Homo sapiens
  misc_RNA (1)...(19): siRNA sense strand
gaaagauaucacagcaaga

SEQ ID NO: 2421534 - RNA, 19 nt, Homo sapiens
  misc_RNA (1)...(19): siRNA sense strand
cggaaagagaagagcguag

SEQ ID NO: 2421535 - RNA, 19 nt, Homo sapiens
  misc_RNA (1)...(19): siRNA sense strand
aggaaagagggaaaggaga

SEQ ID NO: 2421536 - RNA, 19 nt, Homo sapiens
  misc_RNA (1)...(19): siRNA sense strand
cuaacgaagcauaugaaau

SEQ ID NO: 2421537 - RNA, 19 nt, Homo sapiens
  misc_RNA (1)...(19): siRNA sense strand
ccaaagagauguuucacca

SEQ ID NO: 2421538 - RNA, 19 nt, Homo sapiens
  misc_RNA (1)...(19): siRNA sense strand
cacuuaagaccuuguguaa

SEQ ID NO: 2421539 - RNA, 19 nt, Homo sapiens
  misc_RNA (1)...(19): siRNA sense strand
gugaaguggugcagcaagu

SEQ ID NO: 2421540 - RNA, 19 nt, Homo sapiens
  misc_RNA (1)...(19): siRNA sense strand
cggcuuaguccgagaaaug

SEQ ID NO: 2421541 - RNA, 19 nt, Homo sapiens
  misc_RNA (1)...(19): siRNA sense strand
aaacaggaaacgccggaaa

SEQ ID NO: 2421542 - RNA, 19 nt, Homo sapiens
  misc_RNA (1)...(19): siRNA sense strand
agucaggaaucuuugagaa

SEQ ID NO: 2421543 - RNA, 19 nt, Homo sapiens
  misc_RNA (1)...(19): siRNA sense strand
uugugaagaaugugggauu

SEQ ID NO: 2421544 - RNA, 19 nt, Homo sapiens
  misc_RNA (1)...(19): siRNA sense strand
agaaggugcuuaugaacau

SEQ ID NO: 2421545 - RNA, 19 nt, Homo sapiens
  misc_RNA (1)...(19): siRNA sense strand
ugaacagaguacagacaca

SEQ ID NO: 2421546 - RNA, 19 nt, Homo sapiens
  misc_RNA (1)...(19): siRNA sense strand
ggaaggugguggagacgga

SEQ ID NO: 2421547 - RNA, 19 nt, Homo sapiens
  misc_RNA (1)...(19): siRNA sense strand
gcgccaaggagaaugucaa

SEQ ID NO: 2421548 - RNA, 19 nt, Homo sapiens
  misc_RNA (1)...(19): siRNA sense strand
agaccagcgccaaggagaa

SEQ ID NO: 2421549 - RNA, 19 nt, Homo sapiens
  misc_RNA (1)...(19): siRNA sense strand
augacgacccugagcggaa

SEQ ID NO: 2421550 - RNA, 19 nt, Homo sapiens
  misc_RNA (1)...(19): siRNA sense strand
agaaugucaacguggaaga

SEQ ID NO: 2421551 - RNA, 19 nt, Homo sapiens
  misc_RNA (1)...(19): siRNA sense strand
aagaaagacaaccuggcaa

SEQ ID NO: 2421552 - RNA, 19 nt, Homo sapiens
  misc_RNA (1)...(19): siRNA sense strand
gguccuccgagcaaagaaa

SEQ ID NO: 2421553 - RNA, 19 nt, Homo sapiens
  misc_RNA (1)...(19): siRNA sense strand
aagaacaguaaacgaaaga

SEQ ID NO: 2421554 - RNA, 19 nt, Homo sapiens
  misc_RNA (1)...(19): siRNA sense strand
augucaacguggaagagau

SEQ ID NO: 2421555 - RNA, 19 nt, Homo sapiens
  misc_RNA (1)...(19): siRNA sense strand
cugaaagugauguggguaa

SEQ ID NO: 2421556 - RNA, 19 nt, Homo sapiens
  misc_RNA (1)...(19): siRNA sense strand
gcaauaauaucuuggccaa

SEQ ID NO: 2421557 - RNA, 19 nt, Homo sapiens
  misc_RNA (1)...(19): siRNA sense strand
gaguaaacugggugaggaa

SEQ ID NO: 2421558 - RNA, 19 nt, Homo sapiens
  misc_RNA (1)...(19): siRNA sense strand
cugaagaggagcaggaauu

SEQ ID NO: 2421559 - RNA, 19 nt, Homo sapiens
  misc_RNA (1)...(19): siRNA sense strand
ggaagaagggcauggaaaa

SEQ ID NO: 2421560 - RNA, 19 nt, Homo sapiens
  misc_RNA (1)...(19): siRNA sense strand
agggugugcuugugagaaa

SEQ ID NO: 2421561 - RNA, 19 nt, Homo sapiens
  misc_RNA (1)...(19): siRNA sense strand
ccaugaaagugaugcucaa

SEQ ID NO: 2421562 - RNA, 19 nt, Homo sapiens
  misc_RNA (1)...(19): siRNA sense strand
uggaagaagggcauggaaa

SEQ ID NO: 2421563 - RNA, 19 nt, Homo sapiens
  misc_RNA (1)...(19): siRNA sense strand
cugaaguggaagaggauuu

SEQ ID NO: 2421564 - RNA, 19 nt, Homo sapiens
  misc_RNA (1)...(19): siRNA sense strand
gagaaugcugauagugaua

SEQ ID NO: 2421565 - RNA, 19 nt, Homo sapiens
  misc_RNA (1)...(19): siRNA sense strand
gugcaacaccauugagaau

SEQ ID NO: 2421566 - RNA, 19 nt, Homo sapiens
  misc_RNA (1)...(19): siRNA sense strand
ugggaaaaguagugggaca

SEQ ID NO: 2421567 - RNA, 19 nt, Homo sapiens
  misc_RNA (1)...(19): siRNA sense strand
cugaugaagcaaauaguaa

SEQ ID NO: 2421568 - RNA, 19 nt, Homo sapiens
  misc_RNA (1)...(19): siRNA sense strand
ggguaaaagcagugaaagu

SEQ ID NO: 2421569 - RNA, 19 nt, Homo sapiens
  misc_RNA (1)...(19): siRNA sense strand
ggcuacaguuaaagaagaa

SEQ ID NO: 2421570 - RNA, 19 nt, Homo sapiens
  misc_RNA (1)...(19): siRNA sense strand
ccauauaguacucagaaau

SEQ ID NO: 2421571 - RNA, 19 nt, Homo sapiens
  misc_RNA (1)...(19): siRNA sense strand
ugugagaaauggaggaagu

SEQ ID NO: 2421572 - RNA, 19 nt, Homo sapiens
  misc_RNA (1)...(19): siRNA sense strand
cuccaggguuugagaaauu

SEQ ID NO: 2421573 - RNA, 19 nt, Homo sapiens
  misc_RNA (1)...(19): siRNA sense strand
agagagaagauuacaguuu

SEQ ID NO: 2421574 - RNA, 19 nt, Homo sapiens
  misc_RNA (1)...(19): siRNA sense strand
cggagaaugcugauaguga

SEQ ID NO: 2421575 - RNA, 19 nt, Homo sapiens
  misc_RNA (1)...(19): siRNA sense strand
ugaaagugauguggguaaa

SEQ ID NO: 2421576 - RNA, 19 nt, Homo sapiens
  misc_RNA (1)...(19): siRNA sense strand
ucgauuaucuccaggaaaa

SEQ ID NO: 2421577 - RNA, 19 nt, Homo sapiens
  misc_RNA (1)...(19): siRNA sense strand
ucgaaauggaagagguuca

SEQ ID NO: 2421578 - RNA, 19 nt, Homo sapiens
  misc_RNA (1)...(19): siRNA sense strand
gggccugggacuuggagaa

SEQ ID NO: 2421579 - RNA, 19 nt, Homo sapiens
  misc_RNA (1)...(19): siRNA sense strand
cugcugaggaaaugcauaa

SEQ ID NO: 2421580 - RNA, 19 nt, Homo sapiens
  misc_RNA (1)...(19): siRNA sense strand
guuggaacuuuaugaggaa

SEQ ID NO: 2421581 - RNA, 19 nt, Homo sapiens
  misc_RNA (1)...(19): siRNA sense strand
ugagaauacaggaacuaaa

SEQ ID NO: 2421582 - RNA, 19 nt, Homo sapiens
  misc_RNA (1)...(19): siRNA sense strand
ugacugaggaggagagguu

SEQ ID NO: 2421583 - RNA, 19 nt, Homo sapiens
  misc_RNA (1)...(19): siRNA sense strand
cagcacaagaccagccuua

SEQ ID NO: 2421584 - RNA, 19 nt, Homo sapiens
  misc_RNA (1)...(19): siRNA sense strand
aagcagugaaagugaauuu

SEQ ID NO: 2421585 - RNA, 19 nt, Homo sapiens
  misc_RNA (1)...(19): siRNA sense strand
ugccaaagggauagauauu

SEQ ID NO: 2421586 - RNA, 19 nt, Homo sapiens
  misc_RNA (1)...(19): siRNA sense strand
ccucuaacaaggagacaga

SEQ ID NO: 2421587 - RNA, 19 nt, Homo sapiens
  misc_RNA (1)...(19): siRNA sense strand
guuaauacagcuuugcaaa

SEQ ID NO: 2421588 - RNA, 19 nt, Homo sapiens
  misc_RNA (1)...(19): siRNA sense strand
accuaaaucugaaguggaa

SEQ ID NO: 2421589 - RNA, 19 nt, Homo sapiens
  misc_RNA (1)...(19): siRNA sense strand
aggaggaacuggaguggca

SEQ ID NO: 2421590 - RNA, 19 nt, Homo sapiens
  misc_RNA (1)...(19): siRNA sense strand
uuuggaaaguucugaggaa

SEQ ID NO: 2421591 - RNA, 19 nt, Homo sapiens
  misc_RNA (1)...(19): siRNA sense strand
agguguuauuugugcuuua

SEQ ID NO: 2421592 - RNA, 19 nt, Homo sapiens
  misc_RNA (1)...(19): siRNA sense strand
cgauauggcucaaggacug

SEQ ID NO: 2421593 - RNA, 19 nt, Homo sapiens
  misc_RNA (1)...(19): siRNA sense strand
aggaggaggacgaggagga

SEQ ID NO: 2421594 - RNA, 19 nt, Homo sapiens
  misc_RNA (1)...(19): siRNA sense strand
gcgaagaguauuacaugau

SEQ ID NO: 2421595 - RNA, 19 nt, Homo sapiens
  misc_RNA (1)...(19): siRNA sense strand
auauaaugacacagcagaa

SEQ ID NO: 2421596 - RNA, 19 nt, Homo sapiens
  misc_RNA (1)...(19): siRNA sense strand
aggacgaggaggaggacga

SEQ ID NO: 2421597 - RNA, 19 nt, Homo sapiens
  misc_RNA (1)...(19): siRNA sense strand
cagcagcaguugcagacaa

SEQ ID NO: 2421598 - RNA, 19 nt, Homo sapiens
  misc_RNA (1)...(19): siRNA sense strand
gaauggaacuucaggaccu

SEQ ID NO: 2421599 - RNA, 19 nt, Homo sapiens
  misc_RNA (1)...(19): siRNA sense strand
ugaacaaagcaguaguaca

SEQ ID NO: 2421600 - RNA, 19 nt, Homo sapiens
  misc_RNA (1)...(19): siRNA sense strand
uuucagaauuguuggaacu

SEQ ID NO: 2421601 - RNA, 19 nt, Homo sapiens
  misc_RNA (1)...(19): siRNA sense strand
ggucuuacgaagucgaaaa

SEQ ID NO: 2421602 - RNA, 19 nt, Homo sapiens
  misc_RNA (1)...(19): siRNA sense strand
gauccuauuagcuguguaa

SEQ ID NO: 2421603 - RNA, 19 nt, Homo sapiens
  misc_RNA (1)...(19): siRNA sense strand
caacgagaagaucgcgaua

SEQ ID NO: 2421604 - RNA, 19 nt, Homo sapiens
  misc_RNA (1)...(19): siRNA sense strand
gcugaagauucuacagacu

SEQ ID NO: 2421605 - RNA, 19 nt, Homo sapiens
  misc_RNA (1)...(19): siRNA sense strand
gaagaggaaacgugcccaa

SEQ ID NO: 2421606 - RNA, 19 nt, Homo sapiens
  misc_RNA (1)...(19): siRNA sense strand
cuaaaucugaaguggaaga

SEQ ID NO: 2421607 - RNA, 19 nt, Homo sapiens
  misc_RNA (1)...(19): siRNA sense strand
ggaacaugauggucagucu

SEQ ID NO: 2421608 - RNA, 19 nt, Homo sapiens
  misc_RNA (1)...(19): siRNA sense strand
uggaaaguucugaggaagu

SEQ ID NO: 2421609 - RNA, 19 nt, Homo sapiens
  misc_RNA (1)...(19): siRNA sense strand
gcuguguaauacuggaauu

SEQ ID NO: 2421610 - RNA, 19 nt, Homo sapiens
  misc_RNA (1)...(19): siRNA sense strand
gagaaauggaggaaguuuu

SEQ ID NO: 2421611 - RNA, 19 nt, Homo sapiens
  misc_RNA (1)...(19): siRNA sense strand
uggauuuggacgugaugaa

SEQ ID NO: 2421612 - RNA, 19 nt, Homo sapiens
  misc_RNA (1)...(19): siRNA sense strand
aggagagguuugaaguuga

SEQ ID NO: 2421613 - RNA, 19 nt, Homo sapiens
  misc_RNA (1)...(19): siRNA sense strand
uggagaaagcucagaaucu

SEQ ID NO: 2421614 - RNA, 19 nt, Homo sapiens
  misc_RNA (1)...(19): siRNA sense strand
aagaaaguguuccgagcau

SEQ ID NO: 2421615 - RNA, 19 nt, Homo sapiens
  misc_RNA (1)...(19): siRNA sense strand
gaaagggagaaguaugaau

SEQ ID NO: 2421616 - RNA, 19 nt, Homo sapiens
  misc_RNA (1)...(19): siRNA sense strand
cugcaaaucguuuaaugaa

SEQ ID NO: 2421617 - RNA, 19 nt, Homo sapiens
  misc_RNA (1)...(19): siRNA sense strand
gggugaggaaucugguauu

SEQ ID NO: 2421618 - RNA, 19 nt, Homo sapiens
  misc_RNA (1)...(19): siRNA sense strand
ccacugagauauaaagcca

SEQ ID NO: 2421619 - RNA, 19 nt, Homo sapiens
  misc_RNA (1)...(19): siRNA sense strand
uggaauuucacaaagcaaa

SEQ ID NO: 2421620 - RNA, 19 nt, Homo sapiens
  misc_RNA (1)...(19): siRNA sense strand
uagcaaaauaucuggggua

SEQ ID NO: 2421621 - RNA, 19 nt, Homo sapiens
  misc_RNA (1)...(19): siRNA sense strand
ugaccacacucguuggcaa

SEQ ID NO: 2421622 - RNA, 19 nt, Homo sapiens
  misc_RNA (1)...(19): siRNA sense strand
cacaaagcaaagaaaggaa

SEQ ID NO: 2421623 - RNA, 19 nt, Homo sapiens
  misc_RNA (1)...(19): siRNA sense strand
gcaaagaaaggaaagcugu

SEQ ID NO: 2421624 - RNA, 19 nt, Homo sapiens
  misc_RNA (1)...(19): siRNA sense strand
gauucauccagguguaaau

SEQ ID NO: 2421625 - RNA, 19 nt, Homo sapiens
  misc_RNA (1)...(19): siRNA sense strand
gauuaauuagugaugccaa

SEQ ID NO: 2421626 - RNA, 19 nt, Homo sapiens
  misc_RNA (1)...(19): siRNA sense strand
aggaaagcugugaagacau

SEQ ID NO: 2421627 - RNA, 19 nt, Homo sapiens
  misc_RNA (1)...(19): siRNA sense strand
ucuuugaauccuagggaaa

SEQ ID NO: 2421628 - RNA, 19 nt, Homo sapiens
  misc_RNA (1)...(19): siRNA sense strand
ucaugaaggaaguggaaca

SEQ ID NO: 2421629 - RNA, 19 nt, Homo sapiens
  misc_RNA (1)...(19): siRNA sense strand
ccuagggaaauucgagaaa

SEQ ID NO: 2421630 - RNA, 19 nt, Homo sapiens
  misc_RNA (1)...(19): siRNA sense strand
cagagaaagagcuacgcaa

SEQ ID NO: 2421631 - RNA, 19 nt, Homo sapiens
  misc_RNA (1)...(19): siRNA sense strand
ggaaauucgagaaaagcua

SEQ ID NO: 2421632 - RNA, 19 nt, Homo sapiens
  misc_RNA (1)...(19): siRNA sense strand
cuucaaggaguaugggaca

SEQ ID NO: 2421633 - RNA, 19 nt, Homo sapiens
  misc_RNA (1)...(19): siRNA sense strand
ugacaaugguucaggacuc

SEQ ID NO: 2421634 - RNA, 19 nt, Homo sapiens
  misc_RNA (1)...(19): siRNA sense strand
cgccuuggagccagagaaa

SEQ ID NO: 2421635 - RNA, 19 nt, Homo sapiens
  misc_RNA (1)...(19): siRNA sense strand
gcgggagcuuggaguaaaa

SEQ ID NO: 2421636 - RNA, 19 nt, Homo sapiens
  misc_RNA (1)...(19): siRNA sense strand
cgucuugggacauuguaaa

SEQ ID NO: 2421637 - RNA, 19 nt, Homo sapiens
  misc_RNA (1)...(19): siRNA sense strand
cgagaaaagcuagcagaaa

SEQ ID NO: 2421638 - RNA, 19 nt, Homo sapiens
  misc_RNA (1)...(19): siRNA sense strand
ucacaggccugguggugga

SEQ ID NO: 2421639 - RNA, 19 nt, Homo sapiens
  misc_RNA (1)...(19): siRNA sense strand
gagcauacagacugccaga

SEQ ID NO: 2421640 - RNA, 19 nt, Homo sapiens
  misc_RNA (1)...(19): siRNA sense strand
ggugguggacaguggagau

SEQ ID NO: 2421641 - RNA, 19 nt, Homo sapiens
  misc_RNA (1)...(19): siRNA sense strand
agaagaaagcaaagagaaa

SEQ ID NO: 2421642 - RNA, 19 nt, Homo sapiens
  misc_RNA (1)...(19): siRNA sense strand
acucaagacuauugggaaa

SEQ ID NO: 2421643 - RNA, 19 nt, Homo sapiens
  misc_RNA (1)...(19): siRNA sense strand
ugucaaauguggagggauu

SEQ ID NO: 2421644 - RNA, 19 nt, Homo sapiens
  misc_RNA (1)...(19): siRNA sense strand
gcacagacauggagagcga

SEQ ID NO: 2421645 - RNA, 19 nt, Homo sapiens
  misc_RNA (1)...(19): siRNA sense strand
ggaaaagaggucagagaaa

SEQ ID NO: 2421646 - RNA, 19 nt, Homo sapiens
  misc_RNA (1)...(19): siRNA sense strand
aggaaaaguuugagaaaga

SEQ ID NO: 2421647 - RNA, 19 nt, Homo sapiens
  misc_RNA (1)...(19): siRNA sense strand
ccaugaaggcaauaagaua

SEQ ID NO: 2421648 - RNA, 19 nt, Homo sapiens
  misc_RNA (1)...(19): siRNA sense strand
agucagaaagagaagguua

SEQ ID NO: 2421649 - RNA, 19 nt, Homo sapiens
  misc_RNA (1)...(19): siRNA sense strand
agaacaaaccaaagccaaa

SEQ ID NO: 2421650 - RNA, 19 nt, Homo sapiens
  misc_RNA (1)...(19): siRNA sense strand
caguggaguagguggguua

SEQ ID NO: 2421651 - RNA, 19 nt, Homo sapiens
  misc_RNA (1)...(19): siRNA sense strand
ggaauaucuuugauggaau

SEQ ID NO: 2421652 - RNA, 19 nt, Homo sapiens
  misc_RNA (1)...(19): siRNA sense strand
acaacaaaggagagagaga

SEQ ID NO: 2421653 - RNA, 19 nt, Homo sapiens
  misc_RNA (1)...(19): siRNA sense strand
gcagauugcaguaggaaga

SEQ ID NO: 2421654 - RNA, 19 nt, Homo sapiens
  misc_RNA (1)...(19): siRNA sense strand
cagaagaaggcaaagggaa

SEQ ID NO: 2421655 - RNA, 19 nt, Homo sapiens
  misc_RNA (1)...(19): siRNA sense strand
uggaggaaccggaggaaga

SEQ ID NO: 2421656 - RNA, 19 nt, Homo sapiens
  misc_RNA (1)...(19): siRNA sense strand
acucaugacucaagacuau

SEQ ID NO: 2421657 - RNA, 19 nt, Homo sapiens
  misc_RNA (1)...(19): siRNA sense strand
ggcaaagagccgugagcau

SEQ ID NO: 2421658 - RNA, 19 nt, Homo sapiens
  misc_RNA (1)...(19): siRNA sense strand
gggcaaaggauguuggauc

SEQ ID NO: 2421659 - RNA, 19 nt, Homo sapiens
  misc_RNA (1)...(19): siRNA sense strand
aaacaacaaaggagagaga

SEQ ID NO: 2421660 - RNA, 19 nt, Homo sapiens
  misc_RNA (1)...(19): siRNA sense strand
aaagaaguuuggaggucaa

SEQ ID NO: 2421661 - RNA, 19 nt, Homo sapiens
  misc_RNA (1)...(19): siRNA sense strand
gggaaaacauacaugauau

SEQ ID NO: 2421662 - RNA, 19 nt, Homo sapiens
  misc_RNA (1)...(19): siRNA sense strand
cauuuaacuggaaggauua

SEQ ID NO: 2421663 - RNA, 19 nt, Homo sapiens
  misc_RNA (1)...(19): siRNA sense strand
uggaagaagcagaacaaaa

SEQ ID NO: 2421664 - RNA, 19 nt, Homo sapiens
  misc_RNA (1)...(19): siRNA sense strand
caucaaaucauuacggaca

SEQ ID NO: 2421665 - RNA, 19 nt, Homo sapiens
  misc_RNA (1)...(19): siRNA sense strand
ugaauaaaggaaaggcaau

SEQ ID NO: 2421666 - RNA, 19 nt, Homo sapiens
  misc_RNA (1)...(19): siRNA sense strand
gucagaaagagaagguuaa

SEQ ID NO: 2421667 - RNA, 19 nt, Homo sapiens
  misc_RNA (1)...(19): siRNA sense strand
cuuaaauacugaagaguuc

SEQ ID NO: 2421668 - RNA, 19 nt, Homo sapiens
  misc_RNA (1)...(19): siRNA sense strand
gaagaaaagaagacagaga

SEQ ID NO: 2421669 - RNA, 19 nt, Homo sapiens
  misc_RNA (1)...(19): siRNA sense strand
ggcgaaagcaggagagacu

SEQ ID NO: 2421670 - RNA, 19 nt, Homo sapiens
  misc_RNA (1)...(19): siRNA sense strand
gcaaaugggaagaugcaca

SEQ ID NO: 2421671 - RNA, 19 nt, Homo sapiens
  misc_RNA (1)...(19): siRNA sense strand
gcaaaagggaauugauuau

SEQ ID NO: 2421672 - RNA, 19 nt, Homo sapiens
  misc_RNA (1)...(19): siRNA sense strand
cuggagaauuugugcugaa

SEQ ID NO: 2421673 - RNA, 19 nt, Homo sapiens
  misc_RNA (1)...(19): siRNA sense strand
gaauaaaggaaaggcaauu

SEQ ID NO: 2421674 - RNA, 19 nt, Homo sapiens
  misc_RNA (1)...(19): siRNA sense strand
agucagaacuagaagaaag

SEQ ID NO: 2421675 - RNA, 19 nt, Homo sapiens
  misc_RNA (1)...(19): siRNA sense strand
gcaucaugggugugaauuu

SEQ ID NO: 2421676 - RNA, 19 nt, Homo sapiens
  misc_RNA (1)...(19): siRNA sense strand
agauaaugaugaugagaac

SEQ ID NO: 2421677 - RNA, 19 nt, Homo sapiens
  misc_RNA (1)...(19): siRNA sense strand
auuacgugcugcugggaaa

SEQ ID NO: 2421678 - RNA, 19 nt, Homo sapiens
  misc_RNA (1)...(19): siRNA sense strand
ccuaugaggagcagaauca

SEQ ID NO: 2421679 - RNA, 19 nt, Homo sapiens
  misc_RNA (1)...(19): siRNA sense strand
cuugaagaaucuagacaga

SEQ ID NO: 2421680 - RNA, 19 nt, Homo sapiens
  misc_RNA (1)...(19): siRNA sense strand
gaagaaugcaaaagggaau

SEQ ID NO: 2421681 - RNA, 19 nt, Homo sapiens
  misc_RNA (1)...(19): siRNA sense strand
agaacuagaagaaagcaaa

SEQ ID NO: 2421682 - RNA, 19 nt, Homo sapiens
  misc_RNA (1)...(19): siRNA sense strand
gcaugagggugguugugaa

SEQ ID NO: 2421683 - RNA, 19 nt, Homo sapiens
  misc_RNA (1)...(19): siRNA sense strand
ugacagaguuuguggaccu

SEQ ID NO: 2421684 - RNA, 19 nt, Homo sapiens
  misc_RNA (1)...(19): siRNA sense strand
gagaguggauagagaccau

SEQ ID NO: 2421685 - RNA, 19 nt, Homo sapiens
  misc_RNA (1)...(19): siRNA sense strand
ggauagagaccauguggga

SEQ ID NO: 2421686 - RNA, 19 nt, Homo sapiens
  misc_RNA (1)...(19): siRNA sense strand
uagaaauccaugaaggcaa

SEQ ID NO: 2421687 - RNA, 19 nt, Homo sapiens
  misc_RNA (1)...(19): siRNA sense strand
cagcagugagucagaacua

SEQ ID NO: 2421688 - RNA, 19 nt, Homo sapiens
  misc_RNA (1)...(19): siRNA sense strand
ggaucaaccuaguguucau

SEQ ID NO: 2421689 - RNA, 19 nt, Homo sapiens
  misc_RNA (1)...(19): siRNA sense strand
ggguggaccuucagcucua

SEQ ID NO: 2421690 - RNA, 19 nt, Homo sapiens
  misc_RNA (1)...(19): siRNA sense strand
cagaagagaaagccaagaa

SEQ ID NO: 2421691 - RNA, 19 nt, Homo sapiens
  misc_RNA (1)...(19): siRNA sense strand
gaagacagguuuauggcau

SEQ ID NO: 2421692 - RNA, 19 nt, Homo sapiens
  misc_RNA (1)...(19): siRNA sense strand
guguguugacuguaggaaa

SEQ ID NO: 2421693 - RNA, 19 nt, Homo sapiens
  misc_RNA (1)...(19): siRNA sense strand
aaguacagaagaaggcaaa

SEQ ID NO: 2421694 - RNA, 19 nt, Homo sapiens
  misc_RNA (1)...(19): siRNA sense strand
acaacugguuugagacuuu

SEQ ID NO: 2421695 - RNA, 19 nt, Homo sapiens
  misc_RNA (1)...(19): siRNA sense strand
cggucauccuggagaacuu

SEQ ID NO: 2421696 - RNA, 19 nt, Homo sapiens
  misc_RNA (1)...(19): siRNA sense strand
augaauaaaggaaaggcaa

SEQ ID NO: 2421697 - RNA, 19 nt, Homo sapiens
  misc_RNA (1)...(19): siRNA sense strand
gcuaaagaauggaggaacc

SEQ ID NO: 2421698 - RNA, 19 nt, Homo sapiens
  misc_RNA (1)...(19): siRNA sense strand
uggucauggucauuggaaa

SEQ ID NO: 2421699 - RNA, 19 nt, Homo sapiens
  misc_RNA (1)...(19): siRNA sense strand
cagaacuagaagaaagcaa

SEQ ID NO: 2421700 - RNA, 19 nt, Homo sapiens
  misc_RNA (1)...(19): siRNA sense strand
agaagaaggcaaagggaag

SEQ ID NO: 2421701 - RNA, 19 nt, Homo sapiens
  misc_RNA (1)...(19): siRNA sense strand
caaggaaaaguuugagaaa

SEQ ID NO: 2421702 - RNA, 19 nt, Homo sapiens
  misc_RNA (1)...(19): siRNA sense strand
guuaacaauuugagugacu

SEQ ID NO: 2421703 - RNA, 19 nt, Homo sapiens
  misc_RNA (1)...(19): siRNA sense strand
cugcagaagagaaagccaa

SEQ ID NO: 2421704 - RNA, 19 nt, Homo sapiens
  misc_RNA (1)...(19): siRNA sense strand
ggcaaaggauguuggaucu

SEQ ID NO: 2421705 - RNA, 19 nt, Homo sapiens
  misc_RNA (1)...(19): siRNA sense strand
agaaauccaugaaggcaau

SEQ ID NO: 2421706 - RNA, 19 nt, Homo sapiens
  misc_RNA (1)...(19): siRNA sense strand
aagcaagcucgguggaaaa

SEQ ID NO: 2421707 - RNA, 19 nt, Homo sapiens
  misc_RNA (1)...(19): siRNA sense strand
acuauaacaaagaggcaau

SEQ ID NO: 2421708 - RNA, 19 nt, Homo sapiens
  misc_RNA (1)...(19): siRNA sense strand
uugacaaacuaaaugggaa

SEQ ID NO: 2421709 - RNA, 19 nt, Homo sapiens
  misc_RNA (1)...(19): siRNA sense strand
gugucauugugauggcaua

SEQ ID NO: 2421710 - RNA, 19 nt, Homo sapiens
  misc_RNA (1)...(19): siRNA sense strand
cuuggaagaagcagaacaa

SEQ ID NO: 2421711 - RNA, 19 nt, Homo sapiens
  misc_RNA (1)...(19): siRNA sense strand
ggaaacaacaaaggagaga

SEQ ID NO: 2421712 - RNA, 19 nt, Homo sapiens
  misc_RNA (1)...(19): siRNA sense strand
aaacggaugaccagggcaa

SEQ ID NO: 2421713 - RNA, 19 nt, Homo sapiens
  misc_RNA (1)...(19): siRNA sense strand
ggacuacgaugcugggaga

SEQ ID NO: 2421714 - RNA, 19 nt, Homo sapiens
  misc_RNA (1)...(19): siRNA sense strand
cggaaaacgccaugcggua

SEQ ID NO: 2421715 - RNA, 19 nt, Homo sapiens
  misc_RNA (1)...(19): siRNA sense strand
aaguggugacauaaagaaa

SEQ ID NO: 2421716 - RNA, 19 nt, Homo sapiens
  misc_RNA (1)...(19): siRNA sense strand
gugacaaugaagaacaaga

SEQ ID NO: 2421717 - RNA, 19 nt, Homo sapiens
  misc_RNA (1)...(19): siRNA sense strand
augaguaucggcaggacua

SEQ ID NO: 2421718 - RNA, 19 nt, Homo sapiens
  misc_RNA (1)...(19): siRNA sense strand
cuuuaaggagggcaggcaa

SEQ ID NO: 2421719 - RNA, 19 nt, Homo sapiens
  misc_RNA (1)...(19): siRNA sense strand
acacaacugaagaacaaau

SEQ ID NO: 2421720 - RNA, 19 nt, Homo sapiens
  misc_RNA (1)...(19): siRNA sense strand
acgccaugcgguacauaaa

SEQ ID NO: 2421721 - RNA, 19 nt, Homo sapiens
  misc_RNA (1)...(19): siRNA sense strand
ccauauugaggaagagaau

SEQ ID NO: 2421722 - RNA, 19 nt, Homo sapiens
  misc_RNA (1)...(19): siRNA sense strand
gugaauaaucagagccaga

SEQ ID NO: 2421723 - RNA, 19 nt, Homo sapiens
  misc_RNA (1)...(19): siRNA sense strand
guggcaggauaaaggaaua

SEQ ID NO: 2421724 - RNA, 19 nt, Homo sapiens
  misc_RNA (1)...(19): siRNA sense strand
gcccaauaccuuagaauau

SEQ ID NO: 2421725 - RNA, 19 nt, Homo sapiens
  misc_RNA (1)...(19): siRNA sense strand
agauggaacaccagugaua

SEQ ID NO: 2421726 - RNA, 19 nt, Homo sapiens
  misc_RNA (1)...(19): siRNA sense strand
gguuuggcucauagagaaa

SEQ ID NO: 2421727 - RNA, 19 nt, Homo sapiens
  misc_RNA (1)...(19): siRNA sense strand
gauuaugaaacauggcuaa

SEQ ID NO: 2421728 - RNA, 19 nt, Homo sapiens
  misc_RNA (1)...(19): siRNA sense strand
cgaagaauuuggagcucau

SEQ ID NO: 2421729 - RNA, 19 nt, Homo sapiens
  misc_RNA (1)...(19): siRNA sense strand
cuacaguccuagacaguau

SEQ ID NO: 2421730 - RNA, 19 nt, Homo sapiens
  misc_RNA (1)...(19): siRNA sense strand
caaucaaggaugaggcuga

SEQ ID NO: 2421731 - RNA, 19 nt, Homo sapiens
  misc_RNA (1)...(19): siRNA sense strand
aggcaauguccuugugcaa

SEQ ID NO: 2421732 - RNA, 19 nt, Homo sapiens
  misc_RNA (1)...(19): siRNA sense strand
acgacaagccguuaugaaa

SEQ ID NO: 2421733 - RNA, 19 nt, Homo sapiens
  misc_RNA (1)...(19): siRNA sense strand
ggaccaagucacagcauca

SEQ ID NO: 2421734 - RNA, 19 nt, Homo sapiens
  misc_RNA (1)...(19): siRNA sense strand
gaauauggaaacagaacuu

SEQ ID NO: 2421735 - RNA, 19 nt, Homo sapiens
  misc_RNA (1)...(19): siRNA sense strand
cagaugaaacugaagaaaa

SEQ ID NO: 2421736 - RNA, 19 nt, Homo sapiens
  misc_RNA (1)...(19): siRNA sense strand
cagcaaaauaaaagcgcua

SEQ ID NO: 2421737 - RNA, 19 nt, Homo sapiens
  misc_RNA (1)...(19): siRNA sense strand
ggaagagaauuuugugaau

SEQ ID NO: 2421738 - RNA, 19 nt, Homo sapiens
  misc_RNA (1)...(19): siRNA sense strand
guggauagguuuacaaaau

SEQ ID NO: 2421739 - RNA, 19 nt, Homo sapiens
  misc_RNA (1)...(19): siRNA sense strand
auggaaaaccugugguaua

SEQ ID NO: 2421740 - RNA, 19 nt, Homo sapiens
  misc_RNA (1)...(19): siRNA sense strand
ccucagaaugguugaacuu

SEQ ID NO: 2421741 - RNA, 19 nt, Homo sapiens
  misc_RNA (1)...(19): siRNA sense strand
ucaagaagaaagagccaau

SEQ ID NO: 2421742 - RNA, 19 nt, Homo sapiens
  misc_RNA (1)...(19): siRNA sense strand
cgguagaacuggaagcaag

SEQ ID NO: 2421743 - RNA, 19 nt, Homo sapiens
  misc_RNA (1)...(19): siRNA sense strand
gcguggaaauauuaugcua

SEQ ID NO: 2421744 - RNA, 19 nt, Homo sapiens
  misc_RNA (1)...(19): siRNA sense strand
ccguuaugaaagagaugaa

SEQ ID NO: 2421745 - RNA, 19 nt, Homo sapiens
  misc_RNA (1)...(19): siRNA sense strand
aagagaaagaacugugaau

SEQ ID NO: 2421746 - RNA, 19 nt, Homo sapiens
  misc_RNA (1)...(19): siRNA sense strand
uggagacauuugugaauau

SEQ ID NO: 2421747 - RNA, 19 nt, Homo sapiens
  misc_RNA (1)...(19): siRNA sense strand
gcacauucuucaugccaga

SEQ ID NO: 2421748 - RNA, 19 nt, Homo sapiens
  misc_RNA (1)...(19): siRNA sense strand
aagaauucauccacagcaa

SEQ ID NO: 2421749 - RNA, 19 nt, Homo sapiens
  misc_RNA (1)...(19): siRNA sense strand
ccuaguaucuguaagcgaa

SEQ ID NO: 2421750 - RNA, 19 nt, Homo sapiens
  misc_RNA (1)...(19): siRNA sense strand
ggaaacagaacuuacaaaa

SEQ ID NO: 2421751 - RNA, 19 nt, Homo sapiens
  misc_RNA (1)...(19): siRNA sense strand
gguaacaaugaaaccauaa

SEQ ID NO: 2421752 - RNA, 19 nt, Homo sapiens
  misc_RNA (1)...(19): siRNA sense strand
caguugaaaaucaggaaaa

SEQ ID NO: 2421753 - RNA, 19 nt, Homo sapiens
  misc_RNA (1)...(19): siRNA sense strand
acaucuauucccuggauaa

SEQ ID NO: 2421754 - RNA, 19 nt, Homo sapiens
  misc_RNA (1)...(19): siRNA sense strand
uuggagaagaugcaagaaa

SEQ ID NO: 2421755 - RNA, 19 nt, Homo sapiens
  misc_RNA (1)...(19): siRNA sense strand
ccuucgaagcuuugaccaa

SEQ ID NO: 2421756 - RNA, 19 nt, Homo sapiens
  misc_RNA (1)...(19): siRNA sense strand
ugaaaaugcaucagaaaca

SEQ ID NO: 2421757 - RNA, 19 nt, Homo sapiens
  misc_RNA (1)...(19): siRNA sense strand
ggagaagaugcaagaaacu

SEQ ID NO: 2421758 - RNA, 19 nt, Homo sapiens
  misc_RNA (1)...(19): siRNA sense strand
cgugaauggauaugcaaaa

SEQ ID NO: 2421759 - RNA, 19 nt, Homo sapiens
  misc_RNA (1)...(19): siRNA sense strand
auggaacaccagugauaua

SEQ ID NO: 2421760 - RNA, 19 nt, Homo sapiens
  misc_RNA (1)...(19): siRNA sense strand
ucacaauaccacugaaguu

SEQ ID NO: 2421761 - RNA, 19 nt, Homo sapiens
  misc_RNA (1)...(19): siRNA sense strand
guggauuucuuauggguca

SEQ ID NO: 2421762 - RNA, 19 nt, Homo sapiens
  misc_RNA (1)...(19): siRNA sense strand
gcauacaaucaaagggaac

SEQ ID NO: 2421763 - RNA, 19 nt, Homo sapiens
  misc_RNA (1)...(19): siRNA sense strand
aagaaagagccaaugauga

SEQ ID NO: 2421764 - RNA, 19 nt, Homo sapiens
  misc_RNA (1)...(19): siRNA sense strand
ccgugaaggucgggaagau

SEQ ID NO: 2421765 - RNA, 19 nt, Homo sapiens
  misc_RNA (1)...(19): siRNA sense strand
gcacaugagcaguaaaaca

SEQ ID NO: 2421766 - RNA, 19 nt, Homo sapiens
  misc_RNA (1)...(19): siRNA sense strand
agguaaauuuugagccauu

SEQ ID NO: 2421767 - RNA, 19 nt, Homo sapiens
  misc_RNA (1)...(19): siRNA sense strand
caagagaugugaaacccaa

SEQ ID NO: 2421768 - RNA, 19 nt, Homo sapiens
  misc_RNA (1)...(19): siRNA sense strand
agagaaagaacugugaaua

SEQ ID NO: 2421769 - RNA, 19 nt, Homo sapiens
  misc_RNA (1)...(19): siRNA sense strand
cuuagaauauggaaacaga

SEQ ID NO: 2421770 - RNA, 19 nt, Homo sapiens
  misc_RNA (1)...(19): siRNA sense strand
caucauuccucuugcgguu

SEQ ID NO: 2421771 - RNA, 19 nt, Homo sapiens
  misc_RNA (1)...(19): siRNA sense strand
ugugauacuauuugggaga

SEQ ID NO: 2421772 - RNA, 19 nt, Homo sapiens
  misc_RNA (1)...(19): siRNA sense strand
augcauucaagcagguaaa

SEQ ID NO: 2421773 - RNA, 19 nt, Homo sapiens
  misc_RNA (1)...(19): siRNA sense strand
ggcugauaacagugcauua

SEQ ID NO: 2421774 - RNA, 19 nt, Homo sapiens
  misc_RNA (1)...(19): siRNA sense strand
aagcacaacuggucagcau

SEQ ID NO: 2421775 - RNA, 19 nt, Homo sapiens
  misc_RNA (1)...(19): siRNA sense strand
ccucaaccggcuaggauau

SEQ ID NO: 2421776 - RNA, 19 nt, Homo sapiens
  misc_RNA (1)...(19): siRNA sense strand
gguggagacauuugugaau

SEQ ID NO: 2421777 - RNA, 19 nt, Homo sapiens
  misc_RNA (1)...(19): siRNA sense strand
gaacauggagagaagcuga

SEQ ID NO: 2421778 - RNA, 19 nt, Homo sapiens
  misc_RNA (1)...(19): siRNA sense strand
ggugcaaguugguggauug

SEQ ID NO: 2421779 - RNA, 19 nt, Homo sapiens
  misc_RNA (1)...(19): siRNA sense strand
ggauagcucuucaggacca

SEQ ID NO: 2421780 - RNA, 19 nt, Homo sapiens
  misc_RNA (1)...(19): siRNA sense strand
gcaagcagccaguugaaaa

SEQ ID NO: 2421781 - RNA, 19 nt, Homo sapiens
  misc_RNA (1)...(19): siRNA sense strand
ucaugggaguggucugaua

SEQ ID NO: 2421782 - RNA, 19 nt, Homo sapiens
  misc_RNA (1)...(19): siRNA sense strand
ugggacacaggaagagaaa

SEQ ID NO: 2421783 - RNA, 19 nt, Homo sapiens
  misc_RNA (1)...(19): siRNA sense strand
gagcaagaauucauccaca

SEQ ID NO: 2421784 - RNA, 19 nt, Homo sapiens
  misc_RNA (1)...(19): siRNA sense strand
ugaagaucacuguggaaca

SEQ ID NO: 2421785 - RNA, 19 nt, Homo sapiens
  misc_RNA (1)...(19): siRNA sense strand
uugagaagagugaccaaua

SEQ ID NO: 2421786 - RNA, 19 nt, Homo sapiens
  misc_RNA (1)...(19): siRNA sense strand
cuucagucaucuuuacuaa

SEQ ID NO: 2421787 - RNA, 19 nt, Homo sapiens
  misc_RNA (1)...(19): siRNA sense strand
agguuuggcucauagagaa

SEQ ID NO: 2421788 - RNA, 19 nt, Homo sapiens
  misc_RNA (1)...(19): siRNA sense strand
ccaccugaaacaagacaau

SEQ ID NO: 2421789 - RNA, 19 nt, Homo sapiens
  misc_RNA (1)...(19): siRNA sense strand
gucaggugguggagacauu

SEQ ID NO: 2421790 - RNA, 19 nt, Homo sapiens
  misc_RNA (1)...(19): siRNA sense strand
gcgaagaauuuggagcuca

SEQ ID NO: 2421791 - RNA, 19 nt, Homo sapiens
  misc_RNA (1)...(19): siRNA sense strand
gcuuugagcucauggguga

SEQ ID NO: 2421792 - RNA, 19 nt, Homo sapiens
  misc_RNA (1)...(19): siRNA sense strand
ggaagauccacgugggaga

SEQ ID NO: 2421793 - RNA, 19 nt, Homo sapiens
  misc_RNA (1)...(19): siRNA sense strand
auuugaagcguuugagaaa

SEQ ID NO: 2421794 - RNA, 19 nt, Homo sapiens
  misc_RNA (1)...(19): siRNA sense strand
uggacaaaggugagaauga

SEQ ID NO: 2421795 - RNA, 19 nt, Homo sapiens
  misc_RNA (1)...(19): siRNA sense strand
uuggaaagggccagggauu

SEQ ID NO: 2421796 - RNA, 19 nt, Homo sapiens
  misc_RNA (1)...(19): siRNA sense strand
caaacuggcccgagcccua

SEQ ID NO: 2421797 - RNA, 19 nt, Homo sapiens
  misc_RNA (1)...(19): siRNA sense strand
aggggaaaccagagaguau

SEQ ID NO: 2421798 - RNA, 19 nt, Homo sapiens
  misc_RNA (1)...(19): siRNA sense strand
gggcaguaccuugggaaca

SEQ ID NO: 2421799 - RNA, 19 nt, Homo sapiens
  misc_RNA (1)...(19): siRNA sense strand
cauagagguaucaaggaau

SEQ ID NO: 2421800 - RNA, 19 nt, Homo sapiens
  misc_RNA (1)...(19): siRNA sense strand
agaaguagcagaagcggca

SEQ ID NO: 2421801 - RNA, 19 nt, Homo sapiens
  misc_RNA (1)...(19): siRNA sense strand
gauggacaaaggugagaau

SEQ ID NO: 2421802 - RNA, 19 nt, Homo sapiens
  misc_RNA (1)...(19): siRNA sense strand
cugcuacagccgugaaaca

SEQ ID NO: 2421803 - RNA, 19 nt, Homo sapiens
  misc_RNA (1)...(19): siRNA sense strand
uggaaagggccagggauuu

SEQ ID NO: 2421804 - RNA, 19 nt, Homo sapiens
  misc_RNA (1)...(19): siRNA sense strand
acgaaggcuuugagcucau

SEQ ID NO: 2421805 - RNA, 19 nt, Homo sapiens
  misc_RNA (1)...(19): siRNA sense strand
ggacuauaguggaguucac

SEQ ID NO: 2421806 - RNA, 19 nt, Homo sapiens
  misc_RNA (1)...(19): siRNA sense strand
ggagaagagaaacggaucu

SEQ ID NO: 2421807 - RNA, 19 nt, Homo sapiens
  misc_RNA (1)...(19): siRNA sense strand
cugaagagagagugguaac

SEQ ID NO: 2421808 - RNA, 19 nt, Homo sapiens
  misc_RNA (1)...(19): siRNA sense strand
caugacaaggacaggauga

SEQ ID NO: 2421809 - RNA, 19 nt, Homo sapiens
  misc_RNA (1)...(19): siRNA sense strand
aaucugagcaacagugaca

SEQ ID NO: 2421810 - RNA, 19 nt, Homo sapiens
  misc_RNA (1)...(19): siRNA sense strand
cccugaagagagaguggua

SEQ ID NO: 2421811 - RNA, 19 nt, Homo sapiens
  misc_RNA (1)...(19): siRNA sense strand
ggcuguugcugcaugacaa

SEQ ID NO: 2421812 - RNA, 19 nt, Homo sapiens
  misc_RNA (1)...(19): siRNA sense strand
cuacguggaaggugaagau

SEQ ID NO: 2421813 - RNA, 19 nt, Homo sapiens
  misc_RNA (1)...(19): siRNA sense strand
cuacgaaggcuuugagcuc

SEQ ID NO: 2421814 - RNA, 19 nt, Homo sapiens
  misc_RNA (1)...(19): siRNA sense strand
gcagagacgucgcuggaag

SEQ ID NO: 2421815 - RNA, 19 nt, Homo sapiens
  misc_RNA (1)...(19): siRNA sense strand
agacaaagcaagagagagu

SEQ ID NO: 2421816 - RNA, 19 nt, Homo sapiens
  misc_RNA (1)...(19): siRNA sense strand
ccaagaaggugaaggagga

SEQ ID NO: 2421817 - RNA, 19 nt, Homo sapiens
  misc_RNA (1)...(19): siRNA sense strand
cguuaugaaaggacagaua

SEQ ID NO: 2421818 - RNA, 19 nt, Homo sapiens
  misc_RNA (1)...(19): siRNA sense strand
guuuaaagcccgaguggau

SEQ ID NO: 2421819 - RNA, 19 nt, Homo sapiens
  misc_RNA (1)...(19): siRNA sense strand
cggacaaagacaaagacaa

SEQ ID NO: 2421820 - RNA, 19 nt, Homo sapiens
  misc_RNA (1)...(19): siRNA sense strand
ccgucaaggaagaggauga

SEQ ID NO: 2421821 - RNA, 19 nt, Homo sapiens
  misc_RNA (1)...(19): siRNA sense strand
agacaaagacaaagagaag

SEQ ID NO: 2421822 - RNA, 19 nt, Homo sapiens
  misc_RNA (1)...(19): siRNA sense strand
acgaagaagaauaagaaga

SEQ ID NO: 2421823 - RNA, 19 nt, Homo sapiens
  misc_RNA (1)...(19): siRNA sense strand
acagugaagacgaggacaa

SEQ ID NO: 2421824 - RNA, 19 nt, Homo sapiens
  misc_RNA (1)...(19): siRNA sense strand
cugaagaugauguggucua

SEQ ID NO: 2421825 - RNA, 19 nt, Homo sapiens
  misc_RNA (1)...(19): siRNA sense strand
caucugaaggugagggaga

SEQ ID NO: 2421826 - RNA, 19 nt, Homo sapiens
  misc_RNA (1)...(19): siRNA sense strand
ugaagaagccugugcccaa

SEQ ID NO: 2421827 - RNA, 19 nt, Homo sapiens
  misc_RNA (1)...(19): siRNA sense strand
gcagaaagcccgagaggag

SEQ ID NO: 2421828 - RNA, 19 nt, Homo sapiens
  misc_RNA (1)...(19): siRNA sense strand
cgggagaaggagaaggaga

SEQ ID NO: 2421829 - RNA, 19 nt, Homo sapiens
  misc_RNA (1)...(19): siRNA sense strand
gagaaaagagacaaagcaa

SEQ ID NO: 2421830 - RNA, 19 nt, Homo sapiens
  misc_RNA (1)...(19): siRNA sense strand
agcaagagagagugagaau

SEQ ID NO: 2421831 - RNA, 19 nt, Homo sapiens
  misc_RNA (1)...(19): siRNA sense strand
acaaagacaaagagaagga

SEQ ID NO: 2421832 - RNA, 19 nt, Homo sapiens
  misc_RNA (1)...(19): siRNA sense strand
gagagagaaaagagacaaa

SEQ ID NO: 2421833 - RNA, 19 nt, Homo sapiens
  misc_RNA (1)...(19): siRNA sense strand
gguucaggaucgacauaau

SEQ ID NO: 2421834 - RNA, 19 nt, Homo sapiens
  misc_RNA (1)...(19): siRNA sense strand
cgguuacgaugcuggcaaa

SEQ ID NO: 2421835 - RNA, 19 nt, Homo sapiens
  misc_RNA (1)...(19): siRNA sense strand
aagacaaagacaaagacaa

SEQ ID NO: 2421836 - RNA, 19 nt, Homo sapiens
  misc_RNA (1)...(19): siRNA sense strand
ugacaguaaagcagagaca

SEQ ID NO: 2421837 - RNA, 19 nt, Homo sapiens
  misc_RNA (1)...(19): siRNA sense strand
cggaggaguccacgaagaa

SEQ ID NO: 2421838 - RNA, 19 nt, Homo sapiens
  misc_RNA (1)...(19): siRNA sense strand
ggaccuaaguucagccagu

SEQ ID NO: 2421839 - RNA, 19 nt, Homo sapiens
  misc_RNA (1)...(19): siRNA sense strand
cggccaagaaggugaagga

SEQ ID NO: 2421840 - RNA, 19 nt, Homo sapiens
  misc_RNA (1)...(19): siRNA sense strand
aagacaaagacaaagagaa

SEQ ID NO: 2421841 - RNA, 19 nt, Homo sapiens
  misc_RNA (1)...(19): siRNA sense strand
agaccgggaccgagagaga

SEQ ID NO: 2421842 - RNA, 19 nt, Homo sapiens
  misc_RNA (1)...(19): siRNA sense strand
acuucaaacugguccacaa

SEQ ID NO: 2421843 - RNA, 19 nt, Homo sapiens
  misc_RNA (1)...(19): siRNA sense strand
gaaaggagcugcuucccaa

SEQ ID NO: 2421844 - RNA, 19 nt, Homo sapiens
  misc_RNA (1)...(19): siRNA sense strand
agaaagaaggugacaagca

SEQ ID NO: 2421845 - RNA, 19 nt, Homo sapiens
  misc_RNA (1)...(19): siRNA sense strand
ggaucgacauaaugaaaau

SEQ ID NO: 2421846 - RNA, 19 nt, Homo sapiens
  misc_RNA (1)...(19): siRNA sense strand
ccaccuaccaagucaggaa

SEQ ID NO: 2421847 - RNA, 19 nt, Homo sapiens
  misc_RNA (1)...(19): siRNA sense strand
cggaagaagcagccagcca

SEQ ID NO: 2421848 - RNA, 19 nt, Homo sapiens
  misc_RNA (1)...(19): siRNA sense strand
cugcagauguucaacguga

SEQ ID NO: 2421849 - RNA, 19 nt, Homo sapiens
  misc_RNA (1)...(19): siRNA sense strand
gagagggccuguagggagu

SEQ ID NO: 2421850 - RNA, 19 nt, Homo sapiens
  misc_RNA (1)...(19): siRNA sense strand
aagcauagcaugaggacac

SEQ ID NO: 2421851 - RNA, 19 nt, Homo sapiens
  misc_RNA (1)...(19): siRNA sense strand
gaguccacgaagaagaaua

SEQ ID NO: 2421852 - RNA, 19 nt, Homo sapiens
  misc_RNA (1)...(19): siRNA sense strand
aggauauaacccugagaca

SEQ ID NO: 2421853 - RNA, 19 nt, Homo sapiens
  misc_RNA (1)...(19): siRNA sense strand
acaaagcaagagagaguga

SEQ ID NO: 2421854 - RNA, 19 nt, Homo sapiens
  misc_RNA (1)...(19): siRNA sense strand
ccuccagcaaugacaguaa

SEQ ID NO: 2421855 - RNA, 19 nt, Homo sapiens
  misc_RNA (1)...(19): siRNA sense strand
agaagagggaggaggccau

SEQ ID NO: 2421856 - RNA, 19 nt, Homo sapiens
  misc_RNA (1)...(19): siRNA sense strand
gagacaaggaggcugaaca

SEQ ID NO: 2421857 - RNA, 19 nt, Homo sapiens
  misc_RNA (1)...(19): siRNA sense strand
gggcucagugggaagcaua

SEQ ID NO: 2421858 - RNA, 19 nt, Homo sapiens
  misc_RNA (1)...(19): siRNA sense strand
aguccacgaagaagaauaa

SEQ ID NO: 2421859 - RNA, 19 nt, Homo sapiens
  misc_RNA (1)...(19): siRNA sense strand
agagacaaagcaagagaga

SEQ ID NO: 2421860 - RNA, 19 nt, Homo sapiens
  misc_RNA (1)...(19): siRNA sense strand
uaagaagaaaccaccgaaa

SEQ ID NO: 2421861 - RNA, 19 nt, Homo sapiens
  misc_RNA (1)...(19): siRNA sense strand
ccugagacaaggaggcuga

SEQ ID NO: 2421862 - RNA, 19 nt, Homo sapiens
  misc_RNA (1)...(19): siRNA sense strand
gcaugaaagcgguuacgau

SEQ ID NO: 2421863 - RNA, 19 nt, Homo sapiens
  misc_RNA (1)...(19): siRNA sense strand
cagugaagaagucggccaa

SEQ ID NO: 2421864 - RNA, 19 nt, Homo sapiens
  misc_RNA (1)...(19): siRNA sense strand
aaaauuaugcugagaguga

SEQ ID NO: 2421865 - RNA, 19 nt, Homo sapiens
  misc_RNA (1)...(19): siRNA sense strand
ugaaaaugacucuggaaga

SEQ ID NO: 2421866 - RNA, 19 nt, Homo sapiens
  misc_RNA (1)...(19): siRNA sense strand
ggaagaggaugaugggcuc

SEQ ID NO: 2421867 - RNA, 19 nt, Homo sapiens
  misc_RNA (1)...(19): siRNA sense strand
agaaggagaaggagcggga

SEQ ID NO: 2421868 - RNA, 19 nt, Homo sapiens
  misc_RNA (1)...(19): siRNA sense strand
gaggaguccacgaagaaga

SEQ ID NO: 2421869 - RNA, 19 nt, Homo sapiens
  misc_RNA (1)...(19): siRNA sense strand
caggaucgacauaaugaaa

SEQ ID NO: 2421870 - RNA, 19 nt, Homo sapiens
  misc_RNA (1)...(19): siRNA sense strand
acaguaaagcagagacagu

SEQ ID NO: 2421871 - RNA, 19 nt, Homo sapiens
  misc_RNA (1)...(19): siRNA sense strand
uuacagacccaguuaucaa

SEQ ID NO: 2421872 - RNA, 19 nt, Homo sapiens
  misc_RNA (1)...(19): siRNA sense strand
gagagagagaaaagagaca

SEQ ID NO: 2421873 - RNA, 19 nt, Homo sapiens
  misc_RNA (1)...(19): siRNA sense strand
acagugagcaggagcugaa

SEQ ID NO: 2421874 - RNA, 19 nt, Homo sapiens
  misc_RNA (1)...(19): siRNA sense strand
cagcaaugacaguaaagca

SEQ ID NO: 2421875 - RNA, 19 nt, Homo sapiens
  misc_RNA (1)...(19): siRNA sense strand
gcgucaacgaugaggguag

SEQ ID NO: 2421876 - RNA, 19 nt, Homo sapiens
  misc_RNA (1)...(19): siRNA sense strand
aagacgaggacaaugacaa

SEQ ID NO: 2421877 - RNA, 19 nt, Homo sapiens
  misc_RNA (1)...(19): siRNA sense strand
gagagcgggagaaggagaa

SEQ ID NO: 2421878 - RNA, 19 nt, Homo sapiens
  misc_RNA (1)...(19): siRNA sense strand
acaccuaagcagagaauca

SEQ ID NO: 2421879 - RNA, 19 nt, Homo sapiens
  misc_RNA (1)...(19): siRNA sense strand
cuacugaagcugagggacu

SEQ ID NO: 2421880 - RNA, 19 nt, Homo sapiens
  misc_RNA (1)...(19): siRNA sense strand
gggcaauagcacugaguac

SEQ ID NO: 2421881 - RNA, 19 nt, Homo sapiens
  misc_RNA (1)...(19): siRNA sense strand
gggacagcaccaaggaaga

SEQ ID NO: 2421882 - RNA, 19 nt, Homo sapiens
  misc_RNA (1)...(19): siRNA sense strand
gagccaagaaggugaugau

SEQ ID NO: 2421883 - RNA, 19 nt, Homo sapiens
  misc_RNA (1)...(19): siRNA sense strand
ccaccaaccccaaggacaa

SEQ ID NO: 2421884 - RNA, 19 nt, Homo sapiens
  misc_RNA (1)...(19): siRNA sense strand
agguuggaguugugcagua

SEQ ID NO: 2421885 - RNA, 19 nt, Homo sapiens
  misc_RNA (1)...(19): siRNA sense strand
gcauugagugugugaacga

SEQ ID NO: 2421886 - RNA, 19 nt, Homo sapiens
  misc_RNA (1)...(19): siRNA sense strand
gcagagaaucacagccuca

SEQ ID NO: 2421887 - RNA, 19 nt, Homo sapiens
  misc_RNA (1)...(19): siRNA sense strand
gcacgacaucaguggcaau

SEQ ID NO: 2421888 - RNA, 19 nt, Homo sapiens
  misc_RNA (1)...(19): siRNA sense strand
agacgggagacguguacaa

SEQ ID NO: 2421889 - RNA, 19 nt, Homo sapiens
  misc_RNA (1)...(19): siRNA sense strand
ggagaaggugauccagcaa

SEQ ID NO: 2421890 - RNA, 19 nt, Homo sapiens
  misc_RNA (1)...(19): siRNA sense strand
ugagcagagaggaggaaca

SEQ ID NO: 2421891 - RNA, 19 nt, Homo sapiens
  misc_RNA (1)...(19): siRNA sense strand
cuggaauggagcugugcua

SEQ ID NO: 2421892 - RNA, 19 nt, Homo sapiens
  misc_RNA (1)...(19): siRNA sense strand
auggaugagaggcgguaua

SEQ ID NO: 2421893 - RNA, 19 nt, Homo sapiens
  misc_RNA (1)...(19): siRNA sense strand
acgugaagccagugaccuu

SEQ ID NO: 2421894 - RNA, 19 nt, Homo sapiens
  misc_RNA (1)...(19): siRNA sense strand
cugaagacaccuaagcaga

SEQ ID NO: 2421895 - RNA, 19 nt, Homo sapiens
  misc_RNA (1)...(19): siRNA sense strand
agacaacguaacaagauau

SEQ ID NO: 2421896 - RNA, 19 nt, Homo sapiens
  misc_RNA (1)...(19): siRNA sense strand
gcucaagaaccauggugca

SEQ ID NO: 2421897 - RNA, 19 nt, Homo sapiens
  misc_RNA (1)...(19): siRNA sense strand
acagagacccggacggcau

SEQ ID NO: 2421898 - RNA, 19 nt, Homo sapiens
  misc_RNA (1)...(19): siRNA sense strand
gcaccaaggaagacaacgu

SEQ ID NO: 2421899 - RNA, 19 nt, Homo sapiens
  misc_RNA (1)...(19): siRNA sense strand
ggauccagaacuugggcuu

SEQ ID NO: 2421900 - RNA, 19 nt, Homo sapiens
  misc_RNA (1)...(19): siRNA sense strand
ggaaagacaacaugcgccu

SEQ ID NO: 2421901 - RNA, 19 nt, Homo sapiens
  misc_RNA (1)...(19): siRNA sense strand
guccagugauccacgggaa

SEQ ID NO: 2421902 - RNA, 19 nt, Homo sapiens
  misc_RNA (1)...(19): siRNA sense strand
uggccaggguucacggaca

SEQ ID NO: 2421903 - RNA, 19 nt, Homo sapiens
  misc_RNA (1)...(19): siRNA sense strand
gcaaagcgaaagagacaac

SEQ ID NO: 2421904 - RNA, 19 nt, Homo sapiens
  misc_RNA (1)...(19): siRNA sense strand
gcaaugaggaugagcacug

SEQ ID NO: 2421905 - RNA, 19 nt, Homo sapiens
  misc_RNA (1)...(19): siRNA sense strand
cggacgagguagcgaacac

SEQ ID NO: 2421906 - RNA, 19 nt, Homo sapiens
  misc_RNA (1)...(19): siRNA sense strand
uguaaaagaugugguggaa

SEQ ID NO: 2421907 - RNA, 19 nt, Homo sapiens
  misc_RNA (1)...(19): siRNA sense strand
cggcauuuggcauugaauu

SEQ ID NO: 2421908 - RNA, 19 nt, Homo sapiens
  misc_RNA (1)...(19): siRNA sense strand
gcgaaagagacaacguaac

SEQ ID NO: 2421909 - RNA, 19 nt, Homo sapiens
  misc_RNA (1)...(19): siRNA sense strand
cgguuuguuuauaacggaa

SEQ ID NO: 2421910 - RNA, 19 nt, Homo sapiens
  misc_RNA (1)...(19): siRNA sense strand
agauguggugcaugaguuu

SEQ ID NO: 2421911 - RNA, 19 nt, Homo sapiens
  misc_RNA (1)...(19): siRNA sense strand
agcgaaagagacaacguaa

SEQ ID NO: 2421912 - RNA, 19 nt, Homo sapiens
  misc_RNA (1)...(19): siRNA sense strand
agaugaaguagaagaggaa

SEQ ID NO: 2421913 - RNA, 19 nt, Homo sapiens
  misc_RNA (1)...(19): siRNA sense strand
agccaagagucgaagcuaa

SEQ ID NO: 2421914 - RNA, 19 nt, Homo sapiens
  misc_RNA (1)...(19): siRNA sense strand
gcugcaagagagcgagaaa

SEQ ID NO: 2421915 - RNA, 19 nt, Homo sapiens
  misc_RNA (1)...(19): siRNA sense strand
uggaagaggaaccgggcaa

SEQ ID NO: 2421916 - RNA, 19 nt, Homo sapiens
  misc_RNA (1)...(19): siRNA sense strand
cacaaguggaggagaagaa

SEQ ID NO: 2421917 - RNA, 19 nt, Homo sapiens
  misc_RNA (1)...(19): siRNA sense strand
gauuauguuucgaggggaa

SEQ ID NO: 2421918 - RNA, 19 nt, Homo sapiens
  misc_RNA (1)...(19): siRNA sense strand
augaaguagaagaggaaca

SEQ ID NO: 2421919 - RNA, 19 nt, Homo sapiens
  misc_RNA (1)...(19): siRNA sense strand
aggaacaagaagaaagaca

SEQ ID NO: 2421920 - RNA, 19 nt, Homo sapiens
  misc_RNA (1)...(19): siRNA sense strand
gcgugaucgugauggaaga

SEQ ID NO: 2421921 - RNA, 19 nt, Homo sapiens
  misc_RNA (1)...(19): siRNA sense strand
augaagaaucagaagauga

SEQ ID NO: 2421922 - RNA, 19 nt, Homo sapiens
  misc_RNA (1)...(19): siRNA sense strand
aaucagaagaugaaguaga

SEQ ID NO: 2421923 - RNA, 19 nt, Homo sapiens
  misc_RNA (1)...(19): siRNA sense strand
cugaagagcugaaaccaca

SEQ ID NO: 2421924 - RNA, 19 nt, Homo sapiens
  misc_RNA (1)...(19): siRNA sense strand
aaguagaagaggaacaaga

SEQ ID NO: 2421925 - RNA, 19 nt, Homo sapiens
  misc_RNA (1)...(19): siRNA sense strand
agaagaacuuagaagaacu

SEQ ID NO: 2421926 - RNA, 19 nt, Homo sapiens
  misc_RNA (1)...(19): siRNA sense strand
agaagaacuagaggagaaa

SEQ ID NO: 2421927 - RNA, 19 nt, Homo sapiens
  misc_RNA (1)...(19): siRNA sense strand
cuauguucaugguggagua

SEQ ID NO: 2421928 - RNA, 19 nt, Homo sapiens
  misc_RNA (1)...(19): siRNA sense strand
aggagaagaacuuagaaga

SEQ ID NO: 2421929 - RNA, 19 nt, Homo sapiens
  misc_RNA (1)...(19): siRNA sense strand
aagaugaaguguuugguga

SEQ ID NO: 2421930 - RNA, 19 nt, Homo sapiens
  misc_RNA (1)...(19): siRNA sense strand
aggcagaggagauauggaa

SEQ ID NO: 2421931 - RNA, 19 nt, Homo sapiens
  misc_RNA (1)...(19): siRNA sense strand
gaguaguuguccaggucau

SEQ ID NO: 2421932 - RNA, 19 nt, Homo sapiens
  misc_RNA (1)...(19): siRNA sense strand
aagaugaaguagaagagga

SEQ ID NO: 2421933 - RNA, 19 nt, Homo sapiens
  misc_RNA (1)...(19): siRNA sense strand
uuggaaacguuguggaacu

SEQ ID NO: 2421934 - RNA, 19 nt, Homo sapiens
  misc_RNA (1)...(19): siRNA sense strand
ggaagcuguuuauggccaa

SEQ ID NO: 2421935 - RNA, 19 nt, Homo sapiens
  misc_RNA (1)...(19): siRNA sense strand
ggaguagaugcuaguggaa

SEQ ID NO: 2421936 - RNA, 19 nt, Homo sapiens
  misc_RNA (1)...(19): siRNA sense strand
agaggaacaagaagaaaga

SEQ ID NO: 2421937 - RNA, 19 nt, Homo sapiens
  misc_RNA (1)...(19): siRNA sense strand
cagaggugguggugaugau

SEQ ID NO: 2421938 - RNA, 19 nt, Homo sapiens
  misc_RNA (1)...(19): siRNA sense strand
aguagaugcuaguggaaag

SEQ ID NO: 2421939 - RNA, 19 nt, Homo sapiens
  misc_RNA (1)...(19): siRNA sense strand
cugaauaaagcuccggaau

SEQ ID NO: 2421940 - RNA, 19 nt, Homo sapiens
  misc_RNA (1)...(19): siRNA sense strand
aagcuaaaccagaaguuca

SEQ ID NO: 2421941 - RNA, 19 nt, Homo sapiens
  misc_RNA (1)...(19): siRNA sense strand
gccacaugauauugaugaa

SEQ ID NO: 2421942 - RNA, 19 nt, Homo sapiens
  misc_RNA (1)...(19): siRNA sense strand
aguagaagaggaacaagaa

SEQ ID NO: 2421943 - RNA, 19 nt, Homo sapiens
  misc_RNA (1)...(19): siRNA sense strand
cccugugacuaauggcaua

SEQ ID NO: 2421944 - RNA, 19 nt, Homo sapiens
  misc_RNA (1)...(19): siRNA sense strand
gcaucaauaccaagggugu

SEQ ID NO: 2421945 - RNA, 19 nt, Homo sapiens
  misc_RNA (1)...(19): siRNA sense strand
cugaaggaucuguuccaaa

SEQ ID NO: 2421946 - RNA, 19 nt, Homo sapiens
  misc_RNA (1)...(19): siRNA sense strand
aaacaaagacugaagagcu

SEQ ID NO: 2421947 - RNA, 19 nt, Homo sapiens
  misc_RNA (1)...(19): siRNA sense strand
caguggacaaccagaaaga

SEQ ID NO: 2421948 - RNA, 19 nt, Homo sapiens
  misc_RNA (1)...(19): siRNA sense strand
agaccaggcagaggagaua

SEQ ID NO: 2421949 - RNA, 19 nt, Homo sapiens
  misc_RNA (1)...(19): siRNA sense strand
acaagaagaaagacaacca

SEQ ID NO: 2421950 - RNA, 19 nt, Homo sapiens
  misc_RNA (1)...(19): siRNA sense strand
ugaacaacgaccuagagaa

SEQ ID NO: 2421951 - RNA, 19 nt, Homo sapiens
  misc_RNA (1)...(19): siRNA sense strand
ccacaugauauugaugaaa

SEQ ID NO: 2421952 - RNA, 19 nt, Homo sapiens
  misc_RNA (1)...(19): siRNA sense strand
guuuauggccaaaaugaua

SEQ ID NO: 2421953 - RNA, 19 nt, Homo sapiens
  misc_RNA (1)...(19): siRNA sense strand
ugaaaaugagcuaaaggaa

SEQ ID NO: 2421954 - RNA, 19 nt, Homo sapiens
  misc_RNA (1)...(19): siRNA sense strand
aggaucuguuccaaauaaa

SEQ ID NO: 2421955 - RNA, 19 nt, Homo sapiens
  misc_RNA (1)...(19): siRNA sense strand
uguucaugguggaguagau

SEQ ID NO: 2421956 - RNA, 19 nt, Homo sapiens
  misc_RNA (1)...(19): siRNA sense strand
ugaaguagaagaggaacaa

SEQ ID NO: 2421957 - RNA, 19 nt, Homo sapiens
  misc_RNA (1)...(19): siRNA sense strand
agcuaaaccagaaguucaa

SEQ ID NO: 2421958 - RNA, 19 nt, Homo sapiens
  misc_RNA (1)...(19): siRNA sense strand
acaaccagaaagaaaguuu

SEQ ID NO: 2421959 - RNA, 19 nt, Homo sapiens
  misc_RNA (1)...(19): siRNA sense strand
guuaugaagaugaaguguu

SEQ ID NO: 2421960 - RNA, 19 nt, Homo sapiens
  misc_RNA (1)...(19): siRNA sense strand
cgggaguuugugaggcaau

SEQ ID NO: 2421961 - RNA, 19 nt, Homo sapiens
  misc_RNA (1)...(19): siRNA sense strand
agaugaaguguuuggugau

SEQ ID NO: 2421962 - RNA, 19 nt, Homo sapiens
  misc_RNA (1)...(19): siRNA sense strand
agaugaaguagaagaggaa

SEQ ID NO: 2421963 - RNA, 19 nt, Homo sapiens
  misc_RNA (1)...(19): siRNA sense strand
agccaagagucgaagcuaa

SEQ ID NO: 2421964 - RNA, 19 nt, Homo sapiens
  misc_RNA (1)...(19): siRNA sense strand
gcugcaagagagcgagaaa

SEQ ID NO: 2421965 - RNA, 19 nt, Homo sapiens
  misc_RNA (1)...(19): siRNA sense strand
uggaagaggaaccgggcaa

SEQ ID NO: 2421966 - RNA, 19 nt, Homo sapiens
  misc_RNA (1)...(19): siRNA sense strand
cacaaguggaggagaagaa

SEQ ID NO: 2421967 - RNA, 19 nt, Homo sapiens
  misc_RNA (1)...(19): siRNA sense strand
gauuauguuucgaggggaa

SEQ ID NO: 2421968 - RNA, 19 nt, Homo sapiens
  misc_RNA (1)...(19): siRNA sense strand
augaaguagaagaggaaca

SEQ ID NO: 2421969 - RNA, 19 nt, Homo sapiens
  misc_RNA (1)...(19): siRNA sense strand
aggaacaagaagaaagaca

SEQ ID NO: 2421970 - RNA, 19 nt, Homo sapiens
  misc_RNA (1)...(19): siRNA sense strand
gcgugaucgugauggaaga

SEQ ID NO: 2421971 - RNA, 19 nt, Homo sapiens
  misc_RNA (1)...(19): siRNA sense strand
augaagaaucagaagauga

SEQ ID NO: 2421972 - RNA, 19 nt, Homo sapiens
  misc_RNA (1)...(19): siRNA sense strand
aaucagaagaugaaguaga

SEQ ID NO: 2421973 - RNA, 19 nt, Homo sapiens
  misc_RNA (1)...(19): siRNA sense strand
cugaagagcugaaaccaca

SEQ ID NO: 2421974 - RNA, 19 nt, Homo sapiens
  misc_RNA (1)...(19): siRNA sense strand
aaguagaagaggaacaaga

SEQ ID NO: 2421975 - RNA, 19 nt, Homo sapiens
  misc_RNA (1)...(19): siRNA sense strand
agaagaacuuagaagaacu

SEQ ID NO: 2421976 - RNA, 19 nt, Homo sapiens
  misc_RNA (1)...(19): siRNA sense strand
agaagaacuagaggagaaa

SEQ ID NO: 2421977 - RNA, 19 nt, Homo sapiens
  misc_RNA (1)...(19): siRNA sense strand
cuauguucaugguggagua

SEQ ID NO: 2421978 - RNA, 19 nt, Homo sapiens
  misc_RNA (1)...(19): siRNA sense strand
aggagaagaacuuagaaga

SEQ ID NO: 2421979 - RNA, 19 nt, Homo sapiens
  misc_RNA (1)...(19): siRNA sense strand
aagaugaaguguuugguga

SEQ ID NO: 2421980 - RNA, 19 nt, Homo sapiens
  misc_RNA (1)...(19): siRNA sense strand
aggcagaggagauauggaa

SEQ ID NO: 2421981 - RNA, 19 nt, Homo sapiens
  misc_RNA (1)...(19): siRNA sense strand
gaguaguuguccaggucau

SEQ ID NO: 2421982 - RNA, 19 nt, Homo sapiens
  misc_RNA (1)...(19): siRNA sense strand
aagaugaaguagaagagga

SEQ ID NO: 2421983 - RNA, 19 nt, Homo sapiens
  misc_RNA (1)...(19): siRNA sense strand
uuggaaacguuguggaacu

SEQ ID NO: 2421984 - RNA, 19 nt, Homo sapiens
  misc_RNA (1)...(19): siRNA sense strand
ggaagcuguuuauggccaa

SEQ ID NO: 2421985 - RNA, 19 nt, Homo sapiens
  misc_RNA (1)...(19): siRNA sense strand
ggaguagaugcuaguggaa

SEQ ID NO: 2421986 - RNA, 19 nt, Homo sapiens
  misc_RNA (1)...(19): siRNA sense strand
agaggaacaagaagaaaga

SEQ ID NO: 2421987 - RNA, 19 nt, Homo sapiens
  misc_RNA (1)...(19): siRNA sense strand
cagaggugguggugaugau

SEQ ID NO: 2421988 - RNA, 19 nt, Homo sapiens
  misc_RNA (1)...(19): siRNA sense strand
aguagaugcuaguggaaag

SEQ ID NO: 2421989 - RNA, 19 nt, Homo sapiens
  misc_RNA (1)...(19): siRNA sense strand
cugaauaaagcuccggaau

SEQ ID NO: 2421990 - RNA, 19 nt, Homo sapiens
  misc_RNA (1)...(19): siRNA sense strand
aagcuaaaccagaaguuca

SEQ ID NO: 2421991 - RNA, 19 nt, Homo sapiens
  misc_RNA (1)...(19): siRNA sense strand
gccacaugauauugaugaa

SEQ ID NO: 2421992 - RNA, 19 nt, Homo sapiens
  misc_RNA (1)...(19): siRNA sense strand
aguagaagaggaacaagaa

SEQ ID NO: 2421993 - RNA, 19 nt, Homo sapiens
  misc_RNA (1)...(19): siRNA sense strand
cccugugacuaauggcaua

SEQ ID NO: 2421994 - RNA, 19 nt, Homo sapiens
  misc_RNA (1)...(19): siRNA sense strand
gcaucaauaccaagggugu

SEQ ID NO: 2421995 - RNA, 19 nt, Homo sapiens
  misc_RNA (1)...(19): siRNA sense strand
cugaaggaucuguuccaaa

SEQ ID NO: 2421996 - RNA, 19 nt, Homo sapiens
  misc_RNA (1)...(19): siRNA sense strand
aaacaaagacugaagagcu

SEQ ID NO: 2421997 - RNA, 19 nt, Homo sapiens
  misc_RNA (1)...(19): siRNA sense strand
caguggacaaccagaaaga

SEQ ID NO: 2421998 - RNA, 19 nt, Homo sapiens
  misc_RNA (1)...(19): siRNA sense strand
agaccaggcagaggagaua

SEQ ID NO: 2421999 - RNA, 19 nt, Homo sapiens
  misc_RNA (1)...(19): siRNA sense strand
acaagaagaaagacaacca

SEQ ID NO: 2422000 - RNA, 19 nt, Homo sapiens
  misc_RNA (1)...(19): siRNA sense strand
ugaacaacgaccuagagaa

SEQ ID NO: 2422001 - RNA, 19 nt, Homo sapiens
  misc_RNA (1)...(19): siRNA sense strand
ccacaugauauugaugaaa

SEQ ID NO: 2422002 - RNA, 19 nt, Homo sapiens
  misc_RNA (1)...(19): siRNA sense strand
guuuauggccaaaaugaua

SEQ ID NO: 2422003 - RNA, 19 nt, Homo sapiens
  misc_RNA (1)...(19): siRNA sense strand
ugaaaaugagcuaaaggaa

SEQ ID NO: 2422004 - RNA, 19 nt, Homo sapiens
  misc_RNA (1)...(19): siRNA sense strand
aggaucuguuccaaauaaa

SEQ ID NO: 2422005 - RNA, 19 nt, Homo sapiens
  misc_RNA (1)...(19): siRNA sense strand
uguucaugguggaguagau

SEQ ID NO: 2422006 - RNA, 19 nt, Homo sapiens
  misc_RNA (1)...(19): siRNA sense strand
ugaaguagaagaggaacaa

SEQ ID NO: 2422007 - RNA, 19 nt, Homo sapiens
  misc_RNA (1)...(19): siRNA sense strand
agcuaaaccagaaguucaa

SEQ ID NO: 2422008 - RNA, 19 nt, Homo sapiens
  misc_RNA (1)...(19): siRNA sense strand
acaaccagaaagaaaguuu

SEQ ID NO: 2422009 - RNA, 19 nt, Homo sapiens
  misc_RNA (1)...(19): siRNA sense strand
guuaugaagaugaaguguu

SEQ ID NO: 2422010 - RNA, 19 nt, Homo sapiens
  misc_RNA (1)...(19): siRNA sense strand
cgggaguuugugaggcaau

SEQ ID NO: 2422011 - RNA, 19 nt, Homo sapiens
  misc_RNA (1)...(19): siRNA sense strand
agaugaaguguuuggugau

SEQ ID NO: 2422012 - RNA, 19 nt, Homo sapiens
  misc_RNA (1)...(19): siRNA sense strand
agaugaaguagaagaggaa

SEQ ID NO: 2422013 - RNA, 19 nt, Homo sapiens
  misc_RNA (1)...(19): siRNA sense strand
agccaagagucgaagcuaa

SEQ ID NO: 2422014 - RNA, 19 nt, Homo sapiens
  misc_RNA (1)...(19): siRNA sense strand
gcugcaagagagcgagaaa

SEQ ID NO: 2422015 - RNA, 19 nt, Homo sapiens
  misc_RNA (1)...(19): siRNA sense strand
uggaagaggaaccgggcaa

SEQ ID NO: 2422016 - RNA, 19 nt, Homo sapiens
  misc_RNA (1)...(19): siRNA sense strand
cacaaguggaggagaagaa

SEQ ID NO: 2422017 - RNA, 19 nt, Homo sapiens
  misc_RNA (1)...(19): siRNA sense strand
gauuauguuucgaggggaa

SEQ ID NO: 2422018 - RNA, 19 nt, Homo sapiens
  misc_RNA (1)...(19): siRNA sense strand
augaaguagaagaggaaca

SEQ ID NO: 2422019 - RNA, 19 nt, Homo sapiens
  misc_RNA (1)...(19): siRNA sense strand
aggaacaagaagaaagaca

SEQ ID NO: 2422020 - RNA, 19 nt, Homo sapiens
  misc_RNA (1)...(19): siRNA sense strand
gcgugaucgugauggaaga

SEQ ID NO: 2422021 - RNA, 19 nt, Homo sapiens
  misc_RNA (1)...(19): siRNA sense strand
augaagaaucagaagauga

SEQ ID NO: 2422022 - RNA, 19 nt, Homo sapiens
  misc_RNA (1)...(19): siRNA sense strand
aaucagaagaugaaguaga

SEQ ID NO: 2422023 - RNA, 19 nt, Homo sapiens
  misc_RNA (1)...(19): siRNA sense strand
cugaagagcugaaaccaca

SEQ ID NO: 2422024 - RNA, 19 nt, Homo sapiens
  misc_RNA (1)...(19): siRNA sense strand
aaguagaagaggaacaaga

SEQ ID NO: 2422025 - RNA, 19 nt, Homo sapiens
  misc_RNA (1)...(19): siRNA sense strand
agaagaacuuagaagaacu

SEQ ID NO: 2422026 - RNA, 19 nt, Homo sapiens
  misc_RNA (1)...(19): siRNA sense strand
agaagaacuagaggagaaa

SEQ ID NO: 2422027 - RNA, 19 nt, Homo sapiens
  misc_RNA (1)...(19): siRNA sense strand
cuauguucaugguggagua

SEQ ID NO: 2422028 - RNA, 19 nt, Homo sapiens
  misc_RNA (1)...(19): siRNA sense strand
aggagaagaacuuagaaga

SEQ ID NO: 2422029 - RNA, 19 nt, Homo sapiens
  misc_RNA (1)...(19): siRNA sense strand
aagaugaaguguuugguga

SEQ ID NO: 2422030 - RNA, 19 nt, Homo sapiens
  misc_RNA (1)...(19): siRNA sense strand
aggcagaggagauauggaa

SEQ ID NO: 2422031 - RNA, 19 nt, Homo sapiens
  misc_RNA (1)...(19): siRNA sense strand
gaguaguuguccaggucau

SEQ ID NO: 2422032 - RNA, 19 nt, Homo sapiens
  misc_RNA (1)...(19): siRNA sense strand
aagaugaaguagaagagga

SEQ ID NO: 2422033 - RNA, 19 nt, Homo sapiens
  misc_RNA (1)...(19): siRNA sense strand
uuggaaacguuguggaacu

SEQ ID NO: 2422034 - RNA, 19 nt, Homo sapiens
  misc_RNA (1)...(19): siRNA sense strand
ggaagcuguuuauggccaa

SEQ ID NO: 2422035 - RNA, 19 nt, Homo sapiens
  misc_RNA (1)...(19): siRNA sense strand
ggaguagaugcuaguggaa

SEQ ID NO: 2422036 - RNA, 19 nt, Homo sapiens
  misc_RNA (1)...(19): siRNA sense strand
agaggaacaagaagaaaga

SEQ ID NO: 2422037 - RNA, 19 nt, Homo sapiens
  misc_RNA (1)...(19): siRNA sense strand
cagaggugguggugaugau

SEQ ID NO: 2422038 - RNA, 19 nt, Homo sapiens
  misc_RNA (1)...(19): siRNA sense strand
aguagaugcuaguggaaag

SEQ ID NO: 2422039 - RNA, 19 nt, Homo sapiens
  misc_RNA (1)...(19): siRNA sense strand
cugaauaaagcuccggaau

SEQ ID NO: 2422040 - RNA, 19 nt, Homo sapiens
  misc_RNA (1)...(19): siRNA sense strand
aagcuaaaccagaaguuca

SEQ ID NO: 2422041 - RNA, 19 nt, Homo sapiens
  misc_RNA (1)...(19): siRNA sense strand
gccacaugauauugaugaa

SEQ ID NO: 2422042 - RNA, 19 nt, Homo sapiens
  misc_RNA (1)...(19): siRNA sense strand
aguagaagaggaacaagaa

SEQ ID NO: 2422043 - RNA, 19 nt, Homo sapiens
  misc_RNA (1)...(19): siRNA sense strand
cccugugacuaauggcaua

SEQ ID NO: 2422044 - RNA, 19 nt, Homo sapiens
  misc_RNA (1)...(19): siRNA sense strand
gcaucaauaccaagggugu

SEQ ID NO: 2422045 - RNA, 19 nt, Homo sapiens
  misc_RNA (1)...(19): siRNA sense strand
cugaaggaucuguuccaaa

SEQ ID NO: 2422046 - RNA, 19 nt, Homo sapiens
  misc_RNA (1)...(19): siRNA sense strand
aaacaaagacugaagagcu

SEQ ID NO: 2422047 - RNA, 19 nt, Homo sapiens
  misc_RNA (1)...(19): siRNA sense strand
caguggacaaccagaaaga

SEQ ID NO: 2422048 - RNA, 19 nt, Homo sapiens
  misc_RNA (1)...(19): siRNA sense strand
agaccaggcagaggagaua

SEQ ID NO: 2422049 - RNA, 19 nt, Homo sapiens
  misc_RNA (1)...(19): siRNA sense strand
acaagaagaaagacaacca

SEQ ID NO: 2422050 - RNA, 19 nt, Homo sapiens
  misc_RNA (1)...(19): siRNA sense strand
ugaacaacgaccuagagaa

SEQ ID NO: 2422051 - RNA, 19 nt, Homo sapiens
  misc_RNA (1)...(19): siRNA sense strand
ccacaugauauugaugaaa

SEQ ID NO: 2422052 - RNA, 19 nt, Homo sapiens
  misc_RNA (1)...(19): siRNA sense strand
guuuauggccaaaaugaua

SEQ ID NO: 2422053 - RNA, 19 nt, Homo sapiens
  misc_RNA (1)...(19): siRNA sense strand
ugaaaaugagcuaaaggaa

SEQ ID NO: 2422054 - RNA, 19 nt, Homo sapiens
  misc_RNA (1)...(19): siRNA sense strand
aggaucuguuccaaauaaa

SEQ ID NO: 2422055 - RNA, 19 nt, Homo sapiens
  misc_RNA (1)...(19): siRNA sense strand
uguucaugguggaguagau

SEQ ID NO: 2422056 - RNA, 19 nt, Homo sapiens
  misc_RNA (1)...(19): siRNA sense strand
ugaaguagaagaggaacaa

SEQ ID NO: 2422057 - RNA, 19 nt, Homo sapiens
  misc_RNA (1)...(19): siRNA sense strand
agcuaaaccagaaguucaa

SEQ ID NO: 2422058 - RNA, 19 nt, Homo sapiens
  misc_RNA (1)...(19): siRNA sense strand
acaaccagaaagaaaguuu

SEQ ID NO: 2422059 - RNA, 19 nt, Homo sapiens
  misc_RNA (1)...(19): siRNA sense strand
guuaugaagaugaaguguu

SEQ ID NO: 2422060 - RNA, 19 nt, Homo sapiens
  misc_RNA (1)...(19): siRNA sense strand
cgggaguuugugaggcaau

SEQ ID NO: 2422061 - RNA, 19 nt, Homo sapiens
  misc_RNA (1)...(19): siRNA sense strand
agaugaaguguuuggugau

SEQ ID NO: 2422062 - RNA, 19 nt, Homo sapiens
  misc_RNA (1)...(19): siRNA sense strand
aagaaaugguuauggagaa

SEQ ID NO: 2422063 - RNA, 19 nt, Homo sapiens
  misc_RNA (1)...(19): siRNA sense strand
agaugaaguagaagaggaa

SEQ ID NO: 2422064 - RNA, 19 nt, Homo sapiens
  misc_RNA (1)...(19): siRNA sense strand
gcaaagaaaugguuaugga

SEQ ID NO: 2422065 - RNA, 19 nt, Homo sapiens
  misc_RNA (1)...(19): siRNA sense strand
agccaagagucgaagcuaa

SEQ ID NO: 2422066 - RNA, 19 nt, Homo sapiens
  misc_RNA (1)...(19): siRNA sense strand
gcugcaagagagcgagaaa

SEQ ID NO: 2422067 - RNA, 19 nt, Homo sapiens
  misc_RNA (1)...(19): siRNA sense strand
uggaagaggaaccgggcaa

SEQ ID NO: 2422068 - RNA, 19 nt, Homo sapiens
  misc_RNA (1)...(19): siRNA sense strand
cacaaguggaggagaagaa

SEQ ID NO: 2422069 - RNA, 19 nt, Homo sapiens
  misc_RNA (1)...(19): siRNA sense strand
gauuauguuucgaggggaa

SEQ ID NO: 2422070 - RNA, 19 nt, Homo sapiens
  misc_RNA (1)...(19): siRNA sense strand
augaaguagaagaggaaca

SEQ ID NO: 2422071 - RNA, 19 nt, Homo sapiens
  misc_RNA (1)...(19): siRNA sense strand
aggaacaagaagaaagaca

SEQ ID NO: 2422072 - RNA, 19 nt, Homo sapiens
  misc_RNA (1)...(19): siRNA sense strand
gcgugaucgugauggaaga

SEQ ID NO: 2422073 - RNA, 19 nt, Homo sapiens
  misc_RNA (1)...(19): siRNA sense strand
augaagaaucagaagauga

SEQ ID NO: 2422074 - RNA, 19 nt, Homo sapiens
  misc_RNA (1)...(19): siRNA sense strand
aaucagaagaugaaguaga

SEQ ID NO: 2422075 - RNA, 19 nt, Homo sapiens
  misc_RNA (1)...(19): siRNA sense strand
gcagcaaagaaaugguuau

SEQ ID NO: 2422076 - RNA, 19 nt, Homo sapiens
  misc_RNA (1)...(19): siRNA sense strand
cugaagagcugaaaccaca

SEQ ID NO: 2422077 - RNA, 19 nt, Homo sapiens
  misc_RNA (1)...(19): siRNA sense strand
aaguagaagaggaacaaga

SEQ ID NO: 2422078 - RNA, 19 nt, Homo sapiens
  misc_RNA (1)...(19): siRNA sense strand
agaagaacuuagaagaacu

SEQ ID NO: 2422079 - RNA, 19 nt, Homo sapiens
  misc_RNA (1)...(19): siRNA sense strand
agaagaacuagaggagaaa

SEQ ID NO: 2422080 - RNA, 19 nt, Homo sapiens
  misc_RNA (1)...(19): siRNA sense strand
cuauguucaugguggagua

SEQ ID NO: 2422081 - RNA, 19 nt, Homo sapiens
  misc_RNA (1)...(19): siRNA sense strand
aggagaagaacuuagaaga

SEQ ID NO: 2422082 - RNA, 19 nt, Homo sapiens
  misc_RNA (1)...(19): siRNA sense strand
aagaugaaguguuugguga

SEQ ID NO: 2422083 - RNA, 19 nt, Homo sapiens
  misc_RNA (1)...(19): siRNA sense strand
acauugugcagcaaagaaa

SEQ ID NO: 2422084 - RNA, 19 nt, Homo sapiens
  misc_RNA (1)...(19): siRNA sense strand
aggcagaggagauauggaa

SEQ ID NO: 2422085 - RNA, 19 nt, Homo sapiens
  misc_RNA (1)...(19): siRNA sense strand
gaguaguuguccaggucau

SEQ ID NO: 2422086 - RNA, 19 nt, Homo sapiens
  misc_RNA (1)...(19): siRNA sense strand
aagaugaaguagaagagga

SEQ ID NO: 2422087 - RNA, 19 nt, Homo sapiens
  misc_RNA (1)...(19): siRNA sense strand
uuggaaacguuguggaacu

SEQ ID NO: 2422088 - RNA, 19 nt, Homo sapiens
  misc_RNA (1)...(19): siRNA sense strand
ggaagcuguuuauggccaa

SEQ ID NO: 2422089 - RNA, 19 nt, Homo sapiens
  misc_RNA (1)...(19): siRNA sense strand
ggaguagaugcuaguggaa

SEQ ID NO: 2422090 - RNA, 19 nt, Homo sapiens
  misc_RNA (1)...(19): siRNA sense strand
agaggaacaagaagaaaga

SEQ ID NO: 2422091 - RNA, 19 nt, Homo sapiens
  misc_RNA (1)...(19): siRNA sense strand
cagaggugguggugaugau

SEQ ID NO: 2422092 - RNA, 19 nt, Homo sapiens
  misc_RNA (1)...(19): siRNA sense strand
aguagaugcuaguggaaag

SEQ ID NO: 2422093 - RNA, 19 nt, Homo sapiens
  misc_RNA (1)...(19): siRNA sense strand
cugaauaaagcuccggaau

SEQ ID NO: 2422094 - RNA, 19 nt, Homo sapiens
  misc_RNA (1)...(19): siRNA sense strand
aagcuaaaccagaaguuca

SEQ ID NO: 2422095 - RNA, 19 nt, Homo sapiens
  misc_RNA (1)...(19): siRNA sense strand
gccacaugauauugaugaa

SEQ ID NO: 2422096 - RNA, 19 nt, Homo sapiens
  misc_RNA (1)...(19): siRNA sense strand
aguagaagaggaacaagaa

SEQ ID NO: 2422097 - RNA, 19 nt, Homo sapiens
  misc_RNA (1)...(19): siRNA sense strand
cccugugacuaauggcaua

SEQ ID NO: 2422098 - RNA, 19 nt, Homo sapiens
  misc_RNA (1)...(19): siRNA sense strand
aaagaaaugguuauggaga

SEQ ID NO: 2422099 - RNA, 19 nt, Homo sapiens
  misc_RNA (1)...(19): siRNA sense strand
gcaucaauaccaagggugu

SEQ ID NO: 2422100 - RNA, 19 nt, Homo sapiens
  misc_RNA (1)...(19): siRNA sense strand
cugaaggaucuguuccaaa

SEQ ID NO: 2422101 - RNA, 19 nt, Homo sapiens
  misc_RNA (1)...(19): siRNA sense strand
aaacaaagacugaagagcu

SEQ ID NO: 2422102 - RNA, 19 nt, Homo sapiens
  misc_RNA (1)...(19): siRNA sense strand
caguggacaaccagaaaga

SEQ ID NO: 2422103 - RNA, 19 nt, Homo sapiens
  misc_RNA (1)...(19): siRNA sense strand
agaccaggcagaggagaua

SEQ ID NO: 2422104 - RNA, 19 nt, Homo sapiens
  misc_RNA (1)...(19): siRNA sense strand
acaagaagaaagacaacca

SEQ ID NO: 2422105 - RNA, 19 nt, Homo sapiens
  misc_RNA (1)...(19): siRNA sense strand
ugaacaacgaccuagagaa

SEQ ID NO: 2422106 - RNA, 19 nt, Homo sapiens
  misc_RNA (1)...(19): siRNA sense strand
ccacaugauauugaugaaa

SEQ ID NO: 2422107 - RNA, 19 nt, Homo sapiens
  misc_RNA (1)...(19): siRNA sense strand
guuuauggccaaaaugaua

SEQ ID NO: 2422108 - RNA, 19 nt, Homo sapiens
  misc_RNA (1)...(19): siRNA sense strand
ugaaaaugagcuaaaggaa

SEQ ID NO: 2422109 - RNA, 19 nt, Homo sapiens
  misc_RNA (1)...(19): siRNA sense strand
uguucaugguggaguagau

SEQ ID NO: 2422110 - RNA, 19 nt, Homo sapiens
  misc_RNA (1)...(19): siRNA sense strand
aggaucuguuccaaauaaa

SEQ ID NO: 2422111 - RNA, 19 nt, Homo sapiens
  misc_RNA (1)...(19): siRNA sense strand
ugaaguagaagaggaacaa

SEQ ID NO: 2422112 - RNA, 19 nt, Homo sapiens
  misc_RNA (1)...(19): siRNA sense strand
gggacgaggaagaggacaa

SEQ ID NO: 2422113 - RNA, 19 nt, Homo sapiens
  misc_RNA (1)...(19): siRNA sense strand
cguaggagguguaaggaga

SEQ ID NO: 2422114 - RNA, 19 nt, Homo sapiens
  misc_RNA (1)...(19): siRNA sense strand
gcgcaaacgagaagagcca

SEQ ID NO: 2422115 - RNA, 19 nt, Homo sapiens
  misc_RNA (1)...(19): siRNA sense strand
agaagaaggcugaggagga

SEQ ID NO: 2422116 - RNA, 19 nt, Homo sapiens
  misc_RNA (1)...(19): siRNA sense strand
aggaagaugcagagcucaa

SEQ ID NO: 2422117 - RNA, 19 nt, Homo sapiens
  misc_RNA (1)...(19): siRNA sense strand
augcagagcucaaggcaca

SEQ ID NO: 2422118 - RNA, 19 nt, Homo sapiens
  misc_RNA (1)...(19): siRNA sense strand
uauuagagucugcgcgaaa

SEQ ID NO: 2422119 - RNA, 19 nt, Homo sapiens
  misc_RNA (1)...(19): siRNA sense strand
aggaguaaagcuagaaauu

SEQ ID NO: 2422120 - RNA, 19 nt, Homo sapiens
  misc_RNA (1)...(19): siRNA sense strand
acacuaaagaacuggaaga

SEQ ID NO: 2422121 - RNA, 19 nt, Homo sapiens
  misc_RNA (1)...(19): siRNA sense strand
cagcagaagcagagaugca

SEQ ID NO: 2422122 - RNA, 19 nt, Homo sapiens
  misc_RNA (1)...(19): siRNA sense strand
gcugaaaaccagaagaauu

SEQ ID NO: 2422123 - RNA, 19 nt, Homo sapiens
  misc_RNA (1)...(19): siRNA sense strand
gggaagaagucacgcccau

SEQ ID NO: 2422124 - RNA, 19 nt, Homo sapiens
  misc_RNA (1)...(19): siRNA sense strand
ccauccggcacgagggaaa

SEQ ID NO: 2422125 - RNA, 19 nt, Homo sapiens
  misc_RNA (1)...(19): siRNA sense strand
ccauaaagagacagagauc

SEQ ID NO: 2422126 - RNA, 19 nt, Homo sapiens
  misc_RNA (1)...(19): siRNA sense strand
gggaaagucaccugggcuu

SEQ ID NO: 2422127 - RNA, 19 nt, Homo sapiens
  misc_RNA (1)...(19): siRNA sense strand
gaugaaugugggagcgauu

SEQ ID NO: 2422128 - RNA, 19 nt, Homo sapiens
  misc_RNA (1)...(19): siRNA sense strand
ugccaagcguuuauggaaa

SEQ ID NO: 2422129 - RNA, 19 nt, Homo sapiens
  misc_RNA (1)...(19): siRNA sense strand
cugagaagguggugcagga

SEQ ID NO: 2422130 - RNA, 19 nt, Homo sapiens
  misc_RNA (1)...(19): siRNA sense strand
gagaagagccagugcguug

SEQ ID NO: 2422131 - RNA, 19 nt, Homo sapiens
  misc_RNA (1)...(19): siRNA sense strand
aggcaauuaaagaggccaa

SEQ ID NO: 2422132 - RNA, 19 nt, Homo sapiens
  misc_RNA (1)...(19): siRNA sense strand
cugcaaaacagcucgaaua

SEQ ID NO: 2422133 - RNA, 19 nt, Homo sapiens
  misc_RNA (1)...(19): siRNA sense strand
agcaauuagaagacgauaa

SEQ ID NO: 2422134 - RNA, 19 nt, Homo sapiens
  misc_RNA (1)...(19): siRNA sense strand
uggcaggacacaagcgcaa

SEQ ID NO: 2422135 - RNA, 19 nt, Homo sapiens
  misc_RNA (1)...(19): siRNA sense strand
accagaagauggagaggau

SEQ ID NO: 2422136 - RNA, 19 nt, Homo sapiens
  misc_RNA (1)...(19): siRNA sense strand
caagaauugagaagcgaau

SEQ ID NO: 2422137 - RNA, 19 nt, Homo sapiens
  misc_RNA (1)...(19): siRNA sense strand
aggaaugacgccagcagaa

SEQ ID NO: 2422138 - RNA, 19 nt, Homo sapiens
  misc_RNA (1)...(19): siRNA sense strand
cgggaggaguaaagcuaga

SEQ ID NO: 2422139 - RNA, 19 nt, Homo sapiens
  misc_RNA (1)...(19): siRNA sense strand
aaguauguguugagcauca

SEQ ID NO: 2422140 - RNA, 19 nt, Homo sapiens
  misc_RNA (1)...(19): siRNA sense strand
agucggaccaggaggaaga

SEQ ID NO: 2422141 - RNA, 19 nt, Homo sapiens
  misc_RNA (1)...(19): siRNA sense strand
uaccugugauguagagaaa

SEQ ID NO: 2422142 - RNA, 19 nt, Homo sapiens
  misc_RNA (1)...(19): siRNA sense strand
cugcaaacugccagguuau

SEQ ID NO: 2422143 - RNA, 19 nt, Homo sapiens
  misc_RNA (1)...(19): siRNA sense strand
gggaucaagauguggcuuu

SEQ ID NO: 2422144 - RNA, 19 nt, Homo sapiens
  misc_RNA (1)...(19): siRNA sense strand
agacuaugacccagaugaa

SEQ ID NO: 2422145 - RNA, 19 nt, Homo sapiens
  misc_RNA (1)...(19): siRNA sense strand
gaaugggagaagaggcuuu

SEQ ID NO: 2422146 - RNA, 19 nt, Homo sapiens
  misc_RNA (1)...(19): siRNA sense strand
ucacaggcauuaaagggaa

SEQ ID NO: 2422147 - RNA, 19 nt, Homo sapiens
  misc_RNA (1)...(19): siRNA sense strand
cagaagggguagaaauuau

SEQ ID NO: 2422148 - RNA, 19 nt, Homo sapiens
  misc_RNA (1)...(19): siRNA sense strand
guaacgaaugaaugggaga

SEQ ID NO: 2422149 - RNA, 19 nt, Homo sapiens
  misc_RNA (1)...(19): siRNA sense strand
acacaagcgcaaacgagaa

SEQ ID NO: 2422150 - RNA, 19 nt, Homo sapiens
  misc_RNA (1)...(19): siRNA sense strand
ggaggaagaugcagagcuc

SEQ ID NO: 2422151 - RNA, 19 nt, Homo sapiens
  misc_RNA (1)...(19): siRNA sense strand
aaguagugguccauaaaga

SEQ ID NO: 2422152 - RNA, 19 nt, Homo sapiens
  misc_RNA (1)...(19): siRNA sense strand
cugacaaggaacaggaguu

SEQ ID NO: 2422153 - RNA, 19 nt, Homo sapiens
  misc_RNA (1)...(19): siRNA sense strand
gugacaguucagaggaaga

SEQ ID NO: 2422154 - RNA, 19 nt, Homo sapiens
  misc_RNA (1)...(19): siRNA sense strand
cacaggcauuaaagggaaa

SEQ ID NO: 2422155 - RNA, 19 nt, Homo sapiens
  misc_RNA (1)...(19): siRNA sense strand
gagaaacgcuccagaggac

SEQ ID NO: 2422156 - RNA, 19 nt, Homo sapiens
  misc_RNA (1)...(19): siRNA sense strand
acaaagugaucgagcugca

SEQ ID NO: 2422157 - RNA, 19 nt, Homo sapiens
  misc_RNA (1)...(19): siRNA sense strand
cuugaacuugcuagagaaa

SEQ ID NO: 2422158 - RNA, 19 nt, Homo sapiens
  misc_RNA (1)...(19): siRNA sense strand
ccucaacggugaagacgga

SEQ ID NO: 2422159 - RNA, 19 nt, Homo sapiens
  misc_RNA (1)...(19): siRNA sense strand
cggugaagacggaaaccau

SEQ ID NO: 2422160 - RNA, 19 nt, Homo sapiens
  misc_RNA (1)...(19): siRNA sense strand
uccuagaugaugauggaua

SEQ ID NO: 2422161 - RNA, 19 nt, Homo sapiens
  misc_RNA (1)...(19): siRNA sense strand
ccaaagagcagcacccuga

SEQ ID NO: 2422162 - RNA, 19 nt, Homo sapiens
  misc_RNA (1)...(19): siRNA sense strand
ucucgauggaucagaauau

SEQ ID NO: 2422163 - RNA, 19 nt, Homo sapiens
  misc_RNA (1)...(19): siRNA sense strand
gcgcgaaaaccaacagaau

SEQ ID NO: 2422164 - RNA, 19 nt, Homo sapiens
  misc_RNA (1)...(19): siRNA sense strand
guccauaaagagacagaga

SEQ ID NO: 2422165 - RNA, 19 nt, Homo sapiens
  misc_RNA (1)...(19): siRNA sense strand
cagaagauggagaggauug

SEQ ID NO: 2422166 - RNA, 19 nt, Homo sapiens
  misc_RNA (1)...(19): siRNA sense strand
ccacgaaggaagugccagu

SEQ ID NO: 2422167 - RNA, 19 nt, Homo sapiens
  misc_RNA (1)...(19): siRNA sense strand
acaagugcuguuugauaaa

SEQ ID NO: 2422168 - RNA, 19 nt, Homo sapiens
  misc_RNA (1)...(19): siRNA sense strand
gcucaagaauaaaggcuga

SEQ ID NO: 2422169 - RNA, 19 nt, Homo sapiens
  misc_RNA (1)...(19): siRNA sense strand
ggcauauggaagaaagaaa

SEQ ID NO: 2422170 - RNA, 19 nt, Homo sapiens
  misc_RNA (1)...(19): siRNA sense strand
gggcaaugggacagggagu

SEQ ID NO: 2422171 - RNA, 19 nt, Homo sapiens
  misc_RNA (1)...(19): siRNA sense strand
uggaagaaagaaaggugaa

SEQ ID NO: 2422172 - RNA, 19 nt, Homo sapiens
  misc_RNA (1)...(19): siRNA sense strand
uggaugaauaagagcacaa

SEQ ID NO: 2422173 - RNA, 19 nt, Homo sapiens
  misc_RNA (1)...(19): siRNA sense strand
uuuaaagggcaaugggaca

SEQ ID NO: 2422174 - RNA, 19 nt, Homo sapiens
  misc_RNA (1)...(19): siRNA sense strand
aaagagacgaagagcucaa

SEQ ID NO: 2422175 - RNA, 19 nt, Homo sapiens
  misc_RNA (1)...(19): siRNA sense strand
agggaguuuaagaaagaaa

SEQ ID NO: 2422176 - RNA, 19 nt, Homo sapiens
  misc_RNA (1)...(19): siRNA sense strand
auuccuggguugaaagcaa

SEQ ID NO: 2422177 - RNA, 19 nt, Homo sapiens
  misc_RNA (1)...(19): siRNA sense strand
uggaggacuugcaggccaa

SEQ ID NO: 2422178 - RNA, 19 nt, Homo sapiens
  misc_RNA (1)...(19): siRNA sense strand
agaaauugguagaguggac

SEQ ID NO: 2422179 - RNA, 19 nt, Homo sapiens
  misc_RNA (1)...(19): siRNA sense strand
aagaaagaaaggugaaucu

SEQ ID NO: 2422180 - RNA, 19 nt, Homo sapiens
  misc_RNA (1)...(19): siRNA sense strand
cuguacagaugaugacaca

SEQ ID NO: 2422181 - RNA, 19 nt, Homo sapiens
  misc_RNA (1)...(19): siRNA sense strand
uguaaaugcagccgaugaa

SEQ ID NO: 2422182 - RNA, 19 nt, Homo sapiens
  misc_RNA (1)...(19): siRNA sense strand
gguugaaagcaaaacaaau

SEQ ID NO: 2422183 - RNA, 19 nt, Homo sapiens
  misc_RNA (1)...(19): siRNA sense strand
cagcacucgacuuggguuu

SEQ ID NO: 2422184 - RNA, 19 nt, Homo sapiens
  misc_RNA (1)...(19): siRNA sense strand
uugagguggaggacgguua

SEQ ID NO: 2422185 - RNA, 19 nt, Homo sapiens
  misc_RNA (1)...(19): siRNA sense strand
acaaugaauccaacagcau

SEQ ID NO: 2422186 - RNA, 19 nt, Homo sapiens
  misc_RNA (1)...(19): siRNA sense strand
aagauuaauuccuggguug

SEQ ID NO: 2422187 - RNA, 19 nt, Homo sapiens
  misc_RNA (1)...(19): siRNA sense strand
agaaaacaaaugauggcaa

SEQ ID NO: 2422188 - RNA, 19 nt, Homo sapiens
  misc_RNA (1)...(19): siRNA sense strand
ccuucuacuuuguggacua

SEQ ID NO: 2422189 - RNA, 19 nt, Homo sapiens
  misc_RNA (1)...(19): siRNA sense strand
aggccauccuccuggacua

SEQ ID NO: 2422190 - RNA, 19 nt, Homo sapiens
  misc_RNA (1)...(19): siRNA sense strand
gcacaaagucaaggccaga

SEQ ID NO: 2422191 - RNA, 19 nt, Homo sapiens
  misc_RNA (1)...(19): siRNA sense strand
ccugugacaucgugggcca

SEQ ID NO: 2422192 - RNA, 19 nt, Homo sapiens
  misc_RNA (1)...(19): siRNA sense strand
caucgugggccaugggcau

SEQ ID NO: 2422193 - RNA, 19 nt, Homo sapiens
  misc_RNA (1)...(19): siRNA sense strand
cuucugaggcacaaaguca

SEQ ID NO: 2422194 - RNA, 19 nt, Homo sapiens
  misc_RNA (1)...(19): siRNA sense strand
ggccagacugaccaagaaa

SEQ ID NO: 2422195 - RNA, 19 nt, Homo sapiens
  misc_RNA (1)...(19): siRNA sense strand
cgugauagagaaagagaaa

SEQ ID NO: 2422196 - RNA, 19 nt, Homo sapiens
  misc_RNA (1)...(19): siRNA sense strand
aaggaaaggaagagagcua

SEQ ID NO: 2422197 - RNA, 19 nt, Homo sapiens
  misc_RNA (1)...(19): siRNA sense strand
ugauagagaaagagaaaga

SEQ ID NO: 2422198 - RNA, 19 nt, Homo sapiens
  misc_RNA (1)...(19): siRNA sense strand
augaagaaguagaagaaga

SEQ ID NO: 2422199 - RNA, 19 nt, Homo sapiens
  misc_RNA (1)...(19): siRNA sense strand
accagaaagaggagggaaa

SEQ ID NO: 2422200 - RNA, 19 nt, Homo sapiens
  misc_RNA (1)...(19): siRNA sense strand
agaaagagaaagagagcga

SEQ ID NO: 2422201 - RNA, 19 nt, Homo sapiens
  misc_RNA (1)...(19): siRNA sense strand
aggaggaagaagaagaaua

SEQ ID NO: 2422202 - RNA, 19 nt, Homo sapiens
  misc_RNA (1)...(19): siRNA sense strand
agauagaggacgugauaga

SEQ ID NO: 2422203 - RNA, 19 nt, Homo sapiens
  misc_RNA (1)...(19): siRNA sense strand
agaugaagaaguagaagaa

SEQ ID NO: 2422204 - RNA, 19 nt, Homo sapiens
  misc_RNA (1)...(19): siRNA sense strand
aggaaggaguggaagaaga

SEQ ID NO: 2422205 - RNA, 19 nt, Homo sapiens
  misc_RNA (1)...(19): siRNA sense strand
ucauaacagcagaaagaaa

SEQ ID NO: 2422206 - RNA, 19 nt, Homo sapiens
  misc_RNA (1)...(19): siRNA sense strand
agacagagagcgagauaga

SEQ ID NO: 2422207 - RNA, 19 nt, Homo sapiens
  misc_RNA (1)...(19): siRNA sense strand
ggauagacgugcaagcaga

SEQ ID NO: 2422208 - RNA, 19 nt, Homo sapiens
  misc_RNA (1)...(19): siRNA sense strand
aggaagaggaggaggagga

SEQ ID NO: 2422209 - RNA, 19 nt, Homo sapiens
  misc_RNA (1)...(19): siRNA sense strand
aggaagaggaggaggagga

SEQ ID NO: 2422210 - RNA, 19 nt, Homo sapiens
  misc_RNA (1)...(19): siRNA sense strand
aggaggaggaggaggaaga

SEQ ID NO: 2422211 - RNA, 19 nt, Homo sapiens
  misc_RNA (1)...(19): siRNA sense strand
agauggaucagaugagaaa

SEQ ID NO: 2422212 - RNA, 19 nt, Homo sapiens
  misc_RNA (1)...(19): siRNA sense strand
auucauaacagcagaaaga

SEQ ID NO: 2422213 - RNA, 19 nt, Homo sapiens
  misc_RNA (1)...(19): siRNA sense strand
agcaagauacagagauaaa

SEQ ID NO: 2422214 - RNA, 19 nt, Homo sapiens
  misc_RNA (1)...(19): siRNA sense strand
cgagacagagagcgagaua

SEQ ID NO: 2422215 - RNA, 19 nt, Homo sapiens
  misc_RNA (1)...(19): siRNA sense strand
gaguaacaaccaugagaau

SEQ ID NO: 2422216 - RNA, 19 nt, Homo sapiens
  misc_RNA (1)...(19): siRNA sense strand
cagaaagaaaccaaggauu

SEQ ID NO: 2422217 - RNA, 19 nt, Homo sapiens
  misc_RNA (1)...(19): siRNA sense strand
ggaugaagauggagaggag

SEQ ID NO: 2422218 - RNA, 19 nt, Homo sapiens
  misc_RNA (1)...(19): siRNA sense strand
augaacaggaugagagaga

SEQ ID NO: 2422219 - RNA, 19 nt, Homo sapiens
  misc_RNA (1)...(19): siRNA sense strand
ggaaaggaagagagcuaga

SEQ ID NO: 2422220 - RNA, 19 nt, Homo sapiens
  misc_RNA (1)...(19): siRNA sense strand
aagugaacucugaagaaua

SEQ ID NO: 2422221 - RNA, 19 nt, Homo sapiens
  misc_RNA (1)...(19): siRNA sense strand
uggaagaagauguggagga

SEQ ID NO: 2422222 - RNA, 19 nt, Homo sapiens
  misc_RNA (1)...(19): siRNA sense strand
aagaauaugaacaggauga

SEQ ID NO: 2422223 - RNA, 19 nt, Homo sapiens
  misc_RNA (1)...(19): siRNA sense strand
ugucagagagaguggaaaa

SEQ ID NO: 2422224 - RNA, 19 nt, Homo sapiens
  misc_RNA (1)...(19): siRNA sense strand
aggacgugauagagaaaga

SEQ ID NO: 2422225 - RNA, 19 nt, Homo sapiens
  misc_RNA (1)...(19): siRNA sense strand
aggucgauauagaagauaa

SEQ ID NO: 2422226 - RNA, 19 nt, Homo sapiens
  misc_RNA (1)...(19): siRNA sense strand
ucuagaugcugaucggaaa

SEQ ID NO: 2422227 - RNA, 19 nt, Homo sapiens
  misc_RNA (1)...(19): siRNA sense strand
aagaagaugcagaagaaga

SEQ ID NO: 2422228 - RNA, 19 nt, Homo sapiens
  misc_RNA (1)...(19): siRNA sense strand
aggaagaagaagaauauga

SEQ ID NO: 2422229 - RNA, 19 nt, Homo sapiens
  misc_RNA (1)...(19): siRNA sense strand
aaagagaaagagagcgauu

SEQ ID NO: 2422230 - RNA, 19 nt, Homo sapiens
  misc_RNA (1)...(19): siRNA sense strand
agagauaacagacgagaca

SEQ ID NO: 2422231 - RNA, 19 nt, Homo sapiens
  misc_RNA (1)...(19): siRNA sense strand
ggaugagagagaccagaaa

SEQ ID NO: 2422232 - RNA, 19 nt, Homo sapiens
  misc_RNA (1)...(19): siRNA sense strand
cggacgugauggacaggaa

SEQ ID NO: 2422233 - RNA, 19 nt, Homo sapiens
  misc_RNA (1)...(19): siRNA sense strand
aggaggaaggaguggaaga

SEQ ID NO: 2422234 - RNA, 19 nt, Homo sapiens
  misc_RNA (1)...(19): siRNA sense strand
ugaagaaguagaagaagau

SEQ ID NO: 2422235 - RNA, 19 nt, Homo sapiens
  misc_RNA (1)...(19): siRNA sense strand
aagaugaagagguggauga

SEQ ID NO: 2422236 - RNA, 19 nt, Homo sapiens
  misc_RNA (1)...(19): siRNA sense strand
agauaacagacgagacaga

SEQ ID NO: 2422237 - RNA, 19 nt, Homo sapiens
  misc_RNA (1)...(19): siRNA sense strand
aggaggaggaggaagaaga

SEQ ID NO: 2422238 - RNA, 19 nt, Homo sapiens
  misc_RNA (1)...(19): siRNA sense strand
aggaggaggaagaagaaga

SEQ ID NO: 2422239 - RNA, 19 nt, Homo sapiens
  misc_RNA (1)...(19): siRNA sense strand
aggaagagagcuagaggca

SEQ ID NO: 2422240 - RNA, 19 nt, Homo sapiens
  misc_RNA (1)...(19): siRNA sense strand
ccacaugaagcaagauaca

SEQ ID NO: 2422241 - RNA, 19 nt, Homo sapiens
  misc_RNA (1)...(19): siRNA sense strand
cagacgagacagagagcga

SEQ ID NO: 2422242 - RNA, 19 nt, Homo sapiens
  misc_RNA (1)...(19): siRNA sense strand
augcagaagaagaugaaga

SEQ ID NO: 2422243 - RNA, 19 nt, Homo sapiens
  misc_RNA (1)...(19): siRNA sense strand
agagaaagagagcgauuau

SEQ ID NO: 2422244 - RNA, 19 nt, Homo sapiens
  misc_RNA (1)...(19): siRNA sense strand
aggaagaugaagaaguaga

SEQ ID NO: 2422245 - RNA, 19 nt, Homo sapiens
  misc_RNA (1)...(19): siRNA sense strand
aguagaagaagaugcagaa

SEQ ID NO: 2422246 - RNA, 19 nt, Homo sapiens
  misc_RNA (1)...(19): siRNA sense strand
agaagugaacucugaagaa

SEQ ID NO: 2422247 - RNA, 19 nt, Homo sapiens
  misc_RNA (1)...(19): siRNA sense strand
ggaggaaggaguggaagaa

SEQ ID NO: 2422248 - RNA, 19 nt, Homo sapiens
  misc_RNA (1)...(19): siRNA sense strand
aaugauuaugugagggaau

SEQ ID NO: 2422249 - RNA, 19 nt, Homo sapiens
  misc_RNA (1)...(19): siRNA sense strand
aggaggaggaagaggagga

SEQ ID NO: 2422250 - RNA, 19 nt, Homo sapiens
  misc_RNA (1)...(19): siRNA sense strand
aggaggaagaggaggagga

SEQ ID NO: 2422251 - RNA, 19 nt, Homo sapiens
  misc_RNA (1)...(19): siRNA sense strand
aggaggaggaagaggagga

SEQ ID NO: 2422252 - RNA, 19 nt, Homo sapiens
  misc_RNA (1)...(19): siRNA sense strand
aggaggaagaggaggagga

SEQ ID NO: 2422253 - RNA, 19 nt, Homo sapiens
  misc_RNA (1)...(19): siRNA sense strand
aggaggaggaggaggagga

SEQ ID NO: 2422254 - RNA, 19 nt, Homo sapiens
  misc_RNA (1)...(19): siRNA sense strand
ugauagaaguggaagcucu

SEQ ID NO: 2422255 - RNA, 19 nt, Homo sapiens
  misc_RNA (1)...(19): siRNA sense strand
agaagaugcagaagaagau

SEQ ID NO: 2422256 - RNA, 19 nt, Homo sapiens
  misc_RNA (1)...(19): siRNA sense strand
ggguccuggugaagggaaa

SEQ ID NO: 2422257 - RNA, 19 nt, Homo sapiens
  misc_RNA (1)...(19): siRNA sense strand
aggaggaggaggaggauga

SEQ ID NO: 2422258 - RNA, 19 nt, Homo sapiens
  misc_RNA (1)...(19): siRNA sense strand
aggaagaagaggaggugga

SEQ ID NO: 2422259 - RNA, 19 nt, Homo sapiens
  misc_RNA (1)...(19): siRNA sense strand
ccaaugacuuugugggcca

SEQ ID NO: 2422260 - RNA, 19 nt, Homo sapiens
  misc_RNA (1)...(19): siRNA sense strand
aggaugacgaggaggaaga

SEQ ID NO: 2422261 - RNA, 19 nt, Homo sapiens
  misc_RNA (1)...(19): siRNA sense strand
aagaugagcuucaaggaga

SEQ ID NO: 2422262 - RNA, 19 nt, Homo sapiens
  misc_RNA (1)...(19): siRNA sense strand
ccaagaaacucauucggga

SEQ ID NO: 2422263 - RNA, 19 nt, Homo sapiens
  misc_RNA (1)...(19): siRNA sense strand
acuccaaccaggacagcaa

SEQ ID NO: 2422264 - RNA, 19 nt, Homo sapiens
  misc_RNA (1)...(19): siRNA sense strand
uggucaacguggacaugaa

SEQ ID NO: 2422265 - RNA, 19 nt, Homo sapiens
  misc_RNA (1)...(19): siRNA sense strand
agaugagcuucaaggagau

SEQ ID NO: 2422266 - RNA, 19 nt, Homo sapiens
  misc_RNA (1)...(19): siRNA sense strand
uggugaagggaaagaaguu

SEQ ID NO: 2422267 - RNA, 19 nt, Homo sapiens
  misc_RNA (1)...(19): siRNA sense strand
ucaaggagaucaagagccu

SEQ ID NO: 2422268 - RNA, 19 nt, Homo sapiens
  misc_RNA (1)...(19): siRNA sense strand
augacgaggaggaagaaga

SEQ ID NO: 2422269 - RNA, 19 nt, Homo sapiens
  misc_RNA (1)...(19): siRNA sense strand
agacugacuacgugcucaa

SEQ ID NO: 2422270 - RNA, 19 nt, Homo sapiens
  misc_RNA (1)...(19): siRNA sense strand
ggaaagaaguugcccgcug

SEQ ID NO: 2422271 - RNA, 19 nt, Homo sapiens
  misc_RNA (1)...(19): siRNA sense strand
aggaggaugacgaggagga

SEQ ID NO: 2422272 - RNA, 19 nt, Homo sapiens
  misc_RNA (1)...(19): siRNA sense strand
ggaacagcuuugucaggca

SEQ ID NO: 2422273 - RNA, 19 nt, Homo sapiens
  misc_RNA (1)...(19): siRNA sense strand
ugaacgacauguacgccua

SEQ ID NO: 2422274 - RNA, 19 nt, Homo sapiens
  misc_RNA (1)...(19): siRNA sense strand
cguguguguuccaggacau

SEQ ID NO: 2422275 - RNA, 19 nt, Homo sapiens
  misc_RNA (1)...(19): siRNA sense strand
ugacggaggacgaggacgu

SEQ ID NO: 2422276 - RNA, 19 nt, Homo sapiens
  misc_RNA (1)...(19): siRNA sense strand
aagcaaggguaccgccaca

SEQ ID NO: 2422277 - RNA, 19 nt, Homo sapiens
  misc_RNA (1)...(19): siRNA sense strand
aggaggaggaggaugacga

SEQ ID NO: 2422278 - RNA, 19 nt, Homo sapiens
  misc_RNA (1)...(19): siRNA sense strand
cguaaagacuugaggaaaa

SEQ ID NO: 2422279 - RNA, 19 nt, Homo sapiens
  misc_RNA (1)...(19): siRNA sense strand
caacaaacacagagcccaa

SEQ ID NO: 2422280 - RNA, 19 nt, Homo sapiens
  misc_RNA (1)...(19): siRNA sense strand
cagaagaugaagaggcaau

SEQ ID NO: 2422281 - RNA, 19 nt, Homo sapiens
  misc_RNA (1)...(19): siRNA sense strand
agagagagaaugagaguca

SEQ ID NO: 2422282 - RNA, 19 nt, Homo sapiens
  misc_RNA (1)...(19): siRNA sense strand
aagaacuacuggauggaaa

SEQ ID NO: 2422283 - RNA, 19 nt, Homo sapiens
  misc_RNA (1)...(19): siRNA sense strand
gaagagugaguuagugaaa

SEQ ID NO: 2422284 - RNA, 19 nt, Homo sapiens
  misc_RNA (1)...(19): siRNA sense strand
agggaaaucuguucagcaa

SEQ ID NO: 2422285 - RNA, 19 nt, Homo sapiens
  misc_RNA (1)...(19): siRNA sense strand
agagugaguuagugaaaga

SEQ ID NO: 2422286 - RNA, 19 nt, Homo sapiens
  misc_RNA (1)...(19): siRNA sense strand
cggucuugcauuagauaaa

SEQ ID NO: 2422287 - RNA, 19 nt, Homo sapiens
  misc_RNA (1)...(19): siRNA sense strand
cagcaguauggaagugaaa

SEQ ID NO: 2422288 - RNA, 19 nt, Homo sapiens
  misc_RNA (1)...(19): siRNA sense strand
uggcagaccaggagcauau

SEQ ID NO: 2422289 - RNA, 19 nt, Homo sapiens
  misc_RNA (1)...(19): siRNA sense strand
aguauaacaaacugcgaaa

SEQ ID NO: 2422290 - RNA, 19 nt, Homo sapiens
  misc_RNA (1)...(19): siRNA sense strand
aagugaaacagaaggagua

SEQ ID NO: 2422291 - RNA, 19 nt, Homo sapiens
  misc_RNA (1)...(19): siRNA sense strand
gauauugaagcuagaacaa

SEQ ID NO: 2422292 - RNA, 19 nt, Homo sapiens
  misc_RNA (1)...(19): siRNA sense strand
aggaggaauaucaagaaua

SEQ ID NO: 2422293 - RNA, 19 nt, Homo sapiens
  misc_RNA (1)...(19): siRNA sense strand
gcaguauggaagugaaaca

SEQ ID NO: 2422294 - RNA, 19 nt, Homo sapiens
  misc_RNA (1)...(19): siRNA sense strand
cgugauuacuuucaagaau

SEQ ID NO: 2422295 - RNA, 19 nt, Homo sapiens
  misc_RNA (1)...(19): siRNA sense strand
acguaaagacuugaggaaa

SEQ ID NO: 2422296 - RNA, 19 nt, Homo sapiens
  misc_RNA (1)...(19): siRNA sense strand
gggaaagaggagaguccau

SEQ ID NO: 2422297 - RNA, 19 nt, Homo sapiens
  misc_RNA (1)...(19): siRNA sense strand
uguuagaagcugggauuaa

SEQ ID NO: 2422298 - RNA, 19 nt, Homo sapiens
  misc_RNA (1)...(19): siRNA sense strand
ggagagagagaaugagagu

SEQ ID NO: 2422299 - RNA, 19 nt, Homo sapiens
  misc_RNA (1)...(19): siRNA sense strand
ccccaaagguugugaagau

SEQ ID NO: 2422300 - RNA, 19 nt, Homo sapiens
  misc_RNA (1)...(19): siRNA sense strand
gcaucaaagaggcaggaga

SEQ ID NO: 2422301 - RNA, 19 nt, Homo sapiens
  misc_RNA (1)...(19): siRNA sense strand
gggaaugugcuaaagccaa

SEQ ID NO: 2422302 - RNA, 19 nt, Homo sapiens
  misc_RNA (1)...(19): siRNA sense strand
caacagaaaccaagcagca

SEQ ID NO: 2422303 - RNA, 19 nt, Homo sapiens
  misc_RNA (1)...(19): siRNA sense strand
gcccaagaagucaaaguaa

SEQ ID NO: 2422304 - RNA, 19 nt, Homo sapiens
  misc_RNA (1)...(19): siRNA sense strand
gggaaggagccuauacaca

SEQ ID NO: 2422305 - RNA, 19 nt, Homo sapiens
  misc_RNA (1)...(19): siRNA sense strand
gacagaagaugaagaggca

SEQ ID NO: 2422306 - RNA, 19 nt, Homo sapiens
  misc_RNA (1)...(19): siRNA sense strand
gagaaugagagucaggaga

SEQ ID NO: 2422307 - RNA, 19 nt, Homo sapiens
  misc_RNA (1)...(19): siRNA sense strand
cguccaaagaagaggucca

SEQ ID NO: 2422308 - RNA, 19 nt, Homo sapiens
  misc_RNA (1)...(19): siRNA sense strand
agacauaucaacaacagaa

SEQ ID NO: 2422309 - RNA, 19 nt, Homo sapiens
  misc_RNA (1)...(19): siRNA sense strand
ucaagaauuaccuggacaa

SEQ ID NO: 2422310 - RNA, 19 nt, Homo sapiens
  misc_RNA (1)...(19): siRNA sense strand
cagucagaaccuuaaauaa

SEQ ID NO: 2422311 - RNA, 19 nt, Homo sapiens
  misc_RNA (1)...(19): siRNA sense strand
ucaugugggaacuggauaa

SEQ ID NO: 2422312 - RNA, 19 nt, Homo sapiens
  misc_RNA (1)...(19): siRNA sense strand
gaggaguuggugugggcaa

SEQ ID NO: 2422313 - RNA, 19 nt, Homo sapiens
  misc_RNA (1)...(19): siRNA sense strand
uggcugauucucuggauaa

SEQ ID NO: 2422314 - RNA, 19 nt, Homo sapiens
  misc_RNA (1)...(19): siRNA sense strand
acaaagggaaggagccuau

SEQ ID NO: 2422315 - RNA, 19 nt, Homo sapiens
  misc_RNA (1)...(19): siRNA sense strand
aauucaaagacuuggauga

SEQ ID NO: 2422316 - RNA, 19 nt, Homo sapiens
  misc_RNA (1)...(19): siRNA sense strand
cugaagagugaguuaguga

SEQ ID NO: 2422317 - RNA, 19 nt, Homo sapiens
  misc_RNA (1)...(19): siRNA sense strand
guugugaagauguggauga

SEQ ID NO: 2422318 - RNA, 19 nt, Homo sapiens
  misc_RNA (1)...(19): siRNA sense strand
cguacagcuagaugacaaa

SEQ ID NO: 2422319 - RNA, 19 nt, Homo sapiens
  misc_RNA (1)...(19): siRNA sense strand
gaaagucccuggaagguga

SEQ ID NO: 2422320 - RNA, 19 nt, Homo sapiens
  misc_RNA (1)...(19): siRNA sense strand
acuuaagcguuguugauga

SEQ ID NO: 2422321 - RNA, 19 nt, Homo sapiens
  misc_RNA (1)...(19): siRNA sense strand
ucgccaugucagagcuaaa

SEQ ID NO: 2422322 - RNA, 19 nt, Homo sapiens
  misc_RNA (1)...(19): siRNA sense strand
cgggagagagagaaugaga

SEQ ID NO: 2422323 - RNA, 19 nt, Homo sapiens
  misc_RNA (1)...(19): siRNA sense strand
caaagaggcaggagacagu

SEQ ID NO: 2422324 - RNA, 19 nt, Homo sapiens
  misc_RNA (1)...(19): siRNA sense strand
ucgaauuagcacucagcaa

SEQ ID NO: 2422325 - RNA, 19 nt, Homo sapiens
  misc_RNA (1)...(19): siRNA sense strand
cagcauacaaacuguucua

SEQ ID NO: 2422326 - RNA, 19 nt, Homo sapiens
  misc_RNA (1)...(19): siRNA sense strand
aaaugaauggaaaggaaga

SEQ ID NO: 2422327 - RNA, 19 nt, Homo sapiens
  misc_RNA (1)...(19): siRNA sense strand
ccaagaagucaaaguaaac

SEQ ID NO: 2422328 - RNA, 19 nt, Homo sapiens
  misc_RNA (1)...(19): siRNA sense strand
cuucaaggagccagcagua

SEQ ID NO: 2422329 - RNA, 19 nt, Homo sapiens
  misc_RNA (1)...(19): siRNA sense strand
ugggaggcguugauaggua

SEQ ID NO: 2422330 - RNA, 19 nt, Homo sapiens
  misc_RNA (1)...(19): siRNA sense strand
ugaguuagugaaagaagua

SEQ ID NO: 2422331 - RNA, 19 nt, Homo sapiens
  misc_RNA (1)...(19): siRNA sense strand
caggaggaauaucaagaau

SEQ ID NO: 2422332 - RNA, 19 nt, Homo sapiens
  misc_RNA (1)...(19): siRNA sense strand
auucagauuuagucaguga

SEQ ID NO: 2422333 - RNA, 19 nt, Homo sapiens
  misc_RNA (1)...(19): siRNA sense strand
agacaguggcugaaugcau

SEQ ID NO: 2422334 - RNA, 19 nt, Homo sapiens
  misc_RNA (1)...(19): siRNA sense strand
ccgaagagccagaggagga

SEQ ID NO: 2422335 - RNA, 19 nt, Homo sapiens
  misc_RNA (1)...(19): siRNA sense strand
aggaggaggaggagggaga

SEQ ID NO: 2422336 - RNA, 19 nt, Homo sapiens
  misc_RNA (1)...(19): siRNA sense strand
ccaaagggcucgaggacac

SEQ ID NO: 2422337 - RNA, 19 nt, Homo sapiens
  misc_RNA (1)...(19): siRNA sense strand
guucugagcuacugcguga

SEQ ID NO: 2422338 - RNA, 19 nt, Homo sapiens
  misc_RNA (1)...(19): siRNA sense strand
cgagaaggaacuggagcaa

SEQ ID NO: 2422339 - RNA, 19 nt, Homo sapiens
  misc_RNA (1)...(19): siRNA sense strand
uguccgaguacaagaagaa

SEQ ID NO: 2422340 - RNA, 19 nt, Homo sapiens
  misc_RNA (1)...(19): siRNA sense strand
ccgagaaggaacuggagca

SEQ ID NO: 2422341 - RNA, 19 nt, Homo sapiens
  misc_RNA (1)...(19): siRNA sense strand
agccagaggaggaggagga

SEQ ID NO: 2422342 - RNA, 19 nt, Homo sapiens
  misc_RNA (1)...(19): siRNA sense strand
cugcgcaggagaagaagaa

SEQ ID NO: 2422343 - RNA, 19 nt, Homo sapiens
  misc_RNA (1)...(19): siRNA sense strand
cugcaugguuucagagcgu

SEQ ID NO: 2422344 - RNA, 19 nt, Homo sapiens
  misc_RNA (1)...(19): siRNA sense strand
agaagaagaagaagagccu

SEQ ID NO: 2422345 - RNA, 19 nt, Homo sapiens
  misc_RNA (1)...(19): siRNA sense strand
agaagaagagccuggggaa

SEQ ID NO: 2422346 - RNA, 19 nt, Homo sapiens
  misc_RNA (1)...(19): siRNA sense strand
caggcugugaagagagcaa

SEQ ID NO: 2422347 - RNA, 19 nt, Homo sapiens
  misc_RNA (1)...(19): siRNA sense strand
gcuccaaagugcagacgcu

SEQ ID NO: 2422348 - RNA, 19 nt, Homo sapiens
  misc_RNA (1)...(19): siRNA sense strand
aggagggagaggagcccaa

SEQ ID NO: 2422349 - RNA, 19 nt, Homo sapiens
  misc_RNA (1)...(19): siRNA sense strand
gugcagacggucaggguac

SEQ ID NO: 2422350 - RNA, 19 nt, Homo sapiens
  misc_RNA (1)...(19): siRNA sense strand
aagagcagcugaagcgcuu

SEQ ID NO: 2422351 - RNA, 19 nt, Homo sapiens
  misc_RNA (1)...(19): siRNA sense strand
cccaagauccugauggaca

SEQ ID NO: 2422352 - RNA, 19 nt, Homo sapiens
  misc_RNA (1)...(19): siRNA sense strand
ucuggaagugaaugauaaa

SEQ ID NO: 2422353 - RNA, 19 nt, Homo sapiens
  misc_RNA (1)...(19): siRNA sense strand
ccuucaacaacuggaguaa

SEQ ID NO: 2422354 - RNA, 19 nt, Homo sapiens
  misc_RNA (1)...(19): siRNA sense strand
gcaugaucuggaagugaau

SEQ ID NO: 2422355 - RNA, 19 nt, Homo sapiens
  misc_RNA (1)...(19): siRNA sense strand
aucuggaagugaaugauaa

SEQ ID NO: 2422356 - RNA, 19 nt, Homo sapiens
  misc_RNA (1)...(19): siRNA sense strand
gugauggugcucagcgcaa

SEQ ID NO: 2422357 - RNA, 19 nt, Homo sapiens
  misc_RNA (1)...(19): siRNA sense strand
ugccaauuguacagggaaa

SEQ ID NO: 2422358 - RNA, 19 nt, Homo sapiens
  misc_RNA (1)...(19): siRNA sense strand
aggaaaagaaacaggaaau

SEQ ID NO: 2422359 - RNA, 19 nt, Homo sapiens
  misc_RNA (1)...(19): siRNA sense strand
ucguugacuuuaaggaaaa

SEQ ID NO: 2422360 - RNA, 19 nt, Homo sapiens
  misc_RNA (1)...(19): siRNA sense strand
gugaagaaaccucggccau

SEQ ID NO: 2422361 - RNA, 19 nt, Homo sapiens
  misc_RNA (1)...(19): siRNA sense strand
cagggaaaaucaagaccaa

SEQ ID NO: 2422362 - RNA, 19 nt, Homo sapiens
  misc_RNA (1)...(19): siRNA sense strand
uuuagaaauaagagggcca

SEQ ID NO: 2422363 - RNA, 19 nt, Homo sapiens
  misc_RNA (1)...(19): siRNA sense strand
caaucauaucguugacuuu

SEQ ID NO: 2422364 - RNA, 19 nt, Homo sapiens
  misc_RNA (1)...(19): siRNA sense strand
aaggaaaagaaacaggaaa

SEQ ID NO: 2422365 - RNA, 19 nt, Homo sapiens
  misc_RNA (1)...(19): siRNA sense strand
ccauggagaaacuagaaaa

SEQ ID NO: 2422366 - RNA, 19 nt, Homo sapiens
  misc_RNA (1)...(19): siRNA sense strand
aauuauaucuagugcugca

SEQ ID NO: 2422367 - RNA, 19 nt, Homo sapiens
  misc_RNA (1)...(19): siRNA sense strand
ugcaauguuuugagagcaa

SEQ ID NO: 2422368 - RNA, 19 nt, Homo sapiens
  misc_RNA (1)...(19): siRNA sense strand
uccacaaugagaagguaua

SEQ ID NO: 2422369 - RNA, 19 nt, Homo sapiens
  misc_RNA (1)...(19): siRNA sense strand
cagccugacccgugagaca

SEQ ID NO: 2422370 - RNA, 19 nt, Homo sapiens
  misc_RNA (1)...(19): siRNA sense strand
uggucaagugugagggcau

SEQ ID NO: 2422371 - RNA, 19 nt, Homo sapiens
  misc_RNA (1)...(19): siRNA sense strand
cacagugcucagagacaaa

SEQ ID NO: 2422372 - RNA, 19 nt, Homo sapiens
  misc_RNA (1)...(19): siRNA sense strand
ucagagacaaacuggucaa

SEQ ID NO: 2422373 - RNA, 19 nt, Homo sapiens
  misc_RNA (1)...(19): siRNA sense strand
ccagcaaauacaacaugaa

SEQ ID NO: 2422374 - RNA, 19 nt, Homo sapiens
  misc_RNA (1)...(19): siRNA sense strand
gcggaggagcagaaggaaa

SEQ ID NO: 2422375 - RNA, 19 nt, Homo sapiens
  misc_RNA (1)...(19): siRNA sense strand
agugacuaguccagagaaa

SEQ ID NO: 2422376 - RNA, 19 nt, Homo sapiens
  misc_RNA (1)...(19): siRNA sense strand
acaacauggcuaaagcaaa

SEQ ID NO: 2422377 - RNA, 19 nt, Homo sapiens
  misc_RNA (1)...(19): siRNA sense strand
aggaaauggaagauaaagu

SEQ ID NO: 2422378 - RNA, 19 nt, Homo sapiens
  misc_RNA (1)...(19): siRNA sense strand
agcagaaggaaauggaaga

SEQ ID NO: 2422379 - RNA, 19 nt, Homo sapiens
  misc_RNA (1)...(19): siRNA sense strand
cggauaagacggaggucac

SEQ ID NO: 2422380 - RNA, 19 nt, Homo sapiens
  misc_RNA (1)...(19): siRNA sense strand
ccacauucccacuccgcaa

SEQ ID NO: 2422381 - RNA, 19 nt, Homo sapiens
  misc_RNA (1)...(19): siRNA sense strand
gagcagaaggaaauggaag

SEQ ID NO: 2422382 - RNA, 19 nt, Homo sapiens
  misc_RNA (1)...(19): siRNA sense strand
agaauaauuucgagcgcaa

SEQ ID NO: 2422383 - RNA, 19 nt, Homo sapiens
  misc_RNA (1)...(19): siRNA sense strand
acgcggaagaagagggcga

SEQ ID NO: 2422384 - RNA, 19 nt, Homo sapiens
  misc_RNA (1)...(19): siRNA sense strand
aagaagagggcgacggcga

SEQ ID NO: 2422385 - RNA, 19 nt, Homo sapiens
  misc_RNA (1)...(19): siRNA sense strand
uggacgaagacgcggaaga

SEQ ID NO: 2422386 - RNA, 19 nt, Homo sapiens
  misc_RNA (1)...(19): siRNA sense strand
agaauaauuucgagcgcaa

SEQ ID NO: 2422387 - RNA, 19 nt, Homo sapiens
  misc_RNA (1)...(19): siRNA sense strand
gaauauaaagaaagggaga

SEQ ID NO: 2422388 - RNA, 19 nt, Homo sapiens
  misc_RNA (1)...(19): siRNA sense strand
cugauaaagaguuggagaa

SEQ ID NO: 2422389 - RNA, 19 nt, Homo sapiens
  misc_RNA (1)...(19): siRNA sense strand
ccuaagaaacacagagagu

SEQ ID NO: 2422390 - RNA, 19 nt, Homo sapiens
  misc_RNA (1)...(19): siRNA sense strand
gagaauauaaagaaaggga

SEQ ID NO: 2422391 - RNA, 19 nt, Homo sapiens
  misc_RNA (1)...(19): siRNA sense strand
aguguuuaguuaaggacaa

SEQ ID NO: 2422392 - RNA, 19 nt, Homo sapiens
  misc_RNA (1)...(19): siRNA sense strand
agugacaggaugaggaaaa

SEQ ID NO: 2422393 - RNA, 19 nt, Homo sapiens
  misc_RNA (1)...(19): siRNA sense strand
gcugauaaagaguuggaga

SEQ ID NO: 2422394 - RNA, 19 nt, Homo sapiens
  misc_RNA (1)...(19): siRNA sense strand
acgcggaagaagagggcga

SEQ ID NO: 2422395 - RNA, 19 nt, Homo sapiens
  misc_RNA (1)...(19): siRNA sense strand
aagaagagggcgacggcga

SEQ ID NO: 2422396 - RNA, 19 nt, Homo sapiens
  misc_RNA (1)...(19): siRNA sense strand
uggacgaagacgcggaaga

SEQ ID NO: 2422397 - RNA, 19 nt, Homo sapiens
  misc_RNA (1)...(19): siRNA sense strand
acaauagauagaugugcaa

SEQ ID NO: 2422398 - RNA, 19 nt, Homo sapiens
  misc_RNA (1)...(19): siRNA sense strand
ccuggcagcucaagggcau

SEQ ID NO: 2422399 - RNA, 19 nt, Homo sapiens
  misc_RNA (1)...(19): siRNA sense strand
ggacuugaagggagcacga

SEQ ID NO: 2422400 - RNA, 19 nt, Homo sapiens
  misc_RNA (1)...(19): siRNA sense strand
gagcaggacaugaugccau

SEQ ID NO: 2422401 - RNA, 19 nt, Homo sapiens
  misc_RNA (1)...(19): siRNA sense strand
uggagagagaauauaaaga

SEQ ID NO: 2422402 - RNA, 19 nt, Homo sapiens
  misc_RNA (1)...(19): siRNA sense strand
ggcacaacuuauagacagu

SEQ ID NO: 2422403 - RNA, 19 nt, Homo sapiens
  misc_RNA (1)...(19): siRNA sense strand
acucauuauuccagcaaac

SEQ ID NO: 2422404 - RNA, 19 nt, Homo sapiens
  misc_RNA (1)...(19): siRNA sense strand
uugacaaauccaaggacaa

SEQ ID NO: 2422405 - RNA, 19 nt, Homo sapiens
  misc_RNA (1)...(19): siRNA sense strand
gggccaagucagagaaggu

SEQ ID NO: 2422406 - RNA, 19 nt, Homo sapiens
  misc_RNA (1)...(19): siRNA sense strand
gggaagagcugcaaggugg

SEQ ID NO: 2422407 - RNA, 19 nt, Homo sapiens
  misc_RNA (1)...(19): siRNA sense strand
ccaucgugguccuuggcaa

SEQ ID NO: 2422408 - RNA, 19 nt, Homo sapiens
  misc_RNA (1)...(19): siRNA sense strand
aauccaaggacaagaagga

SEQ ID NO: 2422409 - RNA, 19 nt, Homo sapiens
  misc_RNA (1)...(19): siRNA sense strand
acaagaaggaggucaccau

SEQ ID NO: 2422410 - RNA, 19 nt, Homo sapiens
  misc_RNA (1)...(19): siRNA sense strand
agucagagaaggugaagcu

SEQ ID NO: 2422411 - RNA, 19 nt, Homo sapiens
  misc_RNA (1)...(19): siRNA sense strand
uggacaaccuagaagggaa

SEQ ID NO: 2422412 - RNA, 19 nt, Homo sapiens
  misc_RNA (1)...(19): siRNA sense strand
gggaaaugcucacagcuga

SEQ ID NO: 2422413 - RNA, 19 nt, Homo sapiens
  misc_RNA (1)...(19): siRNA sense strand
guguggaauaacaugguaa

SEQ ID NO: 2422414 - RNA, 19 nt, Homo sapiens
  misc_RNA (1)...(19): siRNA sense strand
ucaagaagccuacagggaa

SEQ ID NO: 2422415 - RNA, 19 nt, Homo sapiens
  misc_RNA (1)...(19): siRNA sense strand
uugaggaagaugauguuaa

SEQ ID NO: 2422416 - RNA, 19 nt, Homo sapiens
  misc_RNA (1)...(19): siRNA sense strand
uggcauaauacccagaaau

SEQ ID NO: 2422417 - RNA, 19 nt, Homo sapiens
  misc_RNA (1)...(19): siRNA sense strand
ucagaauguuagcugggaa

SEQ ID NO: 2422418 - RNA, 19 nt, Homo sapiens
  misc_RNA (1)...(19): siRNA sense strand
ggccauucgagaagugcua

SEQ ID NO: 2422419 - RNA, 19 nt, Homo sapiens
  misc_RNA (1)...(19): siRNA sense strand
cugggaagucguugcauau

SEQ ID NO: 2422420 - RNA, 19 nt, Homo sapiens
  misc_RNA (1)...(19): siRNA sense strand
ccauucgagaagugcuaaa

SEQ ID NO: 2422421 - RNA, 19 nt, Homo sapiens
  misc_RNA (1)...(19): siRNA sense strand
ccuauauugaggaagauga

SEQ ID NO: 2422422 - RNA, 19 nt, Homo sapiens
  misc_RNA (1)...(19): siRNA sense strand
gggccuaccgaaagaucau

SEQ ID NO: 2422423 - RNA, 19 nt, Homo sapiens
  misc_RNA (1)...(19): siRNA sense strand
ggacaaccuagaagggaag

SEQ ID NO: 2422424 - RNA, 19 nt, Homo sapiens
  misc_RNA (1)...(19): siRNA sense strand
aggcaggguccuagagcuu

SEQ ID NO: 2422425 - RNA, 19 nt, Homo sapiens
  misc_RNA (1)...(19): siRNA sense strand
aaaagaaggaaaaggagaa

SEQ ID NO: 2422426 - RNA, 19 nt, Homo sapiens
  misc_RNA (1)...(19): siRNA sense strand
uggagauggaugagacuga

SEQ ID NO: 2422427 - RNA, 19 nt, Homo sapiens
  misc_RNA (1)...(19): siRNA sense strand
ccaagaagagcgaggcaag

SEQ ID NO: 2422428 - RNA, 19 nt, Homo sapiens
  misc_RNA (1)...(19): siRNA sense strand
ggaagccacagaagggcaa

SEQ ID NO: 2422429 - RNA, 19 nt, Homo sapiens
  misc_RNA (1)...(19): siRNA sense strand
guggaugagcugcuggaau

SEQ ID NO: 2422430 - RNA, 19 nt, Homo sapiens
  misc_RNA (1)...(19): siRNA sense strand
ccaaaacugagaaggagaa

SEQ ID NO: 2422431 - RNA, 19 nt, Homo sapiens
  misc_RNA (1)...(19): siRNA sense strand
uggaugagacugaccgaga

SEQ ID NO: 2422432 - RNA, 19 nt, Homo sapiens
  misc_RNA (1)...(19): siRNA sense strand
aggaaaaggagaaggccca

SEQ ID NO: 2422433 - RNA, 19 nt, Homo sapiens
  misc_RNA (1)...(19): siRNA sense strand
gggagaagcugcaagggca

SEQ ID NO: 2422434 - RNA, 19 nt, Homo sapiens
  misc_RNA (1)...(19): siRNA sense strand
gcaccagggcauugaggca

SEQ ID NO: 2422435 - RNA, 19 nt, Homo sapiens
  misc_RNA (1)...(19): siRNA sense strand
gugccaaggaggccgagaa

SEQ ID NO: 2422436 - RNA, 19 nt, Homo sapiens
  misc_RNA (1)...(19): siRNA sense strand
gugacuugcaccagggcau

SEQ ID NO: 2422437 - RNA, 19 nt, Homo sapiens
  misc_RNA (1)...(19): siRNA sense strand
ggucagaugaagagagucc

SEQ ID NO: 2422438 - RNA, 19 nt, Homo sapiens
  misc_RNA (1)...(19): siRNA sense strand
ugaagaggcugaaggaggu

SEQ ID NO: 2422439 - RNA, 19 nt, Homo sapiens
  misc_RNA (1)...(19): siRNA sense strand
aggaguggucagaugaaga

SEQ ID NO: 2422440 - RNA, 19 nt, Homo sapiens
  misc_RNA (1)...(19): siRNA sense strand
ugaagaugagugaggagga

SEQ ID NO: 2422441 - RNA, 19 nt, Homo sapiens
  misc_RNA (1)...(19): siRNA sense strand
gcgauuggcuggaugggaa

SEQ ID NO: 2422442 - RNA, 19 nt, Homo sapiens
  misc_RNA (1)...(19): siRNA sense strand
gaacagugguccaaguaca

SEQ ID NO: 2422443 - RNA, 19 nt, Homo sapiens
  misc_RNA (1)...(19): siRNA sense strand
caguauuggcggucaggaa

SEQ ID NO: 2422444 - RNA, 19 nt, Homo sapiens
  misc_RNA (1)...(19): siRNA sense strand
gccgagaacuuuaggcagu

SEQ ID NO: 2422445 - RNA, 19 nt, Homo sapiens
  misc_RNA (1)...(19): siRNA sense strand
gcaugugguguuuggaaaa

SEQ ID NO: 2422446 - RNA, 19 nt, Homo sapiens
  misc_RNA (1)...(19): siRNA sense strand
agcaugugguguuuggaaa

SEQ ID NO: 2422447 - RNA, 19 nt, Homo sapiens
  misc_RNA (1)...(19): siRNA sense strand
gguuccaauaggauacaaa

SEQ ID NO: 2422448 - RNA, 19 nt, Homo sapiens
  misc_RNA (1)...(19): siRNA sense strand
agaucgagcucuuugcaga

SEQ ID NO: 2422449 - RNA, 19 nt, Homo sapiens
  misc_RNA (1)...(19): siRNA sense strand
ggccauuugcagaugaaaa

SEQ ID NO: 2422450 - RNA, 19 nt, Homo sapiens
  misc_RNA (1)...(19): siRNA sense strand
aaggaaagucagagaggaa

SEQ ID NO: 2422451 - RNA, 19 nt, Homo sapiens
  misc_RNA (1)...(19): siRNA sense strand
gggcagagggugaaggaga

SEQ ID NO: 2422452 - RNA, 19 nt, Homo sapiens
  misc_RNA (1)...(19): siRNA sense strand
ccguuaaaggauaaagaaa

SEQ ID NO: 2422453 - RNA, 19 nt, Homo sapiens
  misc_RNA (1)...(19): siRNA sense strand
aguuagaaaacgagggaaa

SEQ ID NO: 2422454 - RNA, 19 nt, Homo sapiens
  misc_RNA (1)...(19): siRNA sense strand
aggcaaaaggagaaggaaa

SEQ ID NO: 2422455 - RNA, 19 nt, Homo sapiens
  misc_RNA (1)...(19): siRNA sense strand
ccaggaaagccaaaagaaa

SEQ ID NO: 2422456 - RNA, 19 nt, Homo sapiens
  misc_RNA (1)...(19): siRNA sense strand
agauagacaaugaagaaca

SEQ ID NO: 2422457 - RNA, 19 nt, Homo sapiens
  misc_RNA (1)...(19): siRNA sense strand
gcaaagaaauuuacaggac

SEQ ID NO: 2422458 - RNA, 19 nt, Homo sapiens
  misc_RNA (1)...(19): siRNA sense strand
agacagugaaagagagcca

SEQ ID NO: 2422459 - RNA, 19 nt, Homo sapiens
  misc_RNA (1)...(19): siRNA sense strand
agccagagagugagggaga

SEQ ID NO: 2422460 - RNA, 19 nt, Homo sapiens
  misc_RNA (1)...(19): siRNA sense strand
ggaugauauacccaggaaa

SEQ ID NO: 2422461 - RNA, 19 nt, Homo sapiens
  misc_RNA (1)...(19): siRNA sense strand
agacagagggaaagccaga

SEQ ID NO: 2422462 - RNA, 19 nt, Homo sapiens
  misc_RNA (1)...(19): siRNA sense strand
agggaaagucagagaugca

SEQ ID NO: 2422463 - RNA, 19 nt, Homo sapiens
  misc_RNA (1)...(19): siRNA sense strand
gcaagagaguugaggaacc

SEQ ID NO: 2422464 - RNA, 19 nt, Homo sapiens
  misc_RNA (1)...(19): siRNA sense strand
aaucaaggaaagauagaca

SEQ ID NO: 2422465 - RNA, 19 nt, Homo sapiens
  misc_RNA (1)...(19): siRNA sense strand
aggaagggaaagucagaga

SEQ ID NO: 2422466 - RNA, 19 nt, Homo sapiens
  misc_RNA (1)...(19): siRNA sense strand
gaauuugacaacauggcua

SEQ ID NO: 2422467 - RNA, 19 nt, Homo sapiens
  misc_RNA (1)...(19): siRNA sense strand
acacagaaaacacgggcaa

SEQ ID NO: 2422468 - RNA, 19 nt, Homo sapiens
  misc_RNA (1)...(19): siRNA sense strand
agagggaaagccagagaga

SEQ ID NO: 2422469 - RNA, 19 nt, Homo sapiens
  misc_RNA (1)...(19): siRNA sense strand
agggaaagccagagagagg

SEQ ID NO: 2422470 - RNA, 19 nt, Homo sapiens
  misc_RNA (1)...(19): siRNA sense strand
acaagaaguuagaaaacga

SEQ ID NO: 2422471 - RNA, 19 nt, Homo sapiens
  misc_RNA (1)...(19): siRNA sense strand
agccaccgcacgagggaaa

SEQ ID NO: 2422472 - RNA, 19 nt, Homo sapiens
  misc_RNA (1)...(19): siRNA sense strand
aagucagagaggaagggaa

SEQ ID NO: 2422473 - RNA, 19 nt, Homo sapiens
  misc_RNA (1)...(19): siRNA sense strand
agagaugcagggaggauca

SEQ ID NO: 2422474 - RNA, 19 nt, Homo sapiens
  misc_RNA (1)...(19): siRNA sense strand
ggaucaaagacagagggaa

SEQ ID NO: 2422475 - RNA, 19 nt, Homo sapiens
  misc_RNA (1)...(19): siRNA sense strand
agacaaugaagaacagcca

SEQ ID NO: 2422476 - RNA, 19 nt, Homo sapiens
  misc_RNA (1)...(19): siRNA sense strand
agucagagaugcagggagg

SEQ ID NO: 2422477 - RNA, 19 nt, Homo sapiens
  misc_RNA (1)...(19): siRNA sense strand
agcaaugaggacaugauaa

SEQ ID NO: 2422478 - RNA, 19 nt, Homo sapiens
  misc_RNA (1)...(19): siRNA sense strand
agugaaagagagccagaga

SEQ ID NO: 2422479 - RNA, 19 nt, Homo sapiens
  misc_RNA (1)...(19): siRNA sense strand
agagagugagggagagcca

SEQ ID NO: 2422480 - RNA, 19 nt, Homo sapiens
  misc_RNA (1)...(19): siRNA sense strand
ggcaaaaggagaaggaaag

SEQ ID NO: 2422481 - RNA, 19 nt, Homo sapiens
  misc_RNA (1)...(19): siRNA sense strand
aggugaaggcgguggagua

SEQ ID NO: 2422482 - RNA, 19 nt, Homo sapiens
  misc_RNA (1)...(19): siRNA sense strand
gcuacauggaggugaucaa

SEQ ID NO: 2422483 - RNA, 19 nt, Homo sapiens
  misc_RNA (1)...(19): siRNA sense strand
acgccauccaggugaauua

SEQ ID NO: 2422484 - RNA, 19 nt, Homo sapiens
  misc_RNA (1)...(19): siRNA sense strand
gugaagauguggcugccua

SEQ ID NO: 2422485 - RNA, 19 nt, Homo sapiens
  misc_RNA (1)...(19): siRNA sense strand
guacaaagcagaaagugca

SEQ ID NO: 2422486 - RNA, 19 nt, Homo sapiens
  misc_RNA (1)...(19): siRNA sense strand
cugcagaaggugaaagacu

SEQ ID NO: 2422487 - RNA, 19 nt, Homo sapiens
  misc_RNA (1)...(19): siRNA sense strand
gcauaaucaacccugggaa

SEQ ID NO: 2422488 - RNA, 19 nt, Homo sapiens
  misc_RNA (1)...(19): siRNA sense strand
cuuaaagcgaagugggaaa

SEQ ID NO: 2422489 - RNA, 19 nt, Homo sapiens
  misc_RNA (1)...(19): siRNA sense strand
gggaaauggcugaagacau

SEQ ID NO: 2422490 - RNA, 19 nt, Homo sapiens
  misc_RNA (1)...(19): siRNA sense strand
guuccaaauaugaggagaa

SEQ ID NO: 2422491 - RNA, 19 nt, Homo sapiens
  misc_RNA (1)...(19): siRNA sense strand
agacaaaacccucagaaaa

SEQ ID NO: 2422492 - RNA, 19 nt, Homo sapiens
  misc_RNA (1)...(19): siRNA sense strand
aagaaauggaggugggagu

SEQ ID NO: 2422493 - RNA, 19 nt, Homo sapiens
  misc_RNA (1)...(19): siRNA sense strand
ccuguuuacaucugagaaa

SEQ ID NO: 2422494 - RNA, 19 nt, Homo sapiens
  misc_RNA (1)...(19): siRNA sense strand
caauaauaucugugaccuu

SEQ ID NO: 2422495 - RNA, 19 nt, Homo sapiens
  misc_RNA (1)...(19): siRNA sense strand
ccaaauaugaggagaagcu

SEQ ID NO: 2422496 - RNA, 19 nt, Homo sapiens
  misc_RNA (1)...(19): siRNA sense strand
agggagugacccagacaaa

SEQ ID NO: 2422497 - RNA, 19 nt, Homo sapiens
  misc_RNA (1)...(19): siRNA sense strand
ccacgagggaagagaagga

SEQ ID NO: 2422498 - RNA, 19 nt, Homo sapiens
  misc_RNA (1)...(19): siRNA sense strand
agaaauaagaagaagcaac

SEQ ID NO: 2422499 - RNA, 19 nt, Homo sapiens
  misc_RNA (1)...(19): siRNA sense strand
acccagacaaagagaggaa

SEQ ID NO: 2422500 - RNA, 19 nt, Homo sapiens
  misc_RNA (1)...(19): siRNA sense strand
uggcugaagacauggaaaa

SEQ ID NO: 2422501 - RNA, 19 nt, Homo sapiens
  misc_RNA (1)...(19): siRNA sense strand
cgacguaugaggagcggga

SEQ ID NO: 2422502 - RNA, 19 nt, Homo sapiens
  misc_RNA (1)...(19): siRNA sense strand
cagacaaaacccucagaaa

SEQ ID NO: 2422503 - RNA, 19 nt, Homo sapiens
  misc_RNA (1)...(19): siRNA sense strand
ggaacacagcgcugaccua

SEQ ID NO: 2422504 - RNA, 19 nt, Homo sapiens
  misc_RNA (1)...(19): siRNA sense strand
ugagaaagggagugaccca

SEQ ID NO: 2422505 - RNA, 19 nt, Homo sapiens
  misc_RNA (1)...(19): siRNA sense strand
gggcaugcucuuaaagcga

SEQ ID NO: 2422506 - RNA, 19 nt, Homo sapiens
  misc_RNA (1)...(19): siRNA sense strand
cgaagugggaaauggcuga

SEQ ID NO: 2422507 - RNA, 19 nt, Homo sapiens
  misc_RNA (1)...(19): siRNA sense strand
cuucagacaucuaccauca

SEQ ID NO: 2422508 - RNA, 19 nt, Homo sapiens
  misc_RNA (1)...(19): siRNA sense strand
cagucaugcgagagcagua

SEQ ID NO: 2422509 - RNA, 19 nt, Homo sapiens
  misc_RNA (1)...(19): siRNA sense strand
ggaaugugguccuggcgca

SEQ ID NO: 2422510 - RNA, 19 nt, Homo sapiens
  misc_RNA (1)...(19): siRNA sense strand
ccucaucauaucacacaaa

SEQ ID NO: 2422511 - RNA, 19 nt, Homo sapiens
  misc_RNA (1)...(19): siRNA sense strand
gugcacauuaugaagaaaa

SEQ ID NO: 2422512 - RNA, 19 nt, Homo sapiens
  misc_RNA (1)...(19): siRNA sense strand
agagauugaccuucagaca

SEQ ID NO: 2422513 - RNA, 19 nt, Homo sapiens
  misc_RNA (1)...(19): siRNA sense strand
cagaaaaguccacgaggga

SEQ ID NO: 2422514 - RNA, 19 nt, Homo sapiens
  misc_RNA (1)...(19): siRNA sense strand
cgugaggaggugaacgaga

SEQ ID NO: 2422515 - RNA, 19 nt, Homo sapiens
  misc_RNA (1)...(19): siRNA sense strand
uguauugaaugcucaggua

SEQ ID NO: 2422516 - RNA, 19 nt, Homo sapiens
  misc_RNA (1)...(19): siRNA sense strand
ggacaaauacaaagggaca

SEQ ID NO: 2422517 - RNA, 19 nt, Homo sapiens
  misc_RNA (1)...(19): siRNA sense strand
ggacaugcagggcugggaa

SEQ ID NO: 2422518 - RNA, 19 nt, Homo sapiens
  misc_RNA (1)...(19): siRNA sense strand
agacccagggccagaagaa

SEQ ID NO: 2422519 - RNA, 19 nt, Homo sapiens
  misc_RNA (1)...(19): siRNA sense strand
ugaccaaccaggaaguaca

SEQ ID NO: 2422520 - RNA, 19 nt, Homo sapiens
  misc_RNA (1)...(19): siRNA sense strand
ugaaggugcuggaggccaa

SEQ ID NO: 2422521 - RNA, 19 nt, Homo sapiens
  misc_RNA (1)...(19): siRNA sense strand
gcaccuaccuucagcgagu

SEQ ID NO: 2422522 - RNA, 19 nt, Homo sapiens
  misc_RNA (1)...(19): siRNA sense strand
aggagugagcugcgaggaa

SEQ ID NO: 2422523 - RNA, 19 nt, Homo sapiens
  misc_RNA (1)...(19): siRNA sense strand
gagagaagggcgagagagg

SEQ ID NO: 2422524 - RNA, 19 nt, Homo sapiens
  misc_RNA (1)...(19): siRNA sense strand
gugauguacaagauaguga

SEQ ID NO: 2422525 - RNA, 19 nt, Homo sapiens
  misc_RNA (1)...(19): siRNA sense strand
ccaaaggaaucucuggcca

SEQ ID NO: 2422526 - RNA, 19 nt, Homo sapiens
  misc_RNA (1)...(19): siRNA sense strand
gagaagggcgagagaggac

SEQ ID NO: 2422527 - RNA, 19 nt, Homo sapiens
  misc_RNA (1)...(19): siRNA sense strand
aggagagaagggcgagaga

SEQ ID NO: 2422528 - RNA, 19 nt, Homo sapiens
  misc_RNA (1)...(19): siRNA sense strand
acaccuucacugagaccaa

SEQ ID NO: 2422529 - RNA, 19 nt, Homo sapiens
  misc_RNA (1)...(19): siRNA sense strand
ccaaggagcugaaggagca

SEQ ID NO: 2422530 - RNA, 19 nt, Homo sapiens
  misc_RNA (1)...(19): siRNA sense strand
acaacagcauccagggcaa

SEQ ID NO: 2422531 - RNA, 19 nt, Homo sapiens
  misc_RNA (1)...(19): siRNA sense strand
caggaaagcuggaucgugu

SEQ ID NO: 2422532 - RNA, 19 nt, Homo sapiens
  misc_RNA (1)...(19): siRNA sense strand
agacgucguuccagcgcaa

SEQ ID NO: 2422533 - RNA, 19 nt, Homo sapiens
  misc_RNA (1)...(19): siRNA sense strand
gcaaaugauaacaucccaa

SEQ ID NO: 2422534 - RNA, 19 nt, Homo sapiens
  misc_RNA (1)...(19): siRNA sense strand
ccaugaguguccaggaacu

SEQ ID NO: 2422535 - RNA, 19 nt, Homo sapiens
  misc_RNA (1)...(19): siRNA sense strand
agucggagucggagcgcuu

SEQ ID NO: 2422536 - RNA, 19 nt, Homo sapiens
  misc_RNA (1)...(19): siRNA sense strand
augaaguguuccuagaaga

SEQ ID NO: 2422537 - RNA, 19 nt, Homo sapiens
  misc_RNA (1)...(19): siRNA sense strand
gagcacuaccgguggagga

SEQ ID NO: 2422538 - RNA, 19 nt, Homo sapiens
  misc_RNA (1)...(19): siRNA sense strand
ggucagaaugagaucacca

SEQ ID NO: 2422539 - RNA, 19 nt, Homo sapiens
  misc_RNA (1)...(19): siRNA sense strand
ccuugggacuuucaggcaa

SEQ ID NO: 2422540 - RNA, 19 nt, Homo sapiens
  misc_RNA (1)...(19): siRNA sense strand
cucaggagcuggagcgguu

SEQ ID NO: 2422541 - RNA, 19 nt, Homo sapiens
  misc_RNA (1)...(19): siRNA sense strand
ucgccaaccagcagcggaa

SEQ ID NO: 2422542 - RNA, 19 nt, Homo sapiens
  misc_RNA (1)...(19): siRNA sense strand
caggcgaagucuuggguuc

SEQ ID NO: 2422543 - RNA, 19 nt, Homo sapiens
  misc_RNA (1)...(19): siRNA sense strand
cagcugaugccuugggacu

SEQ ID NO: 2422544 - RNA, 19 nt, Homo sapiens
  misc_RNA (1)...(19): siRNA sense strand
cagacaaagacaauggaga

SEQ ID NO: 2422545 - RNA, 19 nt, Homo sapiens
  misc_RNA (1)...(19): siRNA sense strand
gggaagaaggagagaaagc

SEQ ID NO: 2422546 - RNA, 19 nt, Homo sapiens
  misc_RNA (1)...(19): siRNA sense strand
ugaccacacuggaggccaa

SEQ ID NO: 2422547 - RNA, 19 nt, Homo sapiens
  misc_RNA (1)...(19): siRNA sense strand
cgaccuggaaugaggacuu

SEQ ID NO: 2422548 - RNA, 19 nt, Homo sapiens
  misc_RNA (1)...(19): siRNA sense strand
agacaaagacaauggagac

SEQ ID NO: 2422549 - RNA, 19 nt, Homo sapiens
  misc_RNA (1)...(19): siRNA sense strand
gugcagaauggcucggaga

SEQ ID NO: 2422550 - RNA, 19 nt, Homo sapiens
  misc_RNA (1)...(19): siRNA sense strand
cccugaagauccuggcaga

SEQ ID NO: 2422551 - RNA, 19 nt, Homo sapiens
  misc_RNA (1)...(19): siRNA sense strand
gccuacagacaaagacaau

SEQ ID NO: 2422552 - RNA, 19 nt, Homo sapiens
  misc_RNA (1)...(19): siRNA sense strand
ggauauagagggaagaaaa

SEQ ID NO: 2422553 - RNA, 19 nt, Homo sapiens
  misc_RNA (1)...(19): siRNA sense strand
aaagaagagaagaggcuaa

SEQ ID NO: 2422554 - RNA, 19 nt, Homo sapiens
  misc_RNA (1)...(19): siRNA sense strand
gaagaaaagcagaaaacaa

SEQ ID NO: 2422555 - RNA, 19 nt, Homo sapiens
  misc_RNA (1)...(19): siRNA sense strand
augaaagagaggacaauua

SEQ ID NO: 2422556 - RNA, 19 nt, Homo sapiens
  misc_RNA (1)...(19): siRNA sense strand
ccuuuauacuacaggagaa

SEQ ID NO: 2422557 - RNA, 19 nt, Homo sapiens
  misc_RNA (1)...(19): siRNA sense strand
ggagcgaacagcaggacaa

SEQ ID NO: 2422558 - RNA, 19 nt, Homo sapiens
  misc_RNA (1)...(19): siRNA sense strand
ugauauagugauuggaaga

SEQ ID NO: 2422559 - RNA, 19 nt, Homo sapiens
  misc_RNA (1)...(19): siRNA sense strand
auaaacaagaaguggagaa

SEQ ID NO: 2422560 - RNA, 19 nt, Homo sapiens
  misc_RNA (1)...(19): siRNA sense strand
guaggaauucagaggacaa

SEQ ID NO: 2422561 - RNA, 19 nt, Homo sapiens
  misc_RNA (1)...(19): siRNA sense strand
augcagaaaucuuuggaau

SEQ ID NO: 2422562 - RNA, 19 nt, Homo sapiens
  misc_RNA (1)...(19): siRNA sense strand
gguaguagcaaaacagaaa

SEQ ID NO: 2422563 - RNA, 19 nt, Homo sapiens
  misc_RNA (1)...(19): siRNA sense strand
aauagaaacaagugcagaa

SEQ ID NO: 2422564 - RNA, 19 nt, Homo sapiens
  misc_RNA (1)...(19): siRNA sense strand
ucacaaaaggcauaagaaa

SEQ ID NO: 2422565 - RNA, 19 nt, Homo sapiens
  misc_RNA (1)...(19): siRNA sense strand
aggcauucaucuagggcau

SEQ ID NO: 2422566 - RNA, 19 nt, Homo sapiens
  misc_RNA (1)...(19): siRNA sense strand
aacaagaaguggagaaacu

SEQ ID NO: 2422567 - RNA, 19 nt, Homo sapiens
  misc_RNA (1)...(19): siRNA sense strand
gugcagaaaaguugcguaa

SEQ ID NO: 2422568 - RNA, 19 nt, Homo sapiens
  misc_RNA (1)...(19): siRNA sense strand
aauaugaaagagaggacaa

SEQ ID NO: 2422569 - RNA, 19 nt, Homo sapiens
  misc_RNA (1)...(19): siRNA sense strand
gcguggugauauagugauu

SEQ ID NO: 2422570 - RNA, 19 nt, Homo sapiens
  misc_RNA (1)...(19): siRNA sense strand
uggagaaacuacuggggaa

SEQ ID NO: 2422571 - RNA, 19 nt, Homo sapiens
  misc_RNA (1)...(19): siRNA sense strand
gauuuaugguuauaggaga

SEQ ID NO: 2422572 - RNA, 19 nt, Homo sapiens
  misc_RNA (1)...(19): siRNA sense strand
gcagaaaagagaagagagu

SEQ ID NO: 2422573 - RNA, 19 nt, Homo sapiens
  misc_RNA (1)...(19): siRNA sense strand
agauagaucagaauaggaa

SEQ ID NO: 2422574 - RNA, 19 nt, Homo sapiens
  misc_RNA (1)...(19): siRNA sense strand
uaaacaagaaguggagaaa

SEQ ID NO: 2422575 - RNA, 19 nt, Homo sapiens
  misc_RNA (1)...(19): siRNA sense strand
acaguuagaagaagaagaa

SEQ ID NO: 2422576 - RNA, 19 nt, Homo sapiens
  misc_RNA (1)...(19): siRNA sense strand
auaggaaagaugagugcua

SEQ ID NO: 2422577 - RNA, 19 nt, Homo sapiens
  misc_RNA (1)...(19): siRNA sense strand
ucugaagauccaagagauu

SEQ ID NO: 2422578 - RNA, 19 nt, Homo sapiens
  misc_RNA (1)...(19): siRNA sense strand
uuggaagucaguugagaaa

SEQ ID NO: 2422579 - RNA, 19 nt, Homo sapiens
  misc_RNA (1)...(19): siRNA sense strand
acaaaaggcauaagaaaca

SEQ ID NO: 2422580 - RNA, 19 nt, Homo sapiens
  misc_RNA (1)...(19): siRNA sense strand
aaggagaauaugaaagaga

SEQ ID NO: 2422581 - RNA, 19 nt, Homo sapiens
  misc_RNA (1)...(19): siRNA sense strand
ugaacaaagcaauagaaga

SEQ ID NO: 2422582 - RNA, 19 nt, Homo sapiens
  misc_RNA (1)...(19): siRNA sense strand
cauaagaaacauaagagga

SEQ ID NO: 2422583 - RNA, 19 nt, Homo sapiens
  misc_RNA (1)...(19): siRNA sense strand
ugaaaaggauauagaggga

SEQ ID NO: 2422584 - RNA, 19 nt, Homo sapiens
  misc_RNA (1)...(19): siRNA sense strand
uaaugaagacagugaagau

SEQ ID NO: 2422585 - RNA, 19 nt, Homo sapiens
  misc_RNA (1)...(19): siRNA sense strand
gcaaaacagaaaagccaua

SEQ ID NO: 2422586 - RNA, 19 nt, Homo sapiens
  misc_RNA (1)...(19): siRNA sense strand
uugacaacaucgagauaca

SEQ ID NO: 2422587 - RNA, 19 nt, Homo sapiens
  misc_RNA (1)...(19): siRNA sense strand
ggauauugacagauaccau

SEQ ID NO: 2422588 - RNA, 19 nt, Homo sapiens
  misc_RNA (1)...(19): siRNA sense strand
agcaaagaacacucagaaa

SEQ ID NO: 2422589 - RNA, 19 nt, Homo sapiens
  misc_RNA (1)...(19): siRNA sense strand
aggaggacaguuagaagaa

SEQ ID NO: 2422590 - RNA, 19 nt, Homo sapiens
  misc_RNA (1)...(19): siRNA sense strand
cagaggaugcuuugcagaa

SEQ ID NO: 2422591 - RNA, 19 nt, Homo sapiens
  misc_RNA (1)...(19): siRNA sense strand
aggauagguuacaguauga

SEQ ID NO: 2422592 - RNA, 19 nt, Homo sapiens
  misc_RNA (1)...(19): siRNA sense strand
uuucaguagacaugagcaa

SEQ ID NO: 2422593 - RNA, 19 nt, Homo sapiens
  misc_RNA (1)...(19): siRNA sense strand
cgagcuggaaucaaggaua

SEQ ID NO: 2422594 - RNA, 19 nt, Homo sapiens
  misc_RNA (1)...(19): siRNA sense strand
caugccaccuuuagagcaa

SEQ ID NO: 2422595 - RNA, 19 nt, Homo sapiens
  misc_RNA (1)...(19): siRNA sense strand
cagaaagcaguguuaagaa

SEQ ID NO: 2422596 - RNA, 19 nt, Homo sapiens
  misc_RNA (1)...(19): siRNA sense strand
aagagaagagaguugacaa

SEQ ID NO: 2422597 - RNA, 19 nt, Homo sapiens
  misc_RNA (1)...(19): siRNA sense strand
ugcagaaaucuuuggaauu

SEQ ID NO: 2422598 - RNA, 19 nt, Homo sapiens
  misc_RNA (1)...(19): siRNA sense strand
aggcuaaagaagaaaagaa

SEQ ID NO: 2422599 - RNA, 19 nt, Homo sapiens
  misc_RNA (1)...(19): siRNA sense strand
gauagaucagaauaggaaa

SEQ ID NO: 2422600 - RNA, 19 nt, Homo sapiens
  misc_RNA (1)...(19): siRNA sense strand
gcacuaaguagcaaagaac

SEQ ID NO: 2422601 - RNA, 19 nt, Homo sapiens
  misc_RNA (1)...(19): siRNA sense strand
cugcaacuucugaaauuaa

SEQ ID NO: 2422602 - RNA, 19 nt, Homo sapiens
  misc_RNA (1)...(19): siRNA sense strand
guugaauuccuucuagaaa

SEQ ID NO: 2422603 - RNA, 19 nt, Homo sapiens
  misc_RNA (1)...(19): siRNA sense strand
aagcugaaaaggaagaaaa

SEQ ID NO: 2422604 - RNA, 19 nt, Homo sapiens
  misc_RNA (1)...(19): siRNA sense strand
agacacagauaaaagagaa

SEQ ID NO: 2422605 - RNA, 19 nt, Homo sapiens
  misc_RNA (1)...(19): siRNA sense strand
uggcuuuggaugagacuuu

SEQ ID NO: 2422606 - RNA, 19 nt, Homo sapiens
  misc_RNA (1)...(19): siRNA sense strand
cggcugaggaagagagaaa

SEQ ID NO: 2422607 - RNA, 19 nt, Homo sapiens
  misc_RNA (1)...(19): siRNA sense strand
aggaggaagucaagcaaga

SEQ ID NO: 2422608 - RNA, 19 nt, Homo sapiens
  misc_RNA (1)...(19): siRNA sense strand
aaggaggaguucaggaaau

SEQ ID NO: 2422609 - RNA, 19 nt, Homo sapiens
  misc_RNA (1)...(19): siRNA sense strand
ggaacauaaccuuaagaau

SEQ ID NO: 2422610 - RNA, 19 nt, Homo sapiens
  misc_RNA (1)...(19): siRNA sense strand
aggaauugcuaguugccaa

SEQ ID NO: 2422611 - RNA, 19 nt, Homo sapiens
  misc_RNA (1)...(19): siRNA sense strand
aggcaacgucaaagagcua

SEQ ID NO: 2422612 - RNA, 19 nt, Homo sapiens
  misc_RNA (1)...(19): siRNA sense strand
aagagaugcagaaaggaaa

SEQ ID NO: 2422613 - RNA, 19 nt, Homo sapiens
  misc_RNA (1)...(19): siRNA sense strand
caggauacacaaagaccua

SEQ ID NO: 2422614 - RNA, 19 nt, Homo sapiens
  misc_RNA (1)...(19): siRNA sense strand
gcuuagagauucuuggguu

SEQ ID NO: 2422615 - RNA, 19 nt, Homo sapiens
  misc_RNA (1)...(19): siRNA sense strand
gcucugacgcauacggauu

SEQ ID NO: 2422616 - RNA, 19 nt, Homo sapiens
  misc_RNA (1)...(19): siRNA sense strand
uuaagaaagaggaugaaca

SEQ ID NO: 2422617 - RNA, 19 nt, Homo sapiens
  misc_RNA (1)...(19): siRNA sense strand
ugaucaagcacuaugaaga

SEQ ID NO: 2422618 - RNA, 19 nt, Homo sapiens
  misc_RNA (1)...(19): siRNA sense strand
acaacaagaagcugacgua

SEQ ID NO: 2422619 - RNA, 19 nt, Homo sapiens
  misc_RNA (1)...(19): siRNA sense strand
caacaagaucuuucgggau

SEQ ID NO: 2422620 - RNA, 19 nt, Homo sapiens
  misc_RNA (1)...(19): siRNA sense strand
guggugacuugauggagaa

SEQ ID NO: 2422621 - RNA, 19 nt, Homo sapiens
  misc_RNA (1)...(19): siRNA sense strand
gagugauagguuaguguau

SEQ ID NO: 2422622 - RNA, 19 nt, Homo sapiens
  misc_RNA (1)...(19): siRNA sense strand
aagacgaccuccggagaaa

SEQ ID NO: 2422623 - RNA, 19 nt, Homo sapiens
  misc_RNA (1)...(19): siRNA sense strand
ucagagagcuccaggugca

SEQ ID NO: 2422624 - RNA, 19 nt, Homo sapiens
  misc_RNA (1)...(19): siRNA sense strand
agaaaggaucucugcauga

SEQ ID NO: 2422625 - RNA, 19 nt, Homo sapiens
  misc_RNA (1)...(19): siRNA sense strand
ugacacaaucacaagggua

SEQ ID NO: 2422626 - RNA, 19 nt, Homo sapiens
  misc_RNA (1)...(19): siRNA sense strand
ccaaggaaacugggaaaca

SEQ ID NO: 2422627 - RNA, 19 nt, Homo sapiens
  misc_RNA (1)...(19): siRNA sense strand
agugauuauucaaggacca

SEQ ID NO: 2422628 - RNA, 19 nt, Homo sapiens
  misc_RNA (1)...(19): siRNA sense strand
cgggauagguuccuguaca

SEQ ID NO: 2422629 - RNA, 19 nt, Homo sapiens
  misc_RNA (1)...(19): siRNA sense strand
gaggaugaacacagcucua

SEQ ID NO: 2422630 - RNA, 19 nt, Homo sapiens
  misc_RNA (1)...(19): siRNA sense strand
cccaagagauaaagcagca

SEQ ID NO: 2422631 - RNA, 19 nt, Homo sapiens
  misc_RNA (1)...(19): siRNA sense strand
aaggagagcacauuggauu

SEQ ID NO: 2422632 - RNA, 19 nt, Homo sapiens
  misc_RNA (1)...(19): siRNA sense strand
accuauacuuugaggagga

SEQ ID NO: 2422633 - RNA, 19 nt, Homo sapiens
  misc_RNA (1)...(19): siRNA sense strand
guggcaauccucagggaca

SEQ ID NO: 2422634 - RNA, 19 nt, Homo sapiens
  misc_RNA (1)...(19): siRNA sense strand
gugcaaugaaaucggagau

SEQ ID NO: 2422635 - RNA, 19 nt, Homo sapiens
  misc_RNA (1)...(19): siRNA sense strand
gagagaaauccuaaccuga

SEQ ID NO: 2422636 - RNA, 19 nt, Homo sapiens
  misc_RNA (1)...(19): siRNA sense strand
ccuaucaagcucacgcaaa

SEQ ID NO: 2422637 - RNA, 19 nt, Homo sapiens
  misc_RNA (1)...(19): siRNA sense strand
gauuauucaaggaccacaa

SEQ ID NO: 2422638 - RNA, 19 nt, Homo sapiens
  misc_RNA (1)...(19): siRNA sense strand
gaccacaaggaauuggaaa

SEQ ID NO: 2422639 - RNA, 19 nt, Homo sapiens
  misc_RNA (1)...(19): siRNA sense strand
caggugacgaucucagaaa

SEQ ID NO: 2422640 - RNA, 19 nt, Homo sapiens
  misc_RNA (1)...(19): siRNA sense strand
aggagagcacauuggauuu

SEQ ID NO: 2422641 - RNA, 19 nt, Homo sapiens
  misc_RNA (1)...(19): siRNA sense strand
ugaacuacccagcaggcaa

SEQ ID NO: 2422642 - RNA, 19 nt, Homo sapiens
  misc_RNA (1)...(19): siRNA sense strand
agagaacaggauacacaaa

SEQ ID NO: 2422643 - RNA, 19 nt, Homo sapiens
  misc_RNA (1)...(19): siRNA sense strand
accacaaggaauuggaaaa

SEQ ID NO: 2422644 - RNA, 19 nt, Homo sapiens
  misc_RNA (1)...(19): siRNA sense strand
aagagauaaagcagcaaau

SEQ ID NO: 2422645 - RNA, 19 nt, Homo sapiens
  misc_RNA (1)...(19): siRNA sense strand
gguaucuggaggagcucaa

SEQ ID NO: 2422646 - RNA, 19 nt, Homo sapiens
  misc_RNA (1)...(19): siRNA sense strand
cgugagagcuccuacgugu

SEQ ID NO: 2422647 - RNA, 19 nt, Homo sapiens
  misc_RNA (1)...(19): siRNA sense strand
acuugaaauaccugagcuu

SEQ ID NO: 2422648 - RNA, 19 nt, Homo sapiens
  misc_RNA (1)...(19): siRNA sense strand
accugaagauucugcaaau

SEQ ID NO: 2422649 - RNA, 19 nt, Homo sapiens
  misc_RNA (1)...(19): siRNA sense strand
ggggauucaacgagaguga

SEQ ID NO: 2422650 - RNA, 19 nt, Homo sapiens
  misc_RNA (1)...(19): siRNA sense strand
ggucggacaacaagaucuu

SEQ ID NO: 2422651 - RNA, 19 nt, Homo sapiens
  misc_RNA (1)...(19): siRNA sense strand
cgucaaagagcuagcgcug

SEQ ID NO: 2422652 - RNA, 19 nt, Homo sapiens
  misc_RNA (1)...(19): siRNA sense strand
aaagaacaucucaagcaaa

SEQ ID NO: 2422653 - RNA, 19 nt, Homo sapiens
  misc_RNA (1)...(19): siRNA sense strand
uguggugacuugauggaga

SEQ ID NO: 2422654 - RNA, 19 nt, Homo sapiens
  misc_RNA (1)...(19): siRNA sense strand
aauucauacuggugagaaa

SEQ ID NO: 2422655 - RNA, 19 nt, Homo sapiens
  misc_RNA (1)...(19): siRNA sense strand
augugaagaaugugggaaa

SEQ ID NO: 2422656 - RNA, 19 nt, Homo sapiens
  misc_RNA (1)...(19): siRNA sense strand
aauucauaccagagagaaa

SEQ ID NO: 2422657 - RNA, 19 nt, Homo sapiens
  misc_RNA (1)...(19): siRNA sense strand
acgugaagaaugugacaaa

SEQ ID NO: 2422658 - RNA, 19 nt, Homo sapiens
  misc_RNA (1)...(19): siRNA sense strand
auauaaggaauguggcaaa

SEQ ID NO: 2422659 - RNA, 19 nt, Homo sapiens
  misc_RNA (1)...(19): siRNA sense strand
augugaagaaugugguaaa

SEQ ID NO: 2422660 - RNA, 19 nt, Homo sapiens
  misc_RNA (1)...(19): siRNA sense strand
ccaacuacccagagcaaaa

SEQ ID NO: 2422661 - RNA, 19 nt, Homo sapiens
  misc_RNA (1)...(19): siRNA sense strand
augugaagaauguggcaaa

SEQ ID NO: 2422662 - RNA, 19 nt, Homo sapiens
  misc_RNA (1)...(19): siRNA sense strand
augugaagaauguggcaaa

SEQ ID NO: 2422663 - RNA, 19 nt, Homo sapiens
  misc_RNA (1)...(19): siRNA sense strand
augugaagaauguggcaaa

SEQ ID NO: 2422664 - RNA, 19 nt, Homo sapiens
  misc_RNA (1)...(19): siRNA sense strand
augugaagaauguggcaaa

SEQ ID NO: 2422665 - RNA, 19 nt, Homo sapiens
  misc_RNA (1)...(19): siRNA sense strand
augugaagaauguggcaaa

SEQ ID NO: 2422666 - RNA, 19 nt, Homo sapiens
  misc_RNA (1)...(19): siRNA sense strand
augugaagaauguggcaaa

SEQ ID NO: 2422667 - RNA, 19 nt, Homo sapiens
  misc_RNA (1)...(19): siRNA sense strand
augugaagaauguggcaaa

SEQ ID NO: 2422668 - RNA, 19 nt, Homo sapiens
  misc_RNA (1)...(19): siRNA sense strand
ccucaaaccuuacuggaca

SEQ ID NO: 2422669 - RNA, 19 nt, Homo sapiens
  misc_RNA (1)...(19): siRNA sense strand
agguaagacacaccagaaa

SEQ ID NO: 2422670 - RNA, 19 nt, Homo sapiens
  misc_RNA (1)...(19): siRNA sense strand
acgugaagaauguagcaaa

SEQ ID NO: 2422671 - RNA, 19 nt, Homo sapiens
  misc_RNA (1)...(19): siRNA sense strand
augugaagacuguggaaaa

SEQ ID NO: 2422672 - RNA, 19 nt, Homo sapiens
  misc_RNA (1)...(19): siRNA sense strand
caccaagaagauauggaaa

SEQ ID NO: 2422673 - RNA, 19 nt, Homo sapiens
  misc_RNA (1)...(19): siRNA sense strand
gaauauaaggaauguggca

SEQ ID NO: 2422674 - RNA, 19 nt, Homo sapiens
  misc_RNA (1)...(19): siRNA sense strand
ucaccagagcagaacauaa

SEQ ID NO: 2422675 - RNA, 19 nt, Homo sapiens
  misc_RNA (1)...(19): siRNA sense strand
ggggagaaaucguacauau

SEQ ID NO: 2422676 - RNA, 19 nt, Homo sapiens
  misc_RNA (1)...(19): siRNA sense strand
agagagaaacucaaugaau

SEQ ID NO: 2422677 - RNA, 19 nt, Homo sapiens
  misc_RNA (1)...(19): siRNA sense strand
accaagaagauauggaaaa

SEQ ID NO: 2422678 - RNA, 19 nt, Homo sapiens
  misc_RNA (1)...(19): siRNA sense strand
ccaagaagauauggaaaau

SEQ ID NO: 2422679 - RNA, 19 nt, Homo sapiens
  misc_RNA (1)...(19): siRNA sense strand
cgugaagaauguagcaaag

SEQ ID NO: 2422680 - RNA, 19 nt, Homo sapiens
  misc_RNA (1)...(19): siRNA sense strand
gguaagacacaccagaaaa

SEQ ID NO: 2422681 - RNA, 19 nt, Homo sapiens
  misc_RNA (1)...(19): siRNA sense strand
ugaagagaaaccauacaaa

SEQ ID NO: 2422682 - RNA, 19 nt, Homo sapiens
  misc_RNA (1)...(19): siRNA sense strand
ccauacaaaugugaagaau

SEQ ID NO: 2422683 - RNA, 19 nt, Homo sapiens
  misc_RNA (1)...(19): siRNA sense strand
ccuguaaccaguucacaaa

SEQ ID NO: 2422684 - RNA, 19 nt, Homo sapiens
  misc_RNA (1)...(19): siRNA sense strand
ggcaaagcuucuaaccaau

SEQ ID NO: 2422685 - RNA, 19 nt, Homo sapiens
  misc_RNA (1)...(19): siRNA sense strand
aauucauacuggagagaag

SEQ ID NO: 2422686 - RNA, 19 nt, Homo sapiens
  misc_RNA (1)...(19): siRNA sense strand
aaacccuaccagugugaaa

SEQ ID NO: 2422687 - RNA, 19 nt, Homo sapiens
  misc_RNA (1)...(19): siRNA sense strand
cuugcuacacauaagguaa

SEQ ID NO: 2422688 - RNA, 19 nt, Homo sapiens
  misc_RNA (1)...(19): siRNA sense strand
aaaguguggaugagugcaa

SEQ ID NO: 2422689 - RNA, 19 nt, Homo sapiens
  misc_RNA (1)...(19): siRNA sense strand
uuacuagacauaagagcau

SEQ ID NO: 2422690 - RNA, 19 nt, Homo sapiens
  misc_RNA (1)...(19): siRNA sense strand
auacugaagagaaaccaua

SEQ ID NO: 2422691 - RNA, 19 nt, Homo sapiens
  misc_RNA (1)...(19): siRNA sense strand
acucuacaaacgugaagaa

SEQ ID NO: 2422692 - RNA, 19 nt, Homo sapiens
  misc_RNA (1)...(19): siRNA sense strand
ccuuuaaccaguucucaaa

SEQ ID NO: 2422693 - RNA, 19 nt, Homo sapiens
  misc_RNA (1)...(19): siRNA sense strand
acacauuacaacacauaca

SEQ ID NO: 2422694 - RNA, 19 nt, Homo sapiens
  misc_RNA (1)...(19): siRNA sense strand
acaccaagaagauauggaa

SEQ ID NO: 2422695 - RNA, 19 nt, Homo sapiens
  misc_RNA (1)...(19): siRNA sense strand
ggacaucacuggagggugu

SEQ ID NO: 2422696 - RNA, 19 nt, Homo sapiens
  misc_RNA (1)...(19): siRNA sense strand
ucauuugaguggaggcaca

SEQ ID NO: 2422697 - RNA, 19 nt, Homo sapiens
  misc_RNA (1)...(19): siRNA sense strand
acaugaauuugaaugggaa

SEQ ID NO: 2422698 - RNA, 19 nt, Homo sapiens
  misc_RNA (1)...(19): siRNA sense strand
gcagcuggacaguggacau

SEQ ID NO: 2422699 - RNA, 19 nt, Homo sapiens
  misc_RNA (1)...(19): siRNA sense strand
gagauagacgaauuggaga

SEQ ID NO: 2422700 - RNA, 19 nt, Homo sapiens
  misc_RNA (1)...(19): siRNA sense strand
ggacaucacuggagggugu

SEQ ID NO: 2422701 - RNA, 19 nt, Homo sapiens
  misc_RNA (1)...(19): siRNA sense strand
ucauuugaguggaggcaca

SEQ ID NO: 2422702 - RNA, 19 nt, Homo sapiens
  misc_RNA (1)...(19): siRNA sense strand
acaugaauuugaaugggaa

SEQ ID NO: 2422703 - RNA, 19 nt, Homo sapiens
  misc_RNA (1)...(19): siRNA sense strand
gcagcuggacaguggacau

SEQ ID NO: 2422704 - RNA, 19 nt, Homo sapiens
  misc_RNA (1)...(19): siRNA sense strand
gagauagacgaauuggaga

SEQ ID NO: 2422705 - RNA, 19 nt, Homo sapiens
  misc_RNA (1)...(19): siRNA sense strand
acuucauacuggugagaaa

SEQ ID NO: 2422706 - RNA, 19 nt, Homo sapiens
  misc_RNA (1)...(19): siRNA sense strand
aauucauacuggugagaaa

SEQ ID NO: 2422707 - RNA, 19 nt, Homo sapiens
  misc_RNA (1)...(19): siRNA sense strand
cuuggaaaguugugaggaa

SEQ ID NO: 2422708 - RNA, 19 nt, Homo sapiens
  misc_RNA (1)...(19): siRNA sense strand
guguaaagaguguggaaaa

SEQ ID NO: 2422709 - RNA, 19 nt, Homo sapiens
  misc_RNA (1)...(19): siRNA sense strand
ccucauuggagcaaggaaa

SEQ ID NO: 2422710 - RNA, 19 nt, Homo sapiens
  misc_RNA (1)...(19): siRNA sense strand
ccguaugaauguaaggaau

SEQ ID NO: 2422711 - RNA, 19 nt, Homo sapiens
  misc_RNA (1)...(19): siRNA sense strand
agaccaaguaugagaccaa

SEQ ID NO: 2422712 - RNA, 19 nt, Homo sapiens
  misc_RNA (1)...(19): siRNA sense strand
aggaaaggaagaagacaau

SEQ ID NO: 2422713 - RNA, 19 nt, Homo sapiens
  misc_RNA (1)...(19): siRNA sense strand
caguggaagauaauggaaa

SEQ ID NO: 2422714 - RNA, 19 nt, Homo sapiens
  misc_RNA (1)...(19): siRNA sense strand
ucuuagaguacaucagaaa

SEQ ID NO: 2422715 - RNA, 19 nt, Homo sapiens
  misc_RNA (1)...(19): siRNA sense strand
cccuaugacuguaaggaau

SEQ ID NO: 2422716 - RNA, 19 nt, Homo sapiens
  misc_RNA (1)...(19): siRNA sense strand
gagcauucauacuggcgaa

SEQ ID NO: 2422717 - RNA, 19 nt, Homo sapiens
  misc_RNA (1)...(19): siRNA sense strand
augucauguuggagaacua

SEQ ID NO: 2422718 - RNA, 19 nt, Homo sapiens
  misc_RNA (1)...(19): siRNA sense strand
cuuuagagugcgacaacaa

SEQ ID NO: 2422719 - RNA, 19 nt, Homo sapiens
  misc_RNA (1)...(19): siRNA sense strand
cccuaugaauguaaagaau

SEQ ID NO: 2422720 - RNA, 19 nt, Homo sapiens
  misc_RNA (1)...(19): siRNA sense strand
aggaaaagagccuuggaaa

SEQ ID NO: 2422721 - RNA, 19 nt, Homo sapiens
  misc_RNA (1)...(19): siRNA sense strand
cccuaugaauguaaggaau

SEQ ID NO: 2422722 - RNA, 19 nt, Homo sapiens
  misc_RNA (1)...(19): siRNA sense strand
cccuaugaauguaaggaau

SEQ ID NO: 2422723 - RNA, 19 nt, Homo sapiens
  misc_RNA (1)...(19): siRNA sense strand
cccuaugaauguaaggaau

SEQ ID NO: 2422724 - RNA, 19 nt, Homo sapiens
  misc_RNA (1)...(19): siRNA sense strand
augcaaagaaugugggaag

SEQ ID NO: 2422725 - RNA, 19 nt, Homo sapiens
  misc_RNA (1)...(19): siRNA sense strand
uuggaaaguugugaggaaa

SEQ ID NO: 2422726 - RNA, 19 nt, Homo sapiens
  misc_RNA (1)...(19): siRNA sense strand
gugaaaaugccaucugaaa

SEQ ID NO: 2422727 - RNA, 19 nt, Homo sapiens
  misc_RNA (1)...(19): siRNA sense strand
ggaaaagagccuuggaaag

SEQ ID NO: 2422728 - RNA, 19 nt, Homo sapiens
  misc_RNA (1)...(19): siRNA sense strand
uuucauauguggugcagau

SEQ ID NO: 2422729 - RNA, 19 nt, Homo sapiens
  misc_RNA (1)...(19): siRNA sense strand
auguaaagaaugugggaag

SEQ ID NO: 2422730 - RNA, 19 nt, Homo sapiens
  misc_RNA (1)...(19): siRNA sense strand
auguaaggaaugcuggaaa

SEQ ID NO: 2422731 - RNA, 19 nt, Homo sapiens
  misc_RNA (1)...(19): siRNA sense strand
aguaugagaccaagaaguu

SEQ ID NO: 2422732 - RNA, 19 nt, Homo sapiens
  misc_RNA (1)...(19): siRNA sense strand
guguguaaagaguguggaa

SEQ ID NO: 2422733 - RNA, 19 nt, Homo sapiens
  misc_RNA (1)...(19): siRNA sense strand
ucuuagaguacaucacaaa

SEQ ID NO: 2422734 - RNA, 19 nt, Homo sapiens
  misc_RNA (1)...(19): siRNA sense strand
gaguauucauauugguguu

SEQ ID NO: 2422735 - RNA, 19 nt, Homo sapiens
  misc_RNA (1)...(19): siRNA sense strand
cucuaugaauguaaggaau

SEQ ID NO: 2422736 - RNA, 19 nt, Homo sapiens
  misc_RNA (1)...(19): siRNA sense strand
ugaaaaugccaucugaaaa

SEQ ID NO: 2422737 - RNA, 19 nt, Homo sapiens
  misc_RNA (1)...(19): siRNA sense strand
guggcaaggccuuuagauu

SEQ ID NO: 2422738 - RNA, 19 nt, Homo sapiens
  misc_RNA (1)...(19): siRNA sense strand
guugauaaacccuaugaau

SEQ ID NO: 2422739 - RNA, 19 nt, Homo sapiens
  misc_RNA (1)...(19): siRNA sense strand
cauauguggugcagaucuu

SEQ ID NO: 2422740 - RNA, 19 nt, Homo sapiens
  misc_RNA (1)...(19): siRNA sense strand
cuccagaagagugggaaua

SEQ ID NO: 2422741 - RNA, 19 nt, Homo sapiens
  misc_RNA (1)...(19): siRNA sense strand
gggaaggccuuuagagugc

SEQ ID NO: 2422742 - RNA, 19 nt, Homo sapiens
  misc_RNA (1)...(19): siRNA sense strand
cucuaugaaugcaaagaau

SEQ ID NO: 2422743 - RNA, 19 nt, Homo sapiens
  misc_RNA (1)...(19): siRNA sense strand
cggcaucagaagcuuaaua

SEQ ID NO: 2422744 - RNA, 19 nt, Homo sapiens
  misc_RNA (1)...(19): siRNA sense strand
uguuggagaacuacagcaa

SEQ ID NO: 2422745 - RNA, 19 nt, Homo sapiens
  misc_RNA (1)...(19): siRNA sense strand
gcucuaugaaugcaaagaa

SEQ ID NO: 2422746 - RNA, 19 nt, Homo sapiens
  misc_RNA (1)...(19): siRNA sense strand
acucuaugaauguaaggaa

SEQ ID NO: 2422747 - RNA, 19 nt, Homo sapiens
  misc_RNA (1)...(19): siRNA sense strand
cuaugaaugcaaagaaugu

SEQ ID NO: 2422748 - RNA, 19 nt, Homo sapiens
  misc_RNA (1)...(19): siRNA sense strand
gaagaagacaauauccaga

SEQ ID NO: 2422749 - RNA, 19 nt, Homo sapiens
  misc_RNA (1)...(19): siRNA sense strand
uaaauuuaucccaguggaa

SEQ ID NO: 2422750 - RNA, 19 nt, Homo sapiens
  misc_RNA (1)...(19): siRNA sense strand
aauuuaucccaguggaaga

SEQ ID NO: 2422751 - RNA, 19 nt, Homo sapiens
  misc_RNA (1)...(19): siRNA sense strand
uaacacuccaucagagaau

SEQ ID NO: 2422752 - RNA, 19 nt, Homo sapiens
  misc_RNA (1)...(19): siRNA sense strand
aggaagaagacaauaucca

SEQ ID NO: 2422753 - RNA, 19 nt, Homo sapiens
  misc_RNA (1)...(19): siRNA sense strand
uggaaagaauugaaaacca

SEQ ID NO: 2422754 - RNA, 19 nt, Homo sapiens
  misc_RNA (1)...(19): siRNA sense strand
gggaaggcguucagagugc

SEQ ID NO: 2422755 - RNA, 19 nt, Homo sapiens
  misc_RNA (1)...(19): siRNA sense strand
auguaaggaauguggggaa

SEQ ID NO: 2422756 - RNA, 19 nt, Homo sapiens
  misc_RNA (1)...(19): siRNA sense strand
ucuccagaagagugggaau

SEQ ID NO: 2422757 - RNA, 19 nt, Homo sapiens
  misc_RNA (1)...(19): siRNA sense strand
uguaaggaaugcuggaaag

SEQ ID NO: 2422758 - RNA, 19 nt, Homo sapiens
  misc_RNA (1)...(19): siRNA sense strand
ugggaaggcuuuuagggua

SEQ ID NO: 2422759 - RNA, 19 nt, Homo sapiens
  misc_RNA (1)...(19): siRNA sense strand
gcgggaaggccuuuagagu

SEQ ID NO: 2422760 - RNA, 19 nt, Homo sapiens
  misc_RNA (1)...(19): siRNA sense strand
gcccuaugacuguaaggaa

SEQ ID NO: 2422761 - RNA, 19 nt, Homo sapiens
  misc_RNA (1)...(19): siRNA sense strand
gggaaggcuuuuaggguac

SEQ ID NO: 2422762 - RNA, 19 nt, Homo sapiens
  misc_RNA (1)...(19): siRNA sense strand
gaauguaaggaaugcggga

SEQ ID NO: 2422763 - RNA, 19 nt, Homo sapiens
  misc_RNA (1)...(19): siRNA sense strand
cauucauacuggagagcaa

SEQ ID NO: 2422764 - RNA, 19 nt, Homo sapiens
  misc_RNA (1)...(19): siRNA sense strand
auguaaagaauguggcaaa

SEQ ID NO: 2422765 - RNA, 19 nt, Homo sapiens
  misc_RNA (1)...(19): siRNA sense strand
gugugaagaauguggcaaa

SEQ ID NO: 2422766 - RNA, 19 nt, Homo sapiens
  misc_RNA (1)...(19): siRNA sense strand
acuucauacuggaaagaaa

SEQ ID NO: 2422767 - RNA, 19 nt, Homo sapiens
  misc_RNA (1)...(19): siRNA sense strand
aauucauucuggagagaua

SEQ ID NO: 2422768 - RNA, 19 nt, Homo sapiens
  misc_RNA (1)...(19): siRNA sense strand
aauucauacaggagagaaa

SEQ ID NO: 2422769 - RNA, 19 nt, Homo sapiens
  misc_RNA (1)...(19): siRNA sense strand
aauucauacuggagagcaa

SEQ ID NO: 2422770 - RNA, 19 nt, Homo sapiens
  misc_RNA (1)...(19): siRNA sense strand
aauucauaccgaagagaaa

SEQ ID NO: 2422771 - RNA, 19 nt, Homo sapiens
  misc_RNA (1)...(19): siRNA sense strand
augugaagaauguggcaaa

SEQ ID NO: 2422772 - RNA, 19 nt, Homo sapiens
  misc_RNA (1)...(19): siRNA sense strand
augugaagaauguggcaaa

SEQ ID NO: 2422773 - RNA, 19 nt, Homo sapiens
  misc_RNA (1)...(19): siRNA sense strand
augugaagaauguggcaaa

SEQ ID NO: 2422774 - RNA, 19 nt, Homo sapiens
  misc_RNA (1)...(19): siRNA sense strand
ccaacuaugcagagcaaaa

SEQ ID NO: 2422775 - RNA, 19 nt, Homo sapiens
  misc_RNA (1)...(19): siRNA sense strand
auguaaagaauguggcaga

SEQ ID NO: 2422776 - RNA, 19 nt, Homo sapiens
  misc_RNA (1)...(19): siRNA sense strand
ucacauucagauagacaua

SEQ ID NO: 2422777 - RNA, 19 nt, Homo sapiens
  misc_RNA (1)...(19): siRNA sense strand
agaaauuauaccaagguga

SEQ ID NO: 2422778 - RNA, 19 nt, Homo sapiens
  misc_RNA (1)...(19): siRNA sense strand
augugagagaugugacaaa

SEQ ID NO: 2422779 - RNA, 19 nt, Homo sapiens
  misc_RNA (1)...(19): siRNA sense strand
augugaagaauguggaaaa

SEQ ID NO: 2422780 - RNA, 19 nt, Homo sapiens
  misc_RNA (1)...(19): siRNA sense strand
gugaugaauaugugaaagu

SEQ ID NO: 2422781 - RNA, 19 nt, Homo sapiens
  misc_RNA (1)...(19): siRNA sense strand
augugaagaaugcggcaaa

SEQ ID NO: 2422782 - RNA, 19 nt, Homo sapiens
  misc_RNA (1)...(19): siRNA sense strand
uggccagagcagaacauaa

SEQ ID NO: 2422783 - RNA, 19 nt, Homo sapiens
  misc_RNA (1)...(19): siRNA sense strand
augugaagaauguagcaaa

SEQ ID NO: 2422784 - RNA, 19 nt, Homo sapiens
  misc_RNA (1)...(19): siRNA sense strand
cggcaaagcuuuuaaccga

SEQ ID NO: 2422785 - RNA, 19 nt, Homo sapiens
  misc_RNA (1)...(19): siRNA sense strand
guuaaaaggcuguaaaagu

SEQ ID NO: 2422786 - RNA, 19 nt, Homo sapiens
  misc_RNA (1)...(19): siRNA sense strand
caagaaugugacagaacuu

SEQ ID NO: 2422787 - RNA, 19 nt, Homo sapiens
  misc_RNA (1)...(19): siRNA sense strand
gaagaauguagcaaagcuu

SEQ ID NO: 2422788 - RNA, 19 nt, Homo sapiens
  misc_RNA (1)...(19): siRNA sense strand
ccauacaaaugugaagaau

SEQ ID NO: 2422789 - RNA, 19 nt, Homo sapiens
  misc_RNA (1)...(19): siRNA sense strand
uggcaaagcuuuuauccaa

SEQ ID NO: 2422790 - RNA, 19 nt, Homo sapiens
  misc_RNA (1)...(19): siRNA sense strand
gggagguuauaauggacuu

SEQ ID NO: 2422791 - RNA, 19 nt, Homo sapiens
  misc_RNA (1)...(19): siRNA sense strand
ccuacaaaugugaggaaug

SEQ ID NO: 2422792 - RNA, 19 nt, Homo sapiens
  misc_RNA (1)...(19): siRNA sense strand
gaaugugagagaugugaca

SEQ ID NO: 2422793 - RNA, 19 nt, Homo sapiens
  misc_RNA (1)...(19): siRNA sense strand
augaauguaaggugcacaa

SEQ ID NO: 2422794 - RNA, 19 nt, Homo sapiens
  misc_RNA (1)...(19): siRNA sense strand
ccucuaaccaguucucaaa

SEQ ID NO: 2422795 - RNA, 19 nt, Homo sapiens
  misc_RNA (1)...(19): siRNA sense strand
ccuaugaaugugagagaug

SEQ ID NO: 2422796 - RNA, 19 nt, Homo sapiens
  misc_RNA (1)...(19): siRNA sense strand
uagaauucucucuggaaga

SEQ ID NO: 2422797 - RNA, 19 nt, Homo sapiens
  misc_RNA (1)...(19): siRNA sense strand
cuguaaaaguguggaugaa

SEQ ID NO: 2422798 - RNA, 19 nt, Homo sapiens
  misc_RNA (1)...(19): siRNA sense strand
acaaaugucaagaauguga

SEQ ID NO: 2422799 - RNA, 19 nt, Homo sapiens
  misc_RNA (1)...(19): siRNA sense strand
cgaagagaaacccuacaaa

SEQ ID NO: 2422800 - RNA, 19 nt, Homo sapiens
  misc_RNA (1)...(19): siRNA sense strand
uggaaagaaacccuacaaa

SEQ ID NO: 2422801 - RNA, 19 nt, Homo sapiens
  misc_RNA (1)...(19): siRNA sense strand
caguuaaaaggcuguaaaa

SEQ ID NO: 2422802 - RNA, 19 nt, Homo sapiens
  misc_RNA (1)...(19): siRNA sense strand
acacauaagagaauucaca

SEQ ID NO: 2422803 - RNA, 19 nt, Homo sapiens
  misc_RNA (1)...(19): siRNA sense strand
gaggaaugcggcaaagcuu

SEQ ID NO: 2422804 - RNA, 19 nt, Homo sapiens
  misc_RNA (1)...(19): siRNA sense strand
cuuacggaacauaggaaaa

SEQ ID NO: 2422805 - RNA, 19 nt, Homo sapiens
  misc_RNA (1)...(19): siRNA sense strand
ccgaagagaaacccuacaa

SEQ ID NO: 2422806 - RNA, 19 nt, Homo sapiens
  misc_RNA (1)...(19): siRNA sense strand
agacuaagaagaagcggua

SEQ ID NO: 2422807 - RNA, 19 nt, Homo sapiens
  misc_RNA (1)...(19): siRNA sense strand
uggagaaccugcuacggua

SEQ ID NO: 2422808 - RNA, 19 nt, Homo sapiens
  misc_RNA (1)...(19): siRNA sense strand
cugcaggccaccagaugaa

SEQ ID NO: 2422809 - RNA, 19 nt, Homo sapiens
  misc_RNA (1)...(19): siRNA sense strand
uggugauagaaauggguuu

SEQ ID NO: 2422810 - RNA, 19 nt, Homo sapiens
  misc_RNA (1)...(19): siRNA sense strand
guucuuauguccuugguga

SEQ ID NO: 2422811 - RNA, 19 nt, Homo sapiens
  misc_RNA (1)...(19): siRNA sense strand
cgaaauaccuugaugagga

SEQ ID NO: 2422812 - RNA, 19 nt, Homo sapiens
  misc_RNA (1)...(19): siRNA sense strand
guguucaucuugacagaaa

SEQ ID NO: 2422813 - RNA, 19 nt, Homo sapiens
  misc_RNA (1)...(19): siRNA sense strand
ugacagaaaugaagaagac

SEQ ID NO: 2422814 - RNA, 19 nt, Homo sapiens
  misc_RNA (1)...(19): siRNA sense strand
acacaagcuaaaugccaaa

SEQ ID NO: 2422815 - RNA, 19 nt, Homo sapiens
  misc_RNA (1)...(19): siRNA sense strand
acagaaaugaagaagacau

SEQ ID NO: 2422816 - RNA, 19 nt, Homo sapiens
  misc_RNA (1)...(19): siRNA sense strand
ccaucagaguccacacaau

SEQ ID NO: 2422817 - RNA, 19 nt, Homo sapiens
  misc_RNA (1)...(19): siRNA sense strand
agguuugucuugaugaaau

SEQ ID NO: 2422818 - RNA, 19 nt, Homo sapiens
  misc_RNA (1)...(19): siRNA sense strand
caucaaagcaguugugccu

SEQ ID NO: 2422819 - RNA, 19 nt, Homo sapiens
  misc_RNA (1)...(19): siRNA sense strand
gaaauuacauccagagcug

SEQ ID NO: 2422820 - RNA, 19 nt, Homo sapiens
  misc_RNA (1)...(19): siRNA sense strand
acacauuggauaugaugau

SEQ ID NO: 2422821 - RNA, 19 nt, Homo sapiens
  misc_RNA (1)...(19): siRNA sense strand
gcccuaaaggagaaaguca

SEQ ID NO: 2422822 - RNA, 19 nt, Homo sapiens
  misc_RNA (1)...(19): siRNA sense strand
cacacaagcuaaaugccaa

SEQ ID NO: 2422823 - RNA, 19 nt, Homo sapiens
  misc_RNA (1)...(19): siRNA sense strand
uggcaaaaucccuuguuaa

SEQ ID NO: 2422824 - RNA, 19 nt, Homo sapiens
  misc_RNA (1)...(19): siRNA sense strand
cagaagagugagagagagc

SEQ ID NO: 2422825 - RNA, 19 nt, Homo sapiens
  misc_RNA (1)...(19): siRNA sense strand
agacauuggugcuggagac

SEQ ID NO: 2422826 - RNA, 19 nt, Homo sapiens
  misc_RNA (1)...(19): siRNA sense strand
ggggaaggccacccagaua

SEQ ID NO: 2422827 - RNA, 19 nt, Homo sapiens
  misc_RNA (1)...(19): siRNA sense strand
gcacacaagcuaaaugcca

SEQ ID NO: 2422828 - RNA, 19 nt, Homo sapiens
  misc_RNA (1)...(19): siRNA sense strand
gguucgugaagcuguuaaa

SEQ ID NO: 2422829 - RNA, 19 nt, Homo sapiens
  misc_RNA (1)...(19): siRNA sense strand
augaaacugaggaguguau

SEQ ID NO: 2422830 - RNA, 19 nt, Homo sapiens
  misc_RNA (1)...(19): siRNA sense strand
agagugagagagagcuauu

SEQ ID NO: 2422831 - RNA, 19 nt, Homo sapiens
  misc_RNA (1)...(19): siRNA sense strand
ucggaaauacagugcaaua

SEQ ID NO: 2422832 - RNA, 19 nt, Homo sapiens
  misc_RNA (1)...(19): siRNA sense strand
aggaggaaauucggaaaua

SEQ ID NO: 2422833 - RNA, 19 nt, Homo sapiens
  misc_RNA (1)...(19): siRNA sense strand
aaagaggaaggaugggaaa

SEQ ID NO: 2422834 - RNA, 19 nt, Homo sapiens
  misc_RNA (1)...(19): siRNA sense strand
caaagaggaaggaugggaa

SEQ ID NO: 2422835 - RNA, 19 nt, Homo sapiens
  misc_RNA (1)...(19): siRNA sense strand
aagugaaagagcugcuaaa

SEQ ID NO: 2422836 - RNA, 19 nt, Homo sapiens
  misc_RNA (1)...(19): siRNA sense strand
gaauuaaaguggaggaugg

SEQ ID NO: 2422837 - RNA, 19 nt, Homo sapiens
  misc_RNA (1)...(19): siRNA sense strand
aggcuagagcuaagaguga

SEQ ID NO: 2422838 - RNA, 19 nt, Homo sapiens
  misc_RNA (1)...(19): siRNA sense strand
agauggacaaggagaaaga

SEQ ID NO: 2422839 - RNA, 19 nt, Homo sapiens
  misc_RNA (1)...(19): siRNA sense strand
ggucacaaacccugggcuu

SEQ ID NO: 2422840 - RNA, 19 nt, Homo sapiens
  misc_RNA (1)...(19): siRNA sense strand
gaggaaauucggaaauaca

SEQ ID NO: 2422841 - RNA, 19 nt, Homo sapiens
  misc_RNA (1)...(19): siRNA sense strand
ccgauaacucagauggaca

SEQ ID NO: 2422842 - RNA, 19 nt, Homo sapiens
  misc_RNA (1)...(19): siRNA sense strand
cuauaaauuaccagaggga

SEQ ID NO: 2422843 - RNA, 19 nt, Homo sapiens
  misc_RNA (1)...(19): siRNA sense strand
auaaauuaccagagggauc

SEQ ID NO: 2422844 - RNA, 19 nt, Homo sapiens
  misc_RNA (1)...(19): siRNA sense strand
agcuaagagugaagaacuu

SEQ ID NO: 2422845 - RNA, 19 nt, Homo sapiens
  misc_RNA (1)...(19): siRNA sense strand
aagcaggagaagaggaguu

SEQ ID NO: 2422846 - RNA, 19 nt, Homo sapiens
  misc_RNA (1)...(19): siRNA sense strand
ugcagaaggcuuugagaga

SEQ ID NO: 2422847 - RNA, 19 nt, Homo sapiens
  misc_RNA (1)...(19): siRNA sense strand
auucggaaauacagugcaa

SEQ ID NO: 2422848 - RNA, 19 nt, Homo sapiens
  misc_RNA (1)...(19): siRNA sense strand
ccugaaaaggugauggcaa

SEQ ID NO: 2422849 - RNA, 19 nt, Homo sapiens
  misc_RNA (1)...(19): siRNA sense strand
gaggaggaaauucggaaau

SEQ ID NO: 2422850 - RNA, 19 nt, Homo sapiens
  misc_RNA (1)...(19): siRNA sense strand
agaggaggaaauucggaaa

SEQ ID NO: 2422851 - RNA, 19 nt, Homo sapiens
  misc_RNA (1)...(19): siRNA sense strand
ccaacauggcugggaauau

SEQ ID NO: 2422852 - RNA, 19 nt, Homo sapiens
  misc_RNA (1)...(19): siRNA sense strand
auguggagaaagagaugaa

SEQ ID NO: 2422853 - RNA, 19 nt, Homo sapiens
  misc_RNA (1)...(19): siRNA sense strand
gugaagaacuugcagcucu

SEQ ID NO: 2422854 - RNA, 19 nt, Homo sapiens
  misc_RNA (1)...(19): siRNA sense strand
cugcagggcuuuacaggca

SEQ ID NO: 2422855 - RNA, 19 nt, Homo sapiens
  misc_RNA (1)...(19): siRNA sense strand
gcuuugagagacuggguca

SEQ ID NO: 2422856 - RNA, 19 nt, Homo sapiens
  misc_RNA (1)...(19): siRNA sense strand
ccaagcuggcuaugagaga

SEQ ID NO: 2422857 - RNA, 19 nt, Homo sapiens
  misc_RNA (1)...(19): siRNA sense strand
ucaccaacauggcugggaa

SEQ ID NO: 2422858 - RNA, 19 nt, Homo sapiens
  misc_RNA (1)...(19): siRNA sense strand
cggaaauacagugcaauau

SEQ ID NO: 2422859 - RNA, 19 nt, Homo sapiens
  misc_RNA (1)...(19): siRNA sense strand
aagucaaaauguggagaaa

SEQ ID NO: 2422860 - RNA, 19 nt, Homo sapiens
  misc_RNA (1)...(19): siRNA sense strand
ucagaagagcacaguccua

SEQ ID NO: 2422861 - RNA, 19 nt, Homo sapiens
  misc_RNA (1)...(19): siRNA sense strand
aguaguuaugaaaggagua

SEQ ID NO: 2422862 - RNA, 19 nt, Homo sapiens
  misc_RNA (1)...(19): siRNA sense strand
cugaguguguggagcggau

SEQ ID NO: 2422863 - RNA, 19 nt, Homo sapiens
  misc_RNA (1)...(19): siRNA sense strand
caagaagagaugagcuuuu

SEQ ID NO: 2422864 - RNA, 19 nt, Homo sapiens
  misc_RNA (1)...(19): siRNA sense strand
gagguugucugcagggcuu

SEQ ID NO: 2422865 - RNA, 19 nt, Homo sapiens
  misc_RNA (1)...(19): siRNA sense strand
acucagauggacaaggaga

SEQ ID NO: 2422866 - RNA, 19 nt, Homo sapiens
  misc_RNA (1)...(19): siRNA sense strand
cuaauuuacagaacagaca

SEQ ID NO: 2422867 - RNA, 19 nt, Homo sapiens
  misc_RNA (1)...(19): siRNA sense strand
agaggaaggaugggaaaca

SEQ ID NO: 2422868 - RNA, 19 nt, Homo sapiens
  misc_RNA (1)...(19): siRNA sense strand
ucgagaagucaccuauaaa

SEQ ID NO: 2422869 - RNA, 19 nt, Homo sapiens
  misc_RNA (1)...(19): siRNA sense strand
caaagagaauuaaagugga

SEQ ID NO: 2422870 - RNA, 19 nt, Homo sapiens
  misc_RNA (1)...(19): siRNA sense strand
cucagauggacaaggagaa

SEQ ID NO: 2422871 - RNA, 19 nt, Homo sapiens
  misc_RNA (1)...(19): siRNA sense strand
gcacuguucuggugggaga

SEQ ID NO: 2422872 - RNA, 19 nt, Homo sapiens
  misc_RNA (1)...(19): siRNA sense strand
agaugaaggagaagaugaa

SEQ ID NO: 2422873 - RNA, 19 nt, Homo sapiens
  misc_RNA (1)...(19): siRNA sense strand
aaagaagcugaaagagaaa

SEQ ID NO: 2422874 - RNA, 19 nt, Homo sapiens
  misc_RNA (1)...(19): siRNA sense strand
gugaugaagaugaaggaga

SEQ ID NO: 2422875 - RNA, 19 nt, Homo sapiens
  misc_RNA (1)...(19): siRNA sense strand
gcuucaaguuguucggaca

SEQ ID NO: 2422876 - RNA, 19 nt, Homo sapiens
  misc_RNA (1)...(19): siRNA sense strand
cgauuugcccagugaugaa

SEQ ID NO: 2422877 - RNA, 19 nt, Homo sapiens
  misc_RNA (1)...(19): siRNA sense strand
ugaagaugaaggagaagau

SEQ ID NO: 2422878 - RNA, 19 nt, Homo sapiens
  misc_RNA (1)...(19): siRNA sense strand
ggaacauguggaugcgauu

SEQ ID NO: 2422879 - RNA, 19 nt, Homo sapiens
  misc_RNA (1)...(19): siRNA sense strand
gggaacauguggaugcgau

SEQ ID NO: 2422880 - RNA, 19 nt, Homo sapiens
  misc_RNA (1)...(19): siRNA sense strand
aagaugaaggagaagauga

SEQ ID NO: 2422881 - RNA, 19 nt, Homo sapiens
  misc_RNA (1)...(19): siRNA sense strand
augaaggagaagaugaaaa

SEQ ID NO: 2422882 - RNA, 19 nt, Homo sapiens
  misc_RNA (1)...(19): siRNA sense strand
caacagagucuuuguccca

SEQ ID NO: 2422883 - RNA, 19 nt, Homo sapiens
  misc_RNA (1)...(19): siRNA sense strand
ccauaguagacauuugcua

SEQ ID NO: 2422884 - RNA, 19 nt, Homo sapiens
  misc_RNA (1)...(19): siRNA sense strand
ugaaagaaagugugagcac

SEQ ID NO: 2422885 - RNA, 19 nt, Homo sapiens
  misc_RNA (1)...(19): siRNA sense strand
gagcagagacaccaggguu

SEQ ID NO: 2422886 - RNA, 19 nt, Homo sapiens
  misc_RNA (1)...(19): siRNA sense strand
gagcacuaauaacagggua

SEQ ID NO: 2422887 - RNA, 19 nt, Homo sapiens
  misc_RNA (1)...(19): siRNA sense strand
cucucaagaacuuuggaaa

SEQ ID NO: 2422888 - RNA, 19 nt, Homo sapiens
  misc_RNA (1)...(19): siRNA sense strand
ccucagacucagcaggcau

SEQ ID NO: 2422889 - RNA, 19 nt, Homo sapiens
  misc_RNA (1)...(19): siRNA sense strand
gugaacuccuugucgguca

SEQ ID NO: 2422890 - RNA, 19 nt, Homo sapiens
  misc_RNA (1)...(19): siRNA sense strand
gcacuguucuggugggaga

SEQ ID NO: 2422891 - RNA, 19 nt, Homo sapiens
  misc_RNA (1)...(19): siRNA sense strand
agaugaaggagaagaugaa

SEQ ID NO: 2422892 - RNA, 19 nt, Homo sapiens
  misc_RNA (1)...(19): siRNA sense strand
aaagaagcugaaagagaaa

SEQ ID NO: 2422893 - RNA, 19 nt, Homo sapiens
  misc_RNA (1)...(19): siRNA sense strand
gugaugaagaugaaggaga

SEQ ID NO: 2422894 - RNA, 19 nt, Homo sapiens
  misc_RNA (1)...(19): siRNA sense strand
gcuucaaguuguucggaca

SEQ ID NO: 2422895 - RNA, 19 nt, Homo sapiens
  misc_RNA (1)...(19): siRNA sense strand
cgauuugcccagugaugaa

SEQ ID NO: 2422896 - RNA, 19 nt, Homo sapiens
  misc_RNA (1)...(19): siRNA sense strand
ugaagaugaaggagaagau

SEQ ID NO: 2422897 - RNA, 19 nt, Homo sapiens
  misc_RNA (1)...(19): siRNA sense strand
ggaacauguggaugcgauu

SEQ ID NO: 2422898 - RNA, 19 nt, Homo sapiens
  misc_RNA (1)...(19): siRNA sense strand
gggaacauguggaugcgau

SEQ ID NO: 2422899 - RNA, 19 nt, Homo sapiens
  misc_RNA (1)...(19): siRNA sense strand
aagaugaaggagaagauga

SEQ ID NO: 2422900 - RNA, 19 nt, Homo sapiens
  misc_RNA (1)...(19): siRNA sense strand
augaaggagaagaugaaaa

SEQ ID NO: 2422901 - RNA, 19 nt, Homo sapiens
  misc_RNA (1)...(19): siRNA sense strand
caacagagucuuuguccca

SEQ ID NO: 2422902 - RNA, 19 nt, Homo sapiens
  misc_RNA (1)...(19): siRNA sense strand
ccauaguagacauuugcua

SEQ ID NO: 2422903 - RNA, 19 nt, Homo sapiens
  misc_RNA (1)...(19): siRNA sense strand
ugaaagaaagugugagcac

SEQ ID NO: 2422904 - RNA, 19 nt, Homo sapiens
  misc_RNA (1)...(19): siRNA sense strand
gagcagagacaccaggguu

SEQ ID NO: 2422905 - RNA, 19 nt, Homo sapiens
  misc_RNA (1)...(19): siRNA sense strand
gagcacuaauaacagggua

SEQ ID NO: 2422906 - RNA, 19 nt, Homo sapiens
  misc_RNA (1)...(19): siRNA sense strand
cucucaagaacuuuggaaa

SEQ ID NO: 2422907 - RNA, 19 nt, Homo sapiens
  misc_RNA (1)...(19): siRNA sense strand
ccucagacucagcaggcau

SEQ ID NO: 2422908 - RNA, 19 nt, Homo sapiens
  misc_RNA (1)...(19): siRNA sense strand
gugaacuccuugucgguca

SEQ ID NO: 2422909 - RNA, 19 nt, Homo sapiens
  misc_RNA (1)...(19): siRNA sense strand
ucgacgaggagcugagcaa

SEQ ID NO: 2422910 - RNA, 19 nt, Homo sapiens
  misc_RNA (1)...(19): siRNA sense strand
guaucauccagcagacaaa

SEQ ID NO: 2422911 - RNA, 19 nt, Homo sapiens
  misc_RNA (1)...(19): siRNA sense strand
ugaagaaauguuagagacu

SEQ ID NO: 2422912 - RNA, 19 nt, Homo sapiens
  misc_RNA (1)...(19): siRNA sense strand
ugaugaugaagaugaagaa

SEQ ID NO: 2422913 - RNA, 19 nt, Homo sapiens
  misc_RNA (1)...(19): siRNA sense strand
auaucaaacuagccagaca

SEQ ID NO: 2422914 - RNA, 19 nt, Homo sapiens
  misc_RNA (1)...(19): siRNA sense strand
gcgggaaugucgacgagga

SEQ ID NO: 2422915 - RNA, 19 nt, Homo sapiens
  misc_RNA (1)...(19): siRNA sense strand
uugaagaacaagaccucua

SEQ ID NO: 2422916 - RNA, 19 nt, Homo sapiens
  misc_RNA (1)...(19): siRNA sense strand
gaacaagaccucuacgacu

SEQ ID NO: 2422917 - RNA, 19 nt, Homo sapiens
  misc_RNA (1)...(19): siRNA sense strand
gaaaugaacaucuuggcga

SEQ ID NO: 2422918 - RNA, 19 nt, Homo sapiens
  misc_RNA (1)...(19): siRNA sense strand
agaaagcaguggagaggag

SEQ ID NO: 2422919 - RNA, 19 nt, Homo sapiens
  misc_RNA (1)...(19): siRNA sense strand
gacgaggagcugagcaaaa

SEQ ID NO: 2422920 - RNA, 19 nt, Homo sapiens
  misc_RNA (1)...(19): siRNA sense strand
cagcaaaacaaauuacgaa

SEQ ID NO: 2422921 - RNA, 19 nt, Homo sapiens
  misc_RNA (1)...(19): siRNA sense strand
ucaccugaagaacgagaaa

SEQ ID NO: 2422922 - RNA, 19 nt, Homo sapiens
  misc_RNA (1)...(19): siRNA sense strand
gagaaagcaugaauacgga

SEQ ID NO: 2422923 - RNA, 19 nt, Homo sapiens
  misc_RNA (1)...(19): siRNA sense strand
acaagaaagcaguggagag

SEQ ID NO: 2422924 - RNA, 19 nt, Homo sapiens
  misc_RNA (1)...(19): siRNA sense strand
caauaucaaacuagccaga

SEQ ID NO: 2422925 - RNA, 19 nt, Homo sapiens
  misc_RNA (1)...(19): siRNA sense strand
ccugaugaauggagagcau

SEQ ID NO: 2422926 - RNA, 19 nt, Homo sapiens
  misc_RNA (1)...(19): siRNA sense strand
cagaagagccuuaugguca

SEQ ID NO: 2422927 - RNA, 19 nt, Homo sapiens
  misc_RNA (1)...(19): siRNA sense strand
aagcaauagaaguuggaau

SEQ ID NO: 2422928 - RNA, 19 nt, Homo sapiens
  misc_RNA (1)...(19): siRNA sense strand
cagaaaugugaaaaggaaa

SEQ ID NO: 2422929 - RNA, 19 nt, Homo sapiens
  misc_RNA (1)...(19): siRNA sense strand
ggauuguccaccugagcaa

SEQ ID NO: 2422930 - RNA, 19 nt, Homo sapiens
  misc_RNA (1)...(19): siRNA sense strand
ugaauauuggcuuaggaaa

SEQ ID NO: 2422931 - RNA, 19 nt, Homo sapiens
  misc_RNA (1)...(19): siRNA sense strand
aggcauugagagacgggaa

SEQ ID NO: 2422932 - RNA, 19 nt, Homo sapiens
  misc_RNA (1)...(19): siRNA sense strand
ugcaaaaucaagaggcaaa

SEQ ID NO: 2422933 - RNA, 19 nt, Homo sapiens
  misc_RNA (1)...(19): siRNA sense strand
ugaugaauggagagcauau

SEQ ID NO: 2422934 - RNA, 19 nt, Homo sapiens
  misc_RNA (1)...(19): siRNA sense strand
ugcaauugauaauggucua

SEQ ID NO: 2422935 - RNA, 19 nt, Homo sapiens
  misc_RNA (1)...(19): siRNA sense strand
cugaauauuggcuuaggaa

SEQ ID NO: 2422936 - RNA, 19 nt, Homo sapiens
  misc_RNA (1)...(19): siRNA sense strand
agacaggggcaaugauaau

SEQ ID NO: 2422937 - RNA, 19 nt, Homo sapiens
  misc_RNA (1)...(19): siRNA sense strand
acccuuugccugagaauau

SEQ ID NO: 2422938 - RNA, 19 nt, Homo sapiens
  misc_RNA (1)...(19): siRNA sense strand
uuaggaaauuugaagcuga

SEQ ID NO: 2422939 - RNA, 19 nt, Homo sapiens
  misc_RNA (1)...(19): siRNA sense strand
acgaaaagcagaaauguga

SEQ ID NO: 2422940 - RNA, 19 nt, Homo sapiens
  misc_RNA (1)...(19): siRNA sense strand
ggaacgcagucaaggugga

SEQ ID NO: 2422941 - RNA, 19 nt, Homo sapiens
  misc_RNA (1)...(19): siRNA sense strand
gagaagaacacuagcgaga

SEQ ID NO: 2422942 - RNA, 19 nt, Homo sapiens
  misc_RNA (1)...(19): siRNA sense strand
cugcaagagcugcgcacaa

SEQ ID NO: 2422943 - RNA, 19 nt, Homo sapiens
  misc_RNA (1)...(19): siRNA sense strand
uggagauggcggaaagcaa

SEQ ID NO: 2422944 - RNA, 19 nt, Homo sapiens
  misc_RNA (1)...(19): siRNA sense strand
agaugaaggcugugcacga

SEQ ID NO: 2422945 - RNA, 19 nt, Homo sapiens
  misc_RNA (1)...(19): siRNA sense strand
cugagaaggcacaggagga

SEQ ID NO: 2422946 - RNA, 19 nt, Homo sapiens
  misc_RNA (1)...(19): siRNA sense strand
aggcaggugcugaaggaga

SEQ ID NO: 2422947 - RNA, 19 nt, Homo sapiens
  misc_RNA (1)...(19): siRNA sense strand
agggaacauccgagugauu

SEQ ID NO: 2422948 - RNA, 19 nt, Homo sapiens
  misc_RNA (1)...(19): siRNA sense strand
agggaaagagccucaggaa

SEQ ID NO: 2422949 - RNA, 19 nt, Homo sapiens
  misc_RNA (1)...(19): siRNA sense strand
gggcagaugcuggaggaga

SEQ ID NO: 2422950 - RNA, 19 nt, Homo sapiens
  misc_RNA (1)...(19): siRNA sense strand
aggccaucgaggaggucaa

SEQ ID NO: 2422951 - RNA, 19 nt, Homo sapiens
  misc_RNA (1)...(19): siRNA sense strand
accaggagcugcugcgcaa

SEQ ID NO: 2422952 - RNA, 19 nt, Homo sapiens
  misc_RNA (1)...(19): siRNA sense strand
gcguggacgacaucaacaa

SEQ ID NO: 2422953 - RNA, 19 nt, Homo sapiens
  misc_RNA (1)...(19): siRNA sense strand
agcugaaccugguggacuu

SEQ ID NO: 2422954 - RNA, 19 nt, Homo sapiens
  misc_RNA (1)...(19): siRNA sense strand
acaaugagcucgugcggcu

SEQ ID NO: 2422955 - RNA, 19 nt, Homo sapiens
  misc_RNA (1)...(19): siRNA sense strand
ugaaggagauggaacagca

SEQ ID NO: 2422956 - RNA, 19 nt, Homo sapiens
  misc_RNA (1)...(19): siRNA sense strand
cugcguaagaagugccaca

SEQ ID NO: 2422957 - RNA, 19 nt, Homo sapiens
  misc_RNA (1)...(19): siRNA sense strand
cugucaaguaugucaucaa

SEQ ID NO: 2422958 - RNA, 19 nt, Homo sapiens
  misc_RNA (1)...(19): siRNA sense strand
agaaugagcgacugaggca

SEQ ID NO: 2422959 - RNA, 19 nt, Homo sapiens
  misc_RNA (1)...(19): siRNA sense strand
acaaugggcucaagcggca

SEQ ID NO: 2422960 - RNA, 19 nt, Homo sapiens
  misc_RNA (1)...(19): siRNA sense strand
uggucaaagucaagagcaa

SEQ ID NO: 2422961 - RNA, 19 nt, Homo sapiens
  misc_RNA (1)...(19): siRNA sense strand
aggaggaggaagaggaaga

SEQ ID NO: 2422962 - RNA, 19 nt, Homo sapiens
  misc_RNA (1)...(19): siRNA sense strand
gggaagaagaggaggagcu

SEQ ID NO: 2422963 - RNA, 19 nt, Homo sapiens
  misc_RNA (1)...(19): siRNA sense strand
cugacgaggaggaggaaga

SEQ ID NO: 2422964 - RNA, 19 nt, Homo sapiens
  misc_RNA (1)...(19): siRNA sense strand
acucagagaucucagggua

SEQ ID NO: 2422965 - RNA, 19 nt, Homo sapiens
  misc_RNA (1)...(19): siRNA sense strand
cgaugagagugauggggaa

SEQ ID NO: 2422966 - RNA, 19 nt, Homo sapiens
  misc_RNA (1)...(19): siRNA sense strand
aagaagaggaggagcucau

SEQ ID NO: 2422967 - RNA, 19 nt, Homo sapiens
  misc_RNA (1)...(19): siRNA sense strand
aggaggaagaggaagauga

SEQ ID NO: 2422968 - RNA, 19 nt, Homo sapiens
  misc_RNA (1)...(19): siRNA sense strand
ccauguuggaagaggcuuu

SEQ ID NO: 2422969 - RNA, 19 nt, Homo sapiens
  misc_RNA (1)...(19): siRNA sense strand
uggagaauuuuguggagaa

SEQ ID NO: 2422970 - RNA, 19 nt, Homo sapiens
  misc_RNA (1)...(19): siRNA sense strand
ugccauuauuggugugcaa

SEQ ID NO: 2422971 - RNA, 19 nt, Homo sapiens
  misc_RNA (1)...(19): siRNA sense strand
ccucgcaaguuguacgcaa

SEQ ID NO: 2422972 - RNA, 19 nt, Homo sapiens
  misc_RNA (1)...(19): siRNA sense strand
uguuugacgaugagaguga

SEQ ID NO: 2422973 - RNA, 19 nt, Homo sapiens
  misc_RNA (1)...(19): siRNA sense strand
auguggaagaagaggauga

SEQ ID NO: 2422974 - RNA, 19 nt, Homo sapiens
  misc_RNA (1)...(19): siRNA sense strand
aggauucagaagaggaaga

SEQ ID NO: 2422975 - RNA, 19 nt, Homo sapiens
  misc_RNA (1)...(19): siRNA sense strand
auucagaagaggaagaguu

SEQ ID NO: 2422976 - RNA, 19 nt, Homo sapiens
  misc_RNA (1)...(19): siRNA sense strand
ugaaggaggacuuggagga

SEQ ID NO: 2422977 - RNA, 19 nt, Homo sapiens
  misc_RNA (1)...(19): siRNA sense strand
aagaggaagaguuggagau

SEQ ID NO: 2422978 - RNA, 19 nt, Homo sapiens
  misc_RNA (1)...(19): siRNA sense strand
gaacagaucaccacgcuca

SEQ ID NO: 2422979 - RNA, 19 nt, Homo sapiens
  misc_RNA (1)...(19): siRNA sense strand
cugcacaaggccugucaaa

SEQ ID NO: 2422980 - RNA, 19 nt, Homo sapiens
  misc_RNA (1)...(19): siRNA sense strand
gcagagagaaacagagcac

SEQ ID NO: 2422981 - RNA, 19 nt, Homo sapiens
  misc_RNA (1)...(19): siRNA sense strand
aguuggagauugagcugau

SEQ ID NO: 2422982 - RNA, 19 nt, Homo sapiens
  misc_RNA (1)...(19): siRNA sense strand
caggguacagcguggagaa

SEQ ID NO: 2422983 - RNA, 19 nt, Homo sapiens
  misc_RNA (1)...(19): siRNA sense strand
gaagaggaagaguuggaga

SEQ ID NO: 2422984 - RNA, 19 nt, Homo sapiens
  misc_RNA (1)...(19): siRNA sense strand
gagcaacgggagagccuca

SEQ ID NO: 2422985 - RNA, 19 nt, Homo sapiens
  misc_RNA (1)...(19): siRNA sense strand
cccacagcccagagagaga

SEQ ID NO: 2422986 - RNA, 19 nt, Homo sapiens
  misc_RNA (1)...(19): siRNA sense strand
cccuugaggcuuuggauga

SEQ ID NO: 2422987 - RNA, 19 nt, Homo sapiens
  misc_RNA (1)...(19): siRNA sense strand
gcgcaaagcuggacuccug

SEQ ID NO: 2422988 - RNA, 19 nt, Homo sapiens
  misc_RNA (1)...(19): siRNA sense strand
ccugcuaugcccuggagaa

SEQ ID NO: 2422989 - RNA, 19 nt, Homo sapiens
  misc_RNA (1)...(19): siRNA sense strand
ccauuauuggugugcaaga

SEQ ID NO: 2422990 - RNA, 19 nt, Homo sapiens
  misc_RNA (1)...(19): siRNA sense strand
aguacaagccacuggaucu

SEQ ID NO: 2422991 - RNA, 19 nt, Homo sapiens
  misc_RNA (1)...(19): siRNA sense strand
gcgacgaggaugggagcuu

SEQ ID NO: 2422992 - RNA, 19 nt, Homo sapiens
  misc_RNA (1)...(19): siRNA sense strand
cggaagacaucgugcugga

SEQ ID NO: 2422993 - RNA, 19 nt, Homo sapiens
  misc_RNA (1)...(19): siRNA sense strand
gagaagacuccauggcuca

SEQ ID NO: 2422994 - RNA, 19 nt, Homo sapiens
  misc_RNA (1)...(19): siRNA sense strand
cauuaagaggcgucgguuu

SEQ ID NO: 2422995 - RNA, 19 nt, Homo sapiens
  misc_RNA (1)...(19): siRNA sense strand
ccuuaauggauaugaggca

SEQ ID NO: 2422996 - RNA, 19 nt, Homo sapiens
  misc_RNA (1)...(19): siRNA sense strand
gaagaugggcagaagcuca

SEQ ID NO: 2422997 - RNA, 19 nt, Homo sapiens
  misc_RNA (1)...(19): siRNA sense strand
cuguggugguggaugacua

SEQ ID NO: 2422998 - RNA, 19 nt, Homo sapiens
  misc_RNA (1)...(19): siRNA sense strand
gacugagggaagagggaga

SEQ ID NO: 2422999 - RNA, 19 nt, Homo sapiens
  misc_RNA (1)...(19): siRNA sense strand
gggaagagggagaagacuc

SEQ ID NO: 2423000 - RNA, 19 nt, Homo sapiens
  misc_RNA (1)...(19): siRNA sense strand
acuccauggcucaggaaga

SEQ ID NO: 2423001 - RNA, 19 nt, Homo sapiens
  misc_RNA (1)...(19): siRNA sense strand
ucaucagggcugugaacau

SEQ ID NO: 2423002 - RNA, 19 nt, Homo sapiens
  misc_RNA (1)...(19): siRNA sense strand
cuuaauggauaugaggcaa

SEQ ID NO: 2423003 - RNA, 19 nt, Homo sapiens
  misc_RNA (1)...(19): siRNA sense strand
agaagaagacugaguguau

SEQ ID NO: 2423004 - RNA, 19 nt, Homo sapiens
  misc_RNA (1)...(19): siRNA sense strand
ggaugaacugagacgcaaa

SEQ ID NO: 2423005 - RNA, 19 nt, Homo sapiens
  misc_RNA (1)...(19): siRNA sense strand
cugcagaggaaguggacca

SEQ ID NO: 2423006 - RNA, 19 nt, Homo sapiens
  misc_RNA (1)...(19): siRNA sense strand
gggacgacgacaaggucua

SEQ ID NO: 2423007 - RNA, 19 nt, Homo sapiens
  misc_RNA (1)...(19): siRNA sense strand
ccuccguggcaguaagaaa

SEQ ID NO: 2423008 - RNA, 19 nt, Homo sapiens
  misc_RNA (1)...(19): siRNA sense strand
uugaagaugggaagggcaa

SEQ ID NO: 2423009 - RNA, 19 nt, Homo sapiens
  misc_RNA (1)...(19): siRNA sense strand
gggcugaggugugguggaa

SEQ ID NO: 2423010 - RNA, 19 nt, Homo sapiens
  misc_RNA (1)...(19): siRNA sense strand
ggaagaacaaccagaccga

SEQ ID NO: 2423011 - RNA, 19 nt, Homo sapiens
  misc_RNA (1)...(19): siRNA sense strand
gaugagaaacuuugggauc

SEQ ID NO: 2423012 - RNA, 19 nt, Homo sapiens
  misc_RNA (1)...(19): siRNA sense strand
gcauggagaguuugaagau

SEQ ID NO: 2423013 - RNA, 19 nt, Homo sapiens
  misc_RNA (1)...(19): siRNA sense strand
agacagaguaccuggccuu

SEQ ID NO: 2423014 - RNA, 19 nt, Homo sapiens
  misc_RNA (1)...(19): siRNA sense strand
uaagauaguaccugggcau

SEQ ID NO: 2423015 - RNA, 19 nt, Homo sapiens
  misc_RNA (1)...(19): siRNA sense strand
gggcggaacucaaaugcca

SEQ ID NO: 2423016 - RNA, 19 nt, Homo sapiens
  misc_RNA (1)...(19): siRNA sense strand
gagaaaggggccaaggcua

SEQ ID NO: 2423017 - RNA, 19 nt, Homo sapiens
  misc_RNA (1)...(19): siRNA sense strand
ccuauguaccugagagugu

SEQ ID NO: 2423018 - RNA, 19 nt, Homo sapiens
  misc_RNA (1)...(19): siRNA sense strand
uccugaaccagaugagaaa

SEQ ID NO: 2423019 - RNA, 19 nt, Homo sapiens
  misc_RNA (1)...(19): siRNA sense strand
ggagaagaagacugagugu

SEQ ID NO: 2423020 - RNA, 19 nt, Homo sapiens
  misc_RNA (1)...(19): siRNA sense strand
uccagaaagggaagaacaa

SEQ ID NO: 2423021 - RNA, 19 nt, Homo sapiens
  misc_RNA (1)...(19): siRNA sense strand
gaagagauccagcgggugu

SEQ ID NO: 2423022 - RNA, 19 nt, Homo sapiens
  misc_RNA (1)...(19): siRNA sense strand
gagaguuugaagaugggaa

SEQ ID NO: 2423023 - RNA, 19 nt, Homo sapiens
  misc_RNA (1)...(19): siRNA sense strand
gguuacaggacuugaugga

SEQ ID NO: 2423024 - RNA, 19 nt, Homo sapiens
  misc_RNA (1)...(19): siRNA sense strand
cugagaggaccuuggugua

SEQ ID NO: 2423025 - RNA, 19 nt, Homo sapiens
  misc_RNA (1)...(19): siRNA sense strand
ccguggagaagaagacuga

SEQ ID NO: 2423026 - RNA, 19 nt, Homo sapiens
  misc_RNA (1)...(19): siRNA sense strand
gagaagaagacugagugua

SEQ ID NO: 2423027 - RNA, 19 nt, Homo sapiens
  misc_RNA (1)...(19): siRNA sense strand
gcggaugaacugagacgca

SEQ ID NO: 2423028 - RNA, 19 nt, Homo sapiens
  misc_RNA (1)...(19): siRNA sense strand
gaguguauccagaaaggga

SEQ ID NO: 2423029 - RNA, 19 nt, Homo sapiens
  misc_RNA (1)...(19): siRNA sense strand
ggaaccuugugccgcguaa

SEQ ID NO: 2423030 - RNA, 19 nt, Homo sapiens
  misc_RNA (1)...(19): siRNA sense strand
cggaugaacugagacgcaa

SEQ ID NO: 2423031 - RNA, 19 nt, Homo sapiens
  misc_RNA (1)...(19): siRNA sense strand
ccaugaagacagaguaccu

SEQ ID NO: 2423032 - RNA, 19 nt, Homo sapiens
  misc_RNA (1)...(19): siRNA sense strand
aguaagaaagucaggccca

SEQ ID NO: 2423033 - RNA, 19 nt, Homo sapiens
  misc_RNA (1)...(19): siRNA sense strand
agagaaacucagugauaua

SEQ ID NO: 2423034 - RNA, 19 nt, Homo sapiens
  misc_RNA (1)...(19): siRNA sense strand
ggucaauacaacugaauau

SEQ ID NO: 2423035 - RNA, 19 nt, Homo sapiens
  misc_RNA (1)...(19): siRNA sense strand
cgaugaagauguugaggau

SEQ ID NO: 2423036 - RNA, 19 nt, Homo sapiens
  misc_RNA (1)...(19): siRNA sense strand
acuaagagcaacauagaaa

SEQ ID NO: 2423037 - RNA, 19 nt, Homo sapiens
  misc_RNA (1)...(19): siRNA sense strand
agcaagaaauggugaauau

SEQ ID NO: 2423038 - RNA, 19 nt, Homo sapiens
  misc_RNA (1)...(19): siRNA sense strand
cugacaucuuugugggaaa

SEQ ID NO: 2423039 - RNA, 19 nt, Homo sapiens
  misc_RNA (1)...(19): siRNA sense strand
cuacagaggcugaggaugu

SEQ ID NO: 2423040 - RNA, 19 nt, Homo sapiens
  misc_RNA (1)...(19): siRNA sense strand
cucugaagcuacugggaaa

SEQ ID NO: 2423041 - RNA, 19 nt, Homo sapiens
  misc_RNA (1)...(19): siRNA sense strand
gcaaaaugccucuuagaaa

SEQ ID NO: 2423042 - RNA, 19 nt, Homo sapiens
  misc_RNA (1)...(19): siRNA sense strand
gagaaguguugcagugaca

SEQ ID NO: 2423043 - RNA, 19 nt, Homo sapiens
  misc_RNA (1)...(19): siRNA sense strand
cuucauuacaggaggaaaa

SEQ ID NO: 2423044 - RNA, 19 nt, Homo sapiens
  misc_RNA (1)...(19): siRNA sense strand
ggagaguccgguagugaaa

SEQ ID NO: 2423045 - RNA, 19 nt, Homo sapiens
  misc_RNA (1)...(19): siRNA sense strand
ucgcuugugugaagagaaa

SEQ ID NO: 2423046 - RNA, 19 nt, Homo sapiens
  misc_RNA (1)...(19): siRNA sense strand
ggacccaauuguagcaaau

SEQ ID NO: 2423047 - RNA, 19 nt, Homo sapiens
  misc_RNA (1)...(19): siRNA sense strand
cugaggaggugcaguacaa

SEQ ID NO: 2423048 - RNA, 19 nt, Homo sapiens
  misc_RNA (1)...(19): siRNA sense strand
gaugauguuuauugaggaa

SEQ ID NO: 2423049 - RNA, 19 nt, Homo sapiens
  misc_RNA (1)...(19): siRNA sense strand
gcuuaaagauaacugguga

SEQ ID NO: 2423050 - RNA, 19 nt, Homo sapiens
  misc_RNA (1)...(19): siRNA sense strand
aggaaagacuguagcagga

SEQ ID NO: 2423051 - RNA, 19 nt, Homo sapiens
  misc_RNA (1)...(19): siRNA sense strand
gggcgaaguuucaagcaga

SEQ ID NO: 2423052 - RNA, 19 nt, Homo sapiens
  misc_RNA (1)...(19): siRNA sense strand
gugaagagauccagcaacu

SEQ ID NO: 2423053 - RNA, 19 nt, Homo sapiens
  misc_RNA (1)...(19): siRNA sense strand
uguugaagacaaaggacaa

SEQ ID NO: 2423054 - RNA, 19 nt, Homo sapiens
  misc_RNA (1)...(19): siRNA sense strand
ucccagaguuuaagaagaa

SEQ ID NO: 2423055 - RNA, 19 nt, Homo sapiens
  misc_RNA (1)...(19): siRNA sense strand
cugaagaguuagaugacga

SEQ ID NO: 2423056 - RNA, 19 nt, Homo sapiens
  misc_RNA (1)...(19): siRNA sense strand
auacaugaaucgagcuuau

SEQ ID NO: 2423057 - RNA, 19 nt, Homo sapiens
  misc_RNA (1)...(19): siRNA sense strand
uuaccaacccagagggcaa

SEQ ID NO: 2423058 - RNA, 19 nt, Homo sapiens
  misc_RNA (1)...(19): siRNA sense strand
gcucuaaaccuuuuggaaa

SEQ ID NO: 2423059 - RNA, 19 nt, Homo sapiens
  misc_RNA (1)...(19): siRNA sense strand
augaagauguugaggaugu

SEQ ID NO: 2423060 - RNA, 19 nt, Homo sapiens
  misc_RNA (1)...(19): siRNA sense strand
gagaaaggaucuagagcug

SEQ ID NO: 2423061 - RNA, 19 nt, Homo sapiens
  misc_RNA (1)...(19): siRNA sense strand
ggagaaacugauugcaaaa

SEQ ID NO: 2423062 - RNA, 19 nt, Homo sapiens
  misc_RNA (1)...(19): siRNA sense strand
cuauugggcuuguggguga

SEQ ID NO: 2423063 - RNA, 19 nt, Homo sapiens
  misc_RNA (1)...(19): siRNA sense strand
cuggaggauucuugaagua

SEQ ID NO: 2423064 - RNA, 19 nt, Homo sapiens
  misc_RNA (1)...(19): siRNA sense strand
gcagcaucaaucagagaua

SEQ ID NO: 2423065 - RNA, 19 nt, Homo sapiens
  misc_RNA (1)...(19): siRNA sense strand
gaguaaagauggaaaacca

SEQ ID NO: 2423066 - RNA, 19 nt, Homo sapiens
  misc_RNA (1)...(19): siRNA sense strand
caaagagaagguugaggaa

SEQ ID NO: 2423067 - RNA, 19 nt, Homo sapiens
  misc_RNA (1)...(19): siRNA sense strand
aaacauaguucauggguug

SEQ ID NO: 2423068 - RNA, 19 nt, Homo sapiens
  misc_RNA (1)...(19): siRNA sense strand
caagguguguauaggacaa

SEQ ID NO: 2423069 - RNA, 19 nt, Homo sapiens
  misc_RNA (1)...(19): siRNA sense strand
gcaguuaaaacauggaaaa

SEQ ID NO: 2423070 - RNA, 19 nt, Homo sapiens
  misc_RNA (1)...(19): siRNA sense strand
cgucguaucuagacaugaa

SEQ ID NO: 2423071 - RNA, 19 nt, Homo sapiens
  misc_RNA (1)...(19): siRNA sense strand
gcaaagagaagguugagga

SEQ ID NO: 2423072 - RNA, 19 nt, Homo sapiens
  misc_RNA (1)...(19): siRNA sense strand
augaacagauccuggguuu

SEQ ID NO: 2423073 - RNA, 19 nt, Homo sapiens
  misc_RNA (1)...(19): siRNA sense strand
ggaaguauguuuaagccuu

SEQ ID NO: 2423074 - RNA, 19 nt, Homo sapiens
  misc_RNA (1)...(19): siRNA sense strand
gcaagugacugguuggcuu

SEQ ID NO: 2423075 - RNA, 19 nt, Homo sapiens
  misc_RNA (1)...(19): siRNA sense strand
gcuauuggcuucuucauua

SEQ ID NO: 2423076 - RNA, 19 nt, Homo sapiens
  misc_RNA (1)...(19): siRNA sense strand
gguuagaaguuucaugcau

SEQ ID NO: 2423077 - RNA, 19 nt, Homo sapiens
  misc_RNA (1)...(19): siRNA sense strand
gucugaauaccaagagaua

SEQ ID NO: 2423078 - RNA, 19 nt, Homo sapiens
  misc_RNA (1)...(19): siRNA sense strand
ucaaugaaagaguggguuu

SEQ ID NO: 2423079 - RNA, 19 nt, Homo sapiens
  misc_RNA (1)...(19): siRNA sense strand
ggacaaaaucuucaccaaa

SEQ ID NO: 2423080 - RNA, 19 nt, Homo sapiens
  misc_RNA (1)...(19): siRNA sense strand
caagcaaccaggacugaaa

SEQ ID NO: 2423081 - RNA, 19 nt, Homo sapiens
  misc_RNA (1)...(19): siRNA sense strand
gggauguaaugcagcugaa

SEQ ID NO: 2423082 - RNA, 19 nt, Homo sapiens
  misc_RNA (1)...(19): siRNA sense strand
aaugcaagcucuuaaggaa

SEQ ID NO: 2423083 - RNA, 19 nt, Homo sapiens
  misc_RNA (1)...(19): siRNA sense strand
gugaugaaacccauagcaa

SEQ ID NO: 2423084 - RNA, 19 nt, Homo sapiens
  misc_RNA (1)...(19): siRNA sense strand
caucaauacuggaacagca

SEQ ID NO: 2423085 - RNA, 19 nt, Homo sapiens
  misc_RNA (1)...(19): siRNA sense strand
guguauaggacaaauucua

SEQ ID NO: 2423086 - RNA, 19 nt, Homo sapiens
  misc_RNA (1)...(19): siRNA sense strand
ccuugcaggugguauguua

SEQ ID NO: 2423087 - RNA, 19 nt, Homo sapiens
  misc_RNA (1)...(19): siRNA sense strand
cuguauaucagcauagcaa

SEQ ID NO: 2423088 - RNA, 19 nt, Homo sapiens
  misc_RNA (1)...(19): siRNA sense strand
ggaaggacaagguggggaa

SEQ ID NO: 2423089 - RNA, 19 nt, Homo sapiens
  misc_RNA (1)...(19): siRNA sense strand
cuuaaagauaacuggugaa

SEQ ID NO: 2423090 - RNA, 19 nt, Homo sapiens
  misc_RNA (1)...(19): siRNA sense strand
cuguugaacuggucauaau

SEQ ID NO: 2423091 - RNA, 19 nt, Homo sapiens
  misc_RNA (1)...(19): siRNA sense strand
agagauauauguaagcaga

SEQ ID NO: 2423092 - RNA, 19 nt, Homo sapiens
  misc_RNA (1)...(19): siRNA sense strand
gcauauagaucccuggcca

SEQ ID NO: 2423093 - RNA, 19 nt, Homo sapiens
  misc_RNA (1)...(19): siRNA sense strand
guaugaaacaaacaagcaa

SEQ ID NO: 2423094 - RNA, 19 nt, Homo sapiens
  misc_RNA (1)...(19): siRNA sense strand
gggccuugcuuuagggaug

SEQ ID NO: 2423095 - RNA, 19 nt, Homo sapiens
  misc_RNA (1)...(19): siRNA sense strand
gugaagagaaacucaguga

SEQ ID NO: 2423096 - RNA, 19 nt, Homo sapiens
  misc_RNA (1)...(19): siRNA sense strand
guauaucagcauagcaaaa

SEQ ID NO: 2423097 - RNA, 19 nt, Homo sapiens
  misc_RNA (1)...(19): siRNA sense strand
ugacagaugaugaugccaa

SEQ ID NO: 2423098 - RNA, 19 nt, Homo sapiens
  misc_RNA (1)...(19): siRNA sense strand
cagaauuagcccaaguaga

SEQ ID NO: 2423099 - RNA, 19 nt, Homo sapiens
  misc_RNA (1)...(19): siRNA sense strand
caggaaaagguuugaauuu

SEQ ID NO: 2423100 - RNA, 19 nt, Homo sapiens
  misc_RNA (1)...(19): siRNA sense strand
acucuauccucaagucaaa

SEQ ID NO: 2423101 - RNA, 19 nt, Homo sapiens
  misc_RNA (1)...(19): siRNA sense strand
ggucauaauuggaauagcu

SEQ ID NO: 2423102 - RNA, 19 nt, Homo sapiens
  misc_RNA (1)...(19): siRNA sense strand
ggguuaugacaaagaagaa

SEQ ID NO: 2423103 - RNA, 19 nt, Homo sapiens
  misc_RNA (1)...(19): siRNA sense strand
cuguuuauugggaaggaua

SEQ ID NO: 2423104 - RNA, 19 nt, Homo sapiens
  misc_RNA (1)...(19): siRNA sense strand
aucagaagauggaaggcua

SEQ ID NO: 2423105 - RNA, 19 nt, Homo sapiens
  misc_RNA (1)...(19): siRNA sense strand
agugaagagaaacggcaua

SEQ ID NO: 2423106 - RNA, 19 nt, Homo sapiens
  misc_RNA (1)...(19): siRNA sense strand
augggaagcuuuacgguga

SEQ ID NO: 2423107 - RNA, 19 nt, Homo sapiens
  misc_RNA (1)...(19): siRNA sense strand
agcaguguuuggugugaaa

SEQ ID NO: 2423108 - RNA, 19 nt, Homo sapiens
  misc_RNA (1)...(19): siRNA sense strand
gguuaugacaaagaagaau

SEQ ID NO: 2423109 - RNA, 19 nt, Homo sapiens
  misc_RNA (1)...(19): siRNA sense strand
caaucaaagcugaaggaga

SEQ ID NO: 2423110 - RNA, 19 nt, Homo sapiens
  misc_RNA (1)...(19): siRNA sense strand
guggaagaagagacagaua

SEQ ID NO: 2423111 - RNA, 19 nt, Homo sapiens
  misc_RNA (1)...(19): siRNA sense strand
uggaggacuugguggagaa

SEQ ID NO: 2423112 - RNA, 19 nt, Homo sapiens
  misc_RNA (1)...(19): siRNA sense strand
caguagaagaauuagaaga

SEQ ID NO: 2423113 - RNA, 19 nt, Homo sapiens
  misc_RNA (1)...(19): siRNA sense strand
agcgauaccagcagggaaa

SEQ ID NO: 2423114 - RNA, 19 nt, Homo sapiens
  misc_RNA (1)...(19): siRNA sense strand
cugccaaacaagaagauau

SEQ ID NO: 2423115 - RNA, 19 nt, Homo sapiens
  misc_RNA (1)...(19): siRNA sense strand
gagaaaaguacaucaacaa

SEQ ID NO: 2423116 - RNA, 19 nt, Homo sapiens
  misc_RNA (1)...(19): siRNA sense strand
uagaauuggcauuguggaa

SEQ ID NO: 2423117 - RNA, 19 nt, Homo sapiens
  misc_RNA (1)...(19): siRNA sense strand
uuuuaaaggcccagacaua

SEQ ID NO: 2423118 - RNA, 19 nt, Homo sapiens
  misc_RNA (1)...(19): siRNA sense strand
auuacuaggacuuuggaaa

SEQ ID NO: 2423119 - RNA, 19 nt, Homo sapiens
  misc_RNA (1)...(19): siRNA sense strand
agaauaucgugcagcucaa

SEQ ID NO: 2423120 - RNA, 19 nt, Homo sapiens
  misc_RNA (1)...(19): siRNA sense strand
cgagaaaaguacaucaaca

SEQ ID NO: 2423121 - RNA, 19 nt, Homo sapiens
  misc_RNA (1)...(19): siRNA sense strand
gugaggcaaaggagcgaua

SEQ ID NO: 2423122 - RNA, 19 nt, Homo sapiens
  misc_RNA (1)...(19): siRNA sense strand
cagaaguggaauugaaucu

SEQ ID NO: 2423123 - RNA, 19 nt, Homo sapiens
  misc_RNA (1)...(19): siRNA sense strand
gagcgauaccagcagggaa

SEQ ID NO: 2423124 - RNA, 19 nt, Homo sapiens
  misc_RNA (1)...(19): siRNA sense strand
gguaaaacaagaaauggaa

SEQ ID NO: 2423125 - RNA, 19 nt, Homo sapiens
  misc_RNA (1)...(19): siRNA sense strand
gccuagaaguggaacgugu

SEQ ID NO: 2423126 - RNA, 19 nt, Homo sapiens
  misc_RNA (1)...(19): siRNA sense strand
gcuccuuuggugaagauua

SEQ ID NO: 2423127 - RNA, 19 nt, Homo sapiens
  misc_RNA (1)...(19): siRNA sense strand
ugccaaacaagaagauauu

SEQ ID NO: 2423128 - RNA, 19 nt, Homo sapiens
  misc_RNA (1)...(19): siRNA sense strand
aggacugacaauaaggauu

SEQ ID NO: 2423129 - RNA, 19 nt, Homo sapiens
  misc_RNA (1)...(19): siRNA sense strand
cuaaaggagaccaagggau

SEQ ID NO: 2423130 - RNA, 19 nt, Homo sapiens
  misc_RNA (1)...(19): siRNA sense strand
ggaacguguacuaccgcaa

SEQ ID NO: 2423131 - RNA, 19 nt, Homo sapiens
  misc_RNA (1)...(19): siRNA sense strand
ccagcacagaaguggaauu

SEQ ID NO: 2423132 - RNA, 19 nt, Homo sapiens
  misc_RNA (1)...(19): siRNA sense strand
cugagguuauggaagaauu

SEQ ID NO: 2423133 - RNA, 19 nt, Homo sapiens
  misc_RNA (1)...(19): siRNA sense strand
uggaauugaaucugcucua

SEQ ID NO: 2423134 - RNA, 19 nt, Homo sapiens
  misc_RNA (1)...(19): siRNA sense strand
uuacuaggacuuuggaaaa

SEQ ID NO: 2423135 - RNA, 19 nt, Homo sapiens
  misc_RNA (1)...(19): siRNA sense strand
guugauuaauaaagcggga

SEQ ID NO: 2423136 - RNA, 19 nt, Homo sapiens
  misc_RNA (1)...(19): siRNA sense strand
auggagaacauguaugcua

SEQ ID NO: 2423137 - RNA, 19 nt, Homo sapiens
  misc_RNA (1)...(19): siRNA sense strand
ucguggugauggaggacuu

SEQ ID NO: 2423138 - RNA, 19 nt, Homo sapiens
  misc_RNA (1)...(19): siRNA sense strand
gggaaauggaggagugacg

SEQ ID NO: 2423139 - RNA, 19 nt, Homo sapiens
  misc_RNA (1)...(19): siRNA sense strand
ccuaaugcaacaauaucua

SEQ ID NO: 2423140 - RNA, 19 nt, Homo sapiens
  misc_RNA (1)...(19): siRNA sense strand
aagaagaaagcguugcaga

SEQ ID NO: 2423141 - RNA, 19 nt, Homo sapiens
  misc_RNA (1)...(19): siRNA sense strand
gagacagauaaugaagaaa

SEQ ID NO: 2423142 - RNA, 19 nt, Homo sapiens
  misc_RNA (1)...(19): siRNA sense strand
ccuagaaguggaacgugua

SEQ ID NO: 2423143 - RNA, 19 nt, Homo sapiens
  misc_RNA (1)...(19): siRNA sense strand
gcagggaaauggaggagug

SEQ ID NO: 2423144 - RNA, 19 nt, Homo sapiens
  misc_RNA (1)...(19): siRNA sense strand
uuguggaagaagagacaga

SEQ ID NO: 2423145 - RNA, 19 nt, Homo sapiens
  misc_RNA (1)...(19): siRNA sense strand
ggagaauccauguugacca

SEQ ID NO: 2423146 - RNA, 19 nt, Homo sapiens
  misc_RNA (1)...(19): siRNA sense strand
aauggaggagugacggaaa

SEQ ID NO: 2423147 - RNA, 19 nt, Homo sapiens
  misc_RNA (1)...(19): siRNA sense strand
cagaagaggaggaggagga

SEQ ID NO: 2423148 - RNA, 19 nt, Homo sapiens
  misc_RNA (1)...(19): siRNA sense strand
aagaggaggaggaggacaa

SEQ ID NO: 2423149 - RNA, 19 nt, Homo sapiens
  misc_RNA (1)...(19): siRNA sense strand
aggcagaagaggaggagga

SEQ ID NO: 2423150 - RNA, 19 nt, Homo sapiens
  misc_RNA (1)...(19): siRNA sense strand
cgaaaagaauacugugaau

SEQ ID NO: 2423151 - RNA, 19 nt, Homo sapiens
  misc_RNA (1)...(19): siRNA sense strand
aggacaaugaggaggaaga

SEQ ID NO: 2423152 - RNA, 19 nt, Homo sapiens
  misc_RNA (1)...(19): siRNA sense strand
ccucaguggugguugaaaa

SEQ ID NO: 2423153 - RNA, 19 nt, Homo sapiens
  misc_RNA (1)...(19): siRNA sense strand
uguuaguggugguagaaau

SEQ ID NO: 2423154 - RNA, 19 nt, Homo sapiens
  misc_RNA (1)...(19): siRNA sense strand
gggaaagaaugcuaggacu

SEQ ID NO: 2423155 - RNA, 19 nt, Homo sapiens
  misc_RNA (1)...(19): siRNA sense strand
cggaaaauuuguuggcaga

SEQ ID NO: 2423156 - RNA, 19 nt, Homo sapiens
  misc_RNA (1)...(19): siRNA sense strand
ccucagggacgcagaguga

SEQ ID NO: 2423157 - RNA, 19 nt, Homo sapiens
  misc_RNA (1)...(19): siRNA sense strand
gcugaaacacagucgaaaa

SEQ ID NO: 2423158 - RNA, 19 nt, Homo sapiens
  misc_RNA (1)...(19): siRNA sense strand
cgaacggaaaucuggcaaa

SEQ ID NO: 2423159 - RNA, 19 nt, Homo sapiens
  misc_RNA (1)...(19): siRNA sense strand
gguuacaaguauuggcacu

SEQ ID NO: 2423160 - RNA, 19 nt, Homo sapiens
  misc_RNA (1)...(19): siRNA sense strand
ugcauuggcuagugggaau

SEQ ID NO: 2423161 - RNA, 19 nt, Homo sapiens
  misc_RNA (1)...(19): siRNA sense strand
gaaaaugaaaacagugcaa

SEQ ID NO: 2423162 - RNA, 19 nt, Homo sapiens
  misc_RNA (1)...(19): siRNA sense strand
gcucgaaauaacaacgcua

SEQ ID NO: 2423163 - RNA, 19 nt, Homo sapiens
  misc_RNA (1)...(19): siRNA sense strand
guuugaugcuacucugaaa

SEQ ID NO: 2423164 - RNA, 19 nt, Homo sapiens
  misc_RNA (1)...(19): siRNA sense strand
ggcuagugggaaugguaua

SEQ ID NO: 2423165 - RNA, 19 nt, Homo sapiens
  misc_RNA (1)...(19): siRNA sense strand
aggaggaggaggacaauga

SEQ ID NO: 2423166 - RNA, 19 nt, Homo sapiens
  misc_RNA (1)...(19): siRNA sense strand
guuaguggugguagaaauu

SEQ ID NO: 2423167 - RNA, 19 nt, Homo sapiens
  misc_RNA (1)...(19): siRNA sense strand
cuuuguuaguggugguaga

SEQ ID NO: 2423168 - RNA, 19 nt, Homo sapiens
  misc_RNA (1)...(19): siRNA sense strand
ccaaaauccaugagcucua

SEQ ID NO: 2423169 - RNA, 19 nt, Homo sapiens
  misc_RNA (1)...(19): siRNA sense strand
gcagauuguuugcaggguu

SEQ ID NO: 2423170 - RNA, 19 nt, Homo sapiens
  misc_RNA (1)...(19): siRNA sense strand
ggguauauacuuuuagcaa

SEQ ID NO: 2423171 - RNA, 19 nt, Homo sapiens
  misc_RNA (1)...(19): siRNA sense strand
ugguuugggauuugaagaa

SEQ ID NO: 2423172 - RNA, 19 nt, Homo sapiens
  misc_RNA (1)...(19): siRNA sense strand
ccggauacuugcuggaucu

SEQ ID NO: 2423173 - RNA, 19 nt, Homo sapiens
  misc_RNA (1)...(19): siRNA sense strand
ugggagaccaggaagaaaa

SEQ ID NO: 2423174 - RNA, 19 nt, Homo sapiens
  misc_RNA (1)...(19): siRNA sense strand
agauaugccuucacggcuu

SEQ ID NO: 2423175 - RNA, 19 nt, Homo sapiens
  misc_RNA (1)...(19): siRNA sense strand
ucuacuacugagagaggua

SEQ ID NO: 2423176 - RNA, 19 nt, Homo sapiens
  misc_RNA (1)...(19): siRNA sense strand
guuugggauuugaagaaca

SEQ ID NO: 2423177 - RNA, 19 nt, Homo sapiens
  misc_RNA (1)...(19): siRNA sense strand
cgugaacuacgaacggaaa

SEQ ID NO: 2423178 - RNA, 19 nt, Homo sapiens
  misc_RNA (1)...(19): siRNA sense strand
ugaagagcuuacaugggaa

SEQ ID NO: 2423179 - RNA, 19 nt, Homo sapiens
  misc_RNA (1)...(19): siRNA sense strand
uguuaaggucucuuuguua

SEQ ID NO: 2423180 - RNA, 19 nt, Homo sapiens
  misc_RNA (1)...(19): siRNA sense strand
cagugaugcuccagugagu

SEQ ID NO: 2423181 - RNA, 19 nt, Homo sapiens
  misc_RNA (1)...(19): siRNA sense strand
ccauaagggcugugacggu

SEQ ID NO: 2423182 - RNA, 19 nt, Homo sapiens
  misc_RNA (1)...(19): siRNA sense strand
ugugguugguggcuggaua

SEQ ID NO: 2423183 - RNA, 19 nt, Homo sapiens
  misc_RNA (1)...(19): siRNA sense strand
aggccuaaucacaaccaua

SEQ ID NO: 2423184 - RNA, 19 nt, Homo sapiens
  misc_RNA (1)...(19): siRNA sense strand
ugguagaaauuggaguauu

SEQ ID NO: 2423185 - RNA, 19 nt, Homo sapiens
  misc_RNA (1)...(19): siRNA sense strand
ugaaaacagugcaaaucaa

SEQ ID NO: 2423186 - RNA, 19 nt, Homo sapiens
  misc_RNA (1)...(19): siRNA sense strand
acuagguguuacugcggaa

SEQ ID NO: 2423187 - RNA, 19 nt, Homo sapiens
  misc_RNA (1)...(19): siRNA sense strand
guuuaagcgccuuuaugaa

SEQ ID NO: 2423188 - RNA, 19 nt, Homo sapiens
  misc_RNA (1)...(19): siRNA sense strand
aggaggacaaugaggagga

SEQ ID NO: 2423189 - RNA, 19 nt, Homo sapiens
  misc_RNA (1)...(19): siRNA sense strand
guguggaggaugcggcaga

SEQ ID NO: 2423190 - RNA, 19 nt, Homo sapiens
  misc_RNA (1)...(19): siRNA sense strand
aaucagcaugcucgaaaua

SEQ ID NO: 2423191 - RNA, 19 nt, Homo sapiens
  misc_RNA (1)...(19): siRNA sense strand
agacauauuugcuggacug

SEQ ID NO: 2423192 - RNA, 19 nt, Homo sapiens
  misc_RNA (1)...(19): siRNA sense strand
ugggaaugguauaugucuu

SEQ ID NO: 2423193 - RNA, 19 nt, Homo sapiens
  misc_RNA (1)...(19): siRNA sense strand
ggaauuugaaugauccaga

SEQ ID NO: 2423194 - RNA, 19 nt, Homo sapiens
  misc_RNA (1)...(19): siRNA sense strand
agugcaaaucaacaaguua

SEQ ID NO: 2423195 - RNA, 19 nt, Homo sapiens
  misc_RNA (1)...(19): siRNA sense strand
ucaugaagacuuugauagu

SEQ ID NO: 2423196 - RNA, 19 nt, Homo sapiens
  misc_RNA (1)...(19): siRNA sense strand
acgcaaauggcauccggaa

SEQ ID NO: 2423197 - RNA, 19 nt, Homo sapiens
  misc_RNA (1)...(19): siRNA sense strand
gcggcagaaauuugggaaa

SEQ ID NO: 2423198 - RNA, 19 nt, Homo sapiens
  misc_RNA (1)...(19): siRNA sense strand
ugguauuugaggagagcaa

SEQ ID NO: 2423199 - RNA, 19 nt, Homo sapiens
  misc_RNA (1)...(19): siRNA sense strand
ccucaauggcauagagugu

SEQ ID NO: 2423200 - RNA, 19 nt, Homo sapiens
  misc_RNA (1)...(19): siRNA sense strand
agaccaaguacacaggaaa

SEQ ID NO: 2423201 - RNA, 19 nt, Homo sapiens
  misc_RNA (1)...(19): siRNA sense strand
gauuauuggagccggaauu

SEQ ID NO: 2423202 - RNA, 19 nt, Homo sapiens
  misc_RNA (1)...(19): siRNA sense strand
augauuaugcugugaagaa

SEQ ID NO: 2423203 - RNA, 19 nt, Homo sapiens
  misc_RNA (1)...(19): siRNA sense strand
agauguaugaaguggucua

SEQ ID NO: 2423204 - RNA, 19 nt, Homo sapiens
  misc_RNA (1)...(19): siRNA sense strand
ggcaguagaagguggcaau

SEQ ID NO: 2423205 - RNA, 19 nt, Homo sapiens
  misc_RNA (1)...(19): siRNA sense strand
caguagaagguggcaauaa

SEQ ID NO: 2423206 - RNA, 19 nt, Homo sapiens
  misc_RNA (1)...(19): siRNA sense strand
gaccaaguacacaggaaau

SEQ ID NO: 2423207 - RNA, 19 nt, Homo sapiens
  misc_RNA (1)...(19): siRNA sense strand
cagcaagugccauggagau

SEQ ID NO: 2423208 - RNA, 19 nt, Homo sapiens
  misc_RNA (1)...(19): siRNA sense strand
ggauggcuuauaugagaaa

SEQ ID NO: 2423209 - RNA, 19 nt, Homo sapiens
  misc_RNA (1)...(19): siRNA sense strand
gggaaagaugugaagauag

SEQ ID NO: 2423210 - RNA, 19 nt, Homo sapiens
  misc_RNA (1)...(19): siRNA sense strand
uuaaauuaguuuggcgcua

SEQ ID NO: 2423211 - RNA, 19 nt, Homo sapiens
  misc_RNA (1)...(19): siRNA sense strand
aggagaaaacaaagaccaa

SEQ ID NO: 2423212 - RNA, 19 nt, Homo sapiens
  misc_RNA (1)...(19): siRNA sense strand
ucaugaggaucuaccgcua

SEQ ID NO: 2423213 - RNA, 19 nt, Homo sapiens
  misc_RNA (1)...(19): siRNA sense strand
acuucaugcucuaggagga

SEQ ID NO: 2423214 - RNA, 19 nt, Homo sapiens
  misc_RNA (1)...(19): siRNA sense strand
gccaaagcacggacaucaa

SEQ ID NO: 2423215 - RNA, 19 nt, Homo sapiens
  misc_RNA (1)...(19): siRNA sense strand
gggcaguagaagguggcaa

SEQ ID NO: 2423216 - RNA, 19 nt, Homo sapiens
  misc_RNA (1)...(19): siRNA sense strand
gggauauauaauggagaga

SEQ ID NO: 2423217 - RNA, 19 nt, Homo sapiens
  misc_RNA (1)...(19): siRNA sense strand
cuguuaugagggucaauua

SEQ ID NO: 2423218 - RNA, 19 nt, Homo sapiens
  misc_RNA (1)...(19): siRNA sense strand
acaggaaauccaacaaaga

SEQ ID NO: 2423219 - RNA, 19 nt, Homo sapiens
  misc_RNA (1)...(19): siRNA sense strand
uggcauagagugugcagca

SEQ ID NO: 2423220 - RNA, 19 nt, Homo sapiens
  misc_RNA (1)...(19): siRNA sense strand
uggaaugcuuaaucgaaca

SEQ ID NO: 2423221 - RNA, 19 nt, Homo sapiens
  misc_RNA (1)...(19): siRNA sense strand
gcuccuguuaugaggguca

SEQ ID NO: 2423222 - RNA, 19 nt, Homo sapiens
  misc_RNA (1)...(19): siRNA sense strand
gcagcaagugccauggaga

SEQ ID NO: 2423223 - RNA, 19 nt, Homo sapiens
  misc_RNA (1)...(19): siRNA sense strand
acauguggguagaggacgu

SEQ ID NO: 2423224 - RNA, 19 nt, Homo sapiens
  misc_RNA (1)...(19): siRNA sense strand
aagaccaaguacacaggaa

SEQ ID NO: 2423225 - RNA, 19 nt, Homo sapiens
  misc_RNA (1)...(19): siRNA sense strand
cggucaaggucgcggguua

SEQ ID NO: 2423226 - RNA, 19 nt, Homo sapiens
  misc_RNA (1)...(19): siRNA sense strand
gauaaagacaagaaggaga

SEQ ID NO: 2423227 - RNA, 19 nt, Homo sapiens
  misc_RNA (1)...(19): siRNA sense strand
ccgcucaaggagagagaaa

SEQ ID NO: 2423228 - RNA, 19 nt, Homo sapiens
  misc_RNA (1)...(19): siRNA sense strand
ucgaagugcugcagcuaaa

SEQ ID NO: 2423229 - RNA, 19 nt, Homo sapiens
  misc_RNA (1)...(19): siRNA sense strand
gcucaaagaagaagaagca

SEQ ID NO: 2423230 - RNA, 19 nt, Homo sapiens
  misc_RNA (1)...(19): siRNA sense strand
uggucuaggagcagaaaua

SEQ ID NO: 2423231 - RNA, 19 nt, Homo sapiens
  misc_RNA (1)...(19): siRNA sense strand
agggugacgucgagaacaa

SEQ ID NO: 2423232 - RNA, 19 nt, Homo sapiens
  misc_RNA (1)...(19): siRNA sense strand
cuccagagguugacagcaa

SEQ ID NO: 2423233 - RNA, 19 nt, Homo sapiens
  misc_RNA (1)...(19): siRNA sense strand
uggcagaauuaaaugagaa

SEQ ID NO: 2423234 - RNA, 19 nt, Homo sapiens
  misc_RNA (1)...(19): siRNA sense strand
gagagaaagaagcggguca

SEQ ID NO: 2423235 - RNA, 19 nt, Homo sapiens
  misc_RNA (1)...(19): siRNA sense strand
aagcagaagaagaagaaaa

SEQ ID NO: 2423236 - RNA, 19 nt, Homo sapiens
  misc_RNA (1)...(19): siRNA sense strand
gguacgaggaacagcaaau

SEQ ID NO: 2423237 - RNA, 19 nt, Homo sapiens
  misc_RNA (1)...(19): siRNA sense strand
aaacguaaaucuaaggaca

SEQ ID NO: 2423238 - RNA, 19 nt, Homo sapiens
  misc_RNA (1)...(19): siRNA sense strand
caguagaagcuuaguuaga

SEQ ID NO: 2423239 - RNA, 19 nt, Homo sapiens
  misc_RNA (1)...(19): siRNA sense strand
auaaagacaagaaggagaa

SEQ ID NO: 2423240 - RNA, 19 nt, Homo sapiens
  misc_RNA (1)...(19): siRNA sense strand
gggcagaguagauuggaga

SEQ ID NO: 2423241 - RNA, 19 nt, Homo sapiens
  misc_RNA (1)...(19): siRNA sense strand
aagaaguggugcuggguca

SEQ ID NO: 2423242 - RNA, 19 nt, Homo sapiens
  misc_RNA (1)...(19): siRNA sense strand
ccuuaugaagacaaagaua

SEQ ID NO: 2423243 - RNA, 19 nt, Homo sapiens
  misc_RNA (1)...(19): siRNA sense strand
acguaaaucuaaggacaaa

SEQ ID NO: 2423244 - RNA, 19 nt, Homo sapiens
  misc_RNA (1)...(19): siRNA sense strand
aggcguaggucucggucua

SEQ ID NO: 2423245 - RNA, 19 nt, Homo sapiens
  misc_RNA (1)...(19): siRNA sense strand
ccaccuaaacagaaaucua

SEQ ID NO: 2423246 - RNA, 19 nt, Homo sapiens
  misc_RNA (1)...(19): siRNA sense strand
aguuaauggaggugguaga

SEQ ID NO: 2423247 - RNA, 19 nt, Homo sapiens
  misc_RNA (1)...(19): siRNA sense strand
cugaaaugaaagaugguuu

SEQ ID NO: 2423248 - RNA, 19 nt, Homo sapiens
  misc_RNA (1)...(19): siRNA sense strand
ucaaagaagaagaagcaca

SEQ ID NO: 2423249 - RNA, 19 nt, Homo sapiens
  misc_RNA (1)...(19): siRNA sense strand
ggucaucaccagagcccaa

SEQ ID NO: 2423250 - RNA, 19 nt, Homo sapiens
  misc_RNA (1)...(19): siRNA sense strand
caccagagcccaagaccaa

SEQ ID NO: 2423251 - RNA, 19 nt, Homo sapiens
  misc_RNA (1)...(19): siRNA sense strand
cagagaagaggcaggucua

SEQ ID NO: 2423252 - RNA, 19 nt, Homo sapiens
  misc_RNA (1)...(19): siRNA sense strand
cggcgaagcagaucaguau

SEQ ID NO: 2423253 - RNA, 19 nt, Homo sapiens
  misc_RNA (1)...(19): siRNA sense strand
ccgagaagcuaaacaacca

SEQ ID NO: 2423254 - RNA, 19 nt, Homo sapiens
  misc_RNA (1)...(19): siRNA sense strand
caggagaaguggcagguca

SEQ ID NO: 2423255 - RNA, 19 nt, Homo sapiens
  misc_RNA (1)...(19): siRNA sense strand
cagaaacaaaagagcaaaa

SEQ ID NO: 2423256 - RNA, 19 nt, Homo sapiens
  misc_RNA (1)...(19): siRNA sense strand
cgucaagccaagaugaaga

SEQ ID NO: 2423257 - RNA, 19 nt, Homo sapiens
  misc_RNA (1)...(19): siRNA sense strand
ugaagaacccgcaggccaa

SEQ ID NO: 2423258 - RNA, 19 nt, Homo sapiens
  misc_RNA (1)...(19): siRNA sense strand
aagaaauguccacaaguaa

SEQ ID NO: 2423259 - RNA, 19 nt, Homo sapiens
  misc_RNA (1)...(19): siRNA sense strand
agauauaccuagaacgcca

SEQ ID NO: 2423260 - RNA, 19 nt, Homo sapiens
  misc_RNA (1)...(19): siRNA sense strand
ccaaagcagaagaagaaga

SEQ ID NO: 2423261 - RNA, 19 nt, Homo sapiens
  misc_RNA (1)...(19): siRNA sense strand
gcagagaagucguucggga

SEQ ID NO: 2423262 - RNA, 19 nt, Homo sapiens
  misc_RNA (1)...(19): siRNA sense strand
gagaacaacuccacggcga

SEQ ID NO: 2423263 - RNA, 19 nt, Homo sapiens
  misc_RNA (1)...(19): siRNA sense strand
ccuccuagacagaaagaca

SEQ ID NO: 2423264 - RNA, 19 nt, Homo sapiens
  misc_RNA (1)...(19): siRNA sense strand
gguagagaagucugaagaa

SEQ ID NO: 2423265 - RNA, 19 nt, Homo sapiens
  misc_RNA (1)...(19): siRNA sense strand
ucaggaaagaagugaguca

SEQ ID NO: 2423266 - RNA, 19 nt, Homo sapiens
  misc_RNA (1)...(19): siRNA sense strand
agaagaagaaugaaagacu

SEQ ID NO: 2423267 - RNA, 19 nt, Homo sapiens
  misc_RNA (1)...(19): siRNA sense strand
ccccaaagcagaagaagaa

SEQ ID NO: 2423268 - RNA, 19 nt, Homo sapiens
  misc_RNA (1)...(19): siRNA sense strand
agauagaggacgcagguca

SEQ ID NO: 2423269 - RNA, 19 nt, Homo sapiens
  misc_RNA (1)...(19): siRNA sense strand
ccccagaugcaguggaaaa

SEQ ID NO: 2423270 - RNA, 19 nt, Homo sapiens
  misc_RNA (1)...(19): siRNA sense strand
agagagaaaacaagaacaa

SEQ ID NO: 2423271 - RNA, 19 nt, Homo sapiens
  misc_RNA (1)...(19): siRNA sense strand
aagauaaagacaagaagga

SEQ ID NO: 2423272 - RNA, 19 nt, Homo sapiens
  misc_RNA (1)...(19): siRNA sense strand
cagaagugagacagaguca

SEQ ID NO: 2423273 - RNA, 19 nt, Homo sapiens
  misc_RNA (1)...(19): siRNA sense strand
gaagaaagauagaggacgc

SEQ ID NO: 2423274 - RNA, 19 nt, Homo sapiens
  misc_RNA (1)...(19): siRNA sense strand
gccaagaugaagaguuaau

SEQ ID NO: 2423275 - RNA, 19 nt, Homo sapiens
  misc_RNA (1)...(19): siRNA sense strand
caaaggaggcuguucgaga

SEQ ID NO: 2423276 - RNA, 19 nt, Homo sapiens
  misc_RNA (1)...(19): siRNA sense strand
agagggaggucucggucua

SEQ ID NO: 2423277 - RNA, 19 nt, Homo sapiens
  misc_RNA (1)...(19): siRNA sense strand
ccaucaagacaaagucauu

SEQ ID NO: 2423278 - RNA, 19 nt, Homo sapiens
  misc_RNA (1)...(19): siRNA sense strand
cgacaagauccucuggaca

SEQ ID NO: 2423279 - RNA, 19 nt, Homo sapiens
  misc_RNA (1)...(19): siRNA sense strand
gaaagaugguuuacccaga

SEQ ID NO: 2423280 - RNA, 19 nt, Homo sapiens
  misc_RNA (1)...(19): siRNA sense strand
gcacagagguggggaagau

SEQ ID NO: 2423281 - RNA, 19 nt, Homo sapiens
  misc_RNA (1)...(19): siRNA sense strand
agaaauacccagagaagag

SEQ ID NO: 2423282 - RNA, 19 nt, Homo sapiens
  misc_RNA (1)...(19): siRNA sense strand
cuuaguuagacguggaaga

SEQ ID NO: 2423283 - RNA, 19 nt, Homo sapiens
  misc_RNA (1)...(19): siRNA sense strand
agaaaagcucaaagaagaa

SEQ ID NO: 2423284 - RNA, 19 nt, Homo sapiens
  misc_RNA (1)...(19): siRNA sense strand
cagcacaggcccagaacca

SEQ ID NO: 2423285 - RNA, 19 nt, Homo sapiens
  misc_RNA (1)...(19): siRNA sense strand
aguuagacguggaagaucu

SEQ ID NO: 2423286 - RNA, 19 nt, Homo sapiens
  misc_RNA (1)...(19): siRNA sense strand
agaacaucucaaagaagaa

SEQ ID NO: 2423287 - RNA, 19 nt, Homo sapiens
  misc_RNA (1)...(19): siRNA sense strand
cugcagagcaaaucucaaa

SEQ ID NO: 2423288 - RNA, 19 nt, Homo sapiens
  misc_RNA (1)...(19): siRNA sense strand
uccaauaagacaagauaga

SEQ ID NO: 2423289 - RNA, 19 nt, Homo sapiens
  misc_RNA (1)...(19): siRNA sense strand
ucauguugcuggagaagga

SEQ ID NO: 2423290 - RNA, 19 nt, Homo sapiens
  misc_RNA (1)...(19): siRNA sense strand
cuaccaagcaggagagcca

SEQ ID NO: 2423291 - RNA, 19 nt, Homo sapiens
  misc_RNA (1)...(19): siRNA sense strand
gcugaagagcugagccgua

SEQ ID NO: 2423292 - RNA, 19 nt, Homo sapiens
  misc_RNA (1)...(19): siRNA sense strand
cagucagauccaagagaau

SEQ ID NO: 2423293 - RNA, 19 nt, Homo sapiens
  misc_RNA (1)...(19): siRNA sense strand
ucaacgaggaugaggacau

SEQ ID NO: 2423294 - RNA, 19 nt, Homo sapiens
  misc_RNA (1)...(19): siRNA sense strand
ggucagugggcgugaucau

SEQ ID NO: 2423295 - RNA, 19 nt, Homo sapiens
  misc_RNA (1)...(19): siRNA sense strand
ucgugaaccuggagugcau

SEQ ID NO: 2423296 - RNA, 19 nt, Homo sapiens
  misc_RNA (1)...(19): siRNA sense strand
aguggucuauggagggaaa

SEQ ID NO: 2423297 - RNA, 19 nt, Homo sapiens
  misc_RNA (1)...(19): siRNA sense strand
uguuuguggugauggagaa

SEQ ID NO: 2423298 - RNA, 19 nt, Homo sapiens
  misc_RNA (1)...(19): siRNA sense strand
gagcugagccguagcacca

SEQ ID NO: 2423299 - RNA, 19 nt, Homo sapiens
  misc_RNA (1)...(19): siRNA sense strand
gagacauccaggagggcga

SEQ ID NO: 2423300 - RNA, 19 nt, Homo sapiens
  misc_RNA (1)...(19): siRNA sense strand
gugaggaggaggaaggcga

SEQ ID NO: 2423301 - RNA, 19 nt, Homo sapiens
  misc_RNA (1)...(19): siRNA sense strand
cauuacagcaacaaggaca

SEQ ID NO: 2423302 - RNA, 19 nt, Homo sapiens
  misc_RNA (1)...(19): siRNA sense strand
uccgagagcuggaggggaa

SEQ ID NO: 2423303 - RNA, 19 nt, Homo sapiens
  misc_RNA (1)...(19): siRNA sense strand
ggagaugcucuucggccua

SEQ ID NO: 2423304 - RNA, 19 nt, Homo sapiens
  misc_RNA (1)...(19): siRNA sense strand
cggccaccuucgaggacuu

SEQ ID NO: 2423305 - RNA, 19 nt, Homo sapiens
  misc_RNA (1)...(19): siRNA sense strand
cagaaauccucacggugga

SEQ ID NO: 2423306 - RNA, 19 nt, Homo sapiens
  misc_RNA (1)...(19): siRNA sense strand
gagaaaguguuugugguga

SEQ ID NO: 2423307 - RNA, 19 nt, Homo sapiens
  misc_RNA (1)...(19): siRNA sense strand
gggugguucauuacagcaa

SEQ ID NO: 2423308 - RNA, 19 nt, Homo sapiens
  misc_RNA (1)...(19): siRNA sense strand
gcaaaguacaagagguaau

SEQ ID NO: 2423309 - RNA, 19 nt, Homo sapiens
  misc_RNA (1)...(19): siRNA sense strand
cuuccaagauauagcaaua

SEQ ID NO: 2423310 - RNA, 19 nt, Homo sapiens
  misc_RNA (1)...(19): siRNA sense strand
aagcaaaguacaagaggua

SEQ ID NO: 2423311 - RNA, 19 nt, Homo sapiens
  misc_RNA (1)...(19): siRNA sense strand
agauaaaauucgagagcau

SEQ ID NO: 2423312 - RNA, 19 nt, Homo sapiens
  misc_RNA (1)...(19): siRNA sense strand
cuacauuccagcagaguaa

SEQ ID NO: 2423313 - RNA, 19 nt, Homo sapiens
  misc_RNA (1)...(19): siRNA sense strand
guggacauguugagugaaa

SEQ ID NO: 2423314 - RNA, 19 nt, Homo sapiens
  misc_RNA (1)...(19): siRNA sense strand
gaggaugacaaucgagaaa

SEQ ID NO: 2423315 - RNA, 19 nt, Homo sapiens
  misc_RNA (1)...(19): siRNA sense strand
guugaagagcuaaaggaaa

SEQ ID NO: 2423316 - RNA, 19 nt, Homo sapiens
  misc_RNA (1)...(19): siRNA sense strand
agauagaugaugaagcaaa

SEQ ID NO: 2423317 - RNA, 19 nt, Homo sapiens
  misc_RNA (1)...(19): siRNA sense strand
cagaaaauauccaggagaa

SEQ ID NO: 2423318 - RNA, 19 nt, Homo sapiens
  misc_RNA (1)...(19): siRNA sense strand
ugguaaaagcaguggcaaa

SEQ ID NO: 2423319 - RNA, 19 nt, Homo sapiens
  misc_RNA (1)...(19): siRNA sense strand
acaaaagguugaagagcua

SEQ ID NO: 2423320 - RNA, 19 nt, Homo sapiens
  misc_RNA (1)...(19): siRNA sense strand
cugaauuugagcugagaaa

SEQ ID NO: 2423321 - RNA, 19 nt, Homo sapiens
  misc_RNA (1)...(19): siRNA sense strand
ccuuauaaauccagagauc

SEQ ID NO: 2423322 - RNA, 19 nt, Homo sapiens
  misc_RNA (1)...(19): siRNA sense strand
ggacauguugagugaaauu

SEQ ID NO: 2423323 - RNA, 19 nt, Homo sapiens
  misc_RNA (1)...(19): siRNA sense strand
gcaaguaauggaagggaca

SEQ ID NO: 2423324 - RNA, 19 nt, Homo sapiens
  misc_RNA (1)...(19): siRNA sense strand
cugccuauuuggugguaua

SEQ ID NO: 2423325 - RNA, 19 nt, Homo sapiens
  misc_RNA (1)...(19): siRNA sense strand
caguaaaggacuucauaau

SEQ ID NO: 2423326 - RNA, 19 nt, Homo sapiens
  misc_RNA (1)...(19): siRNA sense strand
ggacaagagauuagcaacu

SEQ ID NO: 2423327 - RNA, 19 nt, Homo sapiens
  misc_RNA (1)...(19): siRNA sense strand
aggcaaugcuccagaagga

SEQ ID NO: 2423328 - RNA, 19 nt, Homo sapiens
  misc_RNA (1)...(19): siRNA sense strand
cagaucaaacugagagaau

SEQ ID NO: 2423329 - RNA, 19 nt, Homo sapiens
  misc_RNA (1)...(19): siRNA sense strand
aauugaaugucgagaugaa

SEQ ID NO: 2423330 - RNA, 19 nt, Homo sapiens
  misc_RNA (1)...(19): siRNA sense strand
gagugaugggaaagauaaa

SEQ ID NO: 2423331 - RNA, 19 nt, Homo sapiens
  misc_RNA (1)...(19): siRNA sense strand
ggacaauggcaauuaugaa

SEQ ID NO: 2423332 - RNA, 19 nt, Homo sapiens
  misc_RNA (1)...(19): siRNA sense strand
auguagaagucuugauuga

SEQ ID NO: 2423333 - RNA, 19 nt, Homo sapiens
  misc_RNA (1)...(19): siRNA sense strand
ggacaauuuaaccaagaaa

SEQ ID NO: 2423334 - RNA, 19 nt, Homo sapiens
  misc_RNA (1)...(19): siRNA sense strand
caugacuacuugugagcaa

SEQ ID NO: 2423335 - RNA, 19 nt, Homo sapiens
  misc_RNA (1)...(19): siRNA sense strand
gagaaaacaugcuaggcaa

SEQ ID NO: 2423336 - RNA, 19 nt, Homo sapiens
  misc_RNA (1)...(19): siRNA sense strand
agguguggccagaggcaaa

SEQ ID NO: 2423337 - RNA, 19 nt, Homo sapiens
  misc_RNA (1)...(19): siRNA sense strand
gguugaagagcuaaaggaa

SEQ ID NO: 2423338 - RNA, 19 nt, Homo sapiens
  misc_RNA (1)...(19): siRNA sense strand
auuaacaccucuuggcaua

SEQ ID NO: 2423339 - RNA, 19 nt, Homo sapiens
  misc_RNA (1)...(19): siRNA sense strand
cugaagaacuugggacauu

SEQ ID NO: 2423340 - RNA, 19 nt, Homo sapiens
  misc_RNA (1)...(19): siRNA sense strand
gggagaaggcagaguaucu

SEQ ID NO: 2423341 - RNA, 19 nt, Homo sapiens
  misc_RNA (1)...(19): siRNA sense strand
cuauaaagagggaacgaga

SEQ ID NO: 2423342 - RNA, 19 nt, Homo sapiens
  misc_RNA (1)...(19): siRNA sense strand
gagucaguauugagccaaa

SEQ ID NO: 2423343 - RNA, 19 nt, Homo sapiens
  misc_RNA (1)...(19): siRNA sense strand
gaagaauuuagaugagcaa

SEQ ID NO: 2423344 - RNA, 19 nt, Homo sapiens
  misc_RNA (1)...(19): siRNA sense strand
aggaaacggugaaagaaga

SEQ ID NO: 2423345 - RNA, 19 nt, Homo sapiens
  misc_RNA (1)...(19): siRNA sense strand
ggaaacggugaaagaagaa

SEQ ID NO: 2423346 - RNA, 19 nt, Homo sapiens
  misc_RNA (1)...(19): siRNA sense strand
gcuccugaccucugauaaa

SEQ ID NO: 2423347 - RNA, 19 nt, Homo sapiens
  misc_RNA (1)...(19): siRNA sense strand
cugagauggacaagagauu

SEQ ID NO: 2423348 - RNA, 19 nt, Homo sapiens
  misc_RNA (1)...(19): siRNA sense strand
cugcagagauuuaaagacu

SEQ ID NO: 2423349 - RNA, 19 nt, Homo sapiens
  misc_RNA (1)...(19): siRNA sense strand
aaugagaccuacagaaaca

SEQ ID NO: 2423350 - RNA, 19 nt, Homo sapiens
  misc_RNA (1)...(19): siRNA sense strand
gaauaaggccagacaacca

SEQ ID NO: 2423351 - RNA, 19 nt, Homo sapiens
  misc_RNA (1)...(19): siRNA sense strand
ucagcuaccugguggacaa

SEQ ID NO: 2423352 - RNA, 19 nt, Homo sapiens
  misc_RNA (1)...(19): siRNA sense strand
ggcuuauguuaaaggacaa

SEQ ID NO: 2423353 - RNA, 19 nt, Homo sapiens
  misc_RNA (1)...(19): siRNA sense strand
gcucaaauuaagcaaagua

SEQ ID NO: 2423354 - RNA, 19 nt, Homo sapiens
  misc_RNA (1)...(19): siRNA sense strand
aaagagggaacgagaagua

SEQ ID NO: 2423355 - RNA, 19 nt, Homo sapiens
  misc_RNA (1)...(19): siRNA sense strand
uugaagagcuaaaggaaac

SEQ ID NO: 2423356 - RNA, 19 nt, Homo sapiens
  misc_RNA (1)...(19): siRNA sense strand
gaguaucuucugagggaau

SEQ ID NO: 2423357 - RNA, 19 nt, Homo sapiens
  misc_RNA (1)...(19): siRNA sense strand
ccaccaacacugucacaaa

SEQ ID NO: 2423358 - RNA, 19 nt, Homo sapiens
  misc_RNA (1)...(19): siRNA sense strand
agaaguaggcuauggcuuu

SEQ ID NO: 2423359 - RNA, 19 nt, Homo sapiens
  misc_RNA (1)...(19): siRNA sense strand
cauauauagaccuuggaaa

SEQ ID NO: 2423360 - RNA, 19 nt, Homo sapiens
  misc_RNA (1)...(19): siRNA sense strand
augcaaggcucuaucacaa

SEQ ID NO: 2423361 - RNA, 19 nt, Homo sapiens
  misc_RNA (1)...(19): siRNA sense strand
ccugauaaagaguuacaua

SEQ ID NO: 2423362 - RNA, 19 nt, Homo sapiens
  misc_RNA (1)...(19): siRNA sense strand
uagagauccuccugugaaa

SEQ ID NO: 2423363 - RNA, 19 nt, Homo sapiens
  misc_RNA (1)...(19): siRNA sense strand
cuuuggaguuggacaagaa

SEQ ID NO: 2423364 - RNA, 19 nt, Homo sapiens
  misc_RNA (1)...(19): siRNA sense strand
agauaaaagugauggagca

SEQ ID NO: 2423365 - RNA, 19 nt, Homo sapiens
  misc_RNA (1)...(19): siRNA sense strand
ucucaggagcuaucagaaa

SEQ ID NO: 2423366 - RNA, 19 nt, Homo sapiens
  misc_RNA (1)...(19): siRNA sense strand
caaauagucaggaaggauu

SEQ ID NO: 2423367 - RNA, 19 nt, Homo sapiens
  misc_RNA (1)...(19): siRNA sense strand
ucaccaaaccuaugcaaau

SEQ ID NO: 2423368 - RNA, 19 nt, Homo sapiens
  misc_RNA (1)...(19): siRNA sense strand
ucgaacucauucaggauua

SEQ ID NO: 2423369 - RNA, 19 nt, Homo sapiens
  misc_RNA (1)...(19): siRNA sense strand
gcuaaaggaaacggugaaa

SEQ ID NO: 2423370 - RNA, 19 nt, Homo sapiens
  misc_RNA (1)...(19): siRNA sense strand
uugcaaggguuuugggaau

SEQ ID NO: 2423371 - RNA, 19 nt, Homo sapiens
  misc_RNA (1)...(19): siRNA sense strand
aggauuaacagauggcauu

SEQ ID NO: 2423372 - RNA, 19 nt, Homo sapiens
  misc_RNA (1)...(19): siRNA sense strand
auaaagaucgccugaagaa

SEQ ID NO: 2423373 - RNA, 19 nt, Homo sapiens
  misc_RNA (1)...(19): siRNA sense strand
uuucaguggcgaugguaaa

SEQ ID NO: 2423374 - RNA, 19 nt, Homo sapiens
  misc_RNA (1)...(19): siRNA sense strand
ucaaauucgugacaguaaa

SEQ ID NO: 2423375 - RNA, 19 nt, Homo sapiens
  misc_RNA (1)...(19): siRNA sense strand
ggaaacaugcugaaggcca

SEQ ID NO: 2423376 - RNA, 19 nt, Homo sapiens
  misc_RNA (1)...(19): siRNA sense strand
cauucaugcuggagagaaa

SEQ ID NO: 2423377 - RNA, 19 nt, Homo sapiens
  misc_RNA (1)...(19): siRNA sense strand
aagacguacuggaaagaaa

SEQ ID NO: 2423378 - RNA, 19 nt, Homo sapiens
  misc_RNA (1)...(19): siRNA sense strand
aauucauacaggagagaaa

SEQ ID NO: 2423379 - RNA, 19 nt, Homo sapiens
  misc_RNA (1)...(19): siRNA sense strand
augucaagaaugugggaaa

SEQ ID NO: 2423380 - RNA, 19 nt, Homo sapiens
  misc_RNA (1)...(19): siRNA sense strand
acugagaagauauggcaaa

SEQ ID NO: 2423381 - RNA, 19 nt, Homo sapiens
  misc_RNA (1)...(19): siRNA sense strand
augugaagaaugugguaaa

SEQ ID NO: 2423382 - RNA, 19 nt, Homo sapiens
  misc_RNA (1)...(19): siRNA sense strand
augugaagaauguggcaaa

SEQ ID NO: 2423383 - RNA, 19 nt, Homo sapiens
  misc_RNA (1)...(19): siRNA sense strand
augugaagaauguggcaaa

SEQ ID NO: 2423384 - RNA, 19 nt, Homo sapiens
  misc_RNA (1)...(19): siRNA sense strand
augugaagaauguggcaaa

SEQ ID NO: 2423385 - RNA, 19 nt, Homo sapiens
  misc_RNA (1)...(19): siRNA sense strand
augugaagaauguggcaaa

SEQ ID NO: 2423386 - RNA, 19 nt, Homo sapiens
  misc_RNA (1)...(19): siRNA sense strand
augugaagaauguggcaaa

SEQ ID NO: 2423387 - RNA, 19 nt, Homo sapiens
  misc_RNA (1)...(19): siRNA sense strand
augugaagaauguggcaaa

SEQ ID NO: 2423388 - RNA, 19 nt, Homo sapiens
  misc_RNA (1)...(19): siRNA sense strand
augugaagaauguggcaaa

SEQ ID NO: 2423389 - RNA, 19 nt, Homo sapiens
  misc_RNA (1)...(19): siRNA sense strand
augugaagaauguggcaaa

SEQ ID NO: 2423390 - RNA, 19 nt, Homo sapiens
  misc_RNA (1)...(19): siRNA sense strand
agacaagacguacuggaaa

SEQ ID NO: 2423391 - RNA, 19 nt, Homo sapiens
  misc_RNA (1)...(19): siRNA sense strand
cugugaagaaugugacaau

SEQ ID NO: 2423392 - RNA, 19 nt, Homo sapiens
  misc_RNA (1)...(19): siRNA sense strand
augugaaguguguggcaaa

SEQ ID NO: 2423393 - RNA, 19 nt, Homo sapiens
  misc_RNA (1)...(19): siRNA sense strand
acaacuacccagagcaaaa

SEQ ID NO: 2423394 - RNA, 19 nt, Homo sapiens
  misc_RNA (1)...(19): siRNA sense strand
uuacuagacacaagagaau

SEQ ID NO: 2423395 - RNA, 19 nt, Homo sapiens
  misc_RNA (1)...(19): siRNA sense strand
agaagguuauaaugagcua

SEQ ID NO: 2423396 - RNA, 19 nt, Homo sapiens
  misc_RNA (1)...(19): siRNA sense strand
gagcaagacauaaaagauu

SEQ ID NO: 2423397 - RNA, 19 nt, Homo sapiens
  misc_RNA (1)...(19): siRNA sense strand
ugacaacuacccagagcaa

SEQ ID NO: 2423398 - RNA, 19 nt, Homo sapiens
  misc_RNA (1)...(19): siRNA sense strand
agagagaauucuuaccaau

SEQ ID NO: 2423399 - RNA, 19 nt, Homo sapiens
  misc_RNA (1)...(19): siRNA sense strand
cgcaaguguagaugaguau

SEQ ID NO: 2423400 - RNA, 19 nt, Homo sapiens
  misc_RNA (1)...(19): siRNA sense strand
cugagaagauauggcaaau

SEQ ID NO: 2423401 - RNA, 19 nt, Homo sapiens
  misc_RNA (1)...(19): siRNA sense strand
cuuacuagacacaagagaa

SEQ ID NO: 2423402 - RNA, 19 nt, Homo sapiens
  misc_RNA (1)...(19): siRNA sense strand
aaccaguguuugacaacua

SEQ ID NO: 2423403 - RNA, 19 nt, Homo sapiens
  misc_RNA (1)...(19): siRNA sense strand
uggaauaugaagagacaug

SEQ ID NO: 2423404 - RNA, 19 nt, Homo sapiens
  misc_RNA (1)...(19): siRNA sense strand
accauauagaugugaagaa

SEQ ID NO: 2423405 - RNA, 19 nt, Homo sapiens
  misc_RNA (1)...(19): siRNA sense strand
aauucauacuggagagaag

SEQ ID NO: 2423406 - RNA, 19 nt, Homo sapiens
  misc_RNA (1)...(19): siRNA sense strand
aagacaagacguacuggaa

SEQ ID NO: 2423407 - RNA, 19 nt, Homo sapiens
  misc_RNA (1)...(19): siRNA sense strand
guauaaggugcacaaagaa

SEQ ID NO: 2423408 - RNA, 19 nt, Homo sapiens
  misc_RNA (1)...(19): siRNA sense strand
acacauaagagaauucaca

SEQ ID NO: 2423409 - RNA, 19 nt, Homo sapiens
  misc_RNA (1)...(19): siRNA sense strand
ggaucaagcauguggcuca

SEQ ID NO: 2423410 - RNA, 19 nt, Homo sapiens
  misc_RNA (1)...(19): siRNA sense strand
acugguagaaacagagaaa

SEQ ID NO: 2423411 - RNA, 19 nt, Homo sapiens
  misc_RNA (1)...(19): siRNA sense strand
ugguagaaacagagaaaau

SEQ ID NO: 2423412 - RNA, 19 nt, Homo sapiens
  misc_RNA (1)...(19): siRNA sense strand
gagugaacugguagaaaca

SEQ ID NO: 2423413 - RNA, 19 nt, Homo sapiens
  misc_RNA (1)...(19): siRNA sense strand
caggauuguguuugggaau

SEQ ID NO: 2423414 - RNA, 19 nt, Homo sapiens
  misc_RNA (1)...(19): siRNA sense strand
gaacagaagaagaaggcuc

SEQ ID NO: 2423415 - RNA, 19 nt, Homo sapiens
  misc_RNA (1)...(19): siRNA sense strand
aagaacagcauuaagguga

SEQ ID NO: 2423416 - RNA, 19 nt, Homo sapiens
  misc_RNA (1)...(19): siRNA sense strand
cugagagugaggaggaaca

SEQ ID NO: 2423417 - RNA, 19 nt, Homo sapiens
  misc_RNA (1)...(19): siRNA sense strand
cuguggaggucaugugcuu

SEQ ID NO: 2423418 - RNA, 19 nt, Homo sapiens
  misc_RNA (1)...(19): siRNA sense strand
agaaaauguacguggacga

SEQ ID NO: 2423419 - RNA, 19 nt, Homo sapiens
  misc_RNA (1)...(19): siRNA sense strand
caggacacuuucuggguca

SEQ ID NO: 2423420 - RNA, 19 nt, Homo sapiens
  misc_RNA (1)...(19): siRNA sense strand
aauagagcugggauggaua

SEQ ID NO: 2423421 - RNA, 19 nt, Homo sapiens
  misc_RNA (1)...(19): siRNA sense strand
agggugggauccagcgcua

SEQ ID NO: 2423422 - RNA, 19 nt, Homo sapiens
  misc_RNA (1)...(19): siRNA sense strand
cgucuuccucuuugagcaa

SEQ ID NO: 2423423 - RNA, 19 nt, Homo sapiens
  misc_RNA (1)...(19): siRNA sense strand
cccucuugccacuggauaa

SEQ ID NO: 2423424 - RNA, 19 nt, Homo sapiens
  misc_RNA (1)...(19): siRNA sense strand
ggaucaagcauguggcuca

SEQ ID NO: 2423425 - RNA, 19 nt, Homo sapiens
  misc_RNA (1)...(19): siRNA sense strand
acugguagaaacagagaaa

SEQ ID NO: 2423426 - RNA, 19 nt, Homo sapiens
  misc_RNA (1)...(19): siRNA sense strand
ugguagaaacagagaaaau

SEQ ID NO: 2423427 - RNA, 19 nt, Homo sapiens
  misc_RNA (1)...(19): siRNA sense strand
gagugaacugguagaaaca

SEQ ID NO: 2423428 - RNA, 19 nt, Homo sapiens
  misc_RNA (1)...(19): siRNA sense strand
caggauuguguuugggaau

SEQ ID NO: 2423429 - RNA, 19 nt, Homo sapiens
  misc_RNA (1)...(19): siRNA sense strand
guguggaaacugaggcaga

SEQ ID NO: 2423430 - RNA, 19 nt, Homo sapiens
  misc_RNA (1)...(19): siRNA sense strand
aggcaggaccauaugagaa

SEQ ID NO: 2423431 - RNA, 19 nt, Homo sapiens
  misc_RNA (1)...(19): siRNA sense strand
gaacagaagaagaaggcuc

SEQ ID NO: 2423432 - RNA, 19 nt, Homo sapiens
  misc_RNA (1)...(19): siRNA sense strand
aagaacagcauuaagguga

SEQ ID NO: 2423433 - RNA, 19 nt, Homo sapiens
  misc_RNA (1)...(19): siRNA sense strand
cugagagugaggaggaaca

SEQ ID NO: 2423434 - RNA, 19 nt, Homo sapiens
  misc_RNA (1)...(19): siRNA sense strand
ccauaugagaacuggaugu

SEQ ID NO: 2423435 - RNA, 19 nt, Homo sapiens
  misc_RNA (1)...(19): siRNA sense strand
ccgaaaagugcuggcaaaa

SEQ ID NO: 2423436 - RNA, 19 nt, Homo sapiens
  misc_RNA (1)...(19): siRNA sense strand
cuguggaggucaugugcuu

SEQ ID NO: 2423437 - RNA, 19 nt, Homo sapiens
  misc_RNA (1)...(19): siRNA sense strand
agaaaauguacguggacga

SEQ ID NO: 2423438 - RNA, 19 nt, Homo sapiens
  misc_RNA (1)...(19): siRNA sense strand
uccgaaaagugcuggcaaa

SEQ ID NO: 2423439 - RNA, 19 nt, Homo sapiens
  misc_RNA (1)...(19): siRNA sense strand
caggacacuuucuggguca

SEQ ID NO: 2423440 - RNA, 19 nt, Homo sapiens
  misc_RNA (1)...(19): siRNA sense strand
aauagagcugggauggaua

SEQ ID NO: 2423441 - RNA, 19 nt, Homo sapiens
  misc_RNA (1)...(19): siRNA sense strand
agggugggauccagcgcua

SEQ ID NO: 2423442 - RNA, 19 nt, Homo sapiens
  misc_RNA (1)...(19): siRNA sense strand
cgucuuccucuuugagcaa

SEQ ID NO: 2423443 - RNA, 19 nt, Homo sapiens
  misc_RNA (1)...(19): siRNA sense strand
cccucuugccacuggauaa

SEQ ID NO: 2423444 - RNA, 19 nt, Homo sapiens
  misc_RNA (1)...(19): siRNA sense strand
ccauaguggaagaauuaaa

SEQ ID NO: 2423445 - RNA, 19 nt, Homo sapiens
  misc_RNA (1)...(19): siRNA sense strand
gcuuaugagaacaaaggua

SEQ ID NO: 2423446 - RNA, 19 nt, Homo sapiens
  misc_RNA (1)...(19): siRNA sense strand
ggaucaauucagaagaaca

SEQ ID NO: 2423447 - RNA, 19 nt, Homo sapiens
  misc_RNA (1)...(19): siRNA sense strand
aguuaaucuucgcaguaaa

SEQ ID NO: 2423448 - RNA, 19 nt, Homo sapiens
  misc_RNA (1)...(19): siRNA sense strand
ggcccauaguggaagaauu

SEQ ID NO: 2423449 - RNA, 19 nt, Homo sapiens
  misc_RNA (1)...(19): siRNA sense strand
uagcauacuucuugggacu

SEQ ID NO: 2423450 - RNA, 19 nt, Homo sapiens
  misc_RNA (1)...(19): siRNA sense strand
cugcauuagaucugugauu

SEQ ID NO: 2423451 - RNA, 19 nt, Homo sapiens
  misc_RNA (1)...(19): siRNA sense strand
agguagaaaaccauggaaa

SEQ ID NO: 2423452 - RNA, 19 nt, Homo sapiens
  misc_RNA (1)...(19): siRNA sense strand
agaaauugaaacugagugu

SEQ ID NO: 2423453 - RNA, 19 nt, Homo sapiens
  misc_RNA (1)...(19): siRNA sense strand
gaggaaaaucgcugcaauu

SEQ ID NO: 2423454 - RNA, 19 nt, Homo sapiens
  misc_RNA (1)...(19): siRNA sense strand
guuuaaacugaaagccauu

SEQ ID NO: 2423455 - RNA, 19 nt, Homo sapiens
  misc_RNA (1)...(19): siRNA sense strand
ggaccgaauggaugacaca

SEQ ID NO: 2423456 - RNA, 19 nt, Homo sapiens
  misc_RNA (1)...(19): siRNA sense strand
ggacaccagcagaaaauaa

SEQ ID NO: 2423457 - RNA, 19 nt, Homo sapiens
  misc_RNA (1)...(19): siRNA sense strand
cuuucaaggaagagaauac

SEQ ID NO: 2423458 - RNA, 19 nt, Homo sapiens
  misc_RNA (1)...(19): siRNA sense strand
gguuacugcuucuguggau

SEQ ID NO: 2423459 - RNA, 19 nt, Homo sapiens
  misc_RNA (1)...(19): siRNA sense strand
accaguacuugcagcuaua

SEQ ID NO: 2423460 - RNA, 19 nt, Homo sapiens
  misc_RNA (1)...(19): siRNA sense strand
ugguagcuuucaaggaaga

SEQ ID NO: 2423461 - RNA, 19 nt, Homo sapiens
  misc_RNA (1)...(19): siRNA sense strand
gaaacaucuacccuggaaa

SEQ ID NO: 2423462 - RNA, 19 nt, Homo sapiens
  misc_RNA (1)...(19): siRNA sense strand
caacaaggcccauagugga

SEQ ID NO: 2423463 - RNA, 19 nt, Homo sapiens
  misc_RNA (1)...(19): siRNA sense strand
ggcuuggagucauccgaua

SEQ ID NO: 2423464 - RNA, 19 nt, Homo sapiens
  misc_RNA (1)...(19): siRNA sense strand
cugagguaguugugaguag

SEQ ID NO: 2423465 - RNA, 19 nt, Homo sapiens
  misc_RNA (1)...(19): siRNA sense strand
gacauuuccaucagagaau

SEQ ID NO: 2423466 - RNA, 19 nt, Homo sapiens
  misc_RNA (1)...(19): siRNA sense strand
caugaaucccugugagaag

SEQ ID NO: 2423467 - RNA, 19 nt, Homo sapiens
  misc_RNA (1)...(19): siRNA sense strand
ggguaaaaccagagccaaa

SEQ ID NO: 2423468 - RNA, 19 nt, Homo sapiens
  misc_RNA (1)...(19): siRNA sense strand
cagcagaggagguggagga

SEQ ID NO: 2423469 - RNA, 19 nt, Homo sapiens
  misc_RNA (1)...(19): siRNA sense strand
ugagaaagaaagagccgaa

SEQ ID NO: 2423470 - RNA, 19 nt, Homo sapiens
  misc_RNA (1)...(19): siRNA sense strand
ugcaaaauacagagagaaa

SEQ ID NO: 2423471 - RNA, 19 nt, Homo sapiens
  misc_RNA (1)...(19): siRNA sense strand
aggagaaaccaauagaaau

SEQ ID NO: 2423472 - RNA, 19 nt, Homo sapiens
  misc_RNA (1)...(19): siRNA sense strand
caaaauacagagagaaaca

SEQ ID NO: 2423473 - RNA, 19 nt, Homo sapiens
  misc_RNA (1)...(19): siRNA sense strand
auacagagagaaacagcaa

SEQ ID NO: 2423474 - RNA, 19 nt, Homo sapiens
  misc_RNA (1)...(19): siRNA sense strand
uggaggaagaagagaggga

SEQ ID NO: 2423475 - RNA, 19 nt, Homo sapiens
  misc_RNA (1)...(19): siRNA sense strand
gcugcaaaauacagagaga

SEQ ID NO: 2423476 - RNA, 19 nt, Homo sapiens
  misc_RNA (1)...(19): siRNA sense strand
ggacagugggaaaacaaaa

SEQ ID NO: 2423477 - RNA, 19 nt, Homo sapiens
  misc_RNA (1)...(19): siRNA sense strand
uagaaauacaguggguaaa

SEQ ID NO: 2423478 - RNA, 19 nt, Homo sapiens
  misc_RNA (1)...(19): siRNA sense strand
gugaaagaugugccgcaaa

SEQ ID NO: 2423479 - RNA, 19 nt, Homo sapiens
  misc_RNA (1)...(19): siRNA sense strand
caauagaaauacagugggu

SEQ ID NO: 2423480 - RNA, 19 nt, Homo sapiens
  misc_RNA (1)...(19): siRNA sense strand
cggauuuacaaaaggcaaa

SEQ ID NO: 2423481 - RNA, 19 nt, Homo sapiens
  misc_RNA (1)...(19): siRNA sense strand
cuuucagaucauagaagaa

SEQ ID NO: 2423482 - RNA, 19 nt, Homo sapiens
  misc_RNA (1)...(19): siRNA sense strand
gggaaguuuuggaggacca

SEQ ID NO: 2423483 - RNA, 19 nt, Homo sapiens
  misc_RNA (1)...(19): siRNA sense strand
uaaugcaggacuugagaau

SEQ ID NO: 2423484 - RNA, 19 nt, Homo sapiens
  misc_RNA (1)...(19): siRNA sense strand
gaaacgaaauagaugcgga

SEQ ID NO: 2423485 - RNA, 19 nt, Homo sapiens
  misc_RNA (1)...(19): siRNA sense strand
guucaggcgaagaagccaa

SEQ ID NO: 2423486 - RNA, 19 nt, Homo sapiens
  misc_RNA (1)...(19): siRNA sense strand
aggauaugguuucggaacu

SEQ ID NO: 2423487 - RNA, 19 nt, Homo sapiens
  misc_RNA (1)...(19): siRNA sense strand
aggagguggaggaagaaga

SEQ ID NO: 2423488 - RNA, 19 nt, Homo sapiens
  misc_RNA (1)...(19): siRNA sense strand
gcuuugcaguucaggcgaa

SEQ ID NO: 2423489 - RNA, 19 nt, Homo sapiens
  misc_RNA (1)...(19): siRNA sense strand
gcggcaaccaagaggaaac

SEQ ID NO: 2423490 - RNA, 19 nt, Homo sapiens
  misc_RNA (1)...(19): siRNA sense strand
auuaacgagguuugugaaa

SEQ ID NO: 2423491 - RNA, 19 nt, Homo sapiens
  misc_RNA (1)...(19): siRNA sense strand
cuuuaguacaccacgguau

SEQ ID NO: 2423492 - RNA, 19 nt, Homo sapiens
  misc_RNA (1)...(19): siRNA sense strand
augaaacagaggauggaca

SEQ ID NO: 2423493 - RNA, 19 nt, Homo sapiens
  misc_RNA (1)...(19): siRNA sense strand
ugcaagggaaaguggaaaa

SEQ ID NO: 2423494 - RNA, 19 nt, Homo sapiens
  misc_RNA (1)...(19): siRNA sense strand
agagaauuucagagaggaa

SEQ ID NO: 2423495 - RNA, 19 nt, Homo sapiens
  misc_RNA (1)...(19): siRNA sense strand
cgugauaccaaguggcuga

SEQ ID NO: 2423496 - RNA, 19 nt, Homo sapiens
  misc_RNA (1)...(19): siRNA sense strand
cuucaaauauugugcccau

SEQ ID NO: 2423497 - RNA, 19 nt, Homo sapiens
  misc_RNA (1)...(19): siRNA sense strand
cuguagagaauuucagaga

SEQ ID NO: 2423498 - RNA, 19 nt, Homo sapiens
  misc_RNA (1)...(19): siRNA sense strand
gagugauaauacugugaca

SEQ ID NO: 2423499 - RNA, 19 nt, Homo sapiens
  misc_RNA (1)...(19): siRNA sense strand
augauugaagcgagugaua

SEQ ID NO: 2423500 - RNA, 19 nt, Homo sapiens
  misc_RNA (1)...(19): siRNA sense strand
gaguuugccauguggaaaa

SEQ ID NO: 2423501 - RNA, 19 nt, Homo sapiens
  misc_RNA (1)...(19): siRNA sense strand
cgagaauuucagcguggaa

SEQ ID NO: 2423502 - RNA, 19 nt, Homo sapiens
  misc_RNA (1)...(19): siRNA sense strand
guagagaauuucagagagg

SEQ ID NO: 2423503 - RNA, 19 nt, Homo sapiens
  misc_RNA (1)...(19): siRNA sense strand
ccaugauugaagcgaguga

SEQ ID NO: 2423504 - RNA, 19 nt, Homo sapiens
  misc_RNA (1)...(19): siRNA sense strand
ggaaaauggucguguggug

SEQ ID NO: 2423505 - RNA, 19 nt, Homo sapiens
  misc_RNA (1)...(19): siRNA sense strand
agagaauuucagagaggaa

SEQ ID NO: 2423506 - RNA, 19 nt, Homo sapiens
  misc_RNA (1)...(19): siRNA sense strand
cgugauaccaaguggcuga

SEQ ID NO: 2423507 - RNA, 19 nt, Homo sapiens
  misc_RNA (1)...(19): siRNA sense strand
cuucaaauauugugcccau

SEQ ID NO: 2423508 - RNA, 19 nt, Homo sapiens
  misc_RNA (1)...(19): siRNA sense strand
cuguagagaauuucagaga

SEQ ID NO: 2423509 - RNA, 19 nt, Homo sapiens
  misc_RNA (1)...(19): siRNA sense strand
gagugauaauacugugaca

SEQ ID NO: 2423510 - RNA, 19 nt, Homo sapiens
  misc_RNA (1)...(19): siRNA sense strand
augauugaagcgagugaua

SEQ ID NO: 2423511 - RNA, 19 nt, Homo sapiens
  misc_RNA (1)...(19): siRNA sense strand
gaguuugccauguggaaaa

SEQ ID NO: 2423512 - RNA, 19 nt, Homo sapiens
  misc_RNA (1)...(19): siRNA sense strand
cgagaauuucagcguggaa

SEQ ID NO: 2423513 - RNA, 19 nt, Homo sapiens
  misc_RNA (1)...(19): siRNA sense strand
guagagaauuucagagagg

SEQ ID NO: 2423514 - RNA, 19 nt, Homo sapiens
  misc_RNA (1)...(19): siRNA sense strand
ccaugauugaagcgaguga

SEQ ID NO: 2423515 - RNA, 19 nt, Homo sapiens
  misc_RNA (1)...(19): siRNA sense strand
ggaaaauggucguguggug

SEQ ID NO: 2423516 - RNA, 19 nt, Homo sapiens
  misc_RNA (1)...(19): siRNA sense strand
ccaccaucuuccuggacau

SEQ ID NO: 2423517 - RNA, 19 nt, Homo sapiens
  misc_RNA (1)...(19): siRNA sense strand
gauuaugguuguuuggcua

SEQ ID NO: 2423518 - RNA, 19 nt, Homo sapiens
  misc_RNA (1)...(19): siRNA sense strand
ccaacauggcaaugggcua

SEQ ID NO: 2423519 - RNA, 19 nt, Homo sapiens
  misc_RNA (1)...(19): siRNA sense strand
gcaaugggcuacaggggaa

SEQ ID NO: 2423520 - RNA, 19 nt, Homo sapiens
  misc_RNA (1)...(19): siRNA sense strand
aagaugaagaugaaggaga

SEQ ID NO: 2423521 - RNA, 19 nt, Homo sapiens
  misc_RNA (1)...(19): siRNA sense strand
cuuuaacaguugagcacau

SEQ ID NO: 2423522 - RNA, 19 nt, Homo sapiens
  misc_RNA (1)...(19): siRNA sense strand
agggaaaggcacuggaagu

SEQ ID NO: 2423523 - RNA, 19 nt, Homo sapiens
  misc_RNA (1)...(19): siRNA sense strand
uugaagaagaugaugguga

SEQ ID NO: 2423524 - RNA, 19 nt, Homo sapiens
  misc_RNA (1)...(19): siRNA sense strand
agcacuaugugaagaggaa

SEQ ID NO: 2423525 - RNA, 19 nt, Homo sapiens
  misc_RNA (1)...(19): siRNA sense strand
auaccuaccaacaggcaaa

SEQ ID NO: 2423526 - RNA, 19 nt, Homo sapiens
  misc_RNA (1)...(19): siRNA sense strand
ggaagcuaucauugaagaa

SEQ ID NO: 2423527 - RNA, 19 nt, Homo sapiens
  misc_RNA (1)...(19): siRNA sense strand
auuaauacugugaagggaa

SEQ ID NO: 2423528 - RNA, 19 nt, Homo sapiens
  misc_RNA (1)...(19): siRNA sense strand
gaauugaaagugaaggcau

SEQ ID NO: 2423529 - RNA, 19 nt, Homo sapiens
  misc_RNA (1)...(19): siRNA sense strand
gaagaaaaucauugagacu

SEQ ID NO: 2423530 - RNA, 19 nt, Homo sapiens
  misc_RNA (1)...(19): siRNA sense strand
aagaggaagaagaugaaga

SEQ ID NO: 2423531 - RNA, 19 nt, Homo sapiens
  misc_RNA (1)...(19): siRNA sense strand
cagaagaguuuguggcagc

SEQ ID NO: 2423532 - RNA, 19 nt, Homo sapiens
  misc_RNA (1)...(19): siRNA sense strand
agaucacacuggaaaauaa

SEQ ID NO: 2423533 - RNA, 19 nt, Homo sapiens
  misc_RNA (1)...(19): siRNA sense strand
cggugcaaacagauggaau

SEQ ID NO: 2423534 - RNA, 19 nt, Homo sapiens
  misc_RNA (1)...(19): siRNA sense strand
caacacagguauuacagga

SEQ ID NO: 2423535 - RNA, 19 nt, Homo sapiens
  misc_RNA (1)...(19): siRNA sense strand
gugcaaacagauggaauau

SEQ ID NO: 2423536 - RNA, 19 nt, Homo sapiens
  misc_RNA (1)...(19): siRNA sense strand
cacuaugugaagaggaaga

SEQ ID NO: 2423537 - RNA, 19 nt, Homo sapiens
  misc_RNA (1)...(19): siRNA sense strand
uggugauggcggaugggua

SEQ ID NO: 2423538 - RNA, 19 nt, Homo sapiens
  misc_RNA (1)...(19): siRNA sense strand
gcugaggugaugaagaaaa

SEQ ID NO: 2423539 - RNA, 19 nt, Homo sapiens
  misc_RNA (1)...(19): siRNA sense strand
ggaaaauaguagaagcuug

SEQ ID NO: 2423540 - RNA, 19 nt, Homo sapiens
  misc_RNA (1)...(19): siRNA sense strand
cugaggugaugaagaaaau

SEQ ID NO: 2423541 - RNA, 19 nt, Homo sapiens
  misc_RNA (1)...(19): siRNA sense strand
aaacagugaccauugaaaa

SEQ ID NO: 2423542 - RNA, 19 nt, Homo sapiens
  misc_RNA (1)...(19): siRNA sense strand
agaaaaucauugagacugu

SEQ ID NO: 2423543 - RNA, 19 nt, Homo sapiens
  misc_RNA (1)...(19): siRNA sense strand
ccagagaaguggugcagcu

SEQ ID NO: 2423544 - RNA, 19 nt, Homo sapiens
  misc_RNA (1)...(19): siRNA sense strand
gcugcaaccuggaguggca

SEQ ID NO: 2423545 - RNA, 19 nt, Homo sapiens
  misc_RNA (1)...(19): siRNA sense strand
ggagaaaaggagacuucaa

SEQ ID NO: 2423546 - RNA, 19 nt, Homo sapiens
  misc_RNA (1)...(19): siRNA sense strand
ggguggugguccuagacuu

SEQ ID NO: 2423547 - RNA, 19 nt, Homo sapiens
  misc_RNA (1)...(19): siRNA sense strand
caguagugacccugagugu

SEQ ID NO: 2423548 - RNA, 19 nt, Homo sapiens
  misc_RNA (1)...(19): siRNA sense strand
ggagauauccugaggcuga

SEQ ID NO: 2423549 - RNA, 19 nt, Homo sapiens
  misc_RNA (1)...(19): siRNA sense strand
cugagguggccuuggauaa

SEQ ID NO: 2423550 - RNA, 19 nt, Homo sapiens
  misc_RNA (1)...(19): siRNA sense strand
gggccauggacuuguacaa

SEQ ID NO: 2423551 - RNA, 19 nt, Homo sapiens
  misc_RNA (1)...(19): siRNA sense strand
gagcagauggcuuuggaga

SEQ ID NO: 2423552 - RNA, 19 nt, Homo sapiens
  misc_RNA (1)...(19): siRNA sense strand
ggauaagggcugcucccaa

SEQ ID NO: 2423553 - RNA, 19 nt, Homo sapiens
  misc_RNA (1)...(19): siRNA sense strand
cuguuugguagcagagauu

SEQ ID NO: 2423554 - RNA, 19 nt, Homo sapiens
  misc_RNA (1)...(19): siRNA sense strand
gaagaagcccugagagcag

SEQ ID NO: 2423555 - RNA, 19 nt, Homo sapiens
  misc_RNA (1)...(19): siRNA sense strand
gugaagaagcccugagagc

SEQ ID NO: 2423556 - RNA, 19 nt, Homo sapiens
  misc_RNA (1)...(19): siRNA sense strand
gggcuaugggauauacuau

SEQ ID NO: 2423557 - RNA, 19 nt, Homo sapiens
  misc_RNA (1)...(19): siRNA sense strand
aagaaaugcuggaagagga

SEQ ID NO: 2423558 - RNA, 19 nt, Homo sapiens
  misc_RNA (1)...(19): siRNA sense strand
agaaaugcuggaagaggaa

SEQ ID NO: 2423559 - RNA, 19 nt, Homo sapiens
  misc_RNA (1)...(19): siRNA sense strand
gacaaauagaagaggaguu

SEQ ID NO: 2423560 - RNA, 19 nt, Homo sapiens
  misc_RNA (1)...(19): siRNA sense strand
gaagaggaguuaugggaag

SEQ ID NO: 2423561 - RNA, 19 nt, Homo sapiens
  misc_RNA (1)...(19): siRNA sense strand
ggugaaguacggaaauauu

SEQ ID NO: 2423562 - RNA, 19 nt, Homo sapiens
  misc_RNA (1)...(19): siRNA sense strand
ggauggaaaaugaagaaga

SEQ ID NO: 2423563 - RNA, 19 nt, Homo sapiens
  misc_RNA (1)...(19): siRNA sense strand
agaagaggaguuaugggaa

SEQ ID NO: 2423564 - RNA, 19 nt, Homo sapiens
  misc_RNA (1)...(19): siRNA sense strand
ggggugaaguacggaaaua

SEQ ID NO: 2423565 - RNA, 19 nt, Homo sapiens
  misc_RNA (1)...(19): siRNA sense strand
gggugaaguacggaaauau

SEQ ID NO: 2423566 - RNA, 19 nt, Homo sapiens
  misc_RNA (1)...(19): siRNA sense strand
agaagaauucaacagacaa

SEQ ID NO: 2423567 - RNA, 19 nt, Homo sapiens
  misc_RNA (1)...(19): siRNA sense strand
acagacaaauagaagagga

SEQ ID NO: 2423568 - RNA, 19 nt, Homo sapiens
  misc_RNA (1)...(19): siRNA sense strand
gugaaguacggaaauauuu

SEQ ID NO: 2423569 - RNA, 19 nt, Homo sapiens
  misc_RNA (1)...(19): siRNA sense strand
caaaagaagaagagaaaca

SEQ ID NO: 2423570 - RNA, 19 nt, Homo sapiens
  misc_RNA (1)...(19): siRNA sense strand
cagaaacagaugagaaaca

SEQ ID NO: 2423571 - RNA, 19 nt, Homo sapiens
  misc_RNA (1)...(19): siRNA sense strand
aagaagaacaacagcaaau

SEQ ID NO: 2423572 - RNA, 19 nt, Homo sapiens
  misc_RNA (1)...(19): siRNA sense strand
cagcaauuccauaaguaaa

SEQ ID NO: 2423573 - RNA, 19 nt, Homo sapiens
  misc_RNA (1)...(19): siRNA sense strand
ucuuugagccagagcguaa

SEQ ID NO: 2423574 - RNA, 19 nt, Homo sapiens
  misc_RNA (1)...(19): siRNA sense strand
guuaaaucucacacagaaa

SEQ ID NO: 2423575 - RNA, 19 nt, Homo sapiens
  misc_RNA (1)...(19): siRNA sense strand
cagcaaaagaagaagagaa

SEQ ID NO: 2423576 - RNA, 19 nt, Homo sapiens
  misc_RNA (1)...(19): siRNA sense strand
agcaaaagaagaagagaaa

SEQ ID NO: 2423577 - RNA, 19 nt, Homo sapiens
  misc_RNA (1)...(19): siRNA sense strand
acgagaacaacuagagcaa

SEQ ID NO: 2423578 - RNA, 19 nt, Homo sapiens
  misc_RNA (1)...(19): siRNA sense strand
ugaagaaggaagaagcaau

SEQ ID NO: 2423579 - RNA, 19 nt, Homo sapiens
  misc_RNA (1)...(19): siRNA sense strand
cggacaaguuccaaauaca

SEQ ID NO: 2423580 - RNA, 19 nt, Homo sapiens
  misc_RNA (1)...(19): siRNA sense strand
agaaacaaacagagagcca

SEQ ID NO: 2423581 - RNA, 19 nt, Homo sapiens
  misc_RNA (1)...(19): siRNA sense strand
gggugauauucaugaggau

SEQ ID NO: 2423582 - RNA, 19 nt, Homo sapiens
  misc_RNA (1)...(19): siRNA sense strand
aaaacaagaacgagaacaa

SEQ ID NO: 2423583 - RNA, 19 nt, Homo sapiens
  misc_RNA (1)...(19): siRNA sense strand
cuuaaauggaguucagauu

SEQ ID NO: 2423584 - RNA, 19 nt, Homo sapiens
  misc_RNA (1)...(19): siRNA sense strand
gagcagucuuugagccaga

SEQ ID NO: 2423585 - RNA, 19 nt, Homo sapiens
  misc_RNA (1)...(19): siRNA sense strand
cuguccaaauuguggcaaa

SEQ ID NO: 2423586 - RNA, 19 nt, Homo sapiens
  misc_RNA (1)...(19): siRNA sense strand
aagaagaagagaaacagaa

SEQ ID NO: 2423587 - RNA, 19 nt, Homo sapiens
  misc_RNA (1)...(19): siRNA sense strand
agaaaagaguaguugaaca

SEQ ID NO: 2423588 - RNA, 19 nt, Homo sapiens
  misc_RNA (1)...(19): siRNA sense strand
aaacaauucccaagggcau

SEQ ID NO: 2423589 - RNA, 19 nt, Homo sapiens
  misc_RNA (1)...(19): siRNA sense strand
cggcagaaggagaugcaca

SEQ ID NO: 2423590 - RNA, 19 nt, Homo sapiens
  misc_RNA (1)...(19): siRNA sense strand
gaaccugauaguaaagcaa

SEQ ID NO: 2423591 - RNA, 19 nt, Homo sapiens
  misc_RNA (1)...(19): siRNA sense strand
ucaugaacuccaagccaaa

SEQ ID NO: 2423592 - RNA, 19 nt, Homo sapiens
  misc_RNA (1)...(19): siRNA sense strand
aaacaaacagagagccaca

SEQ ID NO: 2423593 - RNA, 19 nt, Homo sapiens
  misc_RNA (1)...(19): siRNA sense strand
gagccagagcguaagaaga

SEQ ID NO: 2423594 - RNA, 19 nt, Homo sapiens
  misc_RNA (1)...(19): siRNA sense strand
gugcagugacauaccuaaa

SEQ ID NO: 2423595 - RNA, 19 nt, Homo sapiens
  misc_RNA (1)...(19): siRNA sense strand
cagcuuugagugagaaaca

SEQ ID NO: 2423596 - RNA, 19 nt, Homo sapiens
  misc_RNA (1)...(19): siRNA sense strand
aggaccagaugcugaagaa

SEQ ID NO: 2423597 - RNA, 19 nt, Homo sapiens
  misc_RNA (1)...(19): siRNA sense strand
aggugaaacagcucagcaa

SEQ ID NO: 2423598 - RNA, 19 nt, Homo sapiens
  misc_RNA (1)...(19): siRNA sense strand
aagcaagaggcaagagcga

SEQ ID NO: 2423599 - RNA, 19 nt, Homo sapiens
  misc_RNA (1)...(19): siRNA sense strand
augcugacuuaaagaaaca

SEQ ID NO: 2423600 - RNA, 19 nt, Homo sapiens
  misc_RNA (1)...(19): siRNA sense strand
acuuaaagaaacagcuuca

SEQ ID NO: 2423601 - RNA, 19 nt, Homo sapiens
  misc_RNA (1)...(19): siRNA sense strand
agcaagaacaaccggacaa

SEQ ID NO: 2423602 - RNA, 19 nt, Homo sapiens
  misc_RNA (1)...(19): siRNA sense strand
aggagaacccucagaaacu

SEQ ID NO: 2423603 - RNA, 19 nt, Homo sapiens
  misc_RNA (1)...(19): siRNA sense strand
aaguggaaauucagguuca

SEQ ID NO: 2423604 - RNA, 19 nt, Homo sapiens
  misc_RNA (1)...(19): siRNA sense strand
aaccaaaacgggaggagaa

SEQ ID NO: 2423605 - RNA, 19 nt, Homo sapiens
  misc_RNA (1)...(19): siRNA sense strand
agccuguggcccagaauaa

SEQ ID NO: 2423606 - RNA, 19 nt, Homo sapiens
  misc_RNA (1)...(19): siRNA sense strand
ggaagagagccaaugagga

SEQ ID NO: 2423607 - RNA, 19 nt, Homo sapiens
  misc_RNA (1)...(19): siRNA sense strand
acagaaaagaguaguugaa

SEQ ID NO: 2423608 - RNA, 19 nt, Homo sapiens
  misc_RNA (1)...(19): siRNA sense strand
guggugggccagagaccua

SEQ ID NO: 2423609 - RNA, 19 nt, Homo sapiens
  misc_RNA (1)...(19): siRNA sense strand
cguaagaagagugcaguga

SEQ ID NO: 2423610 - RNA, 19 nt, Homo sapiens
  misc_RNA (1)...(19): siRNA sense strand
gcucaaaugaagcaggauc

SEQ ID NO: 2423611 - RNA, 19 nt, Homo sapiens
  misc_RNA (1)...(19): siRNA sense strand
aauucagguucaccagaaa

SEQ ID NO: 2423612 - RNA, 19 nt, Homo sapiens
  misc_RNA (1)...(19): siRNA sense strand
cucuuaaaguggaaauuca

SEQ ID NO: 2423613 - RNA, 19 nt, Homo sapiens
  misc_RNA (1)...(19): siRNA sense strand
aaaagaagaacaacagcaa

SEQ ID NO: 2423614 - RNA, 19 nt, Homo sapiens
  misc_RNA (1)...(19): siRNA sense strand
gcugaagaaggaagaagca

SEQ ID NO: 2423615 - RNA, 19 nt, Homo sapiens
  misc_RNA (1)...(19): siRNA sense strand
caaagcagcaaaagaagaa

SEQ ID NO: 2423616 - RNA, 19 nt, Homo sapiens
  misc_RNA (1)...(19): siRNA sense strand
gcuuugagugagaaacaga

SEQ ID NO: 2423617 - RNA, 19 nt, Homo sapiens
  misc_RNA (1)...(19): siRNA sense strand
ugauaguaaagcaagaaca

SEQ ID NO: 2423618 - RNA, 19 nt, Homo sapiens
  misc_RNA (1)...(19): siRNA sense strand
caguuaaaucucacacaga

SEQ ID NO: 2423619 - RNA, 19 nt, Homo sapiens
  misc_RNA (1)...(19): siRNA sense strand
aaagaagaacaacagcaaa

SEQ ID NO: 2423620 - RNA, 19 nt, Homo sapiens
  misc_RNA (1)...(19): siRNA sense strand
cagaugagaaacaaacaga

SEQ ID NO: 2423621 - RNA, 19 nt, Homo sapiens
  misc_RNA (1)...(19): siRNA sense strand
ggagccaacuggagcguga

SEQ ID NO: 2423622 - RNA, 19 nt, Homo sapiens
  misc_RNA (1)...(19): siRNA sense strand
agucagaaccggaaagcca

SEQ ID NO: 2423623 - RNA, 19 nt, Homo sapiens
  misc_RNA (1)...(19): siRNA sense strand
ccaacgagcuggugagcac

SEQ ID NO: 2423624 - RNA, 19 nt, Homo sapiens
  misc_RNA (1)...(19): siRNA sense strand
gcaugauccugcagaggga

SEQ ID NO: 2423625 - RNA, 19 nt, Homo sapiens
  misc_RNA (1)...(19): siRNA sense strand
uggaaucacucgagccuga

SEQ ID NO: 2423626 - RNA, 19 nt, Homo sapiens
  misc_RNA (1)...(19): siRNA sense strand
aggauuaacgagaaugaga

SEQ ID NO: 2423627 - RNA, 19 nt, Homo sapiens
  misc_RNA (1)...(19): siRNA sense strand
ggaacacgcugacaggaca

SEQ ID NO: 2423628 - RNA, 19 nt, Homo sapiens
  misc_RNA (1)...(19): siRNA sense strand
gcaucgagaaggugcagga

SEQ ID NO: 2423629 - RNA, 19 nt, Homo sapiens
  misc_RNA (1)...(19): siRNA sense strand
gcauugauucauagggaua

SEQ ID NO: 2423630 - RNA, 19 nt, Homo sapiens
  misc_RNA (1)...(19): siRNA sense strand
ggauauuaaagcaggaaau

SEQ ID NO: 2423631 - RNA, 19 nt, Homo sapiens
  misc_RNA (1)...(19): siRNA sense strand
caauaagaggcgagaaaga

SEQ ID NO: 2423632 - RNA, 19 nt, Homo sapiens
  misc_RNA (1)...(19): siRNA sense strand
acuuaaaggccauggaaau

SEQ ID NO: 2423633 - RNA, 19 nt, Homo sapiens
  misc_RNA (1)...(19): siRNA sense strand
cagaaugggauuugggaau

SEQ ID NO: 2423634 - RNA, 19 nt, Homo sapiens
  misc_RNA (1)...(19): siRNA sense strand
caguaugaacagaguauaa

SEQ ID NO: 2423635 - RNA, 19 nt, Homo sapiens
  misc_RNA (1)...(19): siRNA sense strand
agaacaagcugaaggcuga

SEQ ID NO: 2423636 - RNA, 19 nt, Homo sapiens
  misc_RNA (1)...(19): siRNA sense strand
ccaagaaagagaagcaaga

SEQ ID NO: 2423637 - RNA, 19 nt, Homo sapiens
  misc_RNA (1)...(19): siRNA sense strand
uacaauaagaggcgagaaa

SEQ ID NO: 2423638 - RNA, 19 nt, Homo sapiens
  misc_RNA (1)...(19): siRNA sense strand
uggaaaggcaagagcgaga

SEQ ID NO: 2423639 - RNA, 19 nt, Homo sapiens
  misc_RNA (1)...(19): siRNA sense strand
aggacaguaugaugggaaa

SEQ ID NO: 2423640 - RNA, 19 nt, Homo sapiens
  misc_RNA (1)...(19): siRNA sense strand
agaugcaguucgugagcua

SEQ ID NO: 2423641 - RNA, 19 nt, Homo sapiens
  misc_RNA (1)...(19): siRNA sense strand
cuccaaagaaugagcacaa

SEQ ID NO: 2423642 - RNA, 19 nt, Homo sapiens
  misc_RNA (1)...(19): siRNA sense strand
cagcagaacuauuaaggca

SEQ ID NO: 2423643 - RNA, 19 nt, Homo sapiens
  misc_RNA (1)...(19): siRNA sense strand
agucagaagaagcaguaua

SEQ ID NO: 2423644 - RNA, 19 nt, Homo sapiens
  misc_RNA (1)...(19): siRNA sense strand
ucauagaaaaggaggcaaa

SEQ ID NO: 2423645 - RNA, 19 nt, Homo sapiens
  misc_RNA (1)...(19): siRNA sense strand
cuugguuggugauggaaua

SEQ ID NO: 2423646 - RNA, 19 nt, Homo sapiens
  misc_RNA (1)...(19): siRNA sense strand
aggaaaugaaugaggacca

SEQ ID NO: 2423647 - RNA, 19 nt, Homo sapiens
  misc_RNA (1)...(19): siRNA sense strand
cagaagaaagauuugacaa

SEQ ID NO: 2423648 - RNA, 19 nt, Homo sapiens
  misc_RNA (1)...(19): siRNA sense strand
agaaggagguggagacgca

SEQ ID NO: 2423649 - RNA, 19 nt, Homo sapiens
  misc_RNA (1)...(19): siRNA sense strand
ccaaacauaaagagaacuu

SEQ ID NO: 2423650 - RNA, 19 nt, Homo sapiens
  misc_RNA (1)...(19): siRNA sense strand
cuugcaaaguacagaccaa

SEQ ID NO: 2423651 - RNA, 19 nt, Homo sapiens
  misc_RNA (1)...(19): siRNA sense strand
cuacaaaugcucacaccaa

SEQ ID NO: 2423652 - RNA, 19 nt, Homo sapiens
  misc_RNA (1)...(19): siRNA sense strand
cacacaggcugaagaggaa

SEQ ID NO: 2423653 - RNA, 19 nt, Homo sapiens
  misc_RNA (1)...(19): siRNA sense strand
uggcagagcaguaugaaca

SEQ ID NO: 2423654 - RNA, 19 nt, Homo sapiens
  misc_RNA (1)...(19): siRNA sense strand
cagaaggaacgcagcgaga

SEQ ID NO: 2423655 - RNA, 19 nt, Homo sapiens
  misc_RNA (1)...(19): siRNA sense strand
gggauauuaaagcaggaaa

SEQ ID NO: 2423656 - RNA, 19 nt, Homo sapiens
  misc_RNA (1)...(19): siRNA sense strand
cagaaaauaccucaggaaa

SEQ ID NO: 2423657 - RNA, 19 nt, Homo sapiens
  misc_RNA (1)...(19): siRNA sense strand
aagagaagcaagagcggau

SEQ ID NO: 2423658 - RNA, 19 nt, Homo sapiens
  misc_RNA (1)...(19): siRNA sense strand
ggaauauugcuuaggcuca

SEQ ID NO: 2423659 - RNA, 19 nt, Homo sapiens
  misc_RNA (1)...(19): siRNA sense strand
cacaggaggaugaggaaga

SEQ ID NO: 2423660 - RNA, 19 nt, Homo sapiens
  misc_RNA (1)...(19): siRNA sense strand
aguauaaagcacucaagaa

SEQ ID NO: 2423661 - RNA, 19 nt, Homo sapiens
  misc_RNA (1)...(19): siRNA sense strand
aaagaugagcagacaagaa

SEQ ID NO: 2423662 - RNA, 19 nt, Homo sapiens
  misc_RNA (1)...(19): siRNA sense strand
aaggcaagagcgagagauu

SEQ ID NO: 2423663 - RNA, 19 nt, Homo sapiens
  misc_RNA (1)...(19): siRNA sense strand
gaaaguugauauuugguca

SEQ ID NO: 2423664 - RNA, 19 nt, Homo sapiens
  misc_RNA (1)...(19): siRNA sense strand
aggaugaggaagacaguga

SEQ ID NO: 2423665 - RNA, 19 nt, Homo sapiens
  misc_RNA (1)...(19): siRNA sense strand
ugaggaagacagugaacau

SEQ ID NO: 2423666 - RNA, 19 nt, Homo sapiens
  misc_RNA (1)...(19): siRNA sense strand
ggaacagaugucagguuau

SEQ ID NO: 2423667 - RNA, 19 nt, Homo sapiens
  misc_RNA (1)...(19): siRNA sense strand
aaauaaugaucaagcggca

SEQ ID NO: 2423668 - RNA, 19 nt, Homo sapiens
  misc_RNA (1)...(19): siRNA sense strand
ugaaauuggacauggaagu

SEQ ID NO: 2423669 - RNA, 19 nt, Homo sapiens
  misc_RNA (1)...(19): siRNA sense strand
agguaaaacuagcugauuu

SEQ ID NO: 2423670 - RNA, 19 nt, Homo sapiens
  misc_RNA (1)...(19): siRNA sense strand
gaacauggaaccagccuga

SEQ ID NO: 2423671 - RNA, 19 nt, Homo sapiens
  misc_RNA (1)...(19): siRNA sense strand
uggaaaaccagcuggagua

SEQ ID NO: 2423672 - RNA, 19 nt, Homo sapiens
  misc_RNA (1)...(19): siRNA sense strand
ccauagcacacccaagaaa

SEQ ID NO: 2423673 - RNA, 19 nt, Homo sapiens
  misc_RNA (1)...(19): siRNA sense strand
uugaauuggcggaacggaa

SEQ ID NO: 2423674 - RNA, 19 nt, Homo sapiens
  misc_RNA (1)...(19): siRNA sense strand
gccucaagcuacagaagga

SEQ ID NO: 2423675 - RNA, 19 nt, Homo sapiens
  misc_RNA (1)...(19): siRNA sense strand
ccaaagaaugagcacaaaa

SEQ ID NO: 2423676 - RNA, 19 nt, Homo sapiens
  misc_RNA (1)...(19): siRNA sense strand
gcagaagauugaagaggag

SEQ ID NO: 2423677 - RNA, 19 nt, Homo sapiens
  misc_RNA (1)...(19): siRNA sense strand
ucuaaugaauggacagacu

SEQ ID NO: 2423678 - RNA, 19 nt, Homo sapiens
  misc_RNA (1)...(19): siRNA sense strand
gcagaaaauaccucaggaa

SEQ ID NO: 2423679 - RNA, 19 nt, Homo sapiens
  misc_RNA (1)...(19): siRNA sense strand
gccaacaucagcagaacua

SEQ ID NO: 2423680 - RNA, 19 nt, Homo sapiens
  misc_RNA (1)...(19): siRNA sense strand
aaagagaacuugcagcaca

SEQ ID NO: 2423681 - RNA, 19 nt, Homo sapiens
  misc_RNA (1)...(19): siRNA sense strand
gagaacgaguugcgggaac

SEQ ID NO: 2423682 - RNA, 19 nt, Homo sapiens
  misc_RNA (1)...(19): siRNA sense strand
agaagaaagauuugacaac

SEQ ID NO: 2423683 - RNA, 19 nt, Homo sapiens
  misc_RNA (1)...(19): siRNA sense strand
cuccaaacauaaagagaac

SEQ ID NO: 2423684 - RNA, 19 nt, Homo sapiens
  misc_RNA (1)...(19): siRNA sense strand
agguggagcagcagaacau

SEQ ID NO: 2423685 - RNA, 19 nt, Homo sapiens
  misc_RNA (1)...(19): siRNA sense strand
aagaggacccagaaggaga

SEQ ID NO: 2423686 - RNA, 19 nt, Homo sapiens
  misc_RNA (1)...(19): siRNA sense strand
ugucauggaacuucggcaa

SEQ ID NO: 2423687 - RNA, 19 nt, Homo sapiens
  misc_RNA (1)...(19): siRNA sense strand
gcuuaaaggacaucagaaa

SEQ ID NO: 2423688 - RNA, 19 nt, Homo sapiens
  misc_RNA (1)...(19): siRNA sense strand
cagugaagaaaguggaaua

SEQ ID NO: 2423689 - RNA, 19 nt, Homo sapiens
  misc_RNA (1)...(19): siRNA sense strand
uaguaaaggcugaaggaau

SEQ ID NO: 2423690 - RNA, 19 nt, Homo sapiens
  misc_RNA (1)...(19): siRNA sense strand
uaacagugacacagagaaa

SEQ ID NO: 2423691 - RNA, 19 nt, Homo sapiens
  misc_RNA (1)...(19): siRNA sense strand
cagaauaugcugagagguu

SEQ ID NO: 2423692 - RNA, 19 nt, Homo sapiens
  misc_RNA (1)...(19): siRNA sense strand
ccaauuaugagguggcuaa

SEQ ID NO: 2423693 - RNA, 19 nt, Homo sapiens
  misc_RNA (1)...(19): siRNA sense strand
cuguaaaguuucugauuga

SEQ ID NO: 2423694 - RNA, 19 nt, Homo sapiens
  misc_RNA (1)...(19): siRNA sense strand
uggaauaugaucauggaaa

SEQ ID NO: 2423695 - RNA, 19 nt, Homo sapiens
  misc_RNA (1)...(19): siRNA sense strand
gcuuaucauuugagaccaa

SEQ ID NO: 2423696 - RNA, 19 nt, Homo sapiens
  misc_RNA (1)...(19): siRNA sense strand
gugaacagaacaugauaaa

SEQ ID NO: 2423697 - RNA, 19 nt, Homo sapiens
  misc_RNA (1)...(19): siRNA sense strand
gaauaugcugagagguuua

SEQ ID NO: 2423698 - RNA, 19 nt, Homo sapiens
  misc_RNA (1)...(19): siRNA sense strand
caauaaaaguccaguaaca

SEQ ID NO: 2423699 - RNA, 19 nt, Homo sapiens
  misc_RNA (1)...(19): siRNA sense strand
agaugagauuuaugagcua

SEQ ID NO: 2423700 - RNA, 19 nt, Homo sapiens
  misc_RNA (1)...(19): siRNA sense strand
aagaaacaacugacagaua

SEQ ID NO: 2423701 - RNA, 19 nt, Homo sapiens
  misc_RNA (1)...(19): siRNA sense strand
cauuugagaccaagagaau

SEQ ID NO: 2423702 - RNA, 19 nt, Homo sapiens
  misc_RNA (1)...(19): siRNA sense strand
uugaaggaguuaagcuaua

SEQ ID NO: 2423703 - RNA, 19 nt, Homo sapiens
  misc_RNA (1)...(19): siRNA sense strand
gauugaaggaguuaagcua

SEQ ID NO: 2423704 - RNA, 19 nt, Homo sapiens
  misc_RNA (1)...(19): siRNA sense strand
gaguaaagugaaagcugaa

SEQ ID NO: 2423705 - RNA, 19 nt, Homo sapiens
  misc_RNA (1)...(19): siRNA sense strand
cagaaggagucuuugaaaa

SEQ ID NO: 2423706 - RNA, 19 nt, Homo sapiens
  misc_RNA (1)...(19): siRNA sense strand
ggaguaaagugaaagcuga

SEQ ID NO: 2423707 - RNA, 19 nt, Homo sapiens
  misc_RNA (1)...(19): siRNA sense strand
ggaggauuccagugagcua

SEQ ID NO: 2423708 - RNA, 19 nt, Homo sapiens
  misc_RNA (1)...(19): siRNA sense strand
gugaaugaccagacauauu

SEQ ID NO: 2423709 - RNA, 19 nt, Homo sapiens
  misc_RNA (1)...(19): siRNA sense strand
agaacauacacuuggcuua

SEQ ID NO: 2423710 - RNA, 19 nt, Homo sapiens
  misc_RNA (1)...(19): siRNA sense strand
guauauaaugugaaggcuu

SEQ ID NO: 2423711 - RNA, 19 nt, Homo sapiens
  misc_RNA (1)...(19): siRNA sense strand
uaacaguggaaaucagaaa

SEQ ID NO: 2423712 - RNA, 19 nt, Homo sapiens
  misc_RNA (1)...(19): siRNA sense strand
gcaacaaacgauugaagga

SEQ ID NO: 2423713 - RNA, 19 nt, Homo sapiens
  misc_RNA (1)...(19): siRNA sense strand
auagaaaguaucagccuaa

SEQ ID NO: 2423714 - RNA, 19 nt, Homo sapiens
  misc_RNA (1)...(19): siRNA sense strand
augaauacagaaaggacaa

SEQ ID NO: 2423715 - RNA, 19 nt, Homo sapiens
  misc_RNA (1)...(19): siRNA sense strand
ggauccaggaagagugauu

SEQ ID NO: 2423716 - RNA, 19 nt, Homo sapiens
  misc_RNA (1)...(19): siRNA sense strand
gaaacaacugacagauaau

SEQ ID NO: 2423717 - RNA, 19 nt, Homo sapiens
  misc_RNA (1)...(19): siRNA sense strand
uagaggaauuucagacaau

SEQ ID NO: 2423718 - RNA, 19 nt, Homo sapiens
  misc_RNA (1)...(19): siRNA sense strand
gcccuaaugaauacagaaa

SEQ ID NO: 2423719 - RNA, 19 nt, Homo sapiens
  misc_RNA (1)...(19): siRNA sense strand
aagugaaugaccagacaua

SEQ ID NO: 2423720 - RNA, 19 nt, Homo sapiens
  misc_RNA (1)...(19): siRNA sense strand
cagacaaggccuuauacaa

SEQ ID NO: 2423721 - RNA, 19 nt, Homo sapiens
  misc_RNA (1)...(19): siRNA sense strand
agaaucaguuacagguauu

SEQ ID NO: 2423722 - RNA, 19 nt, Homo sapiens
  misc_RNA (1)...(19): siRNA sense strand
cuauauuggaguaaaguga

SEQ ID NO: 2423723 - RNA, 19 nt, Homo sapiens
  misc_RNA (1)...(19): siRNA sense strand
ggaggaaaaugaaggacau

SEQ ID NO: 2423724 - RNA, 19 nt, Homo sapiens
  misc_RNA (1)...(19): siRNA sense strand
gaagaauuugcuuuggaaa

SEQ ID NO: 2423725 - RNA, 19 nt, Homo sapiens
  misc_RNA (1)...(19): siRNA sense strand
ggugaacagaacaugauaa

SEQ ID NO: 2423726 - RNA, 19 nt, Homo sapiens
  misc_RNA (1)...(19): siRNA sense strand
agccaaagcaagaagugaa

SEQ ID NO: 2423727 - RNA, 19 nt, Homo sapiens
  misc_RNA (1)...(19): siRNA sense strand
guugguggcuguaggaaaa

SEQ ID NO: 2423728 - RNA, 19 nt, Homo sapiens
  misc_RNA (1)...(19): siRNA sense strand
ggaaaaugaaggacauauu

SEQ ID NO: 2423729 - RNA, 19 nt, Homo sapiens
  misc_RNA (1)...(19): siRNA sense strand
ucaagaaauguaagcacua

SEQ ID NO: 2423730 - RNA, 19 nt, Homo sapiens
  misc_RNA (1)...(19): siRNA sense strand
gaauguggacucuggguau

SEQ ID NO: 2423731 - RNA, 19 nt, Homo sapiens
  misc_RNA (1)...(19): siRNA sense strand
caaaguauacauaugggaa

SEQ ID NO: 2423732 - RNA, 19 nt, Homo sapiens
  misc_RNA (1)...(19): siRNA sense strand
aguugguggcuguaggaaa

SEQ ID NO: 2423733 - RNA, 19 nt, Homo sapiens
  misc_RNA (1)...(19): siRNA sense strand
ggagacaggcggugagaag

SEQ ID NO: 2423734 - RNA, 19 nt, Homo sapiens
  misc_RNA (1)...(19): siRNA sense strand
ggauuauauugaugguguu

SEQ ID NO: 2423735 - RNA, 19 nt, Homo sapiens
  misc_RNA (1)...(19): siRNA sense strand
gcgagacagugaagaaagu

SEQ ID NO: 2423736 - RNA, 19 nt, Homo sapiens
  misc_RNA (1)...(19): siRNA sense strand
ggugguuaguggcaacaaa

SEQ ID NO: 2423737 - RNA, 19 nt, Homo sapiens
  misc_RNA (1)...(19): siRNA sense strand
acacuuggcuuaaaggaca

SEQ ID NO: 2423738 - RNA, 19 nt, Homo sapiens
  misc_RNA (1)...(19): siRNA sense strand
gauuugaauguguguacaa

SEQ ID NO: 2423739 - RNA, 19 nt, Homo sapiens
  misc_RNA (1)...(19): siRNA sense strand
agcugaaccaucugagaaa

SEQ ID NO: 2423740 - RNA, 19 nt, Homo sapiens
  misc_RNA (1)...(19): siRNA sense strand
uguuaucagaggugaagaa

SEQ ID NO: 2423741 - RNA, 19 nt, Homo sapiens
  misc_RNA (1)...(19): siRNA sense strand
ugagcgagacagugaagaa

SEQ ID NO: 2423742 - RNA, 19 nt, Homo sapiens
  misc_RNA (1)...(19): siRNA sense strand
uuugagaccaagagaauau

SEQ ID NO: 2423743 - RNA, 19 nt, Homo sapiens
  misc_RNA (1)...(19): siRNA sense strand
uauacaagccaaagcaaga

SEQ ID NO: 2423744 - RNA, 19 nt, Homo sapiens
  misc_RNA (1)...(19): siRNA sense strand
gaguuaagcuauaugguag

SEQ ID NO: 2423745 - RNA, 19 nt, Homo sapiens
  misc_RNA (1)...(19): siRNA sense strand
acaauaggcuacagaguac

SEQ ID NO: 2423746 - RNA, 19 nt, Homo sapiens
  misc_RNA (1)...(19): siRNA sense strand
gcuacagaguacccugaaa

SEQ ID NO: 2423747 - RNA, 19 nt, Homo sapiens
  misc_RNA (1)...(19): siRNA sense strand
agaaaguggaauaugauca

SEQ ID NO: 2423748 - RNA, 19 nt, Homo sapiens
  misc_RNA (1)...(19): siRNA sense strand
gggagaaauuccuaucaca

SEQ ID NO: 2423749 - RNA, 19 nt, Homo sapiens
  misc_RNA (1)...(19): siRNA sense strand
ccugggauauagaaaguau

SEQ ID NO: 2423750 - RNA, 19 nt, Homo sapiens
  misc_RNA (1)...(19): siRNA sense strand
guuucaagcuucuguacuu

SEQ ID NO: 2423751 - RNA, 19 nt, Homo sapiens
  misc_RNA (1)...(19): siRNA sense strand
ucuucaagcaacaugauua

SEQ ID NO: 2423752 - RNA, 19 nt, Homo sapiens
  misc_RNA (1)...(19): siRNA sense strand
ugaaagaacuguuuggaag

SEQ ID NO: 2423753 - RNA, 19 nt, Homo sapiens
  misc_RNA (1)...(19): siRNA sense strand
acuuggagaucuugggcuu

SEQ ID NO: 2423754 - RNA, 19 nt, Homo sapiens
  misc_RNA (1)...(19): siRNA sense strand
ugauuuaauggaugccaaa

SEQ ID NO: 2423755 - RNA, 19 nt, Homo sapiens
  misc_RNA (1)...(19): siRNA sense strand
agaagauagaacaguguga

SEQ ID NO: 2423756 - RNA, 19 nt, Homo sapiens
  misc_RNA (1)...(19): siRNA sense strand
augcauucucgaagaguca

SEQ ID NO: 2423757 - RNA, 19 nt, Homo sapiens
  misc_RNA (1)...(19): siRNA sense strand
gcaucaacccagauccaga

SEQ ID NO: 2423758 - RNA, 19 nt, Homo sapiens
  misc_RNA (1)...(19): siRNA sense strand
auguuuaugacguagcaaa

SEQ ID NO: 2423759 - RNA, 19 nt, Homo sapiens
  misc_RNA (1)...(19): siRNA sense strand
gcaucaaagaaauagaucu

SEQ ID NO: 2423760 - RNA, 19 nt, Homo sapiens
  misc_RNA (1)...(19): siRNA sense strand
acaaggaaugcaagggcca

SEQ ID NO: 2423761 - RNA, 19 nt, Homo sapiens
  misc_RNA (1)...(19): siRNA sense strand
aggaguugagagagcauua

SEQ ID NO: 2423762 - RNA, 19 nt, Homo sapiens
  misc_RNA (1)...(19): siRNA sense strand
cagaaggaguugagagagc

SEQ ID NO: 2423763 - RNA, 19 nt, Homo sapiens
  misc_RNA (1)...(19): siRNA sense strand
uggguauguuagagcggaa

SEQ ID NO: 2423764 - RNA, 19 nt, Homo sapiens
  misc_RNA (1)...(19): siRNA sense strand
aguucaauuuguucggcaa

SEQ ID NO: 2423765 - RNA, 19 nt, Homo sapiens
  misc_RNA (1)...(19): siRNA sense strand
aguuuacaguuuacaggaa

SEQ ID NO: 2423766 - RNA, 19 nt, Homo sapiens
  misc_RNA (1)...(19): siRNA sense strand
cuuuauguucugacguuua

SEQ ID NO: 2423767 - RNA, 19 nt, Homo sapiens
  misc_RNA (1)...(19): siRNA sense strand
cggaaguucuggcuggcuu

SEQ ID NO: 2423768 - RNA, 19 nt, Homo sapiens
  misc_RNA (1)...(19): siRNA sense strand
gaaauuaauaguagcaccu

SEQ ID NO: 2423769 - RNA, 19 nt, Homo sapiens
  misc_RNA (1)...(19): siRNA sense strand
uggaacuacucuacggcau

SEQ ID NO: 2423770 - RNA, 19 nt, Homo sapiens
  misc_RNA (1)...(19): siRNA sense strand
agugaaacauggugcugca

SEQ ID NO: 2423771 - RNA, 19 nt, Homo sapiens
  misc_RNA (1)...(19): siRNA sense strand
gaagaaagcaucaggccaa

SEQ ID NO: 2423772 - RNA, 19 nt, Homo sapiens
  misc_RNA (1)...(19): siRNA sense strand
aguaagaagaacugugaaa

SEQ ID NO: 2423773 - RNA, 19 nt, Homo sapiens
  misc_RNA (1)...(19): siRNA sense strand
agaagagguagaagaguua

SEQ ID NO: 2423774 - RNA, 19 nt, Homo sapiens
  misc_RNA (1)...(19): siRNA sense strand
cugaagaagagguccaaua

SEQ ID NO: 2423775 - RNA, 19 nt, Homo sapiens
  misc_RNA (1)...(19): siRNA sense strand
ucggaaagaagguggacaa

SEQ ID NO: 2423776 - RNA, 19 nt, Homo sapiens
  misc_RNA (1)...(19): siRNA sense strand
gccaacaagugguggaaaa

SEQ ID NO: 2423777 - RNA, 19 nt, Homo sapiens
  misc_RNA (1)...(19): siRNA sense strand
ccaacuaaaagaagggaaa

SEQ ID NO: 2423778 - RNA, 19 nt, Homo sapiens
  misc_RNA (1)...(19): siRNA sense strand
cuuagauaccugacagaaa

SEQ ID NO: 2423779 - RNA, 19 nt, Homo sapiens
  misc_RNA (1)...(19): siRNA sense strand
guguaaaggcagaauuaau

SEQ ID NO: 2423780 - RNA, 19 nt, Homo sapiens
  misc_RNA (1)...(19): siRNA sense strand
auuuagaccaguugaguua

SEQ ID NO: 2423781 - RNA, 19 nt, Homo sapiens
  misc_RNA (1)...(19): siRNA sense strand
gggaaagaggaggaggaaa

SEQ ID NO: 2423782 - RNA, 19 nt, Homo sapiens
  misc_RNA (1)...(19): siRNA sense strand
ccuuggagguggugauaca

SEQ ID NO: 2423783 - RNA, 19 nt, Homo sapiens
  misc_RNA (1)...(19): siRNA sense strand
aggaaaugguggcugagaa

SEQ ID NO: 2423784 - RNA, 19 nt, Homo sapiens
  misc_RNA (1)...(19): siRNA sense strand
cagcaaagugagagaccuu

SEQ ID NO: 2423785 - RNA, 19 nt, Homo sapiens
  misc_RNA (1)...(19): siRNA sense strand
gagaacaggaggcggaaaa

SEQ ID NO: 2423786 - RNA, 19 nt, Homo sapiens
  misc_RNA (1)...(19): siRNA sense strand
cuguguaaaggcagaauua

SEQ ID NO: 2423787 - RNA, 19 nt, Homo sapiens
  misc_RNA (1)...(19): siRNA sense strand
aggaggaaaugguggcuga

SEQ ID NO: 2423788 - RNA, 19 nt, Homo sapiens
  misc_RNA (1)...(19): siRNA sense strand
ugaaacauaaggagaaaga

SEQ ID NO: 2423789 - RNA, 19 nt, Homo sapiens
  misc_RNA (1)...(19): siRNA sense strand
uggcuuaacaagugaugaa

SEQ ID NO: 2423790 - RNA, 19 nt, Homo sapiens
  misc_RNA (1)...(19): siRNA sense strand
aacaagugaugaaaggaaa

SEQ ID NO: 2423791 - RNA, 19 nt, Homo sapiens
  misc_RNA (1)...(19): siRNA sense strand
uaacaagugaugaaaggaa

SEQ ID NO: 2423792 - RNA, 19 nt, Homo sapiens
  misc_RNA (1)...(19): siRNA sense strand
ucagauaugaacaggagaa

SEQ ID NO: 2423793 - RNA, 19 nt, Homo sapiens
  misc_RNA (1)...(19): siRNA sense strand
uggaaaugacccuagcaaa

SEQ ID NO: 2423794 - RNA, 19 nt, Homo sapiens
  misc_RNA (1)...(19): siRNA sense strand
ucugaaacauaaggagaaa

SEQ ID NO: 2423795 - RNA, 19 nt, Homo sapiens
  misc_RNA (1)...(19): siRNA sense strand
cuaccagcucgaagaguua

SEQ ID NO: 2423796 - RNA, 19 nt, Homo sapiens
  misc_RNA (1)...(19): siRNA sense strand
gugaaaauguagcagaaau

SEQ ID NO: 2423797 - RNA, 19 nt, Homo sapiens
  misc_RNA (1)...(19): siRNA sense strand
acagagaaccagaguggau

SEQ ID NO: 2423798 - RNA, 19 nt, Homo sapiens
  misc_RNA (1)...(19): siRNA sense strand
ugacagaaguuauucccaa

SEQ ID NO: 2423799 - RNA, 19 nt, Homo sapiens
  misc_RNA (1)...(19): siRNA sense strand
aagacaaacaacagguauu

SEQ ID NO: 2423800 - RNA, 19 nt, Homo sapiens
  misc_RNA (1)...(19): siRNA sense strand
ugaaagaaagggauuggaa

SEQ ID NO: 2423801 - RNA, 19 nt, Homo sapiens
  misc_RNA (1)...(19): siRNA sense strand
uggcaauuguccaagaaaa

SEQ ID NO: 2423802 - RNA, 19 nt, Homo sapiens
  misc_RNA (1)...(19): siRNA sense strand
aaaggaaacucuuggagga

SEQ ID NO: 2423803 - RNA, 19 nt, Homo sapiens
  misc_RNA (1)...(19): siRNA sense strand
cugaaagcuuuauugggaa

SEQ ID NO: 2423804 - RNA, 19 nt, Homo sapiens
  misc_RNA (1)...(19): siRNA sense strand
cguaaggacaauugaucau

SEQ ID NO: 2423805 - RNA, 19 nt, Homo sapiens
  misc_RNA (1)...(19): siRNA sense strand
gcgaaggcccagacaccaa

SEQ ID NO: 2423806 - RNA, 19 nt, Homo sapiens
  misc_RNA (1)...(19): siRNA sense strand
gcugagaacaggaggcgga

SEQ ID NO: 2423807 - RNA, 19 nt, Homo sapiens
  misc_RNA (1)...(19): siRNA sense strand
aaagaaagggauuggaagu

SEQ ID NO: 2423808 - RNA, 19 nt, Homo sapiens
  misc_RNA (1)...(19): siRNA sense strand
agaaaggucuugaaggacu

SEQ ID NO: 2423809 - RNA, 19 nt, Homo sapiens
  misc_RNA (1)...(19): siRNA sense strand
uuuagagggucgagcaaaa

SEQ ID NO: 2423810 - RNA, 19 nt, Homo sapiens
  misc_RNA (1)...(19): siRNA sense strand
ggaaaugguggcugagaac

SEQ ID NO: 2423811 - RNA, 19 nt, Homo sapiens
  misc_RNA (1)...(19): siRNA sense strand
auacagugcagguuacaaa

SEQ ID NO: 2423812 - RNA, 19 nt, Homo sapiens
  misc_RNA (1)...(19): siRNA sense strand
aagcaaggaauaucugaaa

SEQ ID NO: 2423813 - RNA, 19 nt, Homo sapiens
  misc_RNA (1)...(19): siRNA sense strand
gugaggugauuaagaacuu

SEQ ID NO: 2423814 - RNA, 19 nt, Homo sapiens
  misc_RNA (1)...(19): siRNA sense strand
uguacagagacuugaagaa

SEQ ID NO: 2423815 - RNA, 19 nt, Homo sapiens
  misc_RNA (1)...(19): siRNA sense strand
ccaacucaguccagcagaa

SEQ ID NO: 2423816 - RNA, 19 nt, Homo sapiens
  misc_RNA (1)...(19): siRNA sense strand
acucaguccagcagaacaa

SEQ ID NO: 2423817 - RNA, 19 nt, Homo sapiens
  misc_RNA (1)...(19): siRNA sense strand
ggaagaaagcaucaggcca

SEQ ID NO: 2423818 - RNA, 19 nt, Homo sapiens
  misc_RNA (1)...(19): siRNA sense strand
aguuauacagugcagguua

SEQ ID NO: 2423819 - RNA, 19 nt, Homo sapiens
  misc_RNA (1)...(19): siRNA sense strand
acugauaagcacacagaga

SEQ ID NO: 2423820 - RNA, 19 nt, Homo sapiens
  misc_RNA (1)...(19): siRNA sense strand
cagauaugaacaggagaaa

SEQ ID NO: 2423821 - RNA, 19 nt, Homo sapiens
  misc_RNA (1)...(19): siRNA sense strand
gggaaauaacuguugaauc

SEQ ID NO: 2423822 - RNA, 19 nt, Homo sapiens
  misc_RNA (1)...(19): siRNA sense strand
ucuaugaaagaaagggauu

SEQ ID NO: 2423823 - RNA, 19 nt, Homo sapiens
  misc_RNA (1)...(19): siRNA sense strand
ccguggagcuacacuggaa

SEQ ID NO: 2423824 - RNA, 19 nt, Homo sapiens
  misc_RNA (1)...(19): siRNA sense strand
cuguugaaucacuuagaua

SEQ ID NO: 2423825 - RNA, 19 nt, Homo sapiens
  misc_RNA (1)...(19): siRNA sense strand
gggugggagaccagccuaa

SEQ ID NO: 2423826 - RNA, 19 nt, Homo sapiens
  misc_RNA (1)...(19): siRNA sense strand
auaugaaguugacagcaaa

SEQ ID NO: 2423827 - RNA, 19 nt, Homo sapiens
  misc_RNA (1)...(19): siRNA sense strand
cugugaaaauguagcagaa

SEQ ID NO: 2423828 - RNA, 19 nt, Homo sapiens
  misc_RNA (1)...(19): siRNA sense strand
gaacuuaccaagaagcuga

SEQ ID NO: 2423829 - RNA, 19 nt, Homo sapiens
  misc_RNA (1)...(19): siRNA sense strand
cauggaaguuacuggaguu

SEQ ID NO: 2423830 - RNA, 19 nt, Homo sapiens
  misc_RNA (1)...(19): siRNA sense strand
gcauauacccagagagccu

SEQ ID NO: 2423831 - RNA, 19 nt, Homo sapiens
  misc_RNA (1)...(19): siRNA sense strand
gagacagauugcagagcca

SEQ ID NO: 2423832 - RNA, 19 nt, Homo sapiens
  misc_RNA (1)...(19): siRNA sense strand
gcagaaucgcagagaccuu

SEQ ID NO: 2423833 - RNA, 19 nt, Homo sapiens
  misc_RNA (1)...(19): siRNA sense strand
ccauaaacuucggggagaa

SEQ ID NO: 2423834 - RNA, 19 nt, Homo sapiens
  misc_RNA (1)...(19): siRNA sense strand
ccagggugugugaggagaa

SEQ ID NO: 2423835 - RNA, 19 nt, Homo sapiens
  misc_RNA (1)...(19): siRNA sense strand
cagugagagcagagaccuu

SEQ ID NO: 2423836 - RNA, 19 nt, Homo sapiens
  misc_RNA (1)...(19): siRNA sense strand
gguggaagcugccugccaa

SEQ ID NO: 2423837 - RNA, 19 nt, Homo sapiens
  misc_RNA (1)...(19): siRNA sense strand
uuccaaguguugaggccaa

SEQ ID NO: 2423838 - RNA, 19 nt, Homo sapiens
  misc_RNA (1)...(19): siRNA sense strand
gugucauacuaucagaauu

SEQ ID NO: 2423839 - RNA, 19 nt, Homo sapiens
  misc_RNA (1)...(19): siRNA sense strand
aggacauggaugcccgaaa

SEQ ID NO: 2423840 - RNA, 19 nt, Homo sapiens
  misc_RNA (1)...(19): siRNA sense strand
gagcagaaucgcagagacc

SEQ ID NO: 2423841 - RNA, 19 nt, Homo sapiens
  misc_RNA (1)...(19): siRNA sense strand
aggcuguguaugaggacau

SEQ ID NO: 2423842 - RNA, 19 nt, Homo sapiens
  misc_RNA (1)...(19): siRNA sense strand
ucaccauauccaaagacaa

SEQ ID NO: 2423843 - RNA, 19 nt, Homo sapiens
  misc_RNA (1)...(19): siRNA sense strand
ccaucaacuacaagaaaua

SEQ ID NO: 2423844 - RNA, 19 nt, Homo sapiens
  misc_RNA (1)...(19): siRNA sense strand
acuucaagagagagaguua

SEQ ID NO: 2423845 - RNA, 19 nt, Homo sapiens
  misc_RNA (1)...(19): siRNA sense strand
caacgaagacagucggcua

SEQ ID NO: 2423846 - RNA, 19 nt, Homo sapiens
  misc_RNA (1)...(19): siRNA sense strand
caguauaugcagagagugu

SEQ ID NO: 2423847 - RNA, 19 nt, Homo sapiens
  misc_RNA (1)...(19): siRNA sense strand
ucgcauacccggaguaaca

SEQ ID NO: 2423848 - RNA, 19 nt, Homo sapiens
  misc_RNA (1)...(19): siRNA sense strand
gcucacacugcgaggguau

SEQ ID NO: 2423849 - RNA, 19 nt, Homo sapiens
  misc_RNA (1)...(19): siRNA sense strand
ugaaagagcuuguuggaug

SEQ ID NO: 2423850 - RNA, 19 nt, Homo sapiens
  misc_RNA (1)...(19): siRNA sense strand
aauaaagggaguucagcaa

SEQ ID NO: 2423851 - RNA, 19 nt, Homo sapiens
  misc_RNA (1)...(19): siRNA sense strand
gcaucagaggcuuggagaa

SEQ ID NO: 2423852 - RNA, 19 nt, Homo sapiens
  misc_RNA (1)...(19): siRNA sense strand
gccugaacacacugggaaa

SEQ ID NO: 2423853 - RNA, 19 nt, Homo sapiens
  misc_RNA (1)...(19): siRNA sense strand
ccuugaagaaguauacuaa

SEQ ID NO: 2423854 - RNA, 19 nt, Homo sapiens
  misc_RNA (1)...(19): siRNA sense strand
caguauggauuaagccaga

SEQ ID NO: 2423855 - RNA, 19 nt, Homo sapiens
  misc_RNA (1)...(19): siRNA sense strand
gauucugacuacugggaca

SEQ ID NO: 2423856 - RNA, 19 nt, Homo sapiens
  misc_RNA (1)...(19): siRNA sense strand
gccaaaagaccuagauuau

SEQ ID NO: 2423857 - RNA, 19 nt, Homo sapiens
  misc_RNA (1)...(19): siRNA sense strand
uuacagaaccagagccuga

SEQ ID NO: 2423858 - RNA, 19 nt, Homo sapiens
  misc_RNA (1)...(19): siRNA sense strand
cugagaggcaugauuguaa

SEQ ID NO: 2423859 - RNA, 19 nt, Homo sapiens
  misc_RNA (1)...(19): siRNA sense strand
caaugagacaguauggauu

SEQ ID NO: 2423860 - RNA, 19 nt, Homo sapiens
  misc_RNA (1)...(19): siRNA sense strand
guauaaagacgcuggcugu

SEQ ID NO: 2423861 - RNA, 19 nt, Homo sapiens
  misc_RNA (1)...(19): siRNA sense strand
agaacaugcagaaagaaau

SEQ ID NO: 2423862 - RNA, 19 nt, Homo sapiens
  misc_RNA (1)...(19): siRNA sense strand
cagcuuuaccaaugagaca

SEQ ID NO: 2423863 - RNA, 19 nt, Homo sapiens
  misc_RNA (1)...(19): siRNA sense strand
cccuagaguggaugagauu

SEQ ID NO: 2423864 - RNA, 19 nt, Homo sapiens
  misc_RNA (1)...(19): siRNA sense strand
uuccagagcccuugaagaa

SEQ ID NO: 2423865 - RNA, 19 nt, Homo sapiens
  misc_RNA (1)...(19): siRNA sense strand
uacaagaaauaaagggagu

SEQ ID NO: 2423866 - RNA, 19 nt, Homo sapiens
  misc_RNA (1)...(19): siRNA sense strand
gcucagauugauaggaaac

SEQ ID NO: 2423867 - RNA, 19 nt, Homo sapiens
  misc_RNA (1)...(19): siRNA sense strand
guauaugcagagaguguga

SEQ ID NO: 2423868 - RNA, 19 nt, Homo sapiens
  misc_RNA (1)...(19): siRNA sense strand
cugaaagacugaaaauaga

SEQ ID NO: 2423869 - RNA, 19 nt, Homo sapiens
  misc_RNA (1)...(19): siRNA sense strand
gggacauuucugagaggca

SEQ ID NO: 2423870 - RNA, 19 nt, Homo sapiens
  misc_RNA (1)...(19): siRNA sense strand
caacgauaugaaagagcuu

SEQ ID NO: 2423871 - RNA, 19 nt, Homo sapiens
  misc_RNA (1)...(19): siRNA sense strand
cugaguuacaagagaaaau

SEQ ID NO: 2423872 - RNA, 19 nt, Homo sapiens
  misc_RNA (1)...(19): siRNA sense strand
cuuaugugaugcagacaga

SEQ ID NO: 2423873 - RNA, 19 nt, Homo sapiens
  misc_RNA (1)...(19): siRNA sense strand
uucaagagagagaguuaua

SEQ ID NO: 2423874 - RNA, 19 nt, Homo sapiens
  misc_RNA (1)...(19): siRNA sense strand
aggcuacgguguucaguau

SEQ ID NO: 2423875 - RNA, 19 nt, Homo sapiens
  misc_RNA (1)...(19): siRNA sense strand
agcucagauugauaggaaa

SEQ ID NO: 2423876 - RNA, 19 nt, Homo sapiens
  misc_RNA (1)...(19): siRNA sense strand
aggagggagcuguagaaga

SEQ ID NO: 2423877 - RNA, 19 nt, Homo sapiens
  misc_RNA (1)...(19): siRNA sense strand
caaacagaacaugcagaaa

SEQ ID NO: 2423878 - RNA, 19 nt, Homo sapiens
  misc_RNA (1)...(19): siRNA sense strand
guggauggaagcacaguau

SEQ ID NO: 2423879 - RNA, 19 nt, Homo sapiens
  misc_RNA (1)...(19): siRNA sense strand
aguaugaggaaguugacau

SEQ ID NO: 2423880 - RNA, 19 nt, Homo sapiens
  misc_RNA (1)...(19): siRNA sense strand
ccaucaacuacaagaaaua

SEQ ID NO: 2423881 - RNA, 19 nt, Homo sapiens
  misc_RNA (1)...(19): siRNA sense strand
agucauugguggaggacau

SEQ ID NO: 2423882 - RNA, 19 nt, Homo sapiens
  misc_RNA (1)...(19): siRNA sense strand
acuucaagagagagaguua

SEQ ID NO: 2423883 - RNA, 19 nt, Homo sapiens
  misc_RNA (1)...(19): siRNA sense strand
caacgaagacagucggcua

SEQ ID NO: 2423884 - RNA, 19 nt, Homo sapiens
  misc_RNA (1)...(19): siRNA sense strand
caguauaugcagagagugu

SEQ ID NO: 2423885 - RNA, 19 nt, Homo sapiens
  misc_RNA (1)...(19): siRNA sense strand
ucgcauacccggaguaaca

SEQ ID NO: 2423886 - RNA, 19 nt, Homo sapiens
  misc_RNA (1)...(19): siRNA sense strand
gcucacacugcgaggguau

SEQ ID NO: 2423887 - RNA, 19 nt, Homo sapiens
  misc_RNA (1)...(19): siRNA sense strand
ugaaagagcuuguuggaug

SEQ ID NO: 2423888 - RNA, 19 nt, Homo sapiens
  misc_RNA (1)...(19): siRNA sense strand
aauaaagggaguucagcaa

SEQ ID NO: 2423889 - RNA, 19 nt, Homo sapiens
  misc_RNA (1)...(19): siRNA sense strand
gcaucagaggcuuggagaa

SEQ ID NO: 2423890 - RNA, 19 nt, Homo sapiens
  misc_RNA (1)...(19): siRNA sense strand
gccugaacacacugggaaa

SEQ ID NO: 2423891 - RNA, 19 nt, Homo sapiens
  misc_RNA (1)...(19): siRNA sense strand
ccuugaagaaguauacuaa

SEQ ID NO: 2423892 - RNA, 19 nt, Homo sapiens
  misc_RNA (1)...(19): siRNA sense strand
caguauggauuaagccaga

SEQ ID NO: 2423893 - RNA, 19 nt, Homo sapiens
  misc_RNA (1)...(19): siRNA sense strand
gauucugacuacugggaca

SEQ ID NO: 2423894 - RNA, 19 nt, Homo sapiens
  misc_RNA (1)...(19): siRNA sense strand
gccaaaagaccuagauuau

SEQ ID NO: 2423895 - RNA, 19 nt, Homo sapiens
  misc_RNA (1)...(19): siRNA sense strand
uuacagaaccagagccuga

SEQ ID NO: 2423896 - RNA, 19 nt, Homo sapiens
  misc_RNA (1)...(19): siRNA sense strand
cugagaggcaugauuguaa

SEQ ID NO: 2423897 - RNA, 19 nt, Homo sapiens
  misc_RNA (1)...(19): siRNA sense strand
caaugagacaguauggauu

SEQ ID NO: 2423898 - RNA, 19 nt, Homo sapiens
  misc_RNA (1)...(19): siRNA sense strand
guauaaagacgcuggcugu

SEQ ID NO: 2423899 - RNA, 19 nt, Homo sapiens
  misc_RNA (1)...(19): siRNA sense strand
agaacaugcagaaagaaau

SEQ ID NO: 2423900 - RNA, 19 nt, Homo sapiens
  misc_RNA (1)...(19): siRNA sense strand
cagcuuuaccaaugagaca

SEQ ID NO: 2423901 - RNA, 19 nt, Homo sapiens
  misc_RNA (1)...(19): siRNA sense strand
cccuagaguggaugagauu

SEQ ID NO: 2423902 - RNA, 19 nt, Homo sapiens
  misc_RNA (1)...(19): siRNA sense strand
uuccagagcccuugaagaa

SEQ ID NO: 2423903 - RNA, 19 nt, Homo sapiens
  misc_RNA (1)...(19): siRNA sense strand
uacaagaaauaaagggagu

SEQ ID NO: 2423904 - RNA, 19 nt, Homo sapiens
  misc_RNA (1)...(19): siRNA sense strand
cgugauagucauuggugga

SEQ ID NO: 2423905 - RNA, 19 nt, Homo sapiens
  misc_RNA (1)...(19): siRNA sense strand
gcucagauugauaggaaac

SEQ ID NO: 2423906 - RNA, 19 nt, Homo sapiens
  misc_RNA (1)...(19): siRNA sense strand
guauaugcagagaguguga

SEQ ID NO: 2423907 - RNA, 19 nt, Homo sapiens
  misc_RNA (1)...(19): siRNA sense strand
cugaaagacugaaaauaga

SEQ ID NO: 2423908 - RNA, 19 nt, Homo sapiens
  misc_RNA (1)...(19): siRNA sense strand
gggacauuucugagaggca

SEQ ID NO: 2423909 - RNA, 19 nt, Homo sapiens
  misc_RNA (1)...(19): siRNA sense strand
caacgauaugaaagagcuu

SEQ ID NO: 2423910 - RNA, 19 nt, Homo sapiens
  misc_RNA (1)...(19): siRNA sense strand
cugaguuacaagagaaaau

SEQ ID NO: 2423911 - RNA, 19 nt, Homo sapiens
  misc_RNA (1)...(19): siRNA sense strand
cuuaugugaugcagacaga

SEQ ID NO: 2423912 - RNA, 19 nt, Homo sapiens
  misc_RNA (1)...(19): siRNA sense strand
uucaagagagagaguuaua

SEQ ID NO: 2423913 - RNA, 19 nt, Homo sapiens
  misc_RNA (1)...(19): siRNA sense strand
aggcuacgguguucaguau

SEQ ID NO: 2423914 - RNA, 19 nt, Homo sapiens
  misc_RNA (1)...(19): siRNA sense strand
gauagucauugguggagga

SEQ ID NO: 2423915 - RNA, 19 nt, Homo sapiens
  misc_RNA (1)...(19): siRNA sense strand
agcucagauugauaggaaa

SEQ ID NO: 2423916 - RNA, 19 nt, Homo sapiens
  misc_RNA (1)...(19): siRNA sense strand
aggagggagcuguagaaga

SEQ ID NO: 2423917 - RNA, 19 nt, Homo sapiens
  misc_RNA (1)...(19): siRNA sense strand
caaacagaacaugcagaaa

SEQ ID NO: 2423918 - RNA, 19 nt, Homo sapiens
  misc_RNA (1)...(19): siRNA sense strand
guggauggaagcacaguau

SEQ ID NO: 2423919 - RNA, 19 nt, Homo sapiens
  misc_RNA (1)...(19): siRNA sense strand
aguaugaggaaguugacau

SEQ ID NO: 2423920 - RNA, 19 nt, Homo sapiens
  misc_RNA (1)...(19): siRNA sense strand
uaaagaaacuagagcguga

SEQ ID NO: 2423921 - RNA, 19 nt, Homo sapiens
  misc_RNA (1)...(19): siRNA sense strand
gcggaguggaggugcgaaa

SEQ ID NO: 2423922 - RNA, 19 nt, Homo sapiens
  misc_RNA (1)...(19): siRNA sense strand
aaauagagaaagaggcaga

SEQ ID NO: 2423923 - RNA, 19 nt, Homo sapiens
  misc_RNA (1)...(19): siRNA sense strand
agaagugaggagauggaua

SEQ ID NO: 2423924 - RNA, 19 nt, Homo sapiens
  misc_RNA (1)...(19): siRNA sense strand
uggcauugucacagaauau

SEQ ID NO: 2423925 - RNA, 19 nt, Homo sapiens
  misc_RNA (1)...(19): siRNA sense strand
gcuaaagaaacuagagcgu

SEQ ID NO: 2423926 - RNA, 19 nt, Homo sapiens
  misc_RNA (1)...(19): siRNA sense strand
cggccaucauucaagcaaa

SEQ ID NO: 2423927 - RNA, 19 nt, Homo sapiens
  misc_RNA (1)...(19): siRNA sense strand
uagagaaagaggcagaaau

SEQ ID NO: 2423928 - RNA, 19 nt, Homo sapiens
  misc_RNA (1)...(19): siRNA sense strand
guaacagaagugaggagau

SEQ ID NO: 2423929 - RNA, 19 nt, Homo sapiens
  misc_RNA (1)...(19): siRNA sense strand
guuuaaagaugugggagca

SEQ ID NO: 2423930 - RNA, 19 nt, Homo sapiens
  misc_RNA (1)...(19): siRNA sense strand
aggagauggauauggauca

SEQ ID NO: 2423931 - RNA, 19 nt, Homo sapiens
  misc_RNA (1)...(19): siRNA sense strand
caaaauagagaaagaggca

SEQ ID NO: 2423932 - RNA, 19 nt, Homo sapiens
  misc_RNA (1)...(19): siRNA sense strand
aggagguggcuguaaagaa

SEQ ID NO: 2423933 - RNA, 19 nt, Homo sapiens
  misc_RNA (1)...(19): siRNA sense strand
agucaagaaacguuguuau

SEQ ID NO: 2423934 - RNA, 19 nt, Homo sapiens
  misc_RNA (1)...(19): siRNA sense strand
cugauguagccaaaggaau

SEQ ID NO: 2423935 - RNA, 19 nt, Homo sapiens
  misc_RNA (1)...(19): siRNA sense strand
ggugcgaaauugaggcaac

SEQ ID NO: 2423936 - RNA, 19 nt, Homo sapiens
  misc_RNA (1)...(19): siRNA sense strand
uggaguaauucuugaaccu

SEQ ID NO: 2423937 - RNA, 19 nt, Homo sapiens
  misc_RNA (1)...(19): siRNA sense strand
aggacaaggagguggcugu

SEQ ID NO: 2423938 - RNA, 19 nt, Homo sapiens
  misc_RNA (1)...(19): siRNA sense strand
cuguaaagaagcuccucaa

SEQ ID NO: 2423939 - RNA, 19 nt, Homo sapiens
  misc_RNA (1)...(19): siRNA sense strand
gcuccucaaaauagagaaa

SEQ ID NO: 2423940 - RNA, 19 nt, Homo sapiens
  misc_RNA (1)...(19): siRNA sense strand
gggagaugcuaacaaggga

SEQ ID NO: 2423941 - RNA, 19 nt, Homo sapiens
  misc_RNA (1)...(19): siRNA sense strand
uaaagaugugggagcaaaa

SEQ ID NO: 2423942 - RNA, 19 nt, Homo sapiens
  misc_RNA (1)...(19): siRNA sense strand
ccccagaaguuuugcugaa

SEQ ID NO: 2423943 - RNA, 19 nt, Homo sapiens
  misc_RNA (1)...(19): siRNA sense strand
gcuuuaaggagcaggagcu

SEQ ID NO: 2423944 - RNA, 19 nt, Homo sapiens
  misc_RNA (1)...(19): siRNA sense strand
uaaagaaacuagagcguga

SEQ ID NO: 2423945 - RNA, 19 nt, Homo sapiens
  misc_RNA (1)...(19): siRNA sense strand
gcggaguggaggugcgaaa

SEQ ID NO: 2423946 - RNA, 19 nt, Homo sapiens
  misc_RNA (1)...(19): siRNA sense strand
aaauagagaaagaggcaga

SEQ ID NO: 2423947 - RNA, 19 nt, Homo sapiens
  misc_RNA (1)...(19): siRNA sense strand
agaagugaggagauggaua

SEQ ID NO: 2423948 - RNA, 19 nt, Homo sapiens
  misc_RNA (1)...(19): siRNA sense strand
uggcauugucacagaauau

SEQ ID NO: 2423949 - RNA, 19 nt, Homo sapiens
  misc_RNA (1)...(19): siRNA sense strand
gcuaaagaaacuagagcgu

SEQ ID NO: 2423950 - RNA, 19 nt, Homo sapiens
  misc_RNA (1)...(19): siRNA sense strand
cggccaucauucaagcaaa

SEQ ID NO: 2423951 - RNA, 19 nt, Homo sapiens
  misc_RNA (1)...(19): siRNA sense strand
uagagaaagaggcagaaau

SEQ ID NO: 2423952 - RNA, 19 nt, Homo sapiens
  misc_RNA (1)...(19): siRNA sense strand
guaacagaagugaggagau

SEQ ID NO: 2423953 - RNA, 19 nt, Homo sapiens
  misc_RNA (1)...(19): siRNA sense strand
guuuaaagaugugggagca

SEQ ID NO: 2423954 - RNA, 19 nt, Homo sapiens
  misc_RNA (1)...(19): siRNA sense strand
aggagauggauauggauca

SEQ ID NO: 2423955 - RNA, 19 nt, Homo sapiens
  misc_RNA (1)...(19): siRNA sense strand
caaaauagagaaagaggca

SEQ ID NO: 2423956 - RNA, 19 nt, Homo sapiens
  misc_RNA (1)...(19): siRNA sense strand
aggagguggcuguaaagaa

SEQ ID NO: 2423957 - RNA, 19 nt, Homo sapiens
  misc_RNA (1)...(19): siRNA sense strand
agucaagaaacguuguuau

SEQ ID NO: 2423958 - RNA, 19 nt, Homo sapiens
  misc_RNA (1)...(19): siRNA sense strand
cugauguagccaaaggaau

SEQ ID NO: 2423959 - RNA, 19 nt, Homo sapiens
  misc_RNA (1)...(19): siRNA sense strand
ggugcgaaauugaggcaac

SEQ ID NO: 2423960 - RNA, 19 nt, Homo sapiens
  misc_RNA (1)...(19): siRNA sense strand
uggaguaauucuugaaccu

SEQ ID NO: 2423961 - RNA, 19 nt, Homo sapiens
  misc_RNA (1)...(19): siRNA sense strand
aggacaaggagguggcugu

SEQ ID NO: 2423962 - RNA, 19 nt, Homo sapiens
  misc_RNA (1)...(19): siRNA sense strand
cuguaaagaagcuccucaa

SEQ ID NO: 2423963 - RNA, 19 nt, Homo sapiens
  misc_RNA (1)...(19): siRNA sense strand
gcuccucaaaauagagaaa

SEQ ID NO: 2423964 - RNA, 19 nt, Homo sapiens
  misc_RNA (1)...(19): siRNA sense strand
gggagaugcuaacaaggga

SEQ ID NO: 2423965 - RNA, 19 nt, Homo sapiens
  misc_RNA (1)...(19): siRNA sense strand
uaaagaugugggagcaaaa

SEQ ID NO: 2423966 - RNA, 19 nt, Homo sapiens
  misc_RNA (1)...(19): siRNA sense strand
ccccagaaguuuugcugaa

SEQ ID NO: 2423967 - RNA, 19 nt, Homo sapiens
  misc_RNA (1)...(19): siRNA sense strand
gcuuuaaggagcaggagcu

SEQ ID NO: 2423968 - RNA, 19 nt, Homo sapiens
  misc_RNA (1)...(19): siRNA sense strand
gcaucaaauucgacagcua

SEQ ID NO: 2423969 - RNA, 19 nt, Homo sapiens
  misc_RNA (1)...(19): siRNA sense strand
cuauuagaguagauggaaa

SEQ ID NO: 2423970 - RNA, 19 nt, Homo sapiens
  misc_RNA (1)...(19): siRNA sense strand
uugaaaagguggaugaaaa

SEQ ID NO: 2423971 - RNA, 19 nt, Homo sapiens
  misc_RNA (1)...(19): siRNA sense strand
augugaaagagaagagaaa

SEQ ID NO: 2423972 - RNA, 19 nt, Homo sapiens
  misc_RNA (1)...(19): siRNA sense strand
uguuagaacuucagcagaa

SEQ ID NO: 2423973 - RNA, 19 nt, Homo sapiens
  misc_RNA (1)...(19): siRNA sense strand
accuaaagcuggaaagauu

SEQ ID NO: 2423974 - RNA, 19 nt, Homo sapiens
  misc_RNA (1)...(19): siRNA sense strand
augaagaaguugugcucaa

SEQ ID NO: 2423975 - RNA, 19 nt, Homo sapiens
  misc_RNA (1)...(19): siRNA sense strand
ggaugaaaauacuaggaaa

SEQ ID NO: 2423976 - RNA, 19 nt, Homo sapiens
  misc_RNA (1)...(19): siRNA sense strand
ggcuggaaguagaaauaaa

SEQ ID NO: 2423977 - RNA, 19 nt, Homo sapiens
  misc_RNA (1)...(19): siRNA sense strand
agaaaugcuaagagaagua

SEQ ID NO: 2423978 - RNA, 19 nt, Homo sapiens
  misc_RNA (1)...(19): siRNA sense strand
aggauaagaccgauggcaa

SEQ ID NO: 2423979 - RNA, 19 nt, Homo sapiens
  misc_RNA (1)...(19): siRNA sense strand
caucugaggcauagggaga

SEQ ID NO: 2423980 - RNA, 19 nt, Homo sapiens
  misc_RNA (1)...(19): siRNA sense strand
gauacaaaucagcgacuua

SEQ ID NO: 2423981 - RNA, 19 nt, Homo sapiens
  misc_RNA (1)...(19): siRNA sense strand
ggaagaacgaauugauaca

SEQ ID NO: 2423982 - RNA, 19 nt, Homo sapiens
  misc_RNA (1)...(19): siRNA sense strand
gggaugaagaagaggagga

SEQ ID NO: 2423983 - RNA, 19 nt, Homo sapiens
  misc_RNA (1)...(19): siRNA sense strand
cugaagaggaggaagauca

SEQ ID NO: 2423984 - RNA, 19 nt, Homo sapiens
  misc_RNA (1)...(19): siRNA sense strand
acauuaaaccagucugaua

SEQ ID NO: 2423985 - RNA, 19 nt, Homo sapiens
  misc_RNA (1)...(19): siRNA sense strand
ggucaagcacuaaaggaau

SEQ ID NO: 2423986 - RNA, 19 nt, Homo sapiens
  misc_RNA (1)...(19): siRNA sense strand
gggucaaggugguccaaga

SEQ ID NO: 2423987 - RNA, 19 nt, Homo sapiens
  misc_RNA (1)...(19): siRNA sense strand
ggagcuaagcagucacaua

SEQ ID NO: 2423988 - RNA, 19 nt, Homo sapiens
  misc_RNA (1)...(19): siRNA sense strand
gauuaaguguagaugccaa

SEQ ID NO: 2423989 - RNA, 19 nt, Homo sapiens
  misc_RNA (1)...(19): siRNA sense strand
gcaguugagaguugugaaa

SEQ ID NO: 2423990 - RNA, 19 nt, Homo sapiens
  misc_RNA (1)...(19): siRNA sense strand
aggauaaagaugagcacau

SEQ ID NO: 2423991 - RNA, 19 nt, Homo sapiens
  misc_RNA (1)...(19): siRNA sense strand
aaacguuggaagagaguau

SEQ ID NO: 2423992 - RNA, 19 nt, Homo sapiens
  misc_RNA (1)...(19): siRNA sense strand
cuacaugggaugaaauauu

SEQ ID NO: 2423993 - RNA, 19 nt, Homo sapiens
  misc_RNA (1)...(19): siRNA sense strand
cggcaaaauagaacugaaa

SEQ ID NO: 2423994 - RNA, 19 nt, Homo sapiens
  misc_RNA (1)...(19): siRNA sense strand
gucccaaaguuaaggaaga

SEQ ID NO: 2423995 - RNA, 19 nt, Homo sapiens
  misc_RNA (1)...(19): siRNA sense strand
ccaacauucucauggaaaa

SEQ ID NO: 2423996 - RNA, 19 nt, Homo sapiens
  misc_RNA (1)...(19): siRNA sense strand
gggaagacagaaaugcuaa

SEQ ID NO: 2423997 - RNA, 19 nt, Homo sapiens
  misc_RNA (1)...(19): siRNA sense strand
gauaugaacaagagagauc

SEQ ID NO: 2423998 - RNA, 19 nt, Homo sapiens
  misc_RNA (1)...(19): siRNA sense strand
cagcaacagcaucgauuaa

SEQ ID NO: 2423999 - RNA, 19 nt, Homo sapiens
  misc_RNA (1)...(19): siRNA sense strand
agacagauguuuaugcaga

SEQ ID NO: 2424000 - RNA, 19 nt, Homo sapiens
  misc_RNA (1)...(19): siRNA sense strand
agaucagagucacaggaaa

SEQ ID NO: 2424001 - RNA, 19 nt, Homo sapiens
  misc_RNA (1)...(19): siRNA sense strand
aagagagauccaagauuaa

SEQ ID NO: 2424002 - RNA, 19 nt, Homo sapiens
  misc_RNA (1)...(19): siRNA sense strand
caguugaagaauugaaaca

SEQ ID NO: 2424003 - RNA, 19 nt, Homo sapiens
  misc_RNA (1)...(19): siRNA sense strand
cuccaaugacaguaggaaa

SEQ ID NO: 2424004 - RNA, 19 nt, Homo sapiens
  misc_RNA (1)...(19): siRNA sense strand
caaaggagaauguagaaaa

SEQ ID NO: 2424005 - RNA, 19 nt, Homo sapiens
  misc_RNA (1)...(19): siRNA sense strand
auggaaaucugguugggaa

SEQ ID NO: 2424006 - RNA, 19 nt, Homo sapiens
  misc_RNA (1)...(19): siRNA sense strand
gugaaauuacacaggauga

SEQ ID NO: 2424007 - RNA, 19 nt, Homo sapiens
  misc_RNA (1)...(19): siRNA sense strand
cguugguacuacaguuuaa

SEQ ID NO: 2424008 - RNA, 19 nt, Homo sapiens
  misc_RNA (1)...(19): siRNA sense strand
uuaacagacuggauagaau

SEQ ID NO: 2424009 - RNA, 19 nt, Homo sapiens
  misc_RNA (1)...(19): siRNA sense strand
cagcaagacaccaguugaa

SEQ ID NO: 2424010 - RNA, 19 nt, Homo sapiens
  misc_RNA (1)...(19): siRNA sense strand
uccaauuguuccugauaua

SEQ ID NO: 2424011 - RNA, 19 nt, Homo sapiens
  misc_RNA (1)...(19): siRNA sense strand
ccaacaaggagguggaaug

SEQ ID NO: 2424012 - RNA, 19 nt, Homo sapiens
  misc_RNA (1)...(19): siRNA sense strand
caguguuacucuuguggaa

SEQ ID NO: 2424013 - RNA, 19 nt, Homo sapiens
  misc_RNA (1)...(19): siRNA sense strand
agaggaaagcauagcaaca

SEQ ID NO: 2424014 - RNA, 19 nt, Homo sapiens
  misc_RNA (1)...(19): siRNA sense strand
gaucagagucacaggaaag

SEQ ID NO: 2424015 - RNA, 19 nt, Homo sapiens
  misc_RNA (1)...(19): siRNA sense strand
ggauccaaggcgaaugaaa

SEQ ID NO: 2424016 - RNA, 19 nt, Homo sapiens
  misc_RNA (1)...(19): siRNA sense strand
gauccaaggcgaaugaaaa

SEQ ID NO: 2424017 - RNA, 19 nt, Homo sapiens
  misc_RNA (1)...(19): siRNA sense strand
gcucaaaacucaagaggcu

SEQ ID NO: 2424018 - RNA, 19 nt, Homo sapiens
  misc_RNA (1)...(19): siRNA sense strand
uggucaagcacuaaaggaa

SEQ ID NO: 2424019 - RNA, 19 nt, Homo sapiens
  misc_RNA (1)...(19): siRNA sense strand
aggcacaagauuugacaau

SEQ ID NO: 2424020 - RNA, 19 nt, Homo sapiens
  misc_RNA (1)...(19): siRNA sense strand
cugauaugaacaagagaga

SEQ ID NO: 2424021 - RNA, 19 nt, Homo sapiens
  misc_RNA (1)...(19): siRNA sense strand
acaaguaagugaaguaacu

SEQ ID NO: 2424022 - RNA, 19 nt, Homo sapiens
  misc_RNA (1)...(19): siRNA sense strand
ggaugaagaagaggaggaa

SEQ ID NO: 2424023 - RNA, 19 nt, Homo sapiens
  misc_RNA (1)...(19): siRNA sense strand
aaguuaaggaagaacgaau

SEQ ID NO: 2424024 - RNA, 19 nt, Homo sapiens
  misc_RNA (1)...(19): siRNA sense strand
gagaagagauaggcgguca

SEQ ID NO: 2424025 - RNA, 19 nt, Homo sapiens
  misc_RNA (1)...(19): siRNA sense strand
ccaaaggagaauguagaaa

SEQ ID NO: 2424026 - RNA, 19 nt, Homo sapiens
  misc_RNA (1)...(19): siRNA sense strand
caagaggcugcuaaagaaa

SEQ ID NO: 2424027 - RNA, 19 nt, Homo sapiens
  misc_RNA (1)...(19): siRNA sense strand
uacaauaacagaagaguca

SEQ ID NO: 2424028 - RNA, 19 nt, Homo sapiens
  misc_RNA (1)...(19): siRNA sense strand
ugccaagauuugauggauu

SEQ ID NO: 2424029 - RNA, 19 nt, Homo sapiens
  misc_RNA (1)...(19): siRNA sense strand
ugucagagucaauucauua

SEQ ID NO: 2424030 - RNA, 19 nt, Homo sapiens
  misc_RNA (1)...(19): siRNA sense strand
ggaaaagaucagagucaca

SEQ ID NO: 2424031 - RNA, 19 nt, Homo sapiens
  misc_RNA (1)...(19): siRNA sense strand
aagaugaugaugugaaaga

SEQ ID NO: 2424032 - RNA, 19 nt, Homo sapiens
  misc_RNA (1)...(19): siRNA sense strand
cagacuggcuggaaguaga

SEQ ID NO: 2424033 - RNA, 19 nt, Homo sapiens
  misc_RNA (1)...(19): siRNA sense strand
gguugaugaacauaguaaa

SEQ ID NO: 2424034 - RNA, 19 nt, Homo sapiens
  misc_RNA (1)...(19): siRNA sense strand
gucaagcacuaaaggaauu

SEQ ID NO: 2424035 - RNA, 19 nt, Homo sapiens
  misc_RNA (1)...(19): siRNA sense strand
gagugaacguuuagcaucu

SEQ ID NO: 2424036 - RNA, 19 nt, Homo sapiens
  misc_RNA (1)...(19): siRNA sense strand
augaagaagaggaggaaug

SEQ ID NO: 2424037 - RNA, 19 nt, Homo sapiens
  misc_RNA (1)...(19): siRNA sense strand
guugaaaaccccuugaaua

SEQ ID NO: 2424038 - RNA, 19 nt, Homo sapiens
  misc_RNA (1)...(19): siRNA sense strand
cagauaaaccauuuguaga

SEQ ID NO: 2424039 - RNA, 19 nt, Homo sapiens
  misc_RNA (1)...(19): siRNA sense strand
cagaguuaaugcagggcuu

SEQ ID NO: 2424040 - RNA, 19 nt, Homo sapiens
  misc_RNA (1)...(19): siRNA sense strand
ccaugaguuuacaggaaca

SEQ ID NO: 2424041 - RNA, 19 nt, Homo sapiens
  misc_RNA (1)...(19): siRNA sense strand
gaaaagaagcugaaggucu

SEQ ID NO: 2424042 - RNA, 19 nt, Homo sapiens
  misc_RNA (1)...(19): siRNA sense strand
agaccauauuugagaucga

SEQ ID NO: 2424043 - RNA, 19 nt, Homo sapiens
  misc_RNA (1)...(19): siRNA sense strand
cgcaaagacagccuggaaa

SEQ ID NO: 2424044 - RNA, 19 nt, Homo sapiens
  misc_RNA (1)...(19): siRNA sense strand
uggcaaagacacagagcag

SEQ ID NO: 2424045 - RNA, 19 nt, Homo sapiens
  misc_RNA (1)...(19): siRNA sense strand
ugagugaucucuaugguga

SEQ ID NO: 2424046 - RNA, 19 nt, Homo sapiens
  misc_RNA (1)...(19): siRNA sense strand
agauggaccuagugguuuu

SEQ ID NO: 2424047 - RNA, 19 nt, Homo sapiens
  misc_RNA (1)...(19): siRNA sense strand
ccggcgacucucuggcaaa

SEQ ID NO: 2424048 - RNA, 19 nt, Homo sapiens
  misc_RNA (1)...(19): siRNA sense strand
gggacaugggaguaggaaa

SEQ ID NO: 2424049 - RNA, 19 nt, Homo sapiens
  misc_RNA (1)...(19): siRNA sense strand
aaucgaaguuaguggccaa

SEQ ID NO: 2424050 - RNA, 19 nt, Homo sapiens
  misc_RNA (1)...(19): siRNA sense strand
aagcagauuuggaggcaca

SEQ ID NO: 2424051 - RNA, 19 nt, Homo sapiens
  misc_RNA (1)...(19): siRNA sense strand
uuacauaugaagaagccaa

SEQ ID NO: 2424052 - RNA, 19 nt, Homo sapiens
  misc_RNA (1)...(19): siRNA sense strand
cuacagaggagcugcggga

SEQ ID NO: 2424053 - RNA, 19 nt, Homo sapiens
  misc_RNA (1)...(19): siRNA sense strand
auuuggaggcacagagaga

SEQ ID NO: 2424054 - RNA, 19 nt, Homo sapiens
  misc_RNA (1)...(19): siRNA sense strand
cacuagaagaaguacauau

SEQ ID NO: 2424055 - RNA, 19 nt, Homo sapiens
  misc_RNA (1)...(19): siRNA sense strand
cagagaaagaagaaagaga

SEQ ID NO: 2424056 - RNA, 19 nt, Homo sapiens
  misc_RNA (1)...(19): siRNA sense strand
aggagaagcaagaaagaga

SEQ ID NO: 2424057 - RNA, 19 nt, Homo sapiens
  misc_RNA (1)...(19): siRNA sense strand
aauuagggucugaaggaaa

SEQ ID NO: 2424058 - RNA, 19 nt, Homo sapiens
  misc_RNA (1)...(19): siRNA sense strand
aagaaagagaagaaagaga

SEQ ID NO: 2424059 - RNA, 19 nt, Homo sapiens
  misc_RNA (1)...(19): siRNA sense strand
ccgaagaaccugaucguga

SEQ ID NO: 2424060 - RNA, 19 nt, Homo sapiens
  misc_RNA (1)...(19): siRNA sense strand
auacuaagaaugaggucaa

SEQ ID NO: 2424061 - RNA, 19 nt, Homo sapiens
  misc_RNA (1)...(19): siRNA sense strand
gucacgaaguagagaaaga

SEQ ID NO: 2424062 - RNA, 19 nt, Homo sapiens
  misc_RNA (1)...(19): siRNA sense strand
gcaauuaaaagaagagaga

SEQ ID NO: 2424063 - RNA, 19 nt, Homo sapiens
  misc_RNA (1)...(19): siRNA sense strand
gaaaacaacacaugggcua

SEQ ID NO: 2424064 - RNA, 19 nt, Homo sapiens
  misc_RNA (1)...(19): siRNA sense strand
acauuaaaucugaagguga

SEQ ID NO: 2424065 - RNA, 19 nt, Homo sapiens
  misc_RNA (1)...(19): siRNA sense strand
gacgaagggaagaggaaga

SEQ ID NO: 2424066 - RNA, 19 nt, Homo sapiens
  misc_RNA (1)...(19): siRNA sense strand
ucauauaagcacaggagca

SEQ ID NO: 2424067 - RNA, 19 nt, Homo sapiens
  misc_RNA (1)...(19): siRNA sense strand
cgaaagucauauaagcaca

SEQ ID NO: 2424068 - RNA, 19 nt, Homo sapiens
  misc_RNA (1)...(19): siRNA sense strand
aggucacgaaguagagaaa

SEQ ID NO: 2424069 - RNA, 19 nt, Homo sapiens
  misc_RNA (1)...(19): siRNA sense strand
gagaaagaaaagaggggau

SEQ ID NO: 2424070 - RNA, 19 nt, Homo sapiens
  misc_RNA (1)...(19): siRNA sense strand
gauagaaaauccaaggaga

SEQ ID NO: 2424071 - RNA, 19 nt, Homo sapiens
  misc_RNA (1)...(19): siRNA sense strand
aagacgaagggaagaggaa

SEQ ID NO: 2424072 - RNA, 19 nt, Homo sapiens
  misc_RNA (1)...(19): siRNA sense strand
cauauaagcacaggagcaa

SEQ ID NO: 2424073 - RNA, 19 nt, Homo sapiens
  misc_RNA (1)...(19): siRNA sense strand
gauugaagaauuagggucu

SEQ ID NO: 2424074 - RNA, 19 nt, Homo sapiens
  misc_RNA (1)...(19): siRNA sense strand
acgaagaagcagaagccau

SEQ ID NO: 2424075 - RNA, 19 nt, Homo sapiens
  misc_RNA (1)...(19): siRNA sense strand
agagaaaggaaaagacgaa

SEQ ID NO: 2424076 - RNA, 19 nt, Homo sapiens
  misc_RNA (1)...(19): siRNA sense strand
gagaaagaagaaagagaag

SEQ ID NO: 2424077 - RNA, 19 nt, Homo sapiens
  misc_RNA (1)...(19): siRNA sense strand
cgugacagagaaagaagaa

SEQ ID NO: 2424078 - RNA, 19 nt, Homo sapiens
  misc_RNA (1)...(19): siRNA sense strand
aacacugaaucgaaggaaa

SEQ ID NO: 2424079 - RNA, 19 nt, Homo sapiens
  misc_RNA (1)...(19): siRNA sense strand
aaggaaaagacgaagggaa

SEQ ID NO: 2424080 - RNA, 19 nt, Homo sapiens
  misc_RNA (1)...(19): siRNA sense strand
auagaaaauccaaggagaa

SEQ ID NO: 2424081 - RNA, 19 nt, Homo sapiens
  misc_RNA (1)...(19): siRNA sense strand
aaauccaaggagaaagaaa

SEQ ID NO: 2424082 - RNA, 19 nt, Homo sapiens
  misc_RNA (1)...(19): siRNA sense strand
gagagagaaagggaagaaa

SEQ ID NO: 2424083 - RNA, 19 nt, Homo sapiens
  misc_RNA (1)...(19): siRNA sense strand
agagaaagaaggcggagca

SEQ ID NO: 2424084 - RNA, 19 nt, Homo sapiens
  misc_RNA (1)...(19): siRNA sense strand
aagcagaagccaugaucga

SEQ ID NO: 2424085 - RNA, 19 nt, Homo sapiens
  misc_RNA (1)...(19): siRNA sense strand
ugaaggaaaaguagaagaa

SEQ ID NO: 2424086 - RNA, 19 nt, Homo sapiens
  misc_RNA (1)...(19): siRNA sense strand
aagucgggacagagaacaa

SEQ ID NO: 2424087 - RNA, 19 nt, Homo sapiens
  misc_RNA (1)...(19): siRNA sense strand
cgagaaaagcagagugaag

SEQ ID NO: 2424088 - RNA, 19 nt, Homo sapiens
  misc_RNA (1)...(19): siRNA sense strand
aauccaaggagaaagaaaa

SEQ ID NO: 2424089 - RNA, 19 nt, Homo sapiens
  misc_RNA (1)...(19): siRNA sense strand
aggaaaagacgaagggaag

SEQ ID NO: 2424090 - RNA, 19 nt, Homo sapiens
  misc_RNA (1)...(19): siRNA sense strand
gcaaaagucgggacagaga

SEQ ID NO: 2424091 - RNA, 19 nt, Homo sapiens
  misc_RNA (1)...(19): siRNA sense strand
aagggaagaggaagaaaga

SEQ ID NO: 2424092 - RNA, 19 nt, Homo sapiens
  misc_RNA (1)...(19): siRNA sense strand
cgggaucgaaagucauaua

SEQ ID NO: 2424093 - RNA, 19 nt, Homo sapiens
  misc_RNA (1)...(19): siRNA sense strand
cugaaucgaaggaaaguga

SEQ ID NO: 2424094 - RNA, 19 nt, Homo sapiens
  misc_RNA (1)...(19): siRNA sense strand
ugaugaaauuaguugagca

SEQ ID NO: 2424095 - RNA, 19 nt, Homo sapiens
  misc_RNA (1)...(19): siRNA sense strand
cagagaacaagauagaaaa

SEQ ID NO: 2424096 - RNA, 19 nt, Homo sapiens
  misc_RNA (1)...(19): siRNA sense strand
uagaaaauccaaggagaaa

SEQ ID NO: 2424097 - RNA, 19 nt, Homo sapiens
  misc_RNA (1)...(19): siRNA sense strand
cuaugaugaagcagagaaa

SEQ ID NO: 2424098 - RNA, 19 nt, Homo sapiens
  misc_RNA (1)...(19): siRNA sense strand
gaaaugauguugauggcau

SEQ ID NO: 2424099 - RNA, 19 nt, Homo sapiens
  misc_RNA (1)...(19): siRNA sense strand
gggauggauaucugagaau

SEQ ID NO: 2424100 - RNA, 19 nt, Homo sapiens
  misc_RNA (1)...(19): siRNA sense strand
gagaaaacagcaagcaaca

SEQ ID NO: 2424101 - RNA, 19 nt, Homo sapiens
  misc_RNA (1)...(19): siRNA sense strand
acuccuaagggauggauau

SEQ ID NO: 2424102 - RNA, 19 nt, Homo sapiens
  misc_RNA (1)...(19): siRNA sense strand
uggcauggaccugggcaaa

SEQ ID NO: 2424103 - RNA, 19 nt, Homo sapiens
  misc_RNA (1)...(19): siRNA sense strand
gguuuauguccuuugucaa

SEQ ID NO: 2424104 - RNA, 19 nt, Homo sapiens
  misc_RNA (1)...(19): siRNA sense strand
cagagaaaacagcaagcaa

SEQ ID NO: 2424105 - RNA, 19 nt, Homo sapiens
  misc_RNA (1)...(19): siRNA sense strand
ugggaaaguggauggaagu

SEQ ID NO: 2424106 - RNA, 19 nt, Homo sapiens
  misc_RNA (1)...(19): siRNA sense strand
cagccaucaugaaggaagu

SEQ ID NO: 2424107 - RNA, 19 nt, Homo sapiens
  misc_RNA (1)...(19): siRNA sense strand
gaguaaauucuguggaaau

SEQ ID NO: 2424108 - RNA, 19 nt, Homo sapiens
  misc_RNA (1)...(19): siRNA sense strand
ggaaagaauaagaagacau

SEQ ID NO: 2424109 - RNA, 19 nt, Homo sapiens
  misc_RNA (1)...(19): siRNA sense strand
agaugaagguagaggcaca

SEQ ID NO: 2424110 - RNA, 19 nt, Homo sapiens
  misc_RNA (1)...(19): siRNA sense strand
cuguggaaaugauggauaa

SEQ ID NO: 2424111 - RNA, 19 nt, Homo sapiens
  misc_RNA (1)...(19): siRNA sense strand
ccaagaaacagcaagacaa

SEQ ID NO: 2424112 - RNA, 19 nt, Homo sapiens
  misc_RNA (1)...(19): siRNA sense strand
augagaaagaagaggguau

SEQ ID NO: 2424113 - RNA, 19 nt, Homo sapiens
  misc_RNA (1)...(19): siRNA sense strand
caaagagguacuacagaaa

SEQ ID NO: 2424114 - RNA, 19 nt, Homo sapiens
  misc_RNA (1)...(19): siRNA sense strand
guggaagagcaaauggaaa

SEQ ID NO: 2424115 - RNA, 19 nt, Homo sapiens
  misc_RNA (1)...(19): siRNA sense strand
guuacaaagggaugauuua

SEQ ID NO: 2424116 - RNA, 19 nt, Homo sapiens
  misc_RNA (1)...(19): siRNA sense strand
ccauagagugcuaauuaaa

SEQ ID NO: 2424117 - RNA, 19 nt, Homo sapiens
  misc_RNA (1)...(19): siRNA sense strand
ucauaaaccagaagagcau

SEQ ID NO: 2424118 - RNA, 19 nt, Homo sapiens
  misc_RNA (1)...(19): siRNA sense strand
agaaccuguuucagagaua

SEQ ID NO: 2424119 - RNA, 19 nt, Homo sapiens
  misc_RNA (1)...(19): siRNA sense strand
ggccaauaaguaugauaaa

SEQ ID NO: 2424120 - RNA, 19 nt, Homo sapiens
  misc_RNA (1)...(19): siRNA sense strand
ggaugaaagccauguuaga

SEQ ID NO: 2424121 - RNA, 19 nt, Homo sapiens
  misc_RNA (1)...(19): siRNA sense strand
caguuggaacaguggauua

SEQ ID NO: 2424122 - RNA, 19 nt, Homo sapiens
  misc_RNA (1)...(19): siRNA sense strand
uagaaaugcaugcagauaa

SEQ ID NO: 2424123 - RNA, 19 nt, Homo sapiens
  misc_RNA (1)...(19): siRNA sense strand
accaagaagugcaguggaa

SEQ ID NO: 2424124 - RNA, 19 nt, Homo sapiens
  misc_RNA (1)...(19): siRNA sense strand
gcugaaaguacucgaccaa

SEQ ID NO: 2424125 - RNA, 19 nt, Homo sapiens
  misc_RNA (1)...(19): siRNA sense strand
ccugagguuucuagaggaa

SEQ ID NO: 2424126 - RNA, 19 nt, Homo sapiens
  misc_RNA (1)...(19): siRNA sense strand
cauaaugaaaggaaaguga

SEQ ID NO: 2424127 - RNA, 19 nt, Homo sapiens
  misc_RNA (1)...(19): siRNA sense strand
caggaaaggaaauggaguu

SEQ ID NO: 2424128 - RNA, 19 nt, Homo sapiens
  misc_RNA (1)...(19): siRNA sense strand
cauaagcagcaaagaggua

SEQ ID NO: 2424129 - RNA, 19 nt, Homo sapiens
  misc_RNA (1)...(19): siRNA sense strand
uauguaaccuugaggaaaa

SEQ ID NO: 2424130 - RNA, 19 nt, Homo sapiens
  misc_RNA (1)...(19): siRNA sense strand
caagaagugcaguggaaca

SEQ ID NO: 2424131 - RNA, 19 nt, Homo sapiens
  misc_RNA (1)...(19): siRNA sense strand
cggccaauaaguaugauaa

SEQ ID NO: 2424132 - RNA, 19 nt, Homo sapiens
  misc_RNA (1)...(19): siRNA sense strand
ucauggaagggcugaguaa

SEQ ID NO: 2424133 - RNA, 19 nt, Homo sapiens
  misc_RNA (1)...(19): siRNA sense strand
uggaguaaauucuguggaa

SEQ ID NO: 2424134 - RNA, 19 nt, Homo sapiens
  misc_RNA (1)...(19): siRNA sense strand
ucaaacaauggcagugaaa

SEQ ID NO: 2424135 - RNA, 19 nt, Homo sapiens
  misc_RNA (1)...(19): siRNA sense strand
gaugaaacacagaccgcaa

SEQ ID NO: 2424136 - RNA, 19 nt, Homo sapiens
  misc_RNA (1)...(19): siRNA sense strand
ucucaacaguuaaguacaa

SEQ ID NO: 2424137 - RNA, 19 nt, Homo sapiens
  misc_RNA (1)...(19): siRNA sense strand
aaaugaggguccagauuau

SEQ ID NO: 2424138 - RNA, 19 nt, Homo sapiens
  misc_RNA (1)...(19): siRNA sense strand
gcuucuaacuauaacguga

SEQ ID NO: 2424139 - RNA, 19 nt, Homo sapiens
  misc_RNA (1)...(19): siRNA sense strand
agauagaaaugcaugcaga

SEQ ID NO: 2424140 - RNA, 19 nt, Homo sapiens
  misc_RNA (1)...(19): siRNA sense strand
cugcaaacauccagucaca

SEQ ID NO: 2424141 - RNA, 19 nt, Homo sapiens
  misc_RNA (1)...(19): siRNA sense strand
ggggaggggucaugaagaa

SEQ ID NO: 2424142 - RNA, 19 nt, Homo sapiens
  misc_RNA (1)...(19): siRNA sense strand
ccagagccuccaagggaaa

SEQ ID NO: 2424143 - RNA, 19 nt, Homo sapiens
  misc_RNA (1)...(19): siRNA sense strand
ugaaucuaauggagaagaa

SEQ ID NO: 2424144 - RNA, 19 nt, Homo sapiens
  misc_RNA (1)...(19): siRNA sense strand
agaaauaugccaagucaca

SEQ ID NO: 2424145 - RNA, 19 nt, Homo sapiens
  misc_RNA (1)...(19): siRNA sense strand
uggcagaaguugaugaauc

SEQ ID NO: 2424146 - RNA, 19 nt, Homo sapiens
  misc_RNA (1)...(19): siRNA sense strand
ggaaagaccaagaagugca

SEQ ID NO: 2424147 - RNA, 19 nt, Homo sapiens
  misc_RNA (1)...(19): siRNA sense strand
ggacacugccauuagagaa

SEQ ID NO: 2424148 - RNA, 19 nt, Homo sapiens
  misc_RNA (1)...(19): siRNA sense strand
ccaacuaaagaaaccaaua

SEQ ID NO: 2424149 - RNA, 19 nt, Homo sapiens
  misc_RNA (1)...(19): siRNA sense strand
agaucuuagagguggaaau

SEQ ID NO: 2424150 - RNA, 19 nt, Homo sapiens
  misc_RNA (1)...(19): siRNA sense strand
gaggagaaacggaggucca

SEQ ID NO: 2424151 - RNA, 19 nt, Homo sapiens
  misc_RNA (1)...(19): siRNA sense strand
agagaggagaugugacaau

SEQ ID NO: 2424152 - RNA, 19 nt, Homo sapiens
  misc_RNA (1)...(19): siRNA sense strand
gcacagauucagaaagaac

SEQ ID NO: 2424153 - RNA, 19 nt, Homo sapiens
  misc_RNA (1)...(19): siRNA sense strand
ccuauguaaccuugaggaa

SEQ ID NO: 2424154 - RNA, 19 nt, Homo sapiens
  misc_RNA (1)...(19): siRNA sense strand
aagagcaaauggaaagaau

SEQ ID NO: 2424155 - RNA, 19 nt, Homo sapiens
  misc_RNA (1)...(19): siRNA sense strand
ccucugaagaucacauuaa

SEQ ID NO: 2424156 - RNA, 19 nt, Homo sapiens
  misc_RNA (1)...(19): siRNA sense strand
gaagaaaccaggggaguaa

SEQ ID NO: 2424157 - RNA, 19 nt, Homo sapiens
  misc_RNA (1)...(19): siRNA sense strand
cuaagaacggaaagaccaa

SEQ ID NO: 2424158 - RNA, 19 nt, Homo sapiens
  misc_RNA (1)...(19): siRNA sense strand
gacacugccauuagagaaa

SEQ ID NO: 2424159 - RNA, 19 nt, Homo sapiens
  misc_RNA (1)...(19): siRNA sense strand
cagaaggauggucaagaua

SEQ ID NO: 2424160 - RNA, 19 nt, Homo sapiens
  misc_RNA (1)...(19): siRNA sense strand
aaguagauauugaugccaa

SEQ ID NO: 2424161 - RNA, 19 nt, Homo sapiens
  misc_RNA (1)...(19): siRNA sense strand
agagcaaauggaaagaaua

SEQ ID NO: 2424162 - RNA, 19 nt, Homo sapiens
  misc_RNA (1)...(19): siRNA sense strand
acugauacaggaaaggaaa

SEQ ID NO: 2424163 - RNA, 19 nt, Homo sapiens
  misc_RNA (1)...(19): siRNA sense strand
gcuaauuaaaccagagauc

SEQ ID NO: 2424164 - RNA, 19 nt, Homo sapiens
  misc_RNA (1)...(19): siRNA sense strand
aagagaaacuucagcaacu

SEQ ID NO: 2424165 - RNA, 19 nt, Homo sapiens
  misc_RNA (1)...(19): siRNA sense strand
caaggaugacuguggaaga

SEQ ID NO: 2424166 - RNA, 19 nt, Homo sapiens
  misc_RNA (1)...(19): siRNA sense strand
aagauagacccuuaacaaa

SEQ ID NO: 2424167 - RNA, 19 nt, Homo sapiens
  misc_RNA (1)...(19): siRNA sense strand
agauagacccuuaacaaaa

SEQ ID NO: 2424168 - RNA, 19 nt, Homo sapiens
  misc_RNA (1)...(19): siRNA sense strand
cgaucgagucauacagaga

SEQ ID NO: 2424169 - RNA, 19 nt, Homo sapiens
  misc_RNA (1)...(19): siRNA sense strand
gaacaaauucaaugcagca

SEQ ID NO: 2424170 - RNA, 19 nt, Homo sapiens
  misc_RNA (1)...(19): siRNA sense strand
caaauacagaccugaagaa

SEQ ID NO: 2424171 - RNA, 19 nt, Homo sapiens
  misc_RNA (1)...(19): siRNA sense strand
cgaugagaaugaagauuua

SEQ ID NO: 2424172 - RNA, 19 nt, Homo sapiens
  misc_RNA (1)...(19): siRNA sense strand
gaguacaaagagugccaaa

SEQ ID NO: 2424173 - RNA, 19 nt, Homo sapiens
  misc_RNA (1)...(19): siRNA sense strand
aggaauacgccgauuauga

SEQ ID NO: 2424174 - RNA, 19 nt, Homo sapiens
  misc_RNA (1)...(19): siRNA sense strand
augacaaaguuacgugcaa

SEQ ID NO: 2424175 - RNA, 19 nt, Homo sapiens
  misc_RNA (1)...(19): siRNA sense strand
acgaugagaaugaagauuu

SEQ ID NO: 2424176 - RNA, 19 nt, Homo sapiens
  misc_RNA (1)...(19): siRNA sense strand
aagaaauaacucagcugaa

SEQ ID NO: 2424177 - RNA, 19 nt, Homo sapiens
  misc_RNA (1)...(19): siRNA sense strand
ugaaggaauacgccgauua

SEQ ID NO: 2424178 - RNA, 19 nt, Homo sapiens
  misc_RNA (1)...(19): siRNA sense strand
gucacagaucacagaauaa

SEQ ID NO: 2424179 - RNA, 19 nt, Homo sapiens
  misc_RNA (1)...(19): siRNA sense strand
uggaaguaaaggaagauca

SEQ ID NO: 2424180 - RNA, 19 nt, Homo sapiens
  misc_RNA (1)...(19): siRNA sense strand
aaggaagaucagagaaaau

SEQ ID NO: 2424181 - RNA, 19 nt, Homo sapiens
  misc_RNA (1)...(19): siRNA sense strand
auccgaaagauuugagaau

SEQ ID NO: 2424182 - RNA, 19 nt, Homo sapiens
  misc_RNA (1)...(19): siRNA sense strand
gagaauugacacuaagcga

SEQ ID NO: 2424183 - RNA, 19 nt, Homo sapiens
  misc_RNA (1)...(19): siRNA sense strand
caugaaauuugaaggaggu

SEQ ID NO: 2424184 - RNA, 19 nt, Homo sapiens
  misc_RNA (1)...(19): siRNA sense strand
gcacgaugagaaugaagau

SEQ ID NO: 2424185 - RNA, 19 nt, Homo sapiens
  misc_RNA (1)...(19): siRNA sense strand
gacaaaguuacgugcaaaa

SEQ ID NO: 2424186 - RNA, 19 nt, Homo sapiens
  misc_RNA (1)...(19): siRNA sense strand
ugaaugucaacaagagaga

SEQ ID NO: 2424187 - RNA, 19 nt, Homo sapiens
  misc_RNA (1)...(19): siRNA sense strand
ggaauacgccgauuaugaa

SEQ ID NO: 2424188 - RNA, 19 nt, Homo sapiens
  misc_RNA (1)...(19): siRNA sense strand
cucagaagaaacagaugaa

SEQ ID NO: 2424189 - RNA, 19 nt, Homo sapiens
  misc_RNA (1)...(19): siRNA sense strand
gcauuuaaaagauggcauu

SEQ ID NO: 2424190 - RNA, 19 nt, Homo sapiens
  misc_RNA (1)...(19): siRNA sense strand
gccaaagacagaaaagcaa

SEQ ID NO: 2424191 - RNA, 19 nt, Homo sapiens
  misc_RNA (1)...(19): siRNA sense strand
cagaguacaaagagugcca

SEQ ID NO: 2424192 - RNA, 19 nt, Homo sapiens
  misc_RNA (1)...(19): siRNA sense strand
acguuuaauucauggguua

SEQ ID NO: 2424193 - RNA, 19 nt, Homo sapiens
  misc_RNA (1)...(19): siRNA sense strand
acgcaagaaugcuggcaaa

SEQ ID NO: 2424194 - RNA, 19 nt, Homo sapiens
  misc_RNA (1)...(19): siRNA sense strand
gcgaaagggaugacagaga

SEQ ID NO: 2424195 - RNA, 19 nt, Homo sapiens
  misc_RNA (1)...(19): siRNA sense strand
caguaauagauuugggaau

SEQ ID NO: 2424196 - RNA, 19 nt, Homo sapiens
  misc_RNA (1)...(19): siRNA sense strand
cugaagaagccaugaucaa

SEQ ID NO: 2424197 - RNA, 19 nt, Homo sapiens
  misc_RNA (1)...(19): siRNA sense strand
uuggauauguggaggaaau

SEQ ID NO: 2424198 - RNA, 19 nt, Homo sapiens
  misc_RNA (1)...(19): siRNA sense strand
gugacaacuuacugaagaa

SEQ ID NO: 2424199 - RNA, 19 nt, Homo sapiens
  misc_RNA (1)...(19): siRNA sense strand
cggcagaugaauacagcua

SEQ ID NO: 2424200 - RNA, 19 nt, Homo sapiens
  misc_RNA (1)...(19): siRNA sense strand
gacugaaacaggagaguau

SEQ ID NO: 2424201 - RNA, 19 nt, Homo sapiens
  misc_RNA (1)...(19): siRNA sense strand
cagagaaugaaguggaaga

SEQ ID NO: 2424202 - RNA, 19 nt, Homo sapiens
  misc_RNA (1)...(19): siRNA sense strand
cagucaagagcuagguuua

SEQ ID NO: 2424203 - RNA, 19 nt, Homo sapiens
  misc_RNA (1)...(19): siRNA sense strand
cugaaacaggagaguauua

SEQ ID NO: 2424204 - RNA, 19 nt, Homo sapiens
  misc_RNA (1)...(19): siRNA sense strand
ccguggucauguuggaaua

SEQ ID NO: 2424205 - RNA, 19 nt, Homo sapiens
  misc_RNA (1)...(19): siRNA sense strand
aaaugaucgugguggagaa

SEQ ID NO: 2424206 - RNA, 19 nt, Homo sapiens
  misc_RNA (1)...(19): siRNA sense strand
gccuuuaacaacagugaaa

SEQ ID NO: 2424207 - RNA, 19 nt, Homo sapiens
  misc_RNA (1)...(19): siRNA sense strand
augaaaaggaacugacaaa

SEQ ID NO: 2424208 - RNA, 19 nt, Homo sapiens
  misc_RNA (1)...(19): siRNA sense strand
caauaaaagccguggucau

SEQ ID NO: 2424209 - RNA, 19 nt, Homo sapiens
  misc_RNA (1)...(19): siRNA sense strand
gcucacaguauauggaaaa

SEQ ID NO: 2424210 - RNA, 19 nt, Homo sapiens
  misc_RNA (1)...(19): siRNA sense strand
uauggaaauaggagagcua

SEQ ID NO: 2424211 - RNA, 19 nt, Homo sapiens
  misc_RNA (1)...(19): siRNA sense strand
aggaagauauugaugcaga

SEQ ID NO: 2424212 - RNA, 19 nt, Homo sapiens
  misc_RNA (1)...(19): siRNA sense strand
uaucauagguacugggaag

SEQ ID NO: 2424213 - RNA, 19 nt, Homo sapiens
  misc_RNA (1)...(19): siRNA sense strand
gaaagggaugacagagaau

SEQ ID NO: 2424214 - RNA, 19 nt, Homo sapiens
  misc_RNA (1)...(19): siRNA sense strand
guguauugaaguucugaua

SEQ ID NO: 2424215 - RNA, 19 nt, Homo sapiens
  misc_RNA (1)...(19): siRNA sense strand
cagaaaaggaagauauuga

SEQ ID NO: 2424216 - RNA, 19 nt, Homo sapiens
  misc_RNA (1)...(19): siRNA sense strand
caggagaguauuacaaaca

SEQ ID NO: 2424217 - RNA, 19 nt, Homo sapiens
  misc_RNA (1)...(19): siRNA sense strand
ugguaaauuuguucagcuu

SEQ ID NO: 2424218 - RNA, 19 nt, Homo sapiens
  misc_RNA (1)...(19): siRNA sense strand
cagcgaaagggaugacaga

SEQ ID NO: 2424219 - RNA, 19 nt, Homo sapiens
  misc_RNA (1)...(19): siRNA sense strand
auaaagagcuucaggacag

SEQ ID NO: 2424220 - RNA, 19 nt, Homo sapiens
  misc_RNA (1)...(19): siRNA sense strand
acaucaaugcagaaagaca

SEQ ID NO: 2424221 - RNA, 19 nt, Homo sapiens
  misc_RNA (1)...(19): siRNA sense strand
guucauauacuaaggugau

SEQ ID NO: 2424222 - RNA, 19 nt, Homo sapiens
  misc_RNA (1)...(19): siRNA sense strand
caacauaccaaauggcagu

SEQ ID NO: 2424223 - RNA, 19 nt, Homo sapiens
  misc_RNA (1)...(19): siRNA sense strand
gaauacgucgaaagagcaa

SEQ ID NO: 2424224 - RNA, 19 nt, Homo sapiens
  misc_RNA (1)...(19): siRNA sense strand
ggagaagacccaaaccaga

SEQ ID NO: 2424225 - RNA, 19 nt, Homo sapiens
  misc_RNA (1)...(19): siRNA sense strand
uggcaaauauguacgucuu

SEQ ID NO: 2424226 - RNA, 19 nt, Homo sapiens
  misc_RNA (1)...(19): siRNA sense strand
uuugaaaccaagaguagua

SEQ ID NO: 2424227 - RNA, 19 nt, Homo sapiens
  misc_RNA (1)...(19): siRNA sense strand
gguuaugaguuuaccagca

SEQ ID NO: 2424228 - RNA, 19 nt, Homo sapiens
  misc_RNA (1)...(19): siRNA sense strand
ugucaguuauaaagagcuu

SEQ ID NO: 2424229 - RNA, 19 nt, Homo sapiens
  misc_RNA (1)...(19): siRNA sense strand
ggaaaaucauguucggcau

SEQ ID NO: 2424230 - RNA, 19 nt, Homo sapiens
  misc_RNA (1)...(19): siRNA sense strand
ugaaguucugauagacaaa

SEQ ID NO: 2424231 - RNA, 19 nt, Homo sapiens
  misc_RNA (1)...(19): siRNA sense strand
aggcgucggcagaugaaua

SEQ ID NO: 2424232 - RNA, 19 nt, Homo sapiens
  misc_RNA (1)...(19): siRNA sense strand
uggcuauggugguguagau

SEQ ID NO: 2424233 - RNA, 19 nt, Homo sapiens
  misc_RNA (1)...(19): siRNA sense strand
cgaaugcugcuccgagaaa

SEQ ID NO: 2424234 - RNA, 19 nt, Homo sapiens
  misc_RNA (1)...(19): siRNA sense strand
aaacaggagaguauuacaa

SEQ ID NO: 2424235 - RNA, 19 nt, Homo sapiens
  misc_RNA (1)...(19): siRNA sense strand
ugacagagaaugaagugga

SEQ ID NO: 2424236 - RNA, 19 nt, Homo sapiens
  misc_RNA (1)...(19): siRNA sense strand
aagccaugaucaacaaauu

SEQ ID NO: 2424237 - RNA, 19 nt, Homo sapiens
  misc_RNA (1)...(19): siRNA sense strand
gagagcuagcauuggauau

SEQ ID NO: 2424238 - RNA, 19 nt, Homo sapiens
  misc_RNA (1)...(19): siRNA sense strand
uuuaugagugcguuggaua

SEQ ID NO: 2424239 - RNA, 19 nt, Homo sapiens
  misc_RNA (1)...(19): siRNA sense strand
cagcaaccuuacucaggaa

SEQ ID NO: 2424240 - RNA, 19 nt, Homo sapiens
  misc_RNA (1)...(19): siRNA sense strand
gguaaauuuguucagcuua

SEQ ID NO: 2424241 - RNA, 19 nt, Homo sapiens
  misc_RNA (1)...(19): siRNA sense strand
uggaauacgucgaaagagc

SEQ ID NO: 2424242 - RNA, 19 nt, Homo sapiens
  misc_RNA (1)...(19): siRNA sense strand
gcaugauuaagaaguguau

SEQ ID NO: 2424243 - RNA, 19 nt, Homo sapiens
  misc_RNA (1)...(19): siRNA sense strand
agauaugaaugaaccacuu

SEQ ID NO: 2424244 - RNA, 19 nt, Homo sapiens
  misc_RNA (1)...(19): siRNA sense strand
ugaugaaacauggaacaaa

SEQ ID NO: 2424245 - RNA, 19 nt, Homo sapiens
  misc_RNA (1)...(19): siRNA sense strand
uuucaaaaguucuacgcaa

SEQ ID NO: 2424246 - RNA, 19 nt, Homo sapiens
  misc_RNA (1)...(19): siRNA sense strand
gucuauggacucugaagaa

SEQ ID NO: 2424247 - RNA, 19 nt, Homo sapiens
  misc_RNA (1)...(19): siRNA sense strand
guaucaugaaagcacgaaa

SEQ ID NO: 2424248 - RNA, 19 nt, Homo sapiens
  misc_RNA (1)...(19): siRNA sense strand
uugaaguucugauagacaa

SEQ ID NO: 2424249 - RNA, 19 nt, Homo sapiens
  misc_RNA (1)...(19): siRNA sense strand
gaaaguaauccaugggguu

SEQ ID NO: 2424250 - RNA, 19 nt, Homo sapiens
  misc_RNA (1)...(19): siRNA sense strand
aagggaugacagagaauga

SEQ ID NO: 2424251 - RNA, 19 nt, Homo sapiens
  misc_RNA (1)...(19): siRNA sense strand
agaaugaaguggaagacag

SEQ ID NO: 2424252 - RNA, 19 nt, Homo sapiens
  misc_RNA (1)...(19): siRNA sense strand
uauaaagagcuucaggaca

SEQ ID NO: 2424253 - RNA, 19 nt, Homo sapiens
  misc_RNA (1)...(19): siRNA sense strand
augaaccacuuauggaaau

SEQ ID NO: 2424254 - RNA, 19 nt, Homo sapiens
  misc_RNA (1)...(19): siRNA sense strand
cggcaacagaucacggaaa

SEQ ID NO: 2424255 - RNA, 19 nt, Homo sapiens
  misc_RNA (1)...(19): siRNA sense strand
ugaacuacgaagaggaaau

SEQ ID NO: 2424256 - RNA, 19 nt, Homo sapiens
  misc_RNA (1)...(19): siRNA sense strand
acgaagaggaaauggccaa

SEQ ID NO: 2424257 - RNA, 19 nt, Homo sapiens
  misc_RNA (1)...(19): siRNA sense strand
ccaacuaccugaugggaag

SEQ ID NO: 2424258 - RNA, 19 nt, Homo sapiens
  misc_RNA (1)...(19): siRNA sense strand
ggaaaauaucaguguggau

SEQ ID NO: 2424259 - RNA, 19 nt, Homo sapiens
  misc_RNA (1)...(19): siRNA sense strand
ugcccaucuuugaggguua

SEQ ID NO: 2424260 - RNA, 19 nt, Homo sapiens
  misc_RNA (1)...(19): siRNA sense strand
uggcaaugaacuacgaaga

SEQ ID NO: 2424261 - RNA, 19 nt, Homo sapiens
  misc_RNA (1)...(19): siRNA sense strand
aguuaaggauauagcaaag

SEQ ID NO: 2424262 - RNA, 19 nt, Homo sapiens
  misc_RNA (1)...(19): siRNA sense strand
agaggaaauggccaagaaa

SEQ ID NO: 2424263 - RNA, 19 nt, Homo sapiens
  misc_RNA (1)...(19): siRNA sense strand
gacuauaaccuaaagcuga

SEQ ID NO: 2424264 - RNA, 19 nt, Homo sapiens
  misc_RNA (1)...(19): siRNA sense strand
gugauacaggccugaggaa

SEQ ID NO: 2424265 - RNA, 19 nt, Homo sapiens
  misc_RNA (1)...(19): siRNA sense strand
gcagcauaaugaaacguga

SEQ ID NO: 2424266 - RNA, 19 nt, Homo sapiens
  misc_RNA (1)...(19): siRNA sense strand
ucgacaacggcucgggaau

SEQ ID NO: 2424267 - RNA, 19 nt, Homo sapiens
  misc_RNA (1)...(19): siRNA sense strand
caaugaacuacgaagagga

SEQ ID NO: 2424268 - RNA, 19 nt, Homo sapiens
  misc_RNA (1)...(19): siRNA sense strand
cgagagaauugcugggauc

SEQ ID NO: 2424269 - RNA, 19 nt, Homo sapiens
  misc_RNA (1)...(19): siRNA sense strand
cagaguggugcgagagaau

SEQ ID NO: 2424270 - RNA, 19 nt, Homo sapiens
  misc_RNA (1)...(19): siRNA sense strand
gugugaaagagcugggcuu

SEQ ID NO: 2424271 - RNA, 19 nt, Homo sapiens
  misc_RNA (1)...(19): siRNA sense strand
ucuucagaguggugcgaga

SEQ ID NO: 2424272 - RNA, 19 nt, Homo sapiens
  misc_RNA (1)...(19): siRNA sense strand
ugagcuggaaccugggaaa

SEQ ID NO: 2424273 - RNA, 19 nt, Homo sapiens
  misc_RNA (1)...(19): siRNA sense strand
ccaggagguucgugggucu

SEQ ID NO: 2424274 - RNA, 19 nt, Homo sapiens
  misc_RNA (1)...(19): siRNA sense strand
augucauaggaaaggauaa

SEQ ID NO: 2424275 - RNA, 19 nt, Homo sapiens
  misc_RNA (1)...(19): siRNA sense strand
gggaaagucuucagagugg

SEQ ID NO: 2424276 - RNA, 19 nt, Homo sapiens
  misc_RNA (1)...(19): siRNA sense strand
ggguggaguauuugagaag

SEQ ID NO: 2424277 - RNA, 19 nt, Homo sapiens
  misc_RNA (1)...(19): siRNA sense strand
gcgagagaauugcugggau

SEQ ID NO: 2424278 - RNA, 19 nt, Homo sapiens
  misc_RNA (1)...(19): siRNA sense strand
aggccaaaccugaggacac

SEQ ID NO: 2424279 - RNA, 19 nt, Homo sapiens
  misc_RNA (1)...(19): siRNA sense strand
gcagagaccaccauagcca

SEQ ID NO: 2424280 - RNA, 19 nt, Homo sapiens
  misc_RNA (1)...(19): siRNA sense strand
guauuagagaaauggacca

SEQ ID NO: 2424281 - RNA, 19 nt, Homo sapiens
  misc_RNA (1)...(19): siRNA sense strand
uuuugggucuugagagaaa

SEQ ID NO: 2424282 - RNA, 19 nt, Homo sapiens
  misc_RNA (1)...(19): siRNA sense strand
ugacacaccuggaggcaca

SEQ ID NO: 2424283 - RNA, 19 nt, Homo sapiens
  misc_RNA (1)...(19): siRNA sense strand
ccagaagauggcagaccaa

SEQ ID NO: 2424284 - RNA, 19 nt, Homo sapiens
  misc_RNA (1)...(19): siRNA sense strand
acagcaaggcucaggcaca

SEQ ID NO: 2424285 - RNA, 19 nt, Homo sapiens
  misc_RNA (1)...(19): siRNA sense strand
acgacgugguggcggugua

SEQ ID NO: 2424286 - RNA, 19 nt, Homo sapiens
  misc_RNA (1)...(19): siRNA sense strand
gggaaagaguggauggcaa

SEQ ID NO: 2424287 - RNA, 19 nt, Homo sapiens
  misc_RNA (1)...(19): siRNA sense strand
ccgucaaauuguaggauau

SEQ ID NO: 2424288 - RNA, 19 nt, Homo sapiens
  misc_RNA (1)...(19): siRNA sense strand
ggauaaacaaucagagccu

SEQ ID NO: 2424289 - RNA, 19 nt, Homo sapiens
  misc_RNA (1)...(19): siRNA sense strand
ccuacaagucauaaaguca

SEQ ID NO: 2424290 - RNA, 19 nt, Homo sapiens
  misc_RNA (1)...(19): siRNA sense strand
ggaaagaguggauggcaac

SEQ ID NO: 2424291 - RNA, 19 nt, Homo sapiens
  misc_RNA (1)...(19): siRNA sense strand
uggcauugugauuggagua

SEQ ID NO: 2424292 - RNA, 19 nt, Homo sapiens
  misc_RNA (1)...(19): siRNA sense strand
agucauaaagucagaucuu

SEQ ID NO: 2424293 - RNA, 19 nt, Homo sapiens
  misc_RNA (1)...(19): siRNA sense strand
ggacccuaugagugugaaa

SEQ ID NO: 2424294 - RNA, 19 nt, Homo sapiens
  misc_RNA (1)...(19): siRNA sense strand
acucagugucacaaggaau

SEQ ID NO: 2424295 - RNA, 19 nt, Homo sapiens
  misc_RNA (1)...(19): siRNA sense strand
aggauaugcaauaggaacu

SEQ ID NO: 2424296 - RNA, 19 nt, Homo sapiens
  misc_RNA (1)...(19): siRNA sense strand
ugcaauaggaacucaacaa

SEQ ID NO: 2424297 - RNA, 19 nt, Homo sapiens
  misc_RNA (1)...(19): siRNA sense strand
acccuaugagugugaaaua

SEQ ID NO: 2424298 - RNA, 19 nt, Homo sapiens
  misc_RNA (1)...(19): siRNA sense strand
uagcaaagccccaaaucaa

SEQ ID NO: 2424299 - RNA, 19 nt, Homo sapiens
  misc_RNA (1)...(19): siRNA sense strand
ucuucaacccaaucaguaa

SEQ ID NO: 2424300 - RNA, 19 nt, Homo sapiens
  misc_RNA (1)...(19): siRNA sense strand
ccaacccuguggaggacaa

SEQ ID NO: 2424301 - RNA, 19 nt, Homo sapiens
  misc_RNA (1)...(19): siRNA sense strand
ccuaugagugugaaauaca

SEQ ID NO: 2424302 - RNA, 19 nt, Homo sapiens
  misc_RNA (1)...(19): siRNA sense strand
ccacagucacaggagauaa

SEQ ID NO: 2424303 - RNA, 19 nt, Homo sapiens
  misc_RNA (1)...(19): siRNA sense strand
cguauuggugugaggucuu

SEQ ID NO: 2424304 - RNA, 19 nt, Homo sapiens
  misc_RNA (1)...(19): siRNA sense strand
ucgaaguggaagagggaaa

SEQ ID NO: 2424305 - RNA, 19 nt, Homo sapiens
  misc_RNA (1)...(19): siRNA sense strand
ggucgaaguggaagaggga

SEQ ID NO: 2424306 - RNA, 19 nt, Homo sapiens
  misc_RNA (1)...(19): siRNA sense strand
gcaagaugagcgaggcguu

SEQ ID NO: 2424307 - RNA, 19 nt, Homo sapiens
  misc_RNA (1)...(19): siRNA sense strand
gcaacaagacccugcccau

SEQ ID NO: 2424308 - RNA, 19 nt, Homo sapiens
  misc_RNA (1)...(19): siRNA sense strand
agacagcauauuugaguca

SEQ ID NO: 2424309 - RNA, 19 nt, Homo sapiens
  misc_RNA (1)...(19): siRNA sense strand
ccucgaagacaucggcaga

SEQ ID NO: 2424310 - RNA, 19 nt, Homo sapiens
  misc_RNA (1)...(19): siRNA sense strand
caucaaaaucacaguggau

SEQ ID NO: 2424311 - RNA, 19 nt, Homo sapiens
  misc_RNA (1)...(19): siRNA sense strand
acagcauauuugagucauu

SEQ ID NO: 2424312 - RNA, 19 nt, Homo sapiens
  misc_RNA (1)...(19): siRNA sense strand
caguaacaagaaagagaaa

SEQ ID NO: 2424313 - RNA, 19 nt, Homo sapiens
  misc_RNA (1)...(19): siRNA sense strand
uugcaaagguucaagaaaa

SEQ ID NO: 2424314 - RNA, 19 nt, Homo sapiens
  misc_RNA (1)...(19): siRNA sense strand
uggaaggagcaaaggagua

SEQ ID NO: 2424315 - RNA, 19 nt, Homo sapiens
  misc_RNA (1)...(19): siRNA sense strand
agaugaagugaaagaagaa

SEQ ID NO: 2424316 - RNA, 19 nt, Homo sapiens
  misc_RNA (1)...(19): siRNA sense strand
caagaaagagaaagcgaca

SEQ ID NO: 2424317 - RNA, 19 nt, Homo sapiens
  misc_RNA (1)...(19): siRNA sense strand
cuggaaaagaaaagugaaa

SEQ ID NO: 2424318 - RNA, 19 nt, Homo sapiens
  misc_RNA (1)...(19): siRNA sense strand
caacagaacuuuaugguag

SEQ ID NO: 2424319 - RNA, 19 nt, Homo sapiens
  misc_RNA (1)...(19): siRNA sense strand
ccagaugacaugaaggaga

SEQ ID NO: 2424320 - RNA, 19 nt, Homo sapiens
  misc_RNA (1)...(19): siRNA sense strand
gagcaaaggaguaugccau

SEQ ID NO: 2424321 - RNA, 19 nt, Homo sapiens
  misc_RNA (1)...(19): siRNA sense strand
cugcuguggcugagacuaa

SEQ ID NO: 2424322 - RNA, 19 nt, Homo sapiens
  misc_RNA (1)...(19): siRNA sense strand
ugggaaaguccauggugaa

SEQ ID NO: 2424323 - RNA, 19 nt, Homo sapiens
  misc_RNA (1)...(19): siRNA sense strand
acgcaagaauaaagaaauc

SEQ ID NO: 2424324 - RNA, 19 nt, Homo sapiens
  misc_RNA (1)...(19): siRNA sense strand
ugggagaugaagugaaaga

SEQ ID NO: 2424325 - RNA, 19 nt, Homo sapiens
  misc_RNA (1)...(19): siRNA sense strand
ggagacagugacagggaca

SEQ ID NO: 2424326 - RNA, 19 nt, Homo sapiens
  misc_RNA (1)...(19): siRNA sense strand
gccaguaacaagaaagaga

SEQ ID NO: 2424327 - RNA, 19 nt, Homo sapiens
  misc_RNA (1)...(19): siRNA sense strand
gcaaagaagaucugccagu

SEQ ID NO: 2424328 - RNA, 19 nt, Homo sapiens
  misc_RNA (1)...(19): siRNA sense strand
ugacagggacacaggcaau

SEQ ID NO: 2424329 - RNA, 19 nt, Homo sapiens
  misc_RNA (1)...(19): siRNA sense strand
ucacagaagaagaaaagaa

SEQ ID NO: 2424330 - RNA, 19 nt, Homo sapiens
  misc_RNA (1)...(19): siRNA sense strand
aggcaaauaugggugcaaa

SEQ ID NO: 2424331 - RNA, 19 nt, Homo sapiens
  misc_RNA (1)...(19): siRNA sense strand
ucaauaacuaugaugggaa

SEQ ID NO: 2424332 - RNA, 19 nt, Homo sapiens
  misc_RNA (1)...(19): siRNA sense strand
aguggaugcuacucggaaa

SEQ ID NO: 2424333 - RNA, 19 nt, Homo sapiens
  misc_RNA (1)...(19): siRNA sense strand
acuuuaugguagaagauga

SEQ ID NO: 2424334 - RNA, 19 nt, Homo sapiens
  misc_RNA (1)...(19): siRNA sense strand
aagugaaagaagaagauga

SEQ ID NO: 2424335 - RNA, 19 nt, Homo sapiens
  misc_RNA (1)...(19): siRNA sense strand
augacaugaaggagaggua

SEQ ID NO: 2424336 - RNA, 19 nt, Homo sapiens
  misc_RNA (1)...(19): siRNA sense strand
gacuaaagaaggagacagu

SEQ ID NO: 2424337 - RNA, 19 nt, Homo sapiens
  misc_RNA (1)...(19): siRNA sense strand
ggaaaagaaaagugaaauc

SEQ ID NO: 2424338 - RNA, 19 nt, Homo sapiens
  misc_RNA (1)...(19): siRNA sense strand
guagaagaugagacgguuu

SEQ ID NO: 2424339 - RNA, 19 nt, Homo sapiens
  misc_RNA (1)...(19): siRNA sense strand
ggaugacagcaaagaagau

SEQ ID NO: 2424340 - RNA, 19 nt, Homo sapiens
  misc_RNA (1)...(19): siRNA sense strand
aaggagagguaucgagaac

SEQ ID NO: 2424341 - RNA, 19 nt, Homo sapiens
  misc_RNA (1)...(19): siRNA sense strand
augaagugaaagaagaaga

SEQ ID NO: 2424342 - RNA, 19 nt, Homo sapiens
  misc_RNA (1)...(19): siRNA sense strand
gaggaagggcacaaugaca

SEQ ID NO: 2424343 - RNA, 19 nt, Homo sapiens
  misc_RNA (1)...(19): siRNA sense strand
gaugcuacucggaaaggaa

SEQ ID NO: 2424344 - RNA, 19 nt, Homo sapiens
  misc_RNA (1)...(19): siRNA sense strand
caagauugaaccagaacca

SEQ ID NO: 2424345 - RNA, 19 nt, Homo sapiens
  misc_RNA (1)...(19): siRNA sense strand
ggaucgagagggagaccga

SEQ ID NO: 2424346 - RNA, 19 nt, Homo sapiens
  misc_RNA (1)...(19): siRNA sense strand
gagacgguuuugugcaaua

SEQ ID NO: 2424347 - RNA, 19 nt, Homo sapiens
  misc_RNA (1)...(19): siRNA sense strand
cagauggaaagcaggauga

SEQ ID NO: 2424348 - RNA, 19 nt, Homo sapiens
  misc_RNA (1)...(19): siRNA sense strand
agaacuuuaugguagaaga

SEQ ID NO: 2424349 - RNA, 19 nt, Homo sapiens
  misc_RNA (1)...(19): siRNA sense strand
auguaucacuuacuggaaa

SEQ ID NO: 2424350 - RNA, 19 nt, Homo sapiens
  misc_RNA (1)...(19): siRNA sense strand
cuuaaacggcuucaggcaa

SEQ ID NO: 2424351 - RNA, 19 nt, Homo sapiens
  misc_RNA (1)...(19): siRNA sense strand
gcuuuaaauacgacugcuu

SEQ ID NO: 2424352 - RNA, 19 nt, Homo sapiens
  misc_RNA (1)...(19): siRNA sense strand
ggcugagacuaaagaagga

SEQ ID NO: 2424353 - RNA, 19 nt, Homo sapiens
  misc_RNA (1)...(19): siRNA sense strand
agaaaagaaagcacagauu

SEQ ID NO: 2424354 - RNA, 19 nt, Homo sapiens
  misc_RNA (1)...(19): siRNA sense strand
uggucauggugaauggaga

SEQ ID NO: 2424355 - RNA, 19 nt, Homo sapiens
  misc_RNA (1)...(19): siRNA sense strand
ccuccaaauguaucacuua

SEQ ID NO: 2424356 - RNA, 19 nt, Homo sapiens
  misc_RNA (1)...(19): siRNA sense strand
guaacaagaaagagaaagc

SEQ ID NO: 2424357 - RNA, 19 nt, Homo sapiens
  misc_RNA (1)...(19): siRNA sense strand
ccggagaaggcaccacaua

SEQ ID NO: 2424358 - RNA, 19 nt, Homo sapiens
  misc_RNA (1)...(19): siRNA sense strand
cacagaagaagaaaagaaa

SEQ ID NO: 2424359 - RNA, 19 nt, Homo sapiens
  misc_RNA (1)...(19): siRNA sense strand
ccagauccucaaugaagaa

SEQ ID NO: 2424360 - RNA, 19 nt, Homo sapiens
  misc_RNA (1)...(19): siRNA sense strand
ucaaugaagaauggaagaa

SEQ ID NO: 2424361 - RNA, 19 nt, Homo sapiens
  misc_RNA (1)...(19): siRNA sense strand
ugaagugaaagaagaagau

SEQ ID NO: 2424362 - RNA, 19 nt, Homo sapiens
  misc_RNA (1)...(19): siRNA sense strand
auacaugcgacuucgacaa

SEQ ID NO: 2424363 - RNA, 19 nt, Homo sapiens
  misc_RNA (1)...(19): siRNA sense strand
gcuaucuggcagugcgaga

SEQ ID NO: 2424364 - RNA, 19 nt, Homo sapiens
  misc_RNA (1)...(19): siRNA sense strand
cagaagaaauggaagccaa

SEQ ID NO: 2424365 - RNA, 19 nt, Homo sapiens
  misc_RNA (1)...(19): siRNA sense strand
gaaugaagaugaacgggaa

SEQ ID NO: 2424366 - RNA, 19 nt, Homo sapiens
  misc_RNA (1)...(19): siRNA sense strand
agaagaaauggaagccaaa

SEQ ID NO: 2424367 - RNA, 19 nt, Homo sapiens
  misc_RNA (1)...(19): siRNA sense strand
ggagagaacagaaggccuu

SEQ ID NO: 2424368 - RNA, 19 nt, Homo sapiens
  misc_RNA (1)...(19): siRNA sense strand
caaucaaaugugaagacaa

SEQ ID NO: 2424369 - RNA, 19 nt, Homo sapiens
  misc_RNA (1)...(19): siRNA sense strand
acaacaacauugaaggcau

SEQ ID NO: 2424370 - RNA, 19 nt, Homo sapiens
  misc_RNA (1)...(19): siRNA sense strand
ugucaaaauucgagcagau

SEQ ID NO: 2424371 - RNA, 19 nt, Homo sapiens
  misc_RNA (1)...(19): siRNA sense strand
agacugaacuugcgaggca

SEQ ID NO: 2424372 - RNA, 19 nt, Homo sapiens
  misc_RNA (1)...(19): siRNA sense strand
augccgaaguggauggaga

SEQ ID NO: 2424373 - RNA, 19 nt, Homo sapiens
  misc_RNA (1)...(19): siRNA sense strand
aaggaugagcagcuggaaa

SEQ ID NO: 2424374 - RNA, 19 nt, Homo sapiens
  misc_RNA (1)...(19): siRNA sense strand
aagauguagugauggugaa

SEQ ID NO: 2424375 - RNA, 19 nt, Homo sapiens
  misc_RNA (1)...(19): siRNA sense strand
gaauuauccagaaggcgua

SEQ ID NO: 2424376 - RNA, 19 nt, Homo sapiens
  misc_RNA (1)...(19): siRNA sense strand
acaaauuuccugaggugga

SEQ ID NO: 2424377 - RNA, 19 nt, Homo sapiens
  misc_RNA (1)...(19): siRNA sense strand
augaugaugcagaagaaau

SEQ ID NO: 2424378 - RNA, 19 nt, Homo sapiens
  misc_RNA (1)...(19): siRNA sense strand
auguagugauggugaaugu

SEQ ID NO: 2424379 - RNA, 19 nt, Homo sapiens
  misc_RNA (1)...(19): siRNA sense strand
gagaggcuugaaagagaaa

SEQ ID NO: 2424380 - RNA, 19 nt, Homo sapiens
  misc_RNA (1)...(19): siRNA sense strand
caaaauucgagcagauauu

SEQ ID NO: 2424381 - RNA, 19 nt, Homo sapiens
  misc_RNA (1)...(19): siRNA sense strand
uggaagauguagugauggu

SEQ ID NO: 2424382 - RNA, 19 nt, Homo sapiens
  misc_RNA (1)...(19): siRNA sense strand
cauugaugcuguaaaagaa

SEQ ID NO: 2424383 - RNA, 19 nt, Homo sapiens
  misc_RNA (1)...(19): siRNA sense strand
aguacaagagaccuggaua

SEQ ID NO: 2424384 - RNA, 19 nt, Homo sapiens
  misc_RNA (1)...(19): siRNA sense strand
acacaaauuuccugaggug

SEQ ID NO: 2424385 - RNA, 19 nt, Homo sapiens
  misc_RNA (1)...(19): siRNA sense strand
caacaacauugaaggcaug

SEQ ID NO: 2424386 - RNA, 19 nt, Homo sapiens
  misc_RNA (1)...(19): siRNA sense strand
agaaaaugccgaaguggau

SEQ ID NO: 2424387 - RNA, 19 nt, Homo sapiens
  misc_RNA (1)...(19): siRNA sense strand
aauggaagccaaagcugaa

SEQ ID NO: 2424388 - RNA, 19 nt, Homo sapiens
  misc_RNA (1)...(19): siRNA sense strand
gggucuuugaugacaagua

SEQ ID NO: 2424389 - RNA, 19 nt, Homo sapiens
  misc_RNA (1)...(19): siRNA sense strand
cagauggagaggcuugaaa

SEQ ID NO: 2424390 - RNA, 19 nt, Homo sapiens
  misc_RNA (1)...(19): siRNA sense strand
cagccaaguuccaggagcu

SEQ ID NO: 2424391 - RNA, 19 nt, Homo sapiens
  misc_RNA (1)...(19): siRNA sense strand
ccaccagccugaagccuga

SEQ ID NO: 2424392 - RNA, 19 nt, Homo sapiens
  misc_RNA (1)...(19): siRNA sense strand
gggaaaggaaaguggagau

SEQ ID NO: 2424393 - RNA, 19 nt, Homo sapiens
  misc_RNA (1)...(19): siRNA sense strand
aggagaucuugcugagaaa

SEQ ID NO: 2424394 - RNA, 19 nt, Homo sapiens
  misc_RNA (1)...(19): siRNA sense strand
ggauaauaugaaggagaaa

SEQ ID NO: 2424395 - RNA, 19 nt, Homo sapiens
  misc_RNA (1)...(19): siRNA sense strand
gggcaaaugcggaacgcga

SEQ ID NO: 2424396 - RNA, 19 nt, Homo sapiens
  misc_RNA (1)...(19): siRNA sense strand
agggauaauaugaaggaga

SEQ ID NO: 2424397 - RNA, 19 nt, Homo sapiens
  misc_RNA (1)...(19): siRNA sense strand
acucagaaagugaugaaau

SEQ ID NO: 2424398 - RNA, 19 nt, Homo sapiens
  misc_RNA (1)...(19): siRNA sense strand
aggcaggcguagauccaaa

SEQ ID NO: 2424399 - RNA, 19 nt, Homo sapiens
  misc_RNA (1)...(19): siRNA sense strand
cuucacaaggcaauggaaa

SEQ ID NO: 2424400 - RNA, 19 nt, Homo sapiens
  misc_RNA (1)...(19): siRNA sense strand
cagauuaccuugcugggaa

SEQ ID NO: 2424401 - RNA, 19 nt, Homo sapiens
  misc_RNA (1)...(19): siRNA sense strand
ggaaaguggagauagcaga

SEQ ID NO: 2424402 - RNA, 19 nt, Homo sapiens
  misc_RNA (1)...(19): siRNA sense strand
gacugagauguuugagaaa

SEQ ID NO: 2424403 - RNA, 19 nt, Homo sapiens
  misc_RNA (1)...(19): siRNA sense strand
caggaugugggaaaggaaa

SEQ ID NO: 2424404 - RNA, 19 nt, Homo sapiens
  misc_RNA (1)...(19): siRNA sense strand
agacaauugaagcaaggaa

SEQ ID NO: 2424405 - RNA, 19 nt, Homo sapiens
  misc_RNA (1)...(19): siRNA sense strand
aagccauauccaagaagaa

SEQ ID NO: 2424406 - RNA, 19 nt, Homo sapiens
  misc_RNA (1)...(19): siRNA sense strand
cagcaguugaagauagaga

SEQ ID NO: 2424407 - RNA, 19 nt, Homo sapiens
  misc_RNA (1)...(19): siRNA sense strand
agguauggaccguggggua

SEQ ID NO: 2424408 - RNA, 19 nt, Homo sapiens
  misc_RNA (1)...(19): siRNA sense strand
ggcugaaauucgauggagu

SEQ ID NO: 2424409 - RNA, 19 nt, Homo sapiens
  misc_RNA (1)...(19): siRNA sense strand
agugaaguuucgagagaag

SEQ ID NO: 2424410 - RNA, 19 nt, Homo sapiens
  misc_RNA (1)...(19): siRNA sense strand
cucaaaguucagaggaaaa

SEQ ID NO: 2424411 - RNA, 19 nt, Homo sapiens
  misc_RNA (1)...(19): siRNA sense strand
aauugaggcagaaggaaga

SEQ ID NO: 2424412 - RNA, 19 nt, Homo sapiens
  misc_RNA (1)...(19): siRNA sense strand
aagaacugacccagcuaaa

SEQ ID NO: 2424413 - RNA, 19 nt, Homo sapiens
  misc_RNA (1)...(19): siRNA sense strand
gcuuggaaucgaaugaaaa

SEQ ID NO: 2424414 - RNA, 19 nt, Homo sapiens
  misc_RNA (1)...(19): siRNA sense strand
caauugaggcagaaggaag

SEQ ID NO: 2424415 - RNA, 19 nt, Homo sapiens
  misc_RNA (1)...(19): siRNA sense strand
cgaucauugaggaggcuga

SEQ ID NO: 2424416 - RNA, 19 nt, Homo sapiens
  misc_RNA (1)...(19): siRNA sense strand
gaaaauaaccaaugagcag

SEQ ID NO: 2424417 - RNA, 19 nt, Homo sapiens
  misc_RNA (1)...(19): siRNA sense strand
cacaagggcaaaugcggaa

SEQ ID NO: 2424418 - RNA, 19 nt, Homo sapiens
  misc_RNA (1)...(19): siRNA sense strand
uuacgacacacaagggcaa

SEQ ID NO: 2424419 - RNA, 19 nt, Homo sapiens
  misc_RNA (1)...(19): siRNA sense strand
agaaaagagcuacuugaaa

SEQ ID NO: 2424420 - RNA, 19 nt, Homo sapiens
  misc_RNA (1)...(19): siRNA sense strand
gaauagaauuggaggagga

SEQ ID NO: 2424421 - RNA, 19 nt, Homo sapiens
  misc_RNA (1)...(19): siRNA sense strand
agaucuaaugagagagaaa

SEQ ID NO: 2424422 - RNA, 19 nt, Homo sapiens
  misc_RNA (1)...(19): siRNA sense strand
cagaauaaugaauggcaua

SEQ ID NO: 2424423 - RNA, 19 nt, Homo sapiens
  misc_RNA (1)...(19): siRNA sense strand
gcagaaacuaaaagagaaa

SEQ ID NO: 2424424 - RNA, 19 nt, Homo sapiens
  misc_RNA (1)...(19): siRNA sense strand
gcggaaugagagagagaau

SEQ ID NO: 2424425 - RNA, 19 nt, Homo sapiens
  misc_RNA (1)...(19): siRNA sense strand
aaucaguggcagagaaauu

SEQ ID NO: 2424426 - RNA, 19 nt, Homo sapiens
  misc_RNA (1)...(19): siRNA sense strand
gcguuaaaauggagaauga

SEQ ID NO: 2424427 - RNA, 19 nt, Homo sapiens
  misc_RNA (1)...(19): siRNA sense strand
cuggaaaggagcaucgaua

SEQ ID NO: 2424428 - RNA, 19 nt, Homo sapiens
  misc_RNA (1)...(19): siRNA sense strand
uggaggaggaauaggguuu

SEQ ID NO: 2424429 - RNA, 19 nt, Homo sapiens
  misc_RNA (1)...(19): siRNA sense strand
uuaaggaugcggaaggaaa

SEQ ID NO: 2424430 - RNA, 19 nt, Homo sapiens
  misc_RNA (1)...(19): siRNA sense strand
gcagaauaaugaauggcau

SEQ ID NO: 2424431 - RNA, 19 nt, Homo sapiens
  misc_RNA (1)...(19): siRNA sense strand
cccuagaaacuaugaacaa

SEQ ID NO: 2424432 - RNA, 19 nt, Homo sapiens
  misc_RNA (1)...(19): siRNA sense strand
aagaagacaaagauggcaa

SEQ ID NO: 2424433 - RNA, 19 nt, Homo sapiens
  misc_RNA (1)...(19): siRNA sense strand
uagguggaguaaugggaaa

SEQ ID NO: 2424434 - RNA, 19 nt, Homo sapiens
  misc_RNA (1)...(19): siRNA sense strand
cagcaaaagaagagaaauc

SEQ ID NO: 2424435 - RNA, 19 nt, Homo sapiens
  misc_RNA (1)...(19): siRNA sense strand
gaauaggcuccaaaggcaa

SEQ ID NO: 2424436 - RNA, 19 nt, Homo sapiens
  misc_RNA (1)...(19): siRNA sense strand
uggaguaaugggaaauuua

SEQ ID NO: 2424437 - RNA, 19 nt, Homo sapiens
  misc_RNA (1)...(19): siRNA sense strand
gguccaaugggaagcggaa

SEQ ID NO: 2424438 - RNA, 19 nt, Homo sapiens
  misc_RNA (1)...(19): siRNA sense strand
cuccaaaggcaaccagaua

SEQ ID NO: 2424439 - RNA, 19 nt, Homo sapiens
  misc_RNA (1)...(19): siRNA sense strand
gucaaaaggcuguggaaca

SEQ ID NO: 2424440 - RNA, 19 nt, Homo sapiens
  misc_RNA (1)...(19): siRNA sense strand
ccguucacaugaugguaaa

SEQ ID NO: 2424441 - RNA, 19 nt, Homo sapiens
  misc_RNA (1)...(19): siRNA sense strand
aagcggaaugagagagaga

SEQ ID NO: 2424442 - RNA, 19 nt, Homo sapiens
  misc_RNA (1)...(19): siRNA sense strand
uggcaagagcagaggaaug

SEQ ID NO: 2424443 - RNA, 19 nt, Homo sapiens
  misc_RNA (1)...(19): siRNA sense strand
aggguuugcaggaagaaua

SEQ ID NO: 2424444 - RNA, 19 nt, Homo sapiens
  misc_RNA (1)...(19): siRNA sense strand
cggaaugagagagagaaua

SEQ ID NO: 2424445 - RNA, 19 nt, Homo sapiens
  misc_RNA (1)...(19): siRNA sense strand
accagauauuugucagaaa

SEQ ID NO: 2424446 - RNA, 19 nt, Homo sapiens
  misc_RNA (1)...(19): siRNA sense strand
agaggauccugauggagaa

SEQ ID NO: 2424447 - RNA, 19 nt, Homo sapiens
  misc_RNA (1)...(19): siRNA sense strand
gaaggaaaaucaagggguu

SEQ ID NO: 2424448 - RNA, 19 nt, Homo sapiens
  misc_RNA (1)...(19): siRNA sense strand
guuccagcuuugauagaau

SEQ ID NO: 2424449 - RNA, 19 nt, Homo sapiens
  misc_RNA (1)...(19): siRNA sense strand
ggcagaaacuaaaagagaa

SEQ ID NO: 2424450 - RNA, 19 nt, Homo sapiens
  misc_RNA (1)...(19): siRNA sense strand
uggagaauggaaagucaaa

SEQ ID NO: 2424451 - RNA, 19 nt, Homo sapiens
  misc_RNA (1)...(19): siRNA sense strand
guugaacauagguggagua

SEQ ID NO: 2424452 - RNA, 19 nt, Homo sapiens
  misc_RNA (1)...(19): siRNA sense strand
caugaaauggcaagcuauu

SEQ ID NO: 2424453 - RNA, 19 nt, Homo sapiens
  misc_RNA (1)...(19): siRNA sense strand
ugagagagaaaguugguga

SEQ ID NO: 2424454 - RNA, 19 nt, Homo sapiens
  misc_RNA (1)...(19): siRNA sense strand
cuaguagcauggagcgaga

SEQ ID NO: 2424455 - RNA, 19 nt, Homo sapiens
  misc_RNA (1)...(19): siRNA sense strand
agaauaggcuccaaaggca

SEQ ID NO: 2424456 - RNA, 19 nt, Homo sapiens
  misc_RNA (1)...(19): siRNA sense strand
uggcagagaaauugauguu

SEQ ID NO: 2424457 - RNA, 19 nt, Homo sapiens
  misc_RNA (1)...(19): siRNA sense strand
agaaaaugcucguagggca

SEQ ID NO: 2424458 - RNA, 19 nt, Homo sapiens
  misc_RNA (1)...(19): siRNA sense strand
ggaugggacuggaccggau

SEQ ID NO: 2424459 - RNA, 19 nt, Homo sapiens
  misc_RNA (1)...(19): siRNA sense strand
cuuggaucguaaugcauaa

SEQ ID NO: 2424460 - RNA, 19 nt, Homo sapiens
  misc_RNA (1)...(19): siRNA sense strand
uggaagaagcuaaaggaag

SEQ ID NO: 2424461 - RNA, 19 nt, Homo sapiens
  misc_RNA (1)...(19): siRNA sense strand
ggauccugauggagaaaau

SEQ ID NO: 2424462 - RNA, 19 nt, Homo sapiens
  misc_RNA (1)...(19): siRNA sense strand
cgguagacuugguuccaca

SEQ ID NO: 2424463 - RNA, 19 nt, Homo sapiens
  misc_RNA (1)...(19): siRNA sense strand
gauggcaagagcagaggaa

SEQ ID NO: 2424464 - RNA, 19 nt, Homo sapiens
  misc_RNA (1)...(19): siRNA sense strand
caggaaguaagaaggccaa

SEQ ID NO: 2424465 - RNA, 19 nt, Homo sapiens
  misc_RNA (1)...(19): siRNA sense strand
aaaucgaggcuuuggagau

SEQ ID NO: 2424466 - RNA, 19 nt, Homo sapiens
  misc_RNA (1)...(19): siRNA sense strand
agacaaagauggcaagagc

SEQ ID NO: 2424467 - RNA, 19 nt, Homo sapiens
  misc_RNA (1)...(19): siRNA sense strand
augaauagcaugggaggau

SEQ ID NO: 2424468 - RNA, 19 nt, Homo sapiens
  misc_RNA (1)...(19): siRNA sense strand
gguggaauggguagcauga

SEQ ID NO: 2424469 - RNA, 19 nt, Homo sapiens
  misc_RNA (1)...(19): siRNA sense strand
aagaggauccugauggaga

SEQ ID NO: 2424470 - RNA, 19 nt, Homo sapiens
  misc_RNA (1)...(19): siRNA sense strand
gguccaggugguaugggaa

SEQ ID NO: 2424471 - RNA, 19 nt, Homo sapiens
  misc_RNA (1)...(19): siRNA sense strand
ggaauggguagcaugaaca

SEQ ID NO: 2424472 - RNA, 19 nt, Homo sapiens
  misc_RNA (1)...(19): siRNA sense strand
ggguccaaaucguaacaga

SEQ ID NO: 2424473 - RNA, 19 nt, Homo sapiens
  misc_RNA (1)...(19): siRNA sense strand
ggaccagguauaggagcua

SEQ ID NO: 2424474 - RNA, 19 nt, Homo sapiens
  misc_RNA (1)...(19): siRNA sense strand
uggaaaggagcaucgauau

SEQ ID NO: 2424475 - RNA, 19 nt, Homo sapiens
  misc_RNA (1)...(19): siRNA sense strand
agagagaauaggcuccaaa

SEQ ID NO: 2424476 - RNA, 19 nt, Homo sapiens
  misc_RNA (1)...(19): siRNA sense strand
agaucgacacagugauuaa

SEQ ID NO: 2424477 - RNA, 19 nt, Homo sapiens
  misc_RNA (1)...(19): siRNA sense strand
cuggaaacauucuccggaa

SEQ ID NO: 2424478 - RNA, 19 nt, Homo sapiens
  misc_RNA (1)...(19): siRNA sense strand
ggacacuuccacaggcaga

SEQ ID NO: 2424479 - RNA, 19 nt, Homo sapiens
  misc_RNA (1)...(19): siRNA sense strand
agcccuagauagagcuuau

SEQ ID NO: 2424480 - RNA, 19 nt, Homo sapiens
  misc_RNA (1)...(19): siRNA sense strand
uccacaaagaagccagaaa

SEQ ID NO: 2424481 - RNA, 19 nt, Homo sapiens
  misc_RNA (1)...(19): siRNA sense strand
gugaagaaguccugggcca

SEQ ID NO: 2424482 - RNA, 19 nt, Homo sapiens
  misc_RNA (1)...(19): siRNA sense strand
gggagagauuagagcucaa

SEQ ID NO: 2424483 - RNA, 19 nt, Homo sapiens
  misc_RNA (1)...(19): siRNA sense strand
ggagaauacgauuggaaca

SEQ ID NO: 2424484 - RNA, 19 nt, Homo sapiens
  misc_RNA (1)...(19): siRNA sense strand
gcaaagguaucauuggcua

SEQ ID NO: 2424485 - RNA, 19 nt, Homo sapiens
  misc_RNA (1)...(19): siRNA sense strand
ggugaaggucaacgugaaa

SEQ ID NO: 2424486 - RNA, 19 nt, Homo sapiens
  misc_RNA (1)...(19): siRNA sense strand
gaacaaggagaucgggaga

SEQ ID NO: 2424487 - RNA, 19 nt, Homo sapiens
  misc_RNA (1)...(19): siRNA sense strand
uaaacagacuugaugggaa

SEQ ID NO: 2424488 - RNA, 19 nt, Homo sapiens
  misc_RNA (1)...(19): siRNA sense strand
cugcuggaaucgagaguga

SEQ ID NO: 2424489 - RNA, 19 nt, Homo sapiens
  misc_RNA (1)...(19): siRNA sense strand
aaggagaucgggagagauu

SEQ ID NO: 2424490 - RNA, 19 nt, Homo sapiens
  misc_RNA (1)...(19): siRNA sense strand
aggcacuggugaaggucaa

SEQ ID NO: 2424491 - RNA, 19 nt, Homo sapiens
  misc_RNA (1)...(19): siRNA sense strand
ugguguggcccaagcgaua

SEQ ID NO: 2424492 - RNA, 19 nt, Homo sapiens
  misc_RNA (1)...(19): siRNA sense strand
uguaugaucaagugaagaa

SEQ ID NO: 2424493 - RNA, 19 nt, Homo sapiens
  misc_RNA (1)...(19): siRNA sense strand
uggugaaggucaacgugaa

SEQ ID NO: 2424494 - RNA, 19 nt, Homo sapiens
  misc_RNA (1)...(19): siRNA sense strand
aagauuacuugaugcggaa

SEQ ID NO: 2424495 - RNA, 19 nt, Homo sapiens
  misc_RNA (1)...(19): siRNA sense strand
ccuccaaggaauauaguga

SEQ ID NO: 2424496 - RNA, 19 nt, Homo sapiens
  misc_RNA (1)...(19): siRNA sense strand
gguugcaacuggaguggau

SEQ ID NO: 2424497 - RNA, 19 nt, Homo sapiens
  misc_RNA (1)...(19): siRNA sense strand
aaguaagugggaagagcua

SEQ ID NO: 2424498 - RNA, 19 nt, Homo sapiens
  misc_RNA (1)...(19): siRNA sense strand
uagccaaggaagacaggaa

SEQ ID NO: 2424499 - RNA, 19 nt, Homo sapiens
  misc_RNA (1)...(19): siRNA sense strand
cuaacuggauacaagacaa

SEQ ID NO: 2424500 - RNA, 19 nt, Homo sapiens
  misc_RNA (1)...(19): siRNA sense strand
gcuuugaugcagaggcaga

SEQ ID NO: 2424501 - RNA, 19 nt, Homo sapiens
  misc_RNA (1)...(19): siRNA sense strand
gcuggaaucgagagugaau

SEQ ID NO: 2424502 - RNA, 19 nt, Homo sapiens
  misc_RNA (1)...(19): siRNA sense strand
ccucaaggaaagaauauga

SEQ ID NO: 2424503 - RNA, 19 nt, Homo sapiens
  misc_RNA (1)...(19): siRNA sense strand
gcgcuuugaugcagaggca

SEQ ID NO: 2424504 - RNA, 19 nt, Homo sapiens
  misc_RNA (1)...(19): siRNA sense strand
cugaaguugacaaguuuaa

SEQ ID NO: 2424505 - RNA, 19 nt, Homo sapiens
  misc_RNA (1)...(19): siRNA sense strand
uaacuggauacaagacaaa

SEQ ID NO: 2424506 - RNA, 19 nt, Homo sapiens
  misc_RNA (1)...(19): siRNA sense strand
uggaauagcaaccaccaaa

SEQ ID NO: 2424507 - RNA, 19 nt, Homo sapiens
  misc_RNA (1)...(19): siRNA sense strand
gagaauacgauuggaacau

SEQ ID NO: 2424508 - RNA, 19 nt, Homo sapiens
  misc_RNA (1)...(19): siRNA sense strand
caguaaaggagaauacgau

SEQ ID NO: 2424509 - RNA, 19 nt, Homo sapiens
  misc_RNA (1)...(19): siRNA sense strand
gugaccaaaccgugggaga

SEQ ID NO: 2424510 - RNA, 19 nt, Homo sapiens
  misc_RNA (1)...(19): siRNA sense strand
aaacagaaguaagugggaa

SEQ ID NO: 2424511 - RNA, 19 nt, Homo sapiens
  misc_RNA (1)...(19): siRNA sense strand
ccaaggaagacaggaacua

SEQ ID NO: 2424512 - RNA, 19 nt, Homo sapiens
  misc_RNA (1)...(19): siRNA sense strand
cuggaauuggucaaagaua

SEQ ID NO: 2424513 - RNA, 19 nt, Homo sapiens
  misc_RNA (1)...(19): siRNA sense strand
uggagaaaauugucaagaa

SEQ ID NO: 2424514 - RNA, 19 nt, Homo sapiens
  misc_RNA (1)...(19): siRNA sense strand
guaagugggaagagcuaca

SEQ ID NO: 2424515 - RNA, 19 nt, Homo sapiens
  misc_RNA (1)...(19): siRNA sense strand
gaagauuacuugaugcgga

SEQ ID NO: 2424516 - RNA, 19 nt, Homo sapiens
  misc_RNA (1)...(19): siRNA sense strand
agucaauauuggcaacaga

SEQ ID NO: 2424517 - RNA, 19 nt, Homo sapiens
  misc_RNA (1)...(19): siRNA sense strand
cuuugaacuugucaguaaa

SEQ ID NO: 2424518 - RNA, 19 nt, Homo sapiens
  misc_RNA (1)...(19): siRNA sense strand
acuugucaguaaaggagaa

SEQ ID NO: 2424519 - RNA, 19 nt, Homo sapiens
  misc_RNA (1)...(19): siRNA sense strand
guagcuacaaacagaagua

SEQ ID NO: 2424520 - RNA, 19 nt, Homo sapiens
  misc_RNA (1)...(19): siRNA sense strand
caaagguaucauuggcuau

SEQ ID NO: 2424521 - RNA, 19 nt, Homo sapiens
  misc_RNA (1)...(19): siRNA sense strand
gcccaaacucugcugaaau

SEQ ID NO: 2424522 - RNA, 19 nt, Homo sapiens
  misc_RNA (1)...(19): siRNA sense strand
acccagaguuguuugaaga

SEQ ID NO: 2424523 - RNA, 19 nt, Homo sapiens
  misc_RNA (1)...(19): siRNA sense strand
uggaguggauugauagcau

SEQ ID NO: 2424524 - RNA, 19 nt, Homo sapiens
  misc_RNA (1)...(19): siRNA sense strand
acgugaaacugaagccgau

SEQ ID NO: 2424525 - RNA, 19 nt, Homo sapiens
  misc_RNA (1)...(19): siRNA sense strand
gagcauggagaaacgguca

SEQ ID NO: 2424526 - RNA, 19 nt, Homo sapiens
  misc_RNA (1)...(19): siRNA sense strand
ugaugaaaucgacaagcua

SEQ ID NO: 2424527 - RNA, 19 nt, Homo sapiens
  misc_RNA (1)...(19): siRNA sense strand
agaauaugaaagaagcaga

SEQ ID NO: 2424528 - RNA, 19 nt, Homo sapiens
  misc_RNA (1)...(19): siRNA sense strand
aaggagaauacgauuggaa

SEQ ID NO: 2424529 - RNA, 19 nt, Homo sapiens
  misc_RNA (1)...(19): siRNA sense strand
cagcguuggugguggcacu

SEQ ID NO: 2424530 - RNA, 19 nt, Homo sapiens
  misc_RNA (1)...(19): siRNA sense strand
ccuagaggacaucgaauca

SEQ ID NO: 2424531 - RNA, 19 nt, Homo sapiens
  misc_RNA (1)...(19): siRNA sense strand
aguaaaggagaauacgauu

SEQ ID NO: 2424532 - RNA, 19 nt, Homo sapiens
  misc_RNA (1)...(19): siRNA sense strand
gaucggaaccggaaggaug

SEQ ID NO: 2424533 - RNA, 19 nt, Homo sapiens
  misc_RNA (1)...(19): siRNA sense strand
gagcuuugcuagagguggu

SEQ ID NO: 2424534 - RNA, 19 nt, Homo sapiens
  misc_RNA (1)...(19): siRNA sense strand
ggucacaauaucuuugcua

SEQ ID NO: 2424535 - RNA, 19 nt, Homo sapiens
  misc_RNA (1)...(19): siRNA sense strand
cgacaagcuaacuggauac

SEQ ID NO: 2424536 - RNA, 19 nt, Homo sapiens
  misc_RNA (1)...(19): siRNA sense strand
gcugaaaugugaacgcugu

SEQ ID NO: 2424537 - RNA, 19 nt, Homo sapiens
  misc_RNA (1)...(19): siRNA sense strand
gaaauauauuacuggcaca

SEQ ID NO: 2424538 - RNA, 19 nt, Homo sapiens
  misc_RNA (1)...(19): siRNA sense strand
uguuugaagauaagaggaa

SEQ ID NO: 2424539 - RNA, 19 nt, Homo sapiens
  misc_RNA (1)...(19): siRNA sense strand
uuuagauggagcaggauua

SEQ ID NO: 2424540 - RNA, 19 nt, Homo sapiens
  misc_RNA (1)...(19): siRNA sense strand
auuugaagcucgugaucga

SEQ ID NO: 2424541 - RNA, 19 nt, Homo sapiens
  misc_RNA (1)...(19): siRNA sense strand
ggauaauaugggagaacag

SEQ ID NO: 2424542 - RNA, 19 nt, Homo sapiens
  misc_RNA (1)...(19): siRNA sense strand
gacaauacauucagcacca

SEQ ID NO: 2424543 - RNA, 19 nt, Homo sapiens
  misc_RNA (1)...(19): siRNA sense strand
ugguuaauuuaguggucau

SEQ ID NO: 2424544 - RNA, 19 nt, Homo sapiens
  misc_RNA (1)...(19): siRNA sense strand
aggcacaagaacaagaaga

SEQ ID NO: 2424545 - RNA, 19 nt, Homo sapiens
  misc_RNA (1)...(19): siRNA sense strand
uauuacuggcacagauaua

SEQ ID NO: 2424546 - RNA, 19 nt, Homo sapiens
  misc_RNA (1)...(19): siRNA sense strand
aagaacaagaagauuggaa

SEQ ID NO: 2424547 - RNA, 19 nt, Homo sapiens
  misc_RNA (1)...(19): siRNA sense strand
cugaaggccucgcuggaga

SEQ ID NO: 2424548 - RNA, 19 nt, Homo sapiens
  misc_RNA (1)...(19): siRNA sense strand
ugaucgaaacauacaagaa

SEQ ID NO: 2424549 - RNA, 19 nt, Homo sapiens
  misc_RNA (1)...(19): siRNA sense strand
uggauaugaaacuggaaga

SEQ ID NO: 2424550 - RNA, 19 nt, Homo sapiens
  misc_RNA (1)...(19): siRNA sense strand
ggcacagauauauuggaua

SEQ ID NO: 2424551 - RNA, 19 nt, Homo sapiens
  misc_RNA (1)...(19): siRNA sense strand
uguagauaaaguuggagaa

SEQ ID NO: 2424552 - RNA, 19 nt, Homo sapiens
  misc_RNA (1)...(19): siRNA sense strand
gcagaaaauuggaauggga

SEQ ID NO: 2424553 - RNA, 19 nt, Homo sapiens
  misc_RNA (1)...(19): siRNA sense strand
auaaaguuggagaaagcaa

SEQ ID NO: 2424554 - RNA, 19 nt, Homo sapiens
  misc_RNA (1)...(19): siRNA sense strand
agaaaauuggaaugggauu

SEQ ID NO: 2424555 - RNA, 19 nt, Homo sapiens
  misc_RNA (1)...(19): siRNA sense strand
cuuuauuagaagagugcca

SEQ ID NO: 2424556 - RNA, 19 nt, Homo sapiens
  misc_RNA (1)...(19): siRNA sense strand
guguauuuguaguccuuau

SEQ ID NO: 2424557 - RNA, 19 nt, Homo sapiens
  misc_RNA (1)...(19): siRNA sense strand
cugucuuuguucagaguua

SEQ ID NO: 2424558 - RNA, 19 nt, Homo sapiens
  misc_RNA (1)...(19): siRNA sense strand
gguauaaaugaauggcaga

SEQ ID NO: 2424559 - RNA, 19 nt, Homo sapiens
  misc_RNA (1)...(19): siRNA sense strand
ccaacuagaggcaggguca

SEQ ID NO: 2424560 - RNA, 19 nt, Homo sapiens
  misc_RNA (1)...(19): siRNA sense strand
guagguggcaagugggaga

SEQ ID NO: 2424561 - RNA, 19 nt, Homo sapiens
  misc_RNA (1)...(19): siRNA sense strand
gcgaaucacuccaggcugu

SEQ ID NO: 2424562 - RNA, 19 nt, Homo sapiens
  misc_RNA (1)...(19): siRNA sense strand
cugggaagaacaagugaau

SEQ ID NO: 2424563 - RNA, 19 nt, Homo sapiens
  misc_RNA (1)...(19): siRNA sense strand
guauaaaugaauggcagaa

SEQ ID NO: 2424564 - RNA, 19 nt, Homo sapiens
  misc_RNA (1)...(19): siRNA sense strand
gcgacauguauaaugacua

SEQ ID NO: 2424565 - RNA, 19 nt, Homo sapiens
  misc_RNA (1)...(19): siRNA sense strand
ugugugcaacagagagaaa

SEQ ID NO: 2424566 - RNA, 19 nt, Homo sapiens
  misc_RNA (1)...(19): siRNA sense strand
aguccuugguauaaaugaa

SEQ ID NO: 2424567 - RNA, 19 nt, Homo sapiens
  misc_RNA (1)...(19): siRNA sense strand
ugugcaacagagagaaauu

SEQ ID NO: 2424568 - RNA, 19 nt, Homo sapiens
  misc_RNA (1)...(19): siRNA sense strand
guugcuaggaagaggcuca

SEQ ID NO: 2424569 - RNA, 19 nt, Homo sapiens
  misc_RNA (1)...(19): siRNA sense strand
ugagaaaucgggcuggcua

SEQ ID NO: 2424570 - RNA, 19 nt, Homo sapiens
  misc_RNA (1)...(19): siRNA sense strand
acagaacugggaagaacaa

SEQ ID NO: 2424571 - RNA, 19 nt, Homo sapiens
  misc_RNA (1)...(19): siRNA sense strand
aagagaagguugagcgaga

SEQ ID NO: 2424572 - RNA, 19 nt, Homo sapiens
  misc_RNA (1)...(19): siRNA sense strand
uuaaagaaggagaggauca

SEQ ID NO: 2424573 - RNA, 19 nt, Homo sapiens
  misc_RNA (1)...(19): siRNA sense strand
aggaucagaaagagauaaa

SEQ ID NO: 2424574 - RNA, 19 nt, Homo sapiens
  misc_RNA (1)...(19): siRNA sense strand
gaacauaauuugagcaagc

SEQ ID NO: 2424575 - RNA, 19 nt, Homo sapiens
  misc_RNA (1)...(19): siRNA sense strand
acauuauagccuucagaaa

SEQ ID NO: 2424576 - RNA, 19 nt, Homo sapiens
  misc_RNA (1)...(19): siRNA sense strand
cgucuagagaugugggcau

SEQ ID NO: 2424577 - RNA, 19 nt, Homo sapiens
  misc_RNA (1)...(19): siRNA sense strand
aggccaacaaaguggguau

SEQ ID NO: 2424578 - RNA, 19 nt, Homo sapiens
  misc_RNA (1)...(19): siRNA sense strand
gaagaaagugaccagggaa

SEQ ID NO: 2424579 - RNA, 19 nt, Homo sapiens
  misc_RNA (1)...(19): siRNA sense strand
gcuacaugaaggagagcca

SEQ ID NO: 2424580 - RNA, 19 nt, Homo sapiens
  misc_RNA (1)...(19): siRNA sense strand
aaagaauagaugugccaau

SEQ ID NO: 2424581 - RNA, 19 nt, Homo sapiens
  misc_RNA (1)...(19): siRNA sense strand
agagauaaagauugagcca

SEQ ID NO: 2424582 - RNA, 19 nt, Homo sapiens
  misc_RNA (1)...(19): siRNA sense strand
gugaagugaccgugugcuu

SEQ ID NO: 2424583 - RNA, 19 nt, Homo sapiens
  misc_RNA (1)...(19): siRNA sense strand
agaggaucagaaagagaua

SEQ ID NO: 2424584 - RNA, 19 nt, Homo sapiens
  misc_RNA (1)...(19): siRNA sense strand
gaaagagaagguugagcga

SEQ ID NO: 2424585 - RNA, 19 nt, Homo sapiens
  misc_RNA (1)...(19): siRNA sense strand
uggcaaggaugcagcagca

SEQ ID NO: 2424586 - RNA, 19 nt, Homo sapiens
  misc_RNA (1)...(19): siRNA sense strand
aagaaggagaggaucagaa

SEQ ID NO: 2424587 - RNA, 19 nt, Homo sapiens
  misc_RNA (1)...(19): siRNA sense strand
agauaaagauugagccagc

SEQ ID NO: 2424588 - RNA, 19 nt, Homo sapiens
  misc_RNA (1)...(19): siRNA sense strand
gcucagaaagagaagguug

SEQ ID NO: 2424589 - RNA, 19 nt, Homo sapiens
  misc_RNA (1)...(19): siRNA sense strand
cucaagacuuucaggacga

SEQ ID NO: 2424590 - RNA, 19 nt, Homo sapiens
  misc_RNA (1)...(19): siRNA sense strand
ugaagaaagugaccaggga

SEQ ID NO: 2424591 - RNA, 19 nt, Homo sapiens
  misc_RNA (1)...(19): siRNA sense strand
cagcuugcucagaaagaga

SEQ ID NO: 2424592 - RNA, 19 nt, Homo sapiens
  misc_RNA (1)...(19): siRNA sense strand
caaauauggucuuggaacc

SEQ ID NO: 2424593 - RNA, 19 nt, Homo sapiens
  misc_RNA (1)...(19): siRNA sense strand
cuauuauacaagaccagua

SEQ ID NO: 2424594 - RNA, 19 nt, Homo sapiens
  misc_RNA (1)...(19): siRNA sense strand
ucuaucuaguccagggaga

SEQ ID NO: 2424595 - RNA, 19 nt, Homo sapiens
  misc_RNA (1)...(19): siRNA sense strand
aagaaagugaccagggaac

SEQ ID NO: 2424596 - RNA, 19 nt, Homo sapiens
  misc_RNA (1)...(19): siRNA sense strand
acggaaagaaagacagcua

SEQ ID NO: 2424597 - RNA, 19 nt, Homo sapiens
  misc_RNA (1)...(19): siRNA sense strand
augaaagaaaugagagcga

SEQ ID NO: 2424598 - RNA, 19 nt, Homo sapiens
  misc_RNA (1)...(19): siRNA sense strand
caaccagauucuuggcaga

SEQ ID NO: 2424599 - RNA, 19 nt, Homo sapiens
  misc_RNA (1)...(19): siRNA sense strand
gcgauuuagcugacaucaa

SEQ ID NO: 2424600 - RNA, 19 nt, Homo sapiens
  misc_RNA (1)...(19): siRNA sense strand
gagcgaaugucguugcuga

SEQ ID NO: 2424601 - RNA, 19 nt, Homo sapiens
  misc_RNA (1)...(19): siRNA sense strand
cagucaucccgaagaggaa

SEQ ID NO: 2424602 - RNA, 19 nt, Homo sapiens
  misc_RNA (1)...(19): siRNA sense strand
agaggaagagagagaaacu

SEQ ID NO: 2424603 - RNA, 19 nt, Homo sapiens
  misc_RNA (1)...(19): siRNA sense strand
uuaugaauuagcacggaaa

SEQ ID NO: 2424604 - RNA, 19 nt, Homo sapiens
  misc_RNA (1)...(19): siRNA sense strand
ggguacauaaugaugccaa

SEQ ID NO: 2424605 - RNA, 19 nt, Homo sapiens
  misc_RNA (1)...(19): siRNA sense strand
ccacccaucccgagaacau

SEQ ID NO: 2424606 - RNA, 19 nt, Homo sapiens
  misc_RNA (1)...(19): siRNA sense strand
gcacaaaccucucaggagc

SEQ ID NO: 2424607 - RNA, 19 nt, Homo sapiens
  misc_RNA (1)...(19): siRNA sense strand
ugaaagaaaugagagcgaa

SEQ ID NO: 2424608 - RNA, 19 nt, Homo sapiens
  misc_RNA (1)...(19): siRNA sense strand
gaacaagauaagaggaaaa

SEQ ID NO: 2424609 - RNA, 19 nt, Homo sapiens
  misc_RNA (1)...(19): siRNA sense strand
caguagaaguauagguaca

SEQ ID NO: 2424610 - RNA, 19 nt, Homo sapiens
  misc_RNA (1)...(19): siRNA sense strand
agauaaauucugugggauu

SEQ ID NO: 2424611 - RNA, 19 nt, Homo sapiens
  misc_RNA (1)...(19): siRNA sense strand
aaauauaguuugaggccau

SEQ ID NO: 2424612 - RNA, 19 nt, Homo sapiens
  misc_RNA (1)...(19): siRNA sense strand
cagaacaagauaagaggaa

SEQ ID NO: 2424613 - RNA, 19 nt, Homo sapiens
  misc_RNA (1)...(19): siRNA sense strand
ggagaugcuaggagaacaa

SEQ ID NO: 2424614 - RNA, 19 nt, Homo sapiens
  misc_RNA (1)...(19): siRNA sense strand
cuguuaaaguccaggauga

SEQ ID NO: 2424615 - RNA, 19 nt, Homo sapiens
  misc_RNA (1)...(19): siRNA sense strand
guguagagauagacuggaa

SEQ ID NO: 2424616 - RNA, 19 nt, Homo sapiens
  misc_RNA (1)...(19): siRNA sense strand
aguuaugggucgaguucua

SEQ ID NO: 2424617 - RNA, 19 nt, Homo sapiens
  misc_RNA (1)...(19): siRNA sense strand
acgagaagcucaaggcaca

SEQ ID NO: 2424618 - RNA, 19 nt, Homo sapiens
  misc_RNA (1)...(19): siRNA sense strand
gauuaggagcagacagcaa

SEQ ID NO: 2424619 - RNA, 19 nt, Homo sapiens
  misc_RNA (1)...(19): siRNA sense strand
caguugaagcagugggaga

SEQ ID NO: 2424620 - RNA, 19 nt, Homo sapiens
  misc_RNA (1)...(19): siRNA sense strand
cugaagaagaacugacaau

SEQ ID NO: 2424621 - RNA, 19 nt, Homo sapiens
  misc_RNA (1)...(19): siRNA sense strand
cuggaaugcaguagaagua

SEQ ID NO: 2424622 - RNA, 19 nt, Homo sapiens
  misc_RNA (1)...(19): siRNA sense strand
auauggaggugauggguuu

SEQ ID NO: 2424623 - RNA, 19 nt, Homo sapiens
  misc_RNA (1)...(19): siRNA sense strand
agaacaagauaagaggaaa

SEQ ID NO: 2424624 - RNA, 19 nt, Homo sapiens
  misc_RNA (1)...(19): siRNA sense strand
acuuaagacccaugcuuua

SEQ ID NO: 2424625 - RNA, 19 nt, Homo sapiens
  misc_RNA (1)...(19): siRNA sense strand
aguaacagaagaugaagaa

SEQ ID NO: 2424626 - RNA, 19 nt, Homo sapiens
  misc_RNA (1)...(19): siRNA sense strand
uggaauauuugaacgucua

SEQ ID NO: 2424627 - RNA, 19 nt, Homo sapiens
  misc_RNA (1)...(19): siRNA sense strand
gggucgaguucuacuacaa

SEQ ID NO: 2424628 - RNA, 19 nt, Homo sapiens
  misc_RNA (1)...(19): siRNA sense strand
ccaucugauaauaguguua

SEQ ID NO: 2424629 - RNA, 19 nt, Homo sapiens
  misc_RNA (1)...(19): siRNA sense strand
caagauaaauucuguggga

SEQ ID NO: 2424630 - RNA, 19 nt, Homo sapiens
  misc_RNA (1)...(19): siRNA sense strand
uguuaauggauuuguggaa

SEQ ID NO: 2424631 - RNA, 19 nt, Homo sapiens
  misc_RNA (1)...(19): siRNA sense strand
ugacaaugugggaagaaga

SEQ ID NO: 2424632 - RNA, 19 nt, Homo sapiens
  misc_RNA (1)...(19): siRNA sense strand
cuugaagcccauaagauua

SEQ ID NO: 2424633 - RNA, 19 nt, Homo sapiens
  misc_RNA (1)...(19): siRNA sense strand
ugcucaagguuguggaaaa

SEQ ID NO: 2424634 - RNA, 19 nt, Homo sapiens
  misc_RNA (1)...(19): siRNA sense strand
aagaagacccagaaggcuu

SEQ ID NO: 2424635 - RNA, 19 nt, Homo sapiens
  misc_RNA (1)...(19): siRNA sense strand
ggguugaucgaauggacaa

SEQ ID NO: 2424636 - RNA, 19 nt, Homo sapiens
  misc_RNA (1)...(19): siRNA sense strand
gcaggagaugcuaggagaa

SEQ ID NO: 2424637 - RNA, 19 nt, Homo sapiens
  misc_RNA (1)...(19): siRNA sense strand
cacaauagguauaagccau

SEQ ID NO: 2424638 - RNA, 19 nt, Homo sapiens
  misc_RNA (1)...(19): siRNA sense strand
uggaccagcuuuugggaaa

SEQ ID NO: 2424639 - RNA, 19 nt, Homo sapiens
  misc_RNA (1)...(19): siRNA sense strand
auaagaauauggaggugau

SEQ ID NO: 2424640 - RNA, 19 nt, Homo sapiens
  misc_RNA (1)...(19): siRNA sense strand
ggauauaaauguaaggugg

SEQ ID NO: 2424641 - RNA, 19 nt, Homo sapiens
  misc_RNA (1)...(19): siRNA sense strand
gggaaauaugauugaaaug

SEQ ID NO: 2424642 - RNA, 19 nt, Homo sapiens
  misc_RNA (1)...(19): siRNA sense strand
caguagaaggccugcauga

SEQ ID NO: 2424643 - RNA, 19 nt, Homo sapiens
  misc_RNA (1)...(19): siRNA sense strand
ccuuaaagugaacccaaua

SEQ ID NO: 2424644 - RNA, 19 nt, Homo sapiens
  misc_RNA (1)...(19): siRNA sense strand
uggcaaugaagcugcaauu

SEQ ID NO: 2424645 - RNA, 19 nt, Homo sapiens
  misc_RNA (1)...(19): siRNA sense strand
uguauaaugcuguuggauu

SEQ ID NO: 2424646 - RNA, 19 nt, Homo sapiens
  misc_RNA (1)...(19): siRNA sense strand
cauaagauuaagauggcau

SEQ ID NO: 2424647 - RNA, 19 nt, Homo sapiens
  misc_RNA (1)...(19): siRNA sense strand
ccacaaauguuucaaccga

SEQ ID NO: 2424648 - RNA, 19 nt, Homo sapiens
  misc_RNA (1)...(19): siRNA sense strand
uuauagaaggggagaggua

SEQ ID NO: 2424649 - RNA, 19 nt, Homo sapiens
  misc_RNA (1)...(19): siRNA sense strand
aaauguggguugaucgaau

SEQ ID NO: 2424650 - RNA, 19 nt, Homo sapiens
  misc_RNA (1)...(19): siRNA sense strand
ugggauguuugguacaaua

SEQ ID NO: 2424651 - RNA, 19 nt, Homo sapiens
  misc_RNA (1)...(19): siRNA sense strand
uggaagaugguuuagaauu

SEQ ID NO: 2424652 - RNA, 19 nt, Homo sapiens
  misc_RNA (1)...(19): siRNA sense strand
ccagauugcaacucagauu

SEQ ID NO: 2424653 - RNA, 19 nt, Homo sapiens
  misc_RNA (1)...(19): siRNA sense strand
ggaagcagagugaagaaca

SEQ ID NO: 2424654 - RNA, 19 nt, Homo sapiens
  misc_RNA (1)...(19): siRNA sense strand
ucgacagcacagagcauua

SEQ ID NO: 2424655 - RNA, 19 nt, Homo sapiens
  misc_RNA (1)...(19): siRNA sense strand
uguggaaccucauaagaau

SEQ ID NO: 2424656 - RNA, 19 nt, Homo sapiens
  misc_RNA (1)...(19): siRNA sense strand
agaaguuggugaaggcguu

SEQ ID NO: 2424657 - RNA, 19 nt, Homo sapiens
  misc_RNA (1)...(19): siRNA sense strand
cuucuagaaaugaugcaaa

SEQ ID NO: 2424658 - RNA, 19 nt, Homo sapiens
  misc_RNA (1)...(19): siRNA sense strand
guggaaccucauaagaaua

SEQ ID NO: 2424659 - RNA, 19 nt, Homo sapiens
  misc_RNA (1)...(19): siRNA sense strand
uaauguguguagagauaga

SEQ ID NO: 2424660 - RNA, 19 nt, Homo sapiens
  misc_RNA (1)...(19): siRNA sense strand
cagcugaggagcaguugaa

SEQ ID NO: 2424661 - RNA, 19 nt, Homo sapiens
  misc_RNA (1)...(19): siRNA sense strand
gcucaagguuguggaaaau

SEQ ID NO: 2424662 - RNA, 19 nt, Homo sapiens
  misc_RNA (1)...(19): siRNA sense strand
agaaccacccacagaacaa

SEQ ID NO: 2424663 - RNA, 19 nt, Homo sapiens
  misc_RNA (1)...(19): siRNA sense strand
caaauguggaagauaugaa

SEQ ID NO: 2424664 - RNA, 19 nt, Homo sapiens
  misc_RNA (1)...(19): siRNA sense strand
cuacagaaggucaaguuca

SEQ ID NO: 2424665 - RNA, 19 nt, Homo sapiens
  misc_RNA (1)...(19): siRNA sense strand
acgacuugcugcugauaga

SEQ ID NO: 2424666 - RNA, 19 nt, Homo sapiens
  misc_RNA (1)...(19): siRNA sense strand
guagagauagacuggaaaa

SEQ ID NO: 2424667 - RNA, 19 nt, Homo sapiens
  misc_RNA (1)...(19): siRNA sense strand
uauccuacuuugacagaga

SEQ ID NO: 2424668 - RNA, 19 nt, Homo sapiens
  misc_RNA (1)...(19): siRNA sense strand
ggagauugucacccagcua

SEQ ID NO: 2424669 - RNA, 19 nt, Homo sapiens
  misc_RNA (1)...(19): siRNA sense strand
ccgccaacuccaugaacaa

SEQ ID NO: 2424670 - RNA, 19 nt, Homo sapiens
  misc_RNA (1)...(19): siRNA sense strand
uucacaaagcagaaagaaa

SEQ ID NO: 2424671 - RNA, 19 nt, Homo sapiens
  misc_RNA (1)...(19): siRNA sense strand
ccgcaauguggaaacaaau

SEQ ID NO: 2424672 - RNA, 19 nt, Homo sapiens
  misc_RNA (1)...(19): siRNA sense strand
ucacaaaggagcaggcaug

SEQ ID NO: 2424673 - RNA, 19 nt, Homo sapiens
  misc_RNA (1)...(19): siRNA sense strand
acaagaaagccaaagccau

SEQ ID NO: 2424674 - RNA, 19 nt, Homo sapiens
  misc_RNA (1)...(19): siRNA sense strand
acuuugaguacgaugauuu

SEQ ID NO: 2424675 - RNA, 19 nt, Homo sapiens
  misc_RNA (1)...(19): siRNA sense strand
ccugcaagaaccacaagaa

SEQ ID NO: 2424676 - RNA, 19 nt, Homo sapiens
  misc_RNA (1)...(19): siRNA sense strand
cggugaacaagcagggcga

SEQ ID NO: 2424677 - RNA, 19 nt, Homo sapiens
  misc_RNA (1)...(19): siRNA sense strand
aguacaaggcaaugaagaa

SEQ ID NO: 2424678 - RNA, 19 nt, Homo sapiens
  misc_RNA (1)...(19): siRNA sense strand
ccaucaaguacaaggcaau

SEQ ID NO: 2424679 - RNA, 19 nt, Homo sapiens
  misc_RNA (1)...(19): siRNA sense strand
ggcaacuggaacagacaaa

SEQ ID NO: 2424680 - RNA, 19 nt, Homo sapiens
  misc_RNA (1)...(19): siRNA sense strand
aggagauggacuuugagua

SEQ ID NO: 2424681 - RNA, 19 nt, Homo sapiens
  misc_RNA (1)...(19): siRNA sense strand
aggcaaugaagaaagaguu

SEQ ID NO: 2424682 - RNA, 19 nt, Homo sapiens
  misc_RNA (1)...(19): siRNA sense strand
cccaucaaguacaaggcaa

SEQ ID NO: 2424683 - RNA, 19 nt, Homo sapiens
  misc_RNA (1)...(19): siRNA sense strand
gaagauagcugaagaggac

SEQ ID NO: 2424684 - RNA, 19 nt, Homo sapiens
  misc_RNA (1)...(19): siRNA sense strand
gggcagaguuucaggagcu

SEQ ID NO: 2424685 - RNA, 19 nt, Homo sapiens
  misc_RNA (1)...(19): siRNA sense strand
cggacgaggacuaugagaa

SEQ ID NO: 2424686 - RNA, 19 nt, Homo sapiens
  misc_RNA (1)...(19): siRNA sense strand
gaaagguuguucaaggcua

SEQ ID NO: 2424687 - RNA, 19 nt, Homo sapiens
  misc_RNA (1)...(19): siRNA sense strand
aguucuaccuggagggcga

SEQ ID NO: 2424688 - RNA, 19 nt, Homo sapiens
  misc_RNA (1)...(19): siRNA sense strand
cgcaagagcuggauggccu

SEQ ID NO: 2424689 - RNA, 19 nt, Homo sapiens
  misc_RNA (1)...(19): siRNA sense strand
ccggaaggcuugaggaugc

SEQ ID NO: 2424690 - RNA, 19 nt, Homo sapiens
  misc_RNA (1)...(19): siRNA sense strand
cggacaaugaagacuauga

SEQ ID NO: 2424691 - RNA, 19 nt, Homo sapiens
  misc_RNA (1)...(19): siRNA sense strand
augaagacuaugagcacga

SEQ ID NO: 2424692 - RNA, 19 nt, Homo sapiens
  misc_RNA (1)...(19): siRNA sense strand
ugaagauagcugaagagga

SEQ ID NO: 2424693 - RNA, 19 nt, Homo sapiens
  misc_RNA (1)...(19): siRNA sense strand
cuucaugucccaagagcaa

SEQ ID NO: 2424694 - RNA, 19 nt, Homo sapiens
  misc_RNA (1)...(19): siRNA sense strand
ccgaggagggagagaaguu

SEQ ID NO: 2424695 - RNA, 19 nt, Homo sapiens
  misc_RNA (1)...(19): siRNA sense strand
augacaacauugaggacau

SEQ ID NO: 2424696 - RNA, 19 nt, Homo sapiens
  misc_RNA (1)...(19): siRNA sense strand
agaaguuggaccaggaaga

SEQ ID NO: 2424697 - RNA, 19 nt, Homo sapiens
  misc_RNA (1)...(19): siRNA sense strand
gagagaaguuggaccagga

SEQ ID NO: 2424698 - RNA, 19 nt, Homo sapiens
  misc_RNA (1)...(19): siRNA sense strand
cgggaagguggcagugcaa

SEQ ID NO: 2424699 - RNA, 19 nt, Homo sapiens
  misc_RNA (1)...(19): siRNA sense strand
gggucaaguccacaggcaa

SEQ ID NO: 2424700 - RNA, 19 nt, Homo sapiens
  misc_RNA (1)...(19): siRNA sense strand
cugcauaagcuggguguau

SEQ ID NO: 2424701 - RNA, 19 nt, Homo sapiens
  misc_RNA (1)...(19): siRNA sense strand
aagacgaggaccaggugaa

SEQ ID NO: 2424702 - RNA, 19 nt, Homo sapiens
  misc_RNA (1)...(19): siRNA sense strand
gggcaaugucuggagguuu

SEQ ID NO: 2424703 - RNA, 19 nt, Homo sapiens
  misc_RNA (1)...(19): siRNA sense strand
gugaagaucuccuggcucu

SEQ ID NO: 2424704 - RNA, 19 nt, Homo sapiens
  misc_RNA (1)...(19): siRNA sense strand
cuguggucaucgagucaua

SEQ ID NO: 2424705 - RNA, 19 nt, Homo sapiens
  misc_RNA (1)...(19): siRNA sense strand
agggagagaaguuggacca

SEQ ID NO: 2424706 - RNA, 19 nt, Homo sapiens
  misc_RNA (1)...(19): siRNA sense strand
gcucauauuccuagggcug

SEQ ID NO: 2424707 - RNA, 19 nt, Homo sapiens
  misc_RNA (1)...(19): siRNA sense strand
agagacgaguucugggcau

SEQ ID NO: 2424708 - RNA, 19 nt, Homo sapiens
  misc_RNA (1)...(19): siRNA sense strand
ggccaauggaccaacaaga

SEQ ID NO: 2424709 - RNA, 19 nt, Homo sapiens
  misc_RNA (1)...(19): siRNA sense strand
cagccaagggagugucaca

SEQ ID NO: 2424710 - RNA, 19 nt, Homo sapiens
  misc_RNA (1)...(19): siRNA sense strand
cugauguauuagaggaaau

SEQ ID NO: 2424711 - RNA, 19 nt, Homo sapiens
  misc_RNA (1)...(19): siRNA sense strand
aacuaaugauggagaagaa

SEQ ID NO: 2424712 - RNA, 19 nt, Homo sapiens
  misc_RNA (1)...(19): siRNA sense strand
gggcagaaucauuagcgaa

SEQ ID NO: 2424713 - RNA, 19 nt, Homo sapiens
  misc_RNA (1)...(19): siRNA sense strand
agaauauacacaaggaaga

SEQ ID NO: 2424714 - RNA, 19 nt, Homo sapiens
  misc_RNA (1)...(19): siRNA sense strand
gcauccaagaagaggagaa

SEQ ID NO: 2424715 - RNA, 19 nt, Homo sapiens
  misc_RNA (1)...(19): siRNA sense strand
ucucagaaacaaaggcaau

SEQ ID NO: 2424716 - RNA, 19 nt, Homo sapiens
  misc_RNA (1)...(19): siRNA sense strand
agcugaaguuacagaagaa

SEQ ID NO: 2424717 - RNA, 19 nt, Homo sapiens
  misc_RNA (1)...(19): siRNA sense strand
ggagagaugugaaagggca

SEQ ID NO: 2424718 - RNA, 19 nt, Homo sapiens
  misc_RNA (1)...(19): siRNA sense strand
acgacuagacagagcauuu

SEQ ID NO: 2424719 - RNA, 19 nt, Homo sapiens
  misc_RNA (1)...(19): siRNA sense strand
cauccaagaagaggagaaa

SEQ ID NO: 2424720 - RNA, 19 nt, Homo sapiens
  misc_RNA (1)...(19): siRNA sense strand
cagcaguggcacaaagaca

SEQ ID NO: 2424721 - RNA, 19 nt, Homo sapiens
  misc_RNA (1)...(19): siRNA sense strand
gagcaucagcaguggcaca

SEQ ID NO: 2424722 - RNA, 19 nt, Homo sapiens
  misc_RNA (1)...(19): siRNA sense strand
uggucaagggcaagucaaa

SEQ ID NO: 2424723 - RNA, 19 nt, Homo sapiens
  misc_RNA (1)...(19): siRNA sense strand
acaaaggcaaugugcagaa

SEQ ID NO: 2424724 - RNA, 19 nt, Homo sapiens
  misc_RNA (1)...(19): siRNA sense strand
cccaaauugcugucauaua

SEQ ID NO: 2424725 - RNA, 19 nt, Homo sapiens
  misc_RNA (1)...(19): siRNA sense strand
cugaaguuacagaagaauu

SEQ ID NO: 2424726 - RNA, 19 nt, Homo sapiens
  misc_RNA (1)...(19): siRNA sense strand
uacagaagaagaagagaau

SEQ ID NO: 2424727 - RNA, 19 nt, Homo sapiens
  misc_RNA (1)...(19): siRNA sense strand
guaucugcuauauggauua

SEQ ID NO: 2424728 - RNA, 19 nt, Homo sapiens
  misc_RNA (1)...(19): siRNA sense strand
cagaaucauuagcgaaaau

SEQ ID NO: 2424729 - RNA, 19 nt, Homo sapiens
  misc_RNA (1)...(19): siRNA sense strand
gucaaagcaacuaggaaaa

SEQ ID NO: 2424730 - RNA, 19 nt, Homo sapiens
  misc_RNA (1)...(19): siRNA sense strand
acaugaaguucgggacuau

SEQ ID NO: 2424731 - RNA, 19 nt, Homo sapiens
  misc_RNA (1)...(19): siRNA sense strand
gcuugauaaaggaugauuu

SEQ ID NO: 2424732 - RNA, 19 nt, Homo sapiens
  misc_RNA (1)...(19): siRNA sense strand
uggcacaaagacagaaaga

SEQ ID NO: 2424733 - RNA, 19 nt, Homo sapiens
  misc_RNA (1)...(19): siRNA sense strand
uauuagaggaaaugcugaa

SEQ ID NO: 2424734 - RNA, 19 nt, Homo sapiens
  misc_RNA (1)...(19): siRNA sense strand
ugaaaguuugaguggaaca

SEQ ID NO: 2424735 - RNA, 19 nt, Homo sapiens
  misc_RNA (1)...(19): siRNA sense strand
gggacuaucuucuguggca

SEQ ID NO: 2424736 - RNA, 19 nt, Homo sapiens
  misc_RNA (1)...(19): siRNA sense strand
guguacgcuucgaggacuu

SEQ ID NO: 2424737 - RNA, 19 nt, Homo sapiens
  misc_RNA (1)...(19): siRNA sense strand
cuaaugauggagaagaaaa

SEQ ID NO: 2424738 - RNA, 19 nt, Homo sapiens
  misc_RNA (1)...(19): siRNA sense strand
gugcuuuguaucugcuaua

SEQ ID NO: 2424739 - RNA, 19 nt, Homo sapiens
  misc_RNA (1)...(19): siRNA sense strand
augugaaagggcagaauca

SEQ ID NO: 2424740 - RNA, 19 nt, Homo sapiens
  misc_RNA (1)...(19): siRNA sense strand
aaacaaaagaucagaguug

SEQ ID NO: 2424741 - RNA, 19 nt, Homo sapiens
  misc_RNA (1)...(19): siRNA sense strand
cagaauauacacaaggaag

SEQ ID NO: 2424742 - RNA, 19 nt, Homo sapiens
  misc_RNA (1)...(19): siRNA sense strand
cuuuaaacacagaggaaga

SEQ ID NO: 2424743 - RNA, 19 nt, Homo sapiens
  misc_RNA (1)...(19): siRNA sense strand
aaauaaaccaggaggagca

SEQ ID NO: 2424744 - RNA, 19 nt, Homo sapiens
  misc_RNA (1)...(19): siRNA sense strand
gcaaagggaaacaccgcaa

SEQ ID NO: 2424745 - RNA, 19 nt, Homo sapiens
  misc_RNA (1)...(19): siRNA sense strand
cgaaacauacacaagggaa

SEQ ID NO: 2424746 - RNA, 19 nt, Homo sapiens
  misc_RNA (1)...(19): siRNA sense strand
ggaaugaaccguuugacga

SEQ ID NO: 2424747 - RNA, 19 nt, Homo sapiens
  misc_RNA (1)...(19): siRNA sense strand
caagauaacccuucgcaca

SEQ ID NO: 2424748 - RNA, 19 nt, Homo sapiens
  misc_RNA (1)...(19): siRNA sense strand
cugcagaagaguccaggaa

SEQ ID NO: 2424749 - RNA, 19 nt, Homo sapiens
  misc_RNA (1)...(19): siRNA sense strand
gaagaguuguugccgggua

SEQ ID NO: 2424750 - RNA, 19 nt, Homo sapiens
  misc_RNA (1)...(19): siRNA sense strand
gucuuuaaacacagaggaa

SEQ ID NO: 2424751 - RNA, 19 nt, Homo sapiens
  misc_RNA (1)...(19): siRNA sense strand
agguaaaauugaagaguug

SEQ ID NO: 2424752 - RNA, 19 nt, Homo sapiens
  misc_RNA (1)...(19): siRNA sense strand
cucucaacguuuaaggaau

SEQ ID NO: 2424753 - RNA, 19 nt, Homo sapiens
  misc_RNA (1)...(19): siRNA sense strand
cuacaagaggauuaugaca

SEQ ID NO: 2424754 - RNA, 19 nt, Homo sapiens
  misc_RNA (1)...(19): siRNA sense strand
gggaauuguugaugccuuc

SEQ ID NO: 2424755 - RNA, 19 nt, Homo sapiens
  misc_RNA (1)...(19): siRNA sense strand
cuucaaaggaaaguggaau

SEQ ID NO: 2424756 - RNA, 19 nt, Homo sapiens
  misc_RNA (1)...(19): siRNA sense strand
gaggauuaugacauggaau

SEQ ID NO: 2424757 - RNA, 19 nt, Homo sapiens
  misc_RNA (1)...(19): siRNA sense strand
aggcugacuugucggcaau

SEQ ID NO: 2424758 - RNA, 19 nt, Homo sapiens
  misc_RNA (1)...(19): siRNA sense strand
ugaagaaggcaccgaggca

SEQ ID NO: 2424759 - RNA, 19 nt, Homo sapiens
  misc_RNA (1)...(19): siRNA sense strand
agauacugugucaagauaa

SEQ ID NO: 2424760 - RNA, 19 nt, Homo sapiens
  misc_RNA (1)...(19): siRNA sense strand
aguucgugcacaagaguuu

SEQ ID NO: 2424761 - RNA, 19 nt, Homo sapiens
  misc_RNA (1)...(19): siRNA sense strand
agcaaaggccagugcagau

SEQ ID NO: 2424762 - RNA, 19 nt, Homo sapiens
  misc_RNA (1)...(19): siRNA sense strand
auacaauaggaguggaauu

SEQ ID NO: 2424763 - RNA, 19 nt, Homo sapiens
  misc_RNA (1)...(19): siRNA sense strand
gauaauaaauguugguggu

SEQ ID NO: 2424764 - RNA, 19 nt, Homo sapiens
  misc_RNA (1)...(19): siRNA sense strand
aguucuugguuauuggaaa

SEQ ID NO: 2424765 - RNA, 19 nt, Homo sapiens
  misc_RNA (1)...(19): siRNA sense strand
ucauacaauaggaguggaa

SEQ ID NO: 2424766 - RNA, 19 nt, Homo sapiens
  misc_RNA (1)...(19): siRNA sense strand
agaaggaccuggaugcaga

SEQ ID NO: 2424767 - RNA, 19 nt, Homo sapiens
  misc_RNA (1)...(19): siRNA sense strand
agaauguagaagaggcuuu

SEQ ID NO: 2424768 - RNA, 19 nt, Homo sapiens
  misc_RNA (1)...(19): siRNA sense strand
cggccauguccgaaaccua

SEQ ID NO: 2424769 - RNA, 19 nt, Homo sapiens
  misc_RNA (1)...(19): siRNA sense strand
gguuauuggaaaugcagga

SEQ ID NO: 2424770 - RNA, 19 nt, Homo sapiens
  misc_RNA (1)...(19): siRNA sense strand
aaaugcaggaacuggcaaa

SEQ ID NO: 2424771 - RNA, 19 nt, Homo sapiens
  misc_RNA (1)...(19): siRNA sense strand
ggagaauguagaagaggcu

SEQ ID NO: 2424772 - RNA, 19 nt, Homo sapiens
  misc_RNA (1)...(19): siRNA sense strand
ccagauuugcucaagaaaa

SEQ ID NO: 2424773 - RNA, 19 nt, Homo sapiens
  misc_RNA (1)...(19): siRNA sense strand
gguuaacagaugcccgaau

SEQ ID NO: 2424774 - RNA, 19 nt, Homo sapiens
  misc_RNA (1)...(19): siRNA sense strand
ggaacaaacugaagagcau

SEQ ID NO: 2424775 - RNA, 19 nt, Homo sapiens
  misc_RNA (1)...(19): siRNA sense strand
ccaaauacaaugaagcuca

SEQ ID NO: 2424776 - RNA, 19 nt, Homo sapiens
  misc_RNA (1)...(19): siRNA sense strand
ccaacaacguccggaacaa

SEQ ID NO: 2424777 - RNA, 19 nt, Homo sapiens
  misc_RNA (1)...(19): siRNA sense strand
cugugaaauaccagaguca

SEQ ID NO: 2424778 - RNA, 19 nt, Homo sapiens
  misc_RNA (1)...(19): siRNA sense strand
uggagcagcugaaggccaa

SEQ ID NO: 2424779 - RNA, 19 nt, Homo sapiens
  misc_RNA (1)...(19): siRNA sense strand
cggaacaaacugaagagca

SEQ ID NO: 2424780 - RNA, 19 nt, Homo sapiens
  misc_RNA (1)...(19): siRNA sense strand
uuguggaggugaugaccaa

SEQ ID NO: 2424781 - RNA, 19 nt, Homo sapiens
  misc_RNA (1)...(19): siRNA sense strand
gggccaacaacguccggaa

SEQ ID NO: 2424782 - RNA, 19 nt, Homo sapiens
  misc_RNA (1)...(19): siRNA sense strand
aggccaagcagcugacaca

SEQ ID NO: 2424783 - RNA, 19 nt, Homo sapiens
  misc_RNA (1)...(19): siRNA sense strand
ccgaugaggagcuggagga

SEQ ID NO: 2424784 - RNA, 19 nt, Homo sapiens
  misc_RNA (1)...(19): siRNA sense strand
ugguggagaaucaggguga

SEQ ID NO: 2424785 - RNA, 19 nt, Homo sapiens
  misc_RNA (1)...(19): siRNA sense strand
aaacugaagagcauggaga

SEQ ID NO: 2424786 - RNA, 19 nt, Homo sapiens
  misc_RNA (1)...(19): siRNA sense strand
caaugaagcucaaguggac

SEQ ID NO: 2424787 - RNA, 19 nt, Homo sapiens
  misc_RNA (1)...(19): siRNA sense strand
auguagaggaggcuaagaa

SEQ ID NO: 2424788 - RNA, 19 nt, Homo sapiens
  misc_RNA (1)...(19): siRNA sense strand
ucucagaacauguagagga

SEQ ID NO: 2424789 - RNA, 19 nt, Homo sapiens
  misc_RNA (1)...(19): siRNA sense strand
ugaugauacugaugcgguu

SEQ ID NO: 2424790 - RNA, 19 nt, Homo sapiens
  misc_RNA (1)...(19): siRNA sense strand
caacaacguccggaacaaa

SEQ ID NO: 2424791 - RNA, 19 nt, Homo sapiens
  misc_RNA (1)...(19): siRNA sense strand
gcacgagaugaaacgaaaa

SEQ ID NO: 2424792 - RNA, 19 nt, Homo sapiens
  misc_RNA (1)...(19): siRNA sense strand
agaagagggugaagggcaa

SEQ ID NO: 2424793 - RNA, 19 nt, Homo sapiens
  misc_RNA (1)...(19): siRNA sense strand
ugguauaaauagugacaca

SEQ ID NO: 2424794 - RNA, 19 nt, Homo sapiens
  misc_RNA (1)...(19): siRNA sense strand
cuucauuguuggagaauca

SEQ ID NO: 2424795 - RNA, 19 nt, Homo sapiens
  misc_RNA (1)...(19): siRNA sense strand
ggggaaagauauagagcuu

SEQ ID NO: 2424796 - RNA, 19 nt, Homo sapiens
  misc_RNA (1)...(19): siRNA sense strand
uuaaauaugugguuggcaa

SEQ ID NO: 2424797 - RNA, 19 nt, Homo sapiens
  misc_RNA (1)...(19): siRNA sense strand
agaagaaacucucagggaa

SEQ ID NO: 2424798 - RNA, 19 nt, Homo sapiens
  misc_RNA (1)...(19): siRNA sense strand
auuuaaugguggacacaua

SEQ ID NO: 2424799 - RNA, 19 nt, Homo sapiens
  misc_RNA (1)...(19): siRNA sense strand
gaauaaaagaacugaguga

SEQ ID NO: 2424800 - RNA, 19 nt, Homo sapiens
  misc_RNA (1)...(19): siRNA sense strand
gagaaagcgguuugagaca

SEQ ID NO: 2424801 - RNA, 19 nt, Homo sapiens
  misc_RNA (1)...(19): siRNA sense strand
ucaacgaagugauggaaaa

SEQ ID NO: 2424802 - RNA, 19 nt, Homo sapiens
  misc_RNA (1)...(19): siRNA sense strand
ucuugauucugaugggaaa

SEQ ID NO: 2424803 - RNA, 19 nt, Homo sapiens
  misc_RNA (1)...(19): siRNA sense strand
cugcuggagugucggauaa

SEQ ID NO: 2424804 - RNA, 19 nt, Homo sapiens
  misc_RNA (1)...(19): siRNA sense strand
ccagcgaagaagaggguga

SEQ ID NO: 2424805 - RNA, 19 nt, Homo sapiens
  misc_RNA (1)...(19): siRNA sense strand
cuguaggagagcagacuua

SEQ ID NO: 2424806 - RNA, 19 nt, Homo sapiens
  misc_RNA (1)...(19): siRNA sense strand
ggguaaagaacugaaggaa

SEQ ID NO: 2424807 - RNA, 19 nt, Homo sapiens
  misc_RNA (1)...(19): siRNA sense strand
gccagaaguggguggagaa

SEQ ID NO: 2424808 - RNA, 19 nt, Homo sapiens
  misc_RNA (1)...(19): siRNA sense strand
cuguagaacuaguccuuau

SEQ ID NO: 2424809 - RNA, 19 nt, Homo sapiens
  misc_RNA (1)...(19): siRNA sense strand
agguugagaaugagcggua

SEQ ID NO: 2424810 - RNA, 19 nt, Homo sapiens
  misc_RNA (1)...(19): siRNA sense strand
aaagcauauuugaggaaca

SEQ ID NO: 2424811 - RNA, 19 nt, Homo sapiens
  misc_RNA (1)...(19): siRNA sense strand
gagaggaauuuauaggcuu

SEQ ID NO: 2424812 - RNA, 19 nt, Homo sapiens
  misc_RNA (1)...(19): siRNA sense strand
auuaggaacaauugaggaa

SEQ ID NO: 2424813 - RNA, 19 nt, Homo sapiens
  misc_RNA (1)...(19): siRNA sense strand
gaagaaacucucagggaag

SEQ ID NO: 2424814 - RNA, 19 nt, Homo sapiens
  misc_RNA (1)...(19): siRNA sense strand
uuggagaaucaaauggaaa

SEQ ID NO: 2424815 - RNA, 19 nt, Homo sapiens
  misc_RNA (1)...(19): siRNA sense strand
cgagauaaugcaauaccaa

SEQ ID NO: 2424816 - RNA, 19 nt, Homo sapiens
  misc_RNA (1)...(19): siRNA sense strand
ucauaaccuaagagaggaa

SEQ ID NO: 2424817 - RNA, 19 nt, Homo sapiens
  misc_RNA (1)...(19): siRNA sense strand
uaaauaugugguuggcaaa

SEQ ID NO: 2424818 - RNA, 19 nt, Homo sapiens
  misc_RNA (1)...(19): siRNA sense strand
uuacaagagccuuugggaa

SEQ ID NO: 2424819 - RNA, 19 nt, Homo sapiens
  misc_RNA (1)...(19): siRNA sense strand
cuauauagcuggccgagca

SEQ ID NO: 2424820 - RNA, 19 nt, Homo sapiens
  misc_RNA (1)...(19): siRNA sense strand
caguaaagaaagggguaaa

SEQ ID NO: 2424821 - RNA, 19 nt, Homo sapiens
  misc_RNA (1)...(19): siRNA sense strand
aggacaguucuucgagaua

SEQ ID NO: 2424822 - RNA, 19 nt, Homo sapiens
  misc_RNA (1)...(19): siRNA sense strand
agauaaugcaauaccaaca

SEQ ID NO: 2424823 - RNA, 19 nt, Homo sapiens
  misc_RNA (1)...(19): siRNA sense strand
acgaagugauggaaaauau

SEQ ID NO: 2424824 - RNA, 19 nt, Homo sapiens
  misc_RNA (1)...(19): siRNA sense strand
agaaugagcgguaugaaaa

SEQ ID NO: 2424825 - RNA, 19 nt, Homo sapiens
  misc_RNA (1)...(19): siRNA sense strand
cgaaagcgucuuaaagcau

SEQ ID NO: 2424826 - RNA, 19 nt, Homo sapiens
  misc_RNA (1)...(19): siRNA sense strand
ggauaaauucuggugaaga

SEQ ID NO: 2424827 - RNA, 19 nt, Homo sapiens
  misc_RNA (1)...(19): siRNA sense strand
cugagaaagcgguuugaga

SEQ ID NO: 2424828 - RNA, 19 nt, Homo sapiens
  misc_RNA (1)...(19): siRNA sense strand
uuaugaagccgaugcagaa

SEQ ID NO: 2424829 - RNA, 19 nt, Homo sapiens
  misc_RNA (1)...(19): siRNA sense strand
gacaguucuucgagauaau

SEQ ID NO: 2424830 - RNA, 19 nt, Homo sapiens
  misc_RNA (1)...(19): siRNA sense strand
aagaagagggugaagggca

SEQ ID NO: 2424831 - RNA, 19 nt, Homo sapiens
  misc_RNA (1)...(19): siRNA sense strand
cagauaacuuucaggcacu

SEQ ID NO: 2424832 - RNA, 19 nt, Homo sapiens
  misc_RNA (1)...(19): siRNA sense strand
agucaugggacaacucaaa

SEQ ID NO: 2424833 - RNA, 19 nt, Homo sapiens
  misc_RNA (1)...(19): siRNA sense strand
guggagaacuguaggagag

SEQ ID NO: 2424834 - RNA, 19 nt, Homo sapiens
  misc_RNA (1)...(19): siRNA sense strand
ugugaugaagguugagaau

SEQ ID NO: 2424835 - RNA, 19 nt, Homo sapiens
  misc_RNA (1)...(19): siRNA sense strand
uggaauaacuauauagcug

SEQ ID NO: 2424836 - RNA, 19 nt, Homo sapiens
  misc_RNA (1)...(19): siRNA sense strand
ucaauacgucggaggaaca

SEQ ID NO: 2424837 - RNA, 19 nt, Homo sapiens
  misc_RNA (1)...(19): siRNA sense strand
ccuacagauaauuccgaaa

SEQ ID NO: 2424838 - RNA, 19 nt, Homo sapiens
  misc_RNA (1)...(19): siRNA sense strand
gguggagaacuguaggaga

SEQ ID NO: 2424839 - RNA, 19 nt, Homo sapiens
  misc_RNA (1)...(19): siRNA sense strand
acgaaagcgucuuaaagca

SEQ ID NO: 2424840 - RNA, 19 nt, Homo sapiens
  misc_RNA (1)...(19): siRNA sense strand
agacacagaaaacgaauaa

SEQ ID NO: 2424841 - RNA, 19 nt, Homo sapiens
  misc_RNA (1)...(19): siRNA sense strand
uugaagagaaggaaaacaa

SEQ ID NO: 2424842 - RNA, 19 nt, Homo sapiens
  misc_RNA (1)...(19): siRNA sense strand
gcauauuugaggaacacuu

SEQ ID NO: 2424843 - RNA, 19 nt, Homo sapiens
  misc_RNA (1)...(19): siRNA sense strand
gagaaggaaaacaaagaau

SEQ ID NO: 2424844 - RNA, 19 nt, Homo sapiens
  misc_RNA (1)...(19): siRNA sense strand
gauucugaugggaaagcaa

SEQ ID NO: 2424845 - RNA, 19 nt, Homo sapiens
  misc_RNA (1)...(19): siRNA sense strand
cuggagugucggauaaauu

SEQ ID NO: 2424846 - RNA, 19 nt, Homo sapiens
  misc_RNA (1)...(19): siRNA sense strand
cuuaugaagccgaugcaga

SEQ ID NO: 2424847 - RNA, 19 nt, Homo sapiens
  misc_RNA (1)...(19): siRNA sense strand
uaggaacaauugaggaagu

SEQ ID NO: 2424848 - RNA, 19 nt, Homo sapiens
  misc_RNA (1)...(19): siRNA sense strand
ugcugaagguccuguguau

SEQ ID NO: 2424849 - RNA, 19 nt, Homo sapiens
  misc_RNA (1)...(19): siRNA sense strand
cuucugagcaggaacaaaa

SEQ ID NO: 2424850 - RNA, 19 nt, Homo sapiens
  misc_RNA (1)...(19): siRNA sense strand
gugaagggcaagaugagga

SEQ ID NO: 2424851 - RNA, 19 nt, Homo sapiens
  misc_RNA (1)...(19): siRNA sense strand
ugaugaaacuucugagcag

SEQ ID NO: 2424852 - RNA, 19 nt, Homo sapiens
  misc_RNA (1)...(19): siRNA sense strand
ggggauuaaauauggagua

SEQ ID NO: 2424853 - RNA, 19 nt, Homo sapiens
  misc_RNA (1)...(19): siRNA sense strand
ggaaacaucucguggagca

SEQ ID NO: 2424854 - RNA, 19 nt, Homo sapiens
  misc_RNA (1)...(19): siRNA sense strand
acuugaagauggugacaga

SEQ ID NO: 2424855 - RNA, 19 nt, Homo sapiens
  misc_RNA (1)...(19): siRNA sense strand
cuggaugcacagaaagaaa

SEQ ID NO: 2424856 - RNA, 19 nt, Homo sapiens
  misc_RNA (1)...(19): siRNA sense strand
aggacacaguaaagaggua

SEQ ID NO: 2424857 - RNA, 19 nt, Homo sapiens
  misc_RNA (1)...(19): siRNA sense strand
uugccaaguuugaagagaa

SEQ ID NO: 2424858 - RNA, 19 nt, Homo sapiens
  misc_RNA (1)...(19): siRNA sense strand
cuugaaacagauagaagua

SEQ ID NO: 2424859 - RNA, 19 nt, Homo sapiens
  misc_RNA (1)...(19): siRNA sense strand
aaguacaaccagagcauau

SEQ ID NO: 2424860 - RNA, 19 nt, Homo sapiens
  misc_RNA (1)...(19): siRNA sense strand
ccgaguggaggaagcaaua

SEQ ID NO: 2424861 - RNA, 19 nt, Homo sapiens
  misc_RNA (1)...(19): siRNA sense strand
ggaccaggaugauggggua

SEQ ID NO: 2424862 - RNA, 19 nt, Homo sapiens
  misc_RNA (1)...(19): siRNA sense strand
gggauauuguggugccuga

SEQ ID NO: 2424863 - RNA, 19 nt, Homo sapiens
  misc_RNA (1)...(19): siRNA sense strand
aguauauggcccuugauaa

SEQ ID NO: 2424864 - RNA, 19 nt, Homo sapiens
  misc_RNA (1)...(19): siRNA sense strand
acagaugaggacacaguaa

SEQ ID NO: 2424865 - RNA, 19 nt, Homo sapiens
  misc_RNA (1)...(19): siRNA sense strand
gcgacaacgcagaaagcca

SEQ ID NO: 2424866 - RNA, 19 nt, Homo sapiens
  misc_RNA (1)...(19): siRNA sense strand
gugccauaauagaggaugu

SEQ ID NO: 2424867 - RNA, 19 nt, Homo sapiens
  misc_RNA (1)...(19): siRNA sense strand
gcucgugacacuaagguau

SEQ ID NO: 2424868 - RNA, 19 nt, Homo sapiens
  misc_RNA (1)...(19): siRNA sense strand
agaugauggaccaggauga

SEQ ID NO: 2424869 - RNA, 19 nt, Homo sapiens
  misc_RNA (1)...(19): siRNA sense strand
ccauaauagaggaugugau

SEQ ID NO: 2424870 - RNA, 19 nt, Homo sapiens
  misc_RNA (1)...(19): siRNA sense strand
ucugaauaacuguggugaa

SEQ ID NO: 2424871 - RNA, 19 nt, Homo sapiens
  misc_RNA (1)...(19): siRNA sense strand
gguauugauagaagacaca

SEQ ID NO: 2424872 - RNA, 19 nt, Homo sapiens
  misc_RNA (1)...(19): siRNA sense strand
ccaaguuugaagagaaguu

SEQ ID NO: 2424873 - RNA, 19 nt, Homo sapiens
  misc_RNA (1)...(19): siRNA sense strand
aguaagggccuguugccaa

SEQ ID NO: 2424874 - RNA, 19 nt, Homo sapiens
  misc_RNA (1)...(19): siRNA sense strand
uaauagaggaugugauucu

SEQ ID NO: 2424875 - RNA, 19 nt, Homo sapiens
  misc_RNA (1)...(19): siRNA sense strand
gggccauuguucagugcau

SEQ ID NO: 2424876 - RNA, 19 nt, Homo sapiens
  misc_RNA (1)...(19): siRNA sense strand
ucacaaagaacgaggucac

SEQ ID NO: 2424877 - RNA, 19 nt, Homo sapiens
  misc_RNA (1)...(19): siRNA sense strand
gaccaaugaacuugaagau

SEQ ID NO: 2424878 - RNA, 19 nt, Homo sapiens
  misc_RNA (1)...(19): siRNA sense strand
uagaacagaugauggacca

SEQ ID NO: 2424879 - RNA, 19 nt, Homo sapiens
  misc_RNA (1)...(19): siRNA sense strand
ggucauggaaguacaacca

SEQ ID NO: 2424880 - RNA, 19 nt, Homo sapiens
  misc_RNA (1)...(19): siRNA sense strand
ccaugaggaacguguccaa

SEQ ID NO: 2424881 - RNA, 19 nt, Homo sapiens
  misc_RNA (1)...(19): siRNA sense strand
gccgauaucgagacacaaa

SEQ ID NO: 2424882 - RNA, 19 nt, Homo sapiens
  misc_RNA (1)...(19): siRNA sense strand
cagaagaaucggucaugga

SEQ ID NO: 2424883 - RNA, 19 nt, Homo sapiens
  misc_RNA (1)...(19): siRNA sense strand
ugacaagauccuggaaaca

SEQ ID NO: 2424884 - RNA, 19 nt, Homo sapiens
  misc_RNA (1)...(19): siRNA sense strand
cuaagguauugauagaaga

SEQ ID NO: 2424885 - RNA, 19 nt, Homo sapiens
  misc_RNA (1)...(19): siRNA sense strand
augacaagauccuggaaac

SEQ ID NO: 2424886 - RNA, 19 nt, Homo sapiens
  misc_RNA (1)...(19): siRNA sense strand
caugacaagauccuggaaa

SEQ ID NO: 2424887 - RNA, 19 nt, Homo sapiens
  misc_RNA (1)...(19): siRNA sense strand
uugaagauggugacagaca

SEQ ID NO: 2424888 - RNA, 19 nt, Homo sapiens
  misc_RNA (1)...(19): siRNA sense strand
gugcauuccugcuuggcuu

SEQ ID NO: 2424889 - RNA, 19 nt, Homo sapiens
  misc_RNA (1)...(19): siRNA sense strand
agaagacacagaugaugaa

SEQ ID NO: 2424890 - RNA, 19 nt, Homo sapiens
  misc_RNA (1)...(19): siRNA sense strand
ggaggaagcaauacaucca

SEQ ID NO: 2424891 - RNA, 19 nt, Homo sapiens
  misc_RNA (1)...(19): siRNA sense strand
ucuacaguuuggagcucaa

SEQ ID NO: 2424892 - RNA, 19 nt, Homo sapiens
  misc_RNA (1)...(19): siRNA sense strand
gagcaauugucuuggguga

SEQ ID NO: 2424893 - RNA, 19 nt, Homo sapiens
  misc_RNA (1)...(19): siRNA sense strand
cacaagaaggagauggaaa

SEQ ID NO: 2424894 - RNA, 19 nt, Homo sapiens
  misc_RNA (1)...(19): siRNA sense strand
acaagaaggagauggaaaa

SEQ ID NO: 2424895 - RNA, 19 nt, Homo sapiens
  misc_RNA (1)...(19): siRNA sense strand
gagcuaaggacuuugggaa

SEQ ID NO: 2424896 - RNA, 19 nt, Homo sapiens
  misc_RNA (1)...(19): siRNA sense strand
guguaagagaguuaaacaa

SEQ ID NO: 2424897 - RNA, 19 nt, Homo sapiens
  misc_RNA (1)...(19): siRNA sense strand
gaugacaaguccaggccua

SEQ ID NO: 2424898 - RNA, 19 nt, Homo sapiens
  misc_RNA (1)...(19): siRNA sense strand
aacaaguguaagagaguua

SEQ ID NO: 2424899 - RNA, 19 nt, Homo sapiens
  misc_RNA (1)...(19): siRNA sense strand
gggaagcagugguagcgaa

SEQ ID NO: 2424900 - RNA, 19 nt, Homo sapiens
  misc_RNA (1)...(19): siRNA sense strand
auguaaugagugaagguaa

SEQ ID NO: 2424901 - RNA, 19 nt, Homo sapiens
  misc_RNA (1)...(19): siRNA sense strand
ccucguagcuucugggacu

SEQ ID NO: 2424902 - RNA, 19 nt, Homo sapiens
  misc_RNA (1)...(19): siRNA sense strand
auauaauuguggagcuuca

SEQ ID NO: 2424903 - RNA, 19 nt, Homo sapiens
  misc_RNA (1)...(19): siRNA sense strand
guuucugccuaaagggaga

SEQ ID NO: 2424904 - RNA, 19 nt, Homo sapiens
  misc_RNA (1)...(19): siRNA sense strand
ccuacaacagagaugacaa

SEQ ID NO: 2424905 - RNA, 19 nt, Homo sapiens
  misc_RNA (1)...(19): siRNA sense strand
gucaguucuucuagagcua

SEQ ID NO: 2424906 - RNA, 19 nt, Homo sapiens
  misc_RNA (1)...(19): siRNA sense strand
cuuacgacuucgagagaac

SEQ ID NO: 2424907 - RNA, 19 nt, Homo sapiens
  misc_RNA (1)...(19): siRNA sense strand
cugugaagacccugauuga

SEQ ID NO: 2424908 - RNA, 19 nt, Homo sapiens
  misc_RNA (1)...(19): siRNA sense strand
ucaacaaguguaagagagu

SEQ ID NO: 2424909 - RNA, 19 nt, Homo sapiens
  misc_RNA (1)...(19): siRNA sense strand
cugacugugcuaaagaaua

SEQ ID NO: 2424910 - RNA, 19 nt, Homo sapiens
  misc_RNA (1)...(19): siRNA sense strand
caaguguaagagaguuaaa

SEQ ID NO: 2424911 - RNA, 19 nt, Homo sapiens
  misc_RNA (1)...(19): siRNA sense strand
auaaacuggagaaggaaca

SEQ ID NO: 2424912 - RNA, 19 nt, Homo sapiens
  misc_RNA (1)...(19): siRNA sense strand
cugagagacuucaaaacaa

SEQ ID NO: 2424913 - RNA, 19 nt, Homo sapiens
  misc_RNA (1)...(19): siRNA sense strand
guggagaggaggaaccuga

SEQ ID NO: 2424914 - RNA, 19 nt, Homo sapiens
  misc_RNA (1)...(19): siRNA sense strand
agugaagguaaggaagaua

SEQ ID NO: 2424915 - RNA, 19 nt, Homo sapiens
  misc_RNA (1)...(19): siRNA sense strand
cuaaaagagauuucccaaa

SEQ ID NO: 2424916 - RNA, 19 nt, Homo sapiens
  misc_RNA (1)...(19): siRNA sense strand
auggaagacauuaggagaa

SEQ ID NO: 2424917 - RNA, 19 nt, Homo sapiens
  misc_RNA (1)...(19): siRNA sense strand
gaaugagacugguggugga

SEQ ID NO: 2424918 - RNA, 19 nt, Homo sapiens
  misc_RNA (1)...(19): siRNA sense strand
acuacaaagcugaugaaga

SEQ ID NO: 2424919 - RNA, 19 nt, Homo sapiens
  misc_RNA (1)...(19): siRNA sense strand
uggaagaaggagcuggcaa

SEQ ID NO: 2424920 - RNA, 19 nt, Homo sapiens
  misc_RNA (1)...(19): siRNA sense strand
aacuagaaacaaugcguaa

SEQ ID NO: 2424921 - RNA, 19 nt, Homo sapiens
  misc_RNA (1)...(19): siRNA sense strand
gauggaagacauuaggaga

SEQ ID NO: 2424922 - RNA, 19 nt, Homo sapiens
  misc_RNA (1)...(19): siRNA sense strand
cuuaugagaaggauggaga

SEQ ID NO: 2424923 - RNA, 19 nt, Homo sapiens
  misc_RNA (1)...(19): siRNA sense strand
uaugagaaggauggagaaa

SEQ ID NO: 2424924 - RNA, 19 nt, Homo sapiens
  misc_RNA (1)...(19): siRNA sense strand
ggacaguauacgcacaaaa

SEQ ID NO: 2424925 - RNA, 19 nt, Homo sapiens
  misc_RNA (1)...(19): siRNA sense strand
gagaaagccuggaaugcgu

SEQ ID NO: 2424926 - RNA, 19 nt, Homo sapiens
  misc_RNA (1)...(19): siRNA sense strand
acugcaaagcaaaguagaa

SEQ ID NO: 2424927 - RNA, 19 nt, Homo sapiens
  misc_RNA (1)...(19): siRNA sense strand
uguacaugguuuagaucca

SEQ ID NO: 2424928 - RNA, 19 nt, Homo sapiens
  misc_RNA (1)...(19): siRNA sense strand
uggugguggagaaggaauu

SEQ ID NO: 2424929 - RNA, 19 nt, Homo sapiens
  misc_RNA (1)...(19): siRNA sense strand
caguauacgcacaaaauuu

SEQ ID NO: 2424930 - RNA, 19 nt, Homo sapiens
  misc_RNA (1)...(19): siRNA sense strand
ccuaaagagcaaagugccu

SEQ ID NO: 2424931 - RNA, 19 nt, Homo sapiens
  misc_RNA (1)...(19): siRNA sense strand
gaacuagaaacaaugcgua

SEQ ID NO: 2424932 - RNA, 19 nt, Homo sapiens
  misc_RNA (1)...(19): siRNA sense strand
ccuugguguuucaugagaa

SEQ ID NO: 2424933 - RNA, 19 nt, Homo sapiens
  misc_RNA (1)...(19): siRNA sense strand
aaguugaaccagcagacua

SEQ ID NO: 2424934 - RNA, 19 nt, Homo sapiens
  misc_RNA (1)...(19): siRNA sense strand
gaagauaggccgaggacag

SEQ ID NO: 2424935 - RNA, 19 nt, Homo sapiens
  misc_RNA (1)...(19): siRNA sense strand
ucgaagacaacgagcugaa

SEQ ID NO: 2424936 - RNA, 19 nt, Homo sapiens
  misc_RNA (1)...(19): siRNA sense strand
cggagaggacaguauggaa

SEQ ID NO: 2424937 - RNA, 19 nt, Homo sapiens
  misc_RNA (1)...(19): siRNA sense strand
ggaaguacuuugugcagcu

SEQ ID NO: 2424938 - RNA, 19 nt, Homo sapiens
  misc_RNA (1)...(19): siRNA sense strand
acucguuuaucgaagacaa

SEQ ID NO: 2424939 - RNA, 19 nt, Homo sapiens
  misc_RNA (1)...(19): siRNA sense strand
aggacugugucaaggagau

SEQ ID NO: 2424940 - RNA, 19 nt, Homo sapiens
  misc_RNA (1)...(19): siRNA sense strand
gcggacuuccagaucgaaa

SEQ ID NO: 2424941 - RNA, 19 nt, Homo sapiens
  misc_RNA (1)...(19): siRNA sense strand
aagacaacgagcugaacau

SEQ ID NO: 2424942 - RNA, 19 nt, Homo sapiens
  misc_RNA (1)...(19): siRNA sense strand
cugcaauuuuccagauuau

SEQ ID NO: 2424943 - RNA, 19 nt, Homo sapiens
  misc_RNA (1)...(19): siRNA sense strand
gggaagagcuagugaggga

SEQ ID NO: 2424944 - RNA, 19 nt, Homo sapiens
  misc_RNA (1)...(19): siRNA sense strand
cuguagaagauaugagaaa

SEQ ID NO: 2424945 - RNA, 19 nt, Homo sapiens
  misc_RNA (1)...(19): siRNA sense strand
caucaggauuauaggaaau

SEQ ID NO: 2424946 - RNA, 19 nt, Homo sapiens
  misc_RNA (1)...(19): siRNA sense strand
cagaaagcuuugcaggaaa

SEQ ID NO: 2424947 - RNA, 19 nt, Homo sapiens
  misc_RNA (1)...(19): siRNA sense strand
cauuauuacugguggauga

SEQ ID NO: 2424948 - RNA, 19 nt, Homo sapiens
  misc_RNA (1)...(19): siRNA sense strand
ccagcauagcagagaauaa

SEQ ID NO: 2424949 - RNA, 19 nt, Homo sapiens
  misc_RNA (1)...(19): siRNA sense strand
gguaaauccaggaguguau

SEQ ID NO: 2424950 - RNA, 19 nt, Homo sapiens
  misc_RNA (1)...(19): siRNA sense strand
ugggaguacuugaagguaa

SEQ ID NO: 2424951 - RNA, 19 nt, Homo sapiens
  misc_RNA (1)...(19): siRNA sense strand
ccaccggauuugagagauu

SEQ ID NO: 2424952 - RNA, 19 nt, Homo sapiens
  misc_RNA (1)...(19): siRNA sense strand
acagaaguuuggagggauu

SEQ ID NO: 2424953 - RNA, 19 nt, Homo sapiens
  misc_RNA (1)...(19): siRNA sense strand
cgugaaagcagauggauga

SEQ ID NO: 2424954 - RNA, 19 nt, Homo sapiens
  misc_RNA (1)...(19): siRNA sense strand
aggcaauuaaguuggaaua

SEQ ID NO: 2424955 - RNA, 19 nt, Homo sapiens
  misc_RNA (1)...(19): siRNA sense strand
cggaugaagagaagccaaa

SEQ ID NO: 2424956 - RNA, 19 nt, Homo sapiens
  misc_RNA (1)...(19): siRNA sense strand
agaacaauuuggagauaga

SEQ ID NO: 2424957 - RNA, 19 nt, Homo sapiens
  misc_RNA (1)...(19): siRNA sense strand
acaacaaaggcuagaaaga

SEQ ID NO: 2424958 - RNA, 19 nt, Homo sapiens
  misc_RNA (1)...(19): siRNA sense strand
ccaaacuggaaaugauaaa

SEQ ID NO: 2424959 - RNA, 19 nt, Homo sapiens
  misc_RNA (1)...(19): siRNA sense strand
gaaucaacugagagaaauu

SEQ ID NO: 2424960 - RNA, 19 nt, Homo sapiens
  misc_RNA (1)...(19): siRNA sense strand
ggauauacuagcuguagaa

SEQ ID NO: 2424961 - RNA, 19 nt, Homo sapiens
  misc_RNA (1)...(19): siRNA sense strand
gcaagaugugagugaguuu

SEQ ID NO: 2424962 - RNA, 19 nt, Homo sapiens
  misc_RNA (1)...(19): siRNA sense strand
augcacagaaacagagaaa

SEQ ID NO: 2424963 - RNA, 19 nt, Homo sapiens
  misc_RNA (1)...(19): siRNA sense strand
ggcuaaagaauguuggcaa

SEQ ID NO: 2424964 - RNA, 19 nt, Homo sapiens
  misc_RNA (1)...(19): siRNA sense strand
cuucgaaucuggagaggau

SEQ ID NO: 2424965 - RNA, 19 nt, Homo sapiens
  misc_RNA (1)...(19): siRNA sense strand
aggaguggcaucaggauua

SEQ ID NO: 2424966 - RNA, 19 nt, Homo sapiens
  misc_RNA (1)...(19): siRNA sense strand
uaacaagaauuaagaggga

SEQ ID NO: 2424967 - RNA, 19 nt, Homo sapiens
  misc_RNA (1)...(19): siRNA sense strand
gguagauguucuucaguau

SEQ ID NO: 2424968 - RNA, 19 nt, Homo sapiens
  misc_RNA (1)...(19): siRNA sense strand
ggaugaaguacaaugauau

SEQ ID NO: 2424969 - RNA, 19 nt, Homo sapiens
  misc_RNA (1)...(19): siRNA sense strand
guacauaaaugauaaggca

SEQ ID NO: 2424970 - RNA, 19 nt, Homo sapiens
  misc_RNA (1)...(19): siRNA sense strand
gaauaacugaugaggaaca

SEQ ID NO: 2424971 - RNA, 19 nt, Homo sapiens
  misc_RNA (1)...(19): siRNA sense strand
uggaugaaauggaagaaaa

SEQ ID NO: 2424972 - RNA, 19 nt, Homo sapiens
  misc_RNA (1)...(19): siRNA sense strand
caagaaaagcugacagauu

SEQ ID NO: 2424973 - RNA, 19 nt, Homo sapiens
  misc_RNA (1)...(19): siRNA sense strand
ggaacaagccauuagcaga

SEQ ID NO: 2424974 - RNA, 19 nt, Homo sapiens
  misc_RNA (1)...(19): siRNA sense strand
auacagaggacaugaugaa

SEQ ID NO: 2424975 - RNA, 19 nt, Homo sapiens
  misc_RNA (1)...(19): siRNA sense strand
acauaaaugauaaggcaca

SEQ ID NO: 2424976 - RNA, 19 nt, Homo sapiens
  misc_RNA (1)...(19): siRNA sense strand
gagaggaucgagaaguaaa

SEQ ID NO: 2424977 - RNA, 19 nt, Homo sapiens
  misc_RNA (1)...(19): siRNA sense strand
uggaauuagcaguggcuuu

SEQ ID NO: 2424978 - RNA, 19 nt, Homo sapiens
  misc_RNA (1)...(19): siRNA sense strand
gauuaaugacacccagaua

SEQ ID NO: 2424979 - RNA, 19 nt, Homo sapiens
  misc_RNA (1)...(19): siRNA sense strand
gguauuacaacaaaggcua

SEQ ID NO: 2424980 - RNA, 19 nt, Homo sapiens
  misc_RNA (1)...(19): siRNA sense strand
gcaugaacucugugagcga

SEQ ID NO: 2424981 - RNA, 19 nt, Homo sapiens
  misc_RNA (1)...(19): siRNA sense strand
cugaagaggagacggauga

SEQ ID NO: 2424982 - RNA, 19 nt, Homo sapiens
  misc_RNA (1)...(19): siRNA sense strand
gcucaagccaaacuggaaa

SEQ ID NO: 2424983 - RNA, 19 nt, Homo sapiens
  misc_RNA (1)...(19): siRNA sense strand
ucacgaaggccaagcuaau

SEQ ID NO: 2424984 - RNA, 19 nt, Homo sapiens
  misc_RNA (1)...(19): siRNA sense strand
gagacaacuuacuaccaaa

SEQ ID NO: 2424985 - RNA, 19 nt, Homo sapiens
  misc_RNA (1)...(19): siRNA sense strand
guaauggaaacuuggaauu

SEQ ID NO: 2424986 - RNA, 19 nt, Homo sapiens
  misc_RNA (1)...(19): siRNA sense strand
ucagaaauugagagaguca

SEQ ID NO: 2424987 - RNA, 19 nt, Homo sapiens
  misc_RNA (1)...(19): siRNA sense strand
cauaauugggcuagaaaau

SEQ ID NO: 2424988 - RNA, 19 nt, Homo sapiens
  misc_RNA (1)...(19): siRNA sense strand
cuaaagaauguuggcaaua

SEQ ID NO: 2424989 - RNA, 19 nt, Homo sapiens
  misc_RNA (1)...(19): siRNA sense strand
uuaagagggaagagaucaa

SEQ ID NO: 2424990 - RNA, 19 nt, Homo sapiens
  misc_RNA (1)...(19): siRNA sense strand
cauaaugaaaguugcucaa

SEQ ID NO: 2424991 - RNA, 19 nt, Homo sapiens
  misc_RNA (1)...(19): siRNA sense strand
gguucaaagaucugcauga

SEQ ID NO: 2424992 - RNA, 19 nt, Homo sapiens
  misc_RNA (1)...(19): siRNA sense strand
gaauuaagagggaagagau

SEQ ID NO: 2424993 - RNA, 19 nt, Homo sapiens
  misc_RNA (1)...(19): siRNA sense strand
cagcaggagacccagaaua

SEQ ID NO: 2424994 - RNA, 19 nt, Homo sapiens
  misc_RNA (1)...(19): siRNA sense strand
ggaucgagaaguaaacaau

SEQ ID NO: 2424995 - RNA, 19 nt, Homo sapiens
  misc_RNA (1)...(19): siRNA sense strand
cuacagaaguuuggaggga

SEQ ID NO: 2424996 - RNA, 19 nt, Homo sapiens
  misc_RNA (1)...(19): siRNA sense strand
aggaaagcauauccagaau

SEQ ID NO: 2424997 - RNA, 19 nt, Homo sapiens
  misc_RNA (1)...(19): siRNA sense strand
gaugaucuucagagagcaa

SEQ ID NO: 2424998 - RNA, 19 nt, Homo sapiens
  misc_RNA (1)...(19): siRNA sense strand
augauauugcugugacaaa

SEQ ID NO: 2424999 - RNA, 19 nt, Homo sapiens
  misc_RNA (1)...(19): siRNA sense strand
cagagggaucauagagaaa

SEQ ID NO: 2425000 - RNA, 19 nt, Homo sapiens
  misc_RNA (1)...(19): siRNA sense strand
uggagaaagccgaggucuu

SEQ ID NO: 2425001 - RNA, 19 nt, Homo sapiens
  misc_RNA (1)...(19): siRNA sense strand
caggagaaacaaagagaaa

SEQ ID NO: 2425002 - RNA, 19 nt, Homo sapiens
  misc_RNA (1)...(19): siRNA sense strand
aggugauguuggagagaaa

SEQ ID NO: 2425003 - RNA, 19 nt, Homo sapiens
  misc_RNA (1)...(19): siRNA sense strand
aggaauaguaagugaagaa

SEQ ID NO: 2425004 - RNA, 19 nt, Homo sapiens
  misc_RNA (1)...(19): siRNA sense strand
agaaagaagaagagacaga

SEQ ID NO: 2425005 - RNA, 19 nt, Homo sapiens
  misc_RNA (1)...(19): siRNA sense strand
cuucaaaagcaaaggaaua

SEQ ID NO: 2425006 - RNA, 19 nt, Homo sapiens
  misc_RNA (1)...(19): siRNA sense strand
ccuuaauggaccaaagaaa

SEQ ID NO: 2425007 - RNA, 19 nt, Homo sapiens
  misc_RNA (1)...(19): siRNA sense strand
caggaaugauagagcgauu

SEQ ID NO: 2425008 - RNA, 19 nt, Homo sapiens
  misc_RNA (1)...(19): siRNA sense strand
acaaaugacaggagaaaca

SEQ ID NO: 2425009 - RNA, 19 nt, Homo sapiens
  misc_RNA (1)...(19): siRNA sense strand
augaagaagauguggagaa

SEQ ID NO: 2425010 - RNA, 19 nt, Homo sapiens
  misc_RNA (1)...(19): siRNA sense strand
agccauagaagaaggaaua

SEQ ID NO: 2425011 - RNA, 19 nt, Homo sapiens
  misc_RNA (1)...(19): siRNA sense strand
gagaaaauguugaagccua

SEQ ID NO: 2425012 - RNA, 19 nt, Homo sapiens
  misc_RNA (1)...(19): siRNA sense strand
aagaagagacagaacgaau

SEQ ID NO: 2425013 - RNA, 19 nt, Homo sapiens
  misc_RNA (1)...(19): siRNA sense strand
auggacacuuugugagaaa

SEQ ID NO: 2425014 - RNA, 19 nt, Homo sapiens
  misc_RNA (1)...(19): siRNA sense strand
accaaggaacuuagggaaa

SEQ ID NO: 2425015 - RNA, 19 nt, Homo sapiens
  misc_RNA (1)...(19): siRNA sense strand
aggucaaggaauuuggaaa

SEQ ID NO: 2425016 - RNA, 19 nt, Homo sapiens
  misc_RNA (1)...(19): siRNA sense strand
caggaaaugccuuggauca

SEQ ID NO: 2425017 - RNA, 19 nt, Homo sapiens
  misc_RNA (1)...(19): siRNA sense strand
agagaaagagacugaaaca

SEQ ID NO: 2425018 - RNA, 19 nt, Homo sapiens
  misc_RNA (1)...(19): siRNA sense strand
ccucgaauucgcauagaaa

SEQ ID NO: 2425019 - RNA, 19 nt, Homo sapiens
  misc_RNA (1)...(19): siRNA sense strand
ccacauggacagugaaacu

SEQ ID NO: 2425020 - RNA, 19 nt, Homo sapiens
  misc_RNA (1)...(19): siRNA sense strand
ggaaauuaagacugauaca

SEQ ID NO: 2425021 - RNA, 19 nt, Homo sapiens
  misc_RNA (1)...(19): siRNA sense strand
aaugagcaccauagagaaa

SEQ ID NO: 2425022 - RNA, 19 nt, Homo sapiens
  misc_RNA (1)...(19): siRNA sense strand
cugaagaagggaaugaaau

SEQ ID NO: 2425023 - RNA, 19 nt, Homo sapiens
  misc_RNA (1)...(19): siRNA sense strand
cagguagaguuguaggaau

SEQ ID NO: 2425024 - RNA, 19 nt, Homo sapiens
  misc_RNA (1)...(19): siRNA sense strand
auuuagagcuagcagggaa

SEQ ID NO: 2425025 - RNA, 19 nt, Homo sapiens
  misc_RNA (1)...(19): siRNA sense strand
aagcaaaggaauaguaagu

SEQ ID NO: 2425026 - RNA, 19 nt, Homo sapiens
  misc_RNA (1)...(19): siRNA sense strand
ugaugaagaucgugcgcga

SEQ ID NO: 2425027 - RNA, 19 nt, Homo sapiens
  misc_RNA (1)...(19): siRNA sense strand
gaaucagccagaagaggaa

SEQ ID NO: 2425028 - RNA, 19 nt, Homo sapiens
  misc_RNA (1)...(19): siRNA sense strand
gaagaugaagcuuggaaaa

SEQ ID NO: 2425029 - RNA, 19 nt, Homo sapiens
  misc_RNA (1)...(19): siRNA sense strand
gcuugcagauauauguaaa

SEQ ID NO: 2425030 - RNA, 19 nt, Homo sapiens
  misc_RNA (1)...(19): siRNA sense strand
cuaauaaccaagagaagca

SEQ ID NO: 2425031 - RNA, 19 nt, Homo sapiens
  misc_RNA (1)...(19): siRNA sense strand
ggacacuuugugagaaauu

SEQ ID NO: 2425032 - RNA, 19 nt, Homo sapiens
  misc_RNA (1)...(19): siRNA sense strand
uagaacaagaacagggaga

SEQ ID NO: 2425033 - RNA, 19 nt, Homo sapiens
  misc_RNA (1)...(19): siRNA sense strand
ccaaagaugcccuggagca

SEQ ID NO: 2425034 - RNA, 19 nt, Homo sapiens
  misc_RNA (1)...(19): siRNA sense strand
agaagaugaagcuuggaaa

SEQ ID NO: 2425035 - RNA, 19 nt, Homo sapiens
  misc_RNA (1)...(19): siRNA sense strand
ugugagaaauuuaggugau

SEQ ID NO: 2425036 - RNA, 19 nt, Homo sapiens
  misc_RNA (1)...(19): siRNA sense strand
acugaauaaacuagccaaa

SEQ ID NO: 2425037 - RNA, 19 nt, Homo sapiens
  misc_RNA (1)...(19): siRNA sense strand
aagaauauguaaagagccu

SEQ ID NO: 2425038 - RNA, 19 nt, Homo sapiens
  misc_RNA (1)...(19): siRNA sense strand
ggaucaagaaucagccaga

SEQ ID NO: 2425039 - RNA, 19 nt, Homo sapiens
  misc_RNA (1)...(19): siRNA sense strand
caggaauguaauugugcua

SEQ ID NO: 2425040 - RNA, 19 nt, Homo sapiens
  misc_RNA (1)...(19): siRNA sense strand
ugauagagcgauucgagua

SEQ ID NO: 2425041 - RNA, 19 nt, Homo sapiens
  misc_RNA (1)...(19): siRNA sense strand
auaacaaaugacaggagaa

SEQ ID NO: 2425042 - RNA, 19 nt, Homo sapiens
  misc_RNA (1)...(19): siRNA sense strand
caaaggaauaguaagugaa

SEQ ID NO: 2425043 - RNA, 19 nt, Homo sapiens
  misc_RNA (1)...(19): siRNA sense strand
aagagaaagccauagaaga

SEQ ID NO: 2425044 - RNA, 19 nt, Homo sapiens
  misc_RNA (1)...(19): siRNA sense strand
cgagaagaccugaggcauc

SEQ ID NO: 2425045 - RNA, 19 nt, Homo sapiens
  misc_RNA (1)...(19): siRNA sense strand
ugacauaugcugaagcuca

SEQ ID NO: 2425046 - RNA, 19 nt, Homo sapiens
  misc_RNA (1)...(19): siRNA sense strand
agaagaagagacagaacga

SEQ ID NO: 2425047 - RNA, 19 nt, Homo sapiens
  misc_RNA (1)...(19): siRNA sense strand
gaugguuggcccagaaauu

SEQ ID NO: 2425048 - RNA, 19 nt, Homo sapiens
  misc_RNA (1)...(19): siRNA sense strand
aagaaaaggacaaaccaaa

SEQ ID NO: 2425049 - RNA, 19 nt, Homo sapiens
  misc_RNA (1)...(19): siRNA sense strand
cgacagugaagaaaauaaa

SEQ ID NO: 2425050 - RNA, 19 nt, Homo sapiens
  misc_RNA (1)...(19): siRNA sense strand
gaagauacgcagaugucau

SEQ ID NO: 2425051 - RNA, 19 nt, Homo sapiens
  misc_RNA (1)...(19): siRNA sense strand
cuuaauggaccaaagaaaa

SEQ ID NO: 2425052 - RNA, 19 nt, Homo sapiens
  misc_RNA (1)...(19): siRNA sense strand
gaaacaaagagaaagccau

SEQ ID NO: 2425053 - RNA, 19 nt, Homo sapiens
  misc_RNA (1)...(19): siRNA sense strand
gagaaauuuaggugauguu

SEQ ID NO: 2425054 - RNA, 19 nt, Homo sapiens
  misc_RNA (1)...(19): siRNA sense strand
ccaauauuucuguugcaaa

SEQ ID NO: 2425055 - RNA, 19 nt, Homo sapiens
  misc_RNA (1)...(19): siRNA sense strand
cauaacaaaugacaggaga

SEQ ID NO: 2425056 - RNA, 19 nt, Homo sapiens
  misc_RNA (1)...(19): siRNA sense strand
ggagaaacaaagagaaagc

SEQ ID NO: 2425057 - RNA, 19 nt, Homo sapiens
  misc_RNA (1)...(19): siRNA sense strand
acgaagauauuguggcugu

SEQ ID NO: 2425058 - RNA, 19 nt, Homo sapiens
  misc_RNA (1)...(19): siRNA sense strand
aggaaaugccuuggaucaa

SEQ ID NO: 2425059 - RNA, 19 nt, Homo sapiens
  misc_RNA (1)...(19): siRNA sense strand
agaugaagcuuggaaaaua

SEQ ID NO: 2425060 - RNA, 19 nt, Homo sapiens
  misc_RNA (1)...(19): siRNA sense strand
gcacaaaauggcucaauau

SEQ ID NO: 2425061 - RNA, 19 nt, Homo sapiens
  misc_RNA (1)...(19): siRNA sense strand
aagccauagaagaaggaau

SEQ ID NO: 2425062 - RNA, 19 nt, Homo sapiens
  misc_RNA (1)...(19): siRNA sense strand
cagcaacagacgacagaaa

SEQ ID NO: 2425063 - RNA, 19 nt, Homo sapiens
  misc_RNA (1)...(19): siRNA sense strand
aguagcagauugagggcaa

SEQ ID NO: 2425064 - RNA, 19 nt, Homo sapiens
  misc_RNA (1)...(19): siRNA sense strand
gggaaggagaaguagaaaa

SEQ ID NO: 2425065 - RNA, 19 nt, Homo sapiens
  misc_RNA (1)...(19): siRNA sense strand
ggucagacguucagugcca

SEQ ID NO: 2425066 - RNA, 19 nt, Homo sapiens
  misc_RNA (1)...(19): siRNA sense strand
agagugaagaggaggaaga

SEQ ID NO: 2425067 - RNA, 19 nt, Homo sapiens
  misc_RNA (1)...(19): siRNA sense strand
gugaagaggaggaagaagu

SEQ ID NO: 2425068 - RNA, 19 nt, Homo sapiens
  misc_RNA (1)...(19): siRNA sense strand
aaagaagaaaguugaggaa

SEQ ID NO: 2425069 - RNA, 19 nt, Homo sapiens
  misc_RNA (1)...(19): siRNA sense strand
gcacacaucuauagccaga

SEQ ID NO: 2425070 - RNA, 19 nt, Homo sapiens
  misc_RNA (1)...(19): siRNA sense strand
acaucugagacaugggaaa

SEQ ID NO: 2425071 - RNA, 19 nt, Homo sapiens
  misc_RNA (1)...(19): siRNA sense strand
cuauaauggaagaagugaa

SEQ ID NO: 2425072 - RNA, 19 nt, Homo sapiens
  misc_RNA (1)...(19): siRNA sense strand
aaacagaacaaauggcuga

SEQ ID NO: 2425073 - RNA, 19 nt, Homo sapiens
  misc_RNA (1)...(19): siRNA sense strand
aaggagaaguagaaaacaa

SEQ ID NO: 2425074 - RNA, 19 nt, Homo sapiens
  misc_RNA (1)...(19): siRNA sense strand
uugaggaagaagaggaaga

SEQ ID NO: 2425075 - RNA, 19 nt, Homo sapiens
  misc_RNA (1)...(19): siRNA sense strand
agaaaguugaggaagaaga

SEQ ID NO: 2425076 - RNA, 19 nt, Homo sapiens
  misc_RNA (1)...(19): siRNA sense strand
aagaagaagcuuauugaca

SEQ ID NO: 2425077 - RNA, 19 nt, Homo sapiens
  misc_RNA (1)...(19): siRNA sense strand
acaaggaaacagaacaaau

SEQ ID NO: 2425078 - RNA, 19 nt, Homo sapiens
  misc_RNA (1)...(19): siRNA sense strand
uagagaaaaucaagccaaa

SEQ ID NO: 2425079 - RNA, 19 nt, Homo sapiens
  misc_RNA (1)...(19): siRNA sense strand
gguagaaaauacacccaaa

SEQ ID NO: 2425080 - RNA, 19 nt, Homo sapiens
  misc_RNA (1)...(19): siRNA sense strand
ucucaaauuccuucagcua

SEQ ID NO: 2425081 - RNA, 19 nt, Homo sapiens
  misc_RNA (1)...(19): siRNA sense strand
aaguaugguuacagcugaa

SEQ ID NO: 2425082 - RNA, 19 nt, Homo sapiens
  misc_RNA (1)...(19): siRNA sense strand
cugccaaagaggaugaaca

SEQ ID NO: 2425083 - RNA, 19 nt, Homo sapiens
  misc_RNA (1)...(19): siRNA sense strand
aguugaggaagaagaggaa

SEQ ID NO: 2425084 - RNA, 19 nt, Homo sapiens
  misc_RNA (1)...(19): siRNA sense strand
agacagagagugaagagga

SEQ ID NO: 2425085 - RNA, 19 nt, Homo sapiens
  misc_RNA (1)...(19): siRNA sense strand
aggcugaacuggaggaggu

SEQ ID NO: 2425086 - RNA, 19 nt, Homo sapiens
  misc_RNA (1)...(19): siRNA sense strand
caaaagaacaagucugcua

SEQ ID NO: 2425087 - RNA, 19 nt, Homo sapiens
  misc_RNA (1)...(19): siRNA sense strand
agacuauaauggaagaagu

SEQ ID NO: 2425088 - RNA, 19 nt, Homo sapiens
  misc_RNA (1)...(19): siRNA sense strand
caucauaaacagaagcagu

SEQ ID NO: 2425089 - RNA, 19 nt, Homo sapiens
  misc_RNA (1)...(19): siRNA sense strand
aggaagaacacgaaugacu

SEQ ID NO: 2425090 - RNA, 19 nt, Homo sapiens
  misc_RNA (1)...(19): siRNA sense strand
aggaauagccaaaacacaa

SEQ ID NO: 2425091 - RNA, 19 nt, Homo sapiens
  misc_RNA (1)...(19): siRNA sense strand
gcaacaucccagaaagcuu

SEQ ID NO: 2425092 - RNA, 19 nt, Homo sapiens
  misc_RNA (1)...(19): siRNA sense strand
cugcaggauuucuuagaga

SEQ ID NO: 2425093 - RNA, 19 nt, Homo sapiens
  misc_RNA (1)...(19): siRNA sense strand
cugggaaggagaaguagaa

SEQ ID NO: 2425094 - RNA, 19 nt, Homo sapiens
  misc_RNA (1)...(19): siRNA sense strand
gaauaauaaagguggacac

SEQ ID NO: 2425095 - RNA, 19 nt, Homo sapiens
  misc_RNA (1)...(19): siRNA sense strand
aggaagauggggugaauau

SEQ ID NO: 2425096 - RNA, 19 nt, Homo sapiens
  misc_RNA (1)...(19): siRNA sense strand
agaagcaggcagcgagaca

SEQ ID NO: 2425097 - RNA, 19 nt, Homo sapiens
  misc_RNA (1)...(19): siRNA sense strand
gagccuaaauuuaaccuga

SEQ ID NO: 2425098 - RNA, 19 nt, Homo sapiens
  misc_RNA (1)...(19): siRNA sense strand
caaagaagaaaguugagga

SEQ ID NO: 2425099 - RNA, 19 nt, Homo sapiens
  misc_RNA (1)...(19): siRNA sense strand
uggugcagguuguagaauu

SEQ ID NO: 2425100 - RNA, 19 nt, Homo sapiens
  misc_RNA (1)...(19): siRNA sense strand
aaauuuaaccugaugcaga

SEQ ID NO: 2425101 - RNA, 19 nt, Homo sapiens
  misc_RNA (1)...(19): siRNA sense strand
aggaggagucugcaggauu

SEQ ID NO: 2425102 - RNA, 19 nt, Homo sapiens
  misc_RNA (1)...(19): siRNA sense strand
cagaacaucccaagcccua

SEQ ID NO: 2425103 - RNA, 19 nt, Homo sapiens
  misc_RNA (1)...(19): siRNA sense strand
aggggaaacccaagaagaa

SEQ ID NO: 2425104 - RNA, 19 nt, Homo sapiens
  misc_RNA (1)...(19): siRNA sense strand
cagacaagcaagugaggcu

SEQ ID NO: 2425105 - RNA, 19 nt, Homo sapiens
  misc_RNA (1)...(19): siRNA sense strand
gggaaauauauggguccua

SEQ ID NO: 2425106 - RNA, 19 nt, Homo sapiens
  misc_RNA (1)...(19): siRNA sense strand
agguggauuuauucgcaua

SEQ ID NO: 2425107 - RNA, 19 nt, Homo sapiens
  misc_RNA (1)...(19): siRNA sense strand
cuuauugacaggaagaaca

SEQ ID NO: 2425108 - RNA, 19 nt, Homo sapiens
  misc_RNA (1)...(19): siRNA sense strand
cugcacuuuacgagaggaa

SEQ ID NO: 2425109 - RNA, 19 nt, Homo sapiens
  misc_RNA (1)...(19): siRNA sense strand
gggugaauauggaaaacuu

SEQ ID NO: 2425110 - RNA, 19 nt, Homo sapiens
  misc_RNA (1)...(19): siRNA sense strand
uuauauagcaaacgguaca

SEQ ID NO: 2425111 - RNA, 19 nt, Homo sapiens
  misc_RNA (1)...(19): siRNA sense strand
gggcaaugaggccaaaaua

SEQ ID NO: 2425112 - RNA, 19 nt, Homo sapiens
  misc_RNA (1)...(19): siRNA sense strand
guuaaaacugagacagaga

SEQ ID NO: 2425113 - RNA, 19 nt, Homo sapiens
  misc_RNA (1)...(19): siRNA sense strand
ccucaagcgagcaucaaau

SEQ ID NO: 2425114 - RNA, 19 nt, Homo sapiens
  misc_RNA (1)...(19): siRNA sense strand
gcugaaaagaaaucaaaga

SEQ ID NO: 2425115 - RNA, 19 nt, Homo sapiens
  misc_RNA (1)...(19): siRNA sense strand
auagagagucugaauucaa

SEQ ID NO: 2425116 - RNA, 19 nt, Homo sapiens
  misc_RNA (1)...(19): siRNA sense strand
agucugaauucaaaggcca

SEQ ID NO: 2425117 - RNA, 19 nt, Homo sapiens
  misc_RNA (1)...(19): siRNA sense strand
gcaaaaugcaggcccgaau

SEQ ID NO: 2425118 - RNA, 19 nt, Homo sapiens
  misc_RNA (1)...(19): siRNA sense strand
ggaaggagaaguagaaaac

SEQ ID NO: 2425119 - RNA, 19 nt, Homo sapiens
  misc_RNA (1)...(19): siRNA sense strand
gugaagaaucugaaggaga

SEQ ID NO: 2425120 - RNA, 19 nt, Homo sapiens
  misc_RNA (1)...(19): siRNA sense strand
ucauugacuuugagggcaa

SEQ ID NO: 2425121 - RNA, 19 nt, Homo sapiens
  misc_RNA (1)...(19): siRNA sense strand
agcucuaaauuguggaaua

SEQ ID NO: 2425122 - RNA, 19 nt, Homo sapiens
  misc_RNA (1)...(19): siRNA sense strand
cuguauggcacaaaugaaa

SEQ ID NO: 2425123 - RNA, 19 nt, Homo sapiens
  misc_RNA (1)...(19): siRNA sense strand
agacagaagcaguagcuca

SEQ ID NO: 2425124 - RNA, 19 nt, Homo sapiens
  misc_RNA (1)...(19): siRNA sense strand
ugaugaaccugcugcgaga

SEQ ID NO: 2425125 - RNA, 19 nt, Homo sapiens
  misc_RNA (1)...(19): siRNA sense strand
aagacaaauugguacgaga

SEQ ID NO: 2425126 - RNA, 19 nt, Homo sapiens
  misc_RNA (1)...(19): siRNA sense strand
acgacaggacggaggauga

SEQ ID NO: 2425127 - RNA, 19 nt, Homo sapiens
  misc_RNA (1)...(19): siRNA sense strand
cuacagaagaaguuuccaa

SEQ ID NO: 2425128 - RNA, 19 nt, Homo sapiens
  misc_RNA (1)...(19): siRNA sense strand
ugaacuacuacuagauaga

SEQ ID NO: 2425129 - RNA, 19 nt, Homo sapiens
  misc_RNA (1)...(19): siRNA sense strand
acaugaaccacuugcaaaa

SEQ ID NO: 2425130 - RNA, 19 nt, Homo sapiens
  misc_RNA (1)...(19): siRNA sense strand
cugguugccaugaaagaaa

SEQ ID NO: 2425131 - RNA, 19 nt, Homo sapiens
  misc_RNA (1)...(19): siRNA sense strand
ucauguuauugaaagggua

SEQ ID NO: 2425132 - RNA, 19 nt, Homo sapiens
  misc_RNA (1)...(19): siRNA sense strand
ccucaagaaccaggccaaa

SEQ ID NO: 2425133 - RNA, 19 nt, Homo sapiens
  misc_RNA (1)...(19): siRNA sense strand
cagacauugugaagaaucu

SEQ ID NO: 2425134 - RNA, 19 nt, Homo sapiens
  misc_RNA (1)...(19): siRNA sense strand
ucacaaaucuccagcagac

SEQ ID NO: 2425135 - RNA, 19 nt, Homo sapiens
  misc_RNA (1)...(19): siRNA sense strand
aggauuuacuuacaagaca

SEQ ID NO: 2425136 - RNA, 19 nt, Homo sapiens
  misc_RNA (1)...(19): siRNA sense strand
gugaauaugagaaguuacu

SEQ ID NO: 2425137 - RNA, 19 nt, Homo sapiens
  misc_RNA (1)...(19): siRNA sense strand
gcuccuacaacgugaacau

SEQ ID NO: 2425138 - RNA, 19 nt, Homo sapiens
  misc_RNA (1)...(19): siRNA sense strand
acaaaguggagacggcaga

SEQ ID NO: 2425139 - RNA, 19 nt, Homo sapiens
  misc_RNA (1)...(19): siRNA sense strand
ccgagaggcagcaagcgaa

SEQ ID NO: 2425140 - RNA, 19 nt, Homo sapiens
  misc_RNA (1)...(19): siRNA sense strand
ccuucgacaugcugagaaa

SEQ ID NO: 2425141 - RNA, 19 nt, Homo sapiens
  misc_RNA (1)...(19): siRNA sense strand
agagaagggaggagaguca

SEQ ID NO: 2425142 - RNA, 19 nt, Homo sapiens
  misc_RNA (1)...(19): siRNA sense strand
acuuauuggcuguggauuu

SEQ ID NO: 2425143 - RNA, 19 nt, Homo sapiens
  misc_RNA (1)...(19): siRNA sense strand
acucaacacucaugggaga

SEQ ID NO: 2425144 - RNA, 19 nt, Homo sapiens
  misc_RNA (1)...(19): siRNA sense strand
aggcagaacugaagcccuu

SEQ ID NO: 2425145 - RNA, 19 nt, Homo sapiens
  misc_RNA (1)...(19): siRNA sense strand
gagaaugaggacaaggaca

SEQ ID NO: 2425146 - RNA, 19 nt, Homo sapiens
  misc_RNA (1)...(19): siRNA sense strand
cgaaagagaagggaggaga

SEQ ID NO: 2425147 - RNA, 19 nt, Homo sapiens
  misc_RNA (1)...(19): siRNA sense strand
agugcaaacuccagaagau

SEQ ID NO: 2425148 - RNA, 19 nt, Homo sapiens
  misc_RNA (1)...(19): siRNA sense strand
caaacaaaggagaggcagu

SEQ ID NO: 2425149 - RNA, 19 nt, Homo sapiens
  misc_RNA (1)...(19): siRNA sense strand
ugaccaacauggaggccuu

SEQ ID NO: 2425150 - RNA, 19 nt, Homo sapiens
  misc_RNA (1)...(19): siRNA sense strand
guggauuuaaugugacuaa

SEQ ID NO: 2425151 - RNA, 19 nt, Homo sapiens
  misc_RNA (1)...(19): siRNA sense strand
ggacaggaugauugugcau

SEQ ID NO: 2425152 - RNA, 19 nt, Homo sapiens
  misc_RNA (1)...(19): siRNA sense strand
gagggaagguguugggccu

SEQ ID NO: 2425153 - RNA, 19 nt, Homo sapiens
  misc_RNA (1)...(19): siRNA sense strand
caaaggacggggagggaau

SEQ ID NO: 2425154 - RNA, 19 nt, Homo sapiens
  misc_RNA (1)...(19): siRNA sense strand
auaaacaacacaaggcaga

SEQ ID NO: 2425155 - RNA, 19 nt, Homo sapiens
  misc_RNA (1)...(19): siRNA sense strand
ggauuuaaugugacuaaca

SEQ ID NO: 2425156 - RNA, 19 nt, Homo sapiens
  misc_RNA (1)...(19): siRNA sense strand
gaggacaaggacaggauga

SEQ ID NO: 2425157 - RNA, 19 nt, Homo sapiens
  misc_RNA (1)...(19): siRNA sense strand
ugucagcugcggaggaaau

SEQ ID NO: 2425158 - RNA, 19 nt, Homo sapiens
  misc_RNA (1)...(19): siRNA sense strand
accagaaguucauggccua

SEQ ID NO: 2425159 - RNA, 19 nt, Homo sapiens
  misc_RNA (1)...(19): siRNA sense strand
gcuccaacauagugcaaac

SEQ ID NO: 2425160 - RNA, 19 nt, Homo sapiens
  misc_RNA (1)...(19): siRNA sense strand
cgugucugaaguagaaaua

SEQ ID NO: 2425161 - RNA, 19 nt, Homo sapiens
  misc_RNA (1)...(19): siRNA sense strand
ggagggaauguguggcuga

SEQ ID NO: 2425162 - RNA, 19 nt, Homo sapiens
  misc_RNA (1)...(19): siRNA sense strand
gguccauucccgaguauca

SEQ ID NO: 2425163 - RNA, 19 nt, Homo sapiens
  misc_RNA (1)...(19): siRNA sense strand
cgggaaaggcacccaacau

SEQ ID NO: 2425164 - RNA, 19 nt, Homo sapiens
  misc_RNA (1)...(19): siRNA sense strand
accuggagaaugaggacaa

SEQ ID NO: 2425165 - RNA, 19 nt, Homo sapiens
  misc_RNA (1)...(19): siRNA sense strand
ccacauggauaauggacug

SEQ ID NO: 2425166 - RNA, 19 nt, Homo sapiens
  misc_RNA (1)...(19): siRNA sense strand
ggaaacauguggacuccga

SEQ ID NO: 2425167 - RNA, 19 nt, Homo sapiens
  misc_RNA (1)...(19): siRNA sense strand
gugacuaacaguaacccua

SEQ ID NO: 2425168 - RNA, 19 nt, Homo sapiens
  misc_RNA (1)...(19): siRNA sense strand
gugcaaacuccagaagauu

SEQ ID NO: 2425169 - RNA, 19 nt, Homo sapiens
  misc_RNA (1)...(19): siRNA sense strand
ccacucugaaggaaguuaa

SEQ ID NO: 2425170 - RNA, 19 nt, Homo sapiens
  misc_RNA (1)...(19): siRNA sense strand
acucaugggagaaacauuu

SEQ ID NO: 2425171 - RNA, 19 nt, Homo sapiens
  misc_RNA (1)...(19): siRNA sense strand
agggccaccuggagaauga

SEQ ID NO: 2425172 - RNA, 19 nt, Homo sapiens
  misc_RNA (1)...(19): siRNA sense strand
ccgcaggaaaugggcuuaa

SEQ ID NO: 2425173 - RNA, 19 nt, Homo sapiens
  misc_RNA (1)...(19): siRNA sense strand
caugaagaucggcggaguu

SEQ ID NO: 2425174 - RNA, 19 nt, Homo sapiens
  misc_RNA (1)...(19): siRNA sense strand
ucggcggaguucugguuaa

SEQ ID NO: 2425175 - RNA, 19 nt, Homo sapiens
  misc_RNA (1)...(19): siRNA sense strand
guucuguggcuguggacau

SEQ ID NO: 2425176 - RNA, 19 nt, Homo sapiens
  misc_RNA (1)...(19): siRNA sense strand
uuguuagagugcugugcaa

SEQ ID NO: 2425177 - RNA, 19 nt, Homo sapiens
  misc_RNA (1)...(19): siRNA sense strand
guucuguggcuguggacau

SEQ ID NO: 2425178 - RNA, 19 nt, Homo sapiens
  misc_RNA (1)...(19): siRNA sense strand
uuguuagagugcugugcaa

SEQ ID NO: 2425179 - RNA, 19 nt, Homo sapiens
  misc_RNA (1)...(19): siRNA sense strand
cuagcaaggaggagcgaga

SEQ ID NO: 2425180 - RNA, 19 nt, Homo sapiens
  misc_RNA (1)...(19): siRNA sense strand
gagagacgcuaguggagga

SEQ ID NO: 2425181 - RNA, 19 nt, Homo sapiens
  misc_RNA (1)...(19): siRNA sense strand
cgcuaguggaggagugcaa

SEQ ID NO: 2425182 - RNA, 19 nt, Homo sapiens
  misc_RNA (1)...(19): siRNA sense strand
ccaguaagguccacggugu

SEQ ID NO: 2425183 - RNA, 19 nt, Homo sapiens
  misc_RNA (1)...(19): siRNA sense strand
cuaguggaggagugcaaua

SEQ ID NO: 2425184 - RNA, 19 nt, Homo sapiens
  misc_RNA (1)...(19): siRNA sense strand
ggaaggaagcagagcgcca

SEQ ID NO: 2425185 - RNA, 19 nt, Homo sapiens
  misc_RNA (1)...(19): siRNA sense strand
gaacagaagcugcgccaga

SEQ ID NO: 2425186 - RNA, 19 nt, Homo sapiens
  misc_RNA (1)...(19): siRNA sense strand
cggaguacuuggaagccua

SEQ ID NO: 2425187 - RNA, 19 nt, Homo sapiens
  misc_RNA (1)...(19): siRNA sense strand
cagcaagaggaaagggcga

SEQ ID NO: 2425188 - RNA, 19 nt, Homo sapiens
  misc_RNA (1)...(19): siRNA sense strand
gcagauauuucccuggcua

SEQ ID NO: 2425189 - RNA, 19 nt, Homo sapiens
  misc_RNA (1)...(19): siRNA sense strand
ccaaauagcggccucggaa

SEQ ID NO: 2425190 - RNA, 19 nt, Homo sapiens
  misc_RNA (1)...(19): siRNA sense strand
cagauauuucccuggcuaa

SEQ ID NO: 2425191 - RNA, 19 nt, Homo sapiens
  misc_RNA (1)...(19): siRNA sense strand
acaucaaggagaaauacaa

SEQ ID NO: 2425192 - RNA, 19 nt, Homo sapiens
  misc_RNA (1)...(19): siRNA sense strand
ccaucauuguuuacaucaa

SEQ ID NO: 2425193 - RNA, 19 nt, Homo sapiens
  misc_RNA (1)...(19): siRNA sense strand
gaccgucgcucaagggcua

SEQ ID NO: 2425194 - RNA, 19 nt, Homo sapiens
  misc_RNA (1)...(19): siRNA sense strand
aaauacagcaagaggaaag

SEQ ID NO: 2425195 - RNA, 19 nt, Homo sapiens
  misc_RNA (1)...(19): siRNA sense strand
ugcacaucaaggagaaaua

SEQ ID NO: 2425196 - RNA, 19 nt, Homo sapiens
  misc_RNA (1)...(19): siRNA sense strand
ccgucaaacuggacagccu

SEQ ID NO: 2425197 - RNA, 19 nt, Homo sapiens
  misc_RNA (1)...(19): siRNA sense strand
gcauuugcugugcggacaa

SEQ ID NO: 2425198 - RNA, 19 nt, Homo sapiens
  misc_RNA (1)...(19): siRNA sense strand
ggaaggaagcagagcgcca

SEQ ID NO: 2425199 - RNA, 19 nt, Homo sapiens
  misc_RNA (1)...(19): siRNA sense strand
gaacagaagcugcgccaga

SEQ ID NO: 2425200 - RNA, 19 nt, Homo sapiens
  misc_RNA (1)...(19): siRNA sense strand
cggaguacuuggaagccua

SEQ ID NO: 2425201 - RNA, 19 nt, Homo sapiens
  misc_RNA (1)...(19): siRNA sense strand
cagcaagaggaaagggcga

SEQ ID NO: 2425202 - RNA, 19 nt, Homo sapiens
  misc_RNA (1)...(19): siRNA sense strand
gcagauauuucccuggcua

SEQ ID NO: 2425203 - RNA, 19 nt, Homo sapiens
  misc_RNA (1)...(19): siRNA sense strand
ccaaauagcggccucggaa

SEQ ID NO: 2425204 - RNA, 19 nt, Homo sapiens
  misc_RNA (1)...(19): siRNA sense strand
cagauauuucccuggcuaa

SEQ ID NO: 2425205 - RNA, 19 nt, Homo sapiens
  misc_RNA (1)...(19): siRNA sense strand
acaucaaggagaaauacaa

SEQ ID NO: 2425206 - RNA, 19 nt, Homo sapiens
  misc_RNA (1)...(19): siRNA sense strand
ccaucauuguuuacaucaa

SEQ ID NO: 2425207 - RNA, 19 nt, Homo sapiens
  misc_RNA (1)...(19): siRNA sense strand
gaccgucgcucaagggcua

SEQ ID NO: 2425208 - RNA, 19 nt, Homo sapiens
  misc_RNA (1)...(19): siRNA sense strand
aaauacagcaagaggaaag

SEQ ID NO: 2425209 - RNA, 19 nt, Homo sapiens
  misc_RNA (1)...(19): siRNA sense strand
ugcacaucaaggagaaaua

SEQ ID NO: 2425210 - RNA, 19 nt, Homo sapiens
  misc_RNA (1)...(19): siRNA sense strand
ccgucaaacuggacagccu

SEQ ID NO: 2425211 - RNA, 19 nt, Homo sapiens
  misc_RNA (1)...(19): siRNA sense strand
gcauuugcugugcggacaa

SEQ ID NO: 2425212 - RNA, 19 nt, Homo sapiens
  misc_RNA (1)...(19): siRNA sense strand
ggaaggaagcagagcgcca

SEQ ID NO: 2425213 - RNA, 19 nt, Homo sapiens
  misc_RNA (1)...(19): siRNA sense strand
gaacagaagcugcgccaga

SEQ ID NO: 2425214 - RNA, 19 nt, Homo sapiens
  misc_RNA (1)...(19): siRNA sense strand
cggaguacuuggaagccua

SEQ ID NO: 2425215 - RNA, 19 nt, Homo sapiens
  misc_RNA (1)...(19): siRNA sense strand
cagcaagaggaaagggcga

SEQ ID NO: 2425216 - RNA, 19 nt, Homo sapiens
  misc_RNA (1)...(19): siRNA sense strand
gcagauauuucccuggcua

SEQ ID NO: 2425217 - RNA, 19 nt, Homo sapiens
  misc_RNA (1)...(19): siRNA sense strand
ccaaauagcggccucggaa

SEQ ID NO: 2425218 - RNA, 19 nt, Homo sapiens
  misc_RNA (1)...(19): siRNA sense strand
cagauauuucccuggcuaa

SEQ ID NO: 2425219 - RNA, 19 nt, Homo sapiens
  misc_RNA (1)...(19): siRNA sense strand
acaucaaggagaaauacaa

SEQ ID NO: 2425220 - RNA, 19 nt, Homo sapiens
  misc_RNA (1)...(19): siRNA sense strand
ccaucauuguuuacaucaa

SEQ ID NO: 2425221 - RNA, 19 nt, Homo sapiens
  misc_RNA (1)...(19): siRNA sense strand
gaccgucgcucaagggcua

SEQ ID NO: 2425222 - RNA, 19 nt, Homo sapiens
  misc_RNA (1)...(19): siRNA sense strand
aaauacagcaagaggaaag

SEQ ID NO: 2425223 - RNA, 19 nt, Homo sapiens
  misc_RNA (1)...(19): siRNA sense strand
ugcacaucaaggagaaaua

SEQ ID NO: 2425224 - RNA, 19 nt, Homo sapiens
  misc_RNA (1)...(19): siRNA sense strand
ccgucaaacuggacagccu

SEQ ID NO: 2425225 - RNA, 19 nt, Homo sapiens
  misc_RNA (1)...(19): siRNA sense strand
gcauuugcugugcggacaa

SEQ ID NO: 2425226 - RNA, 19 nt, Homo sapiens
  misc_RNA (1)...(19): siRNA sense strand
ggggcauggugaagagcaa

SEQ ID NO: 2425227 - RNA, 19 nt, Homo sapiens
  misc_RNA (1)...(19): siRNA sense strand
ccagugagcugaagcagga

SEQ ID NO: 2425228 - RNA, 19 nt, Homo sapiens
  misc_RNA (1)...(19): siRNA sense strand
ggggcauggugaagagcaa

SEQ ID NO: 2425229 - RNA, 19 nt, Homo sapiens
  misc_RNA (1)...(19): siRNA sense strand
ccagugagcugaagcagga

SEQ ID NO: 2425230 - RNA, 19 nt, Homo sapiens
  misc_RNA (1)...(19): siRNA sense strand
caacaagcaacgagggcaa

SEQ ID NO: 2425231 - RNA, 19 nt, Homo sapiens
  misc_RNA (1)...(19): siRNA sense strand
gggcagaguucaugcgugu

SEQ ID NO: 2425232 - RNA, 19 nt, Homo sapiens
  misc_RNA (1)...(19): siRNA sense strand
cucaaggacuauugggaga

SEQ ID NO: 2425233 - RNA, 19 nt, Homo sapiens
  misc_RNA (1)...(19): siRNA sense strand
gguccuacgauaaggcgaa

SEQ ID NO: 2425234 - RNA, 19 nt, Homo sapiens
  misc_RNA (1)...(19): siRNA sense strand
uggaaugacuacaagcuga

SEQ ID NO: 2425235 - RNA, 19 nt, Homo sapiens
  misc_RNA (1)...(19): siRNA sense strand
guaaaaucgacgugaccua

SEQ ID NO: 2425236 - RNA, 19 nt, Homo sapiens
  misc_RNA (1)...(19): siRNA sense strand
agaccaaagccuuacucaa

SEQ ID NO: 2425237 - RNA, 19 nt, Homo sapiens
  misc_RNA (1)...(19): siRNA sense strand
ggugugcauucuagggaca

SEQ ID NO: 2425238 - RNA, 19 nt, Homo sapiens
  misc_RNA (1)...(19): siRNA sense strand
uggccagggaagaugcaua

SEQ ID NO: 2425239 - RNA, 19 nt, Homo sapiens
  misc_RNA (1)...(19): siRNA sense strand
agguggacgacaagaccaa

SEQ ID NO: 2425240 - RNA, 19 nt, Homo sapiens
  misc_RNA (1)...(19): siRNA sense strand
gcucaagcaaaucuggaau

SEQ ID NO: 2425241 - RNA, 19 nt, Homo sapiens
  misc_RNA (1)...(19): siRNA sense strand
gagaccaaccuguggcuca

SEQ ID NO: 2425242 - RNA, 19 nt, Homo sapiens
  misc_RNA (1)...(19): siRNA sense strand
gguuccugguccuacgaua

SEQ ID NO: 2425243 - RNA, 19 nt, Homo sapiens
  misc_RNA (1)...(19): siRNA sense strand
auccaaagugucaaguaua

SEQ ID NO: 2425244 - RNA, 19 nt, Homo sapiens
  misc_RNA (1)...(19): siRNA sense strand
cagaaaucaaagaagccau

SEQ ID NO: 2425245 - RNA, 19 nt, Homo sapiens
  misc_RNA (1)...(19): siRNA sense strand
agucaaagagguuggucaa

SEQ ID NO: 2425246 - RNA, 19 nt, Homo sapiens
  misc_RNA (1)...(19): siRNA sense strand
cugaaaggagcucuggaaa

SEQ ID NO: 2425247 - RNA, 19 nt, Homo sapiens
  misc_RNA (1)...(19): siRNA sense strand
aagucugauugaagaggaa

SEQ ID NO: 2425248 - RNA, 19 nt, Homo sapiens
  misc_RNA (1)...(19): siRNA sense strand
aggaaagagagaugccgaa

SEQ ID NO: 2425249 - RNA, 19 nt, Homo sapiens
  misc_RNA (1)...(19): siRNA sense strand
aggaaacugggcagaagaa

SEQ ID NO: 2425250 - RNA, 19 nt, Homo sapiens
  misc_RNA (1)...(19): siRNA sense strand
uuuccaagagauagucaaa

SEQ ID NO: 2425251 - RNA, 19 nt, Homo sapiens
  misc_RNA (1)...(19): siRNA sense strand
gaggaaagagagaugccga

SEQ ID NO: 2425252 - RNA, 19 nt, Homo sapiens
  misc_RNA (1)...(19): siRNA sense strand
uggcagaaacccaacgcuu

SEQ ID NO: 2425253 - RNA, 19 nt, Homo sapiens
  misc_RNA (1)...(19): siRNA sense strand
cuggacagguacugggcaa

SEQ ID NO: 2425254 - RNA, 19 nt, Homo sapiens
  misc_RNA (1)...(19): siRNA sense strand
ccacuaaaauccugggcau

SEQ ID NO: 2425255 - RNA, 19 nt, Homo sapiens
  misc_RNA (1)...(19): siRNA sense strand
gcucgagaaaggaaagcca

SEQ ID NO: 2425256 - RNA, 19 nt, Homo sapiens
  misc_RNA (1)...(19): siRNA sense strand
gguuaagaacugugcaaau

SEQ ID NO: 2425257 - RNA, 19 nt, Homo sapiens
  misc_RNA (1)...(19): siRNA sense strand
aagaacagucagagggaau

SEQ ID NO: 2425258 - RNA, 19 nt, Homo sapiens
  misc_RNA (1)...(19): siRNA sense strand
ugccaaaauaggaggaaua

SEQ ID NO: 2425259 - RNA, 19 nt, Homo sapiens
  misc_RNA (1)...(19): siRNA sense strand
aggaaacaugaguggaaau

SEQ ID NO: 2425260 - RNA, 19 nt, Homo sapiens
  misc_RNA (1)...(19): siRNA sense strand
aagauuugaaggugguuaa

SEQ ID NO: 2425261 - RNA, 19 nt, Homo sapiens
  misc_RNA (1)...(19): siRNA sense strand
gcuggaaugcaguggcuau

SEQ ID NO: 2425262 - RNA, 19 nt, Homo sapiens
  misc_RNA (1)...(19): siRNA sense strand
agagcacagugaugagcaa

SEQ ID NO: 2425263 - RNA, 19 nt, Homo sapiens
  misc_RNA (1)...(19): siRNA sense strand
cgucauugaagaacaguca

SEQ ID NO: 2425264 - RNA, 19 nt, Homo sapiens
  misc_RNA (1)...(19): siRNA sense strand
cuagaaggauucagcggga

SEQ ID NO: 2425265 - RNA, 19 nt, Homo sapiens
  misc_RNA (1)...(19): siRNA sense strand
gugguuaagaacugugcaa

SEQ ID NO: 2425266 - RNA, 19 nt, Homo sapiens
  misc_RNA (1)...(19): siRNA sense strand
cugaaacuccugagcucaa

SEQ ID NO: 2425267 - RNA, 19 nt, Homo sapiens
  misc_RNA (1)...(19): siRNA sense strand
agggaauuguuaagaagca

SEQ ID NO: 2425268 - RNA, 19 nt, Homo sapiens
  misc_RNA (1)...(19): siRNA sense strand
cuguauacaaucaugagua

SEQ ID NO: 2425269 - RNA, 19 nt, Homo sapiens
  misc_RNA (1)...(19): siRNA sense strand
cugaaauggauugguuaua

SEQ ID NO: 2425270 - RNA, 19 nt, Homo sapiens
  misc_RNA (1)...(19): siRNA sense strand
acugaaauggauugguuau

SEQ ID NO: 2425271 - RNA, 19 nt, Homo sapiens
  misc_RNA (1)...(19): siRNA sense strand
cauuaaugugauggugaaa

SEQ ID NO: 2425272 - RNA, 19 nt, Homo sapiens
  misc_RNA (1)...(19): siRNA sense strand
gaagcacacacgaggccua

SEQ ID NO: 2425273 - RNA, 19 nt, Homo sapiens
  misc_RNA (1)...(19): siRNA sense strand
gggaauuguuaagaagcau

SEQ ID NO: 2425274 - RNA, 19 nt, Homo sapiens
  misc_RNA (1)...(19): siRNA sense strand
cagaagauuugaagguggu

SEQ ID NO: 2425275 - RNA, 19 nt, Homo sapiens
  misc_RNA (1)...(19): siRNA sense strand
augagcaagcaguaauaaa

SEQ ID NO: 2425276 - RNA, 19 nt, Homo sapiens
  misc_RNA (1)...(19): siRNA sense strand
gugaauucuuacagcacaa

SEQ ID NO: 2425277 - RNA, 19 nt, Homo sapiens
  misc_RNA (1)...(19): siRNA sense strand
gagaauaauaacagagggu

SEQ ID NO: 2425278 - RNA, 19 nt, Homo sapiens
  misc_RNA (1)...(19): siRNA sense strand
aggaacaagauccgagcaa

SEQ ID NO: 2425279 - RNA, 19 nt, Homo sapiens
  misc_RNA (1)...(19): siRNA sense strand
cagagaagagagugagagu

SEQ ID NO: 2425280 - RNA, 19 nt, Homo sapiens
  misc_RNA (1)...(19): siRNA sense strand
caguauugaaguaugagaa

SEQ ID NO: 2425281 - RNA, 19 nt, Homo sapiens
  misc_RNA (1)...(19): siRNA sense strand
guuaugaauaucaggcaau

SEQ ID NO: 2425282 - RNA, 19 nt, Homo sapiens
  misc_RNA (1)...(19): siRNA sense strand
cggaaagaggugauaagga

SEQ ID NO: 2425283 - RNA, 19 nt, Homo sapiens
  misc_RNA (1)...(19): siRNA sense strand
uggaaaaccucguguggau

SEQ ID NO: 2425284 - RNA, 19 nt, Homo sapiens
  misc_RNA (1)...(19): siRNA sense strand
agaugaugaacuaggguca

SEQ ID NO: 2425285 - RNA, 19 nt, Homo sapiens
  misc_RNA (1)...(19): siRNA sense strand
ccuccaagucaccggcuua

SEQ ID NO: 2425286 - RNA, 19 nt, Homo sapiens
  misc_RNA (1)...(19): siRNA sense strand
uggauuugauggugcaaca

SEQ ID NO: 2425287 - RNA, 19 nt, Homo sapiens
  misc_RNA (1)...(19): siRNA sense strand
uguuaugaauaucaggcaa

SEQ ID NO: 2425288 - RNA, 19 nt, Homo sapiens
  misc_RNA (1)...(19): siRNA sense strand
gaucacuagcuucgaggaa

SEQ ID NO: 2425289 - RNA, 19 nt, Homo sapiens
  misc_RNA (1)...(19): siRNA sense strand
ccacaacauaagaucacua

SEQ ID NO: 2425290 - RNA, 19 nt, Homo sapiens
  misc_RNA (1)...(19): siRNA sense strand
ucagaaaauuagaccgauu

SEQ ID NO: 2425291 - RNA, 19 nt, Homo sapiens
  misc_RNA (1)...(19): siRNA sense strand
cgaccgacaggguggugaa

SEQ ID NO: 2425292 - RNA, 19 nt, Homo sapiens
  misc_RNA (1)...(19): siRNA sense strand
gaauaauaacagagggugc

SEQ ID NO: 2425293 - RNA, 19 nt, Homo sapiens
  misc_RNA (1)...(19): siRNA sense strand
ccaagggcuuagaccgaau

SEQ ID NO: 2425294 - RNA, 19 nt, Homo sapiens
  misc_RNA (1)...(19): siRNA sense strand
gagacuaacggcacggaca

SEQ ID NO: 2425295 - RNA, 19 nt, Homo sapiens
  misc_RNA (1)...(19): siRNA sense strand
gggaaggcuggaagagagu

SEQ ID NO: 2425296 - RNA, 19 nt, Homo sapiens
  misc_RNA (1)...(19): siRNA sense strand
uggaaaucaugaauguaga

SEQ ID NO: 2425297 - RNA, 19 nt, Homo sapiens
  misc_RNA (1)...(19): siRNA sense strand
gcguauaugaugccuguau

SEQ ID NO: 2425298 - RNA, 19 nt, Homo sapiens
  misc_RNA (1)...(19): siRNA sense strand
gugacugagaugcugguaa

SEQ ID NO: 2425299 - RNA, 19 nt, Homo sapiens
  misc_RNA (1)...(19): siRNA sense strand
caacaaggcucucaccuca

SEQ ID NO: 2425300 - RNA, 19 nt, Homo sapiens
  misc_RNA (1)...(19): siRNA sense strand
guauugaaugugugcugua

SEQ ID NO: 2425301 - RNA, 19 nt, Homo sapiens
  misc_RNA (1)...(19): siRNA sense strand
cugaaaggcuugaccccaa

SEQ ID NO: 2425302 - RNA, 19 nt, Homo sapiens
  misc_RNA (1)...(19): siRNA sense strand
uggcaguaauagcagcaau

SEQ ID NO: 2425303 - RNA, 19 nt, Homo sapiens
  misc_RNA (1)...(19): siRNA sense strand
auaacaaagcugcaguauu

SEQ ID NO: 2425304 - RNA, 19 nt, Homo sapiens
  misc_RNA (1)...(19): siRNA sense strand
aaagaggugauaaggaaca

SEQ ID NO: 2425305 - RNA, 19 nt, Homo sapiens
  misc_RNA (1)...(19): siRNA sense strand
ggauguugguggaaagaua

SEQ ID NO: 2425306 - RNA, 19 nt, Homo sapiens
  misc_RNA (1)...(19): siRNA sense strand
caaaugaggaacagggcaa

SEQ ID NO: 2425307 - RNA, 19 nt, Homo sapiens
  misc_RNA (1)...(19): siRNA sense strand
cuaaaagcauggaaagaaa

SEQ ID NO: 2425308 - RNA, 19 nt, Homo sapiens
  misc_RNA (1)...(19): siRNA sense strand
gggcugaagcagugcacua

SEQ ID NO: 2425309 - RNA, 19 nt, Homo sapiens
  misc_RNA (1)...(19): siRNA sense strand
ugauauagggucugggauu

SEQ ID NO: 2425310 - RNA, 19 nt, Homo sapiens
  misc_RNA (1)...(19): siRNA sense strand
acuuaaagaaagccagaua

SEQ ID NO: 2425311 - RNA, 19 nt, Homo sapiens
  misc_RNA (1)...(19): siRNA sense strand
gugaagagaugucaggaga

SEQ ID NO: 2425312 - RNA, 19 nt, Homo sapiens
  misc_RNA (1)...(19): siRNA sense strand
agcuugacuuggagagaua

SEQ ID NO: 2425313 - RNA, 19 nt, Homo sapiens
  misc_RNA (1)...(19): siRNA sense strand
ggcuguaagcagaagauua

SEQ ID NO: 2425314 - RNA, 19 nt, Homo sapiens
  misc_RNA (1)...(19): siRNA sense strand
gcagaaagaaauauggcau

SEQ ID NO: 2425315 - RNA, 19 nt, Homo sapiens
  misc_RNA (1)...(19): siRNA sense strand
caauuauacagcugcguaa

SEQ ID NO: 2425316 - RNA, 19 nt, Homo sapiens
  misc_RNA (1)...(19): siRNA sense strand
uaguagaacccauggaaaa

SEQ ID NO: 2425317 - RNA, 19 nt, Homo sapiens
  misc_RNA (1)...(19): siRNA sense strand
cagagcucuuugagaauaa

SEQ ID NO: 2425318 - RNA, 19 nt, Homo sapiens
  misc_RNA (1)...(19): siRNA sense strand
uuggauaccuggaggauca

SEQ ID NO: 2425319 - RNA, 19 nt, Homo sapiens
  misc_RNA (1)...(19): siRNA sense strand
cuauuauucaugaggcaaa

SEQ ID NO: 2425320 - RNA, 19 nt, Homo sapiens
  misc_RNA (1)...(19): siRNA sense strand
caugagaagauuaagaaga

SEQ ID NO: 2425321 - RNA, 19 nt, Homo sapiens
  misc_RNA (1)...(19): siRNA sense strand
cugaaaucauggagcuaca

SEQ ID NO: 2425322 - RNA, 19 nt, Homo sapiens
  misc_RNA (1)...(19): siRNA sense strand
uggaaguggcccucaguaa

SEQ ID NO: 2425323 - RNA, 19 nt, Homo sapiens
  misc_RNA (1)...(19): siRNA sense strand
cagggagacuugauggaau

SEQ ID NO: 2425324 - RNA, 19 nt, Homo sapiens
  misc_RNA (1)...(19): siRNA sense strand
cuugauuggaguugguuaa

SEQ ID NO: 2425325 - RNA, 19 nt, Homo sapiens
  misc_RNA (1)...(19): siRNA sense strand
gcacuaugugucuggacua

SEQ ID NO: 2425326 - RNA, 19 nt, Homo sapiens
  misc_RNA (1)...(19): siRNA sense strand
cugugauguuccugaagaa

SEQ ID NO: 2425327 - RNA, 19 nt, Homo sapiens
  misc_RNA (1)...(19): siRNA sense strand
cuaaauaugacuucugcaa

SEQ ID NO: 2425328 - RNA, 19 nt, Homo sapiens
  misc_RNA (1)...(19): siRNA sense strand
uguaaaggccugugauguu

SEQ ID NO: 2425329 - RNA, 19 nt, Homo sapiens
  misc_RNA (1)...(19): siRNA sense strand
agaaaauuguuguggacuu

SEQ ID NO: 2425330 - RNA, 19 nt, Homo sapiens
  misc_RNA (1)...(19): siRNA sense strand
ugaauguauugcuggauau

SEQ ID NO: 2425331 - RNA, 19 nt, Homo sapiens
  misc_RNA (1)...(19): siRNA sense strand
cauggaaagaaauggaaga

SEQ ID NO: 2425332 - RNA, 19 nt, Homo sapiens
  misc_RNA (1)...(19): siRNA sense strand
acuaagugauauagggucu

SEQ ID NO: 2425333 - RNA, 19 nt, Homo sapiens
  misc_RNA (1)...(19): siRNA sense strand
guguauauuugcaugugaa

SEQ ID NO: 2425334 - RNA, 19 nt, Homo sapiens
  misc_RNA (1)...(19): siRNA sense strand
uggaauaaauacugguucu

SEQ ID NO: 2425335 - RNA, 19 nt, Homo sapiens
  misc_RNA (1)...(19): siRNA sense strand
uggaaagaaauggaagaaa

SEQ ID NO: 2425336 - RNA, 19 nt, Homo sapiens
  misc_RNA (1)...(19): siRNA sense strand
ccucaguaauaucaaagaa

SEQ ID NO: 2425337 - RNA, 19 nt, Homo sapiens
  misc_RNA (1)...(19): siRNA sense strand
gggcaauaguaugaugaau

SEQ ID NO: 2425338 - RNA, 19 nt, Homo sapiens
  misc_RNA (1)...(19): siRNA sense strand
uggaguugguuaacagaau

SEQ ID NO: 2425339 - RNA, 19 nt, Homo sapiens
  misc_RNA (1)...(19): siRNA sense strand
gggauaugccaaagauguu

SEQ ID NO: 2425340 - RNA, 19 nt, Homo sapiens
  misc_RNA (1)...(19): siRNA sense strand
uguuguggacuuaaagaaa

SEQ ID NO: 2425341 - RNA, 19 nt, Homo sapiens
  misc_RNA (1)...(19): siRNA sense strand
ggacuuaaagaaagccaga

SEQ ID NO: 2425342 - RNA, 19 nt, Homo sapiens
  misc_RNA (1)...(19): siRNA sense strand
ucaaggagcuguuugguca

SEQ ID NO: 2425343 - RNA, 19 nt, Homo sapiens
  misc_RNA (1)...(19): siRNA sense strand
cagucuagaaggugcagua

SEQ ID NO: 2425344 - RNA, 19 nt, Homo sapiens
  misc_RNA (1)...(19): siRNA sense strand
acaacaacugaaagcuaaa

SEQ ID NO: 2425345 - RNA, 19 nt, Homo sapiens
  misc_RNA (1)...(19): siRNA sense strand
ccaugguauuugaauguau

SEQ ID NO: 2425346 - RNA, 19 nt, Homo sapiens
  misc_RNA (1)...(19): siRNA sense strand
uuaagaagaaggauccaaa

SEQ ID NO: 2425347 - RNA, 19 nt, Homo sapiens
  misc_RNA (1)...(19): siRNA sense strand
ugaagagaugucaggagaa

SEQ ID NO: 2425348 - RNA, 19 nt, Homo sapiens
  misc_RNA (1)...(19): siRNA sense strand
guuuaauaguagaacccau

SEQ ID NO: 2425349 - RNA, 19 nt, Homo sapiens
  misc_RNA (1)...(19): siRNA sense strand
caaggaagucuguguacau

SEQ ID NO: 2425350 - RNA, 19 nt, Homo sapiens
  misc_RNA (1)...(19): siRNA sense strand
agauggaguuagaggcugu

SEQ ID NO: 2425351 - RNA, 19 nt, Homo sapiens
  misc_RNA (1)...(19): siRNA sense strand
gugauagcuauaugguuua

SEQ ID NO: 2425352 - RNA, 19 nt, Homo sapiens
  misc_RNA (1)...(19): siRNA sense strand
agauguugaucaaggaagu

SEQ ID NO: 2425353 - RNA, 19 nt, Homo sapiens
  misc_RNA (1)...(19): siRNA sense strand
cagaugacguaugggauau

SEQ ID NO: 2425354 - RNA, 19 nt, Homo sapiens
  misc_RNA (1)...(19): siRNA sense strand
ugauggaaucucuggaaca

SEQ ID NO: 2425355 - RNA, 19 nt, Homo sapiens
  misc_RNA (1)...(19): siRNA sense strand
aggaacagggcaauaguau

SEQ ID NO: 2425356 - RNA, 19 nt, Homo sapiens
  misc_RNA (1)...(19): siRNA sense strand
gcucaacaaaccagaaaau

SEQ ID NO: 2425357 - RNA, 19 nt, Homo sapiens
  misc_RNA (1)...(19): siRNA sense strand
agagaugucaggagaaguu

SEQ ID NO: 2425358 - RNA, 19 nt, Homo sapiens
  misc_RNA (1)...(19): siRNA sense strand
agauaguacacauccuaaa

SEQ ID NO: 2425359 - RNA, 19 nt, Homo sapiens
  misc_RNA (1)...(19): siRNA sense strand
gcuaaaagcauggaaagaa

SEQ ID NO: 2425360 - RNA, 19 nt, Homo sapiens
  misc_RNA (1)...(19): siRNA sense strand
aggaggaccuguugaccuu

SEQ ID NO: 2425361 - RNA, 19 nt, Homo sapiens
  misc_RNA (1)...(19): siRNA sense strand
agcacaaaugauagaagaa

SEQ ID NO: 2425362 - RNA, 19 nt, Homo sapiens
  misc_RNA (1)...(19): siRNA sense strand
aauuaagucuugucgccua

SEQ ID NO: 2425363 - RNA, 19 nt, Homo sapiens
  misc_RNA (1)...(19): siRNA sense strand
cuacaguugauguugaauu

SEQ ID NO: 2425364 - RNA, 19 nt, Homo sapiens
  misc_RNA (1)...(19): siRNA sense strand
gcguaaagugugggcugaa

SEQ ID NO: 2425365 - RNA, 19 nt, Homo sapiens
  misc_RNA (1)...(19): siRNA sense strand
agguuggugucauuggaua

SEQ ID NO: 2425366 - RNA, 19 nt, Homo sapiens
  misc_RNA (1)...(19): siRNA sense strand
ccgaaagcugcucaacaaa

SEQ ID NO: 2425367 - RNA, 19 nt, Homo sapiens
  misc_RNA (1)...(19): siRNA sense strand
cagauuaugaagaaguuga

SEQ ID NO: 2425368 - RNA, 19 nt, Homo sapiens
  misc_RNA (1)...(19): siRNA sense strand
ggaauacuguucuggagga

SEQ ID NO: 2425369 - RNA, 19 nt, Homo sapiens
  misc_RNA (1)...(19): siRNA sense strand
agagauacagcgagcagau

SEQ ID NO: 2425370 - RNA, 19 nt, Homo sapiens
  misc_RNA (1)...(19): siRNA sense strand
auggaagacgucagggaga

SEQ ID NO: 2425371 - RNA, 19 nt, Homo sapiens
  misc_RNA (1)...(19): siRNA sense strand
acaaaacaggggagaauaa

SEQ ID NO: 2425372 - RNA, 19 nt, Homo sapiens
  misc_RNA (1)...(19): siRNA sense strand
agcaagagcugaaggacga

SEQ ID NO: 2425373 - RNA, 19 nt, Homo sapiens
  misc_RNA (1)...(19): siRNA sense strand
guugcugcgcggagagaaa

SEQ ID NO: 2425374 - RNA, 19 nt, Homo sapiens
  misc_RNA (1)...(19): siRNA sense strand
ccagaguagcacagaguca

SEQ ID NO: 2425375 - RNA, 19 nt, Homo sapiens
  misc_RNA (1)...(19): siRNA sense strand
gggccagcgaggagauauu

SEQ ID NO: 2425376 - RNA, 19 nt, Homo sapiens
  misc_RNA (1)...(19): siRNA sense strand
acgacaaccuggaugguga

SEQ ID NO: 2425377 - RNA, 19 nt, Homo sapiens
  misc_RNA (1)...(19): siRNA sense strand
cgaagaaugcggaguggca

SEQ ID NO: 2425378 - RNA, 19 nt, Homo sapiens
  misc_RNA (1)...(19): siRNA sense strand
uagaagaagagaagugcuu

SEQ ID NO: 2425379 - RNA, 19 nt, Homo sapiens
  misc_RNA (1)...(19): siRNA sense strand
aguacuuccuggaggccua

SEQ ID NO: 2425380 - RNA, 19 nt, Homo sapiens
  misc_RNA (1)...(19): siRNA sense strand
ugacaaaacaggggagaau

SEQ ID NO: 2425381 - RNA, 19 nt, Homo sapiens
  misc_RNA (1)...(19): siRNA sense strand
cugcaaacgcccagaucca

SEQ ID NO: 2425382 - RNA, 19 nt, Homo sapiens
  misc_RNA (1)...(19): siRNA sense strand
gcaguuauaucaaggccau

SEQ ID NO: 2425383 - RNA, 19 nt, Homo sapiens
  misc_RNA (1)...(19): siRNA sense strand
cgacagcaguacaggccga

SEQ ID NO: 2425384 - RNA, 19 nt, Homo sapiens
  misc_RNA (1)...(19): siRNA sense strand
cauacuacacccagcggaa

SEQ ID NO: 2425385 - RNA, 19 nt, Homo sapiens
  misc_RNA (1)...(19): siRNA sense strand
ggagcaacaacgacgucaa

SEQ ID NO: 2425386 - RNA, 19 nt, Homo sapiens
  misc_RNA (1)...(19): siRNA sense strand
ggaugaagacaguggagac

SEQ ID NO: 2425387 - RNA, 19 nt, Homo sapiens
  misc_RNA (1)...(19): siRNA sense strand
ccagucaacacaugggcaa

SEQ ID NO: 2425388 - RNA, 19 nt, Homo sapiens
  misc_RNA (1)...(19): siRNA sense strand
gagcgggaagaacgggaaa

SEQ ID NO: 2425389 - RNA, 19 nt, Homo sapiens
  misc_RNA (1)...(19): siRNA sense strand
gaugaaauuccaugccgaa

SEQ ID NO: 2425390 - RNA, 19 nt, Homo sapiens
  misc_RNA (1)...(19): siRNA sense strand
aggcagagcgagaccgcau

SEQ ID NO: 2425391 - RNA, 19 nt, Homo sapiens
  misc_RNA (1)...(19): siRNA sense strand
ccaccaaggcgaaccgcau

SEQ ID NO: 2425392 - RNA, 19 nt, Homo sapiens
  misc_RNA (1)...(19): siRNA sense strand
agucaacacaugggcaaua

SEQ ID NO: 2425393 - RNA, 19 nt, Homo sapiens
  misc_RNA (1)...(19): siRNA sense strand
ggaaacagauggauccucu

SEQ ID NO: 2425394 - RNA, 19 nt, Homo sapiens
  misc_RNA (1)...(19): siRNA sense strand
gagaacugugugaagaaaa

SEQ ID NO: 2425395 - RNA, 19 nt, Homo sapiens
  misc_RNA (1)...(19): siRNA sense strand
ugcugaagaaccugacaaa

SEQ ID NO: 2425396 - RNA, 19 nt, Homo sapiens
  misc_RNA (1)...(19): siRNA sense strand
agauggaagugaacgggca

SEQ ID NO: 2425397 - RNA, 19 nt, Homo sapiens
  misc_RNA (1)...(19): siRNA sense strand
ugcaaguagaagaagagaa

SEQ ID NO: 2425398 - RNA, 19 nt, Homo sapiens
  misc_RNA (1)...(19): siRNA sense strand
gucaacagauggagcggga

SEQ ID NO: 2425399 - RNA, 19 nt, Homo sapiens
  misc_RNA (1)...(19): siRNA sense strand
cccacgagguaaagaugau

SEQ ID NO: 2425400 - RNA, 19 nt, Homo sapiens
  misc_RNA (1)...(19): siRNA sense strand
gguggagcucggacgacaa

SEQ ID NO: 2425401 - RNA, 19 nt, Homo sapiens
  misc_RNA (1)...(19): siRNA sense strand
ccaucagccaggugagcga

SEQ ID NO: 2425402 - RNA, 19 nt, Homo sapiens
  misc_RNA (1)...(19): siRNA sense strand
augccuacauggacggaca

SEQ ID NO: 2425403 - RNA, 19 nt, Homo sapiens
  misc_RNA (1)...(19): siRNA sense strand
caacagauggagcgggaag

SEQ ID NO: 2425404 - RNA, 19 nt, Homo sapiens
  misc_RNA (1)...(19): siRNA sense strand
gaagauuagaagugagauu

SEQ ID NO: 2425405 - RNA, 19 nt, Homo sapiens
  misc_RNA (1)...(19): siRNA sense strand
cuggaagaauagagaucaa

SEQ ID NO: 2425406 - RNA, 19 nt, Homo sapiens
  misc_RNA (1)...(19): siRNA sense strand
cgggagaguggaagugaaa

SEQ ID NO: 2425407 - RNA, 19 nt, Homo sapiens
  misc_RNA (1)...(19): siRNA sense strand
cuaaguagcuguaacggaa

SEQ ID NO: 2425408 - RNA, 19 nt, Homo sapiens
  misc_RNA (1)...(19): siRNA sense strand
auucaaagaagcagaguuu

SEQ ID NO: 2425409 - RNA, 19 nt, Homo sapiens
  misc_RNA (1)...(19): siRNA sense strand
cugcauagagaguggucaa

SEQ ID NO: 2425410 - RNA, 19 nt, Homo sapiens
  misc_RNA (1)...(19): siRNA sense strand
aaacaaguguagcgggaga

SEQ ID NO: 2425411 - RNA, 19 nt, Homo sapiens
  misc_RNA (1)...(19): siRNA sense strand
gaugaaaugcaauggaaaa

SEQ ID NO: 2425412 - RNA, 19 nt, Homo sapiens
  misc_RNA (1)...(19): siRNA sense strand
agaugaaaugcaauggaaa

SEQ ID NO: 2425413 - RNA, 19 nt, Homo sapiens
  misc_RNA (1)...(19): siRNA sense strand
gagucuuccuugugggauu

SEQ ID NO: 2425414 - RNA, 19 nt, Homo sapiens
  misc_RNA (1)...(19): siRNA sense strand
gcugacgcguggagggaau

SEQ ID NO: 2425415 - RNA, 19 nt, Homo sapiens
  misc_RNA (1)...(19): siRNA sense strand
ggacauagaagaugcccau

SEQ ID NO: 2425416 - RNA, 19 nt, Homo sapiens
  misc_RNA (1)...(19): siRNA sense strand
ggacaguugagguggagau

SEQ ID NO: 2425417 - RNA, 19 nt, Homo sapiens
  misc_RNA (1)...(19): siRNA sense strand
ggagaguggaagugaaagu

SEQ ID NO: 2425418 - RNA, 19 nt, Homo sapiens
  misc_RNA (1)...(19): siRNA sense strand
gugcaaagggaaugagucu

SEQ ID NO: 2425419 - RNA, 19 nt, Homo sapiens
  misc_RNA (1)...(19): siRNA sense strand
cugugcagacaaagggaaa

SEQ ID NO: 2425420 - RNA, 19 nt, Homo sapiens
  misc_RNA (1)...(19): siRNA sense strand
gagaugaauucuugccuga

SEQ ID NO: 2425421 - RNA, 19 nt, Homo sapiens
  misc_RNA (1)...(19): siRNA sense strand
gcgggagaguggaagugaa

SEQ ID NO: 2425422 - RNA, 19 nt, Homo sapiens
  misc_RNA (1)...(19): siRNA sense strand
aagugaaaguccaggagga

SEQ ID NO: 2425423 - RNA, 19 nt, Homo sapiens
  misc_RNA (1)...(19): siRNA sense strand
agugaagugcaaagggaau

SEQ ID NO: 2425424 - RNA, 19 nt, Homo sapiens
  misc_RNA (1)...(19): siRNA sense strand
cagaaauucgcuuggugaa

SEQ ID NO: 2425425 - RNA, 19 nt, Homo sapiens
  misc_RNA (1)...(19): siRNA sense strand
aggaagauuagaagugaga

SEQ ID NO: 2425426 - RNA, 19 nt, Homo sapiens
  misc_RNA (1)...(19): siRNA sense strand
agugagauuccaaggagaa

SEQ ID NO: 2425427 - RNA, 19 nt, Homo sapiens
  misc_RNA (1)...(19): siRNA sense strand
cugaaaaggaaaaugggaa

SEQ ID NO: 2425428 - RNA, 19 nt, Homo sapiens
  misc_RNA (1)...(19): siRNA sense strand
ugaaaaggaaaaugggaau

SEQ ID NO: 2425429 - RNA, 19 nt, Homo sapiens
  misc_RNA (1)...(19): siRNA sense strand
gaaggaacuuguagccaca

SEQ ID NO: 2425430 - RNA, 19 nt, Homo sapiens
  misc_RNA (1)...(19): siRNA sense strand
ugcucaagauacacagaaa

SEQ ID NO: 2425431 - RNA, 19 nt, Homo sapiens
  misc_RNA (1)...(19): siRNA sense strand
gggaacagugugugaugau

SEQ ID NO: 2425432 - RNA, 19 nt, Homo sapiens
  misc_RNA (1)...(19): siRNA sense strand
gaucuuauaugcaacggaa

SEQ ID NO: 2425433 - RNA, 19 nt, Homo sapiens
  misc_RNA (1)...(19): siRNA sense strand
ggggaaagcauuauugcaa

SEQ ID NO: 2425434 - RNA, 19 nt, Homo sapiens
  misc_RNA (1)...(19): siRNA sense strand
gcucaagauacacagaaau

SEQ ID NO: 2425435 - RNA, 19 nt, Homo sapiens
  misc_RNA (1)...(19): siRNA sense strand
gaaaacaaguguagcggga

SEQ ID NO: 2425436 - RNA, 19 nt, Homo sapiens
  misc_RNA (1)...(19): siRNA sense strand
agguggagauucagagacu

SEQ ID NO: 2425437 - RNA, 19 nt, Homo sapiens
  misc_RNA (1)...(19): siRNA sense strand
ucuuauaugcaacggaaau

SEQ ID NO: 2425438 - RNA, 19 nt, Homo sapiens
  misc_RNA (1)...(19): siRNA sense strand
gcaacaaacacauggcugu

SEQ ID NO: 2425439 - RNA, 19 nt, Homo sapiens
  misc_RNA (1)...(19): siRNA sense strand
agaucugggcugaagaauu

SEQ ID NO: 2425440 - RNA, 19 nt, Homo sapiens
  misc_RNA (1)...(19): siRNA sense strand
agggcagaguggagcucaa

SEQ ID NO: 2425441 - RNA, 19 nt, Homo sapiens
  misc_RNA (1)...(19): siRNA sense strand
acaugugacaacaagauaa

SEQ ID NO: 2425442 - RNA, 19 nt, Homo sapiens
  misc_RNA (1)...(19): siRNA sense strand
gaagugaagugcaaaggga

SEQ ID NO: 2425443 - RNA, 19 nt, Homo sapiens
  misc_RNA (1)...(19): siRNA sense strand
ucacuaugaagaagccaaa

SEQ ID NO: 2425444 - RNA, 19 nt, Homo sapiens
  misc_RNA (1)...(19): siRNA sense strand
auuauguccuucagagcaa

SEQ ID NO: 2425445 - RNA, 19 nt, Homo sapiens
  misc_RNA (1)...(19): siRNA sense strand
gagucagcucuuugggauu

SEQ ID NO: 2425446 - RNA, 19 nt, Homo sapiens
  misc_RNA (1)...(19): siRNA sense strand
cguucuaugcagggaauua

SEQ ID NO: 2425447 - RNA, 19 nt, Homo sapiens
  misc_RNA (1)...(19): siRNA sense strand
cucaagauacacagaaauu

SEQ ID NO: 2425448 - RNA, 19 nt, Homo sapiens
  misc_RNA (1)...(19): siRNA sense strand
ugugaugacucuugggacu

SEQ ID NO: 2425449 - RNA, 19 nt, Homo sapiens
  misc_RNA (1)...(19): siRNA sense strand
uggagaaggcucuggacca

SEQ ID NO: 2425450 - RNA, 19 nt, Homo sapiens
  misc_RNA (1)...(19): siRNA sense strand
aggaagacgcugcagugaa

SEQ ID NO: 2425451 - RNA, 19 nt, Homo sapiens
  misc_RNA (1)...(19): siRNA sense strand
cgucacagccauuggucga

SEQ ID NO: 2425452 - RNA, 19 nt, Homo sapiens
  misc_RNA (1)...(19): siRNA sense strand
gaauggugcuacuugaaga

SEQ ID NO: 2425453 - RNA, 19 nt, Homo sapiens
  misc_RNA (1)...(19): siRNA sense strand
gcacaaggaggaugcggga

SEQ ID NO: 2425454 - RNA, 19 nt, Homo sapiens
  misc_RNA (1)...(19): siRNA sense strand
agaacuuaguccaccaaau

SEQ ID NO: 2425455 - RNA, 19 nt, Homo sapiens
  misc_RNA (1)...(19): siRNA sense strand
cagauauuucagugcagaa

SEQ ID NO: 2425456 - RNA, 19 nt, Homo sapiens
  misc_RNA (1)...(19): siRNA sense strand
agugaauugcacagauauu

SEQ ID NO: 2425457 - RNA, 19 nt, Homo sapiens
  misc_RNA (1)...(19): siRNA sense strand
guguagcgggagaguggaa

SEQ ID NO: 2425458 - RNA, 19 nt, Homo sapiens
  misc_RNA (1)...(19): siRNA sense strand
guggaagugcugucaguuu

SEQ ID NO: 2425459 - RNA, 19 nt, Homo sapiens
  misc_RNA (1)...(19): siRNA sense strand
ccaguaagggauuuggaca

SEQ ID NO: 2425460 - RNA, 19 nt, Homo sapiens
  misc_RNA (1)...(19): siRNA sense strand
gaguagucugcucaagaua

SEQ ID NO: 2425461 - RNA, 19 nt, Homo sapiens
  misc_RNA (1)...(19): siRNA sense strand
ucaggaaaccagucccaaa

SEQ ID NO: 2425462 - RNA, 19 nt, Homo sapiens
  misc_RNA (1)...(19): siRNA sense strand
ccaaaauccaggcaacaaa

SEQ ID NO: 2425463 - RNA, 19 nt, Homo sapiens
  misc_RNA (1)...(19): siRNA sense strand
acaaggaggaugcgggagu

SEQ ID NO: 2425464 - RNA, 19 nt, Homo sapiens
  misc_RNA (1)...(19): siRNA sense strand
aagugagauuccaaggaga

SEQ ID NO: 2425465 - RNA, 19 nt, Homo sapiens
  misc_RNA (1)...(19): siRNA sense strand
gaagauuagaagugagauu

SEQ ID NO: 2425466 - RNA, 19 nt, Homo sapiens
  misc_RNA (1)...(19): siRNA sense strand
cuggaagaauagagaucaa

SEQ ID NO: 2425467 - RNA, 19 nt, Homo sapiens
  misc_RNA (1)...(19): siRNA sense strand
cgggagaguggaagugaaa

SEQ ID NO: 2425468 - RNA, 19 nt, Homo sapiens
  misc_RNA (1)...(19): siRNA sense strand
cuaaguagcuguaacggaa

SEQ ID NO: 2425469 - RNA, 19 nt, Homo sapiens
  misc_RNA (1)...(19): siRNA sense strand
auucaaagaagcagaguuu

SEQ ID NO: 2425470 - RNA, 19 nt, Homo sapiens
  misc_RNA (1)...(19): siRNA sense strand
cugcauagagaguggucaa

SEQ ID NO: 2425471 - RNA, 19 nt, Homo sapiens
  misc_RNA (1)...(19): siRNA sense strand
aaacaaguguagcgggaga

SEQ ID NO: 2425472 - RNA, 19 nt, Homo sapiens
  misc_RNA (1)...(19): siRNA sense strand
gaugaaaugcaauggaaaa

SEQ ID NO: 2425473 - RNA, 19 nt, Homo sapiens
  misc_RNA (1)...(19): siRNA sense strand
agaugaaaugcaauggaaa

SEQ ID NO: 2425474 - RNA, 19 nt, Homo sapiens
  misc_RNA (1)...(19): siRNA sense strand
gagucuuccuugugggauu

SEQ ID NO: 2425475 - RNA, 19 nt, Homo sapiens
  misc_RNA (1)...(19): siRNA sense strand
gcugacgcguggagggaau

SEQ ID NO: 2425476 - RNA, 19 nt, Homo sapiens
  misc_RNA (1)...(19): siRNA sense strand
ggacauagaagaugcccau

SEQ ID NO: 2425477 - RNA, 19 nt, Homo sapiens
  misc_RNA (1)...(19): siRNA sense strand
ggacaguugagguggagau

SEQ ID NO: 2425478 - RNA, 19 nt, Homo sapiens
  misc_RNA (1)...(19): siRNA sense strand
ggagaguggaagugaaagu

SEQ ID NO: 2425479 - RNA, 19 nt, Homo sapiens
  misc_RNA (1)...(19): siRNA sense strand
gugcaaagggaaugagucu

SEQ ID NO: 2425480 - RNA, 19 nt, Homo sapiens
  misc_RNA (1)...(19): siRNA sense strand
cugugcagacaaagggaaa

SEQ ID NO: 2425481 - RNA, 19 nt, Homo sapiens
  misc_RNA (1)...(19): siRNA sense strand
gagaugaauucuugccuga

SEQ ID NO: 2425482 - RNA, 19 nt, Homo sapiens
  misc_RNA (1)...(19): siRNA sense strand
gcgggagaguggaagugaa

SEQ ID NO: 2425483 - RNA, 19 nt, Homo sapiens
  misc_RNA (1)...(19): siRNA sense strand
aagugaaaguccaggagga

SEQ ID NO: 2425484 - RNA, 19 nt, Homo sapiens
  misc_RNA (1)...(19): siRNA sense strand
agugaagugcaaagggaau

SEQ ID NO: 2425485 - RNA, 19 nt, Homo sapiens
  misc_RNA (1)...(19): siRNA sense strand
cagaaauucgcuuggugaa

SEQ ID NO: 2425486 - RNA, 19 nt, Homo sapiens
  misc_RNA (1)...(19): siRNA sense strand
aggaagauuagaagugaga

SEQ ID NO: 2425487 - RNA, 19 nt, Homo sapiens
  misc_RNA (1)...(19): siRNA sense strand
agugagauuccaaggagaa

SEQ ID NO: 2425488 - RNA, 19 nt, Homo sapiens
  misc_RNA (1)...(19): siRNA sense strand
gaaggaacuuguagccaca

SEQ ID NO: 2425489 - RNA, 19 nt, Homo sapiens
  misc_RNA (1)...(19): siRNA sense strand
ugcucaagauacacagaaa

SEQ ID NO: 2425490 - RNA, 19 nt, Homo sapiens
  misc_RNA (1)...(19): siRNA sense strand
gggaacagugugugaugau

SEQ ID NO: 2425491 - RNA, 19 nt, Homo sapiens
  misc_RNA (1)...(19): siRNA sense strand
gaucuuauaugcaacggaa

SEQ ID NO: 2425492 - RNA, 19 nt, Homo sapiens
  misc_RNA (1)...(19): siRNA sense strand
ggggaaagcauuauugcaa

SEQ ID NO: 2425493 - RNA, 19 nt, Homo sapiens
  misc_RNA (1)...(19): siRNA sense strand
gcucaagauacacagaaau

SEQ ID NO: 2425494 - RNA, 19 nt, Homo sapiens
  misc_RNA (1)...(19): siRNA sense strand
gaaaacaaguguagcggga

SEQ ID NO: 2425495 - RNA, 19 nt, Homo sapiens
  misc_RNA (1)...(19): siRNA sense strand
agguggagauucagagacu

SEQ ID NO: 2425496 - RNA, 19 nt, Homo sapiens
  misc_RNA (1)...(19): siRNA sense strand
ucuuauaugcaacggaaau

SEQ ID NO: 2425497 - RNA, 19 nt, Homo sapiens
  misc_RNA (1)...(19): siRNA sense strand
gcaacaaacacauggcugu

SEQ ID NO: 2425498 - RNA, 19 nt, Homo sapiens
  misc_RNA (1)...(19): siRNA sense strand
agaucugggcugaagaauu

SEQ ID NO: 2425499 - RNA, 19 nt, Homo sapiens
  misc_RNA (1)...(19): siRNA sense strand
agggcagaguggagcucaa

SEQ ID NO: 2425500 - RNA, 19 nt, Homo sapiens
  misc_RNA (1)...(19): siRNA sense strand
acaugugacaacaagauaa

SEQ ID NO: 2425501 - RNA, 19 nt, Homo sapiens
  misc_RNA (1)...(19): siRNA sense strand
gaagugaagugcaaaggga

SEQ ID NO: 2425502 - RNA, 19 nt, Homo sapiens
  misc_RNA (1)...(19): siRNA sense strand
ucacuaugaagaagccaaa

SEQ ID NO: 2425503 - RNA, 19 nt, Homo sapiens
  misc_RNA (1)...(19): siRNA sense strand
auuauguccuucagagcaa

SEQ ID NO: 2425504 - RNA, 19 nt, Homo sapiens
  misc_RNA (1)...(19): siRNA sense strand
gagucagcucuuugggauu

SEQ ID NO: 2425505 - RNA, 19 nt, Homo sapiens
  misc_RNA (1)...(19): siRNA sense strand
cguucuaugcagggaauua

SEQ ID NO: 2425506 - RNA, 19 nt, Homo sapiens
  misc_RNA (1)...(19): siRNA sense strand
cucaagauacacagaaauu

SEQ ID NO: 2425507 - RNA, 19 nt, Homo sapiens
  misc_RNA (1)...(19): siRNA sense strand
ugugaugacucuugggacu

SEQ ID NO: 2425508 - RNA, 19 nt, Homo sapiens
  misc_RNA (1)...(19): siRNA sense strand
uggagaaggcucuggacca

SEQ ID NO: 2425509 - RNA, 19 nt, Homo sapiens
  misc_RNA (1)...(19): siRNA sense strand
aggaagacgcugcagugaa

SEQ ID NO: 2425510 - RNA, 19 nt, Homo sapiens
  misc_RNA (1)...(19): siRNA sense strand
cgucacagccauuggucga

SEQ ID NO: 2425511 - RNA, 19 nt, Homo sapiens
  misc_RNA (1)...(19): siRNA sense strand
gaauggugcuacuugaaga

SEQ ID NO: 2425512 - RNA, 19 nt, Homo sapiens
  misc_RNA (1)...(19): siRNA sense strand
gcacaaggaggaugcggga

SEQ ID NO: 2425513 - RNA, 19 nt, Homo sapiens
  misc_RNA (1)...(19): siRNA sense strand
agaacuuaguccaccaaau

SEQ ID NO: 2425514 - RNA, 19 nt, Homo sapiens
  misc_RNA (1)...(19): siRNA sense strand
cagauauuucagugcagaa

SEQ ID NO: 2425515 - RNA, 19 nt, Homo sapiens
  misc_RNA (1)...(19): siRNA sense strand
agugaauugcacagauauu

SEQ ID NO: 2425516 - RNA, 19 nt, Homo sapiens
  misc_RNA (1)...(19): siRNA sense strand
guguagcgggagaguggaa

SEQ ID NO: 2425517 - RNA, 19 nt, Homo sapiens
  misc_RNA (1)...(19): siRNA sense strand
guggaagugcugucaguuu

SEQ ID NO: 2425518 - RNA, 19 nt, Homo sapiens
  misc_RNA (1)...(19): siRNA sense strand
ccaguaagggauuuggaca

SEQ ID NO: 2425519 - RNA, 19 nt, Homo sapiens
  misc_RNA (1)...(19): siRNA sense strand
gaguagucugcucaagaua

SEQ ID NO: 2425520 - RNA, 19 nt, Homo sapiens
  misc_RNA (1)...(19): siRNA sense strand
ucaggaaaccagucccaaa

SEQ ID NO: 2425521 - RNA, 19 nt, Homo sapiens
  misc_RNA (1)...(19): siRNA sense strand
ccaaaauccaggcaacaaa

SEQ ID NO: 2425522 - RNA, 19 nt, Homo sapiens
  misc_RNA (1)...(19): siRNA sense strand
acaaggaggaugcgggagu

SEQ ID NO: 2425523 - RNA, 19 nt, Homo sapiens
  misc_RNA (1)...(19): siRNA sense strand
aagugagauuccaaggaga

SEQ ID NO: 2425524 - RNA, 19 nt, Homo sapiens
  misc_RNA (1)...(19): siRNA sense strand
agggaaggugugugacaga

SEQ ID NO: 2425525 - RNA, 19 nt, Homo sapiens
  misc_RNA (1)...(19): siRNA sense strand
aagugaagugcaaagggaa

SEQ ID NO: 2425526 - RNA, 19 nt, Homo sapiens
  misc_RNA (1)...(19): siRNA sense strand
gguugaaagacuugagagu

SEQ ID NO: 2425527 - RNA, 19 nt, Homo sapiens
  misc_RNA (1)...(19): siRNA sense strand
ggaugaagauggagacgac

SEQ ID NO: 2425528 - RNA, 19 nt, Homo sapiens
  misc_RNA (1)...(19): siRNA sense strand
cagcagagauggacgacgu

SEQ ID NO: 2425529 - RNA, 19 nt, Homo sapiens
  misc_RNA (1)...(19): siRNA sense strand
gggcaguggcuuuggugga

SEQ ID NO: 2425530 - RNA, 19 nt, Homo sapiens
  misc_RNA (1)...(19): siRNA sense strand
ccuuauucccagagccaca

SEQ ID NO: 2425531 - RNA, 19 nt, Homo sapiens
  misc_RNA (1)...(19): siRNA sense strand
gggauggacuggagguggu

SEQ ID NO: 2425532 - RNA, 19 nt, Homo sapiens
  misc_RNA (1)...(19): siRNA sense strand
ggaaagaguaugaugugcu

SEQ ID NO: 2425533 - RNA, 19 nt, Homo sapiens
  misc_RNA (1)...(19): siRNA sense strand
uccuaaagagccuggagaa

SEQ ID NO: 2425534 - RNA, 19 nt, Homo sapiens
  misc_RNA (1)...(19): siRNA sense strand
aagauggagacgacgaaau

SEQ ID NO: 2425535 - RNA, 19 nt, Homo sapiens
  misc_RNA (1)...(19): siRNA sense strand
aaggcaagaaagaggacga

SEQ ID NO: 2425536 - RNA, 19 nt, Homo sapiens
  misc_RNA (1)...(19): siRNA sense strand
uugaaagacuugagagugg

SEQ ID NO: 2425537 - RNA, 19 nt, Homo sapiens
  misc_RNA (1)...(19): siRNA sense strand
auggagacgacgaaaucua

SEQ ID NO: 2425538 - RNA, 19 nt, Homo sapiens
  misc_RNA (1)...(19): siRNA sense strand
cggaagacccuccagcaga

SEQ ID NO: 2425539 - RNA, 19 nt, Homo sapiens
  misc_RNA (1)...(19): siRNA sense strand
gcuacaugcuggugcgcua

SEQ ID NO: 2425540 - RNA, 19 nt, Homo sapiens
  misc_RNA (1)...(19): siRNA sense strand
aaguauaagaccuggaaga

SEQ ID NO: 2425541 - RNA, 19 nt, Homo sapiens
  misc_RNA (1)...(19): siRNA sense strand
cugaagaugagaagcaaau

SEQ ID NO: 2425542 - RNA, 19 nt, Homo sapiens
  misc_RNA (1)...(19): siRNA sense strand
ggaagaaguggcuggacga

SEQ ID NO: 2425543 - RNA, 19 nt, Homo sapiens
  misc_RNA (1)...(19): siRNA sense strand
ccugaagaugagaagcaaa

SEQ ID NO: 2425544 - RNA, 19 nt, Homo sapiens
  misc_RNA (1)...(19): siRNA sense strand
gggaggaagaggaagagca

SEQ ID NO: 2425545 - RNA, 19 nt, Homo sapiens
  misc_RNA (1)...(19): siRNA sense strand
ucuucaaccagcagggcaa

SEQ ID NO: 2425546 - RNA, 19 nt, Homo sapiens
  misc_RNA (1)...(19): siRNA sense strand
agaaguggcuggacgacga

SEQ ID NO: 2425547 - RNA, 19 nt, Homo sapiens
  misc_RNA (1)...(19): siRNA sense strand
caggggaggaagaggaaga

SEQ ID NO: 2425548 - RNA, 19 nt, Homo sapiens
  misc_RNA (1)...(19): siRNA sense strand
aggaagaggaagagcagag

SEQ ID NO: 2425549 - RNA, 19 nt, Homo sapiens
  misc_RNA (1)...(19): siRNA sense strand
agauguacgugguggccau

SEQ ID NO: 2425550 - RNA, 19 nt, Homo sapiens
  misc_RNA (1)...(19): siRNA sense strand
ccgaggaugcccugagaca

SEQ ID NO: 2425551 - RNA, 19 nt, Homo sapiens
  misc_RNA (1)...(19): siRNA sense strand
uggcacacaccguggccua

SEQ ID NO: 2425552 - RNA, 19 nt, Homo sapiens
  misc_RNA (1)...(19): siRNA sense strand
agauguacgugguggccau

SEQ ID NO: 2425553 - RNA, 19 nt, Homo sapiens
  misc_RNA (1)...(19): siRNA sense strand
gugagaaaguaaaggagaa

SEQ ID NO: 2425554 - RNA, 19 nt, Homo sapiens
  misc_RNA (1)...(19): siRNA sense strand
ccauaauuguugaggaaga

SEQ ID NO: 2425555 - RNA, 19 nt, Homo sapiens
  misc_RNA (1)...(19): siRNA sense strand
agaggaagcuggaggaaaa

SEQ ID NO: 2425556 - RNA, 19 nt, Homo sapiens
  misc_RNA (1)...(19): siRNA sense strand
cgacagaaggccaggaaga

SEQ ID NO: 2425557 - RNA, 19 nt, Homo sapiens
  misc_RNA (1)...(19): siRNA sense strand
agacaaagacccugccaaa

SEQ ID NO: 2425558 - RNA, 19 nt, Homo sapiens
  misc_RNA (1)...(19): siRNA sense strand
caggaagaauuaugagaau

SEQ ID NO: 2425559 - RNA, 19 nt, Homo sapiens
  misc_RNA (1)...(19): siRNA sense strand
aaguaaaggagaaggaaaa

SEQ ID NO: 2425560 - RNA, 19 nt, Homo sapiens
  misc_RNA (1)...(19): siRNA sense strand
cggaaaauucuuagcaaua

SEQ ID NO: 2425561 - RNA, 19 nt, Homo sapiens
  misc_RNA (1)...(19): siRNA sense strand
gaagauaaacagagcccaa

SEQ ID NO: 2425562 - RNA, 19 nt, Homo sapiens
  misc_RNA (1)...(19): siRNA sense strand
ccauuaagguggaagggau

SEQ ID NO: 2425563 - RNA, 19 nt, Homo sapiens
  misc_RNA (1)...(19): siRNA sense strand
uggaaaagcucgaguguga

SEQ ID NO: 2425564 - RNA, 19 nt, Homo sapiens
  misc_RNA (1)...(19): siRNA sense strand
guuacaaggaugaggauga

SEQ ID NO: 2425565 - RNA, 19 nt, Homo sapiens
  misc_RNA (1)...(19): siRNA sense strand
gcagauaacgacagugcaa

SEQ ID NO: 2425566 - RNA, 19 nt, Homo sapiens
  misc_RNA (1)...(19): siRNA sense strand
aggaagacaaggaggaaga

SEQ ID NO: 2425567 - RNA, 19 nt, Homo sapiens
  misc_RNA (1)...(19): siRNA sense strand
ggaugaugaauuugagcaa

SEQ ID NO: 2425568 - RNA, 19 nt, Homo sapiens
  misc_RNA (1)...(19): siRNA sense strand
ugguaaauuuaguggcauu

SEQ ID NO: 2425569 - RNA, 19 nt, Homo sapiens
  misc_RNA (1)...(19): siRNA sense strand
aggaagaggcggaggagga

SEQ ID NO: 2425570 - RNA, 19 nt, Homo sapiens
  misc_RNA (1)...(19): siRNA sense strand
ccaaagaggccaaucggaa

SEQ ID NO: 2425571 - RNA, 19 nt, Homo sapiens
  misc_RNA (1)...(19): siRNA sense strand
acaaggaggaagagaguga

SEQ ID NO: 2425572 - RNA, 19 nt, Homo sapiens
  misc_RNA (1)...(19): siRNA sense strand
caacuggagacgagggcaa

SEQ ID NO: 2425573 - RNA, 19 nt, Homo sapiens
  misc_RNA (1)...(19): siRNA sense strand
aggaagaagaggaggagga

SEQ ID NO: 2425574 - RNA, 19 nt, Homo sapiens
  misc_RNA (1)...(19): siRNA sense strand
aggaagaagaggaggagga

SEQ ID NO: 2425575 - RNA, 19 nt, Homo sapiens
  misc_RNA (1)...(19): siRNA sense strand
uggacaaggagaaagaaua

SEQ ID NO: 2425576 - RNA, 19 nt, Homo sapiens
  misc_RNA (1)...(19): siRNA sense strand
aaaguaaaggagaaggaaa

SEQ ID NO: 2425577 - RNA, 19 nt, Homo sapiens
  misc_RNA (1)...(19): siRNA sense strand
ccaagaaggagaaaggaga

SEQ ID NO: 2425578 - RNA, 19 nt, Homo sapiens
  misc_RNA (1)...(19): siRNA sense strand
cagacaagcacgugcagaa

SEQ ID NO: 2425579 - RNA, 19 nt, Homo sapiens
  misc_RNA (1)...(19): siRNA sense strand
guugaaggacccagugaaa

SEQ ID NO: 2425580 - RNA, 19 nt, Homo sapiens
  misc_RNA (1)...(19): siRNA sense strand
cggcagaaggagagaagca

SEQ ID NO: 2425581 - RNA, 19 nt, Homo sapiens
  misc_RNA (1)...(19): siRNA sense strand
cggaagaaacuggcagaua

SEQ ID NO: 2425582 - RNA, 19 nt, Homo sapiens
  misc_RNA (1)...(19): siRNA sense strand
cagaagaagcuguguuaca

SEQ ID NO: 2425583 - RNA, 19 nt, Homo sapiens
  misc_RNA (1)...(19): siRNA sense strand
gggaggaagcucugaguca

SEQ ID NO: 2425584 - RNA, 19 nt, Homo sapiens
  misc_RNA (1)...(19): siRNA sense strand
agaagaagccauugaagau

SEQ ID NO: 2425585 - RNA, 19 nt, Homo sapiens
  misc_RNA (1)...(19): siRNA sense strand
agaacaaauuggucaucaa

SEQ ID NO: 2425586 - RNA, 19 nt, Homo sapiens
  misc_RNA (1)...(19): siRNA sense strand
uaccauaauuguugaggaa

SEQ ID NO: 2425587 - RNA, 19 nt, Homo sapiens
  misc_RNA (1)...(19): siRNA sense strand
ccauaugaggucuguguua

SEQ ID NO: 2425588 - RNA, 19 nt, Homo sapiens
  misc_RNA (1)...(19): siRNA sense strand
ccaccaaggccaagcucaa

SEQ ID NO: 2425589 - RNA, 19 nt, Homo sapiens
  misc_RNA (1)...(19): siRNA sense strand
gggcaggacgacagccaaa

SEQ ID NO: 2425590 - RNA, 19 nt, Homo sapiens
  misc_RNA (1)...(19): siRNA sense strand
aggccaaagagaagaaaga

SEQ ID NO: 2425591 - RNA, 19 nt, Homo sapiens
  misc_RNA (1)...(19): siRNA sense strand
cagaagaagccauugaaga

SEQ ID NO: 2425592 - RNA, 19 nt, Homo sapiens
  misc_RNA (1)...(19): siRNA sense strand
cauuaagguggaagggauu

SEQ ID NO: 2425593 - RNA, 19 nt, Homo sapiens
  misc_RNA (1)...(19): siRNA sense strand
acacaaagggaaaggggaa

SEQ ID NO: 2425594 - RNA, 19 nt, Homo sapiens
  misc_RNA (1)...(19): siRNA sense strand
aggcacacaugaaggagaa

SEQ ID NO: 2425595 - RNA, 19 nt, Homo sapiens
  misc_RNA (1)...(19): siRNA sense strand
ucaucaagcaccagaagaa

SEQ ID NO: 2425596 - RNA, 19 nt, Homo sapiens
  misc_RNA (1)...(19): siRNA sense strand
cugaagagccagaagcaga

SEQ ID NO: 2425597 - RNA, 19 nt, Homo sapiens
  misc_RNA (1)...(19): siRNA sense strand
gaggagagcgcuagcgaca

SEQ ID NO: 2425598 - RNA, 19 nt, Homo sapiens
  misc_RNA (1)...(19): siRNA sense strand
caauaaagacaaugccaca

SEQ ID NO: 2425599 - RNA, 19 nt, Homo sapiens
  misc_RNA (1)...(19): siRNA sense strand
gaagaagcaccuugagaca

SEQ ID NO: 2425600 - RNA, 19 nt, Homo sapiens
  misc_RNA (1)...(19): siRNA sense strand
agaaucagggagagggcaa

SEQ ID NO: 2425601 - RNA, 19 nt, Homo sapiens
  misc_RNA (1)...(19): siRNA sense strand
agccagaagcagaaagcaa

SEQ ID NO: 2425602 - RNA, 19 nt, Homo sapiens
  misc_RNA (1)...(19): siRNA sense strand
gcaccagaaccaaaugaaa

SEQ ID NO: 2425603 - RNA, 19 nt, Homo sapiens
  misc_RNA (1)...(19): siRNA sense strand
uggaagaucugaaggcuca

SEQ ID NO: 2425604 - RNA, 19 nt, Homo sapiens
  misc_RNA (1)...(19): siRNA sense strand
acagagaccacuacgauaa

SEQ ID NO: 2425605 - RNA, 19 nt, Homo sapiens
  misc_RNA (1)...(19): siRNA sense strand
gggcaaagauggagagcgg

SEQ ID NO: 2425606 - RNA, 19 nt, Homo sapiens
  misc_RNA (1)...(19): siRNA sense strand
cggaggaggaagaggagga

SEQ ID NO: 2425607 - RNA, 19 nt, Homo sapiens
  misc_RNA (1)...(19): siRNA sense strand
cgacagugcaacgggaaua

SEQ ID NO: 2425608 - RNA, 19 nt, Homo sapiens
  misc_RNA (1)...(19): siRNA sense strand
cauugaagauguugaagga

SEQ ID NO: 2425609 - RNA, 19 nt, Homo sapiens
  misc_RNA (1)...(19): siRNA sense strand
gcaacaacaacaacaacaa

SEQ ID NO: 2425610 - RNA, 19 nt, Homo sapiens
  misc_RNA (1)...(19): siRNA sense strand
ccuuccaacccgagugaua

SEQ ID NO: 2425611 - RNA, 19 nt, Homo sapiens
  misc_RNA (1)...(19): siRNA sense strand
gccaaaagcuccugcguau

SEQ ID NO: 2425612 - RNA, 19 nt, Homo sapiens
  misc_RNA (1)...(19): siRNA sense strand
gcuuugugcucuauggcaa

SEQ ID NO: 2425613 - RNA, 19 nt, Homo sapiens
  misc_RNA (1)...(19): siRNA sense strand
gauagauacauucgaacaa

SEQ ID NO: 2425614 - RNA, 19 nt, Homo sapiens
  misc_RNA (1)...(19): siRNA sense strand
ugaagaaacgugugguaca

SEQ ID NO: 2425615 - RNA, 19 nt, Homo sapiens
  misc_RNA (1)...(19): siRNA sense strand
acaguggacuacagugaaa

SEQ ID NO: 2425616 - RNA, 19 nt, Homo sapiens
  misc_RNA (1)...(19): siRNA sense strand
agaacaagguuuacggacu

SEQ ID NO: 2425617 - RNA, 19 nt, Homo sapiens
  misc_RNA (1)...(19): siRNA sense strand
aaugugagguccugggcaa

SEQ ID NO: 2425618 - RNA, 19 nt, Homo sapiens
  misc_RNA (1)...(19): siRNA sense strand
uuccaaaggugcaguacaa

SEQ ID NO: 2425619 - RNA, 19 nt, Homo sapiens
  misc_RNA (1)...(19): siRNA sense strand
gggaggucuuugagagcau

SEQ ID NO: 2425620 - RNA, 19 nt, Homo sapiens
  misc_RNA (1)...(19): siRNA sense strand
gcaugaaucucacggccua

SEQ ID NO: 2425621 - RNA, 19 nt, Homo sapiens
  misc_RNA (1)...(19): siRNA sense strand
gcaaauaccagaaugcaga

SEQ ID NO: 2425622 - RNA, 19 nt, Homo sapiens
  misc_RNA (1)...(19): siRNA sense strand
cgcacaagguaaagagcca

SEQ ID NO: 2425623 - RNA, 19 nt, Homo sapiens
  misc_RNA (1)...(19): siRNA sense strand
ucuacaaggaacaggguga

SEQ ID NO: 2425624 - RNA, 19 nt, Homo sapiens
  misc_RNA (1)...(19): siRNA sense strand
cguggguggaggaggacaa

SEQ ID NO: 2425625 - RNA, 19 nt, Homo sapiens
  misc_RNA (1)...(19): siRNA sense strand
cagacauccgcgugggcua

SEQ ID NO: 2425626 - RNA, 19 nt, Homo sapiens
  misc_RNA (1)...(19): siRNA sense strand
cagaccuggaggagagcaa

SEQ ID NO: 2425627 - RNA, 19 nt, Homo sapiens
  misc_RNA (1)...(19): siRNA sense strand
gcuucucgcacaagguaaa

SEQ ID NO: 2425628 - RNA, 19 nt, Homo sapiens
  misc_RNA (1)...(19): siRNA sense strand
gcacgucuauggauggcaa

SEQ ID NO: 2425629 - RNA, 19 nt, Homo sapiens
  misc_RNA (1)...(19): siRNA sense strand
uggccaacuuccaggagau

SEQ ID NO: 2425630 - RNA, 19 nt, Homo sapiens
  misc_RNA (1)...(19): siRNA sense strand
gcaaggagaucgccgagga

SEQ ID NO: 2425631 - RNA, 19 nt, Homo sapiens
  misc_RNA (1)...(19): siRNA sense strand
agaaagugccacaccgaga

SEQ ID NO: 2425632 - RNA, 19 nt, Homo sapiens
  misc_RNA (1)...(19): siRNA sense strand
acaacaggguaucugggaa

SEQ ID NO: 2425633 - RNA, 19 nt, Homo sapiens
  misc_RNA (1)...(19): siRNA sense strand
ccauugaacagcuggagga

SEQ ID NO: 2425634 - RNA, 19 nt, Homo sapiens
  misc_RNA (1)...(19): siRNA sense strand
ugucagaccuggaggagag

SEQ ID NO: 2425635 - RNA, 19 nt, Homo sapiens
  misc_RNA (1)...(19): siRNA sense strand
gcucgagggaugaguggga

SEQ ID NO: 2425636 - RNA, 19 nt, Homo sapiens
  misc_RNA (1)...(19): siRNA sense strand
ccuucaugcuggcugagaa

SEQ ID NO: 2425637 - RNA, 19 nt, Homo sapiens
  misc_RNA (1)...(19): siRNA sense strand
uugacaaguuuaaugccaa

SEQ ID NO: 2425638 - RNA, 19 nt, Homo sapiens
  misc_RNA (1)...(19): siRNA sense strand
aagacggacaacaggguau

SEQ ID NO: 2425639 - RNA, 19 nt, Homo sapiens
  misc_RNA (1)...(19): siRNA sense strand
caacaggguaucugggaag

SEQ ID NO: 2425640 - RNA, 19 nt, Homo sapiens
  misc_RNA (1)...(19): siRNA sense strand
ugauggaggaguacagcau

SEQ ID NO: 2425641 - RNA, 19 nt, Homo sapiens
  misc_RNA (1)...(19): siRNA sense strand
gggaggucuuugagagcau

SEQ ID NO: 2425642 - RNA, 19 nt, Homo sapiens
  misc_RNA (1)...(19): siRNA sense strand
gcaugaaucucacggccua

SEQ ID NO: 2425643 - RNA, 19 nt, Homo sapiens
  misc_RNA (1)...(19): siRNA sense strand
gcaaauaccagaaugcaga

SEQ ID NO: 2425644 - RNA, 19 nt, Homo sapiens
  misc_RNA (1)...(19): siRNA sense strand
ucuacaaggaacaggguga

SEQ ID NO: 2425645 - RNA, 19 nt, Homo sapiens
  misc_RNA (1)...(19): siRNA sense strand
cguggguggaggaggacaa

SEQ ID NO: 2425646 - RNA, 19 nt, Homo sapiens
  misc_RNA (1)...(19): siRNA sense strand
cagacauccgcgugggcua

SEQ ID NO: 2425647 - RNA, 19 nt, Homo sapiens
  misc_RNA (1)...(19): siRNA sense strand
cagaccuggaggagagcaa

SEQ ID NO: 2425648 - RNA, 19 nt, Homo sapiens
  misc_RNA (1)...(19): siRNA sense strand
gcacgucuauggauggcaa

SEQ ID NO: 2425649 - RNA, 19 nt, Homo sapiens
  misc_RNA (1)...(19): siRNA sense strand
uggccaacuuccaggagau

SEQ ID NO: 2425650 - RNA, 19 nt, Homo sapiens
  misc_RNA (1)...(19): siRNA sense strand
gcaaggagaucgccgagga

SEQ ID NO: 2425651 - RNA, 19 nt, Homo sapiens
  misc_RNA (1)...(19): siRNA sense strand
agaaagugccacaccgaga

SEQ ID NO: 2425652 - RNA, 19 nt, Homo sapiens
  misc_RNA (1)...(19): siRNA sense strand
acaacaggguaucugggaa

SEQ ID NO: 2425653 - RNA, 19 nt, Homo sapiens
  misc_RNA (1)...(19): siRNA sense strand
ccauugaacagcuggagga

SEQ ID NO: 2425654 - RNA, 19 nt, Homo sapiens
  misc_RNA (1)...(19): siRNA sense strand
ugucagaccuggaggagag

SEQ ID NO: 2425655 - RNA, 19 nt, Homo sapiens
  misc_RNA (1)...(19): siRNA sense strand
gcucgagggaugaguggga

SEQ ID NO: 2425656 - RNA, 19 nt, Homo sapiens
  misc_RNA (1)...(19): siRNA sense strand
ccuucaugcuggcugagaa

SEQ ID NO: 2425657 - RNA, 19 nt, Homo sapiens
  misc_RNA (1)...(19): siRNA sense strand
uugacaaguuuaaugccaa

SEQ ID NO: 2425658 - RNA, 19 nt, Homo sapiens
  misc_RNA (1)...(19): siRNA sense strand
aagacggacaacaggguau

SEQ ID NO: 2425659 - RNA, 19 nt, Homo sapiens
  misc_RNA (1)...(19): siRNA sense strand
caacaggguaucugggaag

SEQ ID NO: 2425660 - RNA, 19 nt, Homo sapiens
  misc_RNA (1)...(19): siRNA sense strand
ugauggaggaguacagcau

SEQ ID NO: 2425661 - RNA, 19 nt, Homo sapiens
  misc_RNA (1)...(19): siRNA sense strand
cagaggugacagaggaaga

SEQ ID NO: 2425662 - RNA, 19 nt, Homo sapiens
  misc_RNA (1)...(19): siRNA sense strand
gcguauaaggaggaagcaa

SEQ ID NO: 2425663 - RNA, 19 nt, Homo sapiens
  misc_RNA (1)...(19): siRNA sense strand
ccacugagcucgcugcgua

SEQ ID NO: 2425664 - RNA, 19 nt, Homo sapiens
  misc_RNA (1)...(19): siRNA sense strand
gguuugaugacauggcaga

SEQ ID NO: 2425665 - RNA, 19 nt, Homo sapiens
  misc_RNA (1)...(19): siRNA sense strand
cuauagagauugaggggac

SEQ ID NO: 2425666 - RNA, 19 nt, Homo sapiens
  misc_RNA (1)...(19): siRNA sense strand
ggguaaugccugauggaaa

SEQ ID NO: 2425667 - RNA, 19 nt, Homo sapiens
  misc_RNA (1)...(19): siRNA sense strand
cagaauuagcuuaccgaaa

SEQ ID NO: 2425668 - RNA, 19 nt, Homo sapiens
  misc_RNA (1)...(19): siRNA sense strand
ucagaauauuugcaggaaa

SEQ ID NO: 2425669 - RNA, 19 nt, Homo sapiens
  misc_RNA (1)...(19): siRNA sense strand
gugaauauugugagaauca

SEQ ID NO: 2425670 - RNA, 19 nt, Homo sapiens
  misc_RNA (1)...(19): siRNA sense strand
aaucagaagucauagguga

SEQ ID NO: 2425671 - RNA, 19 nt, Homo sapiens
  misc_RNA (1)...(19): siRNA sense strand
aggauugguucgaggacuu

SEQ ID NO: 2425672 - RNA, 19 nt, Homo sapiens
  misc_RNA (1)...(19): siRNA sense strand
acgaagaauuugaugaacu

SEQ ID NO: 2425673 - RNA, 19 nt, Homo sapiens
  misc_RNA (1)...(19): siRNA sense strand
cuaaauaagaccaaggagu

SEQ ID NO: 2425674 - RNA, 19 nt, Homo sapiens
  misc_RNA (1)...(19): siRNA sense strand
gauuaucacagaagagaca

SEQ ID NO: 2425675 - RNA, 19 nt, Homo sapiens
  misc_RNA (1)...(19): siRNA sense strand
cagcuauugcuuauggaua

SEQ ID NO: 2425676 - RNA, 19 nt, Homo sapiens
  misc_RNA (1)...(19): siRNA sense strand
aggagaaauuacaucagaa

SEQ ID NO: 2425677 - RNA, 19 nt, Homo sapiens
  misc_RNA (1)...(19): siRNA sense strand
ccauuuacuuauacugcaa

SEQ ID NO: 2425678 - RNA, 19 nt, Homo sapiens
  misc_RNA (1)...(19): siRNA sense strand
agcuauugcuuauggauau

SEQ ID NO: 2425679 - RNA, 19 nt, Homo sapiens
  misc_RNA (1)...(19): siRNA sense strand
aggcaguccacauaaguaa

SEQ ID NO: 2425680 - RNA, 19 nt, Homo sapiens
  misc_RNA (1)...(19): siRNA sense strand
gaaaggagauggugagagc

SEQ ID NO: 2425681 - RNA, 19 nt, Homo sapiens
  misc_RNA (1)...(19): siRNA sense strand
ugauaaacuagguguggau

SEQ ID NO: 2425682 - RNA, 19 nt, Homo sapiens
  misc_RNA (1)...(19): siRNA sense strand
cgaugugccuccuggugaa

SEQ ID NO: 2425683 - RNA, 19 nt, Homo sapiens
  misc_RNA (1)...(19): siRNA sense strand
guuugaaaucucugacauu

SEQ ID NO: 2425684 - RNA, 19 nt, Homo sapiens
  misc_RNA (1)...(19): siRNA sense strand
ggauaugugaucaaagcau

SEQ ID NO: 2425685 - RNA, 19 nt, Homo sapiens
  misc_RNA (1)...(19): siRNA sense strand
ccauagcagcaaaucguaa

SEQ ID NO: 2425686 - RNA, 19 nt, Homo sapiens
  misc_RNA (1)...(19): siRNA sense strand
caucagaauauuugcagga

SEQ ID NO: 2425687 - RNA, 19 nt, Homo sapiens
  misc_RNA (1)...(19): siRNA sense strand
cugacaaucaccugaaaca

SEQ ID NO: 2425688 - RNA, 19 nt, Homo sapiens
  misc_RNA (1)...(19): siRNA sense strand
ugaaauuacaucugagaag

SEQ ID NO: 2425689 - RNA, 19 nt, Homo sapiens
  misc_RNA (1)...(19): siRNA sense strand
aaauaagaccaaggaguau

SEQ ID NO: 2425690 - RNA, 19 nt, Homo sapiens
  misc_RNA (1)...(19): siRNA sense strand
aaucaauauuggacccuuu

SEQ ID NO: 2425691 - RNA, 19 nt, Homo sapiens
  misc_RNA (1)...(19): siRNA sense strand
auaaacuagguguggauau

SEQ ID NO: 2425692 - RNA, 19 nt, Homo sapiens
  misc_RNA (1)...(19): siRNA sense strand
agaugcagcuauugcuuau

SEQ ID NO: 2425693 - RNA, 19 nt, Homo sapiens
  misc_RNA (1)...(19): siRNA sense strand
ccaaauuugagcugaccau

SEQ ID NO: 2425694 - RNA, 19 nt, Homo sapiens
  misc_RNA (1)...(19): siRNA sense strand
ccaguguauaaacggguaa

SEQ ID NO: 2425695 - RNA, 19 nt, Homo sapiens
  misc_RNA (1)...(19): siRNA sense strand
cugacuuuacuaaggcaaa

SEQ ID NO: 2425696 - RNA, 19 nt, Homo sapiens
  misc_RNA (1)...(19): siRNA sense strand
gguucaaagcgucgggaag

SEQ ID NO: 2425697 - RNA, 19 nt, Homo sapiens
  misc_RNA (1)...(19): siRNA sense strand
ccugaagaccauagcagca

SEQ ID NO: 2425698 - RNA, 19 nt, Homo sapiens
  misc_RNA (1)...(19): siRNA sense strand
ucacugaacuucuccgaca

SEQ ID NO: 2425699 - RNA, 19 nt, Homo sapiens
  misc_RNA (1)...(19): siRNA sense strand
aauaagaccaaggaguaua

SEQ ID NO: 2425700 - RNA, 19 nt, Homo sapiens
  misc_RNA (1)...(19): siRNA sense strand
acauauacaagacugacaa

SEQ ID NO: 2425701 - RNA, 19 nt, Homo sapiens
  misc_RNA (1)...(19): siRNA sense strand
gggucaaguacgagggaau

SEQ ID NO: 2425702 - RNA, 19 nt, Homo sapiens
  misc_RNA (1)...(19): siRNA sense strand
agaacuggcuggagggaga

SEQ ID NO: 2425703 - RNA, 19 nt, Homo sapiens
  misc_RNA (1)...(19): siRNA sense strand
agggaagagaagaagagaa

SEQ ID NO: 2425704 - RNA, 19 nt, Homo sapiens
  misc_RNA (1)...(19): siRNA sense strand
gacaaggaccugcgggcaa

SEQ ID NO: 2425705 - RNA, 19 nt, Homo sapiens
  misc_RNA (1)...(19): siRNA sense strand
aggugcugcuggagagaga

SEQ ID NO: 2425706 - RNA, 19 nt, Homo sapiens
  misc_RNA (1)...(19): siRNA sense strand
caaaauggcugauggagga

SEQ ID NO: 2425707 - RNA, 19 nt, Homo sapiens
  misc_RNA (1)...(19): siRNA sense strand
cagcagauucaccggaaaa

SEQ ID NO: 2425708 - RNA, 19 nt, Homo sapiens
  misc_RNA (1)...(19): siRNA sense strand
gggacaagcgcugggucaa

SEQ ID NO: 2425709 - RNA, 19 nt, Homo sapiens
  misc_RNA (1)...(19): siRNA sense strand
cggaagaguccuggaacca

SEQ ID NO: 2425710 - RNA, 19 nt, Homo sapiens
  misc_RNA (1)...(19): siRNA sense strand
cagccaggagggaagagaa

SEQ ID NO: 2425711 - RNA, 19 nt, Homo sapiens
  misc_RNA (1)...(19): siRNA sense strand
cggagaauguuccagcaga

SEQ ID NO: 2425712 - RNA, 19 nt, Homo sapiens
  misc_RNA (1)...(19): siRNA sense strand
agagacugguaccggagaa

SEQ ID NO: 2425713 - RNA, 19 nt, Homo sapiens
  misc_RNA (1)...(19): siRNA sense strand
ccauugaggugcugcugga

SEQ ID NO: 2425714 - RNA, 19 nt, Homo sapiens
  misc_RNA (1)...(19): siRNA sense strand
cuaauuauguggaggugcu

SEQ ID NO: 2425715 - RNA, 19 nt, Homo sapiens
  misc_RNA (1)...(19): siRNA sense strand
ggguggaugucaugcagca

SEQ ID NO: 2425716 - RNA, 19 nt, Homo sapiens
  misc_RNA (1)...(19): siRNA sense strand
ggaaccaguuucugcagga

SEQ ID NO: 2425717 - RNA, 19 nt, Homo sapiens
  misc_RNA (1)...(19): siRNA sense strand
cgggcaagaucgagggcuu

SEQ ID NO: 2425718 - RNA, 19 nt, Homo sapiens
  misc_RNA (1)...(19): siRNA sense strand
ccagugaguuugaggagga

SEQ ID NO: 2425719 - RNA, 19 nt, Homo sapiens
  misc_RNA (1)...(19): siRNA sense strand
ccaaggagguggaggucac

SEQ ID NO: 2425720 - RNA, 19 nt, Homo sapiens
  misc_RNA (1)...(19): siRNA sense strand
aggcagugugcguggguga

SEQ ID NO: 2425721 - RNA, 19 nt, Homo sapiens
  misc_RNA (1)...(19): siRNA sense strand
ccgacgaguuuguggugga

SEQ ID NO: 2425722 - RNA, 19 nt, Homo sapiens
  misc_RNA (1)...(19): siRNA sense strand
acgccuucaucaagagaau

SEQ ID NO: 2425723 - RNA, 19 nt, Homo sapiens
  misc_RNA (1)...(19): siRNA sense strand
cuggaaagcuacaugggca

SEQ ID NO: 2425724 - RNA, 19 nt, Homo sapiens
  misc_RNA (1)...(19): siRNA sense strand
gcgaaagugaccagcggga

SEQ ID NO: 2425725 - RNA, 19 nt, Homo sapiens
  misc_RNA (1)...(19): siRNA sense strand
gggcugaccaucacggaca

SEQ ID NO: 2425726 - RNA, 19 nt, Homo sapiens
  misc_RNA (1)...(19): siRNA sense strand
uggaaagcuacaugggcau

SEQ ID NO: 2425727 - RNA, 19 nt, Homo sapiens
  misc_RNA (1)...(19): siRNA sense strand
agaccaaggagguggaggu

SEQ ID NO: 2425728 - RNA, 19 nt, Homo sapiens
  misc_RNA (1)...(19): siRNA sense strand
ccagagaggccuguggcua

SEQ ID NO: 2425729 - RNA, 19 nt, Homo sapiens
  misc_RNA (1)...(19): siRNA sense strand
aggagguggaggucacuaa

SEQ ID NO: 2425730 - RNA, 19 nt, Homo sapiens
  misc_RNA (1)...(19): siRNA sense strand
acgaguuugugguggaagu

SEQ ID NO: 2425731 - RNA, 19 nt, Homo sapiens
  misc_RNA (1)...(19): siRNA sense strand
gaaacaagcuagagggcga

SEQ ID NO: 2425732 - RNA, 19 nt, Homo sapiens
  misc_RNA (1)...(19): siRNA sense strand
gggagaaagaggagaggau

SEQ ID NO: 2425733 - RNA, 19 nt, Homo sapiens
  misc_RNA (1)...(19): siRNA sense strand
cggaaggagccgagcaaga

SEQ ID NO: 2425734 - RNA, 19 nt, Homo sapiens
  misc_RNA (1)...(19): siRNA sense strand
ggacacgacuggagaggga

SEQ ID NO: 2425735 - RNA, 19 nt, Homo sapiens
  misc_RNA (1)...(19): siRNA sense strand
cagaagguggagacagaaa

SEQ ID NO: 2425736 - RNA, 19 nt, Homo sapiens
  misc_RNA (1)...(19): siRNA sense strand
cagaaagaggaggaagaaa

SEQ ID NO: 2425737 - RNA, 19 nt, Homo sapiens
  misc_RNA (1)...(19): siRNA sense strand
ggcaagaguuggaaggaug

SEQ ID NO: 2425738 - RNA, 19 nt, Homo sapiens
  misc_RNA (1)...(19): siRNA sense strand
ccauucagauccugggaca

SEQ ID NO: 2425739 - RNA, 19 nt, Homo sapiens
  misc_RNA (1)...(19): siRNA sense strand
aagaaaagcgagacgacaa

SEQ ID NO: 2425740 - RNA, 19 nt, Homo sapiens
  misc_RNA (1)...(19): siRNA sense strand
agacagaaauccagcgcgu

SEQ ID NO: 2425741 - RNA, 19 nt, Homo sapiens
  misc_RNA (1)...(19): siRNA sense strand
cagaaauauuuggaggaga

SEQ ID NO: 2425742 - RNA, 19 nt, Homo sapiens
  misc_RNA (1)...(19): siRNA sense strand
gggacggaaucgaacaaaa

SEQ ID NO: 2425743 - RNA, 19 nt, Homo sapiens
  misc_RNA (1)...(19): siRNA sense strand
aggagaagcuggaagcgga

SEQ ID NO: 2425744 - RNA, 19 nt, Homo sapiens
  misc_RNA (1)...(19): siRNA sense strand
uccagaaagaggaggaaga

SEQ ID NO: 2425745 - RNA, 19 nt, Homo sapiens
  misc_RNA (1)...(19): siRNA sense strand
auaaagaaagccagcguga

SEQ ID NO: 2425746 - RNA, 19 nt, Homo sapiens
  misc_RNA (1)...(19): siRNA sense strand
gacaagagccugaugcaga

SEQ ID NO: 2425747 - RNA, 19 nt, Homo sapiens
  misc_RNA (1)...(19): siRNA sense strand
ucaacagggaucugagaga

SEQ ID NO: 2425748 - RNA, 19 nt, Homo sapiens
  misc_RNA (1)...(19): siRNA sense strand
acguugacaagguggagaa

SEQ ID NO: 2425749 - RNA, 19 nt, Homo sapiens
  misc_RNA (1)...(19): siRNA sense strand
ugaguaaugcccaggccaa

SEQ ID NO: 2425750 - RNA, 19 nt, Homo sapiens
  misc_RNA (1)...(19): siRNA sense strand
acaaagugggagcagaaau

SEQ ID NO: 2425751 - RNA, 19 nt, Homo sapiens
  misc_RNA (1)...(19): siRNA sense strand
uggaagcugauaugacaaa

SEQ ID NO: 2425752 - RNA, 19 nt, Homo sapiens
  misc_RNA (1)...(19): siRNA sense strand
gacaagagcuggaagggga

SEQ ID NO: 2425753 - RNA, 19 nt, Homo sapiens
  misc_RNA (1)...(19): siRNA sense strand
aggcaagaguuggaaggau

SEQ ID NO: 2425754 - RNA, 19 nt, Homo sapiens
  misc_RNA (1)...(19): siRNA sense strand
uggaaggaugcuaugagaa

SEQ ID NO: 2425755 - RNA, 19 nt, Homo sapiens
  misc_RNA (1)...(19): siRNA sense strand
augagaagguggcaagacu

SEQ ID NO: 2425756 - RNA, 19 nt, Homo sapiens
  misc_RNA (1)...(19): siRNA sense strand
ccaugagaaacaagcuaga

SEQ ID NO: 2425757 - RNA, 19 nt, Homo sapiens
  misc_RNA (1)...(19): siRNA sense strand
gugagaaggagaagcugga

SEQ ID NO: 2425758 - RNA, 19 nt, Homo sapiens
  misc_RNA (1)...(19): siRNA sense strand
gcauccagaaagaggagga

SEQ ID NO: 2425759 - RNA, 19 nt, Homo sapiens
  misc_RNA (1)...(19): siRNA sense strand
cggagaagcaggugaaaau

SEQ ID NO: 2425760 - RNA, 19 nt, Homo sapiens
  misc_RNA (1)...(19): siRNA sense strand
ccaacgaugacaaggagau

SEQ ID NO: 2425761 - RNA, 19 nt, Homo sapiens
  misc_RNA (1)...(19): siRNA sense strand
ugucggagaagcaggugaa

SEQ ID NO: 2425762 - RNA, 19 nt, Homo sapiens
  misc_RNA (1)...(19): siRNA sense strand
cggcaaagacagagagaca

SEQ ID NO: 2425763 - RNA, 19 nt, Homo sapiens
  misc_RNA (1)...(19): siRNA sense strand
agaacuagucagagagaua

SEQ ID NO: 2425764 - RNA, 19 nt, Homo sapiens
  misc_RNA (1)...(19): siRNA sense strand
aauggaaauucgagagaua

SEQ ID NO: 2425765 - RNA, 19 nt, Homo sapiens
  misc_RNA (1)...(19): siRNA sense strand
cggaagaagauguaguaaa

SEQ ID NO: 2425766 - RNA, 19 nt, Homo sapiens
  misc_RNA (1)...(19): siRNA sense strand
cuuugaagguucugggaua

SEQ ID NO: 2425767 - RNA, 19 nt, Homo sapiens
  misc_RNA (1)...(19): siRNA sense strand
auucagaagucaagcaaua

SEQ ID NO: 2425768 - RNA, 19 nt, Homo sapiens
  misc_RNA (1)...(19): siRNA sense strand
aagaugaaguagugguaaa

SEQ ID NO: 2425769 - RNA, 19 nt, Homo sapiens
  misc_RNA (1)...(19): siRNA sense strand
ccaaaauguaugaggaaua

SEQ ID NO: 2425770 - RNA, 19 nt, Homo sapiens
  misc_RNA (1)...(19): siRNA sense strand
gcaucaaugugaaggaaau

SEQ ID NO: 2425771 - RNA, 19 nt, Homo sapiens
  misc_RNA (1)...(19): siRNA sense strand
ccgaaauggucuacaauau

SEQ ID NO: 2425772 - RNA, 19 nt, Homo sapiens
  misc_RNA (1)...(19): siRNA sense strand
cagcaugcuucgaggagaa

SEQ ID NO: 2425773 - RNA, 19 nt, Homo sapiens
  misc_RNA (1)...(19): siRNA sense strand
gguguuauaugaugggaaa

SEQ ID NO: 2425774 - RNA, 19 nt, Homo sapiens
  misc_RNA (1)...(19): siRNA sense strand
uuuaguagguggagagaau

SEQ ID NO: 2425775 - RNA, 19 nt, Homo sapiens
  misc_RNA (1)...(19): siRNA sense strand
ccacaagccaggaggauau

SEQ ID NO: 2425776 - RNA, 19 nt, Homo sapiens
  misc_RNA (1)...(19): siRNA sense strand
caucaaugaaggaagauua

SEQ ID NO: 2425777 - RNA, 19 nt, Homo sapiens
  misc_RNA (1)...(19): siRNA sense strand
cgauggaggaacagugaaa

SEQ ID NO: 2425778 - RNA, 19 nt, Homo sapiens
  misc_RNA (1)...(19): siRNA sense strand
uugagaaacuccagaacaa

SEQ ID NO: 2425779 - RNA, 19 nt, Homo sapiens
  misc_RNA (1)...(19): siRNA sense strand
gguaaaugauguugaucuu

SEQ ID NO: 2425780 - RNA, 19 nt, Homo sapiens
  misc_RNA (1)...(19): siRNA sense strand
uggcaaagaaucaggaaaa

SEQ ID NO: 2425781 - RNA, 19 nt, Homo sapiens
  misc_RNA (1)...(19): siRNA sense strand
uggaaguauuuauggcaaa

SEQ ID NO: 2425782 - RNA, 19 nt, Homo sapiens
  misc_RNA (1)...(19): siRNA sense strand
cauugaaguccaaaggaaa

SEQ ID NO: 2425783 - RNA, 19 nt, Homo sapiens
  misc_RNA (1)...(19): siRNA sense strand
ccgaguugauuuaggauuu

SEQ ID NO: 2425784 - RNA, 19 nt, Homo sapiens
  misc_RNA (1)...(19): siRNA sense strand
ugaaagagacuuagcguca

SEQ ID NO: 2425785 - RNA, 19 nt, Homo sapiens
  misc_RNA (1)...(19): siRNA sense strand
cuugaaagagcguuagaaa

SEQ ID NO: 2425786 - RNA, 19 nt, Homo sapiens
  misc_RNA (1)...(19): siRNA sense strand
gcugguugguggagaauuu

SEQ ID NO: 2425787 - RNA, 19 nt, Homo sapiens
  misc_RNA (1)...(19): siRNA sense strand
aguuuaaaucugagaguga

SEQ ID NO: 2425788 - RNA, 19 nt, Homo sapiens
  misc_RNA (1)...(19): siRNA sense strand
ggaaaauauugaagugaca

SEQ ID NO: 2425789 - RNA, 19 nt, Homo sapiens
  misc_RNA (1)...(19): siRNA sense strand
agaaauggaauaaggguga

SEQ ID NO: 2425790 - RNA, 19 nt, Homo sapiens
  misc_RNA (1)...(19): siRNA sense strand
cacagauacucgagacuua

SEQ ID NO: 2425791 - RNA, 19 nt, Homo sapiens
  misc_RNA (1)...(19): siRNA sense strand
caucauugcuuguggagga

SEQ ID NO: 2425792 - RNA, 19 nt, Homo sapiens
  misc_RNA (1)...(19): siRNA sense strand
ugagauugaagcugagaaa

SEQ ID NO: 2425793 - RNA, 19 nt, Homo sapiens
  misc_RNA (1)...(19): siRNA sense strand
ccagcauugaagagagaaa

SEQ ID NO: 2425794 - RNA, 19 nt, Homo sapiens
  misc_RNA (1)...(19): siRNA sense strand
agucagagaagaugaagua

SEQ ID NO: 2425795 - RNA, 19 nt, Homo sapiens
  misc_RNA (1)...(19): siRNA sense strand
caacagaaguaaagcucga

SEQ ID NO: 2425796 - RNA, 19 nt, Homo sapiens
  misc_RNA (1)...(19): siRNA sense strand
gagagaaacacaagcuauu

SEQ ID NO: 2425797 - RNA, 19 nt, Homo sapiens
  misc_RNA (1)...(19): siRNA sense strand
gaguauaacauguaugaca

SEQ ID NO: 2425798 - RNA, 19 nt, Homo sapiens
  misc_RNA (1)...(19): siRNA sense strand
gaaccaaaaugcagagaca

SEQ ID NO: 2425799 - RNA, 19 nt, Homo sapiens
  misc_RNA (1)...(19): siRNA sense strand
ggauagacuucuucaggau

SEQ ID NO: 2425800 - RNA, 19 nt, Homo sapiens
  misc_RNA (1)...(19): siRNA sense strand
ugauaauggugcugaaguu

SEQ ID NO: 2425801 - RNA, 19 nt, Homo sapiens
  misc_RNA (1)...(19): siRNA sense strand
guguuauguuaauggacaa

SEQ ID NO: 2425802 - RNA, 19 nt, Homo sapiens
  misc_RNA (1)...(19): siRNA sense strand
ggucaaggaagaugaacuu

SEQ ID NO: 2425803 - RNA, 19 nt, Homo sapiens
  misc_RNA (1)...(19): siRNA sense strand
ccucaaagugugacugcua

SEQ ID NO: 2425804 - RNA, 19 nt, Homo sapiens
  misc_RNA (1)...(19): siRNA sense strand
ccuucaaauucuccaguaa

SEQ ID NO: 2425805 - RNA, 19 nt, Homo sapiens
  misc_RNA (1)...(19): siRNA sense strand
ggauauaaucuuggaguca

SEQ ID NO: 2425806 - RNA, 19 nt, Homo sapiens
  misc_RNA (1)...(19): siRNA sense strand
uguuaucaguggugcuaaa

SEQ ID NO: 2425807 - RNA, 19 nt, Homo sapiens
  misc_RNA (1)...(19): siRNA sense strand
gauuuaggauuucgaggaa

SEQ ID NO: 2425808 - RNA, 19 nt, Homo sapiens
  misc_RNA (1)...(19): siRNA sense strand
ugucaacaguaauggauau

SEQ ID NO: 2425809 - RNA, 19 nt, Homo sapiens
  misc_RNA (1)...(19): siRNA sense strand
ucauucaauuggagggauu

SEQ ID NO: 2425810 - RNA, 19 nt, Homo sapiens
  misc_RNA (1)...(19): siRNA sense strand
gggauguggaugauagcaa

SEQ ID NO: 2425811 - RNA, 19 nt, Homo sapiens
  misc_RNA (1)...(19): siRNA sense strand
gagccgaggauguacauaa

SEQ ID NO: 2425812 - RNA, 19 nt, Homo sapiens
  misc_RNA (1)...(19): siRNA sense strand
cugagggacuucacggaaa

SEQ ID NO: 2425813 - RNA, 19 nt, Homo sapiens
  misc_RNA (1)...(19): siRNA sense strand
cugugaaccuggauaguau

SEQ ID NO: 2425814 - RNA, 19 nt, Homo sapiens
  misc_RNA (1)...(19): siRNA sense strand
ucauugaaguccaaaggaa

SEQ ID NO: 2425815 - RNA, 19 nt, Homo sapiens
  misc_RNA (1)...(19): siRNA sense strand
gcaaaagguggaauggaaa

SEQ ID NO: 2425816 - RNA, 19 nt, Homo sapiens
  misc_RNA (1)...(19): siRNA sense strand
aacauuagcagaugagaaa

SEQ ID NO: 2425817 - RNA, 19 nt, Homo sapiens
  misc_RNA (1)...(19): siRNA sense strand
agaaaucacaagagagcuu

SEQ ID NO: 2425818 - RNA, 19 nt, Homo sapiens
  misc_RNA (1)...(19): siRNA sense strand
ccagaaagugagaccgauu

SEQ ID NO: 2425819 - RNA, 19 nt, Homo sapiens
  misc_RNA (1)...(19): siRNA sense strand
gaacaauguacauggaagu

SEQ ID NO: 2425820 - RNA, 19 nt, Homo sapiens
  misc_RNA (1)...(19): siRNA sense strand
gggcagaauuagaaacaag

SEQ ID NO: 2425821 - RNA, 19 nt, Homo sapiens
  misc_RNA (1)...(19): siRNA sense strand
acugaaaauccuagugaaa

SEQ ID NO: 2425822 - RNA, 19 nt, Homo sapiens
  misc_RNA (1)...(19): siRNA sense strand
cugaagacuuugugcggau

SEQ ID NO: 2425823 - RNA, 19 nt, Homo sapiens
  misc_RNA (1)...(19): siRNA sense strand
agaaacugcugaugcaaau

SEQ ID NO: 2425824 - RNA, 19 nt, Homo sapiens
  misc_RNA (1)...(19): siRNA sense strand
gcgacagugccuaagauua

SEQ ID NO: 2425825 - RNA, 19 nt, Homo sapiens
  misc_RNA (1)...(19): siRNA sense strand
agaaacaucaggcaagaaa

SEQ ID NO: 2425826 - RNA, 19 nt, Homo sapiens
  misc_RNA (1)...(19): siRNA sense strand
ccaggaaacuucagggauc

SEQ ID NO: 2425827 - RNA, 19 nt, Homo sapiens
  misc_RNA (1)...(19): siRNA sense strand
gccaauaauucagguguaa

SEQ ID NO: 2425828 - RNA, 19 nt, Homo sapiens
  misc_RNA (1)...(19): siRNA sense strand
ggauauaagaguaccuuca

SEQ ID NO: 2425829 - RNA, 19 nt, Homo sapiens
  misc_RNA (1)...(19): siRNA sense strand
agagauaccaguagagaca

SEQ ID NO: 2425830 - RNA, 19 nt, Homo sapiens
  misc_RNA (1)...(19): siRNA sense strand
ggaagaagcuccaugggca

SEQ ID NO: 2425831 - RNA, 19 nt, Homo sapiens
  misc_RNA (1)...(19): siRNA sense strand
gaacagaucccaauggaga

SEQ ID NO: 2425832 - RNA, 19 nt, Homo sapiens
  misc_RNA (1)...(19): siRNA sense strand
uuggaaaggcauuuggaaa

SEQ ID NO: 2425833 - RNA, 19 nt, Homo sapiens
  misc_RNA (1)...(19): siRNA sense strand
ccuaaaguccagagacaga

SEQ ID NO: 2425834 - RNA, 19 nt, Homo sapiens
  misc_RNA (1)...(19): siRNA sense strand
uggucucaguggugggaaa

SEQ ID NO: 2425835 - RNA, 19 nt, Homo sapiens
  misc_RNA (1)...(19): siRNA sense strand
guccagagacagagcacua

SEQ ID NO: 2425836 - RNA, 19 nt, Homo sapiens
  misc_RNA (1)...(19): siRNA sense strand
agaacucaaugguggacaa

SEQ ID NO: 2425837 - RNA, 19 nt, Homo sapiens
  misc_RNA (1)...(19): siRNA sense strand
aggcaagccguuugaauau

SEQ ID NO: 2425838 - RNA, 19 nt, Homo sapiens
  misc_RNA (1)...(19): siRNA sense strand
cauuauaugaccuagacaa

SEQ ID NO: 2425839 - RNA, 19 nt, Homo sapiens
  misc_RNA (1)...(19): siRNA sense strand
auggaggcuucaugggaua

SEQ ID NO: 2425840 - RNA, 19 nt, Homo sapiens
  misc_RNA (1)...(19): siRNA sense strand
aguagaagucauuguaaga

SEQ ID NO: 2425841 - RNA, 19 nt, Homo sapiens
  misc_RNA (1)...(19): siRNA sense strand
auucugagcccuuuggaaa

SEQ ID NO: 2425842 - RNA, 19 nt, Homo sapiens
  misc_RNA (1)...(19): siRNA sense strand
guggauuaguugggaagaa

SEQ ID NO: 2425843 - RNA, 19 nt, Homo sapiens
  misc_RNA (1)...(19): siRNA sense strand
auauagaggacuaggucuu

SEQ ID NO: 2425844 - RNA, 19 nt, Homo sapiens
  misc_RNA (1)...(19): siRNA sense strand
agauaccaguagagacaau

SEQ ID NO: 2425845 - RNA, 19 nt, Homo sapiens
  misc_RNA (1)...(19): siRNA sense strand
guuugaauaucgaaaggau

SEQ ID NO: 2425846 - RNA, 19 nt, Homo sapiens
  misc_RNA (1)...(19): siRNA sense strand
gggaagaaggaaugaaggu

SEQ ID NO: 2425847 - RNA, 19 nt, Homo sapiens
  misc_RNA (1)...(19): siRNA sense strand
aauuauugcuugaugcaga

SEQ ID NO: 2425848 - RNA, 19 nt, Homo sapiens
  misc_RNA (1)...(19): siRNA sense strand
acagaguauugguccuaaa

SEQ ID NO: 2425849 - RNA, 19 nt, Homo sapiens
  misc_RNA (1)...(19): siRNA sense strand
augaccaugaugagaaaua

SEQ ID NO: 2425850 - RNA, 19 nt, Homo sapiens
  misc_RNA (1)...(19): siRNA sense strand
gcuucagugucuugaggau

SEQ ID NO: 2425851 - RNA, 19 nt, Homo sapiens
  misc_RNA (1)...(19): siRNA sense strand
uugaauaucgaaaggauga

SEQ ID NO: 2425852 - RNA, 19 nt, Homo sapiens
  misc_RNA (1)...(19): siRNA sense strand
aagaggacacacagaguau

SEQ ID NO: 2425853 - RNA, 19 nt, Homo sapiens
  misc_RNA (1)...(19): siRNA sense strand
uggaaaggcauuuggaaag

SEQ ID NO: 2425854 - RNA, 19 nt, Homo sapiens
  misc_RNA (1)...(19): siRNA sense strand
cgaggggaccuguggauua

SEQ ID NO: 2425855 - RNA, 19 nt, Homo sapiens
  misc_RNA (1)...(19): siRNA sense strand
cugaugaccaugaugagaa

SEQ ID NO: 2425856 - RNA, 19 nt, Homo sapiens
  misc_RNA (1)...(19): siRNA sense strand
ggaaguugcucucaaggga

SEQ ID NO: 2425857 - RNA, 19 nt, Homo sapiens
  misc_RNA (1)...(19): siRNA sense strand
cuucuaauccuaaugggaa

SEQ ID NO: 2425858 - RNA, 19 nt, Homo sapiens
  misc_RNA (1)...(19): siRNA sense strand
ggaaguuggauguggcugu

SEQ ID NO: 2425859 - RNA, 19 nt, Homo sapiens
  misc_RNA (1)...(19): siRNA sense strand
agacaagaucauagaacuc

SEQ ID NO: 2425860 - RNA, 19 nt, Homo sapiens
  misc_RNA (1)...(19): siRNA sense strand
cuauacagcagcaacaaau

SEQ ID NO: 2425861 - RNA, 19 nt, Homo sapiens
  misc_RNA (1)...(19): siRNA sense strand
acaagaucauagaacucaa

SEQ ID NO: 2425862 - RNA, 19 nt, Homo sapiens
  misc_RNA (1)...(19): siRNA sense strand
ggguuggauucaucaucua

SEQ ID NO: 2425863 - RNA, 19 nt, Homo sapiens
  misc_RNA (1)...(19): siRNA sense strand
uucuaauccuaaugggaau

SEQ ID NO: 2425864 - RNA, 19 nt, Homo sapiens
  misc_RNA (1)...(19): siRNA sense strand
uaauccacgcuuugauaaa

SEQ ID NO: 2425865 - RNA, 19 nt, Homo sapiens
  misc_RNA (1)...(19): siRNA sense strand
gcgaauucucugcuugcaa

SEQ ID NO: 2425866 - RNA, 19 nt, Homo sapiens
  misc_RNA (1)...(19): siRNA sense strand
ccuuuaugggcaacuguua

SEQ ID NO: 2425867 - RNA, 19 nt, Homo sapiens
  misc_RNA (1)...(19): siRNA sense strand
gugaagauaugguuccaga

SEQ ID NO: 2425868 - RNA, 19 nt, Homo sapiens
  misc_RNA (1)...(19): siRNA sense strand
agccagagccagagccaga

SEQ ID NO: 2425869 - RNA, 19 nt, Homo sapiens
  misc_RNA (1)...(19): siRNA sense strand
ggucuuaucuguuggacuc

SEQ ID NO: 2425870 - RNA, 19 nt, Homo sapiens
  misc_RNA (1)...(19): siRNA sense strand
gagaggaaguucagccauc

SEQ ID NO: 2425871 - RNA, 19 nt, Homo sapiens
  misc_RNA (1)...(19): siRNA sense strand
agaccgagccagaaaggca

SEQ ID NO: 2425872 - RNA, 19 nt, Homo sapiens
  misc_RNA (1)...(19): siRNA sense strand
gccaagaaccucaagcuca

SEQ ID NO: 2425873 - RNA, 19 nt, Homo sapiens
  misc_RNA (1)...(19): siRNA sense strand
gggugagaguggagaggua

SEQ ID NO: 2425874 - RNA, 19 nt, Homo sapiens
  misc_RNA (1)...(19): siRNA sense strand
gggaacagcuccaggaaaa

SEQ ID NO: 2425875 - RNA, 19 nt, Homo sapiens
  misc_RNA (1)...(19): siRNA sense strand
guggaaaggugcaggaaaa

SEQ ID NO: 2425876 - RNA, 19 nt, Homo sapiens
  misc_RNA (1)...(19): siRNA sense strand
gugagaaagaugaggaaau

SEQ ID NO: 2425877 - RNA, 19 nt, Homo sapiens
  misc_RNA (1)...(19): siRNA sense strand
acauagaucagaagagaaa

SEQ ID NO: 2425878 - RNA, 19 nt, Homo sapiens
  misc_RNA (1)...(19): siRNA sense strand
aaacaauaguucagcggua

SEQ ID NO: 2425879 - RNA, 19 nt, Homo sapiens
  misc_RNA (1)...(19): siRNA sense strand
gcuuaaagaauucggagaa

SEQ ID NO: 2425880 - RNA, 19 nt, Homo sapiens
  misc_RNA (1)...(19): siRNA sense strand
gguuguucauuaagaguaa

SEQ ID NO: 2425881 - RNA, 19 nt, Homo sapiens
  misc_RNA (1)...(19): siRNA sense strand
gggagaaaauagugaguga

SEQ ID NO: 2425882 - RNA, 19 nt, Homo sapiens
  misc_RNA (1)...(19): siRNA sense strand
aagaagaaucagaggugaa

SEQ ID NO: 2425883 - RNA, 19 nt, Homo sapiens
  misc_RNA (1)...(19): siRNA sense strand
caauaaugaggaagaggaa

SEQ ID NO: 2425884 - RNA, 19 nt, Homo sapiens
  misc_RNA (1)...(19): siRNA sense strand
ugaccaacucagaaagaaa

SEQ ID NO: 2425885 - RNA, 19 nt, Homo sapiens
  misc_RNA (1)...(19): siRNA sense strand
gcaccaaagcacacagcua

SEQ ID NO: 2425886 - RNA, 19 nt, Homo sapiens
  misc_RNA (1)...(19): siRNA sense strand
aggaaaaccuagaagagaa

SEQ ID NO: 2425887 - RNA, 19 nt, Homo sapiens
  misc_RNA (1)...(19): siRNA sense strand
gccaaaugcugcuggaaca

SEQ ID NO: 2425888 - RNA, 19 nt, Homo sapiens
  misc_RNA (1)...(19): siRNA sense strand
aagaugaggaggacgaaua

SEQ ID NO: 2425889 - RNA, 19 nt, Homo sapiens
  misc_RNA (1)...(19): siRNA sense strand
ggacauacgccgacaacca

SEQ ID NO: 2425890 - RNA, 19 nt, Homo sapiens
  misc_RNA (1)...(19): siRNA sense strand
acaaugaagucuuggagau

SEQ ID NO: 2425891 - RNA, 19 nt, Homo sapiens
  misc_RNA (1)...(19): siRNA sense strand
gcacauacugucagacgaa

SEQ ID NO: 2425892 - RNA, 19 nt, Homo sapiens
  misc_RNA (1)...(19): siRNA sense strand
cccaauaugcagagaaaca

SEQ ID NO: 2425893 - RNA, 19 nt, Homo sapiens
  misc_RNA (1)...(19): siRNA sense strand
cccaaagaggauaaagaaa

SEQ ID NO: 2425894 - RNA, 19 nt, Homo sapiens
  misc_RNA (1)...(19): siRNA sense strand
ggaaaaccuagaagagaaa

SEQ ID NO: 2425895 - RNA, 19 nt, Homo sapiens
  misc_RNA (1)...(19): siRNA sense strand
auaaugaggaagaggaaga

SEQ ID NO: 2425896 - RNA, 19 nt, Homo sapiens
  misc_RNA (1)...(19): siRNA sense strand
ggauacagcuuguggcacu

SEQ ID NO: 2425897 - RNA, 19 nt, Homo sapiens
  misc_RNA (1)...(19): siRNA sense strand
cgacagaccugggaggaau

SEQ ID NO: 2425898 - RNA, 19 nt, Homo sapiens
  misc_RNA (1)...(19): siRNA sense strand
ugucagaagcccaguggua

SEQ ID NO: 2425899 - RNA, 19 nt, Homo sapiens
  misc_RNA (1)...(19): siRNA sense strand
ggcuuauaauggugggaau

SEQ ID NO: 2425900 - RNA, 19 nt, Homo sapiens
  misc_RNA (1)...(19): siRNA sense strand
gaucauagagacaggcaga

SEQ ID NO: 2425901 - RNA, 19 nt, Homo sapiens
  misc_RNA (1)...(19): siRNA sense strand
gugaugauguagaagaaga

SEQ ID NO: 2425902 - RNA, 19 nt, Homo sapiens
  misc_RNA (1)...(19): siRNA sense strand
gaggugagcuccuggguga

SEQ ID NO: 2425903 - RNA, 19 nt, Homo sapiens
  misc_RNA (1)...(19): siRNA sense strand
agcccaauaugcagagaaa

SEQ ID NO: 2425904 - RNA, 19 nt, Homo sapiens
  misc_RNA (1)...(19): siRNA sense strand
gacaaauggcacugggauu

SEQ ID NO: 2425905 - RNA, 19 nt, Homo sapiens
  misc_RNA (1)...(19): siRNA sense strand
gaggagaagcaaaagaaaa

SEQ ID NO: 2425906 - RNA, 19 nt, Homo sapiens
  misc_RNA (1)...(19): siRNA sense strand
agugagaagagaagaaaca

SEQ ID NO: 2425907 - RNA, 19 nt, Homo sapiens
  misc_RNA (1)...(19): siRNA sense strand
caaaugaacaagacaucaa

SEQ ID NO: 2425908 - RNA, 19 nt, Homo sapiens
  misc_RNA (1)...(19): siRNA sense strand
cgugaauugccaaggagaa

SEQ ID NO: 2425909 - RNA, 19 nt, Homo sapiens
  misc_RNA (1)...(19): siRNA sense strand
aggaagaugaggaggacga

SEQ ID NO: 2425910 - RNA, 19 nt, Homo sapiens
  misc_RNA (1)...(19): siRNA sense strand
ccaaauauuccuacagcau

SEQ ID NO: 2425911 - RNA, 19 nt, Homo sapiens
  misc_RNA (1)...(19): siRNA sense strand
cgguaacugcucagagaau

SEQ ID NO: 2425912 - RNA, 19 nt, Homo sapiens
  misc_RNA (1)...(19): siRNA sense strand
aagaggagaucaugcaaau

SEQ ID NO: 2425913 - RNA, 19 nt, Homo sapiens
  misc_RNA (1)...(19): siRNA sense strand
ccuacagcauccugagcaa

SEQ ID NO: 2425914 - RNA, 19 nt, Homo sapiens
  misc_RNA (1)...(19): siRNA sense strand
cagaaaguauccaaaccaa

SEQ ID NO: 2425915 - RNA, 19 nt, Homo sapiens
  misc_RNA (1)...(19): siRNA sense strand
cugccuugugggagaguaa

SEQ ID NO: 2425916 - RNA, 19 nt, Homo sapiens
  misc_RNA (1)...(19): siRNA sense strand
ccauggaggagaagcgaga

SEQ ID NO: 2425917 - RNA, 19 nt, Homo sapiens
  misc_RNA (1)...(19): siRNA sense strand
cuuuagaguuuguagcaga

SEQ ID NO: 2425918 - RNA, 19 nt, Homo sapiens
  misc_RNA (1)...(19): siRNA sense strand
aaaggaaagcagacagauu

SEQ ID NO: 2425919 - RNA, 19 nt, Homo sapiens
  misc_RNA (1)...(19): siRNA sense strand
aagaaugaauguaggaaac

SEQ ID NO: 2425920 - RNA, 19 nt, Homo sapiens
  misc_RNA (1)...(19): siRNA sense strand
agaagagaagaaacagaaa

SEQ ID NO: 2425921 - RNA, 19 nt, Homo sapiens
  misc_RNA (1)...(19): siRNA sense strand
ugauguuucuccagagcaa

SEQ ID NO: 2425922 - RNA, 19 nt, Homo sapiens
  misc_RNA (1)...(19): siRNA sense strand
gaucuggugaugagguuua

SEQ ID NO: 2425923 - RNA, 19 nt, Homo sapiens
  misc_RNA (1)...(19): siRNA sense strand
cgucaacaguggagauaag

SEQ ID NO: 2425924 - RNA, 19 nt, Homo sapiens
  misc_RNA (1)...(19): siRNA sense strand
aggccaagaugcacaaaga

SEQ ID NO: 2425925 - RNA, 19 nt, Homo sapiens
  misc_RNA (1)...(19): siRNA sense strand
cucaauagcgagggagaaa

SEQ ID NO: 2425926 - RNA, 19 nt, Homo sapiens
  misc_RNA (1)...(19): siRNA sense strand
uggaaauuguguaccacua

SEQ ID NO: 2425927 - RNA, 19 nt, Homo sapiens
  misc_RNA (1)...(19): siRNA sense strand
gaaacaauacccugggcau

SEQ ID NO: 2425928 - RNA, 19 nt, Homo sapiens
  misc_RNA (1)...(19): siRNA sense strand
ccaaagaggauaaagaaag

SEQ ID NO: 2425929 - RNA, 19 nt, Homo sapiens
  misc_RNA (1)...(19): siRNA sense strand
caucaaaccuguuaccaca

SEQ ID NO: 2425930 - RNA, 19 nt, Homo sapiens
  misc_RNA (1)...(19): siRNA sense strand
gcccaaagcaaguggaaag

SEQ ID NO: 2425931 - RNA, 19 nt, Homo sapiens
  misc_RNA (1)...(19): siRNA sense strand
agacacuguaugugaguau

SEQ ID NO: 2425932 - RNA, 19 nt, Homo sapiens
  misc_RNA (1)...(19): siRNA sense strand
cggaacaucagcaaagaau

SEQ ID NO: 2425933 - RNA, 19 nt, Homo sapiens
  misc_RNA (1)...(19): siRNA sense strand
aaacaauacccugggcaua

SEQ ID NO: 2425934 - RNA, 19 nt, Homo sapiens
  misc_RNA (1)...(19): siRNA sense strand
aggaagugguugaagccau

SEQ ID NO: 2425935 - RNA, 19 nt, Homo sapiens
  misc_RNA (1)...(19): siRNA sense strand
cugccaauaaugaggaaga

SEQ ID NO: 2425936 - RNA, 19 nt, Homo sapiens
  misc_RNA (1)...(19): siRNA sense strand
aaguauaaucaguggagaa

SEQ ID NO: 2425937 - RNA, 19 nt, Homo sapiens
  misc_RNA (1)...(19): siRNA sense strand
gaagaaaggaugauggcau

SEQ ID NO: 2425938 - RNA, 19 nt, Homo sapiens
  misc_RNA (1)...(19): siRNA sense strand
uuugaaaggccaagugaaa

SEQ ID NO: 2425939 - RNA, 19 nt, Homo sapiens
  misc_RNA (1)...(19): siRNA sense strand
cugaagaaaugaagcugaa

SEQ ID NO: 2425940 - RNA, 19 nt, Homo sapiens
  misc_RNA (1)...(19): siRNA sense strand
aaguagagguugugaucau

SEQ ID NO: 2425941 - RNA, 19 nt, Homo sapiens
  misc_RNA (1)...(19): siRNA sense strand
aggaguugacuuugaguaa

SEQ ID NO: 2425942 - RNA, 19 nt, Homo sapiens
  misc_RNA (1)...(19): siRNA sense strand
aagacaaagagaaggcuua

SEQ ID NO: 2425943 - RNA, 19 nt, Homo sapiens
  misc_RNA (1)...(19): siRNA sense strand
gaguugaauaccauagaaa

SEQ ID NO: 2425944 - RNA, 19 nt, Homo sapiens
  misc_RNA (1)...(19): siRNA sense strand
aaggauacccagaguuaua

SEQ ID NO: 2425945 - RNA, 19 nt, Homo sapiens
  misc_RNA (1)...(19): siRNA sense strand
agguagagugggaaguuaa

SEQ ID NO: 2425946 - RNA, 19 nt, Homo sapiens
  misc_RNA (1)...(19): siRNA sense strand
gggaaagaagccuaaggaa

SEQ ID NO: 2425947 - RNA, 19 nt, Homo sapiens
  misc_RNA (1)...(19): siRNA sense strand
agucaacagaacagacaaa

SEQ ID NO: 2425948 - RNA, 19 nt, Homo sapiens
  misc_RNA (1)...(19): siRNA sense strand
cgguuuggguuauggaaaa

SEQ ID NO: 2425949 - RNA, 19 nt, Homo sapiens
  misc_RNA (1)...(19): siRNA sense strand
ggaaaaguaaggaugauaa

SEQ ID NO: 2425950 - RNA, 19 nt, Homo sapiens
  misc_RNA (1)...(19): siRNA sense strand
uugagaaggaugagaauga

SEQ ID NO: 2425951 - RNA, 19 nt, Homo sapiens
  misc_RNA (1)...(19): siRNA sense strand
uuuagaagaaggagaguuu

SEQ ID NO: 2425952 - RNA, 19 nt, Homo sapiens
  misc_RNA (1)...(19): siRNA sense strand
cgugagacaacuaaugaaa

SEQ ID NO: 2425953 - RNA, 19 nt, Homo sapiens
  misc_RNA (1)...(19): siRNA sense strand
acgagaguauuuagaggua

SEQ ID NO: 2425954 - RNA, 19 nt, Homo sapiens
  misc_RNA (1)...(19): siRNA sense strand
agaccaaacgggaagauau

SEQ ID NO: 2425955 - RNA, 19 nt, Homo sapiens
  misc_RNA (1)...(19): siRNA sense strand
ggaagauauucgagagcuc

SEQ ID NO: 2425956 - RNA, 19 nt, Homo sapiens
  misc_RNA (1)...(19): siRNA sense strand
gcuucuaaagguuguguua

SEQ ID NO: 2425957 - RNA, 19 nt, Homo sapiens
  misc_RNA (1)...(19): siRNA sense strand
cgaauaugucaguaccaaa

SEQ ID NO: 2425958 - RNA, 19 nt, Homo sapiens
  misc_RNA (1)...(19): siRNA sense strand
guucagaauuuacgagagu

SEQ ID NO: 2425959 - RNA, 19 nt, Homo sapiens
  misc_RNA (1)...(19): siRNA sense strand
ccuuaacaguggaaguaga

SEQ ID NO: 2425960 - RNA, 19 nt, Homo sapiens
  misc_RNA (1)...(19): siRNA sense strand
uuuaaagcgguuuggguua

SEQ ID NO: 2425961 - RNA, 19 nt, Homo sapiens
  misc_RNA (1)...(19): siRNA sense strand
aauaaagaccaaacgggaa

SEQ ID NO: 2425962 - RNA, 19 nt, Homo sapiens
  misc_RNA (1)...(19): siRNA sense strand
auuuagagguagaguggga

SEQ ID NO: 2425963 - RNA, 19 nt, Homo sapiens
  misc_RNA (1)...(19): siRNA sense strand
gggaacggaguuaggaaga

SEQ ID NO: 2425964 - RNA, 19 nt, Homo sapiens
  misc_RNA (1)...(19): siRNA sense strand
agagaagaauugaagcuga

SEQ ID NO: 2425965 - RNA, 19 nt, Homo sapiens
  misc_RNA (1)...(19): siRNA sense strand
cagugauuguggaguauau

SEQ ID NO: 2425966 - RNA, 19 nt, Homo sapiens
  misc_RNA (1)...(19): siRNA sense strand
agaagaugacucaacaaua

SEQ ID NO: 2425967 - RNA, 19 nt, Homo sapiens
  misc_RNA (1)...(19): siRNA sense strand
agaugaacuuguugaacga

SEQ ID NO: 2425968 - RNA, 19 nt, Homo sapiens
  misc_RNA (1)...(19): siRNA sense strand
ucagaauuuacgagaguau

SEQ ID NO: 2425969 - RNA, 19 nt, Homo sapiens
  misc_RNA (1)...(19): siRNA sense strand
caguggaaguagagguugu

SEQ ID NO: 2425970 - RNA, 19 nt, Homo sapiens
  misc_RNA (1)...(19): siRNA sense strand
gguugagaaggaugagaau

SEQ ID NO: 2425971 - RNA, 19 nt, Homo sapiens
  misc_RNA (1)...(19): siRNA sense strand
guauuaagccagcaaucaa

SEQ ID NO: 2425972 - RNA, 19 nt, Homo sapiens
  misc_RNA (1)...(19): siRNA sense strand
aagaauugaagcugaaaga

SEQ ID NO: 2425973 - RNA, 19 nt, Homo sapiens
  misc_RNA (1)...(19): siRNA sense strand
guuagaagaagcuguguau

SEQ ID NO: 2425974 - RNA, 19 nt, Homo sapiens
  misc_RNA (1)...(19): siRNA sense strand
uaagcaagaccgugagaca

SEQ ID NO: 2425975 - RNA, 19 nt, Homo sapiens
  misc_RNA (1)...(19): siRNA sense strand
gguuagaagaagcugugua

SEQ ID NO: 2425976 - RNA, 19 nt, Homo sapiens
  misc_RNA (1)...(19): siRNA sense strand
ggucaucaccagaaaggau

SEQ ID NO: 2425977 - RNA, 19 nt, Homo sapiens
  misc_RNA (1)...(19): siRNA sense strand
aaagagaaggcuuagaaau

SEQ ID NO: 2425978 - RNA, 19 nt, Homo sapiens
  misc_RNA (1)...(19): siRNA sense strand
ccugaagaaauuacaacua

SEQ ID NO: 2425979 - RNA, 19 nt, Homo sapiens
  misc_RNA (1)...(19): siRNA sense strand
aaaucaucacagaaggaaa

SEQ ID NO: 2425980 - RNA, 19 nt, Homo sapiens
  misc_RNA (1)...(19): siRNA sense strand
caguggagaauuagagcuu

SEQ ID NO: 2425981 - RNA, 19 nt, Homo sapiens
  misc_RNA (1)...(19): siRNA sense strand
ccagaguuauauugacgaa

SEQ ID NO: 2425982 - RNA, 19 nt, Homo sapiens
  misc_RNA (1)...(19): siRNA sense strand
aggaugagaaugaguugaa

SEQ ID NO: 2425983 - RNA, 19 nt, Homo sapiens
  misc_RNA (1)...(19): siRNA sense strand
gguagagugggaaguuaaa

SEQ ID NO: 2425984 - RNA, 19 nt, Homo sapiens
  misc_RNA (1)...(19): siRNA sense strand
ugaagaaggaccuguugaa

SEQ ID NO: 2425985 - RNA, 19 nt, Homo sapiens
  misc_RNA (1)...(19): siRNA sense strand
gcgguuuggguuauggaaa

SEQ ID NO: 2425986 - RNA, 19 nt, Homo sapiens
  misc_RNA (1)...(19): siRNA sense strand
ucuaagaggacauaaugaa

SEQ ID NO: 2425987 - RNA, 19 nt, Homo sapiens
  misc_RNA (1)...(19): siRNA sense strand
ggcacagagaagacauaaa

SEQ ID NO: 2425988 - RNA, 19 nt, Homo sapiens
  misc_RNA (1)...(19): siRNA sense strand
ugucuuggguucaggcauu

SEQ ID NO: 2425989 - RNA, 19 nt, Homo sapiens
  misc_RNA (1)...(19): siRNA sense strand
gggaaguuugagugauaca

SEQ ID NO: 2425990 - RNA, 19 nt, Homo sapiens
  misc_RNA (1)...(19): siRNA sense strand
cgaaaucaucacagaagga

SEQ ID NO: 2425991 - RNA, 19 nt, Homo sapiens
  misc_RNA (1)...(19): siRNA sense strand
ugaaagauauuaugacgga

SEQ ID NO: 2425992 - RNA, 19 nt, Homo sapiens
  misc_RNA (1)...(19): siRNA sense strand
cggccaucuucauccgaaa

SEQ ID NO: 2425993 - RNA, 19 nt, Homo sapiens
  misc_RNA (1)...(19): siRNA sense strand
ccacacauuuaaagcgguu

SEQ ID NO: 2425994 - RNA, 19 nt, Homo sapiens
  misc_RNA (1)...(19): siRNA sense strand
agaccaaagaggaggaaga

SEQ ID NO: 2425995 - RNA, 19 nt, Homo sapiens
  misc_RNA (1)...(19): siRNA sense strand
aggaggugguguagggauu

SEQ ID NO: 2425996 - RNA, 19 nt, Homo sapiens
  misc_RNA (1)...(19): siRNA sense strand
agaagaaccauguggaaaa

SEQ ID NO: 2425997 - RNA, 19 nt, Homo sapiens
  misc_RNA (1)...(19): siRNA sense strand
ccaaagaggaggaagagga

SEQ ID NO: 2425998 - RNA, 19 nt, Homo sapiens
  misc_RNA (1)...(19): siRNA sense strand
cuuaauugagggugagaau

SEQ ID NO: 2425999 - RNA, 19 nt, Homo sapiens
  misc_RNA (1)...(19): siRNA sense strand
guguagaagaagcuauaaa

SEQ ID NO: 2426000 - RNA, 19 nt, Homo sapiens
  misc_RNA (1)...(19): siRNA sense strand
gaggaagcaaagagaggau

SEQ ID NO: 2426001 - RNA, 19 nt, Homo sapiens
  misc_RNA (1)...(19): siRNA sense strand
ggggagaauaccugggcaa

SEQ ID NO: 2426002 - RNA, 19 nt, Homo sapiens
  misc_RNA (1)...(19): siRNA sense strand
cuagcuaccaagaggagaa

SEQ ID NO: 2426003 - RNA, 19 nt, Homo sapiens
  misc_RNA (1)...(19): siRNA sense strand
cgggagaggugguuccaga

SEQ ID NO: 2426004 - RNA, 19 nt, Homo sapiens
  misc_RNA (1)...(19): siRNA sense strand
ugguguagaagaagcuaua

SEQ ID NO: 2426005 - RNA, 19 nt, Homo sapiens
  misc_RNA (1)...(19): siRNA sense strand
ugggcaaguuggugagguu

SEQ ID NO: 2426006 - RNA, 19 nt, Homo sapiens
  misc_RNA (1)...(19): siRNA sense strand
ucugaagcgaggaggaaaa

SEQ ID NO: 2426007 - RNA, 19 nt, Homo sapiens
  misc_RNA (1)...(19): siRNA sense strand
guuucaacguggaagagga

SEQ ID NO: 2426008 - RNA, 19 nt, Homo sapiens
  misc_RNA (1)...(19): siRNA sense strand
uggaagaggacaugacgga

SEQ ID NO: 2426009 - RNA, 19 nt, Homo sapiens
  misc_RNA (1)...(19): siRNA sense strand
gaucaaagcacuaaacccu

SEQ ID NO: 2426010 - RNA, 19 nt, Homo sapiens
  misc_RNA (1)...(19): siRNA sense strand
cggaacagaucaaagcacu

SEQ ID NO: 2426011 - RNA, 19 nt, Homo sapiens
  misc_RNA (1)...(19): siRNA sense strand
ucaacguggaagaggacau

SEQ ID NO: 2426012 - RNA, 19 nt, Homo sapiens
  misc_RNA (1)...(19): siRNA sense strand
cugguauggagaagaucaa

SEQ ID NO: 2426013 - RNA, 19 nt, Homo sapiens
  misc_RNA (1)...(19): siRNA sense strand
acauauggaguaaggcuga

SEQ ID NO: 2426014 - RNA, 19 nt, Homo sapiens
  misc_RNA (1)...(19): siRNA sense strand
cuucaaaagcugaggaggu

SEQ ID NO: 2426015 - RNA, 19 nt, Homo sapiens
  misc_RNA (1)...(19): siRNA sense strand
gaagaggacaugacggaac

SEQ ID NO: 2426016 - RNA, 19 nt, Homo sapiens
  misc_RNA (1)...(19): siRNA sense strand
cuccagacauagugggcaa

SEQ ID NO: 2426017 - RNA, 19 nt, Homo sapiens
  misc_RNA (1)...(19): siRNA sense strand
cucgcaaggauaagaaaua

SEQ ID NO: 2426018 - RNA, 19 nt, Homo sapiens
  misc_RNA (1)...(19): siRNA sense strand
ccacuaugccaagggacaa

SEQ ID NO: 2426019 - RNA, 19 nt, Homo sapiens
  misc_RNA (1)...(19): siRNA sense strand
ggaccuucaaagagcgcau

SEQ ID NO: 2426020 - RNA, 19 nt, Homo sapiens
  misc_RNA (1)...(19): siRNA sense strand
gugcuauggagaaggggaa

SEQ ID NO: 2426021 - RNA, 19 nt, Homo sapiens
  misc_RNA (1)...(19): siRNA sense strand
ucagugagaagaaggccaa

SEQ ID NO: 2426022 - RNA, 19 nt, Homo sapiens
  misc_RNA (1)...(19): siRNA sense strand
agaggaaguauguggaaga

SEQ ID NO: 2426023 - RNA, 19 nt, Homo sapiens
  misc_RNA (1)...(19): siRNA sense strand
acggauggccaaagaggaa

SEQ ID NO: 2426024 - RNA, 19 nt, Homo sapiens
  misc_RNA (1)...(19): siRNA sense strand
aggaaaaggccaaauuaaa

SEQ ID NO: 2426025 - RNA, 19 nt, Homo sapiens
  misc_RNA (1)...(19): siRNA sense strand
cggaaggagcugcugaaau

SEQ ID NO: 2426026 - RNA, 19 nt, Homo sapiens
  misc_RNA (1)...(19): siRNA sense strand
auguggaagaagaggauuu

SEQ ID NO: 2426027 - RNA, 19 nt, Homo sapiens
  misc_RNA (1)...(19): siRNA sense strand
cugcagcaaaggaaguaaa

SEQ ID NO: 2426028 - RNA, 19 nt, Homo sapiens
  misc_RNA (1)...(19): siRNA sense strand
ugaaaaggauccauggaga

SEQ ID NO: 2426029 - RNA, 19 nt, Homo sapiens
  misc_RNA (1)...(19): siRNA sense strand
ggagaaauuaucaugcaga

SEQ ID NO: 2426030 - RNA, 19 nt, Homo sapiens
  misc_RNA (1)...(19): siRNA sense strand
caggaaaaggccaaauuaa

SEQ ID NO: 2426031 - RNA, 19 nt, Homo sapiens
  misc_RNA (1)...(19): siRNA sense strand
cugcugaaauugcugggua

SEQ ID NO: 2426032 - RNA, 19 nt, Homo sapiens
  misc_RNA (1)...(19): siRNA sense strand
gggaaaugaccuugcuuuu

SEQ ID NO: 2426033 - RNA, 19 nt, Homo sapiens
  misc_RNA (1)...(19): siRNA sense strand
ccaaagaggaaugugaaaa

SEQ ID NO: 2426034 - RNA, 19 nt, Homo sapiens
  misc_RNA (1)...(19): siRNA sense strand
cggauauaaugaaagaaac

SEQ ID NO: 2426035 - RNA, 19 nt, Homo sapiens
  misc_RNA (1)...(19): siRNA sense strand
ggaucacauuacaggggaa

SEQ ID NO: 2426036 - RNA, 19 nt, Homo sapiens
  misc_RNA (1)...(19): siRNA sense strand
uggccaaagaggaauguga

SEQ ID NO: 2426037 - RNA, 19 nt, Homo sapiens
  misc_RNA (1)...(19): siRNA sense strand
augagaaagcaaaugauga

SEQ ID NO: 2426038 - RNA, 19 nt, Homo sapiens
  misc_RNA (1)...(19): siRNA sense strand
cagaauaacuggugcuucc

SEQ ID NO: 2426039 - RNA, 19 nt, Homo sapiens
  misc_RNA (1)...(19): siRNA sense strand
guauguggaagaagaggau

SEQ ID NO: 2426040 - RNA, 19 nt, Homo sapiens
  misc_RNA (1)...(19): siRNA sense strand
caucuauuuacaagaguga

SEQ ID NO: 2426041 - RNA, 19 nt, Homo sapiens
  misc_RNA (1)...(19): siRNA sense strand
cuuuaaaauuccaggguuu

SEQ ID NO: 2426042 - RNA, 19 nt, Homo sapiens
  misc_RNA (1)...(19): siRNA sense strand
augcaaaagugacgaagaa

SEQ ID NO: 2426043 - RNA, 19 nt, Homo sapiens
  misc_RNA (1)...(19): siRNA sense strand
augggauggugcaaggaaa

SEQ ID NO: 2426044 - RNA, 19 nt, Homo sapiens
  misc_RNA (1)...(19): siRNA sense strand
gggucaucgcagaggcuuu

SEQ ID NO: 2426045 - RNA, 19 nt, Homo sapiens
  misc_RNA (1)...(19): siRNA sense strand
agcccuaauuagugaugaa

SEQ ID NO: 2426046 - RNA, 19 nt, Homo sapiens
  misc_RNA (1)...(19): siRNA sense strand
auuuauacacaaaggcaga

SEQ ID NO: 2426047 - RNA, 19 nt, Homo sapiens
  misc_RNA (1)...(19): siRNA sense strand
gaguaguagcugaucacuu

SEQ ID NO: 2426048 - RNA, 19 nt, Homo sapiens
  misc_RNA (1)...(19): siRNA sense strand
agaagauggaccagcacuu

SEQ ID NO: 2426049 - RNA, 19 nt, Homo sapiens
  misc_RNA (1)...(19): siRNA sense strand
guguggagcaguuggagga

SEQ ID NO: 2426050 - RNA, 19 nt, Homo sapiens
  misc_RNA (1)...(19): siRNA sense strand
ugggauggugcaaggaaaa

SEQ ID NO: 2426051 - RNA, 19 nt, Homo sapiens
  misc_RNA (1)...(19): siRNA sense strand
gcaccaaagaauaccagga

SEQ ID NO: 2426052 - RNA, 19 nt, Homo sapiens
  misc_RNA (1)...(19): siRNA sense strand
ggauggacaugcagccguu

SEQ ID NO: 2426053 - RNA, 19 nt, Homo sapiens
  misc_RNA (1)...(19): siRNA sense strand
agacaaaucucuugaggca

SEQ ID NO: 2426054 - RNA, 19 nt, Homo sapiens
  misc_RNA (1)...(19): siRNA sense strand
gcagaaaaucagucaacaa

SEQ ID NO: 2426055 - RNA, 19 nt, Homo sapiens
  misc_RNA (1)...(19): siRNA sense strand
acaaaucucuugaggcaga

SEQ ID NO: 2426056 - RNA, 19 nt, Homo sapiens
  misc_RNA (1)...(19): siRNA sense strand
agaugaagggaaugcaaau

SEQ ID NO: 2426057 - RNA, 19 nt, Homo sapiens
  misc_RNA (1)...(19): siRNA sense strand
gcgccaaacugcagagcac

SEQ ID NO: 2426058 - RNA, 19 nt, Homo sapiens
  misc_RNA (1)...(19): siRNA sense strand
gcaaauauucaaagacccu

SEQ ID NO: 2426059 - RNA, 19 nt, Homo sapiens
  misc_RNA (1)...(19): siRNA sense strand
ggcacucagacuaaagaaa

SEQ ID NO: 2426060 - RNA, 19 nt, Homo sapiens
  misc_RNA (1)...(19): siRNA sense strand
ccagcagaaacuagaagau

SEQ ID NO: 2426061 - RNA, 19 nt, Homo sapiens
  misc_RNA (1)...(19): siRNA sense strand
aggucaaggucauggaaga

SEQ ID NO: 2426062 - RNA, 19 nt, Homo sapiens
  misc_RNA (1)...(19): siRNA sense strand
ccgagaacaagcagcacaa

SEQ ID NO: 2426063 - RNA, 19 nt, Homo sapiens
  misc_RNA (1)...(19): siRNA sense strand
ucgaggaggccuacagcaa

SEQ ID NO: 2426064 - RNA, 19 nt, Homo sapiens
  misc_RNA (1)...(19): siRNA sense strand
aggugcagggucaggauaa

SEQ ID NO: 2426065 - RNA, 19 nt, Homo sapiens
  misc_RNA (1)...(19): siRNA sense strand
ccauguucgaggaggccua

SEQ ID NO: 2426066 - RNA, 19 nt, Homo sapiens
  misc_RNA (1)...(19): siRNA sense strand
acucagagcaccaccgaga

SEQ ID NO: 2426067 - RNA, 19 nt, Homo sapiens
  misc_RNA (1)...(19): siRNA sense strand
aggccaaugcagagcggau

SEQ ID NO: 2426068 - RNA, 19 nt, Homo sapiens
  misc_RNA (1)...(19): siRNA sense strand
caggagauucggaacgaga

SEQ ID NO: 2426069 - RNA, 19 nt, Homo sapiens
  misc_RNA (1)...(19): siRNA sense strand
gcaacuacugcaagaggca

SEQ ID NO: 2426070 - RNA, 19 nt, Homo sapiens
  misc_RNA (1)...(19): siRNA sense strand
gagaagauccacaaccuga

SEQ ID NO: 2426071 - RNA, 19 nt, Homo sapiens
  misc_RNA (1)...(19): siRNA sense strand
uggggaaggugcaggguca

SEQ ID NO: 2426072 - RNA, 19 nt, Homo sapiens
  misc_RNA (1)...(19): siRNA sense strand
caggauaaacaugaagaau

SEQ ID NO: 2426073 - RNA, 19 nt, Homo sapiens
  misc_RNA (1)...(19): siRNA sense strand
cugaagcagaugaugaaaa

SEQ ID NO: 2426074 - RNA, 19 nt, Homo sapiens
  misc_RNA (1)...(19): siRNA sense strand
cuucuaugugccugagauu

SEQ ID NO: 2426075 - RNA, 19 nt, Homo sapiens
  misc_RNA (1)...(19): siRNA sense strand
ccauauugggagacaccau

SEQ ID NO: 2426076 - RNA, 19 nt, Homo sapiens
  misc_RNA (1)...(19): siRNA sense strand
ggagcaagaaggagggcaa

SEQ ID NO: 2426077 - RNA, 19 nt, Homo sapiens
  misc_RNA (1)...(19): siRNA sense strand
ccaaagggcuagaggagga

SEQ ID NO: 2426078 - RNA, 19 nt, Homo sapiens
  misc_RNA (1)...(19): siRNA sense strand
acacaguaguccagggaga

SEQ ID NO: 2426079 - RNA, 19 nt, Homo sapiens
  misc_RNA (1)...(19): siRNA sense strand
ggcaagaguuagagaggca

SEQ ID NO: 2426080 - RNA, 19 nt, Homo sapiens
  misc_RNA (1)...(19): siRNA sense strand
cuccaagacagaugggaaa

SEQ ID NO: 2426081 - RNA, 19 nt, Homo sapiens
  misc_RNA (1)...(19): siRNA sense strand
ccuccaagacagaugggaa

SEQ ID NO: 2426082 - RNA, 19 nt, Homo sapiens
  misc_RNA (1)...(19): siRNA sense strand
ggacaggcaggaugggcua

SEQ ID NO: 2426083 - RNA, 19 nt, Homo sapiens
  misc_RNA (1)...(19): siRNA sense strand
cgggaaaggaagaagaacu

SEQ ID NO: 2426084 - RNA, 19 nt, Homo sapiens
  misc_RNA (1)...(19): siRNA sense strand
uggaggaaguggagcggca

SEQ ID NO: 2426085 - RNA, 19 nt, Homo sapiens
  misc_RNA (1)...(19): siRNA sense strand
aggcugaggcacaggcauu

SEQ ID NO: 2426086 - RNA, 19 nt, Homo sapiens
  misc_RNA (1)...(19): siRNA sense strand
agaaggagggcaagcgaca

SEQ ID NO: 2426087 - RNA, 19 nt, Homo sapiens
  misc_RNA (1)...(19): siRNA sense strand
agggaagggacuaaggaca

SEQ ID NO: 2426088 - RNA, 19 nt, Homo sapiens
  misc_RNA (1)...(19): siRNA sense strand
agacugaggucaagggcac

SEQ ID NO: 2426089 - RNA, 19 nt, Homo sapiens
  misc_RNA (1)...(19): siRNA sense strand
gcaggaugggcuaagggaa

SEQ ID NO: 2426090 - RNA, 19 nt, Homo sapiens
  misc_RNA (1)...(19): siRNA sense strand
uggaaggagggcaggccaa

SEQ ID NO: 2426091 - RNA, 19 nt, Homo sapiens
  misc_RNA (1)...(19): siRNA sense strand
ggaaagaauuagcugggac

SEQ ID NO: 2426092 - RNA, 19 nt, Homo sapiens
  misc_RNA (1)...(19): siRNA sense strand
guagaggcccacaggguga

SEQ ID NO: 2426093 - RNA, 19 nt, Homo sapiens
  misc_RNA (1)...(19): siRNA sense strand
ggaagaaggacaagcacuc

SEQ ID NO: 2426094 - RNA, 19 nt, Homo sapiens
  misc_RNA (1)...(19): siRNA sense strand
ggcacaggcauuaaggcaa

SEQ ID NO: 2426095 - RNA, 19 nt, Homo sapiens
  misc_RNA (1)...(19): siRNA sense strand
gaagaagaggucagggaag

SEQ ID NO: 2426096 - RNA, 19 nt, Homo sapiens
  misc_RNA (1)...(19): siRNA sense strand
caggaugggcuaagggaac

SEQ ID NO: 2426097 - RNA, 19 nt, Homo sapiens
  misc_RNA (1)...(19): siRNA sense strand
gcacaggcauuaaggcaag

SEQ ID NO: 2426098 - RNA, 19 nt, Homo sapiens
  misc_RNA (1)...(19): siRNA sense strand
aaggaaaaguggugggaug

SEQ ID NO: 2426099 - RNA, 19 nt, Homo sapiens
  misc_RNA (1)...(19): siRNA sense strand
gggaagaaggacaagcacu

SEQ ID NO: 2426100 - RNA, 19 nt, Homo sapiens
  misc_RNA (1)...(19): siRNA sense strand
gagaggagcuugcaggaug

SEQ ID NO: 2426101 - RNA, 19 nt, Homo sapiens
  misc_RNA (1)...(19): siRNA sense strand
acagauuggcccagaaacu

SEQ ID NO: 2426102 - RNA, 19 nt, Homo sapiens
  misc_RNA (1)...(19): siRNA sense strand
uuccagaauucuagggagu

SEQ ID NO: 2426103 - RNA, 19 nt, Homo sapiens
  misc_RNA (1)...(19): siRNA sense strand
ugaagaagaggucagggaa

SEQ ID NO: 2426104 - RNA, 19 nt, Homo sapiens
  misc_RNA (1)...(19): siRNA sense strand
ucacagagcccaagagcug

SEQ ID NO: 2426105 - RNA, 19 nt, Homo sapiens
  misc_RNA (1)...(19): siRNA sense strand
uuucuuuggcacagagcua

SEQ ID NO: 2426106 - RNA, 19 nt, Homo sapiens
  misc_RNA (1)...(19): siRNA sense strand
aggagguggcugugcaaca

SEQ ID NO: 2426107 - RNA, 19 nt, Homo sapiens
  misc_RNA (1)...(19): siRNA sense strand
acguggacauggagggucu

SEQ ID NO: 2426108 - RNA, 19 nt, Homo sapiens
  misc_RNA (1)...(19): siRNA sense strand
aagacagaugggaaagaau

SEQ ID NO: 2426109 - RNA, 19 nt, Homo sapiens
  misc_RNA (1)...(19): siRNA sense strand
agaagaggucagggaagaa

SEQ ID NO: 2426110 - RNA, 19 nt, Homo sapiens
  misc_RNA (1)...(19): siRNA sense strand
aggucagggaagaaggaca

SEQ ID NO: 2426111 - RNA, 19 nt, Homo sapiens
  misc_RNA (1)...(19): siRNA sense strand
acaagcuggccaaggagaa

SEQ ID NO: 2426112 - RNA, 19 nt, Homo sapiens
  misc_RNA (1)...(19): siRNA sense strand
agagagaccggaaggcuga

SEQ ID NO: 2426113 - RNA, 19 nt, Homo sapiens
  misc_RNA (1)...(19): siRNA sense strand
acauaagaaggaagaaucu

SEQ ID NO: 2426114 - RNA, 19 nt, Homo sapiens
  misc_RNA (1)...(19): siRNA sense strand
gcaggaagguggaaggagg

SEQ ID NO: 2426115 - RNA, 19 nt, Homo sapiens
  misc_RNA (1)...(19): siRNA sense strand
gggaagggacuaaggacag

SEQ ID NO: 2426116 - RNA, 19 nt, Homo sapiens
  misc_RNA (1)...(19): siRNA sense strand
cccagaaacugcagggccu

SEQ ID NO: 2426117 - RNA, 19 nt, Homo sapiens
  misc_RNA (1)...(19): siRNA sense strand
ccucaaaggccuggcacca

SEQ ID NO: 2426118 - RNA, 19 nt, Homo sapiens
  misc_RNA (1)...(19): siRNA sense strand
ggagaaaagcagaagcaac

SEQ ID NO: 2426119 - RNA, 19 nt, Homo sapiens
  misc_RNA (1)...(19): siRNA sense strand
cggaugagcuggagcguca

SEQ ID NO: 2426120 - RNA, 19 nt, Homo sapiens
  misc_RNA (1)...(19): siRNA sense strand
agggagugguggagccaaa

SEQ ID NO: 2426121 - RNA, 19 nt, Homo sapiens
  misc_RNA (1)...(19): siRNA sense strand
gcggcaagguguauggcaa

SEQ ID NO: 2426122 - RNA, 19 nt, Homo sapiens
  misc_RNA (1)...(19): siRNA sense strand
cagcaaauuugguggcucu

SEQ ID NO: 2426123 - RNA, 19 nt, Homo sapiens
  misc_RNA (1)...(19): siRNA sense strand
acucaacaacucugggcaa

SEQ ID NO: 2426124 - RNA, 19 nt, Homo sapiens
  misc_RNA (1)...(19): siRNA sense strand
gcuagaagggaguggugga

SEQ ID NO: 2426125 - RNA, 19 nt, Homo sapiens
  misc_RNA (1)...(19): siRNA sense strand
cggaagaagcccauccaca

SEQ ID NO: 2426126 - RNA, 19 nt, Homo sapiens
  misc_RNA (1)...(19): siRNA sense strand
cccuauggcuccugguaca

SEQ ID NO: 2426127 - RNA, 19 nt, Homo sapiens
  misc_RNA (1)...(19): siRNA sense strand
ucuauaaacccaaggcagu

SEQ ID NO: 2426128 - RNA, 19 nt, Homo sapiens
  misc_RNA (1)...(19): siRNA sense strand
gccagcaaccccagagaaa

SEQ ID NO: 2426129 - RNA, 19 nt, Homo sapiens
  misc_RNA (1)...(19): siRNA sense strand
cuuaaaggacagcgagcua

SEQ ID NO: 2426130 - RNA, 19 nt, Homo sapiens
  misc_RNA (1)...(19): siRNA sense strand
cggaugaagaggacagcuu

SEQ ID NO: 2426131 - RNA, 19 nt, Homo sapiens
  misc_RNA (1)...(19): siRNA sense strand
uguuugacuuccugggcua

SEQ ID NO: 2426132 - RNA, 19 nt, Homo sapiens
  misc_RNA (1)...(19): siRNA sense strand
aggaagaguacuacagauu

SEQ ID NO: 2426133 - RNA, 19 nt, Homo sapiens
  misc_RNA (1)...(19): siRNA sense strand
caacaauauucaagcgcga

SEQ ID NO: 2426134 - RNA, 19 nt, Homo sapiens
  misc_RNA (1)...(19): siRNA sense strand
ggauaaaccaguacccaga

SEQ ID NO: 2426135 - RNA, 19 nt, Homo sapiens
  misc_RNA (1)...(19): siRNA sense strand
guaucaaagaugcaaggaa

SEQ ID NO: 2426136 - RNA, 19 nt, Homo sapiens
  misc_RNA (1)...(19): siRNA sense strand
ccgaugagaaggucagaga

SEQ ID NO: 2426137 - RNA, 19 nt, Homo sapiens
  misc_RNA (1)...(19): siRNA sense strand
uaucaaagaugcaaggaag

SEQ ID NO: 2426138 - RNA, 19 nt, Homo sapiens
  misc_RNA (1)...(19): siRNA sense strand
augaagaugcucucacaaa

SEQ ID NO: 2426139 - RNA, 19 nt, Homo sapiens
  misc_RNA (1)...(19): siRNA sense strand
guagaaaacagcuuggauu

SEQ ID NO: 2426140 - RNA, 19 nt, Homo sapiens
  misc_RNA (1)...(19): siRNA sense strand
ugcuauacacagagaacau

SEQ ID NO: 2426141 - RNA, 19 nt, Homo sapiens
  misc_RNA (1)...(19): siRNA sense strand
ggcaccaaguauaggagau

SEQ ID NO: 2426142 - RNA, 19 nt, Homo sapiens
  misc_RNA (1)...(19): siRNA sense strand
ugugauuggaaguggagau

SEQ ID NO: 2426143 - RNA, 19 nt, Homo sapiens
  misc_RNA (1)...(19): siRNA sense strand
acuuauuagaugcggcuau

SEQ ID NO: 2426144 - RNA, 19 nt, Homo sapiens
  misc_RNA (1)...(19): siRNA sense strand
uguaauucuggguaagauu

SEQ ID NO: 2426145 - RNA, 19 nt, Homo sapiens
  misc_RNA (1)...(19): siRNA sense strand
acuucgaagccaagagaaa

SEQ ID NO: 2426146 - RNA, 19 nt, Homo sapiens
  misc_RNA (1)...(19): siRNA sense strand
guguauagaugaaugcaca

SEQ ID NO: 2426147 - RNA, 19 nt, Homo sapiens
  misc_RNA (1)...(19): siRNA sense strand
cauacuaaaugaagccaga

SEQ ID NO: 2426148 - RNA, 19 nt, Homo sapiens
  misc_RNA (1)...(19): siRNA sense strand
gcgaggaaauggcaggcga

SEQ ID NO: 2426149 - RNA, 19 nt, Homo sapiens
  misc_RNA (1)...(19): siRNA sense strand
ccaagagaaacugaggaaa

SEQ ID NO: 2426150 - RNA, 19 nt, Homo sapiens
  misc_RNA (1)...(19): siRNA sense strand
uugaaauuggacugcauua

SEQ ID NO: 2426151 - RNA, 19 nt, Homo sapiens
  misc_RNA (1)...(19): siRNA sense strand
cggacacagaccuaauuaa

SEQ ID NO: 2426152 - RNA, 19 nt, Homo sapiens
  misc_RNA (1)...(19): siRNA sense strand
agugauggaaggaaagaaa

SEQ ID NO: 2426153 - RNA, 19 nt, Homo sapiens
  misc_RNA (1)...(19): siRNA sense strand
ccauugacaguguggacaa

SEQ ID NO: 2426154 - RNA, 19 nt, Homo sapiens
  misc_RNA (1)...(19): siRNA sense strand
ccaagguggaggaaggaga

SEQ ID NO: 2426155 - RNA, 19 nt, Homo sapiens
  misc_RNA (1)...(19): siRNA sense strand
uaacaaaagaagagaggca

SEQ ID NO: 2426156 - RNA, 19 nt, Homo sapiens
  misc_RNA (1)...(19): siRNA sense strand
cagugauuccagagcgcaa

SEQ ID NO: 2426157 - RNA, 19 nt, Homo sapiens
  misc_RNA (1)...(19): siRNA sense strand
ugauggaaggaaagaaaca

SEQ ID NO: 2426158 - RNA, 19 nt, Homo sapiens
  misc_RNA (1)...(19): siRNA sense strand
ucagauaaguggagccucu

SEQ ID NO: 2426159 - RNA, 19 nt, Homo sapiens
  misc_RNA (1)...(19): siRNA sense strand
ccaggaaagcauucagcau

SEQ ID NO: 2426160 - RNA, 19 nt, Homo sapiens
  misc_RNA (1)...(19): siRNA sense strand
gcugagagaugcuggcuac

SEQ ID NO: 2426161 - RNA, 19 nt, Homo sapiens
  misc_RNA (1)...(19): siRNA sense strand
agaguggagagguaacaaa

SEQ ID NO: 2426162 - RNA, 19 nt, Homo sapiens
  misc_RNA (1)...(19): siRNA sense strand
ucaccuaagcagaggccca

SEQ ID NO: 2426163 - RNA, 19 nt, Homo sapiens
  misc_RNA (1)...(19): siRNA sense strand
ggaaggaaagaaacagcca

SEQ ID NO: 2426164 - RNA, 19 nt, Homo sapiens
  misc_RNA (1)...(19): siRNA sense strand
uguauauggacaagagaaa

SEQ ID NO: 2426165 - RNA, 19 nt, Homo sapiens
  misc_RNA (1)...(19): siRNA sense strand
agaacagagugaugaacaa

SEQ ID NO: 2426166 - RNA, 19 nt, Homo sapiens
  misc_RNA (1)...(19): siRNA sense strand
gaauauaguaguauggaga

SEQ ID NO: 2426167 - RNA, 19 nt, Homo sapiens
  misc_RNA (1)...(19): siRNA sense strand
aagaaauaucucaggcuaa

SEQ ID NO: 2426168 - RNA, 19 nt, Homo sapiens
  misc_RNA (1)...(19): siRNA sense strand
caauauugacugagcaaga

SEQ ID NO: 2426169 - RNA, 19 nt, Homo sapiens
  misc_RNA (1)...(19): siRNA sense strand
gaagaaacuuaaugaggca

SEQ ID NO: 2426170 - RNA, 19 nt, Homo sapiens
  misc_RNA (1)...(19): siRNA sense strand
cagaggagaaggagaugaa

SEQ ID NO: 2426171 - RNA, 19 nt, Homo sapiens
  misc_RNA (1)...(19): siRNA sense strand
guuacagugacaagagaua

SEQ ID NO: 2426172 - RNA, 19 nt, Homo sapiens
  misc_RNA (1)...(19): siRNA sense strand
caagaaauaucucaggcua

SEQ ID NO: 2426173 - RNA, 19 nt, Homo sapiens
  misc_RNA (1)...(19): siRNA sense strand
cuuuaauauugguugggaa

SEQ ID NO: 2426174 - RNA, 19 nt, Homo sapiens
  misc_RNA (1)...(19): siRNA sense strand
gcuuaaucguagcugcaaa

SEQ ID NO: 2426175 - RNA, 19 nt, Homo sapiens
  misc_RNA (1)...(19): siRNA sense strand
ggauaaccuaccagggauu

SEQ ID NO: 2426176 - RNA, 19 nt, Homo sapiens
  misc_RNA (1)...(19): siRNA sense strand
uaauauugguugggaacaa

SEQ ID NO: 2426177 - RNA, 19 nt, Homo sapiens
  misc_RNA (1)...(19): siRNA sense strand
ggauccugcuggugggaga

SEQ ID NO: 2426178 - RNA, 19 nt, Homo sapiens
  misc_RNA (1)...(19): siRNA sense strand
ccugaugagcuuaaagauu

SEQ ID NO: 2426179 - RNA, 19 nt, Homo sapiens
  misc_RNA (1)...(19): siRNA sense strand
ugguauaugaugucagcaa

SEQ ID NO: 2426180 - RNA, 19 nt, Homo sapiens
  misc_RNA (1)...(19): siRNA sense strand
gcccagaggagaaggagau

SEQ ID NO: 2426181 - RNA, 19 nt, Homo sapiens
  misc_RNA (1)...(19): siRNA sense strand
acuuaaugaggcagaagaa

SEQ ID NO: 2426182 - RNA, 19 nt, Homo sapiens
  misc_RNA (1)...(19): siRNA sense strand
cuuuauggacagcagaaua

SEQ ID NO: 2426183 - RNA, 19 nt, Homo sapiens
  misc_RNA (1)...(19): siRNA sense strand
ccagagagggagacacgaa

SEQ ID NO: 2426184 - RNA, 19 nt, Homo sapiens
  misc_RNA (1)...(19): siRNA sense strand
augaaagaacagacaaaga

SEQ ID NO: 2426185 - RNA, 19 nt, Homo sapiens
  misc_RNA (1)...(19): siRNA sense strand
aagcaacacuuuauggaca

SEQ ID NO: 2426186 - RNA, 19 nt, Homo sapiens
  misc_RNA (1)...(19): siRNA sense strand
cagaagcagaacagaguga

SEQ ID NO: 2426187 - RNA, 19 nt, Homo sapiens
  misc_RNA (1)...(19): siRNA sense strand
uguggaguguucagcgaaa

SEQ ID NO: 2426188 - RNA, 19 nt, Homo sapiens
  misc_RNA (1)...(19): siRNA sense strand
uuaaugaggcagaagaaaa

SEQ ID NO: 2426189 - RNA, 19 nt, Homo sapiens
  misc_RNA (1)...(19): siRNA sense strand
gaaaauucgugaagaucau

SEQ ID NO: 2426190 - RNA, 19 nt, Homo sapiens
  misc_RNA (1)...(19): siRNA sense strand
gggcagaagaaaucaccau

SEQ ID NO: 2426191 - RNA, 19 nt, Homo sapiens
  misc_RNA (1)...(19): siRNA sense strand
augaaccaguauacagaaa

SEQ ID NO: 2426192 - RNA, 19 nt, Homo sapiens
  misc_RNA (1)...(19): siRNA sense strand
cuguuuauguauauggaca

SEQ ID NO: 2426193 - RNA, 19 nt, Homo sapiens
  misc_RNA (1)...(19): siRNA sense strand
cagaacagagugaugaaca

SEQ ID NO: 2426194 - RNA, 19 nt, Homo sapiens
  misc_RNA (1)...(19): siRNA sense strand
uguacugcccagaggagaa

SEQ ID NO: 2426195 - RNA, 19 nt, Homo sapiens
  misc_RNA (1)...(19): siRNA sense strand
gccuggaauauuugggcua

SEQ ID NO: 2426196 - RNA, 19 nt, Homo sapiens
  misc_RNA (1)...(19): siRNA sense strand
guauaguguaugccguuaa

SEQ ID NO: 2426197 - RNA, 19 nt, Homo sapiens
  misc_RNA (1)...(19): siRNA sense strand
gaauacugugccaggauuu

SEQ ID NO: 2426198 - RNA, 19 nt, Homo sapiens
  misc_RNA (1)...(19): siRNA sense strand
uacagugacaagagauaaa

SEQ ID NO: 2426199 - RNA, 19 nt, Homo sapiens
  misc_RNA (1)...(19): siRNA sense strand
cagagagggagacacgaaa

SEQ ID NO: 2426200 - RNA, 19 nt, Homo sapiens
  misc_RNA (1)...(19): siRNA sense strand
acacgaaacuacuuggacu

SEQ ID NO: 2426201 - RNA, 19 nt, Homo sapiens
  misc_RNA (1)...(19): siRNA sense strand
auuucuaacugaagcugaa

SEQ ID NO: 2426202 - RNA, 19 nt, Homo sapiens
  misc_RNA (1)...(19): siRNA sense strand
gcuucgacgauuugguuau

SEQ ID NO: 2426203 - RNA, 19 nt, Homo sapiens
  misc_RNA (1)...(19): siRNA sense strand
ugggaaaaguggaguucuu

SEQ ID NO: 2426204 - RNA, 19 nt, Homo sapiens
  misc_RNA (1)...(19): siRNA sense strand
ccugauugcacuacugaau

SEQ ID NO: 2426205 - RNA, 19 nt, Homo sapiens
  misc_RNA (1)...(19): siRNA sense strand
cagugaagaauuuccagaa

SEQ ID NO: 2426206 - RNA, 19 nt, Homo sapiens
  misc_RNA (1)...(19): siRNA sense strand
acgauuugguuaugaugau

SEQ ID NO: 2426207 - RNA, 19 nt, Homo sapiens
  misc_RNA (1)...(19): siRNA sense strand
agaugaaaccagcuuguau

SEQ ID NO: 2426208 - RNA, 19 nt, Homo sapiens
  misc_RNA (1)...(19): siRNA sense strand
uaacugaagcugaaaucau

SEQ ID NO: 2426209 - RNA, 19 nt, Homo sapiens
  misc_RNA (1)...(19): siRNA sense strand
ggcuaaugucaucuguaua

SEQ ID NO: 2426210 - RNA, 19 nt, Homo sapiens
  misc_RNA (1)...(19): siRNA sense strand
ccuauuaugaaccaguaua

SEQ ID NO: 2426211 - RNA, 19 nt, Homo sapiens
  misc_RNA (1)...(19): siRNA sense strand
gaggagaaggagaugaaac

SEQ ID NO: 2426212 - RNA, 19 nt, Homo sapiens
  misc_RNA (1)...(19): siRNA sense strand
acauauaagugauggugug

SEQ ID NO: 2426213 - RNA, 19 nt, Homo sapiens
  misc_RNA (1)...(19): siRNA sense strand
aguuuguaccaaugaaaga

SEQ ID NO: 2426214 - RNA, 19 nt, Homo sapiens
  misc_RNA (1)...(19): siRNA sense strand
cuuaaugaggcagaagaaa

SEQ ID NO: 2426215 - RNA, 19 nt, Homo sapiens
  misc_RNA (1)...(19): siRNA sense strand
agaauuuccagaagagguu

SEQ ID NO: 2426216 - RNA, 19 nt, Homo sapiens
  misc_RNA (1)...(19): siRNA sense strand
caagaauguagucagaaaa

SEQ ID NO: 2426217 - RNA, 19 nt, Homo sapiens
  misc_RNA (1)...(19): siRNA sense strand
aggaagaggaggaggagaa

SEQ ID NO: 2426218 - RNA, 19 nt, Homo sapiens
  misc_RNA (1)...(19): siRNA sense strand
aggaagaggaagaggaaga

SEQ ID NO: 2426219 - RNA, 19 nt, Homo sapiens
  misc_RNA (1)...(19): siRNA sense strand
gagaauuacuggaggcuca

SEQ ID NO: 2426220 - RNA, 19 nt, Homo sapiens
  misc_RNA (1)...(19): siRNA sense strand
cagaaaauacccagagaaa

SEQ ID NO: 2426221 - RNA, 19 nt, Homo sapiens
  misc_RNA (1)...(19): siRNA sense strand
aggcagaagaggagcggaa

SEQ ID NO: 2426222 - RNA, 19 nt, Homo sapiens
  misc_RNA (1)...(19): siRNA sense strand
uuacagaggaagaggaaga

SEQ ID NO: 2426223 - RNA, 19 nt, Homo sapiens
  misc_RNA (1)...(19): siRNA sense strand
aaacaggauuuguggaaaa

SEQ ID NO: 2426224 - RNA, 19 nt, Homo sapiens
  misc_RNA (1)...(19): siRNA sense strand
aggaagaggaagaugaaaa

SEQ ID NO: 2426225 - RNA, 19 nt, Homo sapiens
  misc_RNA (1)...(19): siRNA sense strand
aagaagaagucgaagagga

SEQ ID NO: 2426226 - RNA, 19 nt, Homo sapiens
  misc_RNA (1)...(19): siRNA sense strand
aagaaauuacagaggaaga

SEQ ID NO: 2426227 - RNA, 19 nt, Homo sapiens
  misc_RNA (1)...(19): siRNA sense strand
ucauagaucacgugccaaa

SEQ ID NO: 2426228 - RNA, 19 nt, Homo sapiens
  misc_RNA (1)...(19): siRNA sense strand
ucgaagaggaagaggagga

SEQ ID NO: 2426229 - RNA, 19 nt, Homo sapiens
  misc_RNA (1)...(19): siRNA sense strand
aaauacuggcccugggaaa

SEQ ID NO: 2426230 - RNA, 19 nt, Homo sapiens
  misc_RNA (1)...(19): siRNA sense strand
aggaggagaauguggaaga

SEQ ID NO: 2426231 - RNA, 19 nt, Homo sapiens
  misc_RNA (1)...(19): siRNA sense strand
ggaauaaacgacuggagga

SEQ ID NO: 2426232 - RNA, 19 nt, Homo sapiens
  misc_RNA (1)...(19): siRNA sense strand
aggaagaugaggaggagga

SEQ ID NO: 2426233 - RNA, 19 nt, Homo sapiens
  misc_RNA (1)...(19): siRNA sense strand
agucaaguguaucaguaaa

SEQ ID NO: 2426234 - RNA, 19 nt, Homo sapiens
  misc_RNA (1)...(19): siRNA sense strand
gggaaggagaagaagaagu

SEQ ID NO: 2426235 - RNA, 19 nt, Homo sapiens
  misc_RNA (1)...(19): siRNA sense strand
aagaagucgaagaggaaga

SEQ ID NO: 2426236 - RNA, 19 nt, Homo sapiens
  misc_RNA (1)...(19): siRNA sense strand
aggagagcauggagcagaa

SEQ ID NO: 2426237 - RNA, 19 nt, Homo sapiens
  misc_RNA (1)...(19): siRNA sense strand
ggaagugaaaagagaagaa

SEQ ID NO: 2426238 - RNA, 19 nt, Homo sapiens
  misc_RNA (1)...(19): siRNA sense strand
cgucauagaucacgugcca

SEQ ID NO: 2426239 - RNA, 19 nt, Homo sapiens
  misc_RNA (1)...(19): siRNA sense strand
aagacauagucaaguguau

SEQ ID NO: 2426240 - RNA, 19 nt, Homo sapiens
  misc_RNA (1)...(19): siRNA sense strand
cccaaagaccuaugaucaa

SEQ ID NO: 2426241 - RNA, 19 nt, Homo sapiens
  misc_RNA (1)...(19): siRNA sense strand
agucaauuccccugagaaa

SEQ ID NO: 2426242 - RNA, 19 nt, Homo sapiens
  misc_RNA (1)...(19): siRNA sense strand
ucugaaggagcgugugaua

SEQ ID NO: 2426243 - RNA, 19 nt, Homo sapiens
  misc_RNA (1)...(19): siRNA sense strand
acuugaagaugcucagaau

SEQ ID NO: 2426244 - RNA, 19 nt, Homo sapiens
  misc_RNA (1)...(19): siRNA sense strand
agugaaaagagaagaaaga

SEQ ID NO: 2426245 - RNA, 19 nt, Homo sapiens
  misc_RNA (1)...(19): siRNA sense strand
ccguggagauggcagagaa

SEQ ID NO: 2426246 - RNA, 19 nt, Homo sapiens
  misc_RNA (1)...(19): siRNA sense strand
uggagauggcagagaagau

SEQ ID NO: 2426247 - RNA, 19 nt, Homo sapiens
  misc_RNA (1)...(19): siRNA sense strand
ugaaaagagaagaaagaga

SEQ ID NO: 2426248 - RNA, 19 nt, Homo sapiens
  misc_RNA (1)...(19): siRNA sense strand
cucaaggaguacaagcaaa

SEQ ID NO: 2426249 - RNA, 19 nt, Homo sapiens
  misc_RNA (1)...(19): siRNA sense strand
uugcaggaaucaagguuau

SEQ ID NO: 2426250 - RNA, 19 nt, Homo sapiens
  misc_RNA (1)...(19): siRNA sense strand
auaaacgacuggaggaagu

SEQ ID NO: 2426251 - RNA, 19 nt, Homo sapiens
  misc_RNA (1)...(19): siRNA sense strand
guuuaacagacgaagaaaa

SEQ ID NO: 2426252 - RNA, 19 nt, Homo sapiens
  misc_RNA (1)...(19): siRNA sense strand
gaugaaaauaagucagcua

SEQ ID NO: 2426253 - RNA, 19 nt, Homo sapiens
  misc_RNA (1)...(19): siRNA sense strand
aauccauguucuugaucua

SEQ ID NO: 2426254 - RNA, 19 nt, Homo sapiens
  misc_RNA (1)...(19): siRNA sense strand
cgauguaggggaaggagaa

SEQ ID NO: 2426255 - RNA, 19 nt, Homo sapiens
  misc_RNA (1)...(19): siRNA sense strand
agaugaugucagaggcaga

SEQ ID NO: 2426256 - RNA, 19 nt, Homo sapiens
  misc_RNA (1)...(19): siRNA sense strand
agaggaagaggaagaugaa

SEQ ID NO: 2426257 - RNA, 19 nt, Homo sapiens
  misc_RNA (1)...(19): siRNA sense strand
uugcuaaagaauuggccaa

SEQ ID NO: 2426258 - RNA, 19 nt, Homo sapiens
  misc_RNA (1)...(19): siRNA sense strand
aggagaagaagaagucgaa

SEQ ID NO: 2426259 - RNA, 19 nt, Homo sapiens
  misc_RNA (1)...(19): siRNA sense strand
aagaggaagaggaggagga

SEQ ID NO: 2426260 - RNA, 19 nt, Homo sapiens
  misc_RNA (1)...(19): siRNA sense strand
aagaggaggaggagaaugu

SEQ ID NO: 2426261 - RNA, 19 nt, Homo sapiens
  misc_RNA (1)...(19): siRNA sense strand
agaccuaugaucaagcaaa

SEQ ID NO: 2426262 - RNA, 19 nt, Homo sapiens
  misc_RNA (1)...(19): siRNA sense strand
aagcagaacgcgagcacca

SEQ ID NO: 2426263 - RNA, 19 nt, Homo sapiens
  misc_RNA (1)...(19): siRNA sense strand
aauuacagaggaagaggaa

SEQ ID NO: 2426264 - RNA, 19 nt, Homo sapiens
  misc_RNA (1)...(19): siRNA sense strand
gcucacagcaaauggagga

SEQ ID NO: 2426265 - RNA, 19 nt, Homo sapiens
  misc_RNA (1)...(19): siRNA sense strand
ugguuuaacagacgaagaa

SEQ ID NO: 2426266 - RNA, 19 nt, Homo sapiens
  misc_RNA (1)...(19): siRNA sense strand
agaacaauccugaagcaca

SEQ ID NO: 2426267 - RNA, 19 nt, Homo sapiens
  misc_RNA (1)...(19): siRNA sense strand
caagcaaagcagaggauug

SEQ ID NO: 2426268 - RNA, 19 nt, Homo sapiens
  misc_RNA (1)...(19): siRNA sense strand
caaccaaagugaaggaagg

SEQ ID NO: 2426269 - RNA, 19 nt, Homo sapiens
  misc_RNA (1)...(19): siRNA sense strand
gggaaaauccagaaaauac

SEQ ID NO: 2426270 - RNA, 19 nt, Homo sapiens
  misc_RNA (1)...(19): siRNA sense strand
cgcugggaggaguggaaua

SEQ ID NO: 2426271 - RNA, 19 nt, Homo sapiens
  misc_RNA (1)...(19): siRNA sense strand
acgacuggaggaagugaaa

SEQ ID NO: 2426272 - RNA, 19 nt, Homo sapiens
  misc_RNA (1)...(19): siRNA sense strand
ccucaaggaguacaagcaa

SEQ ID NO: 2426273 - RNA, 19 nt, Homo sapiens
  misc_RNA (1)...(19): siRNA sense strand
gggccaggacagaggacua

SEQ ID NO: 2426274 - RNA, 19 nt, Homo sapiens
  misc_RNA (1)...(19): siRNA sense strand
cauucagagcggagaaauu

SEQ ID NO: 2426275 - RNA, 19 nt, Homo sapiens
  misc_RNA (1)...(19): siRNA sense strand
uggcagagcugaagcagga

SEQ ID NO: 2426276 - RNA, 19 nt, Homo sapiens
  misc_RNA (1)...(19): siRNA sense strand
gagcugaagccaaagguga

SEQ ID NO: 2426277 - RNA, 19 nt, Homo sapiens
  misc_RNA (1)...(19): siRNA sense strand
gcaagaaggccaaggagcu

SEQ ID NO: 2426278 - RNA, 19 nt, Homo sapiens
  misc_RNA (1)...(19): siRNA sense strand
aggagaaagacaagcagau

SEQ ID NO: 2426279 - RNA, 19 nt, Homo sapiens
  misc_RNA (1)...(19): siRNA sense strand
aggacuaucucaaacggaa

SEQ ID NO: 2426280 - RNA, 19 nt, Homo sapiens
  misc_RNA (1)...(19): siRNA sense strand
gcggagaaauuucagcaga

SEQ ID NO: 2426281 - RNA, 19 nt, Homo sapiens
  misc_RNA (1)...(19): siRNA sense strand
gccaaggagcugaagccaa

SEQ ID NO: 2426282 - RNA, 19 nt, Homo sapiens
  misc_RNA (1)...(19): siRNA sense strand
uggaagagaccucggcuga

SEQ ID NO: 2426283 - RNA, 19 nt, Homo sapiens
  misc_RNA (1)...(19): siRNA sense strand
cguccgugguggugaagca

SEQ ID NO: 2426284 - RNA, 19 nt, Homo sapiens
  misc_RNA (1)...(19): siRNA sense strand
ugaagguggcagagcugaa

SEQ ID NO: 2426285 - RNA, 19 nt, Homo sapiens
  misc_RNA (1)...(19): siRNA sense strand
uuucaugagcagagaagga

SEQ ID NO: 2426286 - RNA, 19 nt, Homo sapiens
  misc_RNA (1)...(19): siRNA sense strand
agcugaagccaaaggugaa

SEQ ID NO: 2426287 - RNA, 19 nt, Homo sapiens
  misc_RNA (1)...(19): siRNA sense strand
ccaaaggugaagaagcuca

SEQ ID NO: 2426288 - RNA, 19 nt, Homo sapiens
  misc_RNA (1)...(19): siRNA sense strand
ccgugaagcaggagaacag

SEQ ID NO: 2426289 - RNA, 19 nt, Homo sapiens
  misc_RNA (1)...(19): siRNA sense strand
cagcccaaacagcaggaaa

SEQ ID NO: 2426290 - RNA, 19 nt, Homo sapiens
  misc_RNA (1)...(19): siRNA sense strand
agcccaaacagcaggaaaa

SEQ ID NO: 2426291 - RNA, 19 nt, Homo sapiens
  misc_RNA (1)...(19): siRNA sense strand
agaaggaaccaccuggcua

SEQ ID NO: 2426292 - RNA, 19 nt, Homo sapiens
  misc_RNA (1)...(19): siRNA sense strand
aggugaagaagcucaagua

SEQ ID NO: 2426293 - RNA, 19 nt, Homo sapiens
  misc_RNA (1)...(19): siRNA sense strand
gcgagguggugguagccuu

SEQ ID NO: 2426294 - RNA, 19 nt, Homo sapiens
  misc_RNA (1)...(19): siRNA sense strand
agaugcugcaggagaaaga

SEQ ID NO: 2426295 - RNA, 19 nt, Homo sapiens
  misc_RNA (1)...(19): siRNA sense strand
uguagaauuuggaggcaga

SEQ ID NO: 2426296 - RNA, 19 nt, Homo sapiens
  misc_RNA (1)...(19): siRNA sense strand
auaaacaagagacggaaau

SEQ ID NO: 2426297 - RNA, 19 nt, Homo sapiens
  misc_RNA (1)...(19): siRNA sense strand
acauaagucccaugaggau

SEQ ID NO: 2426298 - RNA, 19 nt, Homo sapiens
  misc_RNA (1)...(19): siRNA sense strand
aauuaaugcccaugucaau

SEQ ID NO: 2426299 - RNA, 19 nt, Homo sapiens
  misc_RNA (1)...(19): siRNA sense strand
ccaugguccaaauuagaaa

SEQ ID NO: 2426300 - RNA, 19 nt, Homo sapiens
  misc_RNA (1)...(19): siRNA sense strand
uggaaugagagugcagaua

SEQ ID NO: 2426301 - RNA, 19 nt, Homo sapiens
  misc_RNA (1)...(19): siRNA sense strand
cgugcagcugggagacaua

SEQ ID NO: 2426302 - RNA, 19 nt, Homo sapiens
  misc_RNA (1)...(19): siRNA sense strand
uugauaaacaagagacgga

SEQ ID NO: 2426303 - RNA, 19 nt, Homo sapiens
  misc_RNA (1)...(19): siRNA sense strand
auuuggaggcagaacgaau

SEQ ID NO: 2426304 - RNA, 19 nt, Homo sapiens
  misc_RNA (1)...(19): siRNA sense strand
augcaaagacagagaagga

SEQ ID NO: 2426305 - RNA, 19 nt, Homo sapiens
  misc_RNA (1)...(19): siRNA sense strand
acagagaaggaaagccaaa

SEQ ID NO: 2426306 - RNA, 19 nt, Homo sapiens
  misc_RNA (1)...(19): siRNA sense strand
ggaccguguuuguugggaa

SEQ ID NO: 2426307 - RNA, 19 nt, Homo sapiens
  misc_RNA (1)...(19): siRNA sense strand
agacagagaaggaaagcca

SEQ ID NO: 2426308 - RNA, 19 nt, Homo sapiens
  misc_RNA (1)...(19): siRNA sense strand
cgaaagucuaagaagaaga

SEQ ID NO: 2426309 - RNA, 19 nt, Homo sapiens
  misc_RNA (1)...(19): siRNA sense strand
cagaugaauaaacgaaaga

SEQ ID NO: 2426310 - RNA, 19 nt, Homo sapiens
  misc_RNA (1)...(19): siRNA sense strand
ugauagugauaguagcaca

SEQ ID NO: 2426311 - RNA, 19 nt, Homo sapiens
  misc_RNA (1)...(19): siRNA sense strand
acgaaagagacaaaagcaa

SEQ ID NO: 2426312 - RNA, 19 nt, Homo sapiens
  misc_RNA (1)...(19): siRNA sense strand
cuauaugcaaagacagaga

SEQ ID NO: 2426313 - RNA, 19 nt, Homo sapiens
  misc_RNA (1)...(19): siRNA sense strand
acuacaggaaugaagaaau

SEQ ID NO: 2426314 - RNA, 19 nt, Homo sapiens
  misc_RNA (1)...(19): siRNA sense strand
agugauaguagcacagaca

SEQ ID NO: 2426315 - RNA, 19 nt, Homo sapiens
  misc_RNA (1)...(19): siRNA sense strand
cguuuauauggaagaccaa

SEQ ID NO: 2426316 - RNA, 19 nt, Homo sapiens
  misc_RNA (1)...(19): siRNA sense strand
ccaacaaccaagugacucu

SEQ ID NO: 2426317 - RNA, 19 nt, Homo sapiens
  misc_RNA (1)...(19): siRNA sense strand
ccaacaaccaagugacucu

SEQ ID NO: 2426318 - RNA, 19 nt, Homo sapiens
  misc_RNA (1)...(19): siRNA sense strand
aggcaacgaauguagccaa

SEQ ID NO: 2426319 - RNA, 19 nt, Homo sapiens
  misc_RNA (1)...(19): siRNA sense strand
gggaaaugcuuauagcuca

SEQ ID NO: 2426320 - RNA, 19 nt, Homo sapiens
  misc_RNA (1)...(19): siRNA sense strand
guaccugagacaagggauu

SEQ ID NO: 2426321 - RNA, 19 nt, Homo sapiens
  misc_RNA (1)...(19): siRNA sense strand
gagacaagggauugagaac

SEQ ID NO: 2426322 - RNA, 19 nt, Homo sapiens
  misc_RNA (1)...(19): siRNA sense strand
uggagugggcagugucaaa

SEQ ID NO: 2426323 - RNA, 19 nt, Homo sapiens
  misc_RNA (1)...(19): siRNA sense strand
ccuuggaauuuaagcuaca

SEQ ID NO: 2426324 - RNA, 19 nt, Homo sapiens
  misc_RNA (1)...(19): siRNA sense strand
ugacauuagcaguguggga

SEQ ID NO: 2426325 - RNA, 19 nt, Homo sapiens
  misc_RNA (1)...(19): siRNA sense strand
uugaaguggaccuugguaa

SEQ ID NO: 2426326 - RNA, 19 nt, Homo sapiens
  misc_RNA (1)...(19): siRNA sense strand
acauuagcagugugggaau

SEQ ID NO: 2426327 - RNA, 19 nt, Homo sapiens
  misc_RNA (1)...(19): siRNA sense strand
acgagauccugcagagcca

SEQ ID NO: 2426328 - RNA, 19 nt, Homo sapiens
  misc_RNA (1)...(19): siRNA sense strand
cagcaguguuucucggguu

SEQ ID NO: 2426329 - RNA, 19 nt, Homo sapiens
  misc_RNA (1)...(19): siRNA sense strand
cagaaagaugaauuaccua

SEQ ID NO: 2426330 - RNA, 19 nt, Homo sapiens
  misc_RNA (1)...(19): siRNA sense strand
gcagugucaaaccgggaaa

SEQ ID NO: 2426331 - RNA, 19 nt, Homo sapiens
  misc_RNA (1)...(19): siRNA sense strand
aggaggaagaagaggauaa

SEQ ID NO: 2426332 - RNA, 19 nt, Homo sapiens
  misc_RNA (1)...(19): siRNA sense strand
agacaugaaacaaggagaa

SEQ ID NO: 2426333 - RNA, 19 nt, Homo sapiens
  misc_RNA (1)...(19): siRNA sense strand
acauuuaagucaagaggau

SEQ ID NO: 2426334 - RNA, 19 nt, Homo sapiens
  misc_RNA (1)...(19): siRNA sense strand
acauuuaagucaagaggau

SEQ ID NO: 2426335 - RNA, 19 nt, Homo sapiens
  misc_RNA (1)...(19): siRNA sense strand
aguuaaagaaacaguggaa

SEQ ID NO: 2426336 - RNA, 19 nt, Homo sapiens
  misc_RNA (1)...(19): siRNA sense strand
caguggaaauggagcaaaa

SEQ ID NO: 2426337 - RNA, 19 nt, Homo sapiens
  misc_RNA (1)...(19): siRNA sense strand
aucuagaagucguuggaaa

SEQ ID NO: 2426338 - RNA, 19 nt, Homo sapiens
  misc_RNA (1)...(19): siRNA sense strand
agggugaugaagagaauaa

SEQ ID NO: 2426339 - RNA, 19 nt, Homo sapiens
  misc_RNA (1)...(19): siRNA sense strand
ugacagaagaaguugaaga

SEQ ID NO: 2426340 - RNA, 19 nt, Homo sapiens
  misc_RNA (1)...(19): siRNA sense strand
ugauagugaugaagagcuu

SEQ ID NO: 2426341 - RNA, 19 nt, Homo sapiens
  misc_RNA (1)...(19): siRNA sense strand
ugauagugaugaagagcuu

SEQ ID NO: 2426342 - RNA, 19 nt, Homo sapiens
  misc_RNA (1)...(19): siRNA sense strand
gcuggauuaaggagaaaua

SEQ ID NO: 2426343 - RNA, 19 nt, Homo sapiens
  misc_RNA (1)...(19): siRNA sense strand
cgaguugauuggaggcgaa

SEQ ID NO: 2426344 - RNA, 19 nt, Homo sapiens
  misc_RNA (1)...(19): siRNA sense strand
uagaagaagaagacaucaa

SEQ ID NO: 2426345 - RNA, 19 nt, Homo sapiens
  misc_RNA (1)...(19): siRNA sense strand
augaagaagaaacgaacaa

SEQ ID NO: 2426346 - RNA, 19 nt, Homo sapiens
  misc_RNA (1)...(19): siRNA sense strand
cuguaaauauucagugcau

SEQ ID NO: 2426347 - RNA, 19 nt, Homo sapiens
  misc_RNA (1)...(19): siRNA sense strand
gagagugaugacagcgaua

SEQ ID NO: 2426348 - RNA, 19 nt, Homo sapiens
  misc_RNA (1)...(19): siRNA sense strand
ugaaaaugaugaagagcuu

SEQ ID NO: 2426349 - RNA, 19 nt, Homo sapiens
  misc_RNA (1)...(19): siRNA sense strand
ggaugauuuagaagaagaa

SEQ ID NO: 2426350 - RNA, 19 nt, Homo sapiens
  misc_RNA (1)...(19): siRNA sense strand
gguugaagaugaagguucu

SEQ ID NO: 2426351 - RNA, 19 nt, Homo sapiens
  misc_RNA (1)...(19): siRNA sense strand
augaagauggagaugauua

SEQ ID NO: 2426352 - RNA, 19 nt, Homo sapiens
  misc_RNA (1)...(19): siRNA sense strand
agagcuugauagugaagaa

SEQ ID NO: 2426353 - RNA, 19 nt, Homo sapiens
  misc_RNA (1)...(19): siRNA sense strand
caguagugguagagauuuu

SEQ ID NO: 2426354 - RNA, 19 nt, Homo sapiens
  misc_RNA (1)...(19): siRNA sense strand
gaagaagaaacgaacaaaa

SEQ ID NO: 2426355 - RNA, 19 nt, Homo sapiens
  misc_RNA (1)...(19): siRNA sense strand
aggaugauuuagaagaaga

SEQ ID NO: 2426356 - RNA, 19 nt, Homo sapiens
  misc_RNA (1)...(19): siRNA sense strand
ccguagagugguugaagau

SEQ ID NO: 2426357 - RNA, 19 nt, Homo sapiens
  misc_RNA (1)...(19): siRNA sense strand
gagcaaaagacuccugaaa

SEQ ID NO: 2426358 - RNA, 19 nt, Homo sapiens
  misc_RNA (1)...(19): siRNA sense strand
uaugauggcacaaggcaaa

SEQ ID NO: 2426359 - RNA, 19 nt, Homo sapiens
  misc_RNA (1)...(19): siRNA sense strand
agaaguugaagaugaacaa

SEQ ID NO: 2426360 - RNA, 19 nt, Homo sapiens
  misc_RNA (1)...(19): siRNA sense strand
cauaugaagaagaaacgaa

SEQ ID NO: 2426361 - RNA, 19 nt, Homo sapiens
  misc_RNA (1)...(19): siRNA sense strand
agacaucaagcgaggaaaa

SEQ ID NO: 2426362 - RNA, 19 nt, Homo sapiens
  misc_RNA (1)...(19): siRNA sense strand
gugaugaaguugaugagga

SEQ ID NO: 2426363 - RNA, 19 nt, Homo sapiens
  misc_RNA (1)...(19): siRNA sense strand
gcuugauagugaugaaagu

SEQ ID NO: 2426364 - RNA, 19 nt, Homo sapiens
  misc_RNA (1)...(19): siRNA sense strand
caacauaugaagaagaaac

SEQ ID NO: 2426365 - RNA, 19 nt, Homo sapiens
  misc_RNA (1)...(19): siRNA sense strand
uggacaaauaauagaggau

SEQ ID NO: 2426366 - RNA, 19 nt, Homo sapiens
  misc_RNA (1)...(19): siRNA sense strand
uggacaaauaauagaggau

SEQ ID NO: 2426367 - RNA, 19 nt, Homo sapiens
  misc_RNA (1)...(19): siRNA sense strand
guugauuggaggcgaacua

SEQ ID NO: 2426368 - RNA, 19 nt, Homo sapiens
  misc_RNA (1)...(19): siRNA sense strand
cgcaguagugguagagauu

SEQ ID NO: 2426369 - RNA, 19 nt, Homo sapiens
  misc_RNA (1)...(19): siRNA sense strand
gaaaaggaaucuugcccaa

SEQ ID NO: 2426370 - RNA, 19 nt, Homo sapiens
  misc_RNA (1)...(19): siRNA sense strand
auauaaggagcgaguagaa

SEQ ID NO: 2426371 - RNA, 19 nt, Homo sapiens
  misc_RNA (1)...(19): siRNA sense strand
gugacagugaugagaguga

SEQ ID NO: 2426372 - RNA, 19 nt, Homo sapiens
  misc_RNA (1)...(19): siRNA sense strand
aaagaaaauggcuggauua

SEQ ID NO: 2426373 - RNA, 19 nt, Homo sapiens
  misc_RNA (1)...(19): siRNA sense strand
acuuacaagaucaggaaaa

SEQ ID NO: 2426374 - RNA, 19 nt, Homo sapiens
  misc_RNA (1)...(19): siRNA sense strand
gcucaaagaacucucaaaa

SEQ ID NO: 2426375 - RNA, 19 nt, Homo sapiens
  misc_RNA (1)...(19): siRNA sense strand
acgcaguagugguagagau

SEQ ID NO: 2426376 - RNA, 19 nt, Homo sapiens
  misc_RNA (1)...(19): siRNA sense strand
ugcaagaugaggaggguga

SEQ ID NO: 2426377 - RNA, 19 nt, Homo sapiens
  misc_RNA (1)...(19): siRNA sense strand
gaagugaaagagagcucaa

SEQ ID NO: 2426378 - RNA, 19 nt, Homo sapiens
  misc_RNA (1)...(19): siRNA sense strand
aaguugaugaggaggaaga

SEQ ID NO: 2426379 - RNA, 19 nt, Homo sapiens
  misc_RNA (1)...(19): siRNA sense strand
cgaugacuuuguagugcaa

SEQ ID NO: 2426380 - RNA, 19 nt, Homo sapiens
  misc_RNA (1)...(19): siRNA sense strand
caauauaaggagcgaguag

SEQ ID NO: 2426381 - RNA, 19 nt, Homo sapiens
  misc_RNA (1)...(19): siRNA sense strand
uuaaagaaacaguggaaag

SEQ ID NO: 2426382 - RNA, 19 nt, Homo sapiens
  misc_RNA (1)...(19): siRNA sense strand
gggcagaggaagaggaacu

SEQ ID NO: 2426383 - RNA, 19 nt, Homo sapiens
  misc_RNA (1)...(19): siRNA sense strand
ggaucaagguggucggaca

SEQ ID NO: 2426384 - RNA, 19 nt, Homo sapiens
  misc_RNA (1)...(19): siRNA sense strand
agaaauaucaaguggaaca

SEQ ID NO: 2426385 - RNA, 19 nt, Homo sapiens
  misc_RNA (1)...(19): siRNA sense strand
agguagaaguagauggaca

SEQ ID NO: 2426386 - RNA, 19 nt, Homo sapiens
  misc_RNA (1)...(19): siRNA sense strand
ccucacagcaaguggcaaa

SEQ ID NO: 2426387 - RNA, 19 nt, Homo sapiens
  misc_RNA (1)...(19): siRNA sense strand
ggcaaagggcguugugaau

SEQ ID NO: 2426388 - RNA, 19 nt, Homo sapiens
  misc_RNA (1)...(19): siRNA sense strand
ugaaacaaauaaaggcaca

SEQ ID NO: 2426389 - RNA, 19 nt, Homo sapiens
  misc_RNA (1)...(19): siRNA sense strand
guguuuggcaucuggaaua

SEQ ID NO: 2426390 - RNA, 19 nt, Homo sapiens
  misc_RNA (1)...(19): siRNA sense strand
gccaaaugguuucaggcaa

SEQ ID NO: 2426391 - RNA, 19 nt, Homo sapiens
  misc_RNA (1)...(19): siRNA sense strand
aggcaagggcaaauggauu

SEQ ID NO: 2426392 - RNA, 19 nt, Homo sapiens
  misc_RNA (1)...(19): siRNA sense strand
aggcaaagggcguugugaa

SEQ ID NO: 2426393 - RNA, 19 nt, Homo sapiens
  misc_RNA (1)...(19): siRNA sense strand
gcuuuguaauggagguaga

SEQ ID NO: 2426394 - RNA, 19 nt, Homo sapiens
  misc_RNA (1)...(19): siRNA sense strand
acgcuaacuuugaagguga

SEQ ID NO: 2426395 - RNA, 19 nt, Homo sapiens
  misc_RNA (1)...(19): siRNA sense strand
uaguaaagcaauagaccuu

SEQ ID NO: 2426396 - RNA, 19 nt, Homo sapiens
  misc_RNA (1)...(19): siRNA sense strand
ucuggauaguaaagcaaua

SEQ ID NO: 2426397 - RNA, 19 nt, Homo sapiens
  misc_RNA (1)...(19): siRNA sense strand
uaaagaaggugcugggucu

SEQ ID NO: 2426398 - RNA, 19 nt, Homo sapiens
  misc_RNA (1)...(19): siRNA sense strand
agauuaucccucaggcaaa

SEQ ID NO: 2426399 - RNA, 19 nt, Homo sapiens
  misc_RNA (1)...(19): siRNA sense strand
uggagaagaaggauggaga

SEQ ID NO: 2426400 - RNA, 19 nt, Homo sapiens
  misc_RNA (1)...(19): siRNA sense strand
ugugaaaagucuauaggua

SEQ ID NO: 2426401 - RNA, 19 nt, Homo sapiens
  misc_RNA (1)...(19): siRNA sense strand
aaguagauggacagaaauu

SEQ ID NO: 2426402 - RNA, 19 nt, Homo sapiens
  misc_RNA (1)...(19): siRNA sense strand
aggcuuugaugcagauauu

SEQ ID NO: 2426403 - RNA, 19 nt, Homo sapiens
  misc_RNA (1)...(19): siRNA sense strand
ccaaauaagaaaguggcaa

SEQ ID NO: 2426404 - RNA, 19 nt, Homo sapiens
  misc_RNA (1)...(19): siRNA sense strand
gugagacagaagugaagaa

SEQ ID NO: 2426405 - RNA, 19 nt, Homo sapiens
  misc_RNA (1)...(19): siRNA sense strand
ccaaaugguuucaggcaag

SEQ ID NO: 2426406 - RNA, 19 nt, Homo sapiens
  misc_RNA (1)...(19): siRNA sense strand
acguagcggugaagguauu

SEQ ID NO: 2426407 - RNA, 19 nt, Homo sapiens
  misc_RNA (1)...(19): siRNA sense strand
cggaggaacuugaagcugu

SEQ ID NO: 2426408 - RNA, 19 nt, Homo sapiens
  misc_RNA (1)...(19): siRNA sense strand
caacaggcuuugaugcaga

SEQ ID NO: 2426409 - RNA, 19 nt, Homo sapiens
  misc_RNA (1)...(19): siRNA sense strand
agaaagaugaggccggaga

SEQ ID NO: 2426410 - RNA, 19 nt, Homo sapiens
  misc_RNA (1)...(19): siRNA sense strand
acgaauuggagaagaagga

SEQ ID NO: 2426411 - RNA, 19 nt, Homo sapiens
  misc_RNA (1)...(19): siRNA sense strand
gggauauccaacaggcuuu

SEQ ID NO: 2426412 - RNA, 19 nt, Homo sapiens
  misc_RNA (1)...(19): siRNA sense strand
gcggcaaauaauaagaaaa

SEQ ID NO: 2426413 - RNA, 19 nt, Homo sapiens
  misc_RNA (1)...(19): siRNA sense strand
gucuauagguacuuguaau

SEQ ID NO: 2426414 - RNA, 19 nt, Homo sapiens
  misc_RNA (1)...(19): siRNA sense strand
cuauaugaccauccagcaa

SEQ ID NO: 2426415 - RNA, 19 nt, Homo sapiens
  misc_RNA (1)...(19): siRNA sense strand
uuuacaaagugcuggagau

SEQ ID NO: 2426416 - RNA, 19 nt, Homo sapiens
  misc_RNA (1)...(19): siRNA sense strand
cugcgugauuugugcaaca

SEQ ID NO: 2426417 - RNA, 19 nt, Homo sapiens
  misc_RNA (1)...(19): siRNA sense strand
gugcaaagacaaacccaca

SEQ ID NO: 2426418 - RNA, 19 nt, Homo sapiens
  misc_RNA (1)...(19): siRNA sense strand
gguuggaugaaacaaauaa

SEQ ID NO: 2426419 - RNA, 19 nt, Homo sapiens
  misc_RNA (1)...(19): siRNA sense strand
gaucaagguggucggacau

SEQ ID NO: 2426420 - RNA, 19 nt, Homo sapiens
  misc_RNA (1)...(19): siRNA sense strand
guaauggaguguuuggcau

SEQ ID NO: 2426421 - RNA, 19 nt, Homo sapiens
  misc_RNA (1)...(19): siRNA sense strand
ucaugauccuugugagcga

SEQ ID NO: 2426422 - RNA, 19 nt, Homo sapiens
  misc_RNA (1)...(19): siRNA sense strand
uggauuaggggaugauaaa

SEQ ID NO: 2426423 - RNA, 19 nt, Homo sapiens
  misc_RNA (1)...(19): siRNA sense strand
aacaagaagaugaaacgaa

SEQ ID NO: 2426424 - RNA, 19 nt, Homo sapiens
  misc_RNA (1)...(19): siRNA sense strand
agcaauagaccuuaugaau

SEQ ID NO: 2426425 - RNA, 19 nt, Homo sapiens
  misc_RNA (1)...(19): siRNA sense strand
auguaugaguuccgaugaa

SEQ ID NO: 2426426 - RNA, 19 nt, Homo sapiens
  misc_RNA (1)...(19): siRNA sense strand
cggacauugugugguguaa

SEQ ID NO: 2426427 - RNA, 19 nt, Homo sapiens
  misc_RNA (1)...(19): siRNA sense strand
acaaaagagcccacgcuaa

SEQ ID NO: 2426428 - RNA, 19 nt, Homo sapiens
  misc_RNA (1)...(19): siRNA sense strand
auaugaagccucaggacca

SEQ ID NO: 2426429 - RNA, 19 nt, Homo sapiens
  misc_RNA (1)...(19): siRNA sense strand
uggaaauucuacaacugaa

SEQ ID NO: 2426430 - RNA, 19 nt, Homo sapiens
  misc_RNA (1)...(19): siRNA sense strand
ggacagaaauucagaggcg

SEQ ID NO: 2426431 - RNA, 19 nt, Homo sapiens
  misc_RNA (1)...(19): siRNA sense strand
gaaacaaauaaaggcacaa

SEQ ID NO: 2426432 - RNA, 19 nt, Homo sapiens
  misc_RNA (1)...(19): siRNA sense strand
gaugaaacaaauaaaggca

SEQ ID NO: 2426433 - RNA, 19 nt, Homo sapiens
  misc_RNA (1)...(19): siRNA sense strand
acuuugaaggugauacuua

SEQ ID NO: 2426434 - RNA, 19 nt, Homo sapiens
  misc_RNA (1)...(19): siRNA sense strand
cagaagagaaauaucaagu

SEQ ID NO: 2426435 - RNA, 19 nt, Homo sapiens
  misc_RNA (1)...(19): siRNA sense strand
gcgauaagauagaagccaa

SEQ ID NO: 2426436 - RNA, 19 nt, Homo sapiens
  misc_RNA (1)...(19): siRNA sense strand
cgauaagauagaagccaaa

SEQ ID NO: 2426437 - RNA, 19 nt, Homo sapiens
  misc_RNA (1)...(19): siRNA sense strand
gggaagacgaggaggagga

SEQ ID NO: 2426438 - RNA, 19 nt, Homo sapiens
  misc_RNA (1)...(19): siRNA sense strand
aggaggaggaagaggagua

SEQ ID NO: 2426439 - RNA, 19 nt, Homo sapiens
  misc_RNA (1)...(19): siRNA sense strand
cggaggagguaauggcgga

SEQ ID NO: 2426440 - RNA, 19 nt, Homo sapiens
  misc_RNA (1)...(19): siRNA sense strand
aggaagaggaguacgagga

SEQ ID NO: 2426441 - RNA, 19 nt, Homo sapiens
  misc_RNA (1)...(19): siRNA sense strand
aggaggaagaggaguacga

SEQ ID NO: 2426442 - RNA, 19 nt, Homo sapiens
  misc_RNA (1)...(19): siRNA sense strand
aagacgaggaggaggagga

SEQ ID NO: 2426443 - RNA, 19 nt, Homo sapiens
  misc_RNA (1)...(19): siRNA sense strand
aggaggaggaggaagagga

SEQ ID NO: 2426444 - RNA, 19 nt, Homo sapiens
  misc_RNA (1)...(19): siRNA sense strand
gccaaauuugauaaggaau

SEQ ID NO: 2426445 - RNA, 19 nt, Homo sapiens
  misc_RNA (1)...(19): siRNA sense strand
acgaggaugacgaggagga

SEQ ID NO: 2426446 - RNA, 19 nt, Homo sapiens
  misc_RNA (1)...(19): siRNA sense strand
ugucggugguggagcgcaa

SEQ ID NO: 2426447 - RNA, 19 nt, Homo sapiens
  misc_RNA (1)...(19): siRNA sense strand
ccaaguacgucaagagccu

SEQ ID NO: 2426448 - RNA, 19 nt, Homo sapiens
  misc_RNA (1)...(19): siRNA sense strand
aaucaaggaaccagagaau

SEQ ID NO: 2426449 - RNA, 19 nt, Homo sapiens
  misc_RNA (1)...(19): siRNA sense strand
aggugaaauuugaacagaa

SEQ ID NO: 2426450 - RNA, 19 nt, Homo sapiens
  misc_RNA (1)...(19): siRNA sense strand
cuaagauaucccuaagaaa

SEQ ID NO: 2426451 - RNA, 19 nt, Homo sapiens
  misc_RNA (1)...(19): siRNA sense strand
aaauaaacgaccuaggcua

SEQ ID NO: 2426452 - RNA, 19 nt, Homo sapiens
  misc_RNA (1)...(19): siRNA sense strand
aguauuggccgcagagaau

SEQ ID NO: 2426453 - RNA, 19 nt, Homo sapiens
  misc_RNA (1)...(19): siRNA sense strand
agggcaugguccagaauuu

SEQ ID NO: 2426454 - RNA, 19 nt, Homo sapiens
  misc_RNA (1)...(19): siRNA sense strand
agucagagcaaaaugguua

SEQ ID NO: 2426455 - RNA, 19 nt, Homo sapiens
  misc_RNA (1)...(19): siRNA sense strand
cgaugagguggaugaguau

SEQ ID NO: 2426456 - RNA, 19 nt, Homo sapiens
  misc_RNA (1)...(19): siRNA sense strand
aaggcaaaggaaaggcaaa

SEQ ID NO: 2426457 - RNA, 19 nt, Homo sapiens
  misc_RNA (1)...(19): siRNA sense strand
caguauuggccgcagagaa

SEQ ID NO: 2426458 - RNA, 19 nt, Homo sapiens
  misc_RNA (1)...(19): siRNA sense strand
aaucaaaaccauucagcaa

SEQ ID NO: 2426459 - RNA, 19 nt, Homo sapiens
  misc_RNA (1)...(19): siRNA sense strand
agucaaaagcgaagaaagu

SEQ ID NO: 2426460 - RNA, 19 nt, Homo sapiens
  misc_RNA (1)...(19): siRNA sense strand
aaggauauguucuaggaga

SEQ ID NO: 2426461 - RNA, 19 nt, Homo sapiens
  misc_RNA (1)...(19): siRNA sense strand
cuuuugaaguugaggccaa

SEQ ID NO: 2426462 - RNA, 19 nt, Homo sapiens
  misc_RNA (1)...(19): siRNA sense strand
gaauaaagauaaacccaac

SEQ ID NO: 2426463 - RNA, 19 nt, Homo sapiens
  misc_RNA (1)...(19): siRNA sense strand
augaaaugauacaugccua

SEQ ID NO: 2426464 - RNA, 19 nt, Homo sapiens
  misc_RNA (1)...(19): siRNA sense strand
ggcaaaacuaggaaaggaa

SEQ ID NO: 2426465 - RNA, 19 nt, Homo sapiens
  misc_RNA (1)...(19): siRNA sense strand
cgacaaagaccgagaaggg

SEQ ID NO: 2426466 - RNA, 19 nt, Homo sapiens
  misc_RNA (1)...(19): siRNA sense strand
gagaauaaagauaaaccca

SEQ ID NO: 2426467 - RNA, 19 nt, Homo sapiens
  misc_RNA (1)...(19): siRNA sense strand
ggaacuugcaggaggcgga

SEQ ID NO: 2426468 - RNA, 19 nt, Homo sapiens
  misc_RNA (1)...(19): siRNA sense strand
gcaucaaagucaaaagcga

SEQ ID NO: 2426469 - RNA, 19 nt, Homo sapiens
  misc_RNA (1)...(19): siRNA sense strand
cugaagauacauucccaaa

SEQ ID NO: 2426470 - RNA, 19 nt, Homo sapiens
  misc_RNA (1)...(19): siRNA sense strand
ugaaguggagcgugcgaau

SEQ ID NO: 2426471 - RNA, 19 nt, Homo sapiens
  misc_RNA (1)...(19): siRNA sense strand
aggcaaaggaaaggcaaaa

SEQ ID NO: 2426472 - RNA, 19 nt, Homo sapiens
  misc_RNA (1)...(19): siRNA sense strand
caucaaagucaaaagcgaa

SEQ ID NO: 2426473 - RNA, 19 nt, Homo sapiens
  misc_RNA (1)...(19): siRNA sense strand
acaaagaccgagaagggca

SEQ ID NO: 2426474 - RNA, 19 nt, Homo sapiens
  misc_RNA (1)...(19): siRNA sense strand
aagcagugguaaugaucca

SEQ ID NO: 2426475 - RNA, 19 nt, Homo sapiens
  misc_RNA (1)...(19): siRNA sense strand
ccaaaguauaguacaacca

SEQ ID NO: 2426476 - RNA, 19 nt, Homo sapiens
  misc_RNA (1)...(19): siRNA sense strand
gccgcagagaauaaagaua

SEQ ID NO: 2426477 - RNA, 19 nt, Homo sapiens
  misc_RNA (1)...(19): siRNA sense strand
ccgagaagggcauggucca

SEQ ID NO: 2426478 - RNA, 19 nt, Homo sapiens
  misc_RNA (1)...(19): siRNA sense strand
cuguggaggcacuuacaua

SEQ ID NO: 2426479 - RNA, 19 nt, Homo sapiens
  misc_RNA (1)...(19): siRNA sense strand
cuagaagauaagacuguuu

SEQ ID NO: 2426480 - RNA, 19 nt, Homo sapiens
  misc_RNA (1)...(19): siRNA sense strand
guucauccagucagagcaa

SEQ ID NO: 2426481 - RNA, 19 nt, Homo sapiens
  misc_RNA (1)...(19): siRNA sense strand
ggcuagaagauaagacugu

SEQ ID NO: 2426482 - RNA, 19 nt, Homo sapiens
  misc_RNA (1)...(19): siRNA sense strand
gaaccagagaauuacucaa

SEQ ID NO: 2426483 - RNA, 19 nt, Homo sapiens
  misc_RNA (1)...(19): siRNA sense strand
caacaauacgacagggcca

SEQ ID NO: 2426484 - RNA, 19 nt, Homo sapiens
  misc_RNA (1)...(19): siRNA sense strand
gggcauuaagagauugcaa

SEQ ID NO: 2426485 - RNA, 19 nt, Homo sapiens
  misc_RNA (1)...(19): siRNA sense strand
caucaaaaguauugccuca

SEQ ID NO: 2426486 - RNA, 19 nt, Homo sapiens
  misc_RNA (1)...(19): siRNA sense strand
cauauaaucuugaugagga

SEQ ID NO: 2426487 - RNA, 19 nt, Homo sapiens
  misc_RNA (1)...(19): siRNA sense strand
gagaaccgucagagggaga

SEQ ID NO: 2426488 - RNA, 19 nt, Homo sapiens
  misc_RNA (1)...(19): siRNA sense strand
caaguuggaaggagcgcaa

SEQ ID NO: 2426489 - RNA, 19 nt, Homo sapiens
  misc_RNA (1)...(19): siRNA sense strand
agagauugcaagaacguau

SEQ ID NO: 2426490 - RNA, 19 nt, Homo sapiens
  misc_RNA (1)...(19): siRNA sense strand
gaauauugccugaguccca

SEQ ID NO: 2426491 - RNA, 19 nt, Homo sapiens
  misc_RNA (1)...(19): siRNA sense strand
ccucaaaucuccugggcag

SEQ ID NO: 2426492 - RNA, 19 nt, Homo sapiens
  misc_RNA (1)...(19): siRNA sense strand
ccucagaugggguggacaa

SEQ ID NO: 2426493 - RNA, 19 nt, Homo sapiens
  misc_RNA (1)...(19): siRNA sense strand
gagagaaccgucagaggga

SEQ ID NO: 2426494 - RNA, 19 nt, Homo sapiens
  misc_RNA (1)...(19): siRNA sense strand
ccguaagacagguuuaaaa

SEQ ID NO: 2426495 - RNA, 19 nt, Homo sapiens
  misc_RNA (1)...(19): siRNA sense strand
gguuaauuucuccuguaaa

SEQ ID NO: 2426496 - RNA, 19 nt, Homo sapiens
  misc_RNA (1)...(19): siRNA sense strand
accuucacguucagggaaa

SEQ ID NO: 2426497 - RNA, 19 nt, Homo sapiens
  misc_RNA (1)...(19): siRNA sense strand
aggcacagauauaagagca

SEQ ID NO: 2426498 - RNA, 19 nt, Homo sapiens
  misc_RNA (1)...(19): siRNA sense strand
ucuuucagucccagauaaa

SEQ ID NO: 2426499 - RNA, 19 nt, Homo sapiens
  misc_RNA (1)...(19): siRNA sense strand
uuagaaacccgcaggcuga

SEQ ID NO: 2426500 - RNA, 19 nt, Homo sapiens
  misc_RNA (1)...(19): siRNA sense strand
ccagcaaagcaaaagcaaa

SEQ ID NO: 2426501 - RNA, 19 nt, Homo sapiens
  misc_RNA (1)...(19): siRNA sense strand
gauaucaaacagaaggcuu

SEQ ID NO: 2426502 - RNA, 19 nt, Homo sapiens
  misc_RNA (1)...(19): siRNA sense strand
ggauggaagagaaaaguga

SEQ ID NO: 2426503 - RNA, 19 nt, Homo sapiens
  misc_RNA (1)...(19): siRNA sense strand
gugucuacagauaaagcaa

SEQ ID NO: 2426504 - RNA, 19 nt, Homo sapiens
  misc_RNA (1)...(19): siRNA sense strand
cguaugagcuaauggccaa

SEQ ID NO: 2426505 - RNA, 19 nt, Homo sapiens
  misc_RNA (1)...(19): siRNA sense strand
cagucuauacaaagggaua

SEQ ID NO: 2426506 - RNA, 19 nt, Homo sapiens
  misc_RNA (1)...(19): siRNA sense strand
uggccaaacaagugaguga

SEQ ID NO: 2426507 - RNA, 19 nt, Homo sapiens
  misc_RNA (1)...(19): siRNA sense strand
auauagagcuggagaggcu

SEQ ID NO: 2426508 - RNA, 19 nt, Homo sapiens
  misc_RNA (1)...(19): siRNA sense strand
guggcgaagagcagacaua

SEQ ID NO: 2426509 - RNA, 19 nt, Homo sapiens
  misc_RNA (1)...(19): siRNA sense strand
gagugaaggaccugaaaau

SEQ ID NO: 2426510 - RNA, 19 nt, Homo sapiens
  misc_RNA (1)...(19): siRNA sense strand
agcaagaaugauugaguau

SEQ ID NO: 2426511 - RNA, 19 nt, Homo sapiens
  misc_RNA (1)...(19): siRNA sense strand
ggacagcuguggaggguug

SEQ ID NO: 2426512 - RNA, 19 nt, Homo sapiens
  misc_RNA (1)...(19): siRNA sense strand
uuauauugggccagaagaa

SEQ ID NO: 2426513 - RNA, 19 nt, Homo sapiens
  misc_RNA (1)...(19): siRNA sense strand
aagagcagacauacagaaa

SEQ ID NO: 2426514 - RNA, 19 nt, Homo sapiens
  misc_RNA (1)...(19): siRNA sense strand
ggaaacaaguggagugucc

SEQ ID NO: 2426515 - RNA, 19 nt, Homo sapiens
  misc_RNA (1)...(19): siRNA sense strand
cuacagugaacggaagaaa

SEQ ID NO: 2426516 - RNA, 19 nt, Homo sapiens
  misc_RNA (1)...(19): siRNA sense strand
ccuucaagcaauuucuaua

SEQ ID NO: 2426517 - RNA, 19 nt, Homo sapiens
  misc_RNA (1)...(19): siRNA sense strand
agagaaagacagauggaag

SEQ ID NO: 2426518 - RNA, 19 nt, Homo sapiens
  misc_RNA (1)...(19): siRNA sense strand
cgaagaaguccuggcaaaa

SEQ ID NO: 2426519 - RNA, 19 nt, Homo sapiens
  misc_RNA (1)...(19): siRNA sense strand
ccacuuauguguugagcac

SEQ ID NO: 2426520 - RNA, 19 nt, Homo sapiens
  misc_RNA (1)...(19): siRNA sense strand
gccaaacaagugagugaau

SEQ ID NO: 2426521 - RNA, 19 nt, Homo sapiens
  misc_RNA (1)...(19): siRNA sense strand
guguugagcaccagagacu

SEQ ID NO: 2426522 - RNA, 19 nt, Homo sapiens
  misc_RNA (1)...(19): siRNA sense strand
cucacggaauggacggaaa

SEQ ID NO: 2426523 - RNA, 19 nt, Homo sapiens
  misc_RNA (1)...(19): siRNA sense strand
acuuauguguugagcacca

SEQ ID NO: 2426524 - RNA, 19 nt, Homo sapiens
  misc_RNA (1)...(19): siRNA sense strand
ccugaaaaucauauagaga

SEQ ID NO: 2426525 - RNA, 19 nt, Homo sapiens
  misc_RNA (1)...(19): siRNA sense strand
aagaauuuguucaggcguu

SEQ ID NO: 2426526 - RNA, 19 nt, Homo sapiens
  misc_RNA (1)...(19): siRNA sense strand
cagcaauguuugacagcag

SEQ ID NO: 2426527 - RNA, 19 nt, Homo sapiens
  misc_RNA (1)...(19): siRNA sense strand
gccaaagugaagacugcaa

SEQ ID NO: 2426528 - RNA, 19 nt, Homo sapiens
  misc_RNA (1)...(19): siRNA sense strand
gugaaggaccugaaaauca

SEQ ID NO: 2426529 - RNA, 19 nt, Homo sapiens
  misc_RNA (1)...(19): siRNA sense strand
acuccuugauggcgauaau

SEQ ID NO: 2426530 - RNA, 19 nt, Homo sapiens
  misc_RNA (1)...(19): siRNA sense strand
ucuuuaaggucgagccucu

SEQ ID NO: 2426531 - RNA, 19 nt, Homo sapiens
  misc_RNA (1)...(19): siRNA sense strand
ccguaugagcuaauggcca

SEQ ID NO: 2426532 - RNA, 19 nt, Homo sapiens
  misc_RNA (1)...(19): siRNA sense strand
cgggaugaaagaaugauga

SEQ ID NO: 2426533 - RNA, 19 nt, Homo sapiens
  misc_RNA (1)...(19): siRNA sense strand
auauugggccagaagaauu

SEQ ID NO: 2426534 - RNA, 19 nt, Homo sapiens
  misc_RNA (1)...(19): siRNA sense strand
uggaagucuuuaaggucga

SEQ ID NO: 2426535 - RNA, 19 nt, Homo sapiens
  misc_RNA (1)...(19): siRNA sense strand
cagugauggcggagaagaa

SEQ ID NO: 2426536 - RNA, 19 nt, Homo sapiens
  misc_RNA (1)...(19): siRNA sense strand
cuuuaaagaagcaagacaa

SEQ ID NO: 2426537 - RNA, 19 nt, Homo sapiens
  misc_RNA (1)...(19): siRNA sense strand
cggacacgaaagaaggaaa

SEQ ID NO: 2426538 - RNA, 19 nt, Homo sapiens
  misc_RNA (1)...(19): siRNA sense strand
gaagcaagcagaaggcgaa

SEQ ID NO: 2426539 - RNA, 19 nt, Homo sapiens
  misc_RNA (1)...(19): siRNA sense strand
ugaaagagcaauugccaga

SEQ ID NO: 2426540 - RNA, 19 nt, Homo sapiens
  misc_RNA (1)...(19): siRNA sense strand
ugggaaagucagacggaca

SEQ ID NO: 2426541 - RNA, 19 nt, Homo sapiens
  misc_RNA (1)...(19): siRNA sense strand
ugaugauagcacagaagaa

SEQ ID NO: 2426542 - RNA, 19 nt, Homo sapiens
  misc_RNA (1)...(19): siRNA sense strand
cgacuucuucauugggaaa

SEQ ID NO: 2426543 - RNA, 19 nt, Homo sapiens
  misc_RNA (1)...(19): siRNA sense strand
agguugugaagaugagaaa

SEQ ID NO: 2426544 - RNA, 19 nt, Homo sapiens
  misc_RNA (1)...(19): siRNA sense strand
acugaaaacucuaagucaa

SEQ ID NO: 2426545 - RNA, 19 nt, Homo sapiens
  misc_RNA (1)...(19): siRNA sense strand
cugaaaacucuaagucaaa

SEQ ID NO: 2426546 - RNA, 19 nt, Homo sapiens
  misc_RNA (1)...(19): siRNA sense strand
ugugaagaggagaaggaau

SEQ ID NO: 2426547 - RNA, 19 nt, Homo sapiens
  misc_RNA (1)...(19): siRNA sense strand
ggaagcaagcagaaggcga

SEQ ID NO: 2426548 - RNA, 19 nt, Homo sapiens
  misc_RNA (1)...(19): siRNA sense strand
ccuuuaaagaagcaagaca

SEQ ID NO: 2426549 - RNA, 19 nt, Homo sapiens
  misc_RNA (1)...(19): siRNA sense strand
agaagauacaggugaaacu

SEQ ID NO: 2426550 - RNA, 19 nt, Homo sapiens
  misc_RNA (1)...(19): siRNA sense strand
agaaaagaagugaagagaa

SEQ ID NO: 2426551 - RNA, 19 nt, Homo sapiens
  misc_RNA (1)...(19): siRNA sense strand
acaaaauguugcugaaguu

SEQ ID NO: 2426552 - RNA, 19 nt, Homo sapiens
  misc_RNA (1)...(19): siRNA sense strand
ggugaaacucauggggaua

SEQ ID NO: 2426553 - RNA, 19 nt, Homo sapiens
  misc_RNA (1)...(19): siRNA sense strand
aagcagaaggcgaaaagaa

SEQ ID NO: 2426554 - RNA, 19 nt, Homo sapiens
  misc_RNA (1)...(19): siRNA sense strand
ugucaggaguguuggccga

SEQ ID NO: 2426555 - RNA, 19 nt, Homo sapiens
  misc_RNA (1)...(19): siRNA sense strand
aggugaaacucauggggau

SEQ ID NO: 2426556 - RNA, 19 nt, Homo sapiens
  misc_RNA (1)...(19): siRNA sense strand
aagcagugacuauugcaaa

SEQ ID NO: 2426557 - RNA, 19 nt, Homo sapiens
  misc_RNA (1)...(19): siRNA sense strand
cuguacaagccuuuaaaga

SEQ ID NO: 2426558 - RNA, 19 nt, Homo sapiens
  misc_RNA (1)...(19): siRNA sense strand
uaagaagcuaucaggaaga

SEQ ID NO: 2426559 - RNA, 19 nt, Homo sapiens
  misc_RNA (1)...(19): siRNA sense strand
cgaaaagaacagcaaucua

SEQ ID NO: 2426560 - RNA, 19 nt, Homo sapiens
  misc_RNA (1)...(19): siRNA sense strand
agaaugcuucagaggacaa

SEQ ID NO: 2426561 - RNA, 19 nt, Homo sapiens
  misc_RNA (1)...(19): siRNA sense strand
agcagugacuauugcaaau

SEQ ID NO: 2426562 - RNA, 19 nt, Homo sapiens
  misc_RNA (1)...(19): siRNA sense strand
uuaaagaagauacagguga

SEQ ID NO: 2426563 - RNA, 19 nt, Homo sapiens
  misc_RNA (1)...(19): siRNA sense strand
gaguuuuaguuauccgaaa

SEQ ID NO: 2426564 - RNA, 19 nt, Homo sapiens
  misc_RNA (1)...(19): siRNA sense strand
aaagaaugcuucagaggac

SEQ ID NO: 2426565 - RNA, 19 nt, Homo sapiens
  misc_RNA (1)...(19): siRNA sense strand
caaaggaucugauagcuca

SEQ ID NO: 2426566 - RNA, 19 nt, Homo sapiens
  misc_RNA (1)...(19): siRNA sense strand
aaucaagccaaguacagaa

SEQ ID NO: 2426567 - RNA, 19 nt, Homo sapiens
  misc_RNA (1)...(19): siRNA sense strand
aagccagauucuacugcaa

SEQ ID NO: 2426568 - RNA, 19 nt, Homo sapiens
  misc_RNA (1)...(19): siRNA sense strand
agauacaggugaaacucau

SEQ ID NO: 2426569 - RNA, 19 nt, Homo sapiens
  misc_RNA (1)...(19): siRNA sense strand
ggagagaccaccagggaca

SEQ ID NO: 2426570 - RNA, 19 nt, Homo sapiens
  misc_RNA (1)...(19): siRNA sense strand
agaaagaguugguggucca

SEQ ID NO: 2426571 - RNA, 19 nt, Homo sapiens
  misc_RNA (1)...(19): siRNA sense strand
gcucagaggucaaggugcu

SEQ ID NO: 2426572 - RNA, 19 nt, Homo sapiens
  misc_RNA (1)...(19): siRNA sense strand
uggcgaagcucucugggaa

SEQ ID NO: 2426573 - RNA, 19 nt, Homo sapiens
  misc_RNA (1)...(19): siRNA sense strand
cggagaagagacaagguga

SEQ ID NO: 2426574 - RNA, 19 nt, Homo sapiens
  misc_RNA (1)...(19): siRNA sense strand
gcggagaagccgagaaaag

SEQ ID NO: 2426575 - RNA, 19 nt, Homo sapiens
  misc_RNA (1)...(19): siRNA sense strand
cgacaacuucucuggcgaa

SEQ ID NO: 2426576 - RNA, 19 nt, Homo sapiens
  misc_RNA (1)...(19): siRNA sense strand
cuccagaguuugaagccau

SEQ ID NO: 2426577 - RNA, 19 nt, Homo sapiens
  misc_RNA (1)...(19): siRNA sense strand
uaaagaaauuacagcgcaa

SEQ ID NO: 2426578 - RNA, 19 nt, Homo sapiens
  misc_RNA (1)...(19): siRNA sense strand
uugcaguacacgagauaaa

SEQ ID NO: 2426579 - RNA, 19 nt, Homo sapiens
  misc_RNA (1)...(19): siRNA sense strand
ggaaguuacuggaaagcca

SEQ ID NO: 2426580 - RNA, 19 nt, Homo sapiens
  misc_RNA (1)...(19): siRNA sense strand
aggcaagagcaccggcaaa

SEQ ID NO: 2426581 - RNA, 19 nt, Homo sapiens
  misc_RNA (1)...(19): siRNA sense strand
ccuccaacaaauacagaaa

SEQ ID NO: 2426582 - RNA, 19 nt, Homo sapiens
  misc_RNA (1)...(19): siRNA sense strand
cagccaaaauauugagauu

SEQ ID NO: 2426583 - RNA, 19 nt, Homo sapiens
  misc_RNA (1)...(19): siRNA sense strand
aggaaacacaacuaaguaa

SEQ ID NO: 2426584 - RNA, 19 nt, Homo sapiens
  misc_RNA (1)...(19): siRNA sense strand
ccuacaaggaguuggagau

SEQ ID NO: 2426585 - RNA, 19 nt, Homo sapiens
  misc_RNA (1)...(19): siRNA sense strand
agauggaacaaauggaaaa

SEQ ID NO: 2426586 - RNA, 19 nt, Homo sapiens
  misc_RNA (1)...(19): siRNA sense strand
aauuagagacaaugcagaa

SEQ ID NO: 2426587 - RNA, 19 nt, Homo sapiens
  misc_RNA (1)...(19): siRNA sense strand
ggggugaauuagagacaau

SEQ ID NO: 2426588 - RNA, 19 nt, Homo sapiens
  misc_RNA (1)...(19): siRNA sense strand
cagaaaacaaagauggauu

SEQ ID NO: 2426589 - RNA, 19 nt, Homo sapiens
  misc_RNA (1)...(19): siRNA sense strand
cuacaggagaaacuggaaa

SEQ ID NO: 2426590 - RNA, 19 nt, Homo sapiens
  misc_RNA (1)...(19): siRNA sense strand
cggcaaauugagaaagcca

SEQ ID NO: 2426591 - RNA, 19 nt, Homo sapiens
  misc_RNA (1)...(19): siRNA sense strand
uagaagacagacugaacaa

SEQ ID NO: 2426592 - RNA, 19 nt, Homo sapiens
  misc_RNA (1)...(19): siRNA sense strand
ucauuaacacacagaaaca

SEQ ID NO: 2426593 - RNA, 19 nt, Homo sapiens
  misc_RNA (1)...(19): siRNA sense strand
aagauggaacaaauggaaa

SEQ ID NO: 2426594 - RNA, 19 nt, Homo sapiens
  misc_RNA (1)...(19): siRNA sense strand
cuggaaaagucugaaaaua

SEQ ID NO: 2426595 - RNA, 19 nt, Homo sapiens
  misc_RNA (1)...(19): siRNA sense strand
uguacgaagaaguugagaa

SEQ ID NO: 2426596 - RNA, 19 nt, Homo sapiens
  misc_RNA (1)...(19): siRNA sense strand
aaguacagaaagaccuaaa

SEQ ID NO: 2426597 - RNA, 19 nt, Homo sapiens
  misc_RNA (1)...(19): siRNA sense strand
gaaaagaccaccugggcca

SEQ ID NO: 2426598 - RNA, 19 nt, Homo sapiens
  misc_RNA (1)...(19): siRNA sense strand
cagacaauaaccaagaaaa

SEQ ID NO: 2426599 - RNA, 19 nt, Homo sapiens
  misc_RNA (1)...(19): siRNA sense strand
agaccaaauaagagcucga

SEQ ID NO: 2426600 - RNA, 19 nt, Homo sapiens
  misc_RNA (1)...(19): siRNA sense strand
acagaaacaggaaacacaa

SEQ ID NO: 2426601 - RNA, 19 nt, Homo sapiens
  misc_RNA (1)...(19): siRNA sense strand
ccaaacacccagagagguc

SEQ ID NO: 2426602 - RNA, 19 nt, Homo sapiens
  misc_RNA (1)...(19): siRNA sense strand
gcuagaagacagacugaac

SEQ ID NO: 2426603 - RNA, 19 nt, Homo sapiens
  misc_RNA (1)...(19): siRNA sense strand
ccaagaaaagaaaguaaga

SEQ ID NO: 2426604 - RNA, 19 nt, Homo sapiens
  misc_RNA (1)...(19): siRNA sense strand
aggaacuaacuuugcagua

SEQ ID NO: 2426605 - RNA, 19 nt, Homo sapiens
  misc_RNA (1)...(19): siRNA sense strand
ucaaacaccuacaaggagu

SEQ ID NO: 2426606 - RNA, 19 nt, Homo sapiens
  misc_RNA (1)...(19): siRNA sense strand
cacagaaacaggaaacaca

SEQ ID NO: 2426607 - RNA, 19 nt, Homo sapiens
  misc_RNA (1)...(19): siRNA sense strand
gaauuagagacaaugcaga

SEQ ID NO: 2426608 - RNA, 19 nt, Homo sapiens
  misc_RNA (1)...(19): siRNA sense strand
aagaaauuacagcgcaaga

SEQ ID NO: 2426609 - RNA, 19 nt, Homo sapiens
  misc_RNA (1)...(19): siRNA sense strand
gaaacaaacauaaagggaa

SEQ ID NO: 2426610 - RNA, 19 nt, Homo sapiens
  misc_RNA (1)...(19): siRNA sense strand
aggcaaaggaagaugaaaa

SEQ ID NO: 2426611 - RNA, 19 nt, Homo sapiens
  misc_RNA (1)...(19): siRNA sense strand
agaagaaagaacaggaaga

SEQ ID NO: 2426612 - RNA, 19 nt, Homo sapiens
  misc_RNA (1)...(19): siRNA sense strand
agaggaacaaagaaagaaa

SEQ ID NO: 2426613 - RNA, 19 nt, Homo sapiens
  misc_RNA (1)...(19): siRNA sense strand
aaacaaacauaaagggaag

SEQ ID NO: 2426614 - RNA, 19 nt, Homo sapiens
  misc_RNA (1)...(19): siRNA sense strand
uguaaaggugagaaacaaa

SEQ ID NO: 2426615 - RNA, 19 nt, Homo sapiens
  misc_RNA (1)...(19): siRNA sense strand
aaacauaaagggaagccaa

SEQ ID NO: 2426616 - RNA, 19 nt, Homo sapiens
  misc_RNA (1)...(19): siRNA sense strand
aauaaugaguugagugcca

SEQ ID NO: 2426617 - RNA, 19 nt, Homo sapiens
  misc_RNA (1)...(19): siRNA sense strand
aggaauacagagaagagua

SEQ ID NO: 2426618 - RNA, 19 nt, Homo sapiens
  misc_RNA (1)...(19): siRNA sense strand
aaagaagagcagagguuga

SEQ ID NO: 2426619 - RNA, 19 nt, Homo sapiens
  misc_RNA (1)...(19): siRNA sense strand
agagaaaugauggaagaaa

SEQ ID NO: 2426620 - RNA, 19 nt, Homo sapiens
  misc_RNA (1)...(19): siRNA sense strand
aaacaaagaagacuggcaa

SEQ ID NO: 2426621 - RNA, 19 nt, Homo sapiens
  misc_RNA (1)...(19): siRNA sense strand
aggaaaacagaaagagcaa

SEQ ID NO: 2426622 - RNA, 19 nt, Homo sapiens
  misc_RNA (1)...(19): siRNA sense strand
gcuaauuaaagaagagaag

SEQ ID NO: 2426623 - RNA, 19 nt, Homo sapiens
  misc_RNA (1)...(19): siRNA sense strand
agaaagaacgccagcgcca

SEQ ID NO: 2426624 - RNA, 19 nt, Homo sapiens
  misc_RNA (1)...(19): siRNA sense strand
aggaacaaagaaagaaaca

SEQ ID NO: 2426625 - RNA, 19 nt, Homo sapiens
  misc_RNA (1)...(19): siRNA sense strand
gaggauaaucaaaagcaaa

SEQ ID NO: 2426626 - RNA, 19 nt, Homo sapiens
  misc_RNA (1)...(19): siRNA sense strand
uggaagaaacagaaaagua

SEQ ID NO: 2426627 - RNA, 19 nt, Homo sapiens
  misc_RNA (1)...(19): siRNA sense strand
gcuuuggguaauucagaaa

SEQ ID NO: 2426628 - RNA, 19 nt, Homo sapiens
  misc_RNA (1)...(19): siRNA sense strand
agauagacaggcaaaggaa

SEQ ID NO: 2426629 - RNA, 19 nt, Homo sapiens
  misc_RNA (1)...(19): siRNA sense strand
aguuaaaggaaaaggcaga

SEQ ID NO: 2426630 - RNA, 19 nt, Homo sapiens
  misc_RNA (1)...(19): siRNA sense strand
ugcuagaagaauuggaaaa

SEQ ID NO: 2426631 - RNA, 19 nt, Homo sapiens
  misc_RNA (1)...(19): siRNA sense strand
ucagcaaacaggagggcga

SEQ ID NO: 2426632 - RNA, 19 nt, Homo sapiens
  misc_RNA (1)...(19): siRNA sense strand
aguuauacccagcagaaga

SEQ ID NO: 2426633 - RNA, 19 nt, Homo sapiens
  misc_RNA (1)...(19): siRNA sense strand
auagacaggcaaaggaaga

SEQ ID NO: 2426634 - RNA, 19 nt, Homo sapiens
  misc_RNA (1)...(19): siRNA sense strand
gguaauucagaaacagaga

SEQ ID NO: 2426635 - RNA, 19 nt, Homo sapiens
  misc_RNA (1)...(19): siRNA sense strand
gcgacaaggugccugggau

SEQ ID NO: 2426636 - RNA, 19 nt, Homo sapiens
  misc_RNA (1)...(19): siRNA sense strand
acaaagaagacuggcaaaa

SEQ ID NO: 2426637 - RNA, 19 nt, Homo sapiens
  misc_RNA (1)...(19): siRNA sense strand
cgacaaggugccugggaug

SEQ ID NO: 2426638 - RNA, 19 nt, Homo sapiens
  misc_RNA (1)...(19): siRNA sense strand
uuuguaaaggugagaaaca

SEQ ID NO: 2426639 - RNA, 19 nt, Homo sapiens
  misc_RNA (1)...(19): siRNA sense strand
agaaacaaacauaaaggga

SEQ ID NO: 2426640 - RNA, 19 nt, Homo sapiens
  misc_RNA (1)...(19): siRNA sense strand
cauaaagggaagccaacau

SEQ ID NO: 2426641 - RNA, 19 nt, Homo sapiens
  misc_RNA (1)...(19): siRNA sense strand
uggcucuagaagaaagaaa

SEQ ID NO: 2426642 - RNA, 19 nt, Homo sapiens
  misc_RNA (1)...(19): siRNA sense strand
ccaguuaaaagaagaagaa

SEQ ID NO: 2426643 - RNA, 19 nt, Homo sapiens
  misc_RNA (1)...(19): siRNA sense strand
cagagcaaucucaagcaaa

SEQ ID NO: 2426644 - RNA, 19 nt, Homo sapiens
  misc_RNA (1)...(19): siRNA sense strand
agacaaaguaacaccaagu

SEQ ID NO: 2426645 - RNA, 19 nt, Homo sapiens
  misc_RNA (1)...(19): siRNA sense strand
ggaaaaugcagaaaaggca

SEQ ID NO: 2426646 - RNA, 19 nt, Homo sapiens
  misc_RNA (1)...(19): siRNA sense strand
agccaacauuuauggaaga

SEQ ID NO: 2426647 - RNA, 19 nt, Homo sapiens
  misc_RNA (1)...(19): siRNA sense strand
cagagaaaugauggaagaa

SEQ ID NO: 2426648 - RNA, 19 nt, Homo sapiens
  misc_RNA (1)...(19): siRNA sense strand
uuaaagaagagaagacaac

SEQ ID NO: 2426649 - RNA, 19 nt, Homo sapiens
  misc_RNA (1)...(19): siRNA sense strand
aggugagaaacaaacauaa

SEQ ID NO: 2426650 - RNA, 19 nt, Homo sapiens
  misc_RNA (1)...(19): siRNA sense strand
caguugaagcuuggaagaa

SEQ ID NO: 2426651 - RNA, 19 nt, Homo sapiens
  misc_RNA (1)...(19): siRNA sense strand
aacaaagaagacuggcaaa

SEQ ID NO: 2426652 - RNA, 19 nt, Homo sapiens
  misc_RNA (1)...(19): siRNA sense strand
uguaaagaaacuucagcau

SEQ ID NO: 2426653 - RNA, 19 nt, Homo sapiens
  misc_RNA (1)...(19): siRNA sense strand
ucagaaacagagaaagcuu

SEQ ID NO: 2426654 - RNA, 19 nt, Homo sapiens
  misc_RNA (1)...(19): siRNA sense strand
gaagaugaaaagucacaaa

SEQ ID NO: 2426655 - RNA, 19 nt, Homo sapiens
  misc_RNA (1)...(19): siRNA sense strand
aaccuggagacaaggaaua

SEQ ID NO: 2426656 - RNA, 19 nt, Homo sapiens
  misc_RNA (1)...(19): siRNA sense strand
aagaaagaacaggaagaau

SEQ ID NO: 2426657 - RNA, 19 nt, Homo sapiens
  misc_RNA (1)...(19): siRNA sense strand
ugaaaaggagauaagggaa

SEQ ID NO: 2426658 - RNA, 19 nt, Homo sapiens
  misc_RNA (1)...(19): siRNA sense strand
augcagaaaaggcagaaaa

SEQ ID NO: 2426659 - RNA, 19 nt, Homo sapiens
  misc_RNA (1)...(19): siRNA sense strand
cagcaggaaaacagaaaga

SEQ ID NO: 2426660 - RNA, 19 nt, Homo sapiens
  misc_RNA (1)...(19): siRNA sense strand
aggcaaguuaggagauaaa

SEQ ID NO: 2426661 - RNA, 19 nt, Homo sapiens
  misc_RNA (1)...(19): siRNA sense strand
agaacugggcagaaggcaa

SEQ ID NO: 2426662 - RNA, 19 nt, Homo sapiens
  misc_RNA (1)...(19): siRNA sense strand
gcucgaugucacagccaaa

SEQ ID NO: 2426663 - RNA, 19 nt, Homo sapiens
  misc_RNA (1)...(19): siRNA sense strand
gagccaaaccucaccgcaa

SEQ ID NO: 2426664 - RNA, 19 nt, Homo sapiens
  misc_RNA (1)...(19): siRNA sense strand
aggacaagagugagaacca

SEQ ID NO: 2426665 - RNA, 19 nt, Homo sapiens
  misc_RNA (1)...(19): siRNA sense strand
cuugcaggauggcaggaaa

SEQ ID NO: 2426666 - RNA, 19 nt, Homo sapiens
  misc_RNA (1)...(19): siRNA sense strand
cagaaggcaaguuaggaga

SEQ ID NO: 2426667 - RNA, 19 nt, Homo sapiens
  misc_RNA (1)...(19): siRNA sense strand
cgccagucauccugcacaa

SEQ ID NO: 2426668 - RNA, 19 nt, Homo sapiens
  misc_RNA (1)...(19): siRNA sense strand
gcacgaugaccuugcagga

SEQ ID NO: 2426669 - RNA, 19 nt, Homo sapiens
  misc_RNA (1)...(19): siRNA sense strand
ccaugucuacagaggguuu

SEQ ID NO: 2426670 - RNA, 19 nt, Homo sapiens
  misc_RNA (1)...(19): siRNA sense strand
ggaugagaacugggcagaa

SEQ ID NO: 2426671 - RNA, 19 nt, Homo sapiens
  misc_RNA (1)...(19): siRNA sense strand
aguacaaugacgugguuaa

SEQ ID NO: 2426672 - RNA, 19 nt, Homo sapiens
  misc_RNA (1)...(19): siRNA sense strand
gcauguuagcagagcagaa

SEQ ID NO: 2426673 - RNA, 19 nt, Homo sapiens
  misc_RNA (1)...(19): siRNA sense strand
auagauuucaagaggaaga

SEQ ID NO: 2426674 - RNA, 19 nt, Homo sapiens
  misc_RNA (1)...(19): siRNA sense strand
aaacagaagcagcucgaga

SEQ ID NO: 2426675 - RNA, 19 nt, Homo sapiens
  misc_RNA (1)...(19): siRNA sense strand
gaguauugaaacagagaag

SEQ ID NO: 2426676 - RNA, 19 nt, Homo sapiens
  misc_RNA (1)...(19): siRNA sense strand
ucagcaacugguaaagaaa

SEQ ID NO: 2426677 - RNA, 19 nt, Homo sapiens
  misc_RNA (1)...(19): siRNA sense strand
gagcagaagugcccggauc

SEQ ID NO: 2426678 - RNA, 19 nt, Homo sapiens
  misc_RNA (1)...(19): siRNA sense strand
ggucaugcaaacagaagca

SEQ ID NO: 2426679 - RNA, 19 nt, Homo sapiens
  misc_RNA (1)...(19): siRNA sense strand
ugguucagcaacugguaaa

SEQ ID NO: 2426680 - RNA, 19 nt, Homo sapiens
  misc_RNA (1)...(19): siRNA sense strand
auuucaagaggaagaagua

SEQ ID NO: 2426681 - RNA, 19 nt, Homo sapiens
  misc_RNA (1)...(19): siRNA sense strand
ucaaaugcauguuagcaga

SEQ ID NO: 2426682 - RNA, 19 nt, Homo sapiens
  misc_RNA (1)...(19): siRNA sense strand
gcaaacagaagcagcucga

SEQ ID NO: 2426683 - RNA, 19 nt, Homo sapiens
  misc_RNA (1)...(19): siRNA sense strand
gcagaacacucaaggacug

SEQ ID NO: 2426684 - RNA, 19 nt, Homo sapiens
  misc_RNA (1)...(19): siRNA sense strand
agcaugaggauaaggauca

SEQ ID NO: 2426685 - RNA, 19 nt, Homo sapiens
  misc_RNA (1)...(19): siRNA sense strand
aguaugaggaagaggaaga

SEQ ID NO: 2426686 - RNA, 19 nt, Homo sapiens
  misc_RNA (1)...(19): siRNA sense strand
aggaagaggaagauguaga

SEQ ID NO: 2426687 - RNA, 19 nt, Homo sapiens
  misc_RNA (1)...(19): siRNA sense strand
aggaguugccagucgauaa

SEQ ID NO: 2426688 - RNA, 19 nt, Homo sapiens
  misc_RNA (1)...(19): siRNA sense strand
aggcuggagcugugccaaa

SEQ ID NO: 2426689 - RNA, 19 nt, Homo sapiens
  misc_RNA (1)...(19): siRNA sense strand
ucgauaagcugaaaggugu

SEQ ID NO: 2426690 - RNA, 19 nt, Homo sapiens
  misc_RNA (1)...(19): siRNA sense strand
aauaaucuggaaugggaaa

SEQ ID NO: 2426691 - RNA, 19 nt, Homo sapiens
  misc_RNA (1)...(19): siRNA sense strand
aggagcaacgagagaaaca

SEQ ID NO: 2426692 - RNA, 19 nt, Homo sapiens
  misc_RNA (1)...(19): siRNA sense strand
auaguaaaguccaggccau

SEQ ID NO: 2426693 - RNA, 19 nt, Homo sapiens
  misc_RNA (1)...(19): siRNA sense strand
caauaaucuggaaugggaa

SEQ ID NO: 2426694 - RNA, 19 nt, Homo sapiens
  misc_RNA (1)...(19): siRNA sense strand
ucaauaaucuggaauggga

SEQ ID NO: 2426695 - RNA, 19 nt, Homo sapiens
  misc_RNA (1)...(19): siRNA sense strand
ucguaacgccacaaggaau

SEQ ID NO: 2426696 - RNA, 19 nt, Homo sapiens
  misc_RNA (1)...(19): siRNA sense strand
gagaugucuaauaaagcua

SEQ ID NO: 2426697 - RNA, 19 nt, Homo sapiens
  misc_RNA (1)...(19): siRNA sense strand
uguagaaaccggagccagu

SEQ ID NO: 2426698 - RNA, 19 nt, Homo sapiens
  misc_RNA (1)...(19): siRNA sense strand
gcccaggagcaacgagaga

SEQ ID NO: 2426699 - RNA, 19 nt, Homo sapiens
  misc_RNA (1)...(19): siRNA sense strand
cuagaauaccuaaaggagu

SEQ ID NO: 2426700 - RNA, 19 nt, Homo sapiens
  misc_RNA (1)...(19): siRNA sense strand
gugcagagguagagcaggu

SEQ ID NO: 2426701 - RNA, 19 nt, Homo sapiens
  misc_RNA (1)...(19): siRNA sense strand
agguagagcaggugcacuu

SEQ ID NO: 2426702 - RNA, 19 nt, Homo sapiens
  misc_RNA (1)...(19): siRNA sense strand
cgaagaugcucguugcuga

SEQ ID NO: 2426703 - RNA, 19 nt, Homo sapiens
  misc_RNA (1)...(19): siRNA sense strand
gggugaagagcuuggggaa

SEQ ID NO: 2426704 - RNA, 19 nt, Homo sapiens
  misc_RNA (1)...(19): siRNA sense strand
gugaaguugccgauggaca

SEQ ID NO: 2426705 - RNA, 19 nt, Homo sapiens
  misc_RNA (1)...(19): siRNA sense strand
ggaggaaaucagugcggaa

SEQ ID NO: 2426706 - RNA, 19 nt, Homo sapiens
  misc_RNA (1)...(19): siRNA sense strand
cugaggaagaauacagaaa

SEQ ID NO: 2426707 - RNA, 19 nt, Homo sapiens
  misc_RNA (1)...(19): siRNA sense strand
cuugaucaguugaggaaaa

SEQ ID NO: 2426708 - RNA, 19 nt, Homo sapiens
  misc_RNA (1)...(19): siRNA sense strand
gaaaccagacagaggguca

SEQ ID NO: 2426709 - RNA, 19 nt, Homo sapiens
  misc_RNA (1)...(19): siRNA sense strand
ccaagaagcggcuggcaga

SEQ ID NO: 2426710 - RNA, 19 nt, Homo sapiens
  misc_RNA (1)...(19): siRNA sense strand
ggaggagagaggagaggga

SEQ ID NO: 2426711 - RNA, 19 nt, Homo sapiens
  misc_RNA (1)...(19): siRNA sense strand
uggcagaaacacaggagga

SEQ ID NO: 2426712 - RNA, 19 nt, Homo sapiens
  misc_RNA (1)...(19): siRNA sense strand
caggaucgcuugaggagga

SEQ ID NO: 2426713 - RNA, 19 nt, Homo sapiens
  misc_RNA (1)...(19): siRNA sense strand
aaaagcaggagaagagaaa

SEQ ID NO: 2426714 - RNA, 19 nt, Homo sapiens
  misc_RNA (1)...(19): siRNA sense strand
aauuagaugcaauggauca

SEQ ID NO: 2426715 - RNA, 19 nt, Homo sapiens
  misc_RNA (1)...(19): siRNA sense strand
gcugaaugugaucggagaa

SEQ ID NO: 2426716 - RNA, 19 nt, Homo sapiens
  misc_RNA (1)...(19): siRNA sense strand
gcagauuaugagauugcaa

SEQ ID NO: 2426717 - RNA, 19 nt, Homo sapiens
  misc_RNA (1)...(19): siRNA sense strand
cugaagguaauguggauga

SEQ ID NO: 2426718 - RNA, 19 nt, Homo sapiens
  misc_RNA (1)...(19): siRNA sense strand
aagcaggagaagagaaauc

SEQ ID NO: 2426719 - RNA, 19 nt, Homo sapiens
  misc_RNA (1)...(19): siRNA sense strand
ggacggagacgaaaccaga

SEQ ID NO: 2426720 - RNA, 19 nt, Homo sapiens
  misc_RNA (1)...(19): siRNA sense strand
ggaaguuucugcaaaggca

SEQ ID NO: 2426721 - RNA, 19 nt, Homo sapiens
  misc_RNA (1)...(19): siRNA sense strand
agagaaaucaggaucgcuu

SEQ ID NO: 2426722 - RNA, 19 nt, Homo sapiens
  misc_RNA (1)...(19): siRNA sense strand
gagaagagaaaucaggauc

SEQ ID NO: 2426723 - RNA, 19 nt, Homo sapiens
  misc_RNA (1)...(19): siRNA sense strand
aggagagaggagagggaac

SEQ ID NO: 2426724 - RNA, 19 nt, Homo sapiens
  misc_RNA (1)...(19): siRNA sense strand
ccgggaccgaagugcgaaa

SEQ ID NO: 2426725 - RNA, 19 nt, Homo sapiens
  misc_RNA (1)...(19): siRNA sense strand
uugcaaguaaagaaagaga

SEQ ID NO: 2426726 - RNA, 19 nt, Homo sapiens
  misc_RNA (1)...(19): siRNA sense strand
ggaggaaaucagugcggaa

SEQ ID NO: 2426727 - RNA, 19 nt, Homo sapiens
  misc_RNA (1)...(19): siRNA sense strand
cugaggaagaauacagaaa

SEQ ID NO: 2426728 - RNA, 19 nt, Homo sapiens
  misc_RNA (1)...(19): siRNA sense strand
cuugaucaguugaggaaaa

SEQ ID NO: 2426729 - RNA, 19 nt, Homo sapiens
  misc_RNA (1)...(19): siRNA sense strand
gaaaccagacagaggguca

SEQ ID NO: 2426730 - RNA, 19 nt, Homo sapiens
  misc_RNA (1)...(19): siRNA sense strand
ccaagaagcggcuggcaga

SEQ ID NO: 2426731 - RNA, 19 nt, Homo sapiens
  misc_RNA (1)...(19): siRNA sense strand
ggaggagagaggagaggga

SEQ ID NO: 2426732 - RNA, 19 nt, Homo sapiens
  misc_RNA (1)...(19): siRNA sense strand
uggcagaaacacaggagga

SEQ ID NO: 2426733 - RNA, 19 nt, Homo sapiens
  misc_RNA (1)...(19): siRNA sense strand
caggaucgcuugaggagga

SEQ ID NO: 2426734 - RNA, 19 nt, Homo sapiens
  misc_RNA (1)...(19): siRNA sense strand
aaaagcaggagaagagaaa

SEQ ID NO: 2426735 - RNA, 19 nt, Homo sapiens
  misc_RNA (1)...(19): siRNA sense strand
aauuagaugcaauggauca

SEQ ID NO: 2426736 - RNA, 19 nt, Homo sapiens
  misc_RNA (1)...(19): siRNA sense strand
gcugaaugugaucggagaa

SEQ ID NO: 2426737 - RNA, 19 nt, Homo sapiens
  misc_RNA (1)...(19): siRNA sense strand
gcagauuaugagauugcaa

SEQ ID NO: 2426738 - RNA, 19 nt, Homo sapiens
  misc_RNA (1)...(19): siRNA sense strand
cugaagguaauguggauga

SEQ ID NO: 2426739 - RNA, 19 nt, Homo sapiens
  misc_RNA (1)...(19): siRNA sense strand
aagcaggagaagagaaauc

SEQ ID NO: 2426740 - RNA, 19 nt, Homo sapiens
  misc_RNA (1)...(19): siRNA sense strand
ggacggagacgaaaccaga

SEQ ID NO: 2426741 - RNA, 19 nt, Homo sapiens
  misc_RNA (1)...(19): siRNA sense strand
ggaaguuucugcaaaggca

SEQ ID NO: 2426742 - RNA, 19 nt, Homo sapiens
  misc_RNA (1)...(19): siRNA sense strand
agagaaaucaggaucgcuu

SEQ ID NO: 2426743 - RNA, 19 nt, Homo sapiens
  misc_RNA (1)...(19): siRNA sense strand
gagaagagaaaucaggauc

SEQ ID NO: 2426744 - RNA, 19 nt, Homo sapiens
  misc_RNA (1)...(19): siRNA sense strand
aggagagaggagagggaac

SEQ ID NO: 2426745 - RNA, 19 nt, Homo sapiens
  misc_RNA (1)...(19): siRNA sense strand
ccgggaccgaagugcgaaa

SEQ ID NO: 2426746 - RNA, 19 nt, Homo sapiens
  misc_RNA (1)...(19): siRNA sense strand
uugcaaguaaagaaagaga

SEQ ID NO: 2426747 - RNA, 19 nt, Homo sapiens
  misc_RNA (1)...(19): siRNA sense strand
gaggagagccagaagccaa

SEQ ID NO: 2426748 - RNA, 19 nt, Homo sapiens
  misc_RNA (1)...(19): siRNA sense strand
auaucaaaccagagcacua

SEQ ID NO: 2426749 - RNA, 19 nt, Homo sapiens
  misc_RNA (1)...(19): siRNA sense strand
aagauuaggugaagggugu

SEQ ID NO: 2426750 - RNA, 19 nt, Homo sapiens
  misc_RNA (1)...(19): siRNA sense strand
gaucaagaggagagccaga

SEQ ID NO: 2426751 - RNA, 19 nt, Homo sapiens
  misc_RNA (1)...(19): siRNA sense strand
augaagaaaagcaggauaa

SEQ ID NO: 2426752 - RNA, 19 nt, Homo sapiens
  misc_RNA (1)...(19): siRNA sense strand
ggaaacaagagacuggcaa

SEQ ID NO: 2426753 - RNA, 19 nt, Homo sapiens
  misc_RNA (1)...(19): siRNA sense strand
gggucaacuggaaggauau

SEQ ID NO: 2426754 - RNA, 19 nt, Homo sapiens
  misc_RNA (1)...(19): siRNA sense strand
acugaaggaauuagaugaa

SEQ ID NO: 2426755 - RNA, 19 nt, Homo sapiens
  misc_RNA (1)...(19): siRNA sense strand
gaaaagcaggauaaggaaa

SEQ ID NO: 2426756 - RNA, 19 nt, Homo sapiens
  misc_RNA (1)...(19): siRNA sense strand
gaaaggagcuguucccaca

SEQ ID NO: 2426757 - RNA, 19 nt, Homo sapiens
  misc_RNA (1)...(19): siRNA sense strand
aaacagaaacaaugggaag

SEQ ID NO: 2426758 - RNA, 19 nt, Homo sapiens
  misc_RNA (1)...(19): siRNA sense strand
ccaauaucuaaacgacaaa

SEQ ID NO: 2426759 - RNA, 19 nt, Homo sapiens
  misc_RNA (1)...(19): siRNA sense strand
aaaagcaggauaaggaaaa

SEQ ID NO: 2426760 - RNA, 19 nt, Homo sapiens
  misc_RNA (1)...(19): siRNA sense strand
aggugaagggugugaacca

SEQ ID NO: 2426761 - RNA, 19 nt, Homo sapiens
  misc_RNA (1)...(19): siRNA sense strand
gugugaaccaauaucuaaa

SEQ ID NO: 2426762 - RNA, 19 nt, Homo sapiens
  misc_RNA (1)...(19): siRNA sense strand
caaacaaaagcgaaaagaa

SEQ ID NO: 2426763 - RNA, 19 nt, Homo sapiens
  misc_RNA (1)...(19): siRNA sense strand
uagaugaaucaaaggccua

SEQ ID NO: 2426764 - RNA, 19 nt, Homo sapiens
  misc_RNA (1)...(19): siRNA sense strand
ugaugguauuaaaggacau

SEQ ID NO: 2426765 - RNA, 19 nt, Homo sapiens
  misc_RNA (1)...(19): siRNA sense strand
gggaagagcaacgggaacu

SEQ ID NO: 2426766 - RNA, 19 nt, Homo sapiens
  misc_RNA (1)...(19): siRNA sense strand
ucauaaagaaagaagaccu

SEQ ID NO: 2426767 - RNA, 19 nt, Homo sapiens
  misc_RNA (1)...(19): siRNA sense strand
aaaugaagaucaagaggag

SEQ ID NO: 2426768 - RNA, 19 nt, Homo sapiens
  misc_RNA (1)...(19): siRNA sense strand
gaggaauauagcagaaaug

SEQ ID NO: 2426769 - RNA, 19 nt, Homo sapiens
  misc_RNA (1)...(19): siRNA sense strand
aaccaaacucagauggaca

SEQ ID NO: 2426770 - RNA, 19 nt, Homo sapiens
  misc_RNA (1)...(19): siRNA sense strand
ucugaaauguugccagcau

SEQ ID NO: 2426771 - RNA, 19 nt, Homo sapiens
  misc_RNA (1)...(19): siRNA sense strand
aagaaaagcaggauaagga

SEQ ID NO: 2426772 - RNA, 19 nt, Homo sapiens
  misc_RNA (1)...(19): siRNA sense strand
aggcaaaucucauaggcaa

SEQ ID NO: 2426773 - RNA, 19 nt, Homo sapiens
  misc_RNA (1)...(19): siRNA sense strand
ucacaaggauguuaggcaa

SEQ ID NO: 2426774 - RNA, 19 nt, Homo sapiens
  misc_RNA (1)...(19): siRNA sense strand
gccuggaaguggagagaca

SEQ ID NO: 2426775 - RNA, 19 nt, Homo sapiens
  misc_RNA (1)...(19): siRNA sense strand
cccuauauuuacagaggaa

SEQ ID NO: 2426776 - RNA, 19 nt, Homo sapiens
  misc_RNA (1)...(19): siRNA sense strand
uggagaagcuggaggugga

SEQ ID NO: 2426777 - RNA, 19 nt, Homo sapiens
  misc_RNA (1)...(19): siRNA sense strand
acaugaaggaacuggaaca

SEQ ID NO: 2426778 - RNA, 19 nt, Homo sapiens
  misc_RNA (1)...(19): siRNA sense strand
aggaagaaagaggaagaaa

SEQ ID NO: 2426779 - RNA, 19 nt, Homo sapiens
  misc_RNA (1)...(19): siRNA sense strand
gcaacgaaguaaacgagga

SEQ ID NO: 2426780 - RNA, 19 nt, Homo sapiens
  misc_RNA (1)...(19): siRNA sense strand
uggaguuugaggagaggaa

SEQ ID NO: 2426781 - RNA, 19 nt, Homo sapiens
  misc_RNA (1)...(19): siRNA sense strand
caaaugcagcagaaggcaa

SEQ ID NO: 2426782 - RNA, 19 nt, Homo sapiens
  misc_RNA (1)...(19): siRNA sense strand
agaugagcaacgaaguaaa

SEQ ID NO: 2426783 - RNA, 19 nt, Homo sapiens
  misc_RNA (1)...(19): siRNA sense strand
gaggcaugaagaugagcaa

SEQ ID NO: 2426784 - RNA, 19 nt, Homo sapiens
  misc_RNA (1)...(19): siRNA sense strand
ggaccgucagaaaggcaaa

SEQ ID NO: 2426785 - RNA, 19 nt, Homo sapiens
  misc_RNA (1)...(19): siRNA sense strand
aaacagagguaaaggaacg

SEQ ID NO: 2426786 - RNA, 19 nt, Homo sapiens
  misc_RNA (1)...(19): siRNA sense strand
gaagacgguuccaaggaga

SEQ ID NO: 2426787 - RNA, 19 nt, Homo sapiens
  misc_RNA (1)...(19): siRNA sense strand
uugaugaagcagacagaga

SEQ ID NO: 2426788 - RNA, 19 nt, Homo sapiens
  misc_RNA (1)...(19): siRNA sense strand
agcuacaguucgagaaguu

SEQ ID NO: 2426789 - RNA, 19 nt, Homo sapiens
  misc_RNA (1)...(19): siRNA sense strand
aggcaaugaauggaguaaa

SEQ ID NO: 2426790 - RNA, 19 nt, Homo sapiens
  misc_RNA (1)...(19): siRNA sense strand
caugaaugagcgucgagaa

SEQ ID NO: 2426791 - RNA, 19 nt, Homo sapiens
  misc_RNA (1)...(19): siRNA sense strand
gagaguaaugaucuggcua

SEQ ID NO: 2426792 - RNA, 19 nt, Homo sapiens
  misc_RNA (1)...(19): siRNA sense strand
agagauaaggagcguuaca

SEQ ID NO: 2426793 - RNA, 19 nt, Homo sapiens
  misc_RNA (1)...(19): siRNA sense strand
aggagaaggugaaggagca

SEQ ID NO: 2426794 - RNA, 19 nt, Homo sapiens
  misc_RNA (1)...(19): siRNA sense strand
aggaagaaggcgagaagca

SEQ ID NO: 2426795 - RNA, 19 nt, Homo sapiens
  misc_RNA (1)...(19): siRNA sense strand
gugaaaggcugaaaggcca

SEQ ID NO: 2426796 - RNA, 19 nt, Homo sapiens
  misc_RNA (1)...(19): siRNA sense strand
cgguugcaguggaggagaa

SEQ ID NO: 2426797 - RNA, 19 nt, Homo sapiens
  misc_RNA (1)...(19): siRNA sense strand
aagcggacucagagggcua

SEQ ID NO: 2426798 - RNA, 19 nt, Homo sapiens
  misc_RNA (1)...(19): siRNA sense strand
caguggaggagaaggugaa

SEQ ID NO: 2426799 - RNA, 19 nt, Homo sapiens
  misc_RNA (1)...(19): siRNA sense strand
gaagaggcguugcggcgaa

SEQ ID NO: 2426800 - RNA, 19 nt, Homo sapiens
  misc_RNA (1)...(19): siRNA sense strand
ucaagagagauguggccaa

SEQ ID NO: 2426801 - RNA, 19 nt, Homo sapiens
  misc_RNA (1)...(19): siRNA sense strand
uggccaagaagcuggagaa

SEQ ID NO: 2426802 - RNA, 19 nt, Homo sapiens
  misc_RNA (1)...(19): siRNA sense strand
ggcuagaggaagaggcguu

SEQ ID NO: 2426803 - RNA, 19 nt, Homo sapiens
  misc_RNA (1)...(19): siRNA sense strand
ggcugaaaggccaggaaga

SEQ ID NO: 2426804 - RNA, 19 nt, Homo sapiens
  misc_RNA (1)...(19): siRNA sense strand
gaagaaggcgagaagcaca

SEQ ID NO: 2426805 - RNA, 19 nt, Homo sapiens
  misc_RNA (1)...(19): siRNA sense strand
ggaacuaugucccggagga

SEQ ID NO: 2426806 - RNA, 19 nt, Homo sapiens
  misc_RNA (1)...(19): siRNA sense strand
ggccaagaagcuggagaaa

SEQ ID NO: 2426807 - RNA, 19 nt, Homo sapiens
  misc_RNA (1)...(19): siRNA sense strand
aggaagauggggagccaaa

SEQ ID NO: 2426808 - RNA, 19 nt, Homo sapiens
  misc_RNA (1)...(19): siRNA sense strand
ggcgcaaggacaaggaaga

SEQ ID NO: 2426809 - RNA, 19 nt, Homo sapiens
  misc_RNA (1)...(19): siRNA sense strand
cugaagaagaggagggugc

SEQ ID NO: 2426810 - RNA, 19 nt, Homo sapiens
  misc_RNA (1)...(19): siRNA sense strand
cugaaggcccuacgggaga

SEQ ID NO: 2426811 - RNA, 19 nt, Homo sapiens
  misc_RNA (1)...(19): siRNA sense strand
gagaagaggaggaagaagg

SEQ ID NO: 2426812 - RNA, 19 nt, Homo sapiens
  misc_RNA (1)...(19): siRNA sense strand
ggcgagaagcacagggaac

SEQ ID NO: 2426813 - RNA, 19 nt, Homo sapiens
  misc_RNA (1)...(19): siRNA sense strand
aagaggaggaagaaggcga

SEQ ID NO: 2426814 - RNA, 19 nt, Homo sapiens
  misc_RNA (1)...(19): siRNA sense strand
acuaugucccggaggauga

SEQ ID NO: 2426815 - RNA, 19 nt, Homo sapiens
  misc_RNA (1)...(19): siRNA sense strand
cggcgaaaggaacggcuga

SEQ ID NO: 2426816 - RNA, 19 nt, Homo sapiens
  misc_RNA (1)...(19): siRNA sense strand
cugaaaggccaggaagaca

SEQ ID NO: 2426817 - RNA, 19 nt, Homo sapiens
  misc_RNA (1)...(19): siRNA sense strand
cugcaagacagaaggguau

SEQ ID NO: 2426818 - RNA, 19 nt, Homo sapiens
  misc_RNA (1)...(19): siRNA sense strand
gggaaaugagauagaucga

SEQ ID NO: 2426819 - RNA, 19 nt, Homo sapiens
  misc_RNA (1)...(19): siRNA sense strand
ggaaagauggcaauggcau

SEQ ID NO: 2426820 - RNA, 19 nt, Homo sapiens
  misc_RNA (1)...(19): siRNA sense strand
acuaaacugcuuuggacaa

SEQ ID NO: 2426821 - RNA, 19 nt, Homo sapiens
  misc_RNA (1)...(19): siRNA sense strand
aaggaagagaugaguguga

SEQ ID NO: 2426822 - RNA, 19 nt, Homo sapiens
  misc_RNA (1)...(19): siRNA sense strand
gaaaugagauagaucgauc

SEQ ID NO: 2426823 - RNA, 19 nt, Homo sapiens
  misc_RNA (1)...(19): siRNA sense strand
ggucauagguuuaucacug

SEQ ID NO: 2426824 - RNA, 19 nt, Homo sapiens
  misc_RNA (1)...(19): siRNA sense strand
gggccaagaagcacaggau

SEQ ID NO: 2426825 - RNA, 19 nt, Homo sapiens
  misc_RNA (1)...(19): siRNA sense strand
acgucuacgggaugauaaa

SEQ ID NO: 2426826 - RNA, 19 nt, Homo sapiens
  misc_RNA (1)...(19): siRNA sense strand
acugcaagacagaagggua

SEQ ID NO: 2426827 - RNA, 19 nt, Homo sapiens
  misc_RNA (1)...(19): siRNA sense strand
aaggaaacugggaaggaca

SEQ ID NO: 2426828 - RNA, 19 nt, Homo sapiens
  misc_RNA (1)...(19): siRNA sense strand
aagagaugagugugaugaa

SEQ ID NO: 2426829 - RNA, 19 nt, Homo sapiens
  misc_RNA (1)...(19): siRNA sense strand
auaugaggaaagauggcaa

SEQ ID NO: 2426830 - RNA, 19 nt, Homo sapiens
  misc_RNA (1)...(19): siRNA sense strand
gcauucacgucuacgggau

SEQ ID NO: 2426831 - RNA, 19 nt, Homo sapiens
  misc_RNA (1)...(19): siRNA sense strand
gcuacugcuacgugggaau

SEQ ID NO: 2426832 - RNA, 19 nt, Homo sapiens
  misc_RNA (1)...(19): siRNA sense strand
gguccugggcugaagagau

SEQ ID NO: 2426833 - RNA, 19 nt, Homo sapiens
  misc_RNA (1)...(19): siRNA sense strand
cgcugaagcuggugagccu

SEQ ID NO: 2426834 - RNA, 19 nt, Homo sapiens
  misc_RNA (1)...(19): siRNA sense strand
caggagacuggguggcaaa

SEQ ID NO: 2426835 - RNA, 19 nt, Homo sapiens
  misc_RNA (1)...(19): siRNA sense strand
ggaaggagcgagugcacca

SEQ ID NO: 2426836 - RNA, 19 nt, Homo sapiens
  misc_RNA (1)...(19): siRNA sense strand
cauuaaacuugcucggcuu

SEQ ID NO: 2426837 - RNA, 19 nt, Homo sapiens
  misc_RNA (1)...(19): siRNA sense strand
aguccaguguauagcaaau

SEQ ID NO: 2426838 - RNA, 19 nt, Homo sapiens
  misc_RNA (1)...(19): siRNA sense strand
cggaccuaucguuggguua

SEQ ID NO: 2426839 - RNA, 19 nt, Homo sapiens
  misc_RNA (1)...(19): siRNA sense strand
cagaaaacagauugucaaa

SEQ ID NO: 2426840 - RNA, 19 nt, Homo sapiens
  misc_RNA (1)...(19): siRNA sense strand
gaacaaggaaagacgguag

SEQ ID NO: 2426841 - RNA, 19 nt, Homo sapiens
  misc_RNA (1)...(19): siRNA sense strand
gggaauguaaccuacgcaa

SEQ ID NO: 2426842 - RNA, 19 nt, Homo sapiens
  misc_RNA (1)...(19): siRNA sense strand
aacuggugacagagagaaa

SEQ ID NO: 2426843 - RNA, 19 nt, Homo sapiens
  misc_RNA (1)...(19): siRNA sense strand
gaaagcauccugaagguga

SEQ ID NO: 2426844 - RNA, 19 nt, Homo sapiens
  misc_RNA (1)...(19): siRNA sense strand
cgucucaaccacagggcau

SEQ ID NO: 2426845 - RNA, 19 nt, Homo sapiens
  misc_RNA (1)...(19): siRNA sense strand
cguggaugccguagaggga

SEQ ID NO: 2426846 - RNA, 19 nt, Homo sapiens
  misc_RNA (1)...(19): siRNA sense strand
aagacgaucccgaguucaa

SEQ ID NO: 2426847 - RNA, 19 nt, Homo sapiens
  misc_RNA (1)...(19): siRNA sense strand
uugaaauggaugcuaguau

SEQ ID NO: 2426848 - RNA, 19 nt, Homo sapiens
  misc_RNA (1)...(19): siRNA sense strand
aggcgguaucguuaauaaa

SEQ ID NO: 2426849 - RNA, 19 nt, Homo sapiens
  misc_RNA (1)...(19): siRNA sense strand
agaccagccauguggagaa

SEQ ID NO: 2426850 - RNA, 19 nt, Homo sapiens
  misc_RNA (1)...(19): siRNA sense strand
caccaagggcugugcgcau

SEQ ID NO: 2426851 - RNA, 19 nt, Homo sapiens
  misc_RNA (1)...(19): siRNA sense strand
agaaugacuacauagacaa

SEQ ID NO: 2426852 - RNA, 19 nt, Homo sapiens
  misc_RNA (1)...(19): siRNA sense strand
uguguuuggugcagggcau

SEQ ID NO: 2426853 - RNA, 19 nt, Homo sapiens
  misc_RNA (1)...(19): siRNA sense strand
gcuccguggacgagaggaa

SEQ ID NO: 2426854 - RNA, 19 nt, Homo sapiens
  misc_RNA (1)...(19): siRNA sense strand
ccgagaagaucgagcagac

SEQ ID NO: 2426855 - RNA, 19 nt, Homo sapiens
  misc_RNA (1)...(19): siRNA sense strand
ucaucaacaccuacggaau

SEQ ID NO: 2426856 - RNA, 19 nt, Homo sapiens
  misc_RNA (1)...(19): siRNA sense strand
gccuggagaagcugggcua

SEQ ID NO: 2426857 - RNA, 19 nt, Homo sapiens
  misc_RNA (1)...(19): siRNA sense strand
caagagagcuggauggcau

SEQ ID NO: 2426858 - RNA, 19 nt, Homo sapiens
  misc_RNA (1)...(19): siRNA sense strand
gauaaaagcaagagagacu

SEQ ID NO: 2426859 - RNA, 19 nt, Homo sapiens
  misc_RNA (1)...(19): siRNA sense strand
aagaaauuggaaugggaaa

SEQ ID NO: 2426860 - RNA, 19 nt, Homo sapiens
  misc_RNA (1)...(19): siRNA sense strand
gggaaauauuguagccgca

SEQ ID NO: 2426861 - RNA, 19 nt, Homo sapiens
  misc_RNA (1)...(19): siRNA sense strand
aagccuaugcagagaguau

SEQ ID NO: 2426862 - RNA, 19 nt, Homo sapiens
  misc_RNA (1)...(19): siRNA sense strand
ggucuuucaaggacaguaa

SEQ ID NO: 2426863 - RNA, 19 nt, Homo sapiens
  misc_RNA (1)...(19): siRNA sense strand
ggacugaagccuaugcaga

SEQ ID NO: 2426864 - RNA, 19 nt, Homo sapiens
  misc_RNA (1)...(19): siRNA sense strand
aaacaugccagaaggaaaa

SEQ ID NO: 2426865 - RNA, 19 nt, Homo sapiens
  misc_RNA (1)...(19): siRNA sense strand
cccuuaaagauuucagaua

SEQ ID NO: 2426866 - RNA, 19 nt, Homo sapiens
  misc_RNA (1)...(19): siRNA sense strand
ucaccaaugcagugggaca

SEQ ID NO: 2426867 - RNA, 19 nt, Homo sapiens
  misc_RNA (1)...(19): siRNA sense strand
agaagaaauuggaauggga

SEQ ID NO: 2426868 - RNA, 19 nt, Homo sapiens
  misc_RNA (1)...(19): siRNA sense strand
gaagaaauuggaaugggaa

SEQ ID NO: 2426869 - RNA, 19 nt, Homo sapiens
  misc_RNA (1)...(19): siRNA sense strand
caaguaaauaagacccaaa

SEQ ID NO: 2426870 - RNA, 19 nt, Homo sapiens
  misc_RNA (1)...(19): siRNA sense strand
gagaugaguaugaagggau

SEQ ID NO: 2426871 - RNA, 19 nt, Homo sapiens
  misc_RNA (1)...(19): siRNA sense strand
agaaauuggaaugggaaau

SEQ ID NO: 2426872 - RNA, 19 nt, Homo sapiens
  misc_RNA (1)...(19): siRNA sense strand
aaaacaugccagaaggaaa

SEQ ID NO: 2426873 - RNA, 19 nt, Homo sapiens
  misc_RNA (1)...(19): siRNA sense strand
ccacccaacaacugguuaa

SEQ ID NO: 2426874 - RNA, 19 nt, Homo sapiens
  misc_RNA (1)...(19): siRNA sense strand
ugacgaagugcgaaaccaa

SEQ ID NO: 2426875 - RNA, 19 nt, Homo sapiens
  misc_RNA (1)...(19): siRNA sense strand
agagaugagauccaaguaa

SEQ ID NO: 2426876 - RNA, 19 nt, Homo sapiens
  misc_RNA (1)...(19): siRNA sense strand
uggacaagggagagggacu

SEQ ID NO: 2426877 - RNA, 19 nt, Homo sapiens
  misc_RNA (1)...(19): siRNA sense strand
agaugagauccaaguaaau

SEQ ID NO: 2426878 - RNA, 19 nt, Homo sapiens
  misc_RNA (1)...(19): siRNA sense strand
cacaauacucggagcugua

SEQ ID NO: 2426879 - RNA, 19 nt, Homo sapiens
  misc_RNA (1)...(19): siRNA sense strand
ccauacaugauaaagguuu

SEQ ID NO: 2426880 - RNA, 19 nt, Homo sapiens
  misc_RNA (1)...(19): siRNA sense strand
aaaccacacgagugauaaa

SEQ ID NO: 2426881 - RNA, 19 nt, Homo sapiens
  misc_RNA (1)...(19): siRNA sense strand
ugaagggaugccagacaaa

SEQ ID NO: 2426882 - RNA, 19 nt, Homo sapiens
  misc_RNA (1)...(19): siRNA sense strand
aggcaguaaaguugauaca

SEQ ID NO: 2426883 - RNA, 19 nt, Homo sapiens
  misc_RNA (1)...(19): siRNA sense strand
aguugauacaaguggcauu

SEQ ID NO: 2426884 - RNA, 19 nt, Homo sapiens
  misc_RNA (1)...(19): siRNA sense strand
augaagacauucuggagca

SEQ ID NO: 2426885 - RNA, 19 nt, Homo sapiens
  misc_RNA (1)...(19): siRNA sense strand
ugugaauguugauguccaa

SEQ ID NO: 2426886 - RNA, 19 nt, Homo sapiens
  misc_RNA (1)...(19): siRNA sense strand
ccgugauguacuauggauu

SEQ ID NO: 2426887 - RNA, 19 nt, Homo sapiens
  misc_RNA (1)...(19): siRNA sense strand
ccaaggucuuucaaggaca

SEQ ID NO: 2426888 - RNA, 19 nt, Homo sapiens
  misc_RNA (1)...(19): siRNA sense strand
acaguaacaaggaugggaa

SEQ ID NO: 2426889 - RNA, 19 nt, Homo sapiens
  misc_RNA (1)...(19): siRNA sense strand
agucggacacggacaggaa

SEQ ID NO: 2426890 - RNA, 19 nt, Homo sapiens
  misc_RNA (1)...(19): siRNA sense strand
cuuacuauggagaagaaau

SEQ ID NO: 2426891 - RNA, 19 nt, Homo sapiens
  misc_RNA (1)...(19): siRNA sense strand
auuaauacccuucgcucaa

SEQ ID NO: 2426892 - RNA, 19 nt, Homo sapiens
  misc_RNA (1)...(19): siRNA sense strand
aagagagacuccaucgaga

SEQ ID NO: 2426893 - RNA, 19 nt, Homo sapiens
  misc_RNA (1)...(19): siRNA sense strand
guuuggaugcuguuaaauu

SEQ ID NO: 2426894 - RNA, 19 nt, Homo sapiens
  misc_RNA (1)...(19): siRNA sense strand
auggagaagaaauuggaau

SEQ ID NO: 2426895 - RNA, 19 nt, Homo sapiens
  misc_RNA (1)...(19): siRNA sense strand
aagauaaaagcaagagaga

SEQ ID NO: 2426896 - RNA, 19 nt, Homo sapiens
  misc_RNA (1)...(19): siRNA sense strand
guaccaauucugccgacaa

SEQ ID NO: 2426897 - RNA, 19 nt, Homo sapiens
  misc_RNA (1)...(19): siRNA sense strand
cggagaucugaaagguauu

SEQ ID NO: 2426898 - RNA, 19 nt, Homo sapiens
  misc_RNA (1)...(19): siRNA sense strand
augaagggaugccagacaa

SEQ ID NO: 2426899 - RNA, 19 nt, Homo sapiens
  misc_RNA (1)...(19): siRNA sense strand
ccagacaguucacggcuga

SEQ ID NO: 2426900 - RNA, 19 nt, Homo sapiens
  misc_RNA (1)...(19): siRNA sense strand
uuaucgugguucugaauuu

SEQ ID NO: 2426901 - RNA, 19 nt, Homo sapiens
  misc_RNA (1)...(19): siRNA sense strand
cuauuagugcugaggguaa

SEQ ID NO: 2426902 - RNA, 19 nt, Homo sapiens
  misc_RNA (1)...(19): siRNA sense strand
gguaagacaaugagacaac

SEQ ID NO: 2426903 - RNA, 19 nt, Homo sapiens
  misc_RNA (1)...(19): siRNA sense strand
cagccaaccagguggacau

SEQ ID NO: 2426904 - RNA, 19 nt, Homo sapiens
  misc_RNA (1)...(19): siRNA sense strand
gugcugaggguaagacaau

SEQ ID NO: 2426905 - RNA, 19 nt, Homo sapiens
  misc_RNA (1)...(19): siRNA sense strand
aggguaagacaaugagaca

SEQ ID NO: 2426906 - RNA, 19 nt, Homo sapiens
  misc_RNA (1)...(19): siRNA sense strand
ugcaagaggcagucgacaa

SEQ ID NO: 2426907 - RNA, 19 nt, Homo sapiens
  misc_RNA (1)...(19): siRNA sense strand
cgugaacagauuaagaauu

SEQ ID NO: 2426908 - RNA, 19 nt, Homo sapiens
  misc_RNA (1)...(19): siRNA sense strand
acauagaugagcagguuca

SEQ ID NO: 2426909 - RNA, 19 nt, Homo sapiens
  misc_RNA (1)...(19): siRNA sense strand
gcuacgaaugggagagugu

SEQ ID NO: 2426910 - RNA, 19 nt, Homo sapiens
  misc_RNA (1)...(19): siRNA sense strand
ggguaagacaaugagacaa

SEQ ID NO: 2426911 - RNA, 19 nt, Homo sapiens
  misc_RNA (1)...(19): siRNA sense strand
agaauaaacgugaacagau

SEQ ID NO: 2426912 - RNA, 19 nt, Homo sapiens
  misc_RNA (1)...(19): siRNA sense strand
cuggagcauuuaugggcua

SEQ ID NO: 2426913 - RNA, 19 nt, Homo sapiens
  misc_RNA (1)...(19): siRNA sense strand
ccacaauuggacagccauu

SEQ ID NO: 2426914 - RNA, 19 nt, Homo sapiens
  misc_RNA (1)...(19): siRNA sense strand
agauuugcauucagagcau

SEQ ID NO: 2426915 - RNA, 19 nt, Homo sapiens
  misc_RNA (1)...(19): siRNA sense strand
acaucugaaugcugugcaa

SEQ ID NO: 2426916 - RNA, 19 nt, Homo sapiens
  misc_RNA (1)...(19): siRNA sense strand
ugauagcccugcugcgcaa

SEQ ID NO: 2426917 - RNA, 19 nt, Homo sapiens
  misc_RNA (1)...(19): siRNA sense strand
cauuuaugggcuauagcua

SEQ ID NO: 2426918 - RNA, 19 nt, Homo sapiens
  misc_RNA (1)...(19): siRNA sense strand
cacuguuccugguuagaaa

SEQ ID NO: 2426919 - RNA, 19 nt, Homo sapiens
  misc_RNA (1)...(19): siRNA sense strand
gcugaggguaagacaauga

SEQ ID NO: 2426920 - RNA, 19 nt, Homo sapiens
  misc_RNA (1)...(19): siRNA sense strand
ccaguggaaccuaagaaau

SEQ ID NO: 2426921 - RNA, 19 nt, Homo sapiens
  misc_RNA (1)...(19): siRNA sense strand
cgcaaaguccucagcuaau

SEQ ID NO: 2426922 - RNA, 19 nt, Homo sapiens
  misc_RNA (1)...(19): siRNA sense strand
guggaaccuaagaaauuaa

SEQ ID NO: 2426923 - RNA, 19 nt, Homo sapiens
  misc_RNA (1)...(19): siRNA sense strand
acaccaaaaucuagccaga

SEQ ID NO: 2426924 - RNA, 19 nt, Homo sapiens
  misc_RNA (1)...(19): siRNA sense strand
cauuuacagaggauagauu

SEQ ID NO: 2426925 - RNA, 19 nt, Homo sapiens
  misc_RNA (1)...(19): siRNA sense strand
cuagaagaaaucuggacaa

SEQ ID NO: 2426926 - RNA, 19 nt, Homo sapiens
  misc_RNA (1)...(19): siRNA sense strand
guguggaggugcaaggaga

SEQ ID NO: 2426927 - RNA, 19 nt, Homo sapiens
  misc_RNA (1)...(19): siRNA sense strand
gcagaagggaggaggugga

SEQ ID NO: 2426928 - RNA, 19 nt, Homo sapiens
  misc_RNA (1)...(19): siRNA sense strand
cagaauguguggaggugca

SEQ ID NO: 2426929 - RNA, 19 nt, Homo sapiens
  misc_RNA (1)...(19): siRNA sense strand
agacauucgugaaggccau

SEQ ID NO: 2426930 - RNA, 19 nt, Homo sapiens
  misc_RNA (1)...(19): siRNA sense strand
ucacagaugaaguggccau

SEQ ID NO: 2426931 - RNA, 19 nt, Homo sapiens
  misc_RNA (1)...(19): siRNA sense strand
agacagaauguguggaggu

SEQ ID NO: 2426932 - RNA, 19 nt, Homo sapiens
  misc_RNA (1)...(19): siRNA sense strand
uuauugagcuggaggaccu

SEQ ID NO: 2426933 - RNA, 19 nt, Homo sapiens
  misc_RNA (1)...(19): siRNA sense strand
ccgaggaacaugucaaaau

SEQ ID NO: 2426934 - RNA, 19 nt, Homo sapiens
  misc_RNA (1)...(19): siRNA sense strand
uugaguuccuuguggccua

SEQ ID NO: 2426935 - RNA, 19 nt, Homo sapiens
  misc_RNA (1)...(19): siRNA sense strand
auggagaaguucagggaaa

SEQ ID NO: 2426936 - RNA, 19 nt, Homo sapiens
  misc_RNA (1)...(19): siRNA sense strand
aggaagaggcagaacguua

SEQ ID NO: 2426937 - RNA, 19 nt, Homo sapiens
  misc_RNA (1)...(19): siRNA sense strand
gggaugagaaagaguuaaa

SEQ ID NO: 2426938 - RNA, 19 nt, Homo sapiens
  misc_RNA (1)...(19): siRNA sense strand
cauaauagucaaagcacaa

SEQ ID NO: 2426939 - RNA, 19 nt, Homo sapiens
  misc_RNA (1)...(19): siRNA sense strand
gcaacaagaaauugaucaa

SEQ ID NO: 2426940 - RNA, 19 nt, Homo sapiens
  misc_RNA (1)...(19): siRNA sense strand
ucaauaaaggacagcgaaa

SEQ ID NO: 2426941 - RNA, 19 nt, Homo sapiens
  misc_RNA (1)...(19): siRNA sense strand
gagcaugugaauagggauu

SEQ ID NO: 2426942 - RNA, 19 nt, Homo sapiens
  misc_RNA (1)...(19): siRNA sense strand
gcauaauagucaaagcaca

SEQ ID NO: 2426943 - RNA, 19 nt, Homo sapiens
  misc_RNA (1)...(19): siRNA sense strand
agugcaagacauugagaua

SEQ ID NO: 2426944 - RNA, 19 nt, Homo sapiens
  misc_RNA (1)...(19): siRNA sense strand
agacagacgaagccagaaa

SEQ ID NO: 2426945 - RNA, 19 nt, Homo sapiens
  misc_RNA (1)...(19): siRNA sense strand
ccagaaaauccaagagcua

SEQ ID NO: 2426946 - RNA, 19 nt, Homo sapiens
  misc_RNA (1)...(19): siRNA sense strand
aguuagaggaguauacaaa

SEQ ID NO: 2426947 - RNA, 19 nt, Homo sapiens
  misc_RNA (1)...(19): siRNA sense strand
caggagagcuuauaggaga

SEQ ID NO: 2426948 - RNA, 19 nt, Homo sapiens
  misc_RNA (1)...(19): siRNA sense strand
ggcaagaguucgagcaagu

SEQ ID NO: 2426949 - RNA, 19 nt, Homo sapiens
  misc_RNA (1)...(19): siRNA sense strand
gguuuaugccaauggacaa

SEQ ID NO: 2426950 - RNA, 19 nt, Homo sapiens
  misc_RNA (1)...(19): siRNA sense strand
gcuuauaggagaauaugaa

SEQ ID NO: 2426951 - RNA, 19 nt, Homo sapiens
  misc_RNA (1)...(19): siRNA sense strand
aagaagaagccuuugaaau

SEQ ID NO: 2426952 - RNA, 19 nt, Homo sapiens
  misc_RNA (1)...(19): siRNA sense strand
ccaagaaagcagcaagaga

SEQ ID NO: 2426953 - RNA, 19 nt, Homo sapiens
  misc_RNA (1)...(19): siRNA sense strand
acuuaaagacugucagaga

SEQ ID NO: 2426954 - RNA, 19 nt, Homo sapiens
  misc_RNA (1)...(19): siRNA sense strand
aggaaacccuaguggauga

SEQ ID NO: 2426955 - RNA, 19 nt, Homo sapiens
  misc_RNA (1)...(19): siRNA sense strand
ugcaagacauugagauaau

SEQ ID NO: 2426956 - RNA, 19 nt, Homo sapiens
  misc_RNA (1)...(19): siRNA sense strand
caauacuaacauaggcaaa

SEQ ID NO: 2426957 - RNA, 19 nt, Homo sapiens
  misc_RNA (1)...(19): siRNA sense strand
aggagagcuuauaggagaa

SEQ ID NO: 2426958 - RNA, 19 nt, Homo sapiens
  misc_RNA (1)...(19): siRNA sense strand
caaacauguuaaacggcaa

SEQ ID NO: 2426959 - RNA, 19 nt, Homo sapiens
  misc_RNA (1)...(19): siRNA sense strand
gcagaaaguacccaggcaa

SEQ ID NO: 2426960 - RNA, 19 nt, Homo sapiens
  misc_RNA (1)...(19): siRNA sense strand
acagaagacagaugaagaa

SEQ ID NO: 2426961 - RNA, 19 nt, Homo sapiens
  misc_RNA (1)...(19): siRNA sense strand
aagcaaaauuagagaagga

SEQ ID NO: 2426962 - RNA, 19 nt, Homo sapiens
  misc_RNA (1)...(19): siRNA sense strand
ggaugcagcccuagacaau

SEQ ID NO: 2426963 - RNA, 19 nt, Homo sapiens
  misc_RNA (1)...(19): siRNA sense strand
cuaaacaggaagaugauau

SEQ ID NO: 2426964 - RNA, 19 nt, Homo sapiens
  misc_RNA (1)...(19): siRNA sense strand
uagagaaggaagaggcaga

SEQ ID NO: 2426965 - RNA, 19 nt, Homo sapiens
  misc_RNA (1)...(19): siRNA sense strand
cugaaaagguagcaaaaga

SEQ ID NO: 2426966 - RNA, 19 nt, Homo sapiens
  misc_RNA (1)...(19): siRNA sense strand
agaaaauccaagagcuaaa

SEQ ID NO: 2426967 - RNA, 19 nt, Homo sapiens
  misc_RNA (1)...(19): siRNA sense strand
guuaaacggcaacaagaaa

SEQ ID NO: 2426968 - RNA, 19 nt, Homo sapiens
  misc_RNA (1)...(19): siRNA sense strand
caaaauuagagaaggaaga

SEQ ID NO: 2426969 - RNA, 19 nt, Homo sapiens
  misc_RNA (1)...(19): siRNA sense strand
uuauauauguggaggaaag

SEQ ID NO: 2426970 - RNA, 19 nt, Homo sapiens
  misc_RNA (1)...(19): siRNA sense strand
auggauugcuugaaagaga

SEQ ID NO: 2426971 - RNA, 19 nt, Homo sapiens
  misc_RNA (1)...(19): siRNA sense strand
agggaaaacgucagcaaaa

SEQ ID NO: 2426972 - RNA, 19 nt, Homo sapiens
  misc_RNA (1)...(19): siRNA sense strand
gcaaaagagagcagagguu

SEQ ID NO: 2426973 - RNA, 19 nt, Homo sapiens
  misc_RNA (1)...(19): siRNA sense strand
aggcaacaauugauaucua

SEQ ID NO: 2426974 - RNA, 19 nt, Homo sapiens
  misc_RNA (1)...(19): siRNA sense strand
aggaaaguggcgaagagaa

SEQ ID NO: 2426975 - RNA, 19 nt, Homo sapiens
  misc_RNA (1)...(19): siRNA sense strand
acaccaaguuagagcaugu

SEQ ID NO: 2426976 - RNA, 19 nt, Homo sapiens
  misc_RNA (1)...(19): siRNA sense strand
ggaacagaagacagaugaa

SEQ ID NO: 2426977 - RNA, 19 nt, Homo sapiens
  misc_RNA (1)...(19): siRNA sense strand
gagugaaggaaucaaggaa

SEQ ID NO: 2426978 - RNA, 19 nt, Homo sapiens
  misc_RNA (1)...(19): siRNA sense strand
aagaaauuggcguggaaaa

SEQ ID NO: 2426979 - RNA, 19 nt, Homo sapiens
  misc_RNA (1)...(19): siRNA sense strand
ggaaaagauaggcauaaua

SEQ ID NO: 2426980 - RNA, 19 nt, Homo sapiens
  misc_RNA (1)...(19): siRNA sense strand
aaugcuaacuagacaacua

SEQ ID NO: 2426981 - RNA, 19 nt, Homo sapiens
  misc_RNA (1)...(19): siRNA sense strand
ccaaucaaugaaagacuaa

SEQ ID NO: 2426982 - RNA, 19 nt, Homo sapiens
  misc_RNA (1)...(19): siRNA sense strand
agaaacgauuagagaagca

SEQ ID NO: 2426983 - RNA, 19 nt, Homo sapiens
  misc_RNA (1)...(19): siRNA sense strand
aaccuuacuuggagggaau

SEQ ID NO: 2426984 - RNA, 19 nt, Homo sapiens
  misc_RNA (1)...(19): siRNA sense strand
caucaaagagcaaacucaa

SEQ ID NO: 2426985 - RNA, 19 nt, Homo sapiens
  misc_RNA (1)...(19): siRNA sense strand
uggcaaagcagcagcaacu

SEQ ID NO: 2426986 - RNA, 19 nt, Homo sapiens
  misc_RNA (1)...(19): siRNA sense strand
gcgcagacaagcaaaauua

SEQ ID NO: 2426987 - RNA, 19 nt, Homo sapiens
  misc_RNA (1)...(19): siRNA sense strand
ccagagucuccuugaagaa

SEQ ID NO: 2426988 - RNA, 19 nt, Homo sapiens
  misc_RNA (1)...(19): siRNA sense strand
gaauagagaaguuagagga

SEQ ID NO: 2426989 - RNA, 19 nt, Homo sapiens
  misc_RNA (1)...(19): siRNA sense strand
cagaaugcugggauugaua

SEQ ID NO: 2426990 - RNA, 19 nt, Homo sapiens
  misc_RNA (1)...(19): siRNA sense strand
uggagaaguucagggaaau

SEQ ID NO: 2426991 - RNA, 19 nt, Homo sapiens
  misc_RNA (1)...(19): siRNA sense strand
uauuuaagguagaagacga

SEQ ID NO: 2426992 - RNA, 19 nt, Homo sapiens
  misc_RNA (1)...(19): siRNA sense strand
agacagaugaagaaagacu

SEQ ID NO: 2426993 - RNA, 19 nt, Homo sapiens
  misc_RNA (1)...(19): siRNA sense strand
augcauggauugcuugaaa

SEQ ID NO: 2426994 - RNA, 19 nt, Homo sapiens
  misc_RNA (1)...(19): siRNA sense strand
gaugcugggaugagaaaga

SEQ ID NO: 2426995 - RNA, 19 nt, Homo sapiens
  misc_RNA (1)...(19): siRNA sense strand
acagaaacgauuagagaag

SEQ ID NO: 2426996 - RNA, 19 nt, Homo sapiens
  misc_RNA (1)...(19): siRNA sense strand
aguuagagcaugugaauag

SEQ ID NO: 2426997 - RNA, 19 nt, Homo sapiens
  misc_RNA (1)...(19): siRNA sense strand
cagaagaggccucaguaca

SEQ ID NO: 2426998 - RNA, 19 nt, Homo sapiens
  misc_RNA (1)...(19): siRNA sense strand
aguaaagaaaucaggaaca

SEQ ID NO: 2426999 - RNA, 19 nt, Homo sapiens
  misc_RNA (1)...(19): siRNA sense strand
uccgaaauucagagagaaa

SEQ ID NO: 2427000 - RNA, 19 nt, Homo sapiens
  misc_RNA (1)...(19): siRNA sense strand
caacuauguaacugggaau

SEQ ID NO: 2427001 - RNA, 19 nt, Homo sapiens
  misc_RNA (1)...(19): siRNA sense strand
gggaaauguugccagagga

SEQ ID NO: 2427002 - RNA, 19 nt, Homo sapiens
  misc_RNA (1)...(19): siRNA sense strand
cggaagcacaagacugaau

SEQ ID NO: 2427003 - RNA, 19 nt, Homo sapiens
  misc_RNA (1)...(19): siRNA sense strand
ggugauaacucuggaccga

SEQ ID NO: 2427004 - RNA, 19 nt, Homo sapiens
  misc_RNA (1)...(19): siRNA sense strand
cagcaaaaggcuuggaacu

SEQ ID NO: 2427005 - RNA, 19 nt, Homo sapiens
  misc_RNA (1)...(19): siRNA sense strand
ugauauguaugaaggugau

SEQ ID NO: 2427006 - RNA, 19 nt, Homo sapiens
  misc_RNA (1)...(19): siRNA sense strand
gcagaagcaaguacgccaa

SEQ ID NO: 2427007 - RNA, 19 nt, Homo sapiens
  misc_RNA (1)...(19): siRNA sense strand
gggagaacagcugggaaau

SEQ ID NO: 2427008 - RNA, 19 nt, Homo sapiens
  misc_RNA (1)...(19): siRNA sense strand
ucgcagagcucauuccaga

SEQ ID NO: 2427009 - RNA, 19 nt, Homo sapiens
  misc_RNA (1)...(19): siRNA sense strand
ccauagaagcacuuggaag

SEQ ID NO: 2427010 - RNA, 19 nt, Homo sapiens
  misc_RNA (1)...(19): siRNA sense strand
guaugaaggugauaacucu

SEQ ID NO: 2427011 - RNA, 19 nt, Homo sapiens
  misc_RNA (1)...(19): siRNA sense strand
acccaaagaacgaagcuga

SEQ ID NO: 2427012 - RNA, 19 nt, Homo sapiens
  misc_RNA (1)...(19): siRNA sense strand
ugaaagaagaagauggaga

SEQ ID NO: 2427013 - RNA, 19 nt, Homo sapiens
  misc_RNA (1)...(19): siRNA sense strand
aagaagauggagaagaaau

SEQ ID NO: 2427014 - RNA, 19 nt, Homo sapiens
  misc_RNA (1)...(19): siRNA sense strand
acuguguggagaaggaaua

SEQ ID NO: 2427015 - RNA, 19 nt, Homo sapiens
  misc_RNA (1)...(19): siRNA sense strand
cuugaaagaagaagaugga

SEQ ID NO: 2427016 - RNA, 19 nt, Homo sapiens
  misc_RNA (1)...(19): siRNA sense strand
uggagaaggaauaucccaa

SEQ ID NO: 2427017 - RNA, 19 nt, Homo sapiens
  misc_RNA (1)...(19): siRNA sense strand
aagaagaagauggagaaga

SEQ ID NO: 2427018 - RNA, 19 nt, Homo sapiens
  misc_RNA (1)...(19): siRNA sense strand
uggagaacgaauaguggaa

SEQ ID NO: 2427019 - RNA, 19 nt, Homo sapiens
  misc_RNA (1)...(19): siRNA sense strand
cgaaggagagcgagcagga

SEQ ID NO: 2427020 - RNA, 19 nt, Homo sapiens
  misc_RNA (1)...(19): siRNA sense strand
gagaugacuacaagaaaau

SEQ ID NO: 2427021 - RNA, 19 nt, Homo sapiens
  misc_RNA (1)...(19): siRNA sense strand
ggacagaggucaaaggucu

SEQ ID NO: 2427022 - RNA, 19 nt, Homo sapiens
  misc_RNA (1)...(19): siRNA sense strand
aagaaauaagagagagcaa

SEQ ID NO: 2427023 - RNA, 19 nt, Homo sapiens
  misc_RNA (1)...(19): siRNA sense strand
ggauauuaagagaguggaa

SEQ ID NO: 2427024 - RNA, 19 nt, Homo sapiens
  misc_RNA (1)...(19): siRNA sense strand
ggucaaaggucuaucagga

SEQ ID NO: 2427025 - RNA, 19 nt, Homo sapiens
  misc_RNA (1)...(19): siRNA sense strand
guuugugaguggugaggaa

SEQ ID NO: 2427026 - RNA, 19 nt, Homo sapiens
  misc_RNA (1)...(19): siRNA sense strand
aagaaacagccuugguaua

SEQ ID NO: 2427027 - RNA, 19 nt, Homo sapiens
  misc_RNA (1)...(19): siRNA sense strand
agaaacaacuggaagcaga

SEQ ID NO: 2427028 - RNA, 19 nt, Homo sapiens
  misc_RNA (1)...(19): siRNA sense strand
acuguggaauguagggaaa

SEQ ID NO: 2427029 - RNA, 19 nt, Homo sapiens
  misc_RNA (1)...(19): siRNA sense strand
agagagagcaacuggaaca

SEQ ID NO: 2427030 - RNA, 19 nt, Homo sapiens
  misc_RNA (1)...(19): siRNA sense strand
gagcaugagaagagguguu

SEQ ID NO: 2427031 - RNA, 19 nt, Homo sapiens
  misc_RNA (1)...(19): siRNA sense strand
gagaagagguguuggagug

SEQ ID NO: 2427032 - RNA, 19 nt, Homo sapiens
  misc_RNA (1)...(19): siRNA sense strand
uggaguuacuagugcagaa

SEQ ID NO: 2427033 - RNA, 19 nt, Homo sapiens
  misc_RNA (1)...(19): siRNA sense strand
aguuacuagugcagaagaa

SEQ ID NO: 2427034 - RNA, 19 nt, Homo sapiens
  misc_RNA (1)...(19): siRNA sense strand
ugauaugauugaagaagca

SEQ ID NO: 2427035 - RNA, 19 nt, Homo sapiens
  misc_RNA (1)...(19): siRNA sense strand
caguauagucucuaguauu

SEQ ID NO: 2427036 - RNA, 19 nt, Homo sapiens
  misc_RNA (1)...(19): siRNA sense strand
uuucaagauugguugggaa

SEQ ID NO: 2427037 - RNA, 19 nt, Homo sapiens
  misc_RNA (1)...(19): siRNA sense strand
ccgaaaagaagaugauaca

SEQ ID NO: 2427038 - RNA, 19 nt, Homo sapiens
  misc_RNA (1)...(19): siRNA sense strand
agaguuuggaggacaauaa

SEQ ID NO: 2427039 - RNA, 19 nt, Homo sapiens
  misc_RNA (1)...(19): siRNA sense strand
auauuaagagaguggaaga

SEQ ID NO: 2427040 - RNA, 19 nt, Homo sapiens
  misc_RNA (1)...(19): siRNA sense strand
cugcaagccaguuggauga

SEQ ID NO: 2427041 - RNA, 19 nt, Homo sapiens
  misc_RNA (1)...(19): siRNA sense strand
aaagugaagcuguggucua

SEQ ID NO: 2427042 - RNA, 19 nt, Homo sapiens
  misc_RNA (1)...(19): siRNA sense strand
auucaaaggacaccguaaa

SEQ ID NO: 2427043 - RNA, 19 nt, Homo sapiens
  misc_RNA (1)...(19): siRNA sense strand
ggaaauugucucugccuca

SEQ ID NO: 2427044 - RNA, 19 nt, Homo sapiens
  misc_RNA (1)...(19): siRNA sense strand
caucagaguuuggaggaca

SEQ ID NO: 2427045 - RNA, 19 nt, Homo sapiens
  misc_RNA (1)...(19): siRNA sense strand
aagaagcauacaugacaaa

SEQ ID NO: 2427046 - RNA, 19 nt, Homo sapiens
  misc_RNA (1)...(19): siRNA sense strand
guacaauuaaggugcuaga

SEQ ID NO: 2427047 - RNA, 19 nt, Homo sapiens
  misc_RNA (1)...(19): siRNA sense strand
caagguugcaagaagaaau

SEQ ID NO: 2427048 - RNA, 19 nt, Homo sapiens
  misc_RNA (1)...(19): siRNA sense strand
aagacuuggagcaguguua

SEQ ID NO: 2427049 - RNA, 19 nt, Homo sapiens
  misc_RNA (1)...(19): siRNA sense strand
acaauuaaggugcuagaau

SEQ ID NO: 2427050 - RNA, 19 nt, Homo sapiens
  misc_RNA (1)...(19): siRNA sense strand
aaugaaaugaccugcaauu

SEQ ID NO: 2427051 - RNA, 19 nt, Homo sapiens
  misc_RNA (1)...(19): siRNA sense strand
gaggaaaagagguucaaau

SEQ ID NO: 2427052 - RNA, 19 nt, Homo sapiens
  misc_RNA (1)...(19): siRNA sense strand
auuaagagaguggaagaaa

SEQ ID NO: 2427053 - RNA, 19 nt, Homo sapiens
  misc_RNA (1)...(19): siRNA sense strand
ggguacaauuaaggugcua

SEQ ID NO: 2427054 - RNA, 19 nt, Homo sapiens
  misc_RNA (1)...(19): siRNA sense strand
aggaaaagagguucaaauu

SEQ ID NO: 2427055 - RNA, 19 nt, Homo sapiens
  misc_RNA (1)...(19): siRNA sense strand
gugcagaagaagaaacaac

SEQ ID NO: 2427056 - RNA, 19 nt, Homo sapiens
  misc_RNA (1)...(19): siRNA sense strand
aguacgaccuuuagccaca

SEQ ID NO: 2427057 - RNA, 19 nt, Homo sapiens
  misc_RNA (1)...(19): siRNA sense strand
agaagaaauaagagagagc

SEQ ID NO: 2427058 - RNA, 19 nt, Homo sapiens
  misc_RNA (1)...(19): siRNA sense strand
acguuagcaucaagacgaa

SEQ ID NO: 2427059 - RNA, 19 nt, Homo sapiens
  misc_RNA (1)...(19): siRNA sense strand
gggauggauucacaggaca

SEQ ID NO: 2427060 - RNA, 19 nt, Homo sapiens
  misc_RNA (1)...(19): siRNA sense strand
ccguaaagcagucucuuau

SEQ ID NO: 2427061 - RNA, 19 nt, Homo sapiens
  misc_RNA (1)...(19): siRNA sense strand
gcuaacagucaggguacaa

SEQ ID NO: 2427062 - RNA, 19 nt, Homo sapiens
  misc_RNA (1)...(19): siRNA sense strand
ugcaagaagaaauaagaga

SEQ ID NO: 2427063 - RNA, 19 nt, Homo sapiens
  misc_RNA (1)...(19): siRNA sense strand
guauugaauuugaccggga

SEQ ID NO: 2427064 - RNA, 19 nt, Homo sapiens
  misc_RNA (1)...(19): siRNA sense strand
aagguugcaagaagaaaua

SEQ ID NO: 2427065 - RNA, 19 nt, Homo sapiens
  misc_RNA (1)...(19): siRNA sense strand
aagcagucucuuaugcaaa

SEQ ID NO: 2427066 - RNA, 19 nt, Homo sapiens
  misc_RNA (1)...(19): siRNA sense strand
cuuucuaagacuuugcuaa

SEQ ID NO: 2427067 - RNA, 19 nt, Homo sapiens
  misc_RNA (1)...(19): siRNA sense strand
aggucuaucaggagcauga

SEQ ID NO: 2427068 - RNA, 19 nt, Homo sapiens
  misc_RNA (1)...(19): siRNA sense strand
acaacuggaagcagaauca

SEQ ID NO: 2427069 - RNA, 19 nt, Homo sapiens
  misc_RNA (1)...(19): siRNA sense strand
gacagaggucaaaggucua

SEQ ID NO: 2427070 - RNA, 19 nt, Homo sapiens
  misc_RNA (1)...(19): siRNA sense strand
uaaugugugcuguguuaaa

SEQ ID NO: 2427071 - RNA, 19 nt, Homo sapiens
  misc_RNA (1)...(19): siRNA sense strand
ggaccaaggugauggccaa

SEQ ID NO: 2427072 - RNA, 19 nt, Homo sapiens
  misc_RNA (1)...(19): siRNA sense strand
agggaaagcugaaggaggu

SEQ ID NO: 2427073 - RNA, 19 nt, Homo sapiens
  misc_RNA (1)...(19): siRNA sense strand
gugaagauugagaaggaga

SEQ ID NO: 2427074 - RNA, 19 nt, Homo sapiens
  misc_RNA (1)...(19): siRNA sense strand
cagcgaaggaccaagguga

SEQ ID NO: 2427075 - RNA, 19 nt, Homo sapiens
  misc_RNA (1)...(19): siRNA sense strand
aaggcaaagaaguggagaa

SEQ ID NO: 2427076 - RNA, 19 nt, Homo sapiens
  misc_RNA (1)...(19): siRNA sense strand
gggaagguguugcugguga

SEQ ID NO: 2427077 - RNA, 19 nt, Homo sapiens
  misc_RNA (1)...(19): siRNA sense strand
ugaagauugagaaggagaa

SEQ ID NO: 2427078 - RNA, 19 nt, Homo sapiens
  misc_RNA (1)...(19): siRNA sense strand
uugagaaggagaaggugua

SEQ ID NO: 2427079 - RNA, 19 nt, Homo sapiens
  misc_RNA (1)...(19): siRNA sense strand
ggguacagcaguagcacca

SEQ ID NO: 2427080 - RNA, 19 nt, Homo sapiens
  misc_RNA (1)...(19): siRNA sense strand
agcugaaguuuguggcuuu

SEQ ID NO: 2427081 - RNA, 19 nt, Homo sapiens
  misc_RNA (1)...(19): siRNA sense strand
cuaaaggcgacgaggugau

SEQ ID NO: 2427082 - RNA, 19 nt, Homo sapiens
  misc_RNA (1)...(19): siRNA sense strand
agguguugcuggugaagga

SEQ ID NO: 2427083 - RNA, 19 nt, Homo sapiens
  misc_RNA (1)...(19): siRNA sense strand
cuacacaaguuccagguga

SEQ ID NO: 2427084 - RNA, 19 nt, Homo sapiens
  misc_RNA (1)...(19): siRNA sense strand
aggugauggccaaguguau

SEQ ID NO: 2427085 - RNA, 19 nt, Homo sapiens
  misc_RNA (1)...(19): siRNA sense strand
gcuucaucccugucaacaa

SEQ ID NO: 2427086 - RNA, 19 nt, Homo sapiens
  misc_RNA (1)...(19): siRNA sense strand
uguugcuggugaaggacaa

SEQ ID NO: 2427087 - RNA, 19 nt, Homo sapiens
  misc_RNA (1)...(19): siRNA sense strand
gugaaguucuacaugcaga

SEQ ID NO: 2427088 - RNA, 19 nt, Homo sapiens
  misc_RNA (1)...(19): siRNA sense strand
gggaucuggaggagcugaa

SEQ ID NO: 2427089 - RNA, 19 nt, Homo sapiens
  misc_RNA (1)...(19): siRNA sense strand
aggcaaagcggcaucgguu

SEQ ID NO: 2427090 - RNA, 19 nt, Homo sapiens
  misc_RNA (1)...(19): siRNA sense strand
aguuccaggugaagauuga

SEQ ID NO: 2427091 - RNA, 19 nt, Homo sapiens
  misc_RNA (1)...(19): siRNA sense strand
ugggagagaccgagagaaa

SEQ ID NO: 2427092 - RNA, 19 nt, Homo sapiens
  misc_RNA (1)...(19): siRNA sense strand
uggaaaggaaauugaagaa

SEQ ID NO: 2427093 - RNA, 19 nt, Homo sapiens
  misc_RNA (1)...(19): siRNA sense strand
agacaaaggacaucgaaaa

SEQ ID NO: 2427094 - RNA, 19 nt, Homo sapiens
  misc_RNA (1)...(19): siRNA sense strand
cauaaggggucuagaucaa

SEQ ID NO: 2427095 - RNA, 19 nt, Homo sapiens
  misc_RNA (1)...(19): siRNA sense strand
guguaguacugaaaagaua

SEQ ID NO: 2427096 - RNA, 19 nt, Homo sapiens
  misc_RNA (1)...(19): siRNA sense strand
ucagaaaauuggaaaggaa

SEQ ID NO: 2427097 - RNA, 19 nt, Homo sapiens
  misc_RNA (1)...(19): siRNA sense strand
cagacaaaggacaucgaaa

SEQ ID NO: 2427098 - RNA, 19 nt, Homo sapiens
  misc_RNA (1)...(19): siRNA sense strand
cagaaaauuggaaaggaaa

SEQ ID NO: 2427099 - RNA, 19 nt, Homo sapiens
  misc_RNA (1)...(19): siRNA sense strand
gggccagcucugagaauga

SEQ ID NO: 2427100 - RNA, 19 nt, Homo sapiens
  misc_RNA (1)...(19): siRNA sense strand
uagccaagaacaaggagaa

SEQ ID NO: 2427101 - RNA, 19 nt, Homo sapiens
  misc_RNA (1)...(19): siRNA sense strand
cccuaaaugagcugaggaa

SEQ ID NO: 2427102 - RNA, 19 nt, Homo sapiens
  misc_RNA (1)...(19): siRNA sense strand
aaugacaaacugacggaaa

SEQ ID NO: 2427103 - RNA, 19 nt, Homo sapiens
  misc_RNA (1)...(19): siRNA sense strand
caguagagugugacgaaca

SEQ ID NO: 2427104 - RNA, 19 nt, Homo sapiens
  misc_RNA (1)...(19): siRNA sense strand
ucaaaugcucagaagacua

SEQ ID NO: 2427105 - RNA, 19 nt, Homo sapiens
  misc_RNA (1)...(19): siRNA sense strand
cugaggacuuccaagcaaa

SEQ ID NO: 2427106 - RNA, 19 nt, Homo sapiens
  misc_RNA (1)...(19): siRNA sense strand
augacaaacugacggaaaa

SEQ ID NO: 2427107 - RNA, 19 nt, Homo sapiens
  misc_RNA (1)...(19): siRNA sense strand
augagagacuucaguacaa

SEQ ID NO: 2427108 - RNA, 19 nt, Homo sapiens
  misc_RNA (1)...(19): siRNA sense strand
guuuggaugggcugaaaua

SEQ ID NO: 2427109 - RNA, 19 nt, Homo sapiens
  misc_RNA (1)...(19): siRNA sense strand
gagcauggacuaaugguca

SEQ ID NO: 2427110 - RNA, 19 nt, Homo sapiens
  misc_RNA (1)...(19): siRNA sense strand
cauagagcccagugugcaa

SEQ ID NO: 2427111 - RNA, 19 nt, Homo sapiens
  misc_RNA (1)...(19): siRNA sense strand
gcacccuagccaagaacaa

SEQ ID NO: 2427112 - RNA, 19 nt, Homo sapiens
  misc_RNA (1)...(19): siRNA sense strand
aguagagugugacgaacaa

SEQ ID NO: 2427113 - RNA, 19 nt, Homo sapiens
  misc_RNA (1)...(19): siRNA sense strand
ggcugaaauacuuggguca

SEQ ID NO: 2427114 - RNA, 19 nt, Homo sapiens
  misc_RNA (1)...(19): siRNA sense strand
gauucaugcccgaaaccaa

SEQ ID NO: 2427115 - RNA, 19 nt, Homo sapiens
  misc_RNA (1)...(19): siRNA sense strand
agugaaugccugcaguuaa

SEQ ID NO: 2427116 - RNA, 19 nt, Homo sapiens
  misc_RNA (1)...(19): siRNA sense strand
ccuaagagacaaagcucca

SEQ ID NO: 2427117 - RNA, 19 nt, Homo sapiens
  misc_RNA (1)...(19): siRNA sense strand
ggcaguagagugugacgaa

SEQ ID NO: 2427118 - RNA, 19 nt, Homo sapiens
  misc_RNA (1)...(19): siRNA sense strand
ugacggaaaaggagagaga

SEQ ID NO: 2427119 - RNA, 19 nt, Homo sapiens
  misc_RNA (1)...(19): siRNA sense strand
uggagcaagcagaagaaau

SEQ ID NO: 2427120 - RNA, 19 nt, Homo sapiens
  misc_RNA (1)...(19): siRNA sense strand
aaacggaggccacgcgaau

SEQ ID NO: 2427121 - RNA, 19 nt, Homo sapiens
  misc_RNA (1)...(19): siRNA sense strand
acuaaugcucaguugacaa

SEQ ID NO: 2427122 - RNA, 19 nt, Homo sapiens
  misc_RNA (1)...(19): siRNA sense strand
caaaaggaggggagaaguu

SEQ ID NO: 2427123 - RNA, 19 nt, Homo sapiens
  misc_RNA (1)...(19): siRNA sense strand
auuaaacagacucagguaa

SEQ ID NO: 2427124 - RNA, 19 nt, Homo sapiens
  misc_RNA (1)...(19): siRNA sense strand
agguaacuguucagaaaau

SEQ ID NO: 2427125 - RNA, 19 nt, Homo sapiens
  misc_RNA (1)...(19): siRNA sense strand
cuacaagcaaugaacugaa

SEQ ID NO: 2427126 - RNA, 19 nt, Homo sapiens
  misc_RNA (1)...(19): siRNA sense strand
gagaccgagagaaagauaa

SEQ ID NO: 2427127 - RNA, 19 nt, Homo sapiens
  misc_RNA (1)...(19): siRNA sense strand
ugucuuguuucguggugaa

SEQ ID NO: 2427128 - RNA, 19 nt, Homo sapiens
  misc_RNA (1)...(19): siRNA sense strand
gaacauugcugcccggaac

SEQ ID NO: 2427129 - RNA, 19 nt, Homo sapiens
  misc_RNA (1)...(19): siRNA sense strand
gugcaauuaaacagacuca

SEQ ID NO: 2427130 - RNA, 19 nt, Homo sapiens
  misc_RNA (1)...(19): siRNA sense strand
cuaaaugagcugaggaagg

SEQ ID NO: 2427131 - RNA, 19 nt, Homo sapiens
  misc_RNA (1)...(19): siRNA sense strand
aagauaucaacauggacua

SEQ ID NO: 2427132 - RNA, 19 nt, Homo sapiens
  misc_RNA (1)...(19): siRNA sense strand
ucaacauggacuagggacu

SEQ ID NO: 2427133 - RNA, 19 nt, Homo sapiens
  misc_RNA (1)...(19): siRNA sense strand
cagaagaaaucaucgggcu

SEQ ID NO: 2427134 - RNA, 19 nt, Homo sapiens
  misc_RNA (1)...(19): siRNA sense strand
uggcauuacugcauaagca

SEQ ID NO: 2427135 - RNA, 19 nt, Homo sapiens
  misc_RNA (1)...(19): siRNA sense strand
agaucaacaaucaaagaca

SEQ ID NO: 2427136 - RNA, 19 nt, Homo sapiens
  misc_RNA (1)...(19): siRNA sense strand
acggaaaaggagagagagu

SEQ ID NO: 2427137 - RNA, 19 nt, Homo sapiens
  misc_RNA (1)...(19): siRNA sense strand
uuggaaaggaaauugaaga

SEQ ID NO: 2427138 - RNA, 19 nt, Homo sapiens
  misc_RNA (1)...(19): siRNA sense strand
auuacaagacaaaggaagu

SEQ ID NO: 2427139 - RNA, 19 nt, Homo sapiens
  misc_RNA (1)...(19): siRNA sense strand
ccaaaaggaaacagaagaa

SEQ ID NO: 2427140 - RNA, 19 nt, Homo sapiens
  misc_RNA (1)...(19): siRNA sense strand
acauaauccgcgagcaaga

SEQ ID NO: 2427141 - RNA, 19 nt, Homo sapiens
  misc_RNA (1)...(19): siRNA sense strand
gcacagaggucaucggcac

SEQ ID NO: 2427142 - RNA, 19 nt, Homo sapiens
  misc_RNA (1)...(19): siRNA sense strand
agcaaaacucccuggaaua

SEQ ID NO: 2427143 - RNA, 19 nt, Homo sapiens
  misc_RNA (1)...(19): siRNA sense strand
gggacaagccagugaccgu

SEQ ID NO: 2427144 - RNA, 19 nt, Homo sapiens
  misc_RNA (1)...(19): siRNA sense strand
aauacauggaucagaauga

SEQ ID NO: 2427145 - RNA, 19 nt, Homo sapiens
  misc_RNA (1)...(19): siRNA sense strand
agucugugccugcuggaaa

SEQ ID NO: 2427146 - RNA, 19 nt, Homo sapiens
  misc_RNA (1)...(19): siRNA sense strand
guggugagcaggaacggaa

SEQ ID NO: 2427147 - RNA, 19 nt, Homo sapiens
  misc_RNA (1)...(19): siRNA sense strand
gccugaaaccagaagcaga

SEQ ID NO: 2427148 - RNA, 19 nt, Homo sapiens
  misc_RNA (1)...(19): siRNA sense strand
agagagaacucaauggcaa

SEQ ID NO: 2427149 - RNA, 19 nt, Homo sapiens
  misc_RNA (1)...(19): siRNA sense strand
cuagaaacgcugaaggaga

SEQ ID NO: 2427150 - RNA, 19 nt, Homo sapiens
  misc_RNA (1)...(19): siRNA sense strand
gagaggagcgagaaggcua

SEQ ID NO: 2427151 - RNA, 19 nt, Homo sapiens
  misc_RNA (1)...(19): siRNA sense strand
gcgcaaaguagaugggauc

SEQ ID NO: 2427152 - RNA, 19 nt, Homo sapiens
  misc_RNA (1)...(19): siRNA sense strand
gaggaggagaggagcgaga

SEQ ID NO: 2427153 - RNA, 19 nt, Homo sapiens
  misc_RNA (1)...(19): siRNA sense strand
aggaugaauacaagaguga

SEQ ID NO: 2427154 - RNA, 19 nt, Homo sapiens
  misc_RNA (1)...(19): siRNA sense strand
gggugaguacagucggaaa

SEQ ID NO: 2427155 - RNA, 19 nt, Homo sapiens
  misc_RNA (1)...(19): siRNA sense strand
ucagggagcuucagcgcaa

SEQ ID NO: 2427156 - RNA, 19 nt, Homo sapiens
  misc_RNA (1)...(19): siRNA sense strand
aauacaagagugagaacau

SEQ ID NO: 2427157 - RNA, 19 nt, Homo sapiens
  misc_RNA (1)...(19): siRNA sense strand
ugaaggaugaggaggcgaa

SEQ ID NO: 2427158 - RNA, 19 nt, Homo sapiens
  misc_RNA (1)...(19): siRNA sense strand
gguuugagcaagaggcagu

SEQ ID NO: 2427159 - RNA, 19 nt, Homo sapiens
  misc_RNA (1)...(19): siRNA sense strand
aggagaagaugaugcagga

SEQ ID NO: 2427160 - RNA, 19 nt, Homo sapiens
  misc_RNA (1)...(19): siRNA sense strand
agaugaugcaggaggcuga

SEQ ID NO: 2427161 - RNA, 19 nt, Homo sapiens
  misc_RNA (1)...(19): siRNA sense strand
cagucggaaacuagaggaa

SEQ ID NO: 2427162 - RNA, 19 nt, Homo sapiens
  misc_RNA (1)...(19): siRNA sense strand
agaaagaggaguugcugca

SEQ ID NO: 2427163 - RNA, 19 nt, Homo sapiens
  misc_RNA (1)...(19): siRNA sense strand
ggaaacuagaggaacgcuu

SEQ ID NO: 2427164 - RNA, 19 nt, Homo sapiens
  misc_RNA (1)...(19): siRNA sense strand
gaggagaaugagaagcuga

SEQ ID NO: 2427165 - RNA, 19 nt, Homo sapiens
  misc_RNA (1)...(19): siRNA sense strand
gcuguggagcagauagcua

SEQ ID NO: 2427166 - RNA, 19 nt, Homo sapiens
  misc_RNA (1)...(19): siRNA sense strand
gcuggagcgguuugagcaa

SEQ ID NO: 2427167 - RNA, 19 nt, Homo sapiens
  misc_RNA (1)...(19): siRNA sense strand
ugucagaggaggagaggag

SEQ ID NO: 2427168 - RNA, 19 nt, Homo sapiens
  misc_RNA (1)...(19): siRNA sense strand
ucugccagcuugaggaaaa

SEQ ID NO: 2427169 - RNA, 19 nt, Homo sapiens
  misc_RNA (1)...(19): siRNA sense strand
aggaugaggaggcgaaagu

SEQ ID NO: 2427170 - RNA, 19 nt, Homo sapiens
  misc_RNA (1)...(19): siRNA sense strand
cuguggagcagauagcuaa

SEQ ID NO: 2427171 - RNA, 19 nt, Homo sapiens
  misc_RNA (1)...(19): siRNA sense strand
agaacaaacaggcagagau

SEQ ID NO: 2427172 - RNA, 19 nt, Homo sapiens
  misc_RNA (1)...(19): siRNA sense strand
gaaaaguuggagauagcaa

SEQ ID NO: 2427173 - RNA, 19 nt, Homo sapiens
  misc_RNA (1)...(19): siRNA sense strand
agcucaaggcccaggguga

SEQ ID NO: 2427174 - RNA, 19 nt, Homo sapiens
  misc_RNA (1)...(19): siRNA sense strand
gagacggaguuuaaggaac

SEQ ID NO: 2427175 - RNA, 19 nt, Homo sapiens
  misc_RNA (1)...(19): siRNA sense strand
gcgagaaggagcugcugga

SEQ ID NO: 2427176 - RNA, 19 nt, Homo sapiens
  misc_RNA (1)...(19): siRNA sense strand
uuaaggaacuggacggucu

SEQ ID NO: 2427177 - RNA, 19 nt, Homo sapiens
  misc_RNA (1)...(19): siRNA sense strand
gcaaaugaguccagggauc

SEQ ID NO: 2427178 - RNA, 19 nt, Homo sapiens
  misc_RNA (1)...(19): siRNA sense strand
gggauuaauuggaggcauc

SEQ ID NO: 2427179 - RNA, 19 nt, Homo sapiens
  misc_RNA (1)...(19): siRNA sense strand
agaucagcuuagagaagaa

SEQ ID NO: 2427180 - RNA, 19 nt, Homo sapiens
  misc_RNA (1)...(19): siRNA sense strand
aagaagugguccagagagu

SEQ ID NO: 2427181 - RNA, 19 nt, Homo sapiens
  misc_RNA (1)...(19): siRNA sense strand
cggacaaagcucucaguau

SEQ ID NO: 2427182 - RNA, 19 nt, Homo sapiens
  misc_RNA (1)...(19): siRNA sense strand
aggaggacuuuaagcaaau

SEQ ID NO: 2427183 - RNA, 19 nt, Homo sapiens
  misc_RNA (1)...(19): siRNA sense strand
gaaacggaaugcaaggaga

SEQ ID NO: 2427184 - RNA, 19 nt, Homo sapiens
  misc_RNA (1)...(19): siRNA sense strand
caagaaaagcccagaagau

SEQ ID NO: 2427185 - RNA, 19 nt, Homo sapiens
  misc_RNA (1)...(19): siRNA sense strand
acaugaaaugggagacuuu

SEQ ID NO: 2427186 - RNA, 19 nt, Homo sapiens
  misc_RNA (1)...(19): siRNA sense strand
ccgugggaguucaggccaa

SEQ ID NO: 2427187 - RNA, 19 nt, Homo sapiens
  misc_RNA (1)...(19): siRNA sense strand
ccacggaggagaaacggaa

SEQ ID NO: 2427188 - RNA, 19 nt, Homo sapiens
  misc_RNA (1)...(19): siRNA sense strand
cagaaugagacagaagaua

SEQ ID NO: 2427189 - RNA, 19 nt, Homo sapiens
  misc_RNA (1)...(19): siRNA sense strand
agugaaggugcuaaugaaa

SEQ ID NO: 2427190 - RNA, 19 nt, Homo sapiens
  misc_RNA (1)...(19): siRNA sense strand
ccuaucagaacuagaccaa

SEQ ID NO: 2427191 - RNA, 19 nt, Homo sapiens
  misc_RNA (1)...(19): siRNA sense strand
cccucagguucuugguuua

SEQ ID NO: 2427192 - RNA, 19 nt, Homo sapiens
  misc_RNA (1)...(19): siRNA sense strand
gggauuauacauuggccuu

SEQ ID NO: 2427193 - RNA, 19 nt, Homo sapiens
  misc_RNA (1)...(19): siRNA sense strand
ggcagcugguggagauauu

SEQ ID NO: 2427194 - RNA, 19 nt, Homo sapiens
  misc_RNA (1)...(19): siRNA sense strand
ugacagccuccaacagaaa

SEQ ID NO: 2427195 - RNA, 19 nt, Homo sapiens
  misc_RNA (1)...(19): siRNA sense strand
uggcuauauaugagcaaaa

SEQ ID NO: 2427196 - RNA, 19 nt, Homo sapiens
  misc_RNA (1)...(19): siRNA sense strand
acauaauaacccaugauca

SEQ ID NO: 2427197 - RNA, 19 nt, Homo sapiens
  misc_RNA (1)...(19): siRNA sense strand
cuucaugggauuauacauu

SEQ ID NO: 2427198 - RNA, 19 nt, Homo sapiens
  misc_RNA (1)...(19): siRNA sense strand
uggaauagugagcagugaa

SEQ ID NO: 2427199 - RNA, 19 nt, Homo sapiens
  misc_RNA (1)...(19): siRNA sense strand
cuuugaaccagaugcacua

SEQ ID NO: 2427200 - RNA, 19 nt, Homo sapiens
  misc_RNA (1)...(19): siRNA sense strand
uuucuaaggaggacuuuaa

SEQ ID NO: 2427201 - RNA, 19 nt, Homo sapiens
  misc_RNA (1)...(19): siRNA sense strand
augaaaucccacaugaaau

SEQ ID NO: 2427202 - RNA, 19 nt, Homo sapiens
  misc_RNA (1)...(19): siRNA sense strand
ccauuagcuuguuagcaau

SEQ ID NO: 2427203 - RNA, 19 nt, Homo sapiens
  misc_RNA (1)...(19): siRNA sense strand
acauuauucaucaggaaga

SEQ ID NO: 2427204 - RNA, 19 nt, Homo sapiens
  misc_RNA (1)...(19): siRNA sense strand
gagaagaagugguccagag

SEQ ID NO: 2427205 - RNA, 19 nt, Homo sapiens
  misc_RNA (1)...(19): siRNA sense strand
uuucacagaaugagacaga

SEQ ID NO: 2427206 - RNA, 19 nt, Homo sapiens
  misc_RNA (1)...(19): siRNA sense strand
acagaaugagacagaagau

SEQ ID NO: 2427207 - RNA, 19 nt, Homo sapiens
  misc_RNA (1)...(19): siRNA sense strand
agaagaagugguccagaga

SEQ ID NO: 2427208 - RNA, 19 nt, Homo sapiens
  misc_RNA (1)...(19): siRNA sense strand
guuuaagagagcugugaaa

SEQ ID NO: 2427209 - RNA, 19 nt, Homo sapiens
  misc_RNA (1)...(19): siRNA sense strand
gcaucgagguuuaugggua

SEQ ID NO: 2427210 - RNA, 19 nt, Homo sapiens
  misc_RNA (1)...(19): siRNA sense strand
acaucagaguauacaagaa

SEQ ID NO: 2427211 - RNA, 19 nt, Homo sapiens
  misc_RNA (1)...(19): siRNA sense strand
aguaaaagaagucuggaaa

SEQ ID NO: 2427212 - RNA, 19 nt, Homo sapiens
  misc_RNA (1)...(19): siRNA sense strand
gugugaagaaagaaagcau

SEQ ID NO: 2427213 - RNA, 19 nt, Homo sapiens
  misc_RNA (1)...(19): siRNA sense strand
gaguaaaagaagucuggaa

SEQ ID NO: 2427214 - RNA, 19 nt, Homo sapiens
  misc_RNA (1)...(19): siRNA sense strand
cuggaaacaagcuggaaaa

SEQ ID NO: 2427215 - RNA, 19 nt, Homo sapiens
  misc_RNA (1)...(19): siRNA sense strand
ugacuugaugacagugaaa

SEQ ID NO: 2427216 - RNA, 19 nt, Homo sapiens
  misc_RNA (1)...(19): siRNA sense strand
acuggaagugugugaagaa

SEQ ID NO: 2427217 - RNA, 19 nt, Homo sapiens
  misc_RNA (1)...(19): siRNA sense strand
aagugugugaagaaagaaa

SEQ ID NO: 2427218 - RNA, 19 nt, Homo sapiens
  misc_RNA (1)...(19): siRNA sense strand
cuggauaucaggaagcaau

SEQ ID NO: 2427219 - RNA, 19 nt, Homo sapiens
  misc_RNA (1)...(19): siRNA sense strand
gcauuaaaggaguaaaaga

SEQ ID NO: 2427220 - RNA, 19 nt, Homo sapiens
  misc_RNA (1)...(19): siRNA sense strand
ucuggaaacaagcuggaaa

SEQ ID NO: 2427221 - RNA, 19 nt, Homo sapiens
  misc_RNA (1)...(19): siRNA sense strand
aagaaagcauuaaaggagu

SEQ ID NO: 2427222 - RNA, 19 nt, Homo sapiens
  misc_RNA (1)...(19): siRNA sense strand
uggauaucaggaagcaaua

SEQ ID NO: 2427223 - RNA, 19 nt, Homo sapiens
  misc_RNA (1)...(19): siRNA sense strand
cuggaagugugugaagaaa

SEQ ID NO: 2427224 - RNA, 19 nt, Homo sapiens
  misc_RNA (1)...(19): siRNA sense strand
gcuggauacagaugguaau

SEQ ID NO: 2427225 - RNA, 19 nt, Homo sapiens
  misc_RNA (1)...(19): siRNA sense strand
gcuuacaauccucacuaaa

SEQ ID NO: 2427226 - RNA, 19 nt, Homo sapiens
  misc_RNA (1)...(19): siRNA sense strand
ucagacuagcggaguuuaa

SEQ ID NO: 2427227 - RNA, 19 nt, Homo sapiens
  misc_RNA (1)...(19): siRNA sense strand
ucagcaggagagagcauua

SEQ ID NO: 2427228 - RNA, 19 nt, Homo sapiens
  misc_RNA (1)...(19): siRNA sense strand
aguagcaacaggacaagaa

SEQ ID NO: 2427229 - RNA, 19 nt, Homo sapiens
  misc_RNA (1)...(19): siRNA sense strand
gcuuuuaaaaugcuggaua

SEQ ID NO: 2427230 - RNA, 19 nt, Homo sapiens
  misc_RNA (1)...(19): siRNA sense strand
uuaagagagcugugaaagu

SEQ ID NO: 2427231 - RNA, 19 nt, Homo sapiens
  misc_RNA (1)...(19): siRNA sense strand
ugagcaaauggaacguaaa

SEQ ID NO: 2427232 - RNA, 19 nt, Homo sapiens
  misc_RNA (1)...(19): siRNA sense strand
gaggauacacugucaggga

SEQ ID NO: 2427233 - RNA, 19 nt, Homo sapiens
  misc_RNA (1)...(19): siRNA sense strand
ugaaaguagcaacaggaca

SEQ ID NO: 2427234 - RNA, 19 nt, Homo sapiens
  misc_RNA (1)...(19): siRNA sense strand
ugucagcaggagagagcau

SEQ ID NO: 2427235 - RNA, 19 nt, Homo sapiens
  misc_RNA (1)...(19): siRNA sense strand
caucgagguuuauggguac

SEQ ID NO: 2427236 - RNA, 19 nt, Homo sapiens
  misc_RNA (1)...(19): siRNA sense strand
ccacaacaucagaguauac

SEQ ID NO: 2427237 - RNA, 19 nt, Homo sapiens
  misc_RNA (1)...(19): siRNA sense strand
caggaagagcugucggaaa

SEQ ID NO: 2427238 - RNA, 19 nt, Homo sapiens
  misc_RNA (1)...(19): siRNA sense strand
aggacaaggagaugggaau

SEQ ID NO: 2427239 - RNA, 19 nt, Homo sapiens
  misc_RNA (1)...(19): siRNA sense strand
cgucagauugcgagugaau

SEQ ID NO: 2427240 - RNA, 19 nt, Homo sapiens
  misc_RNA (1)...(19): siRNA sense strand
agacggaggaacuggacaa

SEQ ID NO: 2427241 - RNA, 19 nt, Homo sapiens
  misc_RNA (1)...(19): siRNA sense strand
cugccuuaguggaugacaa

SEQ ID NO: 2427242 - RNA, 19 nt, Homo sapiens
  misc_RNA (1)...(19): siRNA sense strand
gugcaagaggacaaggaga

SEQ ID NO: 2427243 - RNA, 19 nt, Homo sapiens
  misc_RNA (1)...(19): siRNA sense strand
uugagaaacaguacaacaa

SEQ ID NO: 2427244 - RNA, 19 nt, Homo sapiens
  misc_RNA (1)...(19): siRNA sense strand
ccgcagugaagauaaggaa

SEQ ID NO: 2427245 - RNA, 19 nt, Homo sapiens
  misc_RNA (1)...(19): siRNA sense strand
aggagaugggaauggaaau

SEQ ID NO: 2427246 - RNA, 19 nt, Homo sapiens
  misc_RNA (1)...(19): siRNA sense strand
ccacacaggaacacgguga

SEQ ID NO: 2427247 - RNA, 19 nt, Homo sapiens
  misc_RNA (1)...(19): siRNA sense strand
agcgcaagcuggagagcau

SEQ ID NO: 2427248 - RNA, 19 nt, Homo sapiens
  misc_RNA (1)...(19): siRNA sense strand
gaggacaaggagaugggaa

SEQ ID NO: 2427249 - RNA, 19 nt, Homo sapiens
  misc_RNA (1)...(19): siRNA sense strand
aaggagaugggaauggaaa

SEQ ID NO: 2427250 - RNA, 19 nt, Homo sapiens
  misc_RNA (1)...(19): siRNA sense strand
agauggagcuuguggaccu

SEQ ID NO: 2427251 - RNA, 19 nt, Homo sapiens
  misc_RNA (1)...(19): siRNA sense strand
cagaaaaccagaagaaacu

SEQ ID NO: 2427252 - RNA, 19 nt, Homo sapiens
  misc_RNA (1)...(19): siRNA sense strand
ugcaagaggacaaggagau

SEQ ID NO: 2427253 - RNA, 19 nt, Homo sapiens
  misc_RNA (1)...(19): siRNA sense strand
gcugggagggacuggauau

SEQ ID NO: 2427254 - RNA, 19 nt, Homo sapiens
  misc_RNA (1)...(19): siRNA sense strand
cugcaaccucagcgugaaa

SEQ ID NO: 2427255 - RNA, 19 nt, Homo sapiens
  misc_RNA (1)...(19): siRNA sense strand
agaaacuugccauguuaaa

SEQ ID NO: 2427256 - RNA, 19 nt, Homo sapiens
  misc_RNA (1)...(19): siRNA sense strand
ccaaccagacggaggaacu

SEQ ID NO: 2427257 - RNA, 19 nt, Homo sapiens
  misc_RNA (1)...(19): siRNA sense strand
ggaccaacgucauccggga

SEQ ID NO: 2427258 - RNA, 19 nt, Homo sapiens
  misc_RNA (1)...(19): siRNA sense strand
gcaaauacccgcugcagcu

SEQ ID NO: 2427259 - RNA, 19 nt, Homo sapiens
  misc_RNA (1)...(19): siRNA sense strand
ggcgggugcaagaggacaa

SEQ ID NO: 2427260 - RNA, 19 nt, Homo sapiens
  misc_RNA (1)...(19): siRNA sense strand
ggaccaaccagacggagga

SEQ ID NO: 2427261 - RNA, 19 nt, Homo sapiens
  misc_RNA (1)...(19): siRNA sense strand
cuuaagugaaauaggaucu

SEQ ID NO: 2427262 - RNA, 19 nt, Homo sapiens
  misc_RNA (1)...(19): siRNA sense strand
gaccaaaaucacuaagcaa

SEQ ID NO: 2427263 - RNA, 19 nt, Homo sapiens
  misc_RNA (1)...(19): siRNA sense strand
guuaaaugcucaaaaggca

SEQ ID NO: 2427264 - RNA, 19 nt, Homo sapiens
  misc_RNA (1)...(19): siRNA sense strand
ugacaacgguagugaggag

SEQ ID NO: 2427265 - RNA, 19 nt, Homo sapiens
  misc_RNA (1)...(19): siRNA sense strand
aaucacuaagcaaggcaaa

SEQ ID NO: 2427266 - RNA, 19 nt, Homo sapiens
  misc_RNA (1)...(19): siRNA sense strand
gcggaacccaagaggaagu

SEQ ID NO: 2427267 - RNA, 19 nt, Homo sapiens
  misc_RNA (1)...(19): siRNA sense strand
cuugagaaacaguacaaca

SEQ ID NO: 2427268 - RNA, 19 nt, Homo sapiens
  misc_RNA (1)...(19): siRNA sense strand
ggucaaaugugcaaagcgu

SEQ ID NO: 2427269 - RNA, 19 nt, Homo sapiens
  misc_RNA (1)...(19): siRNA sense strand
agggaaagcaggagaugga

SEQ ID NO: 2427270 - RNA, 19 nt, Homo sapiens
  misc_RNA (1)...(19): siRNA sense strand
gaauaaagcaugcaggaag

SEQ ID NO: 2427271 - RNA, 19 nt, Homo sapiens
  misc_RNA (1)...(19): siRNA sense strand
uugucaaagagaagaggaa

SEQ ID NO: 2427272 - RNA, 19 nt, Homo sapiens
  misc_RNA (1)...(19): siRNA sense strand
cugaaggaagcaaggaaga

SEQ ID NO: 2427273 - RNA, 19 nt, Homo sapiens
  misc_RNA (1)...(19): siRNA sense strand
gaagcaaggaagaaagcca

SEQ ID NO: 2427274 - RNA, 19 nt, Homo sapiens
  misc_RNA (1)...(19): siRNA sense strand
ugucaaagagaagaggaaa

SEQ ID NO: 2427275 - RNA, 19 nt, Homo sapiens
  misc_RNA (1)...(19): siRNA sense strand
agagaagaggaaaggagau

SEQ ID NO: 2427276 - RNA, 19 nt, Homo sapiens
  misc_RNA (1)...(19): siRNA sense strand
gaagaaagccacaugguug

SEQ ID NO: 2427277 - RNA, 19 nt, Homo sapiens
  misc_RNA (1)...(19): siRNA sense strand
cugcaaagaugaaaaggga

SEQ ID NO: 2427278 - RNA, 19 nt, Homo sapiens
  misc_RNA (1)...(19): siRNA sense strand
ucaaaugugcaaagcguca

SEQ ID NO: 2427279 - RNA, 19 nt, Homo sapiens
  misc_RNA (1)...(19): siRNA sense strand
aagagaagaggaaaggaga

SEQ ID NO: 2427280 - RNA, 19 nt, Homo sapiens
  misc_RNA (1)...(19): siRNA sense strand
agaggaaaggagaucacua

SEQ ID NO: 2427281 - RNA, 19 nt, Homo sapiens
  misc_RNA (1)...(19): siRNA sense strand
agaauaaagcaugcaggaa

SEQ ID NO: 2427282 - RNA, 19 nt, Homo sapiens
  misc_RNA (1)...(19): siRNA sense strand
gucaaagagaagaggaaag

SEQ ID NO: 2427283 - RNA, 19 nt, Homo sapiens
  misc_RNA (1)...(19): siRNA sense strand
ccacacuuacaaaggucaa

SEQ ID NO: 2427284 - RNA, 19 nt, Homo sapiens
  misc_RNA (1)...(19): siRNA sense strand
ccagagaccugaaggaagc

SEQ ID NO: 2427285 - RNA, 19 nt, Homo sapiens
  misc_RNA (1)...(19): siRNA sense strand
aagaauaaagcaugcagga

SEQ ID NO: 2427286 - RNA, 19 nt, Homo sapiens
  misc_RNA (1)...(19): siRNA sense strand
ccacuacucccaagggcaa

SEQ ID NO: 2427287 - RNA, 19 nt, Homo sapiens
  misc_RNA (1)...(19): siRNA sense strand
gggcuggagaccuugacaa

SEQ ID NO: 2427288 - RNA, 19 nt, Homo sapiens
  misc_RNA (1)...(19): siRNA sense strand
uggaaguauauacgccaaa

SEQ ID NO: 2427289 - RNA, 19 nt, Homo sapiens
  misc_RNA (1)...(19): siRNA sense strand
agaagaaccaggagggcuu

SEQ ID NO: 2427290 - RNA, 19 nt, Homo sapiens
  misc_RNA (1)...(19): siRNA sense strand
ccucaaacucggcgguaau

SEQ ID NO: 2427291 - RNA, 19 nt, Homo sapiens
  misc_RNA (1)...(19): siRNA sense strand
ugcccaugcuggaggacaa

SEQ ID NO: 2427292 - RNA, 19 nt, Homo sapiens
  misc_RNA (1)...(19): siRNA sense strand
cuggagauggagaugguua

SEQ ID NO: 2427293 - RNA, 19 nt, Homo sapiens
  misc_RNA (1)...(19): siRNA sense strand
acgagaaggccaaggucau

SEQ ID NO: 2427294 - RNA, 19 nt, Homo sapiens
  misc_RNA (1)...(19): siRNA sense strand
cuggagaggcugacgcaga

SEQ ID NO: 2427295 - RNA, 19 nt, Homo sapiens
  misc_RNA (1)...(19): siRNA sense strand
uggagauggagaugguuau

SEQ ID NO: 2427296 - RNA, 19 nt, Homo sapiens
  misc_RNA (1)...(19): siRNA sense strand
ccacgaugaaggacgacau

SEQ ID NO: 2427297 - RNA, 19 nt, Homo sapiens
  misc_RNA (1)...(19): siRNA sense strand
cagcaguacgagaaggcca

SEQ ID NO: 2427298 - RNA, 19 nt, Homo sapiens
  misc_RNA (1)...(19): siRNA sense strand
cccucaaacucggcgguaa

SEQ ID NO: 2427299 - RNA, 19 nt, Homo sapiens
  misc_RNA (1)...(19): siRNA sense strand
gcucaggccuuucccgcaa

SEQ ID NO: 2427300 - RNA, 19 nt, Homo sapiens
  misc_RNA (1)...(19): siRNA sense strand
ugugaaggauuuaccgcaa

SEQ ID NO: 2427301 - RNA, 19 nt, Homo sapiens
  misc_RNA (1)...(19): siRNA sense strand
aaacguaggugcacagcca

SEQ ID NO: 2427302 - RNA, 19 nt, Homo sapiens
  misc_RNA (1)...(19): siRNA sense strand
aggaaaacuuacaucacaa

SEQ ID NO: 2427303 - RNA, 19 nt, Homo sapiens
  misc_RNA (1)...(19): siRNA sense strand
aacugaacuuccaggacaa

SEQ ID NO: 2427304 - RNA, 19 nt, Homo sapiens
  misc_RNA (1)...(19): siRNA sense strand
aaacugaacuuccaggaca

SEQ ID NO: 2427305 - RNA, 19 nt, Homo sapiens
  misc_RNA (1)...(19): siRNA sense strand
acaacaaacaguagaaccu

SEQ ID NO: 2427306 - RNA, 19 nt, Homo sapiens
  misc_RNA (1)...(19): siRNA sense strand
gaauaaagcaagcccagca

SEQ ID NO: 2427307 - RNA, 19 nt, Homo sapiens
  misc_RNA (1)...(19): siRNA sense strand
caaagugaaagaagcccaa

SEQ ID NO: 2427308 - RNA, 19 nt, Homo sapiens
  misc_RNA (1)...(19): siRNA sense strand
cugcucagaaccaggaaau

SEQ ID NO: 2427309 - RNA, 19 nt, Homo sapiens
  misc_RNA (1)...(19): siRNA sense strand
aagacauaaagaagcgaau

SEQ ID NO: 2427310 - RNA, 19 nt, Homo sapiens
  misc_RNA (1)...(19): siRNA sense strand
agacuguaggaaauguaaa

SEQ ID NO: 2427311 - RNA, 19 nt, Homo sapiens
  misc_RNA (1)...(19): siRNA sense strand
ccaaagugaaagaagccca

SEQ ID NO: 2427312 - RNA, 19 nt, Homo sapiens
  misc_RNA (1)...(19): siRNA sense strand
ggauccuggcugagcgaaa

SEQ ID NO: 2427313 - RNA, 19 nt, Homo sapiens
  misc_RNA (1)...(19): siRNA sense strand
cugcugggccugugggauu

SEQ ID NO: 2427314 - RNA, 19 nt, Homo sapiens
  misc_RNA (1)...(19): siRNA sense strand
ggauccuggcugagcgaaa

SEQ ID NO: 2427315 - RNA, 19 nt, Homo sapiens
  misc_RNA (1)...(19): siRNA sense strand
cugcugggccugugggauu

SEQ ID NO: 2427316 - RNA, 19 nt, Homo sapiens
  misc_RNA (1)...(19): siRNA sense strand
gugacaugaaagugugcaa

SEQ ID NO: 2427317 - RNA, 19 nt, Homo sapiens
  misc_RNA (1)...(19): siRNA sense strand
cacuagaaaaggugaagaa

SEQ ID NO: 2427318 - RNA, 19 nt, Homo sapiens
  misc_RNA (1)...(19): siRNA sense strand
ccguagaguucguggcaga

SEQ ID NO: 2427319 - RNA, 19 nt, Homo sapiens
  misc_RNA (1)...(19): siRNA sense strand
ggaaagaauucguacguuc

SEQ ID NO: 2427320 - RNA, 19 nt, Homo sapiens
  misc_RNA (1)...(19): siRNA sense strand
ccuugaagcugcuggcuga

SEQ ID NO: 2427321 - RNA, 19 nt, Homo sapiens
  misc_RNA (1)...(19): siRNA sense strand
uggcuaaauuccugggcuu

SEQ ID NO: 2427322 - RNA, 19 nt, Homo sapiens
  misc_RNA (1)...(19): siRNA sense strand
ggcagaaagaauuggauca

SEQ ID NO: 2427323 - RNA, 19 nt, Homo sapiens
  misc_RNA (1)...(19): siRNA sense strand
ggugacacagggagaggaa

SEQ ID NO: 2427324 - RNA, 19 nt, Homo sapiens
  misc_RNA (1)...(19): siRNA sense strand
aggcaguaguggacggagu

SEQ ID NO: 2427325 - RNA, 19 nt, Homo sapiens
  misc_RNA (1)...(19): siRNA sense strand
gcacaguacaggcuggaga

SEQ ID NO: 2427326 - RNA, 19 nt, Homo sapiens
  misc_RNA (1)...(19): siRNA sense strand
gggacuuugcugaagaauu

SEQ ID NO: 2427327 - RNA, 19 nt, Homo sapiens
  misc_RNA (1)...(19): siRNA sense strand
gcuugaagauccaggagcu

SEQ ID NO: 2427328 - RNA, 19 nt, Homo sapiens
  misc_RNA (1)...(19): siRNA sense strand
cuggaauauuaccgggaca

SEQ ID NO: 2427329 - RNA, 19 nt, Homo sapiens
  misc_RNA (1)...(19): siRNA sense strand
uuuaagaaacagagggaug

SEQ ID NO: 2427330 - RNA, 19 nt, Homo sapiens
  misc_RNA (1)...(19): siRNA sense strand
uuuaugaggugcugcgaga

SEQ ID NO: 2427331 - RNA, 19 nt, Homo sapiens
  misc_RNA (1)...(19): siRNA sense strand
ggggcuugcaacagagaaa

SEQ ID NO: 2427332 - RNA, 19 nt, Homo sapiens
  misc_RNA (1)...(19): siRNA sense strand
cugagcagcaucuggcaaa

SEQ ID NO: 2427333 - RNA, 19 nt, Homo sapiens
  misc_RNA (1)...(19): siRNA sense strand
gggaagaucaccaugagga

SEQ ID NO: 2427334 - RNA, 19 nt, Homo sapiens
  misc_RNA (1)...(19): siRNA sense strand
ccccagauguguugaguau

SEQ ID NO: 2427335 - RNA, 19 nt, Homo sapiens
  misc_RNA (1)...(19): siRNA sense strand
aggcuacacugguggcaga

SEQ ID NO: 2427336 - RNA, 19 nt, Homo sapiens
  misc_RNA (1)...(19): siRNA sense strand
gacacaaggccaagggagu

SEQ ID NO: 2427337 - RNA, 19 nt, Homo sapiens
  misc_RNA (1)...(19): siRNA sense strand
ugaagauccaggagcucaa

SEQ ID NO: 2427338 - RNA, 19 nt, Homo sapiens
  misc_RNA (1)...(19): siRNA sense strand
aggccaagggagugggacu

SEQ ID NO: 2427339 - RNA, 19 nt, Homo sapiens
  misc_RNA (1)...(19): siRNA sense strand
acguagacuggcaggguga

SEQ ID NO: 2427340 - RNA, 19 nt, Homo sapiens
  misc_RNA (1)...(19): siRNA sense strand
uggaucaaacugugucaaa

SEQ ID NO: 2427341 - RNA, 19 nt, Homo sapiens
  misc_RNA (1)...(19): siRNA sense strand
ggauggagauagaggccug

SEQ ID NO: 2427342 - RNA, 19 nt, Homo sapiens
  misc_RNA (1)...(19): siRNA sense strand
gcucuaagcagcugcagca

SEQ ID NO: 2427343 - RNA, 19 nt, Homo sapiens
  misc_RNA (1)...(19): siRNA sense strand
aguucguggcagaaagaau

SEQ ID NO: 2427344 - RNA, 19 nt, Homo sapiens
  misc_RNA (1)...(19): siRNA sense strand
ugaucaggagggaggugaa

SEQ ID NO: 2427345 - RNA, 19 nt, Homo sapiens
  misc_RNA (1)...(19): siRNA sense strand
uggaacagcuccuaggcca

SEQ ID NO: 2427346 - RNA, 19 nt, Homo sapiens
  misc_RNA (1)...(19): siRNA sense strand
ccuccucguugcagaucaa

SEQ ID NO: 2427347 - RNA, 19 nt, Homo sapiens
  misc_RNA (1)...(19): siRNA sense strand
agggcaggcucgaaggcuu

SEQ ID NO: 2427348 - RNA, 19 nt, Homo sapiens
  misc_RNA (1)...(19): siRNA sense strand
cagagcauggcuuggacaa

SEQ ID NO: 2427349 - RNA, 19 nt, Homo sapiens
  misc_RNA (1)...(19): siRNA sense strand
cugaagaauuagcaacacu

SEQ ID NO: 2427350 - RNA, 19 nt, Homo sapiens
  misc_RNA (1)...(19): siRNA sense strand
gugcaauaaacgaaagaaa

SEQ ID NO: 2427351 - RNA, 19 nt, Homo sapiens
  misc_RNA (1)...(19): siRNA sense strand
aggaggaacuggaggcaau

SEQ ID NO: 2427352 - RNA, 19 nt, Homo sapiens
  misc_RNA (1)...(19): siRNA sense strand
augcugagcuggaggacaa

SEQ ID NO: 2427353 - RNA, 19 nt, Homo sapiens
  misc_RNA (1)...(19): siRNA sense strand
aagaaaagcuggagagguu

SEQ ID NO: 2427354 - RNA, 19 nt, Homo sapiens
  misc_RNA (1)...(19): siRNA sense strand
aagagauauucuagagcaa

SEQ ID NO: 2427355 - RNA, 19 nt, Homo sapiens
  misc_RNA (1)...(19): siRNA sense strand
cagaaguucaagaggcaua

SEQ ID NO: 2427356 - RNA, 19 nt, Homo sapiens
  misc_RNA (1)...(19): siRNA sense strand
agaaauauccuaaggcaga

SEQ ID NO: 2427357 - RNA, 19 nt, Homo sapiens
  misc_RNA (1)...(19): siRNA sense strand
ccauuaaagagaagguaga

SEQ ID NO: 2427358 - RNA, 19 nt, Homo sapiens
  misc_RNA (1)...(19): siRNA sense strand
aggagagaguugaagauuu

SEQ ID NO: 2427359 - RNA, 19 nt, Homo sapiens
  misc_RNA (1)...(19): siRNA sense strand
aaugugaagaagugggaua

SEQ ID NO: 2427360 - RNA, 19 nt, Homo sapiens
  misc_RNA (1)...(19): siRNA sense strand
ccucaaaagguaagaauau

SEQ ID NO: 2427361 - RNA, 19 nt, Homo sapiens
  misc_RNA (1)...(19): siRNA sense strand
gaguugaagauuuggaaaa

SEQ ID NO: 2427362 - RNA, 19 nt, Homo sapiens
  misc_RNA (1)...(19): siRNA sense strand
gcaaaaucaacguguguua

SEQ ID NO: 2427363 - RNA, 19 nt, Homo sapiens
  misc_RNA (1)...(19): siRNA sense strand
aggaauuggaggacaguuu

SEQ ID NO: 2427364 - RNA, 19 nt, Homo sapiens
  misc_RNA (1)...(19): siRNA sense strand
ggcuaaacccauuggucua

SEQ ID NO: 2427365 - RNA, 19 nt, Homo sapiens
  misc_RNA (1)...(19): siRNA sense strand
ggaaagaauagaauggagu

SEQ ID NO: 2427366 - RNA, 19 nt, Homo sapiens
  misc_RNA (1)...(19): siRNA sense strand
guucaagaggcauacgaaa

SEQ ID NO: 2427367 - RNA, 19 nt, Homo sapiens
  misc_RNA (1)...(19): siRNA sense strand
gccuagggcaggagaagaa

SEQ ID NO: 2427368 - RNA, 19 nt, Homo sapiens
  misc_RNA (1)...(19): siRNA sense strand
aagagaagguagagcugau

SEQ ID NO: 2427369 - RNA, 19 nt, Homo sapiens
  misc_RNA (1)...(19): siRNA sense strand
agcuggaggacaagagaaa

SEQ ID NO: 2427370 - RNA, 19 nt, Homo sapiens
  misc_RNA (1)...(19): siRNA sense strand
aaccagaagcucagacuaa

SEQ ID NO: 2427371 - RNA, 19 nt, Homo sapiens
  misc_RNA (1)...(19): siRNA sense strand
aggcagauucagagaagau

SEQ ID NO: 2427372 - RNA, 19 nt, Homo sapiens
  misc_RNA (1)...(19): siRNA sense strand
cgacaugcugaauggacaa

SEQ ID NO: 2427373 - RNA, 19 nt, Homo sapiens
  misc_RNA (1)...(19): siRNA sense strand
cccauggagaugaggauaa

SEQ ID NO: 2427374 - RNA, 19 nt, Homo sapiens
  misc_RNA (1)...(19): siRNA sense strand
guucuagaguacuggauga

SEQ ID NO: 2427375 - RNA, 19 nt, Homo sapiens
  misc_RNA (1)...(19): siRNA sense strand
gggaaggauaccaaggaca

SEQ ID NO: 2427376 - RNA, 19 nt, Homo sapiens
  misc_RNA (1)...(19): siRNA sense strand
ggagucaggaagagauauu

SEQ ID NO: 2427377 - RNA, 19 nt, Homo sapiens
  misc_RNA (1)...(19): siRNA sense strand
aaagaaaggagaaggagca

SEQ ID NO: 2427378 - RNA, 19 nt, Homo sapiens
  misc_RNA (1)...(19): siRNA sense strand
cggaacagcuacagcagca

SEQ ID NO: 2427379 - RNA, 19 nt, Homo sapiens
  misc_RNA (1)...(19): siRNA sense strand
gggaggaauuggaggacag

SEQ ID NO: 2427380 - RNA, 19 nt, Homo sapiens
  misc_RNA (1)...(19): siRNA sense strand
ccacauuggaacuagaaaa

SEQ ID NO: 2427381 - RNA, 19 nt, Homo sapiens
  misc_RNA (1)...(19): siRNA sense strand
guucaaggaaagaauagaa

SEQ ID NO: 2427382 - RNA, 19 nt, Homo sapiens
  misc_RNA (1)...(19): siRNA sense strand
cagagaagcucauuggagu

SEQ ID NO: 2427383 - RNA, 19 nt, Homo sapiens
  misc_RNA (1)...(19): siRNA sense strand
cuagaaaagaccagggaca

SEQ ID NO: 2427384 - RNA, 19 nt, Homo sapiens
  misc_RNA (1)...(19): siRNA sense strand
aguaugugauggagacaga

SEQ ID NO: 2427385 - RNA, 19 nt, Homo sapiens
  misc_RNA (1)...(19): siRNA sense strand
ugcuagagacuguggagaa

SEQ ID NO: 2427386 - RNA, 19 nt, Homo sapiens
  misc_RNA (1)...(19): siRNA sense strand
cagacuaaggggaaggaua

SEQ ID NO: 2427387 - RNA, 19 nt, Homo sapiens
  misc_RNA (1)...(19): siRNA sense strand
gaaaggagaaggagcacca

SEQ ID NO: 2427388 - RNA, 19 nt, Homo sapiens
  misc_RNA (1)...(19): siRNA sense strand
aagaagaaaacauggcaaa

SEQ ID NO: 2427389 - RNA, 19 nt, Homo sapiens
  misc_RNA (1)...(19): siRNA sense strand
agaaagaaugugaagaagu

SEQ ID NO: 2427390 - RNA, 19 nt, Homo sapiens
  misc_RNA (1)...(19): siRNA sense strand
caaaagaauagguguucaa

SEQ ID NO: 2427391 - RNA, 19 nt, Homo sapiens
  misc_RNA (1)...(19): siRNA sense strand
aguaucgaucuaagagaaa

SEQ ID NO: 2427392 - RNA, 19 nt, Homo sapiens
  misc_RNA (1)...(19): siRNA sense strand
agcaacaggaugagaucaa

SEQ ID NO: 2427393 - RNA, 19 nt, Homo sapiens
  misc_RNA (1)...(19): siRNA sense strand
agcacgaggaagaggaaau

SEQ ID NO: 2427394 - RNA, 19 nt, Homo sapiens
  misc_RNA (1)...(19): siRNA sense strand
auaggaaggcugaagguuu

SEQ ID NO: 2427395 - RNA, 19 nt, Homo sapiens
  misc_RNA (1)...(19): siRNA sense strand
cuugccaguuagagacaua

SEQ ID NO: 2427396 - RNA, 19 nt, Homo sapiens
  misc_RNA (1)...(19): siRNA sense strand
gguuaugacaaaagcacaa

SEQ ID NO: 2427397 - RNA, 19 nt, Homo sapiens
  misc_RNA (1)...(19): siRNA sense strand
ggggagaaagaaaggagaa

SEQ ID NO: 2427398 - RNA, 19 nt, Homo sapiens
  misc_RNA (1)...(19): siRNA sense strand
aggagaugacugaagauuu

SEQ ID NO: 2427399 - RNA, 19 nt, Homo sapiens
  misc_RNA (1)...(19): siRNA sense strand
aaguagagcuccuccaaaa

SEQ ID NO: 2427400 - RNA, 19 nt, Homo sapiens
  misc_RNA (1)...(19): siRNA sense strand
gcacugaaacagaaggaac

SEQ ID NO: 2427401 - RNA, 19 nt, Homo sapiens
  misc_RNA (1)...(19): siRNA sense strand
cacccaugucucagaaaua

SEQ ID NO: 2427402 - RNA, 19 nt, Homo sapiens
  misc_RNA (1)...(19): siRNA sense strand
cuggagucaggaagagaua

SEQ ID NO: 2427403 - RNA, 19 nt, Homo sapiens
  misc_RNA (1)...(19): siRNA sense strand
agcugaaggaagaaagcaa

SEQ ID NO: 2427404 - RNA, 19 nt, Homo sapiens
  misc_RNA (1)...(19): siRNA sense strand
caacgagcucauagcggaa

SEQ ID NO: 2427405 - RNA, 19 nt, Homo sapiens
  misc_RNA (1)...(19): siRNA sense strand
gggagaaagcccaaaauga

SEQ ID NO: 2427406 - RNA, 19 nt, Homo sapiens
  misc_RNA (1)...(19): siRNA sense strand
gcuugaagucaccaacaua

SEQ ID NO: 2427407 - RNA, 19 nt, Homo sapiens
  misc_RNA (1)...(19): siRNA sense strand
cggaucuauucaagugcaa

SEQ ID NO: 2427408 - RNA, 19 nt, Homo sapiens
  misc_RNA (1)...(19): siRNA sense strand
agcaccagguugugagcua

SEQ ID NO: 2427409 - RNA, 19 nt, Homo sapiens
  misc_RNA (1)...(19): siRNA sense strand
ccuucuacccagaggcaga

SEQ ID NO: 2427410 - RNA, 19 nt, Homo sapiens
  misc_RNA (1)...(19): siRNA sense strand
aagaagugggauaugcaua

SEQ ID NO: 2427411 - RNA, 19 nt, Homo sapiens
  misc_RNA (1)...(19): siRNA sense strand
cuuggaagcaacaggauga

SEQ ID NO: 2427412 - RNA, 19 nt, Homo sapiens
  misc_RNA (1)...(19): siRNA sense strand
aggaaagaagaaagacaaa

SEQ ID NO: 2427413 - RNA, 19 nt, Homo sapiens
  misc_RNA (1)...(19): siRNA sense strand
ccuuaacaggaaagaagaa

SEQ ID NO: 2427414 - RNA, 19 nt, Homo sapiens
  misc_RNA (1)...(19): siRNA sense strand
acaggaaagaagaaagaca

SEQ ID NO: 2427415 - RNA, 19 nt, Homo sapiens
  misc_RNA (1)...(19): siRNA sense strand
uguuacagcuguugggucu

SEQ ID NO: 2427416 - RNA, 19 nt, Homo sapiens
  misc_RNA (1)...(19): siRNA sense strand
cuuaacaggaaagaagaaa

SEQ ID NO: 2427417 - RNA, 19 nt, Homo sapiens
  misc_RNA (1)...(19): siRNA sense strand
ccuuaaugaugaaccacca

SEQ ID NO: 2427418 - RNA, 19 nt, Homo sapiens
  misc_RNA (1)...(19): siRNA sense strand
uuauaaugggagaggauga

SEQ ID NO: 2427419 - RNA, 19 nt, Homo sapiens
  misc_RNA (1)...(19): siRNA sense strand
cugcaaugccuuaacgaga

SEQ ID NO: 2427420 - RNA, 19 nt, Homo sapiens
  misc_RNA (1)...(19): siRNA sense strand
cgggcaaugucaagcucaa

SEQ ID NO: 2427421 - RNA, 19 nt, Homo sapiens
  misc_RNA (1)...(19): siRNA sense strand
uguugaaagugaugcagau

SEQ ID NO: 2427422 - RNA, 19 nt, Homo sapiens
  misc_RNA (1)...(19): siRNA sense strand
auacagaaagggagccaga

SEQ ID NO: 2427423 - RNA, 19 nt, Homo sapiens
  misc_RNA (1)...(19): siRNA sense strand
ccgggaucuuacaggagaa

SEQ ID NO: 2427424 - RNA, 19 nt, Homo sapiens
  misc_RNA (1)...(19): siRNA sense strand
augucaagcucaaaggcau

SEQ ID NO: 2427425 - RNA, 19 nt, Homo sapiens
  misc_RNA (1)...(19): siRNA sense strand
ugaugcagaugaagagcuu

SEQ ID NO: 2427426 - RNA, 19 nt, Homo sapiens
  misc_RNA (1)...(19): siRNA sense strand
gcagauacgacaaaggucu

SEQ ID NO: 2427427 - RNA, 19 nt, Homo sapiens
  misc_RNA (1)...(19): siRNA sense strand
cugacauguuaguggagau

SEQ ID NO: 2427428 - RNA, 19 nt, Homo sapiens
  misc_RNA (1)...(19): siRNA sense strand
ggguuaacaaguaugugaa

SEQ ID NO: 2427429 - RNA, 19 nt, Homo sapiens
  misc_RNA (1)...(19): siRNA sense strand
acguagaggaaguggagau

SEQ ID NO: 2427430 - RNA, 19 nt, Homo sapiens
  misc_RNA (1)...(19): siRNA sense strand
uccaagacguagaggaagu

SEQ ID NO: 2427431 - RNA, 19 nt, Homo sapiens
  misc_RNA (1)...(19): siRNA sense strand
guaugaagauauugaggga

SEQ ID NO: 2427432 - RNA, 19 nt, Homo sapiens
  misc_RNA (1)...(19): siRNA sense strand
agauauugagggagcacaa

SEQ ID NO: 2427433 - RNA, 19 nt, Homo sapiens
  misc_RNA (1)...(19): siRNA sense strand
gcacaauccaaauacggaa

SEQ ID NO: 2427434 - RNA, 19 nt, Homo sapiens
  misc_RNA (1)...(19): siRNA sense strand
ccugaagcccuaagugaca

SEQ ID NO: 2427435 - RNA, 19 nt, Homo sapiens
  misc_RNA (1)...(19): siRNA sense strand
augcauaugacuugagugu

SEQ ID NO: 2427436 - RNA, 19 nt, Homo sapiens
  misc_RNA (1)...(19): siRNA sense strand
uggaauaaugaaagcagca

SEQ ID NO: 2427437 - RNA, 19 nt, Homo sapiens
  misc_RNA (1)...(19): siRNA sense strand
caguauaaugcauccaaaa

SEQ ID NO: 2427438 - RNA, 19 nt, Homo sapiens
  misc_RNA (1)...(19): siRNA sense strand
ugaucaaaccaaagagaau

SEQ ID NO: 2427439 - RNA, 19 nt, Homo sapiens
  misc_RNA (1)...(19): siRNA sense strand
ccuccagggaaguguuaaa

SEQ ID NO: 2427440 - RNA, 19 nt, Homo sapiens
  misc_RNA (1)...(19): siRNA sense strand
cugugaacaagaugcguaa

SEQ ID NO: 2427441 - RNA, 19 nt, Homo sapiens
  misc_RNA (1)...(19): siRNA sense strand
ugaaaauauugaacgggaa

SEQ ID NO: 2427442 - RNA, 19 nt, Homo sapiens
  misc_RNA (1)...(19): siRNA sense strand
uggaauuaaagauggauca

SEQ ID NO: 2427443 - RNA, 19 nt, Homo sapiens
  misc_RNA (1)...(19): siRNA sense strand
ccuuggaauuaaagaugga

SEQ ID NO: 2427444 - RNA, 19 nt, Homo sapiens
  misc_RNA (1)...(19): siRNA sense strand
auuaaagcaccgagcugaa

SEQ ID NO: 2427445 - RNA, 19 nt, Homo sapiens
  misc_RNA (1)...(19): siRNA sense strand
ugguuguagaagacauaaa

SEQ ID NO: 2427446 - RNA, 19 nt, Homo sapiens
  misc_RNA (1)...(19): siRNA sense strand
accgagucguugaggaaaa

SEQ ID NO: 2427447 - RNA, 19 nt, Homo sapiens
  misc_RNA (1)...(19): siRNA sense strand
ggggaaugucugagggaaa

SEQ ID NO: 2427448 - RNA, 19 nt, Homo sapiens
  misc_RNA (1)...(19): siRNA sense strand
gggauggauucaaaggaga

SEQ ID NO: 2427449 - RNA, 19 nt, Homo sapiens
  misc_RNA (1)...(19): siRNA sense strand
gggaaagcuuugaggaguc

SEQ ID NO: 2427450 - RNA, 19 nt, Homo sapiens
  misc_RNA (1)...(19): siRNA sense strand
aggacuuugugaaggaauu

SEQ ID NO: 2427451 - RNA, 19 nt, Homo sapiens
  misc_RNA (1)...(19): siRNA sense strand
gcuucuacuggauggaauu

SEQ ID NO: 2427452 - RNA, 19 nt, Homo sapiens
  misc_RNA (1)...(19): siRNA sense strand
ugaaggaauuggugcugga

SEQ ID NO: 2427453 - RNA, 19 nt, Homo sapiens
  misc_RNA (1)...(19): siRNA sense strand
gguaaaggagcgugagcga

SEQ ID NO: 2427454 - RNA, 19 nt, Homo sapiens
  misc_RNA (1)...(19): siRNA sense strand
ggaagauggauguggcuga

SEQ ID NO: 2427455 - RNA, 19 nt, Homo sapiens
  misc_RNA (1)...(19): siRNA sense strand
cagugagacgcgaggguga

SEQ ID NO: 2427456 - RNA, 19 nt, Homo sapiens
  misc_RNA (1)...(19): siRNA sense strand
gccaugaacuucugggcca

SEQ ID NO: 2427457 - RNA, 19 nt, Homo sapiens
  misc_RNA (1)...(19): siRNA sense strand
aggagcagaagcaggacaa

SEQ ID NO: 2427458 - RNA, 19 nt, Homo sapiens
  misc_RNA (1)...(19): siRNA sense strand
gccuaagcgugguggccau

SEQ ID NO: 2427459 - RNA, 19 nt, Homo sapiens
  misc_RNA (1)...(19): siRNA sense strand
cacuggaggaggagcagaa

SEQ ID NO: 2427460 - RNA, 19 nt, Homo sapiens
  misc_RNA (1)...(19): siRNA sense strand
uggaggaggagcagaagca

SEQ ID NO: 2427461 - RNA, 19 nt, Homo sapiens
  misc_RNA (1)...(19): siRNA sense strand
aggucaacauuuaggagaa

SEQ ID NO: 2427462 - RNA, 19 nt, Homo sapiens
  misc_RNA (1)...(19): siRNA sense strand
acaaaaugucagagaguuu

SEQ ID NO: 2427463 - RNA, 19 nt, Homo sapiens
  misc_RNA (1)...(19): siRNA sense strand
gaaacaagugccaaggaca

SEQ ID NO: 2427464 - RNA, 19 nt, Homo sapiens
  misc_RNA (1)...(19): siRNA sense strand
aggagaacagcuuggguuu

SEQ ID NO: 2427465 - RNA, 19 nt, Homo sapiens
  misc_RNA (1)...(19): siRNA sense strand
aaaacauacucuugggaca

SEQ ID NO: 2427466 - RNA, 19 nt, Homo sapiens
  misc_RNA (1)...(19): siRNA sense strand
guggauaucaucugcgaca

SEQ ID NO: 2427467 - RNA, 19 nt, Homo sapiens
  misc_RNA (1)...(19): siRNA sense strand
cuucaaugcaguacaagau

SEQ ID NO: 2427468 - RNA, 19 nt, Homo sapiens
  misc_RNA (1)...(19): siRNA sense strand
caauagcaguguggggaaa

SEQ ID NO: 2427469 - RNA, 19 nt, Homo sapiens
  misc_RNA (1)...(19): siRNA sense strand
aaguuauucugguugggaa

SEQ ID NO: 2427470 - RNA, 19 nt, Homo sapiens
  misc_RNA (1)...(19): siRNA sense strand
guugggaacaagugugaca

SEQ ID NO: 2427471 - RNA, 19 nt, Homo sapiens
  misc_RNA (1)...(19): siRNA sense strand
gcaauagcaguguggggaa

SEQ ID NO: 2427472 - RNA, 19 nt, Homo sapiens
  misc_RNA (1)...(19): siRNA sense strand
aacacgagacucaaggaaa

SEQ ID NO: 2427473 - RNA, 19 nt, Homo sapiens
  misc_RNA (1)...(19): siRNA sense strand
acauuuaggagaacagcuu

SEQ ID NO: 2427474 - RNA, 19 nt, Homo sapiens
  misc_RNA (1)...(19): siRNA sense strand
cagaggaccuggaggacca

SEQ ID NO: 2427475 - RNA, 19 nt, Homo sapiens
  misc_RNA (1)...(19): siRNA sense strand
acaaguaccgcguggaaaa

SEQ ID NO: 2427476 - RNA, 19 nt, Homo sapiens
  misc_RNA (1)...(19): siRNA sense strand
gcucaaugcagguuggcua

SEQ ID NO: 2427477 - RNA, 19 nt, Homo sapiens
  misc_RNA (1)...(19): siRNA sense strand
augaagagcagcagaaaga

SEQ ID NO: 2427478 - RNA, 19 nt, Homo sapiens
  misc_RNA (1)...(19): siRNA sense strand
ccaaugaagagcagcagaa

SEQ ID NO: 2427479 - RNA, 19 nt, Homo sapiens
  misc_RNA (1)...(19): siRNA sense strand
aguccgagguugaugaaau

SEQ ID NO: 2427480 - RNA, 19 nt, Homo sapiens
  misc_RNA (1)...(19): siRNA sense strand
uggaauguaaacugggaaa

SEQ ID NO: 2427481 - RNA, 19 nt, Homo sapiens
  misc_RNA (1)...(19): siRNA sense strand
cccuaaacuugcagauaau

SEQ ID NO: 2427482 - RNA, 19 nt, Homo sapiens
  misc_RNA (1)...(19): siRNA sense strand
ccugaauauuagaagauca

SEQ ID NO: 2427483 - RNA, 19 nt, Homo sapiens
  misc_RNA (1)...(19): siRNA sense strand
uguaaauguagcaggaaga

SEQ ID NO: 2427484 - RNA, 19 nt, Homo sapiens
  misc_RNA (1)...(19): siRNA sense strand
cgauguaaauguagcagga

SEQ ID NO: 2427485 - RNA, 19 nt, Homo sapiens
  misc_RNA (1)...(19): siRNA sense strand
aaaccaacucuaugagcaa

SEQ ID NO: 2427486 - RNA, 19 nt, Homo sapiens
  misc_RNA (1)...(19): siRNA sense strand
cagauuuaaaggaagcaaa

SEQ ID NO: 2427487 - RNA, 19 nt, Homo sapiens
  misc_RNA (1)...(19): siRNA sense strand
cuuuaaagacacauccaua

SEQ ID NO: 2427488 - RNA, 19 nt, Homo sapiens
  misc_RNA (1)...(19): siRNA sense strand
auuugaagauggugagguu

SEQ ID NO: 2427489 - RNA, 19 nt, Homo sapiens
  misc_RNA (1)...(19): siRNA sense strand
aaauguagcaggaagaaaa

SEQ ID NO: 2427490 - RNA, 19 nt, Homo sapiens
  misc_RNA (1)...(19): siRNA sense strand
aguuaguagaacagaucaa

SEQ ID NO: 2427491 - RNA, 19 nt, Homo sapiens
  misc_RNA (1)...(19): siRNA sense strand
cugcugaaacacaggauuu

SEQ ID NO: 2427492 - RNA, 19 nt, Homo sapiens
  misc_RNA (1)...(19): siRNA sense strand
ggguccaggcagaugcaaa

SEQ ID NO: 2427493 - RNA, 19 nt, Homo sapiens
  misc_RNA (1)...(19): siRNA sense strand
ccgaauuugaagaugguga

SEQ ID NO: 2427494 - RNA, 19 nt, Homo sapiens
  misc_RNA (1)...(19): siRNA sense strand
agaagaaauugauugcaca

SEQ ID NO: 2427495 - RNA, 19 nt, Homo sapiens
  misc_RNA (1)...(19): siRNA sense strand
uguuaaagccgucugguga

SEQ ID NO: 2427496 - RNA, 19 nt, Homo sapiens
  misc_RNA (1)...(19): siRNA sense strand
ucuuagaggcugcgaaguu

SEQ ID NO: 2427497 - RNA, 19 nt, Homo sapiens
  misc_RNA (1)...(19): siRNA sense strand
ucgaaaacauggauaugaa

SEQ ID NO: 2427498 - RNA, 19 nt, Homo sapiens
  misc_RNA (1)...(19): siRNA sense strand
gccgaugguaugaaugaaa

SEQ ID NO: 2427499 - RNA, 19 nt, Homo sapiens
  misc_RNA (1)...(19): siRNA sense strand
uccaaggaccagaaugaaa

SEQ ID NO: 2427500 - RNA, 19 nt, Homo sapiens
  misc_RNA (1)...(19): siRNA sense strand
uuuaaagcugucagugaua

SEQ ID NO: 2427501 - RNA, 19 nt, Homo sapiens
  misc_RNA (1)...(19): siRNA sense strand
ugucagugauaucugcaaa

SEQ ID NO: 2427502 - RNA, 19 nt, Homo sapiens
  misc_RNA (1)...(19): siRNA sense strand
caaauaucaaacaguggaa

SEQ ID NO: 2427503 - RNA, 19 nt, Homo sapiens
  misc_RNA (1)...(19): siRNA sense strand
ccaaaagcuuucaaacaau

SEQ ID NO: 2427504 - RNA, 19 nt, Homo sapiens
  misc_RNA (1)...(19): siRNA sense strand
ggagauucacaaauaucaa

SEQ ID NO: 2427505 - RNA, 19 nt, Homo sapiens
  misc_RNA (1)...(19): siRNA sense strand
aaguugugcccgauguaaa

SEQ ID NO: 2427506 - RNA, 19 nt, Homo sapiens
  misc_RNA (1)...(19): siRNA sense strand
aaggagaaccacuagaaaa

SEQ ID NO: 2427507 - RNA, 19 nt, Homo sapiens
  misc_RNA (1)...(19): siRNA sense strand
auggugagguugcgaguca

SEQ ID NO: 2427508 - RNA, 19 nt, Homo sapiens
  misc_RNA (1)...(19): siRNA sense strand
caggcgaguccgagguuga

SEQ ID NO: 2427509 - RNA, 19 nt, Homo sapiens
  misc_RNA (1)...(19): siRNA sense strand
ccacuggacccuggacaaa

SEQ ID NO: 2427510 - RNA, 19 nt, Homo sapiens
  misc_RNA (1)...(19): siRNA sense strand
accaaaagcuuucaaacaa

SEQ ID NO: 2427511 - RNA, 19 nt, Homo sapiens
  misc_RNA (1)...(19): siRNA sense strand
caaugaagagcagcagaaa

SEQ ID NO: 2427512 - RNA, 19 nt, Homo sapiens
  misc_RNA (1)...(19): siRNA sense strand
guauuugagaugugaccau

SEQ ID NO: 2427513 - RNA, 19 nt, Homo sapiens
  misc_RNA (1)...(19): siRNA sense strand
aauugauugcacagaggaa

SEQ ID NO: 2427514 - RNA, 19 nt, Homo sapiens
  misc_RNA (1)...(19): siRNA sense strand
aagaugacauucugggagu

SEQ ID NO: 2427515 - RNA, 19 nt, Homo sapiens
  misc_RNA (1)...(19): siRNA sense strand
ucaaguuaguagaacagau

SEQ ID NO: 2427516 - RNA, 19 nt, Homo sapiens
  misc_RNA (1)...(19): siRNA sense strand
uucuaaaccuggagaguuc

SEQ ID NO: 2427517 - RNA, 19 nt, Homo sapiens
  misc_RNA (1)...(19): siRNA sense strand
augacuugguucagugaca

SEQ ID NO: 2427518 - RNA, 19 nt, Homo sapiens
  misc_RNA (1)...(19): siRNA sense strand
cauccauagcauacuuuaa

SEQ ID NO: 2427519 - RNA, 19 nt, Homo sapiens
  misc_RNA (1)...(19): siRNA sense strand
auaugaacccagaauguuu

SEQ ID NO: 2427520 - RNA, 19 nt, Homo sapiens
  misc_RNA (1)...(19): siRNA sense strand
augaaacacucgaugagga

SEQ ID NO: 2427521 - RNA, 19 nt, Homo sapiens
  misc_RNA (1)...(19): siRNA sense strand
aggagaauuaugaggauau

SEQ ID NO: 2427522 - RNA, 19 nt, Homo sapiens
  misc_RNA (1)...(19): siRNA sense strand
aggaacaaaaggagaauua

SEQ ID NO: 2427523 - RNA, 19 nt, Homo sapiens
  misc_RNA (1)...(19): siRNA sense strand
aaaaggaacaaaaggagaa

SEQ ID NO: 2427524 - RNA, 19 nt, Homo sapiens
  misc_RNA (1)...(19): siRNA sense strand
gaggauauucagugugcca

SEQ ID NO: 2427525 - RNA, 19 nt, Homo sapiens
  misc_RNA (1)...(19): siRNA sense strand
aaacuuugucagagcccaa

SEQ ID NO: 2427526 - RNA, 19 nt, Homo sapiens
  misc_RNA (1)...(19): siRNA sense strand
caaaaggaacaaaaggaga

SEQ ID NO: 2427527 - RNA, 19 nt, Homo sapiens
  misc_RNA (1)...(19): siRNA sense strand
ccaagcugacagugugcaa

SEQ ID NO: 2427528 - RNA, 19 nt, Homo sapiens
  misc_RNA (1)...(19): siRNA sense strand
ccgcaggaggagagagaaa

SEQ ID NO: 2427529 - RNA, 19 nt, Homo sapiens
  misc_RNA (1)...(19): siRNA sense strand
uggcaagauuaaagcaaca

SEQ ID NO: 2427530 - RNA, 19 nt, Homo sapiens
  misc_RNA (1)...(19): siRNA sense strand
uugaagaagcaaagcgaga

SEQ ID NO: 2427531 - RNA, 19 nt, Homo sapiens
  misc_RNA (1)...(19): siRNA sense strand
gacuugaagcagaaagcaa

SEQ ID NO: 2427532 - RNA, 19 nt, Homo sapiens
  misc_RNA (1)...(19): siRNA sense strand
aguagcacuaucagagaaa

SEQ ID NO: 2427533 - RNA, 19 nt, Homo sapiens
  misc_RNA (1)...(19): siRNA sense strand
ggagcaacuuucagccaga

SEQ ID NO: 2427534 - RNA, 19 nt, Homo sapiens
  misc_RNA (1)...(19): siRNA sense strand
agauuaaagcaacagacua

SEQ ID NO: 2427535 - RNA, 19 nt, Homo sapiens
  misc_RNA (1)...(19): siRNA sense strand
ugaacuuacaagaagagua

SEQ ID NO: 2427536 - RNA, 19 nt, Homo sapiens
  misc_RNA (1)...(19): siRNA sense strand
agucagaagccaaguaucu

SEQ ID NO: 2427537 - RNA, 19 nt, Homo sapiens
  misc_RNA (1)...(19): siRNA sense strand
ccaaaagugaagaaaucaa

SEQ ID NO: 2427538 - RNA, 19 nt, Homo sapiens
  misc_RNA (1)...(19): siRNA sense strand
agcgagaacuagauagcau

SEQ ID NO: 2427539 - RNA, 19 nt, Homo sapiens
  misc_RNA (1)...(19): siRNA sense strand
auagaggacuugaagcaga

SEQ ID NO: 2427540 - RNA, 19 nt, Homo sapiens
  misc_RNA (1)...(19): siRNA sense strand
ugauaaucgucgucagaac

SEQ ID NO: 2427541 - RNA, 19 nt, Homo sapiens
  misc_RNA (1)...(19): siRNA sense strand
agugaaaauugaagaagca

SEQ ID NO: 2427542 - RNA, 19 nt, Homo sapiens
  misc_RNA (1)...(19): siRNA sense strand
ucaagaaagcagaguugca

SEQ ID NO: 2427543 - RNA, 19 nt, Homo sapiens
  misc_RNA (1)...(19): siRNA sense strand
gaaucaaggcugcagagga

SEQ ID NO: 2427544 - RNA, 19 nt, Homo sapiens
  misc_RNA (1)...(19): siRNA sense strand
aauacgagucagaagccaa

SEQ ID NO: 2427545 - RNA, 19 nt, Homo sapiens
  misc_RNA (1)...(19): siRNA sense strand
aaucaaggcugcagaggag

SEQ ID NO: 2427546 - RNA, 19 nt, Homo sapiens
  misc_RNA (1)...(19): siRNA sense strand
ugguaauagaggacuugaa

SEQ ID NO: 2427547 - RNA, 19 nt, Homo sapiens
  misc_RNA (1)...(19): siRNA sense strand
auuuagacuuaaugccgaa

SEQ ID NO: 2427548 - RNA, 19 nt, Homo sapiens
  misc_RNA (1)...(19): siRNA sense strand
aggaguugauugagguaaa

SEQ ID NO: 2427549 - RNA, 19 nt, Homo sapiens
  misc_RNA (1)...(19): siRNA sense strand
caacagagcaagaagguca

SEQ ID NO: 2427550 - RNA, 19 nt, Homo sapiens
  misc_RNA (1)...(19): siRNA sense strand
cuaaggaacaacagagcaa

SEQ ID NO: 2427551 - RNA, 19 nt, Homo sapiens
  misc_RNA (1)...(19): siRNA sense strand
cuacaacagccaaggaaca

SEQ ID NO: 2427552 - RNA, 19 nt, Homo sapiens
  misc_RNA (1)...(19): siRNA sense strand
guaugaacggguagaugaa

SEQ ID NO: 2427553 - RNA, 19 nt, Homo sapiens
  misc_RNA (1)...(19): siRNA sense strand
gguuggugucaaaggaaau

SEQ ID NO: 2427554 - RNA, 19 nt, Homo sapiens
  misc_RNA (1)...(19): siRNA sense strand
agccaagaaaucaaggaaa

SEQ ID NO: 2427555 - RNA, 19 nt, Homo sapiens
  misc_RNA (1)...(19): siRNA sense strand
cagcaaaggagccagccaa

SEQ ID NO: 2427556 - RNA, 19 nt, Homo sapiens
  misc_RNA (1)...(19): siRNA sense strand
gaaaccaacuggaugggau

SEQ ID NO: 2427557 - RNA, 19 nt, Homo sapiens
  misc_RNA (1)...(19): siRNA sense strand
auccugaguuagagaagaa

SEQ ID NO: 2427558 - RNA, 19 nt, Homo sapiens
  misc_RNA (1)...(19): siRNA sense strand
ugguuggugucaaaggaaa

SEQ ID NO: 2427559 - RNA, 19 nt, Homo sapiens
  misc_RNA (1)...(19): siRNA sense strand
augaacggguagaugaaau

SEQ ID NO: 2427560 - RNA, 19 nt, Homo sapiens
  misc_RNA (1)...(19): siRNA sense strand
acgucaguaucuugggcaa

SEQ ID NO: 2427561 - RNA, 19 nt, Homo sapiens
  misc_RNA (1)...(19): siRNA sense strand
ccaagaaaucaaggaaaca

SEQ ID NO: 2427562 - RNA, 19 nt, Homo sapiens
  misc_RNA (1)...(19): siRNA sense strand
cagccaagaaaucaaggaa

SEQ ID NO: 2427563 - RNA, 19 nt, Homo sapiens
  misc_RNA (1)...(19): siRNA sense strand
gagccagccaagaaaucaa

SEQ ID NO: 2427564 - RNA, 19 nt, Homo sapiens
  misc_RNA (1)...(19): siRNA sense strand
cugaugagucuuuagguga

SEQ ID NO: 2427565 - RNA, 19 nt, Homo sapiens
  misc_RNA (1)...(19): siRNA sense strand
ucggacacguggagcucua

SEQ ID NO: 2427566 - RNA, 19 nt, Homo sapiens
  misc_RNA (1)...(19): siRNA sense strand
gaggagugcaugaaagcca

SEQ ID NO: 2427567 - RNA, 19 nt, Homo sapiens
  misc_RNA (1)...(19): siRNA sense strand
caugaaagccagugaugcu

SEQ ID NO: 2427568 - RNA, 19 nt, Homo sapiens
  misc_RNA (1)...(19): siRNA sense strand
ugaacggguagaugaaauu

SEQ ID NO: 2427569 - RNA, 19 nt, Homo sapiens
  misc_RNA (1)...(19): siRNA sense strand
agaagaaguugcuacacca

SEQ ID NO: 2427570 - RNA, 19 nt, Homo sapiens
  misc_RNA (1)...(19): siRNA sense strand
ccaacaguccacuaaggaa

SEQ ID NO: 2427571 - RNA, 19 nt, Homo sapiens
  misc_RNA (1)...(19): siRNA sense strand
caaaucaacugcaacgcau

SEQ ID NO: 2427572 - RNA, 19 nt, Homo sapiens
  misc_RNA (1)...(19): siRNA sense strand
guagaaagccuccugcaga

SEQ ID NO: 2427573 - RNA, 19 nt, Homo sapiens
  misc_RNA (1)...(19): siRNA sense strand
cuuaauacauguuuccaca

SEQ ID NO: 2427574 - RNA, 19 nt, Homo sapiens
  misc_RNA (1)...(19): siRNA sense strand
aaggaacaacagagcaaga

SEQ ID NO: 2427575 - RNA, 19 nt, Homo sapiens
  misc_RNA (1)...(19): siRNA sense strand
gggauauucacauggaacu

SEQ ID NO: 2427576 - RNA, 19 nt, Homo sapiens
  misc_RNA (1)...(19): siRNA sense strand
caggaauuuuggagaguaa

SEQ ID NO: 2427577 - RNA, 19 nt, Homo sapiens
  misc_RNA (1)...(19): siRNA sense strand
agaaaguggaagaugugaa

SEQ ID NO: 2427578 - RNA, 19 nt, Homo sapiens
  misc_RNA (1)...(19): siRNA sense strand
ccggaagccacuaggagau

SEQ ID NO: 2427579 - RNA, 19 nt, Homo sapiens
  misc_RNA (1)...(19): siRNA sense strand
augugaaagcucuggucaa

SEQ ID NO: 2427580 - RNA, 19 nt, Homo sapiens
  misc_RNA (1)...(19): siRNA sense strand
caucagcgaucaagagcca

SEQ ID NO: 2427581 - RNA, 19 nt, Homo sapiens
  misc_RNA (1)...(19): siRNA sense strand
cauuggagucuuucagcaa

SEQ ID NO: 2427582 - RNA, 19 nt, Homo sapiens
  misc_RNA (1)...(19): siRNA sense strand
gguuaaagaucgagguccg

SEQ ID NO: 2427583 - RNA, 19 nt, Homo sapiens
  misc_RNA (1)...(19): siRNA sense strand
ugguuuuauuggagcauua

SEQ ID NO: 2427584 - RNA, 19 nt, Homo sapiens
  misc_RNA (1)...(19): siRNA sense strand
ggccauuuacagaagagaa

SEQ ID NO: 2427585 - RNA, 19 nt, Homo sapiens
  misc_RNA (1)...(19): siRNA sense strand
ccgacauguucaagauacu

SEQ ID NO: 2427586 - RNA, 19 nt, Homo sapiens
  misc_RNA (1)...(19): siRNA sense strand
ugaccaucaucgagaccau

SEQ ID NO: 2427587 - RNA, 19 nt, Homo sapiens
  misc_RNA (1)...(19): siRNA sense strand
cuguuugauucauguaaga

SEQ ID NO: 2427588 - RNA, 19 nt, Homo sapiens
  misc_RNA (1)...(19): siRNA sense strand
acucugaagugguggagga

SEQ ID NO: 2427589 - RNA, 19 nt, Homo sapiens
  misc_RNA (1)...(19): siRNA sense strand
cugaagugguggaggacac

SEQ ID NO: 2427590 - RNA, 19 nt, Homo sapiens
  misc_RNA (1)...(19): siRNA sense strand
gggcgcaagaguuggccaa

SEQ ID NO: 2427591 - RNA, 19 nt, Homo sapiens
  misc_RNA (1)...(19): siRNA sense strand
cuggaaaggucugggacga

SEQ ID NO: 2427592 - RNA, 19 nt, Homo sapiens
  misc_RNA (1)...(19): siRNA sense strand
aggucugggacgaggccaa

SEQ ID NO: 2427593 - RNA, 19 nt, Homo sapiens
  misc_RNA (1)...(19): siRNA sense strand
gggaagaggcccaacgaga

SEQ ID NO: 2427594 - RNA, 19 nt, Homo sapiens
  misc_RNA (1)...(19): siRNA sense strand
gcccaaaucccgagaggca

SEQ ID NO: 2427595 - RNA, 19 nt, Homo sapiens
  misc_RNA (1)...(19): siRNA sense strand
acagagaccugaagcccaa

SEQ ID NO: 2427596 - RNA, 19 nt, Homo sapiens
  misc_RNA (1)...(19): siRNA sense strand
gugaaguauuuccuggaga

SEQ ID NO: 2427597 - RNA, 19 nt, Homo sapiens
  misc_RNA (1)...(19): siRNA sense strand
gagcugagccagaaggaug

SEQ ID NO: 2427598 - RNA, 19 nt, Homo sapiens
  misc_RNA (1)...(19): siRNA sense strand
gacagaacguagagcccuu

SEQ ID NO: 2427599 - RNA, 19 nt, Homo sapiens
  misc_RNA (1)...(19): siRNA sense strand
cagacaagaaagagggcuu

SEQ ID NO: 2427600 - RNA, 19 nt, Homo sapiens
  misc_RNA (1)...(19): siRNA sense strand
cgugaaaccaacaaaucaa

SEQ ID NO: 2427601 - RNA, 19 nt, Homo sapiens
  misc_RNA (1)...(19): siRNA sense strand
caguggaaugggaggaaga

SEQ ID NO: 2427602 - RNA, 19 nt, Homo sapiens
  misc_RNA (1)...(19): siRNA sense strand
gcuuaauacggaaacaaau

SEQ ID NO: 2427603 - RNA, 19 nt, Homo sapiens
  misc_RNA (1)...(19): siRNA sense strand
ggguauucuacuaaagaca

SEQ ID NO: 2427604 - RNA, 19 nt, Homo sapiens
  misc_RNA (1)...(19): siRNA sense strand
uugaaacaguauuuggcaa

SEQ ID NO: 2427605 - RNA, 19 nt, Homo sapiens
  misc_RNA (1)...(19): siRNA sense strand
ugguggaagucgagacagu

SEQ ID NO: 2427606 - RNA, 19 nt, Homo sapiens
  misc_RNA (1)...(19): siRNA sense strand
uacggaaacaaaugagaaa

SEQ ID NO: 2427607 - RNA, 19 nt, Homo sapiens
  misc_RNA (1)...(19): siRNA sense strand
gcucuucauuggugggcuu

SEQ ID NO: 2427608 - RNA, 19 nt, Homo sapiens
  misc_RNA (1)...(19): siRNA sense strand
acacauggaugauggugga

SEQ ID NO: 2427609 - RNA, 19 nt, Homo sapiens
  misc_RNA (1)...(19): siRNA sense strand
uggcgauagagauggauau

SEQ ID NO: 2427610 - RNA, 19 nt, Homo sapiens
  misc_RNA (1)...(19): siRNA sense strand
uggaagaggaggaagugga

SEQ ID NO: 2427611 - RNA, 19 nt, Homo sapiens
  misc_RNA (1)...(19): siRNA sense strand
ucgugauacaagagauuau

SEQ ID NO: 2427612 - RNA, 19 nt, Homo sapiens
  misc_RNA (1)...(19): siRNA sense strand
gggcuuaauacggaaacaa

SEQ ID NO: 2427613 - RNA, 19 nt, Homo sapiens
  misc_RNA (1)...(19): siRNA sense strand
cgcuaaggaugcagccaga

SEQ ID NO: 2427614 - RNA, 19 nt, Homo sapiens
  misc_RNA (1)...(19): siRNA sense strand
aagaggaggaaguggagga

SEQ ID NO: 2427615 - RNA, 19 nt, Homo sapiens
  misc_RNA (1)...(19): siRNA sense strand
accaacaaaucaagaggau

SEQ ID NO: 2427616 - RNA, 19 nt, Homo sapiens
  misc_RNA (1)...(19): siRNA sense strand
aggaggaaguggaggaacc

SEQ ID NO: 2427617 - RNA, 19 nt, Homo sapiens
  misc_RNA (1)...(19): siRNA sense strand
caucaagaggcuauggcga

SEQ ID NO: 2427618 - RNA, 19 nt, Homo sapiens
  misc_RNA (1)...(19): siRNA sense strand
gguuggcagacaagaaaga

SEQ ID NO: 2427619 - RNA, 19 nt, Homo sapiens
  misc_RNA (1)...(19): siRNA sense strand
uggauaugguggaagucga

SEQ ID NO: 2427620 - RNA, 19 nt, Homo sapiens
  misc_RNA (1)...(19): siRNA sense strand
uggaaagucauuagaugga

SEQ ID NO: 2427621 - RNA, 19 nt, Homo sapiens
  misc_RNA (1)...(19): siRNA sense strand
ccaucauuugaaagaggua

SEQ ID NO: 2427622 - RNA, 19 nt, Homo sapiens
  misc_RNA (1)...(19): siRNA sense strand
gagauuauacuuaccguga

SEQ ID NO: 2427623 - RNA, 19 nt, Homo sapiens
  misc_RNA (1)...(19): siRNA sense strand
uggucgugaucgugacuau

SEQ ID NO: 2427624 - RNA, 19 nt, Homo sapiens
  misc_RNA (1)...(19): siRNA sense strand
caggguuggcagacaagaa

SEQ ID NO: 2427625 - RNA, 19 nt, Homo sapiens
  misc_RNA (1)...(19): siRNA sense strand
auauggacgaauaguggaa

SEQ ID NO: 2427626 - RNA, 19 nt, Homo sapiens
  misc_RNA (1)...(19): siRNA sense strand
ccgugaaaccaacaaauca

SEQ ID NO: 2427627 - RNA, 19 nt, Homo sapiens
  misc_RNA (1)...(19): siRNA sense strand
aagaagagaaaguggaaau

SEQ ID NO: 2427628 - RNA, 19 nt, Homo sapiens
  misc_RNA (1)...(19): siRNA sense strand
cuaaagaagaaauggucaa

SEQ ID NO: 2427629 - RNA, 19 nt, Homo sapiens
  misc_RNA (1)...(19): siRNA sense strand
uguucguauuauugggaaa

SEQ ID NO: 2427630 - RNA, 19 nt, Homo sapiens
  misc_RNA (1)...(19): siRNA sense strand
cagcaacugaaaugagcaa

SEQ ID NO: 2427631 - RNA, 19 nt, Homo sapiens
  misc_RNA (1)...(19): siRNA sense strand
uguaaaugaagcugcaauu

SEQ ID NO: 2427632 - RNA, 19 nt, Homo sapiens
  misc_RNA (1)...(19): siRNA sense strand
uggaaaugcaggaacugaa

SEQ ID NO: 2427633 - RNA, 19 nt, Homo sapiens
  misc_RNA (1)...(19): siRNA sense strand
cauaagaggaaaagacaga

SEQ ID NO: 2427634 - RNA, 19 nt, Homo sapiens
  misc_RNA (1)...(19): siRNA sense strand
agagaauagaucuugggaa

SEQ ID NO: 2427635 - RNA, 19 nt, Homo sapiens
  misc_RNA (1)...(19): siRNA sense strand
augaugaagaagccaguua

SEQ ID NO: 2427636 - RNA, 19 nt, Homo sapiens
  misc_RNA (1)...(19): siRNA sense strand
uggacguucuaaaggauau

SEQ ID NO: 2427637 - RNA, 19 nt, Homo sapiens
  misc_RNA (1)...(19): siRNA sense strand
cguacaaccaggaucuaau

SEQ ID NO: 2427638 - RNA, 19 nt, Homo sapiens
  misc_RNA (1)...(19): siRNA sense strand
cugaaaugagcaaacagaa

SEQ ID NO: 2427639 - RNA, 19 nt, Homo sapiens
  misc_RNA (1)...(19): siRNA sense strand
gaccaagguaucagcaaca

SEQ ID NO: 2427640 - RNA, 19 nt, Homo sapiens
  misc_RNA (1)...(19): siRNA sense strand
cagaauucacauugggauc

SEQ ID NO: 2427641 - RNA, 19 nt, Homo sapiens
  misc_RNA (1)...(19): siRNA sense strand
gcuugagugacgagcgcau

SEQ ID NO: 2427642 - RNA, 19 nt, Homo sapiens
  misc_RNA (1)...(19): siRNA sense strand
ugaaaugagcaaacagaac

SEQ ID NO: 2427643 - RNA, 19 nt, Homo sapiens
  misc_RNA (1)...(19): siRNA sense strand
uguaagacagaaagaaacu

SEQ ID NO: 2427644 - RNA, 19 nt, Homo sapiens
  misc_RNA (1)...(19): siRNA sense strand
gcuuccagguucagugcuu

SEQ ID NO: 2427645 - RNA, 19 nt, Homo sapiens
  misc_RNA (1)...(19): siRNA sense strand
gcaacugaaaugagcaaac

SEQ ID NO: 2427646 - RNA, 19 nt, Homo sapiens
  misc_RNA (1)...(19): siRNA sense strand
agucagaaggacagcgaac

SEQ ID NO: 2427647 - RNA, 19 nt, Homo sapiens
  misc_RNA (1)...(19): siRNA sense strand
acacaaaagcuguugacca

SEQ ID NO: 2427648 - RNA, 19 nt, Homo sapiens
  misc_RNA (1)...(19): siRNA sense strand
gcaagaugauugugggcaa

SEQ ID NO: 2427649 - RNA, 19 nt, Homo sapiens
  misc_RNA (1)...(19): siRNA sense strand
cuaaagagagcaaagguga

SEQ ID NO: 2427650 - RNA, 19 nt, Homo sapiens
  misc_RNA (1)...(19): siRNA sense strand
cagaaaugaaggaucgaca

SEQ ID NO: 2427651 - RNA, 19 nt, Homo sapiens
  misc_RNA (1)...(19): siRNA sense strand
cagagaggaaggagaagau

SEQ ID NO: 2427652 - RNA, 19 nt, Homo sapiens
  misc_RNA (1)...(19): siRNA sense strand
cugguuacuaagagacuaa

SEQ ID NO: 2427653 - RNA, 19 nt, Homo sapiens
  misc_RNA (1)...(19): siRNA sense strand
aguaaauacaacaugguga

SEQ ID NO: 2427654 - RNA, 19 nt, Homo sapiens
  misc_RNA (1)...(19): siRNA sense strand
uaaagagagcaaaggugaa

SEQ ID NO: 2427655 - RNA, 19 nt, Homo sapiens
  misc_RNA (1)...(19): siRNA sense strand
ggaggacuaaagagagcaa

SEQ ID NO: 2427656 - RNA, 19 nt, Homo sapiens
  misc_RNA (1)...(19): siRNA sense strand
ugaccagagaggaaggaga

SEQ ID NO: 2427657 - RNA, 19 nt, Homo sapiens
  misc_RNA (1)...(19): siRNA sense strand
agagcaaaggugaaggaca

SEQ ID NO: 2427658 - RNA, 19 nt, Homo sapiens
  misc_RNA (1)...(19): siRNA sense strand
uauccaaagagaugaguca

SEQ ID NO: 2427659 - RNA, 19 nt, Homo sapiens
  misc_RNA (1)...(19): siRNA sense strand
gcucagaaaugaaggaucg

SEQ ID NO: 2427660 - RNA, 19 nt, Homo sapiens
  misc_RNA (1)...(19): siRNA sense strand
ccccaugaccagagaggaa

SEQ ID NO: 2427661 - RNA, 19 nt, Homo sapiens
  misc_RNA (1)...(19): siRNA sense strand
uuaaggaagagcagcagaa

SEQ ID NO: 2427662 - RNA, 19 nt, Homo sapiens
  misc_RNA (1)...(19): siRNA sense strand
ggagcuagugucauggaau

SEQ ID NO: 2427663 - RNA, 19 nt, Homo sapiens
  misc_RNA (1)...(19): siRNA sense strand
gguuugaacgcucagaaau

SEQ ID NO: 2427664 - RNA, 19 nt, Homo sapiens
  misc_RNA (1)...(19): siRNA sense strand
ccugaaggaacuugcauca

SEQ ID NO: 2427665 - RNA, 19 nt, Homo sapiens
  misc_RNA (1)...(19): siRNA sense strand
ggugaugcauuuuggaaca

SEQ ID NO: 2427666 - RNA, 19 nt, Homo sapiens
  misc_RNA (1)...(19): siRNA sense strand
aggugaaggacaucuuuaa

SEQ ID NO: 2427667 - RNA, 19 nt, Homo sapiens
  misc_RNA (1)...(19): siRNA sense strand
augaagugacccagagguu

SEQ ID NO: 2427668 - RNA, 19 nt, Homo sapiens
  misc_RNA (1)...(19): siRNA sense strand
ugguuugaacgcucagaaa

SEQ ID NO: 2427669 - RNA, 19 nt, Homo sapiens
  misc_RNA (1)...(19): siRNA sense strand
gcugauaagaagaaacuac

SEQ ID NO: 2427670 - RNA, 19 nt, Homo sapiens
  misc_RNA (1)...(19): siRNA sense strand
ccagagaggaaggagaaga

SEQ ID NO: 2427671 - RNA, 19 nt, Homo sapiens
  misc_RNA (1)...(19): siRNA sense strand
aagccauuguagaagauga

SEQ ID NO: 2427672 - RNA, 19 nt, Homo sapiens
  misc_RNA (1)...(19): siRNA sense strand
uaucauaacaagcaguaca

SEQ ID NO: 2427673 - RNA, 19 nt, Homo sapiens
  misc_RNA (1)...(19): siRNA sense strand
ccauacauccaguugcaau

SEQ ID NO: 2427674 - RNA, 19 nt, Homo sapiens
  misc_RNA (1)...(19): siRNA sense strand
cauacauccaguugcaauu

SEQ ID NO: 2427675 - RNA, 19 nt, Homo sapiens
  misc_RNA (1)...(19): siRNA sense strand
auuggaagccauuguagaa

SEQ ID NO: 2427676 - RNA, 19 nt, Homo sapiens
  misc_RNA (1)...(19): siRNA sense strand
acaccugguuacuaagaga

SEQ ID NO: 2427677 - RNA, 19 nt, Homo sapiens
  misc_RNA (1)...(19): siRNA sense strand
cugcauaauaggaguaaua

SEQ ID NO: 2427678 - RNA, 19 nt, Homo sapiens
  misc_RNA (1)...(19): siRNA sense strand
aagaauagaggcugagaaa

SEQ ID NO: 2427679 - RNA, 19 nt, Homo sapiens
  misc_RNA (1)...(19): siRNA sense strand
caaugaaacucaagggcau

SEQ ID NO: 2427680 - RNA, 19 nt, Homo sapiens
  misc_RNA (1)...(19): siRNA sense strand
ugucagaagucuuaggaau

SEQ ID NO: 2427681 - RNA, 19 nt, Homo sapiens
  misc_RNA (1)...(19): siRNA sense strand
agauagaugcugugaaauu

SEQ ID NO: 2427682 - RNA, 19 nt, Homo sapiens
  misc_RNA (1)...(19): siRNA sense strand
uggaaggaguggagcagaa

SEQ ID NO: 2427683 - RNA, 19 nt, Homo sapiens
  misc_RNA (1)...(19): siRNA sense strand
uaguuauggugaaggaaua

SEQ ID NO: 2427684 - RNA, 19 nt, Homo sapiens
  misc_RNA (1)...(19): siRNA sense strand
cuuuaaaucuucaggauca

SEQ ID NO: 2427685 - RNA, 19 nt, Homo sapiens
  misc_RNA (1)...(19): siRNA sense strand
gucagaagucuuaggaaua

SEQ ID NO: 2427686 - RNA, 19 nt, Homo sapiens
  misc_RNA (1)...(19): siRNA sense strand
uggcagaacuuaugcaaaa

SEQ ID NO: 2427687 - RNA, 19 nt, Homo sapiens
  misc_RNA (1)...(19): siRNA sense strand
aguuguaggaggaagauua

SEQ ID NO: 2427688 - RNA, 19 nt, Homo sapiens
  misc_RNA (1)...(19): siRNA sense strand
ggucagcagaugugaauau

SEQ ID NO: 2427689 - RNA, 19 nt, Homo sapiens
  misc_RNA (1)...(19): siRNA sense strand
gugaagaugaggaugaauu

SEQ ID NO: 2427690 - RNA, 19 nt, Homo sapiens
  misc_RNA (1)...(19): siRNA sense strand
ucgauguuguaaugagaaa

SEQ ID NO: 2427691 - RNA, 19 nt, Homo sapiens
  misc_RNA (1)...(19): siRNA sense strand
cacaaagaauagaggcuga

SEQ ID NO: 2427692 - RNA, 19 nt, Homo sapiens
  misc_RNA (1)...(19): siRNA sense strand
caaauuaucagcugggaga

SEQ ID NO: 2427693 - RNA, 19 nt, Homo sapiens
  misc_RNA (1)...(19): siRNA sense strand
gagcagaaccuguccguca

SEQ ID NO: 2427694 - RNA, 19 nt, Homo sapiens
  misc_RNA (1)...(19): siRNA sense strand
uuauuaacucuguggcaaa

SEQ ID NO: 2427695 - RNA, 19 nt, Homo sapiens
  misc_RNA (1)...(19): siRNA sense strand
cuacaauaccggaaacuga

SEQ ID NO: 2427696 - RNA, 19 nt, Homo sapiens
  misc_RNA (1)...(19): siRNA sense strand
gggacugaucuuacacaaa

SEQ ID NO: 2427697 - RNA, 19 nt, Homo sapiens
  misc_RNA (1)...(19): siRNA sense strand
cgaccaaaaugcacagaau

SEQ ID NO: 2427698 - RNA, 19 nt, Homo sapiens
  misc_RNA (1)...(19): siRNA sense strand
acugagagcaaguuugaua

SEQ ID NO: 2427699 - RNA, 19 nt, Homo sapiens
  misc_RNA (1)...(19): siRNA sense strand
cuucagaaaccuaauggaa

SEQ ID NO: 2427700 - RNA, 19 nt, Homo sapiens
  misc_RNA (1)...(19): siRNA sense strand
uugccauaguugugagaga

SEQ ID NO: 2427701 - RNA, 19 nt, Homo sapiens
  misc_RNA (1)...(19): siRNA sense strand
ucuugaaacuuauggcaga

SEQ ID NO: 2427702 - RNA, 19 nt, Homo sapiens
  misc_RNA (1)...(19): siRNA sense strand
cagagaaauuauugcugau

SEQ ID NO: 2427703 - RNA, 19 nt, Homo sapiens
  misc_RNA (1)...(19): siRNA sense strand
cuacauagggacugaucuu

SEQ ID NO: 2427704 - RNA, 19 nt, Homo sapiens
  misc_RNA (1)...(19): siRNA sense strand
gggugaagaugaggaugaa

SEQ ID NO: 2427705 - RNA, 19 nt, Homo sapiens
  misc_RNA (1)...(19): siRNA sense strand
ugggugaagaugaggauga

SEQ ID NO: 2427706 - RNA, 19 nt, Homo sapiens
  misc_RNA (1)...(19): siRNA sense strand
ucagaagagauguggcaga

SEQ ID NO: 2427707 - RNA, 19 nt, Homo sapiens
  misc_RNA (1)...(19): siRNA sense strand
guugauuauucuagaccuu

SEQ ID NO: 2427708 - RNA, 19 nt, Homo sapiens
  misc_RNA (1)...(19): siRNA sense strand
gagcaguugugcacgguca

SEQ ID NO: 2427709 - RNA, 19 nt, Homo sapiens
  misc_RNA (1)...(19): siRNA sense strand
accaaaaugcacagaauua

SEQ ID NO: 2427710 - RNA, 19 nt, Homo sapiens
  misc_RNA (1)...(19): siRNA sense strand
aggaauaacagaugacaac

SEQ ID NO: 2427711 - RNA, 19 nt, Homo sapiens
  misc_RNA (1)...(19): siRNA sense strand
cuucaagcacauagcaaaa

SEQ ID NO: 2427712 - RNA, 19 nt, Homo sapiens
  misc_RNA (1)...(19): siRNA sense strand
ugaggaugaauuugagaau

SEQ ID NO: 2427713 - RNA, 19 nt, Homo sapiens
  misc_RNA (1)...(19): siRNA sense strand
acaagaagauguaaagcgu

SEQ ID NO: 2427714 - RNA, 19 nt, Homo sapiens
  misc_RNA (1)...(19): siRNA sense strand
gguuugcacuuaugguaau

SEQ ID NO: 2427715 - RNA, 19 nt, Homo sapiens
  misc_RNA (1)...(19): siRNA sense strand
ucagcaaaacacaggaaaa

SEQ ID NO: 2427716 - RNA, 19 nt, Homo sapiens
  misc_RNA (1)...(19): siRNA sense strand
uaaaagagguguuugccaa

SEQ ID NO: 2427717 - RNA, 19 nt, Homo sapiens
  misc_RNA (1)...(19): siRNA sense strand
ccucgauguuguaaugaga

SEQ ID NO: 2427718 - RNA, 19 nt, Homo sapiens
  misc_RNA (1)...(19): siRNA sense strand
uaggaauaacagaugacaa

SEQ ID NO: 2427719 - RNA, 19 nt, Homo sapiens
  misc_RNA (1)...(19): siRNA sense strand
gcacugaacacaaagacca

SEQ ID NO: 2427720 - RNA, 19 nt, Homo sapiens
  misc_RNA (1)...(19): siRNA sense strand
caguuugcuucgacaagaa

SEQ ID NO: 2427721 - RNA, 19 nt, Homo sapiens
  misc_RNA (1)...(19): siRNA sense strand
aggaggaagauuaacauau

SEQ ID NO: 2427722 - RNA, 19 nt, Homo sapiens
  misc_RNA (1)...(19): siRNA sense strand
ggaagauaugagccuguaa

SEQ ID NO: 2427723 - RNA, 19 nt, Homo sapiens
  misc_RNA (1)...(19): siRNA sense strand
gaauaacagaugacaacca

SEQ ID NO: 2427724 - RNA, 19 nt, Homo sapiens
  misc_RNA (1)...(19): siRNA sense strand
cagcaaaacacaggaaaau

SEQ ID NO: 2427725 - RNA, 19 nt, Homo sapiens
  misc_RNA (1)...(19): siRNA sense strand
cagaaaucacgaaggccuu

SEQ ID NO: 2427726 - RNA, 19 nt, Homo sapiens
  misc_RNA (1)...(19): siRNA sense strand
gcagaugugaauaugaaaa

SEQ ID NO: 2427727 - RNA, 19 nt, Homo sapiens
  misc_RNA (1)...(19): siRNA sense strand
acucacuacucuugauaca

SEQ ID NO: 2427728 - RNA, 19 nt, Homo sapiens
  misc_RNA (1)...(19): siRNA sense strand
ucuucaagcacauagcaaa

SEQ ID NO: 2427729 - RNA, 19 nt, Homo sapiens
  misc_RNA (1)...(19): siRNA sense strand
guuguaggaggaagauuaa

SEQ ID NO: 2427730 - RNA, 19 nt, Homo sapiens
  misc_RNA (1)...(19): siRNA sense strand
gacaguuguaggaggaaga

SEQ ID NO: 2427731 - RNA, 19 nt, Homo sapiens
  misc_RNA (1)...(19): siRNA sense strand
gagauguggcagaggcguu

SEQ ID NO: 2427732 - RNA, 19 nt, Homo sapiens
  misc_RNA (1)...(19): siRNA sense strand
ccagguaauuaucaugaau

SEQ ID NO: 2427733 - RNA, 19 nt, Homo sapiens
  misc_RNA (1)...(19): siRNA sense strand
ccagaaugucucagcaagu

SEQ ID NO: 2427734 - RNA, 19 nt, Homo sapiens
  misc_RNA (1)...(19): siRNA sense strand
gguaaugcaggucuugaaa

SEQ ID NO: 2427735 - RNA, 19 nt, Homo sapiens
  misc_RNA (1)...(19): siRNA sense strand
ggagaauuaguuaugguga

SEQ ID NO: 2427736 - RNA, 19 nt, Homo sapiens
  misc_RNA (1)...(19): siRNA sense strand
cauccauauucugguguaa

SEQ ID NO: 2427737 - RNA, 19 nt, Homo sapiens
  misc_RNA (1)...(19): siRNA sense strand
ugggacaguuguaggagga

SEQ ID NO: 2427738 - RNA, 19 nt, Homo sapiens
  misc_RNA (1)...(19): siRNA sense strand
ggcugaauuggaaguguua

SEQ ID NO: 2427739 - RNA, 19 nt, Homo sapiens
  misc_RNA (1)...(19): siRNA sense strand
uuaucagcugggagaauua

SEQ ID NO: 2427740 - RNA, 19 nt, Homo sapiens
  misc_RNA (1)...(19): siRNA sense strand
ugaccuuucuguugguuau

SEQ ID NO: 2427741 - RNA, 19 nt, Homo sapiens
  misc_RNA (1)...(19): siRNA sense strand
ugagagcaaguuugauaaa

SEQ ID NO: 2427742 - RNA, 19 nt, Homo sapiens
  misc_RNA (1)...(19): siRNA sense strand
caaagacguuuuagugcua

SEQ ID NO: 2427743 - RNA, 19 nt, Homo sapiens
  misc_RNA (1)...(19): siRNA sense strand
ccugaaguuauuagauuga

SEQ ID NO: 2427744 - RNA, 19 nt, Homo sapiens
  misc_RNA (1)...(19): siRNA sense strand
gaaacuuauggcagaacuu

SEQ ID NO: 2427745 - RNA, 19 nt, Homo sapiens
  misc_RNA (1)...(19): siRNA sense strand
aacugcaauuggagagcua

SEQ ID NO: 2427746 - RNA, 19 nt, Homo sapiens
  misc_RNA (1)...(19): siRNA sense strand
cugcaauuggagagcuaca

SEQ ID NO: 2427747 - RNA, 19 nt, Homo sapiens
  misc_RNA (1)...(19): siRNA sense strand
gugacaacgacguggagaa

SEQ ID NO: 2427748 - RNA, 19 nt, Homo sapiens
  misc_RNA (1)...(19): siRNA sense strand
ucaaacaagaagagggcau

SEQ ID NO: 2427749 - RNA, 19 nt, Homo sapiens
  misc_RNA (1)...(19): siRNA sense strand
cgacuuaccacccggagaa

SEQ ID NO: 2427750 - RNA, 19 nt, Homo sapiens
  misc_RNA (1)...(19): siRNA sense strand
ccgcaaugcagauaagcca

SEQ ID NO: 2427751 - RNA, 19 nt, Homo sapiens
  misc_RNA (1)...(19): siRNA sense strand
ggaccauugaaaagaaaau

SEQ ID NO: 2427752 - RNA, 19 nt, Homo sapiens
  misc_RNA (1)...(19): siRNA sense strand
cauuagaccaaguguucuu

SEQ ID NO: 2427753 - RNA, 19 nt, Homo sapiens
  misc_RNA (1)...(19): siRNA sense strand
uuguaacucaccagcgaaa

SEQ ID NO: 2427754 - RNA, 19 nt, Homo sapiens
  misc_RNA (1)...(19): siRNA sense strand
aucaauugcauuagaccaa

SEQ ID NO: 2427755 - RNA, 19 nt, Homo sapiens
  misc_RNA (1)...(19): siRNA sense strand
ggccaaauucacagagaca

SEQ ID NO: 2427756 - RNA, 19 nt, Homo sapiens
  misc_RNA (1)...(19): siRNA sense strand
ccguaaucaucgagagaag

SEQ ID NO: 2427757 - RNA, 19 nt, Homo sapiens
  misc_RNA (1)...(19): siRNA sense strand
cggagcuguccuugagaaa

SEQ ID NO: 2427758 - RNA, 19 nt, Homo sapiens
  misc_RNA (1)...(19): siRNA sense strand
cgggaaaggguuuggcuca

SEQ ID NO: 2427759 - RNA, 19 nt, Homo sapiens
  misc_RNA (1)...(19): siRNA sense strand
ucacugagaugcuggccaa

SEQ ID NO: 2427760 - RNA, 19 nt, Homo sapiens
  misc_RNA (1)...(19): siRNA sense strand
uggaauucccugaacgcua

SEQ ID NO: 2427761 - RNA, 19 nt, Homo sapiens
  misc_RNA (1)...(19): siRNA sense strand
gguccauggcuucggguga

SEQ ID NO: 2427762 - RNA, 19 nt, Homo sapiens
  misc_RNA (1)...(19): siRNA sense strand
gagugaagcuagaaagcag

SEQ ID NO: 2427763 - RNA, 19 nt, Homo sapiens
  misc_RNA (1)...(19): siRNA sense strand
aguuaaugaucuacagacu

SEQ ID NO: 2427764 - RNA, 19 nt, Homo sapiens
  misc_RNA (1)...(19): siRNA sense strand
gagccgaguucaaagcaca

SEQ ID NO: 2427765 - RNA, 19 nt, Homo sapiens
  misc_RNA (1)...(19): siRNA sense strand
gcuugugaccaguguaaca

SEQ ID NO: 2427766 - RNA, 19 nt, Homo sapiens
  misc_RNA (1)...(19): siRNA sense strand
ccucagaaguggugcugcu

SEQ ID NO: 2427767 - RNA, 19 nt, Homo sapiens
  misc_RNA (1)...(19): siRNA sense strand
gcaucacgggaaaggguuu

SEQ ID NO: 2427768 - RNA, 19 nt, Homo sapiens
  misc_RNA (1)...(19): siRNA sense strand
ggccguaaucaucgagaga

SEQ ID NO: 2427769 - RNA, 19 nt, Homo sapiens
  misc_RNA (1)...(19): siRNA sense strand
agacucagcuuucuggcaa

SEQ ID NO: 2427770 - RNA, 19 nt, Homo sapiens
  misc_RNA (1)...(19): siRNA sense strand
acgcuugugaccaguguaa

SEQ ID NO: 2427771 - RNA, 19 nt, Homo sapiens
  misc_RNA (1)...(19): siRNA sense strand
cagucaggucacauguaua

SEQ ID NO: 2427772 - RNA, 19 nt, Homo sapiens
  misc_RNA (1)...(19): siRNA sense strand
ccaaagccaccaacgggaa

SEQ ID NO: 2427773 - RNA, 19 nt, Homo sapiens
  misc_RNA (1)...(19): siRNA sense strand
aacaaggagccgaguucaa

SEQ ID NO: 2427774 - RNA, 19 nt, Homo sapiens
  misc_RNA (1)...(19): siRNA sense strand
gcaaacauguagggcgguu

SEQ ID NO: 2427775 - RNA, 19 nt, Homo sapiens
  misc_RNA (1)...(19): siRNA sense strand
ugaccaaggagguggagga

SEQ ID NO: 2427776 - RNA, 19 nt, Homo sapiens
  misc_RNA (1)...(19): siRNA sense strand
agauuaaagacucuagcaa

SEQ ID NO: 2427777 - RNA, 19 nt, Homo sapiens
  misc_RNA (1)...(19): siRNA sense strand
ucaguaugaaagauggaaa

SEQ ID NO: 2427778 - RNA, 19 nt, Homo sapiens
  misc_RNA (1)...(19): siRNA sense strand
ggguuuaccaacagggagu

SEQ ID NO: 2427779 - RNA, 19 nt, Homo sapiens
  misc_RNA (1)...(19): siRNA sense strand
aagcaauagaagaaggagu

SEQ ID NO: 2427780 - RNA, 19 nt, Homo sapiens
  misc_RNA (1)...(19): siRNA sense strand
uguacaaagcaauagaaga

SEQ ID NO: 2427781 - RNA, 19 nt, Homo sapiens
  misc_RNA (1)...(19): siRNA sense strand
gugaaauacuuuaaagguc

SEQ ID NO: 2427782 - RNA, 19 nt, Homo sapiens
  misc_RNA (1)...(19): siRNA sense strand
caauagaagaaggagucaa

SEQ ID NO: 2427783 - RNA, 19 nt, Homo sapiens
  misc_RNA (1)...(19): siRNA sense strand
ggacagugauggaugcuag

SEQ ID NO: 2427784 - RNA, 19 nt, Homo sapiens
  misc_RNA (1)...(19): siRNA sense strand
cacauauccuugacgggaa

SEQ ID NO: 2427785 - RNA, 19 nt, Homo sapiens
  misc_RNA (1)...(19): siRNA sense strand
aggaauugguccagauggu

SEQ ID NO: 2427786 - RNA, 19 nt, Homo sapiens
  misc_RNA (1)...(19): siRNA sense strand
acauauccuugacgggaau

SEQ ID NO: 2427787 - RNA, 19 nt, Homo sapiens
  misc_RNA (1)...(19): siRNA sense strand
cuagagaaguaaugauccu

SEQ ID NO: 2427788 - RNA, 19 nt, Homo sapiens
  misc_RNA (1)...(19): siRNA sense strand
agacagauuaugagggaca

SEQ ID NO: 2427789 - RNA, 19 nt, Homo sapiens
  misc_RNA (1)...(19): siRNA sense strand
gagaauauuacgaaggcuu

SEQ ID NO: 2427790 - RNA, 19 nt, Homo sapiens
  misc_RNA (1)...(19): siRNA sense strand
gaucauuguugcaggagga

SEQ ID NO: 2427791 - RNA, 19 nt, Homo sapiens
  misc_RNA (1)...(19): siRNA sense strand
gauccuaggaagagagaac

SEQ ID NO: 2427792 - RNA, 19 nt, Homo sapiens
  misc_RNA (1)...(19): siRNA sense strand
gcacaagugaagaaggcca

SEQ ID NO: 2427793 - RNA, 19 nt, Homo sapiens
  misc_RNA (1)...(19): siRNA sense strand
cauugugaaaggagagaca

SEQ ID NO: 2427794 - RNA, 19 nt, Homo sapiens
  misc_RNA (1)...(19): siRNA sense strand
acauauuacugaugccaca

SEQ ID NO: 2427795 - RNA, 19 nt, Homo sapiens
  misc_RNA (1)...(19): siRNA sense strand
ccaaugaaccagaggagac

SEQ ID NO: 2427796 - RNA, 19 nt, Homo sapiens
  misc_RNA (1)...(19): siRNA sense strand
ucuuuguacaggagaauau

SEQ ID NO: 2427797 - RNA, 19 nt, Homo sapiens
  misc_RNA (1)...(19): siRNA sense strand
cauuguugcaggaggagau

SEQ ID NO: 2427798 - RNA, 19 nt, Homo sapiens
  misc_RNA (1)...(19): siRNA sense strand
aagcucagguguuuggcaa

SEQ ID NO: 2427799 - RNA, 19 nt, Homo sapiens
  misc_RNA (1)...(19): siRNA sense strand
ggaaagaugugcagcuguc

SEQ ID NO: 2427800 - RNA, 19 nt, Homo sapiens
  misc_RNA (1)...(19): siRNA sense strand
ucgaaaucacuggaagaaa

SEQ ID NO: 2427801 - RNA, 19 nt, Homo sapiens
  misc_RNA (1)...(19): siRNA sense strand
uaagacagauuaugaggga

SEQ ID NO: 2427802 - RNA, 19 nt, Homo sapiens
  misc_RNA (1)...(19): siRNA sense strand
cuuuaaaacgcuucgaaau

SEQ ID NO: 2427803 - RNA, 19 nt, Homo sapiens
  misc_RNA (1)...(19): siRNA sense strand
uugcagaucaagggugaaa

SEQ ID NO: 2427804 - RNA, 19 nt, Homo sapiens
  misc_RNA (1)...(19): siRNA sense strand
gcucauaagaauuggaaaa

SEQ ID NO: 2427805 - RNA, 19 nt, Homo sapiens
  misc_RNA (1)...(19): siRNA sense strand
agucaagaccagugagaca

SEQ ID NO: 2427806 - RNA, 19 nt, Homo sapiens
  misc_RNA (1)...(19): siRNA sense strand
augaagaggagcaggucua

SEQ ID NO: 2427807 - RNA, 19 nt, Homo sapiens
  misc_RNA (1)...(19): siRNA sense strand
uaauuaaaggagugggcau

SEQ ID NO: 2427808 - RNA, 19 nt, Homo sapiens
  misc_RNA (1)...(19): siRNA sense strand
cuuguauauuggaaggcaa

SEQ ID NO: 2427809 - RNA, 19 nt, Homo sapiens
  misc_RNA (1)...(19): siRNA sense strand
uuguauauuggaaggcaaa

SEQ ID NO: 2427810 - RNA, 19 nt, Homo sapiens
  misc_RNA (1)...(19): siRNA sense strand
gcauuugugaagacaggaa

SEQ ID NO: 2427811 - RNA, 19 nt, Homo sapiens
  misc_RNA (1)...(19): siRNA sense strand
ccauaugcaagcacgaaau

SEQ ID NO: 2427812 - RNA, 19 nt, Homo sapiens
  misc_RNA (1)...(19): siRNA sense strand
aaacagaagcagugaggug

SEQ ID NO: 2427813 - RNA, 19 nt, Homo sapiens
  misc_RNA (1)...(19): siRNA sense strand
uggagaauggauaggcuuu

SEQ ID NO: 2427814 - RNA, 19 nt, Homo sapiens
  misc_RNA (1)...(19): siRNA sense strand
aauuaaaggagugggcauu

SEQ ID NO: 2427815 - RNA, 19 nt, Homo sapiens
  misc_RNA (1)...(19): siRNA sense strand
caauaaugcuuuaagagug

SEQ ID NO: 2427816 - RNA, 19 nt, Homo sapiens
  misc_RNA (1)...(19): siRNA sense strand
ggauaggcuuuuaggucuu

SEQ ID NO: 2427817 - RNA, 19 nt, Homo sapiens
  misc_RNA (1)...(19): siRNA sense strand
cacuguguuuagagaagaa

SEQ ID NO: 2427818 - RNA, 19 nt, Homo sapiens
  misc_RNA (1)...(19): siRNA sense strand
aaagaaguguccaggguuc

SEQ ID NO: 2427819 - RNA, 19 nt, Homo sapiens
  misc_RNA (1)...(19): siRNA sense strand
cguugcugguggagaagaa

SEQ ID NO: 2427820 - RNA, 19 nt, Homo sapiens
  misc_RNA (1)...(19): siRNA sense strand
gaagaagggaagaagacca

SEQ ID NO: 2427821 - RNA, 19 nt, Homo sapiens
  misc_RNA (1)...(19): siRNA sense strand
guggagaagaagggaagaa

SEQ ID NO: 2427822 - RNA, 19 nt, Homo sapiens
  misc_RNA (1)...(19): siRNA sense strand
caugcauagaugugaggua

SEQ ID NO: 2427823 - RNA, 19 nt, Homo sapiens
  misc_RNA (1)...(19): siRNA sense strand
ggacagagcguuugggagc

SEQ ID NO: 2427824 - RNA, 19 nt, Homo sapiens
  misc_RNA (1)...(19): siRNA sense strand
gcaacaagugaggggaaaa

SEQ ID NO: 2427825 - RNA, 19 nt, Homo sapiens
  misc_RNA (1)...(19): siRNA sense strand
gaagaagaccacacagcca

SEQ ID NO: 2427826 - RNA, 19 nt, Homo sapiens
  misc_RNA (1)...(19): siRNA sense strand
gggaaguuaucuagaggug

SEQ ID NO: 2427827 - RNA, 19 nt, Homo sapiens
  misc_RNA (1)...(19): siRNA sense strand
cggcgguggacgagauguu

SEQ ID NO: 2427828 - RNA, 19 nt, Homo sapiens
  misc_RNA (1)...(19): siRNA sense strand
uaccagaugcagagaacau

SEQ ID NO: 2427829 - RNA, 19 nt, Homo sapiens
  misc_RNA (1)...(19): siRNA sense strand
caauccaaguggcugggaa

SEQ ID NO: 2427830 - RNA, 19 nt, Homo sapiens
  misc_RNA (1)...(19): siRNA sense strand
ugaacaagaaguuggccaa

SEQ ID NO: 2427831 - RNA, 19 nt, Homo sapiens
  misc_RNA (1)...(19): siRNA sense strand
gggugguggacgagagcuu

SEQ ID NO: 2427832 - RNA, 19 nt, Homo sapiens
  misc_RNA (1)...(19): siRNA sense strand
ccaaacuggaggaugccua

SEQ ID NO: 2427833 - RNA, 19 nt, Homo sapiens
  misc_RNA (1)...(19): siRNA sense strand
cguacacgcuugugggauc

SEQ ID NO: 2427834 - RNA, 19 nt, Homo sapiens
  misc_RNA (1)...(19): siRNA sense strand
uugccgaggagcugaacaa

SEQ ID NO: 2427835 - RNA, 19 nt, Homo sapiens
  misc_RNA (1)...(19): siRNA sense strand
ucaccaaacuggaggaugc

SEQ ID NO: 2427836 - RNA, 19 nt, Homo sapiens
  misc_RNA (1)...(19): siRNA sense strand
gggaagaugaagaaggaau

SEQ ID NO: 2427837 - RNA, 19 nt, Homo sapiens
  misc_RNA (1)...(19): siRNA sense strand
aguuaagacuagaagaaga

SEQ ID NO: 2427838 - RNA, 19 nt, Homo sapiens
  misc_RNA (1)...(19): siRNA sense strand
gggcagcaaagcagcgaaa

SEQ ID NO: 2427839 - RNA, 19 nt, Homo sapiens
  misc_RNA (1)...(19): siRNA sense strand
ccuuagaucuagaguggga

SEQ ID NO: 2427840 - RNA, 19 nt, Homo sapiens
  misc_RNA (1)...(19): siRNA sense strand
aaguauagcaacaagaaga

SEQ ID NO: 2427841 - RNA, 19 nt, Homo sapiens
  misc_RNA (1)...(19): siRNA sense strand
ugacaauagaguuugagaa

SEQ ID NO: 2427842 - RNA, 19 nt, Homo sapiens
  misc_RNA (1)...(19): siRNA sense strand
ccuuacaagaagagaaguu

SEQ ID NO: 2427843 - RNA, 19 nt, Homo sapiens
  misc_RNA (1)...(19): siRNA sense strand
agaugaagaaggaaugaau

SEQ ID NO: 2427844 - RNA, 19 nt, Homo sapiens
  misc_RNA (1)...(19): siRNA sense strand
agcaagaaaggcagagaau

SEQ ID NO: 2427845 - RNA, 19 nt, Homo sapiens
  misc_RNA (1)...(19): siRNA sense strand
aggaaugaauagaaugcuu

SEQ ID NO: 2427846 - RNA, 19 nt, Homo sapiens
  misc_RNA (1)...(19): siRNA sense strand
ccaaugggcuggaguggga

SEQ ID NO: 2427847 - RNA, 19 nt, Homo sapiens
  misc_RNA (1)...(19): siRNA sense strand
auuguugaccuaagagaaa

SEQ ID NO: 2427848 - RNA, 19 nt, Homo sapiens
  misc_RNA (1)...(19): siRNA sense strand
auaucaaaguucaggacca

SEQ ID NO: 2427849 - RNA, 19 nt, Homo sapiens
  misc_RNA (1)...(19): siRNA sense strand
ucgaaucuuguuugagaaa

SEQ ID NO: 2427850 - RNA, 19 nt, Homo sapiens
  misc_RNA (1)...(19): siRNA sense strand
caacaagaagacuggaagu

SEQ ID NO: 2427851 - RNA, 19 nt, Homo sapiens
  misc_RNA (1)...(19): siRNA sense strand
gacuagaagaagaagcuuu

SEQ ID NO: 2427852 - RNA, 19 nt, Homo sapiens
  misc_RNA (1)...(19): siRNA sense strand
aggaagaaauuguugaccu

SEQ ID NO: 2427853 - RNA, 19 nt, Homo sapiens
  misc_RNA (1)...(19): siRNA sense strand
aagaagagaaguuaagacu

SEQ ID NO: 2427854 - RNA, 19 nt, Homo sapiens
  misc_RNA (1)...(19): siRNA sense strand
ugaccuaagagaaaggcau

SEQ ID NO: 2427855 - RNA, 19 nt, Homo sapiens
  misc_RNA (1)...(19): siRNA sense strand
cggcggaggauccaaguau

SEQ ID NO: 2427856 - RNA, 19 nt, Homo sapiens
  misc_RNA (1)...(19): siRNA sense strand
cggacugcuucgcaaggaa

SEQ ID NO: 2427857 - RNA, 19 nt, Homo sapiens
  misc_RNA (1)...(19): siRNA sense strand
auaugaagucacaguauga

SEQ ID NO: 2427858 - RNA, 19 nt, Homo sapiens
  misc_RNA (1)...(19): siRNA sense strand
ggaagacauucuacgggca

SEQ ID NO: 2427859 - RNA, 19 nt, Homo sapiens
  misc_RNA (1)...(19): siRNA sense strand
guugugauuuaaugaccaa

SEQ ID NO: 2427860 - RNA, 19 nt, Homo sapiens
  misc_RNA (1)...(19): siRNA sense strand
agaaauaugaagucacagu

SEQ ID NO: 2427861 - RNA, 19 nt, Homo sapiens
  misc_RNA (1)...(19): siRNA sense strand
ggcauaaggcauucugaca

SEQ ID NO: 2427862 - RNA, 19 nt, Homo sapiens
  misc_RNA (1)...(19): siRNA sense strand
aguuaggguuguugaagau

SEQ ID NO: 2427863 - RNA, 19 nt, Homo sapiens
  misc_RNA (1)...(19): siRNA sense strand
ugaagaugucauuagucaa

SEQ ID NO: 2427864 - RNA, 19 nt, Homo sapiens
  misc_RNA (1)...(19): siRNA sense strand
gcugaauggugucucccaa

SEQ ID NO: 2427865 - RNA, 19 nt, Homo sapiens
  misc_RNA (1)...(19): siRNA sense strand
guguaagcaaugugggaaa

SEQ ID NO: 2427866 - RNA, 19 nt, Homo sapiens
  misc_RNA (1)...(19): siRNA sense strand
auguaaggaaugugggaaa

SEQ ID NO: 2427867 - RNA, 19 nt, Homo sapiens
  misc_RNA (1)...(19): siRNA sense strand
auguaagaaaugugggaaa

SEQ ID NO: 2427868 - RNA, 19 nt, Homo sapiens
  misc_RNA (1)...(19): siRNA sense strand
ccguauaaaugcaagcaau

SEQ ID NO: 2427869 - RNA, 19 nt, Homo sapiens
  misc_RNA (1)...(19): siRNA sense strand
ccguaugaauguaaacaau

SEQ ID NO: 2427870 - RNA, 19 nt, Homo sapiens
  misc_RNA (1)...(19): siRNA sense strand
auguaagcagugugggaaa

SEQ ID NO: 2427871 - RNA, 19 nt, Homo sapiens
  misc_RNA (1)...(19): siRNA sense strand
ccguaucaauguaaggaau

SEQ ID NO: 2427872 - RNA, 19 nt, Homo sapiens
  misc_RNA (1)...(19): siRNA sense strand
gggaagugaugcuggaaac

SEQ ID NO: 2427873 - RNA, 19 nt, Homo sapiens
  misc_RNA (1)...(19): siRNA sense strand
augcaagcaaugugguaaa

SEQ ID NO: 2427874 - RNA, 19 nt, Homo sapiens
  misc_RNA (1)...(19): siRNA sense strand
auguaaguuuugugggaaa

SEQ ID NO: 2427875 - RNA, 19 nt, Homo sapiens
  misc_RNA (1)...(19): siRNA sense strand
caugugaaugucaggaaua

SEQ ID NO: 2427876 - RNA, 19 nt, Homo sapiens
  misc_RNA (1)...(19): siRNA sense strand
ccuuaugaaugucaggaau

SEQ ID NO: 2427877 - RNA, 19 nt, Homo sapiens
  misc_RNA (1)...(19): siRNA sense strand
augucaggaaugugggaaa

SEQ ID NO: 2427878 - RNA, 19 nt, Homo sapiens
  misc_RNA (1)...(19): siRNA sense strand
auguaaggaauguggaaaa

SEQ ID NO: 2427879 - RNA, 19 nt, Homo sapiens
  misc_RNA (1)...(19): siRNA sense strand
agaccagaacauugaauau

SEQ ID NO: 2427880 - RNA, 19 nt, Homo sapiens
  misc_RNA (1)...(19): siRNA sense strand
ccaucgaauacaugaaaga

SEQ ID NO: 2427881 - RNA, 19 nt, Homo sapiens
  misc_RNA (1)...(19): siRNA sense strand
aacucacacuggagagaaa

SEQ ID NO: 2427882 - RNA, 19 nt, Homo sapiens
  misc_RNA (1)...(19): siRNA sense strand
aacucacaguggagagaaa

SEQ ID NO: 2427883 - RNA, 19 nt, Homo sapiens
  misc_RNA (1)...(19): siRNA sense strand
cccuaugaauguaagaaau

SEQ ID NO: 2427884 - RNA, 19 nt, Homo sapiens
  misc_RNA (1)...(19): siRNA sense strand
gaauguaagcaguguggga

SEQ ID NO: 2427885 - RNA, 19 nt, Homo sapiens
  misc_RNA (1)...(19): siRNA sense strand
agaagaaucucuacaggga

SEQ ID NO: 2427886 - RNA, 19 nt, Homo sapiens
  misc_RNA (1)...(19): siRNA sense strand
caauguaaggaauguggaa

SEQ ID NO: 2427887 - RNA, 19 nt, Homo sapiens
  misc_RNA (1)...(19): siRNA sense strand
agacaugaaaggagucaca

SEQ ID NO: 2427888 - RNA, 19 nt, Homo sapiens
  misc_RNA (1)...(19): siRNA sense strand
aagaaugcacucuggagaa

SEQ ID NO: 2427889 - RNA, 19 nt, Homo sapiens
  misc_RNA (1)...(19): siRNA sense strand
aagaaugcacucuggagaa

SEQ ID NO: 2427890 - RNA, 19 nt, Homo sapiens
  misc_RNA (1)...(19): siRNA sense strand
gugaaguuggccuagguaa

SEQ ID NO: 2427891 - RNA, 19 nt, Homo sapiens
  misc_RNA (1)...(19): siRNA sense strand
ggaauauggaccaaagcca

SEQ ID NO: 2427892 - RNA, 19 nt, Homo sapiens
  misc_RNA (1)...(19): siRNA sense strand
ucacagacaugaaaggagu

SEQ ID NO: 2427893 - RNA, 19 nt, Homo sapiens
  misc_RNA (1)...(19): siRNA sense strand
gacacaaacacauaagaau

SEQ ID NO: 2427894 - RNA, 19 nt, Homo sapiens
  misc_RNA (1)...(19): siRNA sense strand
aguggaaagaccagaacau

SEQ ID NO: 2427895 - RNA, 19 nt, Homo sapiens
  misc_RNA (1)...(19): siRNA sense strand
gcuuguaaagaauguggaa

SEQ ID NO: 2427896 - RNA, 19 nt, Homo sapiens
  misc_RNA (1)...(19): siRNA sense strand
acaugggagagaaggcuua

SEQ ID NO: 2427897 - RNA, 19 nt, Homo sapiens
  misc_RNA (1)...(19): siRNA sense strand
cccuaugaguguaagcaau

SEQ ID NO: 2427898 - RNA, 19 nt, Homo sapiens
  misc_RNA (1)...(19): siRNA sense strand
cccuaugcuuguaaagaau

SEQ ID NO: 2427899 - RNA, 19 nt, Homo sapiens
  misc_RNA (1)...(19): siRNA sense strand
agggaagugaugcuggaaa

SEQ ID NO: 2427900 - RNA, 19 nt, Homo sapiens
  misc_RNA (1)...(19): siRNA sense strand
cagucauuguggagaaacu

SEQ ID NO: 2427901 - RNA, 19 nt, Homo sapiens
  misc_RNA (1)...(19): siRNA sense strand
gugacagcuuuguguguga

SEQ ID NO: 2427902 - RNA, 19 nt, Homo sapiens
  misc_RNA (1)...(19): siRNA sense strand
aggauguggcugugaacuu

SEQ ID NO: 2427903 - RNA, 19 nt, Homo sapiens
  misc_RNA (1)...(19): siRNA sense strand
auucaagcauucaaagaca

SEQ ID NO: 2427904 - RNA, 19 nt, Homo sapiens
  misc_RNA (1)...(19): siRNA sense strand
gaauguaagaaauguggga

SEQ ID NO: 2427905 - RNA, 19 nt, Homo sapiens
  misc_RNA (1)...(19): siRNA sense strand
uggauauuucccagaagaa

SEQ ID NO: 2427906 - RNA, 19 nt, Homo sapiens
  misc_RNA (1)...(19): siRNA sense strand
aggagaaacuucaggagug

SEQ ID NO: 2427907 - RNA, 19 nt, Homo sapiens
  misc_RNA (1)...(19): siRNA sense strand
gaacaucagaggugacacu

SEQ ID NO: 2427908 - RNA, 19 nt, Homo sapiens
  misc_RNA (1)...(19): siRNA sense strand
agaaacccuaugaguguaa

SEQ ID NO: 2427909 - RNA, 19 nt, Homo sapiens
  misc_RNA (1)...(19): siRNA sense strand
caggaaugugggaaagcau

SEQ ID NO: 2427910 - RNA, 19 nt, Homo sapiens
  misc_RNA (1)...(19): siRNA sense strand
uaccaaaaccccaggagaa

SEQ ID NO: 2427911 - RNA, 19 nt, Homo sapiens
  misc_RNA (1)...(19): siRNA sense strand
acccuaugcuuguaaagaa

SEQ ID NO: 2427912 - RNA, 19 nt, Homo sapiens
  misc_RNA (1)...(19): siRNA sense strand
uggagaaagaccuuaugaa

SEQ ID NO: 2427913 - RNA, 19 nt, Homo sapiens
  misc_RNA (1)...(19): siRNA sense strand
cuguauucugucugggaaa

SEQ ID NO: 2427914 - RNA, 19 nt, Homo sapiens
  misc_RNA (1)...(19): siRNA sense strand
cugggaaauacuagugaau

SEQ ID NO: 2427915 - RNA, 19 nt, Homo sapiens
  misc_RNA (1)...(19): siRNA sense strand
ugaucauaaagcugacuaa

SEQ ID NO: 2427916 - RNA, 19 nt, Homo sapiens
  misc_RNA (1)...(19): siRNA sense strand
cagaguggacagagcacau

SEQ ID NO: 2427917 - RNA, 19 nt, Homo sapiens
  misc_RNA (1)...(19): siRNA sense strand
cggcaacaucucagggucu

SEQ ID NO: 2427918 - RNA, 19 nt, Homo sapiens
  misc_RNA (1)...(19): siRNA sense strand
gcuucuacccaguggccuu

SEQ ID NO: 2427919 - RNA, 19 nt, Homo sapiens
  misc_RNA (1)...(19): siRNA sense strand
uggaauuggaagaggaaga

SEQ ID NO: 2427920 - RNA, 19 nt, Homo sapiens
  misc_RNA (1)...(19): siRNA sense strand
acggagaagacgaggaaga

SEQ ID NO: 2427921 - RNA, 19 nt, Homo sapiens
  misc_RNA (1)...(19): siRNA sense strand
cagagaagaaggaaggaga

SEQ ID NO: 2427922 - RNA, 19 nt, Homo sapiens
  misc_RNA (1)...(19): siRNA sense strand
gagaagacgaggaagagga

SEQ ID NO: 2427923 - RNA, 19 nt, Homo sapiens
  misc_RNA (1)...(19): siRNA sense strand
agaaggaaggagaagaaaa

SEQ ID NO: 2427924 - RNA, 19 nt, Homo sapiens
  misc_RNA (1)...(19): siRNA sense strand
aguugguucugguggaauu

SEQ ID NO: 2427925 - RNA, 19 nt, Homo sapiens
  misc_RNA (1)...(19): siRNA sense strand
acaugaaaaugaagacgaa

SEQ ID NO: 2427926 - RNA, 19 nt, Homo sapiens
  misc_RNA (1)...(19): siRNA sense strand
aggagaaaccaaugcacuu

SEQ ID NO: 2427927 - RNA, 19 nt, Homo sapiens
  misc_RNA (1)...(19): siRNA sense strand
acgaggaagaggaggagca

SEQ ID NO: 2427928 - RNA, 19 nt, Homo sapiens
  misc_RNA (1)...(19): siRNA sense strand
ggguggaauggcugcaaau

SEQ ID NO: 2427929 - RNA, 19 nt, Homo sapiens
  misc_RNA (1)...(19): siRNA sense strand
aagacgaggaagaggagga

SEQ ID NO: 2427930 - RNA, 19 nt, Homo sapiens
  misc_RNA (1)...(19): siRNA sense strand
ugguggaauuaucaggaau

SEQ ID NO: 2427931 - RNA, 19 nt, Homo sapiens
  misc_RNA (1)...(19): siRNA sense strand
auuggaagaggaagagauu

SEQ ID NO: 2427932 - RNA, 19 nt, Homo sapiens
  misc_RNA (1)...(19): siRNA sense strand
agaagaaggaaggagaaga

SEQ ID NO: 2427933 - RNA, 19 nt, Homo sapiens
  misc_RNA (1)...(19): siRNA sense strand
gaguugugaacaggagaaa

SEQ ID NO: 2427934 - RNA, 19 nt, Homo sapiens
  misc_RNA (1)...(19): siRNA sense strand
ugaaaaugaagacgaagaa

SEQ ID NO: 2427935 - RNA, 19 nt, Homo sapiens
  misc_RNA (1)...(19): siRNA sense strand
cuuuggaauuggaagagga

SEQ ID NO: 2427936 - RNA, 19 nt, Homo sapiens
  misc_RNA (1)...(19): siRNA sense strand
augcugauacagaaggcaa

SEQ ID NO: 2427937 - RNA, 19 nt, Homo sapiens
  misc_RNA (1)...(19): siRNA sense strand
cggacuacgaggaagguuu

SEQ ID NO: 2427938 - RNA, 19 nt, Homo sapiens
  misc_RNA (1)...(19): siRNA sense strand
uucuaaaggcacuggacaa

SEQ ID NO: 2427939 - RNA, 19 nt, Homo sapiens
  misc_RNA (1)...(19): siRNA sense strand
gcugcaaccgaaagaucaa

SEQ ID NO: 2427940 - RNA, 19 nt, Homo sapiens
  misc_RNA (1)...(19): siRNA sense strand
gaaagaucaaggaccggua

SEQ ID NO: 2427941 - RNA, 19 nt, Homo sapiens
  misc_RNA (1)...(19): siRNA sense strand
ucuuugguguaacgggaaa

SEQ ID NO: 2427942 - RNA, 19 nt, Homo sapiens
  misc_RNA (1)...(19): siRNA sense strand
cagaauaaguauaaggaag

SEQ ID NO: 2427943 - RNA, 19 nt, Homo sapiens
  misc_RNA (1)...(19): siRNA sense strand
caguggagucggagaaaca

SEQ ID NO: 2427944 - RNA, 19 nt, Homo sapiens
  misc_RNA (1)...(19): siRNA sense strand
cugcaaagccugucccaga

SEQ ID NO: 2427945 - RNA, 19 nt, Homo sapiens
  misc_RNA (1)...(19): siRNA sense strand
cggaggagaaagaaggcga

SEQ ID NO: 2427946 - RNA, 19 nt, Homo sapiens
  misc_RNA (1)...(19): siRNA sense strand
uggcucagcuggaggagga

SEQ ID NO: 2427947 - RNA, 19 nt, Homo sapiens
  misc_RNA (1)...(19): siRNA sense strand
cuaaugaggaggaagagga

SEQ ID NO: 2427948 - RNA, 19 nt, Homo sapiens
  misc_RNA (1)...(19): siRNA sense strand
aguaugaugaggauggaca

SEQ ID NO: 2427949 - RNA, 19 nt, Homo sapiens
  misc_RNA (1)...(19): siRNA sense strand
ggcuaugccaggagaacca

SEQ ID NO: 2427950 - RNA, 19 nt, Homo sapiens
  misc_RNA (1)...(19): siRNA sense strand
cagaauaaguauaaggaag

SEQ ID NO: 2427951 - RNA, 19 nt, Homo sapiens
  misc_RNA (1)...(19): siRNA sense strand
caguggagucggagaaaca

SEQ ID NO: 2427952 - RNA, 19 nt, Homo sapiens
  misc_RNA (1)...(19): siRNA sense strand
cugcaaagccugucccaga

SEQ ID NO: 2427953 - RNA, 19 nt, Homo sapiens
  misc_RNA (1)...(19): siRNA sense strand
cggaggagaaagaaggcga

SEQ ID NO: 2427954 - RNA, 19 nt, Homo sapiens
  misc_RNA (1)...(19): siRNA sense strand
uggcucagcuggaggagga

SEQ ID NO: 2427955 - RNA, 19 nt, Homo sapiens
  misc_RNA (1)...(19): siRNA sense strand
cuaaugaggaggaagagga

SEQ ID NO: 2427956 - RNA, 19 nt, Homo sapiens
  misc_RNA (1)...(19): siRNA sense strand
aguaugaugaggauggaca

SEQ ID NO: 2427957 - RNA, 19 nt, Homo sapiens
  misc_RNA (1)...(19): siRNA sense strand
ggcuaugccaggagaacca

SEQ ID NO: 2427958 - RNA, 19 nt, Homo sapiens
  misc_RNA (1)...(19): siRNA sense strand
cagaauaaguauaaggaag

SEQ ID NO: 2427959 - RNA, 19 nt, Homo sapiens
  misc_RNA (1)...(19): siRNA sense strand
caguggagucggagaaaca

SEQ ID NO: 2427960 - RNA, 19 nt, Homo sapiens
  misc_RNA (1)...(19): siRNA sense strand
cugcaaagccugucccaga

SEQ ID NO: 2427961 - RNA, 19 nt, Homo sapiens
  misc_RNA (1)...(19): siRNA sense strand
cggaggagaaagaaggcga

SEQ ID NO: 2427962 - RNA, 19 nt, Homo sapiens
  misc_RNA (1)...(19): siRNA sense strand
uggcucagcuggaggagga

SEQ ID NO: 2427963 - RNA, 19 nt, Homo sapiens
  misc_RNA (1)...(19): siRNA sense strand
cuaaugaggaggaagagga

SEQ ID NO: 2427964 - RNA, 19 nt, Homo sapiens
  misc_RNA (1)...(19): siRNA sense strand
aguaugaugaggauggaca

SEQ ID NO: 2427965 - RNA, 19 nt, Homo sapiens
  misc_RNA (1)...(19): siRNA sense strand
ggcuaugccaggagaacca

SEQ ID NO: 2427966 - RNA, 19 nt, Homo sapiens
  misc_RNA (1)...(19): siRNA sense strand
cagaauaaguauaaggaag

SEQ ID NO: 2427967 - RNA, 19 nt, Homo sapiens
  misc_RNA (1)...(19): siRNA sense strand
caguggagucggagaaaca

SEQ ID NO: 2427968 - RNA, 19 nt, Homo sapiens
  misc_RNA (1)...(19): siRNA sense strand
cugcaaagccugucccaga

SEQ ID NO: 2427969 - RNA, 19 nt, Homo sapiens
  misc_RNA (1)...(19): siRNA sense strand
cggaggagaaagaaggcga

SEQ ID NO: 2427970 - RNA, 19 nt, Homo sapiens
  misc_RNA (1)...(19): siRNA sense strand
uggcucagcuggaggagga

SEQ ID NO: 2427971 - RNA, 19 nt, Homo sapiens
  misc_RNA (1)...(19): siRNA sense strand
cuaaugaggaggaagagga

SEQ ID NO: 2427972 - RNA, 19 nt, Homo sapiens
  misc_RNA (1)...(19): siRNA sense strand
aguaugaugaggauggaca

SEQ ID NO: 2427973 - RNA, 19 nt, Homo sapiens
  misc_RNA (1)...(19): siRNA sense strand
ggcuaugccaggagaacca

SEQ ID NO: 2427974 - RNA, 19 nt, Homo sapiens
  misc_RNA (1)...(19): siRNA sense strand
guggaaaugaagaagauca

SEQ ID NO: 2427975 - RNA, 19 nt, Homo sapiens
  misc_RNA (1)...(19): siRNA sense strand
caggaguggaaaugaagaa

SEQ ID NO: 2427976 - RNA, 19 nt, Homo sapiens
  misc_RNA (1)...(19): siRNA sense strand
ccgccaagaagcuggugaa

SEQ ID NO: 2427977 - RNA, 19 nt, Homo sapiens
  misc_RNA (1)...(19): siRNA sense strand
ggaaggaaaugcuggagcu

SEQ ID NO: 2427978 - RNA, 19 nt, Homo sapiens
  misc_RNA (1)...(19): siRNA sense strand
gccaaucggcuguggguga

SEQ ID NO: 2427979 - RNA, 19 nt, Homo sapiens
  misc_RNA (1)...(19): siRNA sense strand
ccaaggagcucaaggcgcu

SEQ ID NO: 2427980 - RNA, 19 nt, Homo sapiens
  misc_RNA (1)...(19): siRNA sense strand
gagcgagaccagauggagu

SEQ ID NO: 2427981 - RNA, 19 nt, Homo sapiens
  misc_RNA (1)...(19): siRNA sense strand
cagauggagucgacgcuca

SEQ ID NO: 2427982 - RNA, 19 nt, Homo sapiens
  misc_RNA (1)...(19): siRNA sense strand
ccaagaagcuggugaaccg

SEQ ID NO: 2427983 - RNA, 19 nt, Homo sapiens
  misc_RNA (1)...(19): siRNA sense strand
augaagaagaucacugaca

SEQ ID NO: 2427984 - RNA, 19 nt, Homo sapiens
  misc_RNA (1)...(19): siRNA sense strand
acgucuaccugcagcgcau

SEQ ID NO: 2427985 - RNA, 19 nt, Homo sapiens
  misc_RNA (1)...(19): siRNA sense strand
ccaccaugcacgccgagaa

SEQ ID NO: 2427986 - RNA, 19 nt, Homo sapiens
  misc_RNA (1)...(19): siRNA sense strand
cagagaagcaccagggcaa

SEQ ID NO: 2427987 - RNA, 19 nt, Homo sapiens
  misc_RNA (1)...(19): siRNA sense strand
agccagugccagagaacaa

SEQ ID NO: 2427988 - RNA, 19 nt, Homo sapiens
  misc_RNA (1)...(19): siRNA sense strand
ggacaaccaucuaugcaga

SEQ ID NO: 2427989 - RNA, 19 nt, Homo sapiens
  misc_RNA (1)...(19): siRNA sense strand
acagaggaaaggaggccaa

SEQ ID NO: 2427990 - RNA, 19 nt, Homo sapiens
  misc_RNA (1)...(19): siRNA sense strand
gcaucaacgcacagagaac

SEQ ID NO: 2427991 - RNA, 19 nt, Homo sapiens
  misc_RNA (1)...(19): siRNA sense strand
augcagagccagugccaga

SEQ ID NO: 2427992 - RNA, 19 nt, Homo sapiens
  misc_RNA (1)...(19): siRNA sense strand
ggacggugucagagaagca

SEQ ID NO: 2427993 - RNA, 19 nt, Homo sapiens
  misc_RNA (1)...(19): siRNA sense strand
acaagggcaaggaggacaa

SEQ ID NO: 2427994 - RNA, 19 nt, Homo sapiens
  misc_RNA (1)...(19): siRNA sense strand
ggacauccuucuacggcuu

SEQ ID NO: 2427995 - RNA, 19 nt, Homo sapiens
  misc_RNA (1)...(19): siRNA sense strand
aacaaggacgagacagaaa

SEQ ID NO: 2427996 - RNA, 19 nt, Homo sapiens
  misc_RNA (1)...(19): siRNA sense strand
ccaggaagcuuuucgggaa

SEQ ID NO: 2427997 - RNA, 19 nt, Homo sapiens
  misc_RNA (1)...(19): siRNA sense strand
gagaagaaaccucaggcca

SEQ ID NO: 2427998 - RNA, 19 nt, Homo sapiens
  misc_RNA (1)...(19): siRNA sense strand
uggcaaagccuaaguccca

SEQ ID NO: 2427999 - RNA, 19 nt, Homo sapiens
  misc_RNA (1)...(19): siRNA sense strand
ggacgagacagaaaggagu

SEQ ID NO: 2428000 - RNA, 19 nt, Homo sapiens
  misc_RNA (1)...(19): siRNA sense strand
cuucgaaauaggaggccuu

SEQ ID NO: 2428001 - RNA, 19 nt, Homo sapiens
  misc_RNA (1)...(19): siRNA sense strand
cuuaugaaucagacgguga

SEQ ID NO: 2428002 - RNA, 19 nt, Homo sapiens
  misc_RNA (1)...(19): siRNA sense strand
acacacaaacccagcccaa

SEQ ID NO: 2428003 - RNA, 19 nt, Homo sapiens
  misc_RNA (1)...(19): siRNA sense strand
gaacgugccucuugggaag

SEQ ID NO: 2428004 - RNA, 19 nt, Homo sapiens
  misc_RNA (1)...(19): siRNA sense strand
gaacauuaaagaaaggucu

SEQ ID NO: 2428005 - RNA, 19 nt, Homo sapiens
  misc_RNA (1)...(19): siRNA sense strand
ucauuaaaggcuacgaaca

SEQ ID NO: 2428006 - RNA, 19 nt, Homo sapiens
  misc_RNA (1)...(19): siRNA sense strand
ccaaaagucagcacagaau

SEQ ID NO: 2428007 - RNA, 19 nt, Homo sapiens
  misc_RNA (1)...(19): siRNA sense strand
ggccagaccaggaagcuga

SEQ ID NO: 2428008 - RNA, 19 nt, Homo sapiens
  misc_RNA (1)...(19): siRNA sense strand
uggaagagccaggacacaa

SEQ ID NO: 2428009 - RNA, 19 nt, Homo sapiens
  misc_RNA (1)...(19): siRNA sense strand
agggcaagaugcagggaug

SEQ ID NO: 2428010 - RNA, 19 nt, Homo sapiens
  misc_RNA (1)...(19): siRNA sense strand
ccaccuaaggagaagaaac

SEQ ID NO: 2428011 - RNA, 19 nt, Homo sapiens
  misc_RNA (1)...(19): siRNA sense strand
cauaaguggcauuagcaau

SEQ ID NO: 2428012 - RNA, 19 nt, Homo sapiens
  misc_RNA (1)...(19): siRNA sense strand
ucgagaugacggcgagcua

SEQ ID NO: 2428013 - RNA, 19 nt, Homo sapiens
  misc_RNA (1)...(19): siRNA sense strand
ccuaacaacauaaguggca

SEQ ID NO: 2428014 - RNA, 19 nt, Homo sapiens
  misc_RNA (1)...(19): siRNA sense strand
acauaaguggcauuagcaa

SEQ ID NO: 2428015 - RNA, 19 nt, Homo sapiens
  misc_RNA (1)...(19): siRNA sense strand
gcacguaggagcacagaaa

SEQ ID NO: 2428016 - RNA, 19 nt, Homo sapiens
  misc_RNA (1)...(19): siRNA sense strand
ucggagauucgaugggaaa

SEQ ID NO: 2428017 - RNA, 19 nt, Homo sapiens
  misc_RNA (1)...(19): siRNA sense strand
cauaaguggcauuagcaau

SEQ ID NO: 2428018 - RNA, 19 nt, Homo sapiens
  misc_RNA (1)...(19): siRNA sense strand
ucgagaugacggcgagcua

SEQ ID NO: 2428019 - RNA, 19 nt, Homo sapiens
  misc_RNA (1)...(19): siRNA sense strand
ccuaacaacauaaguggca

SEQ ID NO: 2428020 - RNA, 19 nt, Homo sapiens
  misc_RNA (1)...(19): siRNA sense strand
acauaaguggcauuagcaa

SEQ ID NO: 2428021 - RNA, 19 nt, Homo sapiens
  misc_RNA (1)...(19): siRNA sense strand
cagaaggagaagaggguca

SEQ ID NO: 2428022 - RNA, 19 nt, Homo sapiens
  misc_RNA (1)...(19): siRNA sense strand
uggagaaggaauuggacau

SEQ ID NO: 2428023 - RNA, 19 nt, Homo sapiens
  misc_RNA (1)...(19): siRNA sense strand
gaaagaagcagcuggcacu

SEQ ID NO: 2428024 - RNA, 19 nt, Homo sapiens
  misc_RNA (1)...(19): siRNA sense strand
aagaacuggagaaggaauu

SEQ ID NO: 2428025 - RNA, 19 nt, Homo sapiens
  misc_RNA (1)...(19): siRNA sense strand
ucacaguggagaaggcaga

SEQ ID NO: 2428026 - RNA, 19 nt, Homo sapiens
  misc_RNA (1)...(19): siRNA sense strand
gggacuugcaggaggccuu

SEQ ID NO: 2428027 - RNA, 19 nt, Homo sapiens
  misc_RNA (1)...(19): siRNA sense strand
uuucuaacaugcugggaga

SEQ ID NO: 2428028 - RNA, 19 nt, Homo sapiens
  misc_RNA (1)...(19): siRNA sense strand
cagacagaucagaugguuu

SEQ ID NO: 2428029 - RNA, 19 nt, Homo sapiens
  misc_RNA (1)...(19): siRNA sense strand
aggaaaaggcugaggaggu

SEQ ID NO: 2428030 - RNA, 19 nt, Homo sapiens
  misc_RNA (1)...(19): siRNA sense strand
caggaagcagagaggugua

SEQ ID NO: 2428031 - RNA, 19 nt, Homo sapiens
  misc_RNA (1)...(19): siRNA sense strand
augcugaacuugaagcuga

SEQ ID NO: 2428032 - RNA, 19 nt, Homo sapiens
  misc_RNA (1)...(19): siRNA sense strand
aggaggacgaggagcgcau

SEQ ID NO: 2428033 - RNA, 19 nt, Homo sapiens
  misc_RNA (1)...(19): siRNA sense strand
ggaaagaagcagcuggcac

SEQ ID NO: 2428034 - RNA, 19 nt, Homo sapiens
  misc_RNA (1)...(19): siRNA sense strand
aggaugucacaguggagaa

SEQ ID NO: 2428035 - RNA, 19 nt, Homo sapiens
  misc_RNA (1)...(19): siRNA sense strand
ggacacuguucaaggcauc

SEQ ID NO: 2428036 - RNA, 19 nt, Homo sapiens
  misc_RNA (1)...(19): siRNA sense strand
ggaaccgacucuaaagcca

SEQ ID NO: 2428037 - RNA, 19 nt, Homo sapiens
  misc_RNA (1)...(19): siRNA sense strand
gggacagcaagaugggcuu

SEQ ID NO: 2428038 - RNA, 19 nt, Homo sapiens
  misc_RNA (1)...(19): siRNA sense strand
augcagugaucgugagaaa

SEQ ID NO: 2428039 - RNA, 19 nt, Homo sapiens
  misc_RNA (1)...(19): siRNA sense strand
augcagagaaugugggaaa

SEQ ID NO: 2428040 - RNA, 19 nt, Homo sapiens
  misc_RNA (1)...(19): siRNA sense strand
gugcagugaaugugagaaa

SEQ ID NO: 2428041 - RNA, 19 nt, Homo sapiens
  misc_RNA (1)...(19): siRNA sense strand
ccuuaugaaugcagagaau

SEQ ID NO: 2428042 - RNA, 19 nt, Homo sapiens
  misc_RNA (1)...(19): siRNA sense strand
ccuuaugaauguagugaau

SEQ ID NO: 2428043 - RNA, 19 nt, Homo sapiens
  misc_RNA (1)...(19): siRNA sense strand
ccuuaugaauguagugaau

SEQ ID NO: 2428044 - RNA, 19 nt, Homo sapiens
  misc_RNA (1)...(19): siRNA sense strand
gggaaauccuuuagccaga

SEQ ID NO: 2428045 - RNA, 19 nt, Homo sapiens
  misc_RNA (1)...(19): siRNA sense strand
gugcagucaaugugggaaa

SEQ ID NO: 2428046 - RNA, 19 nt, Homo sapiens
  misc_RNA (1)...(19): siRNA sense strand
cuuuaugaguguagcaaau

SEQ ID NO: 2428047 - RNA, 19 nt, Homo sapiens
  misc_RNA (1)...(19): siRNA sense strand
gagaauucacaguggagaa

SEQ ID NO: 2428048 - RNA, 19 nt, Homo sapiens
  misc_RNA (1)...(19): siRNA sense strand
gcaaauucacacuggacaa

SEQ ID NO: 2428049 - RNA, 19 nt, Homo sapiens
  misc_RNA (1)...(19): siRNA sense strand
augcagugaaugugggaaa

SEQ ID NO: 2428050 - RNA, 19 nt, Homo sapiens
  misc_RNA (1)...(19): siRNA sense strand
guguagcaaaugugagaaa

SEQ ID NO: 2428051 - RNA, 19 nt, Homo sapiens
  misc_RNA (1)...(19): siRNA sense strand
gaagaagagcccuggaaaa

SEQ ID NO: 2428052 - RNA, 19 nt, Homo sapiens
  misc_RNA (1)...(19): siRNA sense strand
ggguaugaccuuugaggau

SEQ ID NO: 2428053 - RNA, 19 nt, Homo sapiens
  misc_RNA (1)...(19): siRNA sense strand
auguagugaaugugggaaa

SEQ ID NO: 2428054 - RNA, 19 nt, Homo sapiens
  misc_RNA (1)...(19): siRNA sense strand
ggaaaaggaagguggauga

SEQ ID NO: 2428055 - RNA, 19 nt, Homo sapiens
  misc_RNA (1)...(19): siRNA sense strand
guguagugaaugugaggaa

SEQ ID NO: 2428056 - RNA, 19 nt, Homo sapiens
  misc_RNA (1)...(19): siRNA sense strand
cgggaaauccuuuagacaa

SEQ ID NO: 2428057 - RNA, 19 nt, Homo sapiens
  misc_RNA (1)...(19): siRNA sense strand
gugcugugagugugggaaa

SEQ ID NO: 2428058 - RNA, 19 nt, Homo sapiens
  misc_RNA (1)...(19): siRNA sense strand
gauaauucacacuggagaa

SEQ ID NO: 2428059 - RNA, 19 nt, Homo sapiens
  misc_RNA (1)...(19): siRNA sense strand
gagaauucauacuggcaca

SEQ ID NO: 2428060 - RNA, 19 nt, Homo sapiens
  misc_RNA (1)...(19): siRNA sense strand
gagaaugaggcgauagcuu

SEQ ID NO: 2428061 - RNA, 19 nt, Homo sapiens
  misc_RNA (1)...(19): siRNA sense strand
aggaaaaccuuuagcuaca

SEQ ID NO: 2428062 - RNA, 19 nt, Homo sapiens
  misc_RNA (1)...(19): siRNA sense strand
aggucacacuggagaaaga

SEQ ID NO: 2428063 - RNA, 19 nt, Homo sapiens
  misc_RNA (1)...(19): siRNA sense strand
gggaaauccuuuagccgca

SEQ ID NO: 2428064 - RNA, 19 nt, Homo sapiens
  misc_RNA (1)...(19): siRNA sense strand
cgucaugaguguggugaau

SEQ ID NO: 2428065 - RNA, 19 nt, Homo sapiens
  misc_RNA (1)...(19): siRNA sense strand
ugggaaauccuuuagacaa

SEQ ID NO: 2428066 - RNA, 19 nt, Homo sapiens
  misc_RNA (1)...(19): siRNA sense strand
ugggaaauccuuuagacaa

SEQ ID NO: 2428067 - RNA, 19 nt, Homo sapiens
  misc_RNA (1)...(19): siRNA sense strand
aguucacacuggagaaaga

SEQ ID NO: 2428068 - RNA, 19 nt, Homo sapiens
  misc_RNA (1)...(19): siRNA sense strand
gagacuucauacuggagaa

SEQ ID NO: 2428069 - RNA, 19 nt, Homo sapiens
  misc_RNA (1)...(19): siRNA sense strand
augugaugcuggagaacuu

SEQ ID NO: 2428070 - RNA, 19 nt, Homo sapiens
  misc_RNA (1)...(19): siRNA sense strand
gaauggagaaugaggcgau

SEQ ID NO: 2428071 - RNA, 19 nt, Homo sapiens
  misc_RNA (1)...(19): siRNA sense strand
guguggugaauguaggaaa

SEQ ID NO: 2428072 - RNA, 19 nt, Homo sapiens
  misc_RNA (1)...(19): siRNA sense strand
gggacucggcucaggguau

SEQ ID NO: 2428073 - RNA, 19 nt, Homo sapiens
  misc_RNA (1)...(19): siRNA sense strand
gagaaauccuuuagccgca

SEQ ID NO: 2428074 - RNA, 19 nt, Homo sapiens
  misc_RNA (1)...(19): siRNA sense strand
aauucacaguggagaaaga

SEQ ID NO: 2428075 - RNA, 19 nt, Homo sapiens
  misc_RNA (1)...(19): siRNA sense strand
auguuugaguguagugaau

SEQ ID NO: 2428076 - RNA, 19 nt, Homo sapiens
  misc_RNA (1)...(19): siRNA sense strand
gcuuuaugaguguagcaaa

SEQ ID NO: 2428077 - RNA, 19 nt, Homo sapiens
  misc_RNA (1)...(19): siRNA sense strand
augcagugaauguggaaaa

SEQ ID NO: 2428078 - RNA, 19 nt, Homo sapiens
  misc_RNA (1)...(19): siRNA sense strand
agccagagcucuagccuca

SEQ ID NO: 2428079 - RNA, 19 nt, Homo sapiens
  misc_RNA (1)...(19): siRNA sense strand
gcgggaaauccuuuagaca

SEQ ID NO: 2428080 - RNA, 19 nt, Homo sapiens
  misc_RNA (1)...(19): siRNA sense strand
cagcaagcauauacaggca

SEQ ID NO: 2428081 - RNA, 19 nt, Homo sapiens
  misc_RNA (1)...(19): siRNA sense strand
uguggugaauguaggaaaa

SEQ ID NO: 2428082 - RNA, 19 nt, Homo sapiens
  misc_RNA (1)...(19): siRNA sense strand
gcgucaugaguguggugaa

SEQ ID NO: 2428083 - RNA, 19 nt, Homo sapiens
  misc_RNA (1)...(19): siRNA sense strand
ccuuugaggauguggccau

SEQ ID NO: 2428084 - RNA, 19 nt, Homo sapiens
  misc_RNA (1)...(19): siRNA sense strand
agacaauucucuaaccuca

SEQ ID NO: 2428085 - RNA, 19 nt, Homo sapiens
  misc_RNA (1)...(19): siRNA sense strand
agaaagaccuuaugagugc

SEQ ID NO: 2428086 - RNA, 19 nt, Homo sapiens
  misc_RNA (1)...(19): siRNA sense strand
ccuuaugaaugcagugauc

SEQ ID NO: 2428087 - RNA, 19 nt, Homo sapiens
  misc_RNA (1)...(19): siRNA sense strand
gggaaacccuuuacccaca

SEQ ID NO: 2428088 - RNA, 19 nt, Homo sapiens
  misc_RNA (1)...(19): siRNA sense strand
ucauugaacaccagagagu

SEQ ID NO: 2428089 - RNA, 19 nt, Homo sapiens
  misc_RNA (1)...(19): siRNA sense strand
agagacaaggagaguggua

SEQ ID NO: 2428090 - RNA, 19 nt, Homo sapiens
  misc_RNA (1)...(19): siRNA sense strand
cagaggugaugaugggcau

SEQ ID NO: 2428091 - RNA, 19 nt, Homo sapiens
  misc_RNA (1)...(19): siRNA sense strand
ggacucaugcccaggccaa

SEQ ID NO: 2428092 - RNA, 19 nt, Homo sapiens
  misc_RNA (1)...(19): siRNA sense strand
ccuacauugaaguggaaca

SEQ ID NO: 2428093 - RNA, 19 nt, Homo sapiens
  misc_RNA (1)...(19): siRNA sense strand
gcaccuacauugaagugga

SEQ ID NO: 2428094 - RNA, 19 nt, Homo sapiens
  misc_RNA (1)...(19): siRNA sense strand
gggcugauggagagagauc

SEQ ID NO: 2428095 - RNA, 19 nt, Homo sapiens
  misc_RNA (1)...(19): siRNA sense strand
ucacaggguuacuggagca

SEQ ID NO: 2428096 - RNA, 19 nt, Homo sapiens
  misc_RNA (1)...(19): siRNA sense strand
gcaccuuccugcuggcuga

SEQ ID NO: 2428097 - RNA, 19 nt, Homo sapiens
  misc_RNA (1)...(19): siRNA sense strand
ucgugaagagggagagcca

SEQ ID NO: 2428098 - RNA, 19 nt, Homo sapiens
  misc_RNA (1)...(19): siRNA sense strand
cggcugugaucuuugccaa

SEQ ID NO: 2428099 - RNA, 19 nt, Homo sapiens
  misc_RNA (1)...(19): siRNA sense strand
cauccaggucuguguucaa

SEQ ID NO: 2428100 - RNA, 19 nt, Homo sapiens
  misc_RNA (1)...(19): siRNA sense strand
ucagguagaucgucggcau

SEQ ID NO: 2428101 - RNA, 19 nt, Homo sapiens
  misc_RNA (1)...(19): siRNA sense strand
cagguagaucgucggcaua

SEQ ID NO: 2428102 - RNA, 19 nt, Homo sapiens
  misc_RNA (1)...(19): siRNA sense strand
agacaaggagagugguauc

SEQ ID NO: 2428103 - RNA, 19 nt, Homo sapiens
  misc_RNA (1)...(19): siRNA sense strand
ggauaaacacagagggagu

SEQ ID NO: 2428104 - RNA, 19 nt, Homo sapiens
  misc_RNA (1)...(19): siRNA sense strand
agaagauccaggagaacaa

SEQ ID NO: 2428105 - RNA, 19 nt, Homo sapiens
  misc_RNA (1)...(19): siRNA sense strand
ugaagaagcuggagagcag

SEQ ID NO: 2428106 - RNA, 19 nt, Homo sapiens
  misc_RNA (1)...(19): siRNA sense strand
acgugaaagugcagaggca

SEQ ID NO: 2428107 - RNA, 19 nt, Homo sapiens
  misc_RNA (1)...(19): siRNA sense strand
ggagagaagauccaggaga

SEQ ID NO: 2428108 - RNA, 19 nt, Homo sapiens
  misc_RNA (1)...(19): siRNA sense strand
cggcgaaccuggaagugga

SEQ ID NO: 2428109 - RNA, 19 nt, Homo sapiens
  misc_RNA (1)...(19): siRNA sense strand
cuggauaaacacagaggga

SEQ ID NO: 2428110 - RNA, 19 nt, Homo sapiens
  misc_RNA (1)...(19): siRNA sense strand
cuuaugggauggaggacga

SEQ ID NO: 2428111 - RNA, 19 nt, Homo sapiens
  misc_RNA (1)...(19): siRNA sense strand
gggaccaggccuagagacu

SEQ ID NO: 2428112 - RNA, 19 nt, Homo sapiens
  misc_RNA (1)...(19): siRNA sense strand
uggcauugggcgagcugua

SEQ ID NO: 2428113 - RNA, 19 nt, Homo sapiens
  misc_RNA (1)...(19): siRNA sense strand
ccuguggagccgaggaaaa

SEQ ID NO: 2428114 - RNA, 19 nt, Homo sapiens
  misc_RNA (1)...(19): siRNA sense strand
gaggcaggagggagccaaa

SEQ ID NO: 2428115 - RNA, 19 nt, Homo sapiens
  misc_RNA (1)...(19): siRNA sense strand
ggauggaggacgaagguug

SEQ ID NO: 2428116 - RNA, 19 nt, Homo sapiens
  misc_RNA (1)...(19): siRNA sense strand
augacaaagcgguggucuu

SEQ ID NO: 2428117 - RNA, 19 nt, Homo sapiens
  misc_RNA (1)...(19): siRNA sense strand
cauggagagcaacgugaaa

SEQ ID NO: 2428118 - RNA, 19 nt, Homo sapiens
  misc_RNA (1)...(19): siRNA sense strand
aagaagaagaucaagucga

SEQ ID NO: 2428119 - RNA, 19 nt, Homo sapiens
  misc_RNA (1)...(19): siRNA sense strand
aggugcuauucgagugcua

SEQ ID NO: 2428120 - RNA, 19 nt, Homo sapiens
  misc_RNA (1)...(19): siRNA sense strand
uaagacaaguccaggcaga

SEQ ID NO: 2428121 - RNA, 19 nt, Homo sapiens
  misc_RNA (1)...(19): siRNA sense strand
gcagacuacaaguggcaga

SEQ ID NO: 2428122 - RNA, 19 nt, Homo sapiens
  misc_RNA (1)...(19): siRNA sense strand
uacaaguggcagaagcaua

SEQ ID NO: 2428123 - RNA, 19 nt, Homo sapiens
  misc_RNA (1)...(19): siRNA sense strand
caaagcaaauacagccaca

SEQ ID NO: 2428124 - RNA, 19 nt, Homo sapiens
  misc_RNA (1)...(19): siRNA sense strand
agguagcauuaaagcucua

SEQ ID NO: 2428125 - RNA, 19 nt, Homo sapiens
  misc_RNA (1)...(19): siRNA sense strand
aggaggaagcagaggaaga

SEQ ID NO: 2428126 - RNA, 19 nt, Homo sapiens
  misc_RNA (1)...(19): siRNA sense strand
cagaggaagaagaaggcau

SEQ ID NO: 2428127 - RNA, 19 nt, Homo sapiens
  misc_RNA (1)...(19): siRNA sense strand
ccagggagcuugaaggcca

SEQ ID NO: 2428128 - RNA, 19 nt, Homo sapiens
  misc_RNA (1)...(19): siRNA sense strand
aggaagcagaggaagaaga

SEQ ID NO: 2428129 - RNA, 19 nt, Homo sapiens
  misc_RNA (1)...(19): siRNA sense strand
gcuccaggacagaggcuca

SEQ ID NO: 2428130 - RNA, 19 nt, Homo sapiens
  misc_RNA (1)...(19): siRNA sense strand
gccuaugcuuguauggcua

SEQ ID NO: 2428131 - RNA, 19 nt, Homo sapiens
  misc_RNA (1)...(19): siRNA sense strand
augaggaggcggaggagga

SEQ ID NO: 2428132 - RNA, 19 nt, Homo sapiens
  misc_RNA (1)...(19): siRNA sense strand
aagaagaaggcauggaucu

SEQ ID NO: 2428133 - RNA, 19 nt, Homo sapiens
  misc_RNA (1)...(19): siRNA sense strand
aggcggaggaggaagcaga

SEQ ID NO: 2428134 - RNA, 19 nt, Homo sapiens
  misc_RNA (1)...(19): siRNA sense strand
agagggaggcugugccgaa

SEQ ID NO: 2428135 - RNA, 19 nt, Homo sapiens
  misc_RNA (1)...(19): siRNA sense strand
cagggagcuugaaggccaa

SEQ ID NO: 2428136 - RNA, 19 nt, Homo sapiens
  misc_RNA (1)...(19): siRNA sense strand
ccaaggaguuuguggcuga

SEQ ID NO: 2428137 - RNA, 19 nt, Homo sapiens
  misc_RNA (1)...(19): siRNA sense strand
ucaagaacauuguggauga

SEQ ID NO: 2428138 - RNA, 19 nt, Homo sapiens
  misc_RNA (1)...(19): siRNA sense strand
aggaugaguuggaggacga

SEQ ID NO: 2428139 - RNA, 19 nt, Homo sapiens
  misc_RNA (1)...(19): siRNA sense strand
ccaaugaggcgcugcacaa

SEQ ID NO: 2428140 - RNA, 19 nt, Homo sapiens
  misc_RNA (1)...(19): siRNA sense strand
gcggacagcgagcgauaua

SEQ ID NO: 2428141 - RNA, 19 nt, Homo sapiens
  misc_RNA (1)...(19): siRNA sense strand
acaugaugaugaugaguga

SEQ ID NO: 2428142 - RNA, 19 nt, Homo sapiens
  misc_RNA (1)...(19): siRNA sense strand
aguucaacguucacagcaa

SEQ ID NO: 2428143 - RNA, 19 nt, Homo sapiens
  misc_RNA (1)...(19): siRNA sense strand
gacaggaguuucugccaaa

SEQ ID NO: 2428144 - RNA, 19 nt, Homo sapiens
  misc_RNA (1)...(19): siRNA sense strand
uggcggacagcgagcgaua

SEQ ID NO: 2428145 - RNA, 19 nt, Homo sapiens
  misc_RNA (1)...(19): siRNA sense strand
gcuuugauggacaggcaua

SEQ ID NO: 2428146 - RNA, 19 nt, Homo sapiens
  misc_RNA (1)...(19): siRNA sense strand
caucuguacuggugggagu

SEQ ID NO: 2428147 - RNA, 19 nt, Homo sapiens
  misc_RNA (1)...(19): siRNA sense strand
ccucaagaacauuguggau

SEQ ID NO: 2428148 - RNA, 19 nt, Homo sapiens
  misc_RNA (1)...(19): siRNA sense strand
ggacaggcauagcgcgagu

SEQ ID NO: 2428149 - RNA, 19 nt, Homo sapiens
  misc_RNA (1)...(19): siRNA sense strand
gcuucaugcugcacaccaa

SEQ ID NO: 2428150 - RNA, 19 nt, Homo sapiens
  misc_RNA (1)...(19): siRNA sense strand
ucacacuagacuucgaaua

SEQ ID NO: 2428151 - RNA, 19 nt, Homo sapiens
  misc_RNA (1)...(19): siRNA sense strand
gcaagagcugcguggacau

SEQ ID NO: 2428152 - RNA, 19 nt, Homo sapiens
  misc_RNA (1)...(19): siRNA sense strand
acgaggagaucuacagcga

SEQ ID NO: 2428153 - RNA, 19 nt, Homo sapiens
  misc_RNA (1)...(19): siRNA sense strand
gaugaugagugacgagaac

SEQ ID NO: 2428154 - RNA, 19 nt, Homo sapiens
  misc_RNA (1)...(19): siRNA sense strand
ugacaggaguuucugccaa

SEQ ID NO: 2428155 - RNA, 19 nt, Homo sapiens
  misc_RNA (1)...(19): siRNA sense strand
ccaaccagguccucaucaa

SEQ ID NO: 2428156 - RNA, 19 nt, Homo sapiens
  misc_RNA (1)...(19): siRNA sense strand
ccaaagaccuaucacacca

SEQ ID NO: 2428157 - RNA, 19 nt, Homo sapiens
  misc_RNA (1)...(19): siRNA sense strand
acauuguggaugaggacuu

SEQ ID NO: 2428158 - RNA, 19 nt, Homo sapiens
  misc_RNA (1)...(19): siRNA sense strand
ccuccaaggucaucgucuu

SEQ ID NO: 2428159 - RNA, 19 nt, Homo sapiens
  misc_RNA (1)...(19): siRNA sense strand
acgggaugcucaugaacau

SEQ ID NO: 2428160 - RNA, 19 nt, Homo sapiens
  misc_RNA (1)...(19): siRNA sense strand
cggaggaugaguuggagga

SEQ ID NO: 2428161 - RNA, 19 nt, Homo sapiens
  misc_RNA (1)...(19): siRNA sense strand
uugccaaagccaaggaguu

SEQ ID NO: 2428162 - RNA, 19 nt, Homo sapiens
  misc_RNA (1)...(19): siRNA sense strand
ucgaaaucggagcggaaca

SEQ ID NO: 2428163 - RNA, 19 nt, Homo sapiens
  misc_RNA (1)...(19): siRNA sense strand
gcgugucccucaagaacau

SEQ ID NO: 2428164 - RNA, 19 nt, Homo sapiens
  misc_RNA (1)...(19): siRNA sense strand
ggugggaguucaacguuca

SEQ ID NO: 2428165 - RNA, 19 nt, Homo sapiens
  misc_RNA (1)...(19): siRNA sense strand
gccaaauccuguaugacca

SEQ ID NO: 2428166 - RNA, 19 nt, Homo sapiens
  misc_RNA (1)...(19): siRNA sense strand
cggagugucuggaggccuu

SEQ ID NO: 2428167 - RNA, 19 nt, Homo sapiens
  misc_RNA (1)...(19): siRNA sense strand
gaugaggacggcugggaga

SEQ ID NO: 2428168 - RNA, 19 nt, Homo sapiens
  misc_RNA (1)...(19): siRNA sense strand
aggaauauguuuauccaga

SEQ ID NO: 2428169 - RNA, 19 nt, Homo sapiens
  misc_RNA (1)...(19): siRNA sense strand
uauugaaagacuagaggau

SEQ ID NO: 2428170 - RNA, 19 nt, Homo sapiens
  misc_RNA (1)...(19): siRNA sense strand
aguuaaacaaggaaaggga

SEQ ID NO: 2428171 - RNA, 19 nt, Homo sapiens
  misc_RNA (1)...(19): siRNA sense strand
acguuuugaccuagagaaa

SEQ ID NO: 2428172 - RNA, 19 nt, Homo sapiens
  misc_RNA (1)...(19): siRNA sense strand
uccagaagccagagacaga

SEQ ID NO: 2428173 - RNA, 19 nt, Homo sapiens
  misc_RNA (1)...(19): siRNA sense strand
cuuaagagacugagagacc

SEQ ID NO: 2428174 - RNA, 19 nt, Homo sapiens
  misc_RNA (1)...(19): siRNA sense strand
gcagaaaagcugagaagag

SEQ ID NO: 2428175 - RNA, 19 nt, Homo sapiens
  misc_RNA (1)...(19): siRNA sense strand
gguuuaucaaaauggguua

SEQ ID NO: 2428176 - RNA, 19 nt, Homo sapiens
  misc_RNA (1)...(19): siRNA sense strand
gggacaucauggagccagu

SEQ ID NO: 2428177 - RNA, 19 nt, Homo sapiens
  misc_RNA (1)...(19): siRNA sense strand
cagaaggagaagaaggaca

SEQ ID NO: 2428178 - RNA, 19 nt, Homo sapiens
  misc_RNA (1)...(19): siRNA sense strand
acaucaacgacgacgaauu

SEQ ID NO: 2428179 - RNA, 19 nt, Homo sapiens
  misc_RNA (1)...(19): siRNA sense strand
aggucuugcagaaggagaa

SEQ ID NO: 2428180 - RNA, 19 nt, Homo sapiens
  misc_RNA (1)...(19): siRNA sense strand
ccgacgaucagguggacca

SEQ ID NO: 2428181 - RNA, 19 nt, Homo sapiens
  misc_RNA (1)...(19): siRNA sense strand
auuaagaaacagagagcaa

SEQ ID NO: 2428182 - RNA, 19 nt, Homo sapiens
  misc_RNA (1)...(19): siRNA sense strand
ucaaaagagaugagggaaa

SEQ ID NO: 2428183 - RNA, 19 nt, Homo sapiens
  misc_RNA (1)...(19): siRNA sense strand
aguucaaaguucagaagua

SEQ ID NO: 2428184 - RNA, 19 nt, Homo sapiens
  misc_RNA (1)...(19): siRNA sense strand
cugaaauagugguuccuaa

SEQ ID NO: 2428185 - RNA, 19 nt, Homo sapiens
  misc_RNA (1)...(19): siRNA sense strand
cugaauacccugauggaga

SEQ ID NO: 2428186 - RNA, 19 nt, Homo sapiens
  misc_RNA (1)...(19): siRNA sense strand
ccggaaagaaacauggauu

SEQ ID NO: 2428187 - RNA, 19 nt, Homo sapiens
  misc_RNA (1)...(19): siRNA sense strand
ggugcagcccggaaagaaa

SEQ ID NO: 2428188 - RNA, 19 nt, Homo sapiens
  misc_RNA (1)...(19): siRNA sense strand
gaguaagaaaccagcuaau

SEQ ID NO: 2428189 - RNA, 19 nt, Homo sapiens
  misc_RNA (1)...(19): siRNA sense strand
ccucuuggcuuuaugggua

SEQ ID NO: 2428190 - RNA, 19 nt, Homo sapiens
  misc_RNA (1)...(19): siRNA sense strand
agguagaaaacgugaaauu

SEQ ID NO: 2428191 - RNA, 19 nt, Homo sapiens
  misc_RNA (1)...(19): siRNA sense strand
cuuucuugguucagaggaa

SEQ ID NO: 2428192 - RNA, 19 nt, Homo sapiens
  misc_RNA (1)...(19): siRNA sense strand
gcaugaacuagaaaagaaa

SEQ ID NO: 2428193 - RNA, 19 nt, Homo sapiens
  misc_RNA (1)...(19): siRNA sense strand
agaccaaaguugaaugcca

SEQ ID NO: 2428194 - RNA, 19 nt, Homo sapiens
  misc_RNA (1)...(19): siRNA sense strand
gcuucagauucaugggcau

SEQ ID NO: 2428195 - RNA, 19 nt, Homo sapiens
  misc_RNA (1)...(19): siRNA sense strand
ccuccuggaaauuaagaaa

SEQ ID NO: 2428196 - RNA, 19 nt, Homo sapiens
  misc_RNA (1)...(19): siRNA sense strand
ggaccauaacagaugccaa

SEQ ID NO: 2428197 - RNA, 19 nt, Homo sapiens
  misc_RNA (1)...(19): siRNA sense strand
gguaugaaaaugaagacaa

SEQ ID NO: 2428198 - RNA, 19 nt, Homo sapiens
  misc_RNA (1)...(19): siRNA sense strand
uuacaaaggcagugaaggu

SEQ ID NO: 2428199 - RNA, 19 nt, Homo sapiens
  misc_RNA (1)...(19): siRNA sense strand
auagagaaggaauggauau

SEQ ID NO: 2428200 - RNA, 19 nt, Homo sapiens
  misc_RNA (1)...(19): siRNA sense strand
ucuccaaagacuuaggaau

SEQ ID NO: 2428201 - RNA, 19 nt, Homo sapiens
  misc_RNA (1)...(19): siRNA sense strand
cgggaagaucuaagagucu

SEQ ID NO: 2428202 - RNA, 19 nt, Homo sapiens
  misc_RNA (1)...(19): siRNA sense strand
ggaagaucuaagagucuau

SEQ ID NO: 2428203 - RNA, 19 nt, Homo sapiens
  misc_RNA (1)...(19): siRNA sense strand
cagcauuaccugaagaucu

SEQ ID NO: 2428204 - RNA, 19 nt, Homo sapiens
  misc_RNA (1)...(19): siRNA sense strand
gaccaaaguugaaugccau

SEQ ID NO: 2428205 - RNA, 19 nt, Homo sapiens
  misc_RNA (1)...(19): siRNA sense strand
cggaaagaaacauggauug

SEQ ID NO: 2428206 - RNA, 19 nt, Homo sapiens
  misc_RNA (1)...(19): siRNA sense strand
ugcagaaacucuuggaagu

SEQ ID NO: 2428207 - RNA, 19 nt, Homo sapiens
  misc_RNA (1)...(19): siRNA sense strand
aggcagugaagguagaaaa

SEQ ID NO: 2428208 - RNA, 19 nt, Homo sapiens
  misc_RNA (1)...(19): siRNA sense strand
ucguuaugugaguaagaaa

SEQ ID NO: 2428209 - RNA, 19 nt, Homo sapiens
  misc_RNA (1)...(19): siRNA sense strand
gagaugagggaaaguggau

SEQ ID NO: 2428210 - RNA, 19 nt, Homo sapiens
  misc_RNA (1)...(19): siRNA sense strand
guguagaugaugagcucuu

SEQ ID NO: 2428211 - RNA, 19 nt, Homo sapiens
  misc_RNA (1)...(19): siRNA sense strand
ugaucuugauagagaagga

SEQ ID NO: 2428212 - RNA, 19 nt, Homo sapiens
  misc_RNA (1)...(19): siRNA sense strand
ugauagagaaggaauggau

SEQ ID NO: 2428213 - RNA, 19 nt, Homo sapiens
  misc_RNA (1)...(19): siRNA sense strand
aguugaaugccauggccaa

SEQ ID NO: 2428214 - RNA, 19 nt, Homo sapiens
  misc_RNA (1)...(19): siRNA sense strand
gcucagggugguuaagaca

SEQ ID NO: 2428215 - RNA, 19 nt, Homo sapiens
  misc_RNA (1)...(19): siRNA sense strand
cuccaaagacuuaggaauc

SEQ ID NO: 2428216 - RNA, 19 nt, Homo sapiens
  misc_RNA (1)...(19): siRNA sense strand
gugaguaagaaaccagcua

SEQ ID NO: 2428217 - RNA, 19 nt, Homo sapiens
  misc_RNA (1)...(19): siRNA sense strand
agaguaugcuagagagccu

SEQ ID NO: 2428218 - RNA, 19 nt, Homo sapiens
  misc_RNA (1)...(19): siRNA sense strand
ugggaaguccuuugaccaa

SEQ ID NO: 2428219 - RNA, 19 nt, Homo sapiens
  misc_RNA (1)...(19): siRNA sense strand
aaacaaacccagggagcca

SEQ ID NO: 2428220 - RNA, 19 nt, Homo sapiens
  misc_RNA (1)...(19): siRNA sense strand
aucuaagagucuaugagaa

SEQ ID NO: 2428221 - RNA, 19 nt, Homo sapiens
  misc_RNA (1)...(19): siRNA sense strand
gaucguuaugugaguaaga

SEQ ID NO: 2428222 - RNA, 19 nt, Homo sapiens
  misc_RNA (1)...(19): siRNA sense strand
ucucugaggccaugggcau

SEQ ID NO: 2428223 - RNA, 19 nt, Homo sapiens
  misc_RNA (1)...(19): siRNA sense strand
gcucaagcuuucucagcca

SEQ ID NO: 2428224 - RNA, 19 nt, Homo sapiens
  misc_RNA (1)...(19): siRNA sense strand
cuggaaauuaagaaacaga

SEQ ID NO: 2428225 - RNA, 19 nt, Homo sapiens
  misc_RNA (1)...(19): siRNA sense strand
gggaauacccaacagaaac

SEQ ID NO: 2428226 - RNA, 19 nt, Homo sapiens
  misc_RNA (1)...(19): siRNA sense strand
ucaugggcauugagaacau

SEQ ID NO: 2428227 - RNA, 19 nt, Homo sapiens
  misc_RNA (1)...(19): siRNA sense strand
uguauaaccgcuuugacaa

SEQ ID NO: 2428228 - RNA, 19 nt, Homo sapiens
  misc_RNA (1)...(19): siRNA sense strand
agccuuagggccauaaaua

SEQ ID NO: 2428229 - RNA, 19 nt, Homo sapiens
  misc_RNA (1)...(19): siRNA sense strand
cagacuacuccaagcauca

SEQ ID NO: 2428230 - RNA, 19 nt, Homo sapiens
  misc_RNA (1)...(19): siRNA sense strand
acagaaacuaugagauaug

SEQ ID NO: 2428231 - RNA, 19 nt, Homo sapiens
  misc_RNA (1)...(19): siRNA sense strand
agggaaaguggauggaaac

SEQ ID NO: 2428232 - RNA, 19 nt, Homo sapiens
  misc_RNA (1)...(19): siRNA sense strand
gguaacugccagaaggauc

SEQ ID NO: 2428233 - RNA, 19 nt, Homo sapiens
  misc_RNA (1)...(19): siRNA sense strand
uccuggaaauuaagaaaca

SEQ ID NO: 2428234 - RNA, 19 nt, Homo sapiens
  misc_RNA (1)...(19): siRNA sense strand
ccuuugaggcuacgggcuu

SEQ ID NO: 2428235 - RNA, 19 nt, Homo sapiens
  misc_RNA (1)...(19): siRNA sense strand
gugacaagcuggaaccuga

SEQ ID NO: 2428236 - RNA, 19 nt, Homo sapiens
  misc_RNA (1)...(19): siRNA sense strand
aaaccaagcuucagcgcca

SEQ ID NO: 2428237 - RNA, 19 nt, Homo sapiens
  misc_RNA (1)...(19): siRNA sense strand
gcuaguggcuccugggaag

SEQ ID NO: 2428238 - RNA, 19 nt, Homo sapiens
  misc_RNA (1)...(19): siRNA sense strand
ccacauggcacauagcuga

SEQ ID NO: 2428239 - RNA, 19 nt, Homo sapiens
  misc_RNA (1)...(19): siRNA sense strand
cuuagaaggagaaggccua

SEQ ID NO: 2428240 - RNA, 19 nt, Homo sapiens
  misc_RNA (1)...(19): siRNA sense strand
cgucauagucuuugcgcca

SEQ ID NO: 2428241 - RNA, 19 nt, Homo sapiens
  misc_RNA (1)...(19): siRNA sense strand
gggcugaagaagaugcaga

SEQ ID NO: 2428242 - RNA, 19 nt, Homo sapiens
  misc_RNA (1)...(19): siRNA sense strand
ucaggaaacccuugggcuu

SEQ ID NO: 2428243 - RNA, 19 nt, Homo sapiens
  misc_RNA (1)...(19): siRNA sense strand
ugaagaagaugcagagcag

SEQ ID NO: 2428244 - RNA, 19 nt, Homo sapiens
  misc_RNA (1)...(19): siRNA sense strand
guguaaaggaugaaaaugu

SEQ ID NO: 2428245 - RNA, 19 nt, Homo sapiens
  misc_RNA (1)...(19): siRNA sense strand
augaaaaugucaagcagau

SEQ ID NO: 2428246 - RNA, 19 nt, Homo sapiens
  misc_RNA (1)...(19): siRNA sense strand
agguaaaauccaugcaaua

SEQ ID NO: 2428247 - RNA, 19 nt, Homo sapiens
  misc_RNA (1)...(19): siRNA sense strand
aauuuguacuggagaaaca

SEQ ID NO: 2428248 - RNA, 19 nt, Homo sapiens
  misc_RNA (1)...(19): siRNA sense strand
ccaauuuguacuggagaaa

SEQ ID NO: 2428249 - RNA, 19 nt, Homo sapiens
  misc_RNA (1)...(19): siRNA sense strand
cccaauuuguacuggagaa

SEQ ID NO: 2428250 - RNA, 19 nt, Homo sapiens
  misc_RNA (1)...(19): siRNA sense strand
guacuuuauuagaugccaa

SEQ ID NO: 2428251 - RNA, 19 nt, Homo sapiens
  misc_RNA (1)...(19): siRNA sense strand
guacaaaggaaaaccacaa

SEQ ID NO: 2428252 - RNA, 19 nt, Homo sapiens
  misc_RNA (1)...(19): siRNA sense strand
cugaagaaugacaugauau

SEQ ID NO: 2428253 - RNA, 19 nt, Homo sapiens
  misc_RNA (1)...(19): siRNA sense strand
ugaaggaggaagaaguaca

SEQ ID NO: 2428254 - RNA, 19 nt, Homo sapiens
  misc_RNA (1)...(19): siRNA sense strand
aauaagugcacaccggaaa

SEQ ID NO: 2428255 - RNA, 19 nt, Homo sapiens
  misc_RNA (1)...(19): siRNA sense strand
agugugauuuggaaggaau

SEQ ID NO: 2428256 - RNA, 19 nt, Homo sapiens
  misc_RNA (1)...(19): siRNA sense strand
aucaaaugaaggaggaaga

SEQ ID NO: 2428257 - RNA, 19 nt, Homo sapiens
  misc_RNA (1)...(19): siRNA sense strand
aaaugaaggaggaagaagu

SEQ ID NO: 2428258 - RNA, 19 nt, Homo sapiens
  misc_RNA (1)...(19): siRNA sense strand
cuucaauggagcaaguuau

SEQ ID NO: 2428259 - RNA, 19 nt, Homo sapiens
  misc_RNA (1)...(19): siRNA sense strand
gaacuuagauuauuggaug

SEQ ID NO: 2428260 - RNA, 19 nt, Homo sapiens
  misc_RNA (1)...(19): siRNA sense strand
uuacaauagagguccaauu

SEQ ID NO: 2428261 - RNA, 19 nt, Homo sapiens
  misc_RNA (1)...(19): siRNA sense strand
caauaugauaaacagggua

SEQ ID NO: 2428262 - RNA, 19 nt, Homo sapiens
  misc_RNA (1)...(19): siRNA sense strand
aauuagugucaguggaguu

SEQ ID NO: 2428263 - RNA, 19 nt, Homo sapiens
  misc_RNA (1)...(19): siRNA sense strand
cuuuagagucauucaacuu

SEQ ID NO: 2428264 - RNA, 19 nt, Homo sapiens
  misc_RNA (1)...(19): siRNA sense strand
ggauuauuggccagaaguu

SEQ ID NO: 2428265 - RNA, 19 nt, Homo sapiens
  misc_RNA (1)...(19): siRNA sense strand
acugggacguacaaaggaa

SEQ ID NO: 2428266 - RNA, 19 nt, Homo sapiens
  misc_RNA (1)...(19): siRNA sense strand
aggaagaaguacaacuaag

SEQ ID NO: 2428267 - RNA, 19 nt, Homo sapiens
  misc_RNA (1)...(19): siRNA sense strand
ccgugaagaaugcguggaa

SEQ ID NO: 2428268 - RNA, 19 nt, Homo sapiens
  misc_RNA (1)...(19): siRNA sense strand
aggaauaagagaaacccua

SEQ ID NO: 2428269 - RNA, 19 nt, Homo sapiens
  misc_RNA (1)...(19): siRNA sense strand
aguucuugcaugagggauu

SEQ ID NO: 2428270 - RNA, 19 nt, Homo sapiens
  misc_RNA (1)...(19): siRNA sense strand
uuucaggauucucaagaua

SEQ ID NO: 2428271 - RNA, 19 nt, Homo sapiens
  misc_RNA (1)...(19): siRNA sense strand
gauaaugaaaggagcagca

SEQ ID NO: 2428272 - RNA, 19 nt, Homo sapiens
  misc_RNA (1)...(19): siRNA sense strand
acggaaaagaagaagaaau

SEQ ID NO: 2428273 - RNA, 19 nt, Homo sapiens
  misc_RNA (1)...(19): siRNA sense strand
cggaaaagaagaagaaaug

SEQ ID NO: 2428274 - RNA, 19 nt, Homo sapiens
  misc_RNA (1)...(19): siRNA sense strand
cccaaaaggaauaagagaa

SEQ ID NO: 2428275 - RNA, 19 nt, Homo sapiens
  misc_RNA (1)...(19): siRNA sense strand
aagaagaagaaauggcagu

SEQ ID NO: 2428276 - RNA, 19 nt, Homo sapiens
  misc_RNA (1)...(19): siRNA sense strand
uucucaagauacagaggua

SEQ ID NO: 2428277 - RNA, 19 nt, Homo sapiens
  misc_RNA (1)...(19): siRNA sense strand
uggccgacguggacaccaa

SEQ ID NO: 2428278 - RNA, 19 nt, Homo sapiens
  misc_RNA (1)...(19): siRNA sense strand
ugacaggugcuuugggaaa

SEQ ID NO: 2428279 - RNA, 19 nt, Homo sapiens
  misc_RNA (1)...(19): siRNA sense strand
ggagaaaucuggaggcugu

SEQ ID NO: 2428280 - RNA, 19 nt, Homo sapiens
  misc_RNA (1)...(19): siRNA sense strand
ggagaaagauauuacauca

SEQ ID NO: 2428281 - RNA, 19 nt, Homo sapiens
  misc_RNA (1)...(19): siRNA sense strand
acggaaaggcagaagaaau

SEQ ID NO: 2428282 - RNA, 19 nt, Homo sapiens
  misc_RNA (1)...(19): siRNA sense strand
gcaaaagaucaguuggaua

SEQ ID NO: 2428283 - RNA, 19 nt, Homo sapiens
  misc_RNA (1)...(19): siRNA sense strand
gggaauuagcugaugacau

SEQ ID NO: 2428284 - RNA, 19 nt, Homo sapiens
  misc_RNA (1)...(19): siRNA sense strand
caaccaaaguucugggcca

SEQ ID NO: 2428285 - RNA, 19 nt, Homo sapiens
  misc_RNA (1)...(19): siRNA sense strand
agaagaaauccuuagacaa

SEQ ID NO: 2428286 - RNA, 19 nt, Homo sapiens
  misc_RNA (1)...(19): siRNA sense strand
gggcagugauugaugggau

SEQ ID NO: 2428287 - RNA, 19 nt, Homo sapiens
  misc_RNA (1)...(19): siRNA sense strand
ggaauaaggaguuucaaga

SEQ ID NO: 2428288 - RNA, 19 nt, Homo sapiens
  misc_RNA (1)...(19): siRNA sense strand
cggaaaggcagaagaaauc

SEQ ID NO: 2428289 - RNA, 19 nt, Homo sapiens
  misc_RNA (1)...(19): siRNA sense strand
acgcauuauccuagugaau

SEQ ID NO: 2428290 - RNA, 19 nt, Homo sapiens
  misc_RNA (1)...(19): siRNA sense strand
gggcaaugaggcagacaca

SEQ ID NO: 2428291 - RNA, 19 nt, Homo sapiens
  misc_RNA (1)...(19): siRNA sense strand
acaacugauucuagaugua

SEQ ID NO: 2428292 - RNA, 19 nt, Homo sapiens
  misc_RNA (1)...(19): siRNA sense strand
cuggauuacucaacagauu

SEQ ID NO: 2428293 - RNA, 19 nt, Homo sapiens
  misc_RNA (1)...(19): siRNA sense strand
ccuauuuggccuuggaaga

SEQ ID NO: 2428294 - RNA, 19 nt, Homo sapiens
  misc_RNA (1)...(19): siRNA sense strand
gcuaaggacaucagccaau

SEQ ID NO: 2428295 - RNA, 19 nt, Homo sapiens
  misc_RNA (1)...(19): siRNA sense strand
agugacaaaugauggagaa

SEQ ID NO: 2428296 - RNA, 19 nt, Homo sapiens
  misc_RNA (1)...(19): siRNA sense strand
ugaucgaaguggagauguu

SEQ ID NO: 2428297 - RNA, 19 nt, Homo sapiens
  misc_RNA (1)...(19): siRNA sense strand
gauuuggacacaacggaaa

SEQ ID NO: 2428298 - RNA, 19 nt, Homo sapiens
  misc_RNA (1)...(19): siRNA sense strand
ugacauaaaguuagcagau

SEQ ID NO: 2428299 - RNA, 19 nt, Homo sapiens
  misc_RNA (1)...(19): siRNA sense strand
gugacaaaugauggagaaa

SEQ ID NO: 2428300 - RNA, 19 nt, Homo sapiens
  misc_RNA (1)...(19): siRNA sense strand
caacaaccgcugaagaaaa

SEQ ID NO: 2428301 - RNA, 19 nt, Homo sapiens
  misc_RNA (1)...(19): siRNA sense strand
cgaaaacuguauugaucaa

SEQ ID NO: 2428302 - RNA, 19 nt, Homo sapiens
  misc_RNA (1)...(19): siRNA sense strand
cccaagaagcuguacaaau

SEQ ID NO: 2428303 - RNA, 19 nt, Homo sapiens
  misc_RNA (1)...(19): siRNA sense strand
gagaaauguccagggaauu

SEQ ID NO: 2428304 - RNA, 19 nt, Homo sapiens
  misc_RNA (1)...(19): siRNA sense strand
gaaucaaucuacagccuga

SEQ ID NO: 2428305 - RNA, 19 nt, Homo sapiens
  misc_RNA (1)...(19): siRNA sense strand
ccggacaaaacuugagaaa

SEQ ID NO: 2428306 - RNA, 19 nt, Homo sapiens
  misc_RNA (1)...(19): siRNA sense strand
gcuucgaacgcucgguuaa

SEQ ID NO: 2428307 - RNA, 19 nt, Homo sapiens
  misc_RNA (1)...(19): siRNA sense strand
uggacuuacgugacaaaua

SEQ ID NO: 2428308 - RNA, 19 nt, Homo sapiens
  misc_RNA (1)...(19): siRNA sense strand
aauuguugggagaaagaua

SEQ ID NO: 2428309 - RNA, 19 nt, Homo sapiens
  misc_RNA (1)...(19): siRNA sense strand
ggagaagcagguaguaaca

SEQ ID NO: 2428310 - RNA, 19 nt, Homo sapiens
  misc_RNA (1)...(19): siRNA sense strand
cacucuagauggugaauca

SEQ ID NO: 2428311 - RNA, 19 nt, Homo sapiens
  misc_RNA (1)...(19): siRNA sense strand
aaacaaauccaguucccaa

SEQ ID NO: 2428312 - RNA, 19 nt, Homo sapiens
  misc_RNA (1)...(19): siRNA sense strand
acauaaacugacagcuauu

SEQ ID NO: 2428313 - RNA, 19 nt, Homo sapiens
  misc_RNA (1)...(19): siRNA sense strand
agauguggcaacuggagaa

SEQ ID NO: 2428314 - RNA, 19 nt, Homo sapiens
  misc_RNA (1)...(19): siRNA sense strand
ugacagagcuccaagaccu

SEQ ID NO: 2428315 - RNA, 19 nt, Homo sapiens
  misc_RNA (1)...(19): siRNA sense strand
uguaagacauaaacugaca

SEQ ID NO: 2428316 - RNA, 19 nt, Homo sapiens
  misc_RNA (1)...(19): siRNA sense strand
ugacaaaugauggagaaau

SEQ ID NO: 2428317 - RNA, 19 nt, Homo sapiens
  misc_RNA (1)...(19): siRNA sense strand
agcaauucagugagguuaa

SEQ ID NO: 2428318 - RNA, 19 nt, Homo sapiens
  misc_RNA (1)...(19): siRNA sense strand
uagacaagagcuggagaaa

SEQ ID NO: 2428319 - RNA, 19 nt, Homo sapiens
  misc_RNA (1)...(19): siRNA sense strand
cuaucaagguucagcaaag

SEQ ID NO: 2428320 - RNA, 19 nt, Homo sapiens
  misc_RNA (1)...(19): siRNA sense strand
cuggagaagcagguaguaa

SEQ ID NO: 2428321 - RNA, 19 nt, Homo sapiens
  misc_RNA (1)...(19): siRNA sense strand
agugaugaaacuacagaau

SEQ ID NO: 2428322 - RNA, 19 nt, Homo sapiens
  misc_RNA (1)...(19): siRNA sense strand
ccaucuggaaugugcauau

SEQ ID NO: 2428323 - RNA, 19 nt, Homo sapiens
  misc_RNA (1)...(19): siRNA sense strand
gcugaagaaaagauugaua

SEQ ID NO: 2428324 - RNA, 19 nt, Homo sapiens
  misc_RNA (1)...(19): siRNA sense strand
acaaagauguucagguccu

SEQ ID NO: 2428325 - RNA, 19 nt, Homo sapiens
  misc_RNA (1)...(19): siRNA sense strand
auggaaaugggcagaguga

SEQ ID NO: 2428326 - RNA, 19 nt, Homo sapiens
  misc_RNA (1)...(19): siRNA sense strand
ccagcaauucagugagguu

SEQ ID NO: 2428327 - RNA, 19 nt, Homo sapiens
  misc_RNA (1)...(19): siRNA sense strand
ucuagauguaagaagggaa

SEQ ID NO: 2428328 - RNA, 19 nt, Homo sapiens
  misc_RNA (1)...(19): siRNA sense strand
cuuugagaugugugaauau

SEQ ID NO: 2428329 - RNA, 19 nt, Homo sapiens
  misc_RNA (1)...(19): siRNA sense strand
agacaagagcuggagaaaa

SEQ ID NO: 2428330 - RNA, 19 nt, Homo sapiens
  misc_RNA (1)...(19): siRNA sense strand
gguuaaaggacuggaugca

SEQ ID NO: 2428331 - RNA, 19 nt, Homo sapiens
  misc_RNA (1)...(19): siRNA sense strand
gaaaggaaguacucgccga

SEQ ID NO: 2428332 - RNA, 19 nt, Homo sapiens
  misc_RNA (1)...(19): siRNA sense strand
gaacgggcaaugaggcaga

SEQ ID NO: 2428333 - RNA, 19 nt, Homo sapiens
  misc_RNA (1)...(19): siRNA sense strand
augcccacguauauggaaa

SEQ ID NO: 2428334 - RNA, 19 nt, Homo sapiens
  misc_RNA (1)...(19): siRNA sense strand
aggaaagcugcaggaguua

SEQ ID NO: 2428335 - RNA, 19 nt, Homo sapiens
  misc_RNA (1)...(19): siRNA sense strand
agacagaaaugcagaggca

SEQ ID NO: 2428336 - RNA, 19 nt, Homo sapiens
  misc_RNA (1)...(19): siRNA sense strand
ggaaaauggaaucgacaaa

SEQ ID NO: 2428337 - RNA, 19 nt, Homo sapiens
  misc_RNA (1)...(19): siRNA sense strand
gugagaaacuggcaaguga

SEQ ID NO: 2428338 - RNA, 19 nt, Homo sapiens
  misc_RNA (1)...(19): siRNA sense strand
gagaaacuggcaagugaaa

SEQ ID NO: 2428339 - RNA, 19 nt, Homo sapiens
  misc_RNA (1)...(19): siRNA sense strand
gcgcaguaucacagccuua

SEQ ID NO: 2428340 - RNA, 19 nt, Homo sapiens
  misc_RNA (1)...(19): siRNA sense strand
gcaagugaaaagacagaaa

SEQ ID NO: 2428341 - RNA, 19 nt, Homo sapiens
  misc_RNA (1)...(19): siRNA sense strand
agaaaaggaagguggauga

SEQ ID NO: 2428342 - RNA, 19 nt, Homo sapiens
  misc_RNA (1)...(19): siRNA sense strand
guuugugaguacuggaaaa

SEQ ID NO: 2428343 - RNA, 19 nt, Homo sapiens
  misc_RNA (1)...(19): siRNA sense strand
ucucauagugggaggggaa

SEQ ID NO: 2428344 - RNA, 19 nt, Homo sapiens
  misc_RNA (1)...(19): siRNA sense strand
gugccaaacaggugaccau

SEQ ID NO: 2428345 - RNA, 19 nt, Homo sapiens
  misc_RNA (1)...(19): siRNA sense strand
agauaaacgcagaaaugga

SEQ ID NO: 2428346 - RNA, 19 nt, Homo sapiens
  misc_RNA (1)...(19): siRNA sense strand
augcacaaacagacugaaa

SEQ ID NO: 2428347 - RNA, 19 nt, Homo sapiens
  misc_RNA (1)...(19): siRNA sense strand
augcagagcaccacagaga

SEQ ID NO: 2428348 - RNA, 19 nt, Homo sapiens
  misc_RNA (1)...(19): siRNA sense strand
gcgucaaggucugggacau

SEQ ID NO: 2428349 - RNA, 19 nt, Homo sapiens
  misc_RNA (1)...(19): siRNA sense strand
gauaaggacuccagccacu

SEQ ID NO: 2428350 - RNA, 19 nt, Homo sapiens
  misc_RNA (1)...(19): siRNA sense strand
gggaaaauggaaucgacaa

SEQ ID NO: 2428351 - RNA, 19 nt, Homo sapiens
  misc_RNA (1)...(19): siRNA sense strand
acagaaaugcagaggcacu

SEQ ID NO: 2428352 - RNA, 19 nt, Homo sapiens
  misc_RNA (1)...(19): siRNA sense strand
aauccaaagaaaugagcuu

SEQ ID NO: 2428353 - RNA, 19 nt, Homo sapiens
  misc_RNA (1)...(19): siRNA sense strand
gggcagucucacuuggcaa

SEQ ID NO: 2428354 - RNA, 19 nt, Homo sapiens
  misc_RNA (1)...(19): siRNA sense strand
aagaaaugagcuugcauga

SEQ ID NO: 2428355 - RNA, 19 nt, Homo sapiens
  misc_RNA (1)...(19): siRNA sense strand
cagaaaugcagaggcacua

SEQ ID NO: 2428356 - RNA, 19 nt, Homo sapiens
  misc_RNA (1)...(19): siRNA sense strand
aggcacagauaaacgcaga

SEQ ID NO: 2428357 - RNA, 19 nt, Homo sapiens
  misc_RNA (1)...(19): siRNA sense strand
gggcauggagagcagcaau

SEQ ID NO: 2428358 - RNA, 19 nt, Homo sapiens
  misc_RNA (1)...(19): siRNA sense strand
ccagcauauuccaguccaa

SEQ ID NO: 2428359 - RNA, 19 nt, Homo sapiens
  misc_RNA (1)...(19): siRNA sense strand
cugaaauccagcacaccaa

SEQ ID NO: 2428360 - RNA, 19 nt, Homo sapiens
  misc_RNA (1)...(19): siRNA sense strand
uggcaauaaaagaugacaa

SEQ ID NO: 2428361 - RNA, 19 nt, Homo sapiens
  misc_RNA (1)...(19): siRNA sense strand
cuuaaauuggaaugugaga

SEQ ID NO: 2428362 - RNA, 19 nt, Homo sapiens
  misc_RNA (1)...(19): siRNA sense strand
acuuaaagccagagagaaa

SEQ ID NO: 2428363 - RNA, 19 nt, Homo sapiens
  misc_RNA (1)...(19): siRNA sense strand
ccagaaaguacuaaagaau

SEQ ID NO: 2428364 - RNA, 19 nt, Homo sapiens
  misc_RNA (1)...(19): siRNA sense strand
gcucaauguccuaaugaaa

SEQ ID NO: 2428365 - RNA, 19 nt, Homo sapiens
  misc_RNA (1)...(19): siRNA sense strand
aggccaagaaagagauuaa

SEQ ID NO: 2428366 - RNA, 19 nt, Homo sapiens
  misc_RNA (1)...(19): siRNA sense strand
gcgcaagccaagagaaaca

SEQ ID NO: 2428367 - RNA, 19 nt, Homo sapiens
  misc_RNA (1)...(19): siRNA sense strand
ccuaagaaacuaugccaaa

SEQ ID NO: 2428368 - RNA, 19 nt, Homo sapiens
  misc_RNA (1)...(19): siRNA sense strand
aggcaaagguugacccaau

SEQ ID NO: 2428369 - RNA, 19 nt, Homo sapiens
  misc_RNA (1)...(19): siRNA sense strand
cagcgcaagccaagagaaa

SEQ ID NO: 2428370 - RNA, 19 nt, Homo sapiens
  misc_RNA (1)...(19): siRNA sense strand
ucacauaacaggagaaaau

SEQ ID NO: 2428371 - RNA, 19 nt, Homo sapiens
  misc_RNA (1)...(19): siRNA sense strand
cauuagacuuggagacaca

SEQ ID NO: 2428372 - RNA, 19 nt, Homo sapiens
  misc_RNA (1)...(19): siRNA sense strand
ccaagaugaaauagaagaa

SEQ ID NO: 2428373 - RNA, 19 nt, Homo sapiens
  misc_RNA (1)...(19): siRNA sense strand
ucuaagauggagaaggaaa

SEQ ID NO: 2428374 - RNA, 19 nt, Homo sapiens
  misc_RNA (1)...(19): siRNA sense strand
ggacaugauaacacagaau

SEQ ID NO: 2428375 - RNA, 19 nt, Homo sapiens
  misc_RNA (1)...(19): siRNA sense strand
agacauuacauaaggugaa

SEQ ID NO: 2428376 - RNA, 19 nt, Homo sapiens
  misc_RNA (1)...(19): siRNA sense strand
gguugaacagcuuaagaaa

SEQ ID NO: 2428377 - RNA, 19 nt, Homo sapiens
  misc_RNA (1)...(19): siRNA sense strand
ugaaauagaagaagcccua

SEQ ID NO: 2428378 - RNA, 19 nt, Homo sapiens
  misc_RNA (1)...(19): siRNA sense strand
gugaaaggagauaaagaau

SEQ ID NO: 2428379 - RNA, 19 nt, Homo sapiens
  misc_RNA (1)...(19): siRNA sense strand
cuaagauggagaaggaaau

SEQ ID NO: 2428380 - RNA, 19 nt, Homo sapiens
  misc_RNA (1)...(19): siRNA sense strand
gcagcaaaugggaaguaua

SEQ ID NO: 2428381 - RNA, 19 nt, Homo sapiens
  misc_RNA (1)...(19): siRNA sense strand
aaacagagcuacagccuca

SEQ ID NO: 2428382 - RNA, 19 nt, Homo sapiens
  misc_RNA (1)...(19): siRNA sense strand
aagaaguaauggugcucaa

SEQ ID NO: 2428383 - RNA, 19 nt, Homo sapiens
  misc_RNA (1)...(19): siRNA sense strand
aaaagaaaaucgacagcaa

SEQ ID NO: 2428384 - RNA, 19 nt, Homo sapiens
  misc_RNA (1)...(19): siRNA sense strand
acacaauguacaagcagua

SEQ ID NO: 2428385 - RNA, 19 nt, Homo sapiens
  misc_RNA (1)...(19): siRNA sense strand
agugaaaggagauaaagaa

SEQ ID NO: 2428386 - RNA, 19 nt, Homo sapiens
  misc_RNA (1)...(19): siRNA sense strand
agaaucugaucgaggagaa

SEQ ID NO: 2428387 - RNA, 19 nt, Homo sapiens
  misc_RNA (1)...(19): siRNA sense strand
aagaaaagacugaccauaa

SEQ ID NO: 2428388 - RNA, 19 nt, Homo sapiens
  misc_RNA (1)...(19): siRNA sense strand
cuggaaaugaggagguaga

SEQ ID NO: 2428389 - RNA, 19 nt, Homo sapiens
  misc_RNA (1)...(19): siRNA sense strand
acagaacgcaucagugaaa

SEQ ID NO: 2428390 - RNA, 19 nt, Homo sapiens
  misc_RNA (1)...(19): siRNA sense strand
ggacugcauucguaggcaa

SEQ ID NO: 2428391 - RNA, 19 nt, Homo sapiens
  misc_RNA (1)...(19): siRNA sense strand
ccaaagaagucaaggccag

SEQ ID NO: 2428392 - RNA, 19 nt, Homo sapiens
  misc_RNA (1)...(19): siRNA sense strand
cguaaaggaacuccagaau

SEQ ID NO: 2428393 - RNA, 19 nt, Homo sapiens
  misc_RNA (1)...(19): siRNA sense strand
caaauaaagcaguuccaau

SEQ ID NO: 2428394 - RNA, 19 nt, Homo sapiens
  misc_RNA (1)...(19): siRNA sense strand
agaaaugaaaacagagcua

SEQ ID NO: 2428395 - RNA, 19 nt, Homo sapiens
  misc_RNA (1)...(19): siRNA sense strand
gauuacgagaccuaagaaa

SEQ ID NO: 2428396 - RNA, 19 nt, Homo sapiens
  misc_RNA (1)...(19): siRNA sense strand
caaagaaaagcgagaugaa

SEQ ID NO: 2428397 - RNA, 19 nt, Homo sapiens
  misc_RNA (1)...(19): siRNA sense strand
agacauaaaguucaagaga

SEQ ID NO: 2428398 - RNA, 19 nt, Homo sapiens
  misc_RNA (1)...(19): siRNA sense strand
ggaagauuuacucuagaaa

SEQ ID NO: 2428399 - RNA, 19 nt, Homo sapiens
  misc_RNA (1)...(19): siRNA sense strand
uggaagagccagaaaguac

SEQ ID NO: 2428400 - RNA, 19 nt, Homo sapiens
  misc_RNA (1)...(19): siRNA sense strand
agaaggaggaggaaacaga

SEQ ID NO: 2428401 - RNA, 19 nt, Homo sapiens
  misc_RNA (1)...(19): siRNA sense strand
cugcaagacuucaaggacu

SEQ ID NO: 2428402 - RNA, 19 nt, Homo sapiens
  misc_RNA (1)...(19): siRNA sense strand
agaaacuaugccaaagaaa

SEQ ID NO: 2428403 - RNA, 19 nt, Homo sapiens
  misc_RNA (1)...(19): siRNA sense strand
auuaagaaucuccuggaaa

SEQ ID NO: 2428404 - RNA, 19 nt, Homo sapiens
  misc_RNA (1)...(19): siRNA sense strand
cuggagagcauacggaauu

SEQ ID NO: 2428405 - RNA, 19 nt, Homo sapiens
  misc_RNA (1)...(19): siRNA sense strand
ugacccaaucaaagauaaa

SEQ ID NO: 2428406 - RNA, 19 nt, Homo sapiens
  misc_RNA (1)...(19): siRNA sense strand
gcaaaucguucgugcucga

SEQ ID NO: 2428407 - RNA, 19 nt, Homo sapiens
  misc_RNA (1)...(19): siRNA sense strand
gaaaugaggagguagagga

SEQ ID NO: 2428408 - RNA, 19 nt, Homo sapiens
  misc_RNA (1)...(19): siRNA sense strand
agaaaagcgagaugaacaa

SEQ ID NO: 2428409 - RNA, 19 nt, Homo sapiens
  misc_RNA (1)...(19): siRNA sense strand
gcgagaugaacaaaggaga

SEQ ID NO: 2428410 - RNA, 19 nt, Homo sapiens
  misc_RNA (1)...(19): siRNA sense strand
aagagggagcugagaucua

SEQ ID NO: 2428411 - RNA, 19 nt, Homo sapiens
  misc_RNA (1)...(19): siRNA sense strand
ggauuaaagaaaagacuga

SEQ ID NO: 2428412 - RNA, 19 nt, Homo sapiens
  misc_RNA (1)...(19): siRNA sense strand
uaagaauacaugagaagga

SEQ ID NO: 2428413 - RNA, 19 nt, Homo sapiens
  misc_RNA (1)...(19): siRNA sense strand
gcagaauccacuggugaaa

SEQ ID NO: 2428414 - RNA, 19 nt, Homo sapiens
  misc_RNA (1)...(19): siRNA sense strand
ccagaggccaagaaagaga

SEQ ID NO: 2428415 - RNA, 19 nt, Homo sapiens
  misc_RNA (1)...(19): siRNA sense strand
gaacauaacaagagacugc

SEQ ID NO: 2428416 - RNA, 19 nt, Homo sapiens
  misc_RNA (1)...(19): siRNA sense strand
caucaagaacuuaaagcca

SEQ ID NO: 2428417 - RNA, 19 nt, Homo sapiens
  misc_RNA (1)...(19): siRNA sense strand
guucuaaaucacaugaaga

SEQ ID NO: 2428418 - RNA, 19 nt, Homo sapiens
  misc_RNA (1)...(19): siRNA sense strand
augagaaggaggaggaaac

SEQ ID NO: 2428419 - RNA, 19 nt, Homo sapiens
  misc_RNA (1)...(19): siRNA sense strand
agaagcauguagagaaaau

SEQ ID NO: 2428420 - RNA, 19 nt, Homo sapiens
  misc_RNA (1)...(19): siRNA sense strand
agaagaugaugcacacaau

SEQ ID NO: 2428421 - RNA, 19 nt, Homo sapiens
  misc_RNA (1)...(19): siRNA sense strand
ucaagaacuuaaagccaga

SEQ ID NO: 2428422 - RNA, 19 nt, Homo sapiens
  misc_RNA (1)...(19): siRNA sense strand
caugagaaggaggaggaaa

SEQ ID NO: 2428423 - RNA, 19 nt, Homo sapiens
  misc_RNA (1)...(19): siRNA sense strand
aggaggaagaagaggagaa

SEQ ID NO: 2428424 - RNA, 19 nt, Homo sapiens
  misc_RNA (1)...(19): siRNA sense strand
gugccgaggaggaagaaga

SEQ ID NO: 2428425 - RNA, 19 nt, Homo sapiens
  misc_RNA (1)...(19): siRNA sense strand
caaagguggcagauggaga

SEQ ID NO: 2428426 - RNA, 19 nt, Homo sapiens
  misc_RNA (1)...(19): siRNA sense strand
aagaagaggagaaaggcca

SEQ ID NO: 2428427 - RNA, 19 nt, Homo sapiens
  misc_RNA (1)...(19): siRNA sense strand
aggaagaagaggagaaagg

SEQ ID NO: 2428428 - RNA, 19 nt, Homo sapiens
  misc_RNA (1)...(19): siRNA sense strand
ccgaggaggaagaagagga

SEQ ID NO: 2428429 - RNA, 19 nt, Homo sapiens
  misc_RNA (1)...(19): siRNA sense strand
cugcaaaggagcaagaaca

SEQ ID NO: 2428430 - RNA, 19 nt, Homo sapiens
  misc_RNA (1)...(19): siRNA sense strand
ggacugaacuguugagacc

SEQ ID NO: 2428431 - RNA, 19 nt, Homo sapiens
  misc_RNA (1)...(19): siRNA sense strand
ccucaggcuuuguggacca

SEQ ID NO: 2428432 - RNA, 19 nt, Homo sapiens
  misc_RNA (1)...(19): siRNA sense strand
ugcaaaggagcaagaacaa

SEQ ID NO: 2428433 - RNA, 19 nt, Homo sapiens
  misc_RNA (1)...(19): siRNA sense strand
cacgauacauucuaggcua

SEQ ID NO: 2428434 - RNA, 19 nt, Homo sapiens
  misc_RNA (1)...(19): siRNA sense strand
accggauugcagagggaaa

SEQ ID NO: 2428435 - RNA, 19 nt, Homo sapiens
  misc_RNA (1)...(19): siRNA sense strand
gggcugcaaaggagcaaga

SEQ ID NO: 2428436 - RNA, 19 nt, Homo sapiens
  misc_RNA (1)...(19): siRNA sense strand
ccuuaaagacugugccuug

SEQ ID NO: 2428437 - RNA, 19 nt, Homo sapiens
  misc_RNA (1)...(19): siRNA sense strand
auaucgaagccgagagcaa

SEQ ID NO: 2428438 - RNA, 19 nt, Homo sapiens
  misc_RNA (1)...(19): siRNA sense strand
gcgaagaccuagaagugga

SEQ ID NO: 2428439 - RNA, 19 nt, Homo sapiens
  misc_RNA (1)...(19): siRNA sense strand
cagcaagcaaggagagcau

SEQ ID NO: 2428440 - RNA, 19 nt, Homo sapiens
  misc_RNA (1)...(19): siRNA sense strand
gggaaaggauugccagcca

SEQ ID NO: 2428441 - RNA, 19 nt, Homo sapiens
  misc_RNA (1)...(19): siRNA sense strand
caauccaacaggaggguau

SEQ ID NO: 2428442 - RNA, 19 nt, Homo sapiens
  misc_RNA (1)...(19): siRNA sense strand
ccaaugacaaugagggcca

SEQ ID NO: 2428443 - RNA, 19 nt, Homo sapiens
  misc_RNA (1)...(19): siRNA sense strand
gggaaagaagagcgggaac

SEQ ID NO: 2428444 - RNA, 19 nt, Homo sapiens
  misc_RNA (1)...(19): siRNA sense strand
ccuugaagaaguucgagaa

SEQ ID NO: 2428445 - RNA, 19 nt, Homo sapiens
  misc_RNA (1)...(19): siRNA sense strand
gaauauugauaaugaggac

SEQ ID NO: 2428446 - RNA, 19 nt, Homo sapiens
  misc_RNA (1)...(19): siRNA sense strand
agguaggagguauggaaga

SEQ ID NO: 2428447 - RNA, 19 nt, Homo sapiens
  misc_RNA (1)...(19): siRNA sense strand
ggauaaugauucuggucac

SEQ ID NO: 2428448 - RNA, 19 nt, Homo sapiens
  misc_RNA (1)...(19): siRNA sense strand
cgagaguucaaguggcuau

SEQ ID NO: 2428449 - RNA, 19 nt, Homo sapiens
  misc_RNA (1)...(19): siRNA sense strand
agacucugacagugacaaa

SEQ ID NO: 2428450 - RNA, 19 nt, Homo sapiens
  misc_RNA (1)...(19): siRNA sense strand
cagugugagcgaagaccua

SEQ ID NO: 2428451 - RNA, 19 nt, Homo sapiens
  misc_RNA (1)...(19): siRNA sense strand
ccuggcaagaagagggaga

SEQ ID NO: 2428452 - RNA, 19 nt, Homo sapiens
  misc_RNA (1)...(19): siRNA sense strand
ggaagcgaggagugaccaa

SEQ ID NO: 2428453 - RNA, 19 nt, Homo sapiens
  misc_RNA (1)...(19): siRNA sense strand
agucaaaccaccaagagga

SEQ ID NO: 2428454 - RNA, 19 nt, Homo sapiens
  misc_RNA (1)...(19): siRNA sense strand
uggauguagagguggccaa

SEQ ID NO: 2428455 - RNA, 19 nt, Homo sapiens
  misc_RNA (1)...(19): siRNA sense strand
gggauaaugauucugguca

SEQ ID NO: 2428456 - RNA, 19 nt, Homo sapiens
  misc_RNA (1)...(19): siRNA sense strand
gagguauggaagaaggcau

SEQ ID NO: 2428457 - RNA, 19 nt, Homo sapiens
  misc_RNA (1)...(19): siRNA sense strand
gcgcaguuggucaggagau

SEQ ID NO: 2428458 - RNA, 19 nt, Homo sapiens
  misc_RNA (1)...(19): siRNA sense strand
caacugagcugccgugcca

SEQ ID NO: 2428459 - RNA, 19 nt, Homo sapiens
  misc_RNA (1)...(19): siRNA sense strand
gagcaaacccuguccucca

SEQ ID NO: 2428460 - RNA, 19 nt, Homo sapiens
  misc_RNA (1)...(19): siRNA sense strand
auaucgaagccgagagcaa

SEQ ID NO: 2428461 - RNA, 19 nt, Homo sapiens
  misc_RNA (1)...(19): siRNA sense strand
gcgaagaccuagaagugga

SEQ ID NO: 2428462 - RNA, 19 nt, Homo sapiens
  misc_RNA (1)...(19): siRNA sense strand
cagcaagcaaggagagcau

SEQ ID NO: 2428463 - RNA, 19 nt, Homo sapiens
  misc_RNA (1)...(19): siRNA sense strand
cuacaaauacugcgacgaa

SEQ ID NO: 2428464 - RNA, 19 nt, Homo sapiens
  misc_RNA (1)...(19): siRNA sense strand
gggaaaggauugccagcca

SEQ ID NO: 2428465 - RNA, 19 nt, Homo sapiens
  misc_RNA (1)...(19): siRNA sense strand
caauccaacaggaggguau

SEQ ID NO: 2428466 - RNA, 19 nt, Homo sapiens
  misc_RNA (1)...(19): siRNA sense strand
acaaauacugcgacgaaga

SEQ ID NO: 2428467 - RNA, 19 nt, Homo sapiens
  misc_RNA (1)...(19): siRNA sense strand
ccaaugacaaugagggcca

SEQ ID NO: 2428468 - RNA, 19 nt, Homo sapiens
  misc_RNA (1)...(19): siRNA sense strand
gggaaagaagagcgggaac

SEQ ID NO: 2428469 - RNA, 19 nt, Homo sapiens
  misc_RNA (1)...(19): siRNA sense strand
ccuugaagaaguucgagaa

SEQ ID NO: 2428470 - RNA, 19 nt, Homo sapiens
  misc_RNA (1)...(19): siRNA sense strand
gaauauugauaaugaggac

SEQ ID NO: 2428471 - RNA, 19 nt, Homo sapiens
  misc_RNA (1)...(19): siRNA sense strand
cgacgaagacucugacagu

SEQ ID NO: 2428472 - RNA, 19 nt, Homo sapiens
  misc_RNA (1)...(19): siRNA sense strand
agguaggagguauggaaga

SEQ ID NO: 2428473 - RNA, 19 nt, Homo sapiens
  misc_RNA (1)...(19): siRNA sense strand
ggauaaugauucuggucac

SEQ ID NO: 2428474 - RNA, 19 nt, Homo sapiens
  misc_RNA (1)...(19): siRNA sense strand
cgagaguucaaguggcuau

SEQ ID NO: 2428475 - RNA, 19 nt, Homo sapiens
  misc_RNA (1)...(19): siRNA sense strand
agacucugacagugacaaa

SEQ ID NO: 2428476 - RNA, 19 nt, Homo sapiens
  misc_RNA (1)...(19): siRNA sense strand
cagugugagcgaagaccua

SEQ ID NO: 2428477 - RNA, 19 nt, Homo sapiens
  misc_RNA (1)...(19): siRNA sense strand
ccuggcaagaagagggaga

SEQ ID NO: 2428478 - RNA, 19 nt, Homo sapiens
  misc_RNA (1)...(19): siRNA sense strand
ggaagcgaggagugaccaa

SEQ ID NO: 2428479 - RNA, 19 nt, Homo sapiens
  misc_RNA (1)...(19): siRNA sense strand
agucaaaccaccaagagga

SEQ ID NO: 2428480 - RNA, 19 nt, Homo sapiens
  misc_RNA (1)...(19): siRNA sense strand
uggauguagagguggccaa

SEQ ID NO: 2428481 - RNA, 19 nt, Homo sapiens
  misc_RNA (1)...(19): siRNA sense strand
gggauaaugauucugguca

SEQ ID NO: 2428482 - RNA, 19 nt, Homo sapiens
  misc_RNA (1)...(19): siRNA sense strand
gagguauggaagaaggcau

SEQ ID NO: 2428483 - RNA, 19 nt, Homo sapiens
  misc_RNA (1)...(19): siRNA sense strand
gcgcaguuggucaggagau

SEQ ID NO: 2428484 - RNA, 19 nt, Homo sapiens
  misc_RNA (1)...(19): siRNA sense strand
gcgaaagcugggagacucu

SEQ ID NO: 2428485 - RNA, 19 nt, Homo sapiens
  misc_RNA (1)...(19): siRNA sense strand
caacugagcugccgugcca

SEQ ID NO: 2428486 - RNA, 19 nt, Homo sapiens
  misc_RNA (1)...(19): siRNA sense strand
gagcaaacccuguccucca

SEQ ID NO: 2428487 - RNA, 19 nt, Homo sapiens
  misc_RNA (1)...(19): siRNA sense strand
acgaaguggucaaagccaa

SEQ ID NO: 2428488 - RNA, 19 nt, Homo sapiens
  misc_RNA (1)...(19): siRNA sense strand
uggagaagcuaccuggaga

SEQ ID NO: 2428489 - RNA, 19 nt, Homo sapiens
  misc_RNA (1)...(19): siRNA sense strand
gaguggaucaagaagaaaa

SEQ ID NO: 2428490 - RNA, 19 nt, Homo sapiens
  misc_RNA (1)...(19): siRNA sense strand
gggagaaccugcacuggga

SEQ ID NO: 2428491 - RNA, 19 nt, Homo sapiens
  misc_RNA (1)...(19): siRNA sense strand
gggcaguauacaaggaccu

SEQ ID NO: 2428492 - RNA, 19 nt, Homo sapiens
  misc_RNA (1)...(19): siRNA sense strand
ucucaggaggaguggaaau

SEQ ID NO: 2428493 - RNA, 19 nt, Homo sapiens
  misc_RNA (1)...(19): siRNA sense strand
gugaggaagaagaggacaa

SEQ ID NO: 2428494 - RNA, 19 nt, Homo sapiens
  misc_RNA (1)...(19): siRNA sense strand
caggagaggaagaggguga

SEQ ID NO: 2428495 - RNA, 19 nt, Homo sapiens
  misc_RNA (1)...(19): siRNA sense strand
aggacaaugaugaggauga

SEQ ID NO: 2428496 - RNA, 19 nt, Homo sapiens
  misc_RNA (1)...(19): siRNA sense strand
agaaacaccugaaggagca

SEQ ID NO: 2428497 - RNA, 19 nt, Homo sapiens
  misc_RNA (1)...(19): siRNA sense strand
cggcaagcgcuuugagaag

SEQ ID NO: 2428498 - RNA, 19 nt, Homo sapiens
  misc_RNA (1)...(19): siRNA sense strand
ccccaagagaauuaggaaa

SEQ ID NO: 2428499 - RNA, 19 nt, Homo sapiens
  misc_RNA (1)...(19): siRNA sense strand
gugugagauaugcggguuu

SEQ ID NO: 2428500 - RNA, 19 nt, Homo sapiens
  misc_RNA (1)...(19): siRNA sense strand
aauuaggaaagcugccaaa

SEQ ID NO: 2428501 - RNA, 19 nt, Homo sapiens
  misc_RNA (1)...(19): siRNA sense strand
ggguuuaccugccgccaga

SEQ ID NO: 2428502 - RNA, 19 nt, Homo sapiens
  misc_RNA (1)...(19): siRNA sense strand
ucaaggagcggcugggcuu

SEQ ID NO: 2428503 - RNA, 19 nt, Homo sapiens
  misc_RNA (1)...(19): siRNA sense strand
gaagagaaguuccggcuga

SEQ ID NO: 2428504 - RNA, 19 nt, Homo sapiens
  misc_RNA (1)...(19): siRNA sense strand
uguuaguggccuuggaauu

SEQ ID NO: 2428505 - RNA, 19 nt, Homo sapiens
  misc_RNA (1)...(19): siRNA sense strand
ugaaagagaucauuggucu

SEQ ID NO: 2428506 - RNA, 19 nt, Homo sapiens
  misc_RNA (1)...(19): siRNA sense strand
ccuuggagacccuggaaga

SEQ ID NO: 2428507 - RNA, 19 nt, Homo sapiens
  misc_RNA (1)...(19): siRNA sense strand
aagaaggacaugaacgaga

SEQ ID NO: 2428508 - RNA, 19 nt, Homo sapiens
  misc_RNA (1)...(19): siRNA sense strand
caaaauuaggagucugaaa

SEQ ID NO: 2428509 - RNA, 19 nt, Homo sapiens
  misc_RNA (1)...(19): siRNA sense strand
ucaacaaacagaaccggaa

SEQ ID NO: 2428510 - RNA, 19 nt, Homo sapiens
  misc_RNA (1)...(19): siRNA sense strand
cggcugaacaggcgagaac

SEQ ID NO: 2428511 - RNA, 19 nt, Homo sapiens
  misc_RNA (1)...(19): siRNA sense strand
cggagaaauaccauagacu

SEQ ID NO: 2428512 - RNA, 19 nt, Homo sapiens
  misc_RNA (1)...(19): siRNA sense strand
ugaaacgagagaugcggaa

SEQ ID NO: 2428513 - RNA, 19 nt, Homo sapiens
  misc_RNA (1)...(19): siRNA sense strand
augcaagaauauaugcuga

SEQ ID NO: 2428514 - RNA, 19 nt, Homo sapiens
  misc_RNA (1)...(19): siRNA sense strand
ccuuuggagcccggagaaa

SEQ ID NO: 2428515 - RNA, 19 nt, Homo sapiens
  misc_RNA (1)...(19): siRNA sense strand
uggaagaaguaguggguuc

SEQ ID NO: 2428516 - RNA, 19 nt, Homo sapiens
  misc_RNA (1)...(19): siRNA sense strand
aggaagaagucaagccgau

SEQ ID NO: 2428517 - RNA, 19 nt, Homo sapiens
  misc_RNA (1)...(19): siRNA sense strand
augaagaggaagaagucaa

SEQ ID NO: 2428518 - RNA, 19 nt, Homo sapiens
  misc_RNA (1)...(19): siRNA sense strand
ucuaaugcuaacugggaaa

SEQ ID NO: 2428519 - RNA, 19 nt, Homo sapiens
  misc_RNA (1)...(19): siRNA sense strand
gugccgucauccugggaaa

SEQ ID NO: 2428520 - RNA, 19 nt, Homo sapiens
  misc_RNA (1)...(19): siRNA sense strand
gagaguaagggaaagguga

SEQ ID NO: 2428521 - RNA, 19 nt, Homo sapiens
  misc_RNA (1)...(19): siRNA sense strand
cugcagagcaugcugggaa

SEQ ID NO: 2428522 - RNA, 19 nt, Homo sapiens
  misc_RNA (1)...(19): siRNA sense strand
uggcugaugaagaggaaga

SEQ ID NO: 2428523 - RNA, 19 nt, Homo sapiens
  misc_RNA (1)...(19): siRNA sense strand
agaguaagggaaaggugaa

SEQ ID NO: 2428524 - RNA, 19 nt, Homo sapiens
  misc_RNA (1)...(19): siRNA sense strand
cugugaagcuggagcccga

SEQ ID NO: 2428525 - RNA, 19 nt, Homo sapiens
  misc_RNA (1)...(19): siRNA sense strand
ccucagugccuaugcccaa

SEQ ID NO: 2428526 - RNA, 19 nt, Homo sapiens
  misc_RNA (1)...(19): siRNA sense strand
gcuaacugggaaagcacua

SEQ ID NO: 2428527 - RNA, 19 nt, Homo sapiens
  misc_RNA (1)...(19): siRNA sense strand
agcacaaaggaaaggacua

SEQ ID NO: 2428528 - RNA, 19 nt, Homo sapiens
  misc_RNA (1)...(19): siRNA sense strand
acaaagucuccuugcaaaa

SEQ ID NO: 2428529 - RNA, 19 nt, Homo sapiens
  misc_RNA (1)...(19): siRNA sense strand
ugucaauggugcuucguca

SEQ ID NO: 2428530 - RNA, 19 nt, Homo sapiens
  misc_RNA (1)...(19): siRNA sense strand
acuccugacuauagcccua

SEQ ID NO: 2428531 - RNA, 19 nt, Homo sapiens
  misc_RNA (1)...(19): siRNA sense strand
cugaugaagaggaagaagu

SEQ ID NO: 2428532 - RNA, 19 nt, Homo sapiens
  misc_RNA (1)...(19): siRNA sense strand
gggugagguguacuggaaa

SEQ ID NO: 2428533 - RNA, 19 nt, Homo sapiens
  misc_RNA (1)...(19): siRNA sense strand
ugauaaaggcacagagaaa

SEQ ID NO: 2428534 - RNA, 19 nt, Homo sapiens
  misc_RNA (1)...(19): siRNA sense strand
ggaauuacacagagaggaa

SEQ ID NO: 2428535 - RNA, 19 nt, Homo sapiens
  misc_RNA (1)...(19): siRNA sense strand
cagcaguaguggagaugua

SEQ ID NO: 2428536 - RNA, 19 nt, Homo sapiens
  misc_RNA (1)...(19): siRNA sense strand
gaauggugauagaggagaa

SEQ ID NO: 2428537 - RNA, 19 nt, Homo sapiens
  misc_RNA (1)...(19): siRNA sense strand
cugaugaaauagaaagcua

SEQ ID NO: 2428538 - RNA, 19 nt, Homo sapiens
  misc_RNA (1)...(19): siRNA sense strand
gaaucuggguccugagaau

SEQ ID NO: 2428539 - RNA, 19 nt, Homo sapiens
  misc_RNA (1)...(19): siRNA sense strand
uccaaagaucugaggaaua

SEQ ID NO: 2428540 - RNA, 19 nt, Homo sapiens
  misc_RNA (1)...(19): siRNA sense strand
aggaguuuauacagagaaa

SEQ ID NO: 2428541 - RNA, 19 nt, Homo sapiens
  misc_RNA (1)...(19): siRNA sense strand
cugcaacaguagauacaua

SEQ ID NO: 2428542 - RNA, 19 nt, Homo sapiens
  misc_RNA (1)...(19): siRNA sense strand
aaacagaagagguguguga

SEQ ID NO: 2428543 - RNA, 19 nt, Homo sapiens
  misc_RNA (1)...(19): siRNA sense strand
ucaagaaggcucagcgauu

SEQ ID NO: 2428544 - RNA, 19 nt, Homo sapiens
  misc_RNA (1)...(19): siRNA sense strand
acuagaugauucacagaaa

SEQ ID NO: 2428545 - RNA, 19 nt, Homo sapiens
  misc_RNA (1)...(19): siRNA sense strand
cugaggaauaagagaagua

SEQ ID NO: 2428546 - RNA, 19 nt, Homo sapiens
  misc_RNA (1)...(19): siRNA sense strand
ggaugaacuuauaaaggau

SEQ ID NO: 2428547 - RNA, 19 nt, Homo sapiens
  misc_RNA (1)...(19): siRNA sense strand
ccacauggcucguuggguu

SEQ ID NO: 2428548 - RNA, 19 nt, Homo sapiens
  misc_RNA (1)...(19): siRNA sense strand
agaagauaccagauugaua

SEQ ID NO: 2428549 - RNA, 19 nt, Homo sapiens
  misc_RNA (1)...(19): siRNA sense strand
gaacaggcagcaagagaau

SEQ ID NO: 2428550 - RNA, 19 nt, Homo sapiens
  misc_RNA (1)...(19): siRNA sense strand
ccuuagaugaggugugcua

SEQ ID NO: 2428551 - RNA, 19 nt, Homo sapiens
  misc_RNA (1)...(19): siRNA sense strand
aggaagaaacuaauagaga

SEQ ID NO: 2428552 - RNA, 19 nt, Homo sapiens
  misc_RNA (1)...(19): siRNA sense strand
gaagaaacuaauagagacu

SEQ ID NO: 2428553 - RNA, 19 nt, Homo sapiens
  misc_RNA (1)...(19): siRNA sense strand
cuugaaagguugcagaaaa

SEQ ID NO: 2428554 - RNA, 19 nt, Homo sapiens
  misc_RNA (1)...(19): siRNA sense strand
ccguaaagaacuugaaucu

SEQ ID NO: 2428555 - RNA, 19 nt, Homo sapiens
  misc_RNA (1)...(19): siRNA sense strand
agacaaaggaguuuauaca

SEQ ID NO: 2428556 - RNA, 19 nt, Homo sapiens
  misc_RNA (1)...(19): siRNA sense strand
aaugaaaacugcuaggaua

SEQ ID NO: 2428557 - RNA, 19 nt, Homo sapiens
  misc_RNA (1)...(19): siRNA sense strand
aggauaaagccuaaugcua

SEQ ID NO: 2428558 - RNA, 19 nt, Homo sapiens
  misc_RNA (1)...(19): siRNA sense strand
gaucugaggaauaagagaa

SEQ ID NO: 2428559 - RNA, 19 nt, Homo sapiens
  misc_RNA (1)...(19): siRNA sense strand
ccuacugggaauagcauua

SEQ ID NO: 2428560 - RNA, 19 nt, Homo sapiens
  misc_RNA (1)...(19): siRNA sense strand
aauuauggcuggauggaca

SEQ ID NO: 2428561 - RNA, 19 nt, Homo sapiens
  misc_RNA (1)...(19): siRNA sense strand
gaugaaauaaagagagcca

SEQ ID NO: 2428562 - RNA, 19 nt, Homo sapiens
  misc_RNA (1)...(19): siRNA sense strand
cagagaugcuugaggaaag

SEQ ID NO: 2428563 - RNA, 19 nt, Homo sapiens
  misc_RNA (1)...(19): siRNA sense strand
aggaauaagagaaguaguu

SEQ ID NO: 2428564 - RNA, 19 nt, Homo sapiens
  misc_RNA (1)...(19): siRNA sense strand
uggcaugacuacugcauuu

SEQ ID NO: 2428565 - RNA, 19 nt, Homo sapiens
  misc_RNA (1)...(19): siRNA sense strand
uaguggagauguaggaaaa

SEQ ID NO: 2428566 - RNA, 19 nt, Homo sapiens
  misc_RNA (1)...(19): siRNA sense strand
aaagagagccaguggagau

SEQ ID NO: 2428567 - RNA, 19 nt, Homo sapiens
  misc_RNA (1)...(19): siRNA sense strand
guagaaaccaucaggcaga

SEQ ID NO: 2428568 - RNA, 19 nt, Homo sapiens
  misc_RNA (1)...(19): siRNA sense strand
uggaaauucaagaggcauu

SEQ ID NO: 2428569 - RNA, 19 nt, Homo sapiens
  misc_RNA (1)...(19): siRNA sense strand
caaccuacuuucacagcaa

SEQ ID NO: 2428570 - RNA, 19 nt, Homo sapiens
  misc_RNA (1)...(19): siRNA sense strand
gauggaaauucaagaggca

SEQ ID NO: 2428571 - RNA, 19 nt, Homo sapiens
  misc_RNA (1)...(19): siRNA sense strand
gcagaagauaccagauuga

SEQ ID NO: 2428572 - RNA, 19 nt, Homo sapiens
  misc_RNA (1)...(19): siRNA sense strand
ccacaaagaccgagaaucc

SEQ ID NO: 2428573 - RNA, 19 nt, Homo sapiens
  misc_RNA (1)...(19): siRNA sense strand
uuugaugacugcauagaaa

SEQ ID NO: 2428574 - RNA, 19 nt, Homo sapiens
  misc_RNA (1)...(19): siRNA sense strand
ccaaaguacaguuacaaau

SEQ ID NO: 2428575 - RNA, 19 nt, Homo sapiens
  misc_RNA (1)...(19): siRNA sense strand
aagaagaguaguuuggauu

SEQ ID NO: 2428576 - RNA, 19 nt, Homo sapiens
  misc_RNA (1)...(19): siRNA sense strand
ugaauguacaggaggaaaa

SEQ ID NO: 2428577 - RNA, 19 nt, Homo sapiens
  misc_RNA (1)...(19): siRNA sense strand
gggcuaaagcuggauaaua

SEQ ID NO: 2428578 - RNA, 19 nt, Homo sapiens
  misc_RNA (1)...(19): siRNA sense strand
caacaagaaacaagcacuu

SEQ ID NO: 2428579 - RNA, 19 nt, Homo sapiens
  misc_RNA (1)...(19): siRNA sense strand
acuuagcaccuuaaagaaa

SEQ ID NO: 2428580 - RNA, 19 nt, Homo sapiens
  misc_RNA (1)...(19): siRNA sense strand
cgaagagauguuauacaaa

SEQ ID NO: 2428581 - RNA, 19 nt, Homo sapiens
  misc_RNA (1)...(19): siRNA sense strand
augaaaacugcuaggauaa

SEQ ID NO: 2428582 - RNA, 19 nt, Homo sapiens
  misc_RNA (1)...(19): siRNA sense strand
guauggaauuacacagaga

SEQ ID NO: 2428583 - RNA, 19 nt, Homo sapiens
  misc_RNA (1)...(19): siRNA sense strand
gcacaaaccuguauccagu

SEQ ID NO: 2428584 - RNA, 19 nt, Homo sapiens
  misc_RNA (1)...(19): siRNA sense strand
aaguagcacugguaguaua

SEQ ID NO: 2428585 - RNA, 19 nt, Homo sapiens
  misc_RNA (1)...(19): siRNA sense strand
gcuaaagcuggauaauaua

SEQ ID NO: 2428586 - RNA, 19 nt, Homo sapiens
  misc_RNA (1)...(19): siRNA sense strand
agauagauguccugaaauc

SEQ ID NO: 2428587 - RNA, 19 nt, Homo sapiens
  misc_RNA (1)...(19): siRNA sense strand
guaguggagauguaggaaa

SEQ ID NO: 2428588 - RNA, 19 nt, Homo sapiens
  misc_RNA (1)...(19): siRNA sense strand
gcacuuuaguagaaaccau

SEQ ID NO: 2428589 - RNA, 19 nt, Homo sapiens
  misc_RNA (1)...(19): siRNA sense strand
cagcagaagauaccagauu

SEQ ID NO: 2428590 - RNA, 19 nt, Homo sapiens
  misc_RNA (1)...(19): siRNA sense strand
gugcaaaggucacaggucu

SEQ ID NO: 2428591 - RNA, 19 nt, Homo sapiens
  misc_RNA (1)...(19): siRNA sense strand
uauccaaagaucugaggaa

SEQ ID NO: 2428592 - RNA, 19 nt, Homo sapiens
  misc_RNA (1)...(19): siRNA sense strand
augaugaggaagaaacuaa

SEQ ID NO: 2428593 - RNA, 19 nt, Homo sapiens
  misc_RNA (1)...(19): siRNA sense strand
auucagcuguuaugggaua

SEQ ID NO: 2428594 - RNA, 19 nt, Homo sapiens
  misc_RNA (1)...(19): siRNA sense strand
gcacagagaaaacagauaa

SEQ ID NO: 2428595 - RNA, 19 nt, Homo sapiens
  misc_RNA (1)...(19): siRNA sense strand
gcuacuaaucucaagaaga

SEQ ID NO: 2428596 - RNA, 19 nt, Homo sapiens
  misc_RNA (1)...(19): siRNA sense strand
gggagaaggauaaggagaa

SEQ ID NO: 2428597 - RNA, 19 nt, Homo sapiens
  misc_RNA (1)...(19): siRNA sense strand
agaaagagaaggagaaaca

SEQ ID NO: 2428598 - RNA, 19 nt, Homo sapiens
  misc_RNA (1)...(19): siRNA sense strand
ucugaaaggcaaugagaaa

SEQ ID NO: 2428599 - RNA, 19 nt, Homo sapiens
  misc_RNA (1)...(19): siRNA sense strand
acucacagguggagaggaa

SEQ ID NO: 2428600 - RNA, 19 nt, Homo sapiens
  misc_RNA (1)...(19): siRNA sense strand
cggcagaauuuggaggaaa

SEQ ID NO: 2428601 - RNA, 19 nt, Homo sapiens
  misc_RNA (1)...(19): siRNA sense strand
gcaauauggagcugguaaa

SEQ ID NO: 2428602 - RNA, 19 nt, Homo sapiens
  misc_RNA (1)...(19): siRNA sense strand
aagaaaggacucagguaua

SEQ ID NO: 2428603 - RNA, 19 nt, Homo sapiens
  misc_RNA (1)...(19): siRNA sense strand
gcaagguggaggugagcaa

SEQ ID NO: 2428604 - RNA, 19 nt, Homo sapiens
  misc_RNA (1)...(19): siRNA sense strand
gggaacaggucuagcacca

SEQ ID NO: 2428605 - RNA, 19 nt, Homo sapiens
  misc_RNA (1)...(19): siRNA sense strand
cgcaaaggugucugagaaa

SEQ ID NO: 2428606 - RNA, 19 nt, Homo sapiens
  misc_RNA (1)...(19): siRNA sense strand
aggaggaagcucauggaaa

SEQ ID NO: 2428607 - RNA, 19 nt, Homo sapiens
  misc_RNA (1)...(19): siRNA sense strand
aggaggaaaugaaguggaa

SEQ ID NO: 2428608 - RNA, 19 nt, Homo sapiens
  misc_RNA (1)...(19): siRNA sense strand
augagaaagagaaggagaa

SEQ ID NO: 2428609 - RNA, 19 nt, Homo sapiens
  misc_RNA (1)...(19): siRNA sense strand
acacacagcacauuggaaa

SEQ ID NO: 2428610 - RNA, 19 nt, Homo sapiens
  misc_RNA (1)...(19): siRNA sense strand
ccgaagaacagaucccaaa

SEQ ID NO: 2428611 - RNA, 19 nt, Homo sapiens
  misc_RNA (1)...(19): siRNA sense strand
ugaaaggcaaugagaaaga

SEQ ID NO: 2428612 - RNA, 19 nt, Homo sapiens
  misc_RNA (1)...(19): siRNA sense strand
gugaaauagagaagcugaa

SEQ ID NO: 2428613 - RNA, 19 nt, Homo sapiens
  misc_RNA (1)...(19): siRNA sense strand
caggaugcagagugaaaua

SEQ ID NO: 2428614 - RNA, 19 nt, Homo sapiens
  misc_RNA (1)...(19): siRNA sense strand
gagaaacaacagcgggaga

SEQ ID NO: 2428615 - RNA, 19 nt, Homo sapiens
  misc_RNA (1)...(19): siRNA sense strand
cgggagaaggauaaggaga

SEQ ID NO: 2428616 - RNA, 19 nt, Homo sapiens
  misc_RNA (1)...(19): siRNA sense strand
auucagauauugaggagau

SEQ ID NO: 2428617 - RNA, 19 nt, Homo sapiens
  misc_RNA (1)...(19): siRNA sense strand
gaugaguggccguagcaua

SEQ ID NO: 2428618 - RNA, 19 nt, Homo sapiens
  misc_RNA (1)...(19): siRNA sense strand
agaacaaugcuguggacau

SEQ ID NO: 2428619 - RNA, 19 nt, Homo sapiens
  misc_RNA (1)...(19): siRNA sense strand
cugcagaagagaucaggaa

SEQ ID NO: 2428620 - RNA, 19 nt, Homo sapiens
  misc_RNA (1)...(19): siRNA sense strand
ugagaaagagaaggagaaa

SEQ ID NO: 2428621 - RNA, 19 nt, Homo sapiens
  misc_RNA (1)...(19): siRNA sense strand
gcacgcaagaagaugcaaa

SEQ ID NO: 2428622 - RNA, 19 nt, Homo sapiens
  misc_RNA (1)...(19): siRNA sense strand
gggcaaaaucccaaaguca

SEQ ID NO: 2428623 - RNA, 19 nt, Homo sapiens
  misc_RNA (1)...(19): siRNA sense strand
caucagacaacgagagugu

SEQ ID NO: 2428624 - RNA, 19 nt, Homo sapiens
  misc_RNA (1)...(19): siRNA sense strand
ccaggaaacaggacaguga

SEQ ID NO: 2428625 - RNA, 19 nt, Homo sapiens
  misc_RNA (1)...(19): siRNA sense strand
gaugagaagagcagaacca

SEQ ID NO: 2428626 - RNA, 19 nt, Homo sapiens
  misc_RNA (1)...(19): siRNA sense strand
aguuaagagacaaggagau

SEQ ID NO: 2428627 - RNA, 19 nt, Homo sapiens
  misc_RNA (1)...(19): siRNA sense strand
uuauccagguuguggcaaa

SEQ ID NO: 2428628 - RNA, 19 nt, Homo sapiens
  misc_RNA (1)...(19): siRNA sense strand
ccucaaugggcaaugggua

SEQ ID NO: 2428629 - RNA, 19 nt, Homo sapiens
  misc_RNA (1)...(19): siRNA sense strand
cuggaugagaagagcagaa

SEQ ID NO: 2428630 - RNA, 19 nt, Homo sapiens
  misc_RNA (1)...(19): siRNA sense strand
ggaagaacucacuggggaa

SEQ ID NO: 2428631 - RNA, 19 nt, Homo sapiens
  misc_RNA (1)...(19): siRNA sense strand
ucacagguggagaggaauu

SEQ ID NO: 2428632 - RNA, 19 nt, Homo sapiens
  misc_RNA (1)...(19): siRNA sense strand
uggugaugaugucaagaaa

SEQ ID NO: 2428633 - RNA, 19 nt, Homo sapiens
  misc_RNA (1)...(19): siRNA sense strand
ccauaaguccagcaaggaa

SEQ ID NO: 2428634 - RNA, 19 nt, Homo sapiens
  misc_RNA (1)...(19): siRNA sense strand
agauggaccuggaaggcau

SEQ ID NO: 2428635 - RNA, 19 nt, Homo sapiens
  misc_RNA (1)...(19): siRNA sense strand
uaagagacaaggagaugaa

SEQ ID NO: 2428636 - RNA, 19 nt, Homo sapiens
  misc_RNA (1)...(19): siRNA sense strand
agacggacacugaagggaa

SEQ ID NO: 2428637 - RNA, 19 nt, Homo sapiens
  misc_RNA (1)...(19): siRNA sense strand
ccggagcaguggugacgaa

SEQ ID NO: 2428638 - RNA, 19 nt, Homo sapiens
  misc_RNA (1)...(19): siRNA sense strand
gugaaagggcucgcagaaa

SEQ ID NO: 2428639 - RNA, 19 nt, Homo sapiens
  misc_RNA (1)...(19): siRNA sense strand
ccaugacagcugagcagaa

SEQ ID NO: 2428640 - RNA, 19 nt, Homo sapiens
  misc_RNA (1)...(19): siRNA sense strand
gccaagcagccacgagaaa

SEQ ID NO: 2428641 - RNA, 19 nt, Homo sapiens
  misc_RNA (1)...(19): siRNA sense strand
gaaaucagacggaggcuca

SEQ ID NO: 2428642 - RNA, 19 nt, Homo sapiens
  misc_RNA (1)...(19): siRNA sense strand
caaucaggcuccagagucu

SEQ ID NO: 2428643 - RNA, 19 nt, Homo sapiens
  misc_RNA (1)...(19): siRNA sense strand
gaguuaagagacaaggaga

SEQ ID NO: 2428644 - RNA, 19 nt, Homo sapiens
  misc_RNA (1)...(19): siRNA sense strand
ggcagaauuuggaggaaac

SEQ ID NO: 2428645 - RNA, 19 nt, Homo sapiens
  misc_RNA (1)...(19): siRNA sense strand
gggcagcaacauagagagu

SEQ ID NO: 2428646 - RNA, 19 nt, Homo sapiens
  misc_RNA (1)...(19): siRNA sense strand
gcagaagagaucaggaaug

SEQ ID NO: 2428647 - RNA, 19 nt, Homo sapiens
  misc_RNA (1)...(19): siRNA sense strand
cauaaguccagcaaggaau

SEQ ID NO: 2428648 - RNA, 19 nt, Homo sapiens
  misc_RNA (1)...(19): siRNA sense strand
ccuaaagccucccagguga

SEQ ID NO: 2428649 - RNA, 19 nt, Homo sapiens
  misc_RNA (1)...(19): siRNA sense strand
cuaagaaaggacucaggua

SEQ ID NO: 2428650 - RNA, 19 nt, Homo sapiens
  misc_RNA (1)...(19): siRNA sense strand
gcucauggaaacagagauc

SEQ ID NO: 2428651 - RNA, 19 nt, Homo sapiens
  misc_RNA (1)...(19): siRNA sense strand
caaaacacgcggaggguca

SEQ ID NO: 2428652 - RNA, 19 nt, Homo sapiens
  misc_RNA (1)...(19): siRNA sense strand
caagcagccacgagaaaga

SEQ ID NO: 2428653 - RNA, 19 nt, Homo sapiens
  misc_RNA (1)...(19): siRNA sense strand
ggucagccacacugggcaa

SEQ ID NO: 2428654 - RNA, 19 nt, Homo sapiens
  misc_RNA (1)...(19): siRNA sense strand
gggcucagaaucaggauga

SEQ ID NO: 2428655 - RNA, 19 nt, Homo sapiens
  misc_RNA (1)...(19): siRNA sense strand
agaaucaggaugacgggua

SEQ ID NO: 2428656 - RNA, 19 nt, Homo sapiens
  misc_RNA (1)...(19): siRNA sense strand
cagcacagcuugaaccuca

SEQ ID NO: 2428657 - RNA, 19 nt, Homo sapiens
  misc_RNA (1)...(19): siRNA sense strand
cuacagcauuggagaaauc

SEQ ID NO: 2428658 - RNA, 19 nt, Homo sapiens
  misc_RNA (1)...(19): siRNA sense strand
aggauaaggagaaaagcaa

SEQ ID NO: 2428659 - RNA, 19 nt, Homo sapiens
  misc_RNA (1)...(19): siRNA sense strand
cucaaugggcaauggguau

SEQ ID NO: 2428660 - RNA, 19 nt, Homo sapiens
  misc_RNA (1)...(19): siRNA sense strand
gggagaaggauaaggagaa

SEQ ID NO: 2428661 - RNA, 19 nt, Homo sapiens
  misc_RNA (1)...(19): siRNA sense strand
agaaagagaaggagaaaca

SEQ ID NO: 2428662 - RNA, 19 nt, Homo sapiens
  misc_RNA (1)...(19): siRNA sense strand
ucugaaaggcaaugagaaa

SEQ ID NO: 2428663 - RNA, 19 nt, Homo sapiens
  misc_RNA (1)...(19): siRNA sense strand
acucacagguggagaggaa

SEQ ID NO: 2428664 - RNA, 19 nt, Homo sapiens
  misc_RNA (1)...(19): siRNA sense strand
cggcagaauuuggaggaaa

SEQ ID NO: 2428665 - RNA, 19 nt, Homo sapiens
  misc_RNA (1)...(19): siRNA sense strand
gcaauauggagcugguaaa

SEQ ID NO: 2428666 - RNA, 19 nt, Homo sapiens
  misc_RNA (1)...(19): siRNA sense strand
aagaaaggacucagguaua

SEQ ID NO: 2428667 - RNA, 19 nt, Homo sapiens
  misc_RNA (1)...(19): siRNA sense strand
gcaagguggaggugagcaa

SEQ ID NO: 2428668 - RNA, 19 nt, Homo sapiens
  misc_RNA (1)...(19): siRNA sense strand
gggaacaggucuagcacca

SEQ ID NO: 2428669 - RNA, 19 nt, Homo sapiens
  misc_RNA (1)...(19): siRNA sense strand
cgcaaaggugucugagaaa

SEQ ID NO: 2428670 - RNA, 19 nt, Homo sapiens
  misc_RNA (1)...(19): siRNA sense strand
aggaggaagcucauggaaa

SEQ ID NO: 2428671 - RNA, 19 nt, Homo sapiens
  misc_RNA (1)...(19): siRNA sense strand
aggaggaaaugaaguggaa

SEQ ID NO: 2428672 - RNA, 19 nt, Homo sapiens
  misc_RNA (1)...(19): siRNA sense strand
augagaaagagaaggagaa

SEQ ID NO: 2428673 - RNA, 19 nt, Homo sapiens
  misc_RNA (1)...(19): siRNA sense strand
acacacagcacauuggaaa

SEQ ID NO: 2428674 - RNA, 19 nt, Homo sapiens
  misc_RNA (1)...(19): siRNA sense strand
ccgaagaacagaucccaaa

SEQ ID NO: 2428675 - RNA, 19 nt, Homo sapiens
  misc_RNA (1)...(19): siRNA sense strand
ugaaaggcaaugagaaaga

SEQ ID NO: 2428676 - RNA, 19 nt, Homo sapiens
  misc_RNA (1)...(19): siRNA sense strand
gugaaauagagaagcugaa

SEQ ID NO: 2428677 - RNA, 19 nt, Homo sapiens
  misc_RNA (1)...(19): siRNA sense strand
caggaugcagagugaaaua

SEQ ID NO: 2428678 - RNA, 19 nt, Homo sapiens
  misc_RNA (1)...(19): siRNA sense strand
gagaaacaacagcgggaga

SEQ ID NO: 2428679 - RNA, 19 nt, Homo sapiens
  misc_RNA (1)...(19): siRNA sense strand
cgggagaaggauaaggaga

SEQ ID NO: 2428680 - RNA, 19 nt, Homo sapiens
  misc_RNA (1)...(19): siRNA sense strand
auucagauauugaggagau

SEQ ID NO: 2428681 - RNA, 19 nt, Homo sapiens
  misc_RNA (1)...(19): siRNA sense strand
gaugaguggccguagcaua

SEQ ID NO: 2428682 - RNA, 19 nt, Homo sapiens
  misc_RNA (1)...(19): siRNA sense strand
agaacaaugcuguggacau

SEQ ID NO: 2428683 - RNA, 19 nt, Homo sapiens
  misc_RNA (1)...(19): siRNA sense strand
cugcagaagagaucaggaa

SEQ ID NO: 2428684 - RNA, 19 nt, Homo sapiens
  misc_RNA (1)...(19): siRNA sense strand
ugagaaagagaaggagaaa

SEQ ID NO: 2428685 - RNA, 19 nt, Homo sapiens
  misc_RNA (1)...(19): siRNA sense strand
gcacgcaagaagaugcaaa

SEQ ID NO: 2428686 - RNA, 19 nt, Homo sapiens
  misc_RNA (1)...(19): siRNA sense strand
gggcaaaaucccaaaguca

SEQ ID NO: 2428687 - RNA, 19 nt, Homo sapiens
  misc_RNA (1)...(19): siRNA sense strand
caucagacaacgagagugu

SEQ ID NO: 2428688 - RNA, 19 nt, Homo sapiens
  misc_RNA (1)...(19): siRNA sense strand
ccaggaaacaggacaguga

SEQ ID NO: 2428689 - RNA, 19 nt, Homo sapiens
  misc_RNA (1)...(19): siRNA sense strand
gaugagaagagcagaacca

SEQ ID NO: 2428690 - RNA, 19 nt, Homo sapiens
  misc_RNA (1)...(19): siRNA sense strand
aguuaagagacaaggagau

SEQ ID NO: 2428691 - RNA, 19 nt, Homo sapiens
  misc_RNA (1)...(19): siRNA sense strand
uuauccagguuguggcaaa

SEQ ID NO: 2428692 - RNA, 19 nt, Homo sapiens
  misc_RNA (1)...(19): siRNA sense strand
ccucaaugggcaaugggua

SEQ ID NO: 2428693 - RNA, 19 nt, Homo sapiens
  misc_RNA (1)...(19): siRNA sense strand
cuggaugagaagagcagaa

SEQ ID NO: 2428694 - RNA, 19 nt, Homo sapiens
  misc_RNA (1)...(19): siRNA sense strand
ggaagaacucacuggggaa

SEQ ID NO: 2428695 - RNA, 19 nt, Homo sapiens
  misc_RNA (1)...(19): siRNA sense strand
ucacagguggagaggaauu

SEQ ID NO: 2428696 - RNA, 19 nt, Homo sapiens
  misc_RNA (1)...(19): siRNA sense strand
uggugaugaugucaagaaa

SEQ ID NO: 2428697 - RNA, 19 nt, Homo sapiens
  misc_RNA (1)...(19): siRNA sense strand
ccauaaguccagcaaggaa

SEQ ID NO: 2428698 - RNA, 19 nt, Homo sapiens
  misc_RNA (1)...(19): siRNA sense strand
agauggaccuggaaggcau

SEQ ID NO: 2428699 - RNA, 19 nt, Homo sapiens
  misc_RNA (1)...(19): siRNA sense strand
uaagagacaaggagaugaa

SEQ ID NO: 2428700 - RNA, 19 nt, Homo sapiens
  misc_RNA (1)...(19): siRNA sense strand
agacggacacugaagggaa

SEQ ID NO: 2428701 - RNA, 19 nt, Homo sapiens
  misc_RNA (1)...(19): siRNA sense strand
ccggagcaguggugacgaa

SEQ ID NO: 2428702 - RNA, 19 nt, Homo sapiens
  misc_RNA (1)...(19): siRNA sense strand
gugaaagggcucgcagaaa

SEQ ID NO: 2428703 - RNA, 19 nt, Homo sapiens
  misc_RNA (1)...(19): siRNA sense strand
ccaugacagcugagcagaa

SEQ ID NO: 2428704 - RNA, 19 nt, Homo sapiens
  misc_RNA (1)...(19): siRNA sense strand
gccaagcagccacgagaaa

SEQ ID NO: 2428705 - RNA, 19 nt, Homo sapiens
  misc_RNA (1)...(19): siRNA sense strand
gaaaucagacggaggcuca

SEQ ID NO: 2428706 - RNA, 19 nt, Homo sapiens
  misc_RNA (1)...(19): siRNA sense strand
caaucaggcuccagagucu

SEQ ID NO: 2428707 - RNA, 19 nt, Homo sapiens
  misc_RNA (1)...(19): siRNA sense strand
gaguuaagagacaaggaga

SEQ ID NO: 2428708 - RNA, 19 nt, Homo sapiens
  misc_RNA (1)...(19): siRNA sense strand
ggcagaauuuggaggaaac

SEQ ID NO: 2428709 - RNA, 19 nt, Homo sapiens
  misc_RNA (1)...(19): siRNA sense strand
gggcagcaacauagagagu

SEQ ID NO: 2428710 - RNA, 19 nt, Homo sapiens
  misc_RNA (1)...(19): siRNA sense strand
gcagaagagaucaggaaug

SEQ ID NO: 2428711 - RNA, 19 nt, Homo sapiens
  misc_RNA (1)...(19): siRNA sense strand
cauaaguccagcaaggaau

SEQ ID NO: 2428712 - RNA, 19 nt, Homo sapiens
  misc_RNA (1)...(19): siRNA sense strand
ccuaaagccucccagguga

SEQ ID NO: 2428713 - RNA, 19 nt, Homo sapiens
  misc_RNA (1)...(19): siRNA sense strand
cuaagaaaggacucaggua

SEQ ID NO: 2428714 - RNA, 19 nt, Homo sapiens
  misc_RNA (1)...(19): siRNA sense strand
gcucauggaaacagagauc

SEQ ID NO: 2428715 - RNA, 19 nt, Homo sapiens
  misc_RNA (1)...(19): siRNA sense strand
caaaacacgcggaggguca

SEQ ID NO: 2428716 - RNA, 19 nt, Homo sapiens
  misc_RNA (1)...(19): siRNA sense strand
caagcagccacgagaaaga

SEQ ID NO: 2428717 - RNA, 19 nt, Homo sapiens
  misc_RNA (1)...(19): siRNA sense strand
ggucagccacacugggcaa

SEQ ID NO: 2428718 - RNA, 19 nt, Homo sapiens
  misc_RNA (1)...(19): siRNA sense strand
gggcucagaaucaggauga

SEQ ID NO: 2428719 - RNA, 19 nt, Homo sapiens
  misc_RNA (1)...(19): siRNA sense strand
agaaucaggaugacgggua

SEQ ID NO: 2428720 - RNA, 19 nt, Homo sapiens
  misc_RNA (1)...(19): siRNA sense strand
cagcacagcuugaaccuca

SEQ ID NO: 2428721 - RNA, 19 nt, Homo sapiens
  misc_RNA (1)...(19): siRNA sense strand
cuacagcauuggagaaauc

SEQ ID NO: 2428722 - RNA, 19 nt, Homo sapiens
  misc_RNA (1)...(19): siRNA sense strand
aggauaaggagaaaagcaa

SEQ ID NO: 2428723 - RNA, 19 nt, Homo sapiens
  misc_RNA (1)...(19): siRNA sense strand
cucaaugggcaauggguau

SEQ ID NO: 2428724 - RNA, 19 nt, Homo sapiens
  misc_RNA (1)...(19): siRNA sense strand
gcagaaacacacaaggcua

SEQ ID NO: 2428725 - RNA, 19 nt, Homo sapiens
  misc_RNA (1)...(19): siRNA sense strand
aggacagauggauggaaua

SEQ ID NO: 2428726 - RNA, 19 nt, Homo sapiens
  misc_RNA (1)...(19): siRNA sense strand
acugauggaaugaggguga

SEQ ID NO: 2428727 - RNA, 19 nt, Homo sapiens
  misc_RNA (1)...(19): siRNA sense strand
ucgcauuguuuguggcguu

SEQ ID NO: 2428728 - RNA, 19 nt, Homo sapiens
  misc_RNA (1)...(19): siRNA sense strand
acgcagaacaacaacaaca

SEQ ID NO: 2428729 - RNA, 19 nt, Homo sapiens
  misc_RNA (1)...(19): siRNA sense strand
cgugcagcauggaagggaa

SEQ ID NO: 2428730 - RNA, 19 nt, Homo sapiens
  misc_RNA (1)...(19): siRNA sense strand
gguucaacgauguaaagau

SEQ ID NO: 2428731 - RNA, 19 nt, Homo sapiens
  misc_RNA (1)...(19): siRNA sense strand
gggaagacgaagacggccu

SEQ ID NO: 2428732 - RNA, 19 nt, Homo sapiens
  misc_RNA (1)...(19): siRNA sense strand
caacaacagucgugaccac

SEQ ID NO: 2428733 - RNA, 19 nt, Homo sapiens
  misc_RNA (1)...(19): siRNA sense strand
auggaagggaagacgaaga

SEQ ID NO: 2428734 - RNA, 19 nt, Homo sapiens
  misc_RNA (1)...(19): siRNA sense strand
gugaaguggcugugagagu

SEQ ID NO: 2428735 - RNA, 19 nt, Homo sapiens
  misc_RNA (1)...(19): siRNA sense strand
agaauaacggagaaggaga

SEQ ID NO: 2428736 - RNA, 19 nt, Homo sapiens
  misc_RNA (1)...(19): siRNA sense strand
gaaggaagaauaacggaga

SEQ ID NO: 2428737 - RNA, 19 nt, Homo sapiens
  misc_RNA (1)...(19): siRNA sense strand
augaauuuccugagaagau

SEQ ID NO: 2428738 - RNA, 19 nt, Homo sapiens
  misc_RNA (1)...(19): siRNA sense strand
cuagaacaagagagaguga

SEQ ID NO: 2428739 - RNA, 19 nt, Homo sapiens
  misc_RNA (1)...(19): siRNA sense strand
ugcuagaacaagagagagu

SEQ ID NO: 2428740 - RNA, 19 nt, Homo sapiens
  misc_RNA (1)...(19): siRNA sense strand
uggauaugagauaggaaca

SEQ ID NO: 2428741 - RNA, 19 nt, Homo sapiens
  misc_RNA (1)...(19): siRNA sense strand
gaaggagauaagagaucau

SEQ ID NO: 2428742 - RNA, 19 nt, Homo sapiens
  misc_RNA (1)...(19): siRNA sense strand
acugcuagaacaagagaga

SEQ ID NO: 2428743 - RNA, 19 nt, Homo sapiens
  misc_RNA (1)...(19): siRNA sense strand
cugcggaugccucuagaaa

SEQ ID NO: 2428744 - RNA, 19 nt, Homo sapiens
  misc_RNA (1)...(19): siRNA sense strand
aacaagagagagugauaga

SEQ ID NO: 2428745 - RNA, 19 nt, Homo sapiens
  misc_RNA (1)...(19): siRNA sense strand
guucuauauuuguggccca

SEQ ID NO: 2428746 - RNA, 19 nt, Homo sapiens
  misc_RNA (1)...(19): siRNA sense strand
ucccagacugcuagaacaa

SEQ ID NO: 2428747 - RNA, 19 nt, Homo sapiens
  misc_RNA (1)...(19): siRNA sense strand
acaaaacagacuacacaaa

SEQ ID NO: 2428748 - RNA, 19 nt, Homo sapiens
  misc_RNA (1)...(19): siRNA sense strand
gggaaaacgagaaggagaa

SEQ ID NO: 2428749 - RNA, 19 nt, Homo sapiens
  misc_RNA (1)...(19): siRNA sense strand
aggacaagagccagagcaa

SEQ ID NO: 2428750 - RNA, 19 nt, Homo sapiens
  misc_RNA (1)...(19): siRNA sense strand
gggacaagcgaaugcgaga

SEQ ID NO: 2428751 - RNA, 19 nt, Homo sapiens
  misc_RNA (1)...(19): siRNA sense strand
gcagaaagggacaagcgaa

SEQ ID NO: 2428752 - RNA, 19 nt, Homo sapiens
  misc_RNA (1)...(19): siRNA sense strand
gacaagagucugagccgaa

SEQ ID NO: 2428753 - RNA, 19 nt, Homo sapiens
  misc_RNA (1)...(19): siRNA sense strand
aaggacaaggagcgggaaa

SEQ ID NO: 2428754 - RNA, 19 nt, Homo sapiens
  misc_RNA (1)...(19): siRNA sense strand
cgggaaaacgagaaggaga

SEQ ID NO: 2428755 - RNA, 19 nt, Homo sapiens
  misc_RNA (1)...(19): siRNA sense strand
ucaagaaagcuguggugca

SEQ ID NO: 2428756 - RNA, 19 nt, Homo sapiens
  misc_RNA (1)...(19): siRNA sense strand
aaaaggagaagaaggacaa

SEQ ID NO: 2428757 - RNA, 19 nt, Homo sapiens
  misc_RNA (1)...(19): siRNA sense strand
aggagaagaaggacaagga

SEQ ID NO: 2428758 - RNA, 19 nt, Homo sapiens
  misc_RNA (1)...(19): siRNA sense strand
gaggagaucaugaagagga

SEQ ID NO: 2428759 - RNA, 19 nt, Homo sapiens
  misc_RNA (1)...(19): siRNA sense strand
augaagaggacucggaagu

SEQ ID NO: 2428760 - RNA, 19 nt, Homo sapiens
  misc_RNA (1)...(19): siRNA sense strand
gggccaguaacgagaagga

SEQ ID NO: 2428761 - RNA, 19 nt, Homo sapiens
  misc_RNA (1)...(19): siRNA sense strand
cggcaagagcgcagaaagc

SEQ ID NO: 2428762 - RNA, 19 nt, Homo sapiens
  misc_RNA (1)...(19): siRNA sense strand
gaacaaagauggaaguggc

SEQ ID NO: 2428763 - RNA, 19 nt, Homo sapiens
  misc_RNA (1)...(19): siRNA sense strand
ccacucggcucuuggcuga

SEQ ID NO: 2428764 - RNA, 19 nt, Homo sapiens
  misc_RNA (1)...(19): siRNA sense strand
ggacaagagucugagccga

SEQ ID NO: 2428765 - RNA, 19 nt, Homo sapiens
  misc_RNA (1)...(19): siRNA sense strand
gugacagacacguggguga

SEQ ID NO: 2428766 - RNA, 19 nt, Homo sapiens
  misc_RNA (1)...(19): siRNA sense strand
acgugggugaugaagguaa

SEQ ID NO: 2428767 - RNA, 19 nt, Homo sapiens
  misc_RNA (1)...(19): siRNA sense strand
guaaacauggguugggcua

SEQ ID NO: 2428768 - RNA, 19 nt, Homo sapiens
  misc_RNA (1)...(19): siRNA sense strand
uuacaaguugagaaggaaa

SEQ ID NO: 2428769 - RNA, 19 nt, Homo sapiens
  misc_RNA (1)...(19): siRNA sense strand
guuaaagccucuugggaug

SEQ ID NO: 2428770 - RNA, 19 nt, Homo sapiens
  misc_RNA (1)...(19): siRNA sense strand
auuuacaaguugagaagga

SEQ ID NO: 2428771 - RNA, 19 nt, Homo sapiens
  misc_RNA (1)...(19): siRNA sense strand
aguuaaagccucuugggau

SEQ ID NO: 2428772 - RNA, 19 nt, Homo sapiens
  misc_RNA (1)...(19): siRNA sense strand
gaagccaaacagaggaaaa

SEQ ID NO: 2428773 - RNA, 19 nt, Homo sapiens
  misc_RNA (1)...(19): siRNA sense strand
gcuccaucaaugaaagauu

SEQ ID NO: 2428774 - RNA, 19 nt, Homo sapiens
  misc_RNA (1)...(19): siRNA sense strand
cgacuuuggaguuggggaa

SEQ ID NO: 2428775 - RNA, 19 nt, Homo sapiens
  misc_RNA (1)...(19): siRNA sense strand
gcaggaaagauauucgaga

SEQ ID NO: 2428776 - RNA, 19 nt, Homo sapiens
  misc_RNA (1)...(19): siRNA sense strand
cgguuuaauucuucagauc

SEQ ID NO: 2428777 - RNA, 19 nt, Homo sapiens
  misc_RNA (1)...(19): siRNA sense strand
augcaaaaggauaucguaa

SEQ ID NO: 2428778 - RNA, 19 nt, Homo sapiens
  misc_RNA (1)...(19): siRNA sense strand
aggaagccaaacagaggaa

SEQ ID NO: 2428779 - RNA, 19 nt, Homo sapiens
  misc_RNA (1)...(19): siRNA sense strand
caguguuugacaugcauaa

SEQ ID NO: 2428780 - RNA, 19 nt, Homo sapiens
  misc_RNA (1)...(19): siRNA sense strand
aagagaaggaagccaaaca

SEQ ID NO: 2428781 - RNA, 19 nt, Homo sapiens
  misc_RNA (1)...(19): siRNA sense strand
caucagaauuggaaugcuc

SEQ ID NO: 2428782 - RNA, 19 nt, Homo sapiens
  misc_RNA (1)...(19): siRNA sense strand
gggugaaaggccaaggaaa

SEQ ID NO: 2428783 - RNA, 19 nt, Homo sapiens
  misc_RNA (1)...(19): siRNA sense strand
aguagaaacaggucagaua

SEQ ID NO: 2428784 - RNA, 19 nt, Homo sapiens
  misc_RNA (1)...(19): siRNA sense strand
agucaaagaauuagagguu

SEQ ID NO: 2428785 - RNA, 19 nt, Homo sapiens
  misc_RNA (1)...(19): siRNA sense strand
cuggagagcaguaggaaau

SEQ ID NO: 2428786 - RNA, 19 nt, Homo sapiens
  misc_RNA (1)...(19): siRNA sense strand
acauaacuuuggagagcaa

SEQ ID NO: 2428787 - RNA, 19 nt, Homo sapiens
  misc_RNA (1)...(19): siRNA sense strand
gagaaugaggacagagaca

SEQ ID NO: 2428788 - RNA, 19 nt, Homo sapiens
  misc_RNA (1)...(19): siRNA sense strand
cugcagaagugaagaugau

SEQ ID NO: 2428789 - RNA, 19 nt, Homo sapiens
  misc_RNA (1)...(19): siRNA sense strand
ggagcaaaucuuaagaaau

SEQ ID NO: 2428790 - RNA, 19 nt, Homo sapiens
  misc_RNA (1)...(19): siRNA sense strand
ggugaaaggccaaggaaag

SEQ ID NO: 2428791 - RNA, 19 nt, Homo sapiens
  misc_RNA (1)...(19): siRNA sense strand
gcgaacacugaaugaguua

SEQ ID NO: 2428792 - RNA, 19 nt, Homo sapiens
  misc_RNA (1)...(19): siRNA sense strand
aggagcaaaucuuaagaaa

SEQ ID NO: 2428793 - RNA, 19 nt, Homo sapiens
  misc_RNA (1)...(19): siRNA sense strand
agagcagauuguacagaaa

SEQ ID NO: 2428794 - RNA, 19 nt, Homo sapiens
  misc_RNA (1)...(19): siRNA sense strand
ggauuacauuccaggucaa

SEQ ID NO: 2428795 - RNA, 19 nt, Homo sapiens
  misc_RNA (1)...(19): siRNA sense strand
ggccaaggaaagaaggcaa

SEQ ID NO: 2428796 - RNA, 19 nt, Homo sapiens
  misc_RNA (1)...(19): siRNA sense strand
gguguacaggagagaguua

SEQ ID NO: 2428797 - RNA, 19 nt, Homo sapiens
  misc_RNA (1)...(19): siRNA sense strand
augaaggccuacagaagaa

SEQ ID NO: 2428798 - RNA, 19 nt, Homo sapiens
  misc_RNA (1)...(19): siRNA sense strand
ggacuauacuggagagcag

SEQ ID NO: 2428799 - RNA, 19 nt, Homo sapiens
  misc_RNA (1)...(19): siRNA sense strand
ccaaaaugucagaagaaau

SEQ ID NO: 2428800 - RNA, 19 nt, Homo sapiens
  misc_RNA (1)...(19): siRNA sense strand
uaaagaaacccaaaggaga

SEQ ID NO: 2428801 - RNA, 19 nt, Homo sapiens
  misc_RNA (1)...(19): siRNA sense strand
cuacagaagaagaggccca

SEQ ID NO: 2428802 - RNA, 19 nt, Homo sapiens
  misc_RNA (1)...(19): siRNA sense strand
acucaaugaagcuggacua

SEQ ID NO: 2428803 - RNA, 19 nt, Homo sapiens
  misc_RNA (1)...(19): siRNA sense strand
gaaugaggacagagacaca

SEQ ID NO: 2428804 - RNA, 19 nt, Homo sapiens
  misc_RNA (1)...(19): siRNA sense strand
ccuacuuagucaaagaauu

SEQ ID NO: 2428805 - RNA, 19 nt, Homo sapiens
  misc_RNA (1)...(19): siRNA sense strand
gguuugagcaagcuauaaa

SEQ ID NO: 2428806 - RNA, 19 nt, Homo sapiens
  misc_RNA (1)...(19): siRNA sense strand
aaagaaacccaaaggagau

SEQ ID NO: 2428807 - RNA, 19 nt, Homo sapiens
  misc_RNA (1)...(19): siRNA sense strand
uggccaacaucuugcacaa

SEQ ID NO: 2428808 - RNA, 19 nt, Homo sapiens
  misc_RNA (1)...(19): siRNA sense strand
gcauggaucugaaagccaa

SEQ ID NO: 2428809 - RNA, 19 nt, Homo sapiens
  misc_RNA (1)...(19): siRNA sense strand
cagaagugaagaugaugaa

SEQ ID NO: 2428810 - RNA, 19 nt, Homo sapiens
  misc_RNA (1)...(19): siRNA sense strand
ggaucuauaugauggcaca

SEQ ID NO: 2428811 - RNA, 19 nt, Homo sapiens
  misc_RNA (1)...(19): siRNA sense strand
cggugguugaggagagcaa

SEQ ID NO: 2428812 - RNA, 19 nt, Homo sapiens
  misc_RNA (1)...(19): siRNA sense strand
uggcuuugguggaugaauu

SEQ ID NO: 2428813 - RNA, 19 nt, Homo sapiens
  misc_RNA (1)...(19): siRNA sense strand
ccucaaacuccgcugggua

SEQ ID NO: 2428814 - RNA, 19 nt, Homo sapiens
  misc_RNA (1)...(19): siRNA sense strand
gaaacaauuaguugcucaa

SEQ ID NO: 2428815 - RNA, 19 nt, Homo sapiens
  misc_RNA (1)...(19): siRNA sense strand
ggacagagacacaggacug

SEQ ID NO: 2428816 - RNA, 19 nt, Homo sapiens
  misc_RNA (1)...(19): siRNA sense strand
agaagaagaaauugggucu

SEQ ID NO: 2428817 - RNA, 19 nt, Homo sapiens
  misc_RNA (1)...(19): siRNA sense strand
aagcaaaccuagagaucac

SEQ ID NO: 2428818 - RNA, 19 nt, Homo sapiens
  misc_RNA (1)...(19): siRNA sense strand
agcagaaauuggaggcuca

SEQ ID NO: 2428819 - RNA, 19 nt, Homo sapiens
  misc_RNA (1)...(19): siRNA sense strand
gcauagaucucuccagcga

SEQ ID NO: 2428820 - RNA, 19 nt, Homo sapiens
  misc_RNA (1)...(19): siRNA sense strand
ccaaugaacuugaagcauc

SEQ ID NO: 2428821 - RNA, 19 nt, Homo sapiens
  misc_RNA (1)...(19): siRNA sense strand
ggaaagaaggcaaucgacu

SEQ ID NO: 2428822 - RNA, 19 nt, Homo sapiens
  misc_RNA (1)...(19): siRNA sense strand
guaugaugucugugaacuu

SEQ ID NO: 2428823 - RNA, 19 nt, Homo sapiens
  misc_RNA (1)...(19): siRNA sense strand
aggucaaacguguaaagaa

SEQ ID NO: 2428824 - RNA, 19 nt, Homo sapiens
  misc_RNA (1)...(19): siRNA sense strand
cagaugaccaugcacgaaa

SEQ ID NO: 2428825 - RNA, 19 nt, Homo sapiens
  misc_RNA (1)...(19): siRNA sense strand
aagagaaugaggacagaga

SEQ ID NO: 2428826 - RNA, 19 nt, Homo sapiens
  misc_RNA (1)...(19): siRNA sense strand
uggaacagagacauaauaa

SEQ ID NO: 2428827 - RNA, 19 nt, Homo sapiens
  misc_RNA (1)...(19): siRNA sense strand
gagaauuaagaaugagcca

SEQ ID NO: 2428828 - RNA, 19 nt, Homo sapiens
  misc_RNA (1)...(19): siRNA sense strand
augcaaugcuuggggaaua

SEQ ID NO: 2428829 - RNA, 19 nt, Homo sapiens
  misc_RNA (1)...(19): siRNA sense strand
ucugaugcauauagggaca

SEQ ID NO: 2428830 - RNA, 19 nt, Homo sapiens
  misc_RNA (1)...(19): siRNA sense strand
gcaaagaccaauauccaca

SEQ ID NO: 2428831 - RNA, 19 nt, Homo sapiens
  misc_RNA (1)...(19): siRNA sense strand
gugaaaggccaaggaaaga

SEQ ID NO: 2428832 - RNA, 19 nt, Homo sapiens
  misc_RNA (1)...(19): siRNA sense strand
guggagauaucuuugaaaa

SEQ ID NO: 2428833 - RNA, 19 nt, Homo sapiens
  misc_RNA (1)...(19): siRNA sense strand
agaaacaauuaguugcuca

SEQ ID NO: 2428834 - RNA, 19 nt, Homo sapiens
  misc_RNA (1)...(19): siRNA sense strand
ugauucaggaggagcaaau

SEQ ID NO: 2428835 - RNA, 19 nt, Homo sapiens
  misc_RNA (1)...(19): siRNA sense strand
gucuagacuuacaaggaau

SEQ ID NO: 2428836 - RNA, 19 nt, Homo sapiens
  misc_RNA (1)...(19): siRNA sense strand
aagugaagaugaugaagca

SEQ ID NO: 2428837 - RNA, 19 nt, Homo sapiens
  misc_RNA (1)...(19): siRNA sense strand
ggguagagcugacugccau

SEQ ID NO: 2428838 - RNA, 19 nt, Homo sapiens
  misc_RNA (1)...(19): siRNA sense strand
guuaacuaccucaaagaau

SEQ ID NO: 2428839 - RNA, 19 nt, Homo sapiens
  misc_RNA (1)...(19): siRNA sense strand
acucagcagugaugauuau

SEQ ID NO: 2428840 - RNA, 19 nt, Homo sapiens
  misc_RNA (1)...(19): siRNA sense strand
cuauacuaucccagaagaa

SEQ ID NO: 2428841 - RNA, 19 nt, Homo sapiens
  misc_RNA (1)...(19): siRNA sense strand
gcaaugucuacguggcaau

SEQ ID NO: 2428842 - RNA, 19 nt, Homo sapiens
  misc_RNA (1)...(19): siRNA sense strand
gggaccagccuguacgcua

SEQ ID NO: 2428843 - RNA, 19 nt, Homo sapiens
  misc_RNA (1)...(19): siRNA sense strand
cagauuguacagaaagcua

SEQ ID NO: 2428844 - RNA, 19 nt, Homo sapiens
  misc_RNA (1)...(19): siRNA sense strand
aggaggaagaagaagaaau

SEQ ID NO: 2428845 - RNA, 19 nt, Homo sapiens
  misc_RNA (1)...(19): siRNA sense strand
agucgauacuggagcaaca

SEQ ID NO: 2428846 - RNA, 19 nt, Homo sapiens
  misc_RNA (1)...(19): siRNA sense strand
aaaauaaagaggaggaaga

SEQ ID NO: 2428847 - RNA, 19 nt, Homo sapiens
  misc_RNA (1)...(19): siRNA sense strand
augaaauaagagaggauga

SEQ ID NO: 2428848 - RNA, 19 nt, Homo sapiens
  misc_RNA (1)...(19): siRNA sense strand
aagaggaggaagaagaaga

SEQ ID NO: 2428849 - RNA, 19 nt, Homo sapiens
  misc_RNA (1)...(19): siRNA sense strand
ccaaaaguucauagaaaca

SEQ ID NO: 2428850 - RNA, 19 nt, Homo sapiens
  misc_RNA (1)...(19): siRNA sense strand
acacagagucagucagcca

SEQ ID NO: 2428851 - RNA, 19 nt, Homo sapiens
  misc_RNA (1)...(19): siRNA sense strand
gagauuuccuccucggaca

SEQ ID NO: 2428852 - RNA, 19 nt, Homo sapiens
  misc_RNA (1)...(19): siRNA sense strand
ccucaaacuaccuccaaca

SEQ ID NO: 2428853 - RNA, 19 nt, Homo sapiens
  misc_RNA (1)...(19): siRNA sense strand
aaauaagagaggaugaucu

SEQ ID NO: 2428854 - RNA, 19 nt, Homo sapiens
  misc_RNA (1)...(19): siRNA sense strand
gaacagucaccauccggaa

SEQ ID NO: 2428855 - RNA, 19 nt, Homo sapiens
  misc_RNA (1)...(19): siRNA sense strand
ccgcagaaugucagggaaa

SEQ ID NO: 2428856 - RNA, 19 nt, Homo sapiens
  misc_RNA (1)...(19): siRNA sense strand
gggaaaguuaggagaagaa

SEQ ID NO: 2428857 - RNA, 19 nt, Homo sapiens
  misc_RNA (1)...(19): siRNA sense strand
cggccaagccacugaacua

SEQ ID NO: 2428858 - RNA, 19 nt, Homo sapiens
  misc_RNA (1)...(19): siRNA sense strand
aagaagacgaccagaagaa

SEQ ID NO: 2428859 - RNA, 19 nt, Homo sapiens
  misc_RNA (1)...(19): siRNA sense strand
gcaacagcaaagaggacaa

SEQ ID NO: 2428860 - RNA, 19 nt, Homo sapiens
  misc_RNA (1)...(19): siRNA sense strand
aggaagaagacgaccagaa

SEQ ID NO: 2428861 - RNA, 19 nt, Homo sapiens
  misc_RNA (1)...(19): siRNA sense strand
acacuaagggccaggaaga

SEQ ID NO: 2428862 - RNA, 19 nt, Homo sapiens
  misc_RNA (1)...(19): siRNA sense strand
ucauaguaaugcugaucaa

SEQ ID NO: 2428863 - RNA, 19 nt, Homo sapiens
  misc_RNA (1)...(19): siRNA sense strand
cagaagaaccaggccgaaa

SEQ ID NO: 2428864 - RNA, 19 nt, Homo sapiens
  misc_RNA (1)...(19): siRNA sense strand
uggcugaacccuugaaaca

SEQ ID NO: 2428865 - RNA, 19 nt, Homo sapiens
  misc_RNA (1)...(19): siRNA sense strand
cugaacagacuaaaggcaa

SEQ ID NO: 2428866 - RNA, 19 nt, Homo sapiens
  misc_RNA (1)...(19): siRNA sense strand
ggaggaaagaacugcugaa

SEQ ID NO: 2428867 - RNA, 19 nt, Homo sapiens
  misc_RNA (1)...(19): siRNA sense strand
agaaccaggccgaaaggaa

SEQ ID NO: 2428868 - RNA, 19 nt, Homo sapiens
  misc_RNA (1)...(19): siRNA sense strand
ugaaauggaaacucagaau

SEQ ID NO: 2428869 - RNA, 19 nt, Homo sapiens
  misc_RNA (1)...(19): siRNA sense strand
gcaaauuugaggauagcca

SEQ ID NO: 2428870 - RNA, 19 nt, Homo sapiens
  misc_RNA (1)...(19): siRNA sense strand
ccugcaaauuugaggauag

SEQ ID NO: 2428871 - RNA, 19 nt, Homo sapiens
  misc_RNA (1)...(19): siRNA sense strand
agggaaaguuaggagaaga

SEQ ID NO: 2428872 - RNA, 19 nt, Homo sapiens
  misc_RNA (1)...(19): siRNA sense strand
acagcaaagaggacaaaga

SEQ ID NO: 2428873 - RNA, 19 nt, Homo sapiens
  misc_RNA (1)...(19): siRNA sense strand
agaaugucagggaaaguua

SEQ ID NO: 2428874 - RNA, 19 nt, Homo sapiens
  misc_RNA (1)...(19): siRNA sense strand
aggacaaagaggcugacua

SEQ ID NO: 2428875 - RNA, 19 nt, Homo sapiens
  misc_RNA (1)...(19): siRNA sense strand
gccgaaaggaaggcagaua

SEQ ID NO: 2428876 - RNA, 19 nt, Homo sapiens
  misc_RNA (1)...(19): siRNA sense strand
aggcaaggcaucuagccaa

SEQ ID NO: 2428877 - RNA, 19 nt, Homo sapiens
  misc_RNA (1)...(19): siRNA sense strand
ccaaacuaucugagagaag

SEQ ID NO: 2428878 - RNA, 19 nt, Homo sapiens
  misc_RNA (1)...(19): siRNA sense strand
ggguuaucauauacgcaau

SEQ ID NO: 2428879 - RNA, 19 nt, Homo sapiens
  misc_RNA (1)...(19): siRNA sense strand
aggaaagaacugcugaaca

SEQ ID NO: 2428880 - RNA, 19 nt, Homo sapiens
  misc_RNA (1)...(19): siRNA sense strand
acagacugaacgaagauua

SEQ ID NO: 2428881 - RNA, 19 nt, Homo sapiens
  misc_RNA (1)...(19): siRNA sense strand
ucagggaaaguuaggagaa

SEQ ID NO: 2428882 - RNA, 19 nt, Homo sapiens
  misc_RNA (1)...(19): siRNA sense strand
auggaaacucagaaugcaa

SEQ ID NO: 2428883 - RNA, 19 nt, Homo sapiens
  misc_RNA (1)...(19): siRNA sense strand
ccaccaaguguacggccaa

SEQ ID NO: 2428884 - RNA, 19 nt, Homo sapiens
  misc_RNA (1)...(19): siRNA sense strand
cagcaugaacagagugaug

SEQ ID NO: 2428885 - RNA, 19 nt, Homo sapiens
  misc_RNA (1)...(19): siRNA sense strand
ccaacggaguagcugaaca

SEQ ID NO: 2428886 - RNA, 19 nt, Homo sapiens
  misc_RNA (1)...(19): siRNA sense strand
gaaaguuaggagaagaagu

SEQ ID NO: 2428887 - RNA, 19 nt, Homo sapiens
  misc_RNA (1)...(19): siRNA sense strand
cagcugucuuacuaugaaa

SEQ ID NO: 2428888 - RNA, 19 nt, Homo sapiens
  misc_RNA (1)...(19): siRNA sense strand
guacagauugacaguggau

SEQ ID NO: 2428889 - RNA, 19 nt, Homo sapiens
  misc_RNA (1)...(19): siRNA sense strand
acucagaaugcaaccacua

SEQ ID NO: 2428890 - RNA, 19 nt, Homo sapiens
  misc_RNA (1)...(19): siRNA sense strand
agcuaauaauguacagcau

SEQ ID NO: 2428891 - RNA, 19 nt, Homo sapiens
  misc_RNA (1)...(19): siRNA sense strand
cagucugagagaagagcuu

SEQ ID NO: 2428892 - RNA, 19 nt, Homo sapiens
  misc_RNA (1)...(19): siRNA sense strand
ggcggaaagcggaggaacu

SEQ ID NO: 2428893 - RNA, 19 nt, Homo sapiens
  misc_RNA (1)...(19): siRNA sense strand
agaaggaccaccaggaaaa

SEQ ID NO: 2428894 - RNA, 19 nt, Homo sapiens
  misc_RNA (1)...(19): siRNA sense strand
cauggugcccagagaggaa

SEQ ID NO: 2428895 - RNA, 19 nt, Homo sapiens
  misc_RNA (1)...(19): siRNA sense strand
gugacaaggacuagagggu

SEQ ID NO: 2428896 - RNA, 19 nt, Homo sapiens
  misc_RNA (1)...(19): siRNA sense strand
gcucagacauccagggacg

SEQ ID NO: 2428897 - RNA, 19 nt, Homo sapiens
  misc_RNA (1)...(19): siRNA sense strand
cggugaaauugguuggaga

SEQ ID NO: 2428898 - RNA, 19 nt, Homo sapiens
  misc_RNA (1)...(19): siRNA sense strand
agaaauuccaaaugggcua

SEQ ID NO: 2428899 - RNA, 19 nt, Homo sapiens
  misc_RNA (1)...(19): siRNA sense strand
auucaauaacccacagaua

SEQ ID NO: 2428900 - RNA, 19 nt, Homo sapiens
  misc_RNA (1)...(19): siRNA sense strand
aggacacugaucagagaaa

SEQ ID NO: 2428901 - RNA, 19 nt, Homo sapiens
  misc_RNA (1)...(19): siRNA sense strand
gagaacagcaucuggcguu

SEQ ID NO: 2428902 - RNA, 19 nt, Homo sapiens
  misc_RNA (1)...(19): siRNA sense strand
aaucaagacuggagagugg

SEQ ID NO: 2428903 - RNA, 19 nt, Homo sapiens
  misc_RNA (1)...(19): siRNA sense strand
cuauguaggagaacagcau

SEQ ID NO: 2428904 - RNA, 19 nt, Homo sapiens
  misc_RNA (1)...(19): siRNA sense strand
gugaaauugguuggagaau

SEQ ID NO: 2428905 - RNA, 19 nt, Homo sapiens
  misc_RNA (1)...(19): siRNA sense strand
gggcuauucuuguuaggca

SEQ ID NO: 2428906 - RNA, 19 nt, Homo sapiens
  misc_RNA (1)...(19): siRNA sense strand
aguaugaagaacuaaguca

SEQ ID NO: 2428907 - RNA, 19 nt, Homo sapiens
  misc_RNA (1)...(19): siRNA sense strand
acauaaguacgucggugaa

SEQ ID NO: 2428908 - RNA, 19 nt, Homo sapiens
  misc_RNA (1)...(19): siRNA sense strand
gagaaaaggcugagcgugu

SEQ ID NO: 2428909 - RNA, 19 nt, Homo sapiens
  misc_RNA (1)...(19): siRNA sense strand
ucauuaaagaagugggcuu

SEQ ID NO: 2428910 - RNA, 19 nt, Homo sapiens
  misc_RNA (1)...(19): siRNA sense strand
aguuagaggaagaugcaau

SEQ ID NO: 2428911 - RNA, 19 nt, Homo sapiens
  misc_RNA (1)...(19): siRNA sense strand
agacacuguggaagacaaa

SEQ ID NO: 2428912 - RNA, 19 nt, Homo sapiens
  misc_RNA (1)...(19): siRNA sense strand
ccaacgagcuggacacgga

SEQ ID NO: 2428913 - RNA, 19 nt, Homo sapiens
  misc_RNA (1)...(19): siRNA sense strand
ccaaguugugaaugggaga

SEQ ID NO: 2428914 - RNA, 19 nt, Homo sapiens
  misc_RNA (1)...(19): siRNA sense strand
caaagcaaccggaagcgaa

SEQ ID NO: 2428915 - RNA, 19 nt, Homo sapiens
  misc_RNA (1)...(19): siRNA sense strand
ccugauguugauugguuaa

SEQ ID NO: 2428916 - RNA, 19 nt, Homo sapiens
  misc_RNA (1)...(19): siRNA sense strand
cccugauguugauugguua

SEQ ID NO: 2428917 - RNA, 19 nt, Homo sapiens
  misc_RNA (1)...(19): siRNA sense strand
cggaagcgaaacagagacu

SEQ ID NO: 2428918 - RNA, 19 nt, Homo sapiens
  misc_RNA (1)...(19): siRNA sense strand
ggguaagggugaugccuag

SEQ ID NO: 2428919 - RNA, 19 nt, Homo sapiens
  misc_RNA (1)...(19): siRNA sense strand
ugggaaauggccagaagau

SEQ ID NO: 2428920 - RNA, 19 nt, Homo sapiens
  misc_RNA (1)...(19): siRNA sense strand
gcgguuggcuugucgcgaa

SEQ ID NO: 2428921 - RNA, 19 nt, Homo sapiens
  misc_RNA (1)...(19): siRNA sense strand
cugcaugaucacaggagca

SEQ ID NO: 2428922 - RNA, 19 nt, Homo sapiens
  misc_RNA (1)...(19): siRNA sense strand
cagagaaagaggaagaaaa

SEQ ID NO: 2428923 - RNA, 19 nt, Homo sapiens
  misc_RNA (1)...(19): siRNA sense strand
aggaagaaaaccaggagaa

SEQ ID NO: 2428924 - RNA, 19 nt, Homo sapiens
  misc_RNA (1)...(19): siRNA sense strand
gagcagaaguauugggagg

SEQ ID NO: 2428925 - RNA, 19 nt, Homo sapiens
  misc_RNA (1)...(19): siRNA sense strand
auacugagauccucggcua

SEQ ID NO: 2428926 - RNA, 19 nt, Homo sapiens
  misc_RNA (1)...(19): siRNA sense strand
ugaccugugcagagaaaga

SEQ ID NO: 2428927 - RNA, 19 nt, Homo sapiens
  misc_RNA (1)...(19): siRNA sense strand
cugaggacaaugacagcaa

SEQ ID NO: 2428928 - RNA, 19 nt, Homo sapiens
  misc_RNA (1)...(19): siRNA sense strand
cucgaaggcagcaaagaaa

SEQ ID NO: 2428929 - RNA, 19 nt, Homo sapiens
  misc_RNA (1)...(19): siRNA sense strand
gccaaggaagccagagaga

SEQ ID NO: 2428930 - RNA, 19 nt, Homo sapiens
  misc_RNA (1)...(19): siRNA sense strand
ggaagaaaaccaggagaau

SEQ ID NO: 2428931 - RNA, 19 nt, Homo sapiens
  misc_RNA (1)...(19): siRNA sense strand
agaaagaggaagaaaacca

SEQ ID NO: 2428932 - RNA, 19 nt, Homo sapiens
  misc_RNA (1)...(19): siRNA sense strand
ugcaagucacugaggacaa

SEQ ID NO: 2428933 - RNA, 19 nt, Homo sapiens
  misc_RNA (1)...(19): siRNA sense strand
ugaagagcaagaugagaca

SEQ ID NO: 2428934 - RNA, 19 nt, Homo sapiens
  misc_RNA (1)...(19): siRNA sense strand
ccaucgagccugugcagca

SEQ ID NO: 2428935 - RNA, 19 nt, Homo sapiens
  misc_RNA (1)...(19): siRNA sense strand
caaggaagccagagagagc

SEQ ID NO: 2428936 - RNA, 19 nt, Homo sapiens
  misc_RNA (1)...(19): siRNA sense strand
gcaaagaaaauguggagcu

SEQ ID NO: 2428937 - RNA, 19 nt, Homo sapiens
  misc_RNA (1)...(19): siRNA sense strand
aagaaaauguggagcuacu

SEQ ID NO: 2428938 - RNA, 19 nt, Homo sapiens
  misc_RNA (1)...(19): siRNA sense strand
aaagagaacugaaggcaga

SEQ ID NO: 2428939 - RNA, 19 nt, Homo sapiens
  misc_RNA (1)...(19): siRNA sense strand
ucguaaagaacaacagcaa

SEQ ID NO: 2428940 - RNA, 19 nt, Homo sapiens
  misc_RNA (1)...(19): siRNA sense strand
aaacaagaguugaaggaag

SEQ ID NO: 2428941 - RNA, 19 nt, Homo sapiens
  misc_RNA (1)...(19): siRNA sense strand
ccaauagaugauaucgaaa

SEQ ID NO: 2428942 - RNA, 19 nt, Homo sapiens
  misc_RNA (1)...(19): siRNA sense strand
aguugaaggaagcaguaaa

SEQ ID NO: 2428943 - RNA, 19 nt, Homo sapiens
  misc_RNA (1)...(19): siRNA sense strand
gguucaacuccaccaguaa

SEQ ID NO: 2428944 - RNA, 19 nt, Homo sapiens
  misc_RNA (1)...(19): siRNA sense strand
gccaaauauagaagguuca

SEQ ID NO: 2428945 - RNA, 19 nt, Homo sapiens
  misc_RNA (1)...(19): siRNA sense strand
guugaaggaagcaguaaaa

SEQ ID NO: 2428946 - RNA, 19 nt, Homo sapiens
  misc_RNA (1)...(19): siRNA sense strand
agaugauaucgaaagagaa

SEQ ID NO: 2428947 - RNA, 19 nt, Homo sapiens
  misc_RNA (1)...(19): siRNA sense strand
ugaccauaacucugccaaa

SEQ ID NO: 2428948 - RNA, 19 nt, Homo sapiens
  misc_RNA (1)...(19): siRNA sense strand
ugaaggaagcaguaaaauu

SEQ ID NO: 2428949 - RNA, 19 nt, Homo sapiens
  misc_RNA (1)...(19): siRNA sense strand
cagcaacaucacuguaaaa

SEQ ID NO: 2428950 - RNA, 19 nt, Homo sapiens
  misc_RNA (1)...(19): siRNA sense strand
gcuacaaccgcgugggcau

SEQ ID NO: 2428951 - RNA, 19 nt, Homo sapiens
  misc_RNA (1)...(19): siRNA sense strand
cguuggaccucacuggcaa

SEQ ID NO: 2428952 - RNA, 19 nt, Homo sapiens
  misc_RNA (1)...(19): siRNA sense strand
agccaaagaauuagagaau

SEQ ID NO: 2428953 - RNA, 19 nt, Homo sapiens
  misc_RNA (1)...(19): siRNA sense strand
ugucaguagauguggcaaa

SEQ ID NO: 2428954 - RNA, 19 nt, Homo sapiens
  misc_RNA (1)...(19): siRNA sense strand
aagcuaaggagaaggagaa

SEQ ID NO: 2428955 - RNA, 19 nt, Homo sapiens
  misc_RNA (1)...(19): siRNA sense strand
gcuuagaagaaaagggaga

SEQ ID NO: 2428956 - RNA, 19 nt, Homo sapiens
  misc_RNA (1)...(19): siRNA sense strand
agaaaagggagaagaauuu

SEQ ID NO: 2428957 - RNA, 19 nt, Homo sapiens
  misc_RNA (1)...(19): siRNA sense strand
agaccauagaggaaguaua

SEQ ID NO: 2428958 - RNA, 19 nt, Homo sapiens
  misc_RNA (1)...(19): siRNA sense strand
gguucaaaacacagguaaa

SEQ ID NO: 2428959 - RNA, 19 nt, Homo sapiens
  misc_RNA (1)...(19): siRNA sense strand
ugucuuaacuggaggccuu

SEQ ID NO: 2428960 - RNA, 19 nt, Homo sapiens
  misc_RNA (1)...(19): siRNA sense strand
cguuggaauucaucggcaa

SEQ ID NO: 2428961 - RNA, 19 nt, Homo sapiens
  misc_RNA (1)...(19): siRNA sense strand
cagccaaagaauuagagaa

SEQ ID NO: 2428962 - RNA, 19 nt, Homo sapiens
  misc_RNA (1)...(19): siRNA sense strand
agaagaaaagggagaagaa

SEQ ID NO: 2428963 - RNA, 19 nt, Homo sapiens
  misc_RNA (1)...(19): siRNA sense strand
aagaaaagggagaagaauu

SEQ ID NO: 2428964 - RNA, 19 nt, Homo sapiens
  misc_RNA (1)...(19): siRNA sense strand
uguccgaagaagaaacaaa

SEQ ID NO: 2428965 - RNA, 19 nt, Homo sapiens
  misc_RNA (1)...(19): siRNA sense strand
aacuaagaccauagaggaa

SEQ ID NO: 2428966 - RNA, 19 nt, Homo sapiens
  misc_RNA (1)...(19): siRNA sense strand
ccauagaggaaguauacau

SEQ ID NO: 2428967 - RNA, 19 nt, Homo sapiens
  misc_RNA (1)...(19): siRNA sense strand
caugaauguccuugcagaa

SEQ ID NO: 2428968 - RNA, 19 nt, Homo sapiens
  misc_RNA (1)...(19): siRNA sense strand
gaagcuaaggagaaggaga

SEQ ID NO: 2428969 - RNA, 19 nt, Homo sapiens
  misc_RNA (1)...(19): siRNA sense strand
ccacaguaggucauggauu

SEQ ID NO: 2428970 - RNA, 19 nt, Homo sapiens
  misc_RNA (1)...(19): siRNA sense strand
aggaagaaaaggaagagaa

SEQ ID NO: 2428971 - RNA, 19 nt, Homo sapiens
  misc_RNA (1)...(19): siRNA sense strand
aagaaacaaagaaggaaga

SEQ ID NO: 2428972 - RNA, 19 nt, Homo sapiens
  misc_RNA (1)...(19): siRNA sense strand
cuaaggagaaggagaagca

SEQ ID NO: 2428973 - RNA, 19 nt, Homo sapiens
  misc_RNA (1)...(19): siRNA sense strand
aagaaaaggaagagaaauc

SEQ ID NO: 2428974 - RNA, 19 nt, Homo sapiens
  misc_RNA (1)...(19): siRNA sense strand
cugaaggagcccaaccaaa

SEQ ID NO: 2428975 - RNA, 19 nt, Homo sapiens
  misc_RNA (1)...(19): siRNA sense strand
ucucagauguuaagggaag

SEQ ID NO: 2428976 - RNA, 19 nt, Homo sapiens
  misc_RNA (1)...(19): siRNA sense strand
acggauucaugguguaaau

SEQ ID NO: 2428977 - RNA, 19 nt, Homo sapiens
  misc_RNA (1)...(19): siRNA sense strand
gaagaaacaaagaaggaag

SEQ ID NO: 2428978 - RNA, 19 nt, Homo sapiens
  misc_RNA (1)...(19): siRNA sense strand
gcuucauaaaguagcagaa

SEQ ID NO: 2428979 - RNA, 19 nt, Homo sapiens
  misc_RNA (1)...(19): siRNA sense strand
ggaccaagcaaaaguucua

SEQ ID NO: 2428980 - RNA, 19 nt, Homo sapiens
  misc_RNA (1)...(19): siRNA sense strand
agaaggagaagcagagacu

SEQ ID NO: 2428981 - RNA, 19 nt, Homo sapiens
  misc_RNA (1)...(19): siRNA sense strand
caaaaguguccgaagaaga

SEQ ID NO: 2428982 - RNA, 19 nt, Homo sapiens
  misc_RNA (1)...(19): siRNA sense strand
agaaggaagaaaaggaaga

SEQ ID NO: 2428983 - RNA, 19 nt, Homo sapiens
  misc_RNA (1)...(19): siRNA sense strand
ucauggacaagaagaggaa

SEQ ID NO: 2428984 - RNA, 19 nt, Homo sapiens
  misc_RNA (1)...(19): siRNA sense strand
auggacaagaagaggaaaa

SEQ ID NO: 2428985 - RNA, 19 nt, Homo sapiens
  misc_RNA (1)...(19): siRNA sense strand
guguauuguuagagggcug

SEQ ID NO: 2428986 - RNA, 19 nt, Homo sapiens
  misc_RNA (1)...(19): siRNA sense strand
guucaaaacacagguaaaa

SEQ ID NO: 2428987 - RNA, 19 nt, Homo sapiens
  misc_RNA (1)...(19): siRNA sense strand
uggcaaaaguguccgaaga

SEQ ID NO: 2428988 - RNA, 19 nt, Homo sapiens
  misc_RNA (1)...(19): siRNA sense strand
ccgaaauaccccugcaaga

SEQ ID NO: 2428989 - RNA, 19 nt, Homo sapiens
  misc_RNA (1)...(19): siRNA sense strand
gaaaagaaaacuaagacca

SEQ ID NO: 2428990 - RNA, 19 nt, Homo sapiens
  misc_RNA (1)...(19): siRNA sense strand
acaagaaggccgagguccu

SEQ ID NO: 2428991 - RNA, 19 nt, Homo sapiens
  misc_RNA (1)...(19): siRNA sense strand
aauaacagaugcagccaca

SEQ ID NO: 2428992 - RNA, 19 nt, Homo sapiens
  misc_RNA (1)...(19): siRNA sense strand
ccaugaauguccuugcaga

SEQ ID NO: 2428993 - RNA, 19 nt, Homo sapiens
  misc_RNA (1)...(19): siRNA sense strand
cagcucaggaccaagcaaa

SEQ ID NO: 2428994 - RNA, 19 nt, Homo sapiens
  misc_RNA (1)...(19): siRNA sense strand
gagacaaagcagaaguuac

SEQ ID NO: 2428995 - RNA, 19 nt, Homo sapiens
  misc_RNA (1)...(19): siRNA sense strand
gggaagcuaaggagaagga

SEQ ID NO: 2428996 - RNA, 19 nt, Homo sapiens
  misc_RNA (1)...(19): siRNA sense strand
gccuugaugcguuggaauu

SEQ ID NO: 2428997 - RNA, 19 nt, Homo sapiens
  misc_RNA (1)...(19): siRNA sense strand
agauguuaagggaagcuaa

SEQ ID NO: 2428998 - RNA, 19 nt, Homo sapiens
  misc_RNA (1)...(19): siRNA sense strand
cccugcaagaacagaauua

SEQ ID NO: 2428999 - RNA, 19 nt, Homo sapiens
  misc_RNA (1)...(19): siRNA sense strand
aagaacaaggcuuagaaga

SEQ ID NO: 2429000 - RNA, 19 nt, Homo sapiens
  misc_RNA (1)...(19): siRNA sense strand
ggaucaaaccgugguguca

SEQ ID NO: 2429001 - RNA, 19 nt, Homo sapiens
  misc_RNA (1)...(19): siRNA sense strand
ugguguaaauucuggaucu

SEQ ID NO: 2429002 - RNA, 19 nt, Homo sapiens
  misc_RNA (1)...(19): siRNA sense strand
agaagaaacaaagaaggaa

SEQ ID NO: 2429003 - RNA, 19 nt, Homo sapiens
  misc_RNA (1)...(19): siRNA sense strand
caaagaaggaagaaaagga

SEQ ID NO: 2429004 - RNA, 19 nt, Homo sapiens
  misc_RNA (1)...(19): siRNA sense strand
cugagaugccuaauaguga

SEQ ID NO: 2429005 - RNA, 19 nt, Homo sapiens
  misc_RNA (1)...(19): siRNA sense strand
cuaagaccauagaggaagu

SEQ ID NO: 2429006 - RNA, 19 nt, Homo sapiens
  misc_RNA (1)...(19): siRNA sense strand
aaggagaaggagaagcaga

SEQ ID NO: 2429007 - RNA, 19 nt, Homo sapiens
  misc_RNA (1)...(19): siRNA sense strand
uggagagaaccgcgcacua

SEQ ID NO: 2429008 - RNA, 19 nt, Homo sapiens
  misc_RNA (1)...(19): siRNA sense strand
ccgaaugcuggaugagaaa

SEQ ID NO: 2429009 - RNA, 19 nt, Homo sapiens
  misc_RNA (1)...(19): siRNA sense strand
ucacagugcuggagugcga

SEQ ID NO: 2429010 - RNA, 19 nt, Homo sapiens
  misc_RNA (1)...(19): siRNA sense strand
gagcaagagcugauggaac

SEQ ID NO: 2429011 - RNA, 19 nt, Homo sapiens
  misc_RNA (1)...(19): siRNA sense strand
aggcgguggcuccgagaua

SEQ ID NO: 2429012 - RNA, 19 nt, Homo sapiens
  misc_RNA (1)...(19): siRNA sense strand
ugauggaacagcuggaaca

SEQ ID NO: 2429013 - RNA, 19 nt, Homo sapiens
  misc_RNA (1)...(19): siRNA sense strand
ggagcaaucuucaucgaca

SEQ ID NO: 2429014 - RNA, 19 nt, Homo sapiens
  misc_RNA (1)...(19): siRNA sense strand
agugggaacuggaucgaga

SEQ ID NO: 2429015 - RNA, 19 nt, Homo sapiens
  misc_RNA (1)...(19): siRNA sense strand
gagaggaguuggaucgauc

SEQ ID NO: 2429016 - RNA, 19 nt, Homo sapiens
  misc_RNA (1)...(19): siRNA sense strand
ggacgcaucucgacgcuga

SEQ ID NO: 2429017 - RNA, 19 nt, Homo sapiens
  misc_RNA (1)...(19): siRNA sense strand
ccuuuaagauccuggcucu

SEQ ID NO: 2429018 - RNA, 19 nt, Homo sapiens
  misc_RNA (1)...(19): siRNA sense strand
cggcugcagugcuggcaau

SEQ ID NO: 2429019 - RNA, 19 nt, Homo sapiens
  misc_RNA (1)...(19): siRNA sense strand
cucccaagaugaagcucaa

SEQ ID NO: 2429020 - RNA, 19 nt, Homo sapiens
  misc_RNA (1)...(19): siRNA sense strand
gugggaggcaagagauuca

SEQ ID NO: 2429021 - RNA, 19 nt, Homo sapiens
  misc_RNA (1)...(19): siRNA sense strand
ccuuguucuucgucgggaa

SEQ ID NO: 2429022 - RNA, 19 nt, Homo sapiens
  misc_RNA (1)...(19): siRNA sense strand
cauucauacuggagagaaa

SEQ ID NO: 2429023 - RNA, 19 nt, Homo sapiens
  misc_RNA (1)...(19): siRNA sense strand
aauucauaccggagagaaa

SEQ ID NO: 2429024 - RNA, 19 nt, Homo sapiens
  misc_RNA (1)...(19): siRNA sense strand
gaaagcaaauauugggaca

SEQ ID NO: 2429025 - RNA, 19 nt, Homo sapiens
  misc_RNA (1)...(19): siRNA sense strand
aauucaugccggugagaaa

SEQ ID NO: 2429026 - RNA, 19 nt, Homo sapiens
  misc_RNA (1)...(19): siRNA sense strand
auguaaugaauguggcaaa

SEQ ID NO: 2429027 - RNA, 19 nt, Homo sapiens
  misc_RNA (1)...(19): siRNA sense strand
auguaaugaauguggcaaa

SEQ ID NO: 2429028 - RNA, 19 nt, Homo sapiens
  misc_RNA (1)...(19): siRNA sense strand
gugugaugaaugugacaaa

SEQ ID NO: 2429029 - RNA, 19 nt, Homo sapiens
  misc_RNA (1)...(19): siRNA sense strand
guagaaaggaugaugcaca

SEQ ID NO: 2429030 - RNA, 19 nt, Homo sapiens
  misc_RNA (1)...(19): siRNA sense strand
cuaguaaaucacuggagaa

SEQ ID NO: 2429031 - RNA, 19 nt, Homo sapiens
  misc_RNA (1)...(19): siRNA sense strand
cuaguaaaucacuggagaa

SEQ ID NO: 2429032 - RNA, 19 nt, Homo sapiens
  misc_RNA (1)...(19): siRNA sense strand
uugcacaacaucagagaau

SEQ ID NO: 2429033 - RNA, 19 nt, Homo sapiens
  misc_RNA (1)...(19): siRNA sense strand
uggcaagaucuucaauaaa

SEQ ID NO: 2429034 - RNA, 19 nt, Homo sapiens
  misc_RNA (1)...(19): siRNA sense strand
uggcaaagucuucagucaa

SEQ ID NO: 2429035 - RNA, 19 nt, Homo sapiens
  misc_RNA (1)...(19): siRNA sense strand
ccuuauaagugugaugaau

SEQ ID NO: 2429036 - RNA, 19 nt, Homo sapiens
  misc_RNA (1)...(19): siRNA sense strand
gcaaauauugggacagaac

SEQ ID NO: 2429037 - RNA, 19 nt, Homo sapiens
  misc_RNA (1)...(19): siRNA sense strand
uggcaaggccuuucaucaa

SEQ ID NO: 2429038 - RNA, 19 nt, Homo sapiens
  misc_RNA (1)...(19): siRNA sense strand
ccuagcacaucaucggaaa

SEQ ID NO: 2429039 - RNA, 19 nt, Homo sapiens
  misc_RNA (1)...(19): siRNA sense strand
uggcaaggucuuuaaucaa

SEQ ID NO: 2429040 - RNA, 19 nt, Homo sapiens
  misc_RNA (1)...(19): siRNA sense strand
guggcaaagucuucaguca

SEQ ID NO: 2429041 - RNA, 19 nt, Homo sapiens
  misc_RNA (1)...(19): siRNA sense strand
ccuaguaaaucacuggaga

SEQ ID NO: 2429042 - RNA, 19 nt, Homo sapiens
  misc_RNA (1)...(19): siRNA sense strand
ccuaguaaaucacuggaga

SEQ ID NO: 2429043 - RNA, 19 nt, Homo sapiens
  misc_RNA (1)...(19): siRNA sense strand
auucauaucuuguacguca

SEQ ID NO: 2429044 - RNA, 19 nt, Homo sapiens
  misc_RNA (1)...(19): siRNA sense strand
augugaugaauguggcaaa

SEQ ID NO: 2429045 - RNA, 19 nt, Homo sapiens
  misc_RNA (1)...(19): siRNA sense strand
ggacaauucauacuggaga

SEQ ID NO: 2429046 - RNA, 19 nt, Homo sapiens
  misc_RNA (1)...(19): siRNA sense strand
cggaaagaaaucuaacaca

SEQ ID NO: 2429047 - RNA, 19 nt, Homo sapiens
  misc_RNA (1)...(19): siRNA sense strand
uaguaaaucacuggagaau

SEQ ID NO: 2429048 - RNA, 19 nt, Homo sapiens
  misc_RNA (1)...(19): siRNA sense strand
uaguaaaucacuggagaau

SEQ ID NO: 2429049 - RNA, 19 nt, Homo sapiens
  misc_RNA (1)...(19): siRNA sense strand
agauguaauguauguggaa

SEQ ID NO: 2429050 - RNA, 19 nt, Homo sapiens
  misc_RNA (1)...(19): siRNA sense strand
uggagagaaaccauauaaa

SEQ ID NO: 2429051 - RNA, 19 nt, Homo sapiens
  misc_RNA (1)...(19): siRNA sense strand
auacuaaagagacgcaauu

SEQ ID NO: 2429052 - RNA, 19 nt, Homo sapiens
  misc_RNA (1)...(19): siRNA sense strand
aauucauacuggagagaag

SEQ ID NO: 2429053 - RNA, 19 nt, Homo sapiens
  misc_RNA (1)...(19): siRNA sense strand
ccaucaaauuucacaccuu

SEQ ID NO: 2429054 - RNA, 19 nt, Homo sapiens
  misc_RNA (1)...(19): siRNA sense strand
gcugaagggaaaauauaua

SEQ ID NO: 2429055 - RNA, 19 nt, Homo sapiens
  misc_RNA (1)...(19): siRNA sense strand
gaauguaacaaauguggca

SEQ ID NO: 2429056 - RNA, 19 nt, Homo sapiens
  misc_RNA (1)...(19): siRNA sense strand
gggacagaacacuacaaau

SEQ ID NO: 2429057 - RNA, 19 nt, Homo sapiens
  misc_RNA (1)...(19): siRNA sense strand
uugcacaacaucaaagaau

SEQ ID NO: 2429058 - RNA, 19 nt, Homo sapiens
  misc_RNA (1)...(19): siRNA sense strand
cauacuaaagagacgcaau

SEQ ID NO: 2429059 - RNA, 19 nt, Homo sapiens
  misc_RNA (1)...(19): siRNA sense strand
uugcaagucaucaaagaau

SEQ ID NO: 2429060 - RNA, 19 nt, Homo sapiens
  misc_RNA (1)...(19): siRNA sense strand
ggaauaaccaggaacguca

SEQ ID NO: 2429061 - RNA, 19 nt, Homo sapiens
  misc_RNA (1)...(19): siRNA sense strand
gagcaaaggaaccugguca

SEQ ID NO: 2429062 - RNA, 19 nt, Homo sapiens
  misc_RNA (1)...(19): siRNA sense strand
cuuucuacuacgugggcaa

SEQ ID NO: 2429063 - RNA, 19 nt, Homo sapiens
  misc_RNA (1)...(19): siRNA sense strand
aaucaaagcuaucgagagc

SEQ ID NO: 2429064 - RNA, 19 nt, Homo sapiens
  misc_RNA (1)...(19): siRNA sense strand
guaagaaagccgugggcaa

SEQ ID NO: 2429065 - RNA, 19 nt, Homo sapiens
  misc_RNA (1)...(19): siRNA sense strand
gccuugaagaagaggacaa

SEQ ID NO: 2429066 - RNA, 19 nt, Homo sapiens
  misc_RNA (1)...(19): siRNA sense strand
acaagaaagcagaggagag

SEQ ID NO: 2429067 - RNA, 19 nt, Homo sapiens
  misc_RNA (1)...(19): siRNA sense strand
aggagagagccaagaucau

SEQ ID NO: 2429068 - RNA, 19 nt, Homo sapiens
  misc_RNA (1)...(19): siRNA sense strand
ccuugaagaagaggacaaa

SEQ ID NO: 2429069 - RNA, 19 nt, Homo sapiens
  misc_RNA (1)...(19): siRNA sense strand
aagaagaggacaaaagaca

SEQ ID NO: 2429070 - RNA, 19 nt, Homo sapiens
  misc_RNA (1)...(19): siRNA sense strand
cccugauggccuugaagaa

SEQ ID NO: 2429071 - RNA, 19 nt, Homo sapiens
  misc_RNA (1)...(19): siRNA sense strand
acuuugacccugaggacuu

SEQ ID NO: 2429072 - RNA, 19 nt, Homo sapiens
  misc_RNA (1)...(19): siRNA sense strand
gaaccugacugacgaggca

SEQ ID NO: 2429073 - RNA, 19 nt, Homo sapiens
  misc_RNA (1)...(19): siRNA sense strand
ccugaggacuugaaccuga

SEQ ID NO: 2429074 - RNA, 19 nt, Homo sapiens
  misc_RNA (1)...(19): siRNA sense strand
cagaaggagaaccgggaaa

SEQ ID NO: 2429075 - RNA, 19 nt, Homo sapiens
  misc_RNA (1)...(19): siRNA sense strand
gcaaauuucugaagggaag

SEQ ID NO: 2429076 - RNA, 19 nt, Homo sapiens
  misc_RNA (1)...(19): siRNA sense strand
agguagacuucgacaucaa

SEQ ID NO: 2429077 - RNA, 19 nt, Homo sapiens
  misc_RNA (1)...(19): siRNA sense strand
ccugaaaagcaaagaaaca

SEQ ID NO: 2429078 - RNA, 19 nt, Homo sapiens
  misc_RNA (1)...(19): siRNA sense strand
guguagagaucaaugagga

SEQ ID NO: 2429079 - RNA, 19 nt, Homo sapiens
  misc_RNA (1)...(19): siRNA sense strand
uguagagaucaaugaggaa

SEQ ID NO: 2429080 - RNA, 19 nt, Homo sapiens
  misc_RNA (1)...(19): siRNA sense strand
gcguauugagggacugaau

SEQ ID NO: 2429081 - RNA, 19 nt, Homo sapiens
  misc_RNA (1)...(19): siRNA sense strand
cgcaaauuucugaagggaa

SEQ ID NO: 2429082 - RNA, 19 nt, Homo sapiens
  misc_RNA (1)...(19): siRNA sense strand
uagagaucaaugaggaaau

SEQ ID NO: 2429083 - RNA, 19 nt, Homo sapiens
  misc_RNA (1)...(19): siRNA sense strand
caucaggaggccaggcgaa

SEQ ID NO: 2429084 - RNA, 19 nt, Homo sapiens
  misc_RNA (1)...(19): siRNA sense strand
aaucagagucagaacccaa

SEQ ID NO: 2429085 - RNA, 19 nt, Homo sapiens
  misc_RNA (1)...(19): siRNA sense strand
cgucaggaacaacgcaaau

SEQ ID NO: 2429086 - RNA, 19 nt, Homo sapiens
  misc_RNA (1)...(19): siRNA sense strand
ucaaagaguuuauggacug

SEQ ID NO: 2429087 - RNA, 19 nt, Homo sapiens
  misc_RNA (1)...(19): siRNA sense strand
cuggaaagugccaagucaa

SEQ ID NO: 2429088 - RNA, 19 nt, Homo sapiens
  misc_RNA (1)...(19): siRNA sense strand
acucaggcaaggagcagaa

SEQ ID NO: 2429089 - RNA, 19 nt, Homo sapiens
  misc_RNA (1)...(19): siRNA sense strand
cagcuaugccaaagaccuu

SEQ ID NO: 2429090 - RNA, 19 nt, Homo sapiens
  misc_RNA (1)...(19): siRNA sense strand
ccagaauccgaaucagaau

SEQ ID NO: 2429091 - RNA, 19 nt, Homo sapiens
  misc_RNA (1)...(19): siRNA sense strand
ugucaugccugaaaagcaa

SEQ ID NO: 2429092 - RNA, 19 nt, Homo sapiens
  misc_RNA (1)...(19): siRNA sense strand
uauaauaccacuagggccu

SEQ ID NO: 2429093 - RNA, 19 nt, Homo sapiens
  misc_RNA (1)...(19): siRNA sense strand
cgaagcagaacucaggcaa

SEQ ID NO: 2429094 - RNA, 19 nt, Homo sapiens
  misc_RNA (1)...(19): siRNA sense strand
gagcagaaugauaacacca

SEQ ID NO: 2429095 - RNA, 19 nt, Homo sapiens
  misc_RNA (1)...(19): siRNA sense strand
aguuuaugaggcagaaaga

SEQ ID NO: 2429096 - RNA, 19 nt, Homo sapiens
  misc_RNA (1)...(19): siRNA sense strand
cagaaggagaaccgggaaa

SEQ ID NO: 2429097 - RNA, 19 nt, Homo sapiens
  misc_RNA (1)...(19): siRNA sense strand
gcaaauuucugaagggaag

SEQ ID NO: 2429098 - RNA, 19 nt, Homo sapiens
  misc_RNA (1)...(19): siRNA sense strand
agguagacuucgacaucaa

SEQ ID NO: 2429099 - RNA, 19 nt, Homo sapiens
  misc_RNA (1)...(19): siRNA sense strand
cgggaacauggaugagaaa

SEQ ID NO: 2429100 - RNA, 19 nt, Homo sapiens
  misc_RNA (1)...(19): siRNA sense strand
ccugaaaagcaaagaaaca

SEQ ID NO: 2429101 - RNA, 19 nt, Homo sapiens
  misc_RNA (1)...(19): siRNA sense strand
guguagagaucaaugagga

SEQ ID NO: 2429102 - RNA, 19 nt, Homo sapiens
  misc_RNA (1)...(19): siRNA sense strand
uguagagaucaaugaggaa

SEQ ID NO: 2429103 - RNA, 19 nt, Homo sapiens
  misc_RNA (1)...(19): siRNA sense strand
gcguauugagggacugaau

SEQ ID NO: 2429104 - RNA, 19 nt, Homo sapiens
  misc_RNA (1)...(19): siRNA sense strand
cgcaaauuucugaagggaa

SEQ ID NO: 2429105 - RNA, 19 nt, Homo sapiens
  misc_RNA (1)...(19): siRNA sense strand
uagagaucaaugaggaaau

SEQ ID NO: 2429106 - RNA, 19 nt, Homo sapiens
  misc_RNA (1)...(19): siRNA sense strand
caucaggaggccaggcgaa

SEQ ID NO: 2429107 - RNA, 19 nt, Homo sapiens
  misc_RNA (1)...(19): siRNA sense strand
aaucagagucagaacccaa

SEQ ID NO: 2429108 - RNA, 19 nt, Homo sapiens
  misc_RNA (1)...(19): siRNA sense strand
cgucaggaacaacgcaaau

SEQ ID NO: 2429109 - RNA, 19 nt, Homo sapiens
  misc_RNA (1)...(19): siRNA sense strand
ucaaagaguuuauggacug

SEQ ID NO: 2429110 - RNA, 19 nt, Homo sapiens
  misc_RNA (1)...(19): siRNA sense strand
cuggaaagugccaagucaa

SEQ ID NO: 2429111 - RNA, 19 nt, Homo sapiens
  misc_RNA (1)...(19): siRNA sense strand
acucaggcaaggagcagaa

SEQ ID NO: 2429112 - RNA, 19 nt, Homo sapiens
  misc_RNA (1)...(19): siRNA sense strand
cagcuaugccaaagaccuu

SEQ ID NO: 2429113 - RNA, 19 nt, Homo sapiens
  misc_RNA (1)...(19): siRNA sense strand
ccagaauccgaaucagaau

SEQ ID NO: 2429114 - RNA, 19 nt, Homo sapiens
  misc_RNA (1)...(19): siRNA sense strand
ugucaugccugaaaagcaa

SEQ ID NO: 2429115 - RNA, 19 nt, Homo sapiens
  misc_RNA (1)...(19): siRNA sense strand
uauaauaccacuagggccu

SEQ ID NO: 2429116 - RNA, 19 nt, Homo sapiens
  misc_RNA (1)...(19): siRNA sense strand
cgaagcagaacucaggcaa

SEQ ID NO: 2429117 - RNA, 19 nt, Homo sapiens
  misc_RNA (1)...(19): siRNA sense strand
gagcagaaugauaacacca

SEQ ID NO: 2429118 - RNA, 19 nt, Homo sapiens
  misc_RNA (1)...(19): siRNA sense strand
aguuuaugaggcagaaaga

SEQ ID NO: 2429119 - RNA, 19 nt, Homo sapiens
  misc_RNA (1)...(19): siRNA sense strand
agaugaacaccgugacaaa

SEQ ID NO: 2429120 - RNA, 19 nt, Homo sapiens
  misc_RNA (1)...(19): siRNA sense strand
acaaaagaccaaaggcaaa

SEQ ID NO: 2429121 - RNA, 19 nt, Homo sapiens
  misc_RNA (1)...(19): siRNA sense strand
agaacgaaguaaagagagu

SEQ ID NO: 2429122 - RNA, 19 nt, Homo sapiens
  misc_RNA (1)...(19): siRNA sense strand
aggcuaaaguccaggaacu

SEQ ID NO: 2429123 - RNA, 19 nt, Homo sapiens
  misc_RNA (1)...(19): siRNA sense strand
ggcuauaagaagcuacuaa

SEQ ID NO: 2429124 - RNA, 19 nt, Homo sapiens
  misc_RNA (1)...(19): siRNA sense strand
guacagaccugaaagcagu

SEQ ID NO: 2429125 - RNA, 19 nt, Homo sapiens
  misc_RNA (1)...(19): siRNA sense strand
gccugauagauuagaagaa

SEQ ID NO: 2429126 - RNA, 19 nt, Homo sapiens
  misc_RNA (1)...(19): siRNA sense strand
aggaaaucagcaagaugua

SEQ ID NO: 2429127 - RNA, 19 nt, Homo sapiens
  misc_RNA (1)...(19): siRNA sense strand
gcaaacugugaguggcuau

SEQ ID NO: 2429128 - RNA, 19 nt, Homo sapiens
  misc_RNA (1)...(19): siRNA sense strand
cuuaacauuacgacacaaa

SEQ ID NO: 2429129 - RNA, 19 nt, Homo sapiens
  misc_RNA (1)...(19): siRNA sense strand
uuauaaagcuggcuggugu

SEQ ID NO: 2429130 - RNA, 19 nt, Homo sapiens
  misc_RNA (1)...(19): siRNA sense strand
cacaaaagaccaaaggcaa

SEQ ID NO: 2429131 - RNA, 19 nt, Homo sapiens
  misc_RNA (1)...(19): siRNA sense strand
uggacgauccggugauauu

SEQ ID NO: 2429132 - RNA, 19 nt, Homo sapiens
  misc_RNA (1)...(19): siRNA sense strand
ugcuauaauugcuggcuuu

SEQ ID NO: 2429133 - RNA, 19 nt, Homo sapiens
  misc_RNA (1)...(19): siRNA sense strand
aauaauuacccuugugcuu

SEQ ID NO: 2429134 - RNA, 19 nt, Homo sapiens
  misc_RNA (1)...(19): siRNA sense strand
gugaugacaauuaugacaa

SEQ ID NO: 2429135 - RNA, 19 nt, Homo sapiens
  misc_RNA (1)...(19): siRNA sense strand
gauuagaagaacuggcugu

SEQ ID NO: 2429136 - RNA, 19 nt, Homo sapiens
  misc_RNA (1)...(19): siRNA sense strand
auguggaccuguucauaaa

SEQ ID NO: 2429137 - RNA, 19 nt, Homo sapiens
  misc_RNA (1)...(19): siRNA sense strand
agaagaacuggcugugauu

SEQ ID NO: 2429138 - RNA, 19 nt, Homo sapiens
  misc_RNA (1)...(19): siRNA sense strand
augaaagacuguugcauac

SEQ ID NO: 2429139 - RNA, 19 nt, Homo sapiens
  misc_RNA (1)...(19): siRNA sense strand
cugauagauuagaagaacu

SEQ ID NO: 2429140 - RNA, 19 nt, Homo sapiens
  misc_RNA (1)...(19): siRNA sense strand
agaaguugucagaagccua

SEQ ID NO: 2429141 - RNA, 19 nt, Homo sapiens
  misc_RNA (1)...(19): siRNA sense strand
ugacagguguuuaaaggca

SEQ ID NO: 2429142 - RNA, 19 nt, Homo sapiens
  misc_RNA (1)...(19): siRNA sense strand
guguuuaaaggcaguaaga

SEQ ID NO: 2429143 - RNA, 19 nt, Homo sapiens
  misc_RNA (1)...(19): siRNA sense strand
gauucauucauucaggaaa

SEQ ID NO: 2429144 - RNA, 19 nt, Homo sapiens
  misc_RNA (1)...(19): siRNA sense strand
ggcugugauuugugcuaau

SEQ ID NO: 2429145 - RNA, 19 nt, Homo sapiens
  misc_RNA (1)...(19): siRNA sense strand
agcaagauguauccaggaa

SEQ ID NO: 2429146 - RNA, 19 nt, Homo sapiens
  misc_RNA (1)...(19): siRNA sense strand
ggaaugaagaugcaggaug

SEQ ID NO: 2429147 - RNA, 19 nt, Homo sapiens
  misc_RNA (1)...(19): siRNA sense strand
ggaucaaauggcuauaaga

SEQ ID NO: 2429148 - RNA, 19 nt, Homo sapiens
  misc_RNA (1)...(19): siRNA sense strand
agaugaacaccgugacaaa

SEQ ID NO: 2429149 - RNA, 19 nt, Homo sapiens
  misc_RNA (1)...(19): siRNA sense strand
acaaaagaccaaaggcaaa

SEQ ID NO: 2429150 - RNA, 19 nt, Homo sapiens
  misc_RNA (1)...(19): siRNA sense strand
agaacgaaguaaagagagu

SEQ ID NO: 2429151 - RNA, 19 nt, Homo sapiens
  misc_RNA (1)...(19): siRNA sense strand
aggcuaaaguccaggaacu

SEQ ID NO: 2429152 - RNA, 19 nt, Homo sapiens
  misc_RNA (1)...(19): siRNA sense strand
ggcuauaagaagcuacuaa

SEQ ID NO: 2429153 - RNA, 19 nt, Homo sapiens
  misc_RNA (1)...(19): siRNA sense strand
guacagaccugaaagcagu

SEQ ID NO: 2429154 - RNA, 19 nt, Homo sapiens
  misc_RNA (1)...(19): siRNA sense strand
gccugauagauuagaagaa

SEQ ID NO: 2429155 - RNA, 19 nt, Homo sapiens
  misc_RNA (1)...(19): siRNA sense strand
aggaaaucagcaagaugua

SEQ ID NO: 2429156 - RNA, 19 nt, Homo sapiens
  misc_RNA (1)...(19): siRNA sense strand
gcaaacugugaguggcuau

SEQ ID NO: 2429157 - RNA, 19 nt, Homo sapiens
  misc_RNA (1)...(19): siRNA sense strand
cuuaacauuacgacacaaa

SEQ ID NO: 2429158 - RNA, 19 nt, Homo sapiens
  misc_RNA (1)...(19): siRNA sense strand
uuauaaagcuggcuggugu

SEQ ID NO: 2429159 - RNA, 19 nt, Homo sapiens
  misc_RNA (1)...(19): siRNA sense strand
cacaaaagaccaaaggcaa

SEQ ID NO: 2429160 - RNA, 19 nt, Homo sapiens
  misc_RNA (1)...(19): siRNA sense strand
ugcuauaauugcuggcuuu

SEQ ID NO: 2429161 - RNA, 19 nt, Homo sapiens
  misc_RNA (1)...(19): siRNA sense strand
uggacgauccggugauauu

SEQ ID NO: 2429162 - RNA, 19 nt, Homo sapiens
  misc_RNA (1)...(19): siRNA sense strand
aauaauuacccuugugcuu

SEQ ID NO: 2429163 - RNA, 19 nt, Homo sapiens
  misc_RNA (1)...(19): siRNA sense strand
gugaugacaauuaugacaa

SEQ ID NO: 2429164 - RNA, 19 nt, Homo sapiens
  misc_RNA (1)...(19): siRNA sense strand
gauuagaagaacuggcugu

SEQ ID NO: 2429165 - RNA, 19 nt, Homo sapiens
  misc_RNA (1)...(19): siRNA sense strand
auguggaccuguucauaaa

SEQ ID NO: 2429166 - RNA, 19 nt, Homo sapiens
  misc_RNA (1)...(19): siRNA sense strand
agaagaacuggcugugauu

SEQ ID NO: 2429167 - RNA, 19 nt, Homo sapiens
  misc_RNA (1)...(19): siRNA sense strand
augaaagacuguugcauac

SEQ ID NO: 2429168 - RNA, 19 nt, Homo sapiens
  misc_RNA (1)...(19): siRNA sense strand
cugauagauuagaagaacu

SEQ ID NO: 2429169 - RNA, 19 nt, Homo sapiens
  misc_RNA (1)...(19): siRNA sense strand
agaaguugucagaagccua

SEQ ID NO: 2429170 - RNA, 19 nt, Homo sapiens
  misc_RNA (1)...(19): siRNA sense strand
ugacagguguuuaaaggca

SEQ ID NO: 2429171 - RNA, 19 nt, Homo sapiens
  misc_RNA (1)...(19): siRNA sense strand
guguuuaaaggcaguaaga

SEQ ID NO: 2429172 - RNA, 19 nt, Homo sapiens
  misc_RNA (1)...(19): siRNA sense strand
gauucauucauucaggaaa

SEQ ID NO: 2429173 - RNA, 19 nt, Homo sapiens
  misc_RNA (1)...(19): siRNA sense strand
ggcugugauuugugcuaau

SEQ ID NO: 2429174 - RNA, 19 nt, Homo sapiens
  misc_RNA (1)...(19): siRNA sense strand
agcaagauguauccaggaa

SEQ ID NO: 2429175 - RNA, 19 nt, Homo sapiens
  misc_RNA (1)...(19): siRNA sense strand
ggaaugaagaugcaggaug

SEQ ID NO: 2429176 - RNA, 19 nt, Homo sapiens
  misc_RNA (1)...(19): siRNA sense strand
ggaucaaauggcuauaaga

SEQ ID NO: 2429177 - RNA, 19 nt, Homo sapiens
  misc_RNA (1)...(19): siRNA sense strand
ggaaagaagaggaggcagu

SEQ ID NO: 2429178 - RNA, 19 nt, Homo sapiens
  misc_RNA (1)...(19): siRNA sense strand
ggggagaggaagaagaaaa

SEQ ID NO: 2429179 - RNA, 19 nt, Homo sapiens
  misc_RNA (1)...(19): siRNA sense strand
gcuuauaguucgaagguac

SEQ ID NO: 2429180 - RNA, 19 nt, Homo sapiens
  misc_RNA (1)...(19): siRNA sense strand
cggcagagaugcaggagcu

SEQ ID NO: 2429181 - RNA, 19 nt, Homo sapiens
  misc_RNA (1)...(19): siRNA sense strand
ggcgagacuuagagaggau

SEQ ID NO: 2429182 - RNA, 19 nt, Homo sapiens
  misc_RNA (1)...(19): siRNA sense strand
gcuaagaagccaaggcaug

SEQ ID NO: 2429183 - RNA, 19 nt, Homo sapiens
  misc_RNA (1)...(19): siRNA sense strand
guggaggaucggaggccaa

SEQ ID NO: 2429184 - RNA, 19 nt, Homo sapiens
  misc_RNA (1)...(19): siRNA sense strand
ccacagaacacaaagccuu

SEQ ID NO: 2429185 - RNA, 19 nt, Homo sapiens
  misc_RNA (1)...(19): siRNA sense strand
gggaugauggagaggagga

SEQ ID NO: 2429186 - RNA, 19 nt, Homo sapiens
  misc_RNA (1)...(19): siRNA sense strand
ccaaggaggaagaagccau

SEQ ID NO: 2429187 - RNA, 19 nt, Homo sapiens
  misc_RNA (1)...(19): siRNA sense strand
ggugagaaggugcugguga

SEQ ID NO: 2429188 - RNA, 19 nt, Homo sapiens
  misc_RNA (1)...(19): siRNA sense strand
gcugaaggaggaugggcuu

SEQ ID NO: 2429189 - RNA, 19 nt, Homo sapiens
  misc_RNA (1)...(19): siRNA sense strand
ccaaggaagaagccaccaa

SEQ ID NO: 2429190 - RNA, 19 nt, Homo sapiens
  misc_RNA (1)...(19): siRNA sense strand
ccuucaggguggggagaaa

SEQ ID NO: 2429191 - RNA, 19 nt, Homo sapiens
  misc_RNA (1)...(19): siRNA sense strand
agacaguggugguguaccu

SEQ ID NO: 2429192 - RNA, 19 nt, Homo sapiens
  misc_RNA (1)...(19): siRNA sense strand
gcagacacuucuagacgga

SEQ ID NO: 2429193 - RNA, 19 nt, Homo sapiens
  misc_RNA (1)...(19): siRNA sense strand
ggaucggaggccaaaggaa

SEQ ID NO: 2429194 - RNA, 19 nt, Homo sapiens
  misc_RNA (1)...(19): siRNA sense strand
gccucaaaccagucagaga

SEQ ID NO: 2429195 - RNA, 19 nt, Homo sapiens
  misc_RNA (1)...(19): siRNA sense strand
aagcuggaggagagccaua

SEQ ID NO: 2429196 - RNA, 19 nt, Homo sapiens
  misc_RNA (1)...(19): siRNA sense strand
ccaucaaagaggagguggu

SEQ ID NO: 2429197 - RNA, 19 nt, Homo sapiens
  misc_RNA (1)...(19): siRNA sense strand
agcccaaggaugaggcaca

SEQ ID NO: 2429198 - RNA, 19 nt, Homo sapiens
  misc_RNA (1)...(19): siRNA sense strand
uggugaaggcugcauacaa

SEQ ID NO: 2429199 - RNA, 19 nt, Homo sapiens
  misc_RNA (1)...(19): siRNA sense strand
ucugaggaccugugugaga

SEQ ID NO: 2429200 - RNA, 19 nt, Homo sapiens
  misc_RNA (1)...(19): siRNA sense strand
ggaaagaagaggaggcagu

SEQ ID NO: 2429201 - RNA, 19 nt, Homo sapiens
  misc_RNA (1)...(19): siRNA sense strand
ggggagaggaagaagaaaa

SEQ ID NO: 2429202 - RNA, 19 nt, Homo sapiens
  misc_RNA (1)...(19): siRNA sense strand
gcuuauaguucgaagguac

SEQ ID NO: 2429203 - RNA, 19 nt, Homo sapiens
  misc_RNA (1)...(19): siRNA sense strand
cggcagagaugcaggagcu

SEQ ID NO: 2429204 - RNA, 19 nt, Homo sapiens
  misc_RNA (1)...(19): siRNA sense strand
ggcgagacuuagagaggau

SEQ ID NO: 2429205 - RNA, 19 nt, Homo sapiens
  misc_RNA (1)...(19): siRNA sense strand
gcuaagaagccaaggcaug

SEQ ID NO: 2429206 - RNA, 19 nt, Homo sapiens
  misc_RNA (1)...(19): siRNA sense strand
guggaggaucggaggccaa

SEQ ID NO: 2429207 - RNA, 19 nt, Homo sapiens
  misc_RNA (1)...(19): siRNA sense strand
ccacagaacacaaagccuu

SEQ ID NO: 2429208 - RNA, 19 nt, Homo sapiens
  misc_RNA (1)...(19): siRNA sense strand
gggaugauggagaggagga

SEQ ID NO: 2429209 - RNA, 19 nt, Homo sapiens
  misc_RNA (1)...(19): siRNA sense strand
ccaaggaggaagaagccau

SEQ ID NO: 2429210 - RNA, 19 nt, Homo sapiens
  misc_RNA (1)...(19): siRNA sense strand
ggugagaaggugcugguga

SEQ ID NO: 2429211 - RNA, 19 nt, Homo sapiens
  misc_RNA (1)...(19): siRNA sense strand
gcugaaggaggaugggcuu

SEQ ID NO: 2429212 - RNA, 19 nt, Homo sapiens
  misc_RNA (1)...(19): siRNA sense strand
ccaaggaagaagccaccaa

SEQ ID NO: 2429213 - RNA, 19 nt, Homo sapiens
  misc_RNA (1)...(19): siRNA sense strand
ccuucaggguggggagaaa

SEQ ID NO: 2429214 - RNA, 19 nt, Homo sapiens
  misc_RNA (1)...(19): siRNA sense strand
agacaguggugguguaccu

SEQ ID NO: 2429215 - RNA, 19 nt, Homo sapiens
  misc_RNA (1)...(19): siRNA sense strand
gcagacacuucuagacgga

SEQ ID NO: 2429216 - RNA, 19 nt, Homo sapiens
  misc_RNA (1)...(19): siRNA sense strand
ggaucggaggccaaaggaa

SEQ ID NO: 2429217 - RNA, 19 nt, Homo sapiens
  misc_RNA (1)...(19): siRNA sense strand
gccucaaaccagucagaga

SEQ ID NO: 2429218 - RNA, 19 nt, Homo sapiens
  misc_RNA (1)...(19): siRNA sense strand
aagcuggaggagagccaua

SEQ ID NO: 2429219 - RNA, 19 nt, Homo sapiens
  misc_RNA (1)...(19): siRNA sense strand
ccaucaaagaggagguggu

SEQ ID NO: 2429220 - RNA, 19 nt, Homo sapiens
  misc_RNA (1)...(19): siRNA sense strand
agcccaaggaugaggcaca

SEQ ID NO: 2429221 - RNA, 19 nt, Homo sapiens
  misc_RNA (1)...(19): siRNA sense strand
uggugaaggcugcauacaa

SEQ ID NO: 2429222 - RNA, 19 nt, Homo sapiens
  misc_RNA (1)...(19): siRNA sense strand
ucugaggaccugugugaga

SEQ ID NO: 2429223 - RNA, 19 nt, Homo sapiens
  misc_RNA (1)...(19): siRNA sense strand
ggacaaagacguuggcauc

SEQ ID NO: 2429224 - RNA, 19 nt, Homo sapiens
  misc_RNA (1)...(19): siRNA sense strand
cgagaagcccugaaggaca

SEQ ID NO: 2429225 - RNA, 19 nt, Homo sapiens
  misc_RNA (1)...(19): siRNA sense strand
gaggacaagcucugggaca

SEQ ID NO: 2429226 - RNA, 19 nt, Homo sapiens
  misc_RNA (1)...(19): siRNA sense strand
acguuggcaucuugguaaa

SEQ ID NO: 2429227 - RNA, 19 nt, Homo sapiens
  misc_RNA (1)...(19): siRNA sense strand
ugguaaauaacgugggugu

SEQ ID NO: 2429228 - RNA, 19 nt, Homo sapiens
  misc_RNA (1)...(19): siRNA sense strand
cggugcaacagaugggauu

SEQ ID NO: 2429229 - RNA, 19 nt, Homo sapiens
  misc_RNA (1)...(19): siRNA sense strand
aggacaaagacguuggcau

SEQ ID NO: 2429230 - RNA, 19 nt, Homo sapiens
  misc_RNA (1)...(19): siRNA sense strand
aggacaagcucugggacau

SEQ ID NO: 2429231 - RNA, 19 nt, Homo sapiens
  misc_RNA (1)...(19): siRNA sense strand
auauuauaguugcggacuu

SEQ ID NO: 2429232 - RNA, 19 nt, Homo sapiens
  misc_RNA (1)...(19): siRNA sense strand
gaggagaaguugcagguug

SEQ ID NO: 2429233 - RNA, 19 nt, Homo sapiens
  misc_RNA (1)...(19): siRNA sense strand
ccugaauggcucugggugu

SEQ ID NO: 2429234 - RNA, 19 nt, Homo sapiens
  misc_RNA (1)...(19): siRNA sense strand
aggucuugcaauugcuaua

SEQ ID NO: 2429235 - RNA, 19 nt, Homo sapiens
  misc_RNA (1)...(19): siRNA sense strand
cgccaaaagucuaugcaca

SEQ ID NO: 2429236 - RNA, 19 nt, Homo sapiens
  misc_RNA (1)...(19): siRNA sense strand
uguuucuacucuugggauu

SEQ ID NO: 2429237 - RNA, 19 nt, Homo sapiens
  misc_RNA (1)...(19): siRNA sense strand
gagaaagaaaggugccauc

SEQ ID NO: 2429238 - RNA, 19 nt, Homo sapiens
  misc_RNA (1)...(19): siRNA sense strand
aaugguggagagaaagaaa

SEQ ID NO: 2429239 - RNA, 19 nt, Homo sapiens
  misc_RNA (1)...(19): siRNA sense strand
ccugaaggacaaagacguu

SEQ ID NO: 2429240 - RNA, 19 nt, Homo sapiens
  misc_RNA (1)...(19): siRNA sense strand
cuaugauaacuuucggaua

SEQ ID NO: 2429241 - RNA, 19 nt, Homo sapiens
  misc_RNA (1)...(19): siRNA sense strand
ggacuugccuuaaccgcua

SEQ ID NO: 2429242 - RNA, 19 nt, Homo sapiens
  misc_RNA (1)...(19): siRNA sense strand
acccaaaugcugaguucaa

SEQ ID NO: 2429243 - RNA, 19 nt, Homo sapiens
  misc_RNA (1)...(19): siRNA sense strand
gaagguugguauugcgcuu

SEQ ID NO: 2429244 - RNA, 19 nt, Homo sapiens
  misc_RNA (1)...(19): siRNA sense strand
cgucuaugaagguugguau

SEQ ID NO: 2429245 - RNA, 19 nt, Homo sapiens
  misc_RNA (1)...(19): siRNA sense strand
agguaaggacauucucaaa

SEQ ID NO: 2429246 - RNA, 19 nt, Homo sapiens
  misc_RNA (1)...(19): siRNA sense strand
gggaugauucgcagaccau

SEQ ID NO: 2429247 - RNA, 19 nt, Homo sapiens
  misc_RNA (1)...(19): siRNA sense strand
gugacuacuaugaugaaaa

SEQ ID NO: 2429248 - RNA, 19 nt, Homo sapiens
  misc_RNA (1)...(19): siRNA sense strand
ggacuuugcugcagccugu

SEQ ID NO: 2429249 - RNA, 19 nt, Homo sapiens
  misc_RNA (1)...(19): siRNA sense strand
ugccaaagcagguagcaga

SEQ ID NO: 2429250 - RNA, 19 nt, Homo sapiens
  misc_RNA (1)...(19): siRNA sense strand
gcuauaccguggauggcuu

SEQ ID NO: 2429251 - RNA, 19 nt, Homo sapiens
  misc_RNA (1)...(19): siRNA sense strand
augaugaaaaggugguuaa

SEQ ID NO: 2429252 - RNA, 19 nt, Homo sapiens
  misc_RNA (1)...(19): siRNA sense strand
cagugaaccagcaguggaa

SEQ ID NO: 2429253 - RNA, 19 nt, Homo sapiens
  misc_RNA (1)...(19): siRNA sense strand
augacaagaccaaggacau

SEQ ID NO: 2429254 - RNA, 19 nt, Homo sapiens
  misc_RNA (1)...(19): siRNA sense strand
gaccaaggacauaggagga

SEQ ID NO: 2429255 - RNA, 19 nt, Homo sapiens
  misc_RNA (1)...(19): siRNA sense strand
acggcgacgaggaggagua

SEQ ID NO: 2429256 - RNA, 19 nt, Homo sapiens
  misc_RNA (1)...(19): siRNA sense strand
gagguugucaugaggguca

SEQ ID NO: 2429257 - RNA, 19 nt, Homo sapiens
  misc_RNA (1)...(19): siRNA sense strand
gguuaugagcuguggaaau

SEQ ID NO: 2429258 - RNA, 19 nt, Homo sapiens
  misc_RNA (1)...(19): siRNA sense strand
ugaaaggaaaguagugaaa

SEQ ID NO: 2429259 - RNA, 19 nt, Homo sapiens
  misc_RNA (1)...(19): siRNA sense strand
ugaugauagugaaaggaaa

SEQ ID NO: 2429260 - RNA, 19 nt, Homo sapiens
  misc_RNA (1)...(19): siRNA sense strand
agaacaacuucgagacauu

SEQ ID NO: 2429261 - RNA, 19 nt, Homo sapiens
  misc_RNA (1)...(19): siRNA sense strand
cagaaauguuguugcugaa

SEQ ID NO: 2429262 - RNA, 19 nt, Homo sapiens
  misc_RNA (1)...(19): siRNA sense strand
caguaaagcaggaguuuga

SEQ ID NO: 2429263 - RNA, 19 nt, Homo sapiens
  misc_RNA (1)...(19): siRNA sense strand
auggagagguacagaauuu

SEQ ID NO: 2429264 - RNA, 19 nt, Homo sapiens
  misc_RNA (1)...(19): siRNA sense strand
gcaauggagcagggagaaa

SEQ ID NO: 2429265 - RNA, 19 nt, Homo sapiens
  misc_RNA (1)...(19): siRNA sense strand
gaucaggaagucaaggaaa

SEQ ID NO: 2429266 - RNA, 19 nt, Homo sapiens
  misc_RNA (1)...(19): siRNA sense strand
uggagagacuaaagaauga

SEQ ID NO: 2429267 - RNA, 19 nt, Homo sapiens
  misc_RNA (1)...(19): siRNA sense strand
uuaaagagcgugaagagaa

SEQ ID NO: 2429268 - RNA, 19 nt, Homo sapiens
  misc_RNA (1)...(19): siRNA sense strand
cacaaacagaugaaagaaa

SEQ ID NO: 2429269 - RNA, 19 nt, Homo sapiens
  misc_RNA (1)...(19): siRNA sense strand
cuguaauacuagaagcuuu

SEQ ID NO: 2429270 - RNA, 19 nt, Homo sapiens
  misc_RNA (1)...(19): siRNA sense strand
gugaguaaagugaaagaau

SEQ ID NO: 2429271 - RNA, 19 nt, Homo sapiens
  misc_RNA (1)...(19): siRNA sense strand
caguaaaggcauugacacu

SEQ ID NO: 2429272 - RNA, 19 nt, Homo sapiens
  misc_RNA (1)...(19): siRNA sense strand
ggagcuuauaagagaggua

SEQ ID NO: 2429273 - RNA, 19 nt, Homo sapiens
  misc_RNA (1)...(19): siRNA sense strand
gcaagaaauaacuagucaa

SEQ ID NO: 2429274 - RNA, 19 nt, Homo sapiens
  misc_RNA (1)...(19): siRNA sense strand
ccagaaauguuguugcuga

SEQ ID NO: 2429275 - RNA, 19 nt, Homo sapiens
  misc_RNA (1)...(19): siRNA sense strand
augcaauggagcagggaga

SEQ ID NO: 2429276 - RNA, 19 nt, Homo sapiens
  misc_RNA (1)...(19): siRNA sense strand
gaguaaagugaaagaauac

SEQ ID NO: 2429277 - RNA, 19 nt, Homo sapiens
  misc_RNA (1)...(19): siRNA sense strand
gauucuaugucaacaacaa

SEQ ID NO: 2429278 - RNA, 19 nt, Homo sapiens
  misc_RNA (1)...(19): siRNA sense strand
gacuuuagguuuauggcua

SEQ ID NO: 2429279 - RNA, 19 nt, Homo sapiens
  misc_RNA (1)...(19): siRNA sense strand
aagagaauguaaaggcaga

SEQ ID NO: 2429280 - RNA, 19 nt, Homo sapiens
  misc_RNA (1)...(19): siRNA sense strand
aggcagcauuugaguguau

SEQ ID NO: 2429281 - RNA, 19 nt, Homo sapiens
  misc_RNA (1)...(19): siRNA sense strand
ggaccgacuuguugagcca

SEQ ID NO: 2429282 - RNA, 19 nt, Homo sapiens
  misc_RNA (1)...(19): siRNA sense strand
uugaaaguauccagaaaga

SEQ ID NO: 2429283 - RNA, 19 nt, Homo sapiens
  misc_RNA (1)...(19): siRNA sense strand
gugaaaggaaaguagugaa

SEQ ID NO: 2429284 - RNA, 19 nt, Homo sapiens
  misc_RNA (1)...(19): siRNA sense strand
acauguacaacuaagguaa

SEQ ID NO: 2429285 - RNA, 19 nt, Homo sapiens
  misc_RNA (1)...(19): siRNA sense strand
agcuagaagccuuggauau

SEQ ID NO: 2429286 - RNA, 19 nt, Homo sapiens
  misc_RNA (1)...(19): siRNA sense strand
caacaagaaccuacauaca

SEQ ID NO: 2429287 - RNA, 19 nt, Homo sapiens
  misc_RNA (1)...(19): siRNA sense strand
ccuuaaaccauauguugaa

SEQ ID NO: 2429288 - RNA, 19 nt, Homo sapiens
  misc_RNA (1)...(19): siRNA sense strand
aauaccaaguagagacaau

SEQ ID NO: 2429289 - RNA, 19 nt, Homo sapiens
  misc_RNA (1)...(19): siRNA sense strand
cugugagugugcagaggaa

SEQ ID NO: 2429290 - RNA, 19 nt, Homo sapiens
  misc_RNA (1)...(19): siRNA sense strand
gcacauaacaagccaucau

SEQ ID NO: 2429291 - RNA, 19 nt, Homo sapiens
  misc_RNA (1)...(19): siRNA sense strand
guaaaggcaaacucaguaa

SEQ ID NO: 2429292 - RNA, 19 nt, Homo sapiens
  misc_RNA (1)...(19): siRNA sense strand
ugaaagaauaccaaguaga

SEQ ID NO: 2429293 - RNA, 19 nt, Homo sapiens
  misc_RNA (1)...(19): siRNA sense strand
gagcaggcaaggaggacuu

SEQ ID NO: 2429294 - RNA, 19 nt, Homo sapiens
  misc_RNA (1)...(19): siRNA sense strand
ggucauagaauaggugaau

SEQ ID NO: 2429295 - RNA, 19 nt, Homo sapiens
  misc_RNA (1)...(19): siRNA sense strand
acaacuaagguaaaggcaa

SEQ ID NO: 2429296 - RNA, 19 nt, Homo sapiens
  misc_RNA (1)...(19): siRNA sense strand
ucuaauugauccagaaacu

SEQ ID NO: 2429297 - RNA, 19 nt, Homo sapiens
  misc_RNA (1)...(19): siRNA sense strand
cgugcaacauguacaacua

SEQ ID NO: 2429298 - RNA, 19 nt, Homo sapiens
  misc_RNA (1)...(19): siRNA sense strand
gcaauguagaugaugauga

SEQ ID NO: 2429299 - RNA, 19 nt, Homo sapiens
  misc_RNA (1)...(19): siRNA sense strand
ucaagggagugaugaugaa

SEQ ID NO: 2429300 - RNA, 19 nt, Homo sapiens
  misc_RNA (1)...(19): siRNA sense strand
augaaaugcuuccagaauu

SEQ ID NO: 2429301 - RNA, 19 nt, Homo sapiens
  misc_RNA (1)...(19): siRNA sense strand
caugauugaugcaguucua

SEQ ID NO: 2429302 - RNA, 19 nt, Homo sapiens
  misc_RNA (1)...(19): siRNA sense strand
aacaguaauuggagaacuu

SEQ ID NO: 2429303 - RNA, 19 nt, Homo sapiens
  misc_RNA (1)...(19): siRNA sense strand
acgucuuacaagugcaaua

SEQ ID NO: 2429304 - RNA, 19 nt, Homo sapiens
  misc_RNA (1)...(19): siRNA sense strand
uuacgaugaugaagaugaa

SEQ ID NO: 2429305 - RNA, 19 nt, Homo sapiens
  misc_RNA (1)...(19): siRNA sense strand
cagcgaaagugauaugcau

SEQ ID NO: 2429306 - RNA, 19 nt, Homo sapiens
  misc_RNA (1)...(19): siRNA sense strand
guaaagcaggaguuugaaa

SEQ ID NO: 2429307 - RNA, 19 nt, Homo sapiens
  misc_RNA (1)...(19): siRNA sense strand
cuacuaacuuggaaucaau

SEQ ID NO: 2429308 - RNA, 19 nt, Homo sapiens
  misc_RNA (1)...(19): siRNA sense strand
aaucaauggacacuaguua

SEQ ID NO: 2429309 - RNA, 19 nt, Homo sapiens
  misc_RNA (1)...(19): siRNA sense strand
gcgacaaggacuuuagguu

SEQ ID NO: 2429310 - RNA, 19 nt, Homo sapiens
  misc_RNA (1)...(19): siRNA sense strand
cagaggaaggaaccagaaa

SEQ ID NO: 2429311 - RNA, 19 nt, Homo sapiens
  misc_RNA (1)...(19): siRNA sense strand
gagcgugaagagaauguaa

SEQ ID NO: 2429312 - RNA, 19 nt, Homo sapiens
  misc_RNA (1)...(19): siRNA sense strand
gggagaaacaccuuuaaca

SEQ ID NO: 2429313 - RNA, 19 nt, Homo sapiens
  misc_RNA (1)...(19): siRNA sense strand
gaagucaaggaaagggcua

SEQ ID NO: 2429314 - RNA, 19 nt, Homo sapiens
  misc_RNA (1)...(19): siRNA sense strand
uugaaggaccauuaugaua

SEQ ID NO: 2429315 - RNA, 19 nt, Homo sapiens
  misc_RNA (1)...(19): siRNA sense strand
ucauagaauaggugaauac

SEQ ID NO: 2429316 - RNA, 19 nt, Homo sapiens
  misc_RNA (1)...(19): siRNA sense strand
caugaaaugcuuccagaau

SEQ ID NO: 2429317 - RNA, 19 nt, Homo sapiens
  misc_RNA (1)...(19): siRNA sense strand
cggacauugaggaggagua

SEQ ID NO: 2429318 - RNA, 19 nt, Homo sapiens
  misc_RNA (1)...(19): siRNA sense strand
aggagaacgugguggccga

SEQ ID NO: 2429319 - RNA, 19 nt, Homo sapiens
  misc_RNA (1)...(19): siRNA sense strand
cuagagaacccgcaggaga

SEQ ID NO: 2429320 - RNA, 19 nt, Homo sapiens
  misc_RNA (1)...(19): siRNA sense strand
ccucuguguccaagaagaa

SEQ ID NO: 2429321 - RNA, 19 nt, Homo sapiens
  misc_RNA (1)...(19): siRNA sense strand
acccacgauuugagggcaa

SEQ ID NO: 2429322 - RNA, 19 nt, Homo sapiens
  misc_RNA (1)...(19): siRNA sense strand
uggcggacauugaggagga

SEQ ID NO: 2429323 - RNA, 19 nt, Homo sapiens
  misc_RNA (1)...(19): siRNA sense strand
acggcuucgugguggagaa

SEQ ID NO: 2429324 - RNA, 19 nt, Homo sapiens
  misc_RNA (1)...(19): siRNA sense strand
aaagaggacuugagggaca

SEQ ID NO: 2429325 - RNA, 19 nt, Homo sapiens
  misc_RNA (1)...(19): siRNA sense strand
acaaagaggacuugaggga

SEQ ID NO: 2429326 - RNA, 19 nt, Homo sapiens
  misc_RNA (1)...(19): siRNA sense strand
gggagaagcugaagggcac

SEQ ID NO: 2429327 - RNA, 19 nt, Homo sapiens
  misc_RNA (1)...(19): siRNA sense strand
acgaggaacuggaggccau

SEQ ID NO: 2429328 - RNA, 19 nt, Homo sapiens
  misc_RNA (1)...(19): siRNA sense strand
ucagugaggaggaggucaa

SEQ ID NO: 2429329 - RNA, 19 nt, Homo sapiens
  misc_RNA (1)...(19): siRNA sense strand
auccaggaguuuaaagaga

SEQ ID NO: 2429330 - RNA, 19 nt, Homo sapiens
  misc_RNA (1)...(19): siRNA sense strand
ggguuggagacguguguaa

SEQ ID NO: 2429331 - RNA, 19 nt, Homo sapiens
  misc_RNA (1)...(19): siRNA sense strand
gugagcugguggugggcua

SEQ ID NO: 2429332 - RNA, 19 nt, Homo sapiens
  misc_RNA (1)...(19): siRNA sense strand
augaacugguggugggaga

SEQ ID NO: 2429333 - RNA, 19 nt, Homo sapiens
  misc_RNA (1)...(19): siRNA sense strand
aauggaugcuggaggguca

SEQ ID NO: 2429334 - RNA, 19 nt, Homo sapiens
  misc_RNA (1)...(19): siRNA sense strand
aagaaauggaagaagcaga

SEQ ID NO: 2429335 - RNA, 19 nt, Homo sapiens
  misc_RNA (1)...(19): siRNA sense strand
acggaugguaguagggaga

SEQ ID NO: 2429336 - RNA, 19 nt, Homo sapiens
  misc_RNA (1)...(19): siRNA sense strand
aggugaggguccugaacau

SEQ ID NO: 2429337 - RNA, 19 nt, Homo sapiens
  misc_RNA (1)...(19): siRNA sense strand
ucauggaagaaauggaaga

SEQ ID NO: 2429338 - RNA, 19 nt, Homo sapiens
  misc_RNA (1)...(19): siRNA sense strand
cuuucaaccagaagaucua

SEQ ID NO: 2429339 - RNA, 19 nt, Homo sapiens
  misc_RNA (1)...(19): siRNA sense strand
guaauaaaggaaagaaccu

SEQ ID NO: 2429340 - RNA, 19 nt, Homo sapiens
  misc_RNA (1)...(19): siRNA sense strand
ccacucaccuaauuggcaa

SEQ ID NO: 2429341 - RNA, 19 nt, Homo sapiens
  misc_RNA (1)...(19): siRNA sense strand
guguaauaaaggaaagaac

SEQ ID NO: 2429342 - RNA, 19 nt, Homo sapiens
  misc_RNA (1)...(19): siRNA sense strand
cgggaaggugucuguguau

SEQ ID NO: 2429343 - RNA, 19 nt, Homo sapiens
  misc_RNA (1)...(19): siRNA sense strand
aggugcagcuggagcggau

SEQ ID NO: 2429344 - RNA, 19 nt, Homo sapiens
  misc_RNA (1)...(19): siRNA sense strand
ggaaagaaccuguuggugg

SEQ ID NO: 2429345 - RNA, 19 nt, Homo sapiens
  misc_RNA (1)...(19): siRNA sense strand
aaauggaagaagcagacaa

SEQ ID NO: 2429346 - RNA, 19 nt, Homo sapiens
  misc_RNA (1)...(19): siRNA sense strand
uggaagaaauggaagaagc

SEQ ID NO: 2429347 - RNA, 19 nt, Homo sapiens
  misc_RNA (1)...(19): siRNA sense strand
ccugggauggacagacaua

SEQ ID NO: 2429348 - RNA, 19 nt, Homo sapiens
  misc_RNA (1)...(19): siRNA sense strand
ucaaugagguggaacgcuu

SEQ ID NO: 2429349 - RNA, 19 nt, Homo sapiens
  misc_RNA (1)...(19): siRNA sense strand
agccagaggaggagcugaa

SEQ ID NO: 2429350 - RNA, 19 nt, Homo sapiens
  misc_RNA (1)...(19): siRNA sense strand
caucagaagcagugggcag

SEQ ID NO: 2429351 - RNA, 19 nt, Homo sapiens
  misc_RNA (1)...(19): siRNA sense strand
uugaaggacugaaggcuca

SEQ ID NO: 2429352 - RNA, 19 nt, Homo sapiens
  misc_RNA (1)...(19): siRNA sense strand
ucugauuacaccugggaau

SEQ ID NO: 2429353 - RNA, 19 nt, Homo sapiens
  misc_RNA (1)...(19): siRNA sense strand
augcagaguccucagagaa

SEQ ID NO: 2429354 - RNA, 19 nt, Homo sapiens
  misc_RNA (1)...(19): siRNA sense strand
uggaagaccucuggagcca

SEQ ID NO: 2429355 - RNA, 19 nt, Homo sapiens
  misc_RNA (1)...(19): siRNA sense strand
gaaaguacuucgauggacu

SEQ ID NO: 2429356 - RNA, 19 nt, Homo sapiens
  misc_RNA (1)...(19): siRNA sense strand
gcguuaaccaccuggguca

SEQ ID NO: 2429357 - RNA, 19 nt, Homo sapiens
  misc_RNA (1)...(19): siRNA sense strand
uugaagaggaggagcgagu

SEQ ID NO: 2429358 - RNA, 19 nt, Homo sapiens
  misc_RNA (1)...(19): siRNA sense strand
ccgccuacugccagagcaa

SEQ ID NO: 2429359 - RNA, 19 nt, Homo sapiens
  misc_RNA (1)...(19): siRNA sense strand
aggaggagcgaguggacau

SEQ ID NO: 2429360 - RNA, 19 nt, Homo sapiens
  misc_RNA (1)...(19): siRNA sense strand
gcacauagacuuugacgac

SEQ ID NO: 2429361 - RNA, 19 nt, Homo sapiens
  misc_RNA (1)...(19): siRNA sense strand
caaagaucauugaagagga

SEQ ID NO: 2429362 - RNA, 19 nt, Homo sapiens
  misc_RNA (1)...(19): siRNA sense strand
ugacaaacuugcugcugga

SEQ ID NO: 2429363 - RNA, 19 nt, Homo sapiens
  misc_RNA (1)...(19): siRNA sense strand
ggacaagcugaaagccuca

SEQ ID NO: 2429364 - RNA, 19 nt, Homo sapiens
  misc_RNA (1)...(19): siRNA sense strand
cagacgaggaaguauaaca

SEQ ID NO: 2429365 - RNA, 19 nt, Homo sapiens
  misc_RNA (1)...(19): siRNA sense strand
agauaaaggaagagagcca

SEQ ID NO: 2429366 - RNA, 19 nt, Homo sapiens
  misc_RNA (1)...(19): siRNA sense strand
ggaagaaggaaaagaaaau

SEQ ID NO: 2429367 - RNA, 19 nt, Homo sapiens
  misc_RNA (1)...(19): siRNA sense strand
aagaaaaggcuaagcaaua

SEQ ID NO: 2429368 - RNA, 19 nt, Homo sapiens
  misc_RNA (1)...(19): siRNA sense strand
aauccaauguuuagagcaa

SEQ ID NO: 2429369 - RNA, 19 nt, Homo sapiens
  misc_RNA (1)...(19): siRNA sense strand
gagaaauuggcaaggaaau

SEQ ID NO: 2429370 - RNA, 19 nt, Homo sapiens
  misc_RNA (1)...(19): siRNA sense strand
ggacagaccugaauguaca

SEQ ID NO: 2429371 - RNA, 19 nt, Homo sapiens
  misc_RNA (1)...(19): siRNA sense strand
gugccagagcagaaggaaa

SEQ ID NO: 2429372 - RNA, 19 nt, Homo sapiens
  misc_RNA (1)...(19): siRNA sense strand
caaauugaagcgagagcaa

SEQ ID NO: 2429373 - RNA, 19 nt, Homo sapiens
  misc_RNA (1)...(19): siRNA sense strand
cagaguacuuaaagcgaau

SEQ ID NO: 2429374 - RNA, 19 nt, Homo sapiens
  misc_RNA (1)...(19): siRNA sense strand
cuauaauggacaaagcaua

SEQ ID NO: 2429375 - RNA, 19 nt, Homo sapiens
  misc_RNA (1)...(19): siRNA sense strand
ccuaggaggcacaggaaaa

SEQ ID NO: 2429376 - RNA, 19 nt, Homo sapiens
  misc_RNA (1)...(19): siRNA sense strand
cugaaggaggagaggaaga

SEQ ID NO: 2429377 - RNA, 19 nt, Homo sapiens
  misc_RNA (1)...(19): siRNA sense strand
aggaaacacuacaggacuu

SEQ ID NO: 2429378 - RNA, 19 nt, Homo sapiens
  misc_RNA (1)...(19): siRNA sense strand
ggaagaaaacaaaggugaa

SEQ ID NO: 2429379 - RNA, 19 nt, Homo sapiens
  misc_RNA (1)...(19): siRNA sense strand
aggaagaaggaaaagaaaa

SEQ ID NO: 2429380 - RNA, 19 nt, Homo sapiens
  misc_RNA (1)...(19): siRNA sense strand
cauuaaugccuguguuuau

SEQ ID NO: 2429381 - RNA, 19 nt, Homo sapiens
  misc_RNA (1)...(19): siRNA sense strand
ugccagagcagaaggaaau

SEQ ID NO: 2429382 - RNA, 19 nt, Homo sapiens
  misc_RNA (1)...(19): siRNA sense strand
ccacucaguuagaaggaca

SEQ ID NO: 2429383 - RNA, 19 nt, Homo sapiens
  misc_RNA (1)...(19): siRNA sense strand
aggagagaacaaugagaau

SEQ ID NO: 2429384 - RNA, 19 nt, Homo sapiens
  misc_RNA (1)...(19): siRNA sense strand
acaccaacauacaagacaa

SEQ ID NO: 2429385 - RNA, 19 nt, Homo sapiens
  misc_RNA (1)...(19): siRNA sense strand
cugaagagccacacaccaa

SEQ ID NO: 2429386 - RNA, 19 nt, Homo sapiens
  misc_RNA (1)...(19): siRNA sense strand
gugaaaagaaugcgucaaa

SEQ ID NO: 2429387 - RNA, 19 nt, Homo sapiens
  misc_RNA (1)...(19): siRNA sense strand
agaccugaauguacagcaa

SEQ ID NO: 2429388 - RNA, 19 nt, Homo sapiens
  misc_RNA (1)...(19): siRNA sense strand
aagaaugcgucaaagaaca

SEQ ID NO: 2429389 - RNA, 19 nt, Homo sapiens
  misc_RNA (1)...(19): siRNA sense strand
aaaaguugguagagggaga

SEQ ID NO: 2429390 - RNA, 19 nt, Homo sapiens
  misc_RNA (1)...(19): siRNA sense strand
gcagcucagaagaaagaaa

SEQ ID NO: 2429391 - RNA, 19 nt, Homo sapiens
  misc_RNA (1)...(19): siRNA sense strand
cuauugcaguggaggaaga

SEQ ID NO: 2429392 - RNA, 19 nt, Homo sapiens
  misc_RNA (1)...(19): siRNA sense strand
ccacaaacccugacccuca

SEQ ID NO: 2429393 - RNA, 19 nt, Homo sapiens
  misc_RNA (1)...(19): siRNA sense strand
agagcaaauaggauguuaa

SEQ ID NO: 2429394 - RNA, 19 nt, Homo sapiens
  misc_RNA (1)...(19): siRNA sense strand
aguaaucagucucagcaaa

SEQ ID NO: 2429395 - RNA, 19 nt, Homo sapiens
  misc_RNA (1)...(19): siRNA sense strand
ccacagcacaggaagaaaa

SEQ ID NO: 2429396 - RNA, 19 nt, Homo sapiens
  misc_RNA (1)...(19): siRNA sense strand
aggugaagccuauaggaga

SEQ ID NO: 2429397 - RNA, 19 nt, Homo sapiens
  misc_RNA (1)...(19): siRNA sense strand
gguccaaacagcccacaaa

SEQ ID NO: 2429398 - RNA, 19 nt, Homo sapiens
  misc_RNA (1)...(19): siRNA sense strand
gcauagauucauacacaga

SEQ ID NO: 2429399 - RNA, 19 nt, Homo sapiens
  misc_RNA (1)...(19): siRNA sense strand
gggaaggaaacgaguaucu

SEQ ID NO: 2429400 - RNA, 19 nt, Homo sapiens
  misc_RNA (1)...(19): siRNA sense strand
uuuuaaagcagaaggcuaa

SEQ ID NO: 2429401 - RNA, 19 nt, Homo sapiens
  misc_RNA (1)...(19): siRNA sense strand
aggagaggaagaaggaaaa

SEQ ID NO: 2429402 - RNA, 19 nt, Homo sapiens
  misc_RNA (1)...(19): siRNA sense strand
ugauaagccaacagaacau

SEQ ID NO: 2429403 - RNA, 19 nt, Homo sapiens
  misc_RNA (1)...(19): siRNA sense strand
ucaaaugagcuaaggaaac

SEQ ID NO: 2429404 - RNA, 19 nt, Homo sapiens
  misc_RNA (1)...(19): siRNA sense strand
uggacaaagcauauaucua

SEQ ID NO: 2429405 - RNA, 19 nt, Homo sapiens
  misc_RNA (1)...(19): siRNA sense strand
cgaaagaagagacacccaa

SEQ ID NO: 2429406 - RNA, 19 nt, Homo sapiens
  misc_RNA (1)...(19): siRNA sense strand
gagacauaauaguggauuc

SEQ ID NO: 2429407 - RNA, 19 nt, Homo sapiens
  misc_RNA (1)...(19): siRNA sense strand
gggucgguguuuggagaaa

SEQ ID NO: 2429408 - RNA, 19 nt, Homo sapiens
  misc_RNA (1)...(19): siRNA sense strand
gaagagaagccacuggaca

SEQ ID NO: 2429409 - RNA, 19 nt, Homo sapiens
  misc_RNA (1)...(19): siRNA sense strand
cuuccaaacagcauagauu

SEQ ID NO: 2429410 - RNA, 19 nt, Homo sapiens
  misc_RNA (1)...(19): siRNA sense strand
auucaaaugagcuaaggaa

SEQ ID NO: 2429411 - RNA, 19 nt, Homo sapiens
  misc_RNA (1)...(19): siRNA sense strand
caccaacauacaagacaaa

SEQ ID NO: 2429412 - RNA, 19 nt, Homo sapiens
  misc_RNA (1)...(19): siRNA sense strand
gaggaagaaggaaaagaaa

SEQ ID NO: 2429413 - RNA, 19 nt, Homo sapiens
  misc_RNA (1)...(19): siRNA sense strand
acagaguacuuaaagcgaa

SEQ ID NO: 2429414 - RNA, 19 nt, Homo sapiens
  misc_RNA (1)...(19): siRNA sense strand
gggaaagaagguccaaaca

SEQ ID NO: 2429415 - RNA, 19 nt, Homo sapiens
  misc_RNA (1)...(19): siRNA sense strand
gaugauaagccaacagaac

SEQ ID NO: 2429416 - RNA, 19 nt, Homo sapiens
  misc_RNA (1)...(19): siRNA sense strand
cagcacaggaagaaaacaa

SEQ ID NO: 2429417 - RNA, 19 nt, Homo sapiens
  misc_RNA (1)...(19): siRNA sense strand
ccgcagacaacauacacua

SEQ ID NO: 2429418 - RNA, 19 nt, Homo sapiens
  misc_RNA (1)...(19): siRNA sense strand
gaguacuuaaagcgaauua

SEQ ID NO: 2429419 - RNA, 19 nt, Homo sapiens
  misc_RNA (1)...(19): siRNA sense strand
uucugaaggaggagaggaa

SEQ ID NO: 2429420 - RNA, 19 nt, Homo sapiens
  misc_RNA (1)...(19): siRNA sense strand
uccaauguuuagagcaaau

SEQ ID NO: 2429421 - RNA, 19 nt, Homo sapiens
  misc_RNA (1)...(19): siRNA sense strand
cugcaaaaguggaagcgaa

SEQ ID NO: 2429422 - RNA, 19 nt, Homo sapiens
  misc_RNA (1)...(19): siRNA sense strand
ccgccaaggaagagcccaa

SEQ ID NO: 2429423 - RNA, 19 nt, Homo sapiens
  misc_RNA (1)...(19): siRNA sense strand
caggagagaaagaagccaa

SEQ ID NO: 2429424 - RNA, 19 nt, Homo sapiens
  misc_RNA (1)...(19): siRNA sense strand
agugcaaacaaaagggaaa

SEQ ID NO: 2429425 - RNA, 19 nt, Homo sapiens
  misc_RNA (1)...(19): siRNA sense strand
aggauaaaucuucagacaa

SEQ ID NO: 2429426 - RNA, 19 nt, Homo sapiens
  misc_RNA (1)...(19): siRNA sense strand
agcuaaaccuccugcaaaa

SEQ ID NO: 2429427 - RNA, 19 nt, Homo sapiens
  misc_RNA (1)...(19): siRNA sense strand
cggaaaacggggaaacgaa

SEQ ID NO: 2429428 - RNA, 19 nt, Homo sapiens
  misc_RNA (1)...(19): siRNA sense strand
aggaagagcccaagaggag

SEQ ID NO: 2429429 - RNA, 19 nt, Homo sapiens
  misc_RNA (1)...(19): siRNA sense strand
augaagcaggagagaaaga

SEQ ID NO: 2429430 - RNA, 19 nt, Homo sapiens
  misc_RNA (1)...(19): siRNA sense strand
gugcaaacaaaagggaaaa

SEQ ID NO: 2429431 - RNA, 19 nt, Homo sapiens
  misc_RNA (1)...(19): siRNA sense strand
ucguaugccuaaagagcaa

SEQ ID NO: 2429432 - RNA, 19 nt, Homo sapiens
  misc_RNA (1)...(19): siRNA sense strand
augugaaggagaagaaauu

SEQ ID NO: 2429433 - RNA, 19 nt, Homo sapiens
  misc_RNA (1)...(19): siRNA sense strand
ccuggaaagugcugggcuu

SEQ ID NO: 2429434 - RNA, 19 nt, Homo sapiens
  misc_RNA (1)...(19): siRNA sense strand
agaauaugguucaaggcuu

SEQ ID NO: 2429435 - RNA, 19 nt, Homo sapiens
  misc_RNA (1)...(19): siRNA sense strand
aaggcauugcuaagagaua

SEQ ID NO: 2429436 - RNA, 19 nt, Homo sapiens
  misc_RNA (1)...(19): siRNA sense strand
augccauaauugcagaaua

SEQ ID NO: 2429437 - RNA, 19 nt, Homo sapiens
  misc_RNA (1)...(19): siRNA sense strand
uuaaagaaggaaagccaga

SEQ ID NO: 2429438 - RNA, 19 nt, Homo sapiens
  misc_RNA (1)...(19): siRNA sense strand
cuuuauaaauaucaggcca

SEQ ID NO: 2429439 - RNA, 19 nt, Homo sapiens
  misc_RNA (1)...(19): siRNA sense strand
cuacaaagaucauaccaac

SEQ ID NO: 2429440 - RNA, 19 nt, Homo sapiens
  misc_RNA (1)...(19): siRNA sense strand
ggaaacaucuccagugcac

SEQ ID NO: 2429441 - RNA, 19 nt, Homo sapiens
  misc_RNA (1)...(19): siRNA sense strand
aauaaucacaacuggaaca

SEQ ID NO: 2429442 - RNA, 19 nt, Homo sapiens
  misc_RNA (1)...(19): siRNA sense strand
ccaagcacguggugggcua

SEQ ID NO: 2429443 - RNA, 19 nt, Homo sapiens
  misc_RNA (1)...(19): siRNA sense strand
ggaaggacaacacgggcua

SEQ ID NO: 2429444 - RNA, 19 nt, Homo sapiens
  misc_RNA (1)...(19): siRNA sense strand
agagggacguccugggcua

SEQ ID NO: 2429445 - RNA, 19 nt, Homo sapiens
  misc_RNA (1)...(19): siRNA sense strand
gggauggcuacguguacaa

SEQ ID NO: 2429446 - RNA, 19 nt, Homo sapiens
  misc_RNA (1)...(19): siRNA sense strand
uggaaguggugcuggccga

SEQ ID NO: 2429447 - RNA, 19 nt, Homo sapiens
  misc_RNA (1)...(19): siRNA sense strand
gcaaggggaugcuggguga

SEQ ID NO: 2429448 - RNA, 19 nt, Homo sapiens
  misc_RNA (1)...(19): siRNA sense strand
gaaaauaauucuuggagca

SEQ ID NO: 2429449 - RNA, 19 nt, Homo sapiens
  misc_RNA (1)...(19): siRNA sense strand
gaucaagaagugugcgaca

SEQ ID NO: 2429450 - RNA, 19 nt, Homo sapiens
  misc_RNA (1)...(19): siRNA sense strand
ccgcagaacuggaccacca

SEQ ID NO: 2429451 - RNA, 19 nt, Homo sapiens
  misc_RNA (1)...(19): siRNA sense strand
cguuggaaagugcaagaua

SEQ ID NO: 2429452 - RNA, 19 nt, Homo sapiens
  misc_RNA (1)...(19): siRNA sense strand
gaacaaaguuuccgccugu

SEQ ID NO: 2429453 - RNA, 19 nt, Homo sapiens
  misc_RNA (1)...(19): siRNA sense strand
ugguggagcuguggcgaaa

SEQ ID NO: 2429454 - RNA, 19 nt, Homo sapiens
  misc_RNA (1)...(19): siRNA sense strand
auguguuacuggaggugaa

SEQ ID NO: 2429455 - RNA, 19 nt, Homo sapiens
  misc_RNA (1)...(19): siRNA sense strand
cggcguaccagaagugaca

SEQ ID NO: 2429456 - RNA, 19 nt, Homo sapiens
  misc_RNA (1)...(19): siRNA sense strand
ggucagaagacguggcccu

SEQ ID NO: 2429457 - RNA, 19 nt, Homo sapiens
  misc_RNA (1)...(19): siRNA sense strand
acauagcaaacaaggaaau

SEQ ID NO: 2429458 - RNA, 19 nt, Homo sapiens
  misc_RNA (1)...(19): siRNA sense strand
agaucgucauccagaacaa

SEQ ID NO: 2429459 - RNA, 19 nt, Homo sapiens
  misc_RNA (1)...(19): siRNA sense strand
uguuaguaguggaucaaaa

SEQ ID NO: 2429460 - RNA, 19 nt, Homo sapiens
  misc_RNA (1)...(19): siRNA sense strand
guucaggagcccagggacu

SEQ ID NO: 2429461 - RNA, 19 nt, Homo sapiens
  misc_RNA (1)...(19): siRNA sense strand
cguuauugcuguuaguagu

SEQ ID NO: 2429462 - RNA, 19 nt, Homo sapiens
  misc_RNA (1)...(19): siRNA sense strand
guuauaacucgggaggaua

SEQ ID NO: 2429463 - RNA, 19 nt, Homo sapiens
  misc_RNA (1)...(19): siRNA sense strand
ccagaagugccucgugaau

SEQ ID NO: 2429464 - RNA, 19 nt, Homo sapiens
  misc_RNA (1)...(19): siRNA sense strand
ggagcaugucuuuagguau

SEQ ID NO: 2429465 - RNA, 19 nt, Homo sapiens
  misc_RNA (1)...(19): siRNA sense strand
cuguguaggagaugcaaga

SEQ ID NO: 2429466 - RNA, 19 nt, Homo sapiens
  misc_RNA (1)...(19): siRNA sense strand
aauaauucuuggagcaugu

SEQ ID NO: 2429467 - RNA, 19 nt, Homo sapiens
  misc_RNA (1)...(19): siRNA sense strand
uuggaaagugcaagauaga

SEQ ID NO: 2429468 - RNA, 19 nt, Homo sapiens
  misc_RNA (1)...(19): siRNA sense strand
ggcagaaaucauugggucu

SEQ ID NO: 2429469 - RNA, 19 nt, Homo sapiens
  misc_RNA (1)...(19): siRNA sense strand
cgaugcuuguagugaauca

SEQ ID NO: 2429470 - RNA, 19 nt, Homo sapiens
  misc_RNA (1)...(19): siRNA sense strand
cucuggugauggugagcaa

SEQ ID NO: 2429471 - RNA, 19 nt, Homo sapiens
  misc_RNA (1)...(19): siRNA sense strand
cuaccuuaacuguggacau

SEQ ID NO: 2429472 - RNA, 19 nt, Homo sapiens
  misc_RNA (1)...(19): siRNA sense strand
guucagggccucagccaca

SEQ ID NO: 2429473 - RNA, 19 nt, Homo sapiens
  misc_RNA (1)...(19): siRNA sense strand
cuguggacauagcaaacaa

SEQ ID NO: 2429474 - RNA, 19 nt, Homo sapiens
  misc_RNA (1)...(19): siRNA sense strand
gacauagcaaacaaggaaa

SEQ ID NO: 2429475 - RNA, 19 nt, Homo sapiens
  misc_RNA (1)...(19): siRNA sense strand
ucaucaucgagaaggaauu

SEQ ID NO: 2429476 - RNA, 19 nt, Homo sapiens
  misc_RNA (1)...(19): siRNA sense strand
uugcgaugcuuguagugaa

SEQ ID NO: 2429477 - RNA, 19 nt, Homo sapiens
  misc_RNA (1)...(19): siRNA sense strand
gggaagaagaaaagaaaga

SEQ ID NO: 2429478 - RNA, 19 nt, Homo sapiens
  misc_RNA (1)...(19): siRNA sense strand
cagcagcagcagauggaaa

SEQ ID NO: 2429479 - RNA, 19 nt, Homo sapiens
  misc_RNA (1)...(19): siRNA sense strand
cagcaugggaagaagaaaa

SEQ ID NO: 2429480 - RNA, 19 nt, Homo sapiens
  misc_RNA (1)...(19): siRNA sense strand
cggagagaccaaagaugaa

SEQ ID NO: 2429481 - RNA, 19 nt, Homo sapiens
  misc_RNA (1)...(19): siRNA sense strand
uguccagagaugaagauaa

SEQ ID NO: 2429482 - RNA, 19 nt, Homo sapiens
  misc_RNA (1)...(19): siRNA sense strand
aggaacacgaguaggaaca

SEQ ID NO: 2429483 - RNA, 19 nt, Homo sapiens
  misc_RNA (1)...(19): siRNA sense strand
aaacaggauuccacggaga

SEQ ID NO: 2429484 - RNA, 19 nt, Homo sapiens
  misc_RNA (1)...(19): siRNA sense strand
ggaaacagcagcagcggca

SEQ ID NO: 2429485 - RNA, 19 nt, Homo sapiens
  misc_RNA (1)...(19): siRNA sense strand
cagcaacagaagaagguga

SEQ ID NO: 2429486 - RNA, 19 nt, Homo sapiens
  misc_RNA (1)...(19): siRNA sense strand
aaaagaaagccaagaguga

SEQ ID NO: 2429487 - RNA, 19 nt, Homo sapiens
  misc_RNA (1)...(19): siRNA sense strand
cagagauacaugugagcca

SEQ ID NO: 2429488 - RNA, 19 nt, Homo sapiens
  misc_RNA (1)...(19): siRNA sense strand
gcuggaacucugagcucaa

SEQ ID NO: 2429489 - RNA, 19 nt, Homo sapiens
  misc_RNA (1)...(19): siRNA sense strand
acagaagguuacaggaaac

SEQ ID NO: 2429490 - RNA, 19 nt, Homo sapiens
  misc_RNA (1)...(19): siRNA sense strand
cugaauuguaugaaacaga

SEQ ID NO: 2429491 - RNA, 19 nt, Homo sapiens
  misc_RNA (1)...(19): siRNA sense strand
ggaaagaccagcacugcga

SEQ ID NO: 2429492 - RNA, 19 nt, Homo sapiens
  misc_RNA (1)...(19): siRNA sense strand
caacagaagaaggugaaaa

SEQ ID NO: 2429493 - RNA, 19 nt, Homo sapiens
  misc_RNA (1)...(19): siRNA sense strand
cccuggaugcugaagauaa

SEQ ID NO: 2429494 - RNA, 19 nt, Homo sapiens
  misc_RNA (1)...(19): siRNA sense strand
augaugaggaugaggagga

SEQ ID NO: 2429495 - RNA, 19 nt, Homo sapiens
  misc_RNA (1)...(19): siRNA sense strand
caguguugaauuugaauga

SEQ ID NO: 2429496 - RNA, 19 nt, Homo sapiens
  misc_RNA (1)...(19): siRNA sense strand
ccagagaugaagauaaaau

SEQ ID NO: 2429497 - RNA, 19 nt, Homo sapiens
  misc_RNA (1)...(19): siRNA sense strand
uaaaauuggccaugaugaa

SEQ ID NO: 2429498 - RNA, 19 nt, Homo sapiens
  misc_RNA (1)...(19): siRNA sense strand
ccugcacaauugagagaaa

SEQ ID NO: 2429499 - RNA, 19 nt, Homo sapiens
  misc_RNA (1)...(19): siRNA sense strand
ccuccaaaguacaggcaga

SEQ ID NO: 2429500 - RNA, 19 nt, Homo sapiens
  misc_RNA (1)...(19): siRNA sense strand
gcuccauggaauugugaua

SEQ ID NO: 2429501 - RNA, 19 nt, Homo sapiens
  misc_RNA (1)...(19): siRNA sense strand
ggagaaaagggaagccaua

SEQ ID NO: 2429502 - RNA, 19 nt, Homo sapiens
  misc_RNA (1)...(19): siRNA sense strand
agugcauguuacagaauaa

SEQ ID NO: 2429503 - RNA, 19 nt, Homo sapiens
  misc_RNA (1)...(19): siRNA sense strand
acuuaaugguggucgaaca

SEQ ID NO: 2429504 - RNA, 19 nt, Homo sapiens
  misc_RNA (1)...(19): siRNA sense strand
ccaugaagaagauagaaau

SEQ ID NO: 2429505 - RNA, 19 nt, Homo sapiens
  misc_RNA (1)...(19): siRNA sense strand
aagaggagcuagagcgguu

SEQ ID NO: 2429506 - RNA, 19 nt, Homo sapiens
  misc_RNA (1)...(19): siRNA sense strand
augacaagauugagaagca

SEQ ID NO: 2429507 - RNA, 19 nt, Homo sapiens
  misc_RNA (1)...(19): siRNA sense strand
uagcaaagcaacugaaacu

SEQ ID NO: 2429508 - RNA, 19 nt, Homo sapiens
  misc_RNA (1)...(19): siRNA sense strand
cgguauaguacaaauccaa

SEQ ID NO: 2429509 - RNA, 19 nt, Homo sapiens
  misc_RNA (1)...(19): siRNA sense strand
caacagaacuaucagccuu

SEQ ID NO: 2429510 - RNA, 19 nt, Homo sapiens
  misc_RNA (1)...(19): siRNA sense strand
gaucagaugacuaugccua

SEQ ID NO: 2429511 - RNA, 19 nt, Homo sapiens
  misc_RNA (1)...(19): siRNA sense strand
cccaggagauggagcccaa

SEQ ID NO: 2429512 - RNA, 19 nt, Homo sapiens
  misc_RNA (1)...(19): siRNA sense strand
uccaugaagaagauagaaa

SEQ ID NO: 2429513 - RNA, 19 nt, Homo sapiens
  misc_RNA (1)...(19): siRNA sense strand
ccauaguccagaugacaau

SEQ ID NO: 2429514 - RNA, 19 nt, Homo sapiens
  misc_RNA (1)...(19): siRNA sense strand
ccaacuuaaugguggucga

SEQ ID NO: 2429515 - RNA, 19 nt, Homo sapiens
  misc_RNA (1)...(19): siRNA sense strand
agccauaaauaucagagaa

SEQ ID NO: 2429516 - RNA, 19 nt, Homo sapiens
  misc_RNA (1)...(19): siRNA sense strand
caugcaaacaggaaugaau

SEQ ID NO: 2429517 - RNA, 19 nt, Homo sapiens
  misc_RNA (1)...(19): siRNA sense strand
ggagagguuagcaaagcaa

SEQ ID NO: 2429518 - RNA, 19 nt, Homo sapiens
  misc_RNA (1)...(19): siRNA sense strand
ucagcaugcagcagguaaa

SEQ ID NO: 2429519 - RNA, 19 nt, Homo sapiens
  misc_RNA (1)...(19): siRNA sense strand
uugagaaagaggagcuaga

SEQ ID NO: 2429520 - RNA, 19 nt, Homo sapiens
  misc_RNA (1)...(19): siRNA sense strand
aguuaaugguauggagcau

SEQ ID NO: 2429521 - RNA, 19 nt, Homo sapiens
  misc_RNA (1)...(19): siRNA sense strand
agaaaagggaagccauaaa

SEQ ID NO: 2429522 - RNA, 19 nt, Homo sapiens
  misc_RNA (1)...(19): siRNA sense strand
gcccgaagaauuagcguga

SEQ ID NO: 2429523 - RNA, 19 nt, Homo sapiens
  misc_RNA (1)...(19): siRNA sense strand
acauauugauccucagcau

SEQ ID NO: 2429524 - RNA, 19 nt, Homo sapiens
  misc_RNA (1)...(19): siRNA sense strand
ccaaaguacaggcagacau

SEQ ID NO: 2429525 - RNA, 19 nt, Homo sapiens
  misc_RNA (1)...(19): siRNA sense strand
gaacagaacagaagugcag

SEQ ID NO: 2429526 - RNA, 19 nt, Homo sapiens
  misc_RNA (1)...(19): siRNA sense strand
gacuguaccaagagcuuua

SEQ ID NO: 2429527 - RNA, 19 nt, Homo sapiens
  misc_RNA (1)...(19): siRNA sense strand
cagccaucuuccaugcaaa

SEQ ID NO: 2429528 - RNA, 19 nt, Homo sapiens
  misc_RNA (1)...(19): siRNA sense strand
agaaauuacaguugaaccu

SEQ ID NO: 2429529 - RNA, 19 nt, Homo sapiens
  misc_RNA (1)...(19): siRNA sense strand
agggauaucuagucaacca

SEQ ID NO: 2429530 - RNA, 19 nt, Homo sapiens
  misc_RNA (1)...(19): siRNA sense strand
aggauggagagguuagcaa

SEQ ID NO: 2429531 - RNA, 19 nt, Homo sapiens
  misc_RNA (1)...(19): siRNA sense strand
cugaaauuccagagggcgu

SEQ ID NO: 2429532 - RNA, 19 nt, Homo sapiens
  misc_RNA (1)...(19): siRNA sense strand
ccuucaagagggauaucua

SEQ ID NO: 2429533 - RNA, 19 nt, Homo sapiens
  misc_RNA (1)...(19): siRNA sense strand
cgaaggggcuccauggaau

SEQ ID NO: 2429534 - RNA, 19 nt, Homo sapiens
  misc_RNA (1)...(19): siRNA sense strand
cagaaacagggaagccauu

SEQ ID NO: 2429535 - RNA, 19 nt, Homo sapiens
  misc_RNA (1)...(19): siRNA sense strand
cucaagugauggacauauu

SEQ ID NO: 2429536 - RNA, 19 nt, Homo sapiens
  misc_RNA (1)...(19): siRNA sense strand
gaguucaucaggaagacaa

SEQ ID NO: 2429537 - RNA, 19 nt, Homo sapiens
  misc_RNA (1)...(19): siRNA sense strand
caacgagcaaggauggaga

SEQ ID NO: 2429538 - RNA, 19 nt, Homo sapiens
  misc_RNA (1)...(19): siRNA sense strand
caacaaucuugaagccugu

SEQ ID NO: 2429539 - RNA, 19 nt, Homo sapiens
  misc_RNA (1)...(19): siRNA sense strand
cagaguacgccguggcagu

SEQ ID NO: 2429540 - RNA, 19 nt, Homo sapiens
  misc_RNA (1)...(19): siRNA sense strand
ucuccaugaucuucgacaa

SEQ ID NO: 2429541 - RNA, 19 nt, Homo sapiens
  misc_RNA (1)...(19): siRNA sense strand
guuccaugaagaagauaga

SEQ ID NO: 2429542 - RNA, 19 nt, Homo sapiens
  misc_RNA (1)...(19): siRNA sense strand
ugaaagaaguugaccuccu

SEQ ID NO: 2429543 - RNA, 19 nt, Homo sapiens
  misc_RNA (1)...(19): siRNA sense strand
ccugcacaauugagagaaa

SEQ ID NO: 2429544 - RNA, 19 nt, Homo sapiens
  misc_RNA (1)...(19): siRNA sense strand
ccuccaaaguacaggcaga

SEQ ID NO: 2429545 - RNA, 19 nt, Homo sapiens
  misc_RNA (1)...(19): siRNA sense strand
gcuccauggaauugugaua

SEQ ID NO: 2429546 - RNA, 19 nt, Homo sapiens
  misc_RNA (1)...(19): siRNA sense strand
ggagaaaagggaagccaua

SEQ ID NO: 2429547 - RNA, 19 nt, Homo sapiens
  misc_RNA (1)...(19): siRNA sense strand
agugcauguuacagaauaa

SEQ ID NO: 2429548 - RNA, 19 nt, Homo sapiens
  misc_RNA (1)...(19): siRNA sense strand
acuuaaugguggucgaaca

SEQ ID NO: 2429549 - RNA, 19 nt, Homo sapiens
  misc_RNA (1)...(19): siRNA sense strand
ccaugaagaagauagaaau

SEQ ID NO: 2429550 - RNA, 19 nt, Homo sapiens
  misc_RNA (1)...(19): siRNA sense strand
aagaggagcuagagcgguu

SEQ ID NO: 2429551 - RNA, 19 nt, Homo sapiens
  misc_RNA (1)...(19): siRNA sense strand
augacaagauugagaagca

SEQ ID NO: 2429552 - RNA, 19 nt, Homo sapiens
  misc_RNA (1)...(19): siRNA sense strand
uagcaaagcaacugaaacu

SEQ ID NO: 2429553 - RNA, 19 nt, Homo sapiens
  misc_RNA (1)...(19): siRNA sense strand
cgguauaguacaaauccaa

SEQ ID NO: 2429554 - RNA, 19 nt, Homo sapiens
  misc_RNA (1)...(19): siRNA sense strand
caacagaacuaucagccuu

SEQ ID NO: 2429555 - RNA, 19 nt, Homo sapiens
  misc_RNA (1)...(19): siRNA sense strand
gaucagaugacuaugccua

SEQ ID NO: 2429556 - RNA, 19 nt, Homo sapiens
  misc_RNA (1)...(19): siRNA sense strand
cccaggagauggagcccaa

SEQ ID NO: 2429557 - RNA, 19 nt, Homo sapiens
  misc_RNA (1)...(19): siRNA sense strand
uccaugaagaagauagaaa

SEQ ID NO: 2429558 - RNA, 19 nt, Homo sapiens
  misc_RNA (1)...(19): siRNA sense strand
ccauaguccagaugacaau

SEQ ID NO: 2429559 - RNA, 19 nt, Homo sapiens
  misc_RNA (1)...(19): siRNA sense strand
ccaacuuaaugguggucga

SEQ ID NO: 2429560 - RNA, 19 nt, Homo sapiens
  misc_RNA (1)...(19): siRNA sense strand
agccauaaauaucagagaa

SEQ ID NO: 2429561 - RNA, 19 nt, Homo sapiens
  misc_RNA (1)...(19): siRNA sense strand
caugcaaacaggaaugaau

SEQ ID NO: 2429562 - RNA, 19 nt, Homo sapiens
  misc_RNA (1)...(19): siRNA sense strand
ggagagguuagcaaagcaa

SEQ ID NO: 2429563 - RNA, 19 nt, Homo sapiens
  misc_RNA (1)...(19): siRNA sense strand
ucagcaugcagcagguaaa

SEQ ID NO: 2429564 - RNA, 19 nt, Homo sapiens
  misc_RNA (1)...(19): siRNA sense strand
uugagaaagaggagcuaga

SEQ ID NO: 2429565 - RNA, 19 nt, Homo sapiens
  misc_RNA (1)...(19): siRNA sense strand
aguuaaugguauggagcau

SEQ ID NO: 2429566 - RNA, 19 nt, Homo sapiens
  misc_RNA (1)...(19): siRNA sense strand
agaaaagggaagccauaaa

SEQ ID NO: 2429567 - RNA, 19 nt, Homo sapiens
  misc_RNA (1)...(19): siRNA sense strand
gcccgaagaauuagcguga

SEQ ID NO: 2429568 - RNA, 19 nt, Homo sapiens
  misc_RNA (1)...(19): siRNA sense strand
acauauugauccucagcau

SEQ ID NO: 2429569 - RNA, 19 nt, Homo sapiens
  misc_RNA (1)...(19): siRNA sense strand
ccaaaguacaggcagacau

SEQ ID NO: 2429570 - RNA, 19 nt, Homo sapiens
  misc_RNA (1)...(19): siRNA sense strand
gaacagaacagaagugcag

SEQ ID NO: 2429571 - RNA, 19 nt, Homo sapiens
  misc_RNA (1)...(19): siRNA sense strand
gacuguaccaagagcuuua

SEQ ID NO: 2429572 - RNA, 19 nt, Homo sapiens
  misc_RNA (1)...(19): siRNA sense strand
cagccaucuuccaugcaaa

SEQ ID NO: 2429573 - RNA, 19 nt, Homo sapiens
  misc_RNA (1)...(19): siRNA sense strand
agaaauuacaguugaaccu

SEQ ID NO: 2429574 - RNA, 19 nt, Homo sapiens
  misc_RNA (1)...(19): siRNA sense strand
agggauaucuagucaacca

SEQ ID NO: 2429575 - RNA, 19 nt, Homo sapiens
  misc_RNA (1)...(19): siRNA sense strand
aggauggagagguuagcaa

SEQ ID NO: 2429576 - RNA, 19 nt, Homo sapiens
  misc_RNA (1)...(19): siRNA sense strand
cugaaauuccagagggcgu

SEQ ID NO: 2429577 - RNA, 19 nt, Homo sapiens
  misc_RNA (1)...(19): siRNA sense strand
ccuucaagagggauaucua

SEQ ID NO: 2429578 - RNA, 19 nt, Homo sapiens
  misc_RNA (1)...(19): siRNA sense strand
cgaaggggcuccauggaau

SEQ ID NO: 2429579 - RNA, 19 nt, Homo sapiens
  misc_RNA (1)...(19): siRNA sense strand
cagaaacagggaagccauu

SEQ ID NO: 2429580 - RNA, 19 nt, Homo sapiens
  misc_RNA (1)...(19): siRNA sense strand
cucaagugauggacauauu

SEQ ID NO: 2429581 - RNA, 19 nt, Homo sapiens
  misc_RNA (1)...(19): siRNA sense strand
gaguucaucaggaagacaa

SEQ ID NO: 2429582 - RNA, 19 nt, Homo sapiens
  misc_RNA (1)...(19): siRNA sense strand
caacgagcaaggauggaga

SEQ ID NO: 2429583 - RNA, 19 nt, Homo sapiens
  misc_RNA (1)...(19): siRNA sense strand
caacaaucuugaagccugu

SEQ ID NO: 2429584 - RNA, 19 nt, Homo sapiens
  misc_RNA (1)...(19): siRNA sense strand
cagaguacgccguggcagu

SEQ ID NO: 2429585 - RNA, 19 nt, Homo sapiens
  misc_RNA (1)...(19): siRNA sense strand
ucuccaugaucuucgacaa

SEQ ID NO: 2429586 - RNA, 19 nt, Homo sapiens
  misc_RNA (1)...(19): siRNA sense strand
guuccaugaagaagauaga

SEQ ID NO: 2429587 - RNA, 19 nt, Homo sapiens
  misc_RNA (1)...(19): siRNA sense strand
ugaaagaaguugaccuccu

SEQ ID NO: 2429588 - RNA, 19 nt, Homo sapiens
  misc_RNA (1)...(19): siRNA sense strand
ggauaagaaacaaggaaaa

SEQ ID NO: 2429589 - RNA, 19 nt, Homo sapiens
  misc_RNA (1)...(19): siRNA sense strand
aggauaagaaacaaggaaa

SEQ ID NO: 2429590 - RNA, 19 nt, Homo sapiens
  misc_RNA (1)...(19): siRNA sense strand
ggaagaaguaaaagagcaa

SEQ ID NO: 2429591 - RNA, 19 nt, Homo sapiens
  misc_RNA (1)...(19): siRNA sense strand
auucugaagaugaggauaa

SEQ ID NO: 2429592 - RNA, 19 nt, Homo sapiens
  misc_RNA (1)...(19): siRNA sense strand
aggaaaacggagaaagaaa

SEQ ID NO: 2429593 - RNA, 19 nt, Homo sapiens
  misc_RNA (1)...(19): siRNA sense strand
aagaaaggcuccaaggcuu

SEQ ID NO: 2429594 - RNA, 19 nt, Homo sapiens
  misc_RNA (1)...(19): siRNA sense strand
uggcugaauuugaagaaaa

SEQ ID NO: 2429595 - RNA, 19 nt, Homo sapiens
  misc_RNA (1)...(19): siRNA sense strand
cuaccugggaagaaguaaa

SEQ ID NO: 2429596 - RNA, 19 nt, Homo sapiens
  misc_RNA (1)...(19): siRNA sense strand
gggaagaaguaaaagagca

SEQ ID NO: 2429597 - RNA, 19 nt, Homo sapiens
  misc_RNA (1)...(19): siRNA sense strand
uggaagaaagaacuggaaa

SEQ ID NO: 2429598 - RNA, 19 nt, Homo sapiens
  misc_RNA (1)...(19): siRNA sense strand
aaaagauggaacugagaaa

SEQ ID NO: 2429599 - RNA, 19 nt, Homo sapiens
  misc_RNA (1)...(19): siRNA sense strand
augaaugagaacuggaaga

SEQ ID NO: 2429600 - RNA, 19 nt, Homo sapiens
  misc_RNA (1)...(19): siRNA sense strand
cugagaaagaaaaggauau

SEQ ID NO: 2429601 - RNA, 19 nt, Homo sapiens
  misc_RNA (1)...(19): siRNA sense strand
agcauaagaaacacaguaa

SEQ ID NO: 2429602 - RNA, 19 nt, Homo sapiens
  misc_RNA (1)...(19): siRNA sense strand
auuaaaggacucagcaaaa

SEQ ID NO: 2429603 - RNA, 19 nt, Homo sapiens
  misc_RNA (1)...(19): siRNA sense strand
aagaaaucugguagguauu

SEQ ID NO: 2429604 - RNA, 19 nt, Homo sapiens
  misc_RNA (1)...(19): siRNA sense strand
cugaaucgaccaaggccua

SEQ ID NO: 2429605 - RNA, 19 nt, Homo sapiens
  misc_RNA (1)...(19): siRNA sense strand
gaaacaaggaaaacggaga

SEQ ID NO: 2429606 - RNA, 19 nt, Homo sapiens
  misc_RNA (1)...(19): siRNA sense strand
cagaguauauugaggaggu

SEQ ID NO: 2429607 - RNA, 19 nt, Homo sapiens
  misc_RNA (1)...(19): siRNA sense strand
cacaguaagaagaagaaaa

SEQ ID NO: 2429608 - RNA, 19 nt, Homo sapiens
  misc_RNA (1)...(19): siRNA sense strand
augagaacuggaagaaaga

SEQ ID NO: 2429609 - RNA, 19 nt, Homo sapiens
  misc_RNA (1)...(19): siRNA sense strand
auauuaaaggacucagcaa

SEQ ID NO: 2429610 - RNA, 19 nt, Homo sapiens
  misc_RNA (1)...(19): siRNA sense strand
aagcagugaagaacgagaa

SEQ ID NO: 2429611 - RNA, 19 nt, Homo sapiens
  misc_RNA (1)...(19): siRNA sense strand
auagcaauggcgagaucaa

SEQ ID NO: 2429612 - RNA, 19 nt, Homo sapiens
  misc_RNA (1)...(19): siRNA sense strand
caucgaugaagaaggcaaa

SEQ ID NO: 2429613 - RNA, 19 nt, Homo sapiens
  misc_RNA (1)...(19): siRNA sense strand
aagaaggcaaagagagaca

SEQ ID NO: 2429614 - RNA, 19 nt, Homo sapiens
  misc_RNA (1)...(19): siRNA sense strand
ccuccuaugcagauggcua

SEQ ID NO: 2429615 - RNA, 19 nt, Homo sapiens
  misc_RNA (1)...(19): siRNA sense strand
acaucgaugaagaaggcaa

SEQ ID NO: 2429616 - RNA, 19 nt, Homo sapiens
  misc_RNA (1)...(19): siRNA sense strand
acaagaucgcggaaaucaa

SEQ ID NO: 2429617 - RNA, 19 nt, Homo sapiens
  misc_RNA (1)...(19): siRNA sense strand
agacggacccugaggccuu

SEQ ID NO: 2429618 - RNA, 19 nt, Homo sapiens
  misc_RNA (1)...(19): siRNA sense strand
agagauacgugguggcuug

SEQ ID NO: 2429619 - RNA, 19 nt, Homo sapiens
  misc_RNA (1)...(19): siRNA sense strand
cagacagagaacaagauuu

SEQ ID NO: 2429620 - RNA, 19 nt, Homo sapiens
  misc_RNA (1)...(19): siRNA sense strand
ccucaauguggcucagaga

SEQ ID NO: 2429621 - RNA, 19 nt, Homo sapiens
  misc_RNA (1)...(19): siRNA sense strand
aacacaacuuagugaacau

SEQ ID NO: 2429622 - RNA, 19 nt, Homo sapiens
  misc_RNA (1)...(19): siRNA sense strand
ggacaaagcugcguggccu

SEQ ID NO: 2429623 - RNA, 19 nt, Homo sapiens
  misc_RNA (1)...(19): siRNA sense strand
aggccgaugcagaggcuga

SEQ ID NO: 2429624 - RNA, 19 nt, Homo sapiens
  misc_RNA (1)...(19): siRNA sense strand
cagucaaagaagaggagaa

SEQ ID NO: 2429625 - RNA, 19 nt, Homo sapiens
  misc_RNA (1)...(19): siRNA sense strand
uaaagaaagacgagggugu

SEQ ID NO: 2429626 - RNA, 19 nt, Homo sapiens
  misc_RNA (1)...(19): siRNA sense strand
aggagaaccccgagaaaau

SEQ ID NO: 2429627 - RNA, 19 nt, Homo sapiens
  misc_RNA (1)...(19): siRNA sense strand
gcggaagagaagaagcaca

SEQ ID NO: 2429628 - RNA, 19 nt, Homo sapiens
  misc_RNA (1)...(19): siRNA sense strand
gcaagcgacaggagcggaa

SEQ ID NO: 2429629 - RNA, 19 nt, Homo sapiens
  misc_RNA (1)...(19): siRNA sense strand
ccucacagcgagagccaau

SEQ ID NO: 2429630 - RNA, 19 nt, Homo sapiens
  misc_RNA (1)...(19): siRNA sense strand
gagaagaagcacagccaac

SEQ ID NO: 2429631 - RNA, 19 nt, Homo sapiens
  misc_RNA (1)...(19): siRNA sense strand
ggacugggaugcuggccau

SEQ ID NO: 2429632 - RNA, 19 nt, Homo sapiens
  misc_RNA (1)...(19): siRNA sense strand
gcaacgaggcagugagcug

SEQ ID NO: 2429633 - RNA, 19 nt, Homo sapiens
  misc_RNA (1)...(19): siRNA sense strand
acggaacauuuggaagaaa

SEQ ID NO: 2429634 - RNA, 19 nt, Homo sapiens
  misc_RNA (1)...(19): siRNA sense strand
gugcagaaaugccuggagu

SEQ ID NO: 2429635 - RNA, 19 nt, Homo sapiens
  misc_RNA (1)...(19): siRNA sense strand
ccaacaacacugucagcca

SEQ ID NO: 2429636 - RNA, 19 nt, Homo sapiens
  misc_RNA (1)...(19): siRNA sense strand
gaagaaauccagagcaagc

SEQ ID NO: 2429637 - RNA, 19 nt, Homo sapiens
  misc_RNA (1)...(19): siRNA sense strand
aaagaagaggagaagcaga

SEQ ID NO: 2429638 - RNA, 19 nt, Homo sapiens
  misc_RNA (1)...(19): siRNA sense strand
gguccaggaaagaaagaua

SEQ ID NO: 2429639 - RNA, 19 nt, Homo sapiens
  misc_RNA (1)...(19): siRNA sense strand
cgauacuuguggagcaaau

SEQ ID NO: 2429640 - RNA, 19 nt, Homo sapiens
  misc_RNA (1)...(19): siRNA sense strand
gguugauauccuugcuaaa

SEQ ID NO: 2429641 - RNA, 19 nt, Homo sapiens
  misc_RNA (1)...(19): siRNA sense strand
gcuuaauuccugugaaguu

SEQ ID NO: 2429642 - RNA, 19 nt, Homo sapiens
  misc_RNA (1)...(19): siRNA sense strand
cagucaggugguugaaaua

SEQ ID NO: 2429643 - RNA, 19 nt, Homo sapiens
  misc_RNA (1)...(19): siRNA sense strand
uguccugaauugaaagcaa

SEQ ID NO: 2429644 - RNA, 19 nt, Homo sapiens
  misc_RNA (1)...(19): siRNA sense strand
acucaaagaugcugaaccu

SEQ ID NO: 2429645 - RNA, 19 nt, Homo sapiens
  misc_RNA (1)...(19): siRNA sense strand
ccaaaggauuauagcugga

SEQ ID NO: 2429646 - RNA, 19 nt, Homo sapiens
  misc_RNA (1)...(19): siRNA sense strand
uguuugugguggaaguuua

SEQ ID NO: 2429647 - RNA, 19 nt, Homo sapiens
  misc_RNA (1)...(19): siRNA sense strand
ccaauaaagcgaauggacu

SEQ ID NO: 2429648 - RNA, 19 nt, Homo sapiens
  misc_RNA (1)...(19): siRNA sense strand
cugugagagcagaggauca

SEQ ID NO: 2429649 - RNA, 19 nt, Homo sapiens
  misc_RNA (1)...(19): siRNA sense strand
ugauaaguggaaugaggua

SEQ ID NO: 2429650 - RNA, 19 nt, Homo sapiens
  misc_RNA (1)...(19): siRNA sense strand
gaaggguguaacagugaaa

SEQ ID NO: 2429651 - RNA, 19 nt, Homo sapiens
  misc_RNA (1)...(19): siRNA sense strand
gugaaggauagcugguauu

SEQ ID NO: 2429652 - RNA, 19 nt, Homo sapiens
  misc_RNA (1)...(19): siRNA sense strand
gagcaaaugaagagacccu

SEQ ID NO: 2429653 - RNA, 19 nt, Homo sapiens
  misc_RNA (1)...(19): siRNA sense strand
ccgagaagaacuuguagau

SEQ ID NO: 2429654 - RNA, 19 nt, Homo sapiens
  misc_RNA (1)...(19): siRNA sense strand
ucaugguccaggaaagaaa

SEQ ID NO: 2429655 - RNA, 19 nt, Homo sapiens
  misc_RNA (1)...(19): siRNA sense strand
cgaaacagacaaauggguu

SEQ ID NO: 2429656 - RNA, 19 nt, Homo sapiens
  misc_RNA (1)...(19): siRNA sense strand
gagaagaacuuguagaugg

SEQ ID NO: 2429657 - RNA, 19 nt, Homo sapiens
  misc_RNA (1)...(19): siRNA sense strand
gauugaagccaggaagaau

SEQ ID NO: 2429658 - RNA, 19 nt, Homo sapiens
  misc_RNA (1)...(19): siRNA sense strand
gucuggacaauguggaaua

SEQ ID NO: 2429659 - RNA, 19 nt, Homo sapiens
  misc_RNA (1)...(19): siRNA sense strand
agugaaggauagcugguau

SEQ ID NO: 2429660 - RNA, 19 nt, Homo sapiens
  misc_RNA (1)...(19): siRNA sense strand
gagguucagaaguaggaaa

SEQ ID NO: 2429661 - RNA, 19 nt, Homo sapiens
  misc_RNA (1)...(19): siRNA sense strand
ugucgauacuuguggagca

SEQ ID NO: 2429662 - RNA, 19 nt, Homo sapiens
  misc_RNA (1)...(19): siRNA sense strand
gaaacuggguccuccgaca

SEQ ID NO: 2429663 - RNA, 19 nt, Homo sapiens
  misc_RNA (1)...(19): siRNA sense strand
gagaacaaguugaugcuuc

SEQ ID NO: 2429664 - RNA, 19 nt, Homo sapiens
  misc_RNA (1)...(19): siRNA sense strand
caauaaagcgaauggacug

SEQ ID NO: 2429665 - RNA, 19 nt, Homo sapiens
  misc_RNA (1)...(19): siRNA sense strand
cugcagaaggcaaaauuua

SEQ ID NO: 2429666 - RNA, 19 nt, Homo sapiens
  misc_RNA (1)...(19): siRNA sense strand
agacaauccugaaugccuu

SEQ ID NO: 2429667 - RNA, 19 nt, Homo sapiens
  misc_RNA (1)...(19): siRNA sense strand
aagaccuagaagaaagaaa

SEQ ID NO: 2429668 - RNA, 19 nt, Homo sapiens
  misc_RNA (1)...(19): siRNA sense strand
cugaaagcuggcacacaaa

SEQ ID NO: 2429669 - RNA, 19 nt, Homo sapiens
  misc_RNA (1)...(19): siRNA sense strand
guuuagguggucuggacaa

SEQ ID NO: 2429670 - RNA, 19 nt, Homo sapiens
  misc_RNA (1)...(19): siRNA sense strand
uauaauaccgaaacagaca

SEQ ID NO: 2429671 - RNA, 19 nt, Homo sapiens
  misc_RNA (1)...(19): siRNA sense strand
gggagggacugauugcaga

SEQ ID NO: 2429672 - RNA, 19 nt, Homo sapiens
  misc_RNA (1)...(19): siRNA sense strand
gugucuagauuguccugaa

SEQ ID NO: 2429673 - RNA, 19 nt, Homo sapiens
  misc_RNA (1)...(19): siRNA sense strand
aaguugaacgaauggaaga

SEQ ID NO: 2429674 - RNA, 19 nt, Homo sapiens
  misc_RNA (1)...(19): siRNA sense strand
cagacaaauggguugccaa

SEQ ID NO: 2429675 - RNA, 19 nt, Homo sapiens
  misc_RNA (1)...(19): siRNA sense strand
ucaaagaugcugaaccuga

SEQ ID NO: 2429676 - RNA, 19 nt, Homo sapiens
  misc_RNA (1)...(19): siRNA sense strand
uccagaggaccgagaagaa

SEQ ID NO: 2429677 - RNA, 19 nt, Homo sapiens
  misc_RNA (1)...(19): siRNA sense strand
aagcgaauggacugcuaua

SEQ ID NO: 2429678 - RNA, 19 nt, Homo sapiens
  misc_RNA (1)...(19): siRNA sense strand
cuucaaauugucuugguau

SEQ ID NO: 2429679 - RNA, 19 nt, Homo sapiens
  misc_RNA (1)...(19): siRNA sense strand
cuauguuugugguggaagu

SEQ ID NO: 2429680 - RNA, 19 nt, Homo sapiens
  misc_RNA (1)...(19): siRNA sense strand
ggugauaaguggaaugagg

SEQ ID NO: 2429681 - RNA, 19 nt, Homo sapiens
  misc_RNA (1)...(19): siRNA sense strand
gggacugauugcagaaccu

SEQ ID NO: 2429682 - RNA, 19 nt, Homo sapiens
  misc_RNA (1)...(19): siRNA sense strand
ggagggacugauugcagaa

SEQ ID NO: 2429683 - RNA, 19 nt, Homo sapiens
  misc_RNA (1)...(19): siRNA sense strand
cgguuacuguugaggacaa

SEQ ID NO: 2429684 - RNA, 19 nt, Homo sapiens
  misc_RNA (1)...(19): siRNA sense strand
ccugauucccagagugauu

SEQ ID NO: 2429685 - RNA, 19 nt, Homo sapiens
  misc_RNA (1)...(19): siRNA sense strand
ccucugauggugagaaaca

SEQ ID NO: 2429686 - RNA, 19 nt, Homo sapiens
  misc_RNA (1)...(19): siRNA sense strand
ccugcugagaagagggauu

SEQ ID NO: 2429687 - RNA, 19 nt, Homo sapiens
  misc_RNA (1)...(19): siRNA sense strand
ucauugaagcaguugagaa

SEQ ID NO: 2429688 - RNA, 19 nt, Homo sapiens
  misc_RNA (1)...(19): siRNA sense strand
gagaucgggcuguggguga

SEQ ID NO: 2429689 - RNA, 19 nt, Homo sapiens
  misc_RNA (1)...(19): siRNA sense strand
gaagagggauuguggagcu

SEQ ID NO: 2429690 - RNA, 19 nt, Homo sapiens
  misc_RNA (1)...(19): siRNA sense strand
ugagccagaaagaggcaaa

SEQ ID NO: 2429691 - RNA, 19 nt, Homo sapiens
  misc_RNA (1)...(19): siRNA sense strand
ucgcggugcaaguggagaa

SEQ ID NO: 2429692 - RNA, 19 nt, Homo sapiens
  misc_RNA (1)...(19): siRNA sense strand
cgguuuaagcaggaagaga

SEQ ID NO: 2429693 - RNA, 19 nt, Homo sapiens
  misc_RNA (1)...(19): siRNA sense strand
acuuggaacugaaagcaca

SEQ ID NO: 2429694 - RNA, 19 nt, Homo sapiens
  misc_RNA (1)...(19): siRNA sense strand
ccacagagcacuugcgguu

SEQ ID NO: 2429695 - RNA, 19 nt, Homo sapiens
  misc_RNA (1)...(19): siRNA sense strand
cgguguacgugguggacga

SEQ ID NO: 2429696 - RNA, 19 nt, Homo sapiens
  misc_RNA (1)...(19): siRNA sense strand
ccgacguacccaaggaauu

SEQ ID NO: 2429697 - RNA, 19 nt, Homo sapiens
  misc_RNA (1)...(19): siRNA sense strand
cuucaguauuugagccaga

SEQ ID NO: 2429698 - RNA, 19 nt, Homo sapiens
  misc_RNA (1)...(19): siRNA sense strand
cugcggacucuguaguaaa

SEQ ID NO: 2429699 - RNA, 19 nt, Homo sapiens
  misc_RNA (1)...(19): siRNA sense strand
gauugauggaagcgcagaa

SEQ ID NO: 2429700 - RNA, 19 nt, Homo sapiens
  misc_RNA (1)...(19): siRNA sense strand
ccacaacacuuuaugggaa

SEQ ID NO: 2429701 - RNA, 19 nt, Homo sapiens
  misc_RNA (1)...(19): siRNA sense strand
aagcaggaggaguggaaua

SEQ ID NO: 2429702 - RNA, 19 nt, Homo sapiens
  misc_RNA (1)...(19): siRNA sense strand
cggacaauguggagaaacu

SEQ ID NO: 2429703 - RNA, 19 nt, Homo sapiens
  misc_RNA (1)...(19): siRNA sense strand
aggauaucauugagaaaga

SEQ ID NO: 2429704 - RNA, 19 nt, Homo sapiens
  misc_RNA (1)...(19): siRNA sense strand
cugaguacuucaugaacaa

SEQ ID NO: 2429705 - RNA, 19 nt, Homo sapiens
  misc_RNA (1)...(19): siRNA sense strand
gcucaaugucaaacaggaa

SEQ ID NO: 2429706 - RNA, 19 nt, Homo sapiens
  misc_RNA (1)...(19): siRNA sense strand
aguuuaacaucauggguau

SEQ ID NO: 2429707 - RNA, 19 nt, Homo sapiens
  misc_RNA (1)...(19): siRNA sense strand
agcuuagacuagagggcaa

SEQ ID NO: 2429708 - RNA, 19 nt, Homo sapiens
  misc_RNA (1)...(19): siRNA sense strand
guuuaauccucguagcaau

SEQ ID NO: 2429709 - RNA, 19 nt, Homo sapiens
  misc_RNA (1)...(19): siRNA sense strand
gagaggaagaugagugcga

SEQ ID NO: 2429710 - RNA, 19 nt, Homo sapiens
  misc_RNA (1)...(19): siRNA sense strand
aguaaucaguggacaguca

SEQ ID NO: 2429711 - RNA, 19 nt, Homo sapiens
  misc_RNA (1)...(19): siRNA sense strand
caucaaggucaauggcuuu

SEQ ID NO: 2429712 - RNA, 19 nt, Homo sapiens
  misc_RNA (1)...(19): siRNA sense strand
ggaacaacacugaaaagaa

SEQ ID NO: 2429713 - RNA, 19 nt, Homo sapiens
  misc_RNA (1)...(19): siRNA sense strand
ugggaggauuugauggcua

SEQ ID NO: 2429714 - RNA, 19 nt, Homo sapiens
  misc_RNA (1)...(19): siRNA sense strand
agaagcaggaggaguggaa

SEQ ID NO: 2429715 - RNA, 19 nt, Homo sapiens
  misc_RNA (1)...(19): siRNA sense strand
uggugaaagucucggcaga

SEQ ID NO: 2429716 - RNA, 19 nt, Homo sapiens
  misc_RNA (1)...(19): siRNA sense strand
cccuaaaggccauguauga

SEQ ID NO: 2429717 - RNA, 19 nt, Homo sapiens
  misc_RNA (1)...(19): siRNA sense strand
uggcuuugauggagcuaau

SEQ ID NO: 2429718 - RNA, 19 nt, Homo sapiens
  misc_RNA (1)...(19): siRNA sense strand
caguuuaacaucaugggua

SEQ ID NO: 2429719 - RNA, 19 nt, Homo sapiens
  misc_RNA (1)...(19): siRNA sense strand
uuugaaaggcuauguguau

SEQ ID NO: 2429720 - RNA, 19 nt, Homo sapiens
  misc_RNA (1)...(19): siRNA sense strand
ucaucaaggucaauggcuu

SEQ ID NO: 2429721 - RNA, 19 nt, Homo sapiens
  misc_RNA (1)...(19): siRNA sense strand
cugacaugaugaagcuaau

SEQ ID NO: 2429722 - RNA, 19 nt, Homo sapiens
  misc_RNA (1)...(19): siRNA sense strand
agacagugaggaaugcaaa

SEQ ID NO: 2429723 - RNA, 19 nt, Homo sapiens
  misc_RNA (1)...(19): siRNA sense strand
acacugaaaagaagguaua

SEQ ID NO: 2429724 - RNA, 19 nt, Homo sapiens
  misc_RNA (1)...(19): siRNA sense strand
cugaaaagaagguauacaa

SEQ ID NO: 2429725 - RNA, 19 nt, Homo sapiens
  misc_RNA (1)...(19): siRNA sense strand
gaguggaauaggcgugauu

SEQ ID NO: 2429726 - RNA, 19 nt, Homo sapiens
  misc_RNA (1)...(19): siRNA sense strand
caggauuagcacugcgaga

SEQ ID NO: 2429727 - RNA, 19 nt, Homo sapiens
  misc_RNA (1)...(19): siRNA sense strand
ggugaaagucucggcagaa

SEQ ID NO: 2429728 - RNA, 19 nt, Homo sapiens
  misc_RNA (1)...(19): siRNA sense strand
ccuaaugcaugcugaguac

SEQ ID NO: 2429729 - RNA, 19 nt, Homo sapiens
  misc_RNA (1)...(19): siRNA sense strand
gaaaguaaucaguggacag

SEQ ID NO: 2429730 - RNA, 19 nt, Homo sapiens
  misc_RNA (1)...(19): siRNA sense strand
ccugacaugaugaagcuaa

SEQ ID NO: 2429731 - RNA, 19 nt, Homo sapiens
  misc_RNA (1)...(19): siRNA sense strand
agaacauguauaugcggua

SEQ ID NO: 2429732 - RNA, 19 nt, Homo sapiens
  misc_RNA (1)...(19): siRNA sense strand
gcgucuaaacacugcugaa

SEQ ID NO: 2429733 - RNA, 19 nt, Homo sapiens
  misc_RNA (1)...(19): siRNA sense strand
acuuugaggagauggugaa

SEQ ID NO: 2429734 - RNA, 19 nt, Homo sapiens
  misc_RNA (1)...(19): siRNA sense strand
ggcuggaacaacacugaaa

SEQ ID NO: 2429735 - RNA, 19 nt, Homo sapiens
  misc_RNA (1)...(19): siRNA sense strand
cagagcugugcuuggauaa

SEQ ID NO: 2429736 - RNA, 19 nt, Homo sapiens
  misc_RNA (1)...(19): siRNA sense strand
ugcacaacuuugaggagau

SEQ ID NO: 2429737 - RNA, 19 nt, Homo sapiens
  misc_RNA (1)...(19): siRNA sense strand
gucacugaacuuaaggaua

SEQ ID NO: 2429738 - RNA, 19 nt, Homo sapiens
  misc_RNA (1)...(19): siRNA sense strand
cgggcagacagauggguga

SEQ ID NO: 2429739 - RNA, 19 nt, Homo sapiens
  misc_RNA (1)...(19): siRNA sense strand
agucaucauuaaugcccua

SEQ ID NO: 2429740 - RNA, 19 nt, Homo sapiens
  misc_RNA (1)...(19): siRNA sense strand
gcgugauugcuuauggaga

SEQ ID NO: 2429741 - RNA, 19 nt, Homo sapiens
  misc_RNA (1)...(19): siRNA sense strand
cugcagaccaguuuaacau

SEQ ID NO: 2429742 - RNA, 19 nt, Homo sapiens
  misc_RNA (1)...(19): siRNA sense strand
gugcugugugugaggauga

SEQ ID NO: 2429743 - RNA, 19 nt, Homo sapiens
  misc_RNA (1)...(19): siRNA sense strand
ugauaaaugggguguguuu

SEQ ID NO: 2429744 - RNA, 19 nt, Homo sapiens
  misc_RNA (1)...(19): siRNA sense strand
caaaagaaccugugagcca

SEQ ID NO: 2429745 - RNA, 19 nt, Homo sapiens
  misc_RNA (1)...(19): siRNA sense strand
gcgucuucuucaagguauu

SEQ ID NO: 2429746 - RNA, 19 nt, Homo sapiens
  misc_RNA (1)...(19): siRNA sense strand
cuacacgugcauagaccaa

SEQ ID NO: 2429747 - RNA, 19 nt, Homo sapiens
  misc_RNA (1)...(19): siRNA sense strand
acuucauacuggagagaaa

SEQ ID NO: 2429748 - RNA, 19 nt, Homo sapiens
  misc_RNA (1)...(19): siRNA sense strand
acuucauacuggagagaaa

SEQ ID NO: 2429749 - RNA, 19 nt, Homo sapiens
  misc_RNA (1)...(19): siRNA sense strand
acuucauacuggagagaaa

SEQ ID NO: 2429750 - RNA, 19 nt, Homo sapiens
  misc_RNA (1)...(19): siRNA sense strand
acuucauaguggugagaaa

SEQ ID NO: 2429751 - RNA, 19 nt, Homo sapiens
  misc_RNA (1)...(19): siRNA sense strand
aauucauagcggagagaaa

SEQ ID NO: 2429752 - RNA, 19 nt, Homo sapiens
  misc_RNA (1)...(19): siRNA sense strand
ucuuuaaugagaagcgaua

SEQ ID NO: 2429753 - RNA, 19 nt, Homo sapiens
  misc_RNA (1)...(19): siRNA sense strand
agauaauccauuuaggaga

SEQ ID NO: 2429754 - RNA, 19 nt, Homo sapiens
  misc_RNA (1)...(19): siRNA sense strand
gugaagaaugugacagagu

SEQ ID NO: 2429755 - RNA, 19 nt, Homo sapiens
  misc_RNA (1)...(19): siRNA sense strand
guguaaugaaugugggaag

SEQ ID NO: 2429756 - RNA, 19 nt, Homo sapiens
  misc_RNA (1)...(19): siRNA sense strand
guguaaugaauguggaaag

SEQ ID NO: 2429757 - RNA, 19 nt, Homo sapiens
  misc_RNA (1)...(19): siRNA sense strand
guguaaugaauguggaaag

SEQ ID NO: 2429758 - RNA, 19 nt, Homo sapiens
  misc_RNA (1)...(19): siRNA sense strand
guguaaugaauguggaaag

SEQ ID NO: 2429759 - RNA, 19 nt, Homo sapiens
  misc_RNA (1)...(19): siRNA sense strand
uggcaaggcuuuuaaucaa

SEQ ID NO: 2429760 - RNA, 19 nt, Homo sapiens
  misc_RNA (1)...(19): siRNA sense strand
gcucauuuguaaggaaaca

SEQ ID NO: 2429761 - RNA, 19 nt, Homo sapiens
  misc_RNA (1)...(19): siRNA sense strand
aaguguaaugacuguguua

SEQ ID NO: 2429762 - RNA, 19 nt, Homo sapiens
  misc_RNA (1)...(19): siRNA sense strand
augugaagaaugugacaga

SEQ ID NO: 2429763 - RNA, 19 nt, Homo sapiens
  misc_RNA (1)...(19): siRNA sense strand
aaauguaagguuugugaca

SEQ ID NO: 2429764 - RNA, 19 nt, Homo sapiens
  misc_RNA (1)...(19): siRNA sense strand
uugagagacacaagauaau

SEQ ID NO: 2429765 - RNA, 19 nt, Homo sapiens
  misc_RNA (1)...(19): siRNA sense strand
aaguguaaugaguguggua

SEQ ID NO: 2429766 - RNA, 19 nt, Homo sapiens
  misc_RNA (1)...(19): siRNA sense strand
cuuguaauucauaaggcaa

SEQ ID NO: 2429767 - RNA, 19 nt, Homo sapiens
  misc_RNA (1)...(19): siRNA sense strand
gggcgauagaggaggauau

SEQ ID NO: 2429768 - RNA, 19 nt, Homo sapiens
  misc_RNA (1)...(19): siRNA sense strand
gagaaugugcugugggacu

SEQ ID NO: 2429769 - RNA, 19 nt, Homo sapiens
  misc_RNA (1)...(19): siRNA sense strand
gggagaaugugcuguggga

SEQ ID NO: 2429770 - RNA, 19 nt, Homo sapiens
  misc_RNA (1)...(19): siRNA sense strand
cagaaaucucuccagacaa

SEQ ID NO: 2429771 - RNA, 19 nt, Homo sapiens
  misc_RNA (1)...(19): siRNA sense strand
ccucagaaaucucuccaga

SEQ ID NO: 2429772 - RNA, 19 nt, Homo sapiens
  misc_RNA (1)...(19): siRNA sense strand
uagauuaccucuuagcaga

SEQ ID NO: 2429773 - RNA, 19 nt, Homo sapiens
  misc_RNA (1)...(19): siRNA sense strand
gagaaaucugugugggaau

SEQ ID NO: 2429774 - RNA, 19 nt, Homo sapiens
  misc_RNA (1)...(19): siRNA sense strand
gcgacaaggaggaggagga

SEQ ID NO: 2429775 - RNA, 19 nt, Homo sapiens
  misc_RNA (1)...(19): siRNA sense strand
uguuagaaugggucagaaa

SEQ ID NO: 2429776 - RNA, 19 nt, Homo sapiens
  misc_RNA (1)...(19): siRNA sense strand
cuacaguggaugauggaau

SEQ ID NO: 2429777 - RNA, 19 nt, Homo sapiens
  misc_RNA (1)...(19): siRNA sense strand
aggaaggccaguugagcaa

SEQ ID NO: 2429778 - RNA, 19 nt, Homo sapiens
  misc_RNA (1)...(19): siRNA sense strand
gggauaugucaauggauga

SEQ ID NO: 2429779 - RNA, 19 nt, Homo sapiens
  misc_RNA (1)...(19): siRNA sense strand
caaaggagacgguggcuca

SEQ ID NO: 2429780 - RNA, 19 nt, Homo sapiens
  misc_RNA (1)...(19): siRNA sense strand
acaaggaggaggaggagga

SEQ ID NO: 2429781 - RNA, 19 nt, Homo sapiens
  misc_RNA (1)...(19): siRNA sense strand
ccaccuacucugcuggaaa

SEQ ID NO: 2429782 - RNA, 19 nt, Homo sapiens
  misc_RNA (1)...(19): siRNA sense strand
aggaagagucugaagagca

SEQ ID NO: 2429783 - RNA, 19 nt, Homo sapiens
  misc_RNA (1)...(19): siRNA sense strand
uggaugaggacguggcuuu

SEQ ID NO: 2429784 - RNA, 19 nt, Homo sapiens
  misc_RNA (1)...(19): siRNA sense strand
guguuuggguugaaaggau

SEQ ID NO: 2429785 - RNA, 19 nt, Homo sapiens
  misc_RNA (1)...(19): siRNA sense strand
uggaaaagacauuuggaau

SEQ ID NO: 2429786 - RNA, 19 nt, Homo sapiens
  misc_RNA (1)...(19): siRNA sense strand
uugaugaagaaauggagaa

SEQ ID NO: 2429787 - RNA, 19 nt, Homo sapiens
  misc_RNA (1)...(19): siRNA sense strand
cugauauauucaugggagu

SEQ ID NO: 2429788 - RNA, 19 nt, Homo sapiens
  misc_RNA (1)...(19): siRNA sense strand
gguugaaaggauccaggaa

SEQ ID NO: 2429789 - RNA, 19 nt, Homo sapiens
  misc_RNA (1)...(19): siRNA sense strand
ggagaaugaaauuugcaga

SEQ ID NO: 2429790 - RNA, 19 nt, Homo sapiens
  misc_RNA (1)...(19): siRNA sense strand
ugucaauggaugaggacgu

SEQ ID NO: 2429791 - RNA, 19 nt, Homo sapiens
  misc_RNA (1)...(19): siRNA sense strand
ggaagagucugaagagcag

SEQ ID NO: 2429792 - RNA, 19 nt, Homo sapiens
  misc_RNA (1)...(19): siRNA sense strand
gagucuaacacagaggaaa

SEQ ID NO: 2429793 - RNA, 19 nt, Homo sapiens
  misc_RNA (1)...(19): siRNA sense strand
ugaugaagaaauggagaau

SEQ ID NO: 2429794 - RNA, 19 nt, Homo sapiens
  misc_RNA (1)...(19): siRNA sense strand
agagaaaucugugugggaa

SEQ ID NO: 2429795 - RNA, 19 nt, Homo sapiens
  misc_RNA (1)...(19): siRNA sense strand
agucuaacacagaggaaac

SEQ ID NO: 2429796 - RNA, 19 nt, Homo sapiens
  misc_RNA (1)...(19): siRNA sense strand
cuuugauuuggaugagaaa

SEQ ID NO: 2429797 - RNA, 19 nt, Homo sapiens
  misc_RNA (1)...(19): siRNA sense strand
ucaugggaguacuggccaa

SEQ ID NO: 2429798 - RNA, 19 nt, Homo sapiens
  misc_RNA (1)...(19): siRNA sense strand
aagagaaaucuguguggga

SEQ ID NO: 2429799 - RNA, 19 nt, Homo sapiens
  misc_RNA (1)...(19): siRNA sense strand
ccugaaaacaccaaaucua

SEQ ID NO: 2429800 - RNA, 19 nt, Homo sapiens
  misc_RNA (1)...(19): siRNA sense strand
ucuuugauuuggaugagaa

SEQ ID NO: 2429801 - RNA, 19 nt, Homo sapiens
  misc_RNA (1)...(19): siRNA sense strand
gauuuggaugagaaacuaa

SEQ ID NO: 2429802 - RNA, 19 nt, Homo sapiens
  misc_RNA (1)...(19): siRNA sense strand
ugauauauucaugggagua

SEQ ID NO: 2429803 - RNA, 19 nt, Homo sapiens
  misc_RNA (1)...(19): siRNA sense strand
gaguacuggccaaguccaa

SEQ ID NO: 2429804 - RNA, 19 nt, Homo sapiens
  misc_RNA (1)...(19): siRNA sense strand
agaagauauugguggaaaa

SEQ ID NO: 2429805 - RNA, 19 nt, Homo sapiens
  misc_RNA (1)...(19): siRNA sense strand
cugcagacuuugagccaga

SEQ ID NO: 2429806 - RNA, 19 nt, Homo sapiens
  misc_RNA (1)...(19): siRNA sense strand
uggagaagauauuggugga

SEQ ID NO: 2429807 - RNA, 19 nt, Homo sapiens
  misc_RNA (1)...(19): siRNA sense strand
ggaaagggccagcugcaga

SEQ ID NO: 2429808 - RNA, 19 nt, Homo sapiens
  misc_RNA (1)...(19): siRNA sense strand
ucacacugauuguugggaa

SEQ ID NO: 2429809 - RNA, 19 nt, Homo sapiens
  misc_RNA (1)...(19): siRNA sense strand
agauauugguggaaaacga

SEQ ID NO: 2429810 - RNA, 19 nt, Homo sapiens
  misc_RNA (1)...(19): siRNA sense strand
agcugaugcuugaggcuaa

SEQ ID NO: 2429811 - RNA, 19 nt, Homo sapiens
  misc_RNA (1)...(19): siRNA sense strand
uggcagagauguugacgga

SEQ ID NO: 2429812 - RNA, 19 nt, Homo sapiens
  misc_RNA (1)...(19): siRNA sense strand
ucaccaaguugcuggcaga

SEQ ID NO: 2429813 - RNA, 19 nt, Homo sapiens
  misc_RNA (1)...(19): siRNA sense strand
ccaagagagaggagucaca

SEQ ID NO: 2429814 - RNA, 19 nt, Homo sapiens
  misc_RNA (1)...(19): siRNA sense strand
cagcggaagcagagccaca

SEQ ID NO: 2429815 - RNA, 19 nt, Homo sapiens
  misc_RNA (1)...(19): siRNA sense strand
gcuaacagcaucaaccgaa

SEQ ID NO: 2429816 - RNA, 19 nt, Homo sapiens
  misc_RNA (1)...(19): siRNA sense strand
agacagagaugcugcagcu

SEQ ID NO: 2429817 - RNA, 19 nt, Homo sapiens
  misc_RNA (1)...(19): siRNA sense strand
agauguugacggaggagga

SEQ ID NO: 2429818 - RNA, 19 nt, Homo sapiens
  misc_RNA (1)...(19): siRNA sense strand
cagagaugcugcagcucca

SEQ ID NO: 2429819 - RNA, 19 nt, Homo sapiens
  misc_RNA (1)...(19): siRNA sense strand
gaaaagagccagcugcaga

SEQ ID NO: 2429820 - RNA, 19 nt, Homo sapiens
  misc_RNA (1)...(19): siRNA sense strand
ccugcaacgacauggguaa

SEQ ID NO: 2429821 - RNA, 19 nt, Homo sapiens
  misc_RNA (1)...(19): siRNA sense strand
ggccuugagcgcugagcaa

SEQ ID NO: 2429822 - RNA, 19 nt, Homo sapiens
  misc_RNA (1)...(19): siRNA sense strand
agauccagcaggagguuau

SEQ ID NO: 2429823 - RNA, 19 nt, Homo sapiens
  misc_RNA (1)...(19): siRNA sense strand
aggaaguacaacuggaaua

SEQ ID NO: 2429824 - RNA, 19 nt, Homo sapiens
  misc_RNA (1)...(19): siRNA sense strand
ggagauuauucccuggcaa

SEQ ID NO: 2429825 - RNA, 19 nt, Homo sapiens
  misc_RNA (1)...(19): siRNA sense strand
cauaauagccgucugccaa

SEQ ID NO: 2429826 - RNA, 19 nt, Homo sapiens
  misc_RNA (1)...(19): siRNA sense strand
ccuugguggcacagaacua

SEQ ID NO: 2429827 - RNA, 19 nt, Homo sapiens
  misc_RNA (1)...(19): siRNA sense strand
augaagaagacaacacauu

SEQ ID NO: 2429828 - RNA, 19 nt, Homo sapiens
  misc_RNA (1)...(19): siRNA sense strand
ggguguuugaggugcagaa

SEQ ID NO: 2429829 - RNA, 19 nt, Homo sapiens
  misc_RNA (1)...(19): siRNA sense strand
gggacaagaaacugcacca

SEQ ID NO: 2429830 - RNA, 19 nt, Homo sapiens
  misc_RNA (1)...(19): siRNA sense strand
ccuucaacgggacaagaaa

SEQ ID NO: 2429831 - RNA, 19 nt, Homo sapiens
  misc_RNA (1)...(19): siRNA sense strand
cggccuugguggcacagaa

SEQ ID NO: 2429832 - RNA, 19 nt, Homo sapiens
  misc_RNA (1)...(19): siRNA sense strand
uugaaggagaaacuggaaa

SEQ ID NO: 2429833 - RNA, 19 nt, Homo sapiens
  misc_RNA (1)...(19): siRNA sense strand
ccaugaaggaaccgcuaga

SEQ ID NO: 2429834 - RNA, 19 nt, Homo sapiens
  misc_RNA (1)...(19): siRNA sense strand
uggcacagaacuacaucaa

SEQ ID NO: 2429835 - RNA, 19 nt, Homo sapiens
  misc_RNA (1)...(19): siRNA sense strand
cuacaaacacacaagaaaa

SEQ ID NO: 2429836 - RNA, 19 nt, Homo sapiens
  misc_RNA (1)...(19): siRNA sense strand
uggcaacaaaguagagcua

SEQ ID NO: 2429837 - RNA, 19 nt, Homo sapiens
  misc_RNA (1)...(19): siRNA sense strand
cuggcaagucggagaguuu

SEQ ID NO: 2429838 - RNA, 19 nt, Homo sapiens
  misc_RNA (1)...(19): siRNA sense strand
aaguauaucucuuggucau

SEQ ID NO: 2429839 - RNA, 19 nt, Homo sapiens
  misc_RNA (1)...(19): siRNA sense strand
cuucgugaccacaaagaaa

SEQ ID NO: 2429840 - RNA, 19 nt, Homo sapiens
  misc_RNA (1)...(19): siRNA sense strand
ucuacaaacacacaagaaa

SEQ ID NO: 2429841 - RNA, 19 nt, Homo sapiens
  misc_RNA (1)...(19): siRNA sense strand
uuauacugaucuugaggaa

SEQ ID NO: 2429842 - RNA, 19 nt, Homo sapiens
  misc_RNA (1)...(19): siRNA sense strand
uuaccaaagaggagcugua

SEQ ID NO: 2429843 - RNA, 19 nt, Homo sapiens
  misc_RNA (1)...(19): siRNA sense strand
ggaaagugcuuaagcugcu

SEQ ID NO: 2429844 - RNA, 19 nt, Homo sapiens
  misc_RNA (1)...(19): siRNA sense strand
ugggaacacuauugauaca

SEQ ID NO: 2429845 - RNA, 19 nt, Homo sapiens
  misc_RNA (1)...(19): siRNA sense strand
ugccaaugauauucaacaa

SEQ ID NO: 2429846 - RNA, 19 nt, Homo sapiens
  misc_RNA (1)...(19): siRNA sense strand
agaacuaugcccugguuau

SEQ ID NO: 2429847 - RNA, 19 nt, Homo sapiens
  misc_RNA (1)...(19): siRNA sense strand
cgaauuaacuucaggccug

SEQ ID NO: 2429848 - RNA, 19 nt, Homo sapiens
  misc_RNA (1)...(19): siRNA sense strand
acaauuuccuuaaggcuga

SEQ ID NO: 2429849 - RNA, 19 nt, Homo sapiens
  misc_RNA (1)...(19): siRNA sense strand
aaagcaaguagaagguuau

SEQ ID NO: 2429850 - RNA, 19 nt, Homo sapiens
  misc_RNA (1)...(19): siRNA sense strand
ccagaauguguuuaaucua

SEQ ID NO: 2429851 - RNA, 19 nt, Homo sapiens
  misc_RNA (1)...(19): siRNA sense strand
agguagaucauuuacguau

SEQ ID NO: 2429852 - RNA, 19 nt, Homo sapiens
  misc_RNA (1)...(19): siRNA sense strand
uggcuauguaucugaguuu

SEQ ID NO: 2429853 - RNA, 19 nt, Homo sapiens
  misc_RNA (1)...(19): siRNA sense strand
gggccaauuauguaaagau

SEQ ID NO: 2429854 - RNA, 19 nt, Homo sapiens
  misc_RNA (1)...(19): siRNA sense strand
uaauacugacacagaagaa

SEQ ID NO: 2429855 - RNA, 19 nt, Homo sapiens
  misc_RNA (1)...(19): siRNA sense strand
acaucuagauauagcaauc

SEQ ID NO: 2429856 - RNA, 19 nt, Homo sapiens
  misc_RNA (1)...(19): siRNA sense strand
cugaagaagacacaggcuu

SEQ ID NO: 2429857 - RNA, 19 nt, Homo sapiens
  misc_RNA (1)...(19): siRNA sense strand
acacacaagaaaagaaaca

SEQ ID NO: 2429858 - RNA, 19 nt, Homo sapiens
  misc_RNA (1)...(19): siRNA sense strand
gaggaaaaccagaaugcuu

SEQ ID NO: 2429859 - RNA, 19 nt, Homo sapiens
  misc_RNA (1)...(19): siRNA sense strand
gccaaugauauucaacaaa

SEQ ID NO: 2429860 - RNA, 19 nt, Homo sapiens
  misc_RNA (1)...(19): siRNA sense strand
gcuauguaucugaguuuga

SEQ ID NO: 2429861 - RNA, 19 nt, Homo sapiens
  misc_RNA (1)...(19): siRNA sense strand
cuauauuaccucaaaggga

SEQ ID NO: 2429862 - RNA, 19 nt, Homo sapiens
  misc_RNA (1)...(19): siRNA sense strand
cgaucaacaaaauggaauu

SEQ ID NO: 2429863 - RNA, 19 nt, Homo sapiens
  misc_RNA (1)...(19): siRNA sense strand
ccugaaaguuacagcacag

SEQ ID NO: 2429864 - RNA, 19 nt, Homo sapiens
  misc_RNA (1)...(19): siRNA sense strand
aggccuguuugaagaugaa

SEQ ID NO: 2429865 - RNA, 19 nt, Homo sapiens
  misc_RNA (1)...(19): siRNA sense strand
ccuuaaugacuaugaaaca

SEQ ID NO: 2429866 - RNA, 19 nt, Homo sapiens
  misc_RNA (1)...(19): siRNA sense strand
gguaauagccagauugcca

SEQ ID NO: 2429867 - RNA, 19 nt, Homo sapiens
  misc_RNA (1)...(19): siRNA sense strand
cguuguuacugauggugaa

SEQ ID NO: 2429868 - RNA, 19 nt, Homo sapiens
  misc_RNA (1)...(19): siRNA sense strand
gugcaaaaguagaagucca

SEQ ID NO: 2429869 - RNA, 19 nt, Homo sapiens
  misc_RNA (1)...(19): siRNA sense strand
ccuuuggcccagaggaaau

SEQ ID NO: 2429870 - RNA, 19 nt, Homo sapiens
  misc_RNA (1)...(19): siRNA sense strand
agugagauuguuaggaauu

SEQ ID NO: 2429871 - RNA, 19 nt, Homo sapiens
  misc_RNA (1)...(19): siRNA sense strand
aaguacagcucucgggcau

SEQ ID NO: 2429872 - RNA, 19 nt, Homo sapiens
  misc_RNA (1)...(19): siRNA sense strand
aagugagauuguuaggaau

SEQ ID NO: 2429873 - RNA, 19 nt, Homo sapiens
  misc_RNA (1)...(19): siRNA sense strand
gaaauugguaauagccaga

SEQ ID NO: 2429874 - RNA, 19 nt, Homo sapiens
  misc_RNA (1)...(19): siRNA sense strand
agguggaagaaaugagcau

SEQ ID NO: 2429875 - RNA, 19 nt, Homo sapiens
  misc_RNA (1)...(19): siRNA sense strand
caccgaggagcgaaggaaa

SEQ ID NO: 2429876 - RNA, 19 nt, Homo sapiens
  misc_RNA (1)...(19): siRNA sense strand
aguuggagccuuuggcaga

SEQ ID NO: 2429877 - RNA, 19 nt, Homo sapiens
  misc_RNA (1)...(19): siRNA sense strand
gagcagugcaaaaguagaa

SEQ ID NO: 2429878 - RNA, 19 nt, Homo sapiens
  misc_RNA (1)...(19): siRNA sense strand
ccagaggaaaugaaguaca

SEQ ID NO: 2429879 - RNA, 19 nt, Homo sapiens
  misc_RNA (1)...(19): siRNA sense strand
cugucauucucuuaagcua

SEQ ID NO: 2429880 - RNA, 19 nt, Homo sapiens
  misc_RNA (1)...(19): siRNA sense strand
aacuggaagaagugagauu

SEQ ID NO: 2429881 - RNA, 19 nt, Homo sapiens
  misc_RNA (1)...(19): siRNA sense strand
aguggcagaacuaaagaaa

SEQ ID NO: 2429882 - RNA, 19 nt, Homo sapiens
  misc_RNA (1)...(19): siRNA sense strand
uggcauuagggauggagau

SEQ ID NO: 2429883 - RNA, 19 nt, Homo sapiens
  misc_RNA (1)...(19): siRNA sense strand
cugaagaaauacaagguga

SEQ ID NO: 2429884 - RNA, 19 nt, Homo sapiens
  misc_RNA (1)...(19): siRNA sense strand
cccuaauggaugacagaaa

SEQ ID NO: 2429885 - RNA, 19 nt, Homo sapiens
  misc_RNA (1)...(19): siRNA sense strand
guucgagacaagaggagaa

SEQ ID NO: 2429886 - RNA, 19 nt, Homo sapiens
  misc_RNA (1)...(19): siRNA sense strand
gaugaugagacaaaagaaa

SEQ ID NO: 2429887 - RNA, 19 nt, Homo sapiens
  misc_RNA (1)...(19): siRNA sense strand
aaacugaacuugcuggaga

SEQ ID NO: 2429888 - RNA, 19 nt, Homo sapiens
  misc_RNA (1)...(19): siRNA sense strand
ccacagagcaagcagcuga

SEQ ID NO: 2429889 - RNA, 19 nt, Homo sapiens
  misc_RNA (1)...(19): siRNA sense strand
gaggugauguucauggcaa

SEQ ID NO: 2429890 - RNA, 19 nt, Homo sapiens
  misc_RNA (1)...(19): siRNA sense strand
gaaaggauccauaugccaa

SEQ ID NO: 2429891 - RNA, 19 nt, Homo sapiens
  misc_RNA (1)...(19): siRNA sense strand
ugaagaaauacaaggugau

SEQ ID NO: 2429892 - RNA, 19 nt, Homo sapiens
  misc_RNA (1)...(19): siRNA sense strand
agacaaaacugcagcuagu

SEQ ID NO: 2429893 - RNA, 19 nt, Homo sapiens
  misc_RNA (1)...(19): siRNA sense strand
ccuccugagccguggugaa

SEQ ID NO: 2429894 - RNA, 19 nt, Homo sapiens
  misc_RNA (1)...(19): siRNA sense strand
caauggugcgggagauaga

SEQ ID NO: 2429895 - RNA, 19 nt, Homo sapiens
  misc_RNA (1)...(19): siRNA sense strand
ggggaaauugccuggacaa

SEQ ID NO: 2429896 - RNA, 19 nt, Homo sapiens
  misc_RNA (1)...(19): siRNA sense strand
ccuaagaaggagcgcacca

SEQ ID NO: 2429897 - RNA, 19 nt, Homo sapiens
  misc_RNA (1)...(19): siRNA sense strand
ucuccuaagucuggaagaa

SEQ ID NO: 2429898 - RNA, 19 nt, Homo sapiens
  misc_RNA (1)...(19): siRNA sense strand
uaucaagaaggaugcacaa

SEQ ID NO: 2429899 - RNA, 19 nt, Homo sapiens
  misc_RNA (1)...(19): siRNA sense strand
cuacaaaccuagugucccu

SEQ ID NO: 2429900 - RNA, 19 nt, Homo sapiens
  misc_RNA (1)...(19): siRNA sense strand
acagaauagaagucagcau

SEQ ID NO: 2429901 - RNA, 19 nt, Homo sapiens
  misc_RNA (1)...(19): siRNA sense strand
gcagcuaguucaggggaua

SEQ ID NO: 2429902 - RNA, 19 nt, Homo sapiens
  misc_RNA (1)...(19): siRNA sense strand
uugagggcucuuugggaaa

SEQ ID NO: 2429903 - RNA, 19 nt, Homo sapiens
  misc_RNA (1)...(19): siRNA sense strand
ggugcgggagauagaggaa

SEQ ID NO: 2429904 - RNA, 19 nt, Homo sapiens
  misc_RNA (1)...(19): siRNA sense strand
ccuuucugaacgagcauua

SEQ ID NO: 2429905 - RNA, 19 nt, Homo sapiens
  misc_RNA (1)...(19): siRNA sense strand
uagaauaugcuuugccuca

SEQ ID NO: 2429906 - RNA, 19 nt, Homo sapiens
  misc_RNA (1)...(19): siRNA sense strand
cucuauaccuacaaaccua

SEQ ID NO: 2429907 - RNA, 19 nt, Homo sapiens
  misc_RNA (1)...(19): siRNA sense strand
uccuaagucuggaagaaga

SEQ ID NO: 2429908 - RNA, 19 nt, Homo sapiens
  misc_RNA (1)...(19): siRNA sense strand
gaaccuaccucaaagugca

SEQ ID NO: 2429909 - RNA, 19 nt, Homo sapiens
  misc_RNA (1)...(19): siRNA sense strand
caguggcagccgagaagaa

SEQ ID NO: 2429910 - RNA, 19 nt, Homo sapiens
  misc_RNA (1)...(19): siRNA sense strand
cugugaucuuccugccaaa

SEQ ID NO: 2429911 - RNA, 19 nt, Homo sapiens
  misc_RNA (1)...(19): siRNA sense strand
cugccaggauggagagcaa

SEQ ID NO: 2429912 - RNA, 19 nt, Homo sapiens
  misc_RNA (1)...(19): siRNA sense strand
guguacagacauugacgaa

SEQ ID NO: 2429913 - RNA, 19 nt, Homo sapiens
  misc_RNA (1)...(19): siRNA sense strand
agggaaggaagguggcgaa

SEQ ID NO: 2429914 - RNA, 19 nt, Homo sapiens
  misc_RNA (1)...(19): siRNA sense strand
ugacgaaugccuagggacu

SEQ ID NO: 2429915 - RNA, 19 nt, Homo sapiens
  misc_RNA (1)...(19): siRNA sense strand
cugccaagacacugacgaa

SEQ ID NO: 2429916 - RNA, 19 nt, Homo sapiens
  misc_RNA (1)...(19): siRNA sense strand
acuccuguguagauguaaa

SEQ ID NO: 2429917 - RNA, 19 nt, Homo sapiens
  misc_RNA (1)...(19): siRNA sense strand
cguccgagcugaaggggau

SEQ ID NO: 2429918 - RNA, 19 nt, Homo sapiens
  misc_RNA (1)...(19): siRNA sense strand
ggcaggagcucauggucca

SEQ ID NO: 2429919 - RNA, 19 nt, Homo sapiens
  misc_RNA (1)...(19): siRNA sense strand
gcuuccaccuucauggcaa

SEQ ID NO: 2429920 - RNA, 19 nt, Homo sapiens
  misc_RNA (1)...(19): siRNA sense strand
ucuauaacaacgagaccuu

SEQ ID NO: 2429921 - RNA, 19 nt, Homo sapiens
  misc_RNA (1)...(19): siRNA sense strand
gcuuccaggaggagaacaa

SEQ ID NO: 2429922 - RNA, 19 nt, Homo sapiens
  misc_RNA (1)...(19): siRNA sense strand
gcaugcugcaggaggagaa

SEQ ID NO: 2429923 - RNA, 19 nt, Homo sapiens
  misc_RNA (1)...(19): siRNA sense strand
gaggagaaccggaugcuca

SEQ ID NO: 2429924 - RNA, 19 nt, Homo sapiens
  misc_RNA (1)...(19): siRNA sense strand
agaacaaggcccugcgcga

SEQ ID NO: 2429925 - RNA, 19 nt, Homo sapiens
  misc_RNA (1)...(19): siRNA sense strand
aucugaaagccuagaaauu

SEQ ID NO: 2429926 - RNA, 19 nt, Homo sapiens
  misc_RNA (1)...(19): siRNA sense strand
uggaaaugcucaucgagga

SEQ ID NO: 2429927 - RNA, 19 nt, Homo sapiens
  misc_RNA (1)...(19): siRNA sense strand
aggcccugcucaaggagaa

SEQ ID NO: 2429928 - RNA, 19 nt, Homo sapiens
  misc_RNA (1)...(19): siRNA sense strand
agaacaaggcccuguggga

SEQ ID NO: 2429929 - RNA, 19 nt, Homo sapiens
  misc_RNA (1)...(19): siRNA sense strand
acauugcacucaaggccaa

SEQ ID NO: 2429930 - RNA, 19 nt, Homo sapiens
  misc_RNA (1)...(19): siRNA sense strand
agaacaagucucugcggga

SEQ ID NO: 2429931 - RNA, 19 nt, Homo sapiens
  misc_RNA (1)...(19): siRNA sense strand
augaaagauuagugcuaga

SEQ ID NO: 2429932 - RNA, 19 nt, Homo sapiens
  misc_RNA (1)...(19): siRNA sense strand
ccuggauauuuauggugaa

SEQ ID NO: 2429933 - RNA, 19 nt, Homo sapiens
  misc_RNA (1)...(19): siRNA sense strand
uggccauagcugagcaaca

SEQ ID NO: 2429934 - RNA, 19 nt, Homo sapiens
  misc_RNA (1)...(19): siRNA sense strand
gcgggaacagaaugagaga

SEQ ID NO: 2429935 - RNA, 19 nt, Homo sapiens
  misc_RNA (1)...(19): siRNA sense strand
aaacaagggaaggagaaau

SEQ ID NO: 2429936 - RNA, 19 nt, Homo sapiens
  misc_RNA (1)...(19): siRNA sense strand
gggauauccacaaugccaa

SEQ ID NO: 2429937 - RNA, 19 nt, Homo sapiens
  misc_RNA (1)...(19): siRNA sense strand
ggcacaaucuugagagggu

SEQ ID NO: 2429938 - RNA, 19 nt, Homo sapiens
  misc_RNA (1)...(19): siRNA sense strand
ugaaaauggcugagaggaa

SEQ ID NO: 2429939 - RNA, 19 nt, Homo sapiens
  misc_RNA (1)...(19): siRNA sense strand
ucgccaaagcugugaagaa

SEQ ID NO: 2429940 - RNA, 19 nt, Homo sapiens
  misc_RNA (1)...(19): siRNA sense strand
ccuacagauuauuggaaga

SEQ ID NO: 2429941 - RNA, 19 nt, Homo sapiens
  misc_RNA (1)...(19): siRNA sense strand
cugacaaagcugaggaguu

SEQ ID NO: 2429942 - RNA, 19 nt, Homo sapiens
  misc_RNA (1)...(19): siRNA sense strand
agggagaagguguggguca

SEQ ID NO: 2429943 - RNA, 19 nt, Homo sapiens
  misc_RNA (1)...(19): siRNA sense strand
agacaagccaugaggaacu

SEQ ID NO: 2429944 - RNA, 19 nt, Homo sapiens
  misc_RNA (1)...(19): siRNA sense strand
cguucagcuuuaugggauu

SEQ ID NO: 2429945 - RNA, 19 nt, Homo sapiens
  misc_RNA (1)...(19): siRNA sense strand
ggauucucuuacagacaaa

SEQ ID NO: 2429946 - RNA, 19 nt, Homo sapiens
  misc_RNA (1)...(19): siRNA sense strand
cuacgcaaucauaggacua

SEQ ID NO: 2429947 - RNA, 19 nt, Homo sapiens
  misc_RNA (1)...(19): siRNA sense strand
caggaagacuggcugguga

SEQ ID NO: 2429948 - RNA, 19 nt, Homo sapiens
  misc_RNA (1)...(19): siRNA sense strand
caucaucacagaagagcau

SEQ ID NO: 2429949 - RNA, 19 nt, Homo sapiens
  misc_RNA (1)...(19): siRNA sense strand
ccugugaagaccaaguaua

SEQ ID NO: 2429950 - RNA, 19 nt, Homo sapiens
  misc_RNA (1)...(19): siRNA sense strand
gcagggaugugauugggaa

SEQ ID NO: 2429951 - RNA, 19 nt, Homo sapiens
  misc_RNA (1)...(19): siRNA sense strand
aggcagacuuuguggaccu

SEQ ID NO: 2429952 - RNA, 19 nt, Homo sapiens
  misc_RNA (1)...(19): siRNA sense strand
auuuaaucuccgaggauca

SEQ ID NO: 2429953 - RNA, 19 nt, Homo sapiens
  misc_RNA (1)...(19): siRNA sense strand
cgccagucccugagacgaa

SEQ ID NO: 2429954 - RNA, 19 nt, Homo sapiens
  misc_RNA (1)...(19): siRNA sense strand
acagaugugacgcggacaa

SEQ ID NO: 2429955 - RNA, 19 nt, Homo sapiens
  misc_RNA (1)...(19): siRNA sense strand
cagaagagcaugcagccau

SEQ ID NO: 2429956 - RNA, 19 nt, Homo sapiens
  misc_RNA (1)...(19): siRNA sense strand
ccgaaccgauccaggccua

SEQ ID NO: 2429957 - RNA, 19 nt, Homo sapiens
  misc_RNA (1)...(19): siRNA sense strand
ggucugaaggacacaccaa

SEQ ID NO: 2429958 - RNA, 19 nt, Homo sapiens
  misc_RNA (1)...(19): siRNA sense strand
gccaaagcugugaagaauu

SEQ ID NO: 2429959 - RNA, 19 nt, Homo sapiens
  misc_RNA (1)...(19): siRNA sense strand
uggacaugguguugggucu

SEQ ID NO: 2429960 - RNA, 19 nt, Homo sapiens
  misc_RNA (1)...(19): siRNA sense strand
agauggggcuuuuggaauu

SEQ ID NO: 2429961 - RNA, 19 nt, Homo sapiens
  misc_RNA (1)...(19): siRNA sense strand
cuacagauuauuggaagaa

SEQ ID NO: 2429962 - RNA, 19 nt, Homo sapiens
  misc_RNA (1)...(19): siRNA sense strand
ggaaggacaagguugcaga

SEQ ID NO: 2429963 - RNA, 19 nt, Homo sapiens
  misc_RNA (1)...(19): siRNA sense strand
cauauguccucaagggcca

SEQ ID NO: 2429964 - RNA, 19 nt, Homo sapiens
  misc_RNA (1)...(19): siRNA sense strand
cgacuggaaccaaagguca

SEQ ID NO: 2429965 - RNA, 19 nt, Homo sapiens
  misc_RNA (1)...(19): siRNA sense strand
uggagaaagagguucccaa

SEQ ID NO: 2429966 - RNA, 19 nt, Homo sapiens
  misc_RNA (1)...(19): siRNA sense strand
ccaaaaugauagaugugga

SEQ ID NO: 2429967 - RNA, 19 nt, Homo sapiens
  misc_RNA (1)...(19): siRNA sense strand
auguuaagcucaaaggcau

SEQ ID NO: 2429968 - RNA, 19 nt, Homo sapiens
  misc_RNA (1)...(19): siRNA sense strand
gagaaauugaugugcucau

SEQ ID NO: 2429969 - RNA, 19 nt, Homo sapiens
  misc_RNA (1)...(19): siRNA sense strand
ccaaggagcacaauggagu

SEQ ID NO: 2429970 - RNA, 19 nt, Homo sapiens
  misc_RNA (1)...(19): siRNA sense strand
aggacuaccaccuggauga

SEQ ID NO: 2429971 - RNA, 19 nt, Homo sapiens
  misc_RNA (1)...(19): siRNA sense strand
ccaacugggccaaggagca

SEQ ID NO: 2429972 - RNA, 19 nt, Homo sapiens
  misc_RNA (1)...(19): siRNA sense strand
gggauggccagcagcucaa

SEQ ID NO: 2429973 - RNA, 19 nt, Homo sapiens
  misc_RNA (1)...(19): siRNA sense strand
gcgacaaccugcugcgagu

SEQ ID NO: 2429974 - RNA, 19 nt, Homo sapiens
  misc_RNA (1)...(19): siRNA sense strand
cugcccaguuccaggccaa

SEQ ID NO: 2429975 - RNA, 19 nt, Homo sapiens
  misc_RNA (1)...(19): siRNA sense strand
gagaagggcuugcuggaga

SEQ ID NO: 2429976 - RNA, 19 nt, Homo sapiens
  misc_RNA (1)...(19): siRNA sense strand
aagaaguaucugugggaga

SEQ ID NO: 2429977 - RNA, 19 nt, Homo sapiens
  misc_RNA (1)...(19): siRNA sense strand
uggcuuacugggagaagaa

SEQ ID NO: 2429978 - RNA, 19 nt, Homo sapiens
  misc_RNA (1)...(19): siRNA sense strand
guguacaaggugaaggaga

SEQ ID NO: 2429979 - RNA, 19 nt, Homo sapiens
  misc_RNA (1)...(19): siRNA sense strand
ccguuggagcccaggauga

SEQ ID NO: 2429980 - RNA, 19 nt, Homo sapiens
  misc_RNA (1)...(19): siRNA sense strand
gggagaagggcuugcugga

SEQ ID NO: 2429981 - RNA, 19 nt, Homo sapiens
  misc_RNA (1)...(19): siRNA sense strand
acacacacuuucaggagca

SEQ ID NO: 2429982 - RNA, 19 nt, Homo sapiens
  misc_RNA (1)...(19): siRNA sense strand
gaguagauuuagugggcaa

SEQ ID NO: 2429983 - RNA, 19 nt, Homo sapiens
  misc_RNA (1)...(19): siRNA sense strand
cgucagaguaugucagaaa

SEQ ID NO: 2429984 - RNA, 19 nt, Homo sapiens
  misc_RNA (1)...(19): siRNA sense strand
agagauaaggagaaggaua

SEQ ID NO: 2429985 - RNA, 19 nt, Homo sapiens
  misc_RNA (1)...(19): siRNA sense strand
aagcagaagaugaggauau

SEQ ID NO: 2429986 - RNA, 19 nt, Homo sapiens
  misc_RNA (1)...(19): siRNA sense strand
caucagaagaggagaggau

SEQ ID NO: 2429987 - RNA, 19 nt, Homo sapiens
  misc_RNA (1)...(19): siRNA sense strand
gagaaucccuguugggcaa

SEQ ID NO: 2429988 - RNA, 19 nt, Homo sapiens
  misc_RNA (1)...(19): siRNA sense strand
cagcaaauaaagagcagua

SEQ ID NO: 2429989 - RNA, 19 nt, Homo sapiens
  misc_RNA (1)...(19): siRNA sense strand
agaugaagauguagaagau

SEQ ID NO: 2429990 - RNA, 19 nt, Homo sapiens
  misc_RNA (1)...(19): siRNA sense strand
aagcaaagcaagaugaaga

SEQ ID NO: 2429991 - RNA, 19 nt, Homo sapiens
  misc_RNA (1)...(19): siRNA sense strand
ggaagaaagaugaaaacua

SEQ ID NO: 2429992 - RNA, 19 nt, Homo sapiens
  misc_RNA (1)...(19): siRNA sense strand
ugauagagaacgaagaauu

SEQ ID NO: 2429993 - RNA, 19 nt, Homo sapiens
  misc_RNA (1)...(19): siRNA sense strand
gauauuugguagugagcuu

SEQ ID NO: 2429994 - RNA, 19 nt, Homo sapiens
  misc_RNA (1)...(19): siRNA sense strand
ugguaaagcucguagaagu

SEQ ID NO: 2429995 - RNA, 19 nt, Homo sapiens
  misc_RNA (1)...(19): siRNA sense strand
agccaaaacucgagaauuu

SEQ ID NO: 2429996 - RNA, 19 nt, Homo sapiens
  misc_RNA (1)...(19): siRNA sense strand
gcuuauuguugcaaggaga

SEQ ID NO: 2429997 - RNA, 19 nt, Homo sapiens
  misc_RNA (1)...(19): siRNA sense strand
gcaccaagauggaaggaac

SEQ ID NO: 2429998 - RNA, 19 nt, Homo sapiens
  misc_RNA (1)...(19): siRNA sense strand
ggagaauaagcaagugcaa

SEQ ID NO: 2429999 - RNA, 19 nt, Homo sapiens
  misc_RNA (1)...(19): siRNA sense strand
ccaagcaacaagugaaauu

SEQ ID NO: 2430000 - RNA, 19 nt, Homo sapiens
  misc_RNA (1)...(19): siRNA sense strand
agggaaugcugaagggcuu

SEQ ID NO: 2430001 - RNA, 19 nt, Homo sapiens
  misc_RNA (1)...(19): siRNA sense strand
agaaacaagaacaggauga

SEQ ID NO: 2430002 - RNA, 19 nt, Homo sapiens
  misc_RNA (1)...(19): siRNA sense strand
guauuuaguacgacuguaa

SEQ ID NO: 2430003 - RNA, 19 nt, Homo sapiens
  misc_RNA (1)...(19): siRNA sense strand
gggcaaguggcuggagaaa

SEQ ID NO: 2430004 - RNA, 19 nt, Homo sapiens
  misc_RNA (1)...(19): siRNA sense strand
aaacgaaagcagaagauga

SEQ ID NO: 2430005 - RNA, 19 nt, Homo sapiens
  misc_RNA (1)...(19): siRNA sense strand
agagaaaggugauaagacu

SEQ ID NO: 2430006 - RNA, 19 nt, Homo sapiens
  misc_RNA (1)...(19): siRNA sense strand
gugauguagcagacgauaa

SEQ ID NO: 2430007 - RNA, 19 nt, Homo sapiens
  misc_RNA (1)...(19): siRNA sense strand
cgacaggaagaaagaugaa

SEQ ID NO: 2430008 - RNA, 19 nt, Homo sapiens
  misc_RNA (1)...(19): siRNA sense strand
ggaacugaaugcagagcca

SEQ ID NO: 2430009 - RNA, 19 nt, Homo sapiens
  misc_RNA (1)...(19): siRNA sense strand
agguauagcugacgagacu

SEQ ID NO: 2430010 - RNA, 19 nt, Homo sapiens
  misc_RNA (1)...(19): siRNA sense strand
gaaugaagcaggagcagga

SEQ ID NO: 2430011 - RNA, 19 nt, Homo sapiens
  misc_RNA (1)...(19): siRNA sense strand
acuuaaggcaggagacaga

SEQ ID NO: 2430012 - RNA, 19 nt, Homo sapiens
  misc_RNA (1)...(19): siRNA sense strand
cguuaaaacacgaaaauca

SEQ ID NO: 2430013 - RNA, 19 nt, Homo sapiens
  misc_RNA (1)...(19): siRNA sense strand
ugagaaaacggguaaaaua

SEQ ID NO: 2430014 - RNA, 19 nt, Homo sapiens
  misc_RNA (1)...(19): siRNA sense strand
ugauguagcagacgauaaa

SEQ ID NO: 2430015 - RNA, 19 nt, Homo sapiens
  misc_RNA (1)...(19): siRNA sense strand
auaaagagcaguaugaaca

SEQ ID NO: 2430016 - RNA, 19 nt, Homo sapiens
  misc_RNA (1)...(19): siRNA sense strand
aagucaagcucguuggaga

SEQ ID NO: 2430017 - RNA, 19 nt, Homo sapiens
  misc_RNA (1)...(19): siRNA sense strand
gugucagugucaaagguaa

SEQ ID NO: 2430018 - RNA, 19 nt, Homo sapiens
  misc_RNA (1)...(19): siRNA sense strand
cgguagaugaugaugauga

SEQ ID NO: 2430019 - RNA, 19 nt, Homo sapiens
  misc_RNA (1)...(19): siRNA sense strand
guauagcugacgagacuaa

SEQ ID NO: 2430020 - RNA, 19 nt, Homo sapiens
  misc_RNA (1)...(19): siRNA sense strand
aagauagagauaaggagaa

SEQ ID NO: 2430021 - RNA, 19 nt, Homo sapiens
  misc_RNA (1)...(19): siRNA sense strand
cuaaccaauuucagagaga

SEQ ID NO: 2430022 - RNA, 19 nt, Homo sapiens
  misc_RNA (1)...(19): siRNA sense strand
gauuaaugauggcgaccuu

SEQ ID NO: 2430023 - RNA, 19 nt, Homo sapiens
  misc_RNA (1)...(19): siRNA sense strand
ugucaaagguaaccgguca

SEQ ID NO: 2430024 - RNA, 19 nt, Homo sapiens
  misc_RNA (1)...(19): siRNA sense strand
gcuuaagaaagguacagaa

SEQ ID NO: 2430025 - RNA, 19 nt, Homo sapiens
  misc_RNA (1)...(19): siRNA sense strand
cuggaaaagaaaagaagaa

SEQ ID NO: 2430026 - RNA, 19 nt, Homo sapiens
  misc_RNA (1)...(19): siRNA sense strand
ccaagaagggaaugcugaa

SEQ ID NO: 2430027 - RNA, 19 nt, Homo sapiens
  misc_RNA (1)...(19): siRNA sense strand
cccaaagugagaagaacaa

SEQ ID NO: 2430028 - RNA, 19 nt, Homo sapiens
  misc_RNA (1)...(19): siRNA sense strand
acagacuuauagagguaaa

SEQ ID NO: 2430029 - RNA, 19 nt, Homo sapiens
  misc_RNA (1)...(19): siRNA sense strand
gauacuaguaacuggucua

SEQ ID NO: 2430030 - RNA, 19 nt, Homo sapiens
  misc_RNA (1)...(19): siRNA sense strand
gagccaagccagaugcaga

SEQ ID NO: 2430031 - RNA, 19 nt, Homo sapiens
  misc_RNA (1)...(19): siRNA sense strand
cugaagggcuugggagaca

SEQ ID NO: 2430032 - RNA, 19 nt, Homo sapiens
  misc_RNA (1)...(19): siRNA sense strand
ggagaaacaagaacaggau

SEQ ID NO: 2430033 - RNA, 19 nt, Homo sapiens
  misc_RNA (1)...(19): siRNA sense strand
uguugaaccuguuggacau

SEQ ID NO: 2430034 - RNA, 19 nt, Homo sapiens
  misc_RNA (1)...(19): siRNA sense strand
ggauacaggugcaucgcuu

SEQ ID NO: 2430035 - RNA, 19 nt, Homo sapiens
  misc_RNA (1)...(19): siRNA sense strand
agaaagguacagaagguuu

SEQ ID NO: 2430036 - RNA, 19 nt, Homo sapiens
  misc_RNA (1)...(19): siRNA sense strand
gcaaaucccaagaggaagu

SEQ ID NO: 2430037 - RNA, 19 nt, Homo sapiens
  misc_RNA (1)...(19): siRNA sense strand
agagguaaauggaguagau

SEQ ID NO: 2430038 - RNA, 19 nt, Homo sapiens
  misc_RNA (1)...(19): siRNA sense strand
augaaagccaagaagggaa

SEQ ID NO: 2430039 - RNA, 19 nt, Homo sapiens
  misc_RNA (1)...(19): siRNA sense strand
agaugacaagauugagaaa

SEQ ID NO: 2430040 - RNA, 19 nt, Homo sapiens
  misc_RNA (1)...(19): siRNA sense strand
gggucaugcuggaaacuca

SEQ ID NO: 2430041 - RNA, 19 nt, Homo sapiens
  misc_RNA (1)...(19): siRNA sense strand
cuguuauaguagagaauga

SEQ ID NO: 2430042 - RNA, 19 nt, Homo sapiens
  misc_RNA (1)...(19): siRNA sense strand
agauaugacuggcaggcaa

SEQ ID NO: 2430043 - RNA, 19 nt, Homo sapiens
  misc_RNA (1)...(19): siRNA sense strand
cggaaauagucaaguuacu

SEQ ID NO: 2430044 - RNA, 19 nt, Homo sapiens
  misc_RNA (1)...(19): siRNA sense strand
gcuguaacgaugagcggua

SEQ ID NO: 2430045 - RNA, 19 nt, Homo sapiens
  misc_RNA (1)...(19): siRNA sense strand
cccucuaggaccagaauaa

SEQ ID NO: 2430046 - RNA, 19 nt, Homo sapiens
  misc_RNA (1)...(19): siRNA sense strand
ccaaaagaaaguaccaaaa

SEQ ID NO: 2430047 - RNA, 19 nt, Homo sapiens
  misc_RNA (1)...(19): siRNA sense strand
cuaugugaaccuuaagaaa

SEQ ID NO: 2430048 - RNA, 19 nt, Homo sapiens
  misc_RNA (1)...(19): siRNA sense strand
uguuggaagaauagaaaga

SEQ ID NO: 2430049 - RNA, 19 nt, Homo sapiens
  misc_RNA (1)...(19): siRNA sense strand
ggaggaagaugaugagccu

SEQ ID NO: 2430050 - RNA, 19 nt, Homo sapiens
  misc_RNA (1)...(19): siRNA sense strand
aggaagaugaugagccuga

SEQ ID NO: 2430051 - RNA, 19 nt, Homo sapiens
  misc_RNA (1)...(19): siRNA sense strand
agacauuuggagagaggau

SEQ ID NO: 2430052 - RNA, 19 nt, Homo sapiens
  misc_RNA (1)...(19): siRNA sense strand
uggaacagcgacaggaaga

SEQ ID NO: 2430053 - RNA, 19 nt, Homo sapiens
  misc_RNA (1)...(19): siRNA sense strand
cugagaaucaagagaaagu

SEQ ID NO: 2430054 - RNA, 19 nt, Homo sapiens
  misc_RNA (1)...(19): siRNA sense strand
aggaagagucggaaauagu

SEQ ID NO: 2430055 - RNA, 19 nt, Homo sapiens
  misc_RNA (1)...(19): siRNA sense strand
gggagcaucacuagagcau

SEQ ID NO: 2430056 - RNA, 19 nt, Homo sapiens
  misc_RNA (1)...(19): siRNA sense strand
uagaggaagagucggaaau

SEQ ID NO: 2430057 - RNA, 19 nt, Homo sapiens
  misc_RNA (1)...(19): siRNA sense strand
gccaaaagaaaguaccaaa

SEQ ID NO: 2430058 - RNA, 19 nt, Homo sapiens
  misc_RNA (1)...(19): siRNA sense strand
uggaagaauagaaagaagu

SEQ ID NO: 2430059 - RNA, 19 nt, Homo sapiens
  misc_RNA (1)...(19): siRNA sense strand
aggagucagaugaggauga

SEQ ID NO: 2430060 - RNA, 19 nt, Homo sapiens
  misc_RNA (1)...(19): siRNA sense strand
acauuuggagagaggauga

SEQ ID NO: 2430061 - RNA, 19 nt, Homo sapiens
  misc_RNA (1)...(19): siRNA sense strand
gaugaagaucucugaggca

SEQ ID NO: 2430062 - RNA, 19 nt, Homo sapiens
  misc_RNA (1)...(19): siRNA sense strand
uggaugaguguauggaaca

SEQ ID NO: 2430063 - RNA, 19 nt, Homo sapiens
  misc_RNA (1)...(19): siRNA sense strand
uuucagagacauuuggaga

SEQ ID NO: 2430064 - RNA, 19 nt, Homo sapiens
  misc_RNA (1)...(19): siRNA sense strand
ccacaaguauagugacccu

SEQ ID NO: 2430065 - RNA, 19 nt, Homo sapiens
  misc_RNA (1)...(19): siRNA sense strand
cuggaguaucugacaagua

SEQ ID NO: 2430066 - RNA, 19 nt, Homo sapiens
  misc_RNA (1)...(19): siRNA sense strand
uuagaggaagagucggaaa

SEQ ID NO: 2430067 - RNA, 19 nt, Homo sapiens
  misc_RNA (1)...(19): siRNA sense strand
cuguuauaguagagaauga

SEQ ID NO: 2430068 - RNA, 19 nt, Homo sapiens
  misc_RNA (1)...(19): siRNA sense strand
agauaugacuggcaggcaa

SEQ ID NO: 2430069 - RNA, 19 nt, Homo sapiens
  misc_RNA (1)...(19): siRNA sense strand
cggaaauagucaaguuacu

SEQ ID NO: 2430070 - RNA, 19 nt, Homo sapiens
  misc_RNA (1)...(19): siRNA sense strand
gcuguaacgaugagcggua

SEQ ID NO: 2430071 - RNA, 19 nt, Homo sapiens
  misc_RNA (1)...(19): siRNA sense strand
cccucuaggaccagaauaa

SEQ ID NO: 2430072 - RNA, 19 nt, Homo sapiens
  misc_RNA (1)...(19): siRNA sense strand
ccaaaagaaaguaccaaaa

SEQ ID NO: 2430073 - RNA, 19 nt, Homo sapiens
  misc_RNA (1)...(19): siRNA sense strand
cuaugugaaccuuaagaaa

SEQ ID NO: 2430074 - RNA, 19 nt, Homo sapiens
  misc_RNA (1)...(19): siRNA sense strand
uguuggaagaauagaaaga

SEQ ID NO: 2430075 - RNA, 19 nt, Homo sapiens
  misc_RNA (1)...(19): siRNA sense strand
ggaggaagaugaugagccu

SEQ ID NO: 2430076 - RNA, 19 nt, Homo sapiens
  misc_RNA (1)...(19): siRNA sense strand
aggaagaugaugagccuga

SEQ ID NO: 2430077 - RNA, 19 nt, Homo sapiens
  misc_RNA (1)...(19): siRNA sense strand
agacauuuggagagaggau

SEQ ID NO: 2430078 - RNA, 19 nt, Homo sapiens
  misc_RNA (1)...(19): siRNA sense strand
uggaacagcgacaggaaga

SEQ ID NO: 2430079 - RNA, 19 nt, Homo sapiens
  misc_RNA (1)...(19): siRNA sense strand
cugagaaucaagagaaagu

SEQ ID NO: 2430080 - RNA, 19 nt, Homo sapiens
  misc_RNA (1)...(19): siRNA sense strand
aggaagagucggaaauagu

SEQ ID NO: 2430081 - RNA, 19 nt, Homo sapiens
  misc_RNA (1)...(19): siRNA sense strand
gggagcaucacuagagcau

SEQ ID NO: 2430082 - RNA, 19 nt, Homo sapiens
  misc_RNA (1)...(19): siRNA sense strand
uagaggaagagucggaaau

SEQ ID NO: 2430083 - RNA, 19 nt, Homo sapiens
  misc_RNA (1)...(19): siRNA sense strand
gccaaaagaaaguaccaaa

SEQ ID NO: 2430084 - RNA, 19 nt, Homo sapiens
  misc_RNA (1)...(19): siRNA sense strand
uggaagaauagaaagaagu

SEQ ID NO: 2430085 - RNA, 19 nt, Homo sapiens
  misc_RNA (1)...(19): siRNA sense strand
aggagucagaugaggauga

SEQ ID NO: 2430086 - RNA, 19 nt, Homo sapiens
  misc_RNA (1)...(19): siRNA sense strand
acauuuggagagaggauga

SEQ ID NO: 2430087 - RNA, 19 nt, Homo sapiens
  misc_RNA (1)...(19): siRNA sense strand
gaugaagaucucugaggca

SEQ ID NO: 2430088 - RNA, 19 nt, Homo sapiens
  misc_RNA (1)...(19): siRNA sense strand
uggaugaguguauggaaca

SEQ ID NO: 2430089 - RNA, 19 nt, Homo sapiens
  misc_RNA (1)...(19): siRNA sense strand
uuucagagacauuuggaga

SEQ ID NO: 2430090 - RNA, 19 nt, Homo sapiens
  misc_RNA (1)...(19): siRNA sense strand
ccacaaguauagugacccu

SEQ ID NO: 2430091 - RNA, 19 nt, Homo sapiens
  misc_RNA (1)...(19): siRNA sense strand
cuggaguaucugacaagua

SEQ ID NO: 2430092 - RNA, 19 nt, Homo sapiens
  misc_RNA (1)...(19): siRNA sense strand
uuagaggaagagucggaaa

SEQ ID NO: 2430093 - RNA, 19 nt, Homo sapiens
  misc_RNA (1)...(19): siRNA sense strand
cuguuauaguagagaauga

SEQ ID NO: 2430094 - RNA, 19 nt, Homo sapiens
  misc_RNA (1)...(19): siRNA sense strand
agauaugacuggcaggcaa

SEQ ID NO: 2430095 - RNA, 19 nt, Homo sapiens
  misc_RNA (1)...(19): siRNA sense strand
cggaaauagucaaguuacu

SEQ ID NO: 2430096 - RNA, 19 nt, Homo sapiens
  misc_RNA (1)...(19): siRNA sense strand
gcuguaacgaugagcggua

SEQ ID NO: 2430097 - RNA, 19 nt, Homo sapiens
  misc_RNA (1)...(19): siRNA sense strand
cccucuaggaccagaauaa

SEQ ID NO: 2430098 - RNA, 19 nt, Homo sapiens
  misc_RNA (1)...(19): siRNA sense strand
ccaaaagaaaguaccaaaa

SEQ ID NO: 2430099 - RNA, 19 nt, Homo sapiens
  misc_RNA (1)...(19): siRNA sense strand
auggaaacccaaagccaaa

SEQ ID NO: 2430100 - RNA, 19 nt, Homo sapiens
  misc_RNA (1)...(19): siRNA sense strand
cuaugugaaccuuaagaaa

SEQ ID NO: 2430101 - RNA, 19 nt, Homo sapiens
  misc_RNA (1)...(19): siRNA sense strand
uguuggaagaauagaaaga

SEQ ID NO: 2430102 - RNA, 19 nt, Homo sapiens
  misc_RNA (1)...(19): siRNA sense strand
ggaggaagaugaugagccu

SEQ ID NO: 2430103 - RNA, 19 nt, Homo sapiens
  misc_RNA (1)...(19): siRNA sense strand
aggaagaugaugagccuga

SEQ ID NO: 2430104 - RNA, 19 nt, Homo sapiens
  misc_RNA (1)...(19): siRNA sense strand
agacauuuggagagaggau

SEQ ID NO: 2430105 - RNA, 19 nt, Homo sapiens
  misc_RNA (1)...(19): siRNA sense strand
cugagaaucaagagaaagu

SEQ ID NO: 2430106 - RNA, 19 nt, Homo sapiens
  misc_RNA (1)...(19): siRNA sense strand
uggaacagcgacaggaaga

SEQ ID NO: 2430107 - RNA, 19 nt, Homo sapiens
  misc_RNA (1)...(19): siRNA sense strand
aggaagagucggaaauagu

SEQ ID NO: 2430108 - RNA, 19 nt, Homo sapiens
  misc_RNA (1)...(19): siRNA sense strand
gggagcaucacuagagcau

SEQ ID NO: 2430109 - RNA, 19 nt, Homo sapiens
  misc_RNA (1)...(19): siRNA sense strand
uagaggaagagucggaaau

SEQ ID NO: 2430110 - RNA, 19 nt, Homo sapiens
  misc_RNA (1)...(19): siRNA sense strand
gccaaaagaaaguaccaaa

SEQ ID NO: 2430111 - RNA, 19 nt, Homo sapiens
  misc_RNA (1)...(19): siRNA sense strand
uggaagaauagaaagaagu

SEQ ID NO: 2430112 - RNA, 19 nt, Homo sapiens
  misc_RNA (1)...(19): siRNA sense strand
aggagucagaugaggauga

SEQ ID NO: 2430113 - RNA, 19 nt, Homo sapiens
  misc_RNA (1)...(19): siRNA sense strand
acauuuggagagaggauga

SEQ ID NO: 2430114 - RNA, 19 nt, Homo sapiens
  misc_RNA (1)...(19): siRNA sense strand
gaugaagaucucugaggca

SEQ ID NO: 2430115 - RNA, 19 nt, Homo sapiens
  misc_RNA (1)...(19): siRNA sense strand
uggaugaguguauggaaca

SEQ ID NO: 2430116 - RNA, 19 nt, Homo sapiens
  misc_RNA (1)...(19): siRNA sense strand
uuucagagacauuuggaga

SEQ ID NO: 2430117 - RNA, 19 nt, Homo sapiens
  misc_RNA (1)...(19): siRNA sense strand
ccacaaguauagugacccu

SEQ ID NO: 2430118 - RNA, 19 nt, Homo sapiens
  misc_RNA (1)...(19): siRNA sense strand
uaacauaagcaaaggagag

SEQ ID NO: 2430119 - RNA, 19 nt, Homo sapiens
  misc_RNA (1)...(19): siRNA sense strand
cuggaguaucugacaagua

SEQ ID NO: 2430120 - RNA, 19 nt, Homo sapiens
  misc_RNA (1)...(19): siRNA sense strand
guaacauaagcaaaggaga

SEQ ID NO: 2430121 - RNA, 19 nt, Homo sapiens
  misc_RNA (1)...(19): siRNA sense strand
uuagaggaagagucggaaa

SEQ ID NO: 2430122 - RNA, 19 nt, Homo sapiens
  misc_RNA (1)...(19): siRNA sense strand
ggauagagaacuagucaau

SEQ ID NO: 2430123 - RNA, 19 nt, Homo sapiens
  misc_RNA (1)...(19): siRNA sense strand
ccgggaaauucgagagcau

SEQ ID NO: 2430124 - RNA, 19 nt, Homo sapiens
  misc_RNA (1)...(19): siRNA sense strand
gagucagggaggaggcaaa

SEQ ID NO: 2430125 - RNA, 19 nt, Homo sapiens
  misc_RNA (1)...(19): siRNA sense strand
uauccauccucuagaguua

SEQ ID NO: 2430126 - RNA, 19 nt, Homo sapiens
  misc_RNA (1)...(19): siRNA sense strand
aggcaugggcccagaguga

SEQ ID NO: 2430127 - RNA, 19 nt, Homo sapiens
  misc_RNA (1)...(19): siRNA sense strand
cguacugggcugaggaaaa

SEQ ID NO: 2430128 - RNA, 19 nt, Homo sapiens
  misc_RNA (1)...(19): siRNA sense strand
guguacaaggucagugaua

SEQ ID NO: 2430129 - RNA, 19 nt, Homo sapiens
  misc_RNA (1)...(19): siRNA sense strand
gggcagagauugagccuag

SEQ ID NO: 2430130 - RNA, 19 nt, Homo sapiens
  misc_RNA (1)...(19): siRNA sense strand
gauccaagcaagaagccua

SEQ ID NO: 2430131 - RNA, 19 nt, Homo sapiens
  misc_RNA (1)...(19): siRNA sense strand
caucuuagggccagggaga

SEQ ID NO: 2430132 - RNA, 19 nt, Homo sapiens
  misc_RNA (1)...(19): siRNA sense strand
ggucuggaucugaggauga

SEQ ID NO: 2430133 - RNA, 19 nt, Homo sapiens
  misc_RNA (1)...(19): siRNA sense strand
aggcaaagcccaagaaccu

SEQ ID NO: 2430134 - RNA, 19 nt, Homo sapiens
  misc_RNA (1)...(19): siRNA sense strand
gcauacaaugugagcugaa

SEQ ID NO: 2430135 - RNA, 19 nt, Homo sapiens
  misc_RNA (1)...(19): siRNA sense strand
aauaguagauucaggcaca

SEQ ID NO: 2430136 - RNA, 19 nt, Homo sapiens
  misc_RNA (1)...(19): siRNA sense strand
auucaggcacagagacaaa

SEQ ID NO: 2430137 - RNA, 19 nt, Homo sapiens
  misc_RNA (1)...(19): siRNA sense strand
gagaagaggccaagccgga

SEQ ID NO: 2430138 - RNA, 19 nt, Homo sapiens
  misc_RNA (1)...(19): siRNA sense strand
gcaugggcccagagugaau

SEQ ID NO: 2430139 - RNA, 19 nt, Homo sapiens
  misc_RNA (1)...(19): siRNA sense strand
agucugaagaugaguucua

SEQ ID NO: 2430140 - RNA, 19 nt, Homo sapiens
  misc_RNA (1)...(19): siRNA sense strand
ggaacuuagcccagaagga

SEQ ID NO: 2430141 - RNA, 19 nt, Homo sapiens
  misc_RNA (1)...(19): siRNA sense strand
ucgcugggccugagagaga

SEQ ID NO: 2430142 - RNA, 19 nt, Homo sapiens
  misc_RNA (1)...(19): siRNA sense strand
cagaaggagaagagcagga

SEQ ID NO: 2430143 - RNA, 19 nt, Homo sapiens
  misc_RNA (1)...(19): siRNA sense strand
ugucaagugugugaggaaa

SEQ ID NO: 2430144 - RNA, 19 nt, Homo sapiens
  misc_RNA (1)...(19): siRNA sense strand
cuacaagcccaaauagaca

SEQ ID NO: 2430145 - RNA, 19 nt, Homo sapiens
  misc_RNA (1)...(19): siRNA sense strand
aaggagugucccagacuaa

SEQ ID NO: 2430146 - RNA, 19 nt, Homo sapiens
  misc_RNA (1)...(19): siRNA sense strand
cugaagaagaggccauauu

SEQ ID NO: 2430147 - RNA, 19 nt, Homo sapiens
  misc_RNA (1)...(19): siRNA sense strand
augucaagugugugaggaa

SEQ ID NO: 2430148 - RNA, 19 nt, Homo sapiens
  misc_RNA (1)...(19): siRNA sense strand
cuuauuaaccacagccaau

SEQ ID NO: 2430149 - RNA, 19 nt, Homo sapiens
  misc_RNA (1)...(19): siRNA sense strand
aggccaagccggagucuga

SEQ ID NO: 2430150 - RNA, 19 nt, Homo sapiens
  misc_RNA (1)...(19): siRNA sense strand
uuucaauauuugugggucu

SEQ ID NO: 2430151 - RNA, 19 nt, Homo sapiens
  misc_RNA (1)...(19): siRNA sense strand
gaauuugaggaguuagcua

SEQ ID NO: 2430152 - RNA, 19 nt, Homo sapiens
  misc_RNA (1)...(19): siRNA sense strand
agauucaggcacagagaca

SEQ ID NO: 2430153 - RNA, 19 nt, Homo sapiens
  misc_RNA (1)...(19): siRNA sense strand
gggaaauucgagagcaucu

SEQ ID NO: 2430154 - RNA, 19 nt, Homo sapiens
  misc_RNA (1)...(19): siRNA sense strand
gguuugaggaggaagucau

SEQ ID NO: 2430155 - RNA, 19 nt, Homo sapiens
  misc_RNA (1)...(19): siRNA sense strand
agucugaagaagaggccau

SEQ ID NO: 2430156 - RNA, 19 nt, Homo sapiens
  misc_RNA (1)...(19): siRNA sense strand
cuuuaacauagaagagaca

SEQ ID NO: 2430157 - RNA, 19 nt, Homo sapiens
  misc_RNA (1)...(19): siRNA sense strand
ugauagggucaaacaagaa

SEQ ID NO: 2430158 - RNA, 19 nt, Homo sapiens
  misc_RNA (1)...(19): siRNA sense strand
cuaaaauugcaauggguau

SEQ ID NO: 2430159 - RNA, 19 nt, Homo sapiens
  misc_RNA (1)...(19): siRNA sense strand
ccaaauagacaaccaaaau

SEQ ID NO: 2430160 - RNA, 19 nt, Homo sapiens
  misc_RNA (1)...(19): siRNA sense strand
gaccaggggaggagacuaa

SEQ ID NO: 2430161 - RNA, 19 nt, Homo sapiens
  misc_RNA (1)...(19): siRNA sense strand
aggugggacaacaaaguua

SEQ ID NO: 2430162 - RNA, 19 nt, Homo sapiens
  misc_RNA (1)...(19): siRNA sense strand
auagagaacuagucaaugu

SEQ ID NO: 2430163 - RNA, 19 nt, Homo sapiens
  misc_RNA (1)...(19): siRNA sense strand
agauuucauucgagauuca

SEQ ID NO: 2430164 - RNA, 19 nt, Homo sapiens
  misc_RNA (1)...(19): siRNA sense strand
agguccaggcacagggcua

SEQ ID NO: 2430165 - RNA, 19 nt, Homo sapiens
  misc_RNA (1)...(19): siRNA sense strand
gcugaaaauugguucugaa

SEQ ID NO: 2430166 - RNA, 19 nt, Homo sapiens
  misc_RNA (1)...(19): siRNA sense strand
guucugaagaguuugaaga

SEQ ID NO: 2430167 - RNA, 19 nt, Homo sapiens
  misc_RNA (1)...(19): siRNA sense strand
ugaggaaacccuugcacau

SEQ ID NO: 2430168 - RNA, 19 nt, Homo sapiens
  misc_RNA (1)...(19): siRNA sense strand
ucgugaauuugaggaguua

SEQ ID NO: 2430169 - RNA, 19 nt, Homo sapiens
  misc_RNA (1)...(19): siRNA sense strand
aauuugaggaguuagcuaa

SEQ ID NO: 2430170 - RNA, 19 nt, Homo sapiens
  misc_RNA (1)...(19): siRNA sense strand
ugaaaagaaggcuggggaa

SEQ ID NO: 2430171 - RNA, 19 nt, Homo sapiens
  misc_RNA (1)...(19): siRNA sense strand
cauucgagauucagguguu

SEQ ID NO: 2430172 - RNA, 19 nt, Homo sapiens
  misc_RNA (1)...(19): siRNA sense strand
aaagauguugacagugaua

SEQ ID NO: 2430173 - RNA, 19 nt, Homo sapiens
  misc_RNA (1)...(19): siRNA sense strand
ccacaagccccuuuggaau

SEQ ID NO: 2430174 - RNA, 19 nt, Homo sapiens
  misc_RNA (1)...(19): siRNA sense strand
aauugguucugaagaguuu

SEQ ID NO: 2430175 - RNA, 19 nt, Homo sapiens
  misc_RNA (1)...(19): siRNA sense strand
aguggaaagauguccuuaa

SEQ ID NO: 2430176 - RNA, 19 nt, Homo sapiens
  misc_RNA (1)...(19): siRNA sense strand
ccaaguaauggguggugca

SEQ ID NO: 2430177 - RNA, 19 nt, Homo sapiens
  misc_RNA (1)...(19): siRNA sense strand
ccagagugaauuugggacu

SEQ ID NO: 2430178 - RNA, 19 nt, Homo sapiens
  misc_RNA (1)...(19): siRNA sense strand
aagcagugucacaggcaga

SEQ ID NO: 2430179 - RNA, 19 nt, Homo sapiens
  misc_RNA (1)...(19): siRNA sense strand
cagggagagugcagagucu

SEQ ID NO: 2430180 - RNA, 19 nt, Homo sapiens
  misc_RNA (1)...(19): siRNA sense strand
agaacuagucaauguggau

SEQ ID NO: 2430181 - RNA, 19 nt, Homo sapiens
  misc_RNA (1)...(19): siRNA sense strand
ucuaaacaugauugagaca

SEQ ID NO: 2430182 - RNA, 19 nt, Homo sapiens
  misc_RNA (1)...(19): siRNA sense strand
aggcacagacagaacagaa

SEQ ID NO: 2430183 - RNA, 19 nt, Homo sapiens
  misc_RNA (1)...(19): siRNA sense strand
ggugagagugugaaggcca

SEQ ID NO: 2430184 - RNA, 19 nt, Homo sapiens
  misc_RNA (1)...(19): siRNA sense strand
caggagggugagaguguga

SEQ ID NO: 2430185 - RNA, 19 nt, Homo sapiens
  misc_RNA (1)...(19): siRNA sense strand
cagugaugcuggagcggaa

SEQ ID NO: 2430186 - RNA, 19 nt, Homo sapiens
  misc_RNA (1)...(19): siRNA sense strand
gggauggagaggaggucua

SEQ ID NO: 2430187 - RNA, 19 nt, Homo sapiens
  misc_RNA (1)...(19): siRNA sense strand
augcagaagcggaggcaca

SEQ ID NO: 2430188 - RNA, 19 nt, Homo sapiens
  misc_RNA (1)...(19): siRNA sense strand
ccaacuacgacguggacuu

SEQ ID NO: 2430189 - RNA, 19 nt, Homo sapiens
  misc_RNA (1)...(19): siRNA sense strand
cuaugagacacgugaagau

SEQ ID NO: 2430190 - RNA, 19 nt, Homo sapiens
  misc_RNA (1)...(19): siRNA sense strand
gcuauguggaaguguucaa

SEQ ID NO: 2430191 - RNA, 19 nt, Homo sapiens
  misc_RNA (1)...(19): siRNA sense strand
cagacaaggaggaugacca

SEQ ID NO: 2430192 - RNA, 19 nt, Homo sapiens
  misc_RNA (1)...(19): siRNA sense strand
cauccugcuccuagagauu

SEQ ID NO: 2430193 - RNA, 19 nt, Homo sapiens
  misc_RNA (1)...(19): siRNA sense strand
auguggaaguguucaagaa

SEQ ID NO: 2430194 - RNA, 19 nt, Homo sapiens
  misc_RNA (1)...(19): siRNA sense strand
gugugaacagcgaggagau

SEQ ID NO: 2430195 - RNA, 19 nt, Homo sapiens
  misc_RNA (1)...(19): siRNA sense strand
cuguggucaucuugggauu

SEQ ID NO: 2430196 - RNA, 19 nt, Homo sapiens
  misc_RNA (1)...(19): siRNA sense strand
uggugagcuucaaguggaa

SEQ ID NO: 2430197 - RNA, 19 nt, Homo sapiens
  misc_RNA (1)...(19): siRNA sense strand
ucaccauccuccagcaaaa

SEQ ID NO: 2430198 - RNA, 19 nt, Homo sapiens
  misc_RNA (1)...(19): siRNA sense strand
ccuucaagcuggcuggagu

SEQ ID NO: 2430199 - RNA, 19 nt, Homo sapiens
  misc_RNA (1)...(19): siRNA sense strand
gaaaguaacaucagggaga

SEQ ID NO: 2430200 - RNA, 19 nt, Homo sapiens
  misc_RNA (1)...(19): siRNA sense strand
ccagcaaaaucuagggaaa

SEQ ID NO: 2430201 - RNA, 19 nt, Homo sapiens
  misc_RNA (1)...(19): siRNA sense strand
cuuuaaucuucguaggaaa

SEQ ID NO: 2430202 - RNA, 19 nt, Homo sapiens
  misc_RNA (1)...(19): siRNA sense strand
ggcuuuaacacaagaaaua

SEQ ID NO: 2430203 - RNA, 19 nt, Homo sapiens
  misc_RNA (1)...(19): siRNA sense strand
cagaaggugauuaaagaaa

SEQ ID NO: 2430204 - RNA, 19 nt, Homo sapiens
  misc_RNA (1)...(19): siRNA sense strand
ugaagaaacaagaagagaa

SEQ ID NO: 2430205 - RNA, 19 nt, Homo sapiens
  misc_RNA (1)...(19): siRNA sense strand
cacuaaaguucgagccauu

SEQ ID NO: 2430206 - RNA, 19 nt, Homo sapiens
  misc_RNA (1)...(19): siRNA sense strand
cugaauuccuuguggcauu

SEQ ID NO: 2430207 - RNA, 19 nt, Homo sapiens
  misc_RNA (1)...(19): siRNA sense strand
gccaaacuccuuagggaaa

SEQ ID NO: 2430208 - RNA, 19 nt, Homo sapiens
  misc_RNA (1)...(19): siRNA sense strand
gcugauagaagcaggugaa

SEQ ID NO: 2430209 - RNA, 19 nt, Homo sapiens
  misc_RNA (1)...(19): siRNA sense strand
ggcugaaauuguucgauaa

SEQ ID NO: 2430210 - RNA, 19 nt, Homo sapiens
  misc_RNA (1)...(19): siRNA sense strand
ggugaaacccagagccaga

SEQ ID NO: 2430211 - RNA, 19 nt, Homo sapiens
  misc_RNA (1)...(19): siRNA sense strand
acgagaaagaauaaggaau

SEQ ID NO: 2430212 - RNA, 19 nt, Homo sapiens
  misc_RNA (1)...(19): siRNA sense strand
aaauagaagagcaguagaa

SEQ ID NO: 2430213 - RNA, 19 nt, Homo sapiens
  misc_RNA (1)...(19): siRNA sense strand
agcugaaaguaaaggaaau

SEQ ID NO: 2430214 - RNA, 19 nt, Homo sapiens
  misc_RNA (1)...(19): siRNA sense strand
cagcaagaucaacaggaaa

SEQ ID NO: 2430215 - RNA, 19 nt, Homo sapiens
  misc_RNA (1)...(19): siRNA sense strand
ggaugaugaaauugggaga

SEQ ID NO: 2430216 - RNA, 19 nt, Homo sapiens
  misc_RNA (1)...(19): siRNA sense strand
ugaaauugggagaaaggua

SEQ ID NO: 2430217 - RNA, 19 nt, Homo sapiens
  misc_RNA (1)...(19): siRNA sense strand
augcaaugguggaggagga

SEQ ID NO: 2430218 - RNA, 19 nt, Homo sapiens
  misc_RNA (1)...(19): siRNA sense strand
caacaaagacagaggcuag

SEQ ID NO: 2430219 - RNA, 19 nt, Homo sapiens
  misc_RNA (1)...(19): siRNA sense strand
augaugaaauugggagaaa

SEQ ID NO: 2430220 - RNA, 19 nt, Homo sapiens
  misc_RNA (1)...(19): siRNA sense strand
ggacggaauuauagugaac

SEQ ID NO: 2430221 - RNA, 19 nt, Homo sapiens
  misc_RNA (1)...(19): siRNA sense strand
agcaaagaguugaagauga

SEQ ID NO: 2430222 - RNA, 19 nt, Homo sapiens
  misc_RNA (1)...(19): siRNA sense strand
gagcagaugcagaugccua

SEQ ID NO: 2430223 - RNA, 19 nt, Homo sapiens
  misc_RNA (1)...(19): siRNA sense strand
gagaaaucuucgccagaga

SEQ ID NO: 2430224 - RNA, 19 nt, Homo sapiens
  misc_RNA (1)...(19): siRNA sense strand
caggaacgagaaagaauaa

SEQ ID NO: 2430225 - RNA, 19 nt, Homo sapiens
  misc_RNA (1)...(19): siRNA sense strand
uuggauuacuuaagagaga

SEQ ID NO: 2430226 - RNA, 19 nt, Homo sapiens
  misc_RNA (1)...(19): siRNA sense strand
cuuacaagaugcugcaaga

SEQ ID NO: 2430227 - RNA, 19 nt, Homo sapiens
  misc_RNA (1)...(19): siRNA sense strand
gccaagaaguggaaggaag

SEQ ID NO: 2430228 - RNA, 19 nt, Homo sapiens
  misc_RNA (1)...(19): siRNA sense strand
augaauuaccagauggauu

SEQ ID NO: 2430229 - RNA, 19 nt, Homo sapiens
  misc_RNA (1)...(19): siRNA sense strand
acaggaacgagaaagaaua

SEQ ID NO: 2430230 - RNA, 19 nt, Homo sapiens
  misc_RNA (1)...(19): siRNA sense strand
ggagaaaaugauacaacaa

SEQ ID NO: 2430231 - RNA, 19 nt, Homo sapiens
  misc_RNA (1)...(19): siRNA sense strand
gaaagguauauaugagaga

SEQ ID NO: 2430232 - RNA, 19 nt, Homo sapiens
  misc_RNA (1)...(19): siRNA sense strand
gggaaauaugccaucacaa

SEQ ID NO: 2430233 - RNA, 19 nt, Homo sapiens
  misc_RNA (1)...(19): siRNA sense strand
uaaucagguucuuggagua

SEQ ID NO: 2430234 - RNA, 19 nt, Homo sapiens
  misc_RNA (1)...(19): siRNA sense strand
ugauauaaccucccagcua

SEQ ID NO: 2430235 - RNA, 19 nt, Homo sapiens
  misc_RNA (1)...(19): siRNA sense strand
agaaacaagaagagaaaug

SEQ ID NO: 2430236 - RNA, 19 nt, Homo sapiens
  misc_RNA (1)...(19): siRNA sense strand
ugugcaugcaucagggaaa

SEQ ID NO: 2430237 - RNA, 19 nt, Homo sapiens
  misc_RNA (1)...(19): siRNA sense strand
aaaagagagcugaaaguaa

SEQ ID NO: 2430238 - RNA, 19 nt, Homo sapiens
  misc_RNA (1)...(19): siRNA sense strand
uauaugagagaucgagaaa

SEQ ID NO: 2430239 - RNA, 19 nt, Homo sapiens
  misc_RNA (1)...(19): siRNA sense strand
caucaaaaguaggaagcua

SEQ ID NO: 2430240 - RNA, 19 nt, Homo sapiens
  misc_RNA (1)...(19): siRNA sense strand
ccagcaaagaguugaagau

SEQ ID NO: 2430241 - RNA, 19 nt, Homo sapiens
  misc_RNA (1)...(19): siRNA sense strand
cuaaauaccgacuggcaga

SEQ ID NO: 2430242 - RNA, 19 nt, Homo sapiens
  misc_RNA (1)...(19): siRNA sense strand
agcaagaucaacaggaaau

SEQ ID NO: 2430243 - RNA, 19 nt, Homo sapiens
  misc_RNA (1)...(19): siRNA sense strand
cagaaaacucagaagguga

SEQ ID NO: 2430244 - RNA, 19 nt, Homo sapiens
  misc_RNA (1)...(19): siRNA sense strand
gcugaaaauccaugucaua

SEQ ID NO: 2430245 - RNA, 19 nt, Homo sapiens
  misc_RNA (1)...(19): siRNA sense strand
caauuaugggacuuggaua

SEQ ID NO: 2430246 - RNA, 19 nt, Homo sapiens
  misc_RNA (1)...(19): siRNA sense strand
aggaaaugcacuuacaaga

SEQ ID NO: 2430247 - RNA, 19 nt, Homo sapiens
  misc_RNA (1)...(19): siRNA sense strand
agagaggaguggcugaaau

SEQ ID NO: 2430248 - RNA, 19 nt, Homo sapiens
  misc_RNA (1)...(19): siRNA sense strand
ugaagauaugcaagcuaaa

SEQ ID NO: 2430249 - RNA, 19 nt, Homo sapiens
  misc_RNA (1)...(19): siRNA sense strand
acggaauuauagugaacau

SEQ ID NO: 2430250 - RNA, 19 nt, Homo sapiens
  misc_RNA (1)...(19): siRNA sense strand
ugaucuacaacgaaacaaa

SEQ ID NO: 2430251 - RNA, 19 nt, Homo sapiens
  misc_RNA (1)...(19): siRNA sense strand
caaacacaggaacgagaaa

SEQ ID NO: 2430252 - RNA, 19 nt, Homo sapiens
  misc_RNA (1)...(19): siRNA sense strand
auuaaaaggcuauggugaa

SEQ ID NO: 2430253 - RNA, 19 nt, Homo sapiens
  misc_RNA (1)...(19): siRNA sense strand
aguuauugcuacucucaua

SEQ ID NO: 2430254 - RNA, 19 nt, Homo sapiens
  misc_RNA (1)...(19): siRNA sense strand
cugucaaaguuuaggaaaa

SEQ ID NO: 2430255 - RNA, 19 nt, Homo sapiens
  misc_RNA (1)...(19): siRNA sense strand
gaagagaaauguugcagga

SEQ ID NO: 2430256 - RNA, 19 nt, Homo sapiens
  misc_RNA (1)...(19): siRNA sense strand
gugaaaacaaagaagagaa

SEQ ID NO: 2430257 - RNA, 19 nt, Homo sapiens
  misc_RNA (1)...(19): siRNA sense strand
uugauaacugcgugacaua

SEQ ID NO: 2430258 - RNA, 19 nt, Homo sapiens
  misc_RNA (1)...(19): siRNA sense strand
ugaaagggguuguggacca

SEQ ID NO: 2430259 - RNA, 19 nt, Homo sapiens
  misc_RNA (1)...(19): siRNA sense strand
cugacaaagcaaauugaau

SEQ ID NO: 2430260 - RNA, 19 nt, Homo sapiens
  misc_RNA (1)...(19): siRNA sense strand
gcaacuacgacuaaagcca

SEQ ID NO: 2430261 - RNA, 19 nt, Homo sapiens
  misc_RNA (1)...(19): siRNA sense strand
uuggagaaguugaagcuca

SEQ ID NO: 2430262 - RNA, 19 nt, Homo sapiens
  misc_RNA (1)...(19): siRNA sense strand
agaagaaacauggcggcua

SEQ ID NO: 2430263 - RNA, 19 nt, Homo sapiens
  misc_RNA (1)...(19): siRNA sense strand
cggaaaggccaugcagaga

SEQ ID NO: 2430264 - RNA, 19 nt, Homo sapiens
  misc_RNA (1)...(19): siRNA sense strand
ccaagaaguuccaggguga

SEQ ID NO: 2430265 - RNA, 19 nt, Homo sapiens
  misc_RNA (1)...(19): siRNA sense strand
ccgagaaagccaagagcca

SEQ ID NO: 2430266 - RNA, 19 nt, Homo sapiens
  misc_RNA (1)...(19): siRNA sense strand
ugaggaaggagcagcgcaa

SEQ ID NO: 2430267 - RNA, 19 nt, Homo sapiens
  misc_RNA (1)...(19): siRNA sense strand
acuggaaggacgacgacaa

SEQ ID NO: 2430268 - RNA, 19 nt, Homo sapiens
  misc_RNA (1)...(19): siRNA sense strand
ccaagaagcagaaggagcu

SEQ ID NO: 2430269 - RNA, 19 nt, Homo sapiens
  misc_RNA (1)...(19): siRNA sense strand
agaaggagcuggaggaugc

SEQ ID NO: 2430270 - RNA, 19 nt, Homo sapiens
  misc_RNA (1)...(19): siRNA sense strand
cgcaaggaggagaaggaga

SEQ ID NO: 2430271 - RNA, 19 nt, Homo sapiens
  misc_RNA (1)...(19): siRNA sense strand
gagaaagccaagagccauc

SEQ ID NO: 2430272 - RNA, 19 nt, Homo sapiens
  misc_RNA (1)...(19): siRNA sense strand
ccgcugaugccaagaagca

SEQ ID NO: 2430273 - RNA, 19 nt, Homo sapiens
  misc_RNA (1)...(19): siRNA sense strand
gcaucuaccuggaggccaa

SEQ ID NO: 2430274 - RNA, 19 nt, Homo sapiens
  misc_RNA (1)...(19): siRNA sense strand
aggugguguucaaggccaa

SEQ ID NO: 2430275 - RNA, 19 nt, Homo sapiens
  misc_RNA (1)...(19): siRNA sense strand
aggaggaagcccacagaga

SEQ ID NO: 2430276 - RNA, 19 nt, Homo sapiens
  misc_RNA (1)...(19): siRNA sense strand
gcacagcuguagaugcaga

SEQ ID NO: 2430277 - RNA, 19 nt, Homo sapiens
  misc_RNA (1)...(19): siRNA sense strand
ccacaagaagaaggaggaa

SEQ ID NO: 2430278 - RNA, 19 nt, Homo sapiens
  misc_RNA (1)...(19): siRNA sense strand
agaagaaggaggaagccca

SEQ ID NO: 2430279 - RNA, 19 nt, Homo sapiens
  misc_RNA (1)...(19): siRNA sense strand
agaacugugucauuggcua

SEQ ID NO: 2430280 - RNA, 19 nt, Homo sapiens
  misc_RNA (1)...(19): siRNA sense strand
ggaaagacgucgcuggcca

SEQ ID NO: 2430281 - RNA, 19 nt, Homo sapiens
  misc_RNA (1)...(19): siRNA sense strand
ccgacaucguggagcugaa

SEQ ID NO: 2430282 - RNA, 19 nt, Homo sapiens
  misc_RNA (1)...(19): siRNA sense strand
ccgaccagagcgaggacaa

SEQ ID NO: 2430283 - RNA, 19 nt, Homo sapiens
  misc_RNA (1)...(19): siRNA sense strand
gaaagacgucgcuggccaa

SEQ ID NO: 2430284 - RNA, 19 nt, Homo sapiens
  misc_RNA (1)...(19): siRNA sense strand
ggggacacccugaacgaaa

SEQ ID NO: 2430285 - RNA, 19 nt, Homo sapiens
  misc_RNA (1)...(19): siRNA sense strand
gcuacaugaaccagagcuu

SEQ ID NO: 2430286 - RNA, 19 nt, Homo sapiens
  misc_RNA (1)...(19): siRNA sense strand
ucuccaaacuccuggccuu

SEQ ID NO: 2430287 - RNA, 19 nt, Homo sapiens
  misc_RNA (1)...(19): siRNA sense strand
gcgaaguccacguggcacu

SEQ ID NO: 2430288 - RNA, 19 nt, Homo sapiens
  misc_RNA (1)...(19): siRNA sense strand
ccaagaugcagaacgcaga

SEQ ID NO: 2430289 - RNA, 19 nt, Homo sapiens
  misc_RNA (1)...(19): siRNA sense strand
agaaaggagaagaaggaga

SEQ ID NO: 2430290 - RNA, 19 nt, Homo sapiens
  misc_RNA (1)...(19): siRNA sense strand
uugaagagcuuuugggcaa

SEQ ID NO: 2430291 - RNA, 19 nt, Homo sapiens
  misc_RNA (1)...(19): siRNA sense strand
gugggaugguacagagaga

SEQ ID NO: 2430292 - RNA, 19 nt, Homo sapiens
  misc_RNA (1)...(19): siRNA sense strand
gcugaaggcaagaaagcau

SEQ ID NO: 2430293 - RNA, 19 nt, Homo sapiens
  misc_RNA (1)...(19): siRNA sense strand
ugaugaugaugaagagcau

SEQ ID NO: 2430294 - RNA, 19 nt, Homo sapiens
  misc_RNA (1)...(19): siRNA sense strand
agagagagccagaagcaca

SEQ ID NO: 2430295 - RNA, 19 nt, Homo sapiens
  misc_RNA (1)...(19): siRNA sense strand
augaguaugaagaggaaaa

SEQ ID NO: 2430296 - RNA, 19 nt, Homo sapiens
  misc_RNA (1)...(19): siRNA sense strand
gcaaagacauggacccugu

SEQ ID NO: 2430297 - RNA, 19 nt, Homo sapiens
  misc_RNA (1)...(19): siRNA sense strand
cugcaagucucaagugcca

SEQ ID NO: 2430298 - RNA, 19 nt, Homo sapiens
  misc_RNA (1)...(19): siRNA sense strand
cagaagcacagaaaggaga

SEQ ID NO: 2430299 - RNA, 19 nt, Homo sapiens
  misc_RNA (1)...(19): siRNA sense strand
gaaaagaaucccaaagcca

SEQ ID NO: 2430300 - RNA, 19 nt, Homo sapiens
  misc_RNA (1)...(19): siRNA sense strand
gccuagaagaugcagaaaa

SEQ ID NO: 2430301 - RNA, 19 nt, Homo sapiens
  misc_RNA (1)...(19): siRNA sense strand
agcacagaaaggagaagaa

SEQ ID NO: 2430302 - RNA, 19 nt, Homo sapiens
  misc_RNA (1)...(19): siRNA sense strand
aggaugacgaugaugauga

SEQ ID NO: 2430303 - RNA, 19 nt, Homo sapiens
  misc_RNA (1)...(19): siRNA sense strand
cugaugaugaugaugaaga

SEQ ID NO: 2430304 - RNA, 19 nt, Homo sapiens
  misc_RNA (1)...(19): siRNA sense strand
uagaagaugcagaaaagaa

SEQ ID NO: 2430305 - RNA, 19 nt, Homo sapiens
  misc_RNA (1)...(19): siRNA sense strand
augaagaggaaaauagcaa

SEQ ID NO: 2430306 - RNA, 19 nt, Homo sapiens
  misc_RNA (1)...(19): siRNA sense strand
gugaugaguaugaagagga

SEQ ID NO: 2430307 - RNA, 19 nt, Homo sapiens
  misc_RNA (1)...(19): siRNA sense strand
aagccuagaagaugcagaa

SEQ ID NO: 2430308 - RNA, 19 nt, Homo sapiens
  misc_RNA (1)...(19): siRNA sense strand
cggcagagauugauugcag

SEQ ID NO: 2430309 - RNA, 19 nt, Homo sapiens
  misc_RNA (1)...(19): siRNA sense strand
auguuaagauagaagggaa

SEQ ID NO: 2430310 - RNA, 19 nt, Homo sapiens
  misc_RNA (1)...(19): siRNA sense strand
cuuccagaaaccagagaaa

SEQ ID NO: 2430311 - RNA, 19 nt, Homo sapiens
  misc_RNA (1)...(19): siRNA sense strand
caagaaaaugcaagagaca

SEQ ID NO: 2430312 - RNA, 19 nt, Homo sapiens
  misc_RNA (1)...(19): siRNA sense strand
ccuucuacguugugaaaau

SEQ ID NO: 2430313 - RNA, 19 nt, Homo sapiens
  misc_RNA (1)...(19): siRNA sense strand
uggaauagaagaugauacu

SEQ ID NO: 2430314 - RNA, 19 nt, Homo sapiens
  misc_RNA (1)...(19): siRNA sense strand
ugugauuguuaguggaacu

SEQ ID NO: 2430315 - RNA, 19 nt, Homo sapiens
  misc_RNA (1)...(19): siRNA sense strand
cagaaucggacgcggcaga

SEQ ID NO: 2430316 - RNA, 19 nt, Homo sapiens
  misc_RNA (1)...(19): siRNA sense strand
agauagaagggaaggacac

SEQ ID NO: 2430317 - RNA, 19 nt, Homo sapiens
  misc_RNA (1)...(19): siRNA sense strand
cgacugauuccuaggcaga

SEQ ID NO: 2430318 - RNA, 19 nt, Homo sapiens
  misc_RNA (1)...(19): siRNA sense strand
ggaguacccgagagggcua

SEQ ID NO: 2430319 - RNA, 19 nt, Homo sapiens
  misc_RNA (1)...(19): siRNA sense strand
acgugaugcgggagaccua

SEQ ID NO: 2430320 - RNA, 19 nt, Homo sapiens
  misc_RNA (1)...(19): siRNA sense strand
cucuagauccgcaggagua

SEQ ID NO: 2430321 - RNA, 19 nt, Homo sapiens
  misc_RNA (1)...(19): siRNA sense strand
acacagaggagaagcugca

SEQ ID NO: 2430322 - RNA, 19 nt, Homo sapiens
  misc_RNA (1)...(19): siRNA sense strand
caugaaggcuggugggcau

SEQ ID NO: 2430323 - RNA, 19 nt, Homo sapiens
  misc_RNA (1)...(19): siRNA sense strand
ggcuuaauauagaggaacu

SEQ ID NO: 2430324 - RNA, 19 nt, Homo sapiens
  misc_RNA (1)...(19): siRNA sense strand
cauacaaggagguggucca

SEQ ID NO: 2430325 - RNA, 19 nt, Homo sapiens
  misc_RNA (1)...(19): siRNA sense strand
gggcauacaaggagguggu

SEQ ID NO: 2430326 - RNA, 19 nt, Homo sapiens
  misc_RNA (1)...(19): siRNA sense strand
gcuuaauauagaggaacua

SEQ ID NO: 2430327 - RNA, 19 nt, Homo sapiens
  misc_RNA (1)...(19): siRNA sense strand
caacauaucuggagggccc

SEQ ID NO: 2430328 - RNA, 19 nt, Homo sapiens
  misc_RNA (1)...(19): siRNA sense strand
ggggcuuaauauagaggaa

SEQ ID NO: 2430329 - RNA, 19 nt, Homo sapiens
  misc_RNA (1)...(19): siRNA sense strand
ccgacuacacuuugggagu

SEQ ID NO: 2430330 - RNA, 19 nt, Homo sapiens
  misc_RNA (1)...(19): siRNA sense strand
uuucugagcaugagugaca

SEQ ID NO: 2430331 - RNA, 19 nt, Homo sapiens
  misc_RNA (1)...(19): siRNA sense strand
guacaacacuggaagacac

SEQ ID NO: 2430332 - RNA, 19 nt, Homo sapiens
  misc_RNA (1)...(19): siRNA sense strand
gagcuauauacgaauguca

SEQ ID NO: 2430333 - RNA, 19 nt, Homo sapiens
  misc_RNA (1)...(19): siRNA sense strand
ggaacuauauccagagacc

SEQ ID NO: 2430334 - RNA, 19 nt, Homo sapiens
  misc_RNA (1)...(19): siRNA sense strand
ggaaauagucugggaggug

SEQ ID NO: 2430335 - RNA, 19 nt, Homo sapiens
  misc_RNA (1)...(19): siRNA sense strand
aggaggugguccagggaag

SEQ ID NO: 2430336 - RNA, 19 nt, Homo sapiens
  misc_RNA (1)...(19): siRNA sense strand
ggaaccaaguggauggcuu

SEQ ID NO: 2430337 - RNA, 19 nt, Homo sapiens
  misc_RNA (1)...(19): siRNA sense strand
ccaacaacagccacggaau

SEQ ID NO: 2430338 - RNA, 19 nt, Homo sapiens
  misc_RNA (1)...(19): siRNA sense strand
ugaugugaguuuugggaau

SEQ ID NO: 2430339 - RNA, 19 nt, Homo sapiens
  misc_RNA (1)...(19): siRNA sense strand
gagccauggaaaagaaaau

SEQ ID NO: 2430340 - RNA, 19 nt, Homo sapiens
  misc_RNA (1)...(19): siRNA sense strand
ggaaaagaaaaucaagaca

SEQ ID NO: 2430341 - RNA, 19 nt, Homo sapiens
  misc_RNA (1)...(19): siRNA sense strand
ccucaaaucucaaggcgag

SEQ ID NO: 2430342 - RNA, 19 nt, Homo sapiens
  misc_RNA (1)...(19): siRNA sense strand
cgugaaaacuccugauaac

SEQ ID NO: 2430343 - RNA, 19 nt, Homo sapiens
  misc_RNA (1)...(19): siRNA sense strand
accuauagcagaugaagau

SEQ ID NO: 2430344 - RNA, 19 nt, Homo sapiens
  misc_RNA (1)...(19): siRNA sense strand
aggaauuggcggagagaau

SEQ ID NO: 2430345 - RNA, 19 nt, Homo sapiens
  misc_RNA (1)...(19): siRNA sense strand
acaaagugcuggugggaga

SEQ ID NO: 2430346 - RNA, 19 nt, Homo sapiens
  misc_RNA (1)...(19): siRNA sense strand
agaaagaggcugaggagga

SEQ ID NO: 2430347 - RNA, 19 nt, Homo sapiens
  misc_RNA (1)...(19): siRNA sense strand
aggacaaggagaagggcaa

SEQ ID NO: 2430348 - RNA, 19 nt, Homo sapiens
  misc_RNA (1)...(19): siRNA sense strand
aggagaagggcaagggcaa

SEQ ID NO: 2430349 - RNA, 19 nt, Homo sapiens
  misc_RNA (1)...(19): siRNA sense strand
agaaaaggauggaggcaga

SEQ ID NO: 2430350 - RNA, 19 nt, Homo sapiens
  misc_RNA (1)...(19): siRNA sense strand
gaaagagaaagaaaggcaa

SEQ ID NO: 2430351 - RNA, 19 nt, Homo sapiens
  misc_RNA (1)...(19): siRNA sense strand
agggcaaagcaaaggacaa

SEQ ID NO: 2430352 - RNA, 19 nt, Homo sapiens
  misc_RNA (1)...(19): siRNA sense strand
aggagaagggcaagcagaa

SEQ ID NO: 2430353 - RNA, 19 nt, Homo sapiens
  misc_RNA (1)...(19): siRNA sense strand
ggauggaggcagagcagga

SEQ ID NO: 2430354 - RNA, 19 nt, Homo sapiens
  misc_RNA (1)...(19): siRNA sense strand
aaggcaaggagaagggcaa

SEQ ID NO: 2430355 - RNA, 19 nt, Homo sapiens
  misc_RNA (1)...(19): siRNA sense strand
ucaugagggcagugagaga

SEQ ID NO: 2430356 - RNA, 19 nt, Homo sapiens
  misc_RNA (1)...(19): siRNA sense strand
ugaaagagaaagaaaggca

SEQ ID NO: 2430357 - RNA, 19 nt, Homo sapiens
  misc_RNA (1)...(19): siRNA sense strand
cgucaugagggcagugaga

SEQ ID NO: 2430358 - RNA, 19 nt, Homo sapiens
  misc_RNA (1)...(19): siRNA sense strand
cccauggaagcgagggaua

SEQ ID NO: 2430359 - RNA, 19 nt, Homo sapiens
  misc_RNA (1)...(19): siRNA sense strand
agagaaugaagaacaggaa

SEQ ID NO: 2430360 - RNA, 19 nt, Homo sapiens
  misc_RNA (1)...(19): siRNA sense strand
agcagaaaggcaaggagaa

SEQ ID NO: 2430361 - RNA, 19 nt, Homo sapiens
  misc_RNA (1)...(19): siRNA sense strand
caucaacagaauagggcca

SEQ ID NO: 2430362 - RNA, 19 nt, Homo sapiens
  misc_RNA (1)...(19): siRNA sense strand
agggcaagcagaaaggcaa

SEQ ID NO: 2430363 - RNA, 19 nt, Homo sapiens
  misc_RNA (1)...(19): siRNA sense strand
cagaggaggaguuggagga

SEQ ID NO: 2430364 - RNA, 19 nt, Homo sapiens
  misc_RNA (1)...(19): siRNA sense strand
aagcagaaaggcaaggaga

SEQ ID NO: 2430365 - RNA, 19 nt, Homo sapiens
  misc_RNA (1)...(19): siRNA sense strand
gaacaggaaugcagaggag

SEQ ID NO: 2430366 - RNA, 19 nt, Homo sapiens
  misc_RNA (1)...(19): siRNA sense strand
gagaggauauggaggggau

SEQ ID NO: 2430367 - RNA, 19 nt, Homo sapiens
  misc_RNA (1)...(19): siRNA sense strand
aggcagagcaggagauggu

SEQ ID NO: 2430368 - RNA, 19 nt, Homo sapiens
  misc_RNA (1)...(19): siRNA sense strand
ugccugaaagagaaagaaa

SEQ ID NO: 2430369 - RNA, 19 nt, Homo sapiens
  misc_RNA (1)...(19): siRNA sense strand
aagaaaggcaauugcagga

SEQ ID NO: 2430370 - RNA, 19 nt, Homo sapiens
  misc_RNA (1)...(19): siRNA sense strand
cugcagaaauccagccucu

SEQ ID NO: 2430371 - RNA, 19 nt, Homo sapiens
  misc_RNA (1)...(19): siRNA sense strand
agugagagagcaugaggau

SEQ ID NO: 2430372 - RNA, 19 nt, Homo sapiens
  misc_RNA (1)...(19): siRNA sense strand
ggguagaagugcagaagcc

SEQ ID NO: 2430373 - RNA, 19 nt, Homo sapiens
  misc_RNA (1)...(19): siRNA sense strand
acaggaaugcagaggagga

SEQ ID NO: 2430374 - RNA, 19 nt, Homo sapiens
  misc_RNA (1)...(19): siRNA sense strand
agcaggagauggugcgcau

SEQ ID NO: 2430375 - RNA, 19 nt, Homo sapiens
  misc_RNA (1)...(19): siRNA sense strand
ggguauuggccguggcauu

SEQ ID NO: 2430376 - RNA, 19 nt, Homo sapiens
  misc_RNA (1)...(19): siRNA sense strand
cugaaggagcauauggcaa

SEQ ID NO: 2430377 - RNA, 19 nt, Homo sapiens
  misc_RNA (1)...(19): siRNA sense strand
auucaagccaggagaguga

SEQ ID NO: 2430378 - RNA, 19 nt, Homo sapiens
  misc_RNA (1)...(19): siRNA sense strand
gucuagaugugcuggucaa

SEQ ID NO: 2430379 - RNA, 19 nt, Homo sapiens
  misc_RNA (1)...(19): siRNA sense strand
gcgaagccuguuugagcaa

SEQ ID NO: 2430380 - RNA, 19 nt, Homo sapiens
  misc_RNA (1)...(19): siRNA sense strand
ccaugugggaugauaucaa

SEQ ID NO: 2430381 - RNA, 19 nt, Homo sapiens
  misc_RNA (1)...(19): siRNA sense strand
cacagaauugaguggcaaa

SEQ ID NO: 2430382 - RNA, 19 nt, Homo sapiens
  misc_RNA (1)...(19): siRNA sense strand
gugacaagcuggcugcuga

SEQ ID NO: 2430383 - RNA, 19 nt, Homo sapiens
  misc_RNA (1)...(19): siRNA sense strand
cccaauauccugagccuga

SEQ ID NO: 2430384 - RNA, 19 nt, Homo sapiens
  misc_RNA (1)...(19): siRNA sense strand
ccaggagagugaagugcga

SEQ ID NO: 2430385 - RNA, 19 nt, Homo sapiens
  misc_RNA (1)...(19): siRNA sense strand
acaccaggaauaaggcauu

SEQ ID NO: 2430386 - RNA, 19 nt, Homo sapiens
  misc_RNA (1)...(19): siRNA sense strand
ggcaaagcugcgugugaca

SEQ ID NO: 2430387 - RNA, 19 nt, Homo sapiens
  misc_RNA (1)...(19): siRNA sense strand
aggauaaacagaaaggaca

SEQ ID NO: 2430388 - RNA, 19 nt, Homo sapiens
  misc_RNA (1)...(19): siRNA sense strand
uggagcaaagagaaggaua

SEQ ID NO: 2430389 - RNA, 19 nt, Homo sapiens
  misc_RNA (1)...(19): siRNA sense strand
ggauaaacagaaaggacac

SEQ ID NO: 2430390 - RNA, 19 nt, Homo sapiens
  misc_RNA (1)...(19): siRNA sense strand
uggugauggugguggugau

SEQ ID NO: 2430391 - RNA, 19 nt, Homo sapiens
  misc_RNA (1)...(19): siRNA sense strand
aggauaaacagaaaggaca

SEQ ID NO: 2430392 - RNA, 19 nt, Homo sapiens
  misc_RNA (1)...(19): siRNA sense strand
uggagcaaagagaaggaua

SEQ ID NO: 2430393 - RNA, 19 nt, Homo sapiens
  misc_RNA (1)...(19): siRNA sense strand
ggauaaacagaaaggacac

SEQ ID NO: 2430394 - RNA, 19 nt, Homo sapiens
  misc_RNA (1)...(19): siRNA sense strand
uggugauggugguggugau

SEQ ID NO: 2430395 - RNA, 19 nt, Homo sapiens
  misc_RNA (1)...(19): siRNA sense strand
aggauaaacagaaaggaca

SEQ ID NO: 2430396 - RNA, 19 nt, Homo sapiens
  misc_RNA (1)...(19): siRNA sense strand
uggagcaaagagaaggaua

SEQ ID NO: 2430397 - RNA, 19 nt, Homo sapiens
  misc_RNA (1)...(19): siRNA sense strand
ggauaaacagaaaggacac

SEQ ID NO: 2430398 - RNA, 19 nt, Homo sapiens
  misc_RNA (1)...(19): siRNA sense strand
uggugauggugguggugau

SEQ ID NO: 2430399 - RNA, 19 nt, Homo sapiens
  misc_RNA (1)...(19): siRNA sense strand
aggauaaacagaaaggaca

SEQ ID NO: 2430400 - RNA, 19 nt, Homo sapiens
  misc_RNA (1)...(19): siRNA sense strand
uggagcaaagagaaggaua

SEQ ID NO: 2430401 - RNA, 19 nt, Homo sapiens
  misc_RNA (1)...(19): siRNA sense strand
ggauaaacagaaaggacac

SEQ ID NO: 2430402 - RNA, 19 nt, Homo sapiens
  misc_RNA (1)...(19): siRNA sense strand
uggugauggugguggugau

SEQ ID NO: 2430403 - RNA, 19 nt, Homo sapiens
  misc_RNA (1)...(19): siRNA sense strand
agacaaagguugaagcaga

SEQ ID NO: 2430404 - RNA, 19 nt, Homo sapiens
  misc_RNA (1)...(19): siRNA sense strand
cugauuugauagaggaauu

SEQ ID NO: 2430405 - RNA, 19 nt, Homo sapiens
  misc_RNA (1)...(19): siRNA sense strand
agauaauacugaaggggua

SEQ ID NO: 2430406 - RNA, 19 nt, Homo sapiens
  misc_RNA (1)...(19): siRNA sense strand
ucagaagaacugugggcaa

SEQ ID NO: 2430407 - RNA, 19 nt, Homo sapiens
  misc_RNA (1)...(19): siRNA sense strand
gagcaguacagguggccua

SEQ ID NO: 2430408 - RNA, 19 nt, Homo sapiens
  misc_RNA (1)...(19): siRNA sense strand
uugcagagucguaaacaaa

SEQ ID NO: 2430409 - RNA, 19 nt, Homo sapiens
  misc_RNA (1)...(19): siRNA sense strand
aguaaugucagaaggcuua

SEQ ID NO: 2430410 - RNA, 19 nt, Homo sapiens
  misc_RNA (1)...(19): siRNA sense strand
gcucaggguggcugcauaa

SEQ ID NO: 2430411 - RNA, 19 nt, Homo sapiens
  misc_RNA (1)...(19): siRNA sense strand
ggauuuaauaagucugcaa

SEQ ID NO: 2430412 - RNA, 19 nt, Homo sapiens
  misc_RNA (1)...(19): siRNA sense strand
agguugaagcagauaacaa

SEQ ID NO: 2430413 - RNA, 19 nt, Homo sapiens
  misc_RNA (1)...(19): siRNA sense strand
acacaugggacuucaacaa

SEQ ID NO: 2430414 - RNA, 19 nt, Homo sapiens
  misc_RNA (1)...(19): siRNA sense strand
agaaucagccugugcgaau

SEQ ID NO: 2430415 - RNA, 19 nt, Homo sapiens
  misc_RNA (1)...(19): siRNA sense strand
cagcaugaaguuaguagaa

SEQ ID NO: 2430416 - RNA, 19 nt, Homo sapiens
  misc_RNA (1)...(19): siRNA sense strand
ugaucaaggaauugcagaa

SEQ ID NO: 2430417 - RNA, 19 nt, Homo sapiens
  misc_RNA (1)...(19): siRNA sense strand
uguuaguacuucagacaga

SEQ ID NO: 2430418 - RNA, 19 nt, Homo sapiens
  misc_RNA (1)...(19): siRNA sense strand
gcggaaacaggaagaacuu

SEQ ID NO: 2430419 - RNA, 19 nt, Homo sapiens
  misc_RNA (1)...(19): siRNA sense strand
caguaaugucagaaggcuu

SEQ ID NO: 2430420 - RNA, 19 nt, Homo sapiens
  misc_RNA (1)...(19): siRNA sense strand
agacagacagugaaauaau

SEQ ID NO: 2430421 - RNA, 19 nt, Homo sapiens
  misc_RNA (1)...(19): siRNA sense strand
caugaaguuaguagaagaa

SEQ ID NO: 2430422 - RNA, 19 nt, Homo sapiens
  misc_RNA (1)...(19): siRNA sense strand
ugcuuaaauuccuggcaaa

SEQ ID NO: 2430423 - RNA, 19 nt, Homo sapiens
  misc_RNA (1)...(19): siRNA sense strand
agaagacagcucagaagaa

SEQ ID NO: 2430424 - RNA, 19 nt, Homo sapiens
  misc_RNA (1)...(19): siRNA sense strand
ccuuggagguggugcaguu

SEQ ID NO: 2430425 - RNA, 19 nt, Homo sapiens
  misc_RNA (1)...(19): siRNA sense strand
uguuacagcuacucacaaa

SEQ ID NO: 2430426 - RNA, 19 nt, Homo sapiens
  misc_RNA (1)...(19): siRNA sense strand
gugaaauaauuacuggaca

SEQ ID NO: 2430427 - RNA, 19 nt, Homo sapiens
  misc_RNA (1)...(19): siRNA sense strand
agauggauuucaagaacau

SEQ ID NO: 2430428 - RNA, 19 nt, Homo sapiens
  misc_RNA (1)...(19): siRNA sense strand
ggcaaauggauggcagaaa

SEQ ID NO: 2430429 - RNA, 19 nt, Homo sapiens
  misc_RNA (1)...(19): siRNA sense strand
uaagcaaaccagauggauu

SEQ ID NO: 2430430 - RNA, 19 nt, Homo sapiens
  misc_RNA (1)...(19): siRNA sense strand
gugcuuaaauuccuggcaa

SEQ ID NO: 2430431 - RNA, 19 nt, Homo sapiens
  misc_RNA (1)...(19): siRNA sense strand
aguaaggcuucuugaaagu

SEQ ID NO: 2430432 - RNA, 19 nt, Homo sapiens
  misc_RNA (1)...(19): siRNA sense strand
gaugcaaaucaaagaagau

SEQ ID NO: 2430433 - RNA, 19 nt, Homo sapiens
  misc_RNA (1)...(19): siRNA sense strand
acauggacacacacagaua

SEQ ID NO: 2430434 - RNA, 19 nt, Homo sapiens
  misc_RNA (1)...(19): siRNA sense strand
uggcaguaggcuugaguca

SEQ ID NO: 2430435 - RNA, 19 nt, Homo sapiens
  misc_RNA (1)...(19): siRNA sense strand
aggcuugagucauggagau

SEQ ID NO: 2430436 - RNA, 19 nt, Homo sapiens
  misc_RNA (1)...(19): siRNA sense strand
cuugcagagucguaaacaa

SEQ ID NO: 2430437 - RNA, 19 nt, Homo sapiens
  misc_RNA (1)...(19): siRNA sense strand
gcuuaaauuccuggcaaau

SEQ ID NO: 2430438 - RNA, 19 nt, Homo sapiens
  misc_RNA (1)...(19): siRNA sense strand
cagauggauuucaagaaca

SEQ ID NO: 2430439 - RNA, 19 nt, Homo sapiens
  misc_RNA (1)...(19): siRNA sense strand
gauguaaugauuugguaga

SEQ ID NO: 2430440 - RNA, 19 nt, Homo sapiens
  misc_RNA (1)...(19): siRNA sense strand
aggaacaacagaaucgcaa

SEQ ID NO: 2430441 - RNA, 19 nt, Homo sapiens
  misc_RNA (1)...(19): siRNA sense strand
uggauguuguagauaggaa

SEQ ID NO: 2430442 - RNA, 19 nt, Homo sapiens
  misc_RNA (1)...(19): siRNA sense strand
gcagauuccgagaguuuau

SEQ ID NO: 2430443 - RNA, 19 nt, Homo sapiens
  misc_RNA (1)...(19): siRNA sense strand
cguuguuacaccaaagauu

SEQ ID NO: 2430444 - RNA, 19 nt, Homo sapiens
  misc_RNA (1)...(19): siRNA sense strand
acauauagaacuggaauca

SEQ ID NO: 2430445 - RNA, 19 nt, Homo sapiens
  misc_RNA (1)...(19): siRNA sense strand
ucucaaagauguugccucu

SEQ ID NO: 2430446 - RNA, 19 nt, Homo sapiens
  misc_RNA (1)...(19): siRNA sense strand
cuggcaauauacagaccaa

SEQ ID NO: 2430447 - RNA, 19 nt, Homo sapiens
  misc_RNA (1)...(19): siRNA sense strand
aauaauuacuggacaugga

SEQ ID NO: 2430448 - RNA, 19 nt, Homo sapiens
  misc_RNA (1)...(19): siRNA sense strand
ccacuaaaaucauccaaau

SEQ ID NO: 2430449 - RNA, 19 nt, Homo sapiens
  misc_RNA (1)...(19): siRNA sense strand
agaugcaaaucaaagaaga

SEQ ID NO: 2430450 - RNA, 19 nt, Homo sapiens
  misc_RNA (1)...(19): siRNA sense strand
ugucagaaggcuuaaacuu

SEQ ID NO: 2430451 - RNA, 19 nt, Homo sapiens
  misc_RNA (1)...(19): siRNA sense strand
auauaucacuguuguguca

SEQ ID NO: 2430452 - RNA, 19 nt, Homo sapiens
  misc_RNA (1)...(19): siRNA sense strand
auauuugacuguauggaca

SEQ ID NO: 2430453 - RNA, 19 nt, Homo sapiens
  misc_RNA (1)...(19): siRNA sense strand
caaagguugaagcagauaa

SEQ ID NO: 2430454 - RNA, 19 nt, Homo sapiens
  misc_RNA (1)...(19): siRNA sense strand
cugcaauaucagaaugcuu

SEQ ID NO: 2430455 - RNA, 19 nt, Homo sapiens
  misc_RNA (1)...(19): siRNA sense strand
gcaacaaggcaacuguaca

SEQ ID NO: 2430456 - RNA, 19 nt, Homo sapiens
  misc_RNA (1)...(19): siRNA sense strand
aaagaagacacaugggacu

SEQ ID NO: 2430457 - RNA, 19 nt, Homo sapiens
  misc_RNA (1)...(19): siRNA sense strand
agguggugcaguugaauuu

SEQ ID NO: 2430458 - RNA, 19 nt, Homo sapiens
  misc_RNA (1)...(19): siRNA sense strand
aggaaguuucagaggauua

SEQ ID NO: 2430459 - RNA, 19 nt, Homo sapiens
  misc_RNA (1)...(19): siRNA sense strand
agacaucaaaccagagaau

SEQ ID NO: 2430460 - RNA, 19 nt, Homo sapiens
  misc_RNA (1)...(19): siRNA sense strand
gaacaucaagggugggaca

SEQ ID NO: 2430461 - RNA, 19 nt, Homo sapiens
  misc_RNA (1)...(19): siRNA sense strand
gcucggagaagaaggccaa

SEQ ID NO: 2430462 - RNA, 19 nt, Homo sapiens
  misc_RNA (1)...(19): siRNA sense strand
acuccuaaaucuacgaaau

SEQ ID NO: 2430463 - RNA, 19 nt, Homo sapiens
  misc_RNA (1)...(19): siRNA sense strand
gauuaaagauuucugcuca

SEQ ID NO: 2430464 - RNA, 19 nt, Homo sapiens
  misc_RNA (1)...(19): siRNA sense strand
aauacugcgccgagugaaa

SEQ ID NO: 2430465 - RNA, 19 nt, Homo sapiens
  misc_RNA (1)...(19): siRNA sense strand
acaucaaaccagagaaucu

SEQ ID NO: 2430466 - RNA, 19 nt, Homo sapiens
  misc_RNA (1)...(19): siRNA sense strand
ugcuggaaggugagaguua

SEQ ID NO: 2430467 - RNA, 19 nt, Homo sapiens
  misc_RNA (1)...(19): siRNA sense strand
gcauaaguccugaaggugu

SEQ ID NO: 2430468 - RNA, 19 nt, Homo sapiens
  misc_RNA (1)...(19): siRNA sense strand
gcaauuacuucgucgacca

SEQ ID NO: 2430469 - RNA, 19 nt, Homo sapiens
  misc_RNA (1)...(19): siRNA sense strand
caaacuggucugugaacau

SEQ ID NO: 2430470 - RNA, 19 nt, Homo sapiens
  misc_RNA (1)...(19): siRNA sense strand
uuggaaaggucauugguga

SEQ ID NO: 2430471 - RNA, 19 nt, Homo sapiens
  misc_RNA (1)...(19): siRNA sense strand
gugaauauccugauggaac

SEQ ID NO: 2430472 - RNA, 19 nt, Homo sapiens
  misc_RNA (1)...(19): siRNA sense strand
gauucgaaguggagugaag

SEQ ID NO: 2430473 - RNA, 19 nt, Homo sapiens
  misc_RNA (1)...(19): siRNA sense strand
caguagucaaagaguguau

SEQ ID NO: 2430474 - RNA, 19 nt, Homo sapiens
  misc_RNA (1)...(19): siRNA sense strand
agccaaauguuguggaaag

SEQ ID NO: 2430475 - RNA, 19 nt, Homo sapiens
  misc_RNA (1)...(19): siRNA sense strand
gaggagauggaaacagcaa

SEQ ID NO: 2430476 - RNA, 19 nt, Homo sapiens
  misc_RNA (1)...(19): siRNA sense strand
agaauaacaugcaagcuga

SEQ ID NO: 2430477 - RNA, 19 nt, Homo sapiens
  misc_RNA (1)...(19): siRNA sense strand
gcccuaaagauuauagaca

SEQ ID NO: 2430478 - RNA, 19 nt, Homo sapiens
  misc_RNA (1)...(19): siRNA sense strand
uggaaaggucauuggugau

SEQ ID NO: 2430479 - RNA, 19 nt, Homo sapiens
  misc_RNA (1)...(19): siRNA sense strand
cgaaguggagugaagccua

SEQ ID NO: 2430480 - RNA, 19 nt, Homo sapiens
  misc_RNA (1)...(19): siRNA sense strand
cuggauggaaagcagguua

SEQ ID NO: 2430481 - RNA, 19 nt, Homo sapiens
  misc_RNA (1)...(19): siRNA sense strand
ggaacaccugauugagaau

SEQ ID NO: 2430482 - RNA, 19 nt, Homo sapiens
  misc_RNA (1)...(19): siRNA sense strand
gugccaugguguacaacuu

SEQ ID NO: 2430483 - RNA, 19 nt, Homo sapiens
  misc_RNA (1)...(19): siRNA sense strand
gcuggagcacuuugaggaa

SEQ ID NO: 2430484 - RNA, 19 nt, Homo sapiens
  misc_RNA (1)...(19): siRNA sense strand
cuagaaaagccgugcggau

SEQ ID NO: 2430485 - RNA, 19 nt, Homo sapiens
  misc_RNA (1)...(19): siRNA sense strand
uugcauaaguccugaaggu

SEQ ID NO: 2430486 - RNA, 19 nt, Homo sapiens
  misc_RNA (1)...(19): siRNA sense strand
uggaaaggaguuugcccua

SEQ ID NO: 2430487 - RNA, 19 nt, Homo sapiens
  misc_RNA (1)...(19): siRNA sense strand
ggaaacagcaacugagcuc

SEQ ID NO: 2430488 - RNA, 19 nt, Homo sapiens
  misc_RNA (1)...(19): siRNA sense strand
ggaauuggucaaaggugga

SEQ ID NO: 2430489 - RNA, 19 nt, Homo sapiens
  misc_RNA (1)...(19): siRNA sense strand
uggugauggaauuggucaa

SEQ ID NO: 2430490 - RNA, 19 nt, Homo sapiens
  misc_RNA (1)...(19): siRNA sense strand
ccugaaggugugaauggaa

SEQ ID NO: 2430491 - RNA, 19 nt, Homo sapiens
  misc_RNA (1)...(19): siRNA sense strand
gaccaaguacacugagaga

SEQ ID NO: 2430492 - RNA, 19 nt, Homo sapiens
  misc_RNA (1)...(19): siRNA sense strand
ggagauggaaacagcaacu

SEQ ID NO: 2430493 - RNA, 19 nt, Homo sapiens
  misc_RNA (1)...(19): siRNA sense strand
ccaccauuccgaagugaga

SEQ ID NO: 2430494 - RNA, 19 nt, Homo sapiens
  misc_RNA (1)...(19): siRNA sense strand
cagucaaaugcuucaggua

SEQ ID NO: 2430495 - RNA, 19 nt, Homo sapiens
  misc_RNA (1)...(19): siRNA sense strand
agauaucaccgaagccauu

SEQ ID NO: 2430496 - RNA, 19 nt, Homo sapiens
  misc_RNA (1)...(19): siRNA sense strand
gagaguuacgugugugcau

SEQ ID NO: 2430497 - RNA, 19 nt, Homo sapiens
  misc_RNA (1)...(19): siRNA sense strand
agaucuucuuccaauguaa

SEQ ID NO: 2430498 - RNA, 19 nt, Homo sapiens
  misc_RNA (1)...(19): siRNA sense strand
aggugugaauggaaacaga

SEQ ID NO: 2430499 - RNA, 19 nt, Homo sapiens
  misc_RNA (1)...(19): siRNA sense strand
agauuauagacaaagccaa

SEQ ID NO: 2430500 - RNA, 19 nt, Homo sapiens
  misc_RNA (1)...(19): siRNA sense strand
caauguaaacgguggaccu

SEQ ID NO: 2430501 - RNA, 19 nt, Homo sapiens
  misc_RNA (1)...(19): siRNA sense strand
ggacaaauccugagucacc

SEQ ID NO: 2430502 - RNA, 19 nt, Homo sapiens
  misc_RNA (1)...(19): siRNA sense strand
cccaaacagaacagcacua

SEQ ID NO: 2430503 - RNA, 19 nt, Homo sapiens
  misc_RNA (1)...(19): siRNA sense strand
cugugaaaagugaaguaaa

SEQ ID NO: 2430504 - RNA, 19 nt, Homo sapiens
  misc_RNA (1)...(19): siRNA sense strand
cggacucugccaaggaauu

SEQ ID NO: 2430505 - RNA, 19 nt, Homo sapiens
  misc_RNA (1)...(19): siRNA sense strand
aaaugauggaugaggguaa

SEQ ID NO: 2430506 - RNA, 19 nt, Homo sapiens
  misc_RNA (1)...(19): siRNA sense strand
acagacaagauuugggaaa

SEQ ID NO: 2430507 - RNA, 19 nt, Homo sapiens
  misc_RNA (1)...(19): siRNA sense strand
ugaaacagacagugguaau

SEQ ID NO: 2430508 - RNA, 19 nt, Homo sapiens
  misc_RNA (1)...(19): siRNA sense strand
auacagaagaauaagguga

SEQ ID NO: 2430509 - RNA, 19 nt, Homo sapiens
  misc_RNA (1)...(19): siRNA sense strand
cagugaagagucagagaga

SEQ ID NO: 2430510 - RNA, 19 nt, Homo sapiens
  misc_RNA (1)...(19): siRNA sense strand
ggaacacacacaagggaca

SEQ ID NO: 2430511 - RNA, 19 nt, Homo sapiens
  misc_RNA (1)...(19): siRNA sense strand
cacuagacaaagaggaaau

SEQ ID NO: 2430512 - RNA, 19 nt, Homo sapiens
  misc_RNA (1)...(19): siRNA sense strand
gacacuagacaaagaggaa

SEQ ID NO: 2430513 - RNA, 19 nt, Homo sapiens
  misc_RNA (1)...(19): siRNA sense strand
uuggagaguacgaugguaa

SEQ ID NO: 2430514 - RNA, 19 nt, Homo sapiens
  misc_RNA (1)...(19): siRNA sense strand
cugcauggacggaagaaga

SEQ ID NO: 2430515 - RNA, 19 nt, Homo sapiens
  misc_RNA (1)...(19): siRNA sense strand
caaagaggaaauagcaaaa

SEQ ID NO: 2430516 - RNA, 19 nt, Homo sapiens
  misc_RNA (1)...(19): siRNA sense strand
ggauaggauuucugcagga

SEQ ID NO: 2430517 - RNA, 19 nt, Homo sapiens
  misc_RNA (1)...(19): siRNA sense strand
acacaagggacaaugaaca

SEQ ID NO: 2430518 - RNA, 19 nt, Homo sapiens
  misc_RNA (1)...(19): siRNA sense strand
cagacaagauuugggaaaa

SEQ ID NO: 2430519 - RNA, 19 nt, Homo sapiens
  misc_RNA (1)...(19): siRNA sense strand
caacacaccccguggacaa

SEQ ID NO: 2430520 - RNA, 19 nt, Homo sapiens
  misc_RNA (1)...(19): siRNA sense strand
ggggaaagugauuguuuua

SEQ ID NO: 2430521 - RNA, 19 nt, Homo sapiens
  misc_RNA (1)...(19): siRNA sense strand
auaaggaaucagagguuga

SEQ ID NO: 2430522 - RNA, 19 nt, Homo sapiens
  misc_RNA (1)...(19): siRNA sense strand
caccugaagauuugaggaa

SEQ ID NO: 2430523 - RNA, 19 nt, Homo sapiens
  misc_RNA (1)...(19): siRNA sense strand
gacaaagaggaaauagcaa

SEQ ID NO: 2430524 - RNA, 19 nt, Homo sapiens
  misc_RNA (1)...(19): siRNA sense strand
gaugguaaugagaaaguau

SEQ ID NO: 2430525 - RNA, 19 nt, Homo sapiens
  misc_RNA (1)...(19): siRNA sense strand
gcuuugggugggacgguaa

SEQ ID NO: 2430526 - RNA, 19 nt, Homo sapiens
  misc_RNA (1)...(19): siRNA sense strand
gugaagagucagagagacc

SEQ ID NO: 2430527 - RNA, 19 nt, Homo sapiens
  misc_RNA (1)...(19): siRNA sense strand
agaagaauaaggugagaac

SEQ ID NO: 2430528 - RNA, 19 nt, Homo sapiens
  misc_RNA (1)...(19): siRNA sense strand
aagaagaggaaaugaugga

SEQ ID NO: 2430529 - RNA, 19 nt, Homo sapiens
  misc_RNA (1)...(19): siRNA sense strand
guugaaacagacaguggua

SEQ ID NO: 2430530 - RNA, 19 nt, Homo sapiens
  misc_RNA (1)...(19): siRNA sense strand
uaggauuucugcaggaaca

SEQ ID NO: 2430531 - RNA, 19 nt, Homo sapiens
  misc_RNA (1)...(19): siRNA sense strand
auaaaggaagcaaucgaaa

SEQ ID NO: 2430532 - RNA, 19 nt, Homo sapiens
  misc_RNA (1)...(19): siRNA sense strand
acaauaucaggcagagauu

SEQ ID NO: 2430533 - RNA, 19 nt, Homo sapiens
  misc_RNA (1)...(19): siRNA sense strand
gagagcaaaguuaaggaau

SEQ ID NO: 2430534 - RNA, 19 nt, Homo sapiens
  misc_RNA (1)...(19): siRNA sense strand
agcuaaacccuaugaacau

SEQ ID NO: 2430535 - RNA, 19 nt, Homo sapiens
  misc_RNA (1)...(19): siRNA sense strand
ggaaaugauggaugagggu

SEQ ID NO: 2430536 - RNA, 19 nt, Homo sapiens
  misc_RNA (1)...(19): siRNA sense strand
augugauggugauaaggaa

SEQ ID NO: 2430537 - RNA, 19 nt, Homo sapiens
  misc_RNA (1)...(19): siRNA sense strand
uugaagaagaggaaaugau

SEQ ID NO: 2430538 - RNA, 19 nt, Homo sapiens
  misc_RNA (1)...(19): siRNA sense strand
agauacugcugcaauggaa

SEQ ID NO: 2430539 - RNA, 19 nt, Homo sapiens
  misc_RNA (1)...(19): siRNA sense strand
cagaagaauaaggugagaa

SEQ ID NO: 2430540 - RNA, 19 nt, Homo sapiens
  misc_RNA (1)...(19): siRNA sense strand
agucagagagaccagcaaa

SEQ ID NO: 2430541 - RNA, 19 nt, Homo sapiens
  misc_RNA (1)...(19): siRNA sense strand
cagacaugacacuagacaa

SEQ ID NO: 2430542 - RNA, 19 nt, Homo sapiens
  misc_RNA (1)...(19): siRNA sense strand
aggaaucagagguugaaga

SEQ ID NO: 2430543 - RNA, 19 nt, Homo sapiens
  misc_RNA (1)...(19): siRNA sense strand
guuuacaauaucaggcaga

SEQ ID NO: 2430544 - RNA, 19 nt, Homo sapiens
  misc_RNA (1)...(19): siRNA sense strand
cuguaaauaaccugggugu

SEQ ID NO: 2430545 - RNA, 19 nt, Homo sapiens
  misc_RNA (1)...(19): siRNA sense strand
ggguguggacuuugaaaau

SEQ ID NO: 2430546 - RNA, 19 nt, Homo sapiens
  misc_RNA (1)...(19): siRNA sense strand
aaugauggaugaggguaaa

SEQ ID NO: 2430547 - RNA, 19 nt, Homo sapiens
  misc_RNA (1)...(19): siRNA sense strand
gauacugcugcaauggaaa

SEQ ID NO: 2430548 - RNA, 19 nt, Homo sapiens
  misc_RNA (1)...(19): siRNA sense strand
ggaucguuuaguagaugaa

SEQ ID NO: 2430549 - RNA, 19 nt, Homo sapiens
  misc_RNA (1)...(19): siRNA sense strand
augccgaagcuuugaacau

SEQ ID NO: 2430550 - RNA, 19 nt, Homo sapiens
  misc_RNA (1)...(19): siRNA sense strand
cagaaauugaagacuuaga

SEQ ID NO: 2430551 - RNA, 19 nt, Homo sapiens
  misc_RNA (1)...(19): siRNA sense strand
ggauauaaaugcugggaag

SEQ ID NO: 2430552 - RNA, 19 nt, Homo sapiens
  misc_RNA (1)...(19): siRNA sense strand
gaaagaaaguguugccuca

SEQ ID NO: 2430553 - RNA, 19 nt, Homo sapiens
  misc_RNA (1)...(19): siRNA sense strand
agauggagucagagaugaa

SEQ ID NO: 2430554 - RNA, 19 nt, Homo sapiens
  misc_RNA (1)...(19): siRNA sense strand
auucugacuuuaagagcaa

SEQ ID NO: 2430555 - RNA, 19 nt, Homo sapiens
  misc_RNA (1)...(19): siRNA sense strand
gggaaaguaucaugcgugu

SEQ ID NO: 2430556 - RNA, 19 nt, Homo sapiens
  misc_RNA (1)...(19): siRNA sense strand
gcgagggagaagugcaauu

SEQ ID NO: 2430557 - RNA, 19 nt, Homo sapiens
  misc_RNA (1)...(19): siRNA sense strand
cagcgagggagaagugcaa

SEQ ID NO: 2430558 - RNA, 19 nt, Homo sapiens
  misc_RNA (1)...(19): siRNA sense strand
gagaaauaugcuuggucau

SEQ ID NO: 2430559 - RNA, 19 nt, Homo sapiens
  misc_RNA (1)...(19): siRNA sense strand
cuaccuaagacaaaggaga

SEQ ID NO: 2430560 - RNA, 19 nt, Homo sapiens
  misc_RNA (1)...(19): siRNA sense strand
gggagaaccacaaugggau

SEQ ID NO: 2430561 - RNA, 19 nt, Homo sapiens
  misc_RNA (1)...(19): siRNA sense strand
gacuugaagcagaagagaa

SEQ ID NO: 2430562 - RNA, 19 nt, Homo sapiens
  misc_RNA (1)...(19): siRNA sense strand
ugagaaauaugcuugguca

SEQ ID NO: 2430563 - RNA, 19 nt, Homo sapiens
  misc_RNA (1)...(19): siRNA sense strand
ucuucuguguccuggauaa

SEQ ID NO: 2430564 - RNA, 19 nt, Homo sapiens
  misc_RNA (1)...(19): siRNA sense strand
uccaaagacuugaagcaga

SEQ ID NO: 2430565 - RNA, 19 nt, Homo sapiens
  misc_RNA (1)...(19): siRNA sense strand
ucagcaggcuaauggaaaa

SEQ ID NO: 2430566 - RNA, 19 nt, Homo sapiens
  misc_RNA (1)...(19): siRNA sense strand
aagacaaaggagauugcaa

SEQ ID NO: 2430567 - RNA, 19 nt, Homo sapiens
  misc_RNA (1)...(19): siRNA sense strand
cgaagaggcuguccgcaga

SEQ ID NO: 2430568 - RNA, 19 nt, Homo sapiens
  misc_RNA (1)...(19): siRNA sense strand
auccgaauguguuuggaaa

SEQ ID NO: 2430569 - RNA, 19 nt, Homo sapiens
  misc_RNA (1)...(19): siRNA sense strand
gcacggaagaggagaugcu

SEQ ID NO: 2430570 - RNA, 19 nt, Homo sapiens
  misc_RNA (1)...(19): siRNA sense strand
ucuuaaaaguucuggugau

SEQ ID NO: 2430571 - RNA, 19 nt, Homo sapiens
  misc_RNA (1)...(19): siRNA sense strand
acuugaagcagaagagaag

SEQ ID NO: 2430572 - RNA, 19 nt, Homo sapiens
  misc_RNA (1)...(19): siRNA sense strand
gcuacgagguggagcccua

SEQ ID NO: 2430573 - RNA, 19 nt, Homo sapiens
  misc_RNA (1)...(19): siRNA sense strand
aggaaaugaagaugaucaa

SEQ ID NO: 2430574 - RNA, 19 nt, Homo sapiens
  misc_RNA (1)...(19): siRNA sense strand
gcaaggaggagaaggagga

SEQ ID NO: 2430575 - RNA, 19 nt, Homo sapiens
  misc_RNA (1)...(19): siRNA sense strand
ugaugaagcacaaggacau

SEQ ID NO: 2430576 - RNA, 19 nt, Homo sapiens
  misc_RNA (1)...(19): siRNA sense strand
ggagcauaagugugggauu

SEQ ID NO: 2430577 - RNA, 19 nt, Homo sapiens
  misc_RNA (1)...(19): siRNA sense strand
ggaaggaauucaaccggau

SEQ ID NO: 2430578 - RNA, 19 nt, Homo sapiens
  misc_RNA (1)...(19): siRNA sense strand
caggagaccuagauggguu

SEQ ID NO: 2430579 - RNA, 19 nt, Homo sapiens
  misc_RNA (1)...(19): siRNA sense strand
gggucuaggaaacggaaga

SEQ ID NO: 2430580 - RNA, 19 nt, Homo sapiens
  misc_RNA (1)...(19): siRNA sense strand
ugaucaaagacgaggaugu

SEQ ID NO: 2430581 - RNA, 19 nt, Homo sapiens
  misc_RNA (1)...(19): siRNA sense strand
ucgacuuggcugugaagaa

SEQ ID NO: 2430582 - RNA, 19 nt, Homo sapiens
  misc_RNA (1)...(19): siRNA sense strand
ggagaaucgcccuggcaca

SEQ ID NO: 2430583 - RNA, 19 nt, Homo sapiens
  misc_RNA (1)...(19): siRNA sense strand
aggagagcgaggagaccaa

SEQ ID NO: 2430584 - RNA, 19 nt, Homo sapiens
  misc_RNA (1)...(19): siRNA sense strand
uggccaacaugaagcgaca

SEQ ID NO: 2430585 - RNA, 19 nt, Homo sapiens
  misc_RNA (1)...(19): siRNA sense strand
ggagaaugggagaagagga

SEQ ID NO: 2430586 - RNA, 19 nt, Homo sapiens
  misc_RNA (1)...(19): siRNA sense strand
agaagaggagcaaggguga

SEQ ID NO: 2430587 - RNA, 19 nt, Homo sapiens
  misc_RNA (1)...(19): siRNA sense strand
acgaggaggaagaggagga

SEQ ID NO: 2430588 - RNA, 19 nt, Homo sapiens
  misc_RNA (1)...(19): siRNA sense strand
ccugcaaggaggagaagga

SEQ ID NO: 2430589 - RNA, 19 nt, Homo sapiens
  misc_RNA (1)...(19): siRNA sense strand
cuaggaaacggaagagcau

SEQ ID NO: 2430590 - RNA, 19 nt, Homo sapiens
  misc_RNA (1)...(19): siRNA sense strand
cagagaugagaguuugaaa

SEQ ID NO: 2430591 - RNA, 19 nt, Homo sapiens
  misc_RNA (1)...(19): siRNA sense strand
cuggagaggaaaauggaaa

SEQ ID NO: 2430592 - RNA, 19 nt, Homo sapiens
  misc_RNA (1)...(19): siRNA sense strand
agggugugaaggagcauaa

SEQ ID NO: 2430593 - RNA, 19 nt, Homo sapiens
  misc_RNA (1)...(19): siRNA sense strand
gugcagaagcagacccuca

SEQ ID NO: 2430594 - RNA, 19 nt, Homo sapiens
  misc_RNA (1)...(19): siRNA sense strand
agcacagagaugagaguuu

SEQ ID NO: 2430595 - RNA, 19 nt, Homo sapiens
  misc_RNA (1)...(19): siRNA sense strand
agaccaagcagaaggugga

SEQ ID NO: 2430596 - RNA, 19 nt, Homo sapiens
  misc_RNA (1)...(19): siRNA sense strand
agcagaagguggagagggu

SEQ ID NO: 2430597 - RNA, 19 nt, Homo sapiens
  misc_RNA (1)...(19): siRNA sense strand
aaggaaaugaagaugauca

SEQ ID NO: 2430598 - RNA, 19 nt, Homo sapiens
  misc_RNA (1)...(19): siRNA sense strand
gaaugggagaagaggagca

SEQ ID NO: 2430599 - RNA, 19 nt, Homo sapiens
  misc_RNA (1)...(19): siRNA sense strand
ugaaagaauuacuggagag

SEQ ID NO: 2430600 - RNA, 19 nt, Homo sapiens
  misc_RNA (1)...(19): siRNA sense strand
cuucgaaggagcagggucu

SEQ ID NO: 2430601 - RNA, 19 nt, Homo sapiens
  misc_RNA (1)...(19): siRNA sense strand
aggagcagggucuaggaaa

SEQ ID NO: 2430602 - RNA, 19 nt, Homo sapiens
  misc_RNA (1)...(19): siRNA sense strand
uggagaggaaaauggaaaa

SEQ ID NO: 2430603 - RNA, 19 nt, Homo sapiens
  misc_RNA (1)...(19): siRNA sense strand
ugaagaugaucaaagacga

SEQ ID NO: 2430604 - RNA, 19 nt, Homo sapiens
  misc_RNA (1)...(19): siRNA sense strand
gaauuacuggagaggaaaa

SEQ ID NO: 2430605 - RNA, 19 nt, Homo sapiens
  misc_RNA (1)...(19): siRNA sense strand
ccaccuuggcccagcugaa

SEQ ID NO: 2430606 - RNA, 19 nt, Homo sapiens
  misc_RNA (1)...(19): siRNA sense strand
augcaagcuuugugggaag

SEQ ID NO: 2430607 - RNA, 19 nt, Homo sapiens
  misc_RNA (1)...(19): siRNA sense strand
gagaaugggagaagaggag

SEQ ID NO: 2430608 - RNA, 19 nt, Homo sapiens
  misc_RNA (1)...(19): siRNA sense strand
augaugaagcacaaggaca

SEQ ID NO: 2430609 - RNA, 19 nt, Homo sapiens
  misc_RNA (1)...(19): siRNA sense strand
uugaaagaauuacuggaga

SEQ ID NO: 2430610 - RNA, 19 nt, Homo sapiens
  misc_RNA (1)...(19): siRNA sense strand
gcacagagcuccauccaga

SEQ ID NO: 2430611 - RNA, 19 nt, Homo sapiens
  misc_RNA (1)...(19): siRNA sense strand
acgcaggagcugagagguu

SEQ ID NO: 2430612 - RNA, 19 nt, Homo sapiens
  misc_RNA (1)...(19): siRNA sense strand
gggcaaugaaugcagccaa

SEQ ID NO: 2430613 - RNA, 19 nt, Homo sapiens
  misc_RNA (1)...(19): siRNA sense strand
aggaguggucccagggcua

SEQ ID NO: 2430614 - RNA, 19 nt, Homo sapiens
  misc_RNA (1)...(19): siRNA sense strand
agagcaacaagcaaggaaa

SEQ ID NO: 2430615 - RNA, 19 nt, Homo sapiens
  misc_RNA (1)...(19): siRNA sense strand
ccucaagcaugaagcagga

SEQ ID NO: 2430616 - RNA, 19 nt, Homo sapiens
  misc_RNA (1)...(19): siRNA sense strand
accuugagucugacggaaa

SEQ ID NO: 2430617 - RNA, 19 nt, Homo sapiens
  misc_RNA (1)...(19): siRNA sense strand
cugucuacaccgaaggcua

SEQ ID NO: 2430618 - RNA, 19 nt, Homo sapiens
  misc_RNA (1)...(19): siRNA sense strand
agcaauuauucaagccgaa

SEQ ID NO: 2430619 - RNA, 19 nt, Homo sapiens
  misc_RNA (1)...(19): siRNA sense strand
ccaaagagcaacaagcaag

SEQ ID NO: 2430620 - RNA, 19 nt, Homo sapiens
  misc_RNA (1)...(19): siRNA sense strand
gcaugaagcaggagugguc

SEQ ID NO: 2430621 - RNA, 19 nt, Homo sapiens
  misc_RNA (1)...(19): siRNA sense strand
ccaaagaggcacuggggaa

SEQ ID NO: 2430622 - RNA, 19 nt, Homo sapiens
  misc_RNA (1)...(19): siRNA sense strand
ggaacaagcagcuggccuu

SEQ ID NO: 2430623 - RNA, 19 nt, Homo sapiens
  misc_RNA (1)...(19): siRNA sense strand
acaagaagcagcaggagca

SEQ ID NO: 2430624 - RNA, 19 nt, Homo sapiens
  misc_RNA (1)...(19): siRNA sense strand
aggcagaggaagacaggca

SEQ ID NO: 2430625 - RNA, 19 nt, Homo sapiens
  misc_RNA (1)...(19): siRNA sense strand
cgggagaagaacuguccua

SEQ ID NO: 2430626 - RNA, 19 nt, Homo sapiens
  misc_RNA (1)...(19): siRNA sense strand
cagggaacaaugacagcaa

SEQ ID NO: 2430627 - RNA, 19 nt, Homo sapiens
  misc_RNA (1)...(19): siRNA sense strand
cgucggagaagcagugaca

SEQ ID NO: 2430628 - RNA, 19 nt, Homo sapiens
  misc_RNA (1)...(19): siRNA sense strand
ccgccaaagaugacaggga

SEQ ID NO: 2430629 - RNA, 19 nt, Homo sapiens
  misc_RNA (1)...(19): siRNA sense strand
ccacgggugcagacagcaa

SEQ ID NO: 2430630 - RNA, 19 nt, Homo sapiens
  misc_RNA (1)...(19): siRNA sense strand
gugcagacagcaaugguga

SEQ ID NO: 2430631 - RNA, 19 nt, Homo sapiens
  misc_RNA (1)...(19): siRNA sense strand
ggguacagaugcagguggu

SEQ ID NO: 2430632 - RNA, 19 nt, Homo sapiens
  misc_RNA (1)...(19): siRNA sense strand
ggagaaaacaagagagacu

SEQ ID NO: 2430633 - RNA, 19 nt, Homo sapiens
  misc_RNA (1)...(19): siRNA sense strand
uggacuaggaauuggagaa

SEQ ID NO: 2430634 - RNA, 19 nt, Homo sapiens
  misc_RNA (1)...(19): siRNA sense strand
cuguaaagggccauaaaga

SEQ ID NO: 2430635 - RNA, 19 nt, Homo sapiens
  misc_RNA (1)...(19): siRNA sense strand
ggacuguggcauuuggcaa

SEQ ID NO: 2430636 - RNA, 19 nt, Homo sapiens
  misc_RNA (1)...(19): siRNA sense strand
cauuacggugggagacaaa

SEQ ID NO: 2430637 - RNA, 19 nt, Homo sapiens
  misc_RNA (1)...(19): siRNA sense strand
aggaauuggagaaggagca

SEQ ID NO: 2430638 - RNA, 19 nt, Homo sapiens
  misc_RNA (1)...(19): siRNA sense strand
gaauaaguuaguagccaca

SEQ ID NO: 2430639 - RNA, 19 nt, Homo sapiens
  misc_RNA (1)...(19): siRNA sense strand
agaugauccuguugcuaau

SEQ ID NO: 2430640 - RNA, 19 nt, Homo sapiens
  misc_RNA (1)...(19): siRNA sense strand
ggaaccuguacaaggagaa

SEQ ID NO: 2430641 - RNA, 19 nt, Homo sapiens
  misc_RNA (1)...(19): siRNA sense strand
caagagagacuguuggacu

SEQ ID NO: 2430642 - RNA, 19 nt, Homo sapiens
  misc_RNA (1)...(19): siRNA sense strand
gcauagguggacuaggaau

SEQ ID NO: 2430643 - RNA, 19 nt, Homo sapiens
  misc_RNA (1)...(19): siRNA sense strand
ugacaugagaacacagcau

SEQ ID NO: 2430644 - RNA, 19 nt, Homo sapiens
  misc_RNA (1)...(19): siRNA sense strand
cguuacaaagcucaauaaa

SEQ ID NO: 2430645 - RNA, 19 nt, Homo sapiens
  misc_RNA (1)...(19): siRNA sense strand
agggaauagaaaugggagu

SEQ ID NO: 2430646 - RNA, 19 nt, Homo sapiens
  misc_RNA (1)...(19): siRNA sense strand
cuguaguucauuugaccaa

SEQ ID NO: 2430647 - RNA, 19 nt, Homo sapiens
  misc_RNA (1)...(19): siRNA sense strand
cauagauggcauaggugga

SEQ ID NO: 2430648 - RNA, 19 nt, Homo sapiens
  misc_RNA (1)...(19): siRNA sense strand
aaggagaaaacaagagaga

SEQ ID NO: 2430649 - RNA, 19 nt, Homo sapiens
  misc_RNA (1)...(19): siRNA sense strand
gcaucaagcaacugggaga

SEQ ID NO: 2430650 - RNA, 19 nt, Homo sapiens
  misc_RNA (1)...(19): siRNA sense strand
gcgagaucaucgaggccaa

SEQ ID NO: 2430651 - RNA, 19 nt, Homo sapiens
  misc_RNA (1)...(19): siRNA sense strand
cggcaaagcuggugugcuc

SEQ ID NO: 2430652 - RNA, 19 nt, Homo sapiens
  misc_RNA (1)...(19): siRNA sense strand
cgcaagaagaggaaggaga

SEQ ID NO: 2430653 - RNA, 19 nt, Homo sapiens
  misc_RNA (1)...(19): siRNA sense strand
gcgugaccaucgagagcaa

SEQ ID NO: 2430654 - RNA, 19 nt, Homo sapiens
  misc_RNA (1)...(19): siRNA sense strand
caucauugcacuugaggau

SEQ ID NO: 2430655 - RNA, 19 nt, Homo sapiens
  misc_RNA (1)...(19): siRNA sense strand
aggccaacauuguggacuu

SEQ ID NO: 2430656 - RNA, 19 nt, Homo sapiens
  misc_RNA (1)...(19): siRNA sense strand
ccaucgagagcaaggaauu

SEQ ID NO: 2430657 - RNA, 19 nt, Homo sapiens
  misc_RNA (1)...(19): siRNA sense strand
uagaagaggacaucggcua

SEQ ID NO: 2430658 - RNA, 19 nt, Homo sapiens
  misc_RNA (1)...(19): siRNA sense strand
augccaagcuggaggagca

SEQ ID NO: 2430659 - RNA, 19 nt, Homo sapiens
  misc_RNA (1)...(19): siRNA sense strand
caagaagaggaaggagaaa

SEQ ID NO: 2430660 - RNA, 19 nt, Homo sapiens
  misc_RNA (1)...(19): siRNA sense strand
gugacaacaccuuggauga

SEQ ID NO: 2430661 - RNA, 19 nt, Homo sapiens
  misc_RNA (1)...(19): siRNA sense strand
gcacgugguacaaggugaa

SEQ ID NO: 2430662 - RNA, 19 nt, Homo sapiens
  misc_RNA (1)...(19): siRNA sense strand
cagccaucguucuggagua

SEQ ID NO: 2430663 - RNA, 19 nt, Homo sapiens
  misc_RNA (1)...(19): siRNA sense strand
cugcagaucucuagcgucu

SEQ ID NO: 2430664 - RNA, 19 nt, Homo sapiens
  misc_RNA (1)...(19): siRNA sense strand
gugaaguggaccaaggaca

SEQ ID NO: 2430665 - RNA, 19 nt, Homo sapiens
  misc_RNA (1)...(19): siRNA sense strand
cuuaucaacugcaggguca

SEQ ID NO: 2430666 - RNA, 19 nt, Homo sapiens
  misc_RNA (1)...(19): siRNA sense strand
ccaacaaccaggauggcau

SEQ ID NO: 2430667 - RNA, 19 nt, Homo sapiens
  misc_RNA (1)...(19): siRNA sense strand
gcaaggaauucaugagcuc

SEQ ID NO: 2430668 - RNA, 19 nt, Homo sapiens
  misc_RNA (1)...(19): siRNA sense strand
gauccaacucacugugcaa

SEQ ID NO: 2430669 - RNA, 19 nt, Homo sapiens
  misc_RNA (1)...(19): siRNA sense strand
cucaaaggcuaucggguca

SEQ ID NO: 2430670 - RNA, 19 nt, Homo sapiens
  misc_RNA (1)...(19): siRNA sense strand
guggaggaucaaaggucaa

SEQ ID NO: 2430671 - RNA, 19 nt, Homo sapiens
  misc_RNA (1)...(19): siRNA sense strand
gguggaggaucaaagguca

SEQ ID NO: 2430672 - RNA, 19 nt, Homo sapiens
  misc_RNA (1)...(19): siRNA sense strand
ccaucgagccugcuggcaa

SEQ ID NO: 2430673 - RNA, 19 nt, Homo sapiens
  misc_RNA (1)...(19): siRNA sense strand
acaacagcgaggaguggaa

SEQ ID NO: 2430674 - RNA, 19 nt, Homo sapiens
  misc_RNA (1)...(19): siRNA sense strand
ccaccaaggacaacggcga

SEQ ID NO: 2430675 - RNA, 19 nt, Homo sapiens
  misc_RNA (1)...(19): siRNA sense strand
acgagaacgccgacagcau

SEQ ID NO: 2430676 - RNA, 19 nt, Homo sapiens
  misc_RNA (1)...(19): siRNA sense strand
auacaugcaucgccagcaa

SEQ ID NO: 2430677 - RNA, 19 nt, Homo sapiens
  misc_RNA (1)...(19): siRNA sense strand
ccucaauggcguccucaaa

SEQ ID NO: 2430678 - RNA, 19 nt, Homo sapiens
  misc_RNA (1)...(19): siRNA sense strand
aauccaguguccaggaaga

SEQ ID NO: 2430679 - RNA, 19 nt, Homo sapiens
  misc_RNA (1)...(19): siRNA sense strand
ggaaggaacagcauggugu

SEQ ID NO: 2430680 - RNA, 19 nt, Homo sapiens
  misc_RNA (1)...(19): siRNA sense strand
ccaggugguguuugagaau

SEQ ID NO: 2430681 - RNA, 19 nt, Homo sapiens
  misc_RNA (1)...(19): siRNA sense strand
aggucuacacccuggacaa

SEQ ID NO: 2430682 - RNA, 19 nt, Homo sapiens
  misc_RNA (1)...(19): siRNA sense strand
gggcaacagcagcgagaag

SEQ ID NO: 2430683 - RNA, 19 nt, Homo sapiens
  misc_RNA (1)...(19): siRNA sense strand
cagugaaggcugaggacuc

SEQ ID NO: 2430684 - RNA, 19 nt, Homo sapiens
  misc_RNA (1)...(19): siRNA sense strand
agaaacggcugaagcgacu

SEQ ID NO: 2430685 - RNA, 19 nt, Homo sapiens
  misc_RNA (1)...(19): siRNA sense strand
aguacagcaucguggagau

SEQ ID NO: 2430686 - RNA, 19 nt, Homo sapiens
  misc_RNA (1)...(19): siRNA sense strand
cauccgaggcuucgugcua

SEQ ID NO: 2430687 - RNA, 19 nt, Homo sapiens
  misc_RNA (1)...(19): siRNA sense strand
ggaaggacggacaggugau

SEQ ID NO: 2430688 - RNA, 19 nt, Homo sapiens
  misc_RNA (1)...(19): siRNA sense strand
gcgaggaguggaaggaugu

SEQ ID NO: 2430689 - RNA, 19 nt, Homo sapiens
  misc_RNA (1)...(19): siRNA sense strand
gggacaugcccauccguau

SEQ ID NO: 2430690 - RNA, 19 nt, Homo sapiens
  misc_RNA (1)...(19): siRNA sense strand
gcaaagcuggugugcucaa

SEQ ID NO: 2430691 - RNA, 19 nt, Homo sapiens
  misc_RNA (1)...(19): siRNA sense strand
gcauccagauccugcccaa

SEQ ID NO: 2430692 - RNA, 19 nt, Homo sapiens
  misc_RNA (1)...(19): siRNA sense strand
caagauuggccgcagugaa

SEQ ID NO: 2430693 - RNA, 19 nt, Homo sapiens
  misc_RNA (1)...(19): siRNA sense strand
gggcugcggcaaugaaaca

SEQ ID NO: 2430694 - RNA, 19 nt, Homo sapiens
  misc_RNA (1)...(19): siRNA sense strand
acaccaaagaagcugaaga

SEQ ID NO: 2430695 - RNA, 19 nt, Homo sapiens
  misc_RNA (1)...(19): siRNA sense strand
caucaagggccaugcgaag

SEQ ID NO: 2430696 - RNA, 19 nt, Homo sapiens
  misc_RNA (1)...(19): siRNA sense strand
gagcuaaacugcacggcac

SEQ ID NO: 2430697 - RNA, 19 nt, Homo sapiens
  misc_RNA (1)...(19): siRNA sense strand
gagcugcgcaugagggcuu

SEQ ID NO: 2430698 - RNA, 19 nt, Homo sapiens
  misc_RNA (1)...(19): siRNA sense strand
ccacaggggacgacaucua

SEQ ID NO: 2430699 - RNA, 19 nt, Homo sapiens
  misc_RNA (1)...(19): siRNA sense strand
gcgucucccucaagcacaa

SEQ ID NO: 2430700 - RNA, 19 nt, Homo sapiens
  misc_RNA (1)...(19): siRNA sense strand
gcaacgggcaguacagcau

SEQ ID NO: 2430701 - RNA, 19 nt, Homo sapiens
  misc_RNA (1)...(19): siRNA sense strand
gcagcgagaaggugaccau

SEQ ID NO: 2430702 - RNA, 19 nt, Homo sapiens
  misc_RNA (1)...(19): siRNA sense strand
cuugcaauucagugggaga

SEQ ID NO: 2430703 - RNA, 19 nt, Homo sapiens
  misc_RNA (1)...(19): siRNA sense strand
gcuuuauccacgacaauga

SEQ ID NO: 2430704 - RNA, 19 nt, Homo sapiens
  misc_RNA (1)...(19): siRNA sense strand
ucagcgagaagguggucaa

SEQ ID NO: 2430705 - RNA, 19 nt, Homo sapiens
  misc_RNA (1)...(19): siRNA sense strand
ccaucaagggccaugcgaa

SEQ ID NO: 2430706 - RNA, 19 nt, Homo sapiens
  misc_RNA (1)...(19): siRNA sense strand
uggagauccgggaggugaa

SEQ ID NO: 2430707 - RNA, 19 nt, Homo sapiens
  misc_RNA (1)...(19): siRNA sense strand
ccaccaucaaccaggccaa

SEQ ID NO: 2430708 - RNA, 19 nt, Homo sapiens
  misc_RNA (1)...(19): siRNA sense strand
acagacaaaggaaggaaca

SEQ ID NO: 2430709 - RNA, 19 nt, Homo sapiens
  misc_RNA (1)...(19): siRNA sense strand
gaucaaaggucaaugcgug

SEQ ID NO: 2430710 - RNA, 19 nt, Homo sapiens
  misc_RNA (1)...(19): siRNA sense strand
gcaacgagacgcugcucau

SEQ ID NO: 2430711 - RNA, 19 nt, Homo sapiens
  misc_RNA (1)...(19): siRNA sense strand
cuacaguacucgguggaca

SEQ ID NO: 2430712 - RNA, 19 nt, Homo sapiens
  misc_RNA (1)...(19): siRNA sense strand
ugacaaagaugaucaaguu

SEQ ID NO: 2430713 - RNA, 19 nt, Homo sapiens
  misc_RNA (1)...(19): siRNA sense strand
ggacagcacauuaggcuuu

SEQ ID NO: 2430714 - RNA, 19 nt, Homo sapiens
  misc_RNA (1)...(19): siRNA sense strand
gguguauggccgugggcau

SEQ ID NO: 2430715 - RNA, 19 nt, Homo sapiens
  misc_RNA (1)...(19): siRNA sense strand
ggaaaagcagauauuguaa

SEQ ID NO: 2430716 - RNA, 19 nt, Homo sapiens
  misc_RNA (1)...(19): siRNA sense strand
gaacccagcuucucggaca

SEQ ID NO: 2430717 - RNA, 19 nt, Homo sapiens
  misc_RNA (1)...(19): siRNA sense strand
guaaugacaaagaugauca

SEQ ID NO: 2430718 - RNA, 19 nt, Homo sapiens
  misc_RNA (1)...(19): siRNA sense strand
ucaaaauacucaccagaau

SEQ ID NO: 2430719 - RNA, 19 nt, Homo sapiens
  misc_RNA (1)...(19): siRNA sense strand
aguuaguagcccagaagca

SEQ ID NO: 2430720 - RNA, 19 nt, Homo sapiens
  misc_RNA (1)...(19): siRNA sense strand
gggacugagccuugggacu

SEQ ID NO: 2430721 - RNA, 19 nt, Homo sapiens
  misc_RNA (1)...(19): siRNA sense strand
agaccugcauaguaggaau

SEQ ID NO: 2430722 - RNA, 19 nt, Homo sapiens
  misc_RNA (1)...(19): siRNA sense strand
ccuugaugggcuggagaua

SEQ ID NO: 2430723 - RNA, 19 nt, Homo sapiens
  misc_RNA (1)...(19): siRNA sense strand
ccauuaagcaagagcccaa

SEQ ID NO: 2430724 - RNA, 19 nt, Homo sapiens
  misc_RNA (1)...(19): siRNA sense strand
ggaaauucuucuagugcca

SEQ ID NO: 2430725 - RNA, 19 nt, Homo sapiens
  misc_RNA (1)...(19): siRNA sense strand
acaaaacaauacugggaaa

SEQ ID NO: 2430726 - RNA, 19 nt, Homo sapiens
  misc_RNA (1)...(19): siRNA sense strand
cugaaaagguaaagaagga

SEQ ID NO: 2430727 - RNA, 19 nt, Homo sapiens
  misc_RNA (1)...(19): siRNA sense strand
cagccaacuaagugggaau

SEQ ID NO: 2430728 - RNA, 19 nt, Homo sapiens
  misc_RNA (1)...(19): siRNA sense strand
gguaaagaaggaagcugaa

SEQ ID NO: 2430729 - RNA, 19 nt, Homo sapiens
  misc_RNA (1)...(19): siRNA sense strand
ggaaguacuaccagcaaaa

SEQ ID NO: 2430730 - RNA, 19 nt, Homo sapiens
  misc_RNA (1)...(19): siRNA sense strand
agguaaagaaggaagcuga

SEQ ID NO: 2430731 - RNA, 19 nt, Homo sapiens
  misc_RNA (1)...(19): siRNA sense strand
guccaaaguagcaaggauu

SEQ ID NO: 2430732 - RNA, 19 nt, Homo sapiens
  misc_RNA (1)...(19): siRNA sense strand
acuaagugggaauggaaau

SEQ ID NO: 2430733 - RNA, 19 nt, Homo sapiens
  misc_RNA (1)...(19): siRNA sense strand
cugcguuguuuguaggcaa

SEQ ID NO: 2430734 - RNA, 19 nt, Homo sapiens
  misc_RNA (1)...(19): siRNA sense strand
uggagaaaccagaaacaca

SEQ ID NO: 2430735 - RNA, 19 nt, Homo sapiens
  misc_RNA (1)...(19): siRNA sense strand
ugacagacaaggaagcgaa

SEQ ID NO: 2430736 - RNA, 19 nt, Homo sapiens
  misc_RNA (1)...(19): siRNA sense strand
uggcaaucaauuaguagaa

SEQ ID NO: 2430737 - RNA, 19 nt, Homo sapiens
  misc_RNA (1)...(19): siRNA sense strand
aguaaagauucugcugaaa

SEQ ID NO: 2430738 - RNA, 19 nt, Homo sapiens
  misc_RNA (1)...(19): siRNA sense strand
cccaaaauuucaagcacaa

SEQ ID NO: 2430739 - RNA, 19 nt, Homo sapiens
  misc_RNA (1)...(19): siRNA sense strand
uggcuuaacuggaugggca

SEQ ID NO: 2430740 - RNA, 19 nt, Homo sapiens
  misc_RNA (1)...(19): siRNA sense strand
cacaagaaucacagcucaa

SEQ ID NO: 2430741 - RNA, 19 nt, Homo sapiens
  misc_RNA (1)...(19): siRNA sense strand
gcccgauguaccagacaaa

SEQ ID NO: 2430742 - RNA, 19 nt, Homo sapiens
  misc_RNA (1)...(19): siRNA sense strand
ccaaaauagguuccaauaa

SEQ ID NO: 2430743 - RNA, 19 nt, Homo sapiens
  misc_RNA (1)...(19): siRNA sense strand
ccugcuacuucgucagcua

SEQ ID NO: 2430744 - RNA, 19 nt, Homo sapiens
  misc_RNA (1)...(19): siRNA sense strand
cacugaaggaguugauauu

SEQ ID NO: 2430745 - RNA, 19 nt, Homo sapiens
  misc_RNA (1)...(19): siRNA sense strand
acaucaggaccuaguggaa

SEQ ID NO: 2430746 - RNA, 19 nt, Homo sapiens
  misc_RNA (1)...(19): siRNA sense strand
caagaagaaagcugcccaa

SEQ ID NO: 2430747 - RNA, 19 nt, Homo sapiens
  misc_RNA (1)...(19): siRNA sense strand
agaagaaagcugcccaaaa

SEQ ID NO: 2430748 - RNA, 19 nt, Homo sapiens
  misc_RNA (1)...(19): siRNA sense strand
uguccaaaguagcaaggau

SEQ ID NO: 2430749 - RNA, 19 nt, Homo sapiens
  misc_RNA (1)...(19): siRNA sense strand
uaaagaaggaagcugaaaa

SEQ ID NO: 2430750 - RNA, 19 nt, Homo sapiens
  misc_RNA (1)...(19): siRNA sense strand
uaaacugaaacaagagaca

SEQ ID NO: 2430751 - RNA, 19 nt, Homo sapiens
  misc_RNA (1)...(19): siRNA sense strand
cagaaacuaaacugaaaca

SEQ ID NO: 2430752 - RNA, 19 nt, Homo sapiens
  misc_RNA (1)...(19): siRNA sense strand
gcucaaugcuaugaagcga

SEQ ID NO: 2430753 - RNA, 19 nt, Homo sapiens
  misc_RNA (1)...(19): siRNA sense strand
cagucuuccuucugguaau

SEQ ID NO: 2430754 - RNA, 19 nt, Homo sapiens
  misc_RNA (1)...(19): siRNA sense strand
ucacugaaggaguugauau

SEQ ID NO: 2430755 - RNA, 19 nt, Homo sapiens
  misc_RNA (1)...(19): siRNA sense strand
gaaaccuagauuggagaaa

SEQ ID NO: 2430756 - RNA, 19 nt, Homo sapiens
  misc_RNA (1)...(19): siRNA sense strand
cugaaaagcuaaaagcacu

SEQ ID NO: 2430757 - RNA, 19 nt, Homo sapiens
  misc_RNA (1)...(19): siRNA sense strand
uuaagagaacagaagucaa

SEQ ID NO: 2430758 - RNA, 19 nt, Homo sapiens
  misc_RNA (1)...(19): siRNA sense strand
ccugagaaggagagggagu

SEQ ID NO: 2430759 - RNA, 19 nt, Homo sapiens
  misc_RNA (1)...(19): siRNA sense strand
guucaaaacaaguggcuga

SEQ ID NO: 2430760 - RNA, 19 nt, Homo sapiens
  misc_RNA (1)...(19): siRNA sense strand
cugcgaaaccugugggauc

SEQ ID NO: 2430761 - RNA, 19 nt, Homo sapiens
  misc_RNA (1)...(19): siRNA sense strand
cacggaagaugaugggaga

SEQ ID NO: 2430762 - RNA, 19 nt, Homo sapiens
  misc_RNA (1)...(19): siRNA sense strand
aaggcaagaagaugaggaa

SEQ ID NO: 2430763 - RNA, 19 nt, Homo sapiens
  misc_RNA (1)...(19): siRNA sense strand
ccguagauaaguuggagga

SEQ ID NO: 2430764 - RNA, 19 nt, Homo sapiens
  misc_RNA (1)...(19): siRNA sense strand
uugaucaacuuaaaggcaa

SEQ ID NO: 2430765 - RNA, 19 nt, Homo sapiens
  misc_RNA (1)...(19): siRNA sense strand
guagauaaguuggaggacu

SEQ ID NO: 2430766 - RNA, 19 nt, Homo sapiens
  misc_RNA (1)...(19): siRNA sense strand
augaagagggagaggaaaa

SEQ ID NO: 2430767 - RNA, 19 nt, Homo sapiens
  misc_RNA (1)...(19): siRNA sense strand
cagcagaacagguggggaa

SEQ ID NO: 2430768 - RNA, 19 nt, Homo sapiens
  misc_RNA (1)...(19): siRNA sense strand
cagcugaugaagagggaga

SEQ ID NO: 2430769 - RNA, 19 nt, Homo sapiens
  misc_RNA (1)...(19): siRNA sense strand
gggaggaagauguggucga

SEQ ID NO: 2430770 - RNA, 19 nt, Homo sapiens
  misc_RNA (1)...(19): siRNA sense strand
cuuucaagaucaaguucaa

SEQ ID NO: 2430771 - RNA, 19 nt, Homo sapiens
  misc_RNA (1)...(19): siRNA sense strand
uuuagaaggaacaggauau

SEQ ID NO: 2430772 - RNA, 19 nt, Homo sapiens
  misc_RNA (1)...(19): siRNA sense strand
acgaugaaguggaguggga

SEQ ID NO: 2430773 - RNA, 19 nt, Homo sapiens
  misc_RNA (1)...(19): siRNA sense strand
agauagcaagagagaguuu

SEQ ID NO: 2430774 - RNA, 19 nt, Homo sapiens
  misc_RNA (1)...(19): siRNA sense strand
gcuucaaagacaaggagca

SEQ ID NO: 2430775 - RNA, 19 nt, Homo sapiens
  misc_RNA (1)...(19): siRNA sense strand
ggucacuaucuaagggcau

SEQ ID NO: 2430776 - RNA, 19 nt, Homo sapiens
  misc_RNA (1)...(19): siRNA sense strand
augaggaccuucagagcau

SEQ ID NO: 2430777 - RNA, 19 nt, Homo sapiens
  misc_RNA (1)...(19): siRNA sense strand
aaguggagugggaggaaga

SEQ ID NO: 2430778 - RNA, 19 nt, Homo sapiens
  misc_RNA (1)...(19): siRNA sense strand
gaucaaagagugugagagg

SEQ ID NO: 2430779 - RNA, 19 nt, Homo sapiens
  misc_RNA (1)...(19): siRNA sense strand
acaucuuugcccuggauaa

SEQ ID NO: 2430780 - RNA, 19 nt, Homo sapiens
  misc_RNA (1)...(19): siRNA sense strand
ucaaagagugugagaggcu

SEQ ID NO: 2430781 - RNA, 19 nt, Homo sapiens
  misc_RNA (1)...(19): siRNA sense strand
ucaccaggcugaaggagca

SEQ ID NO: 2430782 - RNA, 19 nt, Homo sapiens
  misc_RNA (1)...(19): siRNA sense strand
cuucaaagacaaggagcau

SEQ ID NO: 2430783 - RNA, 19 nt, Homo sapiens
  misc_RNA (1)...(19): siRNA sense strand
gaugaagagggagaggaaa

SEQ ID NO: 2430784 - RNA, 19 nt, Homo sapiens
  misc_RNA (1)...(19): siRNA sense strand
gcgucucauuccuggucaa

SEQ ID NO: 2430785 - RNA, 19 nt, Homo sapiens
  misc_RNA (1)...(19): siRNA sense strand
ggagcuuaucacagagaaa

SEQ ID NO: 2430786 - RNA, 19 nt, Homo sapiens
  misc_RNA (1)...(19): siRNA sense strand
gcaaaggaaaggaggccau

SEQ ID NO: 2430787 - RNA, 19 nt, Homo sapiens
  misc_RNA (1)...(19): siRNA sense strand
acaggauggaagagacaaa

SEQ ID NO: 2430788 - RNA, 19 nt, Homo sapiens
  misc_RNA (1)...(19): siRNA sense strand
ggacaugcuuggaaccaca

SEQ ID NO: 2430789 - RNA, 19 nt, Homo sapiens
  misc_RNA (1)...(19): siRNA sense strand
agagaaaauggaagaaaca

SEQ ID NO: 2430790 - RNA, 19 nt, Homo sapiens
  misc_RNA (1)...(19): siRNA sense strand
guuucauucaggaggguuu

SEQ ID NO: 2430791 - RNA, 19 nt, Homo sapiens
  misc_RNA (1)...(19): siRNA sense strand
ucacagagaaaauggaaga

SEQ ID NO: 2430792 - RNA, 19 nt, Homo sapiens
  misc_RNA (1)...(19): siRNA sense strand
uggaagagacaaaggagcu

SEQ ID NO: 2430793 - RNA, 19 nt, Homo sapiens
  misc_RNA (1)...(19): siRNA sense strand
cugaaaaguuacaagaaac

SEQ ID NO: 2430794 - RNA, 19 nt, Homo sapiens
  misc_RNA (1)...(19): siRNA sense strand
cagagaaaauggaagaaac

SEQ ID NO: 2430795 - RNA, 19 nt, Homo sapiens
  misc_RNA (1)...(19): siRNA sense strand
ccgcauugucuuugccuau

SEQ ID NO: 2430796 - RNA, 19 nt, Homo sapiens
  misc_RNA (1)...(19): siRNA sense strand
gccaugagaaggagggcuu

SEQ ID NO: 2430797 - RNA, 19 nt, Homo sapiens
  misc_RNA (1)...(19): siRNA sense strand
gcaggaugugcgaggacuu

SEQ ID NO: 2430798 - RNA, 19 nt, Homo sapiens
  misc_RNA (1)...(19): siRNA sense strand
gaauuuacaucaauggcca

SEQ ID NO: 2430799 - RNA, 19 nt, Homo sapiens
  misc_RNA (1)...(19): siRNA sense strand
acaccaaguugaaucccua

SEQ ID NO: 2430800 - RNA, 19 nt, Homo sapiens
  misc_RNA (1)...(19): siRNA sense strand
ccaucauccuggcuggaau

SEQ ID NO: 2430801 - RNA, 19 nt, Homo sapiens
  misc_RNA (1)...(19): siRNA sense strand
gugccagaaucucggcgaa

SEQ ID NO: 2430802 - RNA, 19 nt, Homo sapiens
  misc_RNA (1)...(19): siRNA sense strand
cgccaggaguggauggacu

SEQ ID NO: 2430803 - RNA, 19 nt, Homo sapiens
  misc_RNA (1)...(19): siRNA sense strand
cagucaggacggugccuaa

SEQ ID NO: 2430804 - RNA, 19 nt, Homo sapiens
  misc_RNA (1)...(19): siRNA sense strand
gugcuuggacauagggaau

SEQ ID NO: 2430805 - RNA, 19 nt, Homo sapiens
  misc_RNA (1)...(19): siRNA sense strand
cuaucaaauaucagagcau

SEQ ID NO: 2430806 - RNA, 19 nt, Homo sapiens
  misc_RNA (1)...(19): siRNA sense strand
gggaauggucagagaaaag

SEQ ID NO: 2430807 - RNA, 19 nt, Homo sapiens
  misc_RNA (1)...(19): siRNA sense strand
agugcuuccuucagaacaa

SEQ ID NO: 2430808 - RNA, 19 nt, Homo sapiens
  misc_RNA (1)...(19): siRNA sense strand
ggacauagggaauggucag

SEQ ID NO: 2430809 - RNA, 19 nt, Homo sapiens
  misc_RNA (1)...(19): siRNA sense strand
agcaguugauucuggacaa

SEQ ID NO: 2430810 - RNA, 19 nt, Homo sapiens
  misc_RNA (1)...(19): siRNA sense strand
agucagugugggaaauauu

SEQ ID NO: 2430811 - RNA, 19 nt, Homo sapiens
  misc_RNA (1)...(19): siRNA sense strand
gugcuuggacauagggaau

SEQ ID NO: 2430812 - RNA, 19 nt, Homo sapiens
  misc_RNA (1)...(19): siRNA sense strand
cuaucaaauaucagagcau

SEQ ID NO: 2430813 - RNA, 19 nt, Homo sapiens
  misc_RNA (1)...(19): siRNA sense strand
gggaauggucagagaaaag

SEQ ID NO: 2430814 - RNA, 19 nt, Homo sapiens
  misc_RNA (1)...(19): siRNA sense strand
agugcuuccuucagaacaa

SEQ ID NO: 2430815 - RNA, 19 nt, Homo sapiens
  misc_RNA (1)...(19): siRNA sense strand
ggacauagggaauggucag

SEQ ID NO: 2430816 - RNA, 19 nt, Homo sapiens
  misc_RNA (1)...(19): siRNA sense strand
agcaguugauucuggacaa

SEQ ID NO: 2430817 - RNA, 19 nt, Homo sapiens
  misc_RNA (1)...(19): siRNA sense strand
agucagugugggaaauauu

SEQ ID NO: 2430818 - RNA, 19 nt, Homo sapiens
  misc_RNA (1)...(19): siRNA sense strand
gggugaagccagacgucau

SEQ ID NO: 2430819 - RNA, 19 nt, Homo sapiens
  misc_RNA (1)...(19): siRNA sense strand
ccugggaugcugugaggaa

SEQ ID NO: 2430820 - RNA, 19 nt, Homo sapiens
  misc_RNA (1)...(19): siRNA sense strand
guguacacauugcgggaca

SEQ ID NO: 2430821 - RNA, 19 nt, Homo sapiens
  misc_RNA (1)...(19): siRNA sense strand
aggaaggaggugaggaaac

SEQ ID NO: 2430822 - RNA, 19 nt, Homo sapiens
  misc_RNA (1)...(19): siRNA sense strand
gcaacaucuuccuuggaga

SEQ ID NO: 2430823 - RNA, 19 nt, Homo sapiens
  misc_RNA (1)...(19): siRNA sense strand
gaucucggucugugggaau

SEQ ID NO: 2430824 - RNA, 19 nt, Homo sapiens
  misc_RNA (1)...(19): siRNA sense strand
cggucauaguggaguauac

SEQ ID NO: 2430825 - RNA, 19 nt, Homo sapiens
  misc_RNA (1)...(19): siRNA sense strand
ugaagcaacuggaggccca

SEQ ID NO: 2430826 - RNA, 19 nt, Homo sapiens
  misc_RNA (1)...(19): siRNA sense strand
cugagaagacugcccgcua

SEQ ID NO: 2430827 - RNA, 19 nt, Homo sapiens
  misc_RNA (1)...(19): siRNA sense strand
ucguggaaaccaagauaaa

SEQ ID NO: 2430828 - RNA, 19 nt, Homo sapiens
  misc_RNA (1)...(19): siRNA sense strand
cgagaaugucaggaagaaa

SEQ ID NO: 2430829 - RNA, 19 nt, Homo sapiens
  misc_RNA (1)...(19): siRNA sense strand
gcacagagcuccagaggga

SEQ ID NO: 2430830 - RNA, 19 nt, Homo sapiens
  misc_RNA (1)...(19): siRNA sense strand
ggacaagucugaagagcca

SEQ ID NO: 2430831 - RNA, 19 nt, Homo sapiens
  misc_RNA (1)...(19): siRNA sense strand
aagaacggcaagagagaaa

SEQ ID NO: 2430832 - RNA, 19 nt, Homo sapiens
  misc_RNA (1)...(19): siRNA sense strand
guuugaaaucagaugguua

SEQ ID NO: 2430833 - RNA, 19 nt, Homo sapiens
  misc_RNA (1)...(19): siRNA sense strand
uugaagaugccgaggaauu

SEQ ID NO: 2430834 - RNA, 19 nt, Homo sapiens
  misc_RNA (1)...(19): siRNA sense strand
cugaaagaagagacagaau

SEQ ID NO: 2430835 - RNA, 19 nt, Homo sapiens
  misc_RNA (1)...(19): siRNA sense strand
aaagggaagcagagggaga

SEQ ID NO: 2430836 - RNA, 19 nt, Homo sapiens
  misc_RNA (1)...(19): siRNA sense strand
agcaggagcuggugggaga

SEQ ID NO: 2430837 - RNA, 19 nt, Homo sapiens
  misc_RNA (1)...(19): siRNA sense strand
gagaacaauaugucagaga

SEQ ID NO: 2430838 - RNA, 19 nt, Homo sapiens
  misc_RNA (1)...(19): siRNA sense strand
ccucaagaaagaauaagaa

SEQ ID NO: 2430839 - RNA, 19 nt, Homo sapiens
  misc_RNA (1)...(19): siRNA sense strand
cacacaagauggagagagu

SEQ ID NO: 2430840 - RNA, 19 nt, Homo sapiens
  misc_RNA (1)...(19): siRNA sense strand
agggugaaauaguggugaa

SEQ ID NO: 2430841 - RNA, 19 nt, Homo sapiens
  misc_RNA (1)...(19): siRNA sense strand
gggugaaauaguggugaaa

SEQ ID NO: 2430842 - RNA, 19 nt, Homo sapiens
  misc_RNA (1)...(19): siRNA sense strand
cuacauugaaaucuggaaa

SEQ ID NO: 2430843 - RNA, 19 nt, Homo sapiens
  misc_RNA (1)...(19): siRNA sense strand
gcugagaauaguuugaaau

SEQ ID NO: 2430844 - RNA, 19 nt, Homo sapiens
  misc_RNA (1)...(19): siRNA sense strand
acaauaugucagagauaca

SEQ ID NO: 2430845 - RNA, 19 nt, Homo sapiens
  misc_RNA (1)...(19): siRNA sense strand
guaaagaaguggaugcuug

SEQ ID NO: 2430846 - RNA, 19 nt, Homo sapiens
  misc_RNA (1)...(19): siRNA sense strand
gcaucugaaagaagagaca

SEQ ID NO: 2430847 - RNA, 19 nt, Homo sapiens
  misc_RNA (1)...(19): siRNA sense strand
aaacagugaagcaucgaaa

SEQ ID NO: 2430848 - RNA, 19 nt, Homo sapiens
  misc_RNA (1)...(19): siRNA sense strand
gugaaagggcugauggaac

SEQ ID NO: 2430849 - RNA, 19 nt, Homo sapiens
  misc_RNA (1)...(19): siRNA sense strand
agaaagggaagcagaggga

SEQ ID NO: 2430850 - RNA, 19 nt, Homo sapiens
  misc_RNA (1)...(19): siRNA sense strand
uggagagagugguggugau

SEQ ID NO: 2430851 - RNA, 19 nt, Homo sapiens
  misc_RNA (1)...(19): siRNA sense strand
gcaucaaguuaucagcaga

SEQ ID NO: 2430852 - RNA, 19 nt, Homo sapiens
  misc_RNA (1)...(19): siRNA sense strand
cgacaggcguacaagacca

SEQ ID NO: 2430853 - RNA, 19 nt, Homo sapiens
  misc_RNA (1)...(19): siRNA sense strand
ccauuuacgcugagaauag

SEQ ID NO: 2430854 - RNA, 19 nt, Homo sapiens
  misc_RNA (1)...(19): siRNA sense strand
cuuaaagaccauugcuuca

SEQ ID NO: 2430855 - RNA, 19 nt, Homo sapiens
  misc_RNA (1)...(19): siRNA sense strand
agaagagacagaauagaga

SEQ ID NO: 2430856 - RNA, 19 nt, Homo sapiens
  misc_RNA (1)...(19): siRNA sense strand
aagcgaacagacaggaaau

SEQ ID NO: 2430857 - RNA, 19 nt, Homo sapiens
  misc_RNA (1)...(19): siRNA sense strand
agggauuacugcagccaga

SEQ ID NO: 2430858 - RNA, 19 nt, Homo sapiens
  misc_RNA (1)...(19): siRNA sense strand
caccagugacagagcagaa

SEQ ID NO: 2430859 - RNA, 19 nt, Homo sapiens
  misc_RNA (1)...(19): siRNA sense strand
cgcugagaauaguuugaaa

SEQ ID NO: 2430860 - RNA, 19 nt, Homo sapiens
  misc_RNA (1)...(19): siRNA sense strand
caguguuaucaaaggguga

SEQ ID NO: 2430861 - RNA, 19 nt, Homo sapiens
  misc_RNA (1)...(19): siRNA sense strand
aaaaugaagccucaagaaa

SEQ ID NO: 2430862 - RNA, 19 nt, Homo sapiens
  misc_RNA (1)...(19): siRNA sense strand
uaucaaagggugaaauagu

SEQ ID NO: 2430863 - RNA, 19 nt, Homo sapiens
  misc_RNA (1)...(19): siRNA sense strand
aagcgagggcaucaaguua

SEQ ID NO: 2430864 - RNA, 19 nt, Homo sapiens
  misc_RNA (1)...(19): siRNA sense strand
agcagcagccacaggauaa

SEQ ID NO: 2430865 - RNA, 19 nt, Homo sapiens
  misc_RNA (1)...(19): siRNA sense strand
aagagacagaauagagaca

SEQ ID NO: 2430866 - RNA, 19 nt, Homo sapiens
  misc_RNA (1)...(19): siRNA sense strand
augaagaaagggaagcaga

SEQ ID NO: 2430867 - RNA, 19 nt, Homo sapiens
  misc_RNA (1)...(19): siRNA sense strand
gcuuaguaaagaaguggau

SEQ ID NO: 2430868 - RNA, 19 nt, Homo sapiens
  misc_RNA (1)...(19): siRNA sense strand
uggagaaugugcagcagga

SEQ ID NO: 2430869 - RNA, 19 nt, Homo sapiens
  misc_RNA (1)...(19): siRNA sense strand
aaacguaugaucagcaaaa

SEQ ID NO: 2430870 - RNA, 19 nt, Homo sapiens
  misc_RNA (1)...(19): siRNA sense strand
aauccagaaucauugcaaa

SEQ ID NO: 2430871 - RNA, 19 nt, Homo sapiens
  misc_RNA (1)...(19): siRNA sense strand
uucauguacaagagaguua

SEQ ID NO: 2430872 - RNA, 19 nt, Homo sapiens
  misc_RNA (1)...(19): siRNA sense strand
acccaaaagucuaaagcau

SEQ ID NO: 2430873 - RNA, 19 nt, Homo sapiens
  misc_RNA (1)...(19): siRNA sense strand
ccgcaugagucaaaugaag

SEQ ID NO: 2430874 - RNA, 19 nt, Homo sapiens
  misc_RNA (1)...(19): siRNA sense strand
cgguugaggacaagucuga

SEQ ID NO: 2430875 - RNA, 19 nt, Homo sapiens
  misc_RNA (1)...(19): siRNA sense strand
cagccagaugcuuaguaaa

SEQ ID NO: 2430876 - RNA, 19 nt, Homo sapiens
  misc_RNA (1)...(19): siRNA sense strand
ccacaagaaaugaaagcuc

SEQ ID NO: 2430877 - RNA, 19 nt, Homo sapiens
  misc_RNA (1)...(19): siRNA sense strand
aagcucuguuuaagaagaa

SEQ ID NO: 2430878 - RNA, 19 nt, Homo sapiens
  misc_RNA (1)...(19): siRNA sense strand
ggcaguugcaucugaaaga

SEQ ID NO: 2430879 - RNA, 19 nt, Homo sapiens
  misc_RNA (1)...(19): siRNA sense strand
ccacugaugaagaaaggga

SEQ ID NO: 2430880 - RNA, 19 nt, Homo sapiens
  misc_RNA (1)...(19): siRNA sense strand
ccucacugaagaagauuau

SEQ ID NO: 2430881 - RNA, 19 nt, Homo sapiens
  misc_RNA (1)...(19): siRNA sense strand
uugaaagaacggcaagaga

SEQ ID NO: 2430882 - RNA, 19 nt, Homo sapiens
  misc_RNA (1)...(19): siRNA sense strand
agauaaaggaagaggauuu

SEQ ID NO: 2430883 - RNA, 19 nt, Homo sapiens
  misc_RNA (1)...(19): siRNA sense strand
cugcaugguugcugguaaa

SEQ ID NO: 2430884 - RNA, 19 nt, Homo sapiens
  misc_RNA (1)...(19): siRNA sense strand
gugaagaagaaaagacaaa

SEQ ID NO: 2430885 - RNA, 19 nt, Homo sapiens
  misc_RNA (1)...(19): siRNA sense strand
ugugagaacauuaggaaau

SEQ ID NO: 2430886 - RNA, 19 nt, Homo sapiens
  misc_RNA (1)...(19): siRNA sense strand
uuggauaauugauggagaa

SEQ ID NO: 2430887 - RNA, 19 nt, Homo sapiens
  misc_RNA (1)...(19): siRNA sense strand
caagaaaauucgacugcaa

SEQ ID NO: 2430888 - RNA, 19 nt, Homo sapiens
  misc_RNA (1)...(19): siRNA sense strand
agacacaguacguggauga

SEQ ID NO: 2430889 - RNA, 19 nt, Homo sapiens
  misc_RNA (1)...(19): siRNA sense strand
gguugaggccucuggguuu

SEQ ID NO: 2430890 - RNA, 19 nt, Homo sapiens
  misc_RNA (1)...(19): siRNA sense strand
caagagaggcaauaggaca

SEQ ID NO: 2430891 - RNA, 19 nt, Homo sapiens
  misc_RNA (1)...(19): siRNA sense strand
cauacaaggaguugcucaa

SEQ ID NO: 2430892 - RNA, 19 nt, Homo sapiens
  misc_RNA (1)...(19): siRNA sense strand
uaaaacaggaaaugggaaa

SEQ ID NO: 2430893 - RNA, 19 nt, Homo sapiens
  misc_RNA (1)...(19): siRNA sense strand
cuuaaagaucgaccagaaa

SEQ ID NO: 2430894 - RNA, 19 nt, Homo sapiens
  misc_RNA (1)...(19): siRNA sense strand
uuggacaaauaaagcgaua

SEQ ID NO: 2430895 - RNA, 19 nt, Homo sapiens
  misc_RNA (1)...(19): siRNA sense strand
aagaaaagacaaagaccua

SEQ ID NO: 2430896 - RNA, 19 nt, Homo sapiens
  misc_RNA (1)...(19): siRNA sense strand
accacaaacuccuuggaua

SEQ ID NO: 2430897 - RNA, 19 nt, Homo sapiens
  misc_RNA (1)...(19): siRNA sense strand
acauaugaaagaaggugaa

SEQ ID NO: 2430898 - RNA, 19 nt, Homo sapiens
  misc_RNA (1)...(19): siRNA sense strand
gcugcaugguugcugguaa

SEQ ID NO: 2430899 - RNA, 19 nt, Homo sapiens
  misc_RNA (1)...(19): siRNA sense strand
cugcaagaacuggaagaua

SEQ ID NO: 2430900 - RNA, 19 nt, Homo sapiens
  misc_RNA (1)...(19): siRNA sense strand
cagaagaaagacauugaau

SEQ ID NO: 2430901 - RNA, 19 nt, Homo sapiens
  misc_RNA (1)...(19): siRNA sense strand
aagcgauacagaagaaaga

SEQ ID NO: 2430902 - RNA, 19 nt, Homo sapiens
  misc_RNA (1)...(19): siRNA sense strand
gcgauacagaagaaagaca

SEQ ID NO: 2430903 - RNA, 19 nt, Homo sapiens
  misc_RNA (1)...(19): siRNA sense strand
cuggaagauaguauugaua

SEQ ID NO: 2430904 - RNA, 19 nt, Homo sapiens
  misc_RNA (1)...(19): siRNA sense strand
uaagauaaaggaagaggau

SEQ ID NO: 2430905 - RNA, 19 nt, Homo sapiens
  misc_RNA (1)...(19): siRNA sense strand
gggagaaccaagccaaaca

SEQ ID NO: 2430906 - RNA, 19 nt, Homo sapiens
  misc_RNA (1)...(19): siRNA sense strand
cuagaauggcaguuaugaa

SEQ ID NO: 2430907 - RNA, 19 nt, Homo sapiens
  misc_RNA (1)...(19): siRNA sense strand
gcuaaaagaagccuacaaa

SEQ ID NO: 2430908 - RNA, 19 nt, Homo sapiens
  misc_RNA (1)...(19): siRNA sense strand
aagagaggcaauaggacau

SEQ ID NO: 2430909 - RNA, 19 nt, Homo sapiens
  misc_RNA (1)...(19): siRNA sense strand
cccagaaacaguugaggau

SEQ ID NO: 2430910 - RNA, 19 nt, Homo sapiens
  misc_RNA (1)...(19): siRNA sense strand
cgauacagaagaaagacau

SEQ ID NO: 2430911 - RNA, 19 nt, Homo sapiens
  misc_RNA (1)...(19): siRNA sense strand
uggaagagaagauguagau

SEQ ID NO: 2430912 - RNA, 19 nt, Homo sapiens
  misc_RNA (1)...(19): siRNA sense strand
cuaaaugacauaaaggacu

SEQ ID NO: 2430913 - RNA, 19 nt, Homo sapiens
  misc_RNA (1)...(19): siRNA sense strand
acauggagacuucgggaga

SEQ ID NO: 2430914 - RNA, 19 nt, Homo sapiens
  misc_RNA (1)...(19): siRNA sense strand
ugaaauugaaugugcucau

SEQ ID NO: 2430915 - RNA, 19 nt, Homo sapiens
  misc_RNA (1)...(19): siRNA sense strand
aaauaaagcgauacagaag

SEQ ID NO: 2430916 - RNA, 19 nt, Homo sapiens
  misc_RNA (1)...(19): siRNA sense strand
gauacagaagaaagacauu

SEQ ID NO: 2430917 - RNA, 19 nt, Homo sapiens
  misc_RNA (1)...(19): siRNA sense strand
gcaagaacuggaagauagu

SEQ ID NO: 2430918 - RNA, 19 nt, Homo sapiens
  misc_RNA (1)...(19): siRNA sense strand
uggcaguauuuaaagcaga

SEQ ID NO: 2430919 - RNA, 19 nt, Homo sapiens
  misc_RNA (1)...(19): siRNA sense strand
aagaaggugaagaagaaaa

SEQ ID NO: 2430920 - RNA, 19 nt, Homo sapiens
  misc_RNA (1)...(19): siRNA sense strand
acaaagaccuacagugccu

SEQ ID NO: 2430921 - RNA, 19 nt, Homo sapiens
  misc_RNA (1)...(19): siRNA sense strand
agaagauguagaugugaga

SEQ ID NO: 2430922 - RNA, 19 nt, Homo sapiens
  misc_RNA (1)...(19): siRNA sense strand
uggauaauugauggagaaa

SEQ ID NO: 2430923 - RNA, 19 nt, Homo sapiens
  misc_RNA (1)...(19): siRNA sense strand
cuuggauaauugauggaga

SEQ ID NO: 2430924 - RNA, 19 nt, Homo sapiens
  misc_RNA (1)...(19): siRNA sense strand
aggcaauaggacauaugaa

SEQ ID NO: 2430925 - RNA, 19 nt, Homo sapiens
  misc_RNA (1)...(19): siRNA sense strand
gaagaagaaaagacaaaga

SEQ ID NO: 2430926 - RNA, 19 nt, Homo sapiens
  misc_RNA (1)...(19): siRNA sense strand
aagaacuggaagauaguau

SEQ ID NO: 2430927 - RNA, 19 nt, Homo sapiens
  misc_RNA (1)...(19): siRNA sense strand
gaagccuacaaauggauaa

SEQ ID NO: 2430928 - RNA, 19 nt, Homo sapiens
  misc_RNA (1)...(19): siRNA sense strand
agaugauauaguucagcua

SEQ ID NO: 2430929 - RNA, 19 nt, Homo sapiens
  misc_RNA (1)...(19): siRNA sense strand
cuggaagagaagauguaga

SEQ ID NO: 2430930 - RNA, 19 nt, Homo sapiens
  misc_RNA (1)...(19): siRNA sense strand
aagucaaaauggagaggga

SEQ ID NO: 2430931 - RNA, 19 nt, Homo sapiens
  misc_RNA (1)...(19): siRNA sense strand
gguuugaauucaccagcuu

SEQ ID NO: 2430932 - RNA, 19 nt, Homo sapiens
  misc_RNA (1)...(19): siRNA sense strand
uaauugauggagaaaggaa

SEQ ID NO: 2430933 - RNA, 19 nt, Homo sapiens
  misc_RNA (1)...(19): siRNA sense strand
gagcagaggagaagcccaa

SEQ ID NO: 2430934 - RNA, 19 nt, Homo sapiens
  misc_RNA (1)...(19): siRNA sense strand
uggugaagcaguuggagaa

SEQ ID NO: 2430935 - RNA, 19 nt, Homo sapiens
  misc_RNA (1)...(19): siRNA sense strand
agauaaacauugaggagcu

SEQ ID NO: 2430936 - RNA, 19 nt, Homo sapiens
  misc_RNA (1)...(19): siRNA sense strand
aagcagaaauggaaggaac

SEQ ID NO: 2430937 - RNA, 19 nt, Homo sapiens
  misc_RNA (1)...(19): siRNA sense strand
ccaccugggucaagcgcau

SEQ ID NO: 2430938 - RNA, 19 nt, Homo sapiens
  misc_RNA (1)...(19): siRNA sense strand
agauugagcuccuggccau

SEQ ID NO: 2430939 - RNA, 19 nt, Homo sapiens
  misc_RNA (1)...(19): siRNA sense strand
uggagaauggggagauaaa

SEQ ID NO: 2430940 - RNA, 19 nt, Homo sapiens
  misc_RNA (1)...(19): siRNA sense strand
uggauguggaagugggaga

SEQ ID NO: 2430941 - RNA, 19 nt, Homo sapiens
  misc_RNA (1)...(19): siRNA sense strand
ggagauaaacauugaggag

SEQ ID NO: 2430942 - RNA, 19 nt, Homo sapiens
  misc_RNA (1)...(19): siRNA sense strand
cggagaugcuggaggaguc

SEQ ID NO: 2430943 - RNA, 19 nt, Homo sapiens
  misc_RNA (1)...(19): siRNA sense strand
gaacacaaccagaauggga

SEQ ID NO: 2430944 - RNA, 19 nt, Homo sapiens
  misc_RNA (1)...(19): siRNA sense strand
ggagacaggcuaugggaag

SEQ ID NO: 2430945 - RNA, 19 nt, Homo sapiens
  misc_RNA (1)...(19): siRNA sense strand
cugccgaagaugaacacaa

SEQ ID NO: 2430946 - RNA, 19 nt, Homo sapiens
  misc_RNA (1)...(19): siRNA sense strand
auagaugagacacggcaaa

SEQ ID NO: 2430947 - RNA, 19 nt, Homo sapiens
  misc_RNA (1)...(19): siRNA sense strand
gggaaguacaagaauccuu

SEQ ID NO: 2430948 - RNA, 19 nt, Homo sapiens
  misc_RNA (1)...(19): siRNA sense strand
gagaauggggagauaaaca

SEQ ID NO: 2430949 - RNA, 19 nt, Homo sapiens
  misc_RNA (1)...(19): siRNA sense strand
ggaucuucguggaacggau

SEQ ID NO: 2430950 - RNA, 19 nt, Homo sapiens
  misc_RNA (1)...(19): siRNA sense strand
acacaaccagaaugggaau

SEQ ID NO: 2430951 - RNA, 19 nt, Homo sapiens
  misc_RNA (1)...(19): siRNA sense strand
gcuuccacauccagaccaa

SEQ ID NO: 2430952 - RNA, 19 nt, Homo sapiens
  misc_RNA (1)...(19): siRNA sense strand
aggaugaugagaugaacau

SEQ ID NO: 2430953 - RNA, 19 nt, Homo sapiens
  misc_RNA (1)...(19): siRNA sense strand
gaccaugcccugaggacca

SEQ ID NO: 2430954 - RNA, 19 nt, Homo sapiens
  misc_RNA (1)...(19): siRNA sense strand
ccgaagaugaacacaacca

SEQ ID NO: 2430955 - RNA, 19 nt, Homo sapiens
  misc_RNA (1)...(19): siRNA sense strand
gugcacugccugucggaga

SEQ ID NO: 2430956 - RNA, 19 nt, Homo sapiens
  misc_RNA (1)...(19): siRNA sense strand
uggacaaggacgugagcau

SEQ ID NO: 2430957 - RNA, 19 nt, Homo sapiens
  misc_RNA (1)...(19): siRNA sense strand
agagcaaaggagaggaaaa

SEQ ID NO: 2430958 - RNA, 19 nt, Homo sapiens
  misc_RNA (1)...(19): siRNA sense strand
agaagaaguugcagcagca

SEQ ID NO: 2430959 - RNA, 19 nt, Homo sapiens
  misc_RNA (1)...(19): siRNA sense strand
agacaaauaucgaguggug

SEQ ID NO: 2430960 - RNA, 19 nt, Homo sapiens
  misc_RNA (1)...(19): siRNA sense strand
gggaggacuggaauggcua

SEQ ID NO: 2430961 - RNA, 19 nt, Homo sapiens
  misc_RNA (1)...(19): siRNA sense strand
cgaaagacaaauaucgagu

SEQ ID NO: 2430962 - RNA, 19 nt, Homo sapiens
  misc_RNA (1)...(19): siRNA sense strand
aaccaggacgaaagacaaa

SEQ ID NO: 2430963 - RNA, 19 nt, Homo sapiens
  misc_RNA (1)...(19): siRNA sense strand
aggaaaaucaacaagaaga

SEQ ID NO: 2430964 - RNA, 19 nt, Homo sapiens
  misc_RNA (1)...(19): siRNA sense strand
ccggaggaaagccgagcua

SEQ ID NO: 2430965 - RNA, 19 nt, Homo sapiens
  misc_RNA (1)...(19): siRNA sense strand
acaagaagaaguugcagca

SEQ ID NO: 2430966 - RNA, 19 nt, Homo sapiens
  misc_RNA (1)...(19): siRNA sense strand
cugucaaaguccagggaaa

SEQ ID NO: 2430967 - RNA, 19 nt, Homo sapiens
  misc_RNA (1)...(19): siRNA sense strand
aagaugaagaccagagaaa

SEQ ID NO: 2430968 - RNA, 19 nt, Homo sapiens
  misc_RNA (1)...(19): siRNA sense strand
agaagaugucucuaagaaa

SEQ ID NO: 2430969 - RNA, 19 nt, Homo sapiens
  misc_RNA (1)...(19): siRNA sense strand
gcgaaggauuugagagcac

SEQ ID NO: 2430970 - RNA, 19 nt, Homo sapiens
  misc_RNA (1)...(19): siRNA sense strand
agauaaaguugacagcaga

SEQ ID NO: 2430971 - RNA, 19 nt, Homo sapiens
  misc_RNA (1)...(19): siRNA sense strand
gcagaggaauugaagccau

SEQ ID NO: 2430972 - RNA, 19 nt, Homo sapiens
  misc_RNA (1)...(19): siRNA sense strand
uauaaggauugguggaacu

SEQ ID NO: 2430973 - RNA, 19 nt, Homo sapiens
  misc_RNA (1)...(19): siRNA sense strand
aggauguucuauaaggauu

SEQ ID NO: 2430974 - RNA, 19 nt, Homo sapiens
  misc_RNA (1)...(19): siRNA sense strand
aaccauagagcgaaggauu

SEQ ID NO: 2430975 - RNA, 19 nt, Homo sapiens
  misc_RNA (1)...(19): siRNA sense strand
ugucaaaguccagggaaaa

SEQ ID NO: 2430976 - RNA, 19 nt, Homo sapiens
  misc_RNA (1)...(19): siRNA sense strand
agucagcaucauuagauaa

SEQ ID NO: 2430977 - RNA, 19 nt, Homo sapiens
  misc_RNA (1)...(19): siRNA sense strand
cuaaauucagcuaaggaga

SEQ ID NO: 2430978 - RNA, 19 nt, Homo sapiens
  misc_RNA (1)...(19): siRNA sense strand
aagucagcaucauuagaua

SEQ ID NO: 2430979 - RNA, 19 nt, Homo sapiens
  misc_RNA (1)...(19): siRNA sense strand
aguugauagcaaagaagau

SEQ ID NO: 2430980 - RNA, 19 nt, Homo sapiens
  misc_RNA (1)...(19): siRNA sense strand
acgaauaugccuuggcugu

SEQ ID NO: 2430981 - RNA, 19 nt, Homo sapiens
  misc_RNA (1)...(19): siRNA sense strand
aagauaaaguugacagcag

SEQ ID NO: 2430982 - RNA, 19 nt, Homo sapiens
  misc_RNA (1)...(19): siRNA sense strand
aaaggagucccuagagaca

SEQ ID NO: 2430983 - RNA, 19 nt, Homo sapiens
  misc_RNA (1)...(19): siRNA sense strand
cugaggaagaugaagacca

SEQ ID NO: 2430984 - RNA, 19 nt, Homo sapiens
  misc_RNA (1)...(19): siRNA sense strand
gagcgaaggauuugagagc

SEQ ID NO: 2430985 - RNA, 19 nt, Homo sapiens
  misc_RNA (1)...(19): siRNA sense strand
caggaaucccacuguaaga

SEQ ID NO: 2430986 - RNA, 19 nt, Homo sapiens
  misc_RNA (1)...(19): siRNA sense strand
auguaaagaauguggcaaa

SEQ ID NO: 2430987 - RNA, 19 nt, Homo sapiens
  misc_RNA (1)...(19): siRNA sense strand
auguaaagaauguggcaaa

SEQ ID NO: 2430988 - RNA, 19 nt, Homo sapiens
  misc_RNA (1)...(19): siRNA sense strand
auguaaagaauguggcaaa

SEQ ID NO: 2430989 - RNA, 19 nt, Homo sapiens
  misc_RNA (1)...(19): siRNA sense strand
auguaaagaauguggcaaa

SEQ ID NO: 2430990 - RNA, 19 nt, Homo sapiens
  misc_RNA (1)...(19): siRNA sense strand
cccuauaaauggaaagaau

SEQ ID NO: 2430991 - RNA, 19 nt, Homo sapiens
  misc_RNA (1)...(19): siRNA sense strand
augcaaaguaugugcuaaa

SEQ ID NO: 2430992 - RNA, 19 nt, Homo sapiens
  misc_RNA (1)...(19): siRNA sense strand
aagacauacuggagagaga

SEQ ID NO: 2430993 - RNA, 19 nt, Homo sapiens
  misc_RNA (1)...(19): siRNA sense strand
cagaaugugauguuagaaa

SEQ ID NO: 2430994 - RNA, 19 nt, Homo sapiens
  misc_RNA (1)...(19): siRNA sense strand
auguaaagcauguagcaaa

SEQ ID NO: 2430995 - RNA, 19 nt, Homo sapiens
  misc_RNA (1)...(19): siRNA sense strand
auguaaagcauguagcaaa

SEQ ID NO: 2430996 - RNA, 19 nt, Homo sapiens
  misc_RNA (1)...(19): siRNA sense strand
gcuuaaucaacaagaggaa

SEQ ID NO: 2430997 - RNA, 19 nt, Homo sapiens
  misc_RNA (1)...(19): siRNA sense strand
aacucauacuggagagaaa

SEQ ID NO: 2430998 - RNA, 19 nt, Homo sapiens
  misc_RNA (1)...(19): siRNA sense strand
ggaaaagggaggaguguga

SEQ ID NO: 2430999 - RNA, 19 nt, Homo sapiens
  misc_RNA (1)...(19): siRNA sense strand
aagucauacuggagagaga

SEQ ID NO: 2431000 - RNA, 19 nt, Homo sapiens
  misc_RNA (1)...(19): siRNA sense strand
aagucauaguggagagaga

SEQ ID NO: 2431001 - RNA, 19 nt, Homo sapiens
  misc_RNA (1)...(19): siRNA sense strand
agaagucauacuagagaaa

SEQ ID NO: 2431002 - RNA, 19 nt, Homo sapiens
  misc_RNA (1)...(19): siRNA sense strand
acacaucggagaagacaua

SEQ ID NO: 2431003 - RNA, 19 nt, Homo sapiens
  misc_RNA (1)...(19): siRNA sense strand
augugaagaauguggcaaa

SEQ ID NO: 2431004 - RNA, 19 nt, Homo sapiens
  misc_RNA (1)...(19): siRNA sense strand
augugaagaauguggcaaa

SEQ ID NO: 2431005 - RNA, 19 nt, Homo sapiens
  misc_RNA (1)...(19): siRNA sense strand
augugaagaauguggcaaa

SEQ ID NO: 2431006 - RNA, 19 nt, Homo sapiens
  misc_RNA (1)...(19): siRNA sense strand
cccuauacauguaaagaau

SEQ ID NO: 2431007 - RNA, 19 nt, Homo sapiens
  misc_RNA (1)...(19): siRNA sense strand
ggucauaccucauugcaca

SEQ ID NO: 2431008 - RNA, 19 nt, Homo sapiens
  misc_RNA (1)...(19): siRNA sense strand
ggggaaaacaucacauaua

SEQ ID NO: 2431009 - RNA, 19 nt, Homo sapiens
  misc_RNA (1)...(19): siRNA sense strand
aaccaaagcucaagcccua

SEQ ID NO: 2431010 - RNA, 19 nt, Homo sapiens
  misc_RNA (1)...(19): siRNA sense strand
gggauguggccguagaauu

SEQ ID NO: 2431011 - RNA, 19 nt, Homo sapiens
  misc_RNA (1)...(19): siRNA sense strand
gagaaaacucauauagcua

SEQ ID NO: 2431012 - RNA, 19 nt, Homo sapiens
  misc_RNA (1)...(19): siRNA sense strand
ucgaauucauacuggagaa

SEQ ID NO: 2431013 - RNA, 19 nt, Homo sapiens
  misc_RNA (1)...(19): siRNA sense strand
ggagaaaaccuuuacaaau

SEQ ID NO: 2431014 - RNA, 19 nt, Homo sapiens
  misc_RNA (1)...(19): siRNA sense strand
cuuggaaugugaagaguga

SEQ ID NO: 2431015 - RNA, 19 nt, Homo sapiens
  misc_RNA (1)...(19): siRNA sense strand
uuacuaaacagcagcaaau

SEQ ID NO: 2431016 - RNA, 19 nt, Homo sapiens
  misc_RNA (1)...(19): siRNA sense strand
gcacaauggauguuaugau

SEQ ID NO: 2431017 - RNA, 19 nt, Homo sapiens
  misc_RNA (1)...(19): siRNA sense strand
gaucuuagucagucaucaa

SEQ ID NO: 2431018 - RNA, 19 nt, Homo sapiens
  misc_RNA (1)...(19): siRNA sense strand
caaauugauacuggagaaa

SEQ ID NO: 2431019 - RNA, 19 nt, Homo sapiens
  misc_RNA (1)...(19): siRNA sense strand
gugguaaagccuucagcua

SEQ ID NO: 2431020 - RNA, 19 nt, Homo sapiens
  misc_RNA (1)...(19): siRNA sense strand
gccuuuaacucuaggucau

SEQ ID NO: 2431021 - RNA, 19 nt, Homo sapiens
  misc_RNA (1)...(19): siRNA sense strand
ggaacaaaggaaagagccu

SEQ ID NO: 2431022 - RNA, 19 nt, Homo sapiens
  misc_RNA (1)...(19): siRNA sense strand
ggcaagagaaacaagaaca

SEQ ID NO: 2431023 - RNA, 19 nt, Homo sapiens
  misc_RNA (1)...(19): siRNA sense strand
aggaaagagccuuggaaug

SEQ ID NO: 2431024 - RNA, 19 nt, Homo sapiens
  misc_RNA (1)...(19): siRNA sense strand
ccgaagagaaacccuauaa

SEQ ID NO: 2431025 - RNA, 19 nt, Homo sapiens
  misc_RNA (1)...(19): siRNA sense strand
acacaucagagaagucaua

SEQ ID NO: 2431026 - RNA, 19 nt, Homo sapiens
  misc_RNA (1)...(19): siRNA sense strand
acacaucggagaagucaua

SEQ ID NO: 2431027 - RNA, 19 nt, Homo sapiens
  misc_RNA (1)...(19): siRNA sense strand
gaaccagcucagaagaauu

SEQ ID NO: 2431028 - RNA, 19 nt, Homo sapiens
  misc_RNA (1)...(19): siRNA sense strand
uuauugugcaugagagaau

SEQ ID NO: 2431029 - RNA, 19 nt, Homo sapiens
  misc_RNA (1)...(19): siRNA sense strand
augugaugaaugugguaaa

SEQ ID NO: 2431030 - RNA, 19 nt, Homo sapiens
  misc_RNA (1)...(19): siRNA sense strand
ccucauugcacaucagaga

SEQ ID NO: 2431031 - RNA, 19 nt, Homo sapiens
  misc_RNA (1)...(19): siRNA sense strand
cauuccuaccgaagagaaa

SEQ ID NO: 2431032 - RNA, 19 nt, Homo sapiens
  misc_RNA (1)...(19): siRNA sense strand
gaucaauauaggaaggucu

SEQ ID NO: 2431033 - RNA, 19 nt, Homo sapiens
  misc_RNA (1)...(19): siRNA sense strand
guuuguacccagucauuaa

SEQ ID NO: 2431034 - RNA, 19 nt, Homo sapiens
  misc_RNA (1)...(19): siRNA sense strand
ggagaagacauacuggaga

SEQ ID NO: 2431035 - RNA, 19 nt, Homo sapiens
  misc_RNA (1)...(19): siRNA sense strand
aguucauacuggagagaag

SEQ ID NO: 2431036 - RNA, 19 nt, Homo sapiens
  misc_RNA (1)...(19): siRNA sense strand
guggcaaagccuucaacua

SEQ ID NO: 2431037 - RNA, 19 nt, Homo sapiens
  misc_RNA (1)...(19): siRNA sense strand
ugguaaagccuucagcuau

SEQ ID NO: 2431038 - RNA, 19 nt, Homo sapiens
  misc_RNA (1)...(19): siRNA sense strand
aggcagaaguauuggcuga

SEQ ID NO: 2431039 - RNA, 19 nt, Homo sapiens
  misc_RNA (1)...(19): siRNA sense strand
uggaagagaaggagaggga

SEQ ID NO: 2431040 - RNA, 19 nt, Homo sapiens
  misc_RNA (1)...(19): siRNA sense strand
gugaugaaccaguggcaga

SEQ ID NO: 2431041 - RNA, 19 nt, Homo sapiens
  misc_RNA (1)...(19): siRNA sense strand
ccaaauagcuugaaggugg

SEQ ID NO: 2431042 - RNA, 19 nt, Homo sapiens
  misc_RNA (1)...(19): siRNA sense strand
ggggaaagacggacuuaaa

SEQ ID NO: 2431043 - RNA, 19 nt, Homo sapiens
  misc_RNA (1)...(19): siRNA sense strand
agugaugggccuagauauu

SEQ ID NO: 2431044 - RNA, 19 nt, Homo sapiens
  misc_RNA (1)...(19): siRNA sense strand
ccugcugaaagaagagaaa

SEQ ID NO: 2431045 - RNA, 19 nt, Homo sapiens
  misc_RNA (1)...(19): siRNA sense strand
cacaaauguaggagcaauu

SEQ ID NO: 2431046 - RNA, 19 nt, Homo sapiens
  misc_RNA (1)...(19): siRNA sense strand
uggcugaguuugagagaag

SEQ ID NO: 2431047 - RNA, 19 nt, Homo sapiens
  misc_RNA (1)...(19): siRNA sense strand
aguccaaagaagaguauca

SEQ ID NO: 2431048 - RNA, 19 nt, Homo sapiens
  misc_RNA (1)...(19): siRNA sense strand
uaacacaaauguaggagca

SEQ ID NO: 2431049 - RNA, 19 nt, Homo sapiens
  misc_RNA (1)...(19): siRNA sense strand
gcucauagccacuugcuca

SEQ ID NO: 2431050 - RNA, 19 nt, Homo sapiens
  misc_RNA (1)...(19): siRNA sense strand
agaagagaaagguuaagaa

SEQ ID NO: 2431051 - RNA, 19 nt, Homo sapiens
  misc_RNA (1)...(19): siRNA sense strand
ccaaagaagaguaucagca

SEQ ID NO: 2431052 - RNA, 19 nt, Homo sapiens
  misc_RNA (1)...(19): siRNA sense strand
aggaugaugagaagucuaa

SEQ ID NO: 2431053 - RNA, 19 nt, Homo sapiens
  misc_RNA (1)...(19): siRNA sense strand
aaguauuggcugaguuuga

SEQ ID NO: 2431054 - RNA, 19 nt, Homo sapiens
  misc_RNA (1)...(19): siRNA sense strand
uggagaggguccugcugaa

SEQ ID NO: 2431055 - RNA, 19 nt, Homo sapiens
  misc_RNA (1)...(19): siRNA sense strand
cugaaagaagagaaagguu

SEQ ID NO: 2431056 - RNA, 19 nt, Homo sapiens
  misc_RNA (1)...(19): siRNA sense strand
auggaaguuuggaagagaa

SEQ ID NO: 2431057 - RNA, 19 nt, Homo sapiens
  misc_RNA (1)...(19): siRNA sense strand
gcuaauuauucguugccca

SEQ ID NO: 2431058 - RNA, 19 nt, Homo sapiens
  misc_RNA (1)...(19): siRNA sense strand
ucacacucuucgagggcau

SEQ ID NO: 2431059 - RNA, 19 nt, Homo sapiens
  misc_RNA (1)...(19): siRNA sense strand
gaagagaaggagagggagc

SEQ ID NO: 2431060 - RNA, 19 nt, Homo sapiens
  misc_RNA (1)...(19): siRNA sense strand
cugaaagaaaucuauggaa

SEQ ID NO: 2431061 - RNA, 19 nt, Homo sapiens
  misc_RNA (1)...(19): siRNA sense strand
ggaucgaagcuggaaauau

SEQ ID NO: 2431062 - RNA, 19 nt, Homo sapiens
  misc_RNA (1)...(19): siRNA sense strand
ggccacagcuuguuggagu

SEQ ID NO: 2431063 - RNA, 19 nt, Homo sapiens
  misc_RNA (1)...(19): siRNA sense strand
gcacaagucucuccggucu

SEQ ID NO: 2431064 - RNA, 19 nt, Homo sapiens
  misc_RNA (1)...(19): siRNA sense strand
aagaagaguaucagcaaac

SEQ ID NO: 2431065 - RNA, 19 nt, Homo sapiens
  misc_RNA (1)...(19): siRNA sense strand
cgagcgacaggcagaagua

SEQ ID NO: 2431066 - RNA, 19 nt, Homo sapiens
  misc_RNA (1)...(19): siRNA sense strand
cuucgagggcauaacacaa

SEQ ID NO: 2431067 - RNA, 19 nt, Homo sapiens
  misc_RNA (1)...(19): siRNA sense strand
ggcagauauugaaggccau

SEQ ID NO: 2431068 - RNA, 19 nt, Homo sapiens
  misc_RNA (1)...(19): siRNA sense strand
ggaccuacgcacaggacgu

SEQ ID NO: 2431069 - RNA, 19 nt, Homo sapiens
  misc_RNA (1)...(19): siRNA sense strand
aggcagaagaccagagaau

SEQ ID NO: 2431070 - RNA, 19 nt, Homo sapiens
  misc_RNA (1)...(19): siRNA sense strand
aagaaaucaacuugggaaa

SEQ ID NO: 2431071 - RNA, 19 nt, Homo sapiens
  misc_RNA (1)...(19): siRNA sense strand
aggaaaggaaggaggaaaa

SEQ ID NO: 2431072 - RNA, 19 nt, Homo sapiens
  misc_RNA (1)...(19): siRNA sense strand
cuucaaagaaauucagcaa

SEQ ID NO: 2431073 - RNA, 19 nt, Homo sapiens
  misc_RNA (1)...(19): siRNA sense strand
gaagaugauucaagcccaa

SEQ ID NO: 2431074 - RNA, 19 nt, Homo sapiens
  misc_RNA (1)...(19): siRNA sense strand
ugcuaaagaccaaggaauu

SEQ ID NO: 2431075 - RNA, 19 nt, Homo sapiens
  misc_RNA (1)...(19): siRNA sense strand
gaagaaaucaacuugggaa

SEQ ID NO: 2431076 - RNA, 19 nt, Homo sapiens
  misc_RNA (1)...(19): siRNA sense strand
aaggaaaggaaggaggaaa

SEQ ID NO: 2431077 - RNA, 19 nt, Homo sapiens
  misc_RNA (1)...(19): siRNA sense strand
ugauucaagcccaaagaaa

SEQ ID NO: 2431078 - RNA, 19 nt, Homo sapiens
  misc_RNA (1)...(19): siRNA sense strand
cuguaggauuaauugcaaa

SEQ ID NO: 2431079 - RNA, 19 nt, Homo sapiens
  misc_RNA (1)...(19): siRNA sense strand
augcuaaagaccaaggaau

SEQ ID NO: 2431080 - RNA, 19 nt, Homo sapiens
  misc_RNA (1)...(19): siRNA sense strand
cagugaaauagcauggauu

SEQ ID NO: 2431081 - RNA, 19 nt, Homo sapiens
  misc_RNA (1)...(19): siRNA sense strand
caaaggaaaggaaggagga

SEQ ID NO: 2431082 - RNA, 19 nt, Homo sapiens
  misc_RNA (1)...(19): siRNA sense strand
ccuuaaccauaauuggcaa

SEQ ID NO: 2431083 - RNA, 19 nt, Homo sapiens
  misc_RNA (1)...(19): siRNA sense strand
gauauaucugucuggaaau

SEQ ID NO: 2431084 - RNA, 19 nt, Homo sapiens
  misc_RNA (1)...(19): siRNA sense strand
uuucaaaugcacagagugu

SEQ ID NO: 2431085 - RNA, 19 nt, Homo sapiens
  misc_RNA (1)...(19): siRNA sense strand
uggcaaaacagaagaugau

SEQ ID NO: 2431086 - RNA, 19 nt, Homo sapiens
  misc_RNA (1)...(19): siRNA sense strand
guguaaccucagaaagaga

SEQ ID NO: 2431087 - RNA, 19 nt, Homo sapiens
  misc_RNA (1)...(19): siRNA sense strand
cuuuaguagcagcguggua

SEQ ID NO: 2431088 - RNA, 19 nt, Homo sapiens
  misc_RNA (1)...(19): siRNA sense strand
uccauaugcuaaagaccaa

SEQ ID NO: 2431089 - RNA, 19 nt, Homo sapiens
  misc_RNA (1)...(19): siRNA sense strand
gcccacuggcacaggacua

SEQ ID NO: 2431090 - RNA, 19 nt, Homo sapiens
  misc_RNA (1)...(19): siRNA sense strand
gaggaaaaugcaaggcaga

SEQ ID NO: 2431091 - RNA, 19 nt, Homo sapiens
  misc_RNA (1)...(19): siRNA sense strand
guaaccucagaaagagaaa

SEQ ID NO: 2431092 - RNA, 19 nt, Homo sapiens
  misc_RNA (1)...(19): siRNA sense strand
aggaagcgacccauggcaa

SEQ ID NO: 2431093 - RNA, 19 nt, Homo sapiens
  misc_RNA (1)...(19): siRNA sense strand
auuccuggcccgagagaaa

SEQ ID NO: 2431094 - RNA, 19 nt, Homo sapiens
  misc_RNA (1)...(19): siRNA sense strand
uuauagaagcagagaagau

SEQ ID NO: 2431095 - RNA, 19 nt, Homo sapiens
  misc_RNA (1)...(19): siRNA sense strand
gcugagacagagaggaaaa

SEQ ID NO: 2431096 - RNA, 19 nt, Homo sapiens
  misc_RNA (1)...(19): siRNA sense strand
agcagaaagugauggaaaa

SEQ ID NO: 2431097 - RNA, 19 nt, Homo sapiens
  misc_RNA (1)...(19): siRNA sense strand
gagagaaagcgaaagcaga

SEQ ID NO: 2431098 - RNA, 19 nt, Homo sapiens
  misc_RNA (1)...(19): siRNA sense strand
agauauuaggacuggaaga

SEQ ID NO: 2431099 - RNA, 19 nt, Homo sapiens
  misc_RNA (1)...(19): siRNA sense strand
cagaaagacuuaaaccuca

SEQ ID NO: 2431100 - RNA, 19 nt, Homo sapiens
  misc_RNA (1)...(19): siRNA sense strand
auuaggacuggaagagaaa

SEQ ID NO: 2431101 - RNA, 19 nt, Homo sapiens
  misc_RNA (1)...(19): siRNA sense strand
ggcccgagagaaagcgaaa

SEQ ID NO: 2431102 - RNA, 19 nt, Homo sapiens
  misc_RNA (1)...(19): siRNA sense strand
aguuauagaagcagagaag

SEQ ID NO: 2431103 - RNA, 19 nt, Homo sapiens
  misc_RNA (1)...(19): siRNA sense strand
cuacaggggaggagcuuua

SEQ ID NO: 2431104 - RNA, 19 nt, Homo sapiens
  misc_RNA (1)...(19): siRNA sense strand
accgaauagaagugguuaa

SEQ ID NO: 2431105 - RNA, 19 nt, Homo sapiens
  misc_RNA (1)...(19): siRNA sense strand
aguuaauggaggcugagaa

SEQ ID NO: 2431106 - RNA, 19 nt, Homo sapiens
  misc_RNA (1)...(19): siRNA sense strand
aggcaguuauagaagcaga

SEQ ID NO: 2431107 - RNA, 19 nt, Homo sapiens
  misc_RNA (1)...(19): siRNA sense strand
gaagauugcacaaguggca

SEQ ID NO: 2431108 - RNA, 19 nt, Homo sapiens
  misc_RNA (1)...(19): siRNA sense strand
uugaguuaauggaggcuga

SEQ ID NO: 2431109 - RNA, 19 nt, Homo sapiens
  misc_RNA (1)...(19): siRNA sense strand
acaagauugaggagggcca

SEQ ID NO: 2431110 - RNA, 19 nt, Homo sapiens
  misc_RNA (1)...(19): siRNA sense strand
ucaugaaggaagagagauu

SEQ ID NO: 2431111 - RNA, 19 nt, Homo sapiens
  misc_RNA (1)...(19): siRNA sense strand
aagaggaagcaguggaaaa

SEQ ID NO: 2431112 - RNA, 19 nt, Homo sapiens
  misc_RNA (1)...(19): siRNA sense strand
cagaggagccacaggccaa

SEQ ID NO: 2431113 - RNA, 19 nt, Homo sapiens
  misc_RNA (1)...(19): siRNA sense strand
gugcaggaguacaggagga

SEQ ID NO: 2431114 - RNA, 19 nt, Homo sapiens
  misc_RNA (1)...(19): siRNA sense strand
gaagagagauuuuggcuga

SEQ ID NO: 2431115 - RNA, 19 nt, Homo sapiens
  misc_RNA (1)...(19): siRNA sense strand
acucaugaaggaagagaga

SEQ ID NO: 2431116 - RNA, 19 nt, Homo sapiens
  misc_RNA (1)...(19): siRNA sense strand
ccacaggccaagaagguca

SEQ ID NO: 2431117 - RNA, 19 nt, Homo sapiens
  misc_RNA (1)...(19): siRNA sense strand
acacgaaugcacuggucua

SEQ ID NO: 2431118 - RNA, 19 nt, Homo sapiens
  misc_RNA (1)...(19): siRNA sense strand
cagaauacgaggaugaaac

SEQ ID NO: 2431119 - RNA, 19 nt, Homo sapiens
  misc_RNA (1)...(19): siRNA sense strand
ccuuggcaucuuugggaaa

SEQ ID NO: 2431120 - RNA, 19 nt, Homo sapiens
  misc_RNA (1)...(19): siRNA sense strand
ccacaugguguuagccaga

SEQ ID NO: 2431121 - RNA, 19 nt, Homo sapiens
  misc_RNA (1)...(19): siRNA sense strand
augcaggagcacaaguuaa

SEQ ID NO: 2431122 - RNA, 19 nt, Homo sapiens
  misc_RNA (1)...(19): siRNA sense strand
aagcaaaggagaugggccu

SEQ ID NO: 2431123 - RNA, 19 nt, Homo sapiens
  misc_RNA (1)...(19): siRNA sense strand
gagcacaaguuaaagguug

SEQ ID NO: 2431124 - RNA, 19 nt, Homo sapiens
  misc_RNA (1)...(19): siRNA sense strand
ucgaaaugucagugccaca

SEQ ID NO: 2431125 - RNA, 19 nt, Homo sapiens
  misc_RNA (1)...(19): siRNA sense strand
ugccaaaugccuucaggaa

SEQ ID NO: 2431126 - RNA, 19 nt, Homo sapiens
  misc_RNA (1)...(19): siRNA sense strand
auggaggagcgcagggaga

SEQ ID NO: 2431127 - RNA, 19 nt, Homo sapiens
  misc_RNA (1)...(19): siRNA sense strand
gacucaugcaggagcacaa

SEQ ID NO: 2431128 - RNA, 19 nt, Homo sapiens
  misc_RNA (1)...(19): siRNA sense strand
cuucacuuaaagagaggaa

SEQ ID NO: 2431129 - RNA, 19 nt, Homo sapiens
  misc_RNA (1)...(19): siRNA sense strand
agcagagcgugcaggagua

SEQ ID NO: 2431130 - RNA, 19 nt, Homo sapiens
  misc_RNA (1)...(19): siRNA sense strand
ccccagaauacgaggauga

SEQ ID NO: 2431131 - RNA, 19 nt, Homo sapiens
  misc_RNA (1)...(19): siRNA sense strand
ucacuuaaagagaggaaac

SEQ ID NO: 2431132 - RNA, 19 nt, Homo sapiens
  misc_RNA (1)...(19): siRNA sense strand
gaggaaacuucuuggugcu

SEQ ID NO: 2431133 - RNA, 19 nt, Homo sapiens
  misc_RNA (1)...(19): siRNA sense strand
cagcagagcgugcaggagu

SEQ ID NO: 2431134 - RNA, 19 nt, Homo sapiens
  misc_RNA (1)...(19): siRNA sense strand
ccaacaaugcccaagcuga

SEQ ID NO: 2431135 - RNA, 19 nt, Homo sapiens
  misc_RNA (1)...(19): siRNA sense strand
ccagaauacgaggaugaaa

SEQ ID NO: 2431136 - RNA, 19 nt, Homo sapiens
  misc_RNA (1)...(19): siRNA sense strand
agcaguggauggagagguu

SEQ ID NO: 2431137 - RNA, 19 nt, Homo sapiens
  misc_RNA (1)...(19): siRNA sense strand
cuggcgacaucgaggagau

SEQ ID NO: 2431138 - RNA, 19 nt, Homo sapiens
  misc_RNA (1)...(19): siRNA sense strand
gugauuuggaagaguuuca

SEQ ID NO: 2431139 - RNA, 19 nt, Homo sapiens
  misc_RNA (1)...(19): siRNA sense strand
ggaaauaauuaaugaccga

SEQ ID NO: 2431140 - RNA, 19 nt, Homo sapiens
  misc_RNA (1)...(19): siRNA sense strand
acucaauguuaguaagcuu

SEQ ID NO: 2431141 - RNA, 19 nt, Homo sapiens
  misc_RNA (1)...(19): siRNA sense strand
ccccauaucaaguggaaaa

SEQ ID NO: 2431142 - RNA, 19 nt, Homo sapiens
  misc_RNA (1)...(19): siRNA sense strand
cguggaaagccaaaagaua

SEQ ID NO: 2431143 - RNA, 19 nt, Homo sapiens
  misc_RNA (1)...(19): siRNA sense strand
cagagaaggaggagaagcu

SEQ ID NO: 2431144 - RNA, 19 nt, Homo sapiens
  misc_RNA (1)...(19): siRNA sense strand
aauuaaugaccgaacagaa

SEQ ID NO: 2431145 - RNA, 19 nt, Homo sapiens
  misc_RNA (1)...(19): siRNA sense strand
acaucguagucauggaaga

SEQ ID NO: 2431146 - RNA, 19 nt, Homo sapiens
  misc_RNA (1)...(19): siRNA sense strand
gagaaggaggagaagcuga

SEQ ID NO: 2431147 - RNA, 19 nt, Homo sapiens
  misc_RNA (1)...(19): siRNA sense strand
guggaaaacuguaaaggca

SEQ ID NO: 2431148 - RNA, 19 nt, Homo sapiens
  misc_RNA (1)...(19): siRNA sense strand
uuagagacguggaaagcca

SEQ ID NO: 2431149 - RNA, 19 nt, Homo sapiens
  misc_RNA (1)...(19): siRNA sense strand
augcagacaucuugcucau

SEQ ID NO: 2431150 - RNA, 19 nt, Homo sapiens
  misc_RNA (1)...(19): siRNA sense strand
uggaaaacuguaaaggcaa

SEQ ID NO: 2431151 - RNA, 19 nt, Homo sapiens
  misc_RNA (1)...(19): siRNA sense strand
gcauugaccugcuggccua

SEQ ID NO: 2431152 - RNA, 19 nt, Homo sapiens
  misc_RNA (1)...(19): siRNA sense strand
aggcaggcggagaaggaaa

SEQ ID NO: 2431153 - RNA, 19 nt, Homo sapiens
  misc_RNA (1)...(19): siRNA sense strand
ucucauacagcaagagcaa

SEQ ID NO: 2431154 - RNA, 19 nt, Homo sapiens
  misc_RNA (1)...(19): siRNA sense strand
aggaggagcugcuggcaca

SEQ ID NO: 2431155 - RNA, 19 nt, Homo sapiens
  misc_RNA (1)...(19): siRNA sense strand
gggaugugauguuggagga

SEQ ID NO: 2431156 - RNA, 19 nt, Homo sapiens
  misc_RNA (1)...(19): siRNA sense strand
ggaacucacuggaggugga

SEQ ID NO: 2431157 - RNA, 19 nt, Homo sapiens
  misc_RNA (1)...(19): siRNA sense strand
agaccaggcaggcggagaa

SEQ ID NO: 2431158 - RNA, 19 nt, Homo sapiens
  misc_RNA (1)...(19): siRNA sense strand
cagcaagagcaacggcaga

SEQ ID NO: 2431159 - RNA, 19 nt, Homo sapiens
  misc_RNA (1)...(19): siRNA sense strand
ggcagaugaggguggagaa

SEQ ID NO: 2431160 - RNA, 19 nt, Homo sapiens
  misc_RNA (1)...(19): siRNA sense strand
aauaagaagaggaaaucca

SEQ ID NO: 2431161 - RNA, 19 nt, Homo sapiens
  misc_RNA (1)...(19): siRNA sense strand
augugauguuggaggaacu

SEQ ID NO: 2431162 - RNA, 19 nt, Homo sapiens
  misc_RNA (1)...(19): siRNA sense strand
ccucagaagcccagggaga

SEQ ID NO: 2431163 - RNA, 19 nt, Homo sapiens
  misc_RNA (1)...(19): siRNA sense strand
aggccuaggucaagggcua

SEQ ID NO: 2431164 - RNA, 19 nt, Homo sapiens
  misc_RNA (1)...(19): siRNA sense strand
ugacauagacucugggcga

SEQ ID NO: 2431165 - RNA, 19 nt, Homo sapiens
  misc_RNA (1)...(19): siRNA sense strand
cugcaaacuuggaugggca

SEQ ID NO: 2431166 - RNA, 19 nt, Homo sapiens
  misc_RNA (1)...(19): siRNA sense strand
acauagacucugggcgaaa

SEQ ID NO: 2431167 - RNA, 19 nt, Homo sapiens
  misc_RNA (1)...(19): siRNA sense strand
ugagcgaggccuaggucaa

SEQ ID NO: 2431168 - RNA, 19 nt, Homo sapiens
  misc_RNA (1)...(19): siRNA sense strand
gaacacgauuccuggcaca

SEQ ID NO: 2431169 - RNA, 19 nt, Homo sapiens
  misc_RNA (1)...(19): siRNA sense strand
ccaagaugguuucgggaag

SEQ ID NO: 2431170 - RNA, 19 nt, Homo sapiens
  misc_RNA (1)...(19): siRNA sense strand
gcacacagcuugagcgagg

SEQ ID NO: 2431171 - RNA, 19 nt, Homo sapiens
  misc_RNA (1)...(19): siRNA sense strand
gaggcgagcuucaacguca

SEQ ID NO: 2431172 - RNA, 19 nt, Homo sapiens
  misc_RNA (1)...(19): siRNA sense strand
gccaagaugguuucgggaa

SEQ ID NO: 2431173 - RNA, 19 nt, Homo sapiens
  misc_RNA (1)...(19): siRNA sense strand
caggcuuccuacuggagaa

SEQ ID NO: 2431174 - RNA, 19 nt, Homo sapiens
  misc_RNA (1)...(19): siRNA sense strand
ccaagaaauuccagcggca

SEQ ID NO: 2431175 - RNA, 19 nt, Homo sapiens
  misc_RNA (1)...(19): siRNA sense strand
cagcauauggacucagaca

SEQ ID NO: 2431176 - RNA, 19 nt, Homo sapiens
  misc_RNA (1)...(19): siRNA sense strand
ccaagaaauuccagcggca

SEQ ID NO: 2431177 - RNA, 19 nt, Homo sapiens
  misc_RNA (1)...(19): siRNA sense strand
cagcauauggacucagaca

SEQ ID NO: 2431178 - RNA, 19 nt, Homo sapiens
  misc_RNA (1)...(19): siRNA sense strand
ccaagaaauuccagcggca

SEQ ID NO: 2431179 - RNA, 19 nt, Homo sapiens
  misc_RNA (1)...(19): siRNA sense strand
cagcauauggacucagaca

SEQ ID NO: 2431180 - RNA, 19 nt, Homo sapiens
  misc_RNA (1)...(19): siRNA sense strand
ccaagaaauuccagcggca

SEQ ID NO: 2431181 - RNA, 19 nt, Homo sapiens
  misc_RNA (1)...(19): siRNA sense strand
cagcauauggacucagaca

SEQ ID NO: 2431182 - RNA, 19 nt, Homo sapiens
  misc_RNA (1)...(19): siRNA sense strand
cggaagaaguucaugggaa

SEQ ID NO: 2431183 - RNA, 19 nt, Homo sapiens
  misc_RNA (1)...(19): siRNA sense strand
ggaugaagacuauagggua

SEQ ID NO: 2431184 - RNA, 19 nt, Homo sapiens
  misc_RNA (1)...(19): siRNA sense strand
auggaaagacccugggaau

SEQ ID NO: 2431185 - RNA, 19 nt, Homo sapiens
  misc_RNA (1)...(19): siRNA sense strand
ggcaaaugggagcggaaga

SEQ ID NO: 2431186 - RNA, 19 nt, Homo sapiens
  misc_RNA (1)...(19): siRNA sense strand
ggcugcaggugguggaaaa

SEQ ID NO: 2431187 - RNA, 19 nt, Homo sapiens
  misc_RNA (1)...(19): siRNA sense strand
guggaaaagcagaaccuua

SEQ ID NO: 2431188 - RNA, 19 nt, Homo sapiens
  misc_RNA (1)...(19): siRNA sense strand
ccugaagaaugcugggaac

SEQ ID NO: 2431189 - RNA, 19 nt, Homo sapiens
  misc_RNA (1)...(19): siRNA sense strand
uggacauggugaaggggaa

SEQ ID NO: 2431190 - RNA, 19 nt, Homo sapiens
  misc_RNA (1)...(19): siRNA sense strand
cggaugugaacuuggugaa

SEQ ID NO: 2431191 - RNA, 19 nt, Homo sapiens
  misc_RNA (1)...(19): siRNA sense strand
ggagcaaggcuucggggaa

SEQ ID NO: 2431192 - RNA, 19 nt, Homo sapiens
  misc_RNA (1)...(19): siRNA sense strand
ccgcaacaaggaagggcau

SEQ ID NO: 2431193 - RNA, 19 nt, Homo sapiens
  misc_RNA (1)...(19): siRNA sense strand
cuguucaguucguggacau

SEQ ID NO: 2431194 - RNA, 19 nt, Homo sapiens
  misc_RNA (1)...(19): siRNA sense strand
ggacauggugaaggggaaa

SEQ ID NO: 2431195 - RNA, 19 nt, Homo sapiens
  misc_RNA (1)...(19): siRNA sense strand
acggcaaaugggagcggaa

SEQ ID NO: 2431196 - RNA, 19 nt, Homo sapiens
  misc_RNA (1)...(19): siRNA sense strand
cagucauggccaagguuaa

SEQ ID NO: 2431197 - RNA, 19 nt, Homo sapiens
  misc_RNA (1)...(19): siRNA sense strand
gggcaaagcuuaauuggcu

SEQ ID NO: 2431198 - RNA, 19 nt, Homo sapiens
  misc_RNA (1)...(19): siRNA sense strand
ucucggaggaagugauaau

SEQ ID NO: 2431199 - RNA, 19 nt, Homo sapiens
  misc_RNA (1)...(19): siRNA sense strand
uaacaaaagaaagggcaaa

SEQ ID NO: 2431200 - RNA, 19 nt, Homo sapiens
  misc_RNA (1)...(19): siRNA sense strand
cugagaugaugaacaacau

SEQ ID NO: 2431201 - RNA, 19 nt, Homo sapiens
  misc_RNA (1)...(19): siRNA sense strand
uguugaagacaguaaggau

SEQ ID NO: 2431202 - RNA, 19 nt, Homo sapiens
  misc_RNA (1)...(19): siRNA sense strand
ggagacugugggagggcaa

SEQ ID NO: 2431203 - RNA, 19 nt, Homo sapiens
  misc_RNA (1)...(19): siRNA sense strand
acacugaaguaguaggcca

SEQ ID NO: 2431204 - RNA, 19 nt, Homo sapiens
  misc_RNA (1)...(19): siRNA sense strand
aaguaguaggccagaguuu

SEQ ID NO: 2431205 - RNA, 19 nt, Homo sapiens
  misc_RNA (1)...(19): siRNA sense strand
aggaagaggcccagcucca

SEQ ID NO: 2431206 - RNA, 19 nt, Homo sapiens
  misc_RNA (1)...(19): siRNA sense strand
uaucuaacguggugagcgu

SEQ ID NO: 2431207 - RNA, 19 nt, Homo sapiens
  misc_RNA (1)...(19): siRNA sense strand
ucuaacguggugagcguaa

SEQ ID NO: 2431208 - RNA, 19 nt, Homo sapiens
  misc_RNA (1)...(19): siRNA sense strand
uguccauggaggagagcaa

SEQ ID NO: 2431209 - RNA, 19 nt, Homo sapiens
  misc_RNA (1)...(19): siRNA sense strand
cagcagaggcagaugugga

SEQ ID NO: 2431210 - RNA, 19 nt, Homo sapiens
  misc_RNA (1)...(19): siRNA sense strand
cagcuauacugcagccuga

SEQ ID NO: 2431211 - RNA, 19 nt, Homo sapiens
  misc_RNA (1)...(19): siRNA sense strand
cuggaugagcggcuugaaa

SEQ ID NO: 2431212 - RNA, 19 nt, Homo sapiens
  misc_RNA (1)...(19): siRNA sense strand
ccaucuugcuggaggagcu

SEQ ID NO: 2431213 - RNA, 19 nt, Homo sapiens
  misc_RNA (1)...(19): siRNA sense strand
gaagauuucagcagaggca

SEQ ID NO: 2431214 - RNA, 19 nt, Homo sapiens
  misc_RNA (1)...(19): siRNA sense strand
ugaccaagcaagggcacaa

SEQ ID NO: 2431215 - RNA, 19 nt, Homo sapiens
  misc_RNA (1)...(19): siRNA sense strand
uuaccaaagacaaggagga

SEQ ID NO: 2431216 - RNA, 19 nt, Homo sapiens
  misc_RNA (1)...(19): siRNA sense strand
aggaccugguagaugacaa

SEQ ID NO: 2431217 - RNA, 19 nt, Homo sapiens
  misc_RNA (1)...(19): siRNA sense strand
augacaagucccugcaaga

SEQ ID NO: 2431218 - RNA, 19 nt, Homo sapiens
  misc_RNA (1)...(19): siRNA sense strand
aggaagaagaagaggaaga

SEQ ID NO: 2431219 - RNA, 19 nt, Homo sapiens
  misc_RNA (1)...(19): siRNA sense strand
aggaagaggaggaggagga

SEQ ID NO: 2431220 - RNA, 19 nt, Homo sapiens
  misc_RNA (1)...(19): siRNA sense strand
aaggagaggaggaggaaga

SEQ ID NO: 2431221 - RNA, 19 nt, Homo sapiens
  misc_RNA (1)...(19): siRNA sense strand
acgaggaggaggaggaaga

SEQ ID NO: 2431222 - RNA, 19 nt, Homo sapiens
  misc_RNA (1)...(19): siRNA sense strand
aagaagaggaagaggagga

SEQ ID NO: 2431223 - RNA, 19 nt, Homo sapiens
  misc_RNA (1)...(19): siRNA sense strand
agauugacguggaagaaaa

SEQ ID NO: 2431224 - RNA, 19 nt, Homo sapiens
  misc_RNA (1)...(19): siRNA sense strand
aggaggaggaggaagaaga

SEQ ID NO: 2431225 - RNA, 19 nt, Homo sapiens
  misc_RNA (1)...(19): siRNA sense strand
aggaggaggaagaagaaga

SEQ ID NO: 2431226 - RNA, 19 nt, Homo sapiens
  misc_RNA (1)...(19): siRNA sense strand
agucagacgaggaggagga

SEQ ID NO: 2431227 - RNA, 19 nt, Homo sapiens
  misc_RNA (1)...(19): siRNA sense strand
cagacgaggaggaggagga

SEQ ID NO: 2431228 - RNA, 19 nt, Homo sapiens
  misc_RNA (1)...(19): siRNA sense strand
aagaagaagaggaagagga

SEQ ID NO: 2431229 - RNA, 19 nt, Homo sapiens
  misc_RNA (1)...(19): siRNA sense strand
aggaggaagaagaggagga

SEQ ID NO: 2431230 - RNA, 19 nt, Homo sapiens
  misc_RNA (1)...(19): siRNA sense strand
cugaagaauuagauugcca

SEQ ID NO: 2431231 - RNA, 19 nt, Homo sapiens
  misc_RNA (1)...(19): siRNA sense strand
cagugaaagugcugacagu

SEQ ID NO: 2431232 - RNA, 19 nt, Homo sapiens
  misc_RNA (1)...(19): siRNA sense strand
uggacaacacagagguaga

SEQ ID NO: 2431233 - RNA, 19 nt, Homo sapiens
  misc_RNA (1)...(19): siRNA sense strand
aggaugacgaugaugacaa

SEQ ID NO: 2431234 - RNA, 19 nt, Homo sapiens
  misc_RNA (1)...(19): siRNA sense strand
cgaugaugacaaaggagau

SEQ ID NO: 2431235 - RNA, 19 nt, Homo sapiens
  misc_RNA (1)...(19): siRNA sense strand
aggaggaggaugacgauga

SEQ ID NO: 2431236 - RNA, 19 nt, Homo sapiens
  misc_RNA (1)...(19): siRNA sense strand
aagaggaagaggaggagga

SEQ ID NO: 2431237 - RNA, 19 nt, Homo sapiens
  misc_RNA (1)...(19): siRNA sense strand
ugacaaaggagauggcuuc

SEQ ID NO: 2431238 - RNA, 19 nt, Homo sapiens
  misc_RNA (1)...(19): siRNA sense strand
guggaauuuuaaagaggaa

SEQ ID NO: 2431239 - RNA, 19 nt, Homo sapiens
  misc_RNA (1)...(19): siRNA sense strand
gccaaggagaggaggagga

SEQ ID NO: 2431240 - RNA, 19 nt, Homo sapiens
  misc_RNA (1)...(19): siRNA sense strand
auucaaucgcagacaguuu

SEQ ID NO: 2431241 - RNA, 19 nt, Homo sapiens
  misc_RNA (1)...(19): siRNA sense strand
acgaaagccaugcaaagaa

SEQ ID NO: 2431242 - RNA, 19 nt, Homo sapiens
  misc_RNA (1)...(19): siRNA sense strand
ggagaaacgacugaggaca

SEQ ID NO: 2431243 - RNA, 19 nt, Homo sapiens
  misc_RNA (1)...(19): siRNA sense strand
gcauuaagugccaggugga

SEQ ID NO: 2431244 - RNA, 19 nt, Homo sapiens
  misc_RNA (1)...(19): siRNA sense strand
gacaagcagaagaggccua

SEQ ID NO: 2431245 - RNA, 19 nt, Homo sapiens
  misc_RNA (1)...(19): siRNA sense strand
aggaagaagaggaggaugg

SEQ ID NO: 2431246 - RNA, 19 nt, Homo sapiens
  misc_RNA (1)...(19): siRNA sense strand
aggagauggcuucguggaa

SEQ ID NO: 2431247 - RNA, 19 nt, Homo sapiens
  misc_RNA (1)...(19): siRNA sense strand
aggaggaggaagaagagga

SEQ ID NO: 2431248 - RNA, 19 nt, Homo sapiens
  misc_RNA (1)...(19): siRNA sense strand
aggaggaagaagaagagga

SEQ ID NO: 2431249 - RNA, 19 nt, Homo sapiens
  misc_RNA (1)...(19): siRNA sense strand
cagagguagaugaguacuu

SEQ ID NO: 2431250 - RNA, 19 nt, Homo sapiens
  misc_RNA (1)...(19): siRNA sense strand
cagucacauuucagagcau

SEQ ID NO: 2431251 - RNA, 19 nt, Homo sapiens
  misc_RNA (1)...(19): siRNA sense strand
aggaggaggaggaugacga

SEQ ID NO: 2431252 - RNA, 19 nt, Homo sapiens
  misc_RNA (1)...(19): siRNA sense strand
aggaggaugacgaugauga

SEQ ID NO: 2431253 - RNA, 19 nt, Homo sapiens
  misc_RNA (1)...(19): siRNA sense strand
uugugaagguacagaaaua

SEQ ID NO: 2431254 - RNA, 19 nt, Homo sapiens
  misc_RNA (1)...(19): siRNA sense strand
uggaagaugaugaggaaga

SEQ ID NO: 2431255 - RNA, 19 nt, Homo sapiens
  misc_RNA (1)...(19): siRNA sense strand
cagugaagaaggaggaaga

SEQ ID NO: 2431256 - RNA, 19 nt, Homo sapiens
  misc_RNA (1)...(19): siRNA sense strand
cuaacagaggacagagaaa

SEQ ID NO: 2431257 - RNA, 19 nt, Homo sapiens
  misc_RNA (1)...(19): siRNA sense strand
ugaagaaggaggaagaaaa

SEQ ID NO: 2431258 - RNA, 19 nt, Homo sapiens
  misc_RNA (1)...(19): siRNA sense strand
acucaagauggcugaaaua

SEQ ID NO: 2431259 - RNA, 19 nt, Homo sapiens
  misc_RNA (1)...(19): siRNA sense strand
ucaagauggcugaaauaaa

SEQ ID NO: 2431260 - RNA, 19 nt, Homo sapiens
  misc_RNA (1)...(19): siRNA sense strand
uuucuuagauagugaggua

SEQ ID NO: 2431261 - RNA, 19 nt, Homo sapiens
  misc_RNA (1)...(19): siRNA sense strand
gugaagaaggaggaagaaa

SEQ ID NO: 2431262 - RNA, 19 nt, Homo sapiens
  misc_RNA (1)...(19): siRNA sense strand
agacagagcaacuugaaau

SEQ ID NO: 2431263 - RNA, 19 nt, Homo sapiens
  misc_RNA (1)...(19): siRNA sense strand
gguaauagaauuugcagca

SEQ ID NO: 2431264 - RNA, 19 nt, Homo sapiens
  misc_RNA (1)...(19): siRNA sense strand
gugaagguacagaaauaaa

SEQ ID NO: 2431265 - RNA, 19 nt, Homo sapiens
  misc_RNA (1)...(19): siRNA sense strand
augaaugcccagugguuaa

SEQ ID NO: 2431266 - RNA, 19 nt, Homo sapiens
  misc_RNA (1)...(19): siRNA sense strand
guacaugacaauuuggcua

SEQ ID NO: 2431267 - RNA, 19 nt, Homo sapiens
  misc_RNA (1)...(19): siRNA sense strand
ugaaagagacagagcaacu

SEQ ID NO: 2431268 - RNA, 19 nt, Homo sapiens
  misc_RNA (1)...(19): siRNA sense strand
augaugaggaagaggaaga

SEQ ID NO: 2431269 - RNA, 19 nt, Homo sapiens
  misc_RNA (1)...(19): siRNA sense strand
aguuagacgggcaguguua

SEQ ID NO: 2431270 - RNA, 19 nt, Homo sapiens
  misc_RNA (1)...(19): siRNA sense strand
aggagaugaaggugaagaa

SEQ ID NO: 2431271 - RNA, 19 nt, Homo sapiens
  misc_RNA (1)...(19): siRNA sense strand
cauuagaagaugccagaau

SEQ ID NO: 2431272 - RNA, 19 nt, Homo sapiens
  misc_RNA (1)...(19): siRNA sense strand
ccuuaacaguacaugacaa

SEQ ID NO: 2431273 - RNA, 19 nt, Homo sapiens
  misc_RNA (1)...(19): siRNA sense strand
ugaaacaagcuaugcagaa

SEQ ID NO: 2431274 - RNA, 19 nt, Homo sapiens
  misc_RNA (1)...(19): siRNA sense strand
uuagaagaugccagaauaa

SEQ ID NO: 2431275 - RNA, 19 nt, Homo sapiens
  misc_RNA (1)...(19): siRNA sense strand
acagcaaugcagugagauu

SEQ ID NO: 2431276 - RNA, 19 nt, Homo sapiens
  misc_RNA (1)...(19): siRNA sense strand
ugccagagccuguaguaua

SEQ ID NO: 2431277 - RNA, 19 nt, Homo sapiens
  misc_RNA (1)...(19): siRNA sense strand
caaaagaauucauagguca

SEQ ID NO: 2431278 - RNA, 19 nt, Homo sapiens
  misc_RNA (1)...(19): siRNA sense strand
agagaagaaugaugcugaa

SEQ ID NO: 2431279 - RNA, 19 nt, Homo sapiens
  misc_RNA (1)...(19): siRNA sense strand
uuugaaagagacagagcaa

SEQ ID NO: 2431280 - RNA, 19 nt, Homo sapiens
  misc_RNA (1)...(19): siRNA sense strand
aagcaggacuaaucaggaa

SEQ ID NO: 2431281 - RNA, 19 nt, Homo sapiens
  misc_RNA (1)...(19): siRNA sense strand
cugaguuacuuguagauuu

SEQ ID NO: 2431282 - RNA, 19 nt, Homo sapiens
  misc_RNA (1)...(19): siRNA sense strand
cagaaaugaagaugagacu

SEQ ID NO: 2431283 - RNA, 19 nt, Homo sapiens
  misc_RNA (1)...(19): siRNA sense strand
guggagaggguaauagaau

SEQ ID NO: 2431284 - RNA, 19 nt, Homo sapiens
  misc_RNA (1)...(19): siRNA sense strand
agaggaagaugguggccuu

SEQ ID NO: 2431285 - RNA, 19 nt, Homo sapiens
  misc_RNA (1)...(19): siRNA sense strand
uggagaggguaauagaauu

SEQ ID NO: 2431286 - RNA, 19 nt, Homo sapiens
  misc_RNA (1)...(19): siRNA sense strand
ccagcuguggagaggguaa

SEQ ID NO: 2431287 - RNA, 19 nt, Homo sapiens
  misc_RNA (1)...(19): siRNA sense strand
agaugaugaggaagaggaa

SEQ ID NO: 2431288 - RNA, 19 nt, Homo sapiens
  misc_RNA (1)...(19): siRNA sense strand
cuuaaagucucaugaagca

SEQ ID NO: 2431289 - RNA, 19 nt, Homo sapiens
  misc_RNA (1)...(19): siRNA sense strand
gggaaguaugccagaaaau

SEQ ID NO: 2431290 - RNA, 19 nt, Homo sapiens
  misc_RNA (1)...(19): siRNA sense strand
gggcaguguuaucauguau

SEQ ID NO: 2431291 - RNA, 19 nt, Homo sapiens
  misc_RNA (1)...(19): siRNA sense strand
aguccgugcucgccagaaa

SEQ ID NO: 2431292 - RNA, 19 nt, Homo sapiens
  misc_RNA (1)...(19): siRNA sense strand
aggacaugucugagagcuu

SEQ ID NO: 2431293 - RNA, 19 nt, Homo sapiens
  misc_RNA (1)...(19): siRNA sense strand
cagaaaaugcucagauuga

SEQ ID NO: 2431294 - RNA, 19 nt, Homo sapiens
  misc_RNA (1)...(19): siRNA sense strand
aggaaauaucuuagaguug

SEQ ID NO: 2431295 - RNA, 19 nt, Homo sapiens
  misc_RNA (1)...(19): siRNA sense strand
ggucuauaaacgugaacca

SEQ ID NO: 2431296 - RNA, 19 nt, Homo sapiens
  misc_RNA (1)...(19): siRNA sense strand
ucaggaaugcuuugaagaa

SEQ ID NO: 2431297 - RNA, 19 nt, Homo sapiens
  misc_RNA (1)...(19): siRNA sense strand
gcuaaagacuaacagagga

SEQ ID NO: 2431298 - RNA, 19 nt, Homo sapiens
  misc_RNA (1)...(19): siRNA sense strand
gagcauuccaguuguuaau

SEQ ID NO: 2431299 - RNA, 19 nt, Homo sapiens
  misc_RNA (1)...(19): siRNA sense strand
cagauauggaagaugauga

SEQ ID NO: 2431300 - RNA, 19 nt, Homo sapiens
  misc_RNA (1)...(19): siRNA sense strand
ugaagaacacagaggugau

SEQ ID NO: 2431301 - RNA, 19 nt, Homo sapiens
  misc_RNA (1)...(19): siRNA sense strand
guagauuugacaagaccaa

SEQ ID NO: 2431302 - RNA, 19 nt, Homo sapiens
  misc_RNA (1)...(19): siRNA sense strand
gaaucagaaaugaagauga

SEQ ID NO: 2431303 - RNA, 19 nt, Homo sapiens
  misc_RNA (1)...(19): siRNA sense strand
ugaguuacauccagagcau

SEQ ID NO: 2431304 - RNA, 19 nt, Homo sapiens
  misc_RNA (1)...(19): siRNA sense strand
aauaagugcuuuaaaggca

SEQ ID NO: 2431305 - RNA, 19 nt, Homo sapiens
  misc_RNA (1)...(19): siRNA sense strand
gaugauaauaagagaacac

SEQ ID NO: 2431306 - RNA, 19 nt, Homo sapiens
  misc_RNA (1)...(19): siRNA sense strand
gguucuauugaaugagauu

SEQ ID NO: 2431307 - RNA, 19 nt, Homo sapiens
  misc_RNA (1)...(19): siRNA sense strand
ugauuaaaggugugggaaa

SEQ ID NO: 2431308 - RNA, 19 nt, Homo sapiens
  misc_RNA (1)...(19): siRNA sense strand
aaaugaauggagagagaua

SEQ ID NO: 2431309 - RNA, 19 nt, Homo sapiens
  misc_RNA (1)...(19): siRNA sense strand
augacaaaguucagagcua

SEQ ID NO: 2431310 - RNA, 19 nt, Homo sapiens
  misc_RNA (1)...(19): siRNA sense strand
agugggaaauaguggguaa

SEQ ID NO: 2431311 - RNA, 19 nt, Homo sapiens
  misc_RNA (1)...(19): siRNA sense strand
cuaucuagucgguggacaa

SEQ ID NO: 2431312 - RNA, 19 nt, Homo sapiens
  misc_RNA (1)...(19): siRNA sense strand
ugguaaggcacuuggauau

SEQ ID NO: 2431313 - RNA, 19 nt, Homo sapiens
  misc_RNA (1)...(19): siRNA sense strand
ucuucagagcauugagaaa

SEQ ID NO: 2431314 - RNA, 19 nt, Homo sapiens
  misc_RNA (1)...(19): siRNA sense strand
ccagauuauaccagggaga

SEQ ID NO: 2431315 - RNA, 19 nt, Homo sapiens
  misc_RNA (1)...(19): siRNA sense strand
ugaaagugaugaauggaca

SEQ ID NO: 2431316 - RNA, 19 nt, Homo sapiens
  misc_RNA (1)...(19): siRNA sense strand
gggaaaugcuacugccugu

SEQ ID NO: 2431317 - RNA, 19 nt, Homo sapiens
  misc_RNA (1)...(19): siRNA sense strand
acagcugacaugaaagaaa

SEQ ID NO: 2431318 - RNA, 19 nt, Homo sapiens
  misc_RNA (1)...(19): siRNA sense strand
uaacagugaaagugaugaa

SEQ ID NO: 2431319 - RNA, 19 nt, Homo sapiens
  misc_RNA (1)...(19): siRNA sense strand
augaauggacagaagguuu

SEQ ID NO: 2431320 - RNA, 19 nt, Homo sapiens
  misc_RNA (1)...(19): siRNA sense strand
gcuacaauuccgauaucaa

SEQ ID NO: 2431321 - RNA, 19 nt, Homo sapiens
  misc_RNA (1)...(19): siRNA sense strand
cuacaaucacagaaugcua

SEQ ID NO: 2431322 - RNA, 19 nt, Homo sapiens
  misc_RNA (1)...(19): siRNA sense strand
ucuaaaaggacaagaagau

SEQ ID NO: 2431323 - RNA, 19 nt, Homo sapiens
  misc_RNA (1)...(19): siRNA sense strand
gcuaugacccugaacaaaa

SEQ ID NO: 2431324 - RNA, 19 nt, Homo sapiens
  misc_RNA (1)...(19): siRNA sense strand
gaucuauaacagugaaagu

SEQ ID NO: 2431325 - RNA, 19 nt, Homo sapiens
  misc_RNA (1)...(19): siRNA sense strand
cuuuaggugguuacagaaa

SEQ ID NO: 2431326 - RNA, 19 nt, Homo sapiens
  misc_RNA (1)...(19): siRNA sense strand
ccaccaugauauucuggaa

SEQ ID NO: 2431327 - RNA, 19 nt, Homo sapiens
  misc_RNA (1)...(19): siRNA sense strand
ucccaugcauaaagagauu

SEQ ID NO: 2431328 - RNA, 19 nt, Homo sapiens
  misc_RNA (1)...(19): siRNA sense strand
ucuggaaggccuuguaaau

SEQ ID NO: 2431329 - RNA, 19 nt, Homo sapiens
  misc_RNA (1)...(19): siRNA sense strand
caguaaagaaggcuuguga

SEQ ID NO: 2431330 - RNA, 19 nt, Homo sapiens
  misc_RNA (1)...(19): siRNA sense strand
guggcaacaagaagaauuu

SEQ ID NO: 2431331 - RNA, 19 nt, Homo sapiens
  misc_RNA (1)...(19): siRNA sense strand
cggauaacauagaagcucu

SEQ ID NO: 2431332 - RNA, 19 nt, Homo sapiens
  misc_RNA (1)...(19): siRNA sense strand
cuggaugcauucagaacau

SEQ ID NO: 2431333 - RNA, 19 nt, Homo sapiens
  misc_RNA (1)...(19): siRNA sense strand
caaacaugauuaaaggugu

SEQ ID NO: 2431334 - RNA, 19 nt, Homo sapiens
  misc_RNA (1)...(19): siRNA sense strand
uugguaaggcacuuggaua

SEQ ID NO: 2431335 - RNA, 19 nt, Homo sapiens
  misc_RNA (1)...(19): siRNA sense strand
caaagaagcugccugcuca

SEQ ID NO: 2431336 - RNA, 19 nt, Homo sapiens
  misc_RNA (1)...(19): siRNA sense strand
gcuacaggacggauaacau

SEQ ID NO: 2431337 - RNA, 19 nt, Homo sapiens
  misc_RNA (1)...(19): siRNA sense strand
caguccacauccagaauau

SEQ ID NO: 2431338 - RNA, 19 nt, Homo sapiens
  misc_RNA (1)...(19): siRNA sense strand
augcuaugacccugaacaa

SEQ ID NO: 2431339 - RNA, 19 nt, Homo sapiens
  misc_RNA (1)...(19): siRNA sense strand
ugaacaaaaugaauggaga

SEQ ID NO: 2431340 - RNA, 19 nt, Homo sapiens
  misc_RNA (1)...(19): siRNA sense strand
gggaaauaguggguaaucu

SEQ ID NO: 2431341 - RNA, 19 nt, Homo sapiens
  misc_RNA (1)...(19): siRNA sense strand
auauagauccaguguacuu

SEQ ID NO: 2431342 - RNA, 19 nt, Homo sapiens
  misc_RNA (1)...(19): siRNA sense strand
cuaugguguuacauguuua

SEQ ID NO: 2431343 - RNA, 19 nt, Homo sapiens
  misc_RNA (1)...(19): siRNA sense strand
gcucaguuccguuugaaaa

SEQ ID NO: 2431344 - RNA, 19 nt, Homo sapiens
  misc_RNA (1)...(19): siRNA sense strand
auggaaaggaggauggagu

SEQ ID NO: 2431345 - RNA, 19 nt, Homo sapiens
  misc_RNA (1)...(19): siRNA sense strand
aaauaaaacucucuggcau

SEQ ID NO: 2431346 - RNA, 19 nt, Homo sapiens
  misc_RNA (1)...(19): siRNA sense strand
uguucaaaguuuaaggaag

SEQ ID NO: 2431347 - RNA, 19 nt, Homo sapiens
  misc_RNA (1)...(19): siRNA sense strand
ggauaacauagaagcucuu

SEQ ID NO: 2431348 - RNA, 19 nt, Homo sapiens
  misc_RNA (1)...(19): siRNA sense strand
agcagaaauaccagauuau

SEQ ID NO: 2431349 - RNA, 19 nt, Homo sapiens
  misc_RNA (1)...(19): siRNA sense strand
aguuuaaggaaguguggca

SEQ ID NO: 2431350 - RNA, 19 nt, Homo sapiens
  misc_RNA (1)...(19): siRNA sense strand
cuauaacagugaaagugau

SEQ ID NO: 2431351 - RNA, 19 nt, Homo sapiens
  misc_RNA (1)...(19): siRNA sense strand
uggacaaacuacaaucaca

SEQ ID NO: 2431352 - RNA, 19 nt, Homo sapiens
  misc_RNA (1)...(19): siRNA sense strand
cauuuuacuuggauggauu

SEQ ID NO: 2431353 - RNA, 19 nt, Homo sapiens
  misc_RNA (1)...(19): siRNA sense strand
cauaaagagauuucccaga

SEQ ID NO: 2431354 - RNA, 19 nt, Homo sapiens
  misc_RNA (1)...(19): siRNA sense strand
ggauucagggagcagaaau

SEQ ID NO: 2431355 - RNA, 19 nt, Homo sapiens
  misc_RNA (1)...(19): siRNA sense strand
ucuauaacagugaaaguga

SEQ ID NO: 2431356 - RNA, 19 nt, Homo sapiens
  misc_RNA (1)...(19): siRNA sense strand
ccuauugcaaacaugauua

SEQ ID NO: 2431357 - RNA, 19 nt, Homo sapiens
  misc_RNA (1)...(19): siRNA sense strand
cuucagagcauugagaaau

SEQ ID NO: 2431358 - RNA, 19 nt, Homo sapiens
  misc_RNA (1)...(19): siRNA sense strand
aggcaacacuacaggcaaa

SEQ ID NO: 2431359 - RNA, 19 nt, Homo sapiens
  misc_RNA (1)...(19): siRNA sense strand
aagaagaguuugagcggau

SEQ ID NO: 2431360 - RNA, 19 nt, Homo sapiens
  misc_RNA (1)...(19): siRNA sense strand
ccuuggaaucaaugaaaua

SEQ ID NO: 2431361 - RNA, 19 nt, Homo sapiens
  misc_RNA (1)...(19): siRNA sense strand
ccagaguaccuguggagaa

SEQ ID NO: 2431362 - RNA, 19 nt, Homo sapiens
  misc_RNA (1)...(19): siRNA sense strand
cgaucaaaucagaggcaga

SEQ ID NO: 2431363 - RNA, 19 nt, Homo sapiens
  misc_RNA (1)...(19): siRNA sense strand
aggaaaagaagaagaagaa

SEQ ID NO: 2431364 - RNA, 19 nt, Homo sapiens
  misc_RNA (1)...(19): siRNA sense strand
uggcugaccagaagggaaa

SEQ ID NO: 2431365 - RNA, 19 nt, Homo sapiens
  misc_RNA (1)...(19): siRNA sense strand
gguaaauacaguagugagu

SEQ ID NO: 2431366 - RNA, 19 nt, Homo sapiens
  misc_RNA (1)...(19): siRNA sense strand
ccacagaugccaagggcca

SEQ ID NO: 2431367 - RNA, 19 nt, Homo sapiens
  misc_RNA (1)...(19): siRNA sense strand
agcuauggcuagagaccaa

SEQ ID NO: 2431368 - RNA, 19 nt, Homo sapiens
  misc_RNA (1)...(19): siRNA sense strand
gcuucaagucacaguacaa

SEQ ID NO: 2431369 - RNA, 19 nt, Homo sapiens
  misc_RNA (1)...(19): siRNA sense strand
uggagaaagucgagcuguu

SEQ ID NO: 2431370 - RNA, 19 nt, Homo sapiens
  misc_RNA (1)...(19): siRNA sense strand
cuguaucggcagugaacaa

SEQ ID NO: 2431371 - RNA, 19 nt, Homo sapiens
  misc_RNA (1)...(19): siRNA sense strand
uaugaaaaccgcagauaaa

SEQ ID NO: 2431372 - RNA, 19 nt, Homo sapiens
  misc_RNA (1)...(19): siRNA sense strand
gaggaaaagaagaagaaga

SEQ ID NO: 2431373 - RNA, 19 nt, Homo sapiens
  misc_RNA (1)...(19): siRNA sense strand
ucaucaagcagguggcaau

SEQ ID NO: 2431374 - RNA, 19 nt, Homo sapiens
  misc_RNA (1)...(19): siRNA sense strand
ccggagugaagaagaguuu

SEQ ID NO: 2431375 - RNA, 19 nt, Homo sapiens
  misc_RNA (1)...(19): siRNA sense strand
agucacaguacaagcgcua

SEQ ID NO: 2431376 - RNA, 19 nt, Homo sapiens
  misc_RNA (1)...(19): siRNA sense strand
uggccaaucccaagauaau

SEQ ID NO: 2431377 - RNA, 19 nt, Homo sapiens
  misc_RNA (1)...(19): siRNA sense strand
gcggauucaccaagcacaa

SEQ ID NO: 2431378 - RNA, 19 nt, Homo sapiens
  misc_RNA (1)...(19): siRNA sense strand
cuugaaggucuuaagggaa

SEQ ID NO: 2431379 - RNA, 19 nt, Homo sapiens
  misc_RNA (1)...(19): siRNA sense strand
gaguaaaugcuggcaggaa

SEQ ID NO: 2431380 - RNA, 19 nt, Homo sapiens
  misc_RNA (1)...(19): siRNA sense strand
aaucagaggcagaggaccu

SEQ ID NO: 2431381 - RNA, 19 nt, Homo sapiens
  misc_RNA (1)...(19): siRNA sense strand
ccaagauaaugaaaaggaa

SEQ ID NO: 2431382 - RNA, 19 nt, Homo sapiens
  misc_RNA (1)...(19): siRNA sense strand
ggaucuaccugcaucguga

SEQ ID NO: 2431383 - RNA, 19 nt, Homo sapiens
  misc_RNA (1)...(19): siRNA sense strand
ccgaggaccuucuggagga

SEQ ID NO: 2431384 - RNA, 19 nt, Homo sapiens
  misc_RNA (1)...(19): siRNA sense strand
ggcuagagaccaaagauca

SEQ ID NO: 2431385 - RNA, 19 nt, Homo sapiens
  misc_RNA (1)...(19): siRNA sense strand
agaccaaagaucaggccuu

SEQ ID NO: 2431386 - RNA, 19 nt, Homo sapiens
  misc_RNA (1)...(19): siRNA sense strand
acuugaaggucuuaaggga

SEQ ID NO: 2431387 - RNA, 19 nt, Homo sapiens
  misc_RNA (1)...(19): siRNA sense strand
ucaccagcacucagguaaa

SEQ ID NO: 2431388 - RNA, 19 nt, Homo sapiens
  misc_RNA (1)...(19): siRNA sense strand
ccagguuaccacagucaaa

SEQ ID NO: 2431389 - RNA, 19 nt, Homo sapiens
  misc_RNA (1)...(19): siRNA sense strand
aguaaaugcuggcaggaag

SEQ ID NO: 2431390 - RNA, 19 nt, Homo sapiens
  misc_RNA (1)...(19): siRNA sense strand
cguuggauuuacaagaaca

SEQ ID NO: 2431391 - RNA, 19 nt, Homo sapiens
  misc_RNA (1)...(19): siRNA sense strand
acaccugucccucggguaa

SEQ ID NO: 2431392 - RNA, 19 nt, Homo sapiens
  misc_RNA (1)...(19): siRNA sense strand
uucaggagcaggagcguua

SEQ ID NO: 2431393 - RNA, 19 nt, Homo sapiens
  misc_RNA (1)...(19): siRNA sense strand
cagugaagggcguguuuga

SEQ ID NO: 2431394 - RNA, 19 nt, Homo sapiens
  misc_RNA (1)...(19): siRNA sense strand
ucgacugccuaauggagaa

SEQ ID NO: 2431395 - RNA, 19 nt, Homo sapiens
  misc_RNA (1)...(19): siRNA sense strand
aaaagaucccugugugaaa

SEQ ID NO: 2431396 - RNA, 19 nt, Homo sapiens
  misc_RNA (1)...(19): siRNA sense strand
guaaggauguauugcgucu

SEQ ID NO: 2431397 - RNA, 19 nt, Homo sapiens
  misc_RNA (1)...(19): siRNA sense strand
caaugaagggcaagagcgu

SEQ ID NO: 2431398 - RNA, 19 nt, Homo sapiens
  misc_RNA (1)...(19): siRNA sense strand
cguuacagguauagccaac

SEQ ID NO: 2431399 - RNA, 19 nt, Homo sapiens
  misc_RNA (1)...(19): siRNA sense strand
ggguaagaacugacuaugu

SEQ ID NO: 2431400 - RNA, 19 nt, Homo sapiens
  misc_RNA (1)...(19): siRNA sense strand
ugaagggcguguuugacaa

SEQ ID NO: 2431401 - RNA, 19 nt, Homo sapiens
  misc_RNA (1)...(19): siRNA sense strand
gaaauacgacauuggacga

SEQ ID NO: 2431402 - RNA, 19 nt, Homo sapiens
  misc_RNA (1)...(19): siRNA sense strand
gggaagugaaagaggagug

SEQ ID NO: 2431403 - RNA, 19 nt, Homo sapiens
  misc_RNA (1)...(19): siRNA sense strand
ggaaaagaagaagaagaaa

SEQ ID NO: 2431404 - RNA, 19 nt, Homo sapiens
  misc_RNA (1)...(19): siRNA sense strand
ccacauuggccaaguccca

SEQ ID NO: 2431405 - RNA, 19 nt, Homo sapiens
  misc_RNA (1)...(19): siRNA sense strand
cgacauuggacgaaagcug

SEQ ID NO: 2431406 - RNA, 19 nt, Homo sapiens
  misc_RNA (1)...(19): siRNA sense strand
cggacaugauggccacauu

SEQ ID NO: 2431407 - RNA, 19 nt, Homo sapiens
  misc_RNA (1)...(19): siRNA sense strand
ccuuauaugacuuggcugu

SEQ ID NO: 2431408 - RNA, 19 nt, Homo sapiens
  misc_RNA (1)...(19): siRNA sense strand
ggguaaggauguauugcgu

SEQ ID NO: 2431409 - RNA, 19 nt, Homo sapiens
  misc_RNA (1)...(19): siRNA sense strand
ccgcagauaaaguagaacu

SEQ ID NO: 2431410 - RNA, 19 nt, Homo sapiens
  misc_RNA (1)...(19): siRNA sense strand
gggacagugaccugaagau

SEQ ID NO: 2431411 - RNA, 19 nt, Homo sapiens
  misc_RNA (1)...(19): siRNA sense strand
acaaggagaccucgcucaa

SEQ ID NO: 2431412 - RNA, 19 nt, Homo sapiens
  misc_RNA (1)...(19): siRNA sense strand
guggcugaccagaagggaa

SEQ ID NO: 2431413 - RNA, 19 nt, Homo sapiens
  misc_RNA (1)...(19): siRNA sense strand
gugcagggacugggaguga

SEQ ID NO: 2431414 - RNA, 19 nt, Homo sapiens
  misc_RNA (1)...(19): siRNA sense strand
gagaguauuaagagggaaa

SEQ ID NO: 2431415 - RNA, 19 nt, Homo sapiens
  misc_RNA (1)...(19): siRNA sense strand
gggaaauggaagugugcaa

SEQ ID NO: 2431416 - RNA, 19 nt, Homo sapiens
  misc_RNA (1)...(19): siRNA sense strand
gagcaaaucaugaaggaca

SEQ ID NO: 2431417 - RNA, 19 nt, Homo sapiens
  misc_RNA (1)...(19): siRNA sense strand
uggaaugacacgacgaaau

SEQ ID NO: 2431418 - RNA, 19 nt, Homo sapiens
  misc_RNA (1)...(19): siRNA sense strand
ccuuacaggcagagagguu

SEQ ID NO: 2431419 - RNA, 19 nt, Homo sapiens
  misc_RNA (1)...(19): siRNA sense strand
gggaauugcuccagccagu

SEQ ID NO: 2431420 - RNA, 19 nt, Homo sapiens
  misc_RNA (1)...(19): siRNA sense strand
gaggugaaguauuugacua

SEQ ID NO: 2431421 - RNA, 19 nt, Homo sapiens
  misc_RNA (1)...(19): siRNA sense strand
uagauauuauggugggaau

SEQ ID NO: 2431422 - RNA, 19 nt, Homo sapiens
  misc_RNA (1)...(19): siRNA sense strand
aaguggaggugaaguauuu

SEQ ID NO: 2431423 - RNA, 19 nt, Homo sapiens
  misc_RNA (1)...(19): siRNA sense strand
accuaaaggaacugagaga

SEQ ID NO: 2431424 - RNA, 19 nt, Homo sapiens
  misc_RNA (1)...(19): siRNA sense strand
acgcggcacucuagagcaa

SEQ ID NO: 2431425 - RNA, 19 nt, Homo sapiens
  misc_RNA (1)...(19): siRNA sense strand
cgaugaaaucacagcuaca

SEQ ID NO: 2431426 - RNA, 19 nt, Homo sapiens
  misc_RNA (1)...(19): siRNA sense strand
guaaaauuggcaagacaua

SEQ ID NO: 2431427 - RNA, 19 nt, Homo sapiens
  misc_RNA (1)...(19): siRNA sense strand
augaagaagaugaacucaa

SEQ ID NO: 2431428 - RNA, 19 nt, Homo sapiens
  misc_RNA (1)...(19): siRNA sense strand
uggcagugcuguuggagga

SEQ ID NO: 2431429 - RNA, 19 nt, Homo sapiens
  misc_RNA (1)...(19): siRNA sense strand
cauggcaggaugaaggaaa

SEQ ID NO: 2431430 - RNA, 19 nt, Homo sapiens
  misc_RNA (1)...(19): siRNA sense strand
auaugcaaguggaggugaa

SEQ ID NO: 2431431 - RNA, 19 nt, Homo sapiens
  misc_RNA (1)...(19): siRNA sense strand
caagaaauaugacgggcca

SEQ ID NO: 2431432 - RNA, 19 nt, Homo sapiens
  misc_RNA (1)...(19): siRNA sense strand
aggugaaguauuugacuau

SEQ ID NO: 2431433 - RNA, 19 nt, Homo sapiens
  misc_RNA (1)...(19): siRNA sense strand
augaaggacagguggauca

SEQ ID NO: 2431434 - RNA, 19 nt, Homo sapiens
  misc_RNA (1)...(19): siRNA sense strand
cggauauuccugaacgcaa

SEQ ID NO: 2431435 - RNA, 19 nt, Homo sapiens
  misc_RNA (1)...(19): siRNA sense strand
gagagaguauuaagaggga

SEQ ID NO: 2431436 - RNA, 19 nt, Homo sapiens
  misc_RNA (1)...(19): siRNA sense strand
gggcaaaaccuaaaggaac

SEQ ID NO: 2431437 - RNA, 19 nt, Homo sapiens
  misc_RNA (1)...(19): siRNA sense strand
ggauauucacaagaagaaa

SEQ ID NO: 2431438 - RNA, 19 nt, Homo sapiens
  misc_RNA (1)...(19): siRNA sense strand
ggugaaugaacgagacacu

SEQ ID NO: 2431439 - RNA, 19 nt, Homo sapiens
  misc_RNA (1)...(19): siRNA sense strand
ggcaaaaccuaaaggaacu

SEQ ID NO: 2431440 - RNA, 19 nt, Homo sapiens
  misc_RNA (1)...(19): siRNA sense strand
gggacaugaugcgggaaau

SEQ ID NO: 2431441 - RNA, 19 nt, Homo sapiens
  misc_RNA (1)...(19): siRNA sense strand
agacauauccuuacaggca

SEQ ID NO: 2431442 - RNA, 19 nt, Homo sapiens
  misc_RNA (1)...(19): siRNA sense strand
ggaauaugcaaguggaggu

SEQ ID NO: 2431443 - RNA, 19 nt, Homo sapiens
  misc_RNA (1)...(19): siRNA sense strand
ugcaaguggaggugaagua

SEQ ID NO: 2431444 - RNA, 19 nt, Homo sapiens
  misc_RNA (1)...(19): siRNA sense strand
aaaggaacugagagagaga

SEQ ID NO: 2431445 - RNA, 19 nt, Homo sapiens
  misc_RNA (1)...(19): siRNA sense strand
uguuagaugccgauaugaa

SEQ ID NO: 2431446 - RNA, 19 nt, Homo sapiens
  misc_RNA (1)...(19): siRNA sense strand
aaguaaaauuggcaagaca

SEQ ID NO: 2431447 - RNA, 19 nt, Homo sapiens
  misc_RNA (1)...(19): siRNA sense strand
ccggaaaucaaguggcagu

SEQ ID NO: 2431448 - RNA, 19 nt, Homo sapiens
  misc_RNA (1)...(19): siRNA sense strand
ggggacaugaugcgggaaa

SEQ ID NO: 2431449 - RNA, 19 nt, Homo sapiens
  misc_RNA (1)...(19): siRNA sense strand
gcgacuaugagcagaggga

SEQ ID NO: 2431450 - RNA, 19 nt, Homo sapiens
  misc_RNA (1)...(19): siRNA sense strand
ucuaccuaaucauggaaua

SEQ ID NO: 2431451 - RNA, 19 nt, Homo sapiens
  misc_RNA (1)...(19): siRNA sense strand
acuuauguuugcagugaga

SEQ ID NO: 2431452 - RNA, 19 nt, Homo sapiens
  misc_RNA (1)...(19): siRNA sense strand
guuugcagugagagaacua

SEQ ID NO: 2431453 - RNA, 19 nt, Homo sapiens
  misc_RNA (1)...(19): siRNA sense strand
gcuagacaucucagaccaa

SEQ ID NO: 2431454 - RNA, 19 nt, Homo sapiens
  misc_RNA (1)...(19): siRNA sense strand
gagaaaaucuucagagcug

SEQ ID NO: 2431455 - RNA, 19 nt, Homo sapiens
  misc_RNA (1)...(19): siRNA sense strand
gcggcacucuagagcaaau

SEQ ID NO: 2431456 - RNA, 19 nt, Homo sapiens
  misc_RNA (1)...(19): siRNA sense strand
gagcuggaugcuagugauu

SEQ ID NO: 2431457 - RNA, 19 nt, Homo sapiens
  misc_RNA (1)...(19): siRNA sense strand
agauagugaccucaaagaa

SEQ ID NO: 2431458 - RNA, 19 nt, Homo sapiens
  misc_RNA (1)...(19): siRNA sense strand
ugaaguuauucgaagucau

SEQ ID NO: 2431459 - RNA, 19 nt, Homo sapiens
  misc_RNA (1)...(19): siRNA sense strand
uuauggugggaaugggaua

SEQ ID NO: 2431460 - RNA, 19 nt, Homo sapiens
  misc_RNA (1)...(19): siRNA sense strand
cgccaauaacugcgacuau

SEQ ID NO: 2431461 - RNA, 19 nt, Homo sapiens
  misc_RNA (1)...(19): siRNA sense strand
cuguuggaggaaagggaau

SEQ ID NO: 2431462 - RNA, 19 nt, Homo sapiens
  misc_RNA (1)...(19): siRNA sense strand
aaacaaucggcaaggggaa

SEQ ID NO: 2431463 - RNA, 19 nt, Homo sapiens
  misc_RNA (1)...(19): siRNA sense strand
ucgaagucauugaaacuga

SEQ ID NO: 2431464 - RNA, 19 nt, Homo sapiens
  misc_RNA (1)...(19): siRNA sense strand
cuucagagcuggaugcuag

SEQ ID NO: 2431465 - RNA, 19 nt, Homo sapiens
  misc_RNA (1)...(19): siRNA sense strand
ccuaguaguaacacagcau

SEQ ID NO: 2431466 - RNA, 19 nt, Homo sapiens
  misc_RNA (1)...(19): siRNA sense strand
gcuucaacacacaguauca

SEQ ID NO: 2431467 - RNA, 19 nt, Homo sapiens
  misc_RNA (1)...(19): siRNA sense strand
aaacaaagaagcaaagccu

SEQ ID NO: 2431468 - RNA, 19 nt, Homo sapiens
  misc_RNA (1)...(19): siRNA sense strand
gcaaaaguaaaauuggcaa

SEQ ID NO: 2431469 - RNA, 19 nt, Homo sapiens
  misc_RNA (1)...(19): siRNA sense strand
aggaaagggaauugcucca

SEQ ID NO: 2431470 - RNA, 19 nt, Homo sapiens
  misc_RNA (1)...(19): siRNA sense strand
gcaugauauggaaguguau

SEQ ID NO: 2431471 - RNA, 19 nt, Homo sapiens
  misc_RNA (1)...(19): siRNA sense strand
ccaaggauggagaggagga

SEQ ID NO: 2431472 - RNA, 19 nt, Homo sapiens
  misc_RNA (1)...(19): siRNA sense strand
auggagaggaggagagucu

SEQ ID NO: 2431473 - RNA, 19 nt, Homo sapiens
  misc_RNA (1)...(19): siRNA sense strand
aaucaguuuccaagcuaaa

SEQ ID NO: 2431474 - RNA, 19 nt, Homo sapiens
  misc_RNA (1)...(19): siRNA sense strand
ccuaaagaguucagugcag

SEQ ID NO: 2431475 - RNA, 19 nt, Homo sapiens
  misc_RNA (1)...(19): siRNA sense strand
ccaagcuaaaccagggcaa

SEQ ID NO: 2431476 - RNA, 19 nt, Homo sapiens
  misc_RNA (1)...(19): siRNA sense strand
agaugauaccaaaccuaaa

SEQ ID NO: 2431477 - RNA, 19 nt, Homo sapiens
  misc_RNA (1)...(19): siRNA sense strand
agucagaacagcaacagau

SEQ ID NO: 2431478 - RNA, 19 nt, Homo sapiens
  misc_RNA (1)...(19): siRNA sense strand
ccuaaaaccacaugugcau

SEQ ID NO: 2431479 - RNA, 19 nt, Homo sapiens
  misc_RNA (1)...(19): siRNA sense strand
ucucaaagccagugaucuc

SEQ ID NO: 2431480 - RNA, 19 nt, Homo sapiens
  misc_RNA (1)...(19): siRNA sense strand
ugucaggcuacauggagua

SEQ ID NO: 2431481 - RNA, 19 nt, Homo sapiens
  misc_RNA (1)...(19): siRNA sense strand
gguuccaguugaugggcaa

SEQ ID NO: 2431482 - RNA, 19 nt, Homo sapiens
  misc_RNA (1)...(19): siRNA sense strand
auuuagaagaagagcugaa

SEQ ID NO: 2431483 - RNA, 19 nt, Homo sapiens
  misc_RNA (1)...(19): siRNA sense strand
ggugaauacaggugccaga

SEQ ID NO: 2431484 - RNA, 19 nt, Homo sapiens
  misc_RNA (1)...(19): siRNA sense strand
cugccacagaggauggaaa

SEQ ID NO: 2431485 - RNA, 19 nt, Homo sapiens
  misc_RNA (1)...(19): siRNA sense strand
ugguguacaaugugcuuua

SEQ ID NO: 2431486 - RNA, 19 nt, Homo sapiens
  misc_RNA (1)...(19): siRNA sense strand
aagaagaacagcugcagga

SEQ ID NO: 2431487 - RNA, 19 nt, Homo sapiens
  misc_RNA (1)...(19): siRNA sense strand
uuacuaucgaaauggcaaa

SEQ ID NO: 2431488 - RNA, 19 nt, Homo sapiens
  misc_RNA (1)...(19): siRNA sense strand
agaugcaacuggagagcuu

SEQ ID NO: 2431489 - RNA, 19 nt, Homo sapiens
  misc_RNA (1)...(19): siRNA sense strand
cugagcaagcagauggaaa

SEQ ID NO: 2431490 - RNA, 19 nt, Homo sapiens
  misc_RNA (1)...(19): siRNA sense strand
caaagaaagggaaggggaa

SEQ ID NO: 2431491 - RNA, 19 nt, Homo sapiens
  misc_RNA (1)...(19): siRNA sense strand
ccaaaaggguugaagcuga

SEQ ID NO: 2431492 - RNA, 19 nt, Homo sapiens
  misc_RNA (1)...(19): siRNA sense strand
gaccaaacuucaaaggcau

SEQ ID NO: 2431493 - RNA, 19 nt, Homo sapiens
  misc_RNA (1)...(19): siRNA sense strand
aagaaacaacaauggacua

SEQ ID NO: 2431494 - RNA, 19 nt, Homo sapiens
  misc_RNA (1)...(19): siRNA sense strand
agaccaaacuucaaaggca

SEQ ID NO: 2431495 - RNA, 19 nt, Homo sapiens
  misc_RNA (1)...(19): siRNA sense strand
ggugagaccagaugcaaaa

SEQ ID NO: 2431496 - RNA, 19 nt, Homo sapiens
  misc_RNA (1)...(19): siRNA sense strand
acuauaaaggcacgggcua

SEQ ID NO: 2431497 - RNA, 19 nt, Homo sapiens
  misc_RNA (1)...(19): siRNA sense strand
acacaugcguggaagucau

SEQ ID NO: 2431498 - RNA, 19 nt, Homo sapiens
  misc_RNA (1)...(19): siRNA sense strand
ugagcaagcagauggaaaa

SEQ ID NO: 2431499 - RNA, 19 nt, Homo sapiens
  misc_RNA (1)...(19): siRNA sense strand
aagaauacugugaauggaa

SEQ ID NO: 2431500 - RNA, 19 nt, Homo sapiens
  misc_RNA (1)...(19): siRNA sense strand
gcacuuugcagguugguga

SEQ ID NO: 2431501 - RNA, 19 nt, Homo sapiens
  misc_RNA (1)...(19): siRNA sense strand
ccagaauugcuaaggcuga

SEQ ID NO: 2431502 - RNA, 19 nt, Homo sapiens
  misc_RNA (1)...(19): siRNA sense strand
aagaaagggaaggggaaaa

SEQ ID NO: 2431503 - RNA, 19 nt, Homo sapiens
  misc_RNA (1)...(19): siRNA sense strand
agauggaaaagguggaaau

SEQ ID NO: 2431504 - RNA, 19 nt, Homo sapiens
  misc_RNA (1)...(19): siRNA sense strand
uugggaaaucucaggcuaa

SEQ ID NO: 2431505 - RNA, 19 nt, Homo sapiens
  misc_RNA (1)...(19): siRNA sense strand
gccaacuccacuagcaaua

SEQ ID NO: 2431506 - RNA, 19 nt, Homo sapiens
  misc_RNA (1)...(19): siRNA sense strand
ccaaaguuuccuaugugaa

SEQ ID NO: 2431507 - RNA, 19 nt, Homo sapiens
  misc_RNA (1)...(19): siRNA sense strand
uggaaaacccauugaaguu

SEQ ID NO: 2431508 - RNA, 19 nt, Homo sapiens
  misc_RNA (1)...(19): siRNA sense strand
agguggaaauguggcuaaa

SEQ ID NO: 2431509 - RNA, 19 nt, Homo sapiens
  misc_RNA (1)...(19): siRNA sense strand
aagccuauucuaaggaaaa

SEQ ID NO: 2431510 - RNA, 19 nt, Homo sapiens
  misc_RNA (1)...(19): siRNA sense strand
aaagaaagggaaggggaaa

SEQ ID NO: 2431511 - RNA, 19 nt, Homo sapiens
  misc_RNA (1)...(19): siRNA sense strand
gaauacugugaauggaaca

SEQ ID NO: 2431512 - RNA, 19 nt, Homo sapiens
  misc_RNA (1)...(19): siRNA sense strand
auuaugacugcuauggaaa

SEQ ID NO: 2431513 - RNA, 19 nt, Homo sapiens
  misc_RNA (1)...(19): siRNA sense strand
uugaacagguuauugguca

SEQ ID NO: 2431514 - RNA, 19 nt, Homo sapiens
  misc_RNA (1)...(19): siRNA sense strand
caagaaacaacaauggacu

SEQ ID NO: 2431515 - RNA, 19 nt, Homo sapiens
  misc_RNA (1)...(19): siRNA sense strand
ggaugaaauuaaaaggcua

SEQ ID NO: 2431516 - RNA, 19 nt, Homo sapiens
  misc_RNA (1)...(19): siRNA sense strand
ggaaagagauuuaagaagc

SEQ ID NO: 2431517 - RNA, 19 nt, Homo sapiens
  misc_RNA (1)...(19): siRNA sense strand
ugaagaugaugguggggaa

SEQ ID NO: 2431518 - RNA, 19 nt, Homo sapiens
  misc_RNA (1)...(19): siRNA sense strand
ccuuuaguacagcgaguaa

SEQ ID NO: 2431519 - RNA, 19 nt, Homo sapiens
  misc_RNA (1)...(19): siRNA sense strand
guucagugucaaaggagau

SEQ ID NO: 2431520 - RNA, 19 nt, Homo sapiens
  misc_RNA (1)...(19): siRNA sense strand
aaggagauaaggagcagaa

SEQ ID NO: 2431521 - RNA, 19 nt, Homo sapiens
  misc_RNA (1)...(19): siRNA sense strand
aagaauucauugagggcgu

SEQ ID NO: 2431522 - RNA, 19 nt, Homo sapiens
  misc_RNA (1)...(19): siRNA sense strand
acacagaugggaauggaga

SEQ ID NO: 2431523 - RNA, 19 nt, Homo sapiens
  misc_RNA (1)...(19): siRNA sense strand
ucaaaggagauaaggagca

SEQ ID NO: 2431524 - RNA, 19 nt, Homo sapiens
  misc_RNA (1)...(19): siRNA sense strand
augcagauaaggauggaga

SEQ ID NO: 2431525 - RNA, 19 nt, Homo sapiens
  misc_RNA (1)...(19): siRNA sense strand
aggaaagagauuuaagaag

SEQ ID NO: 2431526 - RNA, 19 nt, Homo sapiens
  misc_RNA (1)...(19): siRNA sense strand
cuuugaugcggaugaaauu

SEQ ID NO: 2431527 - RNA, 19 nt, Homo sapiens
  misc_RNA (1)...(19): siRNA sense strand
acuuugaugcggaugaaau

SEQ ID NO: 2431528 - RNA, 19 nt, Homo sapiens
  misc_RNA (1)...(19): siRNA sense strand
acauggauaaagauggcua

SEQ ID NO: 2431529 - RNA, 19 nt, Homo sapiens
  misc_RNA (1)...(19): siRNA sense strand
agauacacaguuacagcaa

SEQ ID NO: 2431530 - RNA, 19 nt, Homo sapiens
  misc_RNA (1)...(19): siRNA sense strand
gcgcuaaaggacugggaga

SEQ ID NO: 2431531 - RNA, 19 nt, Homo sapiens
  misc_RNA (1)...(19): siRNA sense strand
cgcuaaaggacugggagaa

SEQ ID NO: 2431532 - RNA, 19 nt, Homo sapiens
  misc_RNA (1)...(19): siRNA sense strand
aguacgaacuggacgcuca

SEQ ID NO: 2431533 - RNA, 19 nt, Homo sapiens
  misc_RNA (1)...(19): siRNA sense strand
aguacgugcagcaggagaa

SEQ ID NO: 2431534 - RNA, 19 nt, Homo sapiens
  misc_RNA (1)...(19): siRNA sense strand
gugccaucuuccugccaua

SEQ ID NO: 2431535 - RNA, 19 nt, Homo sapiens
  misc_RNA (1)...(19): siRNA sense strand
gcaccuaccgcaagcgcau

SEQ ID NO: 2431536 - RNA, 19 nt, Homo sapiens
  misc_RNA (1)...(19): siRNA sense strand
cggcagaagagcccagcuu

SEQ ID NO: 2431537 - RNA, 19 nt, Homo sapiens
  misc_RNA (1)...(19): siRNA sense strand
agcgagagucgguggccaa

SEQ ID NO: 2431538 - RNA, 19 nt, Homo sapiens
  misc_RNA (1)...(19): siRNA sense strand
gggucuacgagaacgucaa

SEQ ID NO: 2431539 - RNA, 19 nt, Homo sapiens
  misc_RNA (1)...(19): siRNA sense strand
ucaaguacgugcagcagga

SEQ ID NO: 2431540 - RNA, 19 nt, Homo sapiens
  misc_RNA (1)...(19): siRNA sense strand
agaucgaggacauggacga

SEQ ID NO: 2431541 - RNA, 19 nt, Homo sapiens
  misc_RNA (1)...(19): siRNA sense strand
guuaaaugggcuaaggaaa

SEQ ID NO: 2431542 - RNA, 19 nt, Homo sapiens
  misc_RNA (1)...(19): siRNA sense strand
auucaaagucguagucaaa

SEQ ID NO: 2431543 - RNA, 19 nt, Homo sapiens
  misc_RNA (1)...(19): siRNA sense strand
gagaaaguuaaaugggcua

SEQ ID NO: 2431544 - RNA, 19 nt, Homo sapiens
  misc_RNA (1)...(19): siRNA sense strand
agaaaaggagcuuggaaaa

SEQ ID NO: 2431545 - RNA, 19 nt, Homo sapiens
  misc_RNA (1)...(19): siRNA sense strand
cauucaaagucguagucaa

SEQ ID NO: 2431546 - RNA, 19 nt, Homo sapiens
  misc_RNA (1)...(19): siRNA sense strand
agaaauaugccgagcgcca

SEQ ID NO: 2431547 - RNA, 19 nt, Homo sapiens
  misc_RNA (1)...(19): siRNA sense strand
uuaaaugggcuaaggaaaa

SEQ ID NO: 2431548 - RNA, 19 nt, Homo sapiens
  misc_RNA (1)...(19): siRNA sense strand
augaagaagccaagaagau

SEQ ID NO: 2431549 - RNA, 19 nt, Homo sapiens
  misc_RNA (1)...(19): siRNA sense strand
ccgaaguacgugauggaau

SEQ ID NO: 2431550 - RNA, 19 nt, Homo sapiens
  misc_RNA (1)...(19): siRNA sense strand
aagaaaaggagcuuggaaa

SEQ ID NO: 2431551 - RNA, 19 nt, Homo sapiens
  misc_RNA (1)...(19): siRNA sense strand
cuaaagaguugguccggau

SEQ ID NO: 2431552 - RNA, 19 nt, Homo sapiens
  misc_RNA (1)...(19): siRNA sense strand
ccuuuauggugaugaacau

SEQ ID NO: 2431553 - RNA, 19 nt, Homo sapiens
  misc_RNA (1)...(19): siRNA sense strand
cgaaaggaccaguguacca

SEQ ID NO: 2431554 - RNA, 19 nt, Homo sapiens
  misc_RNA (1)...(19): siRNA sense strand
gaaggacaguugauggcua

SEQ ID NO: 2431555 - RNA, 19 nt, Homo sapiens
  misc_RNA (1)...(19): siRNA sense strand
gaucaauaaaacagagaga

SEQ ID NO: 2431556 - RNA, 19 nt, Homo sapiens
  misc_RNA (1)...(19): siRNA sense strand
gugaugaacauguggcuca

SEQ ID NO: 2431557 - RNA, 19 nt, Homo sapiens
  misc_RNA (1)...(19): siRNA sense strand
ggaaacacagauugcaaaa

SEQ ID NO: 2431558 - RNA, 19 nt, Homo sapiens
  misc_RNA (1)...(19): siRNA sense strand
gguccuucucccagauuua

SEQ ID NO: 2431559 - RNA, 19 nt, Homo sapiens
  misc_RNA (1)...(19): siRNA sense strand
aguuaaaugggcuaaggaa

SEQ ID NO: 2431560 - RNA, 19 nt, Homo sapiens
  misc_RNA (1)...(19): siRNA sense strand
aggaaacacagauugcaaa

SEQ ID NO: 2431561 - RNA, 19 nt, Homo sapiens
  misc_RNA (1)...(19): siRNA sense strand
ugcaggaauuacaggauau

SEQ ID NO: 2431562 - RNA, 19 nt, Homo sapiens
  misc_RNA (1)...(19): siRNA sense strand
aaggaaacacagauugcaa

SEQ ID NO: 2431563 - RNA, 19 nt, Homo sapiens
  misc_RNA (1)...(19): siRNA sense strand
guaugagagaggugccauu

SEQ ID NO: 2431564 - RNA, 19 nt, Homo sapiens
  misc_RNA (1)...(19): siRNA sense strand
gagauuggcccuuggagca

SEQ ID NO: 2431565 - RNA, 19 nt, Homo sapiens
  misc_RNA (1)...(19): siRNA sense strand
cuucagagguagagacagc

SEQ ID NO: 2431566 - RNA, 19 nt, Homo sapiens
  misc_RNA (1)...(19): siRNA sense strand
cuacauggcacuagaaccu

SEQ ID NO: 2431567 - RNA, 19 nt, Homo sapiens
  misc_RNA (1)...(19): siRNA sense strand
aagccaagaagauugcaaa

SEQ ID NO: 2431568 - RNA, 19 nt, Homo sapiens
  misc_RNA (1)...(19): siRNA sense strand
gcuaaaagaaguccccaaa

SEQ ID NO: 2431569 - RNA, 19 nt, Homo sapiens
  misc_RNA (1)...(19): siRNA sense strand
aauaaaacagagagagcuu

SEQ ID NO: 2431570 - RNA, 19 nt, Homo sapiens
  misc_RNA (1)...(19): siRNA sense strand
aguacgugauggaauggaa

SEQ ID NO: 2431571 - RNA, 19 nt, Homo sapiens
  misc_RNA (1)...(19): siRNA sense strand
gggcuaaggaaaaugauga

SEQ ID NO: 2431572 - RNA, 19 nt, Homo sapiens
  misc_RNA (1)...(19): siRNA sense strand
cugagugauuuauuagaga

SEQ ID NO: 2431573 - RNA, 19 nt, Homo sapiens
  misc_RNA (1)...(19): siRNA sense strand
agagaaaguuaaaugggcu

SEQ ID NO: 2431574 - RNA, 19 nt, Homo sapiens
  misc_RNA (1)...(19): siRNA sense strand
cggagaucuuuagggaaau

SEQ ID NO: 2431575 - RNA, 19 nt, Homo sapiens
  misc_RNA (1)...(19): siRNA sense strand
guaucaaguaaauguggau

SEQ ID NO: 2431576 - RNA, 19 nt, Homo sapiens
  misc_RNA (1)...(19): siRNA sense strand
ugacgauagagguccuuua

SEQ ID NO: 2431577 - RNA, 19 nt, Homo sapiens
  misc_RNA (1)...(19): siRNA sense strand
ccguaaagccacaaggauu

SEQ ID NO: 2431578 - RNA, 19 nt, Homo sapiens
  misc_RNA (1)...(19): siRNA sense strand
gggaaucagcagaggcauu

SEQ ID NO: 2431579 - RNA, 19 nt, Homo sapiens
  misc_RNA (1)...(19): siRNA sense strand
ucaagaacuaagaggaauu

SEQ ID NO: 2431580 - RNA, 19 nt, Homo sapiens
  misc_RNA (1)...(19): siRNA sense strand
aggcacaggaagacauuaa

SEQ ID NO: 2431581 - RNA, 19 nt, Homo sapiens
  misc_RNA (1)...(19): siRNA sense strand
cuaugaaagggauggagaa

SEQ ID NO: 2431582 - RNA, 19 nt, Homo sapiens
  misc_RNA (1)...(19): siRNA sense strand
gguagugguucaagaaaau

SEQ ID NO: 2431583 - RNA, 19 nt, Homo sapiens
  misc_RNA (1)...(19): siRNA sense strand
aggauuuaauguggagaaa

SEQ ID NO: 2431584 - RNA, 19 nt, Homo sapiens
  misc_RNA (1)...(19): siRNA sense strand
agguagugguucaagaaaa

SEQ ID NO: 2431585 - RNA, 19 nt, Homo sapiens
  misc_RNA (1)...(19): siRNA sense strand
gugaaauagaaacaagcaa

SEQ ID NO: 2431586 - RNA, 19 nt, Homo sapiens
  misc_RNA (1)...(19): siRNA sense strand
cuuggaagaauuugagauu

SEQ ID NO: 2431587 - RNA, 19 nt, Homo sapiens
  misc_RNA (1)...(19): siRNA sense strand
cugagcagcauuaagguaa

SEQ ID NO: 2431588 - RNA, 19 nt, Homo sapiens
  misc_RNA (1)...(19): siRNA sense strand
ucuagaacagggaggaauu

SEQ ID NO: 2431589 - RNA, 19 nt, Homo sapiens
  misc_RNA (1)...(19): siRNA sense strand
gcuaugaaagggauggaga

SEQ ID NO: 2431590 - RNA, 19 nt, Homo sapiens
  misc_RNA (1)...(19): siRNA sense strand
caggauuuaauguggagaa

SEQ ID NO: 2431591 - RNA, 19 nt, Homo sapiens
  misc_RNA (1)...(19): siRNA sense strand
cugccagcacugagaggaa

SEQ ID NO: 2431592 - RNA, 19 nt, Homo sapiens
  misc_RNA (1)...(19): siRNA sense strand
cuuugaaugcuguccaaua

SEQ ID NO: 2431593 - RNA, 19 nt, Homo sapiens
  misc_RNA (1)...(19): siRNA sense strand
guacccaggcacaggaaga

SEQ ID NO: 2431594 - RNA, 19 nt, Homo sapiens
  misc_RNA (1)...(19): siRNA sense strand
aaacguaaucacagcucaa

SEQ ID NO: 2431595 - RNA, 19 nt, Homo sapiens
  misc_RNA (1)...(19): siRNA sense strand
ugcuauggcuacagugaau

SEQ ID NO: 2431596 - RNA, 19 nt, Homo sapiens
  misc_RNA (1)...(19): siRNA sense strand
cgacauccguaaagccaca

SEQ ID NO: 2431597 - RNA, 19 nt, Homo sapiens
  misc_RNA (1)...(19): siRNA sense strand
ccaaaucccuguaucgaca

SEQ ID NO: 2431598 - RNA, 19 nt, Homo sapiens
  misc_RNA (1)...(19): siRNA sense strand
cguaaagccacaaggauuc

SEQ ID NO: 2431599 - RNA, 19 nt, Homo sapiens
  misc_RNA (1)...(19): siRNA sense strand
uggauuuacuacaagaaca

SEQ ID NO: 2431600 - RNA, 19 nt, Homo sapiens
  misc_RNA (1)...(19): siRNA sense strand
aggccaaguuucucuguau

SEQ ID NO: 2431601 - RNA, 19 nt, Homo sapiens
  misc_RNA (1)...(19): siRNA sense strand
guauaauguguugcaguaa

SEQ ID NO: 2431602 - RNA, 19 nt, Homo sapiens
  misc_RNA (1)...(19): siRNA sense strand
uggagaaauuuuaccgaau

SEQ ID NO: 2431603 - RNA, 19 nt, Homo sapiens
  misc_RNA (1)...(19): siRNA sense strand
uggcgaaugcugcaggauu

SEQ ID NO: 2431604 - RNA, 19 nt, Homo sapiens
  misc_RNA (1)...(19): siRNA sense strand
ccgaauaaagacucaucau

SEQ ID NO: 2431605 - RNA, 19 nt, Homo sapiens
  misc_RNA (1)...(19): siRNA sense strand
aggaggagacagaggggaa

SEQ ID NO: 2431606 - RNA, 19 nt, Homo sapiens
  misc_RNA (1)...(19): siRNA sense strand
cagugaaggugguggcaga

SEQ ID NO: 2431607 - RNA, 19 nt, Homo sapiens
  misc_RNA (1)...(19): siRNA sense strand
ccagagagaugaaggcuga

SEQ ID NO: 2431608 - RNA, 19 nt, Homo sapiens
  misc_RNA (1)...(19): siRNA sense strand
gcgucuuccuggugggcaa

SEQ ID NO: 2431609 - RNA, 19 nt, Homo sapiens
  misc_RNA (1)...(19): siRNA sense strand
aggucaaggccaugcggaa

SEQ ID NO: 2431610 - RNA, 19 nt, Homo sapiens
  misc_RNA (1)...(19): siRNA sense strand
cgucuggagagaagggaga

SEQ ID NO: 2431611 - RNA, 19 nt, Homo sapiens
  misc_RNA (1)...(19): siRNA sense strand
ggugacauccgcagggaga

SEQ ID NO: 2431612 - RNA, 19 nt, Homo sapiens
  misc_RNA (1)...(19): siRNA sense strand
gcgccuacgccaacgacaa

SEQ ID NO: 2431613 - RNA, 19 nt, Homo sapiens
  misc_RNA (1)...(19): siRNA sense strand
ccaacuaccacgugcgcuu

SEQ ID NO: 2431614 - RNA, 19 nt, Homo sapiens
  misc_RNA (1)...(19): siRNA sense strand
gggcccagauggauggcuu

SEQ ID NO: 2431615 - RNA, 19 nt, Homo sapiens
  misc_RNA (1)...(19): siRNA sense strand
cauaccagccagagcaaca

SEQ ID NO: 2431616 - RNA, 19 nt, Homo sapiens
  misc_RNA (1)...(19): siRNA sense strand
cccgagaguaccugaucaa

SEQ ID NO: 2431617 - RNA, 19 nt, Homo sapiens
  misc_RNA (1)...(19): siRNA sense strand
cugcagugccacaugggaa

SEQ ID NO: 2431618 - RNA, 19 nt, Homo sapiens
  misc_RNA (1)...(19): siRNA sense strand
cgggcgaugcugagagaga

SEQ ID NO: 2431619 - RNA, 19 nt, Homo sapiens
  misc_RNA (1)...(19): siRNA sense strand
gccuacaauuacagaacau

SEQ ID NO: 2431620 - RNA, 19 nt, Homo sapiens
  misc_RNA (1)...(19): siRNA sense strand
uguagaaauucaaacccua

SEQ ID NO: 2431621 - RNA, 19 nt, Homo sapiens
  misc_RNA (1)...(19): siRNA sense strand
caagcugaucauugagaau

SEQ ID NO: 2431622 - RNA, 19 nt, Homo sapiens
  misc_RNA (1)...(19): siRNA sense strand
agacaauggaagaagacaa

SEQ ID NO: 2431623 - RNA, 19 nt, Homo sapiens
  misc_RNA (1)...(19): siRNA sense strand
agucauggaaguagaagaa

SEQ ID NO: 2431624 - RNA, 19 nt, Homo sapiens
  misc_RNA (1)...(19): siRNA sense strand
aguaaauucugaaggcgaa

SEQ ID NO: 2431625 - RNA, 19 nt, Homo sapiens
  misc_RNA (1)...(19): siRNA sense strand
uuuugaaagucuugggaaa

SEQ ID NO: 2431626 - RNA, 19 nt, Homo sapiens
  misc_RNA (1)...(19): siRNA sense strand
ucauggaaguagaagaaga

SEQ ID NO: 2431627 - RNA, 19 nt, Homo sapiens
  misc_RNA (1)...(19): siRNA sense strand
uggaagaagacaagagcca

SEQ ID NO: 2431628 - RNA, 19 nt, Homo sapiens
  misc_RNA (1)...(19): siRNA sense strand
ggaaacugucaaagugcaa

SEQ ID NO: 2431629 - RNA, 19 nt, Homo sapiens
  misc_RNA (1)...(19): siRNA sense strand
auauagaagcggaugaaga

SEQ ID NO: 2431630 - RNA, 19 nt, Homo sapiens
  misc_RNA (1)...(19): siRNA sense strand
ggauaggaaauuaggaacu

SEQ ID NO: 2431631 - RNA, 19 nt, Homo sapiens
  misc_RNA (1)...(19): siRNA sense strand
ugaagaauugaaagagcaa

SEQ ID NO: 2431632 - RNA, 19 nt, Homo sapiens
  misc_RNA (1)...(19): siRNA sense strand
ucuuguagcaacagugaua

SEQ ID NO: 2431633 - RNA, 19 nt, Homo sapiens
  misc_RNA (1)...(19): siRNA sense strand
ccaaauugaggcggagaaa

SEQ ID NO: 2431634 - RNA, 19 nt, Homo sapiens
  misc_RNA (1)...(19): siRNA sense strand
ggagaauagauguucauau

SEQ ID NO: 2431635 - RNA, 19 nt, Homo sapiens
  misc_RNA (1)...(19): siRNA sense strand
gaagaugaacuuagggcca

SEQ ID NO: 2431636 - RNA, 19 nt, Homo sapiens
  misc_RNA (1)...(19): siRNA sense strand
ucuugauuguggaggacua

SEQ ID NO: 2431637 - RNA, 19 nt, Homo sapiens
  misc_RNA (1)...(19): siRNA sense strand
ggauauagaagcggaugaa

SEQ ID NO: 2431638 - RNA, 19 nt, Homo sapiens
  misc_RNA (1)...(19): siRNA sense strand
aggagaaggauaucaaauu

SEQ ID NO: 2431639 - RNA, 19 nt, Homo sapiens
  misc_RNA (1)...(19): siRNA sense strand
aaauugaggcggagaaaau

SEQ ID NO: 2431640 - RNA, 19 nt, Homo sapiens
  misc_RNA (1)...(19): siRNA sense strand
cugaggagacaauggaaga

SEQ ID NO: 2431641 - RNA, 19 nt, Homo sapiens
  misc_RNA (1)...(19): siRNA sense strand
aggacuagcucgaacagau

SEQ ID NO: 2431642 - RNA, 19 nt, Homo sapiens
  misc_RNA (1)...(19): siRNA sense strand
augucaaaggauuggcaaa

SEQ ID NO: 2431643 - RNA, 19 nt, Homo sapiens
  misc_RNA (1)...(19): siRNA sense strand
cuucuuugccagagaugaa

SEQ ID NO: 2431644 - RNA, 19 nt, Homo sapiens
  misc_RNA (1)...(19): siRNA sense strand
cugaaggcgaauuugauaa

SEQ ID NO: 2431645 - RNA, 19 nt, Homo sapiens
  misc_RNA (1)...(19): siRNA sense strand
gaggagaaggauaucaaau

SEQ ID NO: 2431646 - RNA, 19 nt, Homo sapiens
  misc_RNA (1)...(19): siRNA sense strand
cauccaacuucuauaguca

SEQ ID NO: 2431647 - RNA, 19 nt, Homo sapiens
  misc_RNA (1)...(19): siRNA sense strand
caguaguaaccuugcaaga

SEQ ID NO: 2431648 - RNA, 19 nt, Homo sapiens
  misc_RNA (1)...(19): siRNA sense strand
gagaugaacuaaaagguga

SEQ ID NO: 2431649 - RNA, 19 nt, Homo sapiens
  misc_RNA (1)...(19): siRNA sense strand
ugagaaauggagugaaguu

SEQ ID NO: 2431650 - RNA, 19 nt, Homo sapiens
  misc_RNA (1)...(19): siRNA sense strand
cgacuuaaacaaccaggaa

SEQ ID NO: 2431651 - RNA, 19 nt, Homo sapiens
  misc_RNA (1)...(19): siRNA sense strand
cugucaaagugcaaauaca

SEQ ID NO: 2431652 - RNA, 19 nt, Homo sapiens
  misc_RNA (1)...(19): siRNA sense strand
cuucgauguuuaauggauu

SEQ ID NO: 2431653 - RNA, 19 nt, Homo sapiens
  misc_RNA (1)...(19): siRNA sense strand
aggagacaauggaagaaga

SEQ ID NO: 2431654 - RNA, 19 nt, Homo sapiens
  misc_RNA (1)...(19): siRNA sense strand
cagaaaugucaaaggauug

SEQ ID NO: 2431655 - RNA, 19 nt, Homo sapiens
  misc_RNA (1)...(19): siRNA sense strand
gccaaauugaggcggagaa

SEQ ID NO: 2431656 - RNA, 19 nt, Homo sapiens
  misc_RNA (1)...(19): siRNA sense strand
gaagaagacaagagccagu

SEQ ID NO: 2431657 - RNA, 19 nt, Homo sapiens
  misc_RNA (1)...(19): siRNA sense strand
aaguaaauucugaaggcga

SEQ ID NO: 2431658 - RNA, 19 nt, Homo sapiens
  misc_RNA (1)...(19): siRNA sense strand
aaacagucgacuuaaacaa

SEQ ID NO: 2431659 - RNA, 19 nt, Homo sapiens
  misc_RNA (1)...(19): siRNA sense strand
agucaaagcaggaucaugu

SEQ ID NO: 2431660 - RNA, 19 nt, Homo sapiens
  misc_RNA (1)...(19): siRNA sense strand
agauaagaaaccugccauu

SEQ ID NO: 2431661 - RNA, 19 nt, Homo sapiens
  misc_RNA (1)...(19): siRNA sense strand
augaagaauugaaagagca

SEQ ID NO: 2431662 - RNA, 19 nt, Homo sapiens
  misc_RNA (1)...(19): siRNA sense strand
ugugaaucuuguagcaaca

SEQ ID NO: 2431663 - RNA, 19 nt, Homo sapiens
  misc_RNA (1)...(19): siRNA sense strand
gacuuaaacaaccaggaaa

SEQ ID NO: 2431664 - RNA, 19 nt, Homo sapiens
  misc_RNA (1)...(19): siRNA sense strand
caaccaggaaacugucaaa

SEQ ID NO: 2431665 - RNA, 19 nt, Homo sapiens
  misc_RNA (1)...(19): siRNA sense strand
gagaaauggagugaaguuu

SEQ ID NO: 2431666 - RNA, 19 nt, Homo sapiens
  misc_RNA (1)...(19): siRNA sense strand
cggaugaagaagaugaacu

SEQ ID NO: 2431667 - RNA, 19 nt, Homo sapiens
  misc_RNA (1)...(19): siRNA sense strand
cuaaauaaucucugguaug

SEQ ID NO: 2431668 - RNA, 19 nt, Homo sapiens
  misc_RNA (1)...(19): siRNA sense strand
aaaagagaggagaaggaua

SEQ ID NO: 2431669 - RNA, 19 nt, Homo sapiens
  misc_RNA (1)...(19): siRNA sense strand
acuuagggccagaggucuu

SEQ ID NO: 2431670 - RNA, 19 nt, Homo sapiens
  misc_RNA (1)...(19): siRNA sense strand
guuuaauggauuugcuuca

SEQ ID NO: 2431671 - RNA, 19 nt, Homo sapiens
  misc_RNA (1)...(19): siRNA sense strand
cauggaaguagaagaagau

SEQ ID NO: 2431672 - RNA, 19 nt, Homo sapiens
  misc_RNA (1)...(19): siRNA sense strand
caaauacacagcagagcuu

SEQ ID NO: 2431673 - RNA, 19 nt, Homo sapiens
  misc_RNA (1)...(19): siRNA sense strand
caucaaaugaagguguuaa

SEQ ID NO: 2431674 - RNA, 19 nt, Homo sapiens
  misc_RNA (1)...(19): siRNA sense strand
cuguaacccucgagaccuu

SEQ ID NO: 2431675 - RNA, 19 nt, Homo sapiens
  misc_RNA (1)...(19): siRNA sense strand
cucaggagacaaagcauua

SEQ ID NO: 2431676 - RNA, 19 nt, Homo sapiens
  misc_RNA (1)...(19): siRNA sense strand
aagaauugaaagagcaagu

SEQ ID NO: 2431677 - RNA, 19 nt, Homo sapiens
  misc_RNA (1)...(19): siRNA sense strand
ugaaggcgaauuugauaaa

SEQ ID NO: 2431678 - RNA, 19 nt, Homo sapiens
  misc_RNA (1)...(19): siRNA sense strand
caucuguacauuugucaua

SEQ ID NO: 2431679 - RNA, 19 nt, Homo sapiens
  misc_RNA (1)...(19): siRNA sense strand
ugucaaaggauuggcaaaa

SEQ ID NO: 2431680 - RNA, 19 nt, Homo sapiens
  misc_RNA (1)...(19): siRNA sense strand
ggcgaauuugauaaagaua

SEQ ID NO: 2431681 - RNA, 19 nt, Homo sapiens
  misc_RNA (1)...(19): siRNA sense strand
agguguuaauccacguuua

SEQ ID NO: 2431682 - RNA, 19 nt, Homo sapiens
  misc_RNA (1)...(19): siRNA sense strand
agacaauggaagaagacaa

SEQ ID NO: 2431683 - RNA, 19 nt, Homo sapiens
  misc_RNA (1)...(19): siRNA sense strand
agucauggaaguagaagaa

SEQ ID NO: 2431684 - RNA, 19 nt, Homo sapiens
  misc_RNA (1)...(19): siRNA sense strand
aguaaauucugaaggcgaa

SEQ ID NO: 2431685 - RNA, 19 nt, Homo sapiens
  misc_RNA (1)...(19): siRNA sense strand
ucauggaaguagaagaaga

SEQ ID NO: 2431686 - RNA, 19 nt, Homo sapiens
  misc_RNA (1)...(19): siRNA sense strand
uggaagaagacaagagcca

SEQ ID NO: 2431687 - RNA, 19 nt, Homo sapiens
  misc_RNA (1)...(19): siRNA sense strand
ggaaacugucaaagugcaa

SEQ ID NO: 2431688 - RNA, 19 nt, Homo sapiens
  misc_RNA (1)...(19): siRNA sense strand
auauagaagcggaugaaga

SEQ ID NO: 2431689 - RNA, 19 nt, Homo sapiens
  misc_RNA (1)...(19): siRNA sense strand
ggauaggaaauuaggaacu

SEQ ID NO: 2431690 - RNA, 19 nt, Homo sapiens
  misc_RNA (1)...(19): siRNA sense strand
ugaagaauugaaagagcaa

SEQ ID NO: 2431691 - RNA, 19 nt, Homo sapiens
  misc_RNA (1)...(19): siRNA sense strand
ucuuguagcaacagugaua

SEQ ID NO: 2431692 - RNA, 19 nt, Homo sapiens
  misc_RNA (1)...(19): siRNA sense strand
ccaaauugaggcggagaaa

SEQ ID NO: 2431693 - RNA, 19 nt, Homo sapiens
  misc_RNA (1)...(19): siRNA sense strand
ggagaauagauguucauau

SEQ ID NO: 2431694 - RNA, 19 nt, Homo sapiens
  misc_RNA (1)...(19): siRNA sense strand
gaagaugaacuuagggcca

SEQ ID NO: 2431695 - RNA, 19 nt, Homo sapiens
  misc_RNA (1)...(19): siRNA sense strand
ucuugauuguggaggacua

SEQ ID NO: 2431696 - RNA, 19 nt, Homo sapiens
  misc_RNA (1)...(19): siRNA sense strand
ggauauagaagcggaugaa

SEQ ID NO: 2431697 - RNA, 19 nt, Homo sapiens
  misc_RNA (1)...(19): siRNA sense strand
aggagaaggauaucaaauu

SEQ ID NO: 2431698 - RNA, 19 nt, Homo sapiens
  misc_RNA (1)...(19): siRNA sense strand
aaauugaggcggagaaaau

SEQ ID NO: 2431699 - RNA, 19 nt, Homo sapiens
  misc_RNA (1)...(19): siRNA sense strand
cugaggagacaauggaaga

SEQ ID NO: 2431700 - RNA, 19 nt, Homo sapiens
  misc_RNA (1)...(19): siRNA sense strand
aggacuagcucgaacagau

SEQ ID NO: 2431701 - RNA, 19 nt, Homo sapiens
  misc_RNA (1)...(19): siRNA sense strand
augucaaaggauuggcaaa

SEQ ID NO: 2431702 - RNA, 19 nt, Homo sapiens
  misc_RNA (1)...(19): siRNA sense strand
cuucuuugccagagaugaa

SEQ ID NO: 2431703 - RNA, 19 nt, Homo sapiens
  misc_RNA (1)...(19): siRNA sense strand
cugaaggcgaauuugauaa

SEQ ID NO: 2431704 - RNA, 19 nt, Homo sapiens
  misc_RNA (1)...(19): siRNA sense strand
gaggagaaggauaucaaau

SEQ ID NO: 2431705 - RNA, 19 nt, Homo sapiens
  misc_RNA (1)...(19): siRNA sense strand
cauccaacuucuauaguca

SEQ ID NO: 2431706 - RNA, 19 nt, Homo sapiens
  misc_RNA (1)...(19): siRNA sense strand
caguaguaaccuugcaaga

SEQ ID NO: 2431707 - RNA, 19 nt, Homo sapiens
  misc_RNA (1)...(19): siRNA sense strand
gagaugaacuaaaagguga

SEQ ID NO: 2431708 - RNA, 19 nt, Homo sapiens
  misc_RNA (1)...(19): siRNA sense strand
ugagaaauggagugaaguu

SEQ ID NO: 2431709 - RNA, 19 nt, Homo sapiens
  misc_RNA (1)...(19): siRNA sense strand
cgacuuaaacaaccaggaa

SEQ ID NO: 2431710 - RNA, 19 nt, Homo sapiens
  misc_RNA (1)...(19): siRNA sense strand
cugucaaagugcaaauaca

SEQ ID NO: 2431711 - RNA, 19 nt, Homo sapiens
  misc_RNA (1)...(19): siRNA sense strand
cuucgauguuuaauggauu

SEQ ID NO: 2431712 - RNA, 19 nt, Homo sapiens
  misc_RNA (1)...(19): siRNA sense strand
aggagacaauggaagaaga

SEQ ID NO: 2431713 - RNA, 19 nt, Homo sapiens
  misc_RNA (1)...(19): siRNA sense strand
cagaaaugucaaaggauug

SEQ ID NO: 2431714 - RNA, 19 nt, Homo sapiens
  misc_RNA (1)...(19): siRNA sense strand
gccaaauugaggcggagaa

SEQ ID NO: 2431715 - RNA, 19 nt, Homo sapiens
  misc_RNA (1)...(19): siRNA sense strand
gaagaagacaagagccagu

SEQ ID NO: 2431716 - RNA, 19 nt, Homo sapiens
  misc_RNA (1)...(19): siRNA sense strand
aaguaaauucugaaggcga

SEQ ID NO: 2431717 - RNA, 19 nt, Homo sapiens
  misc_RNA (1)...(19): siRNA sense strand
aaacagucgacuuaaacaa

SEQ ID NO: 2431718 - RNA, 19 nt, Homo sapiens
  misc_RNA (1)...(19): siRNA sense strand
agucaaagcaggaucaugu

SEQ ID NO: 2431719 - RNA, 19 nt, Homo sapiens
  misc_RNA (1)...(19): siRNA sense strand
agauaagaaaccugccauu

SEQ ID NO: 2431720 - RNA, 19 nt, Homo sapiens
  misc_RNA (1)...(19): siRNA sense strand
augaagaauugaaagagca

SEQ ID NO: 2431721 - RNA, 19 nt, Homo sapiens
  misc_RNA (1)...(19): siRNA sense strand
ugugaaucuuguagcaaca

SEQ ID NO: 2431722 - RNA, 19 nt, Homo sapiens
  misc_RNA (1)...(19): siRNA sense strand
gacuuaaacaaccaggaaa

SEQ ID NO: 2431723 - RNA, 19 nt, Homo sapiens
  misc_RNA (1)...(19): siRNA sense strand
caaccaggaaacugucaaa

SEQ ID NO: 2431724 - RNA, 19 nt, Homo sapiens
  misc_RNA (1)...(19): siRNA sense strand
gagaaauggagugaaguuu

SEQ ID NO: 2431725 - RNA, 19 nt, Homo sapiens
  misc_RNA (1)...(19): siRNA sense strand
cggaugaagaagaugaacu

SEQ ID NO: 2431726 - RNA, 19 nt, Homo sapiens
  misc_RNA (1)...(19): siRNA sense strand
cuaaauaaucucugguaug

SEQ ID NO: 2431727 - RNA, 19 nt, Homo sapiens
  misc_RNA (1)...(19): siRNA sense strand
aaaagagaggagaaggaua

SEQ ID NO: 2431728 - RNA, 19 nt, Homo sapiens
  misc_RNA (1)...(19): siRNA sense strand
acuuagggccagaggucuu

SEQ ID NO: 2431729 - RNA, 19 nt, Homo sapiens
  misc_RNA (1)...(19): siRNA sense strand
guuuaauggauuugcuuca

SEQ ID NO: 2431730 - RNA, 19 nt, Homo sapiens
  misc_RNA (1)...(19): siRNA sense strand
cauggaaguagaagaagau

SEQ ID NO: 2431731 - RNA, 19 nt, Homo sapiens
  misc_RNA (1)...(19): siRNA sense strand
caaauacacagcagagcuu

SEQ ID NO: 2431732 - RNA, 19 nt, Homo sapiens
  misc_RNA (1)...(19): siRNA sense strand
caucaaaugaagguguuaa

SEQ ID NO: 2431733 - RNA, 19 nt, Homo sapiens
  misc_RNA (1)...(19): siRNA sense strand
cuguaacccucgagaccuu

SEQ ID NO: 2431734 - RNA, 19 nt, Homo sapiens
  misc_RNA (1)...(19): siRNA sense strand
cucaggagacaaagcauua

SEQ ID NO: 2431735 - RNA, 19 nt, Homo sapiens
  misc_RNA (1)...(19): siRNA sense strand
aagaauugaaagagcaagu

SEQ ID NO: 2431736 - RNA, 19 nt, Homo sapiens
  misc_RNA (1)...(19): siRNA sense strand
ugaaggcgaauuugauaaa

SEQ ID NO: 2431737 - RNA, 19 nt, Homo sapiens
  misc_RNA (1)...(19): siRNA sense strand
caucuguacauuugucaua

SEQ ID NO: 2431738 - RNA, 19 nt, Homo sapiens
  misc_RNA (1)...(19): siRNA sense strand
ugucaaaggauuggcaaaa

SEQ ID NO: 2431739 - RNA, 19 nt, Homo sapiens
  misc_RNA (1)...(19): siRNA sense strand
ggcgaauuugauaaagaua

SEQ ID NO: 2431740 - RNA, 19 nt, Homo sapiens
  misc_RNA (1)...(19): siRNA sense strand
agguguuaauccacguuua

SEQ ID NO: 2431741 - RNA, 19 nt, Homo sapiens
  misc_RNA (1)...(19): siRNA sense strand
aaaugaagguguuaaucca

SEQ ID NO: 2431742 - RNA, 19 nt, Homo sapiens
  misc_RNA (1)...(19): siRNA sense strand
agacaauggaagaagacaa

SEQ ID NO: 2431743 - RNA, 19 nt, Homo sapiens
  misc_RNA (1)...(19): siRNA sense strand
agucauggaaguagaagaa

SEQ ID NO: 2431744 - RNA, 19 nt, Homo sapiens
  misc_RNA (1)...(19): siRNA sense strand
aguaaauucugaaggcgaa

SEQ ID NO: 2431745 - RNA, 19 nt, Homo sapiens
  misc_RNA (1)...(19): siRNA sense strand
uuuugaaagucuugggaaa

SEQ ID NO: 2431746 - RNA, 19 nt, Homo sapiens
  misc_RNA (1)...(19): siRNA sense strand
ucauggaaguagaagaaga

SEQ ID NO: 2431747 - RNA, 19 nt, Homo sapiens
  misc_RNA (1)...(19): siRNA sense strand
uggaagaagacaagagcca

SEQ ID NO: 2431748 - RNA, 19 nt, Homo sapiens
  misc_RNA (1)...(19): siRNA sense strand
ggaaacugucaaagugcaa

SEQ ID NO: 2431749 - RNA, 19 nt, Homo sapiens
  misc_RNA (1)...(19): siRNA sense strand
auauagaagcggaugaaga

SEQ ID NO: 2431750 - RNA, 19 nt, Homo sapiens
  misc_RNA (1)...(19): siRNA sense strand
ggauaggaaauuaggaacu

SEQ ID NO: 2431751 - RNA, 19 nt, Homo sapiens
  misc_RNA (1)...(19): siRNA sense strand
ugaagaauugaaagagcaa

SEQ ID NO: 2431752 - RNA, 19 nt, Homo sapiens
  misc_RNA (1)...(19): siRNA sense strand
ucuuguagcaacagugaua

SEQ ID NO: 2431753 - RNA, 19 nt, Homo sapiens
  misc_RNA (1)...(19): siRNA sense strand
ccaaauugaggcggagaaa

SEQ ID NO: 2431754 - RNA, 19 nt, Homo sapiens
  misc_RNA (1)...(19): siRNA sense strand
ggagaauagauguucauau

SEQ ID NO: 2431755 - RNA, 19 nt, Homo sapiens
  misc_RNA (1)...(19): siRNA sense strand
gaagaugaacuuagggcca

SEQ ID NO: 2431756 - RNA, 19 nt, Homo sapiens
  misc_RNA (1)...(19): siRNA sense strand
ucuugauuguggaggacua

SEQ ID NO: 2431757 - RNA, 19 nt, Homo sapiens
  misc_RNA (1)...(19): siRNA sense strand
ggauauagaagcggaugaa

SEQ ID NO: 2431758 - RNA, 19 nt, Homo sapiens
  misc_RNA (1)...(19): siRNA sense strand
aggagaaggauaucaaauu

SEQ ID NO: 2431759 - RNA, 19 nt, Homo sapiens
  misc_RNA (1)...(19): siRNA sense strand
aaauugaggcggagaaaau

SEQ ID NO: 2431760 - RNA, 19 nt, Homo sapiens
  misc_RNA (1)...(19): siRNA sense strand
cugaggagacaauggaaga

SEQ ID NO: 2431761 - RNA, 19 nt, Homo sapiens
  misc_RNA (1)...(19): siRNA sense strand
aggacuagcucgaacagau

SEQ ID NO: 2431762 - RNA, 19 nt, Homo sapiens
  misc_RNA (1)...(19): siRNA sense strand
augucaaaggauuggcaaa

SEQ ID NO: 2431763 - RNA, 19 nt, Homo sapiens
  misc_RNA (1)...(19): siRNA sense strand
cuucuuugccagagaugaa

SEQ ID NO: 2431764 - RNA, 19 nt, Homo sapiens
  misc_RNA (1)...(19): siRNA sense strand
cugaaggcgaauuugauaa

SEQ ID NO: 2431765 - RNA, 19 nt, Homo sapiens
  misc_RNA (1)...(19): siRNA sense strand
gaggagaaggauaucaaau

SEQ ID NO: 2431766 - RNA, 19 nt, Homo sapiens
  misc_RNA (1)...(19): siRNA sense strand
cauccaacuucuauaguca

SEQ ID NO: 2431767 - RNA, 19 nt, Homo sapiens
  misc_RNA (1)...(19): siRNA sense strand
caguaguaaccuugcaaga

SEQ ID NO: 2431768 - RNA, 19 nt, Homo sapiens
  misc_RNA (1)...(19): siRNA sense strand
gagaugaacuaaaagguga

SEQ ID NO: 2431769 - RNA, 19 nt, Homo sapiens
  misc_RNA (1)...(19): siRNA sense strand
ugagaaauggagugaaguu

SEQ ID NO: 2431770 - RNA, 19 nt, Homo sapiens
  misc_RNA (1)...(19): siRNA sense strand
cgacuuaaacaaccaggaa

SEQ ID NO: 2431771 - RNA, 19 nt, Homo sapiens
  misc_RNA (1)...(19): siRNA sense strand
cugucaaagugcaaauaca

SEQ ID NO: 2431772 - RNA, 19 nt, Homo sapiens
  misc_RNA (1)...(19): siRNA sense strand
cuucgauguuuaauggauu

SEQ ID NO: 2431773 - RNA, 19 nt, Homo sapiens
  misc_RNA (1)...(19): siRNA sense strand
aggagacaauggaagaaga

SEQ ID NO: 2431774 - RNA, 19 nt, Homo sapiens
  misc_RNA (1)...(19): siRNA sense strand
cagaaaugucaaaggauug

SEQ ID NO: 2431775 - RNA, 19 nt, Homo sapiens
  misc_RNA (1)...(19): siRNA sense strand
gccaaauugaggcggagaa

SEQ ID NO: 2431776 - RNA, 19 nt, Homo sapiens
  misc_RNA (1)...(19): siRNA sense strand
gaagaagacaagagccagu

SEQ ID NO: 2431777 - RNA, 19 nt, Homo sapiens
  misc_RNA (1)...(19): siRNA sense strand
aaguaaauucugaaggcga

SEQ ID NO: 2431778 - RNA, 19 nt, Homo sapiens
  misc_RNA (1)...(19): siRNA sense strand
aaacagucgacuuaaacaa

SEQ ID NO: 2431779 - RNA, 19 nt, Homo sapiens
  misc_RNA (1)...(19): siRNA sense strand
agucaaagcaggaucaugu

SEQ ID NO: 2431780 - RNA, 19 nt, Homo sapiens
  misc_RNA (1)...(19): siRNA sense strand
agauaagaaaccugccauu

SEQ ID NO: 2431781 - RNA, 19 nt, Homo sapiens
  misc_RNA (1)...(19): siRNA sense strand
augaagaauugaaagagca

SEQ ID NO: 2431782 - RNA, 19 nt, Homo sapiens
  misc_RNA (1)...(19): siRNA sense strand
ugugaaucuuguagcaaca

SEQ ID NO: 2431783 - RNA, 19 nt, Homo sapiens
  misc_RNA (1)...(19): siRNA sense strand
gacuuaaacaaccaggaaa

SEQ ID NO: 2431784 - RNA, 19 nt, Homo sapiens
  misc_RNA (1)...(19): siRNA sense strand
caaccaggaaacugucaaa

SEQ ID NO: 2431785 - RNA, 19 nt, Homo sapiens
  misc_RNA (1)...(19): siRNA sense strand
gagaaauggagugaaguuu

SEQ ID NO: 2431786 - RNA, 19 nt, Homo sapiens
  misc_RNA (1)...(19): siRNA sense strand
cggaugaagaagaugaacu

SEQ ID NO: 2431787 - RNA, 19 nt, Homo sapiens
  misc_RNA (1)...(19): siRNA sense strand
cuaaauaaucucugguaug

SEQ ID NO: 2431788 - RNA, 19 nt, Homo sapiens
  misc_RNA (1)...(19): siRNA sense strand
aaaagagaggagaaggaua

SEQ ID NO: 2431789 - RNA, 19 nt, Homo sapiens
  misc_RNA (1)...(19): siRNA sense strand
acuuagggccagaggucuu

SEQ ID NO: 2431790 - RNA, 19 nt, Homo sapiens
  misc_RNA (1)...(19): siRNA sense strand
guuuaauggauuugcuuca

SEQ ID NO: 2431791 - RNA, 19 nt, Homo sapiens
  misc_RNA (1)...(19): siRNA sense strand
cauggaaguagaagaagau

SEQ ID NO: 2431792 - RNA, 19 nt, Homo sapiens
  misc_RNA (1)...(19): siRNA sense strand
caaauacacagcagagcuu

SEQ ID NO: 2431793 - RNA, 19 nt, Homo sapiens
  misc_RNA (1)...(19): siRNA sense strand
caucaaaugaagguguuaa

SEQ ID NO: 2431794 - RNA, 19 nt, Homo sapiens
  misc_RNA (1)...(19): siRNA sense strand
cuguaacccucgagaccuu

SEQ ID NO: 2431795 - RNA, 19 nt, Homo sapiens
  misc_RNA (1)...(19): siRNA sense strand
cucaggagacaaagcauua

SEQ ID NO: 2431796 - RNA, 19 nt, Homo sapiens
  misc_RNA (1)...(19): siRNA sense strand
aagaauugaaagagcaagu

SEQ ID NO: 2431797 - RNA, 19 nt, Homo sapiens
  misc_RNA (1)...(19): siRNA sense strand
ugaaggcgaauuugauaaa

SEQ ID NO: 2431798 - RNA, 19 nt, Homo sapiens
  misc_RNA (1)...(19): siRNA sense strand
caucuguacauuugucaua

SEQ ID NO: 2431799 - RNA, 19 nt, Homo sapiens
  misc_RNA (1)...(19): siRNA sense strand
ugucaaaggauuggcaaaa

SEQ ID NO: 2431800 - RNA, 19 nt, Homo sapiens
  misc_RNA (1)...(19): siRNA sense strand
ggcgaauuugauaaagaua

SEQ ID NO: 2431801 - RNA, 19 nt, Homo sapiens
  misc_RNA (1)...(19): siRNA sense strand
agguguuaauccacguuua

SEQ ID NO: 2431802 - RNA, 19 nt, Homo sapiens
  misc_RNA (1)...(19): siRNA sense strand
cgcaagaagcagaaggaaa

SEQ ID NO: 2431803 - RNA, 19 nt, Homo sapiens
  misc_RNA (1)...(19): siRNA sense strand
caggcaagaccaagggcua

SEQ ID NO: 2431804 - RNA, 19 nt, Homo sapiens
  misc_RNA (1)...(19): siRNA sense strand
gcgccaugcgugagaugaa

SEQ ID NO: 2431805 - RNA, 19 nt, Homo sapiens
  misc_RNA (1)...(19): siRNA sense strand
gccugaaagagaaggaaga

SEQ ID NO: 2431806 - RNA, 19 nt, Homo sapiens
  misc_RNA (1)...(19): siRNA sense strand
aggaaauggaggcggagau

SEQ ID NO: 2431807 - RNA, 19 nt, Homo sapiens
  misc_RNA (1)...(19): siRNA sense strand
aggaacgcuugaaggaaau

SEQ ID NO: 2431808 - RNA, 19 nt, Homo sapiens
  misc_RNA (1)...(19): siRNA sense strand
ugaaggaaauggaggcgga

SEQ ID NO: 2431809 - RNA, 19 nt, Homo sapiens
  misc_RNA (1)...(19): siRNA sense strand
ugggugaagacaagaagaa

SEQ ID NO: 2431810 - RNA, 19 nt, Homo sapiens
  misc_RNA (1)...(19): siRNA sense strand
aggggaagccagagaaauu

SEQ ID NO: 2431811 - RNA, 19 nt, Homo sapiens
  misc_RNA (1)...(19): siRNA sense strand
aagagaaggaagaggcagu

SEQ ID NO: 2431812 - RNA, 19 nt, Homo sapiens
  misc_RNA (1)...(19): siRNA sense strand
agaagcugggccugagaua

SEQ ID NO: 2431813 - RNA, 19 nt, Homo sapiens
  misc_RNA (1)...(19): siRNA sense strand
acacauaccagcaggucca

SEQ ID NO: 2431814 - RNA, 19 nt, Homo sapiens
  misc_RNA (1)...(19): siRNA sense strand
aggccaaggugauccguga

SEQ ID NO: 2431815 - RNA, 19 nt, Homo sapiens
  misc_RNA (1)...(19): siRNA sense strand
gaaagagaaggaagaggca

SEQ ID NO: 2431816 - RNA, 19 nt, Homo sapiens
  misc_RNA (1)...(19): siRNA sense strand
gugacaagcgcacaggcaa

SEQ ID NO: 2431817 - RNA, 19 nt, Homo sapiens
  misc_RNA (1)...(19): siRNA sense strand
aagacaagaagaaggggaa

SEQ ID NO: 2431818 - RNA, 19 nt, Homo sapiens
  misc_RNA (1)...(19): siRNA sense strand
gcauguggaaggaccggaa

SEQ ID NO: 2431819 - RNA, 19 nt, Homo sapiens
  misc_RNA (1)...(19): siRNA sense strand
agaccaagggcuacggcuu

SEQ ID NO: 2431820 - RNA, 19 nt, Homo sapiens
  misc_RNA (1)...(19): siRNA sense strand
ccagagaaauugaaacggu

SEQ ID NO: 2431821 - RNA, 19 nt, Homo sapiens
  misc_RNA (1)...(19): siRNA sense strand
ugaaugagguggugcggua

SEQ ID NO: 2431822 - RNA, 19 nt, Homo sapiens
  misc_RNA (1)...(19): siRNA sense strand
ccucagauguccuagccaa

SEQ ID NO: 2431823 - RNA, 19 nt, Homo sapiens
  misc_RNA (1)...(19): siRNA sense strand
gcaugguccaggaggagaa

SEQ ID NO: 2431824 - RNA, 19 nt, Homo sapiens
  misc_RNA (1)...(19): siRNA sense strand
ccuacgaccuggaggagca

SEQ ID NO: 2431825 - RNA, 19 nt, Homo sapiens
  misc_RNA (1)...(19): siRNA sense strand
cagaggagcuggauggugu

SEQ ID NO: 2431826 - RNA, 19 nt, Homo sapiens
  misc_RNA (1)...(19): siRNA sense strand
ggacacuggcugaaggguu

SEQ ID NO: 2431827 - RNA, 19 nt, Homo sapiens
  misc_RNA (1)...(19): siRNA sense strand
ugaagaaggcaguggccca

SEQ ID NO: 2431828 - RNA, 19 nt, Homo sapiens
  misc_RNA (1)...(19): siRNA sense strand
ucaccuaccugaaaggaga

SEQ ID NO: 2431829 - RNA, 19 nt, Homo sapiens
  misc_RNA (1)...(19): siRNA sense strand
gggagaacggcgagcucuu

SEQ ID NO: 2431830 - RNA, 19 nt, Homo sapiens
  misc_RNA (1)...(19): siRNA sense strand
ugguaaaggcccuacugaa

SEQ ID NO: 2431831 - RNA, 19 nt, Homo sapiens
  misc_RNA (1)...(19): siRNA sense strand
gccugaaaguagacacaca

SEQ ID NO: 2431832 - RNA, 19 nt, Homo sapiens
  misc_RNA (1)...(19): siRNA sense strand
gcagugggcuucagcgcau

SEQ ID NO: 2431833 - RNA, 19 nt, Homo sapiens
  misc_RNA (1)...(19): siRNA sense strand
cagcagagccuuguggcaa

SEQ ID NO: 2431834 - RNA, 19 nt, Homo sapiens
  misc_RNA (1)...(19): siRNA sense strand
ccagcaugguccaggagga

SEQ ID NO: 2431835 - RNA, 19 nt, Homo sapiens
  misc_RNA (1)...(19): siRNA sense strand
gaggaaugugagugagugu

SEQ ID NO: 2431836 - RNA, 19 nt, Homo sapiens
  misc_RNA (1)...(19): siRNA sense strand
gcguggugcaagagcugaa

SEQ ID NO: 2431837 - RNA, 19 nt, Homo sapiens
  misc_RNA (1)...(19): siRNA sense strand
acccagaagccaagggcga

SEQ ID NO: 2431838 - RNA, 19 nt, Homo sapiens
  misc_RNA (1)...(19): siRNA sense strand
gagccugaaaguagacaca

SEQ ID NO: 2431839 - RNA, 19 nt, Homo sapiens
  misc_RNA (1)...(19): siRNA sense strand
ccuccgugaaggugaauga

SEQ ID NO: 2431840 - RNA, 19 nt, Homo sapiens
  misc_RNA (1)...(19): siRNA sense strand
gggugaggacacuggcuga

SEQ ID NO: 2431841 - RNA, 19 nt, Homo sapiens
  misc_RNA (1)...(19): siRNA sense strand
aagccuaucagcagugcaa

SEQ ID NO: 2431842 - RNA, 19 nt, Homo sapiens
  misc_RNA (1)...(19): siRNA sense strand
gagcaaauaaacagcacga

SEQ ID NO: 2431843 - RNA, 19 nt, Homo sapiens
  misc_RNA (1)...(19): siRNA sense strand
caaauaaacagcacgagga

SEQ ID NO: 2431844 - RNA, 19 nt, Homo sapiens
  misc_RNA (1)...(19): siRNA sense strand
aggcugaagugcaguggca

SEQ ID NO: 2431845 - RNA, 19 nt, Homo sapiens
  misc_RNA (1)...(19): siRNA sense strand
ccguagccgucaagagcca

SEQ ID NO: 2431846 - RNA, 19 nt, Homo sapiens
  misc_RNA (1)...(19): siRNA sense strand
gaucaaugcccgagaggga

SEQ ID NO: 2431847 - RNA, 19 nt, Homo sapiens
  misc_RNA (1)...(19): siRNA sense strand
agacagauuucgaagccaa

SEQ ID NO: 2431848 - RNA, 19 nt, Homo sapiens
  misc_RNA (1)...(19): siRNA sense strand
augaacugucugagagaaa

SEQ ID NO: 2431849 - RNA, 19 nt, Homo sapiens
  misc_RNA (1)...(19): siRNA sense strand
aggaaugaaagauggauau

SEQ ID NO: 2431850 - RNA, 19 nt, Homo sapiens
  misc_RNA (1)...(19): siRNA sense strand
uguaaaugaagauggaaga

SEQ ID NO: 2431851 - RNA, 19 nt, Homo sapiens
  misc_RNA (1)...(19): siRNA sense strand
ggaagaaauaagcugaaaa

SEQ ID NO: 2431852 - RNA, 19 nt, Homo sapiens
  misc_RNA (1)...(19): siRNA sense strand
uggugauauuccagaagaa

SEQ ID NO: 2431853 - RNA, 19 nt, Homo sapiens
  misc_RNA (1)...(19): siRNA sense strand
ucgaagaaguauacagacu

SEQ ID NO: 2431854 - RNA, 19 nt, Homo sapiens
  misc_RNA (1)...(19): siRNA sense strand
gaugauucgaagaaguaua

SEQ ID NO: 2431855 - RNA, 19 nt, Homo sapiens
  misc_RNA (1)...(19): siRNA sense strand
gaaccuagcccaaagcaga

SEQ ID NO: 2431856 - RNA, 19 nt, Homo sapiens
  misc_RNA (1)...(19): siRNA sense strand
acauugaauaucuggaaga

SEQ ID NO: 2431857 - RNA, 19 nt, Homo sapiens
  misc_RNA (1)...(19): siRNA sense strand
agauguuaagguugagaau

SEQ ID NO: 2431858 - RNA, 19 nt, Homo sapiens
  misc_RNA (1)...(19): siRNA sense strand
cccaaagcagagugaagaa

SEQ ID NO: 2431859 - RNA, 19 nt, Homo sapiens
  misc_RNA (1)...(19): siRNA sense strand
aagccaaauucuucagcau

SEQ ID NO: 2431860 - RNA, 19 nt, Homo sapiens
  misc_RNA (1)...(19): siRNA sense strand
acggaaggucugugguuga

SEQ ID NO: 2431861 - RNA, 19 nt, Homo sapiens
  misc_RNA (1)...(19): siRNA sense strand
agguugagaaugaagauga

SEQ ID NO: 2431862 - RNA, 19 nt, Homo sapiens
  misc_RNA (1)...(19): siRNA sense strand
agauugaugauucgaagaa

SEQ ID NO: 2431863 - RNA, 19 nt, Homo sapiens
  misc_RNA (1)...(19): siRNA sense strand
gguugauacaguuggagga

SEQ ID NO: 2431864 - RNA, 19 nt, Homo sapiens
  misc_RNA (1)...(19): siRNA sense strand
ugaugaacugucugagaga

SEQ ID NO: 2431865 - RNA, 19 nt, Homo sapiens
  misc_RNA (1)...(19): siRNA sense strand
ugaugaagaaacugcugaa

SEQ ID NO: 2431866 - RNA, 19 nt, Homo sapiens
  misc_RNA (1)...(19): siRNA sense strand
ccaauauuuguuugcacua

SEQ ID NO: 2431867 - RNA, 19 nt, Homo sapiens
  misc_RNA (1)...(19): siRNA sense strand
ucagaauuuaagagacaga

SEQ ID NO: 2431868 - RNA, 19 nt, Homo sapiens
  misc_RNA (1)...(19): siRNA sense strand
caguuuggcauguguguca

SEQ ID NO: 2431869 - RNA, 19 nt, Homo sapiens
  misc_RNA (1)...(19): siRNA sense strand
ggcaugugugucagugaua

SEQ ID NO: 2431870 - RNA, 19 nt, Homo sapiens
  misc_RNA (1)...(19): siRNA sense strand
uugaugauucgaagaagua

SEQ ID NO: 2431871 - RNA, 19 nt, Homo sapiens
  misc_RNA (1)...(19): siRNA sense strand
gguuucagaauuuaagaga

SEQ ID NO: 2431872 - RNA, 19 nt, Homo sapiens
  misc_RNA (1)...(19): siRNA sense strand
agaagacgacaaagggaca

SEQ ID NO: 2431873 - RNA, 19 nt, Homo sapiens
  misc_RNA (1)...(19): siRNA sense strand
ggagaagacgacaaaggga

SEQ ID NO: 2431874 - RNA, 19 nt, Homo sapiens
  misc_RNA (1)...(19): siRNA sense strand
cuccaagcccagcaggaaa

SEQ ID NO: 2431875 - RNA, 19 nt, Homo sapiens
  misc_RNA (1)...(19): siRNA sense strand
ccugaauccuggagaagac

SEQ ID NO: 2431876 - RNA, 19 nt, Homo sapiens
  misc_RNA (1)...(19): siRNA sense strand
caggaaagguauugugagg

SEQ ID NO: 2431877 - RNA, 19 nt, Homo sapiens
  misc_RNA (1)...(19): siRNA sense strand
cagagagguuccagagggu

SEQ ID NO: 2431878 - RNA, 19 nt, Homo sapiens
  misc_RNA (1)...(19): siRNA sense strand
gguucagcgcccagacaga

SEQ ID NO: 2431879 - RNA, 19 nt, Homo sapiens
  misc_RNA (1)...(19): siRNA sense strand
cagacaagauggaggccua

SEQ ID NO: 2431880 - RNA, 19 nt, Homo sapiens
  misc_RNA (1)...(19): siRNA sense strand
agucggagcugcagcguga

SEQ ID NO: 2431881 - RNA, 19 nt, Homo sapiens
  misc_RNA (1)...(19): siRNA sense strand
ccaaguaccugcuggagga

SEQ ID NO: 2431882 - RNA, 19 nt, Homo sapiens
  misc_RNA (1)...(19): siRNA sense strand
caucaaggacaaagaggca

SEQ ID NO: 2431883 - RNA, 19 nt, Homo sapiens
  misc_RNA (1)...(19): siRNA sense strand
ccaaguucacgcaggacaa

SEQ ID NO: 2431884 - RNA, 19 nt, Homo sapiens
  misc_RNA (1)...(19): siRNA sense strand
gguacaagcugcaucacca

SEQ ID NO: 2431885 - RNA, 19 nt, Homo sapiens
  misc_RNA (1)...(19): siRNA sense strand
ugaaggaagccgagcucau

SEQ ID NO: 2431886 - RNA, 19 nt, Homo sapiens
  misc_RNA (1)...(19): siRNA sense strand
gcacaagacacugcgggaa

SEQ ID NO: 2431887 - RNA, 19 nt, Homo sapiens
  misc_RNA (1)...(19): siRNA sense strand
gggccaaguucacgcagga

SEQ ID NO: 2431888 - RNA, 19 nt, Homo sapiens
  misc_RNA (1)...(19): siRNA sense strand
agauggaggccuacaacau

SEQ ID NO: 2431889 - RNA, 19 nt, Homo sapiens
  misc_RNA (1)...(19): siRNA sense strand
gugagguggaggagcugaa

SEQ ID NO: 2431890 - RNA, 19 nt, Homo sapiens
  misc_RNA (1)...(19): siRNA sense strand
gacugaaccgggagcacaa

SEQ ID NO: 2431891 - RNA, 19 nt, Homo sapiens
  misc_RNA (1)...(19): siRNA sense strand
agguggaggagcugaacau

SEQ ID NO: 2431892 - RNA, 19 nt, Homo sapiens
  misc_RNA (1)...(19): siRNA sense strand
cagcaagacuccacgcgca

SEQ ID NO: 2431893 - RNA, 19 nt, Homo sapiens
  misc_RNA (1)...(19): siRNA sense strand
gggaaaucacagaucagga

SEQ ID NO: 2431894 - RNA, 19 nt, Homo sapiens
  misc_RNA (1)...(19): siRNA sense strand
aagccgagcucauccggaa

SEQ ID NO: 2431895 - RNA, 19 nt, Homo sapiens
  misc_RNA (1)...(19): siRNA sense strand
ugagugagguggaggagcu

SEQ ID NO: 2431896 - RNA, 19 nt, Homo sapiens
  misc_RNA (1)...(19): siRNA sense strand
ccaacuugcuccuggccca

SEQ ID NO: 2431897 - RNA, 19 nt, Homo sapiens
  misc_RNA (1)...(19): siRNA sense strand
cgaacuuccucaucggcaa

SEQ ID NO: 2431898 - RNA, 19 nt, Homo sapiens
  misc_RNA (1)...(19): siRNA sense strand
agaucgaggcggagaagaa

SEQ ID NO: 2431899 - RNA, 19 nt, Homo sapiens
  misc_RNA (1)...(19): siRNA sense strand
acagcgaaucugagaggaa

SEQ ID NO: 2431900 - RNA, 19 nt, Homo sapiens
  misc_RNA (1)...(19): siRNA sense strand
gugcacaccugcuggguca

SEQ ID NO: 2431901 - RNA, 19 nt, Homo sapiens
  misc_RNA (1)...(19): siRNA sense strand
uggaagaagaagaagagca

SEQ ID NO: 2431902 - RNA, 19 nt, Homo sapiens
  misc_RNA (1)...(19): siRNA sense strand
agaggaaaaccgaggagua

SEQ ID NO: 2431903 - RNA, 19 nt, Homo sapiens
  misc_RNA (1)...(19): siRNA sense strand
aguugaagucaguggcaca

SEQ ID NO: 2431904 - RNA, 19 nt, Homo sapiens
  misc_RNA (1)...(19): siRNA sense strand
aggcauugaagaugacuau

SEQ ID NO: 2431905 - RNA, 19 nt, Homo sapiens
  misc_RNA (1)...(19): siRNA sense strand
acgcagagugaacgaguuu

SEQ ID NO: 2431906 - RNA, 19 nt, Homo sapiens
  misc_RNA (1)...(19): siRNA sense strand
uggaaagugaagaaggcau

SEQ ID NO: 2431907 - RNA, 19 nt, Homo sapiens
  misc_RNA (1)...(19): siRNA sense strand
aaauauaagagcugguacu

SEQ ID NO: 2431908 - RNA, 19 nt, Homo sapiens
  misc_RNA (1)...(19): siRNA sense strand
ugaugaggugaaaggaauu

SEQ ID NO: 2431909 - RNA, 19 nt, Homo sapiens
  misc_RNA (1)...(19): siRNA sense strand
aguuaauguuucuguacca

SEQ ID NO: 2431910 - RNA, 19 nt, Homo sapiens
  misc_RNA (1)...(19): siRNA sense strand
gaaagaugcugaugaggug

SEQ ID NO: 2431911 - RNA, 19 nt, Homo sapiens
  misc_RNA (1)...(19): siRNA sense strand
ccaacugcauccagcccua

SEQ ID NO: 2431912 - RNA, 19 nt, Homo sapiens
  misc_RNA (1)...(19): siRNA sense strand
uggaagacuuugaugugga

SEQ ID NO: 2431913 - RNA, 19 nt, Homo sapiens
  misc_RNA (1)...(19): siRNA sense strand
gagaagaagccgacgagug

SEQ ID NO: 2431914 - RNA, 19 nt, Homo sapiens
  misc_RNA (1)...(19): siRNA sense strand
uggggaaaaccgugcauua

SEQ ID NO: 2431915 - RNA, 19 nt, Homo sapiens
  misc_RNA (1)...(19): siRNA sense strand
aagaagagcaugaucggca

SEQ ID NO: 2431916 - RNA, 19 nt, Homo sapiens
  misc_RNA (1)...(19): siRNA sense strand
uaccaaagaaaacgagaaa

SEQ ID NO: 2431917 - RNA, 19 nt, Homo sapiens
  misc_RNA (1)...(19): siRNA sense strand
cugaaacaucgaaggauaa

SEQ ID NO: 2431918 - RNA, 19 nt, Homo sapiens
  misc_RNA (1)...(19): siRNA sense strand
ccuuaaaugcacuggaaga

SEQ ID NO: 2431919 - RNA, 19 nt, Homo sapiens
  misc_RNA (1)...(19): siRNA sense strand
aggaagaagcccaagccaa

SEQ ID NO: 2431920 - RNA, 19 nt, Homo sapiens
  misc_RNA (1)...(19): siRNA sense strand
gaggcugagcagaggacaa

SEQ ID NO: 2431921 - RNA, 19 nt, Homo sapiens
  misc_RNA (1)...(19): siRNA sense strand
cugaaggaggccaagguua

SEQ ID NO: 2431922 - RNA, 19 nt, Homo sapiens
  misc_RNA (1)...(19): siRNA sense strand
aagugaagacauagaccaa

SEQ ID NO: 2431923 - RNA, 19 nt, Homo sapiens
  misc_RNA (1)...(19): siRNA sense strand
cagaaagaguccuugcaga

SEQ ID NO: 2431924 - RNA, 19 nt, Homo sapiens
  misc_RNA (1)...(19): siRNA sense strand
uggacaagagacacagaaa

SEQ ID NO: 2431925 - RNA, 19 nt, Homo sapiens
  misc_RNA (1)...(19): siRNA sense strand
ggaagaggaagaagcccaa

SEQ ID NO: 2431926 - RNA, 19 nt, Homo sapiens
  misc_RNA (1)...(19): siRNA sense strand
ucaugaaagcuuugcaaaa

SEQ ID NO: 2431927 - RNA, 19 nt, Homo sapiens
  misc_RNA (1)...(19): siRNA sense strand
uccaagaggcccagagaca

SEQ ID NO: 2431928 - RNA, 19 nt, Homo sapiens
  misc_RNA (1)...(19): siRNA sense strand
agucacugaugguggauga

SEQ ID NO: 2431929 - RNA, 19 nt, Homo sapiens
  misc_RNA (1)...(19): siRNA sense strand
cccgagauguucuggacaa

SEQ ID NO: 2431930 - RNA, 19 nt, Homo sapiens
  misc_RNA (1)...(19): siRNA sense strand
uggaaagaaauccuggaaa

SEQ ID NO: 2431931 - RNA, 19 nt, Homo sapiens
  misc_RNA (1)...(19): siRNA sense strand
gacaagagacacagaaaau

SEQ ID NO: 2431932 - RNA, 19 nt, Homo sapiens
  misc_RNA (1)...(19): siRNA sense strand
ggaagaagcccaagccaag

SEQ ID NO: 2431933 - RNA, 19 nt, Homo sapiens
  misc_RNA (1)...(19): siRNA sense strand
augaaugauaacagcacaa

SEQ ID NO: 2431934 - RNA, 19 nt, Homo sapiens
  misc_RNA (1)...(19): siRNA sense strand
auuauguacccaaaggaaa

SEQ ID NO: 2431935 - RNA, 19 nt, Homo sapiens
  misc_RNA (1)...(19): siRNA sense strand
caauccaggcacagaaaga

SEQ ID NO: 2431936 - RNA, 19 nt, Homo sapiens
  misc_RNA (1)...(19): siRNA sense strand
aggaagaggaagaagccca

SEQ ID NO: 2431937 - RNA, 19 nt, Homo sapiens
  misc_RNA (1)...(19): siRNA sense strand
ccaugaaaauguuguugaa

SEQ ID NO: 2431938 - RNA, 19 nt, Homo sapiens
  misc_RNA (1)...(19): siRNA sense strand
aggccaagguuaagaagcu

SEQ ID NO: 2431939 - RNA, 19 nt, Homo sapiens
  misc_RNA (1)...(19): siRNA sense strand
agacuggacaagagacaca

SEQ ID NO: 2431940 - RNA, 19 nt, Homo sapiens
  misc_RNA (1)...(19): siRNA sense strand
ucgucaaggugcacaugaa

SEQ ID NO: 2431941 - RNA, 19 nt, Homo sapiens
  misc_RNA (1)...(19): siRNA sense strand
cuacaaauugagagguuuu

SEQ ID NO: 2431942 - RNA, 19 nt, Homo sapiens
  misc_RNA (1)...(19): siRNA sense strand
accagugggucaugggaau

SEQ ID NO: 2431943 - RNA, 19 nt, Homo sapiens
  misc_RNA (1)...(19): siRNA sense strand
gccaauaugaggaugacuu

SEQ ID NO: 2431944 - RNA, 19 nt, Homo sapiens
  misc_RNA (1)...(19): siRNA sense strand
cuuggauaacagaggaaaa

SEQ ID NO: 2431945 - RNA, 19 nt, Homo sapiens
  misc_RNA (1)...(19): siRNA sense strand
gaguuuaggaguugacacu

SEQ ID NO: 2431946 - RNA, 19 nt, Homo sapiens
  misc_RNA (1)...(19): siRNA sense strand
aacuacaaauugagagguu

SEQ ID NO: 2431947 - RNA, 19 nt, Homo sapiens
  misc_RNA (1)...(19): siRNA sense strand
caacauuuacuaugggacu

SEQ ID NO: 2431948 - RNA, 19 nt, Homo sapiens
  misc_RNA (1)...(19): siRNA sense strand
aaaggaaagacuaagacau

SEQ ID NO: 2431949 - RNA, 19 nt, Homo sapiens
  misc_RNA (1)...(19): siRNA sense strand
agucaagugaagacauaga

SEQ ID NO: 2431950 - RNA, 19 nt, Homo sapiens
  misc_RNA (1)...(19): siRNA sense strand
gggaauacggauagccaag

SEQ ID NO: 2431951 - RNA, 19 nt, Homo sapiens
  misc_RNA (1)...(19): siRNA sense strand
ggauagccaaguaugggaa

SEQ ID NO: 2431952 - RNA, 19 nt, Homo sapiens
  misc_RNA (1)...(19): siRNA sense strand
uugcaaaagaagagaggca

SEQ ID NO: 2431953 - RNA, 19 nt, Homo sapiens
  misc_RNA (1)...(19): siRNA sense strand
ugauaacagcacaaaguca

SEQ ID NO: 2431954 - RNA, 19 nt, Homo sapiens
  misc_RNA (1)...(19): siRNA sense strand
cagacauaagugaggcuga

SEQ ID NO: 2431955 - RNA, 19 nt, Homo sapiens
  misc_RNA (1)...(19): siRNA sense strand
aggugcacaugaaugauaa

SEQ ID NO: 2431956 - RNA, 19 nt, Homo sapiens
  misc_RNA (1)...(19): siRNA sense strand
aaauuaagcuggcgcugga

SEQ ID NO: 2431957 - RNA, 19 nt, Homo sapiens
  misc_RNA (1)...(19): siRNA sense strand
gggcaaaacagaaaagaca

SEQ ID NO: 2431958 - RNA, 19 nt, Homo sapiens
  misc_RNA (1)...(19): siRNA sense strand
ugaccauugcugagguaaa

SEQ ID NO: 2431959 - RNA, 19 nt, Homo sapiens
  misc_RNA (1)...(19): siRNA sense strand
cagccaaagcaguaggaga

SEQ ID NO: 2431960 - RNA, 19 nt, Homo sapiens
  misc_RNA (1)...(19): siRNA sense strand
cugagagagaaauuggaua

SEQ ID NO: 2431961 - RNA, 19 nt, Homo sapiens
  misc_RNA (1)...(19): siRNA sense strand
guaaagaauuccaagaccu

SEQ ID NO: 2431962 - RNA, 19 nt, Homo sapiens
  misc_RNA (1)...(19): siRNA sense strand
ggacaugccaacucggaga

SEQ ID NO: 2431963 - RNA, 19 nt, Homo sapiens
  misc_RNA (1)...(19): siRNA sense strand
uggaaugcacccagaucaa

SEQ ID NO: 2431964 - RNA, 19 nt, Homo sapiens
  misc_RNA (1)...(19): siRNA sense strand
aggagaacaucuugccaga

SEQ ID NO: 2431965 - RNA, 19 nt, Homo sapiens
  misc_RNA (1)...(19): siRNA sense strand
acaacauauggaacagaaa

SEQ ID NO: 2431966 - RNA, 19 nt, Homo sapiens
  misc_RNA (1)...(19): siRNA sense strand
gagagaaauuggauaggcu

SEQ ID NO: 2431967 - RNA, 19 nt, Homo sapiens
  misc_RNA (1)...(19): siRNA sense strand
gagccaagauagaucacca

SEQ ID NO: 2431968 - RNA, 19 nt, Homo sapiens
  misc_RNA (1)...(19): siRNA sense strand
agaugauccuggcgaccaa

SEQ ID NO: 2431969 - RNA, 19 nt, Homo sapiens
  misc_RNA (1)...(19): siRNA sense strand
ccgcugccugagagagaaa

SEQ ID NO: 2431970 - RNA, 19 nt, Homo sapiens
  misc_RNA (1)...(19): siRNA sense strand
cgagauacguuacgacgga

SEQ ID NO: 2431971 - RNA, 19 nt, Homo sapiens
  misc_RNA (1)...(19): siRNA sense strand
gcggaaaacuucagaggcu

SEQ ID NO: 2431972 - RNA, 19 nt, Homo sapiens
  misc_RNA (1)...(19): siRNA sense strand
gcaaaacagaaaagacaga

SEQ ID NO: 2431973 - RNA, 19 nt, Homo sapiens
  misc_RNA (1)...(19): siRNA sense strand
caacaguacuaccagcaga

SEQ ID NO: 2431974 - RNA, 19 nt, Homo sapiens
  misc_RNA (1)...(19): siRNA sense strand
agaacagacagcaagaaaa

SEQ ID NO: 2431975 - RNA, 19 nt, Homo sapiens
  misc_RNA (1)...(19): siRNA sense strand
ggauucuggccaaggacau

SEQ ID NO: 2431976 - RNA, 19 nt, Homo sapiens
  misc_RNA (1)...(19): siRNA sense strand
ucucaauggccaaggugga

SEQ ID NO: 2431977 - RNA, 19 nt, Homo sapiens
  misc_RNA (1)...(19): siRNA sense strand
cuugacauccagagacauu

SEQ ID NO: 2431978 - RNA, 19 nt, Homo sapiens
  misc_RNA (1)...(19): siRNA sense strand
cggaaagcagcuaauguca

SEQ ID NO: 2431979 - RNA, 19 nt, Homo sapiens
  misc_RNA (1)...(19): siRNA sense strand
gcacagaucauccaggaca

SEQ ID NO: 2431980 - RNA, 19 nt, Homo sapiens
  misc_RNA (1)...(19): siRNA sense strand
ccgacaugcgaguggugua

SEQ ID NO: 2431981 - RNA, 19 nt, Homo sapiens
  misc_RNA (1)...(19): siRNA sense strand
cuucaagccuguaaggaga

SEQ ID NO: 2431982 - RNA, 19 nt, Homo sapiens
  misc_RNA (1)...(19): siRNA sense strand
uuggccaggucuugugaaa

SEQ ID NO: 2431983 - RNA, 19 nt, Homo sapiens
  misc_RNA (1)...(19): siRNA sense strand
uucaaaagguggagagcua

SEQ ID NO: 2431984 - RNA, 19 nt, Homo sapiens
  misc_RNA (1)...(19): siRNA sense strand
gggauguaagagugaacaa

SEQ ID NO: 2431985 - RNA, 19 nt, Homo sapiens
  misc_RNA (1)...(19): siRNA sense strand
augcuagagcuuacagaua

SEQ ID NO: 2431986 - RNA, 19 nt, Homo sapiens
  misc_RNA (1)...(19): siRNA sense strand
cgacauacacacuggguac

SEQ ID NO: 2431987 - RNA, 19 nt, Homo sapiens
  misc_RNA (1)...(19): siRNA sense strand
cuauacacuucaaggacau

SEQ ID NO: 2431988 - RNA, 19 nt, Homo sapiens
  misc_RNA (1)...(19): siRNA sense strand
ggauauuucuugaacccuu

SEQ ID NO: 2431989 - RNA, 19 nt, Homo sapiens
  misc_RNA (1)...(19): siRNA sense strand
gagacagaaccgugagacu

SEQ ID NO: 2431990 - RNA, 19 nt, Homo sapiens
  misc_RNA (1)...(19): siRNA sense strand
ucucagaauuuaaagcuca

SEQ ID NO: 2431991 - RNA, 19 nt, Homo sapiens
  misc_RNA (1)...(19): siRNA sense strand
ugugaaagucaaaggagca

SEQ ID NO: 2431992 - RNA, 19 nt, Homo sapiens
  misc_RNA (1)...(19): siRNA sense strand
cugaagacaaauccauaaa

SEQ ID NO: 2431993 - RNA, 19 nt, Homo sapiens
  misc_RNA (1)...(19): siRNA sense strand
cuuuaacccuagugguaca

SEQ ID NO: 2431994 - RNA, 19 nt, Homo sapiens
  misc_RNA (1)...(19): siRNA sense strand
aaguugagacuguagaaau

SEQ ID NO: 2431995 - RNA, 19 nt, Homo sapiens
  misc_RNA (1)...(19): siRNA sense strand
cccuagugguacaugcaua

SEQ ID NO: 2431996 - RNA, 19 nt, Homo sapiens
  misc_RNA (1)...(19): siRNA sense strand
cuggguacgcugugccaaa

SEQ ID NO: 2431997 - RNA, 19 nt, Homo sapiens
  misc_RNA (1)...(19): siRNA sense strand
ucucagauuccguuggauu

SEQ ID NO: 2431998 - RNA, 19 nt, Homo sapiens
  misc_RNA (1)...(19): siRNA sense strand
gucuuauuauggaggacua

SEQ ID NO: 2431999 - RNA, 19 nt, Homo sapiens
  misc_RNA (1)...(19): siRNA sense strand
uggaagacuaauuguguca

SEQ ID NO: 2432000 - RNA, 19 nt, Homo sapiens
  misc_RNA (1)...(19): siRNA sense strand
cuuacagauauguggguca

SEQ ID NO: 2432001 - RNA, 19 nt, Homo sapiens
  misc_RNA (1)...(19): siRNA sense strand
agaugguacccuuaagauu

SEQ ID NO: 2432002 - RNA, 19 nt, Homo sapiens
  misc_RNA (1)...(19): siRNA sense strand
augcauagcuucagcaggu

SEQ ID NO: 2432003 - RNA, 19 nt, Homo sapiens
  misc_RNA (1)...(19): siRNA sense strand
ggauaccacaaauaagcaa

SEQ ID NO: 2432004 - RNA, 19 nt, Homo sapiens
  misc_RNA (1)...(19): siRNA sense strand
ugugaaagucugggaugua

SEQ ID NO: 2432005 - RNA, 19 nt, Homo sapiens
  misc_RNA (1)...(19): siRNA sense strand
aauccaaagcuugagguaa

SEQ ID NO: 2432006 - RNA, 19 nt, Homo sapiens
  misc_RNA (1)...(19): siRNA sense strand
gcauguaucgccagcgcuu

SEQ ID NO: 2432007 - RNA, 19 nt, Homo sapiens
  misc_RNA (1)...(19): siRNA sense strand
ggugaagaggccuguggau

SEQ ID NO: 2432008 - RNA, 19 nt, Homo sapiens
  misc_RNA (1)...(19): siRNA sense strand
aggaagaagugcagaggcu

SEQ ID NO: 2432009 - RNA, 19 nt, Homo sapiens
  misc_RNA (1)...(19): siRNA sense strand
gaagaggaccagcgggcuu

SEQ ID NO: 2432010 - RNA, 19 nt, Homo sapiens
  misc_RNA (1)...(19): siRNA sense strand
uggaccugcuggaggagaa

SEQ ID NO: 2432011 - RNA, 19 nt, Homo sapiens
  misc_RNA (1)...(19): siRNA sense strand
gugcaaugaaggaagaagu

SEQ ID NO: 2432012 - RNA, 19 nt, Homo sapiens
  misc_RNA (1)...(19): siRNA sense strand
caaugaaggaagaagugca

SEQ ID NO: 2432013 - RNA, 19 nt, Homo sapiens
  misc_RNA (1)...(19): siRNA sense strand
cgacaggaguggacagugc

SEQ ID NO: 2432014 - RNA, 19 nt, Homo sapiens
  misc_RNA (1)...(19): siRNA sense strand
aggaagaagugcagaggcu

SEQ ID NO: 2432015 - RNA, 19 nt, Homo sapiens
  misc_RNA (1)...(19): siRNA sense strand
gaagaggaccagcgggcuu

SEQ ID NO: 2432016 - RNA, 19 nt, Homo sapiens
  misc_RNA (1)...(19): siRNA sense strand
uggaccugcuggaggagaa

SEQ ID NO: 2432017 - RNA, 19 nt, Homo sapiens
  misc_RNA (1)...(19): siRNA sense strand
gugcaaugaaggaagaagu

SEQ ID NO: 2432018 - RNA, 19 nt, Homo sapiens
  misc_RNA (1)...(19): siRNA sense strand
caaugaaggaagaagugca

SEQ ID NO: 2432019 - RNA, 19 nt, Homo sapiens
  misc_RNA (1)...(19): siRNA sense strand
cgacaggaguggacagugc

SEQ ID NO: 2432020 - RNA, 19 nt, Homo sapiens
  misc_RNA (1)...(19): siRNA sense strand
aggauuuacacauggcauu

SEQ ID NO: 2432021 - RNA, 19 nt, Homo sapiens
  misc_RNA (1)...(19): siRNA sense strand
ugguuaacuccuuguguuu

SEQ ID NO: 2432022 - RNA, 19 nt, Homo sapiens
  misc_RNA (1)...(19): siRNA sense strand
agacagaagaccaaggaac

SEQ ID NO: 2432023 - RNA, 19 nt, Homo sapiens
  misc_RNA (1)...(19): siRNA sense strand
gguuauaacucaucagcag

SEQ ID NO: 2432024 - RNA, 19 nt, Homo sapiens
  misc_RNA (1)...(19): siRNA sense strand
agaaccaacaacagcuuaa

SEQ ID NO: 2432025 - RNA, 19 nt, Homo sapiens
  misc_RNA (1)...(19): siRNA sense strand
uuaacagacagaagaccaa

SEQ ID NO: 2432026 - RNA, 19 nt, Homo sapiens
  misc_RNA (1)...(19): siRNA sense strand
uugcaauaguugugagaaa

SEQ ID NO: 2432027 - RNA, 19 nt, Homo sapiens
  misc_RNA (1)...(19): siRNA sense strand
cagcagaaguuguagccaa

SEQ ID NO: 2432028 - RNA, 19 nt, Homo sapiens
  misc_RNA (1)...(19): siRNA sense strand
gugugaugcaugugggaaa

SEQ ID NO: 2432029 - RNA, 19 nt, Homo sapiens
  misc_RNA (1)...(19): siRNA sense strand
auguaaugagugugggaaa

SEQ ID NO: 2432030 - RNA, 19 nt, Homo sapiens
  misc_RNA (1)...(19): siRNA sense strand
aauucauacaggugagaaa

SEQ ID NO: 2432031 - RNA, 19 nt, Homo sapiens
  misc_RNA (1)...(19): siRNA sense strand
augugaugaaugugagaaa

SEQ ID NO: 2432032 - RNA, 19 nt, Homo sapiens
  misc_RNA (1)...(19): siRNA sense strand
augugaugaaugugggaaa

SEQ ID NO: 2432033 - RNA, 19 nt, Homo sapiens
  misc_RNA (1)...(19): siRNA sense strand
uguaaucaguguagcaaaa

SEQ ID NO: 2432034 - RNA, 19 nt, Homo sapiens
  misc_RNA (1)...(19): siRNA sense strand
uauuaaacaucgaaggauc

SEQ ID NO: 2432035 - RNA, 19 nt, Homo sapiens
  misc_RNA (1)...(19): siRNA sense strand
acuuacuauucaugaggaa

SEQ ID NO: 2432036 - RNA, 19 nt, Homo sapiens
  misc_RNA (1)...(19): siRNA sense strand
ccuuauucuucaucagaga

SEQ ID NO: 2432037 - RNA, 19 nt, Homo sapiens
  misc_RNA (1)...(19): siRNA sense strand
ccuuauucuucaucagaga

SEQ ID NO: 2432038 - RNA, 19 nt, Homo sapiens
  misc_RNA (1)...(19): siRNA sense strand
aagccuuaucauugcaaua

SEQ ID NO: 2432039 - RNA, 19 nt, Homo sapiens
  misc_RNA (1)...(19): siRNA sense strand
ggagagaagccuuacccau

SEQ ID NO: 2432040 - RNA, 19 nt, Homo sapiens
  misc_RNA (1)...(19): siRNA sense strand
caguaggcuuucagaucuu

SEQ ID NO: 2432041 - RNA, 19 nt, Homo sapiens
  misc_RNA (1)...(19): siRNA sense strand
aaacccaugcugaggagaa

SEQ ID NO: 2432042 - RNA, 19 nt, Homo sapiens
  misc_RNA (1)...(19): siRNA sense strand
gugggaaagccuucaguca

SEQ ID NO: 2432043 - RNA, 19 nt, Homo sapiens
  misc_RNA (1)...(19): siRNA sense strand
augugaugaguguggcaaa

SEQ ID NO: 2432044 - RNA, 19 nt, Homo sapiens
  misc_RNA (1)...(19): siRNA sense strand
ccauguaaucaguguagca

SEQ ID NO: 2432045 - RNA, 19 nt, Homo sapiens
  misc_RNA (1)...(19): siRNA sense strand
ucuuauugaacaccagaaa

SEQ ID NO: 2432046 - RNA, 19 nt, Homo sapiens
  misc_RNA (1)...(19): siRNA sense strand
ugugaucaauguagcaaaa

SEQ ID NO: 2432047 - RNA, 19 nt, Homo sapiens
  misc_RNA (1)...(19): siRNA sense strand
acuaaacaucagagaguac

SEQ ID NO: 2432048 - RNA, 19 nt, Homo sapiens
  misc_RNA (1)...(19): siRNA sense strand
cagucagaauucagaccuu

SEQ ID NO: 2432049 - RNA, 19 nt, Homo sapiens
  misc_RNA (1)...(19): siRNA sense strand
cccuauaaauguaaugagu

SEQ ID NO: 2432050 - RNA, 19 nt, Homo sapiens
  misc_RNA (1)...(19): siRNA sense strand
aauguuuagucgaagauga

SEQ ID NO: 2432051 - RNA, 19 nt, Homo sapiens
  misc_RNA (1)...(19): siRNA sense strand
cuauucaguaccagagaca

SEQ ID NO: 2432052 - RNA, 19 nt, Homo sapiens
  misc_RNA (1)...(19): siRNA sense strand
ccguauaagugugaugcau

SEQ ID NO: 2432053 - RNA, 19 nt, Homo sapiens
  misc_RNA (1)...(19): siRNA sense strand
ggaugaaggcugcgggcau

SEQ ID NO: 2432054 - RNA, 19 nt, Homo sapiens
  misc_RNA (1)...(19): siRNA sense strand
ggaaugaacuauuggcaag

SEQ ID NO: 2432055 - RNA, 19 nt, Homo sapiens
  misc_RNA (1)...(19): siRNA sense strand
aggaaugaacuauuggcaa

SEQ ID NO: 2432056 - RNA, 19 nt, Homo sapiens
  misc_RNA (1)...(19): siRNA sense strand
cgcggaaagcugaaggaga

SEQ ID NO: 2432057 - RNA, 19 nt, Homo sapiens
  misc_RNA (1)...(19): siRNA sense strand
gaagaaacauugugagggc

SEQ ID NO: 2432058 - RNA, 19 nt, Homo sapiens
  misc_RNA (1)...(19): siRNA sense strand
gugauaaagaugaggaaaa

SEQ ID NO: 2432059 - RNA, 19 nt, Homo sapiens
  misc_RNA (1)...(19): siRNA sense strand
gguaaaagucccauagaaa

SEQ ID NO: 2432060 - RNA, 19 nt, Homo sapiens
  misc_RNA (1)...(19): siRNA sense strand
ccucauguaucuaaggaaa

SEQ ID NO: 2432061 - RNA, 19 nt, Homo sapiens
  misc_RNA (1)...(19): siRNA sense strand
acauagaaacugaggaaaa

SEQ ID NO: 2432062 - RNA, 19 nt, Homo sapiens
  misc_RNA (1)...(19): siRNA sense strand
uggaauaggaaaaggaaaa

SEQ ID NO: 2432063 - RNA, 19 nt, Homo sapiens
  misc_RNA (1)...(19): siRNA sense strand
ggauaauagcuguguucaa

SEQ ID NO: 2432064 - RNA, 19 nt, Homo sapiens
  misc_RNA (1)...(19): siRNA sense strand
ugaaaaggucauagggaaa

SEQ ID NO: 2432065 - RNA, 19 nt, Homo sapiens
  misc_RNA (1)...(19): siRNA sense strand
aacuaaagcuucaggaaau

SEQ ID NO: 2432066 - RNA, 19 nt, Homo sapiens
  misc_RNA (1)...(19): siRNA sense strand
cuguagagguagcugauaa

SEQ ID NO: 2432067 - RNA, 19 nt, Homo sapiens
  misc_RNA (1)...(19): siRNA sense strand
guucagaggaagagcaaaa

SEQ ID NO: 2432068 - RNA, 19 nt, Homo sapiens
  misc_RNA (1)...(19): siRNA sense strand
ugguggaguucuugauaaa

SEQ ID NO: 2432069 - RNA, 19 nt, Homo sapiens
  misc_RNA (1)...(19): siRNA sense strand
cuguaguguuuguagauaa

SEQ ID NO: 2432070 - RNA, 19 nt, Homo sapiens
  misc_RNA (1)...(19): siRNA sense strand
cagaagacgauaagaauga

SEQ ID NO: 2432071 - RNA, 19 nt, Homo sapiens
  misc_RNA (1)...(19): siRNA sense strand
aauccaaugcuuugagaaa

SEQ ID NO: 2432072 - RNA, 19 nt, Homo sapiens
  misc_RNA (1)...(19): siRNA sense strand
uguacaaaguccuggauuu

SEQ ID NO: 2432073 - RNA, 19 nt, Homo sapiens
  misc_RNA (1)...(19): siRNA sense strand
uccaaugcuuugagaaaua

SEQ ID NO: 2432074 - RNA, 19 nt, Homo sapiens
  misc_RNA (1)...(19): siRNA sense strand
gaaauaacuacuaggccua

SEQ ID NO: 2432075 - RNA, 19 nt, Homo sapiens
  misc_RNA (1)...(19): siRNA sense strand
aguugaaagcugucaguua

SEQ ID NO: 2432076 - RNA, 19 nt, Homo sapiens
  misc_RNA (1)...(19): siRNA sense strand
ggucauagggaaaguugua

SEQ ID NO: 2432077 - RNA, 19 nt, Homo sapiens
  misc_RNA (1)...(19): siRNA sense strand
caaauaugagagaggagaa

SEQ ID NO: 2432078 - RNA, 19 nt, Homo sapiens
  misc_RNA (1)...(19): siRNA sense strand
gcaaauagcagcugcacca

SEQ ID NO: 2432079 - RNA, 19 nt, Homo sapiens
  misc_RNA (1)...(19): siRNA sense strand
ccauaaacucugcagacaa

SEQ ID NO: 2432080 - RNA, 19 nt, Homo sapiens
  misc_RNA (1)...(19): siRNA sense strand
gcuggaaauaagaguuuaa

SEQ ID NO: 2432081 - RNA, 19 nt, Homo sapiens
  misc_RNA (1)...(19): siRNA sense strand
ggagauguucuuugggaau

SEQ ID NO: 2432082 - RNA, 19 nt, Homo sapiens
  misc_RNA (1)...(19): siRNA sense strand
ggguacaagaagaagaaga

SEQ ID NO: 2432083 - RNA, 19 nt, Homo sapiens
  misc_RNA (1)...(19): siRNA sense strand
ugaacuaucccaaaggaaa

SEQ ID NO: 2432084 - RNA, 19 nt, Homo sapiens
  misc_RNA (1)...(19): siRNA sense strand
ccguauuguucacagauaa

SEQ ID NO: 2432085 - RNA, 19 nt, Homo sapiens
  misc_RNA (1)...(19): siRNA sense strand
agauaguagagaugaggaa

SEQ ID NO: 2432086 - RNA, 19 nt, Homo sapiens
  misc_RNA (1)...(19): siRNA sense strand
gguacaagaagaagaagau

SEQ ID NO: 2432087 - RNA, 19 nt, Homo sapiens
  misc_RNA (1)...(19): siRNA sense strand
guuuguggauccagugaua

SEQ ID NO: 2432088 - RNA, 19 nt, Homo sapiens
  misc_RNA (1)...(19): siRNA sense strand
aagagaaauuguaguguca

SEQ ID NO: 2432089 - RNA, 19 nt, Homo sapiens
  misc_RNA (1)...(19): siRNA sense strand
guaaugaugccauggaaau

SEQ ID NO: 2432090 - RNA, 19 nt, Homo sapiens
  misc_RNA (1)...(19): siRNA sense strand
gagucauacaguugcaaua

SEQ ID NO: 2432091 - RNA, 19 nt, Homo sapiens
  misc_RNA (1)...(19): siRNA sense strand
aaguagucauacagugaaa

SEQ ID NO: 2432092 - RNA, 19 nt, Homo sapiens
  misc_RNA (1)...(19): siRNA sense strand
gugaaaggaaacaugcaaa

SEQ ID NO: 2432093 - RNA, 19 nt, Homo sapiens
  misc_RNA (1)...(19): siRNA sense strand
gaggaaaaguuuaagcaau

SEQ ID NO: 2432094 - RNA, 19 nt, Homo sapiens
  misc_RNA (1)...(19): siRNA sense strand
gcauauagugcaagcuaca

SEQ ID NO: 2432095 - RNA, 19 nt, Homo sapiens
  misc_RNA (1)...(19): siRNA sense strand
cuacuaggccuauggacaa

SEQ ID NO: 2432096 - RNA, 19 nt, Homo sapiens
  misc_RNA (1)...(19): siRNA sense strand
aggaacaccaacagugaua

SEQ ID NO: 2432097 - RNA, 19 nt, Homo sapiens
  misc_RNA (1)...(19): siRNA sense strand
gaucagacauaauagccaa

SEQ ID NO: 2432098 - RNA, 19 nt, Homo sapiens
  misc_RNA (1)...(19): siRNA sense strand
uggauaucacuaagaguua

SEQ ID NO: 2432099 - RNA, 19 nt, Homo sapiens
  misc_RNA (1)...(19): siRNA sense strand
ccggagaguaccagugaau

SEQ ID NO: 2432100 - RNA, 19 nt, Homo sapiens
  misc_RNA (1)...(19): siRNA sense strand
gaacuaucccaaaggaaaa

SEQ ID NO: 2432101 - RNA, 19 nt, Homo sapiens
  misc_RNA (1)...(19): siRNA sense strand
ccacgaaaucuauuggcua

SEQ ID NO: 2432102 - RNA, 19 nt, Homo sapiens
  misc_RNA (1)...(19): siRNA sense strand
ccaaaauacucaauaguga

SEQ ID NO: 2432103 - RNA, 19 nt, Homo sapiens
  misc_RNA (1)...(19): siRNA sense strand
ccacaguaacucagacgua

SEQ ID NO: 2432104 - RNA, 19 nt, Homo sapiens
  misc_RNA (1)...(19): siRNA sense strand
ggaacuaaagcuucaggaa

SEQ ID NO: 2432105 - RNA, 19 nt, Homo sapiens
  misc_RNA (1)...(19): siRNA sense strand
gcuaaagauaguagagaug

SEQ ID NO: 2432106 - RNA, 19 nt, Homo sapiens
  misc_RNA (1)...(19): siRNA sense strand
guggaaauagauaacgaaa

SEQ ID NO: 2432107 - RNA, 19 nt, Homo sapiens
  misc_RNA (1)...(19): siRNA sense strand
gcuauuaggcccauggaca

SEQ ID NO: 2432108 - RNA, 19 nt, Homo sapiens
  misc_RNA (1)...(19): siRNA sense strand
cuauuaggcccauggacaa

SEQ ID NO: 2432109 - RNA, 19 nt, Homo sapiens
  misc_RNA (1)...(19): siRNA sense strand
gcacacaaugauaugcaua

SEQ ID NO: 2432110 - RNA, 19 nt, Homo sapiens
  misc_RNA (1)...(19): siRNA sense strand
gaaaauagugagaaaguca

SEQ ID NO: 2432111 - RNA, 19 nt, Homo sapiens
  misc_RNA (1)...(19): siRNA sense strand
acuaaagcuucaggaaaua

SEQ ID NO: 2432112 - RNA, 19 nt, Homo sapiens
  misc_RNA (1)...(19): siRNA sense strand
gagaccaacucacgggaau

SEQ ID NO: 2432113 - RNA, 19 nt, Homo sapiens
  misc_RNA (1)...(19): siRNA sense strand
cagaugaaugugaagaaau

SEQ ID NO: 2432114 - RNA, 19 nt, Homo sapiens
  misc_RNA (1)...(19): siRNA sense strand
agcaaaagucagagaagaa

SEQ ID NO: 2432115 - RNA, 19 nt, Homo sapiens
  misc_RNA (1)...(19): siRNA sense strand
cauucaaacucaugucaau

SEQ ID NO: 2432116 - RNA, 19 nt, Homo sapiens
  misc_RNA (1)...(19): siRNA sense strand
uuucagaagacgauaagaa

SEQ ID NO: 2432117 - RNA, 19 nt, Homo sapiens
  misc_RNA (1)...(19): siRNA sense strand
uguaaugaugccauggaaa

SEQ ID NO: 2432118 - RNA, 19 nt, Homo sapiens
  misc_RNA (1)...(19): siRNA sense strand
aaauaugagagaggagaaa

SEQ ID NO: 2432119 - RNA, 19 nt, Homo sapiens
  misc_RNA (1)...(19): siRNA sense strand
caggaaauggugaaaguga

SEQ ID NO: 2432120 - RNA, 19 nt, Homo sapiens
  misc_RNA (1)...(19): siRNA sense strand
aagcacuggcuguaggaaa

SEQ ID NO: 2432121 - RNA, 19 nt, Homo sapiens
  misc_RNA (1)...(19): siRNA sense strand
uccaaaggaucaaaugaaa

SEQ ID NO: 2432122 - RNA, 19 nt, Homo sapiens
  misc_RNA (1)...(19): siRNA sense strand
ggagaguaccagugaaucu

SEQ ID NO: 2432123 - RNA, 19 nt, Homo sapiens
  misc_RNA (1)...(19): siRNA sense strand
aacaaugaacagacagaua

SEQ ID NO: 2432124 - RNA, 19 nt, Homo sapiens
  misc_RNA (1)...(19): siRNA sense strand
guaaaagucccauagaaaa

SEQ ID NO: 2432125 - RNA, 19 nt, Homo sapiens
  misc_RNA (1)...(19): siRNA sense strand
acuuggaaucugagggaca

SEQ ID NO: 2432126 - RNA, 19 nt, Homo sapiens
  misc_RNA (1)...(19): siRNA sense strand
ugaaaggaaacaugcaaau

SEQ ID NO: 2432127 - RNA, 19 nt, Homo sapiens
  misc_RNA (1)...(19): siRNA sense strand
gguuauggaacuaaagcuu

SEQ ID NO: 2432128 - RNA, 19 nt, Homo sapiens
  misc_RNA (1)...(19): siRNA sense strand
gggagaugacuaaacuuaa

SEQ ID NO: 2432129 - RNA, 19 nt, Homo sapiens
  misc_RNA (1)...(19): siRNA sense strand
gugauaaagaugaggaaaa

SEQ ID NO: 2432130 - RNA, 19 nt, Homo sapiens
  misc_RNA (1)...(19): siRNA sense strand
gguaaaagucccauagaaa

SEQ ID NO: 2432131 - RNA, 19 nt, Homo sapiens
  misc_RNA (1)...(19): siRNA sense strand
ccucauguaucuaaggaaa

SEQ ID NO: 2432132 - RNA, 19 nt, Homo sapiens
  misc_RNA (1)...(19): siRNA sense strand
acauagaaacugaggaaaa

SEQ ID NO: 2432133 - RNA, 19 nt, Homo sapiens
  misc_RNA (1)...(19): siRNA sense strand
uggaauaggaaaaggaaaa

SEQ ID NO: 2432134 - RNA, 19 nt, Homo sapiens
  misc_RNA (1)...(19): siRNA sense strand
ggauaauagcuguguucaa

SEQ ID NO: 2432135 - RNA, 19 nt, Homo sapiens
  misc_RNA (1)...(19): siRNA sense strand
ugaaaaggucauagggaaa

SEQ ID NO: 2432136 - RNA, 19 nt, Homo sapiens
  misc_RNA (1)...(19): siRNA sense strand
aacuaaagcuucaggaaau

SEQ ID NO: 2432137 - RNA, 19 nt, Homo sapiens
  misc_RNA (1)...(19): siRNA sense strand
cuguagagguagcugauaa

SEQ ID NO: 2432138 - RNA, 19 nt, Homo sapiens
  misc_RNA (1)...(19): siRNA sense strand
guucagaggaagagcaaaa

SEQ ID NO: 2432139 - RNA, 19 nt, Homo sapiens
  misc_RNA (1)...(19): siRNA sense strand
ugguggaguucuugauaaa

SEQ ID NO: 2432140 - RNA, 19 nt, Homo sapiens
  misc_RNA (1)...(19): siRNA sense strand
cuguaguguuuguagauaa

SEQ ID NO: 2432141 - RNA, 19 nt, Homo sapiens
  misc_RNA (1)...(19): siRNA sense strand
cagaagacgauaagaauga

SEQ ID NO: 2432142 - RNA, 19 nt, Homo sapiens
  misc_RNA (1)...(19): siRNA sense strand
aauccaaugcuuugagaaa

SEQ ID NO: 2432143 - RNA, 19 nt, Homo sapiens
  misc_RNA (1)...(19): siRNA sense strand
uguacaaaguccuggauuu

SEQ ID NO: 2432144 - RNA, 19 nt, Homo sapiens
  misc_RNA (1)...(19): siRNA sense strand
uccaaugcuuugagaaaua

SEQ ID NO: 2432145 - RNA, 19 nt, Homo sapiens
  misc_RNA (1)...(19): siRNA sense strand
gaaauaacuacuaggccua

SEQ ID NO: 2432146 - RNA, 19 nt, Homo sapiens
  misc_RNA (1)...(19): siRNA sense strand
aguugaaagcugucaguua

SEQ ID NO: 2432147 - RNA, 19 nt, Homo sapiens
  misc_RNA (1)...(19): siRNA sense strand
ggucauagggaaaguugua

SEQ ID NO: 2432148 - RNA, 19 nt, Homo sapiens
  misc_RNA (1)...(19): siRNA sense strand
caaauaugagagaggagaa

SEQ ID NO: 2432149 - RNA, 19 nt, Homo sapiens
  misc_RNA (1)...(19): siRNA sense strand
gcaaauagcagcugcacca

SEQ ID NO: 2432150 - RNA, 19 nt, Homo sapiens
  misc_RNA (1)...(19): siRNA sense strand
ccauaaacucugcagacaa

SEQ ID NO: 2432151 - RNA, 19 nt, Homo sapiens
  misc_RNA (1)...(19): siRNA sense strand
gcuggaaauaagaguuuaa

SEQ ID NO: 2432152 - RNA, 19 nt, Homo sapiens
  misc_RNA (1)...(19): siRNA sense strand
ggagauguucuuugggaau

SEQ ID NO: 2432153 - RNA, 19 nt, Homo sapiens
  misc_RNA (1)...(19): siRNA sense strand
ggguacaagaagaagaaga

SEQ ID NO: 2432154 - RNA, 19 nt, Homo sapiens
  misc_RNA (1)...(19): siRNA sense strand
ugaacuaucccaaaggaaa

SEQ ID NO: 2432155 - RNA, 19 nt, Homo sapiens
  misc_RNA (1)...(19): siRNA sense strand
ccguauuguucacagauaa

SEQ ID NO: 2432156 - RNA, 19 nt, Homo sapiens
  misc_RNA (1)...(19): siRNA sense strand
agauaguagagaugaggaa

SEQ ID NO: 2432157 - RNA, 19 nt, Homo sapiens
  misc_RNA (1)...(19): siRNA sense strand
gguacaagaagaagaagau

SEQ ID NO: 2432158 - RNA, 19 nt, Homo sapiens
  misc_RNA (1)...(19): siRNA sense strand
guuuguggauccagugaua

SEQ ID NO: 2432159 - RNA, 19 nt, Homo sapiens
  misc_RNA (1)...(19): siRNA sense strand
aagagaaauuguaguguca

SEQ ID NO: 2432160 - RNA, 19 nt, Homo sapiens
  misc_RNA (1)...(19): siRNA sense strand
guaaugaugccauggaaau

SEQ ID NO: 2432161 - RNA, 19 nt, Homo sapiens
  misc_RNA (1)...(19): siRNA sense strand
gagucauacaguugcaaua

SEQ ID NO: 2432162 - RNA, 19 nt, Homo sapiens
  misc_RNA (1)...(19): siRNA sense strand
aaguagucauacagugaaa

SEQ ID NO: 2432163 - RNA, 19 nt, Homo sapiens
  misc_RNA (1)...(19): siRNA sense strand
gugaaaggaaacaugcaaa

SEQ ID NO: 2432164 - RNA, 19 nt, Homo sapiens
  misc_RNA (1)...(19): siRNA sense strand
gaggaaaaguuuaagcaau

SEQ ID NO: 2432165 - RNA, 19 nt, Homo sapiens
  misc_RNA (1)...(19): siRNA sense strand
gcauauagugcaagcuaca

SEQ ID NO: 2432166 - RNA, 19 nt, Homo sapiens
  misc_RNA (1)...(19): siRNA sense strand
gaagauauucauaaggaga

SEQ ID NO: 2432167 - RNA, 19 nt, Homo sapiens
  misc_RNA (1)...(19): siRNA sense strand
cuacuaggccuauggacaa

SEQ ID NO: 2432168 - RNA, 19 nt, Homo sapiens
  misc_RNA (1)...(19): siRNA sense strand
aggaacaccaacagugaua

SEQ ID NO: 2432169 - RNA, 19 nt, Homo sapiens
  misc_RNA (1)...(19): siRNA sense strand
gaucagacauaauagccaa

SEQ ID NO: 2432170 - RNA, 19 nt, Homo sapiens
  misc_RNA (1)...(19): siRNA sense strand
uggauaucacuaagaguua

SEQ ID NO: 2432171 - RNA, 19 nt, Homo sapiens
  misc_RNA (1)...(19): siRNA sense strand
ccggagaguaccagugaau

SEQ ID NO: 2432172 - RNA, 19 nt, Homo sapiens
  misc_RNA (1)...(19): siRNA sense strand
gaacuaucccaaaggaaaa

SEQ ID NO: 2432173 - RNA, 19 nt, Homo sapiens
  misc_RNA (1)...(19): siRNA sense strand
ccacgaaaucuauuggcua

SEQ ID NO: 2432174 - RNA, 19 nt, Homo sapiens
  misc_RNA (1)...(19): siRNA sense strand
ccaaaauacucaauaguga

SEQ ID NO: 2432175 - RNA, 19 nt, Homo sapiens
  misc_RNA (1)...(19): siRNA sense strand
ccacaguaacucagacgua

SEQ ID NO: 2432176 - RNA, 19 nt, Homo sapiens
  misc_RNA (1)...(19): siRNA sense strand
ggaacuaaagcuucaggaa

SEQ ID NO: 2432177 - RNA, 19 nt, Homo sapiens
  misc_RNA (1)...(19): siRNA sense strand
gcuaaagauaguagagaug

SEQ ID NO: 2432178 - RNA, 19 nt, Homo sapiens
  misc_RNA (1)...(19): siRNA sense strand
guggaaauagauaacgaaa

SEQ ID NO: 2432179 - RNA, 19 nt, Homo sapiens
  misc_RNA (1)...(19): siRNA sense strand
gcuauuaggcccauggaca

SEQ ID NO: 2432180 - RNA, 19 nt, Homo sapiens
  misc_RNA (1)...(19): siRNA sense strand
cuauuaggcccauggacaa

SEQ ID NO: 2432181 - RNA, 19 nt, Homo sapiens
  misc_RNA (1)...(19): siRNA sense strand
gcacacaaugauaugcaua

SEQ ID NO: 2432182 - RNA, 19 nt, Homo sapiens
  misc_RNA (1)...(19): siRNA sense strand
gaaaauagugagaaaguca

SEQ ID NO: 2432183 - RNA, 19 nt, Homo sapiens
  misc_RNA (1)...(19): siRNA sense strand
acuaaagcuucaggaaaua

SEQ ID NO: 2432184 - RNA, 19 nt, Homo sapiens
  misc_RNA (1)...(19): siRNA sense strand
gagaccaacucacgggaau

SEQ ID NO: 2432185 - RNA, 19 nt, Homo sapiens
  misc_RNA (1)...(19): siRNA sense strand
cagaugaaugugaagaaau

SEQ ID NO: 2432186 - RNA, 19 nt, Homo sapiens
  misc_RNA (1)...(19): siRNA sense strand
agcaaaagucagagaagaa

SEQ ID NO: 2432187 - RNA, 19 nt, Homo sapiens
  misc_RNA (1)...(19): siRNA sense strand
cauucaaacucaugucaau

SEQ ID NO: 2432188 - RNA, 19 nt, Homo sapiens
  misc_RNA (1)...(19): siRNA sense strand
uuucagaagacgauaagaa

SEQ ID NO: 2432189 - RNA, 19 nt, Homo sapiens
  misc_RNA (1)...(19): siRNA sense strand
uguaaugaugccauggaaa

SEQ ID NO: 2432190 - RNA, 19 nt, Homo sapiens
  misc_RNA (1)...(19): siRNA sense strand
aaauaugagagaggagaaa

SEQ ID NO: 2432191 - RNA, 19 nt, Homo sapiens
  misc_RNA (1)...(19): siRNA sense strand
caggaaauggugaaaguga

SEQ ID NO: 2432192 - RNA, 19 nt, Homo sapiens
  misc_RNA (1)...(19): siRNA sense strand
aagcacuggcuguaggaaa

SEQ ID NO: 2432193 - RNA, 19 nt, Homo sapiens
  misc_RNA (1)...(19): siRNA sense strand
uccaaaggaucaaaugaaa

SEQ ID NO: 2432194 - RNA, 19 nt, Homo sapiens
  misc_RNA (1)...(19): siRNA sense strand
ggagaguaccagugaaucu

SEQ ID NO: 2432195 - RNA, 19 nt, Homo sapiens
  misc_RNA (1)...(19): siRNA sense strand
aacaaugaacagacagaua

SEQ ID NO: 2432196 - RNA, 19 nt, Homo sapiens
  misc_RNA (1)...(19): siRNA sense strand
guaaaagucccauagaaaa

SEQ ID NO: 2432197 - RNA, 19 nt, Homo sapiens
  misc_RNA (1)...(19): siRNA sense strand
acuuggaaucugagggaca

SEQ ID NO: 2432198 - RNA, 19 nt, Homo sapiens
  misc_RNA (1)...(19): siRNA sense strand
ugaaaggaaacaugcaaau

SEQ ID NO: 2432199 - RNA, 19 nt, Homo sapiens
  misc_RNA (1)...(19): siRNA sense strand
gguuauggaacuaaagcuu

SEQ ID NO: 2432200 - RNA, 19 nt, Homo sapiens
  misc_RNA (1)...(19): siRNA sense strand
gugauaaagaugaggaaaa

SEQ ID NO: 2432201 - RNA, 19 nt, Homo sapiens
  misc_RNA (1)...(19): siRNA sense strand
gguaaaagucccauagaaa

SEQ ID NO: 2432202 - RNA, 19 nt, Homo sapiens
  misc_RNA (1)...(19): siRNA sense strand
ccucauguaucuaaggaaa

SEQ ID NO: 2432203 - RNA, 19 nt, Homo sapiens
  misc_RNA (1)...(19): siRNA sense strand
acauagaaacugaggaaaa

SEQ ID NO: 2432204 - RNA, 19 nt, Homo sapiens
  misc_RNA (1)...(19): siRNA sense strand
uggaauaggaaaaggaaaa

SEQ ID NO: 2432205 - RNA, 19 nt, Homo sapiens
  misc_RNA (1)...(19): siRNA sense strand
ggauaauagcuguguucaa

SEQ ID NO: 2432206 - RNA, 19 nt, Homo sapiens
  misc_RNA (1)...(19): siRNA sense strand
ugaaaaggucauagggaaa

SEQ ID NO: 2432207 - RNA, 19 nt, Homo sapiens
  misc_RNA (1)...(19): siRNA sense strand
aacuaaagcuucaggaaau

SEQ ID NO: 2432208 - RNA, 19 nt, Homo sapiens
  misc_RNA (1)...(19): siRNA sense strand
cuguagagguagcugauaa

SEQ ID NO: 2432209 - RNA, 19 nt, Homo sapiens
  misc_RNA (1)...(19): siRNA sense strand
guucagaggaagagcaaaa

SEQ ID NO: 2432210 - RNA, 19 nt, Homo sapiens
  misc_RNA (1)...(19): siRNA sense strand
ugguggaguucuugauaaa

SEQ ID NO: 2432211 - RNA, 19 nt, Homo sapiens
  misc_RNA (1)...(19): siRNA sense strand
cuguaguguuuguagauaa

SEQ ID NO: 2432212 - RNA, 19 nt, Homo sapiens
  misc_RNA (1)...(19): siRNA sense strand
cagaagacgauaagaauga

SEQ ID NO: 2432213 - RNA, 19 nt, Homo sapiens
  misc_RNA (1)...(19): siRNA sense strand
aauccaaugcuuugagaaa

SEQ ID NO: 2432214 - RNA, 19 nt, Homo sapiens
  misc_RNA (1)...(19): siRNA sense strand
uguacaaaguccuggauuu

SEQ ID NO: 2432215 - RNA, 19 nt, Homo sapiens
  misc_RNA (1)...(19): siRNA sense strand
uccaaugcuuugagaaaua

SEQ ID NO: 2432216 - RNA, 19 nt, Homo sapiens
  misc_RNA (1)...(19): siRNA sense strand
gaaauaacuacuaggccua

SEQ ID NO: 2432217 - RNA, 19 nt, Homo sapiens
  misc_RNA (1)...(19): siRNA sense strand
aguugaaagcugucaguua

SEQ ID NO: 2432218 - RNA, 19 nt, Homo sapiens
  misc_RNA (1)...(19): siRNA sense strand
ggucauagggaaaguugua

SEQ ID NO: 2432219 - RNA, 19 nt, Homo sapiens
  misc_RNA (1)...(19): siRNA sense strand
caaauaugagagaggagaa

SEQ ID NO: 2432220 - RNA, 19 nt, Homo sapiens
  misc_RNA (1)...(19): siRNA sense strand
gcaaauagcagcugcacca

SEQ ID NO: 2432221 - RNA, 19 nt, Homo sapiens
  misc_RNA (1)...(19): siRNA sense strand
ccauaaacucugcagacaa

SEQ ID NO: 2432222 - RNA, 19 nt, Homo sapiens
  misc_RNA (1)...(19): siRNA sense strand
gcuggaaauaagaguuuaa

SEQ ID NO: 2432223 - RNA, 19 nt, Homo sapiens
  misc_RNA (1)...(19): siRNA sense strand
ggagauguucuuugggaau

SEQ ID NO: 2432224 - RNA, 19 nt, Homo sapiens
  misc_RNA (1)...(19): siRNA sense strand
ggguacaagaagaagaaga

SEQ ID NO: 2432225 - RNA, 19 nt, Homo sapiens
  misc_RNA (1)...(19): siRNA sense strand
ugaacuaucccaaaggaaa

SEQ ID NO: 2432226 - RNA, 19 nt, Homo sapiens
  misc_RNA (1)...(19): siRNA sense strand
ccguauuguucacagauaa

SEQ ID NO: 2432227 - RNA, 19 nt, Homo sapiens
  misc_RNA (1)...(19): siRNA sense strand
agauaguagagaugaggaa

SEQ ID NO: 2432228 - RNA, 19 nt, Homo sapiens
  misc_RNA (1)...(19): siRNA sense strand
gguacaagaagaagaagau

SEQ ID NO: 2432229 - RNA, 19 nt, Homo sapiens
  misc_RNA (1)...(19): siRNA sense strand
guuuguggauccagugaua

SEQ ID NO: 2432230 - RNA, 19 nt, Homo sapiens
  misc_RNA (1)...(19): siRNA sense strand
aagagaaauuguaguguca

SEQ ID NO: 2432231 - RNA, 19 nt, Homo sapiens
  misc_RNA (1)...(19): siRNA sense strand
guaaugaugccauggaaau

SEQ ID NO: 2432232 - RNA, 19 nt, Homo sapiens
  misc_RNA (1)...(19): siRNA sense strand
gagucauacaguugcaaua

SEQ ID NO: 2432233 - RNA, 19 nt, Homo sapiens
  misc_RNA (1)...(19): siRNA sense strand
aaguagucauacagugaaa

SEQ ID NO: 2432234 - RNA, 19 nt, Homo sapiens
  misc_RNA (1)...(19): siRNA sense strand
gugaaaggaaacaugcaaa

SEQ ID NO: 2432235 - RNA, 19 nt, Homo sapiens
  misc_RNA (1)...(19): siRNA sense strand
gaggaaaaguuuaagcaau

SEQ ID NO: 2432236 - RNA, 19 nt, Homo sapiens
  misc_RNA (1)...(19): siRNA sense strand
gcauauagugcaagcuaca

SEQ ID NO: 2432237 - RNA, 19 nt, Homo sapiens
  misc_RNA (1)...(19): siRNA sense strand
gaagauauucauaaggaga

SEQ ID NO: 2432238 - RNA, 19 nt, Homo sapiens
  misc_RNA (1)...(19): siRNA sense strand
cuacuaggccuauggacaa

SEQ ID NO: 2432239 - RNA, 19 nt, Homo sapiens
  misc_RNA (1)...(19): siRNA sense strand
aggaacaccaacagugaua

SEQ ID NO: 2432240 - RNA, 19 nt, Homo sapiens
  misc_RNA (1)...(19): siRNA sense strand
gaucagacauaauagccaa

SEQ ID NO: 2432241 - RNA, 19 nt, Homo sapiens
  misc_RNA (1)...(19): siRNA sense strand
uggauaucacuaagaguua

SEQ ID NO: 2432242 - RNA, 19 nt, Homo sapiens
  misc_RNA (1)...(19): siRNA sense strand
ccggagaguaccagugaau

SEQ ID NO: 2432243 - RNA, 19 nt, Homo sapiens
  misc_RNA (1)...(19): siRNA sense strand
gaacuaucccaaaggaaaa

SEQ ID NO: 2432244 - RNA, 19 nt, Homo sapiens
  misc_RNA (1)...(19): siRNA sense strand
ccacgaaaucuauuggcua

SEQ ID NO: 2432245 - RNA, 19 nt, Homo sapiens
  misc_RNA (1)...(19): siRNA sense strand
ccaaaauacucaauaguga

SEQ ID NO: 2432246 - RNA, 19 nt, Homo sapiens
  misc_RNA (1)...(19): siRNA sense strand
ccacaguaacucagacgua

SEQ ID NO: 2432247 - RNA, 19 nt, Homo sapiens
  misc_RNA (1)...(19): siRNA sense strand
ggaacuaaagcuucaggaa

SEQ ID NO: 2432248 - RNA, 19 nt, Homo sapiens
  misc_RNA (1)...(19): siRNA sense strand
gcuaaagauaguagagaug

SEQ ID NO: 2432249 - RNA, 19 nt, Homo sapiens
  misc_RNA (1)...(19): siRNA sense strand
guggaaauagauaacgaaa

SEQ ID NO: 2432250 - RNA, 19 nt, Homo sapiens
  misc_RNA (1)...(19): siRNA sense strand
gcuauuaggcccauggaca

SEQ ID NO: 2432251 - RNA, 19 nt, Homo sapiens
  misc_RNA (1)...(19): siRNA sense strand
cuauuaggcccauggacaa

SEQ ID NO: 2432252 - RNA, 19 nt, Homo sapiens
  misc_RNA (1)...(19): siRNA sense strand
gcacacaaugauaugcaua

SEQ ID NO: 2432253 - RNA, 19 nt, Homo sapiens
  misc_RNA (1)...(19): siRNA sense strand
gaaaauagugagaaaguca

SEQ ID NO: 2432254 - RNA, 19 nt, Homo sapiens
  misc_RNA (1)...(19): siRNA sense strand
acuaaagcuucaggaaaua

SEQ ID NO: 2432255 - RNA, 19 nt, Homo sapiens
  misc_RNA (1)...(19): siRNA sense strand
gagaccaacucacgggaau

SEQ ID NO: 2432256 - RNA, 19 nt, Homo sapiens
  misc_RNA (1)...(19): siRNA sense strand
cagaugaaugugaagaaau

SEQ ID NO: 2432257 - RNA, 19 nt, Homo sapiens
  misc_RNA (1)...(19): siRNA sense strand
agcaaaagucagagaagaa

SEQ ID NO: 2432258 - RNA, 19 nt, Homo sapiens
  misc_RNA (1)...(19): siRNA sense strand
cauucaaacucaugucaau

SEQ ID NO: 2432259 - RNA, 19 nt, Homo sapiens
  misc_RNA (1)...(19): siRNA sense strand
uuucagaagacgauaagaa

SEQ ID NO: 2432260 - RNA, 19 nt, Homo sapiens
  misc_RNA (1)...(19): siRNA sense strand
uguaaugaugccauggaaa

SEQ ID NO: 2432261 - RNA, 19 nt, Homo sapiens
  misc_RNA (1)...(19): siRNA sense strand
aaauaugagagaggagaaa

SEQ ID NO: 2432262 - RNA, 19 nt, Homo sapiens
  misc_RNA (1)...(19): siRNA sense strand
caggaaauggugaaaguga

SEQ ID NO: 2432263 - RNA, 19 nt, Homo sapiens
  misc_RNA (1)...(19): siRNA sense strand
aagcacuggcuguaggaaa

SEQ ID NO: 2432264 - RNA, 19 nt, Homo sapiens
  misc_RNA (1)...(19): siRNA sense strand
uccaaaggaucaaaugaaa

SEQ ID NO: 2432265 - RNA, 19 nt, Homo sapiens
  misc_RNA (1)...(19): siRNA sense strand
ggagaguaccagugaaucu

SEQ ID NO: 2432266 - RNA, 19 nt, Homo sapiens
  misc_RNA (1)...(19): siRNA sense strand
aacaaugaacagacagaua

SEQ ID NO: 2432267 - RNA, 19 nt, Homo sapiens
  misc_RNA (1)...(19): siRNA sense strand
guaaaagucccauagaaaa

SEQ ID NO: 2432268 - RNA, 19 nt, Homo sapiens
  misc_RNA (1)...(19): siRNA sense strand
acuuggaaucugagggaca

SEQ ID NO: 2432269 - RNA, 19 nt, Homo sapiens
  misc_RNA (1)...(19): siRNA sense strand
ugaaaggaaacaugcaaau

SEQ ID NO: 2432270 - RNA, 19 nt, Homo sapiens
  misc_RNA (1)...(19): siRNA sense strand
gguuauggaacuaaagcuu

SEQ ID NO: 2432271 - RNA, 19 nt, Homo sapiens
  misc_RNA (1)...(19): siRNA sense strand
cagaauaacuacaggcuuc

SEQ ID NO: 2432272 - RNA, 19 nt, Homo sapiens
  misc_RNA (1)...(19): siRNA sense strand
cuggaaagugagacugaaa

SEQ ID NO: 2432273 - RNA, 19 nt, Homo sapiens
  misc_RNA (1)...(19): siRNA sense strand
uugcaggagcagugacaaa

SEQ ID NO: 2432274 - RNA, 19 nt, Homo sapiens
  misc_RNA (1)...(19): siRNA sense strand
gcuugaagaagaaggcauu

SEQ ID NO: 2432275 - RNA, 19 nt, Homo sapiens
  misc_RNA (1)...(19): siRNA sense strand
cuguugagaccuugguuaa

SEQ ID NO: 2432276 - RNA, 19 nt, Homo sapiens
  misc_RNA (1)...(19): siRNA sense strand
gagcagugacaaaggacuu

SEQ ID NO: 2432277 - RNA, 19 nt, Homo sapiens
  misc_RNA (1)...(19): siRNA sense strand
cugcaaaauccuugaucaa

SEQ ID NO: 2432278 - RNA, 19 nt, Homo sapiens
  misc_RNA (1)...(19): siRNA sense strand
ccaaugaagaagaacaaca

SEQ ID NO: 2432279 - RNA, 19 nt, Homo sapiens
  misc_RNA (1)...(19): siRNA sense strand
gacucaagaaggagcuaaa

SEQ ID NO: 2432280 - RNA, 19 nt, Homo sapiens
  misc_RNA (1)...(19): siRNA sense strand
ggacauaccuauaggcgag

SEQ ID NO: 2432281 - RNA, 19 nt, Homo sapiens
  misc_RNA (1)...(19): siRNA sense strand
ugaucaacaguuacagaaa

SEQ ID NO: 2432282 - RNA, 19 nt, Homo sapiens
  misc_RNA (1)...(19): siRNA sense strand
guacucuaaaggagguaaa

SEQ ID NO: 2432283 - RNA, 19 nt, Homo sapiens
  misc_RNA (1)...(19): siRNA sense strand
acuuuaaacugacagacaa

SEQ ID NO: 2432284 - RNA, 19 nt, Homo sapiens
  misc_RNA (1)...(19): siRNA sense strand
gggucuuuguguugguauu

SEQ ID NO: 2432285 - RNA, 19 nt, Homo sapiens
  misc_RNA (1)...(19): siRNA sense strand
gugccaaguccaugggcuu

SEQ ID NO: 2432286 - RNA, 19 nt, Homo sapiens
  misc_RNA (1)...(19): siRNA sense strand
gggucaucuuggagaagga

SEQ ID NO: 2432287 - RNA, 19 nt, Homo sapiens
  misc_RNA (1)...(19): siRNA sense strand
ugccaaugaagaagaacaa

SEQ ID NO: 2432288 - RNA, 19 nt, Homo sapiens
  misc_RNA (1)...(19): siRNA sense strand
ggaaagugagacugaaacu

SEQ ID NO: 2432289 - RNA, 19 nt, Homo sapiens
  misc_RNA (1)...(19): siRNA sense strand
ccauguuaguaggagauaa

SEQ ID NO: 2432290 - RNA, 19 nt, Homo sapiens
  misc_RNA (1)...(19): siRNA sense strand
gggcaagaaacauuggcuu

SEQ ID NO: 2432291 - RNA, 19 nt, Homo sapiens
  misc_RNA (1)...(19): siRNA sense strand
ugaacaaugcacagaagau

SEQ ID NO: 2432292 - RNA, 19 nt, Homo sapiens
  misc_RNA (1)...(19): siRNA sense strand
ggcacaucuucaugggcua

SEQ ID NO: 2432293 - RNA, 19 nt, Homo sapiens
  misc_RNA (1)...(19): siRNA sense strand
acaucuugcugguugagaa

SEQ ID NO: 2432294 - RNA, 19 nt, Homo sapiens
  misc_RNA (1)...(19): siRNA sense strand
cgcugaagugugagaugaa

SEQ ID NO: 2432295 - RNA, 19 nt, Homo sapiens
  misc_RNA (1)...(19): siRNA sense strand
acgccauguuaguaggaga

SEQ ID NO: 2432296 - RNA, 19 nt, Homo sapiens
  misc_RNA (1)...(19): siRNA sense strand
gguaaguacucuaaaggag

SEQ ID NO: 2432297 - RNA, 19 nt, Homo sapiens
  misc_RNA (1)...(19): siRNA sense strand
caugagauggugaagaaaa

SEQ ID NO: 2432298 - RNA, 19 nt, Homo sapiens
  misc_RNA (1)...(19): siRNA sense strand
aguccaugggcuugaagaa

SEQ ID NO: 2432299 - RNA, 19 nt, Homo sapiens
  misc_RNA (1)...(19): siRNA sense strand
gaaucagaugagcggagaa

SEQ ID NO: 2432300 - RNA, 19 nt, Homo sapiens
  misc_RNA (1)...(19): siRNA sense strand
accaggaagccaugaacaa

SEQ ID NO: 2432301 - RNA, 19 nt, Homo sapiens
  misc_RNA (1)...(19): siRNA sense strand
cugccaaugaagaagaaca

SEQ ID NO: 2432302 - RNA, 19 nt, Homo sapiens
  misc_RNA (1)...(19): siRNA sense strand
gcucacauacuuugcucaa

SEQ ID NO: 2432303 - RNA, 19 nt, Homo sapiens
  misc_RNA (1)...(19): siRNA sense strand
aaaagauguuggggaaaua

SEQ ID NO: 2432304 - RNA, 19 nt, Homo sapiens
  misc_RNA (1)...(19): siRNA sense strand
agauacaugagauggugaa

SEQ ID NO: 2432305 - RNA, 19 nt, Homo sapiens
  misc_RNA (1)...(19): siRNA sense strand
acauuggcuucaaggucaa

SEQ ID NO: 2432306 - RNA, 19 nt, Homo sapiens
  misc_RNA (1)...(19): siRNA sense strand
auaauacucccgugagcua

SEQ ID NO: 2432307 - RNA, 19 nt, Homo sapiens
  misc_RNA (1)...(19): siRNA sense strand
gacuuuaaacugacagaca

SEQ ID NO: 2432308 - RNA, 19 nt, Homo sapiens
  misc_RNA (1)...(19): siRNA sense strand
cgaugaugaaggcuggcua

SEQ ID NO: 2432309 - RNA, 19 nt, Homo sapiens
  misc_RNA (1)...(19): siRNA sense strand
augagacggugguuagcua

SEQ ID NO: 2432310 - RNA, 19 nt, Homo sapiens
  misc_RNA (1)...(19): siRNA sense strand
acagacugccaaugaagaa

SEQ ID NO: 2432311 - RNA, 19 nt, Homo sapiens
  misc_RNA (1)...(19): siRNA sense strand
cagacaagcaugagacggu

SEQ ID NO: 2432312 - RNA, 19 nt, Homo sapiens
  misc_RNA (1)...(19): siRNA sense strand
aagcaugagacggugguua

SEQ ID NO: 2432313 - RNA, 19 nt, Homo sapiens
  misc_RNA (1)...(19): siRNA sense strand
aaauuugggagaagauaca

SEQ ID NO: 2432314 - RNA, 19 nt, Homo sapiens
  misc_RNA (1)...(19): siRNA sense strand
ggcuugaagaagaaggcau

SEQ ID NO: 2432315 - RNA, 19 nt, Homo sapiens
  misc_RNA (1)...(19): siRNA sense strand
aguuguauggguugaguga

SEQ ID NO: 2432316 - RNA, 19 nt, Homo sapiens
  misc_RNA (1)...(19): siRNA sense strand
gaauuuaagaagagaccca

SEQ ID NO: 2432317 - RNA, 19 nt, Homo sapiens
  misc_RNA (1)...(19): siRNA sense strand
uggaaagggaggagaugga

SEQ ID NO: 2432318 - RNA, 19 nt, Homo sapiens
  misc_RNA (1)...(19): siRNA sense strand
gggaggagauggagagagg

SEQ ID NO: 2432319 - RNA, 19 nt, Homo sapiens
  misc_RNA (1)...(19): siRNA sense strand
gaaagggaggagauggaga

SEQ ID NO: 2432320 - RNA, 19 nt, Homo sapiens
  misc_RNA (1)...(19): siRNA sense strand
cgaucaggaaacaggcgaa

SEQ ID NO: 2432321 - RNA, 19 nt, Homo sapiens
  misc_RNA (1)...(19): siRNA sense strand
aaacaggcgaacaaggaau

SEQ ID NO: 2432322 - RNA, 19 nt, Homo sapiens
  misc_RNA (1)...(19): siRNA sense strand
gaaucgcuccagagggcaa

SEQ ID NO: 2432323 - RNA, 19 nt, Homo sapiens
  misc_RNA (1)...(19): siRNA sense strand
gguaagcccuccagccuca

SEQ ID NO: 2432324 - RNA, 19 nt, Homo sapiens
  misc_RNA (1)...(19): siRNA sense strand
agaagaagaaagagaggga

SEQ ID NO: 2432325 - RNA, 19 nt, Homo sapiens
  misc_RNA (1)...(19): siRNA sense strand
agaaagagagggaggagga

SEQ ID NO: 2432326 - RNA, 19 nt, Homo sapiens
  misc_RNA (1)...(19): siRNA sense strand
aggaggaggagcagcugaa

SEQ ID NO: 2432327 - RNA, 19 nt, Homo sapiens
  misc_RNA (1)...(19): siRNA sense strand
aagagagggaggaggagga

SEQ ID NO: 2432328 - RNA, 19 nt, Homo sapiens
  misc_RNA (1)...(19): siRNA sense strand
agagggaggaggaggagca

SEQ ID NO: 2432329 - RNA, 19 nt, Homo sapiens
  misc_RNA (1)...(19): siRNA sense strand
gugcagaguuugaaggaca

SEQ ID NO: 2432330 - RNA, 19 nt, Homo sapiens
  misc_RNA (1)...(19): siRNA sense strand
aggacaaacacgagagcau

SEQ ID NO: 2432331 - RNA, 19 nt, Homo sapiens
  misc_RNA (1)...(19): siRNA sense strand
gcucaguggauuugaucaa

SEQ ID NO: 2432332 - RNA, 19 nt, Homo sapiens
  misc_RNA (1)...(19): siRNA sense strand
ucauguugaugcugggaaa

SEQ ID NO: 2432333 - RNA, 19 nt, Homo sapiens
  misc_RNA (1)...(19): siRNA sense strand
ccguugagccuguggaaga

SEQ ID NO: 2432334 - RNA, 19 nt, Homo sapiens
  misc_RNA (1)...(19): siRNA sense strand
guuaauuggcaacaagaaa

SEQ ID NO: 2432335 - RNA, 19 nt, Homo sapiens
  misc_RNA (1)...(19): siRNA sense strand
auuugagacuggaggacaa

SEQ ID NO: 2432336 - RNA, 19 nt, Homo sapiens
  misc_RNA (1)...(19): siRNA sense strand
guuugaaggacaagaauga

SEQ ID NO: 2432337 - RNA, 19 nt, Homo sapiens
  misc_RNA (1)...(19): siRNA sense strand
cuacagacacaaagaccaa

SEQ ID NO: 2432338 - RNA, 19 nt, Homo sapiens
  misc_RNA (1)...(19): siRNA sense strand
ucggaauguucgaggcuau

SEQ ID NO: 2432339 - RNA, 19 nt, Homo sapiens
  misc_RNA (1)...(19): siRNA sense strand
gaaagauagcaaaaggaaa

SEQ ID NO: 2432340 - RNA, 19 nt, Homo sapiens
  misc_RNA (1)...(19): siRNA sense strand
ggaucagguuaauuggcaa

SEQ ID NO: 2432341 - RNA, 19 nt, Homo sapiens
  misc_RNA (1)...(19): siRNA sense strand
ugagagagguacuuggaga

SEQ ID NO: 2432342 - RNA, 19 nt, Homo sapiens
  misc_RNA (1)...(19): siRNA sense strand
ggaacaagauagagugcag

SEQ ID NO: 2432343 - RNA, 19 nt, Homo sapiens
  misc_RNA (1)...(19): siRNA sense strand
gcuauaacuacgaugaaga

SEQ ID NO: 2432344 - RNA, 19 nt, Homo sapiens
  misc_RNA (1)...(19): siRNA sense strand
cgaugaagauuuugaagau

SEQ ID NO: 2432345 - RNA, 19 nt, Homo sapiens
  misc_RNA (1)...(19): siRNA sense strand
ucaagagauuacuggaaaa

SEQ ID NO: 2432346 - RNA, 19 nt, Homo sapiens
  misc_RNA (1)...(19): siRNA sense strand
cggccagucuguagaggau

SEQ ID NO: 2432347 - RNA, 19 nt, Homo sapiens
  misc_RNA (1)...(19): siRNA sense strand
cuguggaagaauaugauua

SEQ ID NO: 2432348 - RNA, 19 nt, Homo sapiens
  misc_RNA (1)...(19): siRNA sense strand
ucagaagagcagaguucaa

SEQ ID NO: 2432349 - RNA, 19 nt, Homo sapiens
  misc_RNA (1)...(19): siRNA sense strand
guguugucacugagauaaa

SEQ ID NO: 2432350 - RNA, 19 nt, Homo sapiens
  misc_RNA (1)...(19): siRNA sense strand
ugguguugucacugagaua

SEQ ID NO: 2432351 - RNA, 19 nt, Homo sapiens
  misc_RNA (1)...(19): siRNA sense strand
guaaaauagaagcugguua

SEQ ID NO: 2432352 - RNA, 19 nt, Homo sapiens
  misc_RNA (1)...(19): siRNA sense strand
cuacaggaaagauagcaaa

SEQ ID NO: 2432353 - RNA, 19 nt, Homo sapiens
  misc_RNA (1)...(19): siRNA sense strand
aaauaugauuacaggagca

SEQ ID NO: 2432354 - RNA, 19 nt, Homo sapiens
  misc_RNA (1)...(19): siRNA sense strand
agaagcaaacuaugggauu

SEQ ID NO: 2432355 - RNA, 19 nt, Homo sapiens
  misc_RNA (1)...(19): siRNA sense strand
gguuaauuggcaacaagaa

SEQ ID NO: 2432356 - RNA, 19 nt, Homo sapiens
  misc_RNA (1)...(19): siRNA sense strand
agucuguagaggaugauua

SEQ ID NO: 2432357 - RNA, 19 nt, Homo sapiens
  misc_RNA (1)...(19): siRNA sense strand
guaucuggaaagaagcaaa

SEQ ID NO: 2432358 - RNA, 19 nt, Homo sapiens
  misc_RNA (1)...(19): siRNA sense strand
aaauagaugugaaggcgga

SEQ ID NO: 2432359 - RNA, 19 nt, Homo sapiens
  misc_RNA (1)...(19): siRNA sense strand
gagagagguacuuggagau

SEQ ID NO: 2432360 - RNA, 19 nt, Homo sapiens
  misc_RNA (1)...(19): siRNA sense strand
acuaaaggccagaaugcau

SEQ ID NO: 2432361 - RNA, 19 nt, Homo sapiens
  misc_RNA (1)...(19): siRNA sense strand
ccaucagcucaguggauuu

SEQ ID NO: 2432362 - RNA, 19 nt, Homo sapiens
  misc_RNA (1)...(19): siRNA sense strand
uauccaaacuggugaccga

SEQ ID NO: 2432363 - RNA, 19 nt, Homo sapiens
  misc_RNA (1)...(19): siRNA sense strand
aagaaugaggcaacaguau

SEQ ID NO: 2432364 - RNA, 19 nt, Homo sapiens
  misc_RNA (1)...(19): siRNA sense strand
agaacaaguuugaugugca

SEQ ID NO: 2432365 - RNA, 19 nt, Homo sapiens
  misc_RNA (1)...(19): siRNA sense strand
cagacaucgcgaagugaau

SEQ ID NO: 2432366 - RNA, 19 nt, Homo sapiens
  misc_RNA (1)...(19): siRNA sense strand
cuggaaagaagcaaacuau

SEQ ID NO: 2432367 - RNA, 19 nt, Homo sapiens
  misc_RNA (1)...(19): siRNA sense strand
aaugaaacuuguaccguga

SEQ ID NO: 2432368 - RNA, 19 nt, Homo sapiens
  misc_RNA (1)...(19): siRNA sense strand
gaaugcauugguagagcua

SEQ ID NO: 2432369 - RNA, 19 nt, Homo sapiens
  misc_RNA (1)...(19): siRNA sense strand
acuuaguggucauugguca

SEQ ID NO: 2432370 - RNA, 19 nt, Homo sapiens
  misc_RNA (1)...(19): siRNA sense strand
gccagaaugcauugguaga

SEQ ID NO: 2432371 - RNA, 19 nt, Homo sapiens
  misc_RNA (1)...(19): siRNA sense strand
aggacaagaaugaggcaac

SEQ ID NO: 2432372 - RNA, 19 nt, Homo sapiens
  misc_RNA (1)...(19): siRNA sense strand
acuuguaccgugaaaggaa

SEQ ID NO: 2432373 - RNA, 19 nt, Homo sapiens
  misc_RNA (1)...(19): siRNA sense strand
acaaguuugaugugcagaa

SEQ ID NO: 2432374 - RNA, 19 nt, Homo sapiens
  misc_RNA (1)...(19): siRNA sense strand
ucuacaggaaagauagcaa

SEQ ID NO: 2432375 - RNA, 19 nt, Homo sapiens
  misc_RNA (1)...(19): siRNA sense strand
agagauuacuggaaaacuu

SEQ ID NO: 2432376 - RNA, 19 nt, Homo sapiens
  misc_RNA (1)...(19): siRNA sense strand
cguugagccuguggaagaa

SEQ ID NO: 2432377 - RNA, 19 nt, Homo sapiens
  misc_RNA (1)...(19): siRNA sense strand
ucgcgaagugaaucugaaa

SEQ ID NO: 2432378 - RNA, 19 nt, Homo sapiens
  misc_RNA (1)...(19): siRNA sense strand
gaugaaacuggcgaagaaa

SEQ ID NO: 2432379 - RNA, 19 nt, Homo sapiens
  misc_RNA (1)...(19): siRNA sense strand
cggaaugaggagaagaauu

SEQ ID NO: 2432380 - RNA, 19 nt, Homo sapiens
  misc_RNA (1)...(19): siRNA sense strand
guuacagaucugaggacaa

SEQ ID NO: 2432381 - RNA, 19 nt, Homo sapiens
  misc_RNA (1)...(19): siRNA sense strand
gaacaaaucuccucaggca

SEQ ID NO: 2432382 - RNA, 19 nt, Homo sapiens
  misc_RNA (1)...(19): siRNA sense strand
aggagguacugauggacaa

SEQ ID NO: 2432383 - RNA, 19 nt, Homo sapiens
  misc_RNA (1)...(19): siRNA sense strand
guugaaaggaggagcagga

SEQ ID NO: 2432384 - RNA, 19 nt, Homo sapiens
  misc_RNA (1)...(19): siRNA sense strand
aaauggaaauagaugguga

SEQ ID NO: 2432385 - RNA, 19 nt, Homo sapiens
  misc_RNA (1)...(19): siRNA sense strand
cauuuugggaauugagaaa

SEQ ID NO: 2432386 - RNA, 19 nt, Homo sapiens
  misc_RNA (1)...(19): siRNA sense strand
ggguggugguagagauucu

SEQ ID NO: 2432387 - RNA, 19 nt, Homo sapiens
  misc_RNA (1)...(19): siRNA sense strand
aagacaaagaucauccaaa

SEQ ID NO: 2432388 - RNA, 19 nt, Homo sapiens
  misc_RNA (1)...(19): siRNA sense strand
aggaggagcaggagguacu

SEQ ID NO: 2432389 - RNA, 19 nt, Homo sapiens
  misc_RNA (1)...(19): siRNA sense strand
cccggaaugaggagaagaa

SEQ ID NO: 2432390 - RNA, 19 nt, Homo sapiens
  misc_RNA (1)...(19): siRNA sense strand
gaaaggaggagcaggaggu

SEQ ID NO: 2432391 - RNA, 19 nt, Homo sapiens
  misc_RNA (1)...(19): siRNA sense strand
gaggaaggguugaaaggag

SEQ ID NO: 2432392 - RNA, 19 nt, Homo sapiens
  misc_RNA (1)...(19): siRNA sense strand
uaauagaauuugagguguc

SEQ ID NO: 2432393 - RNA, 19 nt, Homo sapiens
  misc_RNA (1)...(19): siRNA sense strand
auuuaaagaggucgcagaa

SEQ ID NO: 2432394 - RNA, 19 nt, Homo sapiens
  misc_RNA (1)...(19): siRNA sense strand
acuggauggaagaaacaua

SEQ ID NO: 2432395 - RNA, 19 nt, Homo sapiens
  misc_RNA (1)...(19): siRNA sense strand
gggauggaucaaauauaau

SEQ ID NO: 2432396 - RNA, 19 nt, Homo sapiens
  misc_RNA (1)...(19): siRNA sense strand
agaaggagaugaaacacca

SEQ ID NO: 2432397 - RNA, 19 nt, Homo sapiens
  misc_RNA (1)...(19): siRNA sense strand
ggcuaaacgcugauggaag

SEQ ID NO: 2432398 - RNA, 19 nt, Homo sapiens
  misc_RNA (1)...(19): siRNA sense strand
aggaaauggcagaggcaua

SEQ ID NO: 2432399 - RNA, 19 nt, Homo sapiens
  misc_RNA (1)...(19): siRNA sense strand
cagaagaguuggaggcuga

SEQ ID NO: 2432400 - RNA, 19 nt, Homo sapiens
  misc_RNA (1)...(19): siRNA sense strand
cugaagauuuugaggguaa

SEQ ID NO: 2432401 - RNA, 19 nt, Homo sapiens
  misc_RNA (1)...(19): siRNA sense strand
gaauaaacaaggagggaug

SEQ ID NO: 2432402 - RNA, 19 nt, Homo sapiens
  misc_RNA (1)...(19): siRNA sense strand
gguaauaaaugaacccaca

SEQ ID NO: 2432403 - RNA, 19 nt, Homo sapiens
  misc_RNA (1)...(19): siRNA sense strand
aguuaaaggaaauggcaga

SEQ ID NO: 2432404 - RNA, 19 nt, Homo sapiens
  misc_RNA (1)...(19): siRNA sense strand
ccaaaagauucauaggcaa

SEQ ID NO: 2432405 - RNA, 19 nt, Homo sapiens
  misc_RNA (1)...(19): siRNA sense strand
ugagacaagcuguggaaau

SEQ ID NO: 2432406 - RNA, 19 nt, Homo sapiens
  misc_RNA (1)...(19): siRNA sense strand
caauaaacuuggaggacag

SEQ ID NO: 2432407 - RNA, 19 nt, Homo sapiens
  misc_RNA (1)...(19): siRNA sense strand
agggauugauggaggcuuu

SEQ ID NO: 2432408 - RNA, 19 nt, Homo sapiens
  misc_RNA (1)...(19): siRNA sense strand
uggaaaagacugagauuga

SEQ ID NO: 2432409 - RNA, 19 nt, Homo sapiens
  misc_RNA (1)...(19): siRNA sense strand
gauaagaaaaguggagaaa

SEQ ID NO: 2432410 - RNA, 19 nt, Homo sapiens
  misc_RNA (1)...(19): siRNA sense strand
aaacagaaauaucacggaa

SEQ ID NO: 2432411 - RNA, 19 nt, Homo sapiens
  misc_RNA (1)...(19): siRNA sense strand
augauguauaugugggaua

SEQ ID NO: 2432412 - RNA, 19 nt, Homo sapiens
  misc_RNA (1)...(19): siRNA sense strand
uggaggagcaggacaggaa

SEQ ID NO: 2432413 - RNA, 19 nt, Homo sapiens
  misc_RNA (1)...(19): siRNA sense strand
acacaauauaugaugccaa

SEQ ID NO: 2432414 - RNA, 19 nt, Homo sapiens
  misc_RNA (1)...(19): siRNA sense strand
ucuccaagucagugcuuua

SEQ ID NO: 2432415 - RNA, 19 nt, Homo sapiens
  misc_RNA (1)...(19): siRNA sense strand
acaauaaacuuggaggaca

SEQ ID NO: 2432416 - RNA, 19 nt, Homo sapiens
  misc_RNA (1)...(19): siRNA sense strand
caggaaaaguaaaggugau

SEQ ID NO: 2432417 - RNA, 19 nt, Homo sapiens
  misc_RNA (1)...(19): siRNA sense strand
ugauaagaaaaguggagaa

SEQ ID NO: 2432418 - RNA, 19 nt, Homo sapiens
  misc_RNA (1)...(19): siRNA sense strand
aaguaaaggugauuccaga

SEQ ID NO: 2432419 - RNA, 19 nt, Homo sapiens
  misc_RNA (1)...(19): siRNA sense strand
aaacaauaaacuuggagga

SEQ ID NO: 2432420 - RNA, 19 nt, Homo sapiens
  misc_RNA (1)...(19): siRNA sense strand
agugauugguauugaucuu

SEQ ID NO: 2432421 - RNA, 19 nt, Homo sapiens
  misc_RNA (1)...(19): siRNA sense strand
gagcaaugucuggaaacaa

SEQ ID NO: 2432422 - RNA, 19 nt, Homo sapiens
  misc_RNA (1)...(19): siRNA sense strand
aaauggaaugguugaguuu

SEQ ID NO: 2432423 - RNA, 19 nt, Homo sapiens
  misc_RNA (1)...(19): siRNA sense strand
agacuugggcggaggaacu

SEQ ID NO: 2432424 - RNA, 19 nt, Homo sapiens
  misc_RNA (1)...(19): siRNA sense strand
ugacaaguaaugagaccau

SEQ ID NO: 2432425 - RNA, 19 nt, Homo sapiens
  misc_RNA (1)...(19): siRNA sense strand
gagcaggacaggaaggaac

SEQ ID NO: 2432426 - RNA, 19 nt, Homo sapiens
  misc_RNA (1)...(19): siRNA sense strand
aacagaaauaucacggaaa

SEQ ID NO: 2432427 - RNA, 19 nt, Homo sapiens
  misc_RNA (1)...(19): siRNA sense strand
cagcagcagcuauggccua

SEQ ID NO: 2432428 - RNA, 19 nt, Homo sapiens
  misc_RNA (1)...(19): siRNA sense strand
ucgcgugaacaguggguuu

SEQ ID NO: 2432429 - RNA, 19 nt, Homo sapiens
  misc_RNA (1)...(19): siRNA sense strand
aagaaggccaccuggaaaa

SEQ ID NO: 2432430 - RNA, 19 nt, Homo sapiens
  misc_RNA (1)...(19): siRNA sense strand
agaaauucccaauaagcau

SEQ ID NO: 2432431 - RNA, 19 nt, Homo sapiens
  misc_RNA (1)...(19): siRNA sense strand
gaacaguggguuuggacgu

SEQ ID NO: 2432432 - RNA, 19 nt, Homo sapiens
  misc_RNA (1)...(19): siRNA sense strand
uggaaugccaguugccaau

SEQ ID NO: 2432433 - RNA, 19 nt, Homo sapiens
  misc_RNA (1)...(19): siRNA sense strand
cuucgugcccucuaggaaa

SEQ ID NO: 2432434 - RNA, 19 nt, Homo sapiens
  misc_RNA (1)...(19): siRNA sense strand
uccuaaagugauugguauu

SEQ ID NO: 2432435 - RNA, 19 nt, Homo sapiens
  misc_RNA (1)...(19): siRNA sense strand
cuauuuggcacaacaguau

SEQ ID NO: 2432436 - RNA, 19 nt, Homo sapiens
  misc_RNA (1)...(19): siRNA sense strand
acgaacuuugggagagaaa

SEQ ID NO: 2432437 - RNA, 19 nt, Homo sapiens
  misc_RNA (1)...(19): siRNA sense strand
gugaagaaauuccgccaga

SEQ ID NO: 2432438 - RNA, 19 nt, Homo sapiens
  misc_RNA (1)...(19): siRNA sense strand
gcucagguuuccagcccaa

SEQ ID NO: 2432439 - RNA, 19 nt, Homo sapiens
  misc_RNA (1)...(19): siRNA sense strand
agggccagcuggaggucua

SEQ ID NO: 2432440 - RNA, 19 nt, Homo sapiens
  misc_RNA (1)...(19): siRNA sense strand
ccggcgugguggaguucua

SEQ ID NO: 2432441 - RNA, 19 nt, Homo sapiens
  misc_RNA (1)...(19): siRNA sense strand
ccuacaagaagcuagugaa

SEQ ID NO: 2432442 - RNA, 19 nt, Homo sapiens
  misc_RNA (1)...(19): siRNA sense strand
cagaagaagcagcgccagu

SEQ ID NO: 2432443 - RNA, 19 nt, Homo sapiens
  misc_RNA (1)...(19): siRNA sense strand
gcaagaagguguuugucac

SEQ ID NO: 2432444 - RNA, 19 nt, Homo sapiens
  misc_RNA (1)...(19): siRNA sense strand
cagcaguguggcagcguca

SEQ ID NO: 2432445 - RNA, 19 nt, Homo sapiens
  misc_RNA (1)...(19): siRNA sense strand
cagucaaggcugcuggaaa

SEQ ID NO: 2432446 - RNA, 19 nt, Homo sapiens
  misc_RNA (1)...(19): siRNA sense strand
agaaguaucuggaagcgaa

SEQ ID NO: 2432447 - RNA, 19 nt, Homo sapiens
  misc_RNA (1)...(19): siRNA sense strand
agcuuaaagaugaggaaau

SEQ ID NO: 2432448 - RNA, 19 nt, Homo sapiens
  misc_RNA (1)...(19): siRNA sense strand
guacagacaacaaggcaga

SEQ ID NO: 2432449 - RNA, 19 nt, Homo sapiens
  misc_RNA (1)...(19): siRNA sense strand
agauccuauucgagauaua

SEQ ID NO: 2432450 - RNA, 19 nt, Homo sapiens
  misc_RNA (1)...(19): siRNA sense strand
uucuaaaugugguggauau

SEQ ID NO: 2432451 - RNA, 19 nt, Homo sapiens
  misc_RNA (1)...(19): siRNA sense strand
uggaaaguacagacaacaa

SEQ ID NO: 2432452 - RNA, 19 nt, Homo sapiens
  misc_RNA (1)...(19): siRNA sense strand
cgaagauuuuaaagaggaa

SEQ ID NO: 2432453 - RNA, 19 nt, Homo sapiens
  misc_RNA (1)...(19): siRNA sense strand
cguugaaggaaguguagau

SEQ ID NO: 2432454 - RNA, 19 nt, Homo sapiens
  misc_RNA (1)...(19): siRNA sense strand
gcagaguaccugugccaga

SEQ ID NO: 2432455 - RNA, 19 nt, Homo sapiens
  misc_RNA (1)...(19): siRNA sense strand
uuggaaugacaaagagauu

SEQ ID NO: 2432456 - RNA, 19 nt, Homo sapiens
  misc_RNA (1)...(19): siRNA sense strand
ccuaaugagagcagaguac

SEQ ID NO: 2432457 - RNA, 19 nt, Homo sapiens
  misc_RNA (1)...(19): siRNA sense strand
gagcagaguaccugugcca

SEQ ID NO: 2432458 - RNA, 19 nt, Homo sapiens
  misc_RNA (1)...(19): siRNA sense strand
caauggucuacuugguuaa

SEQ ID NO: 2432459 - RNA, 19 nt, Homo sapiens
  misc_RNA (1)...(19): siRNA sense strand
uggaagauuuggaaccuca

SEQ ID NO: 2432460 - RNA, 19 nt, Homo sapiens
  misc_RNA (1)...(19): siRNA sense strand
cagacaacaaggcagaaau

SEQ ID NO: 2432461 - RNA, 19 nt, Homo sapiens
  misc_RNA (1)...(19): siRNA sense strand
gauuggaaugacaaagaga

SEQ ID NO: 2432462 - RNA, 19 nt, Homo sapiens
  misc_RNA (1)...(19): siRNA sense strand
cagcuuaaagaugaggaaa

SEQ ID NO: 2432463 - RNA, 19 nt, Homo sapiens
  misc_RNA (1)...(19): siRNA sense strand
auuuggaaccucacugaaa

SEQ ID NO: 2432464 - RNA, 19 nt, Homo sapiens
  misc_RNA (1)...(19): siRNA sense strand
gauaauucucagagggaaa

SEQ ID NO: 2432465 - RNA, 19 nt, Homo sapiens
  misc_RNA (1)...(19): siRNA sense strand
aggaagaagcaaagaacua

SEQ ID NO: 2432466 - RNA, 19 nt, Homo sapiens
  misc_RNA (1)...(19): siRNA sense strand
gaggcaaagaagaaagaua

SEQ ID NO: 2432467 - RNA, 19 nt, Homo sapiens
  misc_RNA (1)...(19): siRNA sense strand
cggauauaaugcaggagaa

SEQ ID NO: 2432468 - RNA, 19 nt, Homo sapiens
  misc_RNA (1)...(19): siRNA sense strand
aggaaguaaaggaggcaaa

SEQ ID NO: 2432469 - RNA, 19 nt, Homo sapiens
  misc_RNA (1)...(19): siRNA sense strand
ggcaaagaagaaagauaaa

SEQ ID NO: 2432470 - RNA, 19 nt, Homo sapiens
  misc_RNA (1)...(19): siRNA sense strand
ggaacagagcagaagaaga

SEQ ID NO: 2432471 - RNA, 19 nt, Homo sapiens
  misc_RNA (1)...(19): siRNA sense strand
augcugaaguaaauggaaa

SEQ ID NO: 2432472 - RNA, 19 nt, Homo sapiens
  misc_RNA (1)...(19): siRNA sense strand
cuacuauaagcaaggaaua

SEQ ID NO: 2432473 - RNA, 19 nt, Homo sapiens
  misc_RNA (1)...(19): siRNA sense strand
gcaauaaggauguacguca

SEQ ID NO: 2432474 - RNA, 19 nt, Homo sapiens
  misc_RNA (1)...(19): siRNA sense strand
aaguaguguucaaggauuu

SEQ ID NO: 2432475 - RNA, 19 nt, Homo sapiens
  misc_RNA (1)...(19): siRNA sense strand
ucaagaaggagcagcaaau

SEQ ID NO: 2432476 - RNA, 19 nt, Homo sapiens
  misc_RNA (1)...(19): siRNA sense strand
gaagcaagcuacaggagga

SEQ ID NO: 2432477 - RNA, 19 nt, Homo sapiens
  misc_RNA (1)...(19): siRNA sense strand
cuguacaaacugucagaua

SEQ ID NO: 2432478 - RNA, 19 nt, Homo sapiens
  misc_RNA (1)...(19): siRNA sense strand
guacaaacugucagauaca

SEQ ID NO: 2432479 - RNA, 19 nt, Homo sapiens
  misc_RNA (1)...(19): siRNA sense strand
guaucaaagcaauggugaa

SEQ ID NO: 2432480 - RNA, 19 nt, Homo sapiens
  misc_RNA (1)...(19): siRNA sense strand
aaguaaaggaggcaaagaa

SEQ ID NO: 2432481 - RNA, 19 nt, Homo sapiens
  misc_RNA (1)...(19): siRNA sense strand
gucagaaggaagaagcaaa

SEQ ID NO: 2432482 - RNA, 19 nt, Homo sapiens
  misc_RNA (1)...(19): siRNA sense strand
uaaaggaaaacguggaaaa

SEQ ID NO: 2432483 - RNA, 19 nt, Homo sapiens
  misc_RNA (1)...(19): siRNA sense strand
ugguaaggcaauccagaaa

SEQ ID NO: 2432484 - RNA, 19 nt, Homo sapiens
  misc_RNA (1)...(19): siRNA sense strand
gagcagaagaagaaaauga

SEQ ID NO: 2432485 - RNA, 19 nt, Homo sapiens
  misc_RNA (1)...(19): siRNA sense strand
ggauucaaccagaagaaaa

SEQ ID NO: 2432486 - RNA, 19 nt, Homo sapiens
  misc_RNA (1)...(19): siRNA sense strand
ccuuagggcuggaugcaga

SEQ ID NO: 2432487 - RNA, 19 nt, Homo sapiens
  misc_RNA (1)...(19): siRNA sense strand
cugaguuaccagaggauga

SEQ ID NO: 2432488 - RNA, 19 nt, Homo sapiens
  misc_RNA (1)...(19): siRNA sense strand
ggucaauguuggcguaacu

SEQ ID NO: 2432489 - RNA, 19 nt, Homo sapiens
  misc_RNA (1)...(19): siRNA sense strand
caacuggaacagagcagaa

SEQ ID NO: 2432490 - RNA, 19 nt, Homo sapiens
  misc_RNA (1)...(19): siRNA sense strand
gcggauucaaccagaagaa

SEQ ID NO: 2432491 - RNA, 19 nt, Homo sapiens
  misc_RNA (1)...(19): siRNA sense strand
cugcugaaauuaagaucau

SEQ ID NO: 2432492 - RNA, 19 nt, Homo sapiens
  misc_RNA (1)...(19): siRNA sense strand
agaaggaagaagcaaagaa

SEQ ID NO: 2432493 - RNA, 19 nt, Homo sapiens
  misc_RNA (1)...(19): siRNA sense strand
aggaggugcccaaguuaua

SEQ ID NO: 2432494 - RNA, 19 nt, Homo sapiens
  misc_RNA (1)...(19): siRNA sense strand
acaaacugucagauacaaa

SEQ ID NO: 2432495 - RNA, 19 nt, Homo sapiens
  misc_RNA (1)...(19): siRNA sense strand
cagcuaaaugcaucguuaa

SEQ ID NO: 2432496 - RNA, 19 nt, Homo sapiens
  misc_RNA (1)...(19): siRNA sense strand
gaagcaaacuuguuccaga

SEQ ID NO: 2432497 - RNA, 19 nt, Homo sapiens
  misc_RNA (1)...(19): siRNA sense strand
auuggaaugugcagcuaaa

SEQ ID NO: 2432498 - RNA, 19 nt, Homo sapiens
  misc_RNA (1)...(19): siRNA sense strand
agaaggaugagcagacgaa

SEQ ID NO: 2432499 - RNA, 19 nt, Homo sapiens
  misc_RNA (1)...(19): siRNA sense strand
agacgaaggaaguaaagga

SEQ ID NO: 2432500 - RNA, 19 nt, Homo sapiens
  misc_RNA (1)...(19): siRNA sense strand
ggucagaaggaagaagcaa

SEQ ID NO: 2432501 - RNA, 19 nt, Homo sapiens
  misc_RNA (1)...(19): siRNA sense strand
cuggaacagagcagaagaa

SEQ ID NO: 2432502 - RNA, 19 nt, Homo sapiens
  misc_RNA (1)...(19): siRNA sense strand
agaauuaccugaauggagu

SEQ ID NO: 2432503 - RNA, 19 nt, Homo sapiens
  misc_RNA (1)...(19): siRNA sense strand
gaguugggguuuagucaaa

SEQ ID NO: 2432504 - RNA, 19 nt, Homo sapiens
  misc_RNA (1)...(19): siRNA sense strand
gggagaaggaugagcagac

SEQ ID NO: 2432505 - RNA, 19 nt, Homo sapiens
  misc_RNA (1)...(19): siRNA sense strand
cuacaggaggagcagcaaa

SEQ ID NO: 2432506 - RNA, 19 nt, Homo sapiens
  misc_RNA (1)...(19): siRNA sense strand
gcguaacugccuacaauau

SEQ ID NO: 2432507 - RNA, 19 nt, Homo sapiens
  misc_RNA (1)...(19): siRNA sense strand
accaaauggaguacagauu

SEQ ID NO: 2432508 - RNA, 19 nt, Homo sapiens
  misc_RNA (1)...(19): siRNA sense strand
ugagccaguuccagaagaa

SEQ ID NO: 2432509 - RNA, 19 nt, Homo sapiens
  misc_RNA (1)...(19): siRNA sense strand
ucaagaagcauggaagcaa

SEQ ID NO: 2432510 - RNA, 19 nt, Homo sapiens
  misc_RNA (1)...(19): siRNA sense strand
agacagaugcaacagaaaa

SEQ ID NO: 2432511 - RNA, 19 nt, Homo sapiens
  misc_RNA (1)...(19): siRNA sense strand
guaaauggaaacaccucaa

SEQ ID NO: 2432512 - RNA, 19 nt, Homo sapiens
  misc_RNA (1)...(19): siRNA sense strand
uaccagaggaugauagaga

SEQ ID NO: 2432513 - RNA, 19 nt, Homo sapiens
  misc_RNA (1)...(19): siRNA sense strand
cauuguaccaugugagcca

SEQ ID NO: 2432514 - RNA, 19 nt, Homo sapiens
  misc_RNA (1)...(19): siRNA sense strand
gcugaaauuaagaucauca

SEQ ID NO: 2432515 - RNA, 19 nt, Homo sapiens
  misc_RNA (1)...(19): siRNA sense strand
agagaagggucuugccacu

SEQ ID NO: 2432516 - RNA, 19 nt, Homo sapiens
  misc_RNA (1)...(19): siRNA sense strand
caucaguuggagaggaguu

SEQ ID NO: 2432517 - RNA, 19 nt, Homo sapiens
  misc_RNA (1)...(19): siRNA sense strand
gguuagugcaccuucguau

SEQ ID NO: 2432518 - RNA, 19 nt, Homo sapiens
  misc_RNA (1)...(19): siRNA sense strand
gccaagaaguggugggagu

SEQ ID NO: 2432519 - RNA, 19 nt, Homo sapiens
  misc_RNA (1)...(19): siRNA sense strand
agagcaaccuggacggcua

SEQ ID NO: 2432520 - RNA, 19 nt, Homo sapiens
  misc_RNA (1)...(19): siRNA sense strand
cggacgaggaggagaucau

SEQ ID NO: 2432521 - RNA, 19 nt, Homo sapiens
  misc_RNA (1)...(19): siRNA sense strand
aggcagacggcuacgacua

SEQ ID NO: 2432522 - RNA, 19 nt, Homo sapiens
  misc_RNA (1)...(19): siRNA sense strand
gggucaagcgcgagaugca

SEQ ID NO: 2432523 - RNA, 19 nt, Homo sapiens
  misc_RNA (1)...(19): siRNA sense strand
agguggagcgcgagcugaa

SEQ ID NO: 2432524 - RNA, 19 nt, Homo sapiens
  misc_RNA (1)...(19): siRNA sense strand
gugaagaacuggguggagu

SEQ ID NO: 2432525 - RNA, 19 nt, Homo sapiens
  misc_RNA (1)...(19): siRNA sense strand
acgcggacgaggaggagau

SEQ ID NO: 2432526 - RNA, 19 nt, Homo sapiens
  misc_RNA (1)...(19): siRNA sense strand
agaaguggugggaguucaa

SEQ ID NO: 2432527 - RNA, 19 nt, Homo sapiens
  misc_RNA (1)...(19): siRNA sense strand
gcugaagauaagugugaaa

SEQ ID NO: 2432528 - RNA, 19 nt, Homo sapiens
  misc_RNA (1)...(19): siRNA sense strand
ggacaugaagggagggcau

SEQ ID NO: 2432529 - RNA, 19 nt, Homo sapiens
  misc_RNA (1)...(19): siRNA sense strand
ugacagaggaugagaggcu

SEQ ID NO: 2432530 - RNA, 19 nt, Homo sapiens
  misc_RNA (1)...(19): siRNA sense strand
aagaaagaacaaagaacca

SEQ ID NO: 2432531 - RNA, 19 nt, Homo sapiens
  misc_RNA (1)...(19): siRNA sense strand
cugucaaccaggugcagaa

SEQ ID NO: 2432532 - RNA, 19 nt, Homo sapiens
  misc_RNA (1)...(19): siRNA sense strand
cagccauaagaaugaacaa

SEQ ID NO: 2432533 - RNA, 19 nt, Homo sapiens
  misc_RNA (1)...(19): siRNA sense strand
agaacagcucugggagaua

SEQ ID NO: 2432534 - RNA, 19 nt, Homo sapiens
  misc_RNA (1)...(19): siRNA sense strand
agaagaaagaacaaagaac

SEQ ID NO: 2432535 - RNA, 19 nt, Homo sapiens
  misc_RNA (1)...(19): siRNA sense strand
acgcugaagauaaguguga

SEQ ID NO: 2432536 - RNA, 19 nt, Homo sapiens
  misc_RNA (1)...(19): siRNA sense strand
aaagcauaugccugggaua

SEQ ID NO: 2432537 - RNA, 19 nt, Homo sapiens
  misc_RNA (1)...(19): siRNA sense strand
cugggauaccaaugaagaa

SEQ ID NO: 2432538 - RNA, 19 nt, Homo sapiens
  misc_RNA (1)...(19): siRNA sense strand
gcaucaucauaguugcaau

SEQ ID NO: 2432539 - RNA, 19 nt, Homo sapiens
  misc_RNA (1)...(19): siRNA sense strand
cugaaguggaugacgcuga

SEQ ID NO: 2432540 - RNA, 19 nt, Homo sapiens
  misc_RNA (1)...(19): siRNA sense strand
ggaaaguaugugaugguga

SEQ ID NO: 2432541 - RNA, 19 nt, Homo sapiens
  misc_RNA (1)...(19): siRNA sense strand
caugaaaguaugugggaac

SEQ ID NO: 2432542 - RNA, 19 nt, Homo sapiens
  misc_RNA (1)...(19): siRNA sense strand
gggaacuggagguagaaga

SEQ ID NO: 2432543 - RNA, 19 nt, Homo sapiens
  misc_RNA (1)...(19): siRNA sense strand
ccaugaaaguaugugggaa

SEQ ID NO: 2432544 - RNA, 19 nt, Homo sapiens
  misc_RNA (1)...(19): siRNA sense strand
acuggagguagaagauuua

SEQ ID NO: 2432545 - RNA, 19 nt, Homo sapiens
  misc_RNA (1)...(19): siRNA sense strand
caggaaaguaugugauggu

SEQ ID NO: 2432546 - RNA, 19 nt, Homo sapiens
  misc_RNA (1)...(19): siRNA sense strand
gguucaaugcacagagaaa

SEQ ID NO: 2432547 - RNA, 19 nt, Homo sapiens
  misc_RNA (1)...(19): siRNA sense strand
ggaagaacuuagagcacau

SEQ ID NO: 2432548 - RNA, 19 nt, Homo sapiens
  misc_RNA (1)...(19): siRNA sense strand
gguuuagguuacaggcaua

SEQ ID NO: 2432549 - RNA, 19 nt, Homo sapiens
  misc_RNA (1)...(19): siRNA sense strand
uugaagaggaugacaauaa

SEQ ID NO: 2432550 - RNA, 19 nt, Homo sapiens
  misc_RNA (1)...(19): siRNA sense strand
guugagagcaugaggaaaa

SEQ ID NO: 2432551 - RNA, 19 nt, Homo sapiens
  misc_RNA (1)...(19): siRNA sense strand
guccagaagaagaguauaa

SEQ ID NO: 2432552 - RNA, 19 nt, Homo sapiens
  misc_RNA (1)...(19): siRNA sense strand
guauuugauuucagaggaa

SEQ ID NO: 2432553 - RNA, 19 nt, Homo sapiens
  misc_RNA (1)...(19): siRNA sense strand
ggagcaagugacagagaau

SEQ ID NO: 2432554 - RNA, 19 nt, Homo sapiens
  misc_RNA (1)...(19): siRNA sense strand
cuuggaaagaugaugaaua

SEQ ID NO: 2432555 - RNA, 19 nt, Homo sapiens
  misc_RNA (1)...(19): siRNA sense strand
agaaacuugugguggagaa

SEQ ID NO: 2432556 - RNA, 19 nt, Homo sapiens
  misc_RNA (1)...(19): siRNA sense strand
guggaaauguugguggaaa

SEQ ID NO: 2432557 - RNA, 19 nt, Homo sapiens
  misc_RNA (1)...(19): siRNA sense strand
uggaaauguugguggaaac

SEQ ID NO: 2432558 - RNA, 19 nt, Homo sapiens
  misc_RNA (1)...(19): siRNA sense strand
agacagucauggagagcca

SEQ ID NO: 2432559 - RNA, 19 nt, Homo sapiens
  misc_RNA (1)...(19): siRNA sense strand
agcagaagcuggcggagaa

SEQ ID NO: 2432560 - RNA, 19 nt, Homo sapiens
  misc_RNA (1)...(19): siRNA sense strand
cuuaugucuugcugagaaa

SEQ ID NO: 2432561 - RNA, 19 nt, Homo sapiens
  misc_RNA (1)...(19): siRNA sense strand
uugcacaacuacagaaaga

SEQ ID NO: 2432562 - RNA, 19 nt, Homo sapiens
  misc_RNA (1)...(19): siRNA sense strand
cauacgaggcuauaauaaa

SEQ ID NO: 2432563 - RNA, 19 nt, Homo sapiens
  misc_RNA (1)...(19): siRNA sense strand
cagagaaagacgcaaguuu

SEQ ID NO: 2432564 - RNA, 19 nt, Homo sapiens
  misc_RNA (1)...(19): siRNA sense strand
ccacacaggaaauugcaaa

SEQ ID NO: 2432565 - RNA, 19 nt, Homo sapiens
  misc_RNA (1)...(19): siRNA sense strand
gcaauggaaaaguggauua

SEQ ID NO: 2432566 - RNA, 19 nt, Homo sapiens
  misc_RNA (1)...(19): siRNA sense strand
ccuguaaugcagagguauu

SEQ ID NO: 2432567 - RNA, 19 nt, Homo sapiens
  misc_RNA (1)...(19): siRNA sense strand
ccuaaauacugacgcuaca

SEQ ID NO: 2432568 - RNA, 19 nt, Homo sapiens
  misc_RNA (1)...(19): siRNA sense strand
ucagucaagcagugaauaa

SEQ ID NO: 2432569 - RNA, 19 nt, Homo sapiens
  misc_RNA (1)...(19): siRNA sense strand
cuaacaaguguaagagcau

SEQ ID NO: 2432570 - RNA, 19 nt, Homo sapiens
  misc_RNA (1)...(19): siRNA sense strand
uuaagaaacuuguggugga

SEQ ID NO: 2432571 - RNA, 19 nt, Homo sapiens
  misc_RNA (1)...(19): siRNA sense strand
ugaucaaccuggauugcua

SEQ ID NO: 2432572 - RNA, 19 nt, Homo sapiens
  misc_RNA (1)...(19): siRNA sense strand
gcagugaauaagaaaucaa

SEQ ID NO: 2432573 - RNA, 19 nt, Homo sapiens
  misc_RNA (1)...(19): siRNA sense strand
gcacugaaggaauuggcua

SEQ ID NO: 2432574 - RNA, 19 nt, Homo sapiens
  misc_RNA (1)...(19): siRNA sense strand
caaugaaagcguuugugaa

SEQ ID NO: 2432575 - RNA, 19 nt, Homo sapiens
  misc_RNA (1)...(19): siRNA sense strand
uggaaucugcugugaaauu

SEQ ID NO: 2432576 - RNA, 19 nt, Homo sapiens
  misc_RNA (1)...(19): siRNA sense strand
cagaagagcgacaucauau

SEQ ID NO: 2432577 - RNA, 19 nt, Homo sapiens
  misc_RNA (1)...(19): siRNA sense strand
guguugagagcaugaggaa

SEQ ID NO: 2432578 - RNA, 19 nt, Homo sapiens
  misc_RNA (1)...(19): siRNA sense strand
guuugugaauugcugaaua

SEQ ID NO: 2432579 - RNA, 19 nt, Homo sapiens
  misc_RNA (1)...(19): siRNA sense strand
acccaagcauugugccaaa

SEQ ID NO: 2432580 - RNA, 19 nt, Homo sapiens
  misc_RNA (1)...(19): siRNA sense strand
cagcugaccaguggagaaa

SEQ ID NO: 2432581 - RNA, 19 nt, Homo sapiens
  misc_RNA (1)...(19): siRNA sense strand
uguaaacauacgaggcuau

SEQ ID NO: 2432582 - RNA, 19 nt, Homo sapiens
  misc_RNA (1)...(19): siRNA sense strand
guguaaaacaaguugaaga

SEQ ID NO: 2432583 - RNA, 19 nt, Homo sapiens
  misc_RNA (1)...(19): siRNA sense strand
gcgacaucauauuggagau

SEQ ID NO: 2432584 - RNA, 19 nt, Homo sapiens
  misc_RNA (1)...(19): siRNA sense strand
cauuacaagucuauacaca

SEQ ID NO: 2432585 - RNA, 19 nt, Homo sapiens
  misc_RNA (1)...(19): siRNA sense strand
auaugaagguugcaaugaa

SEQ ID NO: 2432586 - RNA, 19 nt, Homo sapiens
  misc_RNA (1)...(19): siRNA sense strand
uugaagaaaggaaggcaau

SEQ ID NO: 2432587 - RNA, 19 nt, Homo sapiens
  misc_RNA (1)...(19): siRNA sense strand
guggagaccccaaggcaaa

SEQ ID NO: 2432588 - RNA, 19 nt, Homo sapiens
  misc_RNA (1)...(19): siRNA sense strand
gugaacuuaccuacagaaa

SEQ ID NO: 2432589 - RNA, 19 nt, Homo sapiens
  misc_RNA (1)...(19): siRNA sense strand
caaaguagcucuugccucu

SEQ ID NO: 2432590 - RNA, 19 nt, Homo sapiens
  misc_RNA (1)...(19): siRNA sense strand
ggaaauacggaccuguaau

SEQ ID NO: 2432591 - RNA, 19 nt, Homo sapiens
  misc_RNA (1)...(19): siRNA sense strand
cagagaacuuggaaagaug

SEQ ID NO: 2432592 - RNA, 19 nt, Homo sapiens
  misc_RNA (1)...(19): siRNA sense strand
uaaucaagccacacaggaa

SEQ ID NO: 2432593 - RNA, 19 nt, Homo sapiens
  misc_RNA (1)...(19): siRNA sense strand
aaucaagccacacaggaaa

SEQ ID NO: 2432594 - RNA, 19 nt, Homo sapiens
  misc_RNA (1)...(19): siRNA sense strand
gugaaagccuuauguggca

SEQ ID NO: 2432595 - RNA, 19 nt, Homo sapiens
  misc_RNA (1)...(19): siRNA sense strand
acaagaagcacuuagagau

SEQ ID NO: 2432596 - RNA, 19 nt, Homo sapiens
  misc_RNA (1)...(19): siRNA sense strand
cuauagaagggcauugcaa

SEQ ID NO: 2432597 - RNA, 19 nt, Homo sapiens
  misc_RNA (1)...(19): siRNA sense strand
uggccaaacaagcucgaaa

SEQ ID NO: 2432598 - RNA, 19 nt, Homo sapiens
  misc_RNA (1)...(19): siRNA sense strand
ggaaaacauuaguccagaa

SEQ ID NO: 2432599 - RNA, 19 nt, Homo sapiens
  misc_RNA (1)...(19): siRNA sense strand
gcuagauaugauuguacaa

SEQ ID NO: 2432600 - RNA, 19 nt, Homo sapiens
  misc_RNA (1)...(19): siRNA sense strand
ccuuaugucuugcugagaa

SEQ ID NO: 2432601 - RNA, 19 nt, Homo sapiens
  misc_RNA (1)...(19): siRNA sense strand
caaucaacagcuugcacaa

SEQ ID NO: 2432602 - RNA, 19 nt, Homo sapiens
  misc_RNA (1)...(19): siRNA sense strand
gguucaaugcacagagaaa

SEQ ID NO: 2432603 - RNA, 19 nt, Homo sapiens
  misc_RNA (1)...(19): siRNA sense strand
ggaagaacuuagagcacau

SEQ ID NO: 2432604 - RNA, 19 nt, Homo sapiens
  misc_RNA (1)...(19): siRNA sense strand
gguuuagguuacaggcaua

SEQ ID NO: 2432605 - RNA, 19 nt, Homo sapiens
  misc_RNA (1)...(19): siRNA sense strand
uugaagaggaugacaauaa

SEQ ID NO: 2432606 - RNA, 19 nt, Homo sapiens
  misc_RNA (1)...(19): siRNA sense strand
guugagagcaugaggaaaa

SEQ ID NO: 2432607 - RNA, 19 nt, Homo sapiens
  misc_RNA (1)...(19): siRNA sense strand
guccagaagaagaguauaa

SEQ ID NO: 2432608 - RNA, 19 nt, Homo sapiens
  misc_RNA (1)...(19): siRNA sense strand
guauuugauuucagaggaa

SEQ ID NO: 2432609 - RNA, 19 nt, Homo sapiens
  misc_RNA (1)...(19): siRNA sense strand
ggagcaagugacagagaau

SEQ ID NO: 2432610 - RNA, 19 nt, Homo sapiens
  misc_RNA (1)...(19): siRNA sense strand
cuuggaaagaugaugaaua

SEQ ID NO: 2432611 - RNA, 19 nt, Homo sapiens
  misc_RNA (1)...(19): siRNA sense strand
agaaacuugugguggagaa

SEQ ID NO: 2432612 - RNA, 19 nt, Homo sapiens
  misc_RNA (1)...(19): siRNA sense strand
guggaaauguugguggaaa

SEQ ID NO: 2432613 - RNA, 19 nt, Homo sapiens
  misc_RNA (1)...(19): siRNA sense strand
uggaaauguugguggaaac

SEQ ID NO: 2432614 - RNA, 19 nt, Homo sapiens
  misc_RNA (1)...(19): siRNA sense strand
agacagucauggagagcca

SEQ ID NO: 2432615 - RNA, 19 nt, Homo sapiens
  misc_RNA (1)...(19): siRNA sense strand
agcagaagcuggcggagaa

SEQ ID NO: 2432616 - RNA, 19 nt, Homo sapiens
  misc_RNA (1)...(19): siRNA sense strand
cuuaugucuugcugagaaa

SEQ ID NO: 2432617 - RNA, 19 nt, Homo sapiens
  misc_RNA (1)...(19): siRNA sense strand
uugcacaacuacagaaaga

SEQ ID NO: 2432618 - RNA, 19 nt, Homo sapiens
  misc_RNA (1)...(19): siRNA sense strand
cauacgaggcuauaauaaa

SEQ ID NO: 2432619 - RNA, 19 nt, Homo sapiens
  misc_RNA (1)...(19): siRNA sense strand
cagagaaagacgcaaguuu

SEQ ID NO: 2432620 - RNA, 19 nt, Homo sapiens
  misc_RNA (1)...(19): siRNA sense strand
ccacacaggaaauugcaaa

SEQ ID NO: 2432621 - RNA, 19 nt, Homo sapiens
  misc_RNA (1)...(19): siRNA sense strand
gcaauggaaaaguggauua

SEQ ID NO: 2432622 - RNA, 19 nt, Homo sapiens
  misc_RNA (1)...(19): siRNA sense strand
ccuguaaugcagagguauu

SEQ ID NO: 2432623 - RNA, 19 nt, Homo sapiens
  misc_RNA (1)...(19): siRNA sense strand
ccuaaauacugacgcuaca

SEQ ID NO: 2432624 - RNA, 19 nt, Homo sapiens
  misc_RNA (1)...(19): siRNA sense strand
ucagucaagcagugaauaa

SEQ ID NO: 2432625 - RNA, 19 nt, Homo sapiens
  misc_RNA (1)...(19): siRNA sense strand
cuaacaaguguaagagcau

SEQ ID NO: 2432626 - RNA, 19 nt, Homo sapiens
  misc_RNA (1)...(19): siRNA sense strand
uuaagaaacuuguggugga

SEQ ID NO: 2432627 - RNA, 19 nt, Homo sapiens
  misc_RNA (1)...(19): siRNA sense strand
ugaucaaccuggauugcua

SEQ ID NO: 2432628 - RNA, 19 nt, Homo sapiens
  misc_RNA (1)...(19): siRNA sense strand
gcagugaauaagaaaucaa

SEQ ID NO: 2432629 - RNA, 19 nt, Homo sapiens
  misc_RNA (1)...(19): siRNA sense strand
gcacugaaggaauuggcua

SEQ ID NO: 2432630 - RNA, 19 nt, Homo sapiens
  misc_RNA (1)...(19): siRNA sense strand
caaugaaagcguuugugaa

SEQ ID NO: 2432631 - RNA, 19 nt, Homo sapiens
  misc_RNA (1)...(19): siRNA sense strand
uggaaucugcugugaaauu

SEQ ID NO: 2432632 - RNA, 19 nt, Homo sapiens
  misc_RNA (1)...(19): siRNA sense strand
cagaagagcgacaucauau

SEQ ID NO: 2432633 - RNA, 19 nt, Homo sapiens
  misc_RNA (1)...(19): siRNA sense strand
guguugagagcaugaggaa

SEQ ID NO: 2432634 - RNA, 19 nt, Homo sapiens
  misc_RNA (1)...(19): siRNA sense strand
guuugugaauugcugaaua

SEQ ID NO: 2432635 - RNA, 19 nt, Homo sapiens
  misc_RNA (1)...(19): siRNA sense strand
acccaagcauugugccaaa

SEQ ID NO: 2432636 - RNA, 19 nt, Homo sapiens
  misc_RNA (1)...(19): siRNA sense strand
cagcugaccaguggagaaa

SEQ ID NO: 2432637 - RNA, 19 nt, Homo sapiens
  misc_RNA (1)...(19): siRNA sense strand
uguaaacauacgaggcuau

SEQ ID NO: 2432638 - RNA, 19 nt, Homo sapiens
  misc_RNA (1)...(19): siRNA sense strand
guguaaaacaaguugaaga

SEQ ID NO: 2432639 - RNA, 19 nt, Homo sapiens
  misc_RNA (1)...(19): siRNA sense strand
gcgacaucauauuggagau

SEQ ID NO: 2432640 - RNA, 19 nt, Homo sapiens
  misc_RNA (1)...(19): siRNA sense strand
cauuacaagucuauacaca

SEQ ID NO: 2432641 - RNA, 19 nt, Homo sapiens
  misc_RNA (1)...(19): siRNA sense strand
auaugaagguugcaaugaa

SEQ ID NO: 2432642 - RNA, 19 nt, Homo sapiens
  misc_RNA (1)...(19): siRNA sense strand
uugaagaaaggaaggcaau

SEQ ID NO: 2432643 - RNA, 19 nt, Homo sapiens
  misc_RNA (1)...(19): siRNA sense strand
guggagaccccaaggcaaa

SEQ ID NO: 2432644 - RNA, 19 nt, Homo sapiens
  misc_RNA (1)...(19): siRNA sense strand
gugaacuuaccuacagaaa

SEQ ID NO: 2432645 - RNA, 19 nt, Homo sapiens
  misc_RNA (1)...(19): siRNA sense strand
caaaguagcucuugccucu

SEQ ID NO: 2432646 - RNA, 19 nt, Homo sapiens
  misc_RNA (1)...(19): siRNA sense strand
ggaaauacggaccuguaau

SEQ ID NO: 2432647 - RNA, 19 nt, Homo sapiens
  misc_RNA (1)...(19): siRNA sense strand
cagagaacuuggaaagaug

SEQ ID NO: 2432648 - RNA, 19 nt, Homo sapiens
  misc_RNA (1)...(19): siRNA sense strand
uaaucaagccacacaggaa

SEQ ID NO: 2432649 - RNA, 19 nt, Homo sapiens
  misc_RNA (1)...(19): siRNA sense strand
aaucaagccacacaggaaa

SEQ ID NO: 2432650 - RNA, 19 nt, Homo sapiens
  misc_RNA (1)...(19): siRNA sense strand
gugaaagccuuauguggca

SEQ ID NO: 2432651 - RNA, 19 nt, Homo sapiens
  misc_RNA (1)...(19): siRNA sense strand
acaagaagcacuuagagau

SEQ ID NO: 2432652 - RNA, 19 nt, Homo sapiens
  misc_RNA (1)...(19): siRNA sense strand
cuauagaagggcauugcaa

SEQ ID NO: 2432653 - RNA, 19 nt, Homo sapiens
  misc_RNA (1)...(19): siRNA sense strand
uggccaaacaagcucgaaa

SEQ ID NO: 2432654 - RNA, 19 nt, Homo sapiens
  misc_RNA (1)...(19): siRNA sense strand
ggaaaacauuaguccagaa

SEQ ID NO: 2432655 - RNA, 19 nt, Homo sapiens
  misc_RNA (1)...(19): siRNA sense strand
gcuagauaugauuguacaa

SEQ ID NO: 2432656 - RNA, 19 nt, Homo sapiens
  misc_RNA (1)...(19): siRNA sense strand
ccuuaugucuugcugagaa

SEQ ID NO: 2432657 - RNA, 19 nt, Homo sapiens
  misc_RNA (1)...(19): siRNA sense strand
caaucaacagcuugcacaa

SEQ ID NO: 2432658 - RNA, 19 nt, Homo sapiens
  misc_RNA (1)...(19): siRNA sense strand
ccuuuaagaagaagagcaa

SEQ ID NO: 2432659 - RNA, 19 nt, Homo sapiens
  misc_RNA (1)...(19): siRNA sense strand
cugcagaagaaguggacca

SEQ ID NO: 2432660 - RNA, 19 nt, Homo sapiens
  misc_RNA (1)...(19): siRNA sense strand
cccguuaagcagagagcaa

SEQ ID NO: 2432661 - RNA, 19 nt, Homo sapiens
  misc_RNA (1)...(19): siRNA sense strand
gugcaguguuuguaggcuu

SEQ ID NO: 2432662 - RNA, 19 nt, Homo sapiens
  misc_RNA (1)...(19): siRNA sense strand
ggcuagagucugcaagaau

SEQ ID NO: 2432663 - RNA, 19 nt, Homo sapiens
  misc_RNA (1)...(19): siRNA sense strand
cguuaagcagagagcaaca

SEQ ID NO: 2432664 - RNA, 19 nt, Homo sapiens
  misc_RNA (1)...(19): siRNA sense strand
uuaaagaaguccuggcugu

SEQ ID NO: 2432665 - RNA, 19 nt, Homo sapiens
  misc_RNA (1)...(19): siRNA sense strand
gugcugggcaacugagaau

SEQ ID NO: 2432666 - RNA, 19 nt, Homo sapiens
  misc_RNA (1)...(19): siRNA sense strand
ggacaaggucauggaggga

SEQ ID NO: 2432667 - RNA, 19 nt, Homo sapiens
  misc_RNA (1)...(19): siRNA sense strand
agaagagcaaugagacaca

SEQ ID NO: 2432668 - RNA, 19 nt, Homo sapiens
  misc_RNA (1)...(19): siRNA sense strand
ccuacuggguggacagcca

SEQ ID NO: 2432669 - RNA, 19 nt, Homo sapiens
  misc_RNA (1)...(19): siRNA sense strand
ccauucuggccuuggauau

SEQ ID NO: 2432670 - RNA, 19 nt, Homo sapiens
  misc_RNA (1)...(19): siRNA sense strand
ccucuuugccuuagugcuu

SEQ ID NO: 2432671 - RNA, 19 nt, Homo sapiens
  misc_RNA (1)...(19): siRNA sense strand
uuuaagaagaagagcaaug

SEQ ID NO: 2432672 - RNA, 19 nt, Homo sapiens
  misc_RNA (1)...(19): siRNA sense strand
ccagugauguggacgcuga

SEQ ID NO: 2432673 - RNA, 19 nt, Homo sapiens
  misc_RNA (1)...(19): siRNA sense strand
gagaaagacaccaaggaga

SEQ ID NO: 2432674 - RNA, 19 nt, Homo sapiens
  misc_RNA (1)...(19): siRNA sense strand
ugucugaguuugaaagcuu

SEQ ID NO: 2432675 - RNA, 19 nt, Homo sapiens
  misc_RNA (1)...(19): siRNA sense strand
aggaaagugaagagcacau

SEQ ID NO: 2432676 - RNA, 19 nt, Homo sapiens
  misc_RNA (1)...(19): siRNA sense strand
agugaugacaugaaggaga

SEQ ID NO: 2432677 - RNA, 19 nt, Homo sapiens
  misc_RNA (1)...(19): siRNA sense strand
gcagcagccuccauggcaa

SEQ ID NO: 2432678 - RNA, 19 nt, Homo sapiens
  misc_RNA (1)...(19): siRNA sense strand
cccugugguucaugacaaa

SEQ ID NO: 2432679 - RNA, 19 nt, Homo sapiens
  misc_RNA (1)...(19): siRNA sense strand
agaggaaagugaagagcac

SEQ ID NO: 2432680 - RNA, 19 nt, Homo sapiens
  misc_RNA (1)...(19): siRNA sense strand
acuuugagaugucaggcaa

SEQ ID NO: 2432681 - RNA, 19 nt, Homo sapiens
  misc_RNA (1)...(19): siRNA sense strand
aguagguggaguuaguaua

SEQ ID NO: 2432682 - RNA, 19 nt, Homo sapiens
  misc_RNA (1)...(19): siRNA sense strand
acaugaaggagaucaccaa

SEQ ID NO: 2432683 - RNA, 19 nt, Homo sapiens
  misc_RNA (1)...(19): siRNA sense strand
gcaacaugagugaugacau

SEQ ID NO: 2432684 - RNA, 19 nt, Homo sapiens
  misc_RNA (1)...(19): siRNA sense strand
ucucuuaguagguggaguu

SEQ ID NO: 2432685 - RNA, 19 nt, Homo sapiens
  misc_RNA (1)...(19): siRNA sense strand
acggcauugugcaggaauu

SEQ ID NO: 2432686 - RNA, 19 nt, Homo sapiens
  misc_RNA (1)...(19): siRNA sense strand
ugaacaagaaggcagccaa

SEQ ID NO: 2432687 - RNA, 19 nt, Homo sapiens
  misc_RNA (1)...(19): siRNA sense strand
guggaaacccaaagggcaa

SEQ ID NO: 2432688 - RNA, 19 nt, Homo sapiens
  misc_RNA (1)...(19): siRNA sense strand
ccaacuaccggaaggagaa

SEQ ID NO: 2432689 - RNA, 19 nt, Homo sapiens
  misc_RNA (1)...(19): siRNA sense strand
auaucaaggcugugcggaa

SEQ ID NO: 2432690 - RNA, 19 nt, Homo sapiens
  misc_RNA (1)...(19): siRNA sense strand
ucaugagcgcagagggcaa

SEQ ID NO: 2432691 - RNA, 19 nt, Homo sapiens
  misc_RNA (1)...(19): siRNA sense strand
ccaaugacccggagguguu

SEQ ID NO: 2432692 - RNA, 19 nt, Homo sapiens
  misc_RNA (1)...(19): siRNA sense strand
ccgaggaguaucuggacau

SEQ ID NO: 2432693 - RNA, 19 nt, Homo sapiens
  misc_RNA (1)...(19): siRNA sense strand
uguccaagaacaagcaaaa

SEQ ID NO: 2432694 - RNA, 19 nt, Homo sapiens
  misc_RNA (1)...(19): siRNA sense strand
gagauugacaagaccguga

SEQ ID NO: 2432695 - RNA, 19 nt, Homo sapiens
  misc_RNA (1)...(19): siRNA sense strand
gcgccuuucugcaggacga

SEQ ID NO: 2432696 - RNA, 19 nt, Homo sapiens
  misc_RNA (1)...(19): siRNA sense strand
aagugugaccaguguggaa

SEQ ID NO: 2432697 - RNA, 19 nt, Homo sapiens
  misc_RNA (1)...(19): siRNA sense strand
aggagaaccuguacugcga

SEQ ID NO: 2432698 - RNA, 19 nt, Homo sapiens
  misc_RNA (1)...(19): siRNA sense strand
gcagaaacggggagugcaa

SEQ ID NO: 2432699 - RNA, 19 nt, Homo sapiens
  misc_RNA (1)...(19): siRNA sense strand
uauuggaacuggaugggaa

SEQ ID NO: 2432700 - RNA, 19 nt, Homo sapiens
  misc_RNA (1)...(19): siRNA sense strand
aauccaaauucaaagccaa

SEQ ID NO: 2432701 - RNA, 19 nt, Homo sapiens
  misc_RNA (1)...(19): siRNA sense strand
cagaagagaaggugcugga

SEQ ID NO: 2432702 - RNA, 19 nt, Homo sapiens
  misc_RNA (1)...(19): siRNA sense strand
cagcagaugggaaagguga

SEQ ID NO: 2432703 - RNA, 19 nt, Homo sapiens
  misc_RNA (1)...(19): siRNA sense strand
cuggguaagaagaguaaga

SEQ ID NO: 2432704 - RNA, 19 nt, Homo sapiens
  misc_RNA (1)...(19): siRNA sense strand
aggauggguguguggcuua

SEQ ID NO: 2432705 - RNA, 19 nt, Homo sapiens
  misc_RNA (1)...(19): siRNA sense strand
ggguaagaagaguaagaac

SEQ ID NO: 2432706 - RNA, 19 nt, Homo sapiens
  misc_RNA (1)...(19): siRNA sense strand
cagagaaggaucagagcag

SEQ ID NO: 2432707 - RNA, 19 nt, Homo sapiens
  misc_RNA (1)...(19): siRNA sense strand
ugaaaacagcagaugggaa

SEQ ID NO: 2432708 - RNA, 19 nt, Homo sapiens
  misc_RNA (1)...(19): siRNA sense strand
uggccgaggaagauaccaa

SEQ ID NO: 2432709 - RNA, 19 nt, Homo sapiens
  misc_RNA (1)...(19): siRNA sense strand
ugaacaauaaagugggaaa

SEQ ID NO: 2432710 - RNA, 19 nt, Homo sapiens
  misc_RNA (1)...(19): siRNA sense strand
aggaaaaggaugaggaaga

SEQ ID NO: 2432711 - RNA, 19 nt, Homo sapiens
  misc_RNA (1)...(19): siRNA sense strand
agauaauggcaaagaggau

SEQ ID NO: 2432712 - RNA, 19 nt, Homo sapiens
  misc_RNA (1)...(19): siRNA sense strand
cacaaauggaaguggagaa

SEQ ID NO: 2432713 - RNA, 19 nt, Homo sapiens
  misc_RNA (1)...(19): siRNA sense strand
acugcaacuuggaagauaa

SEQ ID NO: 2432714 - RNA, 19 nt, Homo sapiens
  misc_RNA (1)...(19): siRNA sense strand
cgaaggaguaacagcaaaa

SEQ ID NO: 2432715 - RNA, 19 nt, Homo sapiens
  misc_RNA (1)...(19): siRNA sense strand
aggcaaaccgaaggaguaa

SEQ ID NO: 2432716 - RNA, 19 nt, Homo sapiens
  misc_RNA (1)...(19): siRNA sense strand
aggaugaggaagauggaga

SEQ ID NO: 2432717 - RNA, 19 nt, Homo sapiens
  misc_RNA (1)...(19): siRNA sense strand
gguacaaguaaccgggaca

SEQ ID NO: 2432718 - RNA, 19 nt, Homo sapiens
  misc_RNA (1)...(19): siRNA sense strand
agagcuauuucauggacaa

SEQ ID NO: 2432719 - RNA, 19 nt, Homo sapiens
  misc_RNA (1)...(19): siRNA sense strand
agaugacagaagaagguua

SEQ ID NO: 2432720 - RNA, 19 nt, Homo sapiens
  misc_RNA (1)...(19): siRNA sense strand
aaggcaaaccgaaggagua

SEQ ID NO: 2432721 - RNA, 19 nt, Homo sapiens
  misc_RNA (1)...(19): siRNA sense strand
gauuauuaucacagagcca

SEQ ID NO: 2432722 - RNA, 19 nt, Homo sapiens
  misc_RNA (1)...(19): siRNA sense strand
gcaaagaggaucuggaguc

SEQ ID NO: 2432723 - RNA, 19 nt, Homo sapiens
  misc_RNA (1)...(19): siRNA sense strand
gcuauaucucaucaggaaa

SEQ ID NO: 2432724 - RNA, 19 nt, Homo sapiens
  misc_RNA (1)...(19): siRNA sense strand
cagacaucuccuuaaauaa

SEQ ID NO: 2432725 - RNA, 19 nt, Homo sapiens
  misc_RNA (1)...(19): siRNA sense strand
aaguggagaacaaaguaaa

SEQ ID NO: 2432726 - RNA, 19 nt, Homo sapiens
  misc_RNA (1)...(19): siRNA sense strand
cugcaacuuggaagauaaa

SEQ ID NO: 2432727 - RNA, 19 nt, Homo sapiens
  misc_RNA (1)...(19): siRNA sense strand
cuauaucucaucaggaaau

SEQ ID NO: 2432728 - RNA, 19 nt, Homo sapiens
  misc_RNA (1)...(19): siRNA sense strand
gaaauucagauaauggcaa

SEQ ID NO: 2432729 - RNA, 19 nt, Homo sapiens
  misc_RNA (1)...(19): siRNA sense strand
ucaucaggaaauucagaua

SEQ ID NO: 2432730 - RNA, 19 nt, Homo sapiens
  misc_RNA (1)...(19): siRNA sense strand
aagcagcaguuuugggaau

SEQ ID NO: 2432731 - RNA, 19 nt, Homo sapiens
  misc_RNA (1)...(19): siRNA sense strand
gcaaaacaccaauggggau

SEQ ID NO: 2432732 - RNA, 19 nt, Homo sapiens
  misc_RNA (1)...(19): siRNA sense strand
ugucaucucagaagaggaa

SEQ ID NO: 2432733 - RNA, 19 nt, Homo sapiens
  misc_RNA (1)...(19): siRNA sense strand
auggaggcgguuuggguaa

SEQ ID NO: 2432734 - RNA, 19 nt, Homo sapiens
  misc_RNA (1)...(19): siRNA sense strand
ccucaacacuuuugcucaa

SEQ ID NO: 2432735 - RNA, 19 nt, Homo sapiens
  misc_RNA (1)...(19): siRNA sense strand
aagucuuccugcucagaua

SEQ ID NO: 2432736 - RNA, 19 nt, Homo sapiens
  misc_RNA (1)...(19): siRNA sense strand
ucaagaaaggagacaucau

SEQ ID NO: 2432737 - RNA, 19 nt, Homo sapiens
  misc_RNA (1)...(19): siRNA sense strand
aaauaaaggcaaaccgaag

SEQ ID NO: 2432738 - RNA, 19 nt, Homo sapiens
  misc_RNA (1)...(19): siRNA sense strand
cugcaggaauacaccucaa

SEQ ID NO: 2432739 - RNA, 19 nt, Homo sapiens
  misc_RNA (1)...(19): siRNA sense strand
uggugaaggcgcaguacau

SEQ ID NO: 2432740 - RNA, 19 nt, Homo sapiens
  misc_RNA (1)...(19): siRNA sense strand
augugaagaaugugggaaa

SEQ ID NO: 2432741 - RNA, 19 nt, Homo sapiens
  misc_RNA (1)...(19): siRNA sense strand
gggaaguuauaguggcaca

SEQ ID NO: 2432742 - RNA, 19 nt, Homo sapiens
  misc_RNA (1)...(19): siRNA sense strand
cuucauuacucguagaaca

SEQ ID NO: 2432743 - RNA, 19 nt, Homo sapiens
  misc_RNA (1)...(19): siRNA sense strand
gaagagaaccuaugaggga

SEQ ID NO: 2432744 - RNA, 19 nt, Homo sapiens
  misc_RNA (1)...(19): siRNA sense strand
guguguugagugugggaaa

SEQ ID NO: 2432745 - RNA, 19 nt, Homo sapiens
  misc_RNA (1)...(19): siRNA sense strand
cgauguaaugaguguggua

SEQ ID NO: 2432746 - RNA, 19 nt, Homo sapiens
  misc_RNA (1)...(19): siRNA sense strand
gugugaugagugugguaaa

SEQ ID NO: 2432747 - RNA, 19 nt, Homo sapiens
  misc_RNA (1)...(19): siRNA sense strand
augugaugugugugagaaa

SEQ ID NO: 2432748 - RNA, 19 nt, Homo sapiens
  misc_RNA (1)...(19): siRNA sense strand
uaauugugagugugggaaa

SEQ ID NO: 2432749 - RNA, 19 nt, Homo sapiens
  misc_RNA (1)...(19): siRNA sense strand
aacccauacuggagaggaa

SEQ ID NO: 2432750 - RNA, 19 nt, Homo sapiens
  misc_RNA (1)...(19): siRNA sense strand
guggaaaauccuucaauua

SEQ ID NO: 2432751 - RNA, 19 nt, Homo sapiens
  misc_RNA (1)...(19): siRNA sense strand
gaagaaugugggaaagcau

SEQ ID NO: 2432752 - RNA, 19 nt, Homo sapiens
  misc_RNA (1)...(19): siRNA sense strand
ggaaagaagccauaccgau

SEQ ID NO: 2432753 - RNA, 19 nt, Homo sapiens
  misc_RNA (1)...(19): siRNA sense strand
augcgacaucugugggaaa

SEQ ID NO: 2432754 - RNA, 19 nt, Homo sapiens
  misc_RNA (1)...(19): siRNA sense strand
ccuuaaaguacauaaacga

SEQ ID NO: 2432755 - RNA, 19 nt, Homo sapiens
  misc_RNA (1)...(19): siRNA sense strand
guacauaaacgaauccaca

SEQ ID NO: 2432756 - RNA, 19 nt, Homo sapiens
  misc_RNA (1)...(19): siRNA sense strand
gaaugugauguguguggaa

SEQ ID NO: 2432757 - RNA, 19 nt, Homo sapiens
  misc_RNA (1)...(19): siRNA sense strand
ggggagaagaacuguaaau

SEQ ID NO: 2432758 - RNA, 19 nt, Homo sapiens
  misc_RNA (1)...(19): siRNA sense strand
gugggaaguuauaguggca

SEQ ID NO: 2432759 - RNA, 19 nt, Homo sapiens
  misc_RNA (1)...(19): siRNA sense strand
gaaagaagccauaccgaug

SEQ ID NO: 2432760 - RNA, 19 nt, Homo sapiens
  misc_RNA (1)...(19): siRNA sense strand
gauauaugugggaaguuau

SEQ ID NO: 2432761 - RNA, 19 nt, Homo sapiens
  misc_RNA (1)...(19): siRNA sense strand
aagaaugugggaaagcaua

SEQ ID NO: 2432762 - RNA, 19 nt, Homo sapiens
  misc_RNA (1)...(19): siRNA sense strand
gcccuauaauugugagugu

SEQ ID NO: 2432763 - RNA, 19 nt, Homo sapiens
  misc_RNA (1)...(19): siRNA sense strand
acacuggaaagaagccaua

SEQ ID NO: 2432764 - RNA, 19 nt, Homo sapiens
  misc_RNA (1)...(19): siRNA sense strand
ccuuacaaaugugaagaau

SEQ ID NO: 2432765 - RNA, 19 nt, Homo sapiens
  misc_RNA (1)...(19): siRNA sense strand
gugggaaaaccuucaguaa

SEQ ID NO: 2432766 - RNA, 19 nt, Homo sapiens
  misc_RNA (1)...(19): siRNA sense strand
cugguagagacgagcagua

SEQ ID NO: 2432767 - RNA, 19 nt, Homo sapiens
  misc_RNA (1)...(19): siRNA sense strand
aggaagaagucgcggacga

SEQ ID NO: 2432768 - RNA, 19 nt, Homo sapiens
  misc_RNA (1)...(19): siRNA sense strand
uugccaaguuaaagggcua

SEQ ID NO: 2432769 - RNA, 19 nt, Homo sapiens
  misc_RNA (1)...(19): siRNA sense strand
gcaaggagaaguucggcaa

SEQ ID NO: 2432770 - RNA, 19 nt, Homo sapiens
  misc_RNA (1)...(19): siRNA sense strand
cagagggcgacgaggacaa

SEQ ID NO: 2432771 - RNA, 19 nt, Homo sapiens
  misc_RNA (1)...(19): siRNA sense strand
ggauagagcgcaugaccca

SEQ ID NO: 2432772 - RNA, 19 nt, Homo sapiens
  misc_RNA (1)...(19): siRNA sense strand
ccuauaucgggcaggguua

SEQ ID NO: 2432773 - RNA, 19 nt, Homo sapiens
  misc_RNA (1)...(19): siRNA sense strand
ucacagucgacgagcucaa

SEQ ID NO: 2432774 - RNA, 19 nt, Homo sapiens
  misc_RNA (1)...(19): siRNA sense strand
caacaaggauggcgagguc

SEQ ID NO: 2432775 - RNA, 19 nt, Homo sapiens
  misc_RNA (1)...(19): siRNA sense strand
ccuggagagagaaggaaga

SEQ ID NO: 2432776 - RNA, 19 nt, Homo sapiens
  misc_RNA (1)...(19): siRNA sense strand
gggccaacaaggugaucga

SEQ ID NO: 2432777 - RNA, 19 nt, Homo sapiens
  misc_RNA (1)...(19): siRNA sense strand
auguggucaucgagaggua

SEQ ID NO: 2432778 - RNA, 19 nt, Homo sapiens
  misc_RNA (1)...(19): siRNA sense strand
uggcaagaaguuugauuca

SEQ ID NO: 2432779 - RNA, 19 nt, Homo sapiens
  misc_RNA (1)...(19): siRNA sense strand
ggaacaaggaagacaccgu

SEQ ID NO: 2432780 - RNA, 19 nt, Homo sapiens
  misc_RNA (1)...(19): siRNA sense strand
ugggaaagacaguggcaca

SEQ ID NO: 2432781 - RNA, 19 nt, Homo sapiens
  misc_RNA (1)...(19): siRNA sense strand
cuaucugucuuuugggaaa

SEQ ID NO: 2432782 - RNA, 19 nt, Homo sapiens
  misc_RNA (1)...(19): siRNA sense strand
ggcaagguguggagcgacu

SEQ ID NO: 2432783 - RNA, 19 nt, Homo sapiens
  misc_RNA (1)...(19): siRNA sense strand
cugggaaguacaaguggua

SEQ ID NO: 2432784 - RNA, 19 nt, Homo sapiens
  misc_RNA (1)...(19): siRNA sense strand
ugaagaagcugguauuugu

SEQ ID NO: 2432785 - RNA, 19 nt, Homo sapiens
  misc_RNA (1)...(19): siRNA sense strand
cagaagaacuugaaggaag

SEQ ID NO: 2432786 - RNA, 19 nt, Homo sapiens
  misc_RNA (1)...(19): siRNA sense strand
agaagaaacugaaugccaa

SEQ ID NO: 2432787 - RNA, 19 nt, Homo sapiens
  misc_RNA (1)...(19): siRNA sense strand
gagaagaaacugaaugcca

SEQ ID NO: 2432788 - RNA, 19 nt, Homo sapiens
  misc_RNA (1)...(19): siRNA sense strand
ucaaaacaucacagagaaa

SEQ ID NO: 2432789 - RNA, 19 nt, Homo sapiens
  misc_RNA (1)...(19): siRNA sense strand
gagaaauggcugcccgaga

SEQ ID NO: 2432790 - RNA, 19 nt, Homo sapiens
  misc_RNA (1)...(19): siRNA sense strand
cagccuugacgcagaagaa

SEQ ID NO: 2432791 - RNA, 19 nt, Homo sapiens
  misc_RNA (1)...(19): siRNA sense strand
acuuauuuguggugggaua

SEQ ID NO: 2432792 - RNA, 19 nt, Homo sapiens
  misc_RNA (1)...(19): siRNA sense strand
cuuaagaacaucagccgaa

SEQ ID NO: 2432793 - RNA, 19 nt, Homo sapiens
  misc_RNA (1)...(19): siRNA sense strand
ggaugauuggccaggguau

SEQ ID NO: 2432794 - RNA, 19 nt, Homo sapiens
  misc_RNA (1)...(19): siRNA sense strand
gaauugagcggcuggccaa

SEQ ID NO: 2432795 - RNA, 19 nt, Homo sapiens
  misc_RNA (1)...(19): siRNA sense strand
uagagaaauacaagcccaa

SEQ ID NO: 2432796 - RNA, 19 nt, Homo sapiens
  misc_RNA (1)...(19): siRNA sense strand
gauuauggaugauuggcca

SEQ ID NO: 2432797 - RNA, 19 nt, Homo sapiens
  misc_RNA (1)...(19): siRNA sense strand
guuuguuggugaagagaac

SEQ ID NO: 2432798 - RNA, 19 nt, Homo sapiens
  misc_RNA (1)...(19): siRNA sense strand
cggcuuuagaccugacuau

SEQ ID NO: 2432799 - RNA, 19 nt, Homo sapiens
  misc_RNA (1)...(19): siRNA sense strand
gcgagaaguuuguugcaga

SEQ ID NO: 2432800 - RNA, 19 nt, Homo sapiens
  misc_RNA (1)...(19): siRNA sense strand
gguccaguccagaggucaa

SEQ ID NO: 2432801 - RNA, 19 nt, Homo sapiens
  misc_RNA (1)...(19): siRNA sense strand
uuaaagagcuuccuggaga

SEQ ID NO: 2432802 - RNA, 19 nt, Homo sapiens
  misc_RNA (1)...(19): siRNA sense strand
cuauaagaaaucagcugaa

SEQ ID NO: 2432803 - RNA, 19 nt, Homo sapiens
  misc_RNA (1)...(19): siRNA sense strand
aaggagugcgugagagaca

SEQ ID NO: 2432804 - RNA, 19 nt, Homo sapiens
  misc_RNA (1)...(19): siRNA sense strand
ccauacuggacgugaacuu

SEQ ID NO: 2432805 - RNA, 19 nt, Homo sapiens
  misc_RNA (1)...(19): siRNA sense strand
ugacucuggcuucgggaaa

SEQ ID NO: 2432806 - RNA, 19 nt, Homo sapiens
  misc_RNA (1)...(19): siRNA sense strand
ggagaaaggagccgagcag

SEQ ID NO: 2432807 - RNA, 19 nt, Homo sapiens
  misc_RNA (1)...(19): siRNA sense strand
cugcacugguaccgggaga

SEQ ID NO: 2432808 - RNA, 19 nt, Homo sapiens
  misc_RNA (1)...(19): siRNA sense strand
gcugugaccaguaaggaga

SEQ ID NO: 2432809 - RNA, 19 nt, Homo sapiens
  misc_RNA (1)...(19): siRNA sense strand
cagcugaacaaauggagca

SEQ ID NO: 2432810 - RNA, 19 nt, Homo sapiens
  misc_RNA (1)...(19): siRNA sense strand
uguugcagacuauaagaaa

SEQ ID NO: 2432811 - RNA, 19 nt, Homo sapiens
  misc_RNA (1)...(19): siRNA sense strand
cagaggucaaggaggccua

SEQ ID NO: 2432812 - RNA, 19 nt, Homo sapiens
  misc_RNA (1)...(19): siRNA sense strand
aggccuauggcgagaaguu

SEQ ID NO: 2432813 - RNA, 19 nt, Homo sapiens
  misc_RNA (1)...(19): siRNA sense strand
agaugaagacugugagaaa

SEQ ID NO: 2432814 - RNA, 19 nt, Homo sapiens
  misc_RNA (1)...(19): siRNA sense strand
gaauauaagaagccagaaa

SEQ ID NO: 2432815 - RNA, 19 nt, Homo sapiens
  misc_RNA (1)...(19): siRNA sense strand
agaccgaguuugaaagaaa

SEQ ID NO: 2432816 - RNA, 19 nt, Homo sapiens
  misc_RNA (1)...(19): siRNA sense strand
acuaauggauagaggauuu

SEQ ID NO: 2432817 - RNA, 19 nt, Homo sapiens
  misc_RNA (1)...(19): siRNA sense strand
gguaaaugccaaagagcuu

SEQ ID NO: 2432818 - RNA, 19 nt, Homo sapiens
  misc_RNA (1)...(19): siRNA sense strand
uugaagaagaagauggaaa

SEQ ID NO: 2432819 - RNA, 19 nt, Homo sapiens
  misc_RNA (1)...(19): siRNA sense strand
ccacaaauguugagcccuu

SEQ ID NO: 2432820 - RNA, 19 nt, Homo sapiens
  misc_RNA (1)...(19): siRNA sense strand
guauagaagaacagugcaa

SEQ ID NO: 2432821 - RNA, 19 nt, Homo sapiens
  misc_RNA (1)...(19): siRNA sense strand
gaguauaccaaaaggaaaa

SEQ ID NO: 2432822 - RNA, 19 nt, Homo sapiens
  misc_RNA (1)...(19): siRNA sense strand
gaaauuaacacaaagggaa

SEQ ID NO: 2432823 - RNA, 19 nt, Homo sapiens
  misc_RNA (1)...(19): siRNA sense strand
cagcauugcacuugaacua

SEQ ID NO: 2432824 - RNA, 19 nt, Homo sapiens
  misc_RNA (1)...(19): siRNA sense strand
gggcaacacuggugaaaau

SEQ ID NO: 2432825 - RNA, 19 nt, Homo sapiens
  misc_RNA (1)...(19): siRNA sense strand
cagauuggcacgugguaaa

SEQ ID NO: 2432826 - RNA, 19 nt, Homo sapiens
  misc_RNA (1)...(19): siRNA sense strand
uggaagagaaacugaacaa

SEQ ID NO: 2432827 - RNA, 19 nt, Homo sapiens
  misc_RNA (1)...(19): siRNA sense strand
caguagaggagauggaaga

SEQ ID NO: 2432828 - RNA, 19 nt, Homo sapiens
  misc_RNA (1)...(19): siRNA sense strand
cguuccaauuuaugagaaa

SEQ ID NO: 2432829 - RNA, 19 nt, Homo sapiens
  misc_RNA (1)...(19): siRNA sense strand
aggaauugaaccugauaua

SEQ ID NO: 2432830 - RNA, 19 nt, Homo sapiens
  misc_RNA (1)...(19): siRNA sense strand
ugaagaaggagcaaugaaa

SEQ ID NO: 2432831 - RNA, 19 nt, Homo sapiens
  misc_RNA (1)...(19): siRNA sense strand
gaacuaaaugagcggcuaa

SEQ ID NO: 2432832 - RNA, 19 nt, Homo sapiens
  misc_RNA (1)...(19): siRNA sense strand
agagauuucccgagacaua

SEQ ID NO: 2432833 - RNA, 19 nt, Homo sapiens
  misc_RNA (1)...(19): siRNA sense strand
ggucuacuucugagggaaa

SEQ ID NO: 2432834 - RNA, 19 nt, Homo sapiens
  misc_RNA (1)...(19): siRNA sense strand
gugcagaacccuauaucaa

SEQ ID NO: 2432835 - RNA, 19 nt, Homo sapiens
  misc_RNA (1)...(19): siRNA sense strand
auucagaaguucagagguu

SEQ ID NO: 2432836 - RNA, 19 nt, Homo sapiens
  misc_RNA (1)...(19): siRNA sense strand
ggugaauugccaugauuua

SEQ ID NO: 2432837 - RNA, 19 nt, Homo sapiens
  misc_RNA (1)...(19): siRNA sense strand
gggaaaagaaacauagcaa

SEQ ID NO: 2432838 - RNA, 19 nt, Homo sapiens
  misc_RNA (1)...(19): siRNA sense strand
augaagggcuaaagucaaa

SEQ ID NO: 2432839 - RNA, 19 nt, Homo sapiens
  misc_RNA (1)...(19): siRNA sense strand
augaaguauggaagagaaa

SEQ ID NO: 2432840 - RNA, 19 nt, Homo sapiens
  misc_RNA (1)...(19): siRNA sense strand
gcuacauacaacagggaau

SEQ ID NO: 2432841 - RNA, 19 nt, Homo sapiens
  misc_RNA (1)...(19): siRNA sense strand
acuuguuggaagagaauaa

SEQ ID NO: 2432842 - RNA, 19 nt, Homo sapiens
  misc_RNA (1)...(19): siRNA sense strand
agaaggagcaacaggauuu

SEQ ID NO: 2432843 - RNA, 19 nt, Homo sapiens
  misc_RNA (1)...(19): siRNA sense strand
gaaagaagaugcugggaug

SEQ ID NO: 2432844 - RNA, 19 nt, Homo sapiens
  misc_RNA (1)...(19): siRNA sense strand
agacaagguaaaugccaaa

SEQ ID NO: 2432845 - RNA, 19 nt, Homo sapiens
  misc_RNA (1)...(19): siRNA sense strand
gacaaagaacucacagaaa

SEQ ID NO: 2432846 - RNA, 19 nt, Homo sapiens
  misc_RNA (1)...(19): siRNA sense strand
agagaagauucaagagguu

SEQ ID NO: 2432847 - RNA, 19 nt, Homo sapiens
  misc_RNA (1)...(19): siRNA sense strand
aagucaaauuucagagaca

SEQ ID NO: 2432848 - RNA, 19 nt, Homo sapiens
  misc_RNA (1)...(19): siRNA sense strand
gugagugaguugaaagaca

SEQ ID NO: 2432849 - RNA, 19 nt, Homo sapiens
  misc_RNA (1)...(19): siRNA sense strand
uggccaagauucauguaaa

SEQ ID NO: 2432850 - RNA, 19 nt, Homo sapiens
  misc_RNA (1)...(19): siRNA sense strand
cagacaagguaaaugccaa

SEQ ID NO: 2432851 - RNA, 19 nt, Homo sapiens
  misc_RNA (1)...(19): siRNA sense strand
acacaagauaccagcacaa

SEQ ID NO: 2432852 - RNA, 19 nt, Homo sapiens
  misc_RNA (1)...(19): siRNA sense strand
aauaauugcuguaagccaa

SEQ ID NO: 2432853 - RNA, 19 nt, Homo sapiens
  misc_RNA (1)...(19): siRNA sense strand
gcugaaacugagcaggaaa

SEQ ID NO: 2432854 - RNA, 19 nt, Homo sapiens
  misc_RNA (1)...(19): siRNA sense strand
aaugaaggagcaugagaaa

SEQ ID NO: 2432855 - RNA, 19 nt, Homo sapiens
  misc_RNA (1)...(19): siRNA sense strand
aggcagaacguuaugaaau

SEQ ID NO: 2432856 - RNA, 19 nt, Homo sapiens
  misc_RNA (1)...(19): siRNA sense strand
aaaagguacuacagggaaa

SEQ ID NO: 2432857 - RNA, 19 nt, Homo sapiens
  misc_RNA (1)...(19): siRNA sense strand
aggaagaccgaguuugaaa

SEQ ID NO: 2432858 - RNA, 19 nt, Homo sapiens
  misc_RNA (1)...(19): siRNA sense strand
cguacaaucuugacaacuu

SEQ ID NO: 2432859 - RNA, 19 nt, Homo sapiens
  misc_RNA (1)...(19): siRNA sense strand
cugaaagaugguagaauca

SEQ ID NO: 2432860 - RNA, 19 nt, Homo sapiens
  misc_RNA (1)...(19): siRNA sense strand
aagaagauggaaaggagua

SEQ ID NO: 2432861 - RNA, 19 nt, Homo sapiens
  misc_RNA (1)...(19): siRNA sense strand
aaucacaguucuacaacaa

SEQ ID NO: 2432862 - RNA, 19 nt, Homo sapiens
  misc_RNA (1)...(19): siRNA sense strand
aagaaggagcaaugaaaga

SEQ ID NO: 2432863 - RNA, 19 nt, Homo sapiens
  misc_RNA (1)...(19): siRNA sense strand
cauacuuguuggaagagaa

SEQ ID NO: 2432864 - RNA, 19 nt, Homo sapiens
  misc_RNA (1)...(19): siRNA sense strand
augaagacugugagaaaga

SEQ ID NO: 2432865 - RNA, 19 nt, Homo sapiens
  misc_RNA (1)...(19): siRNA sense strand
ccauaacccauuaaugaaa

SEQ ID NO: 2432866 - RNA, 19 nt, Homo sapiens
  misc_RNA (1)...(19): siRNA sense strand
ggccaagauucauguaaaa

SEQ ID NO: 2432867 - RNA, 19 nt, Homo sapiens
  misc_RNA (1)...(19): siRNA sense strand
gcggcuaauuaaagaagau

SEQ ID NO: 2432868 - RNA, 19 nt, Homo sapiens
  misc_RNA (1)...(19): siRNA sense strand
ccaugaagggcuaaaguca

SEQ ID NO: 2432869 - RNA, 19 nt, Homo sapiens
  misc_RNA (1)...(19): siRNA sense strand
gcaauuagugguacaucaa

SEQ ID NO: 2432870 - RNA, 19 nt, Homo sapiens
  misc_RNA (1)...(19): siRNA sense strand
gcuaaacaucacaguagaa

SEQ ID NO: 2432871 - RNA, 19 nt, Homo sapiens
  misc_RNA (1)...(19): siRNA sense strand
ccagagauuucccgagaca

SEQ ID NO: 2432872 - RNA, 19 nt, Homo sapiens
  misc_RNA (1)...(19): siRNA sense strand
uggaaaauauacagcgauu

SEQ ID NO: 2432873 - RNA, 19 nt, Homo sapiens
  misc_RNA (1)...(19): siRNA sense strand
ccuaagaaagugagugagu

SEQ ID NO: 2432874 - RNA, 19 nt, Homo sapiens
  misc_RNA (1)...(19): siRNA sense strand
gagucugagcacugacaaa

SEQ ID NO: 2432875 - RNA, 19 nt, Homo sapiens
  misc_RNA (1)...(19): siRNA sense strand
aggaaaaccuggcuugaua

SEQ ID NO: 2432876 - RNA, 19 nt, Homo sapiens
  misc_RNA (1)...(19): siRNA sense strand
aggagauggaagacagaau

SEQ ID NO: 2432877 - RNA, 19 nt, Homo sapiens
  misc_RNA (1)...(19): siRNA sense strand
ugagaauguuauugcccaa

SEQ ID NO: 2432878 - RNA, 19 nt, Homo sapiens
  misc_RNA (1)...(19): siRNA sense strand
gcagaaucaagaaggcaau

SEQ ID NO: 2432879 - RNA, 19 nt, Homo sapiens
  misc_RNA (1)...(19): siRNA sense strand
cucuuaacuuacuggaaua

SEQ ID NO: 2432880 - RNA, 19 nt, Homo sapiens
  misc_RNA (1)...(19): siRNA sense strand
cuauaacagaagugaagaa

SEQ ID NO: 2432881 - RNA, 19 nt, Homo sapiens
  misc_RNA (1)...(19): siRNA sense strand
cugaagagaacaagaaacu

SEQ ID NO: 2432882 - RNA, 19 nt, Homo sapiens
  misc_RNA (1)...(19): siRNA sense strand
aguagagagugaagaaaau

SEQ ID NO: 2432883 - RNA, 19 nt, Homo sapiens
  misc_RNA (1)...(19): siRNA sense strand
aaguagagagugaagaaaa

SEQ ID NO: 2432884 - RNA, 19 nt, Homo sapiens
  misc_RNA (1)...(19): siRNA sense strand
ccucuuacaauguggugaa

SEQ ID NO: 2432885 - RNA, 19 nt, Homo sapiens
  misc_RNA (1)...(19): siRNA sense strand
gaacaagaaacuaagccuu

SEQ ID NO: 2432886 - RNA, 19 nt, Homo sapiens
  misc_RNA (1)...(19): siRNA sense strand
cagcugugucugaagagaa

SEQ ID NO: 2432887 - RNA, 19 nt, Homo sapiens
  misc_RNA (1)...(19): siRNA sense strand
ugggaagguaaauggaaaa

SEQ ID NO: 2432888 - RNA, 19 nt, Homo sapiens
  misc_RNA (1)...(19): siRNA sense strand
gguaaauggaaaacugcaa

SEQ ID NO: 2432889 - RNA, 19 nt, Homo sapiens
  misc_RNA (1)...(19): siRNA sense strand
aagaaguggagaagcugua

SEQ ID NO: 2432890 - RNA, 19 nt, Homo sapiens
  misc_RNA (1)...(19): siRNA sense strand
ccacuauggguuagaugau

SEQ ID NO: 2432891 - RNA, 19 nt, Homo sapiens
  misc_RNA (1)...(19): siRNA sense strand
uagaagaaauaucuggcuu

SEQ ID NO: 2432892 - RNA, 19 nt, Homo sapiens
  misc_RNA (1)...(19): siRNA sense strand
ucucaaugucugugaaucu

SEQ ID NO: 2432893 - RNA, 19 nt, Homo sapiens
  misc_RNA (1)...(19): siRNA sense strand
cccuaugugggaagguaaa

SEQ ID NO: 2432894 - RNA, 19 nt, Homo sapiens
  misc_RNA (1)...(19): siRNA sense strand
aaacaaagauuaaacgcug

SEQ ID NO: 2432895 - RNA, 19 nt, Homo sapiens
  misc_RNA (1)...(19): siRNA sense strand
ccguagagcaugugcaaaa

SEQ ID NO: 2432896 - RNA, 19 nt, Homo sapiens
  misc_RNA (1)...(19): siRNA sense strand
ggguuauucaacagcguaa

SEQ ID NO: 2432897 - RNA, 19 nt, Homo sapiens
  misc_RNA (1)...(19): siRNA sense strand
cagaguaugaagagaacau

SEQ ID NO: 2432898 - RNA, 19 nt, Homo sapiens
  misc_RNA (1)...(19): siRNA sense strand
auuuagaggacgaagacau

SEQ ID NO: 2432899 - RNA, 19 nt, Homo sapiens
  misc_RNA (1)...(19): siRNA sense strand
ugaauuuagaggacgaaga

SEQ ID NO: 2432900 - RNA, 19 nt, Homo sapiens
  misc_RNA (1)...(19): siRNA sense strand
agaaguuuccguagagcau

SEQ ID NO: 2432901 - RNA, 19 nt, Homo sapiens
  misc_RNA (1)...(19): siRNA sense strand
acauggugacagaguacaa

SEQ ID NO: 2432902 - RNA, 19 nt, Homo sapiens
  misc_RNA (1)...(19): siRNA sense strand
ccacauggugacagaguac

SEQ ID NO: 2432903 - RNA, 19 nt, Homo sapiens
  misc_RNA (1)...(19): siRNA sense strand
guaugaaagaaaaugggaa

SEQ ID NO: 2432904 - RNA, 19 nt, Homo sapiens
  misc_RNA (1)...(19): siRNA sense strand
agaaaaucgugaaucagaa

SEQ ID NO: 2432905 - RNA, 19 nt, Homo sapiens
  misc_RNA (1)...(19): siRNA sense strand
ccuuuauaguuguggugaa

SEQ ID NO: 2432906 - RNA, 19 nt, Homo sapiens
  misc_RNA (1)...(19): siRNA sense strand
ggauauuuguuaauggaca

SEQ ID NO: 2432907 - RNA, 19 nt, Homo sapiens
  misc_RNA (1)...(19): siRNA sense strand
caguuaagauugauggagu

SEQ ID NO: 2432908 - RNA, 19 nt, Homo sapiens
  misc_RNA (1)...(19): siRNA sense strand
ugggagacuggaaggauaa

SEQ ID NO: 2432909 - RNA, 19 nt, Homo sapiens
  misc_RNA (1)...(19): siRNA sense strand
aguuaagauugauggaguu

SEQ ID NO: 2432910 - RNA, 19 nt, Homo sapiens
  misc_RNA (1)...(19): siRNA sense strand
ucuucauggugcaguuaaa

SEQ ID NO: 2432911 - RNA, 19 nt, Homo sapiens
  misc_RNA (1)...(19): siRNA sense strand
uuauaguuguggugaacau

SEQ ID NO: 2432912 - RNA, 19 nt, Homo sapiens
  misc_RNA (1)...(19): siRNA sense strand
ucaauaaugaguucggcua

SEQ ID NO: 2432913 - RNA, 19 nt, Homo sapiens
  misc_RNA (1)...(19): siRNA sense strand
gauaauaggagguaccgga

SEQ ID NO: 2432914 - RNA, 19 nt, Homo sapiens
  misc_RNA (1)...(19): siRNA sense strand
acauagaaguaaucgucca

SEQ ID NO: 2432915 - RNA, 19 nt, Homo sapiens
  misc_RNA (1)...(19): siRNA sense strand
ggucacaacuucaggucuc

SEQ ID NO: 2432916 - RNA, 19 nt, Homo sapiens
  misc_RNA (1)...(19): siRNA sense strand
acaucagagucuuggccuu

SEQ ID NO: 2432917 - RNA, 19 nt, Homo sapiens
  misc_RNA (1)...(19): siRNA sense strand
ccuacaaggcagcauaaca

SEQ ID NO: 2432918 - RNA, 19 nt, Homo sapiens
  misc_RNA (1)...(19): siRNA sense strand
uggaacuugaggugggaga

SEQ ID NO: 2432919 - RNA, 19 nt, Homo sapiens
  misc_RNA (1)...(19): siRNA sense strand
aaggaaagcagucggagca

SEQ ID NO: 2432920 - RNA, 19 nt, Homo sapiens
  misc_RNA (1)...(19): siRNA sense strand
uggaggagcuggaggagga

SEQ ID NO: 2432921 - RNA, 19 nt, Homo sapiens
  misc_RNA (1)...(19): siRNA sense strand
gaagacugcucgugggagu

SEQ ID NO: 2432922 - RNA, 19 nt, Homo sapiens
  misc_RNA (1)...(19): siRNA sense strand
gcaugaacauccagcccau

SEQ ID NO: 2432923 - RNA, 19 nt, Homo sapiens
  misc_RNA (1)...(19): siRNA sense strand
gcgaagauccaguacgcga

SEQ ID NO: 2432924 - RNA, 19 nt, Homo sapiens
  misc_RNA (1)...(19): siRNA sense strand
caggagugccggaagcgaa

SEQ ID NO: 2432925 - RNA, 19 nt, Homo sapiens
  misc_RNA (1)...(19): siRNA sense strand
aagagaucuccaaggaauu

SEQ ID NO: 2432926 - RNA, 19 nt, Homo sapiens
  misc_RNA (1)...(19): siRNA sense strand
gagaugaucaugcugggaa

SEQ ID NO: 2432927 - RNA, 19 nt, Homo sapiens
  misc_RNA (1)...(19): siRNA sense strand
ccauggagcucugcgggaa

SEQ ID NO: 2432928 - RNA, 19 nt, Homo sapiens
  misc_RNA (1)...(19): siRNA sense strand
ccuuuaucauggaggccuu

SEQ ID NO: 2432929 - RNA, 19 nt, Homo sapiens
  misc_RNA (1)...(19): siRNA sense strand
aggaguaugggaaggcaaa

SEQ ID NO: 2432930 - RNA, 19 nt, Homo sapiens
  misc_RNA (1)...(19): siRNA sense strand
aguaacaggaguaugggaa

SEQ ID NO: 2432931 - RNA, 19 nt, Homo sapiens
  misc_RNA (1)...(19): siRNA sense strand
ggacaauuauauacccaca

SEQ ID NO: 2432932 - RNA, 19 nt, Homo sapiens
  misc_RNA (1)...(19): siRNA sense strand
gaccaaaauacaugaggaa

SEQ ID NO: 2432933 - RNA, 19 nt, Homo sapiens
  misc_RNA (1)...(19): siRNA sense strand
caggaguaugggaaggcaa

SEQ ID NO: 2432934 - RNA, 19 nt, Homo sapiens
  misc_RNA (1)...(19): siRNA sense strand
acuucuacauucagaccua

SEQ ID NO: 2432935 - RNA, 19 nt, Homo sapiens
  misc_RNA (1)...(19): siRNA sense strand
ccgcaggagaaucagauau

SEQ ID NO: 2432936 - RNA, 19 nt, Homo sapiens
  misc_RNA (1)...(19): siRNA sense strand
aggaagcugcggaaggauu

SEQ ID NO: 2432937 - RNA, 19 nt, Homo sapiens
  misc_RNA (1)...(19): siRNA sense strand
cuccacaggcagugaacaa

SEQ ID NO: 2432938 - RNA, 19 nt, Homo sapiens
  misc_RNA (1)...(19): siRNA sense strand
gugaacaacuauaaggaag

SEQ ID NO: 2432939 - RNA, 19 nt, Homo sapiens
  misc_RNA (1)...(19): siRNA sense strand
auucaguacacgagcaaga

SEQ ID NO: 2432940 - RNA, 19 nt, Homo sapiens
  misc_RNA (1)...(19): siRNA sense strand
gguuuuaaauucagacaca

SEQ ID NO: 2432941 - RNA, 19 nt, Homo sapiens
  misc_RNA (1)...(19): siRNA sense strand
ccgagaugucagcaacaaa

SEQ ID NO: 2432942 - RNA, 19 nt, Homo sapiens
  misc_RNA (1)...(19): siRNA sense strand
gaguugucuaauugugaaa

SEQ ID NO: 2432943 - RNA, 19 nt, Homo sapiens
  misc_RNA (1)...(19): siRNA sense strand
cuguacuccugguuugaaa

SEQ ID NO: 2432944 - RNA, 19 nt, Homo sapiens
  misc_RNA (1)...(19): siRNA sense strand
aggacgaacaaguaauaaa

SEQ ID NO: 2432945 - RNA, 19 nt, Homo sapiens
  misc_RNA (1)...(19): siRNA sense strand
agauaagagcacuggcauu

SEQ ID NO: 2432946 - RNA, 19 nt, Homo sapiens
  misc_RNA (1)...(19): siRNA sense strand
augaagagccagagccaga

SEQ ID NO: 2432947 - RNA, 19 nt, Homo sapiens
  misc_RNA (1)...(19): siRNA sense strand
cacccagagaguuggaaua

SEQ ID NO: 2432948 - RNA, 19 nt, Homo sapiens
  misc_RNA (1)...(19): siRNA sense strand
gaucaaaauuuaaggagcu

SEQ ID NO: 2432949 - RNA, 19 nt, Homo sapiens
  misc_RNA (1)...(19): siRNA sense strand
accggaaauaggaaagaaa

SEQ ID NO: 2432950 - RNA, 19 nt, Homo sapiens
  misc_RNA (1)...(19): siRNA sense strand
uggaaagcacccagagagu

SEQ ID NO: 2432951 - RNA, 19 nt, Homo sapiens
  misc_RNA (1)...(19): siRNA sense strand
ccggaaauaggaaagaaaa

SEQ ID NO: 2432952 - RNA, 19 nt, Homo sapiens
  misc_RNA (1)...(19): siRNA sense strand
uguagaucaaggagaguca

SEQ ID NO: 2432953 - RNA, 19 nt, Homo sapiens
  misc_RNA (1)...(19): siRNA sense strand
aaaugaagagccagagcca

SEQ ID NO: 2432954 - RNA, 19 nt, Homo sapiens
  misc_RNA (1)...(19): siRNA sense strand
ucugguaagaagagugaaa

SEQ ID NO: 2432955 - RNA, 19 nt, Homo sapiens
  misc_RNA (1)...(19): siRNA sense strand
ccucagaccucccagggua

SEQ ID NO: 2432956 - RNA, 19 nt, Homo sapiens
  misc_RNA (1)...(19): siRNA sense strand
gugaaagcaaagaagccaa

SEQ ID NO: 2432957 - RNA, 19 nt, Homo sapiens
  misc_RNA (1)...(19): siRNA sense strand
ugaccaaacacaaggcuga

SEQ ID NO: 2432958 - RNA, 19 nt, Homo sapiens
  misc_RNA (1)...(19): siRNA sense strand
cgccggaagccuugugcaa

SEQ ID NO: 2432959 - RNA, 19 nt, Homo sapiens
  misc_RNA (1)...(19): siRNA sense strand
ggacaaaccuucaagcagc

SEQ ID NO: 2432960 - RNA, 19 nt, Homo sapiens
  misc_RNA (1)...(19): siRNA sense strand
gagcgugucugguggaucu

SEQ ID NO: 2432961 - RNA, 19 nt, Homo sapiens
  misc_RNA (1)...(19): siRNA sense strand
ggaagaagccgggacccaa

SEQ ID NO: 2432962 - RNA, 19 nt, Homo sapiens
  misc_RNA (1)...(19): siRNA sense strand
ccggaagccuugugcaaag

SEQ ID NO: 2432963 - RNA, 19 nt, Homo sapiens
  misc_RNA (1)...(19): siRNA sense strand
cugugacgaauguggacaa

SEQ ID NO: 2432964 - RNA, 19 nt, Homo sapiens
  misc_RNA (1)...(19): siRNA sense strand
gugaagaugaaaaugacaa

SEQ ID NO: 2432965 - RNA, 19 nt, Homo sapiens
  misc_RNA (1)...(19): siRNA sense strand
agccaagaagucugaagaa

SEQ ID NO: 2432966 - RNA, 19 nt, Homo sapiens
  misc_RNA (1)...(19): siRNA sense strand
gugaaugaauggaucgcua

SEQ ID NO: 2432967 - RNA, 19 nt, Homo sapiens
  misc_RNA (1)...(19): siRNA sense strand
ggaaguugauacaugggaa

SEQ ID NO: 2432968 - RNA, 19 nt, Homo sapiens
  misc_RNA (1)...(19): siRNA sense strand
aaagaaaucccuagagcca

SEQ ID NO: 2432969 - RNA, 19 nt, Homo sapiens
  misc_RNA (1)...(19): siRNA sense strand
caagagaaauuggaggcua

SEQ ID NO: 2432970 - RNA, 19 nt, Homo sapiens
  misc_RNA (1)...(19): siRNA sense strand
uggaaacaccggagcaaca

SEQ ID NO: 2432971 - RNA, 19 nt, Homo sapiens
  misc_RNA (1)...(19): siRNA sense strand
ccuggaaggaagaggaagu

SEQ ID NO: 2432972 - RNA, 19 nt, Homo sapiens
  misc_RNA (1)...(19): siRNA sense strand
ggaaggaagaggaagugga

SEQ ID NO: 2432973 - RNA, 19 nt, Homo sapiens
  misc_RNA (1)...(19): siRNA sense strand
agaaaggccuggaaggaag

SEQ ID NO: 2432974 - RNA, 19 nt, Homo sapiens
  misc_RNA (1)...(19): siRNA sense strand
cuacaugaauggaacagga

SEQ ID NO: 2432975 - RNA, 19 nt, Homo sapiens
  misc_RNA (1)...(19): siRNA sense strand
gggcagauuuauuggaguc

SEQ ID NO: 2432976 - RNA, 19 nt, Homo sapiens
  misc_RNA (1)...(19): siRNA sense strand
acacaguugucaaaggcau

SEQ ID NO: 2432977 - RNA, 19 nt, Homo sapiens
  misc_RNA (1)...(19): siRNA sense strand
aagagaaauuggaggcuag

SEQ ID NO: 2432978 - RNA, 19 nt, Homo sapiens
  misc_RNA (1)...(19): siRNA sense strand
ucacccaaaucguggccaa

SEQ ID NO: 2432979 - RNA, 19 nt, Homo sapiens
  misc_RNA (1)...(19): siRNA sense strand
uggccaaggacuacaugaa

SEQ ID NO: 2432980 - RNA, 19 nt, Homo sapiens
  misc_RNA (1)...(19): siRNA sense strand
aggaagaggaaguggacug

SEQ ID NO: 2432981 - RNA, 19 nt, Homo sapiens
  misc_RNA (1)...(19): siRNA sense strand
gaauggaacaggaagguac

SEQ ID NO: 2432982 - RNA, 19 nt, Homo sapiens
  misc_RNA (1)...(19): siRNA sense strand
ggacuacaugaauggaaca

SEQ ID NO: 2432983 - RNA, 19 nt, Homo sapiens
  misc_RNA (1)...(19): siRNA sense strand
aagcugugccaaaggucaa

SEQ ID NO: 2432984 - RNA, 19 nt, Homo sapiens
  misc_RNA (1)...(19): siRNA sense strand
cugagagugaagacaggaa

SEQ ID NO: 2432985 - RNA, 19 nt, Homo sapiens
  misc_RNA (1)...(19): siRNA sense strand
ccuacaagaagaaaggacu

SEQ ID NO: 2432986 - RNA, 19 nt, Homo sapiens
  misc_RNA (1)...(19): siRNA sense strand
auguaaggagugugggaaa

SEQ ID NO: 2432987 - RNA, 19 nt, Homo sapiens
  misc_RNA (1)...(19): siRNA sense strand
gggaaagccuucagugcca

SEQ ID NO: 2432988 - RNA, 19 nt, Homo sapiens
  misc_RNA (1)...(19): siRNA sense strand
cagaaaagcagcaggcaca

SEQ ID NO: 2432989 - RNA, 19 nt, Homo sapiens
  misc_RNA (1)...(19): siRNA sense strand
gaacaucggcggagccaca

SEQ ID NO: 2432990 - RNA, 19 nt, Homo sapiens
  misc_RNA (1)...(19): siRNA sense strand
cuuguaaacgagacagcaa

SEQ ID NO: 2432991 - RNA, 19 nt, Homo sapiens
  misc_RNA (1)...(19): siRNA sense strand
augcaaagugugugggaag

SEQ ID NO: 2432992 - RNA, 19 nt, Homo sapiens
  misc_RNA (1)...(19): siRNA sense strand
acacuggagagaagcgcua

SEQ ID NO: 2432993 - RNA, 19 nt, Homo sapiens
  misc_RNA (1)...(19): siRNA sense strand
gaaacuuguaaacgagaca

SEQ ID NO: 2432994 - RNA, 19 nt, Homo sapiens
  misc_RNA (1)...(19): siRNA sense strand
gugucgugaguguggcaaa

SEQ ID NO: 2432995 - RNA, 19 nt, Homo sapiens
  misc_RNA (1)...(19): siRNA sense strand
cuaucagugucgugagugu

SEQ ID NO: 2432996 - RNA, 19 nt, Homo sapiens
  misc_RNA (1)...(19): siRNA sense strand
caauguaaggaguguggga

SEQ ID NO: 2432997 - RNA, 19 nt, Homo sapiens
  misc_RNA (1)...(19): siRNA sense strand
ggggagaagccauaugaau

SEQ ID NO: 2432998 - RNA, 19 nt, Homo sapiens
  misc_RNA (1)...(19): siRNA sense strand
gccuucagccggaggucaa

SEQ ID NO: 2432999 - RNA, 19 nt, Homo sapiens
  misc_RNA (1)...(19): siRNA sense strand
ccaccaauuucaagaacaa

SEQ ID NO: 2433000 - RNA, 19 nt, Homo sapiens
  misc_RNA (1)...(19): siRNA sense strand
uugugaaaguggaggaaga

SEQ ID NO: 2433001 - RNA, 19 nt, Homo sapiens
  misc_RNA (1)...(19): siRNA sense strand
agaacaagauggugaaagu

SEQ ID NO: 2433002 - RNA, 19 nt, Homo sapiens
  misc_RNA (1)...(19): siRNA sense strand
auguaaggagugugggaaa

SEQ ID NO: 2433003 - RNA, 19 nt, Homo sapiens
  misc_RNA (1)...(19): siRNA sense strand
acaagauggugaaaguaua

SEQ ID NO: 2433004 - RNA, 19 nt, Homo sapiens
  misc_RNA (1)...(19): siRNA sense strand
gcaggaaccaacagacaua

SEQ ID NO: 2433005 - RNA, 19 nt, Homo sapiens
  misc_RNA (1)...(19): siRNA sense strand
gggaaagccuucagugcca

SEQ ID NO: 2433006 - RNA, 19 nt, Homo sapiens
  misc_RNA (1)...(19): siRNA sense strand
uggaacaucugaaggucaa

SEQ ID NO: 2433007 - RNA, 19 nt, Homo sapiens
  misc_RNA (1)...(19): siRNA sense strand
caacagacauacagcuuca

SEQ ID NO: 2433008 - RNA, 19 nt, Homo sapiens
  misc_RNA (1)...(19): siRNA sense strand
cugaagugcucuuggagga

SEQ ID NO: 2433009 - RNA, 19 nt, Homo sapiens
  misc_RNA (1)...(19): siRNA sense strand
caacagaggaacaguacga

SEQ ID NO: 2433010 - RNA, 19 nt, Homo sapiens
  misc_RNA (1)...(19): siRNA sense strand
gaaccaggcuccagaccau

SEQ ID NO: 2433011 - RNA, 19 nt, Homo sapiens
  misc_RNA (1)...(19): siRNA sense strand
ggccagaaauccacaccaa

SEQ ID NO: 2433012 - RNA, 19 nt, Homo sapiens
  misc_RNA (1)...(19): siRNA sense strand
cagaaaagcagcaggcaca

SEQ ID NO: 2433013 - RNA, 19 nt, Homo sapiens
  misc_RNA (1)...(19): siRNA sense strand
ccaagaagccucccgacaa

SEQ ID NO: 2433014 - RNA, 19 nt, Homo sapiens
  misc_RNA (1)...(19): siRNA sense strand
aguugaagaucuggaacaa

SEQ ID NO: 2433015 - RNA, 19 nt, Homo sapiens
  misc_RNA (1)...(19): siRNA sense strand
uugaagaucuggaacaaga

SEQ ID NO: 2433016 - RNA, 19 nt, Homo sapiens
  misc_RNA (1)...(19): siRNA sense strand
acauacagcuucagccuau

SEQ ID NO: 2433017 - RNA, 19 nt, Homo sapiens
  misc_RNA (1)...(19): siRNA sense strand
gaacaucggcggagccaca

SEQ ID NO: 2433018 - RNA, 19 nt, Homo sapiens
  misc_RNA (1)...(19): siRNA sense strand
ggaguuggcaucaaagcaa

SEQ ID NO: 2433019 - RNA, 19 nt, Homo sapiens
  misc_RNA (1)...(19): siRNA sense strand
aggaacaguacgaucuuaa

SEQ ID NO: 2433020 - RNA, 19 nt, Homo sapiens
  misc_RNA (1)...(19): siRNA sense strand
ucuuggaggauguggaaca

SEQ ID NO: 2433021 - RNA, 19 nt, Homo sapiens
  misc_RNA (1)...(19): siRNA sense strand
cuuguaaacgagacagcaa

SEQ ID NO: 2433022 - RNA, 19 nt, Homo sapiens
  misc_RNA (1)...(19): siRNA sense strand
acaagagcuuagugagcca

SEQ ID NO: 2433023 - RNA, 19 nt, Homo sapiens
  misc_RNA (1)...(19): siRNA sense strand
ucaagaacaagauggugaa

SEQ ID NO: 2433024 - RNA, 19 nt, Homo sapiens
  misc_RNA (1)...(19): siRNA sense strand
augcaaagugugugggaag

SEQ ID NO: 2433025 - RNA, 19 nt, Homo sapiens
  misc_RNA (1)...(19): siRNA sense strand
acacuggagagaagcgcua

SEQ ID NO: 2433026 - RNA, 19 nt, Homo sapiens
  misc_RNA (1)...(19): siRNA sense strand
gugaaaguauaccugagaa

SEQ ID NO: 2433027 - RNA, 19 nt, Homo sapiens
  misc_RNA (1)...(19): siRNA sense strand
gaacaagagcuuagugagc

SEQ ID NO: 2433028 - RNA, 19 nt, Homo sapiens
  misc_RNA (1)...(19): siRNA sense strand
gaaacuuguaaacgagaca

SEQ ID NO: 2433029 - RNA, 19 nt, Homo sapiens
  misc_RNA (1)...(19): siRNA sense strand
gugucgugaguguggcaaa

SEQ ID NO: 2433030 - RNA, 19 nt, Homo sapiens
  misc_RNA (1)...(19): siRNA sense strand
aauccacaccaaagagcaa

SEQ ID NO: 2433031 - RNA, 19 nt, Homo sapiens
  misc_RNA (1)...(19): siRNA sense strand
cuucaacagaggaacagua

SEQ ID NO: 2433032 - RNA, 19 nt, Homo sapiens
  misc_RNA (1)...(19): siRNA sense strand
ggcuguggcuguaguugaa

SEQ ID NO: 2433033 - RNA, 19 nt, Homo sapiens
  misc_RNA (1)...(19): siRNA sense strand
uaguugaagaucuggaaca

SEQ ID NO: 2433034 - RNA, 19 nt, Homo sapiens
  misc_RNA (1)...(19): siRNA sense strand
aaaguauaccugagaacca

SEQ ID NO: 2433035 - RNA, 19 nt, Homo sapiens
  misc_RNA (1)...(19): siRNA sense strand
cuaucagugucgugagugu

SEQ ID NO: 2433036 - RNA, 19 nt, Homo sapiens
  misc_RNA (1)...(19): siRNA sense strand
ggugaaaguauaccugaga

SEQ ID NO: 2433037 - RNA, 19 nt, Homo sapiens
  misc_RNA (1)...(19): siRNA sense strand
caauguaaggaguguggga

SEQ ID NO: 2433038 - RNA, 19 nt, Homo sapiens
  misc_RNA (1)...(19): siRNA sense strand
aagcaggaaccaacagaca

SEQ ID NO: 2433039 - RNA, 19 nt, Homo sapiens
  misc_RNA (1)...(19): siRNA sense strand
ggggagaagccauaugaau

SEQ ID NO: 2433040 - RNA, 19 nt, Homo sapiens
  misc_RNA (1)...(19): siRNA sense strand
gccuucagccggaggucaa

SEQ ID NO: 2433041 - RNA, 19 nt, Homo sapiens
  misc_RNA (1)...(19): siRNA sense strand
aacaagauggugaaaguau

SEQ ID NO: 2433042 - RNA, 19 nt, Homo sapiens
  misc_RNA (1)...(19): siRNA sense strand
ugaaaguauaccugagaac

SEQ ID NO: 2433043 - RNA, 19 nt, Homo sapiens
  misc_RNA (1)...(19): siRNA sense strand
gugcaacaguacugcgcaa

SEQ ID NO: 2433044 - RNA, 19 nt, Homo sapiens
  misc_RNA (1)...(19): siRNA sense strand
cagaauuugaagagcagaa

SEQ ID NO: 2433045 - RNA, 19 nt, Homo sapiens
  misc_RNA (1)...(19): siRNA sense strand
aggcagaauuugaagagca

SEQ ID NO: 2433046 - RNA, 19 nt, Homo sapiens
  misc_RNA (1)...(19): siRNA sense strand
cugauggauaugagaauga

SEQ ID NO: 2433047 - RNA, 19 nt, Homo sapiens
  misc_RNA (1)...(19): siRNA sense strand
uggauaugagaaugagaau

SEQ ID NO: 2433048 - RNA, 19 nt, Homo sapiens
  misc_RNA (1)...(19): siRNA sense strand
aaaugugccuggaagccaa

SEQ ID NO: 2433049 - RNA, 19 nt, Homo sapiens
  misc_RNA (1)...(19): siRNA sense strand
gcagaaugugagaaagaag

SEQ ID NO: 2433050 - RNA, 19 nt, Homo sapiens
  misc_RNA (1)...(19): siRNA sense strand
gugaaaaccuuccaggaga

SEQ ID NO: 2433051 - RNA, 19 nt, Homo sapiens
  misc_RNA (1)...(19): siRNA sense strand
aggagaaaacacagcgcua

SEQ ID NO: 2433052 - RNA, 19 nt, Homo sapiens
  misc_RNA (1)...(19): siRNA sense strand
auaaagaacagcugcggga

SEQ ID NO: 2433053 - RNA, 19 nt, Homo sapiens
  misc_RNA (1)...(19): siRNA sense strand
agccaaggucacugaauuu

SEQ ID NO: 2433054 - RNA, 19 nt, Homo sapiens
  misc_RNA (1)...(19): siRNA sense strand
gauacacugucauggccaa

SEQ ID NO: 2433055 - RNA, 19 nt, Homo sapiens
  misc_RNA (1)...(19): siRNA sense strand
aagugauguuagagaacua

SEQ ID NO: 2433056 - RNA, 19 nt, Homo sapiens
  misc_RNA (1)...(19): siRNA sense strand
ccuggaauaugaagggaca

SEQ ID NO: 2433057 - RNA, 19 nt, Homo sapiens
  misc_RNA (1)...(19): siRNA sense strand
aggaaagugauguuagaga

SEQ ID NO: 2433058 - RNA, 19 nt, Homo sapiens
  misc_RNA (1)...(19): siRNA sense strand
aggaaaagaucccuggaau

SEQ ID NO: 2433059 - RNA, 19 nt, Homo sapiens
  misc_RNA (1)...(19): siRNA sense strand
ccguugacauuuagggaug

SEQ ID NO: 2433060 - RNA, 19 nt, Homo sapiens
  misc_RNA (1)...(19): siRNA sense strand
gauuuguauaggaaaguga

SEQ ID NO: 2433061 - RNA, 19 nt, Homo sapiens
  misc_RNA (1)...(19): siRNA sense strand
ccgagagcuucaagggcaa

SEQ ID NO: 2433062 - RNA, 19 nt, Homo sapiens
  misc_RNA (1)...(19): siRNA sense strand
ggaauauacagcuggcaga

SEQ ID NO: 2433063 - RNA, 19 nt, Homo sapiens
  misc_RNA (1)...(19): siRNA sense strand
cugggaagcugaaggcaga

SEQ ID NO: 2433064 - RNA, 19 nt, Homo sapiens
  misc_RNA (1)...(19): siRNA sense strand
ggaagaacuuugaagacgu

SEQ ID NO: 2433065 - RNA, 19 nt, Homo sapiens
  misc_RNA (1)...(19): siRNA sense strand
aggaagacgaugaucagaa

SEQ ID NO: 2433066 - RNA, 19 nt, Homo sapiens
  misc_RNA (1)...(19): siRNA sense strand
ccgucaaagugcacagcuu

SEQ ID NO: 2433067 - RNA, 19 nt, Homo sapiens
  misc_RNA (1)...(19): siRNA sense strand
gggaggucaccaaggagaa

SEQ ID NO: 2433068 - RNA, 19 nt, Homo sapiens
  misc_RNA (1)...(19): siRNA sense strand
ugacauaccauuugggauc

SEQ ID NO: 2433069 - RNA, 19 nt, Homo sapiens
  misc_RNA (1)...(19): siRNA sense strand
aggagaugaccaaguacaa

SEQ ID NO: 2433070 - RNA, 19 nt, Homo sapiens
  misc_RNA (1)...(19): siRNA sense strand
uggaggaggagaugaccaa

SEQ ID NO: 2433071 - RNA, 19 nt, Homo sapiens
  misc_RNA (1)...(19): siRNA sense strand
ugaucagaaagcugugaaa

SEQ ID NO: 2433072 - RNA, 19 nt, Homo sapiens
  misc_RNA (1)...(19): siRNA sense strand
aucagaaagcugugaaaga

SEQ ID NO: 2433073 - RNA, 19 nt, Homo sapiens
  misc_RNA (1)...(19): siRNA sense strand
ggauaaacugggagagacg

SEQ ID NO: 2433074 - RNA, 19 nt, Homo sapiens
  misc_RNA (1)...(19): siRNA sense strand
ggaagaagcagaggagcca

SEQ ID NO: 2433075 - RNA, 19 nt, Homo sapiens
  misc_RNA (1)...(19): siRNA sense strand
cugcagaguccuuggugga

SEQ ID NO: 2433076 - RNA, 19 nt, Homo sapiens
  misc_RNA (1)...(19): siRNA sense strand
ggaacaacuuugaagggga

SEQ ID NO: 2433077 - RNA, 19 nt, Homo sapiens
  misc_RNA (1)...(19): siRNA sense strand
acuuugaagacguggcuuu

SEQ ID NO: 2433078 - RNA, 19 nt, Homo sapiens
  misc_RNA (1)...(19): siRNA sense strand
acauggaggaagacgauga

SEQ ID NO: 2433079 - RNA, 19 nt, Homo sapiens
  misc_RNA (1)...(19): siRNA sense strand
ugggauaaacugggagaga

SEQ ID NO: 2433080 - RNA, 19 nt, Homo sapiens
  misc_RNA (1)...(19): siRNA sense strand
uggaggaagacgaugauca

SEQ ID NO: 2433081 - RNA, 19 nt, Homo sapiens
  misc_RNA (1)...(19): siRNA sense strand
cugugaaagaugaacugua

SEQ ID NO: 2433082 - RNA, 19 nt, Homo sapiens
  misc_RNA (1)...(19): siRNA sense strand
uuuaagaaauuccuggaga

SEQ ID NO: 2433083 - RNA, 19 nt, Homo sapiens
  misc_RNA (1)...(19): siRNA sense strand
acaaguaccugcuggugga

SEQ ID NO: 2433084 - RNA, 19 nt, Homo sapiens
  misc_RNA (1)...(19): siRNA sense strand
ugucugacuaugacggcaa

SEQ ID NO: 2433085 - RNA, 19 nt, Homo sapiens
  misc_RNA (1)...(19): siRNA sense strand
gcaaucagguugucggguu

SEQ ID NO: 2433086 - RNA, 19 nt, Homo sapiens
  misc_RNA (1)...(19): siRNA sense strand
gguuugacucggagaaaau

SEQ ID NO: 2433087 - RNA, 19 nt, Homo sapiens
  misc_RNA (1)...(19): siRNA sense strand
cgacaaguucacagagaag

SEQ ID NO: 2433088 - RNA, 19 nt, Homo sapiens
  misc_RNA (1)...(19): siRNA sense strand
gagaucaagcgcuggguca

SEQ ID NO: 2433089 - RNA, 19 nt, Homo sapiens
  misc_RNA (1)...(19): siRNA sense strand
ccaucaugcuggugcucau

SEQ ID NO: 2433090 - RNA, 19 nt, Homo sapiens
  misc_RNA (1)...(19): siRNA sense strand
gaaagagaggcuuggagga

SEQ ID NO: 2433091 - RNA, 19 nt, Homo sapiens
  misc_RNA (1)...(19): siRNA sense strand
ggccucaaguacaggguca

SEQ ID NO: 2433092 - RNA, 19 nt, Homo sapiens
  misc_RNA (1)...(19): siRNA sense strand
uugacaucgugguggaaaa

SEQ ID NO: 2433093 - RNA, 19 nt, Homo sapiens
  misc_RNA (1)...(19): siRNA sense strand
cggaugacacugagccuga

SEQ ID NO: 2433094 - RNA, 19 nt, Homo sapiens
  misc_RNA (1)...(19): siRNA sense strand
ccaccagcaacgugaccua

SEQ ID NO: 2433095 - RNA, 19 nt, Homo sapiens
  misc_RNA (1)...(19): siRNA sense strand
acagggucaucaagggcaa

SEQ ID NO: 2433096 - RNA, 19 nt, Homo sapiens
  misc_RNA (1)...(19): siRNA sense strand
gagcaguguucaaugccuu

SEQ ID NO: 2433097 - RNA, 19 nt, Homo sapiens
  misc_RNA (1)...(19): siRNA sense strand
gaguacuuccgcagagaca

SEQ ID NO: 2433098 - RNA, 19 nt, Homo sapiens
  misc_RNA (1)...(19): siRNA sense strand
gacuaugacaacagugaga

SEQ ID NO: 2433099 - RNA, 19 nt, Homo sapiens
  misc_RNA (1)...(19): siRNA sense strand
agaagagcguggugagccu

SEQ ID NO: 2433100 - RNA, 19 nt, Homo sapiens
  misc_RNA (1)...(19): siRNA sense strand
accugguggugguggacaa

SEQ ID NO: 2433101 - RNA, 19 nt, Homo sapiens
  misc_RNA (1)...(19): siRNA sense strand
gccuugaacuacuggcuga

SEQ ID NO: 2433102 - RNA, 19 nt, Homo sapiens
  misc_RNA (1)...(19): siRNA sense strand
aggaagggccgaugaucca

SEQ ID NO: 2433103 - RNA, 19 nt, Homo sapiens
  misc_RNA (1)...(19): siRNA sense strand
cugaaaggugugcgagauu

SEQ ID NO: 2433104 - RNA, 19 nt, Homo sapiens
  misc_RNA (1)...(19): siRNA sense strand
uauucaaggagaagaagaa

SEQ ID NO: 2433105 - RNA, 19 nt, Homo sapiens
  misc_RNA (1)...(19): siRNA sense strand
gaaagaaucugaugagccu

SEQ ID NO: 2433106 - RNA, 19 nt, Homo sapiens
  misc_RNA (1)...(19): siRNA sense strand
guacugagccgcaaggaca

SEQ ID NO: 2433107 - RNA, 19 nt, Homo sapiens
  misc_RNA (1)...(19): siRNA sense strand
uugaagugucugagguuau

SEQ ID NO: 2433108 - RNA, 19 nt, Homo sapiens
  misc_RNA (1)...(19): siRNA sense strand
ccucggaaugauauugaaa

SEQ ID NO: 2433109 - RNA, 19 nt, Homo sapiens
  misc_RNA (1)...(19): siRNA sense strand
uuguauucaaggagaagaa

SEQ ID NO: 2433110 - RNA, 19 nt, Homo sapiens
  misc_RNA (1)...(19): siRNA sense strand
guuucaucauggugacuau

SEQ ID NO: 2433111 - RNA, 19 nt, Homo sapiens
  misc_RNA (1)...(19): siRNA sense strand
ugcucagcuuagaaagaaa

SEQ ID NO: 2433112 - RNA, 19 nt, Homo sapiens
  misc_RNA (1)...(19): siRNA sense strand
guauucaaggagaagaaga

SEQ ID NO: 2433113 - RNA, 19 nt, Homo sapiens
  misc_RNA (1)...(19): siRNA sense strand
cgcaaggacaagacuggaa

SEQ ID NO: 2433114 - RNA, 19 nt, Homo sapiens
  misc_RNA (1)...(19): siRNA sense strand
uggccaagaaagaggagaa

SEQ ID NO: 2433115 - RNA, 19 nt, Homo sapiens
  misc_RNA (1)...(19): siRNA sense strand
aaucaugggaauuggccaa

SEQ ID NO: 2433116 - RNA, 19 nt, Homo sapiens
  misc_RNA (1)...(19): siRNA sense strand
gagaagagucagaugguag

SEQ ID NO: 2433117 - RNA, 19 nt, Homo sapiens
  misc_RNA (1)...(19): siRNA sense strand
gggaucagcaauagugcau

SEQ ID NO: 2433118 - RNA, 19 nt, Homo sapiens
  misc_RNA (1)...(19): siRNA sense strand
cagaagccaagcagggcaa

SEQ ID NO: 2433119 - RNA, 19 nt, Homo sapiens
  misc_RNA (1)...(19): siRNA sense strand
aggagaaaucaugggaauu

SEQ ID NO: 2433120 - RNA, 19 nt, Homo sapiens
  misc_RNA (1)...(19): siRNA sense strand
augguagggaucagcaaua

SEQ ID NO: 2433121 - RNA, 19 nt, Homo sapiens
  misc_RNA (1)...(19): siRNA sense strand
gaucgggagcagagagaag

SEQ ID NO: 2433122 - RNA, 19 nt, Homo sapiens
  misc_RNA (1)...(19): siRNA sense strand
gggcaaaagggaucaagau

SEQ ID NO: 2433123 - RNA, 19 nt, Homo sapiens
  misc_RNA (1)...(19): siRNA sense strand
cagaagaagaggaggaaga

SEQ ID NO: 2433124 - RNA, 19 nt, Homo sapiens
  misc_RNA (1)...(19): siRNA sense strand
agaagaagagaaagggaaa

SEQ ID NO: 2433125 - RNA, 19 nt, Homo sapiens
  misc_RNA (1)...(19): siRNA sense strand
aggaagaagaagaagagaa

SEQ ID NO: 2433126 - RNA, 19 nt, Homo sapiens
  misc_RNA (1)...(19): siRNA sense strand
cagcuaaauacuuggaauu

SEQ ID NO: 2433127 - RNA, 19 nt, Homo sapiens
  misc_RNA (1)...(19): siRNA sense strand
ccaugauguuucuggacaa

SEQ ID NO: 2433128 - RNA, 19 nt, Homo sapiens
  misc_RNA (1)...(19): siRNA sense strand
ccuugagagccgugagcaa

SEQ ID NO: 2433129 - RNA, 19 nt, Homo sapiens
  misc_RNA (1)...(19): siRNA sense strand
aagaagaagagaaagggaa

SEQ ID NO: 2433130 - RNA, 19 nt, Homo sapiens
  misc_RNA (1)...(19): siRNA sense strand
ggaagaagcaccagcacca

SEQ ID NO: 2433131 - RNA, 19 nt, Homo sapiens
  misc_RNA (1)...(19): siRNA sense strand
caauuauggagcagcuaaa

SEQ ID NO: 2433132 - RNA, 19 nt, Homo sapiens
  misc_RNA (1)...(19): siRNA sense strand
cuaucaaggaagaagaaga

SEQ ID NO: 2433133 - RNA, 19 nt, Homo sapiens
  misc_RNA (1)...(19): siRNA sense strand
ccguauucuuagucaggua

SEQ ID NO: 2433134 - RNA, 19 nt, Homo sapiens
  misc_RNA (1)...(19): siRNA sense strand
ucaaggaagaagaagaaga

SEQ ID NO: 2433135 - RNA, 19 nt, Homo sapiens
  misc_RNA (1)...(19): siRNA sense strand
cuaaccauguaaaggcuaa

SEQ ID NO: 2433136 - RNA, 19 nt, Homo sapiens
  misc_RNA (1)...(19): siRNA sense strand
caaacaaagccuagguucu

SEQ ID NO: 2433137 - RNA, 19 nt, Homo sapiens
  misc_RNA (1)...(19): siRNA sense strand
agaaugaagaugaaacaga

SEQ ID NO: 2433138 - RNA, 19 nt, Homo sapiens
  misc_RNA (1)...(19): siRNA sense strand
uguacagaaugaagaugaa

SEQ ID NO: 2433139 - RNA, 19 nt, Homo sapiens
  misc_RNA (1)...(19): siRNA sense strand
agaggaaaccugugaaaau

SEQ ID NO: 2433140 - RNA, 19 nt, Homo sapiens
  misc_RNA (1)...(19): siRNA sense strand
gaacaaaucuugccgcagu

SEQ ID NO: 2433141 - RNA, 19 nt, Homo sapiens
  misc_RNA (1)...(19): siRNA sense strand
acagaaugaagaugaaaca

SEQ ID NO: 2433142 - RNA, 19 nt, Homo sapiens
  misc_RNA (1)...(19): siRNA sense strand
guuacuucgcucagugaaa

SEQ ID NO: 2433143 - RNA, 19 nt, Homo sapiens
  misc_RNA (1)...(19): siRNA sense strand
cacauggacauaugggaua

SEQ ID NO: 2433144 - RNA, 19 nt, Homo sapiens
  misc_RNA (1)...(19): siRNA sense strand
agaaagucauugaagagga

SEQ ID NO: 2433145 - RNA, 19 nt, Homo sapiens
  misc_RNA (1)...(19): siRNA sense strand
accaagaggcgaggagaua

SEQ ID NO: 2433146 - RNA, 19 nt, Homo sapiens
  misc_RNA (1)...(19): siRNA sense strand
gggaacagcucauggggca

SEQ ID NO: 2433147 - RNA, 19 nt, Homo sapiens
  misc_RNA (1)...(19): siRNA sense strand
aaacgagggccaagaggau

SEQ ID NO: 2433148 - RNA, 19 nt, Homo sapiens
  misc_RNA (1)...(19): siRNA sense strand
gcaucaaacugcaggaagc

SEQ ID NO: 2433149 - RNA, 19 nt, Homo sapiens
  misc_RNA (1)...(19): siRNA sense strand
cugaugacccagaagaaga

SEQ ID NO: 2433150 - RNA, 19 nt, Homo sapiens
  misc_RNA (1)...(19): siRNA sense strand
aguggaaaauauaggaaga

SEQ ID NO: 2433151 - RNA, 19 nt, Homo sapiens
  misc_RNA (1)...(19): siRNA sense strand
agagaaagggaaaccaaga

SEQ ID NO: 2433152 - RNA, 19 nt, Homo sapiens
  misc_RNA (1)...(19): siRNA sense strand
accaauaacaacagugaca

SEQ ID NO: 2433153 - RNA, 19 nt, Homo sapiens
  misc_RNA (1)...(19): siRNA sense strand
ggagauuggauauagggau

SEQ ID NO: 2433154 - RNA, 19 nt, Homo sapiens
  misc_RNA (1)...(19): siRNA sense strand
aagauaucccgguguuuaa

SEQ ID NO: 2433155 - RNA, 19 nt, Homo sapiens
  misc_RNA (1)...(19): siRNA sense strand
gcaccaaaugaagaggaaa

SEQ ID NO: 2433156 - RNA, 19 nt, Homo sapiens
  misc_RNA (1)...(19): siRNA sense strand
caccaaaugaagaggaaac

SEQ ID NO: 2433157 - RNA, 19 nt, Homo sapiens
  misc_RNA (1)...(19): siRNA sense strand
ugaagaaacacuuugacuu

SEQ ID NO: 2433158 - RNA, 19 nt, Homo sapiens
  misc_RNA (1)...(19): siRNA sense strand
cagugacauuguacagaau

SEQ ID NO: 2433159 - RNA, 19 nt, Homo sapiens
  misc_RNA (1)...(19): siRNA sense strand
cuaugauucagcaggacua

SEQ ID NO: 2433160 - RNA, 19 nt, Homo sapiens
  misc_RNA (1)...(19): siRNA sense strand
gaagaagaagagaaaggga

SEQ ID NO: 2433161 - RNA, 19 nt, Homo sapiens
  misc_RNA (1)...(19): siRNA sense strand
ggaccacaaacgagggcca

SEQ ID NO: 2433162 - RNA, 19 nt, Homo sapiens
  misc_RNA (1)...(19): siRNA sense strand
guauaaugugacagaugau

SEQ ID NO: 2433163 - RNA, 19 nt, Homo sapiens
  misc_RNA (1)...(19): siRNA sense strand
gauuaugaucauccaggaa

SEQ ID NO: 2433164 - RNA, 19 nt, Homo sapiens
  misc_RNA (1)...(19): siRNA sense strand
cuuaauuaaccuugaccau

SEQ ID NO: 2433165 - RNA, 19 nt, Homo sapiens
  misc_RNA (1)...(19): siRNA sense strand
aggacuaaugccuggaaaa

SEQ ID NO: 2433166 - RNA, 19 nt, Homo sapiens
  misc_RNA (1)...(19): siRNA sense strand
acccagaagaagaggagga

SEQ ID NO: 2433167 - RNA, 19 nt, Homo sapiens
  misc_RNA (1)...(19): siRNA sense strand
guucaguuuuggagaauca

SEQ ID NO: 2433168 - RNA, 19 nt, Homo sapiens
  misc_RNA (1)...(19): siRNA sense strand
ccagcuaaauguaaagaac

SEQ ID NO: 2433169 - RNA, 19 nt, Homo sapiens
  misc_RNA (1)...(19): siRNA sense strand
cuggaaaauggguggaaga

SEQ ID NO: 2433170 - RNA, 19 nt, Homo sapiens
  misc_RNA (1)...(19): siRNA sense strand
uggccagguacguggaaca

SEQ ID NO: 2433171 - RNA, 19 nt, Homo sapiens
  misc_RNA (1)...(19): siRNA sense strand
acacauggacauaugggau

SEQ ID NO: 2433172 - RNA, 19 nt, Homo sapiens
  misc_RNA (1)...(19): siRNA sense strand
uaaaguuggcugauaucaa

SEQ ID NO: 2433173 - RNA, 19 nt, Homo sapiens
  misc_RNA (1)...(19): siRNA sense strand
ugguccagcuaaauguaaa

SEQ ID NO: 2433174 - RNA, 19 nt, Homo sapiens
  misc_RNA (1)...(19): siRNA sense strand
uggccaaccuucaggaauc

SEQ ID NO: 2433175 - RNA, 19 nt, Homo sapiens
  misc_RNA (1)...(19): siRNA sense strand
aagaagaagaagagaaagg

SEQ ID NO: 2433176 - RNA, 19 nt, Homo sapiens
  misc_RNA (1)...(19): siRNA sense strand
guacagaaugaagaugaaa

SEQ ID NO: 2433177 - RNA, 19 nt, Homo sapiens
  misc_RNA (1)...(19): siRNA sense strand
gaugaaacagagugccuga

SEQ ID NO: 2433178 - RNA, 19 nt, Homo sapiens
  misc_RNA (1)...(19): siRNA sense strand
agcgaugagucaggagaua

SEQ ID NO: 2433179 - RNA, 19 nt, Homo sapiens
  misc_RNA (1)...(19): siRNA sense strand
cagugacagcagugacauu

SEQ ID NO: 2433180 - RNA, 19 nt, Homo sapiens
  misc_RNA (1)...(19): siRNA sense strand
ccaggaaggacuaaugcuu

SEQ ID NO: 2433181 - RNA, 19 nt, Homo sapiens
  misc_RNA (1)...(19): siRNA sense strand
agaagaagaggaggaagaa

SEQ ID NO: 2433182 - RNA, 19 nt, Homo sapiens
  misc_RNA (1)...(19): siRNA sense strand
cgacauggcuggugcugag

SEQ ID NO: 2433183 - RNA, 19 nt, Homo sapiens
  misc_RNA (1)...(19): siRNA sense strand
aggaagauaucccgguguu

SEQ ID NO: 2433184 - RNA, 19 nt, Homo sapiens
  misc_RNA (1)...(19): siRNA sense strand
ccgaaaaguucuacagcau

SEQ ID NO: 2433185 - RNA, 19 nt, Homo sapiens
  misc_RNA (1)...(19): siRNA sense strand
auaaagaucuucaugguga

SEQ ID NO: 2433186 - RNA, 19 nt, Homo sapiens
  misc_RNA (1)...(19): siRNA sense strand
gcaaauuccaccaggccau

SEQ ID NO: 2433187 - RNA, 19 nt, Homo sapiens
  misc_RNA (1)...(19): siRNA sense strand
gagcauuacgagaagggca

SEQ ID NO: 2433188 - RNA, 19 nt, Homo sapiens
  misc_RNA (1)...(19): siRNA sense strand
ccacaugacuccucccaca

SEQ ID NO: 2433189 - RNA, 19 nt, Homo sapiens
  misc_RNA (1)...(19): siRNA sense strand
ucaccaagaaguuccgcaa

SEQ ID NO: 2433190 - RNA, 19 nt, Homo sapiens
  misc_RNA (1)...(19): siRNA sense strand
agggaagaucaguggauua

SEQ ID NO: 2433191 - RNA, 19 nt, Homo sapiens
  misc_RNA (1)...(19): siRNA sense strand
cagagaaaccagugggcau

SEQ ID NO: 2433192 - RNA, 19 nt, Homo sapiens
  misc_RNA (1)...(19): siRNA sense strand
uggcauaucucaauggcua

SEQ ID NO: 2433193 - RNA, 19 nt, Homo sapiens
  misc_RNA (1)...(19): siRNA sense strand
ccagaggaguuaaaggaca

SEQ ID NO: 2433194 - RNA, 19 nt, Homo sapiens
  misc_RNA (1)...(19): siRNA sense strand
ggaguuaaguugaaggaag

SEQ ID NO: 2433195 - RNA, 19 nt, Homo sapiens
  misc_RNA (1)...(19): siRNA sense strand
aaguagcaccucagcgaaa

SEQ ID NO: 2433196 - RNA, 19 nt, Homo sapiens
  misc_RNA (1)...(19): siRNA sense strand
aggaaagaccucugggugu

SEQ ID NO: 2433197 - RNA, 19 nt, Homo sapiens
  misc_RNA (1)...(19): siRNA sense strand
ggaagaugaugcacggagu

SEQ ID NO: 2433198 - RNA, 19 nt, Homo sapiens
  misc_RNA (1)...(19): siRNA sense strand
agggcauggauguggcaua

SEQ ID NO: 2433199 - RNA, 19 nt, Homo sapiens
  misc_RNA (1)...(19): siRNA sense strand
gcaaguagcaccucagcga

SEQ ID NO: 2433200 - RNA, 19 nt, Homo sapiens
  misc_RNA (1)...(19): siRNA sense strand
ccuugaaccuggucagagu

SEQ ID NO: 2433201 - RNA, 19 nt, Homo sapiens
  misc_RNA (1)...(19): siRNA sense strand
gucuggacauagagaguga

SEQ ID NO: 2433202 - RNA, 19 nt, Homo sapiens
  misc_RNA (1)...(19): siRNA sense strand
ccaaacagcagcagcagca

SEQ ID NO: 2433203 - RNA, 19 nt, Homo sapiens
  misc_RNA (1)...(19): siRNA sense strand
gggaggagacucuagcaga

SEQ ID NO: 2433204 - RNA, 19 nt, Homo sapiens
  misc_RNA (1)...(19): siRNA sense strand
gaguuuuauuacugaggaa

SEQ ID NO: 2433205 - RNA, 19 nt, Homo sapiens
  misc_RNA (1)...(19): siRNA sense strand
ccuggauagucuggacaua

SEQ ID NO: 2433206 - RNA, 19 nt, Homo sapiens
  misc_RNA (1)...(19): siRNA sense strand
gugccaaggagauggugau

SEQ ID NO: 2433207 - RNA, 19 nt, Homo sapiens
  misc_RNA (1)...(19): siRNA sense strand
ucagaauaguuggcagcaa

SEQ ID NO: 2433208 - RNA, 19 nt, Homo sapiens
  misc_RNA (1)...(19): siRNA sense strand
aguugaaggaaguggaaug

SEQ ID NO: 2433209 - RNA, 19 nt, Homo sapiens
  misc_RNA (1)...(19): siRNA sense strand
cagaggaguuaaaggacac

SEQ ID NO: 2433210 - RNA, 19 nt, Homo sapiens
  misc_RNA (1)...(19): siRNA sense strand
acguagugacuuucaggaa

SEQ ID NO: 2433211 - RNA, 19 nt, Homo sapiens
  misc_RNA (1)...(19): siRNA sense strand
gcacaggaucagcaggguu

SEQ ID NO: 2433212 - RNA, 19 nt, Homo sapiens
  misc_RNA (1)...(19): siRNA sense strand
cugcaaucgcaacgugcua

SEQ ID NO: 2433213 - RNA, 19 nt, Homo sapiens
  misc_RNA (1)...(19): siRNA sense strand
acaugcuacagcuggaaua

SEQ ID NO: 2433214 - RNA, 19 nt, Homo sapiens
  misc_RNA (1)...(19): siRNA sense strand
ugaugaagucugggugcaa

SEQ ID NO: 2433215 - RNA, 19 nt, Homo sapiens
  misc_RNA (1)...(19): siRNA sense strand
aggcagaagcacuguguaa

SEQ ID NO: 2433216 - RNA, 19 nt, Homo sapiens
  misc_RNA (1)...(19): siRNA sense strand
aagugaaaccugugaaaga

SEQ ID NO: 2433217 - RNA, 19 nt, Homo sapiens
  misc_RNA (1)...(19): siRNA sense strand
ggugagacuuuauuggcua

SEQ ID NO: 2433218 - RNA, 19 nt, Homo sapiens
  misc_RNA (1)...(19): siRNA sense strand
ugauaaaugcggugaagca

SEQ ID NO: 2433219 - RNA, 19 nt, Homo sapiens
  misc_RNA (1)...(19): siRNA sense strand
agaagugaaaccugugaaa

SEQ ID NO: 2433220 - RNA, 19 nt, Homo sapiens
  misc_RNA (1)...(19): siRNA sense strand
acccaaaccagaagaagaa

SEQ ID NO: 2433221 - RNA, 19 nt, Homo sapiens
  misc_RNA (1)...(19): siRNA sense strand
accagaagaagaagugaaa

SEQ ID NO: 2433222 - RNA, 19 nt, Homo sapiens
  misc_RNA (1)...(19): siRNA sense strand
ucauagaagcauacguuau

SEQ ID NO: 2433223 - RNA, 19 nt, Homo sapiens
  misc_RNA (1)...(19): siRNA sense strand
aagaauauggagaaaccaa

SEQ ID NO: 2433224 - RNA, 19 nt, Homo sapiens
  misc_RNA (1)...(19): siRNA sense strand
guucaguggacaccagaaa

SEQ ID NO: 2433225 - RNA, 19 nt, Homo sapiens
  misc_RNA (1)...(19): siRNA sense strand
ucaucgaagccuaaagauu

SEQ ID NO: 2433226 - RNA, 19 nt, Homo sapiens
  misc_RNA (1)...(19): siRNA sense strand
gaauuaauuuccaugggau

SEQ ID NO: 2433227 - RNA, 19 nt, Homo sapiens
  misc_RNA (1)...(19): siRNA sense strand
agaauauggagaaaccaaa

SEQ ID NO: 2433228 - RNA, 19 nt, Homo sapiens
  misc_RNA (1)...(19): siRNA sense strand
acucauuacaccugcggaa

SEQ ID NO: 2433229 - RNA, 19 nt, Homo sapiens
  misc_RNA (1)...(19): siRNA sense strand
gcuggaacucaaagcaaau

SEQ ID NO: 2433230 - RNA, 19 nt, Homo sapiens
  misc_RNA (1)...(19): siRNA sense strand
aacagaagaugaagcaaaa

SEQ ID NO: 2433231 - RNA, 19 nt, Homo sapiens
  misc_RNA (1)...(19): siRNA sense strand
agcuggaacucaaagcaaa

SEQ ID NO: 2433232 - RNA, 19 nt, Homo sapiens
  misc_RNA (1)...(19): siRNA sense strand
guacuaaacccaaaccaga

SEQ ID NO: 2433233 - RNA, 19 nt, Homo sapiens
  misc_RNA (1)...(19): siRNA sense strand
agaaguucaucgaagccua

SEQ ID NO: 2433234 - RNA, 19 nt, Homo sapiens
  misc_RNA (1)...(19): siRNA sense strand
gaugaaucuacccaagaaa

SEQ ID NO: 2433235 - RNA, 19 nt, Homo sapiens
  misc_RNA (1)...(19): siRNA sense strand
aaaacaugcuccuggacua

SEQ ID NO: 2433236 - RNA, 19 nt, Homo sapiens
  misc_RNA (1)...(19): siRNA sense strand
cagaagaagaagugaaacc

SEQ ID NO: 2433237 - RNA, 19 nt, Homo sapiens
  misc_RNA (1)...(19): siRNA sense strand
cagccaauuucuaucaaaa

SEQ ID NO: 2433238 - RNA, 19 nt, Homo sapiens
  misc_RNA (1)...(19): siRNA sense strand
augcaaaggcagaagcacu

SEQ ID NO: 2433239 - RNA, 19 nt, Homo sapiens
  misc_RNA (1)...(19): siRNA sense strand
acuuuauuggcuagugaua

SEQ ID NO: 2433240 - RNA, 19 nt, Homo sapiens
  misc_RNA (1)...(19): siRNA sense strand
caaggaugacaguacuaaa

SEQ ID NO: 2433241 - RNA, 19 nt, Homo sapiens
  misc_RNA (1)...(19): siRNA sense strand
cagucaaaccuucaggaca

SEQ ID NO: 2433242 - RNA, 19 nt, Homo sapiens
  misc_RNA (1)...(19): siRNA sense strand
cagcuggaacucaaagcaa

SEQ ID NO: 2433243 - RNA, 19 nt, Homo sapiens
  misc_RNA (1)...(19): siRNA sense strand
aaccagaagaagaagugaa

SEQ ID NO: 2433244 - RNA, 19 nt, Homo sapiens
  misc_RNA (1)...(19): siRNA sense strand
uguguaaagaauauggaga

SEQ ID NO: 2433245 - RNA, 19 nt, Homo sapiens
  misc_RNA (1)...(19): siRNA sense strand
ugaagaacacccuagaaaa

SEQ ID NO: 2433246 - RNA, 19 nt, Homo sapiens
  misc_RNA (1)...(19): siRNA sense strand
uuucauaggaacccauuaa

SEQ ID NO: 2433247 - RNA, 19 nt, Homo sapiens
  misc_RNA (1)...(19): siRNA sense strand
aggaaagucaucucccaaa

SEQ ID NO: 2433248 - RNA, 19 nt, Homo sapiens
  misc_RNA (1)...(19): siRNA sense strand
agaaguaacaauugcucga

SEQ ID NO: 2433249 - RNA, 19 nt, Homo sapiens
  misc_RNA (1)...(19): siRNA sense strand
uggagaaaccaaaggaccu

SEQ ID NO: 2433250 - RNA, 19 nt, Homo sapiens
  misc_RNA (1)...(19): siRNA sense strand
aaccaaaggaccuggacca

SEQ ID NO: 2433251 - RNA, 19 nt, Homo sapiens
  misc_RNA (1)...(19): siRNA sense strand
aguagauaauucagggaaa

SEQ ID NO: 2433252 - RNA, 19 nt, Homo sapiens
  misc_RNA (1)...(19): siRNA sense strand
guguaaaugccaaggacaa

SEQ ID NO: 2433253 - RNA, 19 nt, Homo sapiens
  misc_RNA (1)...(19): siRNA sense strand
ccaugauaauucagaagaa

SEQ ID NO: 2433254 - RNA, 19 nt, Homo sapiens
  misc_RNA (1)...(19): siRNA sense strand
cuguaaaggauaaggacuu

SEQ ID NO: 2433255 - RNA, 19 nt, Homo sapiens
  misc_RNA (1)...(19): siRNA sense strand
aggaaaugcccaugauaau

SEQ ID NO: 2433256 - RNA, 19 nt, Homo sapiens
  misc_RNA (1)...(19): siRNA sense strand
cagugaacgcaguagauaa

SEQ ID NO: 2433257 - RNA, 19 nt, Homo sapiens
  misc_RNA (1)...(19): siRNA sense strand
ucagaauggaggugaaauu

SEQ ID NO: 2433258 - RNA, 19 nt, Homo sapiens
  misc_RNA (1)...(19): siRNA sense strand
caguacagguuuugauuaa

SEQ ID NO: 2433259 - RNA, 19 nt, Homo sapiens
  misc_RNA (1)...(19): siRNA sense strand
uguaaagauuccagaggga

SEQ ID NO: 2433260 - RNA, 19 nt, Homo sapiens
  misc_RNA (1)...(19): siRNA sense strand
auacaagacgagagccuua

SEQ ID NO: 2433261 - RNA, 19 nt, Homo sapiens
  misc_RNA (1)...(19): siRNA sense strand
aagaacaaacaguggauuu

SEQ ID NO: 2433262 - RNA, 19 nt, Homo sapiens
  misc_RNA (1)...(19): siRNA sense strand
gcacuaugcagcugcgaau

SEQ ID NO: 2433263 - RNA, 19 nt, Homo sapiens
  misc_RNA (1)...(19): siRNA sense strand
ucgcaaauuuaucgguaau

SEQ ID NO: 2433264 - RNA, 19 nt, Homo sapiens
  misc_RNA (1)...(19): siRNA sense strand
ucaauuuacucuuggccaa

SEQ ID NO: 2433265 - RNA, 19 nt, Homo sapiens
  misc_RNA (1)...(19): siRNA sense strand
ugaaagaugccaaaggaca

SEQ ID NO: 2433266 - RNA, 19 nt, Homo sapiens
  misc_RNA (1)...(19): siRNA sense strand
aggcaggcgcuguggauau

SEQ ID NO: 2433267 - RNA, 19 nt, Homo sapiens
  misc_RNA (1)...(19): siRNA sense strand
cagaagugaagaagcagua

SEQ ID NO: 2433268 - RNA, 19 nt, Homo sapiens
  misc_RNA (1)...(19): siRNA sense strand
aaauugacuguguggauaa

SEQ ID NO: 2433269 - RNA, 19 nt, Homo sapiens
  misc_RNA (1)...(19): siRNA sense strand
gccagggagcugaaggaaa

SEQ ID NO: 2433270 - RNA, 19 nt, Homo sapiens
  misc_RNA (1)...(19): siRNA sense strand
gcuagaaauugcagacaac

SEQ ID NO: 2433271 - RNA, 19 nt, Homo sapiens
  misc_RNA (1)...(19): siRNA sense strand
ggucaugagcuuuugauua

SEQ ID NO: 2433272 - RNA, 19 nt, Homo sapiens
  misc_RNA (1)...(19): siRNA sense strand
cagaagaacuugaaagagc

SEQ ID NO: 2433273 - RNA, 19 nt, Homo sapiens
  misc_RNA (1)...(19): siRNA sense strand
guagauaauucagggaaaa

SEQ ID NO: 2433274 - RNA, 19 nt, Homo sapiens
  misc_RNA (1)...(19): siRNA sense strand
ugcaaaugcugcuggaaca

SEQ ID NO: 2433275 - RNA, 19 nt, Homo sapiens
  misc_RNA (1)...(19): siRNA sense strand
ugaaagacaauguaaccaa

SEQ ID NO: 2433276 - RNA, 19 nt, Homo sapiens
  misc_RNA (1)...(19): siRNA sense strand
ucaaagauaaccaaggcua

SEQ ID NO: 2433277 - RNA, 19 nt, Homo sapiens
  misc_RNA (1)...(19): siRNA sense strand
ggccaacguuaaugaaaca

SEQ ID NO: 2433278 - RNA, 19 nt, Homo sapiens
  misc_RNA (1)...(19): siRNA sense strand
ccucaguaauuaaugguca

SEQ ID NO: 2433279 - RNA, 19 nt, Homo sapiens
  misc_RNA (1)...(19): siRNA sense strand
gaucaugggaauugugcau

SEQ ID NO: 2433280 - RNA, 19 nt, Homo sapiens
  misc_RNA (1)...(19): siRNA sense strand
aaggauaaggacuugaaua

SEQ ID NO: 2433281 - RNA, 19 nt, Homo sapiens
  misc_RNA (1)...(19): siRNA sense strand
gauuaauguugucaagcau

SEQ ID NO: 2433282 - RNA, 19 nt, Homo sapiens
  misc_RNA (1)...(19): siRNA sense strand
ugaaaacuguauagaggua

SEQ ID NO: 2433283 - RNA, 19 nt, Homo sapiens
  misc_RNA (1)...(19): siRNA sense strand
ugaaauugacuguguggau

SEQ ID NO: 2433284 - RNA, 19 nt, Homo sapiens
  misc_RNA (1)...(19): siRNA sense strand
ccuaggaugcacagcuuua

SEQ ID NO: 2433285 - RNA, 19 nt, Homo sapiens
  misc_RNA (1)...(19): siRNA sense strand
aguaauuaauggucacaca

SEQ ID NO: 2433286 - RNA, 19 nt, Homo sapiens
  misc_RNA (1)...(19): siRNA sense strand
agguaauguggaauguaua

SEQ ID NO: 2433287 - RNA, 19 nt, Homo sapiens
  misc_RNA (1)...(19): siRNA sense strand
gcuucaaaaugaugcaaau

SEQ ID NO: 2433288 - RNA, 19 nt, Homo sapiens
  misc_RNA (1)...(19): siRNA sense strand
cgaugugaaagaugccaaa

SEQ ID NO: 2433289 - RNA, 19 nt, Homo sapiens
  misc_RNA (1)...(19): siRNA sense strand
aggauaaggacuugaauac

SEQ ID NO: 2433290 - RNA, 19 nt, Homo sapiens
  misc_RNA (1)...(19): siRNA sense strand
cuauggaaauacagcgcuu

SEQ ID NO: 2433291 - RNA, 19 nt, Homo sapiens
  misc_RNA (1)...(19): siRNA sense strand
ucagaguaaagauggcaaa

SEQ ID NO: 2433292 - RNA, 19 nt, Homo sapiens
  misc_RNA (1)...(19): siRNA sense strand
ugacaggacacgaggaaug

SEQ ID NO: 2433293 - RNA, 19 nt, Homo sapiens
  misc_RNA (1)...(19): siRNA sense strand
acgaggaaugugugcaaau

SEQ ID NO: 2433294 - RNA, 19 nt, Homo sapiens
  misc_RNA (1)...(19): siRNA sense strand
uggaacaagaagugucaau

SEQ ID NO: 2433295 - RNA, 19 nt, Homo sapiens
  misc_RNA (1)...(19): siRNA sense strand
acacagugcuccagugaac

SEQ ID NO: 2433296 - RNA, 19 nt, Homo sapiens
  misc_RNA (1)...(19): siRNA sense strand
agugaacgcaguagauaau

SEQ ID NO: 2433297 - RNA, 19 nt, Homo sapiens
  misc_RNA (1)...(19): siRNA sense strand
acacagagggauuaugaca

SEQ ID NO: 2433298 - RNA, 19 nt, Homo sapiens
  misc_RNA (1)...(19): siRNA sense strand
gaguaaagauggcaaaagu

SEQ ID NO: 2433299 - RNA, 19 nt, Homo sapiens
  misc_RNA (1)...(19): siRNA sense strand
gggccaacguuaaugaaac

SEQ ID NO: 2433300 - RNA, 19 nt, Homo sapiens
  misc_RNA (1)...(19): siRNA sense strand
uuuaaaggacacacagaau

SEQ ID NO: 2433301 - RNA, 19 nt, Homo sapiens
  misc_RNA (1)...(19): siRNA sense strand
ugcuagaaauugcagacaa

SEQ ID NO: 2433302 - RNA, 19 nt, Homo sapiens
  misc_RNA (1)...(19): siRNA sense strand
ccacaggggccaacguuaa

SEQ ID NO: 2433303 - RNA, 19 nt, Homo sapiens
  misc_RNA (1)...(19): siRNA sense strand
cuuuaaaggacacacagaa

SEQ ID NO: 2433304 - RNA, 19 nt, Homo sapiens
  misc_RNA (1)...(19): siRNA sense strand
ugggagaugcagagaucau

SEQ ID NO: 2433305 - RNA, 19 nt, Homo sapiens
  misc_RNA (1)...(19): siRNA sense strand
ggaaagaacaaacagugga

SEQ ID NO: 2433306 - RNA, 19 nt, Homo sapiens
  misc_RNA (1)...(19): siRNA sense strand
gcaaaugcugcuggaacaa

SEQ ID NO: 2433307 - RNA, 19 nt, Homo sapiens
  misc_RNA (1)...(19): siRNA sense strand
agauuaauguugucaagca

SEQ ID NO: 2433308 - RNA, 19 nt, Homo sapiens
  misc_RNA (1)...(19): siRNA sense strand
agauacaagacgagagccu

SEQ ID NO: 2433309 - RNA, 19 nt, Homo sapiens
  misc_RNA (1)...(19): siRNA sense strand
aaacugaagaugugaauac

SEQ ID NO: 2433310 - RNA, 19 nt, Homo sapiens
  misc_RNA (1)...(19): siRNA sense strand
cauuaaccauggcgcagaa

SEQ ID NO: 2433311 - RNA, 19 nt, Homo sapiens
  misc_RNA (1)...(19): siRNA sense strand
aagauacggucaugagcuu

SEQ ID NO: 2433312 - RNA, 19 nt, Homo sapiens
  misc_RNA (1)...(19): siRNA sense strand
cggaggcggucgaugugaa

SEQ ID NO: 2433313 - RNA, 19 nt, Homo sapiens
  misc_RNA (1)...(19): siRNA sense strand
acaaauugcaacagaucaa

SEQ ID NO: 2433314 - RNA, 19 nt, Homo sapiens
  misc_RNA (1)...(19): siRNA sense strand
aguuggaccaucagaacaa

SEQ ID NO: 2433315 - RNA, 19 nt, Homo sapiens
  misc_RNA (1)...(19): siRNA sense strand
cagacagauaauugcaaau

SEQ ID NO: 2433316 - RNA, 19 nt, Homo sapiens
  misc_RNA (1)...(19): siRNA sense strand
ggacucagacuuacgguca

SEQ ID NO: 2433317 - RNA, 19 nt, Homo sapiens
  misc_RNA (1)...(19): siRNA sense strand
cccaggaaacuuuggaaaa

SEQ ID NO: 2433318 - RNA, 19 nt, Homo sapiens
  misc_RNA (1)...(19): siRNA sense strand
aauaguggaaagugaccaa

SEQ ID NO: 2433319 - RNA, 19 nt, Homo sapiens
  misc_RNA (1)...(19): siRNA sense strand
agcucaaccuuuauggauu

SEQ ID NO: 2433320 - RNA, 19 nt, Homo sapiens
  misc_RNA (1)...(19): siRNA sense strand
gggcccaacaugagggaaa

SEQ ID NO: 2433321 - RNA, 19 nt, Homo sapiens
  misc_RNA (1)...(19): siRNA sense strand
gggaaggaccaguaggaga

SEQ ID NO: 2433322 - RNA, 19 nt, Homo sapiens
  misc_RNA (1)...(19): siRNA sense strand
ccaggaugaaguagagcaa

SEQ ID NO: 2433323 - RNA, 19 nt, Homo sapiens
  misc_RNA (1)...(19): siRNA sense strand
agagcaagcuggacgccua

SEQ ID NO: 2433324 - RNA, 19 nt, Homo sapiens
  misc_RNA (1)...(19): siRNA sense strand
ugacauuauuugcaggaga

SEQ ID NO: 2433325 - RNA, 19 nt, Homo sapiens
  misc_RNA (1)...(19): siRNA sense strand
caacaugagggaaaggaga

SEQ ID NO: 2433326 - RNA, 19 nt, Homo sapiens
  misc_RNA (1)...(19): siRNA sense strand
cauaugaacuucugggugu

SEQ ID NO: 2433327 - RNA, 19 nt, Homo sapiens
  misc_RNA (1)...(19): siRNA sense strand
ggucugagcagcaggcaca

SEQ ID NO: 2433328 - RNA, 19 nt, Homo sapiens
  misc_RNA (1)...(19): siRNA sense strand
acagcaaggucgaaguaca

SEQ ID NO: 2433329 - RNA, 19 nt, Homo sapiens
  misc_RNA (1)...(19): siRNA sense strand
ggugauggucugugccaau

SEQ ID NO: 2433330 - RNA, 19 nt, Homo sapiens
  misc_RNA (1)...(19): siRNA sense strand
aggggaagcugcaggggaa

SEQ ID NO: 2433331 - RNA, 19 nt, Homo sapiens
  misc_RNA (1)...(19): siRNA sense strand
ccacuuaggcccagcacca

SEQ ID NO: 2433332 - RNA, 19 nt, Homo sapiens
  misc_RNA (1)...(19): siRNA sense strand
uggaacaagaugaggagca

SEQ ID NO: 2433333 - RNA, 19 nt, Homo sapiens
  misc_RNA (1)...(19): siRNA sense strand
cuacagcggaggauggcaa

SEQ ID NO: 2433334 - RNA, 19 nt, Homo sapiens
  misc_RNA (1)...(19): siRNA sense strand
gagcagaguuggacagcug

SEQ ID NO: 2433335 - RNA, 19 nt, Homo sapiens
  misc_RNA (1)...(19): siRNA sense strand
ccuuugagccugggagaau

SEQ ID NO: 2433336 - RNA, 19 nt, Homo sapiens
  misc_RNA (1)...(19): siRNA sense strand
ccauuauguugguggugga

SEQ ID NO: 2433337 - RNA, 19 nt, Homo sapiens
  misc_RNA (1)...(19): siRNA sense strand
uuccagaaccugugccaaa

SEQ ID NO: 2433338 - RNA, 19 nt, Homo sapiens
  misc_RNA (1)...(19): siRNA sense strand
agccagagccugauaccaa

SEQ ID NO: 2433339 - RNA, 19 nt, Homo sapiens
  misc_RNA (1)...(19): siRNA sense strand
ggacagagagcacacgaca

SEQ ID NO: 2433340 - RNA, 19 nt, Homo sapiens
  misc_RNA (1)...(19): siRNA sense strand
auagauggcuggagcacca

SEQ ID NO: 2433341 - RNA, 19 nt, Homo sapiens
  misc_RNA (1)...(19): siRNA sense strand
cuaaauuugcugugguguu

SEQ ID NO: 2433342 - RNA, 19 nt, Homo sapiens
  misc_RNA (1)...(19): siRNA sense strand
gggaaaggagagcccagaa

SEQ ID NO: 2433343 - RNA, 19 nt, Homo sapiens
  misc_RNA (1)...(19): siRNA sense strand
cagccaugggcaaagcaaa

SEQ ID NO: 2433344 - RNA, 19 nt, Homo sapiens
  misc_RNA (1)...(19): siRNA sense strand
cugaggagcugcagagccu

SEQ ID NO: 2433345 - RNA, 19 nt, Homo sapiens
  misc_RNA (1)...(19): siRNA sense strand
auggacaacuguagggcca

SEQ ID NO: 2433346 - RNA, 19 nt, Homo sapiens
  misc_RNA (1)...(19): siRNA sense strand
ggcugucacuccugagcaa

SEQ ID NO: 2433347 - RNA, 19 nt, Homo sapiens
  misc_RNA (1)...(19): siRNA sense strand
ccacaucagcccacgccaa

SEQ ID NO: 2433348 - RNA, 19 nt, Homo sapiens
  misc_RNA (1)...(19): siRNA sense strand
agaucaacuccaugguaga

SEQ ID NO: 2433349 - RNA, 19 nt, Homo sapiens
  misc_RNA (1)...(19): siRNA sense strand
aggacuugggccugaggaa

SEQ ID NO: 2433350 - RNA, 19 nt, Homo sapiens
  misc_RNA (1)...(19): siRNA sense strand
gggaacuacaggagcugau

SEQ ID NO: 2433351 - RNA, 19 nt, Homo sapiens
  misc_RNA (1)...(19): siRNA sense strand
ggucccugguauugacuau

SEQ ID NO: 2433352 - RNA, 19 nt, Homo sapiens
  misc_RNA (1)...(19): siRNA sense strand
gagcagacuccccgagauu

SEQ ID NO: 2433353 - RNA, 19 nt, Homo sapiens
  misc_RNA (1)...(19): siRNA sense strand
cgaucuaucccuggaggaa

SEQ ID NO: 2433354 - RNA, 19 nt, Homo sapiens
  misc_RNA (1)...(19): siRNA sense strand
aggcacaguuucucuggaa

SEQ ID NO: 2433355 - RNA, 19 nt, Homo sapiens
  misc_RNA (1)...(19): siRNA sense strand
cuguagggccagaacugaa

SEQ ID NO: 2433356 - RNA, 19 nt, Homo sapiens
  misc_RNA (1)...(19): siRNA sense strand
aggucuaggagaucgggaa

SEQ ID NO: 2433357 - RNA, 19 nt, Homo sapiens
  misc_RNA (1)...(19): siRNA sense strand
caaccuuacccucaggaau

SEQ ID NO: 2433358 - RNA, 19 nt, Homo sapiens
  misc_RNA (1)...(19): siRNA sense strand
gggaaagacaugaaggaga

SEQ ID NO: 2433359 - RNA, 19 nt, Homo sapiens
  misc_RNA (1)...(19): siRNA sense strand
cugcagaagauuuggacaa

SEQ ID NO: 2433360 - RNA, 19 nt, Homo sapiens
  misc_RNA (1)...(19): siRNA sense strand
guuaagaaaugaugggagu

SEQ ID NO: 2433361 - RNA, 19 nt, Homo sapiens
  misc_RNA (1)...(19): siRNA sense strand
ggaaagacaugaaggagag

SEQ ID NO: 2433362 - RNA, 19 nt, Homo sapiens
  misc_RNA (1)...(19): siRNA sense strand
aauacaaccuuuaugggaa

SEQ ID NO: 2433363 - RNA, 19 nt, Homo sapiens
  misc_RNA (1)...(19): siRNA sense strand
uagaguuggaagagaaauu

SEQ ID NO: 2433364 - RNA, 19 nt, Homo sapiens
  misc_RNA (1)...(19): siRNA sense strand
aagacuaccuuguuggcaa

SEQ ID NO: 2433365 - RNA, 19 nt, Homo sapiens
  misc_RNA (1)...(19): siRNA sense strand
aguagaguuggaagagaaa

SEQ ID NO: 2433366 - RNA, 19 nt, Homo sapiens
  misc_RNA (1)...(19): siRNA sense strand
ggaugaagcuggugcagac

SEQ ID NO: 2433367 - RNA, 19 nt, Homo sapiens
  misc_RNA (1)...(19): siRNA sense strand
cuuuagaagaagcaaggaa

SEQ ID NO: 2433368 - RNA, 19 nt, Homo sapiens
  misc_RNA (1)...(19): siRNA sense strand
cuuaaagagccacagacaa

SEQ ID NO: 2433369 - RNA, 19 nt, Homo sapiens
  misc_RNA (1)...(19): siRNA sense strand
cugccuuggucaaagagaa

SEQ ID NO: 2433370 - RNA, 19 nt, Homo sapiens
  misc_RNA (1)...(19): siRNA sense strand
cuggaguagaguuggaaga

SEQ ID NO: 2433371 - RNA, 19 nt, Homo sapiens
  misc_RNA (1)...(19): siRNA sense strand
aggaagauuuucagguuuu

SEQ ID NO: 2433372 - RNA, 19 nt, Homo sapiens
  misc_RNA (1)...(19): siRNA sense strand
ugccuuggucaaagagaaa

SEQ ID NO: 2433373 - RNA, 19 nt, Homo sapiens
  misc_RNA (1)...(19): siRNA sense strand
ugguugagauugacgggau

SEQ ID NO: 2433374 - RNA, 19 nt, Homo sapiens
  misc_RNA (1)...(19): siRNA sense strand
cagagaagcccaagcucca

SEQ ID NO: 2433375 - RNA, 19 nt, Homo sapiens
  misc_RNA (1)...(19): siRNA sense strand
ggugcagaccagagccauu

SEQ ID NO: 2433376 - RNA, 19 nt, Homo sapiens
  misc_RNA (1)...(19): siRNA sense strand
cauaugucaaccagaggaa

SEQ ID NO: 2433377 - RNA, 19 nt, Homo sapiens
  misc_RNA (1)...(19): siRNA sense strand
aggagagagcccugauuga

SEQ ID NO: 2433378 - RNA, 19 nt, Homo sapiens
  misc_RNA (1)...(19): siRNA sense strand
auauguacacagaagguau

SEQ ID NO: 2433379 - RNA, 19 nt, Homo sapiens
  misc_RNA (1)...(19): siRNA sense strand
cagaggaaagagaugccaa

SEQ ID NO: 2433380 - RNA, 19 nt, Homo sapiens
  misc_RNA (1)...(19): siRNA sense strand
uuagaagaagcaaggaaga

SEQ ID NO: 2433381 - RNA, 19 nt, Homo sapiens
  misc_RNA (1)...(19): siRNA sense strand
uuaaagagccacagacaag

SEQ ID NO: 2433382 - RNA, 19 nt, Homo sapiens
  misc_RNA (1)...(19): siRNA sense strand
uuacaauccugaagggaaa

SEQ ID NO: 2433383 - RNA, 19 nt, Homo sapiens
  misc_RNA (1)...(19): siRNA sense strand
cgaugaagaagcagaggaa

SEQ ID NO: 2433384 - RNA, 19 nt, Homo sapiens
  misc_RNA (1)...(19): siRNA sense strand
augaagaagcagaggaaga

SEQ ID NO: 2433385 - RNA, 19 nt, Homo sapiens
  misc_RNA (1)...(19): siRNA sense strand
aggaagaacaagaagagaa

SEQ ID NO: 2433386 - RNA, 19 nt, Homo sapiens
  misc_RNA (1)...(19): siRNA sense strand
aggaagaagaguuggauga

SEQ ID NO: 2433387 - RNA, 19 nt, Homo sapiens
  misc_RNA (1)...(19): siRNA sense strand
agguugaagcaaugaauaa

SEQ ID NO: 2433388 - RNA, 19 nt, Homo sapiens
  misc_RNA (1)...(19): siRNA sense strand
aggaaacagaagagcuaaa

SEQ ID NO: 2433389 - RNA, 19 nt, Homo sapiens
  misc_RNA (1)...(19): siRNA sense strand
uagaagaccuguugcggaa

SEQ ID NO: 2433390 - RNA, 19 nt, Homo sapiens
  misc_RNA (1)...(19): siRNA sense strand
caauaaagcucuaucggga

SEQ ID NO: 2433391 - RNA, 19 nt, Homo sapiens
  misc_RNA (1)...(19): siRNA sense strand
cuccagagcaggugggcaa

SEQ ID NO: 2433392 - RNA, 19 nt, Homo sapiens
  misc_RNA (1)...(19): siRNA sense strand
gggaaaguuaccaagagaa

SEQ ID NO: 2433393 - RNA, 19 nt, Homo sapiens
  misc_RNA (1)...(19): siRNA sense strand
cguugguacugcugaagaa

SEQ ID NO: 2433394 - RNA, 19 nt, Homo sapiens
  misc_RNA (1)...(19): siRNA sense strand
ucuuacaggagcuggauaa

SEQ ID NO: 2433395 - RNA, 19 nt, Homo sapiens
  misc_RNA (1)...(19): siRNA sense strand
aagaagaguuggaugacca

SEQ ID NO: 2433396 - RNA, 19 nt, Homo sapiens
  misc_RNA (1)...(19): siRNA sense strand
aagcagaggaagaacaaga

SEQ ID NO: 2433397 - RNA, 19 nt, Homo sapiens
  misc_RNA (1)...(19): siRNA sense strand
aacaaaugaaccagugaaa

SEQ ID NO: 2433398 - RNA, 19 nt, Homo sapiens
  misc_RNA (1)...(19): siRNA sense strand
agggaaaguuaccaagaga

SEQ ID NO: 2433399 - RNA, 19 nt, Homo sapiens
  misc_RNA (1)...(19): siRNA sense strand
uggagaaagaggaaacaga

SEQ ID NO: 2433400 - RNA, 19 nt, Homo sapiens
  misc_RNA (1)...(19): siRNA sense strand
ugguacugcugaagaaaca

SEQ ID NO: 2433401 - RNA, 19 nt, Homo sapiens
  misc_RNA (1)...(19): siRNA sense strand
cuaugggagucgucagauu

SEQ ID NO: 2433402 - RNA, 19 nt, Homo sapiens
  misc_RNA (1)...(19): siRNA sense strand
cagaggaagaacaagaaga

SEQ ID NO: 2433403 - RNA, 19 nt, Homo sapiens
  misc_RNA (1)...(19): siRNA sense strand
ugggcaagaugaaggcuau

SEQ ID NO: 2433404 - RNA, 19 nt, Homo sapiens
  misc_RNA (1)...(19): siRNA sense strand
ccuugguggaugaguuuaa

SEQ ID NO: 2433405 - RNA, 19 nt, Homo sapiens
  misc_RNA (1)...(19): siRNA sense strand
gguugaagcaaugaauaaa

SEQ ID NO: 2433406 - RNA, 19 nt, Homo sapiens
  misc_RNA (1)...(19): siRNA sense strand
gcaaggguacgcugggcaa

SEQ ID NO: 2433407 - RNA, 19 nt, Homo sapiens
  misc_RNA (1)...(19): siRNA sense strand
agaagcagaggaagaacaa

SEQ ID NO: 2433408 - RNA, 19 nt, Homo sapiens
  misc_RNA (1)...(19): siRNA sense strand
agagaaaacacgauaauga

SEQ ID NO: 2433409 - RNA, 19 nt, Homo sapiens
  misc_RNA (1)...(19): siRNA sense strand
aguuuaaggagcuuguuua

SEQ ID NO: 2433410 - RNA, 19 nt, Homo sapiens
  misc_RNA (1)...(19): siRNA sense strand
uguuugaaucucagaguga

SEQ ID NO: 2433411 - RNA, 19 nt, Homo sapiens
  misc_RNA (1)...(19): siRNA sense strand
gcgccaaggagaccaggaa

SEQ ID NO: 2433412 - RNA, 19 nt, Homo sapiens
  misc_RNA (1)...(19): siRNA sense strand
auuacaauccugaagggaa

SEQ ID NO: 2433413 - RNA, 19 nt, Homo sapiens
  misc_RNA (1)...(19): siRNA sense strand
ccucuuuagugauguccaa

SEQ ID NO: 2433414 - RNA, 19 nt, Homo sapiens
  misc_RNA (1)...(19): siRNA sense strand
cggaacaagcaguggaccu

SEQ ID NO: 2433415 - RNA, 19 nt, Homo sapiens
  misc_RNA (1)...(19): siRNA sense strand
aagcaaguggagacuauaa

SEQ ID NO: 2433416 - RNA, 19 nt, Homo sapiens
  misc_RNA (1)...(19): siRNA sense strand
uagcagaggaugaggaccu

SEQ ID NO: 2433417 - RNA, 19 nt, Homo sapiens
  misc_RNA (1)...(19): siRNA sense strand
ucaucaagugucuggagaa

SEQ ID NO: 2433418 - RNA, 19 nt, Homo sapiens
  misc_RNA (1)...(19): siRNA sense strand
gcagcauugugcagauaca

SEQ ID NO: 2433419 - RNA, 19 nt, Homo sapiens
  misc_RNA (1)...(19): siRNA sense strand
gcaaaaggcccaaggugga

SEQ ID NO: 2433420 - RNA, 19 nt, Homo sapiens
  misc_RNA (1)...(19): siRNA sense strand
aagaggagcugaagaccca

SEQ ID NO: 2433421 - RNA, 19 nt, Homo sapiens
  misc_RNA (1)...(19): siRNA sense strand
aaaacgaauucuagagcuu

SEQ ID NO: 2433422 - RNA, 19 nt, Homo sapiens
  misc_RNA (1)...(19): siRNA sense strand
cugaagcucaacaaagaua

SEQ ID NO: 2433423 - RNA, 19 nt, Homo sapiens
  misc_RNA (1)...(19): siRNA sense strand
ucagauuauacuggagaaa

SEQ ID NO: 2433424 - RNA, 19 nt, Homo sapiens
  misc_RNA (1)...(19): siRNA sense strand
aagcaguggaccugacauu

SEQ ID NO: 2433425 - RNA, 19 nt, Homo sapiens
  misc_RNA (1)...(19): siRNA sense strand
ugcccaagguugaagcaau

SEQ ID NO: 2433426 - RNA, 19 nt, Homo sapiens
  misc_RNA (1)...(19): siRNA sense strand
acaugagcauccaguguau

SEQ ID NO: 2433427 - RNA, 19 nt, Homo sapiens
  misc_RNA (1)...(19): siRNA sense strand
acuugaugcaccugaagaa

SEQ ID NO: 2433428 - RNA, 19 nt, Homo sapiens
  misc_RNA (1)...(19): siRNA sense strand
ucagcauagcagaggauga

SEQ ID NO: 2433429 - RNA, 19 nt, Homo sapiens
  misc_RNA (1)...(19): siRNA sense strand
cagaagagcuaaaacgguu

SEQ ID NO: 2433430 - RNA, 19 nt, Homo sapiens
  misc_RNA (1)...(19): siRNA sense strand
ccagcaagcuagaagaccu

SEQ ID NO: 2433431 - RNA, 19 nt, Homo sapiens
  misc_RNA (1)...(19): siRNA sense strand
ggguucacuuugaggaauc

SEQ ID NO: 2433432 - RNA, 19 nt, Homo sapiens
  misc_RNA (1)...(19): siRNA sense strand
agaagagaaccuugaagca

SEQ ID NO: 2433433 - RNA, 19 nt, Homo sapiens
  misc_RNA (1)...(19): siRNA sense strand
aaaccgagggcgaugaaga

SEQ ID NO: 2433434 - RNA, 19 nt, Homo sapiens
  misc_RNA (1)...(19): siRNA sense strand
aauccugaagggaaaguua

SEQ ID NO: 2433435 - RNA, 19 nt, Homo sapiens
  misc_RNA (1)...(19): siRNA sense strand
cagaagaggagcugaagac

SEQ ID NO: 2433436 - RNA, 19 nt, Homo sapiens
  misc_RNA (1)...(19): siRNA sense strand
gauccagguuugaugcuca

SEQ ID NO: 2433437 - RNA, 19 nt, Homo sapiens
  misc_RNA (1)...(19): siRNA sense strand
cugaagggaaaguuaccaa

SEQ ID NO: 2433438 - RNA, 19 nt, Homo sapiens
  misc_RNA (1)...(19): siRNA sense strand
cagagauaucaucagcaua

SEQ ID NO: 2433439 - RNA, 19 nt, Homo sapiens
  misc_RNA (1)...(19): siRNA sense strand
gagaaagaggaaacagaag

SEQ ID NO: 2433440 - RNA, 19 nt, Homo sapiens
  misc_RNA (1)...(19): siRNA sense strand
aagaagcagaggaagaaca

SEQ ID NO: 2433441 - RNA, 19 nt, Homo sapiens
  misc_RNA (1)...(19): siRNA sense strand
gcgagcacucagcagguua

SEQ ID NO: 2433442 - RNA, 19 nt, Homo sapiens
  misc_RNA (1)...(19): siRNA sense strand
aauaaagcucuaucgggaa

SEQ ID NO: 2433443 - RNA, 19 nt, Homo sapiens
  misc_RNA (1)...(19): siRNA sense strand
aaacaaaugaaccagugaa

SEQ ID NO: 2433444 - RNA, 19 nt, Homo sapiens
  misc_RNA (1)...(19): siRNA sense strand
agaugaaggcuaucguuga

SEQ ID NO: 2433445 - RNA, 19 nt, Homo sapiens
  misc_RNA (1)...(19): siRNA sense strand
ggugggagucauauuacaa

SEQ ID NO: 2433446 - RNA, 19 nt, Homo sapiens
  misc_RNA (1)...(19): siRNA sense strand
ccaagagaaaacacgauaa

SEQ ID NO: 2433447 - RNA, 19 nt, Homo sapiens
  misc_RNA (1)...(19): siRNA sense strand
caaaugaaccagugaaaac

SEQ ID NO: 2433448 - RNA, 19 nt, Homo sapiens
  misc_RNA (1)...(19): siRNA sense strand
auaagaaggaugaggagaa

SEQ ID NO: 2433449 - RNA, 19 nt, Homo sapiens
  misc_RNA (1)...(19): siRNA sense strand
cggcaauucaaucgggaaa

SEQ ID NO: 2433450 - RNA, 19 nt, Homo sapiens
  misc_RNA (1)...(19): siRNA sense strand
agaacaagagaguuggaaa

SEQ ID NO: 2433451 - RNA, 19 nt, Homo sapiens
  misc_RNA (1)...(19): siRNA sense strand
ccaaagucgaggugugcaa

SEQ ID NO: 2433452 - RNA, 19 nt, Homo sapiens
  misc_RNA (1)...(19): siRNA sense strand
aggaaaagagaguggagua

SEQ ID NO: 2433453 - RNA, 19 nt, Homo sapiens
  misc_RNA (1)...(19): siRNA sense strand
gcaagauggucaagcagga

SEQ ID NO: 2433454 - RNA, 19 nt, Homo sapiens
  misc_RNA (1)...(19): siRNA sense strand
gugcagagguaauggacgu

SEQ ID NO: 2433455 - RNA, 19 nt, Homo sapiens
  misc_RNA (1)...(19): siRNA sense strand
gauguaaagauuagcguga

SEQ ID NO: 2433456 - RNA, 19 nt, Homo sapiens
  misc_RNA (1)...(19): siRNA sense strand
cagugaagaacucgaguau

SEQ ID NO: 2433457 - RNA, 19 nt, Homo sapiens
  misc_RNA (1)...(19): siRNA sense strand
ggagaagcggugauggaga

SEQ ID NO: 2433458 - RNA, 19 nt, Homo sapiens
  misc_RNA (1)...(19): siRNA sense strand
gguguaagaacaagagagu

SEQ ID NO: 2433459 - RNA, 19 nt, Homo sapiens
  misc_RNA (1)...(19): siRNA sense strand
ggccauacuucuugggaac

SEQ ID NO: 2433460 - RNA, 19 nt, Homo sapiens
  misc_RNA (1)...(19): siRNA sense strand
cugacaauuuggagcuaga

SEQ ID NO: 2433461 - RNA, 19 nt, Homo sapiens
  misc_RNA (1)...(19): siRNA sense strand
ggaucaugacauuccauaa

SEQ ID NO: 2433462 - RNA, 19 nt, Homo sapiens
  misc_RNA (1)...(19): siRNA sense strand
acacaggagcagagcgcga

SEQ ID NO: 2433463 - RNA, 19 nt, Homo sapiens
  misc_RNA (1)...(19): siRNA sense strand
caggagaagcggugaugga

SEQ ID NO: 2433464 - RNA, 19 nt, Homo sapiens
  misc_RNA (1)...(19): siRNA sense strand
agagagacagaguggauga

SEQ ID NO: 2433465 - RNA, 19 nt, Homo sapiens
  misc_RNA (1)...(19): siRNA sense strand
ggaaaagagaguggaguau

SEQ ID NO: 2433466 - RNA, 19 nt, Homo sapiens
  misc_RNA (1)...(19): siRNA sense strand
ucagagagacagaguggau

SEQ ID NO: 2433467 - RNA, 19 nt, Homo sapiens
  misc_RNA (1)...(19): siRNA sense strand
auuuggagcuagaugaaga

SEQ ID NO: 2433468 - RNA, 19 nt, Homo sapiens
  misc_RNA (1)...(19): siRNA sense strand
agaaugagcuggaucagga

SEQ ID NO: 2433469 - RNA, 19 nt, Homo sapiens
  misc_RNA (1)...(19): siRNA sense strand
gugcaaagaugaauccguu

SEQ ID NO: 2433470 - RNA, 19 nt, Homo sapiens
  misc_RNA (1)...(19): siRNA sense strand
aggagaaugagcuggauca

SEQ ID NO: 2433471 - RNA, 19 nt, Homo sapiens
  misc_RNA (1)...(19): siRNA sense strand
aaagaggcgaacagaggaa

SEQ ID NO: 2433472 - RNA, 19 nt, Homo sapiens
  misc_RNA (1)...(19): siRNA sense strand
agaugcacccacaaagaaa

SEQ ID NO: 2433473 - RNA, 19 nt, Homo sapiens
  misc_RNA (1)...(19): siRNA sense strand
gguaauggacguuggcucu

SEQ ID NO: 2433474 - RNA, 19 nt, Homo sapiens
  misc_RNA (1)...(19): siRNA sense strand
guaccuacacagagagucu

SEQ ID NO: 2433475 - RNA, 19 nt, Homo sapiens
  misc_RNA (1)...(19): siRNA sense strand
caagagaguuggaaagcag

SEQ ID NO: 2433476 - RNA, 19 nt, Homo sapiens
  misc_RNA (1)...(19): siRNA sense strand
gcucgaugaguuagaagau

SEQ ID NO: 2433477 - RNA, 19 nt, Homo sapiens
  misc_RNA (1)...(19): siRNA sense strand
agacaagugugcagccgau

SEQ ID NO: 2433478 - RNA, 19 nt, Homo sapiens
  misc_RNA (1)...(19): siRNA sense strand
aggccauacuucuugggaa

SEQ ID NO: 2433479 - RNA, 19 nt, Homo sapiens
  misc_RNA (1)...(19): siRNA sense strand
caacgaggaacgggagcaa

SEQ ID NO: 2433480 - RNA, 19 nt, Homo sapiens
  misc_RNA (1)...(19): siRNA sense strand
gcgggugguguaagaacaa

SEQ ID NO: 2433481 - RNA, 19 nt, Homo sapiens
  misc_RNA (1)...(19): siRNA sense strand
augcagugcucgaugaguu

SEQ ID NO: 2433482 - RNA, 19 nt, Homo sapiens
  misc_RNA (1)...(19): siRNA sense strand
cggcuaaagcaaucguuca

SEQ ID NO: 2433483 - RNA, 19 nt, Homo sapiens
  misc_RNA (1)...(19): siRNA sense strand
gcaaucguucagagagaca

SEQ ID NO: 2433484 - RNA, 19 nt, Homo sapiens
  misc_RNA (1)...(19): siRNA sense strand
gauaagaaggaugaggaga

SEQ ID NO: 2433485 - RNA, 19 nt, Homo sapiens
  misc_RNA (1)...(19): siRNA sense strand
aaugaaggacaacgaggaa

SEQ ID NO: 2433486 - RNA, 19 nt, Homo sapiens
  misc_RNA (1)...(19): siRNA sense strand
acgagugccuuaaaagaaa

SEQ ID NO: 2433487 - RNA, 19 nt, Homo sapiens
  misc_RNA (1)...(19): siRNA sense strand
gagagcagcaagaugguca

SEQ ID NO: 2433488 - RNA, 19 nt, Homo sapiens
  misc_RNA (1)...(19): siRNA sense strand
gcuagaugaagaaggagca

SEQ ID NO: 2433489 - RNA, 19 nt, Homo sapiens
  misc_RNA (1)...(19): siRNA sense strand
aggaugacuuugacaacga

SEQ ID NO: 2433490 - RNA, 19 nt, Homo sapiens
  misc_RNA (1)...(19): siRNA sense strand
gcguuuugacuuugagcaa

SEQ ID NO: 2433491 - RNA, 19 nt, Homo sapiens
  misc_RNA (1)...(19): siRNA sense strand
cagaagagugaauacguca

SEQ ID NO: 2433492 - RNA, 19 nt, Homo sapiens
  misc_RNA (1)...(19): siRNA sense strand
gggugagagugcugauaag

SEQ ID NO: 2433493 - RNA, 19 nt, Homo sapiens
  misc_RNA (1)...(19): siRNA sense strand
ccaguggugcagagguaau

SEQ ID NO: 2433494 - RNA, 19 nt, Homo sapiens
  misc_RNA (1)...(19): siRNA sense strand
cuugggaacgggaagcaua

SEQ ID NO: 2433495 - RNA, 19 nt, Homo sapiens
  misc_RNA (1)...(19): siRNA sense strand
cugauaagaaggaugagga

SEQ ID NO: 2433496 - RNA, 19 nt, Homo sapiens
  misc_RNA (1)...(19): siRNA sense strand
gaguggaugaagaggccuu

SEQ ID NO: 2433497 - RNA, 19 nt, Homo sapiens
  misc_RNA (1)...(19): siRNA sense strand
agauuaaaacagugcucaa

SEQ ID NO: 2433498 - RNA, 19 nt, Homo sapiens
  misc_RNA (1)...(19): siRNA sense strand
agggaggagacucgaaaga

SEQ ID NO: 2433499 - RNA, 19 nt, Homo sapiens
  misc_RNA (1)...(19): siRNA sense strand
ggguucacggcuaaagcaa

SEQ ID NO: 2433500 - RNA, 19 nt, Homo sapiens
  misc_RNA (1)...(19): siRNA sense strand
cgaggugugcaaagaugaa

SEQ ID NO: 2433501 - RNA, 19 nt, Homo sapiens
  misc_RNA (1)...(19): siRNA sense strand
ugaagagaugauugggaaa

SEQ ID NO: 2433502 - RNA, 19 nt, Homo sapiens
  misc_RNA (1)...(19): siRNA sense strand
cugaacagcuauagggacu

SEQ ID NO: 2433503 - RNA, 19 nt, Homo sapiens
  misc_RNA (1)...(19): siRNA sense strand
ugucaaaaguggagagauc

SEQ ID NO: 2433504 - RNA, 19 nt, Homo sapiens
  misc_RNA (1)...(19): siRNA sense strand
augaagagaugauugggaa

SEQ ID NO: 2433505 - RNA, 19 nt, Homo sapiens
  misc_RNA (1)...(19): siRNA sense strand
ggagaggaaaccaggguca

SEQ ID NO: 2433506 - RNA, 19 nt, Homo sapiens
  misc_RNA (1)...(19): siRNA sense strand
agucaauguaggagcucua

SEQ ID NO: 2433507 - RNA, 19 nt, Homo sapiens
  misc_RNA (1)...(19): siRNA sense strand
cagucaaauuggagagcac

SEQ ID NO: 2433508 - RNA, 19 nt, Homo sapiens
  misc_RNA (1)...(19): siRNA sense strand
acaaaguggaaucgugcua

SEQ ID NO: 2433509 - RNA, 19 nt, Homo sapiens
  misc_RNA (1)...(19): siRNA sense strand
caguauugcaccaugaaga

SEQ ID NO: 2433510 - RNA, 19 nt, Homo sapiens
  misc_RNA (1)...(19): siRNA sense strand
guguauggagguugguuau

SEQ ID NO: 2433511 - RNA, 19 nt, Homo sapiens
  misc_RNA (1)...(19): siRNA sense strand
aguguauggagguugguua

SEQ ID NO: 2433512 - RNA, 19 nt, Homo sapiens
  misc_RNA (1)...(19): siRNA sense strand
gucaaauuggagagcacaa

SEQ ID NO: 2433513 - RNA, 19 nt, Homo sapiens
  misc_RNA (1)...(19): siRNA sense strand
cauucgcuguggagaggaa

SEQ ID NO: 2433514 - RNA, 19 nt, Homo sapiens
  misc_RNA (1)...(19): siRNA sense strand
ucaaaaguggagagaucua

SEQ ID NO: 2433515 - RNA, 19 nt, Homo sapiens
  misc_RNA (1)...(19): siRNA sense strand
cuauaagggagaauuccaa

SEQ ID NO: 2433516 - RNA, 19 nt, Homo sapiens
  misc_RNA (1)...(19): siRNA sense strand
augaaagaacugugaggaa

SEQ ID NO: 2433517 - RNA, 19 nt, Homo sapiens
  misc_RNA (1)...(19): siRNA sense strand
uaucaugcuuggaaggcaa

SEQ ID NO: 2433518 - RNA, 19 nt, Homo sapiens
  misc_RNA (1)...(19): siRNA sense strand
gugcaaaagaaguugaauu

SEQ ID NO: 2433519 - RNA, 19 nt, Homo sapiens
  misc_RNA (1)...(19): siRNA sense strand
caauaaaagcuuugcuaga

SEQ ID NO: 2433520 - RNA, 19 nt, Homo sapiens
  misc_RNA (1)...(19): siRNA sense strand
gcuaaaacuguucgagaau

SEQ ID NO: 2433521 - RNA, 19 nt, Homo sapiens
  misc_RNA (1)...(19): siRNA sense strand
ggcaaaugcaauaggccga

SEQ ID NO: 2433522 - RNA, 19 nt, Homo sapiens
  misc_RNA (1)...(19): siRNA sense strand
gaggaaaauuugugcccuu

SEQ ID NO: 2433523 - RNA, 19 nt, Homo sapiens
  misc_RNA (1)...(19): siRNA sense strand
cugccuuaauuguagguuu

SEQ ID NO: 2433524 - RNA, 19 nt, Homo sapiens
  misc_RNA (1)...(19): siRNA sense strand
agaagaugccauagcaagu

SEQ ID NO: 2433525 - RNA, 19 nt, Homo sapiens
  misc_RNA (1)...(19): siRNA sense strand
cggaauucgagguaccaau

SEQ ID NO: 2433526 - RNA, 19 nt, Homo sapiens
  misc_RNA (1)...(19): siRNA sense strand
gcuuggaaggcaaaugcaa

SEQ ID NO: 2433527 - RNA, 19 nt, Homo sapiens
  misc_RNA (1)...(19): siRNA sense strand
acagaagaugccauagcaa

SEQ ID NO: 2433528 - RNA, 19 nt, Homo sapiens
  misc_RNA (1)...(19): siRNA sense strand
ugaugcuagaguaguaaua

SEQ ID NO: 2433529 - RNA, 19 nt, Homo sapiens
  misc_RNA (1)...(19): siRNA sense strand
aguaauaaacagagcccgu

SEQ ID NO: 2433530 - RNA, 19 nt, Homo sapiens
  misc_RNA (1)...(19): siRNA sense strand
gguccuugucccugagaaa

SEQ ID NO: 2433531 - RNA, 19 nt, Homo sapiens
  misc_RNA (1)...(19): siRNA sense strand
agguaauauuugaggaauc

SEQ ID NO: 2433532 - RNA, 19 nt, Homo sapiens
  misc_RNA (1)...(19): siRNA sense strand
uggacuagcuucagggacu

SEQ ID NO: 2433533 - RNA, 19 nt, Homo sapiens
  misc_RNA (1)...(19): siRNA sense strand
guguuaugcacgugaacuu

SEQ ID NO: 2433534 - RNA, 19 nt, Homo sapiens
  misc_RNA (1)...(19): siRNA sense strand
ugguuaaaaugcuggagaa

SEQ ID NO: 2433535 - RNA, 19 nt, Homo sapiens
  misc_RNA (1)...(19): siRNA sense strand
gggauuauguuguuccuga

SEQ ID NO: 2433536 - RNA, 19 nt, Homo sapiens
  misc_RNA (1)...(19): siRNA sense strand
cuguccaaaucaaagcaaa

SEQ ID NO: 2433537 - RNA, 19 nt, Homo sapiens
  misc_RNA (1)...(19): siRNA sense strand
caacagugauugaaggguc

SEQ ID NO: 2433538 - RNA, 19 nt, Homo sapiens
  misc_RNA (1)...(19): siRNA sense strand
ggacacauguuaugcgguu

SEQ ID NO: 2433539 - RNA, 19 nt, Homo sapiens
  misc_RNA (1)...(19): siRNA sense strand
gugaaaaugggacgggaua

SEQ ID NO: 2433540 - RNA, 19 nt, Homo sapiens
  misc_RNA (1)...(19): siRNA sense strand
ccaugaaacagaagcgcca

SEQ ID NO: 2433541 - RNA, 19 nt, Homo sapiens
  misc_RNA (1)...(19): siRNA sense strand
acagaagcgccaaggccaa

SEQ ID NO: 2433542 - RNA, 19 nt, Homo sapiens
  misc_RNA (1)...(19): siRNA sense strand
agggaaagaucgaacugga

SEQ ID NO: 2433543 - RNA, 19 nt, Homo sapiens
  misc_RNA (1)...(19): siRNA sense strand
ggucauuaagggaaagauc

SEQ ID NO: 2433544 - RNA, 19 nt, Homo sapiens
  misc_RNA (1)...(19): siRNA sense strand
agauugggcaagagaagaa

SEQ ID NO: 2433545 - RNA, 19 nt, Homo sapiens
  misc_RNA (1)...(19): siRNA sense strand
acguuaaagcaguucguaa

SEQ ID NO: 2433546 - RNA, 19 nt, Homo sapiens
  misc_RNA (1)...(19): siRNA sense strand
cagcucaaggaguuagaaa

SEQ ID NO: 2433547 - RNA, 19 nt, Homo sapiens
  misc_RNA (1)...(19): siRNA sense strand
caaaugauucugaucgcaa

SEQ ID NO: 2433548 - RNA, 19 nt, Homo sapiens
  misc_RNA (1)...(19): siRNA sense strand
cguuaaagcaguucguaag

SEQ ID NO: 2433549 - RNA, 19 nt, Homo sapiens
  misc_RNA (1)...(19): siRNA sense strand
gcaguucguaagaaggcaa

SEQ ID NO: 2433550 - RNA, 19 nt, Homo sapiens
  misc_RNA (1)...(19): siRNA sense strand
cugaagaaguguuuggaag

SEQ ID NO: 2433551 - RNA, 19 nt, Homo sapiens
  misc_RNA (1)...(19): siRNA sense strand
uguucuaggaauagcacaa

SEQ ID NO: 2433552 - RNA, 19 nt, Homo sapiens
  misc_RNA (1)...(19): siRNA sense strand
uggaagucaacaugaacaa

SEQ ID NO: 2433553 - RNA, 19 nt, Homo sapiens
  misc_RNA (1)...(19): siRNA sense strand
guggacacaaggaggagaa

SEQ ID NO: 2433554 - RNA, 19 nt, Homo sapiens
  misc_RNA (1)...(19): siRNA sense strand
acaaagacgccgugcagca

SEQ ID NO: 2433555 - RNA, 19 nt, Homo sapiens
  misc_RNA (1)...(19): siRNA sense strand
ggaauagcacaaugggcca

SEQ ID NO: 2433556 - RNA, 19 nt, Homo sapiens
  misc_RNA (1)...(19): siRNA sense strand
uggaagaugcuuggagaga

SEQ ID NO: 2433557 - RNA, 19 nt, Homo sapiens
  misc_RNA (1)...(19): siRNA sense strand
gcuacgugauccagggcau

SEQ ID NO: 2433558 - RNA, 19 nt, Homo sapiens
  misc_RNA (1)...(19): siRNA sense strand
gggaagcuccagaagguga

SEQ ID NO: 2433559 - RNA, 19 nt, Homo sapiens
  misc_RNA (1)...(19): siRNA sense strand
uggccaugaucuucggcua

SEQ ID NO: 2433560 - RNA, 19 nt, Homo sapiens
  misc_RNA (1)...(19): siRNA sense strand
gcauagaccuguacggcug

SEQ ID NO: 2433561 - RNA, 19 nt, Homo sapiens
  misc_RNA (1)...(19): siRNA sense strand
uggccaacaucgagagccu

SEQ ID NO: 2433562 - RNA, 19 nt, Homo sapiens
  misc_RNA (1)...(19): siRNA sense strand
cagaugacggacagugaga

SEQ ID NO: 2433563 - RNA, 19 nt, Homo sapiens
  misc_RNA (1)...(19): siRNA sense strand
ccagaagcucacagaucuu

SEQ ID NO: 2433564 - RNA, 19 nt, Homo sapiens
  misc_RNA (1)...(19): siRNA sense strand
acauaaaggugaugcguca

SEQ ID NO: 2433565 - RNA, 19 nt, Homo sapiens
  misc_RNA (1)...(19): siRNA sense strand
acauuaugcucaagaggaa

SEQ ID NO: 2433566 - RNA, 19 nt, Homo sapiens
  misc_RNA (1)...(19): siRNA sense strand
gcaaaggacuggaggggau

SEQ ID NO: 2433567 - RNA, 19 nt, Homo sapiens
  misc_RNA (1)...(19): siRNA sense strand
aagacauggcugagagcaa

SEQ ID NO: 2433568 - RNA, 19 nt, Homo sapiens
  misc_RNA (1)...(19): siRNA sense strand
uggaauuggccuugggcau

SEQ ID NO: 2433569 - RNA, 19 nt, Homo sapiens
  misc_RNA (1)...(19): siRNA sense strand
cagccagcaaacagaaaua

SEQ ID NO: 2433570 - RNA, 19 nt, Homo sapiens
  misc_RNA (1)...(19): siRNA sense strand
uggacaaccaagaagaaau

SEQ ID NO: 2433571 - RNA, 19 nt, Homo sapiens
  misc_RNA (1)...(19): siRNA sense strand
aaacagaaauaccuggaga

SEQ ID NO: 2433572 - RNA, 19 nt, Homo sapiens
  misc_RNA (1)...(19): siRNA sense strand
ugugauucuuggagcaaau

SEQ ID NO: 2433573 - RNA, 19 nt, Homo sapiens
  misc_RNA (1)...(19): siRNA sense strand
ccaagaagaaauaccguca

SEQ ID NO: 2433574 - RNA, 19 nt, Homo sapiens
  misc_RNA (1)...(19): siRNA sense strand
cugcuguggccgagaccaa

SEQ ID NO: 2433575 - RNA, 19 nt, Homo sapiens
  misc_RNA (1)...(19): siRNA sense strand
gcgaugagauuguggacag

SEQ ID NO: 2433576 - RNA, 19 nt, Homo sapiens
  misc_RNA (1)...(19): siRNA sense strand
cugcacaccaucagggaga

SEQ ID NO: 2433577 - RNA, 19 nt, Homo sapiens
  misc_RNA (1)...(19): siRNA sense strand
augagauuguggacagaau

SEQ ID NO: 2433578 - RNA, 19 nt, Homo sapiens
  misc_RNA (1)...(19): siRNA sense strand
gaugcaggcaacagagaga

SEQ ID NO: 2433579 - RNA, 19 nt, Homo sapiens
  misc_RNA (1)...(19): siRNA sense strand
ccguacaggucuugcgauc

SEQ ID NO: 2433580 - RNA, 19 nt, Homo sapiens
  misc_RNA (1)...(19): siRNA sense strand
ugggcaaggacuacagcaa

SEQ ID NO: 2433581 - RNA, 19 nt, Homo sapiens
  misc_RNA (1)...(19): siRNA sense strand
gaaagauauaccagcggau

SEQ ID NO: 2433582 - RNA, 19 nt, Homo sapiens
  misc_RNA (1)...(19): siRNA sense strand
acagaaauaccuggagaau

SEQ ID NO: 2433583 - RNA, 19 nt, Homo sapiens
  misc_RNA (1)...(19): siRNA sense strand
gcaaggugcucaucgcaga

SEQ ID NO: 2433584 - RNA, 19 nt, Homo sapiens
  misc_RNA (1)...(19): siRNA sense strand
acaaagucuugaugagucu

SEQ ID NO: 2433585 - RNA, 19 nt, Homo sapiens
  misc_RNA (1)...(19): siRNA sense strand
cggugugauucuuggagca

SEQ ID NO: 2433586 - RNA, 19 nt, Homo sapiens
  misc_RNA (1)...(19): siRNA sense strand
gggacuggaccuugccuau

SEQ ID NO: 2433587 - RNA, 19 nt, Homo sapiens
  misc_RNA (1)...(19): siRNA sense strand
aacagaaauaccuggagaa

SEQ ID NO: 2433588 - RNA, 19 nt, Homo sapiens
  misc_RNA (1)...(19): siRNA sense strand
acagaauccugaaggccca

SEQ ID NO: 2433589 - RNA, 19 nt, Homo sapiens
  misc_RNA (1)...(19): siRNA sense strand
cugcaaauugguagaggaa

SEQ ID NO: 2433590 - RNA, 19 nt, Homo sapiens
  misc_RNA (1)...(19): siRNA sense strand
gcaggaagcuguuuggaga

SEQ ID NO: 2433591 - RNA, 19 nt, Homo sapiens
  misc_RNA (1)...(19): siRNA sense strand
gcaaauugguagaggaacg

SEQ ID NO: 2433592 - RNA, 19 nt, Homo sapiens
  misc_RNA (1)...(19): siRNA sense strand
guuuggagacucuggaaaa

SEQ ID NO: 2433593 - RNA, 19 nt, Homo sapiens
  misc_RNA (1)...(19): siRNA sense strand
ccugcaaauugguagagga

SEQ ID NO: 2433594 - RNA, 19 nt, Homo sapiens
  misc_RNA (1)...(19): siRNA sense strand
aagcagaagcacaagcaaa

SEQ ID NO: 2433595 - RNA, 19 nt, Homo sapiens
  misc_RNA (1)...(19): siRNA sense strand
gggaauaauuaugggcaga

SEQ ID NO: 2433596 - RNA, 19 nt, Homo sapiens
  misc_RNA (1)...(19): siRNA sense strand
guggacaagaagagagaca

SEQ ID NO: 2433597 - RNA, 19 nt, Homo sapiens
  misc_RNA (1)...(19): siRNA sense strand
ggaagauccuugacagcca

SEQ ID NO: 2433598 - RNA, 19 nt, Homo sapiens
  misc_RNA (1)...(19): siRNA sense strand
uggacgaggcauugaaaga

SEQ ID NO: 2433599 - RNA, 19 nt, Homo sapiens
  misc_RNA (1)...(19): siRNA sense strand
gcaagagaacaaugcaaaa

SEQ ID NO: 2433600 - RNA, 19 nt, Homo sapiens
  misc_RNA (1)...(19): siRNA sense strand
aagagagacaagauugaaa

SEQ ID NO: 2433601 - RNA, 19 nt, Homo sapiens
  misc_RNA (1)...(19): siRNA sense strand
caugcaagcagaagcacaa

SEQ ID NO: 2433602 - RNA, 19 nt, Homo sapiens
  misc_RNA (1)...(19): siRNA sense strand
acacauaacgugaaggaac

SEQ ID NO: 2433603 - RNA, 19 nt, Homo sapiens
  misc_RNA (1)...(19): siRNA sense strand
acagaaagauggaagacgu

SEQ ID NO: 2433604 - RNA, 19 nt, Homo sapiens
  misc_RNA (1)...(19): siRNA sense strand
acaugcugguguacagaaa

SEQ ID NO: 2433605 - RNA, 19 nt, Homo sapiens
  misc_RNA (1)...(19): siRNA sense strand
agacaagauugaaaggaag

SEQ ID NO: 2433606 - RNA, 19 nt, Homo sapiens
  misc_RNA (1)...(19): siRNA sense strand
ccgagccagcagaggguaa

SEQ ID NO: 2433607 - RNA, 19 nt, Homo sapiens
  misc_RNA (1)...(19): siRNA sense strand
cgucauagcacggaugcaa

SEQ ID NO: 2433608 - RNA, 19 nt, Homo sapiens
  misc_RNA (1)...(19): siRNA sense strand
ucgcagacuaugaggcuga

SEQ ID NO: 2433609 - RNA, 19 nt, Homo sapiens
  misc_RNA (1)...(19): siRNA sense strand
acggaacaguauuuagaau

SEQ ID NO: 2433610 - RNA, 19 nt, Homo sapiens
  misc_RNA (1)...(19): siRNA sense strand
cugaaguggacauuaagaa

SEQ ID NO: 2433611 - RNA, 19 nt, Homo sapiens
  misc_RNA (1)...(19): siRNA sense strand
agaagaugaguuacaacaa

SEQ ID NO: 2433612 - RNA, 19 nt, Homo sapiens
  misc_RNA (1)...(19): siRNA sense strand
gaaagauggaagacgucau

SEQ ID NO: 2433613 - RNA, 19 nt, Homo sapiens
  misc_RNA (1)...(19): siRNA sense strand
ucagaauucagcucggaaa

SEQ ID NO: 2433614 - RNA, 19 nt, Homo sapiens
  misc_RNA (1)...(19): siRNA sense strand
cggaagugggaguucauuu

SEQ ID NO: 2433615 - RNA, 19 nt, Homo sapiens
  misc_RNA (1)...(19): siRNA sense strand
cuacuaaguuacacggaac

SEQ ID NO: 2433616 - RNA, 19 nt, Homo sapiens
  misc_RNA (1)...(19): siRNA sense strand
agcagaagcacaagcaaaa

SEQ ID NO: 2433617 - RNA, 19 nt, Homo sapiens
  misc_RNA (1)...(19): siRNA sense strand
cgugaaggaaccuggacga

SEQ ID NO: 2433618 - RNA, 19 nt, Homo sapiens
  misc_RNA (1)...(19): siRNA sense strand
aggagcuucuacaggcaaa

SEQ ID NO: 2433619 - RNA, 19 nt, Homo sapiens
  misc_RNA (1)...(19): siRNA sense strand
ccaucaaauuguugggagc

SEQ ID NO: 2433620 - RNA, 19 nt, Homo sapiens
  misc_RNA (1)...(19): siRNA sense strand
aaguggacaagaagagaga

SEQ ID NO: 2433621 - RNA, 19 nt, Homo sapiens
  misc_RNA (1)...(19): siRNA sense strand
cagaauucagcucggaaaa

SEQ ID NO: 2433622 - RNA, 19 nt, Homo sapiens
  misc_RNA (1)...(19): siRNA sense strand
uuaagaagucauccagaau

SEQ ID NO: 2433623 - RNA, 19 nt, Homo sapiens
  misc_RNA (1)...(19): siRNA sense strand
uguacagaaagauggaaga

SEQ ID NO: 2433624 - RNA, 19 nt, Homo sapiens
  misc_RNA (1)...(19): siRNA sense strand
acgaaagaacaaaggaaga

SEQ ID NO: 2433625 - RNA, 19 nt, Homo sapiens
  misc_RNA (1)...(19): siRNA sense strand
cagaagaagagcagggacu

SEQ ID NO: 2433626 - RNA, 19 nt, Homo sapiens
  misc_RNA (1)...(19): siRNA sense strand
cugcaaggaaugucggauu

SEQ ID NO: 2433627 - RNA, 19 nt, Homo sapiens
  misc_RNA (1)...(19): siRNA sense strand
ucuaauggagauaggagua

SEQ ID NO: 2433628 - RNA, 19 nt, Homo sapiens
  misc_RNA (1)...(19): siRNA sense strand
aauuucaacaagagagcaa

SEQ ID NO: 2433629 - RNA, 19 nt, Homo sapiens
  misc_RNA (1)...(19): siRNA sense strand
cugagaaagaccagcauca

SEQ ID NO: 2433630 - RNA, 19 nt, Homo sapiens
  misc_RNA (1)...(19): siRNA sense strand
gcucaaaaugugaagcaau

SEQ ID NO: 2433631 - RNA, 19 nt, Homo sapiens
  misc_RNA (1)...(19): siRNA sense strand
uuacagaagacgaaagaac

SEQ ID NO: 2433632 - RNA, 19 nt, Homo sapiens
  misc_RNA (1)...(19): siRNA sense strand
uggagauaggaguauguaa

SEQ ID NO: 2433633 - RNA, 19 nt, Homo sapiens
  misc_RNA (1)...(19): siRNA sense strand
ucggaaggaggaaggaaga

SEQ ID NO: 2433634 - RNA, 19 nt, Homo sapiens
  misc_RNA (1)...(19): siRNA sense strand
cggaaggaggaaggaagaa

SEQ ID NO: 2433635 - RNA, 19 nt, Homo sapiens
  misc_RNA (1)...(19): siRNA sense strand
aaggaggaaggaagaagaa

SEQ ID NO: 2433636 - RNA, 19 nt, Homo sapiens
  misc_RNA (1)...(19): siRNA sense strand
gaacaaaggaagagccugg

SEQ ID NO: 2433637 - RNA, 19 nt, Homo sapiens
  misc_RNA (1)...(19): siRNA sense strand
cagcaaucuaaguccagaa

SEQ ID NO: 2433638 - RNA, 19 nt, Homo sapiens
  misc_RNA (1)...(19): siRNA sense strand
cagcaauggcuuuggagga

SEQ ID NO: 2433639 - RNA, 19 nt, Homo sapiens
  misc_RNA (1)...(19): siRNA sense strand
uugugucucuggagggaaa

SEQ ID NO: 2433640 - RNA, 19 nt, Homo sapiens
  misc_RNA (1)...(19): siRNA sense strand
auaagacaguuguggccua

SEQ ID NO: 2433641 - RNA, 19 nt, Homo sapiens
  misc_RNA (1)...(19): siRNA sense strand
gggaaacagcaaagcaaac

SEQ ID NO: 2433642 - RNA, 19 nt, Homo sapiens
  misc_RNA (1)...(19): siRNA sense strand
gggauguggugacaggaca

SEQ ID NO: 2433643 - RNA, 19 nt, Homo sapiens
  misc_RNA (1)...(19): siRNA sense strand
ggggaaacagcaaagcaaa

SEQ ID NO: 2433644 - RNA, 19 nt, Homo sapiens
  misc_RNA (1)...(19): siRNA sense strand
cugugaagucaguguggau

SEQ ID NO: 2433645 - RNA, 19 nt, Homo sapiens
  misc_RNA (1)...(19): siRNA sense strand
aaacuggaaauguggugaa

SEQ ID NO: 2433646 - RNA, 19 nt, Homo sapiens
  misc_RNA (1)...(19): siRNA sense strand
aggacagaguguggaaaga

SEQ ID NO: 2433647 - RNA, 19 nt, Homo sapiens
  misc_RNA (1)...(19): siRNA sense strand
acagcaaagcaaacucaaa

SEQ ID NO: 2433648 - RNA, 19 nt, Homo sapiens
  misc_RNA (1)...(19): siRNA sense strand
augugaagauuguggcaaa

SEQ ID NO: 2433649 - RNA, 19 nt, Homo sapiens
  misc_RNA (1)...(19): siRNA sense strand
aauucauacaggagagaaa

SEQ ID NO: 2433650 - RNA, 19 nt, Homo sapiens
  misc_RNA (1)...(19): siRNA sense strand
auguaaacaauguggcaaa

SEQ ID NO: 2433651 - RNA, 19 nt, Homo sapiens
  misc_RNA (1)...(19): siRNA sense strand
augugaagaaugugguaaa

SEQ ID NO: 2433652 - RNA, 19 nt, Homo sapiens
  misc_RNA (1)...(19): siRNA sense strand
ccugcauaaucauaagaaa

SEQ ID NO: 2433653 - RNA, 19 nt, Homo sapiens
  misc_RNA (1)...(19): siRNA sense strand
augugaagaauguggaaaa

SEQ ID NO: 2433654 - RNA, 19 nt, Homo sapiens
  misc_RNA (1)...(19): siRNA sense strand
augugaagaauguggaaaa

SEQ ID NO: 2433655 - RNA, 19 nt, Homo sapiens
  misc_RNA (1)...(19): siRNA sense strand
augcgaagaauguggcaau

SEQ ID NO: 2433656 - RNA, 19 nt, Homo sapiens
  misc_RNA (1)...(19): siRNA sense strand
ccuuaauguacacaagaga

SEQ ID NO: 2433657 - RNA, 19 nt, Homo sapiens
  misc_RNA (1)...(19): siRNA sense strand
cuuaauguacacaagagaa

SEQ ID NO: 2433658 - RNA, 19 nt, Homo sapiens
  misc_RNA (1)...(19): siRNA sense strand
agaagagagcagagaugaa

SEQ ID NO: 2433659 - RNA, 19 nt, Homo sapiens
  misc_RNA (1)...(19): siRNA sense strand
gauuaaaagggccaauaaa

SEQ ID NO: 2433660 - RNA, 19 nt, Homo sapiens
  misc_RNA (1)...(19): siRNA sense strand
aggaagugucagccagaga

SEQ ID NO: 2433661 - RNA, 19 nt, Homo sapiens
  misc_RNA (1)...(19): siRNA sense strand
gaacagauuaaaagggcca

SEQ ID NO: 2433662 - RNA, 19 nt, Homo sapiens
  misc_RNA (1)...(19): siRNA sense strand
aucaacagaaugaggauaa

SEQ ID NO: 2433663 - RNA, 19 nt, Homo sapiens
  misc_RNA (1)...(19): siRNA sense strand
augaggauaagaugagaaa

SEQ ID NO: 2433664 - RNA, 19 nt, Homo sapiens
  misc_RNA (1)...(19): siRNA sense strand
gcgcguaggaagcgagaag

SEQ ID NO: 2433665 - RNA, 19 nt, Homo sapiens
  misc_RNA (1)...(19): siRNA sense strand
ccuagaaauugaaaagcau

SEQ ID NO: 2433666 - RNA, 19 nt, Homo sapiens
  misc_RNA (1)...(19): siRNA sense strand
cauaguuauuagauggguu

SEQ ID NO: 2433667 - RNA, 19 nt, Homo sapiens
  misc_RNA (1)...(19): siRNA sense strand
caguaaaagaauugaguuc

SEQ ID NO: 2433668 - RNA, 19 nt, Homo sapiens
  misc_RNA (1)...(19): siRNA sense strand
augacaggauccuagaaau

SEQ ID NO: 2433669 - RNA, 19 nt, Homo sapiens
  misc_RNA (1)...(19): siRNA sense strand
ggagagacacucagaggca

SEQ ID NO: 2433670 - RNA, 19 nt, Homo sapiens
  misc_RNA (1)...(19): siRNA sense strand
ggacauucucccagccaca

SEQ ID NO: 2433671 - RNA, 19 nt, Homo sapiens
  misc_RNA (1)...(19): siRNA sense strand
cuccaauacaccugggauu

SEQ ID NO: 2433672 - RNA, 19 nt, Homo sapiens
  misc_RNA (1)...(19): siRNA sense strand
cugacaaggaccuaggaca

SEQ ID NO: 2433673 - RNA, 19 nt, Homo sapiens
  misc_RNA (1)...(19): siRNA sense strand
gcacagaaggggcaggaga

SEQ ID NO: 2433674 - RNA, 19 nt, Homo sapiens
  misc_RNA (1)...(19): siRNA sense strand
agaaggggcaggagagaca

SEQ ID NO: 2433675 - RNA, 19 nt, Homo sapiens
  misc_RNA (1)...(19): siRNA sense strand
aggaagaggacaaggagga

SEQ ID NO: 2433676 - RNA, 19 nt, Homo sapiens
  misc_RNA (1)...(19): siRNA sense strand
uggcagaaaucgaggccca

SEQ ID NO: 2433677 - RNA, 19 nt, Homo sapiens
  misc_RNA (1)...(19): siRNA sense strand
ccgaggaacuagaggcgga

SEQ ID NO: 2433678 - RNA, 19 nt, Homo sapiens
  misc_RNA (1)...(19): siRNA sense strand
ugaagaagcagcaggcaga

SEQ ID NO: 2433679 - RNA, 19 nt, Homo sapiens
  misc_RNA (1)...(19): siRNA sense strand
uggaagaaaagguggacaa

SEQ ID NO: 2433680 - RNA, 19 nt, Homo sapiens
  misc_RNA (1)...(19): siRNA sense strand
gggacgaguuugaggaccu

SEQ ID NO: 2433681 - RNA, 19 nt, Homo sapiens
  misc_RNA (1)...(19): siRNA sense strand
agaaaauugaggaacgaaa

SEQ ID NO: 2433682 - RNA, 19 nt, Homo sapiens
  misc_RNA (1)...(19): siRNA sense strand
ccgagaaagagcaagcgua

SEQ ID NO: 2433683 - RNA, 19 nt, Homo sapiens
  misc_RNA (1)...(19): siRNA sense strand
ccaggaucgaugaggaaga

SEQ ID NO: 2433684 - RNA, 19 nt, Homo sapiens
  misc_RNA (1)...(19): siRNA sense strand
aggaggaggaggaggagca

SEQ ID NO: 2433685 - RNA, 19 nt, Homo sapiens
  misc_RNA (1)...(19): siRNA sense strand
ugaggaacgaaaugaggaa

SEQ ID NO: 2433686 - RNA, 19 nt, Homo sapiens
  misc_RNA (1)...(19): siRNA sense strand
cugaagauugagaaccaaa

SEQ ID NO: 2433687 - RNA, 19 nt, Homo sapiens
  misc_RNA (1)...(19): siRNA sense strand
ggaugaggacccaggagga

SEQ ID NO: 2433688 - RNA, 19 nt, Homo sapiens
  misc_RNA (1)...(19): siRNA sense strand
agcugaagauugagaacca

SEQ ID NO: 2433689 - RNA, 19 nt, Homo sapiens
  misc_RNA (1)...(19): siRNA sense strand
cgagaaagagcaagcguac

SEQ ID NO: 2433690 - RNA, 19 nt, Homo sapiens
  misc_RNA (1)...(19): siRNA sense strand
aggacaaggaggagacgca

SEQ ID NO: 2433691 - RNA, 19 nt, Homo sapiens
  misc_RNA (1)...(19): siRNA sense strand
ccgugcggcuggagaacau

SEQ ID NO: 2433692 - RNA, 19 nt, Homo sapiens
  misc_RNA (1)...(19): siRNA sense strand
cggagagcaaggagaggga

SEQ ID NO: 2433693 - RNA, 19 nt, Homo sapiens
  misc_RNA (1)...(19): siRNA sense strand
agaagaucagggaggccaa

SEQ ID NO: 2433694 - RNA, 19 nt, Homo sapiens
  misc_RNA (1)...(19): siRNA sense strand
acauggagaacgcgugcaa

SEQ ID NO: 2433695 - RNA, 19 nt, Homo sapiens
  misc_RNA (1)...(19): siRNA sense strand
cggcagaggggaaggaagu

SEQ ID NO: 2433696 - RNA, 19 nt, Homo sapiens
  misc_RNA (1)...(19): siRNA sense strand
auggagaacgcgugcaaaa

SEQ ID NO: 2433697 - RNA, 19 nt, Homo sapiens
  misc_RNA (1)...(19): siRNA sense strand
agacgaagcaagcccgaga

SEQ ID NO: 2433698 - RNA, 19 nt, Homo sapiens
  misc_RNA (1)...(19): siRNA sense strand
cggccaaaagccaggaaga

SEQ ID NO: 2433699 - RNA, 19 nt, Homo sapiens
  misc_RNA (1)...(19): siRNA sense strand
ccaaauuugcagugggaau

SEQ ID NO: 2433700 - RNA, 19 nt, Homo sapiens
  misc_RNA (1)...(19): siRNA sense strand
ggugauguauauuggccaa

SEQ ID NO: 2433701 - RNA, 19 nt, Homo sapiens
  misc_RNA (1)...(19): siRNA sense strand
gugucauaguugugccauu

SEQ ID NO: 2433702 - RNA, 19 nt, Homo sapiens
  misc_RNA (1)...(19): siRNA sense strand
ccauaggauucuggaucaa

SEQ ID NO: 2433703 - RNA, 19 nt, Homo sapiens
  misc_RNA (1)...(19): siRNA sense strand
ucugauuacuacagcccaa

SEQ ID NO: 2433704 - RNA, 19 nt, Homo sapiens
  misc_RNA (1)...(19): siRNA sense strand
gaccaaauuugcaguggga

SEQ ID NO: 2433705 - RNA, 19 nt, Homo sapiens
  misc_RNA (1)...(19): siRNA sense strand
ggguuuuggugauguauau

SEQ ID NO: 2433706 - RNA, 19 nt, Homo sapiens
  misc_RNA (1)...(19): siRNA sense strand
uggagauugaagugccuua

SEQ ID NO: 2433707 - RNA, 19 nt, Homo sapiens
  misc_RNA (1)...(19): siRNA sense strand
ccaauaaaguuguugcaga

SEQ ID NO: 2433708 - RNA, 19 nt, Homo sapiens
  misc_RNA (1)...(19): siRNA sense strand
agucaaaggaguuggcuga

SEQ ID NO: 2433709 - RNA, 19 nt, Homo sapiens
  misc_RNA (1)...(19): siRNA sense strand
ggaaaauagauguuaccaa

SEQ ID NO: 2433710 - RNA, 19 nt, Homo sapiens
  misc_RNA (1)...(19): siRNA sense strand
aggugaagaccacaggaua

SEQ ID NO: 2433711 - RNA, 19 nt, Homo sapiens
  misc_RNA (1)...(19): siRNA sense strand
agcuaauggcugaggugaa

SEQ ID NO: 2433712 - RNA, 19 nt, Homo sapiens
  misc_RNA (1)...(19): siRNA sense strand
aggaaugauacacggagaa

SEQ ID NO: 2433713 - RNA, 19 nt, Homo sapiens
  misc_RNA (1)...(19): siRNA sense strand
aauccagcauacagagcua

SEQ ID NO: 2433714 - RNA, 19 nt, Homo sapiens
  misc_RNA (1)...(19): siRNA sense strand
cagacgaagaagucagaca

SEQ ID NO: 2433715 - RNA, 19 nt, Homo sapiens
  misc_RNA (1)...(19): siRNA sense strand
ccauuaauuacguggaagu

SEQ ID NO: 2433716 - RNA, 19 nt, Homo sapiens
  misc_RNA (1)...(19): siRNA sense strand
cuaaacuagacgaugaauu

SEQ ID NO: 2433717 - RNA, 19 nt, Homo sapiens
  misc_RNA (1)...(19): siRNA sense strand
agacgagaauacaagccaa

SEQ ID NO: 2433718 - RNA, 19 nt, Homo sapiens
  misc_RNA (1)...(19): siRNA sense strand
aaggaaugauacacggaga

SEQ ID NO: 2433719 - RNA, 19 nt, Homo sapiens
  misc_RNA (1)...(19): siRNA sense strand
auugauagaaguuggugaa

SEQ ID NO: 2433720 - RNA, 19 nt, Homo sapiens
  misc_RNA (1)...(19): siRNA sense strand
cauuagacuaucacagaca

SEQ ID NO: 2433721 - RNA, 19 nt, Homo sapiens
  misc_RNA (1)...(19): siRNA sense strand
ccagaaaaccaaggagaau

SEQ ID NO: 2433722 - RNA, 19 nt, Homo sapiens
  misc_RNA (1)...(19): siRNA sense strand
ggaaaggaaaauagauguu

SEQ ID NO: 2433723 - RNA, 19 nt, Homo sapiens
  misc_RNA (1)...(19): siRNA sense strand
ucuaugacuuugagccaga

SEQ ID NO: 2433724 - RNA, 19 nt, Homo sapiens
  misc_RNA (1)...(19): siRNA sense strand
gccagaaaaccaaggagaa

SEQ ID NO: 2433725 - RNA, 19 nt, Homo sapiens
  misc_RNA (1)...(19): siRNA sense strand
cugguaugaaggaaugaua

SEQ ID NO: 2433726 - RNA, 19 nt, Homo sapiens
  misc_RNA (1)...(19): siRNA sense strand
ucagacaagcgguagaaaa

SEQ ID NO: 2433727 - RNA, 19 nt, Homo sapiens
  misc_RNA (1)...(19): siRNA sense strand
ugggauaauaugcaaucaa

SEQ ID NO: 2433728 - RNA, 19 nt, Homo sapiens
  misc_RNA (1)...(19): siRNA sense strand
agaagucagacaagcggua

SEQ ID NO: 2433729 - RNA, 19 nt, Homo sapiens
  misc_RNA (1)...(19): siRNA sense strand
gcaucaaagaaguggccaa

SEQ ID NO: 2433730 - RNA, 19 nt, Homo sapiens
  misc_RNA (1)...(19): siRNA sense strand
acauugugacugagagcaa

SEQ ID NO: 2433731 - RNA, 19 nt, Homo sapiens
  misc_RNA (1)...(19): siRNA sense strand
augacaagcuguacgaaaa

SEQ ID NO: 2433732 - RNA, 19 nt, Homo sapiens
  misc_RNA (1)...(19): siRNA sense strand
gcuccaucgcacugggcaa

SEQ ID NO: 2433733 - RNA, 19 nt, Homo sapiens
  misc_RNA (1)...(19): siRNA sense strand
ggcaaagagauucgcaaaa

SEQ ID NO: 2433734 - RNA, 19 nt, Homo sapiens
  misc_RNA (1)...(19): siRNA sense strand
agucggugccagacauuaa

SEQ ID NO: 2433735 - RNA, 19 nt, Homo sapiens
  misc_RNA (1)...(19): siRNA sense strand
ggaaccagcugaaggaccu

SEQ ID NO: 2433736 - RNA, 19 nt, Homo sapiens
  misc_RNA (1)...(19): siRNA sense strand
ugcuggacgugaagaacaa

SEQ ID NO: 2433737 - RNA, 19 nt, Homo sapiens
  misc_RNA (1)...(19): siRNA sense strand
ugaagacccuggagagcca

SEQ ID NO: 2433738 - RNA, 19 nt, Homo sapiens
  misc_RNA (1)...(19): siRNA sense strand
ccuuguugcgagagaggau

SEQ ID NO: 2433739 - RNA, 19 nt, Homo sapiens
  misc_RNA (1)...(19): siRNA sense strand
cugacgaugcccugccaaa

SEQ ID NO: 2433740 - RNA, 19 nt, Homo sapiens
  misc_RNA (1)...(19): siRNA sense strand
ucgagaagcugguccggga

SEQ ID NO: 2433741 - RNA, 19 nt, Homo sapiens
  misc_RNA (1)...(19): siRNA sense strand
ucgcaaaaugugugagguu

SEQ ID NO: 2433742 - RNA, 19 nt, Homo sapiens
  misc_RNA (1)...(19): siRNA sense strand
ccugggugacaauggcaaa

SEQ ID NO: 2433743 - RNA, 19 nt, Homo sapiens
  misc_RNA (1)...(19): siRNA sense strand
ggugacaauggcaaagaga

SEQ ID NO: 2433744 - RNA, 19 nt, Homo sapiens
  misc_RNA (1)...(19): siRNA sense strand
gcaaaaugugugagguugu

SEQ ID NO: 2433745 - RNA, 19 nt, Homo sapiens
  misc_RNA (1)...(19): siRNA sense strand
gaauagugguggagucaaa

SEQ ID NO: 2433746 - RNA, 19 nt, Homo sapiens
  misc_RNA (1)...(19): siRNA sense strand
ggucagaaagagugggaau

SEQ ID NO: 2433747 - RNA, 19 nt, Homo sapiens
  misc_RNA (1)...(19): siRNA sense strand
ccuucaagauggagacaga

SEQ ID NO: 2433748 - RNA, 19 nt, Homo sapiens
  misc_RNA (1)...(19): siRNA sense strand
ggucaaaucaucaaggaca

SEQ ID NO: 2433749 - RNA, 19 nt, Homo sapiens
  misc_RNA (1)...(19): siRNA sense strand
gaugaauggaggugugcaa

SEQ ID NO: 2433750 - RNA, 19 nt, Homo sapiens
  misc_RNA (1)...(19): siRNA sense strand
gcucagaacagaaagguca

SEQ ID NO: 2433751 - RNA, 19 nt, Homo sapiens
  misc_RNA (1)...(19): siRNA sense strand
gauuagaaaggguggagau

SEQ ID NO: 2433752 - RNA, 19 nt, Homo sapiens
  misc_RNA (1)...(19): siRNA sense strand
ggugaaugugcuagaugaa

SEQ ID NO: 2433753 - RNA, 19 nt, Homo sapiens
  misc_RNA (1)...(19): siRNA sense strand
ggaucaugacaguguggua

SEQ ID NO: 2433754 - RNA, 19 nt, Homo sapiens
  misc_RNA (1)...(19): siRNA sense strand
cuaugagaaagcagugaaa

SEQ ID NO: 2433755 - RNA, 19 nt, Homo sapiens
  misc_RNA (1)...(19): siRNA sense strand
guggagaugaagaaaggaa

SEQ ID NO: 2433756 - RNA, 19 nt, Homo sapiens
  misc_RNA (1)...(19): siRNA sense strand
agacagaguucuuaggauc

SEQ ID NO: 2433757 - RNA, 19 nt, Homo sapiens
  misc_RNA (1)...(19): siRNA sense strand
ugauugaagugaauggaga

SEQ ID NO: 2433758 - RNA, 19 nt, Homo sapiens
  misc_RNA (1)...(19): siRNA sense strand
uggagagaauguagaggau

SEQ ID NO: 2433759 - RNA, 19 nt, Homo sapiens
  misc_RNA (1)...(19): siRNA sense strand
ggcuagaggaugaggaugu

SEQ ID NO: 2433760 - RNA, 19 nt, Homo sapiens
  misc_RNA (1)...(19): siRNA sense strand
acuugaaagaguuggguca

SEQ ID NO: 2433761 - RNA, 19 nt, Homo sapiens
  misc_RNA (1)...(19): siRNA sense strand
gaaaacuguccaagguaaa

SEQ ID NO: 2433762 - RNA, 19 nt, Homo sapiens
  misc_RNA (1)...(19): siRNA sense strand
gaugaagaaaggaagcaau

SEQ ID NO: 2433763 - RNA, 19 nt, Homo sapiens
  misc_RNA (1)...(19): siRNA sense strand
uggacaaagaagaacauau

SEQ ID NO: 2433764 - RNA, 19 nt, Homo sapiens
  misc_RNA (1)...(19): siRNA sense strand
cccgaauuguggagaugaa

SEQ ID NO: 2433765 - RNA, 19 nt, Homo sapiens
  misc_RNA (1)...(19): siRNA sense strand
aggcuggcuugaagaacaa

SEQ ID NO: 2433766 - RNA, 19 nt, Homo sapiens
  misc_RNA (1)...(19): siRNA sense strand
gggcaggcucagaacagaa

SEQ ID NO: 2433767 - RNA, 19 nt, Homo sapiens
  misc_RNA (1)...(19): siRNA sense strand
accagauacuacagaggaa

SEQ ID NO: 2433768 - RNA, 19 nt, Homo sapiens
  misc_RNA (1)...(19): siRNA sense strand
augagaaggugguggauag

SEQ ID NO: 2433769 - RNA, 19 nt, Homo sapiens
  misc_RNA (1)...(19): siRNA sense strand
ggucaaagucagaaggagc

SEQ ID NO: 2433770 - RNA, 19 nt, Homo sapiens
  misc_RNA (1)...(19): siRNA sense strand
augaggaagugguugaaaa

SEQ ID NO: 2433771 - RNA, 19 nt, Homo sapiens
  misc_RNA (1)...(19): siRNA sense strand
agaaaggaagcaauggcua

SEQ ID NO: 2433772 - RNA, 19 nt, Homo sapiens
  misc_RNA (1)...(19): siRNA sense strand
agaaaugauuagaaagggu

SEQ ID NO: 2433773 - RNA, 19 nt, Homo sapiens
  misc_RNA (1)...(19): siRNA sense strand
uagacaaagagacggacaa

SEQ ID NO: 2433774 - RNA, 19 nt, Homo sapiens
  misc_RNA (1)...(19): siRNA sense strand
ggaaguagaucauaagccu

SEQ ID NO: 2433775 - RNA, 19 nt, Homo sapiens
  misc_RNA (1)...(19): siRNA sense strand
agaaggacaccgagggcca

SEQ ID NO: 2433776 - RNA, 19 nt, Homo sapiens
  misc_RNA (1)...(19): siRNA sense strand
gucaaaucaucaaggacau

SEQ ID NO: 2433777 - RNA, 19 nt, Homo sapiens
  misc_RNA (1)...(19): siRNA sense strand
cggacaacauguacagacu

SEQ ID NO: 2433778 - RNA, 19 nt, Homo sapiens
  misc_RNA (1)...(19): siRNA sense strand
aagaaggaauaguggugga

SEQ ID NO: 2433779 - RNA, 19 nt, Homo sapiens
  misc_RNA (1)...(19): siRNA sense strand
gagcuggaguucuggcuga

SEQ ID NO: 2433780 - RNA, 19 nt, Homo sapiens
  misc_RNA (1)...(19): siRNA sense strand
gagagaauguagaggaugc

SEQ ID NO: 2433781 - RNA, 19 nt, Homo sapiens
  misc_RNA (1)...(19): siRNA sense strand
caucaaggacauagauucu

SEQ ID NO: 2433782 - RNA, 19 nt, Homo sapiens
  misc_RNA (1)...(19): siRNA sense strand
caggcuggcuaaaggugaa

SEQ ID NO: 2433783 - RNA, 19 nt, Homo sapiens
  misc_RNA (1)...(19): siRNA sense strand
guccaagcaagaagggcaa

SEQ ID NO: 2433784 - RNA, 19 nt, Homo sapiens
  misc_RNA (1)...(19): siRNA sense strand
guaaacuguccaagcaaga

SEQ ID NO: 2433785 - RNA, 19 nt, Homo sapiens
  misc_RNA (1)...(19): siRNA sense strand
cuucacuguuggugguaga

SEQ ID NO: 2433786 - RNA, 19 nt, Homo sapiens
  misc_RNA (1)...(19): siRNA sense strand
gccaugaggaagugguuga

SEQ ID NO: 2433787 - RNA, 19 nt, Homo sapiens
  misc_RNA (1)...(19): siRNA sense strand
uagaaaggguggagaucag

SEQ ID NO: 2433788 - RNA, 19 nt, Homo sapiens
  misc_RNA (1)...(19): siRNA sense strand
ucaucaaagagguacagaa

SEQ ID NO: 2433789 - RNA, 19 nt, Homo sapiens
  misc_RNA (1)...(19): siRNA sense strand
cagaaaggucaaaucauca

SEQ ID NO: 2433790 - RNA, 19 nt, Homo sapiens
  misc_RNA (1)...(19): siRNA sense strand
cuaucaaagucaagaacug

SEQ ID NO: 2433791 - RNA, 19 nt, Homo sapiens
  misc_RNA (1)...(19): siRNA sense strand
uguuggugguagacaaaga

SEQ ID NO: 2433792 - RNA, 19 nt, Homo sapiens
  misc_RNA (1)...(19): siRNA sense strand
ugaaaauggcuauggcuuu

SEQ ID NO: 2433793 - RNA, 19 nt, Homo sapiens
  misc_RNA (1)...(19): siRNA sense strand
aggaauagugguggaguca

SEQ ID NO: 2433794 - RNA, 19 nt, Homo sapiens
  misc_RNA (1)...(19): siRNA sense strand
gucagaaggagcaagguuu

SEQ ID NO: 2433795 - RNA, 19 nt, Homo sapiens
  misc_RNA (1)...(19): siRNA sense strand
gcaagguuugagugauaau

SEQ ID NO: 2433796 - RNA, 19 nt, Homo sapiens
  misc_RNA (1)...(19): siRNA sense strand
cggguggacuugaaagagu

SEQ ID NO: 2433797 - RNA, 19 nt, Homo sapiens
  misc_RNA (1)...(19): siRNA sense strand
augacagugugguagaaau

SEQ ID NO: 2433798 - RNA, 19 nt, Homo sapiens
  misc_RNA (1)...(19): siRNA sense strand
gagaauguaaacuguccaa

SEQ ID NO: 2433799 - RNA, 19 nt, Homo sapiens
  misc_RNA (1)...(19): siRNA sense strand
uguuccugcugguggacaa

SEQ ID NO: 2433800 - RNA, 19 nt, Homo sapiens
  misc_RNA (1)...(19): siRNA sense strand
caaagaaacugacaagcgu

SEQ ID NO: 2433801 - RNA, 19 nt, Homo sapiens
  misc_RNA (1)...(19): siRNA sense strand
cgaauuguggagaugaaga

SEQ ID NO: 2433802 - RNA, 19 nt, Homo sapiens
  misc_RNA (1)...(19): siRNA sense strand
cacuguuggugguagacaa

SEQ ID NO: 2433803 - RNA, 19 nt, Homo sapiens
  misc_RNA (1)...(19): siRNA sense strand
gaaguagaucauaagccua

SEQ ID NO: 2433804 - RNA, 19 nt, Homo sapiens
  misc_RNA (1)...(19): siRNA sense strand
ccuaugagaagguggugga

SEQ ID NO: 2433805 - RNA, 19 nt, Homo sapiens
  misc_RNA (1)...(19): siRNA sense strand
gugggaauucagugacuuu

SEQ ID NO: 2433806 - RNA, 19 nt, Homo sapiens
  misc_RNA (1)...(19): siRNA sense strand
agaugaagaaaggaagcaa

SEQ ID NO: 2433807 - RNA, 19 nt, Homo sapiens
  misc_RNA (1)...(19): siRNA sense strand
cuguggaaacccuggauca

SEQ ID NO: 2433808 - RNA, 19 nt, Homo sapiens
  misc_RNA (1)...(19): siRNA sense strand
cugcaggagcugaaggcaa

SEQ ID NO: 2433809 - RNA, 19 nt, Homo sapiens
  misc_RNA (1)...(19): siRNA sense strand
uggaaaaggacgaguucaa

SEQ ID NO: 2433810 - RNA, 19 nt, Homo sapiens
  misc_RNA (1)...(19): siRNA sense strand
augugagggugcugaacua

SEQ ID NO: 2433811 - RNA, 19 nt, Homo sapiens
  misc_RNA (1)...(19): siRNA sense strand
ccaaaggcuucguggaccu

SEQ ID NO: 2433812 - RNA, 19 nt, Homo sapiens
  misc_RNA (1)...(19): siRNA sense strand
gcacugaacuugaccucca

SEQ ID NO: 2433813 - RNA, 19 nt, Homo sapiens
  misc_RNA (1)...(19): siRNA sense strand
caggaaaggcugcucguga

SEQ ID NO: 2433814 - RNA, 19 nt, Homo sapiens
  misc_RNA (1)...(19): siRNA sense strand
acguggacuucuaugacaa

SEQ ID NO: 2433815 - RNA, 19 nt, Homo sapiens
  misc_RNA (1)...(19): siRNA sense strand
gugaacaacuacugggcac

SEQ ID NO: 2433816 - RNA, 19 nt, Homo sapiens
  misc_RNA (1)...(19): siRNA sense strand
uggacuucuaugacaaaua

SEQ ID NO: 2433817 - RNA, 19 nt, Homo sapiens
  misc_RNA (1)...(19): siRNA sense strand
gggauguguccaaaggcuu

SEQ ID NO: 2433818 - RNA, 19 nt, Homo sapiens
  misc_RNA (1)...(19): siRNA sense strand
gcuucguggaccugaguga

SEQ ID NO: 2433819 - RNA, 19 nt, Homo sapiens
  misc_RNA (1)...(19): siRNA sense strand
gugugaaugcagaccuaaa

SEQ ID NO: 2433820 - RNA, 19 nt, Homo sapiens
  misc_RNA (1)...(19): siRNA sense strand
gggcauuucuguugagcac

SEQ ID NO: 2433821 - RNA, 19 nt, Homo sapiens
  misc_RNA (1)...(19): siRNA sense strand
ccaacaaaccagaaggaag

SEQ ID NO: 2433822 - RNA, 19 nt, Homo sapiens
  misc_RNA (1)...(19): siRNA sense strand
cagucaaagugcagcagga

SEQ ID NO: 2433823 - RNA, 19 nt, Homo sapiens
  misc_RNA (1)...(19): siRNA sense strand
agauagucccuuuggagau

SEQ ID NO: 2433824 - RNA, 19 nt, Homo sapiens
  misc_RNA (1)...(19): siRNA sense strand
ccgugguggccaaguauau

SEQ ID NO: 2433825 - RNA, 19 nt, Homo sapiens
  misc_RNA (1)...(19): siRNA sense strand
ccacgaucuuggagggaaa

SEQ ID NO: 2433826 - RNA, 19 nt, Homo sapiens
  misc_RNA (1)...(19): siRNA sense strand
caacauauugggagggcaa

SEQ ID NO: 2433827 - RNA, 19 nt, Homo sapiens
  misc_RNA (1)...(19): siRNA sense strand
gagaaaaggaaaagauaga

SEQ ID NO: 2433828 - RNA, 19 nt, Homo sapiens
  misc_RNA (1)...(19): siRNA sense strand
gagaauauauguaaagcca

SEQ ID NO: 2433829 - RNA, 19 nt, Homo sapiens
  misc_RNA (1)...(19): siRNA sense strand
aagaguggcugaugggcaa

SEQ ID NO: 2433830 - RNA, 19 nt, Homo sapiens
  misc_RNA (1)...(19): siRNA sense strand
cgguaauagccaaagucaa

SEQ ID NO: 2433831 - RNA, 19 nt, Homo sapiens
  misc_RNA (1)...(19): siRNA sense strand
ccugauaacaagaugauga

SEQ ID NO: 2433832 - RNA, 19 nt, Homo sapiens
  misc_RNA (1)...(19): siRNA sense strand
cuagaagucagcaaggaaa

SEQ ID NO: 2433833 - RNA, 19 nt, Homo sapiens
  misc_RNA (1)...(19): siRNA sense strand
cagaacagcuugauggacu

SEQ ID NO: 2433834 - RNA, 19 nt, Homo sapiens
  misc_RNA (1)...(19): siRNA sense strand
ggggaagucuggaaaacaa

SEQ ID NO: 2433835 - RNA, 19 nt, Homo sapiens
  misc_RNA (1)...(19): siRNA sense strand
augaugagagacugggaaa

SEQ ID NO: 2433836 - RNA, 19 nt, Homo sapiens
  misc_RNA (1)...(19): siRNA sense strand
ggaagaucgggaaggaaca

SEQ ID NO: 2433837 - RNA, 19 nt, Homo sapiens
  misc_RNA (1)...(19): siRNA sense strand
cuggaaauguuuaaguaca

SEQ ID NO: 2433838 - RNA, 19 nt, Homo sapiens
  misc_RNA (1)...(19): siRNA sense strand
cgggaaggaacaagaacuu

SEQ ID NO: 2433839 - RNA, 19 nt, Homo sapiens
  misc_RNA (1)...(19): siRNA sense strand
cugagaagcaacugcagaa

SEQ ID NO: 2433840 - RNA, 19 nt, Homo sapiens
  misc_RNA (1)...(19): siRNA sense strand
uggaaacauugcagaggau

SEQ ID NO: 2433841 - RNA, 19 nt, Homo sapiens
  misc_RNA (1)...(19): siRNA sense strand
ugggaucaguggaaagaau

SEQ ID NO: 2433842 - RNA, 19 nt, Homo sapiens
  misc_RNA (1)...(19): siRNA sense strand
agaaaacuauggcggaaaa

SEQ ID NO: 2433843 - RNA, 19 nt, Homo sapiens
  misc_RNA (1)...(19): siRNA sense strand
uguaagacacacuggaaaa

SEQ ID NO: 2433844 - RNA, 19 nt, Homo sapiens
  misc_RNA (1)...(19): siRNA sense strand
auuucauacgagaggaaua

SEQ ID NO: 2433845 - RNA, 19 nt, Homo sapiens
  misc_RNA (1)...(19): siRNA sense strand
ccuggagaauauauguaaa

SEQ ID NO: 2433846 - RNA, 19 nt, Homo sapiens
  misc_RNA (1)...(19): siRNA sense strand
gaauauauguaaagccauc

SEQ ID NO: 2433847 - RNA, 19 nt, Homo sapiens
  misc_RNA (1)...(19): siRNA sense strand
caaggaugcuauuggcaga

SEQ ID NO: 2433848 - RNA, 19 nt, Homo sapiens
  misc_RNA (1)...(19): siRNA sense strand
gcaaacagugcaaggggaa

SEQ ID NO: 2433849 - RNA, 19 nt, Homo sapiens
  misc_RNA (1)...(19): siRNA sense strand
agccaaagucaauggugaa

SEQ ID NO: 2433850 - RNA, 19 nt, Homo sapiens
  misc_RNA (1)...(19): siRNA sense strand
uagccaaagucaaugguga

SEQ ID NO: 2433851 - RNA, 19 nt, Homo sapiens
  misc_RNA (1)...(19): siRNA sense strand
cuugauggacuuuggagaa

SEQ ID NO: 2433852 - RNA, 19 nt, Homo sapiens
  misc_RNA (1)...(19): siRNA sense strand
agaagagaccugugaucau

SEQ ID NO: 2433853 - RNA, 19 nt, Homo sapiens
  misc_RNA (1)...(19): siRNA sense strand
guggaaagaaugauagcca

SEQ ID NO: 2433854 - RNA, 19 nt, Homo sapiens
  misc_RNA (1)...(19): siRNA sense strand
aagaaggauuuauggcuga

SEQ ID NO: 2433855 - RNA, 19 nt, Homo sapiens
  misc_RNA (1)...(19): siRNA sense strand
cauguuuaccuuugagauu

SEQ ID NO: 2433856 - RNA, 19 nt, Homo sapiens
  misc_RNA (1)...(19): siRNA sense strand
ccauugauaaacugaagaa

SEQ ID NO: 2433857 - RNA, 19 nt, Homo sapiens
  misc_RNA (1)...(19): siRNA sense strand
gggcaauccggaaauggaa

SEQ ID NO: 2433858 - RNA, 19 nt, Homo sapiens
  misc_RNA (1)...(19): siRNA sense strand
acuagaagucagcaaggaa

SEQ ID NO: 2433859 - RNA, 19 nt, Homo sapiens
  misc_RNA (1)...(19): siRNA sense strand
agauuucauacgagaggaa

SEQ ID NO: 2433860 - RNA, 19 nt, Homo sapiens
  misc_RNA (1)...(19): siRNA sense strand
gaaaaugaacccaggagau

SEQ ID NO: 2433861 - RNA, 19 nt, Homo sapiens
  misc_RNA (1)...(19): siRNA sense strand
ugaaggaaagcgaggcuga

SEQ ID NO: 2433862 - RNA, 19 nt, Homo sapiens
  misc_RNA (1)...(19): siRNA sense strand
auguaagacacacuggaaa

SEQ ID NO: 2433863 - RNA, 19 nt, Homo sapiens
  misc_RNA (1)...(19): siRNA sense strand
cgaacaagagacaacaaaa

SEQ ID NO: 2433864 - RNA, 19 nt, Homo sapiens
  misc_RNA (1)...(19): siRNA sense strand
gaaacauugcagaggaucu

SEQ ID NO: 2433865 - RNA, 19 nt, Homo sapiens
  misc_RNA (1)...(19): siRNA sense strand
cuacaauucagcuggacuu

SEQ ID NO: 2433866 - RNA, 19 nt, Homo sapiens
  misc_RNA (1)...(19): siRNA sense strand
ggaucaguggaaagaauga

SEQ ID NO: 2433867 - RNA, 19 nt, Homo sapiens
  misc_RNA (1)...(19): siRNA sense strand
gagaaaguuaacacugcaa

SEQ ID NO: 2433868 - RNA, 19 nt, Homo sapiens
  misc_RNA (1)...(19): siRNA sense strand
uggagaaaaggaaaagaua

SEQ ID NO: 2433869 - RNA, 19 nt, Homo sapiens
  misc_RNA (1)...(19): siRNA sense strand
uggcagcauuacagcgaga

SEQ ID NO: 2433870 - RNA, 19 nt, Homo sapiens
  misc_RNA (1)...(19): siRNA sense strand
gagagauugagauguggaa

SEQ ID NO: 2433871 - RNA, 19 nt, Homo sapiens
  misc_RNA (1)...(19): siRNA sense strand
uagaagucagcaaggaaau

SEQ ID NO: 2433872 - RNA, 19 nt, Homo sapiens
  misc_RNA (1)...(19): siRNA sense strand
caacaguaaacucugggaa

SEQ ID NO: 2433873 - RNA, 19 nt, Homo sapiens
  misc_RNA (1)...(19): siRNA sense strand
agaacagcuugauggacuu

SEQ ID NO: 2433874 - RNA, 19 nt, Homo sapiens
  misc_RNA (1)...(19): siRNA sense strand
uggaaagaaugauagccau

SEQ ID NO: 2433875 - RNA, 19 nt, Homo sapiens
  misc_RNA (1)...(19): siRNA sense strand
gccaagacaaggacaugaa

SEQ ID NO: 2433876 - RNA, 19 nt, Homo sapiens
  misc_RNA (1)...(19): siRNA sense strand
agaagaaaaugaaggaaag

SEQ ID NO: 2433877 - RNA, 19 nt, Homo sapiens
  misc_RNA (1)...(19): siRNA sense strand
aggaagacacggacacuca

SEQ ID NO: 2433878 - RNA, 19 nt, Homo sapiens
  misc_RNA (1)...(19): siRNA sense strand
gagcagauugaagaagaaa

SEQ ID NO: 2433879 - RNA, 19 nt, Homo sapiens
  misc_RNA (1)...(19): siRNA sense strand
gcuugauggacuuuggaga

SEQ ID NO: 2433880 - RNA, 19 nt, Homo sapiens
  misc_RNA (1)...(19): siRNA sense strand
cugucaacaaggccggaaa

SEQ ID NO: 2433881 - RNA, 19 nt, Homo sapiens
  misc_RNA (1)...(19): siRNA sense strand
gagauugagauguggaaug

SEQ ID NO: 2433882 - RNA, 19 nt, Homo sapiens
  misc_RNA (1)...(19): siRNA sense strand
acaacaaaauucauggaga

SEQ ID NO: 2433883 - RNA, 19 nt, Homo sapiens
  misc_RNA (1)...(19): siRNA sense strand
gcacgaaccuaaaggcaga

SEQ ID NO: 2433884 - RNA, 19 nt, Homo sapiens
  misc_RNA (1)...(19): siRNA sense strand
gagaaauacugaaaggacu

SEQ ID NO: 2433885 - RNA, 19 nt, Homo sapiens
  misc_RNA (1)...(19): siRNA sense strand
gaugaaacccagaucgcua

SEQ ID NO: 2433886 - RNA, 19 nt, Homo sapiens
  misc_RNA (1)...(19): siRNA sense strand
ucuaagugguggaggaacu

SEQ ID NO: 2433887 - RNA, 19 nt, Homo sapiens
  misc_RNA (1)...(19): siRNA sense strand
aggaguuauugaagcacaa

SEQ ID NO: 2433888 - RNA, 19 nt, Homo sapiens
  misc_RNA (1)...(19): siRNA sense strand
aagcugaagaugagauaga

SEQ ID NO: 2433889 - RNA, 19 nt, Homo sapiens
  misc_RNA (1)...(19): siRNA sense strand
gagccgagcuuuagaccca

SEQ ID NO: 2433890 - RNA, 19 nt, Homo sapiens
  misc_RNA (1)...(19): siRNA sense strand
ugacaaucggacucagaaa

SEQ ID NO: 2433891 - RNA, 19 nt, Homo sapiens
  misc_RNA (1)...(19): siRNA sense strand
gaauggagcucuucagcca

SEQ ID NO: 2433892 - RNA, 19 nt, Homo sapiens
  misc_RNA (1)...(19): siRNA sense strand
aagaaaauccacagagaca

SEQ ID NO: 2433893 - RNA, 19 nt, Homo sapiens
  misc_RNA (1)...(19): siRNA sense strand
aguugaaggagaagagcca

SEQ ID NO: 2433894 - RNA, 19 nt, Homo sapiens
  misc_RNA (1)...(19): siRNA sense strand
ggggacuggccuugaauaa

SEQ ID NO: 2433895 - RNA, 19 nt, Homo sapiens
  misc_RNA (1)...(19): siRNA sense strand
gagagguguucaaaggcau

SEQ ID NO: 2433896 - RNA, 19 nt, Homo sapiens
  misc_RNA (1)...(19): siRNA sense strand
agauagaggacauucaaca

SEQ ID NO: 2433897 - RNA, 19 nt, Homo sapiens
  misc_RNA (1)...(19): siRNA sense strand
ccuaugacucgaaggcaga

SEQ ID NO: 2433898 - RNA, 19 nt, Homo sapiens
  misc_RNA (1)...(19): siRNA sense strand
ggagagguguucaaaggca

SEQ ID NO: 2433899 - RNA, 19 nt, Homo sapiens
  misc_RNA (1)...(19): siRNA sense strand
uggacagaaauaagaugaa

SEQ ID NO: 2433900 - RNA, 19 nt, Homo sapiens
  misc_RNA (1)...(19): siRNA sense strand
ugaacuugcaagaggggaa

SEQ ID NO: 2433901 - RNA, 19 nt, Homo sapiens
  misc_RNA (1)...(19): siRNA sense strand
ucaucaaacagucggccua

SEQ ID NO: 2433902 - RNA, 19 nt, Homo sapiens
  misc_RNA (1)...(19): siRNA sense strand
ggauggcacccgaggucau

SEQ ID NO: 2433903 - RNA, 19 nt, Homo sapiens
  misc_RNA (1)...(19): siRNA sense strand
gagauaaagugucugggua

SEQ ID NO: 2433904 - RNA, 19 nt, Homo sapiens
  misc_RNA (1)...(19): siRNA sense strand
ccaauguacaagagagaca

SEQ ID NO: 2433905 - RNA, 19 nt, Homo sapiens
  misc_RNA (1)...(19): siRNA sense strand
aagaauaccucuacuacaa

SEQ ID NO: 2433906 - RNA, 19 nt, Homo sapiens
  misc_RNA (1)...(19): siRNA sense strand
guaugcaggcugaagaaua

SEQ ID NO: 2433907 - RNA, 19 nt, Homo sapiens
  misc_RNA (1)...(19): siRNA sense strand
acuuaagguugaugaccaa

SEQ ID NO: 2433908 - RNA, 19 nt, Homo sapiens
  misc_RNA (1)...(19): siRNA sense strand
ggccaauguacaagagaga

SEQ ID NO: 2433909 - RNA, 19 nt, Homo sapiens
  misc_RNA (1)...(19): siRNA sense strand
gugaaagcugcaagggauu

SEQ ID NO: 2433910 - RNA, 19 nt, Homo sapiens
  misc_RNA (1)...(19): siRNA sense strand
ugugaaagcugcaagggau

SEQ ID NO: 2433911 - RNA, 19 nt, Homo sapiens
  misc_RNA (1)...(19): siRNA sense strand
agacagagaaauuuggaca

SEQ ID NO: 2433912 - RNA, 19 nt, Homo sapiens
  misc_RNA (1)...(19): siRNA sense strand
cuguaagggccgaccgaau

SEQ ID NO: 2433913 - RNA, 19 nt, Homo sapiens
  misc_RNA (1)...(19): siRNA sense strand
gugcaaaauggcagaucaa

SEQ ID NO: 2433914 - RNA, 19 nt, Homo sapiens
  misc_RNA (1)...(19): siRNA sense strand
uugacaaaacacagagaaa

SEQ ID NO: 2433915 - RNA, 19 nt, Homo sapiens
  misc_RNA (1)...(19): siRNA sense strand
gcacaggaguuaguggcaa

SEQ ID NO: 2433916 - RNA, 19 nt, Homo sapiens
  misc_RNA (1)...(19): siRNA sense strand
cuuccugguuacugggcaa

SEQ ID NO: 2433917 - RNA, 19 nt, Homo sapiens
  misc_RNA (1)...(19): siRNA sense strand
agauaaagugucuggguac

SEQ ID NO: 2433918 - RNA, 19 nt, Homo sapiens
  misc_RNA (1)...(19): siRNA sense strand
augaugaagaucuggaaga

SEQ ID NO: 2433919 - RNA, 19 nt, Homo sapiens
  misc_RNA (1)...(19): siRNA sense strand
cgcagcagacagagaaauu

SEQ ID NO: 2433920 - RNA, 19 nt, Homo sapiens
  misc_RNA (1)...(19): siRNA sense strand
augcguggaggaaggaaua

SEQ ID NO: 2433921 - RNA, 19 nt, Homo sapiens
  misc_RNA (1)...(19): siRNA sense strand
ucccguguguggagauaaa

SEQ ID NO: 2433922 - RNA, 19 nt, Homo sapiens
  misc_RNA (1)...(19): siRNA sense strand
cauccgagccaauggacuu

SEQ ID NO: 2433923 - RNA, 19 nt, Homo sapiens
  misc_RNA (1)...(19): siRNA sense strand
agccaauggacuuaagcua

SEQ ID NO: 2433924 - RNA, 19 nt, Homo sapiens
  misc_RNA (1)...(19): siRNA sense strand
gacuuaagcuagaagccau

SEQ ID NO: 2433925 - RNA, 19 nt, Homo sapiens
  misc_RNA (1)...(19): siRNA sense strand
uugaaauguugcaugccaa

SEQ ID NO: 2433926 - RNA, 19 nt, Homo sapiens
  misc_RNA (1)...(19): siRNA sense strand
cgaccgaaugcguggagga

SEQ ID NO: 2433927 - RNA, 19 nt, Homo sapiens
  misc_RNA (1)...(19): siRNA sense strand
caguaugcaggcugaagaa

SEQ ID NO: 2433928 - RNA, 19 nt, Homo sapiens
  misc_RNA (1)...(19): siRNA sense strand
gagucaugcacaggaguua

SEQ ID NO: 2433929 - RNA, 19 nt, Homo sapiens
  misc_RNA (1)...(19): siRNA sense strand
cugaagaauaccucuacua

SEQ ID NO: 2433930 - RNA, 19 nt, Homo sapiens
  misc_RNA (1)...(19): siRNA sense strand
ccgaaugcguggaggaagg

SEQ ID NO: 2433931 - RNA, 19 nt, Homo sapiens
  misc_RNA (1)...(19): siRNA sense strand
cugcaagguuaccaaacau

SEQ ID NO: 2433932 - RNA, 19 nt, Homo sapiens
  misc_RNA (1)...(19): siRNA sense strand
guguggagauaaagugucu

SEQ ID NO: 2433933 - RNA, 19 nt, Homo sapiens
  misc_RNA (1)...(19): siRNA sense strand
gcugagcaccuuugggcuu

SEQ ID NO: 2433934 - RNA, 19 nt, Homo sapiens
  misc_RNA (1)...(19): siRNA sense strand
cuucagaacugcuggagug

SEQ ID NO: 2433935 - RNA, 19 nt, Homo sapiens
  misc_RNA (1)...(19): siRNA sense strand
gagauaaagugucugggua

SEQ ID NO: 2433936 - RNA, 19 nt, Homo sapiens
  misc_RNA (1)...(19): siRNA sense strand
ccaauguacaagagagaca

SEQ ID NO: 2433937 - RNA, 19 nt, Homo sapiens
  misc_RNA (1)...(19): siRNA sense strand
aagaauaccucuacuacaa

SEQ ID NO: 2433938 - RNA, 19 nt, Homo sapiens
  misc_RNA (1)...(19): siRNA sense strand
guaugcaggcugaagaaua

SEQ ID NO: 2433939 - RNA, 19 nt, Homo sapiens
  misc_RNA (1)...(19): siRNA sense strand
acuuaagguugaugaccaa

SEQ ID NO: 2433940 - RNA, 19 nt, Homo sapiens
  misc_RNA (1)...(19): siRNA sense strand
ggccaauguacaagagaga

SEQ ID NO: 2433941 - RNA, 19 nt, Homo sapiens
  misc_RNA (1)...(19): siRNA sense strand
gugaaagcugcaagggauu

SEQ ID NO: 2433942 - RNA, 19 nt, Homo sapiens
  misc_RNA (1)...(19): siRNA sense strand
ugugaaagcugcaagggau

SEQ ID NO: 2433943 - RNA, 19 nt, Homo sapiens
  misc_RNA (1)...(19): siRNA sense strand
agacagagaaauuuggaca

SEQ ID NO: 2433944 - RNA, 19 nt, Homo sapiens
  misc_RNA (1)...(19): siRNA sense strand
cuguaagggccgaccgaau

SEQ ID NO: 2433945 - RNA, 19 nt, Homo sapiens
  misc_RNA (1)...(19): siRNA sense strand
gugcaaaauggcagaucaa

SEQ ID NO: 2433946 - RNA, 19 nt, Homo sapiens
  misc_RNA (1)...(19): siRNA sense strand
uugacaaaacacagagaaa

SEQ ID NO: 2433947 - RNA, 19 nt, Homo sapiens
  misc_RNA (1)...(19): siRNA sense strand
gcacaggaguuaguggcaa

SEQ ID NO: 2433948 - RNA, 19 nt, Homo sapiens
  misc_RNA (1)...(19): siRNA sense strand
cuuccugguuacugggcaa

SEQ ID NO: 2433949 - RNA, 19 nt, Homo sapiens
  misc_RNA (1)...(19): siRNA sense strand
agauaaagugucuggguac

SEQ ID NO: 2433950 - RNA, 19 nt, Homo sapiens
  misc_RNA (1)...(19): siRNA sense strand
augaugaagaucuggaaga

SEQ ID NO: 2433951 - RNA, 19 nt, Homo sapiens
  misc_RNA (1)...(19): siRNA sense strand
cgcagcagacagagaaauu

SEQ ID NO: 2433952 - RNA, 19 nt, Homo sapiens
  misc_RNA (1)...(19): siRNA sense strand
augcguggaggaaggaaua

SEQ ID NO: 2433953 - RNA, 19 nt, Homo sapiens
  misc_RNA (1)...(19): siRNA sense strand
ucccguguguggagauaaa

SEQ ID NO: 2433954 - RNA, 19 nt, Homo sapiens
  misc_RNA (1)...(19): siRNA sense strand
cauccgagccaauggacuu

SEQ ID NO: 2433955 - RNA, 19 nt, Homo sapiens
  misc_RNA (1)...(19): siRNA sense strand
agccaauggacuuaagcua

SEQ ID NO: 2433956 - RNA, 19 nt, Homo sapiens
  misc_RNA (1)...(19): siRNA sense strand
gacuuaagcuagaagccau

SEQ ID NO: 2433957 - RNA, 19 nt, Homo sapiens
  misc_RNA (1)...(19): siRNA sense strand
uugaaauguugcaugccaa

SEQ ID NO: 2433958 - RNA, 19 nt, Homo sapiens
  misc_RNA (1)...(19): siRNA sense strand
cgaccgaaugcguggagga

SEQ ID NO: 2433959 - RNA, 19 nt, Homo sapiens
  misc_RNA (1)...(19): siRNA sense strand
caguaugcaggcugaagaa

SEQ ID NO: 2433960 - RNA, 19 nt, Homo sapiens
  misc_RNA (1)...(19): siRNA sense strand
gagucaugcacaggaguua

SEQ ID NO: 2433961 - RNA, 19 nt, Homo sapiens
  misc_RNA (1)...(19): siRNA sense strand
cugaagaauaccucuacua

SEQ ID NO: 2433962 - RNA, 19 nt, Homo sapiens
  misc_RNA (1)...(19): siRNA sense strand
ccgaaugcguggaggaagg

SEQ ID NO: 2433963 - RNA, 19 nt, Homo sapiens
  misc_RNA (1)...(19): siRNA sense strand
cugcaagguuaccaaacau

SEQ ID NO: 2433964 - RNA, 19 nt, Homo sapiens
  misc_RNA (1)...(19): siRNA sense strand
guguggagauaaagugucu

SEQ ID NO: 2433965 - RNA, 19 nt, Homo sapiens
  misc_RNA (1)...(19): siRNA sense strand
gcugagcaccuuugggcuu

SEQ ID NO: 2433966 - RNA, 19 nt, Homo sapiens
  misc_RNA (1)...(19): siRNA sense strand
cuucagaacugcuggagug

SEQ ID NO: 2433967 - RNA, 19 nt, Homo sapiens
  misc_RNA (1)...(19): siRNA sense strand
gcuugauguccaugagcaa

SEQ ID NO: 2433968 - RNA, 19 nt, Homo sapiens
  misc_RNA (1)...(19): siRNA sense strand
ucuacaauucagaggaaga

SEQ ID NO: 2433969 - RNA, 19 nt, Homo sapiens
  misc_RNA (1)...(19): siRNA sense strand
acagaggacauuaggacuu

SEQ ID NO: 2433970 - RNA, 19 nt, Homo sapiens
  misc_RNA (1)...(19): siRNA sense strand
auaccucuuugaagggaaa

SEQ ID NO: 2433971 - RNA, 19 nt, Homo sapiens
  misc_RNA (1)...(19): siRNA sense strand
gcuacuuccaccuggcuaa

SEQ ID NO: 2433972 - RNA, 19 nt, Homo sapiens
  misc_RNA (1)...(19): siRNA sense strand
caguugugcauuuggaaca

SEQ ID NO: 2433973 - RNA, 19 nt, Homo sapiens
  misc_RNA (1)...(19): siRNA sense strand
agaaucuacaucugacaaa

SEQ ID NO: 2433974 - RNA, 19 nt, Homo sapiens
  misc_RNA (1)...(19): siRNA sense strand
cauuuggaacagaggacau

SEQ ID NO: 2433975 - RNA, 19 nt, Homo sapiens
  misc_RNA (1)...(19): siRNA sense strand
cccaagaagcagaagccau

SEQ ID NO: 2433976 - RNA, 19 nt, Homo sapiens
  misc_RNA (1)...(19): siRNA sense strand
cagaaggcugacugggaca

SEQ ID NO: 2433977 - RNA, 19 nt, Homo sapiens
  misc_RNA (1)...(19): siRNA sense strand
aggcacaggaauauggcau

SEQ ID NO: 2433978 - RNA, 19 nt, Homo sapiens
  misc_RNA (1)...(19): siRNA sense strand
gugugaagcuguauggccu

SEQ ID NO: 2433979 - RNA, 19 nt, Homo sapiens
  misc_RNA (1)...(19): siRNA sense strand
aguucauacuggagagaaa

SEQ ID NO: 2433980 - RNA, 19 nt, Homo sapiens
  misc_RNA (1)...(19): siRNA sense strand
aguucauacuggagagaaa

SEQ ID NO: 2433981 - RNA, 19 nt, Homo sapiens
  misc_RNA (1)...(19): siRNA sense strand
gaauauaaaucuuggggaa

SEQ ID NO: 2433982 - RNA, 19 nt, Homo sapiens
  misc_RNA (1)...(19): siRNA sense strand
auguaaugucugugggaaa

SEQ ID NO: 2433983 - RNA, 19 nt, Homo sapiens
  misc_RNA (1)...(19): siRNA sense strand
caucaaucccagaagauaa

SEQ ID NO: 2433984 - RNA, 19 nt, Homo sapiens
  misc_RNA (1)...(19): siRNA sense strand
ccuuauaagugucaggaau

SEQ ID NO: 2433985 - RNA, 19 nt, Homo sapiens
  misc_RNA (1)...(19): siRNA sense strand
aguucauacaggagagaaa

SEQ ID NO: 2433986 - RNA, 19 nt, Homo sapiens
  misc_RNA (1)...(19): siRNA sense strand
aauacauacuggagagaga

SEQ ID NO: 2433987 - RNA, 19 nt, Homo sapiens
  misc_RNA (1)...(19): siRNA sense strand
guuucaaggaagagauaau

SEQ ID NO: 2433988 - RNA, 19 nt, Homo sapiens
  misc_RNA (1)...(19): siRNA sense strand
ccagaagauaauagaaaca

SEQ ID NO: 2433989 - RNA, 19 nt, Homo sapiens
  misc_RNA (1)...(19): siRNA sense strand
augugaugcuagagaacua

SEQ ID NO: 2433990 - RNA, 19 nt, Homo sapiens
  misc_RNA (1)...(19): siRNA sense strand
ccaaagaggagaaaguaca

SEQ ID NO: 2433991 - RNA, 19 nt, Homo sapiens
  misc_RNA (1)...(19): siRNA sense strand
gggaaggccuuuagccaga

SEQ ID NO: 2433992 - RNA, 19 nt, Homo sapiens
  misc_RNA (1)...(19): siRNA sense strand
aggagaaaguacauaaaca

SEQ ID NO: 2433993 - RNA, 19 nt, Homo sapiens
  misc_RNA (1)...(19): siRNA sense strand
auguaaggaauguaggaaa

SEQ ID NO: 2433994 - RNA, 19 nt, Homo sapiens
  misc_RNA (1)...(19): siRNA sense strand
aauucauacuggagagaga

SEQ ID NO: 2433995 - RNA, 19 nt, Homo sapiens
  misc_RNA (1)...(19): siRNA sense strand
ccuggauggugaagagaga

SEQ ID NO: 2433996 - RNA, 19 nt, Homo sapiens
  misc_RNA (1)...(19): siRNA sense strand
ugaagagagagcugacaaa

SEQ ID NO: 2433997 - RNA, 19 nt, Homo sapiens
  misc_RNA (1)...(19): siRNA sense strand
auguaucgaaugugggaaa

SEQ ID NO: 2433998 - RNA, 19 nt, Homo sapiens
  misc_RNA (1)...(19): siRNA sense strand
aguggaaaugugagggcua

SEQ ID NO: 2433999 - RNA, 19 nt, Homo sapiens
  misc_RNA (1)...(19): siRNA sense strand
auguauagaguguggaaaa

SEQ ID NO: 2434000 - RNA, 19 nt, Homo sapiens
  misc_RNA (1)...(19): siRNA sense strand
gcauuuagcaacagaucau

SEQ ID NO: 2434001 - RNA, 19 nt, Homo sapiens
  misc_RNA (1)...(19): siRNA sense strand
gcgaguucauacuggagaa

SEQ ID NO: 2434002 - RNA, 19 nt, Homo sapiens
  misc_RNA (1)...(19): siRNA sense strand
gugucaggaauguaggaaa

SEQ ID NO: 2434003 - RNA, 19 nt, Homo sapiens
  misc_RNA (1)...(19): siRNA sense strand
cuauuaagcccaagagugu

SEQ ID NO: 2434004 - RNA, 19 nt, Homo sapiens
  misc_RNA (1)...(19): siRNA sense strand
ucccagaagauaauagaaa

SEQ ID NO: 2434005 - RNA, 19 nt, Homo sapiens
  misc_RNA (1)...(19): siRNA sense strand
aguucacacgggagagaaa

SEQ ID NO: 2434006 - RNA, 19 nt, Homo sapiens
  misc_RNA (1)...(19): siRNA sense strand
cccuaugaauguaaggaau

SEQ ID NO: 2434007 - RNA, 19 nt, Homo sapiens
  misc_RNA (1)...(19): siRNA sense strand
cccuaugaauguaaggaau

SEQ ID NO: 2434008 - RNA, 19 nt, Homo sapiens
  misc_RNA (1)...(19): siRNA sense strand
cccuaugaauguaaggaau

SEQ ID NO: 2434009 - RNA, 19 nt, Homo sapiens
  misc_RNA (1)...(19): siRNA sense strand
uuccaaaccaagugugaua

SEQ ID NO: 2434010 - RNA, 19 nt, Homo sapiens
  misc_RNA (1)...(19): siRNA sense strand
ggaaaagccuucagccaga

SEQ ID NO: 2434011 - RNA, 19 nt, Homo sapiens
  misc_RNA (1)...(19): siRNA sense strand
guuugagagaagaguggaa

SEQ ID NO: 2434012 - RNA, 19 nt, Homo sapiens
  misc_RNA (1)...(19): siRNA sense strand
gcucaacaccagagaguuc

SEQ ID NO: 2434013 - RNA, 19 nt, Homo sapiens
  misc_RNA (1)...(19): siRNA sense strand
gaauguaaggaaugcaaaa

SEQ ID NO: 2434014 - RNA, 19 nt, Homo sapiens
  misc_RNA (1)...(19): siRNA sense strand
gugaagagagagcugacaa

SEQ ID NO: 2434015 - RNA, 19 nt, Homo sapiens
  misc_RNA (1)...(19): siRNA sense strand
gugggaaagcauuuagcaa

SEQ ID NO: 2434016 - RNA, 19 nt, Homo sapiens
  misc_RNA (1)...(19): siRNA sense strand
aggaaagcauucagccaga

SEQ ID NO: 2434017 - RNA, 19 nt, Homo sapiens
  misc_RNA (1)...(19): siRNA sense strand
aagaggagaaaguacauaa

SEQ ID NO: 2434018 - RNA, 19 nt, Homo sapiens
  misc_RNA (1)...(19): siRNA sense strand
uguaaggaauguaggaaag

SEQ ID NO: 2434019 - RNA, 19 nt, Homo sapiens
  misc_RNA (1)...(19): siRNA sense strand
augagagagaacaagaaua

SEQ ID NO: 2434020 - RNA, 19 nt, Homo sapiens
  misc_RNA (1)...(19): siRNA sense strand
ugaaaggcaaccagguaau

SEQ ID NO: 2434021 - RNA, 19 nt, Homo sapiens
  misc_RNA (1)...(19): siRNA sense strand
gcucaacaucagagaguuc

SEQ ID NO: 2434022 - RNA, 19 nt, Homo sapiens
  misc_RNA (1)...(19): siRNA sense strand
caggaauguaggaaagcau

SEQ ID NO: 2434023 - RNA, 19 nt, Homo sapiens
  misc_RNA (1)...(19): siRNA sense strand
uugaaaggcaaccagguaa

SEQ ID NO: 2434024 - RNA, 19 nt, Homo sapiens
  misc_RNA (1)...(19): siRNA sense strand
guguuucaaggaagagaua

SEQ ID NO: 2434025 - RNA, 19 nt, Homo sapiens
  misc_RNA (1)...(19): siRNA sense strand
guaggaaagccuucaguca

SEQ ID NO: 2434026 - RNA, 19 nt, Homo sapiens
  misc_RNA (1)...(19): siRNA sense strand
gcucaacaucagagaauuc

SEQ ID NO: 2434027 - RNA, 19 nt, Homo sapiens
  misc_RNA (1)...(19): siRNA sense strand
ugucaggaauguaggaaag

SEQ ID NO: 2434028 - RNA, 19 nt, Homo sapiens
  misc_RNA (1)...(19): siRNA sense strand
gaauguacuguuuguggaa

SEQ ID NO: 2434029 - RNA, 19 nt, Homo sapiens
  misc_RNA (1)...(19): siRNA sense strand
cuugaauacuccaguuuga

SEQ ID NO: 2434030 - RNA, 19 nt, Homo sapiens
  misc_RNA (1)...(19): siRNA sense strand
aggcguguuucaaggaaga

SEQ ID NO: 2434031 - RNA, 19 nt, Homo sapiens
  misc_RNA (1)...(19): siRNA sense strand
gggaaagcauuuagccuuc

SEQ ID NO: 2434032 - RNA, 19 nt, Homo sapiens
  misc_RNA (1)...(19): siRNA sense strand
gagaauacauacuggagag

SEQ ID NO: 2434033 - RNA, 19 nt, Homo sapiens
  misc_RNA (1)...(19): siRNA sense strand
agaaacacuuacaagcuau

SEQ ID NO: 2434034 - RNA, 19 nt, Homo sapiens
  misc_RNA (1)...(19): siRNA sense strand
agagauaaucacucaugaa

SEQ ID NO: 2434035 - RNA, 19 nt, Homo sapiens
  misc_RNA (1)...(19): siRNA sense strand
agaggagaaaguacauaaa

SEQ ID NO: 2434036 - RNA, 19 nt, Homo sapiens
  misc_RNA (1)...(19): siRNA sense strand
cauaaacaugacacacaaa

SEQ ID NO: 2434037 - RNA, 19 nt, Homo sapiens
  misc_RNA (1)...(19): siRNA sense strand
gcaccaagauccugggcau

SEQ ID NO: 2434038 - RNA, 19 nt, Homo sapiens
  misc_RNA (1)...(19): siRNA sense strand
gagaccaagcagcgggaaa

SEQ ID NO: 2434039 - RNA, 19 nt, Homo sapiens
  misc_RNA (1)...(19): siRNA sense strand
uggagaugguggugaagau

SEQ ID NO: 2434040 - RNA, 19 nt, Homo sapiens
  misc_RNA (1)...(19): siRNA sense strand
ccggagacgcugaaggaga

SEQ ID NO: 2434041 - RNA, 19 nt, Homo sapiens
  misc_RNA (1)...(19): siRNA sense strand
gagaaggccaggagagcca

SEQ ID NO: 2434042 - RNA, 19 nt, Homo sapiens
  misc_RNA (1)...(19): siRNA sense strand
ggaagaagugcuuggccuu

SEQ ID NO: 2434043 - RNA, 19 nt, Homo sapiens
  misc_RNA (1)...(19): siRNA sense strand
acgccgaugacgagggcaa

SEQ ID NO: 2434044 - RNA, 19 nt, Homo sapiens
  misc_RNA (1)...(19): siRNA sense strand
uggugaagaugguggccuu

SEQ ID NO: 2434045 - RNA, 19 nt, Homo sapiens
  misc_RNA (1)...(19): siRNA sense strand
ccauucugguggagggcuu

SEQ ID NO: 2434046 - RNA, 19 nt, Homo sapiens
  misc_RNA (1)...(19): siRNA sense strand
ggcugaagcugguggugga

SEQ ID NO: 2434047 - RNA, 19 nt, Homo sapiens
  misc_RNA (1)...(19): siRNA sense strand
cugccagaccggaagaauu

SEQ ID NO: 2434048 - RNA, 19 nt, Homo sapiens
  misc_RNA (1)...(19): siRNA sense strand
cgcuauuaccagacagaga

SEQ ID NO: 2434049 - RNA, 19 nt, Homo sapiens
  misc_RNA (1)...(19): siRNA sense strand
gcuccuucuucaugaucaa

SEQ ID NO: 2434050 - RNA, 19 nt, Homo sapiens
  misc_RNA (1)...(19): siRNA sense strand
gggaugacgccgaugacga

SEQ ID NO: 2434051 - RNA, 19 nt, Homo sapiens
  misc_RNA (1)...(19): siRNA sense strand
aggagaaggcacuaguaga

SEQ ID NO: 2434052 - RNA, 19 nt, Homo sapiens
  misc_RNA (1)...(19): siRNA sense strand
ccgcagucuuucuggcuga

SEQ ID NO: 2434053 - RNA, 19 nt, Homo sapiens
  misc_RNA (1)...(19): siRNA sense strand
gcaucagcauguuggucau

SEQ ID NO: 2434054 - RNA, 19 nt, Homo sapiens
  misc_RNA (1)...(19): siRNA sense strand
gcuuccuaccugagaauuu

SEQ ID NO: 2434055 - RNA, 19 nt, Homo sapiens
  misc_RNA (1)...(19): siRNA sense strand
gggacaggaagaagugcuu

SEQ ID NO: 2434056 - RNA, 19 nt, Homo sapiens
  misc_RNA (1)...(19): siRNA sense strand
cugaaaugacagugaaggu

SEQ ID NO: 2434057 - RNA, 19 nt, Homo sapiens
  misc_RNA (1)...(19): siRNA sense strand
ugugggagaucgugggcca

SEQ ID NO: 2434058 - RNA, 19 nt, Homo sapiens
  misc_RNA (1)...(19): siRNA sense strand
agaugguggccuugggcau

SEQ ID NO: 2434059 - RNA, 19 nt, Homo sapiens
  misc_RNA (1)...(19): siRNA sense strand
aggaagaagugcuuggccu

SEQ ID NO: 2434060 - RNA, 19 nt, Homo sapiens
  misc_RNA (1)...(19): siRNA sense strand
caaccugagcaaaggggaa

SEQ ID NO: 2434061 - RNA, 19 nt, Homo sapiens
  misc_RNA (1)...(19): siRNA sense strand
gcacaagcugcuggagaca

SEQ ID NO: 2434062 - RNA, 19 nt, Homo sapiens
  misc_RNA (1)...(19): siRNA sense strand
aggaugaagaggagagcuc

SEQ ID NO: 2434063 - RNA, 19 nt, Homo sapiens
  misc_RNA (1)...(19): siRNA sense strand
gcaccaagauccugggcau

SEQ ID NO: 2434064 - RNA, 19 nt, Homo sapiens
  misc_RNA (1)...(19): siRNA sense strand
gagaccaagcagcgggaaa

SEQ ID NO: 2434065 - RNA, 19 nt, Homo sapiens
  misc_RNA (1)...(19): siRNA sense strand
uggagaugguggugaagau

SEQ ID NO: 2434066 - RNA, 19 nt, Homo sapiens
  misc_RNA (1)...(19): siRNA sense strand
ccggagacgcugaaggaga

SEQ ID NO: 2434067 - RNA, 19 nt, Homo sapiens
  misc_RNA (1)...(19): siRNA sense strand
gagaaggccaggagagcca

SEQ ID NO: 2434068 - RNA, 19 nt, Homo sapiens
  misc_RNA (1)...(19): siRNA sense strand
ggaagaagugcuuggccuu

SEQ ID NO: 2434069 - RNA, 19 nt, Homo sapiens
  misc_RNA (1)...(19): siRNA sense strand
acgccgaugacgagggcaa

SEQ ID NO: 2434070 - RNA, 19 nt, Homo sapiens
  misc_RNA (1)...(19): siRNA sense strand
uggugaagaugguggccuu

SEQ ID NO: 2434071 - RNA, 19 nt, Homo sapiens
  misc_RNA (1)...(19): siRNA sense strand
ccauucugguggagggcuu

SEQ ID NO: 2434072 - RNA, 19 nt, Homo sapiens
  misc_RNA (1)...(19): siRNA sense strand
ggcugaagcugguggugga

SEQ ID NO: 2434073 - RNA, 19 nt, Homo sapiens
  misc_RNA (1)...(19): siRNA sense strand
cugccagaccggaagaauu

SEQ ID NO: 2434074 - RNA, 19 nt, Homo sapiens
  misc_RNA (1)...(19): siRNA sense strand
cgcuauuaccagacagaga

SEQ ID NO: 2434075 - RNA, 19 nt, Homo sapiens
  misc_RNA (1)...(19): siRNA sense strand
gcuccuucuucaugaucaa

SEQ ID NO: 2434076 - RNA, 19 nt, Homo sapiens
  misc_RNA (1)...(19): siRNA sense strand
gggaugacgccgaugacga

SEQ ID NO: 2434077 - RNA, 19 nt, Homo sapiens
  misc_RNA (1)...(19): siRNA sense strand
aggagaaggcacuaguaga

SEQ ID NO: 2434078 - RNA, 19 nt, Homo sapiens
  misc_RNA (1)...(19): siRNA sense strand
ccgcagucuuucuggcuga

SEQ ID NO: 2434079 - RNA, 19 nt, Homo sapiens
  misc_RNA (1)...(19): siRNA sense strand
gcaucagcauguuggucau

SEQ ID NO: 2434080 - RNA, 19 nt, Homo sapiens
  misc_RNA (1)...(19): siRNA sense strand
gcuuccuaccugagaauuu

SEQ ID NO: 2434081 - RNA, 19 nt, Homo sapiens
  misc_RNA (1)...(19): siRNA sense strand
gggacaggaagaagugcuu

SEQ ID NO: 2434082 - RNA, 19 nt, Homo sapiens
  misc_RNA (1)...(19): siRNA sense strand
cugaaaugacagugaaggu

SEQ ID NO: 2434083 - RNA, 19 nt, Homo sapiens
  misc_RNA (1)...(19): siRNA sense strand
ugugggagaucgugggcca

SEQ ID NO: 2434084 - RNA, 19 nt, Homo sapiens
  misc_RNA (1)...(19): siRNA sense strand
agaugguggccuugggcau

SEQ ID NO: 2434085 - RNA, 19 nt, Homo sapiens
  misc_RNA (1)...(19): siRNA sense strand
aggaagaagugcuuggccu

SEQ ID NO: 2434086 - RNA, 19 nt, Homo sapiens
  misc_RNA (1)...(19): siRNA sense strand
caaccugagcaaaggggaa

SEQ ID NO: 2434087 - RNA, 19 nt, Homo sapiens
  misc_RNA (1)...(19): siRNA sense strand
gcacaagcugcuggagaca

SEQ ID NO: 2434088 - RNA, 19 nt, Homo sapiens
  misc_RNA (1)...(19): siRNA sense strand
aggaugaagaggagagcuc

SEQ ID NO: 2434089 - RNA, 19 nt, Homo sapiens
  misc_RNA (1)...(19): siRNA sense strand
gcaccaagauccugggcau

SEQ ID NO: 2434090 - RNA, 19 nt, Homo sapiens
  misc_RNA (1)...(19): siRNA sense strand
gagaccaagcagcgggaaa

SEQ ID NO: 2434091 - RNA, 19 nt, Homo sapiens
  misc_RNA (1)...(19): siRNA sense strand
uggagaugguggugaagau

SEQ ID NO: 2434092 - RNA, 19 nt, Homo sapiens
  misc_RNA (1)...(19): siRNA sense strand
ccggagacgcugaaggaga

SEQ ID NO: 2434093 - RNA, 19 nt, Homo sapiens
  misc_RNA (1)...(19): siRNA sense strand
gagaaggccaggagagcca

SEQ ID NO: 2434094 - RNA, 19 nt, Homo sapiens
  misc_RNA (1)...(19): siRNA sense strand
ggaagaagugcuuggccuu

SEQ ID NO: 2434095 - RNA, 19 nt, Homo sapiens
  misc_RNA (1)...(19): siRNA sense strand
acgccgaugacgagggcaa

SEQ ID NO: 2434096 - RNA, 19 nt, Homo sapiens
  misc_RNA (1)...(19): siRNA sense strand
uggugaagaugguggccuu

SEQ ID NO: 2434097 - RNA, 19 nt, Homo sapiens
  misc_RNA (1)...(19): siRNA sense strand
ccauucugguggagggcuu

SEQ ID NO: 2434098 - RNA, 19 nt, Homo sapiens
  misc_RNA (1)...(19): siRNA sense strand
ggcugaagcugguggugga

SEQ ID NO: 2434099 - RNA, 19 nt, Homo sapiens
  misc_RNA (1)...(19): siRNA sense strand
cugccagaccggaagaauu

SEQ ID NO: 2434100 - RNA, 19 nt, Homo sapiens
  misc_RNA (1)...(19): siRNA sense strand
cgcuauuaccagacagaga

SEQ ID NO: 2434101 - RNA, 19 nt, Homo sapiens
  misc_RNA (1)...(19): siRNA sense strand
gcuccuucuucaugaucaa

SEQ ID NO: 2434102 - RNA, 19 nt, Homo sapiens
  misc_RNA (1)...(19): siRNA sense strand
gggaugacgccgaugacga

SEQ ID NO: 2434103 - RNA, 19 nt, Homo sapiens
  misc_RNA (1)...(19): siRNA sense strand
aggagaaggcacuaguaga

SEQ ID NO: 2434104 - RNA, 19 nt, Homo sapiens
  misc_RNA (1)...(19): siRNA sense strand
ccgcagucuuucuggcuga

SEQ ID NO: 2434105 - RNA, 19 nt, Homo sapiens
  misc_RNA (1)...(19): siRNA sense strand
gcaucagcauguuggucau

SEQ ID NO: 2434106 - RNA, 19 nt, Homo sapiens
  misc_RNA (1)...(19): siRNA sense strand
gcuuccuaccugagaauuu

SEQ ID NO: 2434107 - RNA, 19 nt, Homo sapiens
  misc_RNA (1)...(19): siRNA sense strand
gggacaggaagaagugcuu

SEQ ID NO: 2434108 - RNA, 19 nt, Homo sapiens
  misc_RNA (1)...(19): siRNA sense strand
cugaaaugacagugaaggu

SEQ ID NO: 2434109 - RNA, 19 nt, Homo sapiens
  misc_RNA (1)...(19): siRNA sense strand
ugugggagaucgugggcca

SEQ ID NO: 2434110 - RNA, 19 nt, Homo sapiens
  misc_RNA (1)...(19): siRNA sense strand
agaugguggccuugggcau

SEQ ID NO: 2434111 - RNA, 19 nt, Homo sapiens
  misc_RNA (1)...(19): siRNA sense strand
aggaagaagugcuuggccu

SEQ ID NO: 2434112 - RNA, 19 nt, Homo sapiens
  misc_RNA (1)...(19): siRNA sense strand
caaccugagcaaaggggaa

SEQ ID NO: 2434113 - RNA, 19 nt, Homo sapiens
  misc_RNA (1)...(19): siRNA sense strand
gcacaagcugcuggagaca

SEQ ID NO: 2434114 - RNA, 19 nt, Homo sapiens
  misc_RNA (1)...(19): siRNA sense strand
aggaugaagaggagagcuc

SEQ ID NO: 2434115 - RNA, 19 nt, Homo sapiens
  misc_RNA (1)...(19): siRNA sense strand
gcaccaagauccugggcau

SEQ ID NO: 2434116 - RNA, 19 nt, Homo sapiens
  misc_RNA (1)...(19): siRNA sense strand
gagaccaagcagcgggaaa

SEQ ID NO: 2434117 - RNA, 19 nt, Homo sapiens
  misc_RNA (1)...(19): siRNA sense strand
uggagaugguggugaagau

SEQ ID NO: 2434118 - RNA, 19 nt, Homo sapiens
  misc_RNA (1)...(19): siRNA sense strand
ccggagacgcugaaggaga

SEQ ID NO: 2434119 - RNA, 19 nt, Homo sapiens
  misc_RNA (1)...(19): siRNA sense strand
gagaaggccaggagagcca

SEQ ID NO: 2434120 - RNA, 19 nt, Homo sapiens
  misc_RNA (1)...(19): siRNA sense strand
ggaagaagugcuuggccuu

SEQ ID NO: 2434121 - RNA, 19 nt, Homo sapiens
  misc_RNA (1)...(19): siRNA sense strand
acgccgaugacgagggcaa

SEQ ID NO: 2434122 - RNA, 19 nt, Homo sapiens
  misc_RNA (1)...(19): siRNA sense strand
uggugaagaugguggccuu

SEQ ID NO: 2434123 - RNA, 19 nt, Homo sapiens
  misc_RNA (1)...(19): siRNA sense strand
ccauucugguggagggcuu

SEQ ID NO: 2434124 - RNA, 19 nt, Homo sapiens
  misc_RNA (1)...(19): siRNA sense strand
ggcugaagcugguggugga

SEQ ID NO: 2434125 - RNA, 19 nt, Homo sapiens
  misc_RNA (1)...(19): siRNA sense strand
cugccagaccggaagaauu

SEQ ID NO: 2434126 - RNA, 19 nt, Homo sapiens
  misc_RNA (1)...(19): siRNA sense strand
cgcuauuaccagacagaga

SEQ ID NO: 2434127 - RNA, 19 nt, Homo sapiens
  misc_RNA (1)...(19): siRNA sense strand
gcuccuucuucaugaucaa

SEQ ID NO: 2434128 - RNA, 19 nt, Homo sapiens
  misc_RNA (1)...(19): siRNA sense strand
gggaugacgccgaugacga

SEQ ID NO: 2434129 - RNA, 19 nt, Homo sapiens
  misc_RNA (1)...(19): siRNA sense strand
aggagaaggcacuaguaga

SEQ ID NO: 2434130 - RNA, 19 nt, Homo sapiens
  misc_RNA (1)...(19): siRNA sense strand
ccgcagucuuucuggcuga

SEQ ID NO: 2434131 - RNA, 19 nt, Homo sapiens
  misc_RNA (1)...(19): siRNA sense strand
gcaucagcauguuggucau

SEQ ID NO: 2434132 - RNA, 19 nt, Homo sapiens
  misc_RNA (1)...(19): siRNA sense strand
gcuuccuaccugagaauuu

SEQ ID NO: 2434133 - RNA, 19 nt, Homo sapiens
  misc_RNA (1)...(19): siRNA sense strand
gggacaggaagaagugcuu

SEQ ID NO: 2434134 - RNA, 19 nt, Homo sapiens
  misc_RNA (1)...(19): siRNA sense strand
cugaaaugacagugaaggu

SEQ ID NO: 2434135 - RNA, 19 nt, Homo sapiens
  misc_RNA (1)...(19): siRNA sense strand
ugugggagaucgugggcca

SEQ ID NO: 2434136 - RNA, 19 nt, Homo sapiens
  misc_RNA (1)...(19): siRNA sense strand
agaugguggccuugggcau

SEQ ID NO: 2434137 - RNA, 19 nt, Homo sapiens
  misc_RNA (1)...(19): siRNA sense strand
aggaagaagugcuuggccu

SEQ ID NO: 2434138 - RNA, 19 nt, Homo sapiens
  misc_RNA (1)...(19): siRNA sense strand
caaccugagcaaaggggaa

SEQ ID NO: 2434139 - RNA, 19 nt, Homo sapiens
  misc_RNA (1)...(19): siRNA sense strand
gcacaagcugcuggagaca

SEQ ID NO: 2434140 - RNA, 19 nt, Homo sapiens
  misc_RNA (1)...(19): siRNA sense strand
aggaugaagaggagagcuc

SEQ ID NO: 2434141 - RNA, 19 nt, Homo sapiens
  misc_RNA (1)...(19): siRNA sense strand
gcaccaagauccugggcau

SEQ ID NO: 2434142 - RNA, 19 nt, Homo sapiens
  misc_RNA (1)...(19): siRNA sense strand
gagaccaagcagcgggaaa

SEQ ID NO: 2434143 - RNA, 19 nt, Homo sapiens
  misc_RNA (1)...(19): siRNA sense strand
uggagaugguggugaagau

SEQ ID NO: 2434144 - RNA, 19 nt, Homo sapiens
  misc_RNA (1)...(19): siRNA sense strand
ccggagacgcugaaggaga

SEQ ID NO: 2434145 - RNA, 19 nt, Homo sapiens
  misc_RNA (1)...(19): siRNA sense strand
gagaaggccaggagagcca

SEQ ID NO: 2434146 - RNA, 19 nt, Homo sapiens
  misc_RNA (1)...(19): siRNA sense strand
ggaagaagugcuuggccuu

SEQ ID NO: 2434147 - RNA, 19 nt, Homo sapiens
  misc_RNA (1)...(19): siRNA sense strand
acgccgaugacgagggcaa

SEQ ID NO: 2434148 - RNA, 19 nt, Homo sapiens
  misc_RNA (1)...(19): siRNA sense strand
uggugaagaugguggccuu

SEQ ID NO: 2434149 - RNA, 19 nt, Homo sapiens
  misc_RNA (1)...(19): siRNA sense strand
ccauucugguggagggcuu

SEQ ID NO: 2434150 - RNA, 19 nt, Homo sapiens
  misc_RNA (1)...(19): siRNA sense strand
ggcugaagcugguggugga

SEQ ID NO: 2434151 - RNA, 19 nt, Homo sapiens
  misc_RNA (1)...(19): siRNA sense strand
cugccagaccggaagaauu

SEQ ID NO: 2434152 - RNA, 19 nt, Homo sapiens
  misc_RNA (1)...(19): siRNA sense strand
cgcuauuaccagacagaga

SEQ ID NO: 2434153 - RNA, 19 nt, Homo sapiens
  misc_RNA (1)...(19): siRNA sense strand
gcuccuucuucaugaucaa

SEQ ID NO: 2434154 - RNA, 19 nt, Homo sapiens
  misc_RNA (1)...(19): siRNA sense strand
gggaugacgccgaugacga

SEQ ID NO: 2434155 - RNA, 19 nt, Homo sapiens
  misc_RNA (1)...(19): siRNA sense strand
aggagaaggcacuaguaga

SEQ ID NO: 2434156 - RNA, 19 nt, Homo sapiens
  misc_RNA (1)...(19): siRNA sense strand
ccgcagucuuucuggcuga

SEQ ID NO: 2434157 - RNA, 19 nt, Homo sapiens
  misc_RNA (1)...(19): siRNA sense strand
gcaucagcauguuggucau

SEQ ID NO: 2434158 - RNA, 19 nt, Homo sapiens
  misc_RNA (1)...(19): siRNA sense strand
gcuuccuaccugagaauuu

SEQ ID NO: 2434159 - RNA, 19 nt, Homo sapiens
  misc_RNA (1)...(19): siRNA sense strand
gggacaggaagaagugcuu

SEQ ID NO: 2434160 - RNA, 19 nt, Homo sapiens
  misc_RNA (1)...(19): siRNA sense strand
cugaaaugacagugaaggu

SEQ ID NO: 2434161 - RNA, 19 nt, Homo sapiens
  misc_RNA (1)...(19): siRNA sense strand
ugugggagaucgugggcca

SEQ ID NO: 2434162 - RNA, 19 nt, Homo sapiens
  misc_RNA (1)...(19): siRNA sense strand
agaugguggccuugggcau

SEQ ID NO: 2434163 - RNA, 19 nt, Homo sapiens
  misc_RNA (1)...(19): siRNA sense strand
aggaagaagugcuuggccu

SEQ ID NO: 2434164 - RNA, 19 nt, Homo sapiens
  misc_RNA (1)...(19): siRNA sense strand
caaccugagcaaaggggaa

SEQ ID NO: 2434165 - RNA, 19 nt, Homo sapiens
  misc_RNA (1)...(19): siRNA sense strand
gcacaagcugcuggagaca

SEQ ID NO: 2434166 - RNA, 19 nt, Homo sapiens
  misc_RNA (1)...(19): siRNA sense strand
aggaugaagaggagagcuc

SEQ ID NO: 2434167 - RNA, 19 nt, Homo sapiens
  misc_RNA (1)...(19): siRNA sense strand
gcaccaagauccugggcau

SEQ ID NO: 2434168 - RNA, 19 nt, Homo sapiens
  misc_RNA (1)...(19): siRNA sense strand
gagaccaagcagcgggaaa

SEQ ID NO: 2434169 - RNA, 19 nt, Homo sapiens
  misc_RNA (1)...(19): siRNA sense strand
uggagaugguggugaagau

SEQ ID NO: 2434170 - RNA, 19 nt, Homo sapiens
  misc_RNA (1)...(19): siRNA sense strand
ccggagacgcugaaggaga

SEQ ID NO: 2434171 - RNA, 19 nt, Homo sapiens
  misc_RNA (1)...(19): siRNA sense strand
gagaaggccaggagagcca

SEQ ID NO: 2434172 - RNA, 19 nt, Homo sapiens
  misc_RNA (1)...(19): siRNA sense strand
ggaagaagugcuuggccuu

SEQ ID NO: 2434173 - RNA, 19 nt, Homo sapiens
  misc_RNA (1)...(19): siRNA sense strand
acgccgaugacgagggcaa

SEQ ID NO: 2434174 - RNA, 19 nt, Homo sapiens
  misc_RNA (1)...(19): siRNA sense strand
uggugaagaugguggccuu

SEQ ID NO: 2434175 - RNA, 19 nt, Homo sapiens
  misc_RNA (1)...(19): siRNA sense strand
ccauucugguggagggcuu

SEQ ID NO: 2434176 - RNA, 19 nt, Homo sapiens
  misc_RNA (1)...(19): siRNA sense strand
ggcugaagcugguggugga

SEQ ID NO: 2434177 - RNA, 19 nt, Homo sapiens
  misc_RNA (1)...(19): siRNA sense strand
cugccagaccggaagaauu

SEQ ID NO: 2434178 - RNA, 19 nt, Homo sapiens
  misc_RNA (1)...(19): siRNA sense strand
cgcuauuaccagacagaga

SEQ ID NO: 2434179 - RNA, 19 nt, Homo sapiens
  misc_RNA (1)...(19): siRNA sense strand
gcuccuucuucaugaucaa

SEQ ID NO: 2434180 - RNA, 19 nt, Homo sapiens
  misc_RNA (1)...(19): siRNA sense strand
gggaugacgccgaugacga

SEQ ID NO: 2434181 - RNA, 19 nt, Homo sapiens
  misc_RNA (1)...(19): siRNA sense strand
aggagaaggcacuaguaga

SEQ ID NO: 2434182 - RNA, 19 nt, Homo sapiens
  misc_RNA (1)...(19): siRNA sense strand
ccgcagucuuucuggcuga

SEQ ID NO: 2434183 - RNA, 19 nt, Homo sapiens
  misc_RNA (1)...(19): siRNA sense strand
gcaucagcauguuggucau

SEQ ID NO: 2434184 - RNA, 19 nt, Homo sapiens
  misc_RNA (1)...(19): siRNA sense strand
gcuuccuaccugagaauuu

SEQ ID NO: 2434185 - RNA, 19 nt, Homo sapiens
  misc_RNA (1)...(19): siRNA sense strand
gggacaggaagaagugcuu

SEQ ID NO: 2434186 - RNA, 19 nt, Homo sapiens
  misc_RNA (1)...(19): siRNA sense strand
cugaaaugacagugaaggu

SEQ ID NO: 2434187 - RNA, 19 nt, Homo sapiens
  misc_RNA (1)...(19): siRNA sense strand
ugugggagaucgugggcca

SEQ ID NO: 2434188 - RNA, 19 nt, Homo sapiens
  misc_RNA (1)...(19): siRNA sense strand
agaugguggccuugggcau

SEQ ID NO: 2434189 - RNA, 19 nt, Homo sapiens
  misc_RNA (1)...(19): siRNA sense strand
aggaagaagugcuuggccu

SEQ ID NO: 2434190 - RNA, 19 nt, Homo sapiens
  misc_RNA (1)...(19): siRNA sense strand
caaccugagcaaaggggaa

SEQ ID NO: 2434191 - RNA, 19 nt, Homo sapiens
  misc_RNA (1)...(19): siRNA sense strand
gcacaagcugcuggagaca

SEQ ID NO: 2434192 - RNA, 19 nt, Homo sapiens
  misc_RNA (1)...(19): siRNA sense strand
aggaugaagaggagagcuc

SEQ ID NO: 2434193 - RNA, 19 nt, Homo sapiens
  misc_RNA (1)...(19): siRNA sense strand
gcaccaagauccugggcau

SEQ ID NO: 2434194 - RNA, 19 nt, Homo sapiens
  misc_RNA (1)...(19): siRNA sense strand
gagaccaagcagcgggaaa

SEQ ID NO: 2434195 - RNA, 19 nt, Homo sapiens
  misc_RNA (1)...(19): siRNA sense strand
uggagaugguggugaagau

SEQ ID NO: 2434196 - RNA, 19 nt, Homo sapiens
  misc_RNA (1)...(19): siRNA sense strand
ccggagacgcugaaggaga

SEQ ID NO: 2434197 - RNA, 19 nt, Homo sapiens
  misc_RNA (1)...(19): siRNA sense strand
gagaaggccaggagagcca

SEQ ID NO: 2434198 - RNA, 19 nt, Homo sapiens
  misc_RNA (1)...(19): siRNA sense strand
ggaagaagugcuuggccuu

SEQ ID NO: 2434199 - RNA, 19 nt, Homo sapiens
  misc_RNA (1)...(19): siRNA sense strand
acgccgaugacgagggcaa

SEQ ID NO: 2434200 - RNA, 19 nt, Homo sapiens
  misc_RNA (1)...(19): siRNA sense strand
uggugaagaugguggccuu

SEQ ID NO: 2434201 - RNA, 19 nt, Homo sapiens
  misc_RNA (1)...(19): siRNA sense strand
ccauucugguggagggcuu

SEQ ID NO: 2434202 - RNA, 19 nt, Homo sapiens
  misc_RNA (1)...(19): siRNA sense strand
ggcugaagcugguggugga

SEQ ID NO: 2434203 - RNA, 19 nt, Homo sapiens
  misc_RNA (1)...(19): siRNA sense strand
cugccagaccggaagaauu

SEQ ID NO: 2434204 - RNA, 19 nt, Homo sapiens
  misc_RNA (1)...(19): siRNA sense strand
cgcuauuaccagacagaga

SEQ ID NO: 2434205 - RNA, 19 nt, Homo sapiens
  misc_RNA (1)...(19): siRNA sense strand
gcuccuucuucaugaucaa

SEQ ID NO: 2434206 - RNA, 19 nt, Homo sapiens
  misc_RNA (1)...(19): siRNA sense strand
gggaugacgccgaugacga

SEQ ID NO: 2434207 - RNA, 19 nt, Homo sapiens
  misc_RNA (1)...(19): siRNA sense strand
aggagaaggcacuaguaga

SEQ ID NO: 2434208 - RNA, 19 nt, Homo sapiens
  misc_RNA (1)...(19): siRNA sense strand
ccgcagucuuucuggcuga

SEQ ID NO: 2434209 - RNA, 19 nt, Homo sapiens
  misc_RNA (1)...(19): siRNA sense strand
gcaucagcauguuggucau

SEQ ID NO: 2434210 - RNA, 19 nt, Homo sapiens
  misc_RNA (1)...(19): siRNA sense strand
gcuuccuaccugagaauuu

SEQ ID NO: 2434211 - RNA, 19 nt, Homo sapiens
  misc_RNA (1)...(19): siRNA sense strand
gggacaggaagaagugcuu

SEQ ID NO: 2434212 - RNA, 19 nt, Homo sapiens
  misc_RNA (1)...(19): siRNA sense strand
cugaaaugacagugaaggu

SEQ ID NO: 2434213 - RNA, 19 nt, Homo sapiens
  misc_RNA (1)...(19): siRNA sense strand
ugugggagaucgugggcca

SEQ ID NO: 2434214 - RNA, 19 nt, Homo sapiens
  misc_RNA (1)...(19): siRNA sense strand
agaugguggccuugggcau

SEQ ID NO: 2434215 - RNA, 19 nt, Homo sapiens
  misc_RNA (1)...(19): siRNA sense strand
aggaagaagugcuuggccu

SEQ ID NO: 2434216 - RNA, 19 nt, Homo sapiens
  misc_RNA (1)...(19): siRNA sense strand
caaccugagcaaaggggaa

SEQ ID NO: 2434217 - RNA, 19 nt, Homo sapiens
  misc_RNA (1)...(19): siRNA sense strand
gcacaagcugcuggagaca

SEQ ID NO: 2434218 - RNA, 19 nt, Homo sapiens
  misc_RNA (1)...(19): siRNA sense strand
aggaugaagaggagagcuc

SEQ ID NO: 2434219 - RNA, 19 nt, Homo sapiens
  misc_RNA (1)...(19): siRNA sense strand
gcaccaagauccugggcau

SEQ ID NO: 2434220 - RNA, 19 nt, Homo sapiens
  misc_RNA (1)...(19): siRNA sense strand
gagaccaagcagcgggaaa

SEQ ID NO: 2434221 - RNA, 19 nt, Homo sapiens
  misc_RNA (1)...(19): siRNA sense strand
uggagaugguggugaagau

SEQ ID NO: 2434222 - RNA, 19 nt, Homo sapiens
  misc_RNA (1)...(19): siRNA sense strand
ccggagacgcugaaggaga

SEQ ID NO: 2434223 - RNA, 19 nt, Homo sapiens
  misc_RNA (1)...(19): siRNA sense strand
gagaaggccaggagagcca

SEQ ID NO: 2434224 - RNA, 19 nt, Homo sapiens
  misc_RNA (1)...(19): siRNA sense strand
ggaagaagugcuuggccuu

SEQ ID NO: 2434225 - RNA, 19 nt, Homo sapiens
  misc_RNA (1)...(19): siRNA sense strand
acgccgaugacgagggcaa

SEQ ID NO: 2434226 - RNA, 19 nt, Homo sapiens
  misc_RNA (1)...(19): siRNA sense strand
uggugaagaugguggccuu

SEQ ID NO: 2434227 - RNA, 19 nt, Homo sapiens
  misc_RNA (1)...(19): siRNA sense strand
ccauucugguggagggcuu

SEQ ID NO: 2434228 - RNA, 19 nt, Homo sapiens
  misc_RNA (1)...(19): siRNA sense strand
ggcugaagcugguggugga

SEQ ID NO: 2434229 - RNA, 19 nt, Homo sapiens
  misc_RNA (1)...(19): siRNA sense strand
cugccagaccggaagaauu

SEQ ID NO: 2434230 - RNA, 19 nt, Homo sapiens
  misc_RNA (1)...(19): siRNA sense strand
cgcuauuaccagacagaga

SEQ ID NO: 2434231 - RNA, 19 nt, Homo sapiens
  misc_RNA (1)...(19): siRNA sense strand
gcuccuucuucaugaucaa

SEQ ID NO: 2434232 - RNA, 19 nt, Homo sapiens
  misc_RNA (1)...(19): siRNA sense strand
gggaugacgccgaugacga

SEQ ID NO: 2434233 - RNA, 19 nt, Homo sapiens
  misc_RNA (1)...(19): siRNA sense strand
aggagaaggcacuaguaga

SEQ ID NO: 2434234 - RNA, 19 nt, Homo sapiens
  misc_RNA (1)...(19): siRNA sense strand
ccgcagucuuucuggcuga

SEQ ID NO: 2434235 - RNA, 19 nt, Homo sapiens
  misc_RNA (1)...(19): siRNA sense strand
gcaucagcauguuggucau

SEQ ID NO: 2434236 - RNA, 19 nt, Homo sapiens
  misc_RNA (1)...(19): siRNA sense strand
gcuuccuaccugagaauuu

SEQ ID NO: 2434237 - RNA, 19 nt, Homo sapiens
  misc_RNA (1)...(19): siRNA sense strand
gggacaggaagaagugcuu

SEQ ID NO: 2434238 - RNA, 19 nt, Homo sapiens
  misc_RNA (1)...(19): siRNA sense strand
cugaaaugacagugaaggu

SEQ ID NO: 2434239 - RNA, 19 nt, Homo sapiens
  misc_RNA (1)...(19): siRNA sense strand
ugugggagaucgugggcca

SEQ ID NO: 2434240 - RNA, 19 nt, Homo sapiens
  misc_RNA (1)...(19): siRNA sense strand
agaugguggccuugggcau

SEQ ID NO: 2434241 - RNA, 19 nt, Homo sapiens
  misc_RNA (1)...(19): siRNA sense strand
aggaagaagugcuuggccu

SEQ ID NO: 2434242 - RNA, 19 nt, Homo sapiens
  misc_RNA (1)...(19): siRNA sense strand
caaccugagcaaaggggaa

SEQ ID NO: 2434243 - RNA, 19 nt, Homo sapiens
  misc_RNA (1)...(19): siRNA sense strand
gcacaagcugcuggagaca

SEQ ID NO: 2434244 - RNA, 19 nt, Homo sapiens
  misc_RNA (1)...(19): siRNA sense strand
aggaugaagaggagagcuc

SEQ ID NO: 2434245 - RNA, 19 nt, Homo sapiens
  misc_RNA (1)...(19): siRNA sense strand
gcaccaagauccugggcau

SEQ ID NO: 2434246 - RNA, 19 nt, Homo sapiens
  misc_RNA (1)...(19): siRNA sense strand
gagaccaagcagcgggaaa

SEQ ID NO: 2434247 - RNA, 19 nt, Homo sapiens
  misc_RNA (1)...(19): siRNA sense strand
uggagaugguggugaagau

SEQ ID NO: 2434248 - RNA, 19 nt, Homo sapiens
  misc_RNA (1)...(19): siRNA sense strand
ccggagacgcugaaggaga

SEQ ID NO: 2434249 - RNA, 19 nt, Homo sapiens
  misc_RNA (1)...(19): siRNA sense strand
gagaaggccaggagagcca

SEQ ID NO: 2434250 - RNA, 19 nt, Homo sapiens
  misc_RNA (1)...(19): siRNA sense strand
ggaagaagugcuuggccuu

SEQ ID NO: 2434251 - RNA, 19 nt, Homo sapiens
  misc_RNA (1)...(19): siRNA sense strand
acgccgaugacgagggcaa

SEQ ID NO: 2434252 - RNA, 19 nt, Homo sapiens
  misc_RNA (1)...(19): siRNA sense strand
uggugaagaugguggccuu

SEQ ID NO: 2434253 - RNA, 19 nt, Homo sapiens
  misc_RNA (1)...(19): siRNA sense strand
ccauucugguggagggcuu

SEQ ID NO: 2434254 - RNA, 19 nt, Homo sapiens
  misc_RNA (1)...(19): siRNA sense strand
ggcugaagcugguggugga

SEQ ID NO: 2434255 - RNA, 19 nt, Homo sapiens
  misc_RNA (1)...(19): siRNA sense strand
cugccagaccggaagaauu

SEQ ID NO: 2434256 - RNA, 19 nt, Homo sapiens
  misc_RNA (1)...(19): siRNA sense strand
cgcuauuaccagacagaga

SEQ ID NO: 2434257 - RNA, 19 nt, Homo sapiens
  misc_RNA (1)...(19): siRNA sense strand
gcuccuucuucaugaucaa

SEQ ID NO: 2434258 - RNA, 19 nt, Homo sapiens
  misc_RNA (1)...(19): siRNA sense strand
gggaugacgccgaugacga

SEQ ID NO: 2434259 - RNA, 19 nt, Homo sapiens
  misc_RNA (1)...(19): siRNA sense strand
aggagaaggcacuaguaga

SEQ ID NO: 2434260 - RNA, 19 nt, Homo sapiens
  misc_RNA (1)...(19): siRNA sense strand
ccgcagucuuucuggcuga

SEQ ID NO: 2434261 - RNA, 19 nt, Homo sapiens
  misc_RNA (1)...(19): siRNA sense strand
gcaucagcauguuggucau

SEQ ID NO: 2434262 - RNA, 19 nt, Homo sapiens
  misc_RNA (1)...(19): siRNA sense strand
gcuuccuaccugagaauuu

SEQ ID NO: 2434263 - RNA, 19 nt, Homo sapiens
  misc_RNA (1)...(19): siRNA sense strand
gggacaggaagaagugcuu

SEQ ID NO: 2434264 - RNA, 19 nt, Homo sapiens
  misc_RNA (1)...(19): siRNA sense strand
cugaaaugacagugaaggu

SEQ ID NO: 2434265 - RNA, 19 nt, Homo sapiens
  misc_RNA (1)...(19): siRNA sense strand
ugugggagaucgugggcca

SEQ ID NO: 2434266 - RNA, 19 nt, Homo sapiens
  misc_RNA (1)...(19): siRNA sense strand
agaugguggccuugggcau

SEQ ID NO: 2434267 - RNA, 19 nt, Homo sapiens
  misc_RNA (1)...(19): siRNA sense strand
aggaagaagugcuuggccu

SEQ ID NO: 2434268 - RNA, 19 nt, Homo sapiens
  misc_RNA (1)...(19): siRNA sense strand
caaccugagcaaaggggaa

SEQ ID NO: 2434269 - RNA, 19 nt, Homo sapiens
  misc_RNA (1)...(19): siRNA sense strand
gcacaagcugcuggagaca

SEQ ID NO: 2434270 - RNA, 19 nt, Homo sapiens
  misc_RNA (1)...(19): siRNA sense strand
aggaugaagaggagagcuc

SEQ ID NO: 2434271 - RNA, 19 nt, Homo sapiens
  misc_RNA (1)...(19): siRNA sense strand
gcaccaagauccugggcau

SEQ ID NO: 2434272 - RNA, 19 nt, Homo sapiens
  misc_RNA (1)...(19): siRNA sense strand
gagaccaagcagcgggaaa

SEQ ID NO: 2434273 - RNA, 19 nt, Homo sapiens
  misc_RNA (1)...(19): siRNA sense strand
uggagaugguggugaagau

SEQ ID NO: 2434274 - RNA, 19 nt, Homo sapiens
  misc_RNA (1)...(19): siRNA sense strand
ccggagacgcugaaggaga

SEQ ID NO: 2434275 - RNA, 19 nt, Homo sapiens
  misc_RNA (1)...(19): siRNA sense strand
gagaaggccaggagagcca

SEQ ID NO: 2434276 - RNA, 19 nt, Homo sapiens
  misc_RNA (1)...(19): siRNA sense strand
ggaagaagugcuuggccuu

SEQ ID NO: 2434277 - RNA, 19 nt, Homo sapiens
  misc_RNA (1)...(19): siRNA sense strand
acgccgaugacgagggcaa

SEQ ID NO: 2434278 - RNA, 19 nt, Homo sapiens
  misc_RNA (1)...(19): siRNA sense strand
uggugaagaugguggccuu

SEQ ID NO: 2434279 - RNA, 19 nt, Homo sapiens
  misc_RNA (1)...(19): siRNA sense strand
ccauucugguggagggcuu

SEQ ID NO: 2434280 - RNA, 19 nt, Homo sapiens
  misc_RNA (1)...(19): siRNA sense strand
ggcugaagcugguggugga

SEQ ID NO: 2434281 - RNA, 19 nt, Homo sapiens
  misc_RNA (1)...(19): siRNA sense strand
cugccagaccggaagaauu

SEQ ID NO: 2434282 - RNA, 19 nt, Homo sapiens
  misc_RNA (1)...(19): siRNA sense strand
cgcuauuaccagacagaga

SEQ ID NO: 2434283 - RNA, 19 nt, Homo sapiens
  misc_RNA (1)...(19): siRNA sense strand
gcuccuucuucaugaucaa

SEQ ID NO: 2434284 - RNA, 19 nt, Homo sapiens
  misc_RNA (1)...(19): siRNA sense strand
gggaugacgccgaugacga

SEQ ID NO: 2434285 - RNA, 19 nt, Homo sapiens
  misc_RNA (1)...(19): siRNA sense strand
aggagaaggcacuaguaga

SEQ ID NO: 2434286 - RNA, 19 nt, Homo sapiens
  misc_RNA (1)...(19): siRNA sense strand
ccgcagucuuucuggcuga

SEQ ID NO: 2434287 - RNA, 19 nt, Homo sapiens
  misc_RNA (1)...(19): siRNA sense strand
gcaucagcauguuggucau

SEQ ID NO: 2434288 - RNA, 19 nt, Homo sapiens
  misc_RNA (1)...(19): siRNA sense strand
gcuuccuaccugagaauuu

SEQ ID NO: 2434289 - RNA, 19 nt, Homo sapiens
  misc_RNA (1)...(19): siRNA sense strand
gggacaggaagaagugcuu

SEQ ID NO: 2434290 - RNA, 19 nt, Homo sapiens
  misc_RNA (1)...(19): siRNA sense strand
cugaaaugacagugaaggu

SEQ ID NO: 2434291 - RNA, 19 nt, Homo sapiens
  misc_RNA (1)...(19): siRNA sense strand
ugugggagaucgugggcca

SEQ ID NO: 2434292 - RNA, 19 nt, Homo sapiens
  misc_RNA (1)...(19): siRNA sense strand
agaugguggccuugggcau

SEQ ID NO: 2434293 - RNA, 19 nt, Homo sapiens
  misc_RNA (1)...(19): siRNA sense strand
aggaagaagugcuuggccu

SEQ ID NO: 2434294 - RNA, 19 nt, Homo sapiens
  misc_RNA (1)...(19): siRNA sense strand
caaccugagcaaaggggaa

SEQ ID NO: 2434295 - RNA, 19 nt, Homo sapiens
  misc_RNA (1)...(19): siRNA sense strand
gcacaagcugcuggagaca

SEQ ID NO: 2434296 - RNA, 19 nt, Homo sapiens
  misc_RNA (1)...(19): siRNA sense strand
aggaugaagaggagagcuc

SEQ ID NO: 2434297 - RNA, 19 nt, Homo sapiens
  misc_RNA (1)...(19): siRNA sense strand
gcaccaagauccugggcau

SEQ ID NO: 2434298 - RNA, 19 nt, Homo sapiens
  misc_RNA (1)...(19): siRNA sense strand
gagaccaagcagcgggaaa

SEQ ID NO: 2434299 - RNA, 19 nt, Homo sapiens
  misc_RNA (1)...(19): siRNA sense strand
uggagaugguggugaagau

SEQ ID NO: 2434300 - RNA, 19 nt, Homo sapiens
  misc_RNA (1)...(19): siRNA sense strand
ccggagacgcugaaggaga

SEQ ID NO: 2434301 - RNA, 19 nt, Homo sapiens
  misc_RNA (1)...(19): siRNA sense strand
gagaaggccaggagagcca

SEQ ID NO: 2434302 - RNA, 19 nt, Homo sapiens
  misc_RNA (1)...(19): siRNA sense strand
ggaagaagugcuuggccuu

SEQ ID NO: 2434303 - RNA, 19 nt, Homo sapiens
  misc_RNA (1)...(19): siRNA sense strand
acgccgaugacgagggcaa

SEQ ID NO: 2434304 - RNA, 19 nt, Homo sapiens
  misc_RNA (1)...(19): siRNA sense strand
uggugaagaugguggccuu

SEQ ID NO: 2434305 - RNA, 19 nt, Homo sapiens
  misc_RNA (1)...(19): siRNA sense strand
ccauucugguggagggcuu

SEQ ID NO: 2434306 - RNA, 19 nt, Homo sapiens
  misc_RNA (1)...(19): siRNA sense strand
ggcugaagcugguggugga

SEQ ID NO: 2434307 - RNA, 19 nt, Homo sapiens
  misc_RNA (1)...(19): siRNA sense strand
cugccagaccggaagaauu

SEQ ID NO: 2434308 - RNA, 19 nt, Homo sapiens
  misc_RNA (1)...(19): siRNA sense strand
cgcuauuaccagacagaga

SEQ ID NO: 2434309 - RNA, 19 nt, Homo sapiens
  misc_RNA (1)...(19): siRNA sense strand
gcuccuucuucaugaucaa

SEQ ID NO: 2434310 - RNA, 19 nt, Homo sapiens
  misc_RNA (1)...(19): siRNA sense strand
gggaugacgccgaugacga

SEQ ID NO: 2434311 - RNA, 19 nt, Homo sapiens
  misc_RNA (1)...(19): siRNA sense strand
aggagaaggcacuaguaga

SEQ ID NO: 2434312 - RNA, 19 nt, Homo sapiens
  misc_RNA (1)...(19): siRNA sense strand
ccgcagucuuucuggcuga

SEQ ID NO: 2434313 - RNA, 19 nt, Homo sapiens
  misc_RNA (1)...(19): siRNA sense strand
gcaucagcauguuggucau

SEQ ID NO: 2434314 - RNA, 19 nt, Homo sapiens
  misc_RNA (1)...(19): siRNA sense strand
gcuuccuaccugagaauuu

SEQ ID NO: 2434315 - RNA, 19 nt, Homo sapiens
  misc_RNA (1)...(19): siRNA sense strand
gggacaggaagaagugcuu

SEQ ID NO: 2434316 - RNA, 19 nt, Homo sapiens
  misc_RNA (1)...(19): siRNA sense strand
cugaaaugacagugaaggu

SEQ ID NO: 2434317 - RNA, 19 nt, Homo sapiens
  misc_RNA (1)...(19): siRNA sense strand
ugugggagaucgugggcca

SEQ ID NO: 2434318 - RNA, 19 nt, Homo sapiens
  misc_RNA (1)...(19): siRNA sense strand
agaugguggccuugggcau

SEQ ID NO: 2434319 - RNA, 19 nt, Homo sapiens
  misc_RNA (1)...(19): siRNA sense strand
aggaagaagugcuuggccu

SEQ ID NO: 2434320 - RNA, 19 nt, Homo sapiens
  misc_RNA (1)...(19): siRNA sense strand
caaccugagcaaaggggaa

SEQ ID NO: 2434321 - RNA, 19 nt, Homo sapiens
  misc_RNA (1)...(19): siRNA sense strand
gcacaagcugcuggagaca

SEQ ID NO: 2434322 - RNA, 19 nt, Homo sapiens
  misc_RNA (1)...(19): siRNA sense strand
aggaugaagaggagagcuc

SEQ ID NO: 2434323 - RNA, 19 nt, Homo sapiens
  misc_RNA (1)...(19): siRNA sense strand
gcaccaagauccugggcau

SEQ ID NO: 2434324 - RNA, 19 nt, Homo sapiens
  misc_RNA (1)...(19): siRNA sense strand
gagaccaagcagcgggaaa

SEQ ID NO: 2434325 - RNA, 19 nt, Homo sapiens
  misc_RNA (1)...(19): siRNA sense strand
uggagaugguggugaagau

SEQ ID NO: 2434326 - RNA, 19 nt, Homo sapiens
  misc_RNA (1)...(19): siRNA sense strand
ccggagacgcugaaggaga

SEQ ID NO: 2434327 - RNA, 19 nt, Homo sapiens
  misc_RNA (1)...(19): siRNA sense strand
gagaaggccaggagagcca

SEQ ID NO: 2434328 - RNA, 19 nt, Homo sapiens
  misc_RNA (1)...(19): siRNA sense strand
ggaagaagugcuuggccuu

SEQ ID NO: 2434329 - RNA, 19 nt, Homo sapiens
  misc_RNA (1)...(19): siRNA sense strand
acgccgaugacgagggcaa

SEQ ID NO: 2434330 - RNA, 19 nt, Homo sapiens
  misc_RNA (1)...(19): siRNA sense strand
uggugaagaugguggccuu

SEQ ID NO: 2434331 - RNA, 19 nt, Homo sapiens
  misc_RNA (1)...(19): siRNA sense strand
ccauucugguggagggcuu

SEQ ID NO: 2434332 - RNA, 19 nt, Homo sapiens
  misc_RNA (1)...(19): siRNA sense strand
ggcugaagcugguggugga

SEQ ID NO: 2434333 - RNA, 19 nt, Homo sapiens
  misc_RNA (1)...(19): siRNA sense strand
cugccagaccggaagaauu

SEQ ID NO: 2434334 - RNA, 19 nt, Homo sapiens
  misc_RNA (1)...(19): siRNA sense strand
cgcuauuaccagacagaga

SEQ ID NO: 2434335 - RNA, 19 nt, Homo sapiens
  misc_RNA (1)...(19): siRNA sense strand
gcuccuucuucaugaucaa

SEQ ID NO: 2434336 - RNA, 19 nt, Homo sapiens
  misc_RNA (1)...(19): siRNA sense strand
gggaugacgccgaugacga

SEQ ID NO: 2434337 - RNA, 19 nt, Homo sapiens
  misc_RNA (1)...(19): siRNA sense strand
aggagaaggcacuaguaga

SEQ ID NO: 2434338 - RNA, 19 nt, Homo sapiens
  misc_RNA (1)...(19): siRNA sense strand
ccgcagucuuucuggcuga

SEQ ID NO: 2434339 - RNA, 19 nt, Homo sapiens
  misc_RNA (1)...(19): siRNA sense strand
gcaucagcauguuggucau

SEQ ID NO: 2434340 - RNA, 19 nt, Homo sapiens
  misc_RNA (1)...(19): siRNA sense strand
gcuuccuaccugagaauuu

SEQ ID NO: 2434341 - RNA, 19 nt, Homo sapiens
  misc_RNA (1)...(19): siRNA sense strand
gggacaggaagaagugcuu

SEQ ID NO: 2434342 - RNA, 19 nt, Homo sapiens
  misc_RNA (1)...(19): siRNA sense strand
cugaaaugacagugaaggu

SEQ ID NO: 2434343 - RNA, 19 nt, Homo sapiens
  misc_RNA (1)...(19): siRNA sense strand
ugugggagaucgugggcca

SEQ ID NO: 2434344 - RNA, 19 nt, Homo sapiens
  misc_RNA (1)...(19): siRNA sense strand
agaugguggccuugggcau

SEQ ID NO: 2434345 - RNA, 19 nt, Homo sapiens
  misc_RNA (1)...(19): siRNA sense strand
aggaagaagugcuuggccu

SEQ ID NO: 2434346 - RNA, 19 nt, Homo sapiens
  misc_RNA (1)...(19): siRNA sense strand
caaccugagcaaaggggaa

SEQ ID NO: 2434347 - RNA, 19 nt, Homo sapiens
  misc_RNA (1)...(19): siRNA sense strand
gcacaagcugcuggagaca

SEQ ID NO: 2434348 - RNA, 19 nt, Homo sapiens
  misc_RNA (1)...(19): siRNA sense strand
aggaugaagaggagagcuc

SEQ ID NO: 2434349 - RNA, 19 nt, Homo sapiens
  misc_RNA (1)...(19): siRNA sense strand
gcaccaagauccugggcau

SEQ ID NO: 2434350 - RNA, 19 nt, Homo sapiens
  misc_RNA (1)...(19): siRNA sense strand
gagaccaagcagcgggaaa

SEQ ID NO: 2434351 - RNA, 19 nt, Homo sapiens
  misc_RNA (1)...(19): siRNA sense strand
uggagaugguggugaagau

SEQ ID NO: 2434352 - RNA, 19 nt, Homo sapiens
  misc_RNA (1)...(19): siRNA sense strand
ccggagacgcugaaggaga

SEQ ID NO: 2434353 - RNA, 19 nt, Homo sapiens
  misc_RNA (1)...(19): siRNA sense strand
gagaaggccaggagagcca

SEQ ID NO: 2434354 - RNA, 19 nt, Homo sapiens
  misc_RNA (1)...(19): siRNA sense strand
ggaagaagugcuuggccuu

SEQ ID NO: 2434355 - RNA, 19 nt, Homo sapiens
  misc_RNA (1)...(19): siRNA sense strand
acgccgaugacgagggcaa

SEQ ID NO: 2434356 - RNA, 19 nt, Homo sapiens
  misc_RNA (1)...(19): siRNA sense strand
uggugaagaugguggccuu

SEQ ID NO: 2434357 - RNA, 19 nt, Homo sapiens
  misc_RNA (1)...(19): siRNA sense strand
ccauucugguggagggcuu

SEQ ID NO: 2434358 - RNA, 19 nt, Homo sapiens
  misc_RNA (1)...(19): siRNA sense strand
ggcugaagcugguggugga

SEQ ID NO: 2434359 - RNA, 19 nt, Homo sapiens
  misc_RNA (1)...(19): siRNA sense strand
cugccagaccggaagaauu

SEQ ID NO: 2434360 - RNA, 19 nt, Homo sapiens
  misc_RNA (1)...(19): siRNA sense strand
cgcuauuaccagacagaga

SEQ ID NO: 2434361 - RNA, 19 nt, Homo sapiens
  misc_RNA (1)...(19): siRNA sense strand
gcuccuucuucaugaucaa

SEQ ID NO: 2434362 - RNA, 19 nt, Homo sapiens
  misc_RNA (1)...(19): siRNA sense strand
gggaugacgccgaugacga

SEQ ID NO: 2434363 - RNA, 19 nt, Homo sapiens
  misc_RNA (1)...(19): siRNA sense strand
aggagaaggcacuaguaga

SEQ ID NO: 2434364 - RNA, 19 nt, Homo sapiens
  misc_RNA (1)...(19): siRNA sense strand
ccgcagucuuucuggcuga

SEQ ID NO: 2434365 - RNA, 19 nt, Homo sapiens
  misc_RNA (1)...(19): siRNA sense strand
gcaucagcauguuggucau

SEQ ID NO: 2434366 - RNA, 19 nt, Homo sapiens
  misc_RNA (1)...(19): siRNA sense strand
gcuuccuaccugagaauuu

SEQ ID NO: 2434367 - RNA, 19 nt, Homo sapiens
  misc_RNA (1)...(19): siRNA sense strand
gggacaggaagaagugcuu

SEQ ID NO: 2434368 - RNA, 19 nt, Homo sapiens
  misc_RNA (1)...(19): siRNA sense strand
cugaaaugacagugaaggu

SEQ ID NO: 2434369 - RNA, 19 nt, Homo sapiens
  misc_RNA (1)...(19): siRNA sense strand
ugugggagaucgugggcca

SEQ ID NO: 2434370 - RNA, 19 nt, Homo sapiens
  misc_RNA (1)...(19): siRNA sense strand
agaugguggccuugggcau

SEQ ID NO: 2434371 - RNA, 19 nt, Homo sapiens
  misc_RNA (1)...(19): siRNA sense strand
aggaagaagugcuuggccu

SEQ ID NO: 2434372 - RNA, 19 nt, Homo sapiens
  misc_RNA (1)...(19): siRNA sense strand
caaccugagcaaaggggaa

SEQ ID NO: 2434373 - RNA, 19 nt, Homo sapiens
  misc_RNA (1)...(19): siRNA sense strand
gcacaagcugcuggagaca

SEQ ID NO: 2434374 - RNA, 19 nt, Homo sapiens
  misc_RNA (1)...(19): siRNA sense strand
aggaugaagaggagagcuc

SEQ ID NO: 2434375 - RNA, 19 nt, Homo sapiens
  misc_RNA (1)...(19): siRNA sense strand
gcaccaagauccugggcau

SEQ ID NO: 2434376 - RNA, 19 nt, Homo sapiens
  misc_RNA (1)...(19): siRNA sense strand
gagaccaagcagcgggaaa

SEQ ID NO: 2434377 - RNA, 19 nt, Homo sapiens
  misc_RNA (1)...(19): siRNA sense strand
uggagaugguggugaagau

SEQ ID NO: 2434378 - RNA, 19 nt, Homo sapiens
  misc_RNA (1)...(19): siRNA sense strand
ccggagacgcugaaggaga

SEQ ID NO: 2434379 - RNA, 19 nt, Homo sapiens
  misc_RNA (1)...(19): siRNA sense strand
gagaaggccaggagagcca

SEQ ID NO: 2434380 - RNA, 19 nt, Homo sapiens
  misc_RNA (1)...(19): siRNA sense strand
ggaagaagugcuuggccuu

SEQ ID NO: 2434381 - RNA, 19 nt, Homo sapiens
  misc_RNA (1)...(19): siRNA sense strand
acgccgaugacgagggcaa

SEQ ID NO: 2434382 - RNA, 19 nt, Homo sapiens
  misc_RNA (1)...(19): siRNA sense strand
uggugaagaugguggccuu

SEQ ID NO: 2434383 - RNA, 19 nt, Homo sapiens
  misc_RNA (1)...(19): siRNA sense strand
ccauucugguggagggcuu

SEQ ID NO: 2434384 - RNA, 19 nt, Homo sapiens
  misc_RNA (1)...(19): siRNA sense strand
ggcugaagcugguggugga

SEQ ID NO: 2434385 - RNA, 19 nt, Homo sapiens
  misc_RNA (1)...(19): siRNA sense strand
cugccagaccggaagaauu

SEQ ID NO: 2434386 - RNA, 19 nt, Homo sapiens
  misc_RNA (1)...(19): siRNA sense strand
cgcuauuaccagacagaga

SEQ ID NO: 2434387 - RNA, 19 nt, Homo sapiens
  misc_RNA (1)...(19): siRNA sense strand
gcuccuucuucaugaucaa

SEQ ID NO: 2434388 - RNA, 19 nt, Homo sapiens
  misc_RNA (1)...(19): siRNA sense strand
gggaugacgccgaugacga

SEQ ID NO: 2434389 - RNA, 19 nt, Homo sapiens
  misc_RNA (1)...(19): siRNA sense strand
aggagaaggcacuaguaga

SEQ ID NO: 2434390 - RNA, 19 nt, Homo sapiens
  misc_RNA (1)...(19): siRNA sense strand
ccgcagucuuucuggcuga

SEQ ID NO: 2434391 - RNA, 19 nt, Homo sapiens
  misc_RNA (1)...(19): siRNA sense strand
gcaucagcauguuggucau

SEQ ID NO: 2434392 - RNA, 19 nt, Homo sapiens
  misc_RNA (1)...(19): siRNA sense strand
gcuuccuaccugagaauuu

SEQ ID NO: 2434393 - RNA, 19 nt, Homo sapiens
  misc_RNA (1)...(19): siRNA sense strand
gggacaggaagaagugcuu

SEQ ID NO: 2434394 - RNA, 19 nt, Homo sapiens
  misc_RNA (1)...(19): siRNA sense strand
cugaaaugacagugaaggu

SEQ ID NO: 2434395 - RNA, 19 nt, Homo sapiens
  misc_RNA (1)...(19): siRNA sense strand
ugugggagaucgugggcca

SEQ ID NO: 2434396 - RNA, 19 nt, Homo sapiens
  misc_RNA (1)...(19): siRNA sense strand
agaugguggccuugggcau

SEQ ID NO: 2434397 - RNA, 19 nt, Homo sapiens
  misc_RNA (1)...(19): siRNA sense strand
aggaagaagugcuuggccu

SEQ ID NO: 2434398 - RNA, 19 nt, Homo sapiens
  misc_RNA (1)...(19): siRNA sense strand
caaccugagcaaaggggaa

SEQ ID NO: 2434399 - RNA, 19 nt, Homo sapiens
  misc_RNA (1)...(19): siRNA sense strand
gcacaagcugcuggagaca

SEQ ID NO: 2434400 - RNA, 19 nt, Homo sapiens
  misc_RNA (1)...(19): siRNA sense strand
aggaugaagaggagagcuc

SEQ ID NO: 2434401 - RNA, 19 nt, Homo sapiens
  misc_RNA (1)...(19): siRNA sense strand
gcaccaagauccugggcau

SEQ ID NO: 2434402 - RNA, 19 nt, Homo sapiens
  misc_RNA (1)...(19): siRNA sense strand
gagaccaagcagcgggaaa

SEQ ID NO: 2434403 - RNA, 19 nt, Homo sapiens
  misc_RNA (1)...(19): siRNA sense strand
uggagaugguggugaagau

SEQ ID NO: 2434404 - RNA, 19 nt, Homo sapiens
  misc_RNA (1)...(19): siRNA sense strand
ccggagacgcugaaggaga

SEQ ID NO: 2434405 - RNA, 19 nt, Homo sapiens
  misc_RNA (1)...(19): siRNA sense strand
gagaaggccaggagagcca

SEQ ID NO: 2434406 - RNA, 19 nt, Homo sapiens
  misc_RNA (1)...(19): siRNA sense strand
ggaagaagugcuuggccuu

SEQ ID NO: 2434407 - RNA, 19 nt, Homo sapiens
  misc_RNA (1)...(19): siRNA sense strand
acgccgaugacgagggcaa

SEQ ID NO: 2434408 - RNA, 19 nt, Homo sapiens
  misc_RNA (1)...(19): siRNA sense strand
uggugaagaugguggccuu

SEQ ID NO: 2434409 - RNA, 19 nt, Homo sapiens
  misc_RNA (1)...(19): siRNA sense strand
ccauucugguggagggcuu

SEQ ID NO: 2434410 - RNA, 19 nt, Homo sapiens
  misc_RNA (1)...(19): siRNA sense strand
ggcugaagcugguggugga

SEQ ID NO: 2434411 - RNA, 19 nt, Homo sapiens
  misc_RNA (1)...(19): siRNA sense strand
cugccagaccggaagaauu

SEQ ID NO: 2434412 - RNA, 19 nt, Homo sapiens
  misc_RNA (1)...(19): siRNA sense strand
cgcuauuaccagacagaga

SEQ ID NO: 2434413 - RNA, 19 nt, Homo sapiens
  misc_RNA (1)...(19): siRNA sense strand
gcuccuucuucaugaucaa

SEQ ID NO: 2434414 - RNA, 19 nt, Homo sapiens
  misc_RNA (1)...(19): siRNA sense strand
gggaugacgccgaugacga

SEQ ID NO: 2434415 - RNA, 19 nt, Homo sapiens
  misc_RNA (1)...(19): siRNA sense strand
aggagaaggcacuaguaga

SEQ ID NO: 2434416 - RNA, 19 nt, Homo sapiens
  misc_RNA (1)...(19): siRNA sense strand
ccgcagucuuucuggcuga

SEQ ID NO: 2434417 - RNA, 19 nt, Homo sapiens
  misc_RNA (1)...(19): siRNA sense strand
gcaucagcauguuggucau

SEQ ID NO: 2434418 - RNA, 19 nt, Homo sapiens
  misc_RNA (1)...(19): siRNA sense strand
gcuuccuaccugagaauuu

SEQ ID NO: 2434419 - RNA, 19 nt, Homo sapiens
  misc_RNA (1)...(19): siRNA sense strand
gggacaggaagaagugcuu

SEQ ID NO: 2434420 - RNA, 19 nt, Homo sapiens
  misc_RNA (1)...(19): siRNA sense strand
cugaaaugacagugaaggu

SEQ ID NO: 2434421 - RNA, 19 nt, Homo sapiens
  misc_RNA (1)...(19): siRNA sense strand
ugugggagaucgugggcca

SEQ ID NO: 2434422 - RNA, 19 nt, Homo sapiens
  misc_RNA (1)...(19): siRNA sense strand
agaugguggccuugggcau

SEQ ID NO: 2434423 - RNA, 19 nt, Homo sapiens
  misc_RNA (1)...(19): siRNA sense strand
aggaagaagugcuuggccu

SEQ ID NO: 2434424 - RNA, 19 nt, Homo sapiens
  misc_RNA (1)...(19): siRNA sense strand
caaccugagcaaaggggaa

SEQ ID NO: 2434425 - RNA, 19 nt, Homo sapiens
  misc_RNA (1)...(19): siRNA sense strand
gcacaagcugcuggagaca

SEQ ID NO: 2434426 - RNA, 19 nt, Homo sapiens
  misc_RNA (1)...(19): siRNA sense strand
aggaugaagaggagagcuc

SEQ ID NO: 2434427 - RNA, 19 nt, Homo sapiens
  misc_RNA (1)...(19): siRNA sense strand
cagaagaugaagaggagga

SEQ ID NO: 2434428 - RNA, 19 nt, Homo sapiens
  misc_RNA (1)...(19): siRNA sense strand
augaagaggaggaggaugu

SEQ ID NO: 2434429 - RNA, 19 nt, Homo sapiens
  misc_RNA (1)...(19): siRNA sense strand
ccuucaagaaacaggaaaa

SEQ ID NO: 2434430 - RNA, 19 nt, Homo sapiens
  misc_RNA (1)...(19): siRNA sense strand
aggaagaugcagagucaga

SEQ ID NO: 2434431 - RNA, 19 nt, Homo sapiens
  misc_RNA (1)...(19): siRNA sense strand
augcaagcaaguauagaaa

SEQ ID NO: 2434432 - RNA, 19 nt, Homo sapiens
  misc_RNA (1)...(19): siRNA sense strand
augcagagucagaagauga

SEQ ID NO: 2434433 - RNA, 19 nt, Homo sapiens
  misc_RNA (1)...(19): siRNA sense strand
aacuaaaggccgacaaaga

SEQ ID NO: 2434434 - RNA, 19 nt, Homo sapiens
  misc_RNA (1)...(19): siRNA sense strand
agucagaagaugaagagga

SEQ ID NO: 2434435 - RNA, 19 nt, Homo sapiens
  misc_RNA (1)...(19): siRNA sense strand
gcauauuaguggacagcac

SEQ ID NO: 2434436 - RNA, 19 nt, Homo sapiens
  misc_RNA (1)...(19): siRNA sense strand
cuuuaagaacggucaguuu

SEQ ID NO: 2434437 - RNA, 19 nt, Homo sapiens
  misc_RNA (1)...(19): siRNA sense strand
aagaugaagaggaggagga

SEQ ID NO: 2434438 - RNA, 19 nt, Homo sapiens
  misc_RNA (1)...(19): siRNA sense strand
aggaggaggaugugaaacu

SEQ ID NO: 2434439 - RNA, 19 nt, Homo sapiens
  misc_RNA (1)...(19): siRNA sense strand
augaggaagcugaagaaaa

SEQ ID NO: 2434440 - RNA, 19 nt, Homo sapiens
  misc_RNA (1)...(19): siRNA sense strand
uuguugaagcagaggcaau

SEQ ID NO: 2434441 - RNA, 19 nt, Homo sapiens
  misc_RNA (1)...(19): siRNA sense strand
gaagugugguucagggcca

SEQ ID NO: 2434442 - RNA, 19 nt, Homo sapiens
  misc_RNA (1)...(19): siRNA sense strand
ucccaaaguggaagccaaa

SEQ ID NO: 2434443 - RNA, 19 nt, Homo sapiens
  misc_RNA (1)...(19): siRNA sense strand
augaagaugaugacgauga

SEQ ID NO: 2434444 - RNA, 19 nt, Homo sapiens
  misc_RNA (1)...(19): siRNA sense strand
augaugaugaagaggauga

SEQ ID NO: 2434445 - RNA, 19 nt, Homo sapiens
  misc_RNA (1)...(19): siRNA sense strand
augaagaugaugaugauga

SEQ ID NO: 2434446 - RNA, 19 nt, Homo sapiens
  misc_RNA (1)...(19): siRNA sense strand
ugaugaggaagcugaagaa

SEQ ID NO: 2434447 - RNA, 19 nt, Homo sapiens
  misc_RNA (1)...(19): siRNA sense strand
gguggauaaugaugaaaau

SEQ ID NO: 2434448 - RNA, 19 nt, Homo sapiens
  misc_RNA (1)...(19): siRNA sense strand
aggaugaugaugaagauga

SEQ ID NO: 2434449 - RNA, 19 nt, Homo sapiens
  misc_RNA (1)...(19): siRNA sense strand
aagaggaggaggaugugaa

SEQ ID NO: 2434450 - RNA, 19 nt, Homo sapiens
  misc_RNA (1)...(19): siRNA sense strand
acuuaguagcuguggagga

SEQ ID NO: 2434451 - RNA, 19 nt, Homo sapiens
  misc_RNA (1)...(19): siRNA sense strand
gcacauuguugaagcagag

SEQ ID NO: 2434452 - RNA, 19 nt, Homo sapiens
  misc_RNA (1)...(19): siRNA sense strand
aggcaguccaauuaaagua

SEQ ID NO: 2434453 - RNA, 19 nt, Homo sapiens
  misc_RNA (1)...(19): siRNA sense strand
ccgacaaagauuaucacuu

SEQ ID NO: 2434454 - RNA, 19 nt, Homo sapiens
  misc_RNA (1)...(19): siRNA sense strand
augaugaagaugaugauga

SEQ ID NO: 2434455 - RNA, 19 nt, Homo sapiens
  misc_RNA (1)...(19): siRNA sense strand
augaugaagaggaugauga

SEQ ID NO: 2434456 - RNA, 19 nt, Homo sapiens
  misc_RNA (1)...(19): siRNA sense strand
guugugaacuaaaggccga

SEQ ID NO: 2434457 - RNA, 19 nt, Homo sapiens
  misc_RNA (1)...(19): siRNA sense strand
gaaaaugucuguacagcca

SEQ ID NO: 2434458 - RNA, 19 nt, Homo sapiens
  misc_RNA (1)...(19): siRNA sense strand
cugaugaagaugaugacga

SEQ ID NO: 2434459 - RNA, 19 nt, Homo sapiens
  misc_RNA (1)...(19): siRNA sense strand
ugauuuugaugaugaggaa

SEQ ID NO: 2434460 - RNA, 19 nt, Homo sapiens
  misc_RNA (1)...(19): siRNA sense strand
cagaagaugaagaggagga

SEQ ID NO: 2434461 - RNA, 19 nt, Homo sapiens
  misc_RNA (1)...(19): siRNA sense strand
augaagaggaggaggaugu

SEQ ID NO: 2434462 - RNA, 19 nt, Homo sapiens
  misc_RNA (1)...(19): siRNA sense strand
ccuucaagaaacaggaaaa

SEQ ID NO: 2434463 - RNA, 19 nt, Homo sapiens
  misc_RNA (1)...(19): siRNA sense strand
aggaagaugcagagucaga

SEQ ID NO: 2434464 - RNA, 19 nt, Homo sapiens
  misc_RNA (1)...(19): siRNA sense strand
augcaagcaaguauagaaa

SEQ ID NO: 2434465 - RNA, 19 nt, Homo sapiens
  misc_RNA (1)...(19): siRNA sense strand
augcagagucagaagauga

SEQ ID NO: 2434466 - RNA, 19 nt, Homo sapiens
  misc_RNA (1)...(19): siRNA sense strand
aacuaaaggccgacaaaga

SEQ ID NO: 2434467 - RNA, 19 nt, Homo sapiens
  misc_RNA (1)...(19): siRNA sense strand
agucagaagaugaagagga

SEQ ID NO: 2434468 - RNA, 19 nt, Homo sapiens
  misc_RNA (1)...(19): siRNA sense strand
gcauauuaguggacagcac

SEQ ID NO: 2434469 - RNA, 19 nt, Homo sapiens
  misc_RNA (1)...(19): siRNA sense strand
cuuuaagaacggucaguuu

SEQ ID NO: 2434470 - RNA, 19 nt, Homo sapiens
  misc_RNA (1)...(19): siRNA sense strand
aagaugaagaggaggagga

SEQ ID NO: 2434471 - RNA, 19 nt, Homo sapiens
  misc_RNA (1)...(19): siRNA sense strand
aggaggaggaugugaaacu

SEQ ID NO: 2434472 - RNA, 19 nt, Homo sapiens
  misc_RNA (1)...(19): siRNA sense strand
augaggaagcugaagaaaa

SEQ ID NO: 2434473 - RNA, 19 nt, Homo sapiens
  misc_RNA (1)...(19): siRNA sense strand
uuguugaagcagaggcaau

SEQ ID NO: 2434474 - RNA, 19 nt, Homo sapiens
  misc_RNA (1)...(19): siRNA sense strand
gaagugugguucagggcca

SEQ ID NO: 2434475 - RNA, 19 nt, Homo sapiens
  misc_RNA (1)...(19): siRNA sense strand
ucccaaaguggaagccaaa

SEQ ID NO: 2434476 - RNA, 19 nt, Homo sapiens
  misc_RNA (1)...(19): siRNA sense strand
augaagaugaugacgauga

SEQ ID NO: 2434477 - RNA, 19 nt, Homo sapiens
  misc_RNA (1)...(19): siRNA sense strand
augaugaugaagaggauga

SEQ ID NO: 2434478 - RNA, 19 nt, Homo sapiens
  misc_RNA (1)...(19): siRNA sense strand
augaagaugaugaugauga

SEQ ID NO: 2434479 - RNA, 19 nt, Homo sapiens
  misc_RNA (1)...(19): siRNA sense strand
ugaugaggaagcugaagaa

SEQ ID NO: 2434480 - RNA, 19 nt, Homo sapiens
  misc_RNA (1)...(19): siRNA sense strand
gguggauaaugaugaaaau

SEQ ID NO: 2434481 - RNA, 19 nt, Homo sapiens
  misc_RNA (1)...(19): siRNA sense strand
aggaugaugaugaagauga

SEQ ID NO: 2434482 - RNA, 19 nt, Homo sapiens
  misc_RNA (1)...(19): siRNA sense strand
aagaggaggaggaugugaa

SEQ ID NO: 2434483 - RNA, 19 nt, Homo sapiens
  misc_RNA (1)...(19): siRNA sense strand
acuuaguagcuguggagga

SEQ ID NO: 2434484 - RNA, 19 nt, Homo sapiens
  misc_RNA (1)...(19): siRNA sense strand
gcacauuguugaagcagag

SEQ ID NO: 2434485 - RNA, 19 nt, Homo sapiens
  misc_RNA (1)...(19): siRNA sense strand
aggcaguccaauuaaagua

SEQ ID NO: 2434486 - RNA, 19 nt, Homo sapiens
  misc_RNA (1)...(19): siRNA sense strand
ccgacaaagauuaucacuu

SEQ ID NO: 2434487 - RNA, 19 nt, Homo sapiens
  misc_RNA (1)...(19): siRNA sense strand
augaugaagaugaugauga

SEQ ID NO: 2434488 - RNA, 19 nt, Homo sapiens
  misc_RNA (1)...(19): siRNA sense strand
augaugaagaggaugauga

SEQ ID NO: 2434489 - RNA, 19 nt, Homo sapiens
  misc_RNA (1)...(19): siRNA sense strand
guugugaacuaaaggccga

SEQ ID NO: 2434490 - RNA, 19 nt, Homo sapiens
  misc_RNA (1)...(19): siRNA sense strand
gaaaaugucuguacagcca

SEQ ID NO: 2434491 - RNA, 19 nt, Homo sapiens
  misc_RNA (1)...(19): siRNA sense strand
cugaugaagaugaugacga

SEQ ID NO: 2434492 - RNA, 19 nt, Homo sapiens
  misc_RNA (1)...(19): siRNA sense strand
ugauuuugaugaugaggaa

SEQ ID NO: 2434493 - RNA, 19 nt, Homo sapiens
  misc_RNA (1)...(19): siRNA sense strand
gggcagacauguuggccaa

SEQ ID NO: 2434494 - RNA, 19 nt, Homo sapiens
  misc_RNA (1)...(19): siRNA sense strand
agguggagcuucuggaaaa

SEQ ID NO: 2434495 - RNA, 19 nt, Homo sapiens
  misc_RNA (1)...(19): siRNA sense strand
auggaaagacccaggaaga

SEQ ID NO: 2434496 - RNA, 19 nt, Homo sapiens
  misc_RNA (1)...(19): siRNA sense strand
agaacauggacaagaucaa

SEQ ID NO: 2434497 - RNA, 19 nt, Homo sapiens
  misc_RNA (1)...(19): siRNA sense strand
ucaaagaacugcagggcuc

SEQ ID NO: 2434498 - RNA, 19 nt, Homo sapiens
  misc_RNA (1)...(19): siRNA sense strand
agugagaaguccagauacu

SEQ ID NO: 2434499 - RNA, 19 nt, Homo sapiens
  misc_RNA (1)...(19): siRNA sense strand
gggcaaguuaagaggauac

SEQ ID NO: 2434500 - RNA, 19 nt, Homo sapiens
  misc_RNA (1)...(19): siRNA sense strand
guagaaugccugaagcuga

SEQ ID NO: 2434501 - RNA, 19 nt, Homo sapiens
  misc_RNA (1)...(19): siRNA sense strand
cauaacaacuucuaccgaa

SEQ ID NO: 2434502 - RNA, 19 nt, Homo sapiens
  misc_RNA (1)...(19): siRNA sense strand
uggucaaguuccuuccaaa

SEQ ID NO: 2434503 - RNA, 19 nt, Homo sapiens
  misc_RNA (1)...(19): siRNA sense strand
acucaguagugauggaaag

SEQ ID NO: 2434504 - RNA, 19 nt, Homo sapiens
  misc_RNA (1)...(19): siRNA sense strand
ugguacuggcggaggacau

SEQ ID NO: 2434505 - RNA, 19 nt, Homo sapiens
  misc_RNA (1)...(19): siRNA sense strand
ggaaacaagaccaggugcu

SEQ ID NO: 2434506 - RNA, 19 nt, Homo sapiens
  misc_RNA (1)...(19): siRNA sense strand
ccacuacucccaagggcaa

SEQ ID NO: 2434507 - RNA, 19 nt, Homo sapiens
  misc_RNA (1)...(19): siRNA sense strand
cugcaguacaucagagagu

SEQ ID NO: 2434508 - RNA, 19 nt, Homo sapiens
  misc_RNA (1)...(19): siRNA sense strand
gggcuggagaccuugacaa

SEQ ID NO: 2434509 - RNA, 19 nt, Homo sapiens
  misc_RNA (1)...(19): siRNA sense strand
uggaaguauauacgccaaa

SEQ ID NO: 2434510 - RNA, 19 nt, Homo sapiens
  misc_RNA (1)...(19): siRNA sense strand
gcaaggagauugagcagaa

SEQ ID NO: 2434511 - RNA, 19 nt, Homo sapiens
  misc_RNA (1)...(19): siRNA sense strand
aggagauugagcagaagua

SEQ ID NO: 2434512 - RNA, 19 nt, Homo sapiens
  misc_RNA (1)...(19): siRNA sense strand
gcaaucaaggccauggcaa

SEQ ID NO: 2434513 - RNA, 19 nt, Homo sapiens
  misc_RNA (1)...(19): siRNA sense strand
cgacuguggagaagagauc

SEQ ID NO: 2434514 - RNA, 19 nt, Homo sapiens
  misc_RNA (1)...(19): siRNA sense strand
ugauaauucaggagggaaa

SEQ ID NO: 2434515 - RNA, 19 nt, Homo sapiens
  misc_RNA (1)...(19): siRNA sense strand
ccaucaagagggugggcua

SEQ ID NO: 2434516 - RNA, 19 nt, Homo sapiens
  misc_RNA (1)...(19): siRNA sense strand
ggaaaauacuuguucggaa

SEQ ID NO: 2434517 - RNA, 19 nt, Homo sapiens
  misc_RNA (1)...(19): siRNA sense strand
aguaugugguggagcccaa

SEQ ID NO: 2434518 - RNA, 19 nt, Homo sapiens
  misc_RNA (1)...(19): siRNA sense strand
acuuuaaccucaagacaca

SEQ ID NO: 2434519 - RNA, 19 nt, Homo sapiens
  misc_RNA (1)...(19): siRNA sense strand
ucaagaaguccaagcccaa

SEQ ID NO: 2434520 - RNA, 19 nt, Homo sapiens
  misc_RNA (1)...(19): siRNA sense strand
cccaacaagaggaaguuaa

SEQ ID NO: 2434521 - RNA, 19 nt, Homo sapiens
  misc_RNA (1)...(19): siRNA sense strand
gguuacaaagggaguuauu

SEQ ID NO: 2434522 - RNA, 19 nt, Homo sapiens
  misc_RNA (1)...(19): siRNA sense strand
gagcaccagcauuggcaaa

SEQ ID NO: 2434523 - RNA, 19 nt, Homo sapiens
  misc_RNA (1)...(19): siRNA sense strand
aagaaacggcaaagaagau

SEQ ID NO: 2434524 - RNA, 19 nt, Homo sapiens
  misc_RNA (1)...(19): siRNA sense strand
agacagccauagagaaaau

SEQ ID NO: 2434525 - RNA, 19 nt, Homo sapiens
  misc_RNA (1)...(19): siRNA sense strand
agagaaaauuacucagaga

SEQ ID NO: 2434526 - RNA, 19 nt, Homo sapiens
  misc_RNA (1)...(19): siRNA sense strand
cugaaaaugagaagcagua

SEQ ID NO: 2434527 - RNA, 19 nt, Homo sapiens
  misc_RNA (1)...(19): siRNA sense strand
ugugaaauguccagcagga

SEQ ID NO: 2434528 - RNA, 19 nt, Homo sapiens
  misc_RNA (1)...(19): siRNA sense strand
aguuuggguucgacaagua

SEQ ID NO: 2434529 - RNA, 19 nt, Homo sapiens
  misc_RNA (1)...(19): siRNA sense strand
ccucaagacacacacgaau

SEQ ID NO: 2434530 - RNA, 19 nt, Homo sapiens
  misc_RNA (1)...(19): siRNA sense strand
ucaaacaaagaaacggcaa

SEQ ID NO: 2434531 - RNA, 19 nt, Homo sapiens
  misc_RNA (1)...(19): siRNA sense strand
cagcauuggcaaacggcga

SEQ ID NO: 2434532 - RNA, 19 nt, Homo sapiens
  misc_RNA (1)...(19): siRNA sense strand
cugaagacagccauagaga

SEQ ID NO: 2434533 - RNA, 19 nt, Homo sapiens
  misc_RNA (1)...(19): siRNA sense strand
gcgaugucaaagccggaaa

SEQ ID NO: 2434534 - RNA, 19 nt, Homo sapiens
  misc_RNA (1)...(19): siRNA sense strand
gaaaccuguuggagcggau

SEQ ID NO: 2434535 - RNA, 19 nt, Homo sapiens
  misc_RNA (1)...(19): siRNA sense strand
cggacaaaguggaggaggc

SEQ ID NO: 2434536 - RNA, 19 nt, Homo sapiens
  misc_RNA (1)...(19): siRNA sense strand
cgagagagucaggaaucaa

SEQ ID NO: 2434537 - RNA, 19 nt, Homo sapiens
  misc_RNA (1)...(19): siRNA sense strand
acaaaguggaggaggcuuc

SEQ ID NO: 2434538 - RNA, 19 nt, Homo sapiens
  misc_RNA (1)...(19): siRNA sense strand
auguaaucauugugggaaa

SEQ ID NO: 2434539 - RNA, 19 nt, Homo sapiens
  misc_RNA (1)...(19): siRNA sense strand
aauacauaccggagagaaa

SEQ ID NO: 2434540 - RNA, 19 nt, Homo sapiens
  misc_RNA (1)...(19): siRNA sense strand
augcaaucacugugggaaa

SEQ ID NO: 2434541 - RNA, 19 nt, Homo sapiens
  misc_RNA (1)...(19): siRNA sense strand
ggaaagaagucaucgugga

SEQ ID NO: 2434542 - RNA, 19 nt, Homo sapiens
  misc_RNA (1)...(19): siRNA sense strand
aagucaucguggagugaaa

SEQ ID NO: 2434543 - RNA, 19 nt, Homo sapiens
  misc_RNA (1)...(19): siRNA sense strand
auguaacgagugugggaaa

SEQ ID NO: 2434544 - RNA, 19 nt, Homo sapiens
  misc_RNA (1)...(19): siRNA sense strand
augucacgauugugggaaa

SEQ ID NO: 2434545 - RNA, 19 nt, Homo sapiens
  misc_RNA (1)...(19): siRNA sense strand
gugacagaggaaagaggaa

SEQ ID NO: 2434546 - RNA, 19 nt, Homo sapiens
  misc_RNA (1)...(19): siRNA sense strand
aguuggaacaagacaagaa

SEQ ID NO: 2434547 - RNA, 19 nt, Homo sapiens
  misc_RNA (1)...(19): siRNA sense strand
cguaagaacucauacugga

SEQ ID NO: 2434548 - RNA, 19 nt, Homo sapiens
  misc_RNA (1)...(19): siRNA sense strand
uuacugugcacaagagaau

SEQ ID NO: 2434549 - RNA, 19 nt, Homo sapiens
  misc_RNA (1)...(19): siRNA sense strand
gacucuacuuaaagccaaa

SEQ ID NO: 2434550 - RNA, 19 nt, Homo sapiens
  misc_RNA (1)...(19): siRNA sense strand
ucagaaaagaacagucuaa

SEQ ID NO: 2434551 - RNA, 19 nt, Homo sapiens
  misc_RNA (1)...(19): siRNA sense strand
gaauguaacgaguguggga

SEQ ID NO: 2434552 - RNA, 19 nt, Homo sapiens
  misc_RNA (1)...(19): siRNA sense strand
guuaaugagcuccugacaa

SEQ ID NO: 2434553 - RNA, 19 nt, Homo sapiens
  misc_RNA (1)...(19): siRNA sense strand
agaggaaagaggaauucua

SEQ ID NO: 2434554 - RNA, 19 nt, Homo sapiens
  misc_RNA (1)...(19): siRNA sense strand
gcacaagagaauucauacu

SEQ ID NO: 2434555 - RNA, 19 nt, Homo sapiens
  misc_RNA (1)...(19): siRNA sense strand
gugggaaagcauuuaguga

SEQ ID NO: 2434556 - RNA, 19 nt, Homo sapiens
  misc_RNA (1)...(19): siRNA sense strand
aggauguggccguggaguu

SEQ ID NO: 2434557 - RNA, 19 nt, Homo sapiens
  misc_RNA (1)...(19): siRNA sense strand
ugacagaggaaagaggaau

SEQ ID NO: 2434558 - RNA, 19 nt, Homo sapiens
  misc_RNA (1)...(19): siRNA sense strand
ugguuaacuccuaagaaga

SEQ ID NO: 2434559 - RNA, 19 nt, Homo sapiens
  misc_RNA (1)...(19): siRNA sense strand
aagaacucauacuggagaa

SEQ ID NO: 2434560 - RNA, 19 nt, Homo sapiens
  misc_RNA (1)...(19): siRNA sense strand
acuccuaagaagaauguuu

SEQ ID NO: 2434561 - RNA, 19 nt, Homo sapiens
  misc_RNA (1)...(19): siRNA sense strand
ggagagaaacccuacgagu

SEQ ID NO: 2434562 - RNA, 19 nt, Homo sapiens
  misc_RNA (1)...(19): siRNA sense strand
ugguaaccuucgaggaugu

SEQ ID NO: 2434563 - RNA, 19 nt, Homo sapiens
  misc_RNA (1)...(19): siRNA sense strand
auguaaucaguguggaaaa

SEQ ID NO: 2434564 - RNA, 19 nt, Homo sapiens
  misc_RNA (1)...(19): siRNA sense strand
agugaaacucaaugaaugu

SEQ ID NO: 2434565 - RNA, 19 nt, Homo sapiens
  misc_RNA (1)...(19): siRNA sense strand
ggggagaaaccuuaugaau

SEQ ID NO: 2434566 - RNA, 19 nt, Homo sapiens
  misc_RNA (1)...(19): siRNA sense strand
ccacaaagauuaagccgaa

SEQ ID NO: 2434567 - RNA, 19 nt, Homo sapiens
  misc_RNA (1)...(19): siRNA sense strand
ugggaaaggcugaggacaa

SEQ ID NO: 2434568 - RNA, 19 nt, Homo sapiens
  misc_RNA (1)...(19): siRNA sense strand
ccauaaugccaaaggaaaa

SEQ ID NO: 2434569 - RNA, 19 nt, Homo sapiens
  misc_RNA (1)...(19): siRNA sense strand
agcgaaagcugaaggcaaa

SEQ ID NO: 2434570 - RNA, 19 nt, Homo sapiens
  misc_RNA (1)...(19): siRNA sense strand
cagccaaaguuuauggaau

SEQ ID NO: 2434571 - RNA, 19 nt, Homo sapiens
  misc_RNA (1)...(19): siRNA sense strand
gugaaagccagcaaagaaa

SEQ ID NO: 2434572 - RNA, 19 nt, Homo sapiens
  misc_RNA (1)...(19): siRNA sense strand
gaugaaaaccccagugaaa

SEQ ID NO: 2434573 - RNA, 19 nt, Homo sapiens
  misc_RNA (1)...(19): siRNA sense strand
guaaaaugccugucagaaa

SEQ ID NO: 2434574 - RNA, 19 nt, Homo sapiens
  misc_RNA (1)...(19): siRNA sense strand
ggccaaagcaagagaacca

SEQ ID NO: 2434575 - RNA, 19 nt, Homo sapiens
  misc_RNA (1)...(19): siRNA sense strand
caucaagacagcucggaaa

SEQ ID NO: 2434576 - RNA, 19 nt, Homo sapiens
  misc_RNA (1)...(19): siRNA sense strand
aagucaaggaagauagaaa

SEQ ID NO: 2434577 - RNA, 19 nt, Homo sapiens
  misc_RNA (1)...(19): siRNA sense strand
cugaaagagauuuggaaaa

SEQ ID NO: 2434578 - RNA, 19 nt, Homo sapiens
  misc_RNA (1)...(19): siRNA sense strand
gaacaagaugcaaggccaa

SEQ ID NO: 2434579 - RNA, 19 nt, Homo sapiens
  misc_RNA (1)...(19): siRNA sense strand
cuaaaauggaugagaagaa

SEQ ID NO: 2434580 - RNA, 19 nt, Homo sapiens
  misc_RNA (1)...(19): siRNA sense strand
ccucagaaagccacgaaua

SEQ ID NO: 2434581 - RNA, 19 nt, Homo sapiens
  misc_RNA (1)...(19): siRNA sense strand
aagcgaaagcugaaggcaa

SEQ ID NO: 2434582 - RNA, 19 nt, Homo sapiens
  misc_RNA (1)...(19): siRNA sense strand
aagaaaaggucacggaaau

SEQ ID NO: 2434583 - RNA, 19 nt, Homo sapiens
  misc_RNA (1)...(19): siRNA sense strand
gccaggauuuagaggcaaa

SEQ ID NO: 2434584 - RNA, 19 nt, Homo sapiens
  misc_RNA (1)...(19): siRNA sense strand
ggagaaagaaggacagcca

SEQ ID NO: 2434585 - RNA, 19 nt, Homo sapiens
  misc_RNA (1)...(19): siRNA sense strand
cagccaacaccaagagcaa

SEQ ID NO: 2434586 - RNA, 19 nt, Homo sapiens
  misc_RNA (1)...(19): siRNA sense strand
gggagaggacggugaugua

SEQ ID NO: 2434587 - RNA, 19 nt, Homo sapiens
  misc_RNA (1)...(19): siRNA sense strand
cggaaaaguaaaagggcau

SEQ ID NO: 2434588 - RNA, 19 nt, Homo sapiens
  misc_RNA (1)...(19): siRNA sense strand
uaggaaaauuagagggaga

SEQ ID NO: 2434589 - RNA, 19 nt, Homo sapiens
  misc_RNA (1)...(19): siRNA sense strand
agaauuuggacaagaagaa

SEQ ID NO: 2434590 - RNA, 19 nt, Homo sapiens
  misc_RNA (1)...(19): siRNA sense strand
acugaaagagauuuggaaa

SEQ ID NO: 2434591 - RNA, 19 nt, Homo sapiens
  misc_RNA (1)...(19): siRNA sense strand
uguaaaugguucuuagaga

SEQ ID NO: 2434592 - RNA, 19 nt, Homo sapiens
  misc_RNA (1)...(19): siRNA sense strand
uggaggaggcugugaauga

SEQ ID NO: 2434593 - RNA, 19 nt, Homo sapiens
  misc_RNA (1)...(19): siRNA sense strand
acgaauaggaagcagagua

SEQ ID NO: 2434594 - RNA, 19 nt, Homo sapiens
  misc_RNA (1)...(19): siRNA sense strand
gcagaguaguggaaagacu

SEQ ID NO: 2434595 - RNA, 19 nt, Homo sapiens
  misc_RNA (1)...(19): siRNA sense strand
aucuagaacugcugacaaa

SEQ ID NO: 2434596 - RNA, 19 nt, Homo sapiens
  misc_RNA (1)...(19): siRNA sense strand
caagaaaaggucacggaaa

SEQ ID NO: 2434597 - RNA, 19 nt, Homo sapiens
  misc_RNA (1)...(19): siRNA sense strand
agaaagaguacucgaggau

SEQ ID NO: 2434598 - RNA, 19 nt, Homo sapiens
  misc_RNA (1)...(19): siRNA sense strand
agagaaagcgaaagcugaa

SEQ ID NO: 2434599 - RNA, 19 nt, Homo sapiens
  misc_RNA (1)...(19): siRNA sense strand
aauagucaguagagaagaa

SEQ ID NO: 2434600 - RNA, 19 nt, Homo sapiens
  misc_RNA (1)...(19): siRNA sense strand
ggaacaaaucagauaaacu

SEQ ID NO: 2434601 - RNA, 19 nt, Homo sapiens
  misc_RNA (1)...(19): siRNA sense strand
gcauagaggaagucaagga

SEQ ID NO: 2434602 - RNA, 19 nt, Homo sapiens
  misc_RNA (1)...(19): siRNA sense strand
gagaggacggugauguaaa

SEQ ID NO: 2434603 - RNA, 19 nt, Homo sapiens
  misc_RNA (1)...(19): siRNA sense strand
gcucauauccccucagaaa

SEQ ID NO: 2434604 - RNA, 19 nt, Homo sapiens
  misc_RNA (1)...(19): siRNA sense strand
cccauaaugccaaaggaaa

SEQ ID NO: 2434605 - RNA, 19 nt, Homo sapiens
  misc_RNA (1)...(19): siRNA sense strand
cggaaauguaggaguucau

SEQ ID NO: 2434606 - RNA, 19 nt, Homo sapiens
  misc_RNA (1)...(19): siRNA sense strand
gcgccaggauuuagaggca

SEQ ID NO: 2434607 - RNA, 19 nt, Homo sapiens
  misc_RNA (1)...(19): siRNA sense strand
cuggagagagauuggaaau

SEQ ID NO: 2434608 - RNA, 19 nt, Homo sapiens
  misc_RNA (1)...(19): siRNA sense strand
ugaagacagcauagaggaa

SEQ ID NO: 2434609 - RNA, 19 nt, Homo sapiens
  misc_RNA (1)...(19): siRNA sense strand
gaauagugaggaaggcaau

SEQ ID NO: 2434610 - RNA, 19 nt, Homo sapiens
  misc_RNA (1)...(19): siRNA sense strand
cagaguaaacgcaagagaa

SEQ ID NO: 2434611 - RNA, 19 nt, Homo sapiens
  misc_RNA (1)...(19): siRNA sense strand
ugguagaugaacagccaaa

SEQ ID NO: 2434612 - RNA, 19 nt, Homo sapiens
  misc_RNA (1)...(19): siRNA sense strand
ccaagaguacugaaggaau

SEQ ID NO: 2434613 - RNA, 19 nt, Homo sapiens
  misc_RNA (1)...(19): siRNA sense strand
gggaagcaggugucugaaa

SEQ ID NO: 2434614 - RNA, 19 nt, Homo sapiens
  misc_RNA (1)...(19): siRNA sense strand
cggaaaacagccagaaaga

SEQ ID NO: 2434615 - RNA, 19 nt, Homo sapiens
  misc_RNA (1)...(19): siRNA sense strand
gugcugaggaggagaacca

SEQ ID NO: 2434616 - RNA, 19 nt, Homo sapiens
  misc_RNA (1)...(19): siRNA sense strand
agaauagugaggaaggcaa

SEQ ID NO: 2434617 - RNA, 19 nt, Homo sapiens
  misc_RNA (1)...(19): siRNA sense strand
acaccaagagcaaggaaca

SEQ ID NO: 2434618 - RNA, 19 nt, Homo sapiens
  misc_RNA (1)...(19): siRNA sense strand
gaagaaccuagcaaggaaa

SEQ ID NO: 2434619 - RNA, 19 nt, Homo sapiens
  misc_RNA (1)...(19): siRNA sense strand
augcaaggccaaagcaaga

SEQ ID NO: 2434620 - RNA, 19 nt, Homo sapiens
  misc_RNA (1)...(19): siRNA sense strand
ucaagaaccaagaugauau

SEQ ID NO: 2434621 - RNA, 19 nt, Homo sapiens
  misc_RNA (1)...(19): siRNA sense strand
cagcaggugguauaggaaa

SEQ ID NO: 2434622 - RNA, 19 nt, Homo sapiens
  misc_RNA (1)...(19): siRNA sense strand
gccacugccuggagagaga

SEQ ID NO: 2434623 - RNA, 19 nt, Homo sapiens
  misc_RNA (1)...(19): siRNA sense strand
ucgagagaauccugaucaa

SEQ ID NO: 2434624 - RNA, 19 nt, Homo sapiens
  misc_RNA (1)...(19): siRNA sense strand
gcccaagaguacugaagga

SEQ ID NO: 2434625 - RNA, 19 nt, Homo sapiens
  misc_RNA (1)...(19): siRNA sense strand
cagaaagaguacucgagga

SEQ ID NO: 2434626 - RNA, 19 nt, Homo sapiens
  misc_RNA (1)...(19): siRNA sense strand
aaagaguacucgaggauac

SEQ ID NO: 2434627 - RNA, 19 nt, Homo sapiens
  misc_RNA (1)...(19): siRNA sense strand
acugaaggaaugaagggaa

SEQ ID NO: 2434628 - RNA, 19 nt, Homo sapiens
  misc_RNA (1)...(19): siRNA sense strand
cugaaggaaugaagggaag

SEQ ID NO: 2434629 - RNA, 19 nt, Homo sapiens
  misc_RNA (1)...(19): siRNA sense strand
cugaagaggaccugccaga

SEQ ID NO: 2434630 - RNA, 19 nt, Homo sapiens
  misc_RNA (1)...(19): siRNA sense strand
cugaugagcuguuggguga

SEQ ID NO: 2434631 - RNA, 19 nt, Homo sapiens
  misc_RNA (1)...(19): siRNA sense strand
cugagaucguuaaggaaau

SEQ ID NO: 2434632 - RNA, 19 nt, Homo sapiens
  misc_RNA (1)...(19): siRNA sense strand
caaaaugggaagaaagcaa

SEQ ID NO: 2434633 - RNA, 19 nt, Homo sapiens
  misc_RNA (1)...(19): siRNA sense strand
guugaggagaugagggaga

SEQ ID NO: 2434634 - RNA, 19 nt, Homo sapiens
  misc_RNA (1)...(19): siRNA sense strand
gcuuauauagucaggaaca

SEQ ID NO: 2434635 - RNA, 19 nt, Homo sapiens
  misc_RNA (1)...(19): siRNA sense strand
cugcagaggaucauggaga

SEQ ID NO: 2434636 - RNA, 19 nt, Homo sapiens
  misc_RNA (1)...(19): siRNA sense strand
aauaagaagaagaugcaga

SEQ ID NO: 2434637 - RNA, 19 nt, Homo sapiens
  misc_RNA (1)...(19): siRNA sense strand
ggguugaggagaugaggga

SEQ ID NO: 2434638 - RNA, 19 nt, Homo sapiens
  misc_RNA (1)...(19): siRNA sense strand
cugcaaagcaaaaugggaa

SEQ ID NO: 2434639 - RNA, 19 nt, Homo sapiens
  misc_RNA (1)...(19): siRNA sense strand
gggaagaagaagaagggag

SEQ ID NO: 2434640 - RNA, 19 nt, Homo sapiens
  misc_RNA (1)...(19): siRNA sense strand
cagauaaaaucgccagcaa

SEQ ID NO: 2434641 - RNA, 19 nt, Homo sapiens
  misc_RNA (1)...(19): siRNA sense strand
uuaaagaagaaguggguug

SEQ ID NO: 2434642 - RNA, 19 nt, Homo sapiens
  misc_RNA (1)...(19): siRNA sense strand
cgggagcaagaaagacaaa

SEQ ID NO: 2434643 - RNA, 19 nt, Homo sapiens
  misc_RNA (1)...(19): siRNA sense strand
ccaaauucaugcaggaggu

SEQ ID NO: 2434644 - RNA, 19 nt, Homo sapiens
  misc_RNA (1)...(19): siRNA sense strand
guuccaagggccacaagaa

SEQ ID NO: 2434645 - RNA, 19 nt, Homo sapiens
  misc_RNA (1)...(19): siRNA sense strand
aauucaugcaggaggucua

SEQ ID NO: 2434646 - RNA, 19 nt, Homo sapiens
  misc_RNA (1)...(19): siRNA sense strand
guacccagcaucaggucaa

SEQ ID NO: 2434647 - RNA, 19 nt, Homo sapiens
  misc_RNA (1)...(19): siRNA sense strand
ggaagaagaagaagggagg

SEQ ID NO: 2434648 - RNA, 19 nt, Homo sapiens
  misc_RNA (1)...(19): siRNA sense strand
aggaaguuuugcaggaauu

SEQ ID NO: 2434649 - RNA, 19 nt, Homo sapiens
  misc_RNA (1)...(19): siRNA sense strand
aaugaagacaccauggaau

SEQ ID NO: 2434650 - RNA, 19 nt, Homo sapiens
  misc_RNA (1)...(19): siRNA sense strand
cggagaaucugaugagcug

SEQ ID NO: 2434651 - RNA, 19 nt, Homo sapiens
  misc_RNA (1)...(19): siRNA sense strand
augacgaggccacgaggaa

SEQ ID NO: 2434652 - RNA, 19 nt, Homo sapiens
  misc_RNA (1)...(19): siRNA sense strand
ucaugaggguucuggggaa

SEQ ID NO: 2434653 - RNA, 19 nt, Homo sapiens
  misc_RNA (1)...(19): siRNA sense strand
cgaaaauagcagaugccau

SEQ ID NO: 2434654 - RNA, 19 nt, Homo sapiens
  misc_RNA (1)...(19): siRNA sense strand
gcaccaauccgaaccguca

SEQ ID NO: 2434655 - RNA, 19 nt, Homo sapiens
  misc_RNA (1)...(19): siRNA sense strand
aguuugagcauaaggagga

SEQ ID NO: 2434656 - RNA, 19 nt, Homo sapiens
  misc_RNA (1)...(19): siRNA sense strand
gugaagguuccaagggcca

SEQ ID NO: 2434657 - RNA, 19 nt, Homo sapiens
  misc_RNA (1)...(19): siRNA sense strand
uggaauacucugaugugau

SEQ ID NO: 2434658 - RNA, 19 nt, Homo sapiens
  misc_RNA (1)...(19): siRNA sense strand
ugguccuggucuugaacaa

SEQ ID NO: 2434659 - RNA, 19 nt, Homo sapiens
  misc_RNA (1)...(19): siRNA sense strand
ccucugagucacugcugaa

SEQ ID NO: 2434660 - RNA, 19 nt, Homo sapiens
  misc_RNA (1)...(19): siRNA sense strand
aaauaaaaccaccguguau

SEQ ID NO: 2434661 - RNA, 19 nt, Homo sapiens
  misc_RNA (1)...(19): siRNA sense strand
uggagaagcucaaaggcaa

SEQ ID NO: 2434662 - RNA, 19 nt, Homo sapiens
  misc_RNA (1)...(19): siRNA sense strand
augaagaacuggaggcuga

SEQ ID NO: 2434663 - RNA, 19 nt, Homo sapiens
  misc_RNA (1)...(19): siRNA sense strand
cugcaaaggaggcgcucua

SEQ ID NO: 2434664 - RNA, 19 nt, Homo sapiens
  misc_RNA (1)...(19): siRNA sense strand
acgccaagcagcagggaga

SEQ ID NO: 2434665 - RNA, 19 nt, Homo sapiens
  misc_RNA (1)...(19): siRNA sense strand
ggagaggagcagaaggcuu

SEQ ID NO: 2434666 - RNA, 19 nt, Homo sapiens
  misc_RNA (1)...(19): siRNA sense strand
ggagauagcaugugagguc

SEQ ID NO: 2434667 - RNA, 19 nt, Homo sapiens
  misc_RNA (1)...(19): siRNA sense strand
cagcccaggccaagagcaa

SEQ ID NO: 2434668 - RNA, 19 nt, Homo sapiens
  misc_RNA (1)...(19): siRNA sense strand
uaaaugagguccuuggaga

SEQ ID NO: 2434669 - RNA, 19 nt, Homo sapiens
  misc_RNA (1)...(19): siRNA sense strand
acagagagguggcugguca

SEQ ID NO: 2434670 - RNA, 19 nt, Homo sapiens
  misc_RNA (1)...(19): siRNA sense strand
gggcuaacgaugaagaacu

SEQ ID NO: 2434671 - RNA, 19 nt, Homo sapiens
  misc_RNA (1)...(19): siRNA sense strand
gcggaaagcucgaaugcac

SEQ ID NO: 2434672 - RNA, 19 nt, Homo sapiens
  misc_RNA (1)...(19): siRNA sense strand
aggacgacuuggaggcuga

SEQ ID NO: 2434673 - RNA, 19 nt, Homo sapiens
  misc_RNA (1)...(19): siRNA sense strand
augaaggcccagaggauga

SEQ ID NO: 2434674 - RNA, 19 nt, Homo sapiens
  misc_RNA (1)...(19): siRNA sense strand
ggcuuaaaacacuggaaaa

SEQ ID NO: 2434675 - RNA, 19 nt, Homo sapiens
  misc_RNA (1)...(19): siRNA sense strand
aguucgaagugguucacaa

SEQ ID NO: 2434676 - RNA, 19 nt, Homo sapiens
  misc_RNA (1)...(19): siRNA sense strand
cugcaagggagucagggaa

SEQ ID NO: 2434677 - RNA, 19 nt, Homo sapiens
  misc_RNA (1)...(19): siRNA sense strand
ccuccauccguaagggcaa

SEQ ID NO: 2434678 - RNA, 19 nt, Homo sapiens
  misc_RNA (1)...(19): siRNA sense strand
gcccagaggaugaagagga

SEQ ID NO: 2434679 - RNA, 19 nt, Homo sapiens
  misc_RNA (1)...(19): siRNA sense strand
aguucaaggagcaguucaa

SEQ ID NO: 2434680 - RNA, 19 nt, Homo sapiens
  misc_RNA (1)...(19): siRNA sense strand
gcucagaaagacaagacca

SEQ ID NO: 2434681 - RNA, 19 nt, Homo sapiens
  misc_RNA (1)...(19): siRNA sense strand
gggagauccuugagguccu

SEQ ID NO: 2434682 - RNA, 19 nt, Homo sapiens
  misc_RNA (1)...(19): siRNA sense strand
gccaagcagcagggagaua

SEQ ID NO: 2434683 - RNA, 19 nt, Homo sapiens
  misc_RNA (1)...(19): siRNA sense strand
gggcuuaaaacacuggaaa

SEQ ID NO: 2434684 - RNA, 19 nt, Homo sapiens
  misc_RNA (1)...(19): siRNA sense strand
caaccaggaugaaggccca

SEQ ID NO: 2434685 - RNA, 19 nt, Homo sapiens
  misc_RNA (1)...(19): siRNA sense strand
gcaucaaguucgaaguggu

SEQ ID NO: 2434686 - RNA, 19 nt, Homo sapiens
  misc_RNA (1)...(19): siRNA sense strand
acuuggaggcugaugauga

SEQ ID NO: 2434687 - RNA, 19 nt, Homo sapiens
  misc_RNA (1)...(19): siRNA sense strand
ccauugacgaagcggacau

SEQ ID NO: 2434688 - RNA, 19 nt, Homo sapiens
  misc_RNA (1)...(19): siRNA sense strand
gcggaaucugguagagagu

SEQ ID NO: 2434689 - RNA, 19 nt, Homo sapiens
  misc_RNA (1)...(19): siRNA sense strand
gugccuaagaagcagaaca

SEQ ID NO: 2434690 - RNA, 19 nt, Homo sapiens
  misc_RNA (1)...(19): siRNA sense strand
ccauccagaccaagggcau

SEQ ID NO: 2434691 - RNA, 19 nt, Homo sapiens
  misc_RNA (1)...(19): siRNA sense strand
gcuuauaagaugauggauu

SEQ ID NO: 2434692 - RNA, 19 nt, Homo sapiens
  misc_RNA (1)...(19): siRNA sense strand
aggaaugacuguacggcaa

SEQ ID NO: 2434693 - RNA, 19 nt, Homo sapiens
  misc_RNA (1)...(19): siRNA sense strand
ggauauuauucuagugcuu

SEQ ID NO: 2434694 - RNA, 19 nt, Homo sapiens
  misc_RNA (1)...(19): siRNA sense strand
cagcaaaaguacugagaca

SEQ ID NO: 2434695 - RNA, 19 nt, Homo sapiens
  misc_RNA (1)...(19): siRNA sense strand
gugaauaaugacaggagua

SEQ ID NO: 2434696 - RNA, 19 nt, Homo sapiens
  misc_RNA (1)...(19): siRNA sense strand
agagagaguuggaagaaca

SEQ ID NO: 2434697 - RNA, 19 nt, Homo sapiens
  misc_RNA (1)...(19): siRNA sense strand
ggauaacacaagaggacau

SEQ ID NO: 2434698 - RNA, 19 nt, Homo sapiens
  misc_RNA (1)...(19): siRNA sense strand
gcauuauauaagugggaau

SEQ ID NO: 2434699 - RNA, 19 nt, Homo sapiens
  misc_RNA (1)...(19): siRNA sense strand
ggaugaugacugugaaaga

SEQ ID NO: 2434700 - RNA, 19 nt, Homo sapiens
  misc_RNA (1)...(19): siRNA sense strand
aguagaagaacgaaagcaa

SEQ ID NO: 2434701 - RNA, 19 nt, Homo sapiens
  misc_RNA (1)...(19): siRNA sense strand
guauaaagucauucaguga

SEQ ID NO: 2434702 - RNA, 19 nt, Homo sapiens
  misc_RNA (1)...(19): siRNA sense strand
aaggcaagcugaaggacua

SEQ ID NO: 2434703 - RNA, 19 nt, Homo sapiens
  misc_RNA (1)...(19): siRNA sense strand
gcaugauguacaagaacua

SEQ ID NO: 2434704 - RNA, 19 nt, Homo sapiens
  misc_RNA (1)...(19): siRNA sense strand
cuggagaagugauggugaa

SEQ ID NO: 2434705 - RNA, 19 nt, Homo sapiens
  misc_RNA (1)...(19): siRNA sense strand
gugaauacccagaacauau

SEQ ID NO: 2434706 - RNA, 19 nt, Homo sapiens
  misc_RNA (1)...(19): siRNA sense strand
aauaaugacaggaguacaa

SEQ ID NO: 2434707 - RNA, 19 nt, Homo sapiens
  misc_RNA (1)...(19): siRNA sense strand
aggagaauacagaguuaaa

SEQ ID NO: 2434708 - RNA, 19 nt, Homo sapiens
  misc_RNA (1)...(19): siRNA sense strand
acaagaggacauuaagaaa

SEQ ID NO: 2434709 - RNA, 19 nt, Homo sapiens
  misc_RNA (1)...(19): siRNA sense strand
ggucaaugaacaagagcca

SEQ ID NO: 2434710 - RNA, 19 nt, Homo sapiens
  misc_RNA (1)...(19): siRNA sense strand
gugcagaaagagagagagu

SEQ ID NO: 2434711 - RNA, 19 nt, Homo sapiens
  misc_RNA (1)...(19): siRNA sense strand
ugcuaaggguagaggaaca

SEQ ID NO: 2434712 - RNA, 19 nt, Homo sapiens
  misc_RNA (1)...(19): siRNA sense strand
gcauaggauuaaacugaau

SEQ ID NO: 2434713 - RNA, 19 nt, Homo sapiens
  misc_RNA (1)...(19): siRNA sense strand
gcaauacaugcaagauaaa

SEQ ID NO: 2434714 - RNA, 19 nt, Homo sapiens
  misc_RNA (1)...(19): siRNA sense strand
guagaagaacgaaagcaaa

SEQ ID NO: 2434715 - RNA, 19 nt, Homo sapiens
  misc_RNA (1)...(19): siRNA sense strand
aaguaguagaagaacgaaa

SEQ ID NO: 2434716 - RNA, 19 nt, Homo sapiens
  misc_RNA (1)...(19): siRNA sense strand
uagaagaacgaaagcaaau

SEQ ID NO: 2434717 - RNA, 19 nt, Homo sapiens
  misc_RNA (1)...(19): siRNA sense strand
cgaaagcaaaugaagggaa

SEQ ID NO: 2434718 - RNA, 19 nt, Homo sapiens
  misc_RNA (1)...(19): siRNA sense strand
uggaacugauagugaauau

SEQ ID NO: 2434719 - RNA, 19 nt, Homo sapiens
  misc_RNA (1)...(19): siRNA sense strand
agaugaagguucuggggaa

SEQ ID NO: 2434720 - RNA, 19 nt, Homo sapiens
  misc_RNA (1)...(19): siRNA sense strand
gggauaaaacagaagaauu

SEQ ID NO: 2434721 - RNA, 19 nt, Homo sapiens
  misc_RNA (1)...(19): siRNA sense strand
ugauguugaagaugagaaa

SEQ ID NO: 2434722 - RNA, 19 nt, Homo sapiens
  misc_RNA (1)...(19): siRNA sense strand
ugaugaugguguugaugaa

SEQ ID NO: 2434723 - RNA, 19 nt, Homo sapiens
  misc_RNA (1)...(19): siRNA sense strand
cuucagcaucaguggauaa

SEQ ID NO: 2434724 - RNA, 19 nt, Homo sapiens
  misc_RNA (1)...(19): siRNA sense strand
cagacucagaugugaauaa

SEQ ID NO: 2434725 - RNA, 19 nt, Homo sapiens
  misc_RNA (1)...(19): siRNA sense strand
ucguaaagagaaagcacua

SEQ ID NO: 2434726 - RNA, 19 nt, Homo sapiens
  misc_RNA (1)...(19): siRNA sense strand
cuugaaaccaauaguggaa

SEQ ID NO: 2434727 - RNA, 19 nt, Homo sapiens
  misc_RNA (1)...(19): siRNA sense strand
cugcugaaacaaugagaau

SEQ ID NO: 2434728 - RNA, 19 nt, Homo sapiens
  misc_RNA (1)...(19): siRNA sense strand
uugaagaaucugaagaaga

SEQ ID NO: 2434729 - RNA, 19 nt, Homo sapiens
  misc_RNA (1)...(19): siRNA sense strand
aacgagaaauugagcgcaa

SEQ ID NO: 2434730 - RNA, 19 nt, Homo sapiens
  misc_RNA (1)...(19): siRNA sense strand
guucauaaggauaagacau

SEQ ID NO: 2434731 - RNA, 19 nt, Homo sapiens
  misc_RNA (1)...(19): siRNA sense strand
uaaaggaagcaguagaaau

SEQ ID NO: 2434732 - RNA, 19 nt, Homo sapiens
  misc_RNA (1)...(19): siRNA sense strand
acagcaggauggagauaau

SEQ ID NO: 2434733 - RNA, 19 nt, Homo sapiens
  misc_RNA (1)...(19): siRNA sense strand
gaucagacucagaugugaa

SEQ ID NO: 2434734 - RNA, 19 nt, Homo sapiens
  misc_RNA (1)...(19): siRNA sense strand
cauuaaaggaagcaguaga

SEQ ID NO: 2434735 - RNA, 19 nt, Homo sapiens
  misc_RNA (1)...(19): siRNA sense strand
uaucacaaguaguagaaga

SEQ ID NO: 2434736 - RNA, 19 nt, Homo sapiens
  misc_RNA (1)...(19): siRNA sense strand
acaaccaugcauaggauua

SEQ ID NO: 2434737 - RNA, 19 nt, Homo sapiens
  misc_RNA (1)...(19): siRNA sense strand
cauaugaaggagaagaaga

SEQ ID NO: 2434738 - RNA, 19 nt, Homo sapiens
  misc_RNA (1)...(19): siRNA sense strand
gggauacagcagaagaaga

SEQ ID NO: 2434739 - RNA, 19 nt, Homo sapiens
  misc_RNA (1)...(19): siRNA sense strand
gauaagacauuaaaggaag

SEQ ID NO: 2434740 - RNA, 19 nt, Homo sapiens
  misc_RNA (1)...(19): siRNA sense strand
uggauuuagaagagguaau

SEQ ID NO: 2434741 - RNA, 19 nt, Homo sapiens
  misc_RNA (1)...(19): siRNA sense strand
ggauaauagagaacuugaa

SEQ ID NO: 2434742 - RNA, 19 nt, Homo sapiens
  misc_RNA (1)...(19): siRNA sense strand
gguuaugagggcuggcgaa

SEQ ID NO: 2434743 - RNA, 19 nt, Homo sapiens
  misc_RNA (1)...(19): siRNA sense strand
cccugaaagcugaaggauu

SEQ ID NO: 2434744 - RNA, 19 nt, Homo sapiens
  misc_RNA (1)...(19): siRNA sense strand
ugaaggauccagccagaaa

SEQ ID NO: 2434745 - RNA, 19 nt, Homo sapiens
  misc_RNA (1)...(19): siRNA sense strand
gcugaaacaaugagaauag

SEQ ID NO: 2434746 - RNA, 19 nt, Homo sapiens
  misc_RNA (1)...(19): siRNA sense strand
ggacgaauugcgagagaag

SEQ ID NO: 2434747 - RNA, 19 nt, Homo sapiens
  misc_RNA (1)...(19): siRNA sense strand
gaacuagauaugaguacuu

SEQ ID NO: 2434748 - RNA, 19 nt, Homo sapiens
  misc_RNA (1)...(19): siRNA sense strand
gcucaguauugacagguuu

SEQ ID NO: 2434749 - RNA, 19 nt, Homo sapiens
  misc_RNA (1)...(19): siRNA sense strand
ugacagauaaagaugguga

SEQ ID NO: 2434750 - RNA, 19 nt, Homo sapiens
  misc_RNA (1)...(19): siRNA sense strand
caagaggacauuaagaaaa

SEQ ID NO: 2434751 - RNA, 19 nt, Homo sapiens
  misc_RNA (1)...(19): siRNA sense strand
ggagaagaagauacaccaa

SEQ ID NO: 2434752 - RNA, 19 nt, Homo sapiens
  misc_RNA (1)...(19): siRNA sense strand
cuagaagaaagcacugaaa

SEQ ID NO: 2434753 - RNA, 19 nt, Homo sapiens
  misc_RNA (1)...(19): siRNA sense strand
agaagaagacucuggaacu

SEQ ID NO: 2434754 - RNA, 19 nt, Homo sapiens
  misc_RNA (1)...(19): siRNA sense strand
gcacauccuuccugggcau

SEQ ID NO: 2434755 - RNA, 19 nt, Homo sapiens
  misc_RNA (1)...(19): siRNA sense strand
gcacagacuucaugccgga

SEQ ID NO: 2434756 - RNA, 19 nt, Homo sapiens
  misc_RNA (1)...(19): siRNA sense strand
gaucauaugcagaggcuga

SEQ ID NO: 2434757 - RNA, 19 nt, Homo sapiens
  misc_RNA (1)...(19): siRNA sense strand
cggccuggguugaacuaaa

SEQ ID NO: 2434758 - RNA, 19 nt, Homo sapiens
  misc_RNA (1)...(19): siRNA sense strand
caguuaaggaagaggacca

SEQ ID NO: 2434759 - RNA, 19 nt, Homo sapiens
  misc_RNA (1)...(19): siRNA sense strand
aggaagaggaccagccauu

SEQ ID NO: 2434760 - RNA, 19 nt, Homo sapiens
  misc_RNA (1)...(19): siRNA sense strand
cugccaauggaaagaauua

SEQ ID NO: 2434761 - RNA, 19 nt, Homo sapiens
  misc_RNA (1)...(19): siRNA sense strand
gaguaggacgcuuggaaga

SEQ ID NO: 2434762 - RNA, 19 nt, Homo sapiens
  misc_RNA (1)...(19): siRNA sense strand
cugcuaaucugguacgcaa

SEQ ID NO: 2434763 - RNA, 19 nt, Homo sapiens
  misc_RNA (1)...(19): siRNA sense strand
ccaugaaggauuuggcuca

SEQ ID NO: 2434764 - RNA, 19 nt, Homo sapiens
  misc_RNA (1)...(19): siRNA sense strand
gagaagaugaagaaggacu

SEQ ID NO: 2434765 - RNA, 19 nt, Homo sapiens
  misc_RNA (1)...(19): siRNA sense strand
ccggaaucccagagaagau

SEQ ID NO: 2434766 - RNA, 19 nt, Homo sapiens
  misc_RNA (1)...(19): siRNA sense strand
uguuuguaguucagaagaa

SEQ ID NO: 2434767 - RNA, 19 nt, Homo sapiens
  misc_RNA (1)...(19): siRNA sense strand
ggaaguaaccagagacccu

SEQ ID NO: 2434768 - RNA, 19 nt, Homo sapiens
  misc_RNA (1)...(19): siRNA sense strand
cugaaacaguuaaugguga

SEQ ID NO: 2434769 - RNA, 19 nt, Homo sapiens
  misc_RNA (1)...(19): siRNA sense strand
cagaagaaaaucaguacua

SEQ ID NO: 2434770 - RNA, 19 nt, Homo sapiens
  misc_RNA (1)...(19): siRNA sense strand
gggaagagcagcagguggu

SEQ ID NO: 2434771 - RNA, 19 nt, Homo sapiens
  misc_RNA (1)...(19): siRNA sense strand
guuuguaguucagaagaaa

SEQ ID NO: 2434772 - RNA, 19 nt, Homo sapiens
  misc_RNA (1)...(19): siRNA sense strand
ccauguauuuggaaagcca

SEQ ID NO: 2434773 - RNA, 19 nt, Homo sapiens
  misc_RNA (1)...(19): siRNA sense strand
acauaagauugaaggacgu

SEQ ID NO: 2434774 - RNA, 19 nt, Homo sapiens
  misc_RNA (1)...(19): siRNA sense strand
aagcaaggaucaaaaggaa

SEQ ID NO: 2434775 - RNA, 19 nt, Homo sapiens
  misc_RNA (1)...(19): siRNA sense strand
aguuaauggugaucgggau

SEQ ID NO: 2434776 - RNA, 19 nt, Homo sapiens
  misc_RNA (1)...(19): siRNA sense strand
gugguagaucauacaauaa

SEQ ID NO: 2434777 - RNA, 19 nt, Homo sapiens
  misc_RNA (1)...(19): siRNA sense strand
acgcaaggacagggaggaa

SEQ ID NO: 2434778 - RNA, 19 nt, Homo sapiens
  misc_RNA (1)...(19): siRNA sense strand
gcaaggacagggaggaacu

SEQ ID NO: 2434779 - RNA, 19 nt, Homo sapiens
  misc_RNA (1)...(19): siRNA sense strand
uuggaauacuacagcaaaa

SEQ ID NO: 2434780 - RNA, 19 nt, Homo sapiens
  misc_RNA (1)...(19): siRNA sense strand
agaagaugaagaaggacuu

SEQ ID NO: 2434781 - RNA, 19 nt, Homo sapiens
  misc_RNA (1)...(19): siRNA sense strand
ccaaugaacugaugcguug

SEQ ID NO: 2434782 - RNA, 19 nt, Homo sapiens
  misc_RNA (1)...(19): siRNA sense strand
aacuaaaggaugaccgaau

SEQ ID NO: 2434783 - RNA, 19 nt, Homo sapiens
  misc_RNA (1)...(19): siRNA sense strand
caaagagagcaauggacca

SEQ ID NO: 2434784 - RNA, 19 nt, Homo sapiens
  misc_RNA (1)...(19): siRNA sense strand
ucagcagagaaguggacaa

SEQ ID NO: 2434785 - RNA, 19 nt, Homo sapiens
  misc_RNA (1)...(19): siRNA sense strand
agucaaaggaaaacagaca

SEQ ID NO: 2434786 - RNA, 19 nt, Homo sapiens
  misc_RNA (1)...(19): siRNA sense strand
cccauaaggucauucggaa

SEQ ID NO: 2434787 - RNA, 19 nt, Homo sapiens
  misc_RNA (1)...(19): siRNA sense strand
gggacugaaccucgucaaa

SEQ ID NO: 2434788 - RNA, 19 nt, Homo sapiens
  misc_RNA (1)...(19): siRNA sense strand
gugagagacaggauaauca

SEQ ID NO: 2434789 - RNA, 19 nt, Homo sapiens
  misc_RNA (1)...(19): siRNA sense strand
cuaugguacuacagcaaca

SEQ ID NO: 2434790 - RNA, 19 nt, Homo sapiens
  misc_RNA (1)...(19): siRNA sense strand
ucacgaugucugaugggaa

SEQ ID NO: 2434791 - RNA, 19 nt, Homo sapiens
  misc_RNA (1)...(19): siRNA sense strand
ucccagagaagaugaagaa

SEQ ID NO: 2434792 - RNA, 19 nt, Homo sapiens
  misc_RNA (1)...(19): siRNA sense strand
caggaacuaaacuggguua

SEQ ID NO: 2434793 - RNA, 19 nt, Homo sapiens
  misc_RNA (1)...(19): siRNA sense strand
gaggccauguauuuggaaa

SEQ ID NO: 2434794 - RNA, 19 nt, Homo sapiens
  misc_RNA (1)...(19): siRNA sense strand
aggccugggcauugaaaca

SEQ ID NO: 2434795 - RNA, 19 nt, Homo sapiens
  misc_RNA (1)...(19): siRNA sense strand
gaaaacagacagugcugaa

SEQ ID NO: 2434796 - RNA, 19 nt, Homo sapiens
  misc_RNA (1)...(19): siRNA sense strand
gggaagauacagaugguug

SEQ ID NO: 2434797 - RNA, 19 nt, Homo sapiens
  misc_RNA (1)...(19): siRNA sense strand
ggaguguggcccagaagau

SEQ ID NO: 2434798 - RNA, 19 nt, Homo sapiens
  misc_RNA (1)...(19): siRNA sense strand
cgaauagagacuuauguca

SEQ ID NO: 2434799 - RNA, 19 nt, Homo sapiens
  misc_RNA (1)...(19): siRNA sense strand
ggaagauacagaugguugu

SEQ ID NO: 2434800 - RNA, 19 nt, Homo sapiens
  misc_RNA (1)...(19): siRNA sense strand
gcaaggaucaaaaggaaca

SEQ ID NO: 2434801 - RNA, 19 nt, Homo sapiens
  misc_RNA (1)...(19): siRNA sense strand
caccauagugcuuuggaau

SEQ ID NO: 2434802 - RNA, 19 nt, Homo sapiens
  misc_RNA (1)...(19): siRNA sense strand
ugcaaaaggauguacauaa

SEQ ID NO: 2434803 - RNA, 19 nt, Homo sapiens
  misc_RNA (1)...(19): siRNA sense strand
gggaaagagaucacauucu

SEQ ID NO: 2434804 - RNA, 19 nt, Homo sapiens
  misc_RNA (1)...(19): siRNA sense strand
gccccaauguggagugcaa

SEQ ID NO: 2434805 - RNA, 19 nt, Homo sapiens
  misc_RNA (1)...(19): siRNA sense strand
aaucaugggaugcugcuaa

SEQ ID NO: 2434806 - RNA, 19 nt, Homo sapiens
  misc_RNA (1)...(19): siRNA sense strand
augaccgaauagagacuua

SEQ ID NO: 2434807 - RNA, 19 nt, Homo sapiens
  misc_RNA (1)...(19): siRNA sense strand
uggagugucugauggccaa

SEQ ID NO: 2434808 - RNA, 19 nt, Homo sapiens
  misc_RNA (1)...(19): siRNA sense strand
gagaauuaucagcccaaga

SEQ ID NO: 2434809 - RNA, 19 nt, Homo sapiens
  misc_RNA (1)...(19): siRNA sense strand
ucguauugaugauguggau

SEQ ID NO: 2434810 - RNA, 19 nt, Homo sapiens
  misc_RNA (1)...(19): siRNA sense strand
aaagaauugcaaagaacga

SEQ ID NO: 2434811 - RNA, 19 nt, Homo sapiens
  misc_RNA (1)...(19): siRNA sense strand
ucuuggaauacuacagcaa

SEQ ID NO: 2434812 - RNA, 19 nt, Homo sapiens
  misc_RNA (1)...(19): siRNA sense strand
aggauguacauaagauuga

SEQ ID NO: 2434813 - RNA, 19 nt, Homo sapiens
  misc_RNA (1)...(19): siRNA sense strand
aaggaugaccgaauagaga

SEQ ID NO: 2434814 - RNA, 19 nt, Homo sapiens
  misc_RNA (1)...(19): siRNA sense strand
aggcaaagaaagagaagaa

SEQ ID NO: 2434815 - RNA, 19 nt, Homo sapiens
  misc_RNA (1)...(19): siRNA sense strand
gcgaagacucagaggaaaa

SEQ ID NO: 2434816 - RNA, 19 nt, Homo sapiens
  misc_RNA (1)...(19): siRNA sense strand
acugugagcuagagagaau

SEQ ID NO: 2434817 - RNA, 19 nt, Homo sapiens
  misc_RNA (1)...(19): siRNA sense strand
cgacauuuccuuugggaca

SEQ ID NO: 2434818 - RNA, 19 nt, Homo sapiens
  misc_RNA (1)...(19): siRNA sense strand
augcgaagacucagaggaa

SEQ ID NO: 2434819 - RNA, 19 nt, Homo sapiens
  misc_RNA (1)...(19): siRNA sense strand
aggaaaacaagcagagaau

SEQ ID NO: 2434820 - RNA, 19 nt, Homo sapiens
  misc_RNA (1)...(19): siRNA sense strand
caauaagaugauaggacuu

SEQ ID NO: 2434821 - RNA, 19 nt, Homo sapiens
  misc_RNA (1)...(19): siRNA sense strand
uuccaaaucaggaggcaaa

SEQ ID NO: 2434822 - RNA, 19 nt, Homo sapiens
  misc_RNA (1)...(19): siRNA sense strand
uguuugagaaagugaggaa

SEQ ID NO: 2434823 - RNA, 19 nt, Homo sapiens
  misc_RNA (1)...(19): siRNA sense strand
ugcuaaagcuugaacuaau

SEQ ID NO: 2434824 - RNA, 19 nt, Homo sapiens
  misc_RNA (1)...(19): siRNA sense strand
acuaauuccagaagcuaaa

SEQ ID NO: 2434825 - RNA, 19 nt, Homo sapiens
  misc_RNA (1)...(19): siRNA sense strand
ggacuuugaaucugggaca

SEQ ID NO: 2434826 - RNA, 19 nt, Homo sapiens
  misc_RNA (1)...(19): siRNA sense strand
cugaacagccuuaagaaaa

SEQ ID NO: 2434827 - RNA, 19 nt, Homo sapiens
  misc_RNA (1)...(19): siRNA sense strand
acauacaccaccaggaaau

SEQ ID NO: 2434828 - RNA, 19 nt, Homo sapiens
  misc_RNA (1)...(19): siRNA sense strand
gcacaauugaggaaaucau

SEQ ID NO: 2434829 - RNA, 19 nt, Homo sapiens
  misc_RNA (1)...(19): siRNA sense strand
acugaacagccuuaagaaa

SEQ ID NO: 2434830 - RNA, 19 nt, Homo sapiens
  misc_RNA (1)...(19): siRNA sense strand
acuccagaacugugagcua

SEQ ID NO: 2434831 - RNA, 19 nt, Homo sapiens
  misc_RNA (1)...(19): siRNA sense strand
cuguaaauucaaaggcaca

SEQ ID NO: 2434832 - RNA, 19 nt, Homo sapiens
  misc_RNA (1)...(19): siRNA sense strand
gaugcuuagaugugagcua

SEQ ID NO: 2434833 - RNA, 19 nt, Homo sapiens
  misc_RNA (1)...(19): siRNA sense strand
gucagaaguuagugaaaau

SEQ ID NO: 2434834 - RNA, 19 nt, Homo sapiens
  misc_RNA (1)...(19): siRNA sense strand
acaauaagaugauaggacu

SEQ ID NO: 2434835 - RNA, 19 nt, Homo sapiens
  misc_RNA (1)...(19): siRNA sense strand
gggaaauuaguuugaacca

SEQ ID NO: 2434836 - RNA, 19 nt, Homo sapiens
  misc_RNA (1)...(19): siRNA sense strand
ggacagaacugcaucaccu

SEQ ID NO: 2434837 - RNA, 19 nt, Homo sapiens
  misc_RNA (1)...(19): siRNA sense strand
gcuuugaacacgucugcaa

SEQ ID NO: 2434838 - RNA, 19 nt, Homo sapiens
  misc_RNA (1)...(19): siRNA sense strand
aguuguacuuaauaggcaa

SEQ ID NO: 2434839 - RNA, 19 nt, Homo sapiens
  misc_RNA (1)...(19): siRNA sense strand
gugaagagcaauuugacca

SEQ ID NO: 2434840 - RNA, 19 nt, Homo sapiens
  misc_RNA (1)...(19): siRNA sense strand
ugggauguguuuauggauu

SEQ ID NO: 2434841 - RNA, 19 nt, Homo sapiens
  misc_RNA (1)...(19): siRNA sense strand
caauauuaggaaagugcuu

SEQ ID NO: 2434842 - RNA, 19 nt, Homo sapiens
  misc_RNA (1)...(19): siRNA sense strand
cuucagaaccugcagcauu

SEQ ID NO: 2434843 - RNA, 19 nt, Homo sapiens
  misc_RNA (1)...(19): siRNA sense strand
ccaccaaccaagaccaaga

SEQ ID NO: 2434844 - RNA, 19 nt, Homo sapiens
  misc_RNA (1)...(19): siRNA sense strand
gaccaagaugggcggacaa

SEQ ID NO: 2434845 - RNA, 19 nt, Homo sapiens
  misc_RNA (1)...(19): siRNA sense strand
aagaaagagaagaaagauc

SEQ ID NO: 2434846 - RNA, 19 nt, Homo sapiens
  misc_RNA (1)...(19): siRNA sense strand
aaaucaggaggcaaagaaa

SEQ ID NO: 2434847 - RNA, 19 nt, Homo sapiens
  misc_RNA (1)...(19): siRNA sense strand
ugaacagccuuaagaaaau

SEQ ID NO: 2434848 - RNA, 19 nt, Homo sapiens
  misc_RNA (1)...(19): siRNA sense strand
gaggaaaacaagcagagaa

SEQ ID NO: 2434849 - RNA, 19 nt, Homo sapiens
  misc_RNA (1)...(19): siRNA sense strand
aaguggacauucugccaaa

SEQ ID NO: 2434850 - RNA, 19 nt, Homo sapiens
  misc_RNA (1)...(19): siRNA sense strand
gaagaaagauccaacaggu

SEQ ID NO: 2434851 - RNA, 19 nt, Homo sapiens
  misc_RNA (1)...(19): siRNA sense strand
gagcaguuuuagugacauu

SEQ ID NO: 2434852 - RNA, 19 nt, Homo sapiens
  misc_RNA (1)...(19): siRNA sense strand
ucgaagucaaagaggcauu

SEQ ID NO: 2434853 - RNA, 19 nt, Homo sapiens
  misc_RNA (1)...(19): siRNA sense strand
caugaguggacauuugaaa

SEQ ID NO: 2434854 - RNA, 19 nt, Homo sapiens
  misc_RNA (1)...(19): siRNA sense strand
acucgaagucaaagaggca

SEQ ID NO: 2434855 - RNA, 19 nt, Homo sapiens
  misc_RNA (1)...(19): siRNA sense strand
ggcaaagaaagagaagaaa

SEQ ID NO: 2434856 - RNA, 19 nt, Homo sapiens
  misc_RNA (1)...(19): siRNA sense strand
cgaacuuugucaacgcaau

SEQ ID NO: 2434857 - RNA, 19 nt, Homo sapiens
  misc_RNA (1)...(19): siRNA sense strand
gaaauuaguuugaaccaug

SEQ ID NO: 2434858 - RNA, 19 nt, Homo sapiens
  misc_RNA (1)...(19): siRNA sense strand
agagaaaguuggucagcuc

SEQ ID NO: 2434859 - RNA, 19 nt, Homo sapiens
  misc_RNA (1)...(19): siRNA sense strand
uccaauaacauucgcacaa

SEQ ID NO: 2434860 - RNA, 19 nt, Homo sapiens
  misc_RNA (1)...(19): siRNA sense strand
aggauggagagcaggccaa

SEQ ID NO: 2434861 - RNA, 19 nt, Homo sapiens
  misc_RNA (1)...(19): siRNA sense strand
gugcuaaagcuugaacuaa

SEQ ID NO: 2434862 - RNA, 19 nt, Homo sapiens
  misc_RNA (1)...(19): siRNA sense strand
caguaugaccagcuauauu

SEQ ID NO: 2434863 - RNA, 19 nt, Homo sapiens
  misc_RNA (1)...(19): siRNA sense strand
cgacugacuuguuuaaaau

SEQ ID NO: 2434864 - RNA, 19 nt, Homo sapiens
  misc_RNA (1)...(19): siRNA sense strand
ugaacuaauuccagaagcu

SEQ ID NO: 2434865 - RNA, 19 nt, Homo sapiens
  misc_RNA (1)...(19): siRNA sense strand
ugaagagcaauuugaccaa

SEQ ID NO: 2434866 - RNA, 19 nt, Homo sapiens
  misc_RNA (1)...(19): siRNA sense strand
ucucuaauuuacaggaacu

SEQ ID NO: 2434867 - RNA, 19 nt, Homo sapiens
  misc_RNA (1)...(19): siRNA sense strand
auuuacaggaacuggauuu

SEQ ID NO: 2434868 - RNA, 19 nt, Homo sapiens
  misc_RNA (1)...(19): siRNA sense strand
agaccaagaugggcggaca

SEQ ID NO: 2434869 - RNA, 19 nt, Homo sapiens
  misc_RNA (1)...(19): siRNA sense strand
caggaggcaaagaaagaga

SEQ ID NO: 2434870 - RNA, 19 nt, Homo sapiens
  misc_RNA (1)...(19): siRNA sense strand
gagaauaacaggugcccag

SEQ ID NO: 2434871 - RNA, 19 nt, Homo sapiens
  misc_RNA (1)...(19): siRNA sense strand
agagaagagagcaguuuua

SEQ ID NO: 2434872 - RNA, 19 nt, Homo sapiens
  misc_RNA (1)...(19): siRNA sense strand
cagaccuggaugugcuaaa

SEQ ID NO: 2434873 - RNA, 19 nt, Homo sapiens
  misc_RNA (1)...(19): siRNA sense strand
ugugcuaaagcuugaacua

SEQ ID NO: 2434874 - RNA, 19 nt, Homo sapiens
  misc_RNA (1)...(19): siRNA sense strand
ggcaauuugaacucugaaa

SEQ ID NO: 2434875 - RNA, 19 nt, Homo sapiens
  misc_RNA (1)...(19): siRNA sense strand
cugaaaccauggugggaug

SEQ ID NO: 2434876 - RNA, 19 nt, Homo sapiens
  misc_RNA (1)...(19): siRNA sense strand
gugaagaggacaaagaauu

SEQ ID NO: 2434877 - RNA, 19 nt, Homo sapiens
  misc_RNA (1)...(19): siRNA sense strand
ggcaggaagcagagaagaa

SEQ ID NO: 2434878 - RNA, 19 nt, Homo sapiens
  misc_RNA (1)...(19): siRNA sense strand
gagaagaaugugcagcaaa

SEQ ID NO: 2434879 - RNA, 19 nt, Homo sapiens
  misc_RNA (1)...(19): siRNA sense strand
caaaaugugaagaggacaa

SEQ ID NO: 2434880 - RNA, 19 nt, Homo sapiens
  misc_RNA (1)...(19): siRNA sense strand
gaauucaccugcagggcau

SEQ ID NO: 2434881 - RNA, 19 nt, Homo sapiens
  misc_RNA (1)...(19): siRNA sense strand
auaucacaguaaagagcaa

SEQ ID NO: 2434882 - RNA, 19 nt, Homo sapiens
  misc_RNA (1)...(19): siRNA sense strand
cagagaagaaugugcagca

SEQ ID NO: 2434883 - RNA, 19 nt, Homo sapiens
  misc_RNA (1)...(19): siRNA sense strand
ugugaagaggacaaagaau

SEQ ID NO: 2434884 - RNA, 19 nt, Homo sapiens
  misc_RNA (1)...(19): siRNA sense strand
agagaagaaugugcagcaa

SEQ ID NO: 2434885 - RNA, 19 nt, Homo sapiens
  misc_RNA (1)...(19): siRNA sense strand
ugaaaucaggucaaggaga

SEQ ID NO: 2434886 - RNA, 19 nt, Homo sapiens
  misc_RNA (1)...(19): siRNA sense strand
caagagaaucaguggguga

SEQ ID NO: 2434887 - RNA, 19 nt, Homo sapiens
  misc_RNA (1)...(19): siRNA sense strand
acgugaagcccguggacua

SEQ ID NO: 2434888 - RNA, 19 nt, Homo sapiens
  misc_RNA (1)...(19): siRNA sense strand
ucugaaagacggaaggaga

SEQ ID NO: 2434889 - RNA, 19 nt, Homo sapiens
  misc_RNA (1)...(19): siRNA sense strand
gguuugacgcagaaggaca

SEQ ID NO: 2434890 - RNA, 19 nt, Homo sapiens
  misc_RNA (1)...(19): siRNA sense strand
ggucaugagcaucaggaga

SEQ ID NO: 2434891 - RNA, 19 nt, Homo sapiens
  misc_RNA (1)...(19): siRNA sense strand
cugcaauaagaaagugauu

SEQ ID NO: 2434892 - RNA, 19 nt, Homo sapiens
  misc_RNA (1)...(19): siRNA sense strand
gggaauuaaaagacaagaa

SEQ ID NO: 2434893 - RNA, 19 nt, Homo sapiens
  misc_RNA (1)...(19): siRNA sense strand
agacaagaaugaacaggca

SEQ ID NO: 2434894 - RNA, 19 nt, Homo sapiens
  misc_RNA (1)...(19): siRNA sense strand
acgagaugaccuucaauaa

SEQ ID NO: 2434895 - RNA, 19 nt, Homo sapiens
  misc_RNA (1)...(19): siRNA sense strand
auacaaacauaaagcccau

SEQ ID NO: 2434896 - RNA, 19 nt, Homo sapiens
  misc_RNA (1)...(19): siRNA sense strand
aguccaaaguggugcccau

SEQ ID NO: 2434897 - RNA, 19 nt, Homo sapiens
  misc_RNA (1)...(19): siRNA sense strand
cagaauggaagcucgggaa

SEQ ID NO: 2434898 - RNA, 19 nt, Homo sapiens
  misc_RNA (1)...(19): siRNA sense strand
aagaacaauuguccagcaa

SEQ ID NO: 2434899 - RNA, 19 nt, Homo sapiens
  misc_RNA (1)...(19): siRNA sense strand
cgaaagacucacuuguaga

SEQ ID NO: 2434900 - RNA, 19 nt, Homo sapiens
  misc_RNA (1)...(19): siRNA sense strand
gucaugagcaucaggagaa

SEQ ID NO: 2434901 - RNA, 19 nt, Homo sapiens
  misc_RNA (1)...(19): siRNA sense strand
gggaagguggugacugcua

SEQ ID NO: 2434902 - RNA, 19 nt, Homo sapiens
  misc_RNA (1)...(19): siRNA sense strand
cugauaaauuugaugguuc

SEQ ID NO: 2434903 - RNA, 19 nt, Homo sapiens
  misc_RNA (1)...(19): siRNA sense strand
uggugaaauccgagcuaca

SEQ ID NO: 2434904 - RNA, 19 nt, Homo sapiens
  misc_RNA (1)...(19): siRNA sense strand
guggaugguuugacgcaga

SEQ ID NO: 2434905 - RNA, 19 nt, Homo sapiens
  misc_RNA (1)...(19): siRNA sense strand
ggauuguaccgcugugaga

SEQ ID NO: 2434906 - RNA, 19 nt, Homo sapiens
  misc_RNA (1)...(19): siRNA sense strand
gagaagugcgacaccgaau

SEQ ID NO: 2434907 - RNA, 19 nt, Homo sapiens
  misc_RNA (1)...(19): siRNA sense strand
ccuagaacugguugacgaa

SEQ ID NO: 2434908 - RNA, 19 nt, Homo sapiens
  misc_RNA (1)...(19): siRNA sense strand
ugccagauucacagauuua

SEQ ID NO: 2434909 - RNA, 19 nt, Homo sapiens
  misc_RNA (1)...(19): siRNA sense strand
aguaacaccaacuggaaaa

SEQ ID NO: 2434910 - RNA, 19 nt, Homo sapiens
  misc_RNA (1)...(19): siRNA sense strand
cccuagaacugguugacga

SEQ ID NO: 2434911 - RNA, 19 nt, Homo sapiens
  misc_RNA (1)...(19): siRNA sense strand
cgaaaguggugaaauccga

SEQ ID NO: 2434912 - RNA, 19 nt, Homo sapiens
  misc_RNA (1)...(19): siRNA sense strand
cugacaucccagaggccua

SEQ ID NO: 2434913 - RNA, 19 nt, Homo sapiens
  misc_RNA (1)...(19): siRNA sense strand
guuugacgcagaaggacaa

SEQ ID NO: 2434914 - RNA, 19 nt, Homo sapiens
  misc_RNA (1)...(19): siRNA sense strand
gcuuauggugcuucaaaga

SEQ ID NO: 2434915 - RNA, 19 nt, Homo sapiens
  misc_RNA (1)...(19): siRNA sense strand
cccugaagauugcuaacaa

SEQ ID NO: 2434916 - RNA, 19 nt, Homo sapiens
  misc_RNA (1)...(19): siRNA sense strand
agacggaaggagaguaguu

SEQ ID NO: 2434917 - RNA, 19 nt, Homo sapiens
  misc_RNA (1)...(19): siRNA sense strand
gguugacgaaaguggugaa

SEQ ID NO: 2434918 - RNA, 19 nt, Homo sapiens
  misc_RNA (1)...(19): siRNA sense strand
uugaagugaacaaggugua

SEQ ID NO: 2434919 - RNA, 19 nt, Homo sapiens
  misc_RNA (1)...(19): siRNA sense strand
gcggagucggagggaguaa

SEQ ID NO: 2434920 - RNA, 19 nt, Homo sapiens
  misc_RNA (1)...(19): siRNA sense strand
ugaagaaguuuuccagaau

SEQ ID NO: 2434921 - RNA, 19 nt, Homo sapiens
  misc_RNA (1)...(19): siRNA sense strand
cuugauggaauuagaaguu

SEQ ID NO: 2434922 - RNA, 19 nt, Homo sapiens
  misc_RNA (1)...(19): siRNA sense strand
cuacagagaguauggccga

SEQ ID NO: 2434923 - RNA, 19 nt, Homo sapiens
  misc_RNA (1)...(19): siRNA sense strand
ucguggaggaagaacaauu

SEQ ID NO: 2434924 - RNA, 19 nt, Homo sapiens
  misc_RNA (1)...(19): siRNA sense strand
cagcugaagcaguuggagu

SEQ ID NO: 2434925 - RNA, 19 nt, Homo sapiens
  misc_RNA (1)...(19): siRNA sense strand
agaauggaagcucgggaau

SEQ ID NO: 2434926 - RNA, 19 nt, Homo sapiens
  misc_RNA (1)...(19): siRNA sense strand
agggauuaaccgaggcaaa

SEQ ID NO: 2434927 - RNA, 19 nt, Homo sapiens
  misc_RNA (1)...(19): siRNA sense strand
cugcaggaaaugagagauu

SEQ ID NO: 2434928 - RNA, 19 nt, Homo sapiens
  misc_RNA (1)...(19): siRNA sense strand
gcaccugggcuaagggaga

SEQ ID NO: 2434929 - RNA, 19 nt, Homo sapiens
  misc_RNA (1)...(19): siRNA sense strand
gggaacaaggucagcgaca

SEQ ID NO: 2434930 - RNA, 19 nt, Homo sapiens
  misc_RNA (1)...(19): siRNA sense strand
aggcuuucgaugagguaaa

SEQ ID NO: 2434931 - RNA, 19 nt, Homo sapiens
  misc_RNA (1)...(19): siRNA sense strand
ggacaaggcuggcuggauc

SEQ ID NO: 2434932 - RNA, 19 nt, Homo sapiens
  misc_RNA (1)...(19): siRNA sense strand
ggcuaagggagaagcggaa

SEQ ID NO: 2434933 - RNA, 19 nt, Homo sapiens
  misc_RNA (1)...(19): siRNA sense strand
ggaaggagcuggugacccu

SEQ ID NO: 2434934 - RNA, 19 nt, Homo sapiens
  misc_RNA (1)...(19): siRNA sense strand
gaucagaaguguguggaga

SEQ ID NO: 2434935 - RNA, 19 nt, Homo sapiens
  misc_RNA (1)...(19): siRNA sense strand
cugaaggugagcugggaga

SEQ ID NO: 2434936 - RNA, 19 nt, Homo sapiens
  misc_RNA (1)...(19): siRNA sense strand
gugcccuccucaagcgaaa

SEQ ID NO: 2434937 - RNA, 19 nt, Homo sapiens
  misc_RNA (1)...(19): siRNA sense strand
ucgaugagguaaaggugga

SEQ ID NO: 2434938 - RNA, 19 nt, Homo sapiens
  misc_RNA (1)...(19): siRNA sense strand
ccugacaaacugaagguga

SEQ ID NO: 2434939 - RNA, 19 nt, Homo sapiens
  misc_RNA (1)...(19): siRNA sense strand
gggagaagcggaaggagcu

SEQ ID NO: 2434940 - RNA, 19 nt, Homo sapiens
  misc_RNA (1)...(19): siRNA sense strand
gcugcuggucuaugagaau

SEQ ID NO: 2434941 - RNA, 19 nt, Homo sapiens
  misc_RNA (1)...(19): siRNA sense strand
cagugaauggcauggauga

SEQ ID NO: 2434942 - RNA, 19 nt, Homo sapiens
  misc_RNA (1)...(19): siRNA sense strand
aggaggagggugugaagga

SEQ ID NO: 2434943 - RNA, 19 nt, Homo sapiens
  misc_RNA (1)...(19): siRNA sense strand
gggcuaagggagaagcgga

SEQ ID NO: 2434944 - RNA, 19 nt, Homo sapiens
  misc_RNA (1)...(19): siRNA sense strand
ggucuaugagaaugaggau

SEQ ID NO: 2434945 - RNA, 19 nt, Homo sapiens
  misc_RNA (1)...(19): siRNA sense strand
gggauuaaccgaggcaaaa

SEQ ID NO: 2434946 - RNA, 19 nt, Homo sapiens
  misc_RNA (1)...(19): siRNA sense strand
augagguaaagguggacaa

SEQ ID NO: 2434947 - RNA, 19 nt, Homo sapiens
  misc_RNA (1)...(19): siRNA sense strand
ugaacaaggugcugggcag

SEQ ID NO: 2434948 - RNA, 19 nt, Homo sapiens
  misc_RNA (1)...(19): siRNA sense strand
gugugaaggaagccgguga

SEQ ID NO: 2434949 - RNA, 19 nt, Homo sapiens
  misc_RNA (1)...(19): siRNA sense strand
gaugcaggcuucugggcca

SEQ ID NO: 2434950 - RNA, 19 nt, Homo sapiens
  misc_RNA (1)...(19): siRNA sense strand
aguucauacuggugagaaa

SEQ ID NO: 2434951 - RNA, 19 nt, Homo sapiens
  misc_RNA (1)...(19): siRNA sense strand
augcaaggaaugugggaaa

SEQ ID NO: 2434952 - RNA, 19 nt, Homo sapiens
  misc_RNA (1)...(19): siRNA sense strand
gguuauucacacugagaaa

SEQ ID NO: 2434953 - RNA, 19 nt, Homo sapiens
  misc_RNA (1)...(19): siRNA sense strand
cccuauaaauguaaggaau

SEQ ID NO: 2434954 - RNA, 19 nt, Homo sapiens
  misc_RNA (1)...(19): siRNA sense strand
aauucauaccggugagaaa

SEQ ID NO: 2434955 - RNA, 19 nt, Homo sapiens
  misc_RNA (1)...(19): siRNA sense strand
auguaaagauugugagaag

SEQ ID NO: 2434956 - RNA, 19 nt, Homo sapiens
  misc_RNA (1)...(19): siRNA sense strand
ggucagaauuguucaggga

SEQ ID NO: 2434957 - RNA, 19 nt, Homo sapiens
  misc_RNA (1)...(19): siRNA sense strand
gugcaaaguauguggaaag

SEQ ID NO: 2434958 - RNA, 19 nt, Homo sapiens
  misc_RNA (1)...(19): siRNA sense strand
gaauggaaguaauggggaa

SEQ ID NO: 2434959 - RNA, 19 nt, Homo sapiens
  misc_RNA (1)...(19): siRNA sense strand
gcaccugcucagagggauu

SEQ ID NO: 2434960 - RNA, 19 nt, Homo sapiens
  misc_RNA (1)...(19): siRNA sense strand
gggaaagcccauuagccua

SEQ ID NO: 2434961 - RNA, 19 nt, Homo sapiens
  misc_RNA (1)...(19): siRNA sense strand
acgugauguuggagaccua

SEQ ID NO: 2434962 - RNA, 19 nt, Homo sapiens
  misc_RNA (1)...(19): siRNA sense strand
uugacagacaacagggaaa

SEQ ID NO: 2434963 - RNA, 19 nt, Homo sapiens
  misc_RNA (1)...(19): siRNA sense strand
agggaaauccagacagaca

SEQ ID NO: 2434964 - RNA, 19 nt, Homo sapiens
  misc_RNA (1)...(19): siRNA sense strand
agauaugauaccaaggaau

SEQ ID NO: 2434965 - RNA, 19 nt, Homo sapiens
  misc_RNA (1)...(19): siRNA sense strand
caaugggagauaauggaaa

SEQ ID NO: 2434966 - RNA, 19 nt, Homo sapiens
  misc_RNA (1)...(19): siRNA sense strand
uguucauacuggcaggaaa

SEQ ID NO: 2434967 - RNA, 19 nt, Homo sapiens
  misc_RNA (1)...(19): siRNA sense strand
ccuggaugguggagagagu

SEQ ID NO: 2434968 - RNA, 19 nt, Homo sapiens
  misc_RNA (1)...(19): siRNA sense strand
cccuaugaauauaaggaau

SEQ ID NO: 2434969 - RNA, 19 nt, Homo sapiens
  misc_RNA (1)...(19): siRNA sense strand
ccguucaaccucagagaau

SEQ ID NO: 2434970 - RNA, 19 nt, Homo sapiens
  misc_RNA (1)...(19): siRNA sense strand
uagagaaacacaugugaau

SEQ ID NO: 2434971 - RNA, 19 nt, Homo sapiens
  misc_RNA (1)...(19): siRNA sense strand
cuuccuagagcaaggcaaa

SEQ ID NO: 2434972 - RNA, 19 nt, Homo sapiens
  misc_RNA (1)...(19): siRNA sense strand
ccuuacaaguuauggucuu

SEQ ID NO: 2434973 - RNA, 19 nt, Homo sapiens
  misc_RNA (1)...(19): siRNA sense strand
gcauaauagagaaacacau

SEQ ID NO: 2434974 - RNA, 19 nt, Homo sapiens
  misc_RNA (1)...(19): siRNA sense strand
cuucaauucugguucaaau

SEQ ID NO: 2434975 - RNA, 19 nt, Homo sapiens
  misc_RNA (1)...(19): siRNA sense strand
cccuaugagugcaaaguau

SEQ ID NO: 2434976 - RNA, 19 nt, Homo sapiens
  misc_RNA (1)...(19): siRNA sense strand
ucaagcaacaucagagaau

SEQ ID NO: 2434977 - RNA, 19 nt, Homo sapiens
  misc_RNA (1)...(19): siRNA sense strand
agagaaugcauaauagaga

SEQ ID NO: 2434978 - RNA, 19 nt, Homo sapiens
  misc_RNA (1)...(19): siRNA sense strand
gcucagagggauuuguaca

SEQ ID NO: 2434979 - RNA, 19 nt, Homo sapiens
  misc_RNA (1)...(19): siRNA sense strand
cucuaugaauguaaggaau

SEQ ID NO: 2434980 - RNA, 19 nt, Homo sapiens
  misc_RNA (1)...(19): siRNA sense strand
cagauaugauaccaaggaa

SEQ ID NO: 2434981 - RNA, 19 nt, Homo sapiens
  misc_RNA (1)...(19): siRNA sense strand
ggugaaaagccauaugaau

SEQ ID NO: 2434982 - RNA, 19 nt, Homo sapiens
  misc_RNA (1)...(19): siRNA sense strand
gggagauaauggaaagccu

SEQ ID NO: 2434983 - RNA, 19 nt, Homo sapiens
  misc_RNA (1)...(19): siRNA sense strand
cccuaucaguguaaggaau

SEQ ID NO: 2434984 - RNA, 19 nt, Homo sapiens
  misc_RNA (1)...(19): siRNA sense strand
gaugauugggaaugcagaa

SEQ ID NO: 2434985 - RNA, 19 nt, Homo sapiens
  misc_RNA (1)...(19): siRNA sense strand
uguuggagaccuacagcaa

SEQ ID NO: 2434986 - RNA, 19 nt, Homo sapiens
  misc_RNA (1)...(19): siRNA sense strand
aaguuauggucuugagugu

SEQ ID NO: 2434987 - RNA, 19 nt, Homo sapiens
  misc_RNA (1)...(19): siRNA sense strand
caggaaacucuaugaaugu

SEQ ID NO: 2434988 - RNA, 19 nt, Homo sapiens
  misc_RNA (1)...(19): siRNA sense strand
ggagauaauggaaagccuu

SEQ ID NO: 2434989 - RNA, 19 nt, Homo sapiens
  misc_RNA (1)...(19): siRNA sense strand
agugcaaaguauguggaaa

SEQ ID NO: 2434990 - RNA, 19 nt, Homo sapiens
  misc_RNA (1)...(19): siRNA sense strand
agagaauuuauguuggcaa

SEQ ID NO: 2434991 - RNA, 19 nt, Homo sapiens
  misc_RNA (1)...(19): siRNA sense strand
gggaaggcuuuuagucauu

SEQ ID NO: 2434992 - RNA, 19 nt, Homo sapiens
  misc_RNA (1)...(19): siRNA sense strand
agagaaacacaugugaaua

SEQ ID NO: 2434993 - RNA, 19 nt, Homo sapiens
  misc_RNA (1)...(19): siRNA sense strand
aauuuauguuggcaagcaa

SEQ ID NO: 2434994 - RNA, 19 nt, Homo sapiens
  misc_RNA (1)...(19): siRNA sense strand
auggaaagccuuacaaguu

SEQ ID NO: 2434995 - RNA, 19 nt, Homo sapiens
  misc_RNA (1)...(19): siRNA sense strand
acucuaugaauguaaggaa

SEQ ID NO: 2434996 - RNA, 19 nt, Homo sapiens
  misc_RNA (1)...(19): siRNA sense strand
auauaaggaaugugagaag

SEQ ID NO: 2434997 - RNA, 19 nt, Homo sapiens
  misc_RNA (1)...(19): siRNA sense strand
ccuauaaauguaaggaaug

SEQ ID NO: 2434998 - RNA, 19 nt, Homo sapiens
  misc_RNA (1)...(19): siRNA sense strand
gcucaacucuuauacgaca

SEQ ID NO: 2434999 - RNA, 19 nt, Homo sapiens
  misc_RNA (1)...(19): siRNA sense strand
uuauacgacaucagagaau

SEQ ID NO: 2435000 - RNA, 19 nt, Homo sapiens
  misc_RNA (1)...(19): siRNA sense strand
gagaauuuauguuggcaag

SEQ ID NO: 2435001 - RNA, 19 nt, Homo sapiens
  misc_RNA (1)...(19): siRNA sense strand
aggaaugugggaaggcuuu

SEQ ID NO: 2435002 - RNA, 19 nt, Homo sapiens
  misc_RNA (1)...(19): siRNA sense strand
ucuuauacgacaucagaga

SEQ ID NO: 2435003 - RNA, 19 nt, Homo sapiens
  misc_RNA (1)...(19): siRNA sense strand
gccauaugaauguaaggaa

SEQ ID NO: 2435004 - RNA, 19 nt, Homo sapiens
  misc_RNA (1)...(19): siRNA sense strand
aggaaugugggaaggcuuu

SEQ ID NO: 2435005 - RNA, 19 nt, Homo sapiens
  misc_RNA (1)...(19): siRNA sense strand
auuuaacacuccugggaaa

SEQ ID NO: 2435006 - RNA, 19 nt, Homo sapiens
  misc_RNA (1)...(19): siRNA sense strand
gaguguguacagugggaaa

SEQ ID NO: 2435007 - RNA, 19 nt, Homo sapiens
  misc_RNA (1)...(19): siRNA sense strand
gauuagaaguccuggcugu

SEQ ID NO: 2435008 - RNA, 19 nt, Homo sapiens
  misc_RNA (1)...(19): siRNA sense strand
acgagaugccaaugaacaa

SEQ ID NO: 2435009 - RNA, 19 nt, Homo sapiens
  misc_RNA (1)...(19): siRNA sense strand
uuuaaaggguacugaugau

SEQ ID NO: 2435010 - RNA, 19 nt, Homo sapiens
  misc_RNA (1)...(19): siRNA sense strand
uuuagaaguccgaaaugaa

SEQ ID NO: 2435011 - RNA, 19 nt, Homo sapiens
  misc_RNA (1)...(19): siRNA sense strand
uggguaacauugaggaaac

SEQ ID NO: 2435012 - RNA, 19 nt, Homo sapiens
  misc_RNA (1)...(19): siRNA sense strand
aggacugguuuuacaaaua

SEQ ID NO: 2435013 - RNA, 19 nt, Homo sapiens
  misc_RNA (1)...(19): siRNA sense strand
gaagauuauuaguugguac

SEQ ID NO: 2435014 - RNA, 19 nt, Homo sapiens
  misc_RNA (1)...(19): siRNA sense strand
gcauguaagaauucgacga

SEQ ID NO: 2435015 - RNA, 19 nt, Homo sapiens
  misc_RNA (1)...(19): siRNA sense strand
aggaauuggagcaacucaa

SEQ ID NO: 2435016 - RNA, 19 nt, Homo sapiens
  misc_RNA (1)...(19): siRNA sense strand
ucucaaucauggacacaca

SEQ ID NO: 2435017 - RNA, 19 nt, Homo sapiens
  misc_RNA (1)...(19): siRNA sense strand
guaacauugaggaaaccua

SEQ ID NO: 2435018 - RNA, 19 nt, Homo sapiens
  misc_RNA (1)...(19): siRNA sense strand
ugucuauucauuuggguuu

SEQ ID NO: 2435019 - RNA, 19 nt, Homo sapiens
  misc_RNA (1)...(19): siRNA sense strand
ccuccacagucuuggcaca

SEQ ID NO: 2435020 - RNA, 19 nt, Homo sapiens
  misc_RNA (1)...(19): siRNA sense strand
cgagauacacacgggaaga

SEQ ID NO: 2435021 - RNA, 19 nt, Homo sapiens
  misc_RNA (1)...(19): siRNA sense strand
guguaaagaaugugggaaa

SEQ ID NO: 2435022 - RNA, 19 nt, Homo sapiens
  misc_RNA (1)...(19): siRNA sense strand
auguaaagaaugugggaaa

SEQ ID NO: 2435023 - RNA, 19 nt, Homo sapiens
  misc_RNA (1)...(19): siRNA sense strand
auguaaacaaugugggaaa

SEQ ID NO: 2435024 - RNA, 19 nt, Homo sapiens
  misc_RNA (1)...(19): siRNA sense strand
agugcauacuggagagaaa

SEQ ID NO: 2435025 - RNA, 19 nt, Homo sapiens
  misc_RNA (1)...(19): siRNA sense strand
ccuuauaaauguagggacu

SEQ ID NO: 2435026 - RNA, 19 nt, Homo sapiens
  misc_RNA (1)...(19): siRNA sense strand
auguaaggaaugugggaaa

SEQ ID NO: 2435027 - RNA, 19 nt, Homo sapiens
  misc_RNA (1)...(19): siRNA sense strand
aaugcauacuggagagaaa

SEQ ID NO: 2435028 - RNA, 19 nt, Homo sapiens
  misc_RNA (1)...(19): siRNA sense strand
cccuauaaguguaaagaau

SEQ ID NO: 2435029 - RNA, 19 nt, Homo sapiens
  misc_RNA (1)...(19): siRNA sense strand
ccauauaaauguaaggagu

SEQ ID NO: 2435030 - RNA, 19 nt, Homo sapiens
  misc_RNA (1)...(19): siRNA sense strand
auguaaggagugugagaaa

SEQ ID NO: 2435031 - RNA, 19 nt, Homo sapiens
  misc_RNA (1)...(19): siRNA sense strand
ugaaaauccacaagagaaa

SEQ ID NO: 2435032 - RNA, 19 nt, Homo sapiens
  misc_RNA (1)...(19): siRNA sense strand
gagaaaucacacuggagaa

SEQ ID NO: 2435033 - RNA, 19 nt, Homo sapiens
  misc_RNA (1)...(19): siRNA sense strand
agguaaagaagguagucaa

SEQ ID NO: 2435034 - RNA, 19 nt, Homo sapiens
  misc_RNA (1)...(19): siRNA sense strand
ccacaagcuuucaaggaca

SEQ ID NO: 2435035 - RNA, 19 nt, Homo sapiens
  misc_RNA (1)...(19): siRNA sense strand
gguaaagaagguagucaau

SEQ ID NO: 2435036 - RNA, 19 nt, Homo sapiens
  misc_RNA (1)...(19): siRNA sense strand
caaagaauguggaaaggca

SEQ ID NO: 2435037 - RNA, 19 nt, Homo sapiens
  misc_RNA (1)...(19): siRNA sense strand
cccuaugaguguaaggaau

SEQ ID NO: 2435038 - RNA, 19 nt, Homo sapiens
  misc_RNA (1)...(19): siRNA sense strand
guguaaggaaugugcaaaa

SEQ ID NO: 2435039 - RNA, 19 nt, Homo sapiens
  misc_RNA (1)...(19): siRNA sense strand
uguaaagaaugugggaaau

SEQ ID NO: 2435040 - RNA, 19 nt, Homo sapiens
  misc_RNA (1)...(19): siRNA sense strand
guuacgaacacaugaaaga

SEQ ID NO: 2435041 - RNA, 19 nt, Homo sapiens
  misc_RNA (1)...(19): siRNA sense strand
cggagauagaccuuauaaa

SEQ ID NO: 2435042 - RNA, 19 nt, Homo sapiens
  misc_RNA (1)...(19): siRNA sense strand
gaguguaaggaaugugcaa

SEQ ID NO: 2435043 - RNA, 19 nt, Homo sapiens
  misc_RNA (1)...(19): siRNA sense strand
aacucacacuggagagaaa

SEQ ID NO: 2435044 - RNA, 19 nt, Homo sapiens
  misc_RNA (1)...(19): siRNA sense strand
aacucacacuggagagaaa

SEQ ID NO: 2435045 - RNA, 19 nt, Homo sapiens
  misc_RNA (1)...(19): siRNA sense strand
ucaaagacaugaaaggagu

SEQ ID NO: 2435046 - RNA, 19 nt, Homo sapiens
  misc_RNA (1)...(19): siRNA sense strand
augcaaagaauguggaaag

SEQ ID NO: 2435047 - RNA, 19 nt, Homo sapiens
  misc_RNA (1)...(19): siRNA sense strand
agacaugaaaggagucaca

SEQ ID NO: 2435048 - RNA, 19 nt, Homo sapiens
  misc_RNA (1)...(19): siRNA sense strand
agagaugugaugcaggaaa

SEQ ID NO: 2435049 - RNA, 19 nt, Homo sapiens
  misc_RNA (1)...(19): siRNA sense strand
auguaaagaaugugggaag

SEQ ID NO: 2435050 - RNA, 19 nt, Homo sapiens
  misc_RNA (1)...(19): siRNA sense strand
aagccauacgggagagaga

SEQ ID NO: 2435051 - RNA, 19 nt, Homo sapiens
  misc_RNA (1)...(19): siRNA sense strand
aaauguaaggagugugaga

SEQ ID NO: 2435052 - RNA, 19 nt, Homo sapiens
  misc_RNA (1)...(19): siRNA sense strand
ucgaauacaugaaaggacu

SEQ ID NO: 2435053 - RNA, 19 nt, Homo sapiens
  misc_RNA (1)...(19): siRNA sense strand
ccucuugaauguaagcaau

SEQ ID NO: 2435054 - RNA, 19 nt, Homo sapiens
  misc_RNA (1)...(19): siRNA sense strand
cugugaagguaaagaaggu

SEQ ID NO: 2435055 - RNA, 19 nt, Homo sapiens
  misc_RNA (1)...(19): siRNA sense strand
guguacuaucuguggaaaa

SEQ ID NO: 2435056 - RNA, 19 nt, Homo sapiens
  misc_RNA (1)...(19): siRNA sense strand
auguaagcaauguggaaaa

SEQ ID NO: 2435057 - RNA, 19 nt, Homo sapiens
  misc_RNA (1)...(19): siRNA sense strand
cccuaugcauguaaggaau

SEQ ID NO: 2435058 - RNA, 19 nt, Homo sapiens
  misc_RNA (1)...(19): siRNA sense strand
auguaagcaauguggaaaa

SEQ ID NO: 2435059 - RNA, 19 nt, Homo sapiens
  misc_RNA (1)...(19): siRNA sense strand
cgaagaagacugccggagu

SEQ ID NO: 2435060 - RNA, 19 nt, Homo sapiens
  misc_RNA (1)...(19): siRNA sense strand
cgaaagaacucacacugga

SEQ ID NO: 2435061 - RNA, 19 nt, Homo sapiens
  misc_RNA (1)...(19): siRNA sense strand
cccuaugaauguaaacaau

SEQ ID NO: 2435062 - RNA, 19 nt, Homo sapiens
  misc_RNA (1)...(19): siRNA sense strand
cccuaugaauguaaacaau

SEQ ID NO: 2435063 - RNA, 19 nt, Homo sapiens
  misc_RNA (1)...(19): siRNA sense strand
gcagaaaacuucaguccca

SEQ ID NO: 2435064 - RNA, 19 nt, Homo sapiens
  misc_RNA (1)...(19): siRNA sense strand
auaaauguaaggaguguga

SEQ ID NO: 2435065 - RNA, 19 nt, Homo sapiens
  misc_RNA (1)...(19): siRNA sense strand
cccuaugaauguaagcaau

SEQ ID NO: 2435066 - RNA, 19 nt, Homo sapiens
  misc_RNA (1)...(19): siRNA sense strand
aauucauacuggagagaag

SEQ ID NO: 2435067 - RNA, 19 nt, Homo sapiens
  misc_RNA (1)...(19): siRNA sense strand
agguagucaaugugcagaa

SEQ ID NO: 2435068 - RNA, 19 nt, Homo sapiens
  misc_RNA (1)...(19): siRNA sense strand
gaguguacuaucuguggaa

SEQ ID NO: 2435069 - RNA, 19 nt, Homo sapiens
  misc_RNA (1)...(19): siRNA sense strand
aggaugugucugugagcuu

SEQ ID NO: 2435070 - RNA, 19 nt, Homo sapiens
  misc_RNA (1)...(19): siRNA sense strand
aguuacauucggauacaua

SEQ ID NO: 2435071 - RNA, 19 nt, Homo sapiens
  misc_RNA (1)...(19): siRNA sense strand
aagaagacugccggaguaa

SEQ ID NO: 2435072 - RNA, 19 nt, Homo sapiens
  misc_RNA (1)...(19): siRNA sense strand
ucaagguggccgaggucaa

SEQ ID NO: 2435073 - RNA, 19 nt, Homo sapiens
  misc_RNA (1)...(19): siRNA sense strand
ugacagcaguggugggaac

SEQ ID NO: 2435074 - RNA, 19 nt, Homo sapiens
  misc_RNA (1)...(19): siRNA sense strand
agggaaagccgggaaggaa

SEQ ID NO: 2435075 - RNA, 19 nt, Homo sapiens
  misc_RNA (1)...(19): siRNA sense strand
gggaaagccgggaaggaag

SEQ ID NO: 2435076 - RNA, 19 nt, Homo sapiens
  misc_RNA (1)...(19): siRNA sense strand
cccaagacggccagagcuu

SEQ ID NO: 2435077 - RNA, 19 nt, Homo sapiens
  misc_RNA (1)...(19): siRNA sense strand
cugacaagguucugcugga

SEQ ID NO: 2435078 - RNA, 19 nt, Homo sapiens
  misc_RNA (1)...(19): siRNA sense strand
ggacaaaggcccaccgaug

SEQ ID NO: 2435079 - RNA, 19 nt, Homo sapiens
  misc_RNA (1)...(19): siRNA sense strand
ccgacuaccaccugcacaa

SEQ ID NO: 2435080 - RNA, 19 nt, Homo sapiens
  misc_RNA (1)...(19): siRNA sense strand
cuuaauggaccuuggaucu

SEQ ID NO: 2435081 - RNA, 19 nt, Homo sapiens
  misc_RNA (1)...(19): siRNA sense strand
gggcagaaaccguggccaa

SEQ ID NO: 2435082 - RNA, 19 nt, Homo sapiens
  misc_RNA (1)...(19): siRNA sense strand
aggaagaaggcuuuggaaa

SEQ ID NO: 2435083 - RNA, 19 nt, Homo sapiens
  misc_RNA (1)...(19): siRNA sense strand
gggcauuacagaagagcau

SEQ ID NO: 2435084 - RNA, 19 nt, Homo sapiens
  misc_RNA (1)...(19): siRNA sense strand
ucgaaauaaccaagggaga

SEQ ID NO: 2435085 - RNA, 19 nt, Homo sapiens
  misc_RNA (1)...(19): siRNA sense strand
gagaagguggugagggaga

SEQ ID NO: 2435086 - RNA, 19 nt, Homo sapiens
  misc_RNA (1)...(19): siRNA sense strand
augagaagguggugaggga

SEQ ID NO: 2435087 - RNA, 19 nt, Homo sapiens
  misc_RNA (1)...(19): siRNA sense strand
cuuuagaacauuugggcau

SEQ ID NO: 2435088 - RNA, 19 nt, Homo sapiens
  misc_RNA (1)...(19): siRNA sense strand
cuaccgaauucgaggggaa

SEQ ID NO: 2435089 - RNA, 19 nt, Homo sapiens
  misc_RNA (1)...(19): siRNA sense strand
aagaagaaaaugaggucaa

SEQ ID NO: 2435090 - RNA, 19 nt, Homo sapiens
  misc_RNA (1)...(19): siRNA sense strand
guccaaaggaagaaggcuu

SEQ ID NO: 2435091 - RNA, 19 nt, Homo sapiens
  misc_RNA (1)...(19): siRNA sense strand
cuaaagaaagagaccucaa

SEQ ID NO: 2435092 - RNA, 19 nt, Homo sapiens
  misc_RNA (1)...(19): siRNA sense strand
ccgugucuacagagggaua

SEQ ID NO: 2435093 - RNA, 19 nt, Homo sapiens
  misc_RNA (1)...(19): siRNA sense strand
ccaaagaaaagguggccau

SEQ ID NO: 2435094 - RNA, 19 nt, Homo sapiens
  misc_RNA (1)...(19): siRNA sense strand
gggaaaucggaaguggaaa

SEQ ID NO: 2435095 - RNA, 19 nt, Homo sapiens
  misc_RNA (1)...(19): siRNA sense strand
cggauaggcuucuaccgaa

SEQ ID NO: 2435096 - RNA, 19 nt, Homo sapiens
  misc_RNA (1)...(19): siRNA sense strand
ggggaaaucggaaguggaa

SEQ ID NO: 2435097 - RNA, 19 nt, Homo sapiens
  misc_RNA (1)...(19): siRNA sense strand
ucucaaggaagaagaaaau

SEQ ID NO: 2435098 - RNA, 19 nt, Homo sapiens
  misc_RNA (1)...(19): siRNA sense strand
aggagggugaggagggaca

SEQ ID NO: 2435099 - RNA, 19 nt, Homo sapiens
  misc_RNA (1)...(19): siRNA sense strand
agaaacugacacaggacau

SEQ ID NO: 2435100 - RNA, 19 nt, Homo sapiens
  misc_RNA (1)...(19): siRNA sense strand
acgaagugguggagacccu

SEQ ID NO: 2435101 - RNA, 19 nt, Homo sapiens
  misc_RNA (1)...(19): siRNA sense strand
gagagaugcucgcagcuca

SEQ ID NO: 2435102 - RNA, 19 nt, Homo sapiens
  misc_RNA (1)...(19): siRNA sense strand
gauucagcacaguaagcaa

SEQ ID NO: 2435103 - RNA, 19 nt, Homo sapiens
  misc_RNA (1)...(19): siRNA sense strand
agaguagcaaggaggguga

SEQ ID NO: 2435104 - RNA, 19 nt, Homo sapiens
  misc_RNA (1)...(19): siRNA sense strand
cauuaugcccggugggauc

SEQ ID NO: 2435105 - RNA, 19 nt, Homo sapiens
  misc_RNA (1)...(19): siRNA sense strand
acauagaguccaaaggaag

SEQ ID NO: 2435106 - RNA, 19 nt, Homo sapiens
  misc_RNA (1)...(19): siRNA sense strand
uuguugaagaugaggaaua

SEQ ID NO: 2435107 - RNA, 19 nt, Homo sapiens
  misc_RNA (1)...(19): siRNA sense strand
gggaguaucuguuaggaga

SEQ ID NO: 2435108 - RNA, 19 nt, Homo sapiens
  misc_RNA (1)...(19): siRNA sense strand
gguucagcaucuuggacaa

SEQ ID NO: 2435109 - RNA, 19 nt, Homo sapiens
  misc_RNA (1)...(19): siRNA sense strand
gaauaaaaguggaggcaag

SEQ ID NO: 2435110 - RNA, 19 nt, Homo sapiens
  misc_RNA (1)...(19): siRNA sense strand
ggacuaugucaaagggagu

SEQ ID NO: 2435111 - RNA, 19 nt, Homo sapiens
  misc_RNA (1)...(19): siRNA sense strand
gagagaagcuagugguggu

SEQ ID NO: 2435112 - RNA, 19 nt, Homo sapiens
  misc_RNA (1)...(19): siRNA sense strand
gguuguugaagaugaggaa

SEQ ID NO: 2435113 - RNA, 19 nt, Homo sapiens
  misc_RNA (1)...(19): siRNA sense strand
gguucuaagaggagcagga

SEQ ID NO: 2435114 - RNA, 19 nt, Homo sapiens
  misc_RNA (1)...(19): siRNA sense strand
ucugaaauggaaugggauu

SEQ ID NO: 2435115 - RNA, 19 nt, Homo sapiens
  misc_RNA (1)...(19): siRNA sense strand
aggcagaugcuaagaugau

SEQ ID NO: 2435116 - RNA, 19 nt, Homo sapiens
  misc_RNA (1)...(19): siRNA sense strand
ggaguaucuguuaggagaa

SEQ ID NO: 2435117 - RNA, 19 nt, Homo sapiens
  misc_RNA (1)...(19): siRNA sense strand
auggaaaggacuaugucaa

SEQ ID NO: 2435118 - RNA, 19 nt, Homo sapiens
  misc_RNA (1)...(19): siRNA sense strand
ccaaagagaggguaccaga

SEQ ID NO: 2435119 - RNA, 19 nt, Homo sapiens
  misc_RNA (1)...(19): siRNA sense strand
gggugggagaagaagaaaa

SEQ ID NO: 2435120 - RNA, 19 nt, Homo sapiens
  misc_RNA (1)...(19): siRNA sense strand
ccaauugugcuuacggcua

SEQ ID NO: 2435121 - RNA, 19 nt, Homo sapiens
  misc_RNA (1)...(19): siRNA sense strand
guaaauacaguguguggca

SEQ ID NO: 2435122 - RNA, 19 nt, Homo sapiens
  misc_RNA (1)...(19): siRNA sense strand
gaucugaaauggaauggga

SEQ ID NO: 2435123 - RNA, 19 nt, Homo sapiens
  misc_RNA (1)...(19): siRNA sense strand
aagaauuggaagcgcaaaa

SEQ ID NO: 2435124 - RNA, 19 nt, Homo sapiens
  misc_RNA (1)...(19): siRNA sense strand
uaaaaguggaggcaagaaa

SEQ ID NO: 2435125 - RNA, 19 nt, Homo sapiens
  misc_RNA (1)...(19): siRNA sense strand
cgucgagguucuaagagga

SEQ ID NO: 2435126 - RNA, 19 nt, Homo sapiens
  misc_RNA (1)...(19): siRNA sense strand
guaucuguuaggagaaaga

SEQ ID NO: 2435127 - RNA, 19 nt, Homo sapiens
  misc_RNA (1)...(19): siRNA sense strand
agaggguaccagagagcau

SEQ ID NO: 2435128 - RNA, 19 nt, Homo sapiens
  misc_RNA (1)...(19): siRNA sense strand
ggucuaucugcgucugaaa

SEQ ID NO: 2435129 - RNA, 19 nt, Homo sapiens
  misc_RNA (1)...(19): siRNA sense strand
cuaccuuggacuaugacua

SEQ ID NO: 2435130 - RNA, 19 nt, Homo sapiens
  misc_RNA (1)...(19): siRNA sense strand
cuguuaggagaaagagaca

SEQ ID NO: 2435131 - RNA, 19 nt, Homo sapiens
  misc_RNA (1)...(19): siRNA sense strand
auguaaagaaugugggaaa

SEQ ID NO: 2435132 - RNA, 19 nt, Homo sapiens
  misc_RNA (1)...(19): siRNA sense strand
ugucaaagucuucggcaaa

SEQ ID NO: 2435133 - RNA, 19 nt, Homo sapiens
  misc_RNA (1)...(19): siRNA sense strand
uaugcauacuggagagaaa

SEQ ID NO: 2435134 - RNA, 19 nt, Homo sapiens
  misc_RNA (1)...(19): siRNA sense strand
gugucaaagucuucggcaa

SEQ ID NO: 2435135 - RNA, 19 nt, Homo sapiens
  misc_RNA (1)...(19): siRNA sense strand
cuuacuaaacauaggagaa

SEQ ID NO: 2435136 - RNA, 19 nt, Homo sapiens
  misc_RNA (1)...(19): siRNA sense strand
augugaagaaugugacaaa

SEQ ID NO: 2435137 - RNA, 19 nt, Homo sapiens
  misc_RNA (1)...(19): siRNA sense strand
augugauguuagagaacua

SEQ ID NO: 2435138 - RNA, 19 nt, Homo sapiens
  misc_RNA (1)...(19): siRNA sense strand
augugaagaauguggcaaa

SEQ ID NO: 2435139 - RNA, 19 nt, Homo sapiens
  misc_RNA (1)...(19): siRNA sense strand
aaauaaagagccuuggaau

SEQ ID NO: 2435140 - RNA, 19 nt, Homo sapiens
  misc_RNA (1)...(19): siRNA sense strand
uugcuaaccacaagagaau

SEQ ID NO: 2435141 - RNA, 19 nt, Homo sapiens
  misc_RNA (1)...(19): siRNA sense strand
uccaauagacauaagacaa

SEQ ID NO: 2435142 - RNA, 19 nt, Homo sapiens
  misc_RNA (1)...(19): siRNA sense strand
accaagaagauauggaaaa

SEQ ID NO: 2435143 - RNA, 19 nt, Homo sapiens
  misc_RNA (1)...(19): siRNA sense strand
augugaagaaugcggcaaa

SEQ ID NO: 2435144 - RNA, 19 nt, Homo sapiens
  misc_RNA (1)...(19): siRNA sense strand
augugaagaauguggccaa

SEQ ID NO: 2435145 - RNA, 19 nt, Homo sapiens
  misc_RNA (1)...(19): siRNA sense strand
augugaggaauguggcaaa

SEQ ID NO: 2435146 - RNA, 19 nt, Homo sapiens
  misc_RNA (1)...(19): siRNA sense strand
agauguagucauagaauuc

SEQ ID NO: 2435147 - RNA, 19 nt, Homo sapiens
  misc_RNA (1)...(19): siRNA sense strand
aagacaagacauacuggaa

SEQ ID NO: 2435148 - RNA, 19 nt, Homo sapiens
  misc_RNA (1)...(19): siRNA sense strand
gaagaaugugacaaagcuu

SEQ ID NO: 2435149 - RNA, 19 nt, Homo sapiens
  misc_RNA (1)...(19): siRNA sense strand
uaccaagaagauauggaaa

SEQ ID NO: 2435150 - RNA, 19 nt, Homo sapiens
  misc_RNA (1)...(19): siRNA sense strand
agaccuuccgccagagcua

SEQ ID NO: 2435151 - RNA, 19 nt, Homo sapiens
  misc_RNA (1)...(19): siRNA sense strand
agagaugugauguuagaga

SEQ ID NO: 2435152 - RNA, 19 nt, Homo sapiens
  misc_RNA (1)...(19): siRNA sense strand
ccacaagagaauucauacu

SEQ ID NO: 2435153 - RNA, 19 nt, Homo sapiens
  misc_RNA (1)...(19): siRNA sense strand
ccacaagagaauucauacu

SEQ ID NO: 2435154 - RNA, 19 nt, Homo sapiens
  misc_RNA (1)...(19): siRNA sense strand
gugaagaagaggaagaaaa

SEQ ID NO: 2435155 - RNA, 19 nt, Homo sapiens
  misc_RNA (1)...(19): siRNA sense strand
auucaaagagccuggagaa

SEQ ID NO: 2435156 - RNA, 19 nt, Homo sapiens
  misc_RNA (1)...(19): siRNA sense strand
ucagugaagaagaggaaga

SEQ ID NO: 2435157 - RNA, 19 nt, Homo sapiens
  misc_RNA (1)...(19): siRNA sense strand
gcgcugauccuacgggaga

SEQ ID NO: 2435158 - RNA, 19 nt, Homo sapiens
  misc_RNA (1)...(19): siRNA sense strand
uagacaagacaaagcugaa

SEQ ID NO: 2435159 - RNA, 19 nt, Homo sapiens
  misc_RNA (1)...(19): siRNA sense strand
cggagugaacaaugaagau

SEQ ID NO: 2435160 - RNA, 19 nt, Homo sapiens
  misc_RNA (1)...(19): siRNA sense strand
guugaaaaguuccggcaga

SEQ ID NO: 2435161 - RNA, 19 nt, Homo sapiens
  misc_RNA (1)...(19): siRNA sense strand
cagugaagaagaggaagaa

SEQ ID NO: 2435162 - RNA, 19 nt, Homo sapiens
  misc_RNA (1)...(19): siRNA sense strand
uucaaagagccuggagaaa

SEQ ID NO: 2435163 - RNA, 19 nt, Homo sapiens
  misc_RNA (1)...(19): siRNA sense strand
agaugaagcuucugggaga

SEQ ID NO: 2435164 - RNA, 19 nt, Homo sapiens
  misc_RNA (1)...(19): siRNA sense strand
ucaccuacgagaagggcua

SEQ ID NO: 2435165 - RNA, 19 nt, Homo sapiens
  misc_RNA (1)...(19): siRNA sense strand
gggcaaggcugaagcagac

SEQ ID NO: 2435166 - RNA, 19 nt, Homo sapiens
  misc_RNA (1)...(19): siRNA sense strand
ccuauguggagaaguacaa

SEQ ID NO: 2435167 - RNA, 19 nt, Homo sapiens
  misc_RNA (1)...(19): siRNA sense strand
ugggaagagauguggcuga

SEQ ID NO: 2435168 - RNA, 19 nt, Homo sapiens
  misc_RNA (1)...(19): siRNA sense strand
aggcugaagcagacacaga

SEQ ID NO: 2435169 - RNA, 19 nt, Homo sapiens
  misc_RNA (1)...(19): siRNA sense strand
acacagacucggacgcaca

SEQ ID NO: 2435170 - RNA, 19 nt, Homo sapiens
  misc_RNA (1)...(19): siRNA sense strand
gcaguggagcaguggcuga

SEQ ID NO: 2435171 - RNA, 19 nt, Homo sapiens
  misc_RNA (1)...(19): siRNA sense strand
aggacagcccggucagcaa

SEQ ID NO: 2435172 - RNA, 19 nt, Homo sapiens
  misc_RNA (1)...(19): siRNA sense strand
gcagaugaauggugcgaca

SEQ ID NO: 2435173 - RNA, 19 nt, Homo sapiens
  misc_RNA (1)...(19): siRNA sense strand
ccgacuuggagaaggaaga

SEQ ID NO: 2435174 - RNA, 19 nt, Homo sapiens
  misc_RNA (1)...(19): siRNA sense strand
gcgaugaauacgacgacau

SEQ ID NO: 2435175 - RNA, 19 nt, Homo sapiens
  misc_RNA (1)...(19): siRNA sense strand
gggaaaagcugccgacgca

SEQ ID NO: 2435176 - RNA, 19 nt, Homo sapiens
  misc_RNA (1)...(19): siRNA sense strand
gggucgcgugcuugggaaa

SEQ ID NO: 2435177 - RNA, 19 nt, Homo sapiens
  misc_RNA (1)...(19): siRNA sense strand
uggagaaggaagaagagga

SEQ ID NO: 2435178 - RNA, 19 nt, Homo sapiens
  misc_RNA (1)...(19): siRNA sense strand
cugaaaacuacgagggcca

SEQ ID NO: 2435179 - RNA, 19 nt, Homo sapiens
  misc_RNA (1)...(19): siRNA sense strand
acgacgacauugugguuca

SEQ ID NO: 2435180 - RNA, 19 nt, Homo sapiens
  misc_RNA (1)...(19): siRNA sense strand
acuuggagaaggaagaaga

SEQ ID NO: 2435181 - RNA, 19 nt, Homo sapiens
  misc_RNA (1)...(19): siRNA sense strand
aguacauggaccugcagaa

SEQ ID NO: 2435182 - RNA, 19 nt, Homo sapiens
  misc_RNA (1)...(19): siRNA sense strand
aagaggagagugaggagga

SEQ ID NO: 2435183 - RNA, 19 nt, Homo sapiens
  misc_RNA (1)...(19): siRNA sense strand
ucuuccaagucgagagaua

SEQ ID NO: 2435184 - RNA, 19 nt, Homo sapiens
  misc_RNA (1)...(19): siRNA sense strand
gugcaagauagucuagaaa

SEQ ID NO: 2435185 - RNA, 19 nt, Homo sapiens
  misc_RNA (1)...(19): siRNA sense strand
cggccaaggucaaguucau

SEQ ID NO: 2435186 - RNA, 19 nt, Homo sapiens
  misc_RNA (1)...(19): siRNA sense strand
gaauagaaucugaggcaag

SEQ ID NO: 2435187 - RNA, 19 nt, Homo sapiens
  misc_RNA (1)...(19): siRNA sense strand
cgacaguuuugaagaggaa

SEQ ID NO: 2435188 - RNA, 19 nt, Homo sapiens
  misc_RNA (1)...(19): siRNA sense strand
aagacgagaaagagaaaca

SEQ ID NO: 2435189 - RNA, 19 nt, Homo sapiens
  misc_RNA (1)...(19): siRNA sense strand
aggaauagaaucugaggca

SEQ ID NO: 2435190 - RNA, 19 nt, Homo sapiens
  misc_RNA (1)...(19): siRNA sense strand
caucaagagcagaaaggga

SEQ ID NO: 2435191 - RNA, 19 nt, Homo sapiens
  misc_RNA (1)...(19): siRNA sense strand
ucaagagcagaaagggaaa

SEQ ID NO: 2435192 - RNA, 19 nt, Homo sapiens
  misc_RNA (1)...(19): siRNA sense strand
ggaauagaaucugaggcaa

SEQ ID NO: 2435193 - RNA, 19 nt, Homo sapiens
  misc_RNA (1)...(19): siRNA sense strand
ccaccacgacagaggaaaa

SEQ ID NO: 2435194 - RNA, 19 nt, Homo sapiens
  misc_RNA (1)...(19): siRNA sense strand
gguccaggugauaaacaaa

SEQ ID NO: 2435195 - RNA, 19 nt, Homo sapiens
  misc_RNA (1)...(19): siRNA sense strand
ccgaaaagggauggugaaa

SEQ ID NO: 2435196 - RNA, 19 nt, Homo sapiens
  misc_RNA (1)...(19): siRNA sense strand
cauagugagacuuguggaa

SEQ ID NO: 2435197 - RNA, 19 nt, Homo sapiens
  misc_RNA (1)...(19): siRNA sense strand
cgaaaagggauggugaaaa

SEQ ID NO: 2435198 - RNA, 19 nt, Homo sapiens
  misc_RNA (1)...(19): siRNA sense strand
ucaaauacggccaagguca

SEQ ID NO: 2435199 - RNA, 19 nt, Homo sapiens
  misc_RNA (1)...(19): siRNA sense strand
aguugaaagaacagacuga

SEQ ID NO: 2435200 - RNA, 19 nt, Homo sapiens
  misc_RNA (1)...(19): siRNA sense strand
acuuauaagcaggaggauu

SEQ ID NO: 2435201 - RNA, 19 nt, Homo sapiens
  misc_RNA (1)...(19): siRNA sense strand
cgacuuauaagcaggagga

SEQ ID NO: 2435202 - RNA, 19 nt, Homo sapiens
  misc_RNA (1)...(19): siRNA sense strand
ucuucauauuccagcaaau

SEQ ID NO: 2435203 - RNA, 19 nt, Homo sapiens
  misc_RNA (1)...(19): siRNA sense strand
aucaagagcagaaagggaa

SEQ ID NO: 2435204 - RNA, 19 nt, Homo sapiens
  misc_RNA (1)...(19): siRNA sense strand
cccagaaacagcagacuga

SEQ ID NO: 2435205 - RNA, 19 nt, Homo sapiens
  misc_RNA (1)...(19): siRNA sense strand
ucagauuaagauaggcaau

SEQ ID NO: 2435206 - RNA, 19 nt, Homo sapiens
  misc_RNA (1)...(19): siRNA sense strand
uuccaagucgagagauaaa

SEQ ID NO: 2435207 - RNA, 19 nt, Homo sapiens
  misc_RNA (1)...(19): siRNA sense strand
cugaaaaugcugccaacaa

SEQ ID NO: 2435208 - RNA, 19 nt, Homo sapiens
  misc_RNA (1)...(19): siRNA sense strand
aaccaaggguccaggugau

SEQ ID NO: 2435209 - RNA, 19 nt, Homo sapiens
  misc_RNA (1)...(19): siRNA sense strand
cuuugaagaaugaaggaaa

SEQ ID NO: 2435210 - RNA, 19 nt, Homo sapiens
  misc_RNA (1)...(19): siRNA sense strand
agggaaaagcuuugaagaa

SEQ ID NO: 2435211 - RNA, 19 nt, Homo sapiens
  misc_RNA (1)...(19): siRNA sense strand
guugaacaauuaaagggaa

SEQ ID NO: 2435212 - RNA, 19 nt, Homo sapiens
  misc_RNA (1)...(19): siRNA sense strand
guucuaucacacagagcaa

SEQ ID NO: 2435213 - RNA, 19 nt, Homo sapiens
  misc_RNA (1)...(19): siRNA sense strand
cgaaauagauguuccagcu

SEQ ID NO: 2435214 - RNA, 19 nt, Homo sapiens
  misc_RNA (1)...(19): siRNA sense strand
ccuacugaggcaagcagaa

SEQ ID NO: 2435215 - RNA, 19 nt, Homo sapiens
  misc_RNA (1)...(19): siRNA sense strand
ggaugaugaaauugacagu

SEQ ID NO: 2435216 - RNA, 19 nt, Homo sapiens
  misc_RNA (1)...(19): siRNA sense strand
agccagaagaagagccaaa

SEQ ID NO: 2435217 - RNA, 19 nt, Homo sapiens
  misc_RNA (1)...(19): siRNA sense strand
caucaaaucugugugggaa

SEQ ID NO: 2435218 - RNA, 19 nt, Homo sapiens
  misc_RNA (1)...(19): siRNA sense strand
uggacaaggcacaagaaga

SEQ ID NO: 2435219 - RNA, 19 nt, Homo sapiens
  misc_RNA (1)...(19): siRNA sense strand
cacaagaagaagucugaau

SEQ ID NO: 2435220 - RNA, 19 nt, Homo sapiens
  misc_RNA (1)...(19): siRNA sense strand
uugacaaggccaacaaaca

SEQ ID NO: 2435221 - RNA, 19 nt, Homo sapiens
  misc_RNA (1)...(19): siRNA sense strand
ccaaagcagaggaaggcua

SEQ ID NO: 2435222 - RNA, 19 nt, Homo sapiens
  misc_RNA (1)...(19): siRNA sense strand
agauagagaaagaggccau

SEQ ID NO: 2435223 - RNA, 19 nt, Homo sapiens
  misc_RNA (1)...(19): siRNA sense strand
ugguggaaucuguggucaa

SEQ ID NO: 2435224 - RNA, 19 nt, Homo sapiens
  misc_RNA (1)...(19): siRNA sense strand
gcaucagcaagauagcaaa

SEQ ID NO: 2435225 - RNA, 19 nt, Homo sapiens
  misc_RNA (1)...(19): siRNA sense strand
ccauggaggaagcggagaa

SEQ ID NO: 2435226 - RNA, 19 nt, Homo sapiens
  misc_RNA (1)...(19): siRNA sense strand
gaggagggaagcagggaga

SEQ ID NO: 2435227 - RNA, 19 nt, Homo sapiens
  misc_RNA (1)...(19): siRNA sense strand
gccgcaagacgcaggacaa

SEQ ID NO: 2435228 - RNA, 19 nt, Homo sapiens
  misc_RNA (1)...(19): siRNA sense strand
agucuggacacgagagguu

SEQ ID NO: 2435229 - RNA, 19 nt, Homo sapiens
  misc_RNA (1)...(19): siRNA sense strand
gaauacagauggagccagu

SEQ ID NO: 2435230 - RNA, 19 nt, Homo sapiens
  misc_RNA (1)...(19): siRNA sense strand
acucaaaggaagcggagga

SEQ ID NO: 2435231 - RNA, 19 nt, Homo sapiens
  misc_RNA (1)...(19): siRNA sense strand
cauuguugcaagagaauca

SEQ ID NO: 2435232 - RNA, 19 nt, Homo sapiens
  misc_RNA (1)...(19): siRNA sense strand
uugaaagcacacagaagaa

SEQ ID NO: 2435233 - RNA, 19 nt, Homo sapiens
  misc_RNA (1)...(19): siRNA sense strand
aagaacacacacaggagaa

SEQ ID NO: 2435234 - RNA, 19 nt, Homo sapiens
  misc_RNA (1)...(19): siRNA sense strand
cugucaagcaagaggccau

SEQ ID NO: 2435235 - RNA, 19 nt, Homo sapiens
  misc_RNA (1)...(19): siRNA sense strand
acacagaagaacacacaca

SEQ ID NO: 2435236 - RNA, 19 nt, Homo sapiens
  misc_RNA (1)...(19): siRNA sense strand
gagaaucacccuucgguca

SEQ ID NO: 2435237 - RNA, 19 nt, Homo sapiens
  misc_RNA (1)...(19): siRNA sense strand
ccgaaaacauacuggaauc

SEQ ID NO: 2435238 - RNA, 19 nt, Homo sapiens
  misc_RNA (1)...(19): siRNA sense strand
uaucggaggagauggaaaa

SEQ ID NO: 2435239 - RNA, 19 nt, Homo sapiens
  misc_RNA (1)...(19): siRNA sense strand
gauuaugauggaugcaaca

SEQ ID NO: 2435240 - RNA, 19 nt, Homo sapiens
  misc_RNA (1)...(19): siRNA sense strand
ggacagauuauuauccuga

SEQ ID NO: 2435241 - RNA, 19 nt, Homo sapiens
  misc_RNA (1)...(19): siRNA sense strand
gaaucauaugagaagccua

SEQ ID NO: 2435242 - RNA, 19 nt, Homo sapiens
  misc_RNA (1)...(19): siRNA sense strand
agaccauagcugagaacua

SEQ ID NO: 2435243 - RNA, 19 nt, Homo sapiens
  misc_RNA (1)...(19): siRNA sense strand
agaaaaugcaacagcgaaa

SEQ ID NO: 2435244 - RNA, 19 nt, Homo sapiens
  misc_RNA (1)...(19): siRNA sense strand
gcacagaaggagauggagu

SEQ ID NO: 2435245 - RNA, 19 nt, Homo sapiens
  misc_RNA (1)...(19): siRNA sense strand
uaaauaaggcuguuggaga

SEQ ID NO: 2435246 - RNA, 19 nt, Homo sapiens
  misc_RNA (1)...(19): siRNA sense strand
gaguauacaccuuaaauga

SEQ ID NO: 2435247 - RNA, 19 nt, Homo sapiens
  misc_RNA (1)...(19): siRNA sense strand
ugucuaaguaccaggaaga

SEQ ID NO: 2435248 - RNA, 19 nt, Homo sapiens
  misc_RNA (1)...(19): siRNA sense strand
cugccuaccuucaaagaau

SEQ ID NO: 2435249 - RNA, 19 nt, Homo sapiens
  misc_RNA (1)...(19): siRNA sense strand
cuucaaagaauuaugcaga

SEQ ID NO: 2435250 - RNA, 19 nt, Homo sapiens
  misc_RNA (1)...(19): siRNA sense strand
ggugcuuguuaaugagaga

SEQ ID NO: 2435251 - RNA, 19 nt, Homo sapiens
  misc_RNA (1)...(19): siRNA sense strand
cuuuaaacuuacugaccau

SEQ ID NO: 2435252 - RNA, 19 nt, Homo sapiens
  misc_RNA (1)...(19): siRNA sense strand
gaacaauggcugcugacca

SEQ ID NO: 2435253 - RNA, 19 nt, Homo sapiens
  misc_RNA (1)...(19): siRNA sense strand
cuuguuaaugagagaguga

SEQ ID NO: 2435254 - RNA, 19 nt, Homo sapiens
  misc_RNA (1)...(19): siRNA sense strand
guggacaccuggaugccaa

SEQ ID NO: 2435255 - RNA, 19 nt, Homo sapiens
  misc_RNA (1)...(19): siRNA sense strand
gcuaaauggagaagcaaca

SEQ ID NO: 2435256 - RNA, 19 nt, Homo sapiens
  misc_RNA (1)...(19): siRNA sense strand
agacaauggaagugacuau

SEQ ID NO: 2435257 - RNA, 19 nt, Homo sapiens
  misc_RNA (1)...(19): siRNA sense strand
gggcuaagugucaaggcua

SEQ ID NO: 2435258 - RNA, 19 nt, Homo sapiens
  misc_RNA (1)...(19): siRNA sense strand
cccuaaacacaaugacaaa

SEQ ID NO: 2435259 - RNA, 19 nt, Homo sapiens
  misc_RNA (1)...(19): siRNA sense strand
ccaaagaguaggaagugau

SEQ ID NO: 2435260 - RNA, 19 nt, Homo sapiens
  misc_RNA (1)...(19): siRNA sense strand
aggaugacauggaggaguu

SEQ ID NO: 2435261 - RNA, 19 nt, Homo sapiens
  misc_RNA (1)...(19): siRNA sense strand
uguaaagacggaagacaau

SEQ ID NO: 2435262 - RNA, 19 nt, Homo sapiens
  misc_RNA (1)...(19): siRNA sense strand
ccucauagaugcuucccaa

SEQ ID NO: 2435263 - RNA, 19 nt, Homo sapiens
  misc_RNA (1)...(19): siRNA sense strand
uggagaaaauuaugagaga

SEQ ID NO: 2435264 - RNA, 19 nt, Homo sapiens
  misc_RNA (1)...(19): siRNA sense strand
ccugauacagcuugggaga

SEQ ID NO: 2435265 - RNA, 19 nt, Homo sapiens
  misc_RNA (1)...(19): siRNA sense strand
augauggcuuugagggcua

SEQ ID NO: 2435266 - RNA, 19 nt, Homo sapiens
  misc_RNA (1)...(19): siRNA sense strand
agcuauucuccuugggaaa

SEQ ID NO: 2435267 - RNA, 19 nt, Homo sapiens
  misc_RNA (1)...(19): siRNA sense strand
auuuaggaggagagaauau

SEQ ID NO: 2435268 - RNA, 19 nt, Homo sapiens
  misc_RNA (1)...(19): siRNA sense strand
acagcuaaauggagaagca

SEQ ID NO: 2435269 - RNA, 19 nt, Homo sapiens
  misc_RNA (1)...(19): siRNA sense strand
guauacaccaaaugaaaca

SEQ ID NO: 2435270 - RNA, 19 nt, Homo sapiens
  misc_RNA (1)...(19): siRNA sense strand
aagccagauuggaacuaua

SEQ ID NO: 2435271 - RNA, 19 nt, Homo sapiens
  misc_RNA (1)...(19): siRNA sense strand
agaccaacucuuuagacaa

SEQ ID NO: 2435272 - RNA, 19 nt, Homo sapiens
  misc_RNA (1)...(19): siRNA sense strand
gcuugggagaauacauaaa

SEQ ID NO: 2435273 - RNA, 19 nt, Homo sapiens
  misc_RNA (1)...(19): siRNA sense strand
acauaaaccagaucugaau

SEQ ID NO: 2435274 - RNA, 19 nt, Homo sapiens
  misc_RNA (1)...(19): siRNA sense strand
gcccuaaacacaaugacaa

SEQ ID NO: 2435275 - RNA, 19 nt, Homo sapiens
  misc_RNA (1)...(19): siRNA sense strand
cgaaguucuuaaagccauu

SEQ ID NO: 2435276 - RNA, 19 nt, Homo sapiens
  misc_RNA (1)...(19): siRNA sense strand
gagcuauucuccuugggaa

SEQ ID NO: 2435277 - RNA, 19 nt, Homo sapiens
  misc_RNA (1)...(19): siRNA sense strand
gugucaaggcuacgucaua

SEQ ID NO: 2435278 - RNA, 19 nt, Homo sapiens
  misc_RNA (1)...(19): siRNA sense strand
caacauugcuucagacccu

SEQ ID NO: 2435279 - RNA, 19 nt, Homo sapiens
  misc_RNA (1)...(19): siRNA sense strand
aacaauuggucgugcccua

SEQ ID NO: 2435280 - RNA, 19 nt, Homo sapiens
  misc_RNA (1)...(19): siRNA sense strand
uaggaagugaugaguuuaa

SEQ ID NO: 2435281 - RNA, 19 nt, Homo sapiens
  misc_RNA (1)...(19): siRNA sense strand
ggagaauacauaaaccaga

SEQ ID NO: 2435282 - RNA, 19 nt, Homo sapiens
  misc_RNA (1)...(19): siRNA sense strand
ggguugcuguccugagcua

SEQ ID NO: 2435283 - RNA, 19 nt, Homo sapiens
  misc_RNA (1)...(19): siRNA sense strand
caacaaauaucccaccgaa

SEQ ID NO: 2435284 - RNA, 19 nt, Homo sapiens
  misc_RNA (1)...(19): siRNA sense strand
gcgaaguucuuaaagccau

SEQ ID NO: 2435285 - RNA, 19 nt, Homo sapiens
  misc_RNA (1)...(19): siRNA sense strand
ggagaaaauuaugagagaa

SEQ ID NO: 2435286 - RNA, 19 nt, Homo sapiens
  misc_RNA (1)...(19): siRNA sense strand
acucaucaauuuaggagga

SEQ ID NO: 2435287 - RNA, 19 nt, Homo sapiens
  misc_RNA (1)...(19): siRNA sense strand
aggaugaguuuaaggcugu

SEQ ID NO: 2435288 - RNA, 19 nt, Homo sapiens
  misc_RNA (1)...(19): siRNA sense strand
gcagaaaagaagaaccaga

SEQ ID NO: 2435289 - RNA, 19 nt, Homo sapiens
  misc_RNA (1)...(19): siRNA sense strand
uagaagaauuagccagcca

SEQ ID NO: 2435290 - RNA, 19 nt, Homo sapiens
  misc_RNA (1)...(19): siRNA sense strand
cuguagacucaucaauuua

SEQ ID NO: 2435291 - RNA, 19 nt, Homo sapiens
  misc_RNA (1)...(19): siRNA sense strand
cucaacagcucaauggaga

SEQ ID NO: 2435292 - RNA, 19 nt, Homo sapiens
  misc_RNA (1)...(19): siRNA sense strand
gaucugaauuauauugcga

SEQ ID NO: 2435293 - RNA, 19 nt, Homo sapiens
  misc_RNA (1)...(19): siRNA sense strand
acaugaaaauuauggcaga

SEQ ID NO: 2435294 - RNA, 19 nt, Homo sapiens
  misc_RNA (1)...(19): siRNA sense strand
cccacaagccagauuggaa

SEQ ID NO: 2435295 - RNA, 19 nt, Homo sapiens
  misc_RNA (1)...(19): siRNA sense strand
ccaaagagaccuaugggau

SEQ ID NO: 2435296 - RNA, 19 nt, Homo sapiens
  misc_RNA (1)...(19): siRNA sense strand
ggaaauacaagaaacccaa

SEQ ID NO: 2435297 - RNA, 19 nt, Homo sapiens
  misc_RNA (1)...(19): siRNA sense strand
gggaaauacaagaaaccca

SEQ ID NO: 2435298 - RNA, 19 nt, Homo sapiens
  misc_RNA (1)...(19): siRNA sense strand
acagggugucuuugggaaa

SEQ ID NO: 2435299 - RNA, 19 nt, Homo sapiens
  misc_RNA (1)...(19): siRNA sense strand
cugaugucauugauggcaa

SEQ ID NO: 2435300 - RNA, 19 nt, Homo sapiens
  misc_RNA (1)...(19): siRNA sense strand
ggauuguggcccaggcuca

SEQ ID NO: 2435301 - RNA, 19 nt, Homo sapiens
  misc_RNA (1)...(19): siRNA sense strand
agacggagacagaggugga

SEQ ID NO: 2435302 - RNA, 19 nt, Homo sapiens
  misc_RNA (1)...(19): siRNA sense strand
ugaagcuggcugagaucaa

SEQ ID NO: 2435303 - RNA, 19 nt, Homo sapiens
  misc_RNA (1)...(19): siRNA sense strand
gacacagagaccagagaga

SEQ ID NO: 2435304 - RNA, 19 nt, Homo sapiens
  misc_RNA (1)...(19): siRNA sense strand
cuggagacucagaggggaa

SEQ ID NO: 2435305 - RNA, 19 nt, Homo sapiens
  misc_RNA (1)...(19): siRNA sense strand
auuacaauuuggaaggcau

SEQ ID NO: 2435306 - RNA, 19 nt, Homo sapiens
  misc_RNA (1)...(19): siRNA sense strand
ggauaauuccaaugagcac

SEQ ID NO: 2435307 - RNA, 19 nt, Homo sapiens
  misc_RNA (1)...(19): siRNA sense strand
uuccagugauggugccaaa

SEQ ID NO: 2435308 - RNA, 19 nt, Homo sapiens
  misc_RNA (1)...(19): siRNA sense strand
uugacuggguuuaugggua

SEQ ID NO: 2435309 - RNA, 19 nt, Homo sapiens
  misc_RNA (1)...(19): siRNA sense strand
acucggaggccguggucau

SEQ ID NO: 2435310 - RNA, 19 nt, Homo sapiens
  misc_RNA (1)...(19): siRNA sense strand
acacaggaccaaagggaga

SEQ ID NO: 2435311 - RNA, 19 nt, Homo sapiens
  misc_RNA (1)...(19): siRNA sense strand
agguuggacccgagugaaa

SEQ ID NO: 2435312 - RNA, 19 nt, Homo sapiens
  misc_RNA (1)...(19): siRNA sense strand
caugagauuugaagaugaa

SEQ ID NO: 2435313 - RNA, 19 nt, Homo sapiens
  misc_RNA (1)...(19): siRNA sense strand
gcaaaacaguuccaagaaa

SEQ ID NO: 2435314 - RNA, 19 nt, Homo sapiens
  misc_RNA (1)...(19): siRNA sense strand
gcgaggagucucuggaaaa

SEQ ID NO: 2435315 - RNA, 19 nt, Homo sapiens
  misc_RNA (1)...(19): siRNA sense strand
ggagaaagcugugcugcua

SEQ ID NO: 2435316 - RNA, 19 nt, Homo sapiens
  misc_RNA (1)...(19): siRNA sense strand
guguacuaggacagggaaa

SEQ ID NO: 2435317 - RNA, 19 nt, Homo sapiens
  misc_RNA (1)...(19): siRNA sense strand
cuacaugagauuugaagau

SEQ ID NO: 2435318 - RNA, 19 nt, Homo sapiens
  misc_RNA (1)...(19): siRNA sense strand
gaaugugacuuugaagaaa

SEQ ID NO: 2435319 - RNA, 19 nt, Homo sapiens
  misc_RNA (1)...(19): siRNA sense strand
agaccacacuacaggcuua

SEQ ID NO: 2435320 - RNA, 19 nt, Homo sapiens
  misc_RNA (1)...(19): siRNA sense strand
ggacccgagugaaaguaaa

SEQ ID NO: 2435321 - RNA, 19 nt, Homo sapiens
  misc_RNA (1)...(19): siRNA sense strand
ccaggaaacuugcaguauu

SEQ ID NO: 2435322 - RNA, 19 nt, Homo sapiens
  misc_RNA (1)...(19): siRNA sense strand
gagugaaaguaaaaccaaa

SEQ ID NO: 2435323 - RNA, 19 nt, Homo sapiens
  misc_RNA (1)...(19): siRNA sense strand
acaugagauuugaagauga

SEQ ID NO: 2435324 - RNA, 19 nt, Homo sapiens
  misc_RNA (1)...(19): siRNA sense strand
gauuugaagaugaaagcuu

SEQ ID NO: 2435325 - RNA, 19 nt, Homo sapiens
  misc_RNA (1)...(19): siRNA sense strand
caaaacaguuccaagaaau

SEQ ID NO: 2435326 - RNA, 19 nt, Homo sapiens
  misc_RNA (1)...(19): siRNA sense strand
ugaaugugacuuugaagaa

SEQ ID NO: 2435327 - RNA, 19 nt, Homo sapiens
  misc_RNA (1)...(19): siRNA sense strand
cacuacaggcuuaggguau

SEQ ID NO: 2435328 - RNA, 19 nt, Homo sapiens
  misc_RNA (1)...(19): siRNA sense strand
aggaaggccauuacauuua

SEQ ID NO: 2435329 - RNA, 19 nt, Homo sapiens
  misc_RNA (1)...(19): siRNA sense strand
cuguauugaaugugacuuu

SEQ ID NO: 2435330 - RNA, 19 nt, Homo sapiens
  misc_RNA (1)...(19): siRNA sense strand
gagaagaucuggucugugu

SEQ ID NO: 2435331 - RNA, 19 nt, Homo sapiens
  misc_RNA (1)...(19): siRNA sense strand
caguuuaugugaagcacuu

SEQ ID NO: 2435332 - RNA, 19 nt, Homo sapiens
  misc_RNA (1)...(19): siRNA sense strand
gaggaaggccauuacauuu

SEQ ID NO: 2435333 - RNA, 19 nt, Homo sapiens
  misc_RNA (1)...(19): siRNA sense strand
uuucaugagccuaugcaaa

SEQ ID NO: 2435334 - RNA, 19 nt, Homo sapiens
  misc_RNA (1)...(19): siRNA sense strand
gagaagaggugaacagagc

SEQ ID NO: 2435335 - RNA, 19 nt, Homo sapiens
  misc_RNA (1)...(19): siRNA sense strand
gaggaaaucuggaaagcag

SEQ ID NO: 2435336 - RNA, 19 nt, Homo sapiens
  misc_RNA (1)...(19): siRNA sense strand
ugauauugccauugaugau

SEQ ID NO: 2435337 - RNA, 19 nt, Homo sapiens
  misc_RNA (1)...(19): siRNA sense strand
uggagaaauggaagauaca

SEQ ID NO: 2435338 - RNA, 19 nt, Homo sapiens
  misc_RNA (1)...(19): siRNA sense strand
cuacaggcuuaggguauua

SEQ ID NO: 2435339 - RNA, 19 nt, Homo sapiens
  misc_RNA (1)...(19): siRNA sense strand
ccaugugguucaagagaag

SEQ ID NO: 2435340 - RNA, 19 nt, Homo sapiens
  misc_RNA (1)...(19): siRNA sense strand
gcucauagccagcuuggau

SEQ ID NO: 2435341 - RNA, 19 nt, Homo sapiens
  misc_RNA (1)...(19): siRNA sense strand
gagcaagaucucugcaacu

SEQ ID NO: 2435342 - RNA, 19 nt, Homo sapiens
  misc_RNA (1)...(19): siRNA sense strand
gagcaagaugaauguacau

SEQ ID NO: 2435343 - RNA, 19 nt, Homo sapiens
  misc_RNA (1)...(19): siRNA sense strand
gagaaauggaagauacaac

SEQ ID NO: 2435344 - RNA, 19 nt, Homo sapiens
  misc_RNA (1)...(19): siRNA sense strand
ggacagggaaacacagcca

SEQ ID NO: 2435345 - RNA, 19 nt, Homo sapiens
  misc_RNA (1)...(19): siRNA sense strand
gagaaagcugugcugcuaa

SEQ ID NO: 2435346 - RNA, 19 nt, Homo sapiens
  misc_RNA (1)...(19): siRNA sense strand
auggaggagaagaggugaa

SEQ ID NO: 2435347 - RNA, 19 nt, Homo sapiens
  misc_RNA (1)...(19): siRNA sense strand
uguuggaggaggaaguauu

SEQ ID NO: 2435348 - RNA, 19 nt, Homo sapiens
  misc_RNA (1)...(19): siRNA sense strand
uuuaagaagcccaugccua

SEQ ID NO: 2435349 - RNA, 19 nt, Homo sapiens
  misc_RNA (1)...(19): siRNA sense strand
guggaagccagcugcaauu

SEQ ID NO: 2435350 - RNA, 19 nt, Homo sapiens
  misc_RNA (1)...(19): siRNA sense strand
acacaaaguucacaucuca

SEQ ID NO: 2435351 - RNA, 19 nt, Homo sapiens
  misc_RNA (1)...(19): siRNA sense strand
uagaagguguacuaggaca

SEQ ID NO: 2435352 - RNA, 19 nt, Homo sapiens
  misc_RNA (1)...(19): siRNA sense strand
gaacugguuuguuggagga

SEQ ID NO: 2435353 - RNA, 19 nt, Homo sapiens
  misc_RNA (1)...(19): siRNA sense strand
guuuguuggaggaggaagu

SEQ ID NO: 2435354 - RNA, 19 nt, Homo sapiens
  misc_RNA (1)...(19): siRNA sense strand
ccagaaucagacagaacuu

SEQ ID NO: 2435355 - RNA, 19 nt, Homo sapiens
  misc_RNA (1)...(19): siRNA sense strand
gggagaaagcugugcugcu

SEQ ID NO: 2435356 - RNA, 19 nt, Homo sapiens
  misc_RNA (1)...(19): siRNA sense strand
aauagaagguguacuagga

SEQ ID NO: 2435357 - RNA, 19 nt, Homo sapiens
  misc_RNA (1)...(19): siRNA sense strand
gcucaucuucagagaaacu

SEQ ID NO: 2435358 - RNA, 19 nt, Homo sapiens
  misc_RNA (1)...(19): siRNA sense strand
agagagcacuugcggcuuu

SEQ ID NO: 2435359 - RNA, 19 nt, Homo sapiens
  misc_RNA (1)...(19): siRNA sense strand
ugggaugggcugauggaaa

SEQ ID NO: 2435360 - RNA, 19 nt, Homo sapiens
  misc_RNA (1)...(19): siRNA sense strand
cugcgaacucugugggaga

SEQ ID NO: 2435361 - RNA, 19 nt, Homo sapiens
  misc_RNA (1)...(19): siRNA sense strand
aggaaggccaggaggaaac

SEQ ID NO: 2435362 - RNA, 19 nt, Homo sapiens
  misc_RNA (1)...(19): siRNA sense strand
uaggaaggccaggaggaaa

SEQ ID NO: 2435363 - RNA, 19 nt, Homo sapiens
  misc_RNA (1)...(19): siRNA sense strand
augccgaccaggagaucua

SEQ ID NO: 2435364 - RNA, 19 nt, Homo sapiens
  misc_RNA (1)...(19): siRNA sense strand
guuaggaaggccaggagga

SEQ ID NO: 2435365 - RNA, 19 nt, Homo sapiens
  misc_RNA (1)...(19): siRNA sense strand
ccgaagaauccaagagaac

SEQ ID NO: 2435366 - RNA, 19 nt, Homo sapiens
  misc_RNA (1)...(19): siRNA sense strand
cagcaguccaagcaggaaa

SEQ ID NO: 2435367 - RNA, 19 nt, Homo sapiens
  misc_RNA (1)...(19): siRNA sense strand
aguccaagcaggaaaccaa

SEQ ID NO: 2435368 - RNA, 19 nt, Homo sapiens
  misc_RNA (1)...(19): siRNA sense strand
gcuccgaagccgugagaac

SEQ ID NO: 2435369 - RNA, 19 nt, Homo sapiens
  misc_RNA (1)...(19): siRNA sense strand
uugaccaguuugaggagaa

SEQ ID NO: 2435370 - RNA, 19 nt, Homo sapiens
  misc_RNA (1)...(19): siRNA sense strand
aggucauauuugaggaugu

SEQ ID NO: 2435371 - RNA, 19 nt, Homo sapiens
  misc_RNA (1)...(19): siRNA sense strand
gggagcugaucgagaccau

SEQ ID NO: 2435372 - RNA, 19 nt, Homo sapiens
  misc_RNA (1)...(19): siRNA sense strand
uauuaagggccgaggugga

SEQ ID NO: 2435373 - RNA, 19 nt, Homo sapiens
  misc_RNA (1)...(19): siRNA sense strand
cagccuucauacaagcaaa

SEQ ID NO: 2435374 - RNA, 19 nt, Homo sapiens
  misc_RNA (1)...(19): siRNA sense strand
cagagcagcugaaugccaa

SEQ ID NO: 2435375 - RNA, 19 nt, Homo sapiens
  misc_RNA (1)...(19): siRNA sense strand
ggaaguuggacccugggaa

SEQ ID NO: 2435376 - RNA, 19 nt, Homo sapiens
  misc_RNA (1)...(19): siRNA sense strand
cugggaagaugcaugccaa

SEQ ID NO: 2435377 - RNA, 19 nt, Homo sapiens
  misc_RNA (1)...(19): siRNA sense strand
ugggaagaugcaugccaaa

SEQ ID NO: 2435378 - RNA, 19 nt, Homo sapiens
  misc_RNA (1)...(19): siRNA sense strand
cugaaugccaagauugaga

SEQ ID NO: 2435379 - RNA, 19 nt, Homo sapiens
  misc_RNA (1)...(19): siRNA sense strand
aguuguauacugagggcua

SEQ ID NO: 2435380 - RNA, 19 nt, Homo sapiens
  misc_RNA (1)...(19): siRNA sense strand
uugaagaaagggagaagau

SEQ ID NO: 2435381 - RNA, 19 nt, Homo sapiens
  misc_RNA (1)...(19): siRNA sense strand
cuguggagaaguugcuaaa

SEQ ID NO: 2435382 - RNA, 19 nt, Homo sapiens
  misc_RNA (1)...(19): siRNA sense strand
guacccaagcaaagaaaca

SEQ ID NO: 2435383 - RNA, 19 nt, Homo sapiens
  misc_RNA (1)...(19): siRNA sense strand
ucauugaauacaagaccua

SEQ ID NO: 2435384 - RNA, 19 nt, Homo sapiens
  misc_RNA (1)...(19): siRNA sense strand
gugaagaacauuacccuga

SEQ ID NO: 2435385 - RNA, 19 nt, Homo sapiens
  misc_RNA (1)...(19): siRNA sense strand
aacaauaggaucuggcgaa

SEQ ID NO: 2435386 - RNA, 19 nt, Homo sapiens
  misc_RNA (1)...(19): siRNA sense strand
ggcuuauggaugacauuua

SEQ ID NO: 2435387 - RNA, 19 nt, Homo sapiens
  misc_RNA (1)...(19): siRNA sense strand
uggaaugggcacagcaguu

SEQ ID NO: 2435388 - RNA, 19 nt, Homo sapiens
  misc_RNA (1)...(19): siRNA sense strand
ccauggagucacugauuca

SEQ ID NO: 2435389 - RNA, 19 nt, Homo sapiens
  misc_RNA (1)...(19): siRNA sense strand
gcucaggcauccaguggga

SEQ ID NO: 2435390 - RNA, 19 nt, Homo sapiens
  misc_RNA (1)...(19): siRNA sense strand
cuaagcgagcagagaugaa

SEQ ID NO: 2435391 - RNA, 19 nt, Homo sapiens
  misc_RNA (1)...(19): siRNA sense strand
cagcagagguguucggcag

SEQ ID NO: 2435392 - RNA, 19 nt, Homo sapiens
  misc_RNA (1)...(19): siRNA sense strand
ccuaugauguuuacgacca

SEQ ID NO: 2435393 - RNA, 19 nt, Homo sapiens
  misc_RNA (1)...(19): siRNA sense strand
ggaccuaccccuugggcuu

SEQ ID NO: 2435394 - RNA, 19 nt, Homo sapiens
  misc_RNA (1)...(19): siRNA sense strand
uguuauguacccaagcaaa

SEQ ID NO: 2435395 - RNA, 19 nt, Homo sapiens
  misc_RNA (1)...(19): siRNA sense strand
cagugggaccugcggaaga

SEQ ID NO: 2435396 - RNA, 19 nt, Homo sapiens
  misc_RNA (1)...(19): siRNA sense strand
cgagcagagaugaagacuu

SEQ ID NO: 2435397 - RNA, 19 nt, Homo sapiens
  misc_RNA (1)...(19): siRNA sense strand
uggagaaguagaucgguga

SEQ ID NO: 2435398 - RNA, 19 nt, Homo sapiens
  misc_RNA (1)...(19): siRNA sense strand
ccaaggagaugauggccca

SEQ ID NO: 2435399 - RNA, 19 nt, Homo sapiens
  misc_RNA (1)...(19): siRNA sense strand
gggaagauggugaagcugu

SEQ ID NO: 2435400 - RNA, 19 nt, Homo sapiens
  misc_RNA (1)...(19): siRNA sense strand
aagcaagcccugcaggaga

SEQ ID NO: 2435401 - RNA, 19 nt, Homo sapiens
  misc_RNA (1)...(19): siRNA sense strand
gggaaggaaucguggagca

SEQ ID NO: 2435402 - RNA, 19 nt, Homo sapiens
  misc_RNA (1)...(19): siRNA sense strand
gugaugagcugguggcaga

SEQ ID NO: 2435403 - RNA, 19 nt, Homo sapiens
  misc_RNA (1)...(19): siRNA sense strand
gaggagaacaggaagguga

SEQ ID NO: 2435404 - RNA, 19 nt, Homo sapiens
  misc_RNA (1)...(19): siRNA sense strand
aguacauccacgagaacua

SEQ ID NO: 2435405 - RNA, 19 nt, Homo sapiens
  misc_RNA (1)...(19): siRNA sense strand
cagcugaaaccgaggggua

SEQ ID NO: 2435406 - RNA, 19 nt, Homo sapiens
  misc_RNA (1)...(19): siRNA sense strand
ucgaacaguugguggagga

SEQ ID NO: 2435407 - RNA, 19 nt, Homo sapiens
  misc_RNA (1)...(19): siRNA sense strand
acaugaagcagguggggua

SEQ ID NO: 2435408 - RNA, 19 nt, Homo sapiens
  misc_RNA (1)...(19): siRNA sense strand
cggugguuaaagaaggaaa

SEQ ID NO: 2435409 - RNA, 19 nt, Homo sapiens
  misc_RNA (1)...(19): siRNA sense strand
ggugguuaaagaaggaaau

SEQ ID NO: 2435410 - RNA, 19 nt, Homo sapiens
  misc_RNA (1)...(19): siRNA sense strand
acgcugaccgggaggauau

SEQ ID NO: 2435411 - RNA, 19 nt, Homo sapiens
  misc_RNA (1)...(19): siRNA sense strand
uuaaagaaggaaauggaga

SEQ ID NO: 2435412 - RNA, 19 nt, Homo sapiens
  misc_RNA (1)...(19): siRNA sense strand
agaaauacgcugaccggga

SEQ ID NO: 2435413 - RNA, 19 nt, Homo sapiens
  misc_RNA (1)...(19): siRNA sense strand
aguggaaguacaaggauga

SEQ ID NO: 2435414 - RNA, 19 nt, Homo sapiens
  misc_RNA (1)...(19): siRNA sense strand
gacccaggacugagggaga

SEQ ID NO: 2435415 - RNA, 19 nt, Homo sapiens
  misc_RNA (1)...(19): siRNA sense strand
ggcuggaggcuacgagaau

SEQ ID NO: 2435416 - RNA, 19 nt, Homo sapiens
  misc_RNA (1)...(19): siRNA sense strand
aguacaaggaugaugacga

SEQ ID NO: 2435417 - RNA, 19 nt, Homo sapiens
  misc_RNA (1)...(19): siRNA sense strand
agcucaacuaccugggaaa

SEQ ID NO: 2435418 - RNA, 19 nt, Homo sapiens
  misc_RNA (1)...(19): siRNA sense strand
auaaagaauuggugagcaa

SEQ ID NO: 2435419 - RNA, 19 nt, Homo sapiens
  misc_RNA (1)...(19): siRNA sense strand
uggaagaaacugaggaaaa

SEQ ID NO: 2435420 - RNA, 19 nt, Homo sapiens
  misc_RNA (1)...(19): siRNA sense strand
ccgagaagcaacaggagaa

SEQ ID NO: 2435421 - RNA, 19 nt, Homo sapiens
  misc_RNA (1)...(19): siRNA sense strand
agaaagaggaggaggggaa

SEQ ID NO: 2435422 - RNA, 19 nt, Homo sapiens
  misc_RNA (1)...(19): siRNA sense strand
ugguaugaagagagggaua

SEQ ID NO: 2435423 - RNA, 19 nt, Homo sapiens
  misc_RNA (1)...(19): siRNA sense strand
ggacaagaaagaagggacu

SEQ ID NO: 2435424 - RNA, 19 nt, Homo sapiens
  misc_RNA (1)...(19): siRNA sense strand
uuacuauauucgagaggaa

SEQ ID NO: 2435425 - RNA, 19 nt, Homo sapiens
  misc_RNA (1)...(19): siRNA sense strand
agaaauuugccuugaagaa

SEQ ID NO: 2435426 - RNA, 19 nt, Homo sapiens
  misc_RNA (1)...(19): siRNA sense strand
aggagaaaauggagaaaca

SEQ ID NO: 2435427 - RNA, 19 nt, Homo sapiens
  misc_RNA (1)...(19): siRNA sense strand
aagaagaggaggaaccuaa

SEQ ID NO: 2435428 - RNA, 19 nt, Homo sapiens
  misc_RNA (1)...(19): siRNA sense strand
uggagaaacagaaaugaaa

SEQ ID NO: 2435429 - RNA, 19 nt, Homo sapiens
  misc_RNA (1)...(19): siRNA sense strand
acacaauggagaccagaaa

SEQ ID NO: 2435430 - RNA, 19 nt, Homo sapiens
  misc_RNA (1)...(19): siRNA sense strand
agaaauggacagagggucu

SEQ ID NO: 2435431 - RNA, 19 nt, Homo sapiens
  misc_RNA (1)...(19): siRNA sense strand
gcucgguggugcaguggaa

SEQ ID NO: 2435432 - RNA, 19 nt, Homo sapiens
  misc_RNA (1)...(19): siRNA sense strand
gcugaaguccagaagguau

SEQ ID NO: 2435433 - RNA, 19 nt, Homo sapiens
  misc_RNA (1)...(19): siRNA sense strand
aguuauuuguagagcccaa

SEQ ID NO: 2435434 - RNA, 19 nt, Homo sapiens
  misc_RNA (1)...(19): siRNA sense strand
agacgaaaucacugcagaa

SEQ ID NO: 2435435 - RNA, 19 nt, Homo sapiens
  misc_RNA (1)...(19): siRNA sense strand
aaaugaaagaagaggagga

SEQ ID NO: 2435436 - RNA, 19 nt, Homo sapiens
  misc_RNA (1)...(19): siRNA sense strand
gagaaguccaagagaagga

SEQ ID NO: 2435437 - RNA, 19 nt, Homo sapiens
  misc_RNA (1)...(19): siRNA sense strand
acaauagcauggagagagu

SEQ ID NO: 2435438 - RNA, 19 nt, Homo sapiens
  misc_RNA (1)...(19): siRNA sense strand
caggaggaggagaggaaaa

SEQ ID NO: 2435439 - RNA, 19 nt, Homo sapiens
  misc_RNA (1)...(19): siRNA sense strand
uuacuaaaggugagcauau

SEQ ID NO: 2435440 - RNA, 19 nt, Homo sapiens
  misc_RNA (1)...(19): siRNA sense strand
cauggaagaaacugaggaa

SEQ ID NO: 2435441 - RNA, 19 nt, Homo sapiens
  misc_RNA (1)...(19): siRNA sense strand
cucaggaggaggagaggaa

SEQ ID NO: 2435442 - RNA, 19 nt, Homo sapiens
  misc_RNA (1)...(19): siRNA sense strand
gaaagaggguaucacggua

SEQ ID NO: 2435443 - RNA, 19 nt, Homo sapiens
  misc_RNA (1)...(19): siRNA sense strand
ggacuuuggcaguggaaac

SEQ ID NO: 2435444 - RNA, 19 nt, Homo sapiens
  misc_RNA (1)...(19): siRNA sense strand
cgagaagcaacaggagaaa

SEQ ID NO: 2435445 - RNA, 19 nt, Homo sapiens
  misc_RNA (1)...(19): siRNA sense strand
cggcaauccacauaagaca

SEQ ID NO: 2435446 - RNA, 19 nt, Homo sapiens
  misc_RNA (1)...(19): siRNA sense strand
cggccaggauggucaguga

SEQ ID NO: 2435447 - RNA, 19 nt, Homo sapiens
  misc_RNA (1)...(19): siRNA sense strand
cagaaaugaaagaagagga

SEQ ID NO: 2435448 - RNA, 19 nt, Homo sapiens
  misc_RNA (1)...(19): siRNA sense strand
ugaacugggacaagaaaga

SEQ ID NO: 2435449 - RNA, 19 nt, Homo sapiens
  misc_RNA (1)...(19): siRNA sense strand
ggaugaucaaaguguggaa

SEQ ID NO: 2435450 - RNA, 19 nt, Homo sapiens
  misc_RNA (1)...(19): siRNA sense strand
gaggaggagauguuggauu

SEQ ID NO: 2435451 - RNA, 19 nt, Homo sapiens
  misc_RNA (1)...(19): siRNA sense strand
cgacugaaauucuuggcuu

SEQ ID NO: 2435452 - RNA, 19 nt, Homo sapiens
  misc_RNA (1)...(19): siRNA sense strand
acaugcugguggucagaaa

SEQ ID NO: 2435453 - RNA, 19 nt, Homo sapiens
  misc_RNA (1)...(19): siRNA sense strand
acaaagaccaccuggaagu

SEQ ID NO: 2435454 - RNA, 19 nt, Homo sapiens
  misc_RNA (1)...(19): siRNA sense strand
acacaauagcauggagaga

SEQ ID NO: 2435455 - RNA, 19 nt, Homo sapiens
  misc_RNA (1)...(19): siRNA sense strand
ucuacaauguguucaggaa

SEQ ID NO: 2435456 - RNA, 19 nt, Homo sapiens
  misc_RNA (1)...(19): siRNA sense strand
cagccacaauggaagggaa

SEQ ID NO: 2435457 - RNA, 19 nt, Homo sapiens
  misc_RNA (1)...(19): siRNA sense strand
acauaagacaucugcuauu

SEQ ID NO: 2435458 - RNA, 19 nt, Homo sapiens
  misc_RNA (1)...(19): siRNA sense strand
gaagggacuuggagccaga

SEQ ID NO: 2435459 - RNA, 19 nt, Homo sapiens
  misc_RNA (1)...(19): siRNA sense strand
acaaauacucucagccaca

SEQ ID NO: 2435460 - RNA, 19 nt, Homo sapiens
  misc_RNA (1)...(19): siRNA sense strand
aggaggagaaagaggagga

SEQ ID NO: 2435461 - RNA, 19 nt, Homo sapiens
  misc_RNA (1)...(19): siRNA sense strand
ggucagaaauggacagagg

SEQ ID NO: 2435462 - RNA, 19 nt, Homo sapiens
  misc_RNA (1)...(19): siRNA sense strand
ugacggaggaggagauguu

SEQ ID NO: 2435463 - RNA, 19 nt, Homo sapiens
  misc_RNA (1)...(19): siRNA sense strand
aggagagcuugaggagaaa

SEQ ID NO: 2435464 - RNA, 19 nt, Homo sapiens
  misc_RNA (1)...(19): siRNA sense strand
cugaagagaagauugauga

SEQ ID NO: 2435465 - RNA, 19 nt, Homo sapiens
  misc_RNA (1)...(19): siRNA sense strand
aggaggaaccuaauccaaa

SEQ ID NO: 2435466 - RNA, 19 nt, Homo sapiens
  misc_RNA (1)...(19): siRNA sense strand
ugaaagaagaggaggaacc

SEQ ID NO: 2435467 - RNA, 19 nt, Homo sapiens
  misc_RNA (1)...(19): siRNA sense strand
gagaggaaaggcagagagu

SEQ ID NO: 2435468 - RNA, 19 nt, Homo sapiens
  misc_RNA (1)...(19): siRNA sense strand
accaaaaugugcagaaaga

SEQ ID NO: 2435469 - RNA, 19 nt, Homo sapiens
  misc_RNA (1)...(19): siRNA sense strand
gguaacaccaugaguggca

SEQ ID NO: 2435470 - RNA, 19 nt, Homo sapiens
  misc_RNA (1)...(19): siRNA sense strand
cagagaggagggacaagaa

SEQ ID NO: 2435471 - RNA, 19 nt, Homo sapiens
  misc_RNA (1)...(19): siRNA sense strand
agaagcaacaggagaaaau

SEQ ID NO: 2435472 - RNA, 19 nt, Homo sapiens
  misc_RNA (1)...(19): siRNA sense strand
agaugaacugggacaagaa

SEQ ID NO: 2435473 - RNA, 19 nt, Homo sapiens
  misc_RNA (1)...(19): siRNA sense strand
caaagagguagcaagucaa

SEQ ID NO: 2435474 - RNA, 19 nt, Homo sapiens
  misc_RNA (1)...(19): siRNA sense strand
agagaggagggacaagaaa

SEQ ID NO: 2435475 - RNA, 19 nt, Homo sapiens
  misc_RNA (1)...(19): siRNA sense strand
gagaaaauggagaaacaga

SEQ ID NO: 2435476 - RNA, 19 nt, Homo sapiens
  misc_RNA (1)...(19): siRNA sense strand
ccacaagagcuuugaggug

SEQ ID NO: 2435477 - RNA, 19 nt, Homo sapiens
  misc_RNA (1)...(19): siRNA sense strand
auggagaaacagaaaugaa

SEQ ID NO: 2435478 - RNA, 19 nt, Homo sapiens
  misc_RNA (1)...(19): siRNA sense strand
ggaaaacgggcgaggagga

SEQ ID NO: 2435479 - RNA, 19 nt, Homo sapiens
  misc_RNA (1)...(19): siRNA sense strand
gggaguacuuagcaagacu

SEQ ID NO: 2435480 - RNA, 19 nt, Homo sapiens
  misc_RNA (1)...(19): siRNA sense strand
gaagcauggcggagcuaca

SEQ ID NO: 2435481 - RNA, 19 nt, Homo sapiens
  misc_RNA (1)...(19): siRNA sense strand
acgaaaucacugcagaaau

SEQ ID NO: 2435482 - RNA, 19 nt, Homo sapiens
  misc_RNA (1)...(19): siRNA sense strand
gggacaagaaaggagagua

SEQ ID NO: 2435483 - RNA, 19 nt, Homo sapiens
  misc_RNA (1)...(19): siRNA sense strand
gaacaaaggcauucugcga

SEQ ID NO: 2435484 - RNA, 19 nt, Homo sapiens
  misc_RNA (1)...(19): siRNA sense strand
cugcaaucacaaagaugaa

SEQ ID NO: 2435485 - RNA, 19 nt, Homo sapiens
  misc_RNA (1)...(19): siRNA sense strand
uuuggaacaucuuuggaaa

SEQ ID NO: 2435486 - RNA, 19 nt, Homo sapiens
  misc_RNA (1)...(19): siRNA sense strand
cagcauauugcgaaggcua

SEQ ID NO: 2435487 - RNA, 19 nt, Homo sapiens
  misc_RNA (1)...(19): siRNA sense strand
cugcauagagauugguuau

SEQ ID NO: 2435488 - RNA, 19 nt, Homo sapiens
  misc_RNA (1)...(19): siRNA sense strand
ccgacaacuguguggauau

SEQ ID NO: 2435489 - RNA, 19 nt, Homo sapiens
  misc_RNA (1)...(19): siRNA sense strand
cuaugguggcccagaguca

SEQ ID NO: 2435490 - RNA, 19 nt, Homo sapiens
  misc_RNA (1)...(19): siRNA sense strand
uuacagaggacguuggcca

SEQ ID NO: 2435491 - RNA, 19 nt, Homo sapiens
  misc_RNA (1)...(19): siRNA sense strand
ggguucaccuggagggcau

SEQ ID NO: 2435492 - RNA, 19 nt, Homo sapiens
  misc_RNA (1)...(19): siRNA sense strand
gggcagagaagguuggacu

SEQ ID NO: 2435493 - RNA, 19 nt, Homo sapiens
  misc_RNA (1)...(19): siRNA sense strand
cgcagaugauggaagggaa

SEQ ID NO: 2435494 - RNA, 19 nt, Homo sapiens
  misc_RNA (1)...(19): siRNA sense strand
aggaaauacagaaggccau

SEQ ID NO: 2435495 - RNA, 19 nt, Homo sapiens
  misc_RNA (1)...(19): siRNA sense strand
ccaugaagcucuaccgacu

SEQ ID NO: 2435496 - RNA, 19 nt, Homo sapiens
  misc_RNA (1)...(19): siRNA sense strand
ccauggaggaggcuagcaa

SEQ ID NO: 2435497 - RNA, 19 nt, Homo sapiens
  misc_RNA (1)...(19): siRNA sense strand
augagaacuauguggaaga

SEQ ID NO: 2435498 - RNA, 19 nt, Homo sapiens
  misc_RNA (1)...(19): siRNA sense strand
uggaagaugaugacaacau

SEQ ID NO: 2435499 - RNA, 19 nt, Homo sapiens
  misc_RNA (1)...(19): siRNA sense strand
caggaaauacagaaggcca

SEQ ID NO: 2435500 - RNA, 19 nt, Homo sapiens
  misc_RNA (1)...(19): siRNA sense strand
uggagaacgcaaacggaga

SEQ ID NO: 2435501 - RNA, 19 nt, Homo sapiens
  misc_RNA (1)...(19): siRNA sense strand
aggaucagccugugaagau

SEQ ID NO: 2435502 - RNA, 19 nt, Homo sapiens
  misc_RNA (1)...(19): siRNA sense strand
cgccaaaaugaaaggguuu

SEQ ID NO: 2435503 - RNA, 19 nt, Homo sapiens
  misc_RNA (1)...(19): siRNA sense strand
augaggaggacaacagcua

SEQ ID NO: 2435504 - RNA, 19 nt, Homo sapiens
  misc_RNA (1)...(19): siRNA sense strand
ggaggaggcuagcaagcga

SEQ ID NO: 2435505 - RNA, 19 nt, Homo sapiens
  misc_RNA (1)...(19): siRNA sense strand
auguggaagaugaugacaa

SEQ ID NO: 2435506 - RNA, 19 nt, Homo sapiens
  misc_RNA (1)...(19): siRNA sense strand
ugguuugaguccagccaau

SEQ ID NO: 2435507 - RNA, 19 nt, Homo sapiens
  misc_RNA (1)...(19): siRNA sense strand
gcagaugauggaagggaac

SEQ ID NO: 2435508 - RNA, 19 nt, Homo sapiens
  misc_RNA (1)...(19): siRNA sense strand
ugauggaagggaacgggaa

SEQ ID NO: 2435509 - RNA, 19 nt, Homo sapiens
  misc_RNA (1)...(19): siRNA sense strand
agguuggacuggugcuaca

SEQ ID NO: 2435510 - RNA, 19 nt, Homo sapiens
  misc_RNA (1)...(19): siRNA sense strand
uggacuggugcuacaauaa

SEQ ID NO: 2435511 - RNA, 19 nt, Homo sapiens
  misc_RNA (1)...(19): siRNA sense strand
gcaugaaugugcugggcau

SEQ ID NO: 2435512 - RNA, 19 nt, Homo sapiens
  misc_RNA (1)...(19): siRNA sense strand
ugauuaacgugcuggguga

SEQ ID NO: 2435513 - RNA, 19 nt, Homo sapiens
  misc_RNA (1)...(19): siRNA sense strand
agaccaagccagugagccu

SEQ ID NO: 2435514 - RNA, 19 nt, Homo sapiens
  misc_RNA (1)...(19): siRNA sense strand
acacaggcaccgagaaacu

SEQ ID NO: 2435515 - RNA, 19 nt, Homo sapiens
  misc_RNA (1)...(19): siRNA sense strand
ccguucaaguggagcggga

SEQ ID NO: 2435516 - RNA, 19 nt, Homo sapiens
  misc_RNA (1)...(19): siRNA sense strand
gcguacuaccuguggacca

SEQ ID NO: 2435517 - RNA, 19 nt, Homo sapiens
  misc_RNA (1)...(19): siRNA sense strand
agugccugcuggagaacaa

SEQ ID NO: 2435518 - RNA, 19 nt, Homo sapiens
  misc_RNA (1)...(19): siRNA sense strand
caaccuaguagaagccaca

SEQ ID NO: 2435519 - RNA, 19 nt, Homo sapiens
  misc_RNA (1)...(19): siRNA sense strand
uggcgguggcuguguggua

SEQ ID NO: 2435520 - RNA, 19 nt, Homo sapiens
  misc_RNA (1)...(19): siRNA sense strand
acgucaaacucaugagaca

SEQ ID NO: 2435521 - RNA, 19 nt, Homo sapiens
  misc_RNA (1)...(19): siRNA sense strand
gagaagagcuccuacggau

SEQ ID NO: 2435522 - RNA, 19 nt, Homo sapiens
  misc_RNA (1)...(19): siRNA sense strand
uggcagaccuccaugggaa

SEQ ID NO: 2435523 - RNA, 19 nt, Homo sapiens
  misc_RNA (1)...(19): siRNA sense strand
gugaugagugaaagagaga

SEQ ID NO: 2435524 - RNA, 19 nt, Homo sapiens
  misc_RNA (1)...(19): siRNA sense strand
cagaugaaucagagaggca

SEQ ID NO: 2435525 - RNA, 19 nt, Homo sapiens
  misc_RNA (1)...(19): siRNA sense strand
ggccagugagaaagacaaa

SEQ ID NO: 2435526 - RNA, 19 nt, Homo sapiens
  misc_RNA (1)...(19): siRNA sense strand
uuugaagugaugagugaaa

SEQ ID NO: 2435527 - RNA, 19 nt, Homo sapiens
  misc_RNA (1)...(19): siRNA sense strand
ccucgugcuuuguggccaa

SEQ ID NO: 2435528 - RNA, 19 nt, Homo sapiens
  misc_RNA (1)...(19): siRNA sense strand
aggugguacuagaaauauu

SEQ ID NO: 2435529 - RNA, 19 nt, Homo sapiens
  misc_RNA (1)...(19): siRNA sense strand
aguuauggacacuuugaaa

SEQ ID NO: 2435530 - RNA, 19 nt, Homo sapiens
  misc_RNA (1)...(19): siRNA sense strand
ugaagugaugagugaaaga

SEQ ID NO: 2435531 - RNA, 19 nt, Homo sapiens
  misc_RNA (1)...(19): siRNA sense strand
cugcuaaggccaaggucca

SEQ ID NO: 2435532 - RNA, 19 nt, Homo sapiens
  misc_RNA (1)...(19): siRNA sense strand
caggaggaugugcaggaaa

SEQ ID NO: 2435533 - RNA, 19 nt, Homo sapiens
  misc_RNA (1)...(19): siRNA sense strand
ccugaagagcgcugaggga

SEQ ID NO: 2435534 - RNA, 19 nt, Homo sapiens
  misc_RNA (1)...(19): siRNA sense strand
acaucuacgugcaagcaau

SEQ ID NO: 2435535 - RNA, 19 nt, Homo sapiens
  misc_RNA (1)...(19): siRNA sense strand
agaagagcuccuacggauu

SEQ ID NO: 2435536 - RNA, 19 nt, Homo sapiens
  misc_RNA (1)...(19): siRNA sense strand
gaugagugaaagagagaag

SEQ ID NO: 2435537 - RNA, 19 nt, Homo sapiens
  misc_RNA (1)...(19): siRNA sense strand
cagcaguacacuaccaaca

SEQ ID NO: 2435538 - RNA, 19 nt, Homo sapiens
  misc_RNA (1)...(19): siRNA sense strand
ggcagaccuccaugggaaa

SEQ ID NO: 2435539 - RNA, 19 nt, Homo sapiens
  misc_RNA (1)...(19): siRNA sense strand
gugaugaacuaaugagcag

SEQ ID NO: 2435540 - RNA, 19 nt, Homo sapiens
  misc_RNA (1)...(19): siRNA sense strand
gagaaagacaaaacugcua

SEQ ID NO: 2435541 - RNA, 19 nt, Homo sapiens
  misc_RNA (1)...(19): siRNA sense strand
ggcaggugguacuagaaau

SEQ ID NO: 2435542 - RNA, 19 nt, Homo sapiens
  misc_RNA (1)...(19): siRNA sense strand
cggccagugagaaagacaa

SEQ ID NO: 2435543 - RNA, 19 nt, Homo sapiens
  misc_RNA (1)...(19): siRNA sense strand
aggaugugcaggaaaugaa

SEQ ID NO: 2435544 - RNA, 19 nt, Homo sapiens
  misc_RNA (1)...(19): siRNA sense strand
gcaaaagcaaagaccagaa

SEQ ID NO: 2435545 - RNA, 19 nt, Homo sapiens
  misc_RNA (1)...(19): siRNA sense strand
agcaaagaccagaaagagu

SEQ ID NO: 2435546 - RNA, 19 nt, Homo sapiens
  misc_RNA (1)...(19): siRNA sense strand
uaccaacagaucaaagaaa

SEQ ID NO: 2435547 - RNA, 19 nt, Homo sapiens
  misc_RNA (1)...(19): siRNA sense strand
ucgaaacagccgagugcca

SEQ ID NO: 2435548 - RNA, 19 nt, Homo sapiens
  misc_RNA (1)...(19): siRNA sense strand
cggugugcccacuggaaga

SEQ ID NO: 2435549 - RNA, 19 nt, Homo sapiens
  misc_RNA (1)...(19): siRNA sense strand
acgucaaacucaugagaca

SEQ ID NO: 2435550 - RNA, 19 nt, Homo sapiens
  misc_RNA (1)...(19): siRNA sense strand
gagaagagcuccuacggau

SEQ ID NO: 2435551 - RNA, 19 nt, Homo sapiens
  misc_RNA (1)...(19): siRNA sense strand
uggcagaccuccaugggaa

SEQ ID NO: 2435552 - RNA, 19 nt, Homo sapiens
  misc_RNA (1)...(19): siRNA sense strand
gugaugagugaaagagaga

SEQ ID NO: 2435553 - RNA, 19 nt, Homo sapiens
  misc_RNA (1)...(19): siRNA sense strand
cagaugaaucagagaggca

SEQ ID NO: 2435554 - RNA, 19 nt, Homo sapiens
  misc_RNA (1)...(19): siRNA sense strand
ggccagugagaaagacaaa

SEQ ID NO: 2435555 - RNA, 19 nt, Homo sapiens
  misc_RNA (1)...(19): siRNA sense strand
uuugaagugaugagugaaa

SEQ ID NO: 2435556 - RNA, 19 nt, Homo sapiens
  misc_RNA (1)...(19): siRNA sense strand
ccucgugcuuuguggccaa

SEQ ID NO: 2435557 - RNA, 19 nt, Homo sapiens
  misc_RNA (1)...(19): siRNA sense strand
aggugguacuagaaauauu

SEQ ID NO: 2435558 - RNA, 19 nt, Homo sapiens
  misc_RNA (1)...(19): siRNA sense strand
aguuauggacacuuugaaa

SEQ ID NO: 2435559 - RNA, 19 nt, Homo sapiens
  misc_RNA (1)...(19): siRNA sense strand
ugaagugaugagugaaaga

SEQ ID NO: 2435560 - RNA, 19 nt, Homo sapiens
  misc_RNA (1)...(19): siRNA sense strand
cugcuaaggccaaggucca

SEQ ID NO: 2435561 - RNA, 19 nt, Homo sapiens
  misc_RNA (1)...(19): siRNA sense strand
caggaggaugugcaggaaa

SEQ ID NO: 2435562 - RNA, 19 nt, Homo sapiens
  misc_RNA (1)...(19): siRNA sense strand
ccugaagagcgcugaggga

SEQ ID NO: 2435563 - RNA, 19 nt, Homo sapiens
  misc_RNA (1)...(19): siRNA sense strand
acaucuacgugcaagcaau

SEQ ID NO: 2435564 - RNA, 19 nt, Homo sapiens
  misc_RNA (1)...(19): siRNA sense strand
agaagagcuccuacggauu

SEQ ID NO: 2435565 - RNA, 19 nt, Homo sapiens
  misc_RNA (1)...(19): siRNA sense strand
gaugagugaaagagagaag

SEQ ID NO: 2435566 - RNA, 19 nt, Homo sapiens
  misc_RNA (1)...(19): siRNA sense strand
cagcaguacacuaccaaca

SEQ ID NO: 2435567 - RNA, 19 nt, Homo sapiens
  misc_RNA (1)...(19): siRNA sense strand
ggcagaccuccaugggaaa

SEQ ID NO: 2435568 - RNA, 19 nt, Homo sapiens
  misc_RNA (1)...(19): siRNA sense strand
gugaugaacuaaugagcag

SEQ ID NO: 2435569 - RNA, 19 nt, Homo sapiens
  misc_RNA (1)...(19): siRNA sense strand
gagaaagacaaaacugcua

SEQ ID NO: 2435570 - RNA, 19 nt, Homo sapiens
  misc_RNA (1)...(19): siRNA sense strand
ggcaggugguacuagaaau

SEQ ID NO: 2435571 - RNA, 19 nt, Homo sapiens
  misc_RNA (1)...(19): siRNA sense strand
cggccagugagaaagacaa

SEQ ID NO: 2435572 - RNA, 19 nt, Homo sapiens
  misc_RNA (1)...(19): siRNA sense strand
aggaugugcaggaaaugaa

SEQ ID NO: 2435573 - RNA, 19 nt, Homo sapiens
  misc_RNA (1)...(19): siRNA sense strand
gcaaaagcaaagaccagaa

SEQ ID NO: 2435574 - RNA, 19 nt, Homo sapiens
  misc_RNA (1)...(19): siRNA sense strand
agcaaagaccagaaagagu

SEQ ID NO: 2435575 - RNA, 19 nt, Homo sapiens
  misc_RNA (1)...(19): siRNA sense strand
uaccaacagaucaaagaaa

SEQ ID NO: 2435576 - RNA, 19 nt, Homo sapiens
  misc_RNA (1)...(19): siRNA sense strand
ucgaaacagccgagugcca

SEQ ID NO: 2435577 - RNA, 19 nt, Homo sapiens
  misc_RNA (1)...(19): siRNA sense strand
cggugugcccacuggaaga

SEQ ID NO: 2435578 - RNA, 19 nt, Homo sapiens
  misc_RNA (1)...(19): siRNA sense strand
cuuuagucuuaguguggaa

SEQ ID NO: 2435579 - RNA, 19 nt, Homo sapiens
  misc_RNA (1)...(19): siRNA sense strand
uggugaagaagguugaauu

SEQ ID NO: 2435580 - RNA, 19 nt, Homo sapiens
  misc_RNA (1)...(19): siRNA sense strand
uggcuauuguggaagugaa

SEQ ID NO: 2435581 - RNA, 19 nt, Homo sapiens
  misc_RNA (1)...(19): siRNA sense strand
uagucuuaguguggaaaua

SEQ ID NO: 2435582 - RNA, 19 nt, Homo sapiens
  misc_RNA (1)...(19): siRNA sense strand
cuauuguggaagugaagau

SEQ ID NO: 2435583 - RNA, 19 nt, Homo sapiens
  misc_RNA (1)...(19): siRNA sense strand
ccucaagagcagugguuca

SEQ ID NO: 2435584 - RNA, 19 nt, Homo sapiens
  misc_RNA (1)...(19): siRNA sense strand
ggacagaaauggaaagacg

SEQ ID NO: 2435585 - RNA, 19 nt, Homo sapiens
  misc_RNA (1)...(19): siRNA sense strand
aaagaaagccaaacgccaa

SEQ ID NO: 2435586 - RNA, 19 nt, Homo sapiens
  misc_RNA (1)...(19): siRNA sense strand
gcccauaaguagugagcac

SEQ ID NO: 2435587 - RNA, 19 nt, Homo sapiens
  misc_RNA (1)...(19): siRNA sense strand
agguagacgucguggacac

SEQ ID NO: 2435588 - RNA, 19 nt, Homo sapiens
  misc_RNA (1)...(19): siRNA sense strand
ccaaggaccucaagagcag

SEQ ID NO: 2435589 - RNA, 19 nt, Homo sapiens
  misc_RNA (1)...(19): siRNA sense strand
gaagaauggaaguggcaag

SEQ ID NO: 2435590 - RNA, 19 nt, Homo sapiens
  misc_RNA (1)...(19): siRNA sense strand
gcauugaauuauacuggga

SEQ ID NO: 2435591 - RNA, 19 nt, Homo sapiens
  misc_RNA (1)...(19): siRNA sense strand
ggcagaugcaaguguaaaa

SEQ ID NO: 2435592 - RNA, 19 nt, Homo sapiens
  misc_RNA (1)...(19): siRNA sense strand
uuaugguggcuguguuaaa

SEQ ID NO: 2435593 - RNA, 19 nt, Homo sapiens
  misc_RNA (1)...(19): siRNA sense strand
ggugaaaggaggaacgcua

SEQ ID NO: 2435594 - RNA, 19 nt, Homo sapiens
  misc_RNA (1)...(19): siRNA sense strand
gccaaauacaagugacaaa

SEQ ID NO: 2435595 - RNA, 19 nt, Homo sapiens
  misc_RNA (1)...(19): siRNA sense strand
accagaacuucaagagaaa

SEQ ID NO: 2435596 - RNA, 19 nt, Homo sapiens
  misc_RNA (1)...(19): siRNA sense strand
gcgaguauugcaacagaaa

SEQ ID NO: 2435597 - RNA, 19 nt, Homo sapiens
  misc_RNA (1)...(19): siRNA sense strand
ggauacaaaugaugcgagu

SEQ ID NO: 2435598 - RNA, 19 nt, Homo sapiens
  misc_RNA (1)...(19): siRNA sense strand
aggagaaauuugaaggugu

SEQ ID NO: 2435599 - RNA, 19 nt, Homo sapiens
  misc_RNA (1)...(19): siRNA sense strand
cuugagagcuucaggggaa

SEQ ID NO: 2435600 - RNA, 19 nt, Homo sapiens
  misc_RNA (1)...(19): siRNA sense strand
aagaagucaccaaaggaaa

SEQ ID NO: 2435601 - RNA, 19 nt, Homo sapiens
  misc_RNA (1)...(19): siRNA sense strand
aagaagaagaagucaccaa

SEQ ID NO: 2435602 - RNA, 19 nt, Homo sapiens
  misc_RNA (1)...(19): siRNA sense strand
cauuauguaucauggguga

SEQ ID NO: 2435603 - RNA, 19 nt, Homo sapiens
  misc_RNA (1)...(19): siRNA sense strand
agacagaaaguuaugguga

SEQ ID NO: 2435604 - RNA, 19 nt, Homo sapiens
  misc_RNA (1)...(19): siRNA sense strand
cagaagaacccucagccaa

SEQ ID NO: 2435605 - RNA, 19 nt, Homo sapiens
  misc_RNA (1)...(19): siRNA sense strand
ggaaauggcuucagcgcag

SEQ ID NO: 2435606 - RNA, 19 nt, Homo sapiens
  misc_RNA (1)...(19): siRNA sense strand
ucaccaaaggaaaggaaaa

SEQ ID NO: 2435607 - RNA, 19 nt, Homo sapiens
  misc_RNA (1)...(19): siRNA sense strand
aaauaauggaagaggaaag

SEQ ID NO: 2435608 - RNA, 19 nt, Homo sapiens
  misc_RNA (1)...(19): siRNA sense strand
guauauuacugcagcccuu

SEQ ID NO: 2435609 - RNA, 19 nt, Homo sapiens
  misc_RNA (1)...(19): siRNA sense strand
cuccaacguugcaaagaaa

SEQ ID NO: 2435610 - RNA, 19 nt, Homo sapiens
  misc_RNA (1)...(19): siRNA sense strand
cagccaaauacaagugaca

SEQ ID NO: 2435611 - RNA, 19 nt, Homo sapiens
  misc_RNA (1)...(19): siRNA sense strand
ucguagaagacaugacaga

SEQ ID NO: 2435612 - RNA, 19 nt, Homo sapiens
  misc_RNA (1)...(19): siRNA sense strand
agagaaggaaucugugaau

SEQ ID NO: 2435613 - RNA, 19 nt, Homo sapiens
  misc_RNA (1)...(19): siRNA sense strand
ugccaaaguucuuaaggau

SEQ ID NO: 2435614 - RNA, 19 nt, Homo sapiens
  misc_RNA (1)...(19): siRNA sense strand
caacaggaugcuaaugaau

SEQ ID NO: 2435615 - RNA, 19 nt, Homo sapiens
  misc_RNA (1)...(19): siRNA sense strand
uugaaauaauggaagagga

SEQ ID NO: 2435616 - RNA, 19 nt, Homo sapiens
  misc_RNA (1)...(19): siRNA sense strand
uaauggaagaggaaaguga

SEQ ID NO: 2435617 - RNA, 19 nt, Homo sapiens
  misc_RNA (1)...(19): siRNA sense strand
ugaaaggaggaacgcuaaa

SEQ ID NO: 2435618 - RNA, 19 nt, Homo sapiens
  misc_RNA (1)...(19): siRNA sense strand
ugcuaaugaauguuggaua

SEQ ID NO: 2435619 - RNA, 19 nt, Homo sapiens
  misc_RNA (1)...(19): siRNA sense strand
aagugaaucagcagccaaa

SEQ ID NO: 2435620 - RNA, 19 nt, Homo sapiens
  misc_RNA (1)...(19): siRNA sense strand
aggugaacaaggacaguau

SEQ ID NO: 2435621 - RNA, 19 nt, Homo sapiens
  misc_RNA (1)...(19): siRNA sense strand
ucguaacaccagaagauau

SEQ ID NO: 2435622 - RNA, 19 nt, Homo sapiens
  misc_RNA (1)...(19): siRNA sense strand
cccagaaagaaguuaagua

SEQ ID NO: 2435623 - RNA, 19 nt, Homo sapiens
  misc_RNA (1)...(19): siRNA sense strand
accaugaaauguacagaau

SEQ ID NO: 2435624 - RNA, 19 nt, Homo sapiens
  misc_RNA (1)...(19): siRNA sense strand
auuugaagguguagaauug

SEQ ID NO: 2435625 - RNA, 19 nt, Homo sapiens
  misc_RNA (1)...(19): siRNA sense strand
ccugccagacagaaaguua

SEQ ID NO: 2435626 - RNA, 19 nt, Homo sapiens
  misc_RNA (1)...(19): siRNA sense strand
agaaaggugaacaaggaca

SEQ ID NO: 2435627 - RNA, 19 nt, Homo sapiens
  misc_RNA (1)...(19): siRNA sense strand
caaugguauucaaggcuca

SEQ ID NO: 2435628 - RNA, 19 nt, Homo sapiens
  misc_RNA (1)...(19): siRNA sense strand
guaaaauggggaaaggaga

SEQ ID NO: 2435629 - RNA, 19 nt, Homo sapiens
  misc_RNA (1)...(19): siRNA sense strand
uaaaauggggaaaggagaa

SEQ ID NO: 2435630 - RNA, 19 nt, Homo sapiens
  misc_RNA (1)...(19): siRNA sense strand
uaucaugggugaaaaggaa

SEQ ID NO: 2435631 - RNA, 19 nt, Homo sapiens
  misc_RNA (1)...(19): siRNA sense strand
gcuucagcgcaguauauua

SEQ ID NO: 2435632 - RNA, 19 nt, Homo sapiens
  misc_RNA (1)...(19): siRNA sense strand
ccagccugccagacagaaa

SEQ ID NO: 2435633 - RNA, 19 nt, Homo sapiens
  misc_RNA (1)...(19): siRNA sense strand
cccacaguuugccgagaaa

SEQ ID NO: 2435634 - RNA, 19 nt, Homo sapiens
  misc_RNA (1)...(19): siRNA sense strand
ccaaaggaaaggaaaauca

SEQ ID NO: 2435635 - RNA, 19 nt, Homo sapiens
  misc_RNA (1)...(19): siRNA sense strand
guagaagacaugacagaag

SEQ ID NO: 2435636 - RNA, 19 nt, Homo sapiens
  misc_RNA (1)...(19): siRNA sense strand
agaagacaugacagaagaa

SEQ ID NO: 2435637 - RNA, 19 nt, Homo sapiens
  misc_RNA (1)...(19): siRNA sense strand
acagaagaacaguuagcau

SEQ ID NO: 2435638 - RNA, 19 nt, Homo sapiens
  misc_RNA (1)...(19): siRNA sense strand
aagacaugacagaagaaca

SEQ ID NO: 2435639 - RNA, 19 nt, Homo sapiens
  misc_RNA (1)...(19): siRNA sense strand
agaaucugaagaagaagaa

SEQ ID NO: 2435640 - RNA, 19 nt, Homo sapiens
  misc_RNA (1)...(19): siRNA sense strand
guacuaacacaccagggaa

SEQ ID NO: 2435641 - RNA, 19 nt, Homo sapiens
  misc_RNA (1)...(19): siRNA sense strand
ggugguggagacuggcaua

SEQ ID NO: 2435642 - RNA, 19 nt, Homo sapiens
  misc_RNA (1)...(19): siRNA sense strand
aggaggaacgcuaaaggau

SEQ ID NO: 2435643 - RNA, 19 nt, Homo sapiens
  misc_RNA (1)...(19): siRNA sense strand
aauuaaaucaggagacaga

SEQ ID NO: 2435644 - RNA, 19 nt, Homo sapiens
  misc_RNA (1)...(19): siRNA sense strand
gccuauucccauaaagaaa

SEQ ID NO: 2435645 - RNA, 19 nt, Homo sapiens
  misc_RNA (1)...(19): siRNA sense strand
ccuuugacugagagugaaa

SEQ ID NO: 2435646 - RNA, 19 nt, Homo sapiens
  misc_RNA (1)...(19): siRNA sense strand
ugggauuagccgagacaca

SEQ ID NO: 2435647 - RNA, 19 nt, Homo sapiens
  misc_RNA (1)...(19): siRNA sense strand
ccgaauauugcaagaagca

SEQ ID NO: 2435648 - RNA, 19 nt, Homo sapiens
  misc_RNA (1)...(19): siRNA sense strand
uugacaugccugaugauaa

SEQ ID NO: 2435649 - RNA, 19 nt, Homo sapiens
  misc_RNA (1)...(19): siRNA sense strand
guugaagaggcuugcagaa

SEQ ID NO: 2435650 - RNA, 19 nt, Homo sapiens
  misc_RNA (1)...(19): siRNA sense strand
gaugaaauauggaggucac

SEQ ID NO: 2435651 - RNA, 19 nt, Homo sapiens
  misc_RNA (1)...(19): siRNA sense strand
gggccaugucaguggagca

SEQ ID NO: 2435652 - RNA, 19 nt, Homo sapiens
  misc_RNA (1)...(19): siRNA sense strand
guguggcauuauuggagaa

SEQ ID NO: 2435653 - RNA, 19 nt, Homo sapiens
  misc_RNA (1)...(19): siRNA sense strand
caguaucaaguguggcauu

SEQ ID NO: 2435654 - RNA, 19 nt, Homo sapiens
  misc_RNA (1)...(19): siRNA sense strand
gagaggcauaacugagaau

SEQ ID NO: 2435655 - RNA, 19 nt, Homo sapiens
  misc_RNA (1)...(19): siRNA sense strand
aauagagaacccuaagcaa

SEQ ID NO: 2435656 - RNA, 19 nt, Homo sapiens
  misc_RNA (1)...(19): siRNA sense strand
ggacagaggcauagggcug

SEQ ID NO: 2435657 - RNA, 19 nt, Homo sapiens
  misc_RNA (1)...(19): siRNA sense strand
agguguagacucugggauu

SEQ ID NO: 2435658 - RNA, 19 nt, Homo sapiens
  misc_RNA (1)...(19): siRNA sense strand
caaacagaugaaagaagaa

SEQ ID NO: 2435659 - RNA, 19 nt, Homo sapiens
  misc_RNA (1)...(19): siRNA sense strand
ccgugagaggguugaacua

SEQ ID NO: 2435660 - RNA, 19 nt, Homo sapiens
  misc_RNA (1)...(19): siRNA sense strand
aguauuaaagccagccaua

SEQ ID NO: 2435661 - RNA, 19 nt, Homo sapiens
  misc_RNA (1)...(19): siRNA sense strand
caguaaauagugaccgauu

SEQ ID NO: 2435662 - RNA, 19 nt, Homo sapiens
  misc_RNA (1)...(19): siRNA sense strand
agaugaaagaagaaagcca

SEQ ID NO: 2435663 - RNA, 19 nt, Homo sapiens
  misc_RNA (1)...(19): siRNA sense strand
aggaagaggauuugacaac

SEQ ID NO: 2435664 - RNA, 19 nt, Homo sapiens
  misc_RNA (1)...(19): siRNA sense strand
cuuauagcccauuggauau

SEQ ID NO: 2435665 - RNA, 19 nt, Homo sapiens
  misc_RNA (1)...(19): siRNA sense strand
ggcagcuggcuuuggguua

SEQ ID NO: 2435666 - RNA, 19 nt, Homo sapiens
  misc_RNA (1)...(19): siRNA sense strand
aguggaacucacacaguaa

SEQ ID NO: 2435667 - RNA, 19 nt, Homo sapiens
  misc_RNA (1)...(19): siRNA sense strand
aguagaaauaggaagagga

SEQ ID NO: 2435668 - RNA, 19 nt, Homo sapiens
  misc_RNA (1)...(19): siRNA sense strand
gauuggagaaagugugcuu

SEQ ID NO: 2435669 - RNA, 19 nt, Homo sapiens
  misc_RNA (1)...(19): siRNA sense strand
ugaaggaaugagugaaacu

SEQ ID NO: 2435670 - RNA, 19 nt, Homo sapiens
  misc_RNA (1)...(19): siRNA sense strand
ugaauuagccagugggcag

SEQ ID NO: 2435671 - RNA, 19 nt, Homo sapiens
  misc_RNA (1)...(19): siRNA sense strand
cacaguaaauagugaccga

SEQ ID NO: 2435672 - RNA, 19 nt, Homo sapiens
  misc_RNA (1)...(19): siRNA sense strand
agagaaacuuccagggaga

SEQ ID NO: 2435673 - RNA, 19 nt, Homo sapiens
  misc_RNA (1)...(19): siRNA sense strand
gauuagagcuggaagagga

SEQ ID NO: 2435674 - RNA, 19 nt, Homo sapiens
  misc_RNA (1)...(19): siRNA sense strand
ccaugagaccagugaggaa

SEQ ID NO: 2435675 - RNA, 19 nt, Homo sapiens
  misc_RNA (1)...(19): siRNA sense strand
gaagagaggaagaggagga

SEQ ID NO: 2435676 - RNA, 19 nt, Homo sapiens
  misc_RNA (1)...(19): siRNA sense strand
gcuuggagaucgaggccau

SEQ ID NO: 2435677 - RNA, 19 nt, Homo sapiens
  misc_RNA (1)...(19): siRNA sense strand
aggaagaggaggaugcaga

SEQ ID NO: 2435678 - RNA, 19 nt, Homo sapiens
  misc_RNA (1)...(19): siRNA sense strand
gggaggagaucuuggcucu

SEQ ID NO: 2435679 - RNA, 19 nt, Homo sapiens
  misc_RNA (1)...(19): siRNA sense strand
agaucuuggcucugcguaa

SEQ ID NO: 2435680 - RNA, 19 nt, Homo sapiens
  misc_RNA (1)...(19): siRNA sense strand
ugaccagaagagaggaaga

SEQ ID NO: 2435681 - RNA, 19 nt, Homo sapiens
  misc_RNA (1)...(19): siRNA sense strand
ccagaagagaggaagagga

SEQ ID NO: 2435682 - RNA, 19 nt, Homo sapiens
  misc_RNA (1)...(19): siRNA sense strand
aggaggaugcagagagcca

SEQ ID NO: 2435683 - RNA, 19 nt, Homo sapiens
  misc_RNA (1)...(19): siRNA sense strand
agacucugcaggaggagaa

SEQ ID NO: 2435684 - RNA, 19 nt, Homo sapiens
  misc_RNA (1)...(19): siRNA sense strand
gaacaaggaucugacgaca

SEQ ID NO: 2435685 - RNA, 19 nt, Homo sapiens
  misc_RNA (1)...(19): siRNA sense strand
guucgaagcuugugacccu

SEQ ID NO: 2435686 - RNA, 19 nt, Homo sapiens
  misc_RNA (1)...(19): siRNA sense strand
cggaaaaggagcagcagca

SEQ ID NO: 2435687 - RNA, 19 nt, Homo sapiens
  misc_RNA (1)...(19): siRNA sense strand
uugccaaggccauggauga

SEQ ID NO: 2435688 - RNA, 19 nt, Homo sapiens
  misc_RNA (1)...(19): siRNA sense strand
augaggagcuggaggaccu

SEQ ID NO: 2435689 - RNA, 19 nt, Homo sapiens
  misc_RNA (1)...(19): siRNA sense strand
gaacagaaucgcagccuuc

SEQ ID NO: 2435690 - RNA, 19 nt, Homo sapiens
  misc_RNA (1)...(19): siRNA sense strand
gugccuagcgugagccuga

SEQ ID NO: 2435691 - RNA, 19 nt, Homo sapiens
  misc_RNA (1)...(19): siRNA sense strand
ggggauuagagcuggaaga

SEQ ID NO: 2435692 - RNA, 19 nt, Homo sapiens
  misc_RNA (1)...(19): siRNA sense strand
ggaacagaaucgcagccuu

SEQ ID NO: 2435693 - RNA, 19 nt, Homo sapiens
  misc_RNA (1)...(19): siRNA sense strand
auacaauagguguggaauu

SEQ ID NO: 2435694 - RNA, 19 nt, Homo sapiens
  misc_RNA (1)...(19): siRNA sense strand
ccauacaauagguguggaa

SEQ ID NO: 2435695 - RNA, 19 nt, Homo sapiens
  misc_RNA (1)...(19): siRNA sense strand
caagcuuggugcagggaca

SEQ ID NO: 2435696 - RNA, 19 nt, Homo sapiens
  misc_RNA (1)...(19): siRNA sense strand
gugcaaaagaugccacaaa

SEQ ID NO: 2435697 - RNA, 19 nt, Homo sapiens
  misc_RNA (1)...(19): siRNA sense strand
aguaacuggaagaaagaau

SEQ ID NO: 2435698 - RNA, 19 nt, Homo sapiens
  misc_RNA (1)...(19): siRNA sense strand
cuaauaaguuugauaccca

SEQ ID NO: 2435699 - RNA, 19 nt, Homo sapiens
  misc_RNA (1)...(19): siRNA sense strand
auuuggaaguggauggaca

SEQ ID NO: 2435700 - RNA, 19 nt, Homo sapiens
  misc_RNA (1)...(19): siRNA sense strand
cuuaaguaacuggaagaaa

SEQ ID NO: 2435701 - RNA, 19 nt, Homo sapiens
  misc_RNA (1)...(19): siRNA sense strand
caagauugacauaagcgaa

SEQ ID NO: 2435702 - RNA, 19 nt, Homo sapiens
  misc_RNA (1)...(19): siRNA sense strand
auaaagauuuggaagugga

SEQ ID NO: 2435703 - RNA, 19 nt, Homo sapiens
  misc_RNA (1)...(19): siRNA sense strand
cuuuugugauucuggguaa

SEQ ID NO: 2435704 - RNA, 19 nt, Homo sapiens
  misc_RNA (1)...(19): siRNA sense strand
gaacuuaaguaacuggaag

SEQ ID NO: 2435705 - RNA, 19 nt, Homo sapiens
  misc_RNA (1)...(19): siRNA sense strand
auggauaacaucagagaaa

SEQ ID NO: 2435706 - RNA, 19 nt, Homo sapiens
  misc_RNA (1)...(19): siRNA sense strand
uuucaaagacagagacaau

SEQ ID NO: 2435707 - RNA, 19 nt, Homo sapiens
  misc_RNA (1)...(19): siRNA sense strand
caucauuguacuuuggaaa

SEQ ID NO: 2435708 - RNA, 19 nt, Homo sapiens
  misc_RNA (1)...(19): siRNA sense strand
uuggaaaugcuuaaggaaa

SEQ ID NO: 2435709 - RNA, 19 nt, Homo sapiens
  misc_RNA (1)...(19): siRNA sense strand
caucaaugucacagguauu

SEQ ID NO: 2435710 - RNA, 19 nt, Homo sapiens
  misc_RNA (1)...(19): siRNA sense strand
ggauaacaucagagaaaau

SEQ ID NO: 2435711 - RNA, 19 nt, Homo sapiens
  misc_RNA (1)...(19): siRNA sense strand
ccaacacaauucagcgaca

SEQ ID NO: 2435712 - RNA, 19 nt, Homo sapiens
  misc_RNA (1)...(19): siRNA sense strand
cagggaauccuuuggguca

SEQ ID NO: 2435713 - RNA, 19 nt, Homo sapiens
  misc_RNA (1)...(19): siRNA sense strand
acauacuucugcuggacaa

SEQ ID NO: 2435714 - RNA, 19 nt, Homo sapiens
  misc_RNA (1)...(19): siRNA sense strand
agaucaaguaaaugguaca

SEQ ID NO: 2435715 - RNA, 19 nt, Homo sapiens
  misc_RNA (1)...(19): siRNA sense strand
cccaaaacagagaaaauaa

SEQ ID NO: 2435716 - RNA, 19 nt, Homo sapiens
  misc_RNA (1)...(19): siRNA sense strand
agcagaugacuuagaaauu

SEQ ID NO: 2435717 - RNA, 19 nt, Homo sapiens
  misc_RNA (1)...(19): siRNA sense strand
ucaaaacacaacagggaau

SEQ ID NO: 2435718 - RNA, 19 nt, Homo sapiens
  misc_RNA (1)...(19): siRNA sense strand
uaggaguacaccaggauuu

SEQ ID NO: 2435719 - RNA, 19 nt, Homo sapiens
  misc_RNA (1)...(19): siRNA sense strand
agacuguggagaucauaaa

SEQ ID NO: 2435720 - RNA, 19 nt, Homo sapiens
  misc_RNA (1)...(19): siRNA sense strand
auuccaaccuugagaucca

SEQ ID NO: 2435721 - RNA, 19 nt, Homo sapiens
  misc_RNA (1)...(19): siRNA sense strand
cuucuauguugguagcuau

SEQ ID NO: 2435722 - RNA, 19 nt, Homo sapiens
  misc_RNA (1)...(19): siRNA sense strand
cugacauuuguauggauaa

SEQ ID NO: 2435723 - RNA, 19 nt, Homo sapiens
  misc_RNA (1)...(19): siRNA sense strand
gagaagcagucacagccua

SEQ ID NO: 2435724 - RNA, 19 nt, Homo sapiens
  misc_RNA (1)...(19): siRNA sense strand
aaguaaccaaucugacaaa

SEQ ID NO: 2435725 - RNA, 19 nt, Homo sapiens
  misc_RNA (1)...(19): siRNA sense strand
aggcauugaugaugaugaa

SEQ ID NO: 2435726 - RNA, 19 nt, Homo sapiens
  misc_RNA (1)...(19): siRNA sense strand
ccagcaagucucaggaaau

SEQ ID NO: 2435727 - RNA, 19 nt, Homo sapiens
  misc_RNA (1)...(19): siRNA sense strand
cgaagaaggugugggcaga

SEQ ID NO: 2435728 - RNA, 19 nt, Homo sapiens
  misc_RNA (1)...(19): siRNA sense strand
agacaaggaaccugcagaa

SEQ ID NO: 2435729 - RNA, 19 nt, Homo sapiens
  misc_RNA (1)...(19): siRNA sense strand
cagacaaccacaaggauga

SEQ ID NO: 2435730 - RNA, 19 nt, Homo sapiens
  misc_RNA (1)...(19): siRNA sense strand
ccacauucuacaagcacaa

SEQ ID NO: 2435731 - RNA, 19 nt, Homo sapiens
  misc_RNA (1)...(19): siRNA sense strand
aggcuuggaagaagauaaa

SEQ ID NO: 2435732 - RNA, 19 nt, Homo sapiens
  misc_RNA (1)...(19): siRNA sense strand
ccacaauggcccagaugga

SEQ ID NO: 2435733 - RNA, 19 nt, Homo sapiens
  misc_RNA (1)...(19): siRNA sense strand
gcuuggaagaagauaaaga

SEQ ID NO: 2435734 - RNA, 19 nt, Homo sapiens
  misc_RNA (1)...(19): siRNA sense strand
agauaaagaccauccaaca

SEQ ID NO: 2435735 - RNA, 19 nt, Homo sapiens
  misc_RNA (1)...(19): siRNA sense strand
gcaauggagcuguggagga

SEQ ID NO: 2435736 - RNA, 19 nt, Homo sapiens
  misc_RNA (1)...(19): siRNA sense strand
ugaagaugaaagagacaga

SEQ ID NO: 2435737 - RNA, 19 nt, Homo sapiens
  misc_RNA (1)...(19): siRNA sense strand
aggagaauacagaacgaau

SEQ ID NO: 2435738 - RNA, 19 nt, Homo sapiens
  misc_RNA (1)...(19): siRNA sense strand
caggaagaaggauggauau

SEQ ID NO: 2435739 - RNA, 19 nt, Homo sapiens
  misc_RNA (1)...(19): siRNA sense strand
caacagauggcaugaggga

SEQ ID NO: 2435740 - RNA, 19 nt, Homo sapiens
  misc_RNA (1)...(19): siRNA sense strand
gagucaagaagguggagca

SEQ ID NO: 2435741 - RNA, 19 nt, Homo sapiens
  misc_RNA (1)...(19): siRNA sense strand
gcuucagccuacugcaaau

SEQ ID NO: 2435742 - RNA, 19 nt, Homo sapiens
  misc_RNA (1)...(19): siRNA sense strand
augaaggcuuggaagaaga

SEQ ID NO: 2435743 - RNA, 19 nt, Homo sapiens
  misc_RNA (1)...(19): siRNA sense strand
cauugaugaugaugaagau

SEQ ID NO: 2435744 - RNA, 19 nt, Homo sapiens
  misc_RNA (1)...(19): siRNA sense strand
uggaagaagauaaagacca

SEQ ID NO: 2435745 - RNA, 19 nt, Homo sapiens
  misc_RNA (1)...(19): siRNA sense strand
acaaauggcugguacgucu

SEQ ID NO: 2435746 - RNA, 19 nt, Homo sapiens
  misc_RNA (1)...(19): siRNA sense strand
acaugaaggcuuggaagaa

SEQ ID NO: 2435747 - RNA, 19 nt, Homo sapiens
  misc_RNA (1)...(19): siRNA sense strand
caguggaacccaagccauu

SEQ ID NO: 2435748 - RNA, 19 nt, Homo sapiens
  misc_RNA (1)...(19): siRNA sense strand
cuucaaugcuucagcucca

SEQ ID NO: 2435749 - RNA, 19 nt, Homo sapiens
  misc_RNA (1)...(19): siRNA sense strand
ccgacagcacagacagaau

SEQ ID NO: 2435750 - RNA, 19 nt, Homo sapiens
  misc_RNA (1)...(19): siRNA sense strand
caggagaccaagacacauu

SEQ ID NO: 2435751 - RNA, 19 nt, Homo sapiens
  misc_RNA (1)...(19): siRNA sense strand
ggacagaaagccaagugga

SEQ ID NO: 2435752 - RNA, 19 nt, Homo sapiens
  misc_RNA (1)...(19): siRNA sense strand
uggugcauuuggugaacaa

SEQ ID NO: 2435753 - RNA, 19 nt, Homo sapiens
  misc_RNA (1)...(19): siRNA sense strand
cagaaaggagaauacagaa

SEQ ID NO: 2435754 - RNA, 19 nt, Homo sapiens
  misc_RNA (1)...(19): siRNA sense strand
guuucuaccaucagaguca

SEQ ID NO: 2435755 - RNA, 19 nt, Homo sapiens
  misc_RNA (1)...(19): siRNA sense strand
ggagccaaaugaagaaaau

SEQ ID NO: 2435756 - RNA, 19 nt, Homo sapiens
  misc_RNA (1)...(19): siRNA sense strand
aaugaagaugaaagagaca

SEQ ID NO: 2435757 - RNA, 19 nt, Homo sapiens
  misc_RNA (1)...(19): siRNA sense strand
ccacugcuuaugaaggaaa

SEQ ID NO: 2435758 - RNA, 19 nt, Homo sapiens
  misc_RNA (1)...(19): siRNA sense strand
aagaagagacccaaaucau

SEQ ID NO: 2435759 - RNA, 19 nt, Homo sapiens
  misc_RNA (1)...(19): siRNA sense strand
caaguggacucaacggaga

SEQ ID NO: 2435760 - RNA, 19 nt, Homo sapiens
  misc_RNA (1)...(19): siRNA sense strand
cuacaucacaugaaggcuu

SEQ ID NO: 2435761 - RNA, 19 nt, Homo sapiens
  misc_RNA (1)...(19): siRNA sense strand
acaucaagcaauaggaaug

SEQ ID NO: 2435762 - RNA, 19 nt, Homo sapiens
  misc_RNA (1)...(19): siRNA sense strand
guggaagaagagacccaaa

SEQ ID NO: 2435763 - RNA, 19 nt, Homo sapiens
  misc_RNA (1)...(19): siRNA sense strand
aggaacagugguuuggcaa

SEQ ID NO: 2435764 - RNA, 19 nt, Homo sapiens
  misc_RNA (1)...(19): siRNA sense strand
ccaaugcaaggaaggacaa

SEQ ID NO: 2435765 - RNA, 19 nt, Homo sapiens
  misc_RNA (1)...(19): siRNA sense strand
agaguaauucucagagcuu

SEQ ID NO: 2435766 - RNA, 19 nt, Homo sapiens
  misc_RNA (1)...(19): siRNA sense strand
aaggcuuggaagaagauaa

SEQ ID NO: 2435767 - RNA, 19 nt, Homo sapiens
  misc_RNA (1)...(19): siRNA sense strand
aggugugggcagaagaaaa

SEQ ID NO: 2435768 - RNA, 19 nt, Homo sapiens
  misc_RNA (1)...(19): siRNA sense strand
uagaagggcauguggugau

SEQ ID NO: 2435769 - RNA, 19 nt, Homo sapiens
  misc_RNA (1)...(19): siRNA sense strand
ggagaauacagaacgaauc

SEQ ID NO: 2435770 - RNA, 19 nt, Homo sapiens
  misc_RNA (1)...(19): siRNA sense strand
caggcaacuccuaguagua

SEQ ID NO: 2435771 - RNA, 19 nt, Homo sapiens
  misc_RNA (1)...(19): siRNA sense strand
cacaugaaggcuuggaaga

SEQ ID NO: 2435772 - RNA, 19 nt, Homo sapiens
  misc_RNA (1)...(19): siRNA sense strand
agaaaggagaauacagaac

SEQ ID NO: 2435773 - RNA, 19 nt, Homo sapiens
  misc_RNA (1)...(19): siRNA sense strand
aagaugaaagagacagaca

SEQ ID NO: 2435774 - RNA, 19 nt, Homo sapiens
  misc_RNA (1)...(19): siRNA sense strand
agucaagaagguggagcaa

SEQ ID NO: 2435775 - RNA, 19 nt, Homo sapiens
  misc_RNA (1)...(19): siRNA sense strand
gcaugagggauaucgccaa

SEQ ID NO: 2435776 - RNA, 19 nt, Homo sapiens
  misc_RNA (1)...(19): siRNA sense strand
uggaagaagagacccaaau

SEQ ID NO: 2435777 - RNA, 19 nt, Homo sapiens
  misc_RNA (1)...(19): siRNA sense strand
caacagucgaagaaggugu

SEQ ID NO: 2435778 - RNA, 19 nt, Homo sapiens
  misc_RNA (1)...(19): siRNA sense strand
aaaggagaauacagaacga

SEQ ID NO: 2435779 - RNA, 19 nt, Homo sapiens
  misc_RNA (1)...(19): siRNA sense strand
ucauagacccugaggccau

SEQ ID NO: 2435780 - RNA, 19 nt, Homo sapiens
  misc_RNA (1)...(19): siRNA sense strand
caccagagcugaaccgaca

SEQ ID NO: 2435781 - RNA, 19 nt, Homo sapiens
  misc_RNA (1)...(19): siRNA sense strand
aggaagcaccagagcugaa

SEQ ID NO: 2435782 - RNA, 19 nt, Homo sapiens
  misc_RNA (1)...(19): siRNA sense strand
gcgcaaggucuuugagcag

SEQ ID NO: 2435783 - RNA, 19 nt, Homo sapiens
  misc_RNA (1)...(19): siRNA sense strand
cgggagaggauggagaaga

SEQ ID NO: 2435784 - RNA, 19 nt, Homo sapiens
  misc_RNA (1)...(19): siRNA sense strand
aguaaaacauucagagaca

SEQ ID NO: 2435785 - RNA, 19 nt, Homo sapiens
  misc_RNA (1)...(19): siRNA sense strand
gcagcuguucggagggaaa

SEQ ID NO: 2435786 - RNA, 19 nt, Homo sapiens
  misc_RNA (1)...(19): siRNA sense strand
augcagaggagauggagaa

SEQ ID NO: 2435787 - RNA, 19 nt, Homo sapiens
  misc_RNA (1)...(19): siRNA sense strand
ggaaaaugcugcaaggugu

SEQ ID NO: 2435788 - RNA, 19 nt, Homo sapiens
  misc_RNA (1)...(19): siRNA sense strand
gggaacauucugaugguga

SEQ ID NO: 2435789 - RNA, 19 nt, Homo sapiens
  misc_RNA (1)...(19): siRNA sense strand
agaaguacagaguggguga

SEQ ID NO: 2435790 - RNA, 19 nt, Homo sapiens
  misc_RNA (1)...(19): siRNA sense strand
ccagugaacaauaagguga

SEQ ID NO: 2435791 - RNA, 19 nt, Homo sapiens
  misc_RNA (1)...(19): siRNA sense strand
ggacuauucgaaagggcau

SEQ ID NO: 2435792 - RNA, 19 nt, Homo sapiens
  misc_RNA (1)...(19): siRNA sense strand
gggaagaaacgaugccugu

SEQ ID NO: 2435793 - RNA, 19 nt, Homo sapiens
  misc_RNA (1)...(19): siRNA sense strand
cugaaaagggccacuguua

SEQ ID NO: 2435794 - RNA, 19 nt, Homo sapiens
  misc_RNA (1)...(19): siRNA sense strand
caacuuaccaacauggaga

SEQ ID NO: 2435795 - RNA, 19 nt, Homo sapiens
  misc_RNA (1)...(19): siRNA sense strand
ggagaacugucaugggaac

SEQ ID NO: 2435796 - RNA, 19 nt, Homo sapiens
  misc_RNA (1)...(19): siRNA sense strand
guucguagcugaagggcuc

SEQ ID NO: 2435797 - RNA, 19 nt, Homo sapiens
  misc_RNA (1)...(19): siRNA sense strand
ccggguaugcagaggagau

SEQ ID NO: 2435798 - RNA, 19 nt, Homo sapiens
  misc_RNA (1)...(19): siRNA sense strand
aaaagaacuuccaggccaa

SEQ ID NO: 2435799 - RNA, 19 nt, Homo sapiens
  misc_RNA (1)...(19): siRNA sense strand
ccaacagagaagcaagaca

SEQ ID NO: 2435800 - RNA, 19 nt, Homo sapiens
  misc_RNA (1)...(19): siRNA sense strand
agaagaucuccaagaggau

SEQ ID NO: 2435801 - RNA, 19 nt, Homo sapiens
  misc_RNA (1)...(19): siRNA sense strand
ccaagaggauguuugagga

SEQ ID NO: 2435802 - RNA, 19 nt, Homo sapiens
  misc_RNA (1)...(19): siRNA sense strand
acccugagccaguggaaga

SEQ ID NO: 2435803 - RNA, 19 nt, Homo sapiens
  misc_RNA (1)...(19): siRNA sense strand
uguuucaagacaagaagua

SEQ ID NO: 2435804 - RNA, 19 nt, Homo sapiens
  misc_RNA (1)...(19): siRNA sense strand
ggcaaaacagagcaaguaa

SEQ ID NO: 2435805 - RNA, 19 nt, Homo sapiens
  misc_RNA (1)...(19): siRNA sense strand
uuucaagacaagaaguaca

SEQ ID NO: 2435806 - RNA, 19 nt, Homo sapiens
  misc_RNA (1)...(19): siRNA sense strand
agaacaacccugagccagu

SEQ ID NO: 2435807 - RNA, 19 nt, Homo sapiens
  misc_RNA (1)...(19): siRNA sense strand
ggguauucuuccaggagau

SEQ ID NO: 2435808 - RNA, 19 nt, Homo sapiens
  misc_RNA (1)...(19): siRNA sense strand
ggaaauugguuuagggucc

SEQ ID NO: 2435809 - RNA, 19 nt, Homo sapiens
  misc_RNA (1)...(19): siRNA sense strand
ccuagaugaaauuggacaa

SEQ ID NO: 2435810 - RNA, 19 nt, Homo sapiens
  misc_RNA (1)...(19): siRNA sense strand
uguucacaguggaggagaa

SEQ ID NO: 2435811 - RNA, 19 nt, Homo sapiens
  misc_RNA (1)...(19): siRNA sense strand
caguagaccauauggagau

SEQ ID NO: 2435812 - RNA, 19 nt, Homo sapiens
  misc_RNA (1)...(19): siRNA sense strand
aggccaagaaagagaaacu

SEQ ID NO: 2435813 - RNA, 19 nt, Homo sapiens
  misc_RNA (1)...(19): siRNA sense strand
uccagaagccacagggaau

SEQ ID NO: 2435814 - RNA, 19 nt, Homo sapiens
  misc_RNA (1)...(19): siRNA sense strand
gcaguagaccauauggaga

SEQ ID NO: 2435815 - RNA, 19 nt, Homo sapiens
  misc_RNA (1)...(19): siRNA sense strand
aagaaggccaagaaagaga

SEQ ID NO: 2435816 - RNA, 19 nt, Homo sapiens
  misc_RNA (1)...(19): siRNA sense strand
aggcuaaagaggccgagaa

SEQ ID NO: 2435817 - RNA, 19 nt, Homo sapiens
  misc_RNA (1)...(19): siRNA sense strand
ccuugguacccaugggaga

SEQ ID NO: 2435818 - RNA, 19 nt, Homo sapiens
  misc_RNA (1)...(19): siRNA sense strand
gggagaugaugauggaggu

SEQ ID NO: 2435819 - RNA, 19 nt, Homo sapiens
  misc_RNA (1)...(19): siRNA sense strand
gacucuacagccugggaaa

SEQ ID NO: 2435820 - RNA, 19 nt, Homo sapiens
  misc_RNA (1)...(19): siRNA sense strand
cuaaagaggccgagaaccc

SEQ ID NO: 2435821 - RNA, 19 nt, Homo sapiens
  misc_RNA (1)...(19): siRNA sense strand
agauagaggagcugagcaa

SEQ ID NO: 2435822 - RNA, 19 nt, Homo sapiens
  misc_RNA (1)...(19): siRNA sense strand
ugucaaagucagaugccaa

SEQ ID NO: 2435823 - RNA, 19 nt, Homo sapiens
  misc_RNA (1)...(19): siRNA sense strand
ccgaaguccaaguggcgaa

SEQ ID NO: 2435824 - RNA, 19 nt, Homo sapiens
  misc_RNA (1)...(19): siRNA sense strand
aagaagagccgcaguggga

SEQ ID NO: 2435825 - RNA, 19 nt, Homo sapiens
  misc_RNA (1)...(19): siRNA sense strand
ccgugguccagguggcaaa

SEQ ID NO: 2435826 - RNA, 19 nt, Homo sapiens
  misc_RNA (1)...(19): siRNA sense strand
ucaaagacgcugcuggaga

SEQ ID NO: 2435827 - RNA, 19 nt, Homo sapiens
  misc_RNA (1)...(19): siRNA sense strand
aggaugagauagaggagcu

SEQ ID NO: 2435828 - RNA, 19 nt, Homo sapiens
  misc_RNA (1)...(19): siRNA sense strand
auagaggagcugagcaaga

SEQ ID NO: 2435829 - RNA, 19 nt, Homo sapiens
  misc_RNA (1)...(19): siRNA sense strand
ccucaaagacgcugcugga

SEQ ID NO: 2435830 - RNA, 19 nt, Homo sapiens
  misc_RNA (1)...(19): siRNA sense strand
ggcucaacuucuaugguau

SEQ ID NO: 2435831 - RNA, 19 nt, Homo sapiens
  misc_RNA (1)...(19): siRNA sense strand
ccgucuggcugcagcugaa

SEQ ID NO: 2435832 - RNA, 19 nt, Homo sapiens
  misc_RNA (1)...(19): siRNA sense strand
ggaaccagcugcuaagcca

SEQ ID NO: 2435833 - RNA, 19 nt, Homo sapiens
  misc_RNA (1)...(19): siRNA sense strand
gcacaaggaguuugagcag

SEQ ID NO: 2435834 - RNA, 19 nt, Homo sapiens
  misc_RNA (1)...(19): siRNA sense strand
guccaaguggcgaagcaaa

SEQ ID NO: 2435835 - RNA, 19 nt, Homo sapiens
  misc_RNA (1)...(19): siRNA sense strand
ggaugcgagcugucaggaa

SEQ ID NO: 2435836 - RNA, 19 nt, Homo sapiens
  misc_RNA (1)...(19): siRNA sense strand
cgacuacucuacagcgcau

SEQ ID NO: 2435837 - RNA, 19 nt, Homo sapiens
  misc_RNA (1)...(19): siRNA sense strand
acaaggaguuugagcagcu

SEQ ID NO: 2435838 - RNA, 19 nt, Homo sapiens
  misc_RNA (1)...(19): siRNA sense strand
cgaagagauuagaaggaaa

SEQ ID NO: 2435839 - RNA, 19 nt, Homo sapiens
  misc_RNA (1)...(19): siRNA sense strand
uauuaaauguggaggguga

SEQ ID NO: 2435840 - RNA, 19 nt, Homo sapiens
  misc_RNA (1)...(19): siRNA sense strand
aggaaguacuggaagacaa

SEQ ID NO: 2435841 - RNA, 19 nt, Homo sapiens
  misc_RNA (1)...(19): siRNA sense strand
uggaagaggaaaaggaaaa

SEQ ID NO: 2435842 - RNA, 19 nt, Homo sapiens
  misc_RNA (1)...(19): siRNA sense strand
ccaugaaagaagaagagaa

SEQ ID NO: 2435843 - RNA, 19 nt, Homo sapiens
  misc_RNA (1)...(19): siRNA sense strand
gaggauaagaagucagcaa

SEQ ID NO: 2435844 - RNA, 19 nt, Homo sapiens
  misc_RNA (1)...(19): siRNA sense strand
ggauagaaauggaacagga

SEQ ID NO: 2435845 - RNA, 19 nt, Homo sapiens
  misc_RNA (1)...(19): siRNA sense strand
gguuugaauuagaagauga

SEQ ID NO: 2435846 - RNA, 19 nt, Homo sapiens
  misc_RNA (1)...(19): siRNA sense strand
ccaagauaugguaaggaaa

SEQ ID NO: 2435847 - RNA, 19 nt, Homo sapiens
  misc_RNA (1)...(19): siRNA sense strand
cuagagaagucgaagagau

SEQ ID NO: 2435848 - RNA, 19 nt, Homo sapiens
  misc_RNA (1)...(19): siRNA sense strand
uagagaagucgaagagauu

SEQ ID NO: 2435849 - RNA, 19 nt, Homo sapiens
  misc_RNA (1)...(19): siRNA sense strand
gcaauuagggauaagaaaa

SEQ ID NO: 2435850 - RNA, 19 nt, Homo sapiens
  misc_RNA (1)...(19): siRNA sense strand
gaauuuaaggggaaagaaa

SEQ ID NO: 2435851 - RNA, 19 nt, Homo sapiens
  misc_RNA (1)...(19): siRNA sense strand
cgagagucaaugagagauu

SEQ ID NO: 2435852 - RNA, 19 nt, Homo sapiens
  misc_RNA (1)...(19): siRNA sense strand
agaccagaucauaaagaaa

SEQ ID NO: 2435853 - RNA, 19 nt, Homo sapiens
  misc_RNA (1)...(19): siRNA sense strand
ggaagaaacuaauugagga

SEQ ID NO: 2435854 - RNA, 19 nt, Homo sapiens
  misc_RNA (1)...(19): siRNA sense strand
gcaagagauucauggcaga

SEQ ID NO: 2435855 - RNA, 19 nt, Homo sapiens
  misc_RNA (1)...(19): siRNA sense strand
agaagaaaguagaagaucu

SEQ ID NO: 2435856 - RNA, 19 nt, Homo sapiens
  misc_RNA (1)...(19): siRNA sense strand
gaauuagucaaucgagaaa

SEQ ID NO: 2435857 - RNA, 19 nt, Homo sapiens
  misc_RNA (1)...(19): siRNA sense strand
cagcaggcuuugacagaau

SEQ ID NO: 2435858 - RNA, 19 nt, Homo sapiens
  misc_RNA (1)...(19): siRNA sense strand
gaagaaacuaauugaggau

SEQ ID NO: 2435859 - RNA, 19 nt, Homo sapiens
  misc_RNA (1)...(19): siRNA sense strand
uggaagaacaacauaacaa

SEQ ID NO: 2435860 - RNA, 19 nt, Homo sapiens
  misc_RNA (1)...(19): siRNA sense strand
gcagaagaaaguagaagau

SEQ ID NO: 2435861 - RNA, 19 nt, Homo sapiens
  misc_RNA (1)...(19): siRNA sense strand
aagaagaagagaagcucaa

SEQ ID NO: 2435862 - RNA, 19 nt, Homo sapiens
  misc_RNA (1)...(19): siRNA sense strand
cuacaggccagcaaagaaa

SEQ ID NO: 2435863 - RNA, 19 nt, Homo sapiens
  misc_RNA (1)...(19): siRNA sense strand
agaaguggaaagugagcua

SEQ ID NO: 2435864 - RNA, 19 nt, Homo sapiens
  misc_RNA (1)...(19): siRNA sense strand
uggaagaggaggugacuca

SEQ ID NO: 2435865 - RNA, 19 nt, Homo sapiens
  misc_RNA (1)...(19): siRNA sense strand
cuucaggacucccaggaaa

SEQ ID NO: 2435866 - RNA, 19 nt, Homo sapiens
  misc_RNA (1)...(19): siRNA sense strand
uugaagaauuagaggagca

SEQ ID NO: 2435867 - RNA, 19 nt, Homo sapiens
  misc_RNA (1)...(19): siRNA sense strand
acaaauucuugcugaaaca

SEQ ID NO: 2435868 - RNA, 19 nt, Homo sapiens
  misc_RNA (1)...(19): siRNA sense strand
cuggaagacaaguugaaua

SEQ ID NO: 2435869 - RNA, 19 nt, Homo sapiens
  misc_RNA (1)...(19): siRNA sense strand
aaacuauggaagaggaaaa

SEQ ID NO: 2435870 - RNA, 19 nt, Homo sapiens
  misc_RNA (1)...(19): siRNA sense strand
uaaauaaaggccaggaaaa

SEQ ID NO: 2435871 - RNA, 19 nt, Homo sapiens
  misc_RNA (1)...(19): siRNA sense strand
caagauaugguaaggaaaa

SEQ ID NO: 2435872 - RNA, 19 nt, Homo sapiens
  misc_RNA (1)...(19): siRNA sense strand
gguaaggaaaagugaacaa

SEQ ID NO: 2435873 - RNA, 19 nt, Homo sapiens
  misc_RNA (1)...(19): siRNA sense strand
cagaauacgaagugaaucu

SEQ ID NO: 2435874 - RNA, 19 nt, Homo sapiens
  misc_RNA (1)...(19): siRNA sense strand
aagaauuagaggagcaaca

SEQ ID NO: 2435875 - RNA, 19 nt, Homo sapiens
  misc_RNA (1)...(19): siRNA sense strand
agauaagguugcaugaaca

SEQ ID NO: 2435876 - RNA, 19 nt, Homo sapiens
  misc_RNA (1)...(19): siRNA sense strand
cagaaagagaccagaucau

SEQ ID NO: 2435877 - RNA, 19 nt, Homo sapiens
  misc_RNA (1)...(19): siRNA sense strand
ucaacaaauucuugcugaa

SEQ ID NO: 2435878 - RNA, 19 nt, Homo sapiens
  misc_RNA (1)...(19): siRNA sense strand
aggaaaaggcagaggaacu

SEQ ID NO: 2435879 - RNA, 19 nt, Homo sapiens
  misc_RNA (1)...(19): siRNA sense strand
gcuagaacaagaaaggcaa

SEQ ID NO: 2435880 - RNA, 19 nt, Homo sapiens
  misc_RNA (1)...(19): siRNA sense strand
agaccaccucagagagaaa

SEQ ID NO: 2435881 - RNA, 19 nt, Homo sapiens
  misc_RNA (1)...(19): siRNA sense strand
uaaccaaagaacuggaauu

SEQ ID NO: 2435882 - RNA, 19 nt, Homo sapiens
  misc_RNA (1)...(19): siRNA sense strand
guaaaugaagcaaagagaa

SEQ ID NO: 2435883 - RNA, 19 nt, Homo sapiens
  misc_RNA (1)...(19): siRNA sense strand
ccugaaauugagcaagaaa

SEQ ID NO: 2435884 - RNA, 19 nt, Homo sapiens
  misc_RNA (1)...(19): siRNA sense strand
augaagagcagaagcaaca

SEQ ID NO: 2435885 - RNA, 19 nt, Homo sapiens
  misc_RNA (1)...(19): siRNA sense strand
auuaagacacagagagcau

SEQ ID NO: 2435886 - RNA, 19 nt, Homo sapiens
  misc_RNA (1)...(19): siRNA sense strand
augaaggcaaguugaauaa

SEQ ID NO: 2435887 - RNA, 19 nt, Homo sapiens
  misc_RNA (1)...(19): siRNA sense strand
ugaaagaagaagagaagcu

SEQ ID NO: 2435888 - RNA, 19 nt, Homo sapiens
  misc_RNA (1)...(19): siRNA sense strand
cagcaaagacacaaaucau

SEQ ID NO: 2435889 - RNA, 19 nt, Homo sapiens
  misc_RNA (1)...(19): siRNA sense strand
gauagaaauggaacaggaa

SEQ ID NO: 2435890 - RNA, 19 nt, Homo sapiens
  misc_RNA (1)...(19): siRNA sense strand
ccuaaagggcccaagacau

SEQ ID NO: 2435891 - RNA, 19 nt, Homo sapiens
  misc_RNA (1)...(19): siRNA sense strand
aguaaaugaagcaaagaga

SEQ ID NO: 2435892 - RNA, 19 nt, Homo sapiens
  misc_RNA (1)...(19): siRNA sense strand
ccugcaaaguagauuggaa

SEQ ID NO: 2435893 - RNA, 19 nt, Homo sapiens
  misc_RNA (1)...(19): siRNA sense strand
gagagucaauggagggcuu

SEQ ID NO: 2435894 - RNA, 19 nt, Homo sapiens
  misc_RNA (1)...(19): siRNA sense strand
ucacagugccucaguaaau

SEQ ID NO: 2435895 - RNA, 19 nt, Homo sapiens
  misc_RNA (1)...(19): siRNA sense strand
uaugaaggcaaguugaaua

SEQ ID NO: 2435896 - RNA, 19 nt, Homo sapiens
  misc_RNA (1)...(19): siRNA sense strand
uggaauuagucaaucgaga

SEQ ID NO: 2435897 - RNA, 19 nt, Homo sapiens
  misc_RNA (1)...(19): siRNA sense strand
aagaaaggcaacagcauga

SEQ ID NO: 2435898 - RNA, 19 nt, Homo sapiens
  misc_RNA (1)...(19): siRNA sense strand
auucuaagacuuuggaaga

SEQ ID NO: 2435899 - RNA, 19 nt, Homo sapiens
  misc_RNA (1)...(19): siRNA sense strand
uggaagaauuagcuuggaa

SEQ ID NO: 2435900 - RNA, 19 nt, Homo sapiens
  misc_RNA (1)...(19): siRNA sense strand
gcuagaaaaccuaaaggaa

SEQ ID NO: 2435901 - RNA, 19 nt, Homo sapiens
  misc_RNA (1)...(19): siRNA sense strand
cggaaggacugcucggaga

SEQ ID NO: 2435902 - RNA, 19 nt, Homo sapiens
  misc_RNA (1)...(19): siRNA sense strand
gcgagaaguaugagcugga

SEQ ID NO: 2435903 - RNA, 19 nt, Homo sapiens
  misc_RNA (1)...(19): siRNA sense strand
ggacaaggugugugggcug

SEQ ID NO: 2435904 - RNA, 19 nt, Homo sapiens
  misc_RNA (1)...(19): siRNA sense strand
gcauccagacccagcggaa

SEQ ID NO: 2435905 - RNA, 19 nt, Homo sapiens
  misc_RNA (1)...(19): siRNA sense strand
acauggacugcgagaucaa

SEQ ID NO: 2435906 - RNA, 19 nt, Homo sapiens
  misc_RNA (1)...(19): siRNA sense strand
aguacauccagcaggagaa

SEQ ID NO: 2435907 - RNA, 19 nt, Homo sapiens
  misc_RNA (1)...(19): siRNA sense strand
gugaguucaugcacggcua

SEQ ID NO: 2435908 - RNA, 19 nt, Homo sapiens
  misc_RNA (1)...(19): siRNA sense strand
ugaaguacauccagcagga

SEQ ID NO: 2435909 - RNA, 19 nt, Homo sapiens
  misc_RNA (1)...(19): siRNA sense strand
uggaggaggauguggucga

SEQ ID NO: 2435910 - RNA, 19 nt, Homo sapiens
  misc_RNA (1)...(19): siRNA sense strand
guucaaggcaagagcgaau

SEQ ID NO: 2435911 - RNA, 19 nt, Homo sapiens
  misc_RNA (1)...(19): siRNA sense strand
ccgaguaauugguaaucaa

SEQ ID NO: 2435912 - RNA, 19 nt, Homo sapiens
  misc_RNA (1)...(19): siRNA sense strand
gucagcaguuagagagaua

SEQ ID NO: 2435913 - RNA, 19 nt, Homo sapiens
  misc_RNA (1)...(19): siRNA sense strand
uggaaacagagcaaagaaa

SEQ ID NO: 2435914 - RNA, 19 nt, Homo sapiens
  misc_RNA (1)...(19): siRNA sense strand
cuggaaaucaagaagcaaa

SEQ ID NO: 2435915 - RNA, 19 nt, Homo sapiens
  misc_RNA (1)...(19): siRNA sense strand
cagcaguuagagagauaua

SEQ ID NO: 2435916 - RNA, 19 nt, Homo sapiens
  misc_RNA (1)...(19): siRNA sense strand
gggaugaacaagaaacaga

SEQ ID NO: 2435917 - RNA, 19 nt, Homo sapiens
  misc_RNA (1)...(19): siRNA sense strand
agaaggaggcauucacaaa

SEQ ID NO: 2435918 - RNA, 19 nt, Homo sapiens
  misc_RNA (1)...(19): siRNA sense strand
ggaaacagagcaaagaaaa

SEQ ID NO: 2435919 - RNA, 19 nt, Homo sapiens
  misc_RNA (1)...(19): siRNA sense strand
aggaagauucugaagguga

SEQ ID NO: 2435920 - RNA, 19 nt, Homo sapiens
  misc_RNA (1)...(19): siRNA sense strand
uuucaaacccugggaguaa

SEQ ID NO: 2435921 - RNA, 19 nt, Homo sapiens
  misc_RNA (1)...(19): siRNA sense strand
aguccaaugucaagcauau

SEQ ID NO: 2435922 - RNA, 19 nt, Homo sapiens
  misc_RNA (1)...(19): siRNA sense strand
ugucaaguucagagaauga

SEQ ID NO: 2435923 - RNA, 19 nt, Homo sapiens
  misc_RNA (1)...(19): siRNA sense strand
acggaggacaggugaacua

SEQ ID NO: 2435924 - RNA, 19 nt, Homo sapiens
  misc_RNA (1)...(19): siRNA sense strand
gagcaggcuaugacagcaa

SEQ ID NO: 2435925 - RNA, 19 nt, Homo sapiens
  misc_RNA (1)...(19): siRNA sense strand
uggaagaauuauauggacu

SEQ ID NO: 2435926 - RNA, 19 nt, Homo sapiens
  misc_RNA (1)...(19): siRNA sense strand
ccugcaaagccguaacuua

SEQ ID NO: 2435927 - RNA, 19 nt, Homo sapiens
  misc_RNA (1)...(19): siRNA sense strand
aucaagaagcaaauggaua

SEQ ID NO: 2435928 - RNA, 19 nt, Homo sapiens
  misc_RNA (1)...(19): siRNA sense strand
cagcaguccaccagccaaa

SEQ ID NO: 2435929 - RNA, 19 nt, Homo sapiens
  misc_RNA (1)...(19): siRNA sense strand
cagcaauacaucacaguca

SEQ ID NO: 2435930 - RNA, 19 nt, Homo sapiens
  misc_RNA (1)...(19): siRNA sense strand
cuuaaaaugcauagccuua

SEQ ID NO: 2435931 - RNA, 19 nt, Homo sapiens
  misc_RNA (1)...(19): siRNA sense strand
ccaagugggagaugcaaau

SEQ ID NO: 2435932 - RNA, 19 nt, Homo sapiens
  misc_RNA (1)...(19): siRNA sense strand
ggugcagacaauugaguuu

SEQ ID NO: 2435933 - RNA, 19 nt, Homo sapiens
  misc_RNA (1)...(19): siRNA sense strand
uggaaaucaagaagcaaau

SEQ ID NO: 2435934 - RNA, 19 nt, Homo sapiens
  misc_RNA (1)...(19): siRNA sense strand
gaauaguacaguggaggaa

SEQ ID NO: 2435935 - RNA, 19 nt, Homo sapiens
  misc_RNA (1)...(19): siRNA sense strand
aaucugagcaggacggaau

SEQ ID NO: 2435936 - RNA, 19 nt, Homo sapiens
  misc_RNA (1)...(19): siRNA sense strand
gaaugaugaagaugugcua

SEQ ID NO: 2435937 - RNA, 19 nt, Homo sapiens
  misc_RNA (1)...(19): siRNA sense strand
ggaugaacaagaaacagaa

SEQ ID NO: 2435938 - RNA, 19 nt, Homo sapiens
  misc_RNA (1)...(19): siRNA sense strand
ugugucaaguucagagaau

SEQ ID NO: 2435939 - RNA, 19 nt, Homo sapiens
  misc_RNA (1)...(19): siRNA sense strand
accuauaauuguucgacua

SEQ ID NO: 2435940 - RNA, 19 nt, Homo sapiens
  misc_RNA (1)...(19): siRNA sense strand
agaaaugacacaagcacca

SEQ ID NO: 2435941 - RNA, 19 nt, Homo sapiens
  misc_RNA (1)...(19): siRNA sense strand
gcuccauggugcaauguau

SEQ ID NO: 2435942 - RNA, 19 nt, Homo sapiens
  misc_RNA (1)...(19): siRNA sense strand
ccauugaugauguagauau

SEQ ID NO: 2435943 - RNA, 19 nt, Homo sapiens
  misc_RNA (1)...(19): siRNA sense strand
ugucagagaagaaagugaa

SEQ ID NO: 2435944 - RNA, 19 nt, Homo sapiens
  misc_RNA (1)...(19): siRNA sense strand
ccuccgaguaauugguaau

SEQ ID NO: 2435945 - RNA, 19 nt, Homo sapiens
  misc_RNA (1)...(19): siRNA sense strand
cguuggaaucuccuagaaa

SEQ ID NO: 2435946 - RNA, 19 nt, Homo sapiens
  misc_RNA (1)...(19): siRNA sense strand
cugcaauggguuauaucaa

SEQ ID NO: 2435947 - RNA, 19 nt, Homo sapiens
  misc_RNA (1)...(19): siRNA sense strand
gccaagugggagaugcaaa

SEQ ID NO: 2435948 - RNA, 19 nt, Homo sapiens
  misc_RNA (1)...(19): siRNA sense strand
cugaagauuacccagauaa

SEQ ID NO: 2435949 - RNA, 19 nt, Homo sapiens
  misc_RNA (1)...(19): siRNA sense strand
auaguacaguggaggaaga

SEQ ID NO: 2435950 - RNA, 19 nt, Homo sapiens
  misc_RNA (1)...(19): siRNA sense strand
gcaguuucucucagggaau

SEQ ID NO: 2435951 - RNA, 19 nt, Homo sapiens
  misc_RNA (1)...(19): siRNA sense strand
gcaauguauggaaguggaa

SEQ ID NO: 2435952 - RNA, 19 nt, Homo sapiens
  misc_RNA (1)...(19): siRNA sense strand
ucauagaauagcaacagaa

SEQ ID NO: 2435953 - RNA, 19 nt, Homo sapiens
  misc_RNA (1)...(19): siRNA sense strand
uggcaaaagcaaauccaaa

SEQ ID NO: 2435954 - RNA, 19 nt, Homo sapiens
  misc_RNA (1)...(19): siRNA sense strand
cuaugaucgaguaaugaaa

SEQ ID NO: 2435955 - RNA, 19 nt, Homo sapiens
  misc_RNA (1)...(19): siRNA sense strand
ugggagaugcaaauauuaa

SEQ ID NO: 2435956 - RNA, 19 nt, Homo sapiens
  misc_RNA (1)...(19): siRNA sense strand
acaaagagauccuccgagu

SEQ ID NO: 2435957 - RNA, 19 nt, Homo sapiens
  misc_RNA (1)...(19): siRNA sense strand
gaggaaucaagacagaaua

SEQ ID NO: 2435958 - RNA, 19 nt, Homo sapiens
  misc_RNA (1)...(19): siRNA sense strand
cuguuaagucagaggaaug

SEQ ID NO: 2435959 - RNA, 19 nt, Homo sapiens
  misc_RNA (1)...(19): siRNA sense strand
ugaaauagcaacuggagcu

SEQ ID NO: 2435960 - RNA, 19 nt, Homo sapiens
  misc_RNA (1)...(19): siRNA sense strand
cauagaauagcaacagaau

SEQ ID NO: 2435961 - RNA, 19 nt, Homo sapiens
  misc_RNA (1)...(19): siRNA sense strand
caagcauaucauuugguua

SEQ ID NO: 2435962 - RNA, 19 nt, Homo sapiens
  misc_RNA (1)...(19): siRNA sense strand
aaacagaaggugucagcca

SEQ ID NO: 2435963 - RNA, 19 nt, Homo sapiens
  misc_RNA (1)...(19): siRNA sense strand
ggggaggaaucaagacaga

SEQ ID NO: 2435964 - RNA, 19 nt, Homo sapiens
  misc_RNA (1)...(19): siRNA sense strand
cagcaauuaaaucgcacaa

SEQ ID NO: 2435965 - RNA, 19 nt, Homo sapiens
  misc_RNA (1)...(19): siRNA sense strand
gcaaauggauaaacaggac

SEQ ID NO: 2435966 - RNA, 19 nt, Homo sapiens
  misc_RNA (1)...(19): siRNA sense strand
ggggauguguucaaggcaa

SEQ ID NO: 2435967 - RNA, 19 nt, Homo sapiens
  misc_RNA (1)...(19): siRNA sense strand
aguccagagcugagaagga

SEQ ID NO: 2435968 - RNA, 19 nt, Homo sapiens
  misc_RNA (1)...(19): siRNA sense strand
ggcuaugacagcaauuaaa

SEQ ID NO: 2435969 - RNA, 19 nt, Homo sapiens
  misc_RNA (1)...(19): siRNA sense strand
aggaaugccuaacucuaaa

SEQ ID NO: 2435970 - RNA, 19 nt, Homo sapiens
  misc_RNA (1)...(19): siRNA sense strand
gcuuauugguauccuaaca

SEQ ID NO: 2435971 - RNA, 19 nt, Homo sapiens
  misc_RNA (1)...(19): siRNA sense strand
cuucugugguagauccuaa

SEQ ID NO: 2435972 - RNA, 19 nt, Homo sapiens
  misc_RNA (1)...(19): siRNA sense strand
gguuguugcuucuaauaca

SEQ ID NO: 2435973 - RNA, 19 nt, Homo sapiens
  misc_RNA (1)...(19): siRNA sense strand
cggccaagugggagaugca

SEQ ID NO: 2435974 - RNA, 19 nt, Homo sapiens
  misc_RNA (1)...(19): siRNA sense strand
cuguaacgcaugugggaaa

SEQ ID NO: 2435975 - RNA, 19 nt, Homo sapiens
  misc_RNA (1)...(19): siRNA sense strand
agacagaagcuaaggcaga

SEQ ID NO: 2435976 - RNA, 19 nt, Homo sapiens
  misc_RNA (1)...(19): siRNA sense strand
aagagguggccgaggugaa

SEQ ID NO: 2435977 - RNA, 19 nt, Homo sapiens
  misc_RNA (1)...(19): siRNA sense strand
aggugaagccaaagccaga

SEQ ID NO: 2435978 - RNA, 19 nt, Homo sapiens
  misc_RNA (1)...(19): siRNA sense strand
cgguggagcauguggaaug

SEQ ID NO: 2435979 - RNA, 19 nt, Homo sapiens
  misc_RNA (1)...(19): siRNA sense strand
aagccuaugcggagcucaa

SEQ ID NO: 2435980 - RNA, 19 nt, Homo sapiens
  misc_RNA (1)...(19): siRNA sense strand
gcgcccaugaagaggugaa

SEQ ID NO: 2435981 - RNA, 19 nt, Homo sapiens
  misc_RNA (1)...(19): siRNA sense strand
aguggcagguggugggcau

SEQ ID NO: 2435982 - RNA, 19 nt, Homo sapiens
  misc_RNA (1)...(19): siRNA sense strand
gugccagcgacuugcgcaa

SEQ ID NO: 2435983 - RNA, 19 nt, Homo sapiens
  misc_RNA (1)...(19): siRNA sense strand
gggagaaggugucaggcuc

SEQ ID NO: 2435984 - RNA, 19 nt, Homo sapiens
  misc_RNA (1)...(19): siRNA sense strand
gggcaugacgguggagcau

SEQ ID NO: 2435985 - RNA, 19 nt, Homo sapiens
  misc_RNA (1)...(19): siRNA sense strand
ggauugaguuugacgagga

SEQ ID NO: 2435986 - RNA, 19 nt, Homo sapiens
  misc_RNA (1)...(19): siRNA sense strand
acaucaacguggagaccau

SEQ ID NO: 2435987 - RNA, 19 nt, Homo sapiens
  misc_RNA (1)...(19): siRNA sense strand
uguucaaggaggagggugu

SEQ ID NO: 2435988 - RNA, 19 nt, Homo sapiens
  misc_RNA (1)...(19): siRNA sense strand
cuuucgagguguugggaug

SEQ ID NO: 2435989 - RNA, 19 nt, Homo sapiens
  misc_RNA (1)...(19): siRNA sense strand
ccaaauaugaagaggaaaa

SEQ ID NO: 2435990 - RNA, 19 nt, Homo sapiens
  misc_RNA (1)...(19): siRNA sense strand
gaccaaauaugaagaggaa

SEQ ID NO: 2435991 - RNA, 19 nt, Homo sapiens
  misc_RNA (1)...(19): siRNA sense strand
gaaagagguuauucgggaa

SEQ ID NO: 2435992 - RNA, 19 nt, Homo sapiens
  misc_RNA (1)...(19): siRNA sense strand
ccuaaagagcaguggacca

SEQ ID NO: 2435993 - RNA, 19 nt, Homo sapiens
  misc_RNA (1)...(19): siRNA sense strand
auacaauauacgaggauga

SEQ ID NO: 2435994 - RNA, 19 nt, Homo sapiens
  misc_RNA (1)...(19): siRNA sense strand
ggaaagaaaagaaagagaa

SEQ ID NO: 2435995 - RNA, 19 nt, Homo sapiens
  misc_RNA (1)...(19): siRNA sense strand
gaaagagaagaaugggcaa

SEQ ID NO: 2435996 - RNA, 19 nt, Homo sapiens
  misc_RNA (1)...(19): siRNA sense strand
gggaaagaaaagaaagaga

SEQ ID NO: 2435997 - RNA, 19 nt, Homo sapiens
  misc_RNA (1)...(19): siRNA sense strand
ggaccaaauaugaagagga

SEQ ID NO: 2435998 - RNA, 19 nt, Homo sapiens
  misc_RNA (1)...(19): siRNA sense strand
agguuauucgggaaagaaa

SEQ ID NO: 2435999 - RNA, 19 nt, Homo sapiens
  misc_RNA (1)...(19): siRNA sense strand
acgaggaugaagauguaaa

SEQ ID NO: 2436000 - RNA, 19 nt, Homo sapiens
  misc_RNA (1)...(19): siRNA sense strand
ugaaagagguuauucggga

SEQ ID NO: 2436001 - RNA, 19 nt, Homo sapiens
  misc_RNA (1)...(19): siRNA sense strand
aaagagaagaaugggcaaa

SEQ ID NO: 2436002 - RNA, 19 nt, Homo sapiens
  misc_RNA (1)...(19): siRNA sense strand
guuaaugcgagaugauaca

SEQ ID NO: 2436003 - RNA, 19 nt, Homo sapiens
  misc_RNA (1)...(19): siRNA sense strand
agaaagagaagaaugggca

SEQ ID NO: 2436004 - RNA, 19 nt, Homo sapiens
  misc_RNA (1)...(19): siRNA sense strand
gcuggaugguauucgaaaa

SEQ ID NO: 2436005 - RNA, 19 nt, Homo sapiens
  misc_RNA (1)...(19): siRNA sense strand
gguuauucgggaaagaaaa

SEQ ID NO: 2436006 - RNA, 19 nt, Homo sapiens
  misc_RNA (1)...(19): siRNA sense strand
cuuuauaaugacaggaugu

SEQ ID NO: 2436007 - RNA, 19 nt, Homo sapiens
  misc_RNA (1)...(19): siRNA sense strand
acuugaagcaucagaucuu

SEQ ID NO: 2436008 - RNA, 19 nt, Homo sapiens
  misc_RNA (1)...(19): siRNA sense strand
gguuaaugcgagaugauac

SEQ ID NO: 2436009 - RNA, 19 nt, Homo sapiens
  misc_RNA (1)...(19): siRNA sense strand
agauguaaaagaagccaua

SEQ ID NO: 2436010 - RNA, 19 nt, Homo sapiens
  misc_RNA (1)...(19): siRNA sense strand
cuauagaguugcaggcaga

SEQ ID NO: 2436011 - RNA, 19 nt, Homo sapiens
  misc_RNA (1)...(19): siRNA sense strand
cugaacaugcagaggaaaa

SEQ ID NO: 2436012 - RNA, 19 nt, Homo sapiens
  misc_RNA (1)...(19): siRNA sense strand
aguuggaggagauggcaaa

SEQ ID NO: 2436013 - RNA, 19 nt, Homo sapiens
  misc_RNA (1)...(19): siRNA sense strand
ccagugacuuuguggccaa

SEQ ID NO: 2436014 - RNA, 19 nt, Homo sapiens
  misc_RNA (1)...(19): siRNA sense strand
aagaugaguugguggcuga

SEQ ID NO: 2436015 - RNA, 19 nt, Homo sapiens
  misc_RNA (1)...(19): siRNA sense strand
gguaccaguuugaggagga

SEQ ID NO: 2436016 - RNA, 19 nt, Homo sapiens
  misc_RNA (1)...(19): siRNA sense strand
ugggagaaccugagggaac

SEQ ID NO: 2436017 - RNA, 19 nt, Homo sapiens
  misc_RNA (1)...(19): siRNA sense strand
cccugaacaugcagaggaa

SEQ ID NO: 2436018 - RNA, 19 nt, Homo sapiens
  misc_RNA (1)...(19): siRNA sense strand
uggagcaaucagaggagaa

SEQ ID NO: 2436019 - RNA, 19 nt, Homo sapiens
  misc_RNA (1)...(19): siRNA sense strand
cccgcugggcugaggaaua

SEQ ID NO: 2436020 - RNA, 19 nt, Homo sapiens
  misc_RNA (1)...(19): siRNA sense strand
gaacaagaacuauuagcca

SEQ ID NO: 2436021 - RNA, 19 nt, Homo sapiens
  misc_RNA (1)...(19): siRNA sense strand
cagcagaguuuauacagca

SEQ ID NO: 2436022 - RNA, 19 nt, Homo sapiens
  misc_RNA (1)...(19): siRNA sense strand
uggaaaccagagugaagaa

SEQ ID NO: 2436023 - RNA, 19 nt, Homo sapiens
  misc_RNA (1)...(19): siRNA sense strand
gaguuggaggagauggcaa

SEQ ID NO: 2436024 - RNA, 19 nt, Homo sapiens
  misc_RNA (1)...(19): siRNA sense strand
uggaugaccuccuggcuga

SEQ ID NO: 2436025 - RNA, 19 nt, Homo sapiens
  misc_RNA (1)...(19): siRNA sense strand
ccacccuggccaauggaaa

SEQ ID NO: 2436026 - RNA, 19 nt, Homo sapiens
  misc_RNA (1)...(19): siRNA sense strand
ccagauaaccagacagcac

SEQ ID NO: 2436027 - RNA, 19 nt, Homo sapiens
  misc_RNA (1)...(19): siRNA sense strand
cugagaugcagcagauuga

SEQ ID NO: 2436028 - RNA, 19 nt, Homo sapiens
  misc_RNA (1)...(19): siRNA sense strand
cagcaggauccuaagcaca

SEQ ID NO: 2436029 - RNA, 19 nt, Homo sapiens
  misc_RNA (1)...(19): siRNA sense strand
agcuaaagccagauaacca

SEQ ID NO: 2436030 - RNA, 19 nt, Homo sapiens
  misc_RNA (1)...(19): siRNA sense strand
cuggagaugcuguggaugu

SEQ ID NO: 2436031 - RNA, 19 nt, Homo sapiens
  misc_RNA (1)...(19): siRNA sense strand
gauuauaaugagacugacu

SEQ ID NO: 2436032 - RNA, 19 nt, Homo sapiens
  misc_RNA (1)...(19): siRNA sense strand
ugaaggagcugcagaguaa

SEQ ID NO: 2436033 - RNA, 19 nt, Homo sapiens
  misc_RNA (1)...(19): siRNA sense strand
cggagaacuucaucggcaa

SEQ ID NO: 2436034 - RNA, 19 nt, Homo sapiens
  misc_RNA (1)...(19): siRNA sense strand
cagggaagguggaguggau

SEQ ID NO: 2436035 - RNA, 19 nt, Homo sapiens
  misc_RNA (1)...(19): siRNA sense strand
cugaacaaauacauggaga

SEQ ID NO: 2436036 - RNA, 19 nt, Homo sapiens
  misc_RNA (1)...(19): siRNA sense strand
augaagaagcggaccaaga

SEQ ID NO: 2436037 - RNA, 19 nt, Homo sapiens
  misc_RNA (1)...(19): siRNA sense strand
gcagaguaacuuaggggua

SEQ ID NO: 2436038 - RNA, 19 nt, Homo sapiens
  misc_RNA (1)...(19): siRNA sense strand
ugaacaaauacauggagau

SEQ ID NO: 2436039 - RNA, 19 nt, Homo sapiens
  misc_RNA (1)...(19): siRNA sense strand
ucagugaggucgagugguu

SEQ ID NO: 2436040 - RNA, 19 nt, Homo sapiens
  misc_RNA (1)...(19): siRNA sense strand
aagaaguaccggugccgaa

SEQ ID NO: 2436041 - RNA, 19 nt, Homo sapiens
  misc_RNA (1)...(19): siRNA sense strand
cugugaagguggaccagau

SEQ ID NO: 2436042 - RNA, 19 nt, Homo sapiens
  misc_RNA (1)...(19): siRNA sense strand
cagcagaugaagcggcaca

SEQ ID NO: 2436043 - RNA, 19 nt, Homo sapiens
  misc_RNA (1)...(19): siRNA sense strand
cugaaggagcugcagagua

SEQ ID NO: 2436044 - RNA, 19 nt, Homo sapiens
  misc_RNA (1)...(19): siRNA sense strand
cugcagagcuccagacccu

SEQ ID NO: 2436045 - RNA, 19 nt, Homo sapiens
  misc_RNA (1)...(19): siRNA sense strand
ccguguacuacgagagcca

SEQ ID NO: 2436046 - RNA, 19 nt, Homo sapiens
  misc_RNA (1)...(19): siRNA sense strand
gcggagaacuucaucggca

SEQ ID NO: 2436047 - RNA, 19 nt, Homo sapiens
  misc_RNA (1)...(19): siRNA sense strand
gagcucaacgagacggaga

SEQ ID NO: 2436048 - RNA, 19 nt, Homo sapiens
  misc_RNA (1)...(19): siRNA sense strand
ugaaggagcugcagaguaa

SEQ ID NO: 2436049 - RNA, 19 nt, Homo sapiens
  misc_RNA (1)...(19): siRNA sense strand
cggagaacuucaucggcaa

SEQ ID NO: 2436050 - RNA, 19 nt, Homo sapiens
  misc_RNA (1)...(19): siRNA sense strand
cagggaagguggaguggau

SEQ ID NO: 2436051 - RNA, 19 nt, Homo sapiens
  misc_RNA (1)...(19): siRNA sense strand
cugaacaaauacauggaga

SEQ ID NO: 2436052 - RNA, 19 nt, Homo sapiens
  misc_RNA (1)...(19): siRNA sense strand
augaagaagcggaccaaga

SEQ ID NO: 2436053 - RNA, 19 nt, Homo sapiens
  misc_RNA (1)...(19): siRNA sense strand
gcagaguaacuuaggggua

SEQ ID NO: 2436054 - RNA, 19 nt, Homo sapiens
  misc_RNA (1)...(19): siRNA sense strand
ugaacaaauacauggagau

SEQ ID NO: 2436055 - RNA, 19 nt, Homo sapiens
  misc_RNA (1)...(19): siRNA sense strand
ucagugaggucgagugguu

SEQ ID NO: 2436056 - RNA, 19 nt, Homo sapiens
  misc_RNA (1)...(19): siRNA sense strand
aagaaguaccggugccgaa

SEQ ID NO: 2436057 - RNA, 19 nt, Homo sapiens
  misc_RNA (1)...(19): siRNA sense strand
cugugaagguggaccagau

SEQ ID NO: 2436058 - RNA, 19 nt, Homo sapiens
  misc_RNA (1)...(19): siRNA sense strand
cagcagaugaagcggcaca

SEQ ID NO: 2436059 - RNA, 19 nt, Homo sapiens
  misc_RNA (1)...(19): siRNA sense strand
cugaaggagcugcagagua

SEQ ID NO: 2436060 - RNA, 19 nt, Homo sapiens
  misc_RNA (1)...(19): siRNA sense strand
cugcagagcuccagacccu

SEQ ID NO: 2436061 - RNA, 19 nt, Homo sapiens
  misc_RNA (1)...(19): siRNA sense strand
ccguguacuacgagagcca

SEQ ID NO: 2436062 - RNA, 19 nt, Homo sapiens
  misc_RNA (1)...(19): siRNA sense strand
gcggagaacuucaucggca

SEQ ID NO: 2436063 - RNA, 19 nt, Homo sapiens
  misc_RNA (1)...(19): siRNA sense strand
gagcucaacgagacggaga

SEQ ID NO: 2436064 - RNA, 19 nt, Homo sapiens
  misc_RNA (1)...(19): siRNA sense strand
ugauaaugucaguguggua

SEQ ID NO: 2436065 - RNA, 19 nt, Homo sapiens
  misc_RNA (1)...(19): siRNA sense strand
ucacagaagcuaauggaca

SEQ ID NO: 2436066 - RNA, 19 nt, Homo sapiens
  misc_RNA (1)...(19): siRNA sense strand
auucagaaguuuggggaua

SEQ ID NO: 2436067 - RNA, 19 nt, Homo sapiens
  misc_RNA (1)...(19): siRNA sense strand
ccaacuuauuccagaggca

SEQ ID NO: 2436068 - RNA, 19 nt, Homo sapiens
  misc_RNA (1)...(19): siRNA sense strand
gcacaaaacaagaccaagu

SEQ ID NO: 2436069 - RNA, 19 nt, Homo sapiens
  misc_RNA (1)...(19): siRNA sense strand
agaaaagguaacuggaaga

SEQ ID NO: 2436070 - RNA, 19 nt, Homo sapiens
  misc_RNA (1)...(19): siRNA sense strand
gcgaggaugugcugagcgu

SEQ ID NO: 2436071 - RNA, 19 nt, Homo sapiens
  misc_RNA (1)...(19): siRNA sense strand
ggagaaaucgaauuggagu

SEQ ID NO: 2436072 - RNA, 19 nt, Homo sapiens
  misc_RNA (1)...(19): siRNA sense strand
ucuuacagcaauugaacuu

SEQ ID NO: 2436073 - RNA, 19 nt, Homo sapiens
  misc_RNA (1)...(19): siRNA sense strand
gggacgauugccuggauga

SEQ ID NO: 2436074 - RNA, 19 nt, Homo sapiens
  misc_RNA (1)...(19): siRNA sense strand
agggaugagcacucgacaa

SEQ ID NO: 2436075 - RNA, 19 nt, Homo sapiens
  misc_RNA (1)...(19): siRNA sense strand
uuuccagagaugaaugaua

SEQ ID NO: 2436076 - RNA, 19 nt, Homo sapiens
  misc_RNA (1)...(19): siRNA sense strand
cuggaauguuaacuggauu

SEQ ID NO: 2436077 - RNA, 19 nt, Homo sapiens
  misc_RNA (1)...(19): siRNA sense strand
gggaagacgcccauugaga

SEQ ID NO: 2436078 - RNA, 19 nt, Homo sapiens
  misc_RNA (1)...(19): siRNA sense strand
guugagagccugcaggaga

SEQ ID NO: 2436079 - RNA, 19 nt, Homo sapiens
  misc_RNA (1)...(19): siRNA sense strand
uugagagccugcaggagaa

SEQ ID NO: 2436080 - RNA, 19 nt, Homo sapiens
  misc_RNA (1)...(19): siRNA sense strand
agucgagcggcaagcauua

SEQ ID NO: 2436081 - RNA, 19 nt, Homo sapiens
  misc_RNA (1)...(19): siRNA sense strand
gaagacgcccauugagaca

SEQ ID NO: 2436082 - RNA, 19 nt, Homo sapiens
  misc_RNA (1)...(19): siRNA sense strand
agcuaaagccguuggauau

SEQ ID NO: 2436083 - RNA, 19 nt, Homo sapiens
  misc_RNA (1)...(19): siRNA sense strand
ccauggaggaacuggagaa

SEQ ID NO: 2436084 - RNA, 19 nt, Homo sapiens
  misc_RNA (1)...(19): siRNA sense strand
guguguuaguagauggauu

SEQ ID NO: 2436085 - RNA, 19 nt, Homo sapiens
  misc_RNA (1)...(19): siRNA sense strand
gaaacaaggugaugaggag

SEQ ID NO: 2436086 - RNA, 19 nt, Homo sapiens
  misc_RNA (1)...(19): siRNA sense strand
caagauaauucccagccua

SEQ ID NO: 2436087 - RNA, 19 nt, Homo sapiens
  misc_RNA (1)...(19): siRNA sense strand
ggaaacaaggugaugagga

SEQ ID NO: 2436088 - RNA, 19 nt, Homo sapiens
  misc_RNA (1)...(19): siRNA sense strand
ccucagugacagcagcaua

SEQ ID NO: 2436089 - RNA, 19 nt, Homo sapiens
  misc_RNA (1)...(19): siRNA sense strand
gagaaagccuugagcaguc

SEQ ID NO: 2436090 - RNA, 19 nt, Homo sapiens
  misc_RNA (1)...(19): siRNA sense strand
caguugaugcuuuggugaa

SEQ ID NO: 2436091 - RNA, 19 nt, Homo sapiens
  misc_RNA (1)...(19): siRNA sense strand
aaggugaugaggaggagaa

SEQ ID NO: 2436092 - RNA, 19 nt, Homo sapiens
  misc_RNA (1)...(19): siRNA sense strand
guauaugagcucaccaaaa

SEQ ID NO: 2436093 - RNA, 19 nt, Homo sapiens
  misc_RNA (1)...(19): siRNA sense strand
guagauucugcuuggguuu

SEQ ID NO: 2436094 - RNA, 19 nt, Homo sapiens
  misc_RNA (1)...(19): siRNA sense strand
caguauaugagcucaccaa

SEQ ID NO: 2436095 - RNA, 19 nt, Homo sapiens
  misc_RNA (1)...(19): siRNA sense strand
gcuuuggugaagaaacuaa

SEQ ID NO: 2436096 - RNA, 19 nt, Homo sapiens
  misc_RNA (1)...(19): siRNA sense strand
guggagagguguaugcgga

SEQ ID NO: 2436097 - RNA, 19 nt, Homo sapiens
  misc_RNA (1)...(19): siRNA sense strand
guuaaucguaauucgacaa

SEQ ID NO: 2436098 - RNA, 19 nt, Homo sapiens
  misc_RNA (1)...(19): siRNA sense strand
gcaauaauaugauuccuca

SEQ ID NO: 2436099 - RNA, 19 nt, Homo sapiens
  misc_RNA (1)...(19): siRNA sense strand
augcugaacccgaugaaga

SEQ ID NO: 2436100 - RNA, 19 nt, Homo sapiens
  misc_RNA (1)...(19): siRNA sense strand
ggcuaugggaggccagcaa

SEQ ID NO: 2436101 - RNA, 19 nt, Homo sapiens
  misc_RNA (1)...(19): siRNA sense strand
aaguugagccugagaucca

SEQ ID NO: 2436102 - RNA, 19 nt, Homo sapiens
  misc_RNA (1)...(19): siRNA sense strand
guaaagaagcugaaggaga

SEQ ID NO: 2436103 - RNA, 19 nt, Homo sapiens
  misc_RNA (1)...(19): siRNA sense strand
cggucuuuguacagaguua

SEQ ID NO: 2436104 - RNA, 19 nt, Homo sapiens
  misc_RNA (1)...(19): siRNA sense strand
auguaaaggugaaggugau

SEQ ID NO: 2436105 - RNA, 19 nt, Homo sapiens
  misc_RNA (1)...(19): siRNA sense strand
aggaucaguagguggaaua

SEQ ID NO: 2436106 - RNA, 19 nt, Homo sapiens
  misc_RNA (1)...(19): siRNA sense strand
gagugaaacauuugcaaaa

SEQ ID NO: 2436107 - RNA, 19 nt, Homo sapiens
  misc_RNA (1)...(19): siRNA sense strand
caggaugaguuuugugaaa

SEQ ID NO: 2436108 - RNA, 19 nt, Homo sapiens
  misc_RNA (1)...(19): siRNA sense strand
ugauagugucugugugaau

SEQ ID NO: 2436109 - RNA, 19 nt, Homo sapiens
  misc_RNA (1)...(19): siRNA sense strand
guuacuacuuagacagaga

SEQ ID NO: 2436110 - RNA, 19 nt, Homo sapiens
  misc_RNA (1)...(19): siRNA sense strand
gcagauagcaucagggccu

SEQ ID NO: 2436111 - RNA, 19 nt, Homo sapiens
  misc_RNA (1)...(19): siRNA sense strand
ggagagacauuuaagguuc

SEQ ID NO: 2436112 - RNA, 19 nt, Homo sapiens
  misc_RNA (1)...(19): siRNA sense strand
ccggauuacccaagacaga

SEQ ID NO: 2436113 - RNA, 19 nt, Homo sapiens
  misc_RNA (1)...(19): siRNA sense strand
ugguaaagaagcugaagga

SEQ ID NO: 2436114 - RNA, 19 nt, Homo sapiens
  misc_RNA (1)...(19): siRNA sense strand
aggaugaauaugugcauga

SEQ ID NO: 2436115 - RNA, 19 nt, Homo sapiens
  misc_RNA (1)...(19): siRNA sense strand
ugauggugaaggaugaaua

SEQ ID NO: 2436116 - RNA, 19 nt, Homo sapiens
  misc_RNA (1)...(19): siRNA sense strand
guucauaagaucuacccaa

SEQ ID NO: 2436117 - RNA, 19 nt, Homo sapiens
  misc_RNA (1)...(19): siRNA sense strand
agguggagagagugaaaca

SEQ ID NO: 2436118 - RNA, 19 nt, Homo sapiens
  misc_RNA (1)...(19): siRNA sense strand
augaauaugugcaugacuu

SEQ ID NO: 2436119 - RNA, 19 nt, Homo sapiens
  misc_RNA (1)...(19): siRNA sense strand
ugcaugacuuugagggaca

SEQ ID NO: 2436120 - RNA, 19 nt, Homo sapiens
  misc_RNA (1)...(19): siRNA sense strand
cagaguuacuacuuagaca

SEQ ID NO: 2436121 - RNA, 19 nt, Homo sapiens
  misc_RNA (1)...(19): siRNA sense strand
aauugaucucucaggauua

SEQ ID NO: 2436122 - RNA, 19 nt, Homo sapiens
  misc_RNA (1)...(19): siRNA sense strand
aguuguaucaccuggaauu

SEQ ID NO: 2436123 - RNA, 19 nt, Homo sapiens
  misc_RNA (1)...(19): siRNA sense strand
cauaguuugaugugccaua

SEQ ID NO: 2436124 - RNA, 19 nt, Homo sapiens
  misc_RNA (1)...(19): siRNA sense strand
uguucagguaggagagaca

SEQ ID NO: 2436125 - RNA, 19 nt, Homo sapiens
  misc_RNA (1)...(19): siRNA sense strand
gcuccugaguauugguguu

SEQ ID NO: 2436126 - RNA, 19 nt, Homo sapiens
  misc_RNA (1)...(19): siRNA sense strand
gacaagguggagagaguga

SEQ ID NO: 2436127 - RNA, 19 nt, Homo sapiens
  misc_RNA (1)...(19): siRNA sense strand
agagugaaacauuugcaaa

SEQ ID NO: 2436128 - RNA, 19 nt, Homo sapiens
  misc_RNA (1)...(19): siRNA sense strand
cgacagagacauacagcac

SEQ ID NO: 2436129 - RNA, 19 nt, Homo sapiens
  misc_RNA (1)...(19): siRNA sense strand
agacagagaagcugggcgu

SEQ ID NO: 2436130 - RNA, 19 nt, Homo sapiens
  misc_RNA (1)...(19): siRNA sense strand
cuacuuagacagagaagcu

SEQ ID NO: 2436131 - RNA, 19 nt, Homo sapiens
  misc_RNA (1)...(19): siRNA sense strand
ggacuguugcagauagcau

SEQ ID NO: 2436132 - RNA, 19 nt, Homo sapiens
  misc_RNA (1)...(19): siRNA sense strand
aauguaaaggugaagguga

SEQ ID NO: 2436133 - RNA, 19 nt, Homo sapiens
  misc_RNA (1)...(19): siRNA sense strand
ccaccaaguaaucgugcau

SEQ ID NO: 2436134 - RNA, 19 nt, Homo sapiens
  misc_RNA (1)...(19): siRNA sense strand
aaguaaucgugcaucgaca

SEQ ID NO: 2436135 - RNA, 19 nt, Homo sapiens
  misc_RNA (1)...(19): siRNA sense strand
uuguuacuguugauggaua

SEQ ID NO: 2436136 - RNA, 19 nt, Homo sapiens
  misc_RNA (1)...(19): siRNA sense strand
gcuuaugcauacucaggau

SEQ ID NO: 2436137 - RNA, 19 nt, Homo sapiens
  misc_RNA (1)...(19): siRNA sense strand
ucauagaggagaugggcaa

SEQ ID NO: 2436138 - RNA, 19 nt, Homo sapiens
  misc_RNA (1)...(19): siRNA sense strand
uggcagagacagagcggaa

SEQ ID NO: 2436139 - RNA, 19 nt, Homo sapiens
  misc_RNA (1)...(19): siRNA sense strand
ugucagucauagaggagau

SEQ ID NO: 2436140 - RNA, 19 nt, Homo sapiens
  misc_RNA (1)...(19): siRNA sense strand
ggcaaagagauccggccua

SEQ ID NO: 2436141 - RNA, 19 nt, Homo sapiens
  misc_RNA (1)...(19): siRNA sense strand
gcuacgugcaggcgaugaa

SEQ ID NO: 2436142 - RNA, 19 nt, Homo sapiens
  misc_RNA (1)...(19): siRNA sense strand
ggcugaagauaaagaaaau

SEQ ID NO: 2436143 - RNA, 19 nt, Homo sapiens
  misc_RNA (1)...(19): siRNA sense strand
acaccaaagaagauguauu

SEQ ID NO: 2436144 - RNA, 19 nt, Homo sapiens
  misc_RNA (1)...(19): siRNA sense strand
cugccaucaagaagaauaa

SEQ ID NO: 2436145 - RNA, 19 nt, Homo sapiens
  misc_RNA (1)...(19): siRNA sense strand
gcgcaguguaggagaugga

SEQ ID NO: 2436146 - RNA, 19 nt, Homo sapiens
  misc_RNA (1)...(19): siRNA sense strand
gaugaaggauggaguccca

SEQ ID NO: 2436147 - RNA, 19 nt, Homo sapiens
  misc_RNA (1)...(19): siRNA sense strand
aggcugaagauaaagaaaa

SEQ ID NO: 2436148 - RNA, 19 nt, Homo sapiens
  misc_RNA (1)...(19): siRNA sense strand
gaggcugaagauaaagaaa

SEQ ID NO: 2436149 - RNA, 19 nt, Homo sapiens
  misc_RNA (1)...(19): siRNA sense strand
uugaugugguugaaggaga

SEQ ID NO: 2436150 - RNA, 19 nt, Homo sapiens
  misc_RNA (1)...(19): siRNA sense strand
cgccuuaccacgugggaca

SEQ ID NO: 2436151 - RNA, 19 nt, Homo sapiens
  misc_RNA (1)...(19): siRNA sense strand
gugagauuggagagaugaa

SEQ ID NO: 2436152 - RNA, 19 nt, Homo sapiens
  misc_RNA (1)...(19): siRNA sense strand
gucaaaugguucaacguca

SEQ ID NO: 2436153 - RNA, 19 nt, Homo sapiens
  misc_RNA (1)...(19): siRNA sense strand
gcaaagaggccaaggcagg

SEQ ID NO: 2436154 - RNA, 19 nt, Homo sapiens
  misc_RNA (1)...(19): siRNA sense strand
aggagagaagggugcagaa

SEQ ID NO: 2436155 - RNA, 19 nt, Homo sapiens
  misc_RNA (1)...(19): siRNA sense strand
uggugagauuggagagaug

SEQ ID NO: 2436156 - RNA, 19 nt, Homo sapiens
  misc_RNA (1)...(19): siRNA sense strand
gagcacaacuucagggacc

SEQ ID NO: 2436157 - RNA, 19 nt, Homo sapiens
  misc_RNA (1)...(19): siRNA sense strand
gagagaugaaggauggagu

SEQ ID NO: 2436158 - RNA, 19 nt, Homo sapiens
  misc_RNA (1)...(19): siRNA sense strand
cuggagaggacaugagaca

SEQ ID NO: 2436159 - RNA, 19 nt, Homo sapiens
  misc_RNA (1)...(19): siRNA sense strand
ugacaaagagcauggcuga

SEQ ID NO: 2436160 - RNA, 19 nt, Homo sapiens
  misc_RNA (1)...(19): siRNA sense strand
agagagaccuggaaggauc

SEQ ID NO: 2436161 - RNA, 19 nt, Homo sapiens
  misc_RNA (1)...(19): siRNA sense strand
uggcagaaccauauggaag

SEQ ID NO: 2436162 - RNA, 19 nt, Homo sapiens
  misc_RNA (1)...(19): siRNA sense strand
gugcagagcccaaggaagg

SEQ ID NO: 2436163 - RNA, 19 nt, Homo sapiens
  misc_RNA (1)...(19): siRNA sense strand
aggagaagguggagcguca

SEQ ID NO: 2436164 - RNA, 19 nt, Homo sapiens
  misc_RNA (1)...(19): siRNA sense strand
aggaagaagaggucgaaga

SEQ ID NO: 2436165 - RNA, 19 nt, Homo sapiens
  misc_RNA (1)...(19): siRNA sense strand
aggaagaagaggucgaaga

SEQ ID NO: 2436166 - RNA, 19 nt, Homo sapiens
  misc_RNA (1)...(19): siRNA sense strand
ucguagaggcugaagaaaa

SEQ ID NO: 2436167 - RNA, 19 nt, Homo sapiens
  misc_RNA (1)...(19): siRNA sense strand
augcaaaggaggcgagcga

SEQ ID NO: 2436168 - RNA, 19 nt, Homo sapiens
  misc_RNA (1)...(19): siRNA sense strand
aggaggagcuggaagagga

SEQ ID NO: 2436169 - RNA, 19 nt, Homo sapiens
  misc_RNA (1)...(19): siRNA sense strand
aggaggagcuggaagagga

SEQ ID NO: 2436170 - RNA, 19 nt, Homo sapiens
  misc_RNA (1)...(19): siRNA sense strand
acaugaggcagcaggagaa

SEQ ID NO: 2436171 - RNA, 19 nt, Homo sapiens
  misc_RNA (1)...(19): siRNA sense strand
gcugaagaaaagagagaga

SEQ ID NO: 2436172 - RNA, 19 nt, Homo sapiens
  misc_RNA (1)...(19): siRNA sense strand
aauauguggaggagggaga

SEQ ID NO: 2436173 - RNA, 19 nt, Homo sapiens
  misc_RNA (1)...(19): siRNA sense strand
uggaagaggaagaggaggu

SEQ ID NO: 2436174 - RNA, 19 nt, Homo sapiens
  misc_RNA (1)...(19): siRNA sense strand
aagaaaagagagagaacuu

SEQ ID NO: 2436175 - RNA, 19 nt, Homo sapiens
  misc_RNA (1)...(19): siRNA sense strand
augaugaugaggaggagua

SEQ ID NO: 2436176 - RNA, 19 nt, Homo sapiens
  misc_RNA (1)...(19): siRNA sense strand
aggcgagcgaggaggaaga

SEQ ID NO: 2436177 - RNA, 19 nt, Homo sapiens
  misc_RNA (1)...(19): siRNA sense strand
uggaagaggaggagcugga

SEQ ID NO: 2436178 - RNA, 19 nt, Homo sapiens
  misc_RNA (1)...(19): siRNA sense strand
caaucuucguagaggcuga

SEQ ID NO: 2436179 - RNA, 19 nt, Homo sapiens
  misc_RNA (1)...(19): siRNA sense strand
aggaggaagaggucgaaga

SEQ ID NO: 2436180 - RNA, 19 nt, Homo sapiens
  misc_RNA (1)...(19): siRNA sense strand
gugcaaguguuucgggugu

SEQ ID NO: 2436181 - RNA, 19 nt, Homo sapiens
  misc_RNA (1)...(19): siRNA sense strand
aggaggaagaagaggucga

SEQ ID NO: 2436182 - RNA, 19 nt, Homo sapiens
  misc_RNA (1)...(19): siRNA sense strand
aggaggaagaagaggucga

SEQ ID NO: 2436183 - RNA, 19 nt, Homo sapiens
  misc_RNA (1)...(19): siRNA sense strand
gucccaacccagaggaaaa

SEQ ID NO: 2436184 - RNA, 19 nt, Homo sapiens
  misc_RNA (1)...(19): siRNA sense strand
aggucgaagaggcugaaua

SEQ ID NO: 2436185 - RNA, 19 nt, Homo sapiens
  misc_RNA (1)...(19): siRNA sense strand
cuguaugaguggagagagc

SEQ ID NO: 2436186 - RNA, 19 nt, Homo sapiens
  misc_RNA (1)...(19): siRNA sense strand
cuggaaaugccuuuaucaa

SEQ ID NO: 2436187 - RNA, 19 nt, Homo sapiens
  misc_RNA (1)...(19): siRNA sense strand
cagccagauccuccggaaa

SEQ ID NO: 2436188 - RNA, 19 nt, Homo sapiens
  misc_RNA (1)...(19): siRNA sense strand
aggucgaagaugaggagga

SEQ ID NO: 2436189 - RNA, 19 nt, Homo sapiens
  misc_RNA (1)...(19): siRNA sense strand
aggucgaagaugaggagga

SEQ ID NO: 2436190 - RNA, 19 nt, Homo sapiens
  misc_RNA (1)...(19): siRNA sense strand
gauaauucccaaagugcca

SEQ ID NO: 2436191 - RNA, 19 nt, Homo sapiens
  misc_RNA (1)...(19): siRNA sense strand
ugguggaagaagaggagga

SEQ ID NO: 2436192 - RNA, 19 nt, Homo sapiens
  misc_RNA (1)...(19): siRNA sense strand
uggaggagggagaggagga

SEQ ID NO: 2436193 - RNA, 19 nt, Homo sapiens
  misc_RNA (1)...(19): siRNA sense strand
aggaaacucuguauggcuu

SEQ ID NO: 2436194 - RNA, 19 nt, Homo sapiens
  misc_RNA (1)...(19): siRNA sense strand
aggcugaauauguggagga

SEQ ID NO: 2436195 - RNA, 19 nt, Homo sapiens
  misc_RNA (1)...(19): siRNA sense strand
aggcugaagaaaagagaga

SEQ ID NO: 2436196 - RNA, 19 nt, Homo sapiens
  misc_RNA (1)...(19): siRNA sense strand
aggagcuggaagaggaaga

SEQ ID NO: 2436197 - RNA, 19 nt, Homo sapiens
  misc_RNA (1)...(19): siRNA sense strand
agggagaggaggagcugga

SEQ ID NO: 2436198 - RNA, 19 nt, Homo sapiens
  misc_RNA (1)...(19): siRNA sense strand
gaacgagcagagaggggaa

SEQ ID NO: 2436199 - RNA, 19 nt, Homo sapiens
  misc_RNA (1)...(19): siRNA sense strand
ggauauagaaugugugcca

SEQ ID NO: 2436200 - RNA, 19 nt, Homo sapiens
  misc_RNA (1)...(19): siRNA sense strand
ccaccuugcuguugcgaca

SEQ ID NO: 2436201 - RNA, 19 nt, Homo sapiens
  misc_RNA (1)...(19): siRNA sense strand
ccaagaacagccaggccaa

SEQ ID NO: 2436202 - RNA, 19 nt, Homo sapiens
  misc_RNA (1)...(19): siRNA sense strand
gacaagguguggugggcca

SEQ ID NO: 2436203 - RNA, 19 nt, Homo sapiens
  misc_RNA (1)...(19): siRNA sense strand
caaaauacacaacgcgcua

SEQ ID NO: 2436204 - RNA, 19 nt, Homo sapiens
  misc_RNA (1)...(19): siRNA sense strand
aaauacacaacgcgcuaaa

SEQ ID NO: 2436205 - RNA, 19 nt, Homo sapiens
  misc_RNA (1)...(19): siRNA sense strand
caaaggaaccugaagcugu

SEQ ID NO: 2436206 - RNA, 19 nt, Homo sapiens
  misc_RNA (1)...(19): siRNA sense strand
cagacugguuggauggcaa

SEQ ID NO: 2436207 - RNA, 19 nt, Homo sapiens
  misc_RNA (1)...(19): siRNA sense strand
ucuaagagugggaggacau

SEQ ID NO: 2436208 - RNA, 19 nt, Homo sapiens
  misc_RNA (1)...(19): siRNA sense strand
gggaaguccaucuacggaa

SEQ ID NO: 2436209 - RNA, 19 nt, Homo sapiens
  misc_RNA (1)...(19): siRNA sense strand
gcacuggugagaagggcuu

SEQ ID NO: 2436210 - RNA, 19 nt, Homo sapiens
  misc_RNA (1)...(19): siRNA sense strand
ucaaagagggcauggacgu

SEQ ID NO: 2436211 - RNA, 19 nt, Homo sapiens
  misc_RNA (1)...(19): siRNA sense strand
caguuaugaagaagggaaa

SEQ ID NO: 2436212 - RNA, 19 nt, Homo sapiens
  misc_RNA (1)...(19): siRNA sense strand
ggauaauuuuggaggcaga

SEQ ID NO: 2436213 - RNA, 19 nt, Homo sapiens
  misc_RNA (1)...(19): siRNA sense strand
cugcauauggaaaggguga

SEQ ID NO: 2436214 - RNA, 19 nt, Homo sapiens
  misc_RNA (1)...(19): siRNA sense strand
gggaaauccucauugacga

SEQ ID NO: 2436215 - RNA, 19 nt, Homo sapiens
  misc_RNA (1)...(19): siRNA sense strand
cuauuauguugguugggaa

SEQ ID NO: 2436216 - RNA, 19 nt, Homo sapiens
  misc_RNA (1)...(19): siRNA sense strand
auggcaaauuguuggauau

SEQ ID NO: 2436217 - RNA, 19 nt, Homo sapiens
  misc_RNA (1)...(19): siRNA sense strand
auaagaaagaccugcauau

SEQ ID NO: 2436218 - RNA, 19 nt, Homo sapiens
  misc_RNA (1)...(19): siRNA sense strand
agaaagaccugcauaugga

SEQ ID NO: 2436219 - RNA, 19 nt, Homo sapiens
  misc_RNA (1)...(19): siRNA sense strand
uuaaaguuauccauggcaa

SEQ ID NO: 2436220 - RNA, 19 nt, Homo sapiens
  misc_RNA (1)...(19): siRNA sense strand
ucuucaacuuguagacaca

SEQ ID NO: 2436221 - RNA, 19 nt, Homo sapiens
  misc_RNA (1)...(19): siRNA sense strand
aagggaaagcuuuggcaga

SEQ ID NO: 2436222 - RNA, 19 nt, Homo sapiens
  misc_RNA (1)...(19): siRNA sense strand
ggaauaagaaagaccugca

SEQ ID NO: 2436223 - RNA, 19 nt, Homo sapiens
  misc_RNA (1)...(19): siRNA sense strand
ucaguuaugaagaagggaa

SEQ ID NO: 2436224 - RNA, 19 nt, Homo sapiens
  misc_RNA (1)...(19): siRNA sense strand
gggcagcuucacaaggcaa

SEQ ID NO: 2436225 - RNA, 19 nt, Homo sapiens
  misc_RNA (1)...(19): siRNA sense strand
augaagaagggaaagcuuu

SEQ ID NO: 2436226 - RNA, 19 nt, Homo sapiens
  misc_RNA (1)...(19): siRNA sense strand
acaugguaacuguuggaaa

SEQ ID NO: 2436227 - RNA, 19 nt, Homo sapiens
  misc_RNA (1)...(19): siRNA sense strand
ccaagucaccagagcccaa

SEQ ID NO: 2436228 - RNA, 19 nt, Homo sapiens
  misc_RNA (1)...(19): siRNA sense strand
aauuaaagguggagcugga

SEQ ID NO: 2436229 - RNA, 19 nt, Homo sapiens
  misc_RNA (1)...(19): siRNA sense strand
cuucggagguccaaggaga

SEQ ID NO: 2436230 - RNA, 19 nt, Homo sapiens
  misc_RNA (1)...(19): siRNA sense strand
gguccaaggagaaaacaaa

SEQ ID NO: 2436231 - RNA, 19 nt, Homo sapiens
  misc_RNA (1)...(19): siRNA sense strand
uggaggaggaggaggagga

SEQ ID NO: 2436232 - RNA, 19 nt, Homo sapiens
  misc_RNA (1)...(19): siRNA sense strand
ucaacuugcucucggguga

SEQ ID NO: 2436233 - RNA, 19 nt, Homo sapiens
  misc_RNA (1)...(19): siRNA sense strand
ggucuauggcucuggaacu

SEQ ID NO: 2436234 - RNA, 19 nt, Homo sapiens
  misc_RNA (1)...(19): siRNA sense strand
agacgggcacacaggcaaa

SEQ ID NO: 2436235 - RNA, 19 nt, Homo sapiens
  misc_RNA (1)...(19): siRNA sense strand
caacuuccgugcugggaga

SEQ ID NO: 2436236 - RNA, 19 nt, Homo sapiens
  misc_RNA (1)...(19): siRNA sense strand
gaacuaagacggaccgaug

SEQ ID NO: 2436237 - RNA, 19 nt, Homo sapiens
  misc_RNA (1)...(19): siRNA sense strand
agguggagcuggaggagac

SEQ ID NO: 2436238 - RNA, 19 nt, Homo sapiens
  misc_RNA (1)...(19): siRNA sense strand
ucucugagcucaaacguca

SEQ ID NO: 2436239 - RNA, 19 nt, Homo sapiens
  misc_RNA (1)...(19): siRNA sense strand
ggaaggagcagaaaggccu

SEQ ID NO: 2436240 - RNA, 19 nt, Homo sapiens
  misc_RNA (1)...(19): siRNA sense strand
uggcauaucucaauggcua

SEQ ID NO: 2436241 - RNA, 19 nt, Homo sapiens
  misc_RNA (1)...(19): siRNA sense strand
agggcagaauggaggcaaa

SEQ ID NO: 2436242 - RNA, 19 nt, Homo sapiens
  misc_RNA (1)...(19): siRNA sense strand
aagagaaaccagugggcau

SEQ ID NO: 2436243 - RNA, 19 nt, Homo sapiens
  misc_RNA (1)...(19): siRNA sense strand
agaaauaccaagugagucu

SEQ ID NO: 2436244 - RNA, 19 nt, Homo sapiens
  misc_RNA (1)...(19): siRNA sense strand
ggaguuaaguugaaggaag

SEQ ID NO: 2436245 - RNA, 19 nt, Homo sapiens
  misc_RNA (1)...(19): siRNA sense strand
ucacugaagaagaagaaau

SEQ ID NO: 2436246 - RNA, 19 nt, Homo sapiens
  misc_RNA (1)...(19): siRNA sense strand
ccagaggaauuaaaggaca

SEQ ID NO: 2436247 - RNA, 19 nt, Homo sapiens
  misc_RNA (1)...(19): siRNA sense strand
ccuuugaccuaaugguaau

SEQ ID NO: 2436248 - RNA, 19 nt, Homo sapiens
  misc_RNA (1)...(19): siRNA sense strand
ccuauauagcucagaacuu

SEQ ID NO: 2436249 - RNA, 19 nt, Homo sapiens
  misc_RNA (1)...(19): siRNA sense strand
gcucagaacuucaagcaac

SEQ ID NO: 2436250 - RNA, 19 nt, Homo sapiens
  misc_RNA (1)...(19): siRNA sense strand
agaccaacaacuacagaau

SEQ ID NO: 2436251 - RNA, 19 nt, Homo sapiens
  misc_RNA (1)...(19): siRNA sense strand
gucuggacguggagaguga

SEQ ID NO: 2436252 - RNA, 19 nt, Homo sapiens
  misc_RNA (1)...(19): siRNA sense strand
agggcauggauguggcaua

SEQ ID NO: 2436253 - RNA, 19 nt, Homo sapiens
  misc_RNA (1)...(19): siRNA sense strand
ccucacugaagaagaagaa

SEQ ID NO: 2436254 - RNA, 19 nt, Homo sapiens
  misc_RNA (1)...(19): siRNA sense strand
uuucacggguccagaggaa

SEQ ID NO: 2436255 - RNA, 19 nt, Homo sapiens
  misc_RNA (1)...(19): siRNA sense strand
ucuucaaugaggagaucua

SEQ ID NO: 2436256 - RNA, 19 nt, Homo sapiens
  misc_RNA (1)...(19): siRNA sense strand
ccuugaaccuggucagagu

SEQ ID NO: 2436257 - RNA, 19 nt, Homo sapiens
  misc_RNA (1)...(19): siRNA sense strand
ucacggguccagaggaauu

SEQ ID NO: 2436258 - RNA, 19 nt, Homo sapiens
  misc_RNA (1)...(19): siRNA sense strand
ccaaacagcagcagcagca

SEQ ID NO: 2436259 - RNA, 19 nt, Homo sapiens
  misc_RNA (1)...(19): siRNA sense strand
gcguuucucugaagcgcaa

SEQ ID NO: 2436260 - RNA, 19 nt, Homo sapiens
  misc_RNA (1)...(19): siRNA sense strand
gggcagaauggaggcaaau

SEQ ID NO: 2436261 - RNA, 19 nt, Homo sapiens
  misc_RNA (1)...(19): siRNA sense strand
gggaggagacucuagcaga

SEQ ID NO: 2436262 - RNA, 19 nt, Homo sapiens
  misc_RNA (1)...(19): siRNA sense strand
uggaaugcuacaauguuaa

SEQ ID NO: 2436263 - RNA, 19 nt, Homo sapiens
  misc_RNA (1)...(19): siRNA sense strand
gugccaaggagauggugau

SEQ ID NO: 2436264 - RNA, 19 nt, Homo sapiens
  misc_RNA (1)...(19): siRNA sense strand
ucagaauaguuggcagcaa

SEQ ID NO: 2436265 - RNA, 19 nt, Homo sapiens
  misc_RNA (1)...(19): siRNA sense strand
gcccaagaagauucacaaa

SEQ ID NO: 2436266 - RNA, 19 nt, Homo sapiens
  misc_RNA (1)...(19): siRNA sense strand
aguugaaggaaguggaaug

SEQ ID NO: 2436267 - RNA, 19 nt, Homo sapiens
  misc_RNA (1)...(19): siRNA sense strand
cagaggaauuaaaggacac

SEQ ID NO: 2436268 - RNA, 19 nt, Homo sapiens
  misc_RNA (1)...(19): siRNA sense strand
ugauauuaggggagaccaa

SEQ ID NO: 2436269 - RNA, 19 nt, Homo sapiens
  misc_RNA (1)...(19): siRNA sense strand
cggcaugucccuacuucaa

SEQ ID NO: 2436270 - RNA, 19 nt, Homo sapiens
  misc_RNA (1)...(19): siRNA sense strand
acaugcuacagcuggaaua

SEQ ID NO: 2436271 - RNA, 19 nt, Homo sapiens
  misc_RNA (1)...(19): siRNA sense strand
aggcaaacggugaaauuaa

SEQ ID NO: 2436272 - RNA, 19 nt, Homo sapiens
  misc_RNA (1)...(19): siRNA sense strand
ggaaacugcuggaggagga

SEQ ID NO: 2436273 - RNA, 19 nt, Homo sapiens
  misc_RNA (1)...(19): siRNA sense strand
uggaggaggaggagaagaa

SEQ ID NO: 2436274 - RNA, 19 nt, Homo sapiens
  misc_RNA (1)...(19): siRNA sense strand
agucagaccuggagaggca

SEQ ID NO: 2436275 - RNA, 19 nt, Homo sapiens
  misc_RNA (1)...(19): siRNA sense strand
ucgaagugaacuaaagaaa

SEQ ID NO: 2436276 - RNA, 19 nt, Homo sapiens
  misc_RNA (1)...(19): siRNA sense strand
agagaaugaagguggagaa

SEQ ID NO: 2436277 - RNA, 19 nt, Homo sapiens
  misc_RNA (1)...(19): siRNA sense strand
cugucaaguuacacaauaa

SEQ ID NO: 2436278 - RNA, 19 nt, Homo sapiens
  misc_RNA (1)...(19): siRNA sense strand
aacaaaugguacaggaauu

SEQ ID NO: 2436279 - RNA, 19 nt, Homo sapiens
  misc_RNA (1)...(19): siRNA sense strand
uggaagaucagguggaaca

SEQ ID NO: 2436280 - RNA, 19 nt, Homo sapiens
  misc_RNA (1)...(19): siRNA sense strand
gcaacaaaugguacaggaa

SEQ ID NO: 2436281 - RNA, 19 nt, Homo sapiens
  misc_RNA (1)...(19): siRNA sense strand
agaucaaagacaugaaaga

SEQ ID NO: 2436282 - RNA, 19 nt, Homo sapiens
  misc_RNA (1)...(19): siRNA sense strand
gagaaugaagguggagaaa

SEQ ID NO: 2436283 - RNA, 19 nt, Homo sapiens
  misc_RNA (1)...(19): siRNA sense strand
cggcauaauaauaacauga

SEQ ID NO: 2436284 - RNA, 19 nt, Homo sapiens
  misc_RNA (1)...(19): siRNA sense strand
cagaagaacuacaggcuac

SEQ ID NO: 2436285 - RNA, 19 nt, Homo sapiens
  misc_RNA (1)...(19): siRNA sense strand
ggugagaagcagaaagcca

SEQ ID NO: 2436286 - RNA, 19 nt, Homo sapiens
  misc_RNA (1)...(19): siRNA sense strand
ccauauuugaauuggaaga

SEQ ID NO: 2436287 - RNA, 19 nt, Homo sapiens
  misc_RNA (1)...(19): siRNA sense strand
aggagaagaacaagaacuu

SEQ ID NO: 2436288 - RNA, 19 nt, Homo sapiens
  misc_RNA (1)...(19): siRNA sense strand
gugacauugaugaguauaa

SEQ ID NO: 2436289 - RNA, 19 nt, Homo sapiens
  misc_RNA (1)...(19): siRNA sense strand
auaauaacaugauggccaa

SEQ ID NO: 2436290 - RNA, 19 nt, Homo sapiens
  misc_RNA (1)...(19): siRNA sense strand
cauacauggaaaugcauua

SEQ ID NO: 2436291 - RNA, 19 nt, Homo sapiens
  misc_RNA (1)...(19): siRNA sense strand
uggaaaugcauuacggaca

SEQ ID NO: 2436292 - RNA, 19 nt, Homo sapiens
  misc_RNA (1)...(19): siRNA sense strand
gcaagagaaugaaggugga

SEQ ID NO: 2436293 - RNA, 19 nt, Homo sapiens
  misc_RNA (1)...(19): siRNA sense strand
ugcggaagguugaggaaga

SEQ ID NO: 2436294 - RNA, 19 nt, Homo sapiens
  misc_RNA (1)...(19): siRNA sense strand
aauaauaacaugauggcca

SEQ ID NO: 2436295 - RNA, 19 nt, Homo sapiens
  misc_RNA (1)...(19): siRNA sense strand
augcagagaucaaagacau

SEQ ID NO: 2436296 - RNA, 19 nt, Homo sapiens
  misc_RNA (1)...(19): siRNA sense strand
agccuaaagcugcaagaaa

SEQ ID NO: 2436297 - RNA, 19 nt, Homo sapiens
  misc_RNA (1)...(19): siRNA sense strand
agaugaaggaggagaccga

SEQ ID NO: 2436298 - RNA, 19 nt, Homo sapiens
  misc_RNA (1)...(19): siRNA sense strand
agaggaaacugcuggagga

SEQ ID NO: 2436299 - RNA, 19 nt, Homo sapiens
  misc_RNA (1)...(19): siRNA sense strand
ccaccacucaggaaggaaa

SEQ ID NO: 2436300 - RNA, 19 nt, Homo sapiens
  misc_RNA (1)...(19): siRNA sense strand
caagaauuacuaaaggcaa

SEQ ID NO: 2436301 - RNA, 19 nt, Homo sapiens
  misc_RNA (1)...(19): siRNA sense strand
ccaagguggaaaaggauua

SEQ ID NO: 2436302 - RNA, 19 nt, Homo sapiens
  misc_RNA (1)...(19): siRNA sense strand
gcccaaaugucgauggaac

SEQ ID NO: 2436303 - RNA, 19 nt, Homo sapiens
  misc_RNA (1)...(19): siRNA sense strand
gcagaagaacuacaggcua

SEQ ID NO: 2436304 - RNA, 19 nt, Homo sapiens
  misc_RNA (1)...(19): siRNA sense strand
ugaaggagaaacugaucua

SEQ ID NO: 2436305 - RNA, 19 nt, Homo sapiens
  misc_RNA (1)...(19): siRNA sense strand
ggaauugacagcugaaaau

SEQ ID NO: 2436306 - RNA, 19 nt, Homo sapiens
  misc_RNA (1)...(19): siRNA sense strand
agcccaagcaagagaauga

SEQ ID NO: 2436307 - RNA, 19 nt, Homo sapiens
  misc_RNA (1)...(19): siRNA sense strand
cagugacauugaugaguau

SEQ ID NO: 2436308 - RNA, 19 nt, Homo sapiens
  misc_RNA (1)...(19): siRNA sense strand
ccaagcagaugaaggagga

SEQ ID NO: 2436309 - RNA, 19 nt, Homo sapiens
  misc_RNA (1)...(19): siRNA sense strand
cccaaaugucgauggaaca

SEQ ID NO: 2436310 - RNA, 19 nt, Homo sapiens
  misc_RNA (1)...(19): siRNA sense strand
ccaccauagcacugcagaa

SEQ ID NO: 2436311 - RNA, 19 nt, Homo sapiens
  misc_RNA (1)...(19): siRNA sense strand
ggaagguugaggaagaaaa

SEQ ID NO: 2436312 - RNA, 19 nt, Homo sapiens
  misc_RNA (1)...(19): siRNA sense strand
cggaagcccaacuggaaau

SEQ ID NO: 2436313 - RNA, 19 nt, Homo sapiens
  misc_RNA (1)...(19): siRNA sense strand
acaagagcgaguaaagaau

SEQ ID NO: 2436314 - RNA, 19 nt, Homo sapiens
  misc_RNA (1)...(19): siRNA sense strand
acuaaaggcaaacggugaa

SEQ ID NO: 2436315 - RNA, 19 nt, Homo sapiens
  misc_RNA (1)...(19): siRNA sense strand
uagaaaguagugugaucaa

SEQ ID NO: 2436316 - RNA, 19 nt, Homo sapiens
  misc_RNA (1)...(19): siRNA sense strand
agaacaagaacuuucagaa

SEQ ID NO: 2436317 - RNA, 19 nt, Homo sapiens
  misc_RNA (1)...(19): siRNA sense strand
cuggaacggcauaauaaua

SEQ ID NO: 2436318 - RNA, 19 nt, Homo sapiens
  misc_RNA (1)...(19): siRNA sense strand
cggugaaauuaaacauguu

SEQ ID NO: 2436319 - RNA, 19 nt, Homo sapiens
  misc_RNA (1)...(19): siRNA sense strand
agagagugaugcagagauc

SEQ ID NO: 2436320 - RNA, 19 nt, Homo sapiens
  misc_RNA (1)...(19): siRNA sense strand
uagcacugcagaagaacua

SEQ ID NO: 2436321 - RNA, 19 nt, Homo sapiens
  misc_RNA (1)...(19): siRNA sense strand
guguagaguuaccuuggaa

SEQ ID NO: 2436322 - RNA, 19 nt, Homo sapiens
  misc_RNA (1)...(19): siRNA sense strand
caucagugagcuagaaagu

SEQ ID NO: 2436323 - RNA, 19 nt, Homo sapiens
  misc_RNA (1)...(19): siRNA sense strand
aggaggagaccgaggaaug

SEQ ID NO: 2436324 - RNA, 19 nt, Homo sapiens
  misc_RNA (1)...(19): siRNA sense strand
acacaaagcuccagcguca

SEQ ID NO: 2436325 - RNA, 19 nt, Homo sapiens
  misc_RNA (1)...(19): siRNA sense strand
cuuugaugauacugggaaa

SEQ ID NO: 2436326 - RNA, 19 nt, Homo sapiens
  misc_RNA (1)...(19): siRNA sense strand
aaguaagaagcuagugaaa

SEQ ID NO: 2436327 - RNA, 19 nt, Homo sapiens
  misc_RNA (1)...(19): siRNA sense strand
cggaauugucagagaagca

SEQ ID NO: 2436328 - RNA, 19 nt, Homo sapiens
  misc_RNA (1)...(19): siRNA sense strand
ggauaauggaauaguaacu

SEQ ID NO: 2436329 - RNA, 19 nt, Homo sapiens
  misc_RNA (1)...(19): siRNA sense strand
acgaaguguuaaugugaau

SEQ ID NO: 2436330 - RNA, 19 nt, Homo sapiens
  misc_RNA (1)...(19): siRNA sense strand
ccauagggacauugugaau

SEQ ID NO: 2436331 - RNA, 19 nt, Homo sapiens
  misc_RNA (1)...(19): siRNA sense strand
uugaaaagccagagaauga

SEQ ID NO: 2436332 - RNA, 19 nt, Homo sapiens
  misc_RNA (1)...(19): siRNA sense strand
ccuucaaacaguuagcaaa

SEQ ID NO: 2436333 - RNA, 19 nt, Homo sapiens
  misc_RNA (1)...(19): siRNA sense strand
ggcugaaauugaaagacua

SEQ ID NO: 2436334 - RNA, 19 nt, Homo sapiens
  misc_RNA (1)...(19): siRNA sense strand
ccacauggaaucagcucaa

SEQ ID NO: 2436335 - RNA, 19 nt, Homo sapiens
  misc_RNA (1)...(19): siRNA sense strand
gggaaagaggaaaaugaaa

SEQ ID NO: 2436336 - RNA, 19 nt, Homo sapiens
  misc_RNA (1)...(19): siRNA sense strand
gaagcaugccauagggaca

SEQ ID NO: 2436337 - RNA, 19 nt, Homo sapiens
  misc_RNA (1)...(19): siRNA sense strand
uaaccauaggcuuggauaa

SEQ ID NO: 2436338 - RNA, 19 nt, Homo sapiens
  misc_RNA (1)...(19): siRNA sense strand
ugaugaguccauaggcaaa

SEQ ID NO: 2436339 - RNA, 19 nt, Homo sapiens
  misc_RNA (1)...(19): siRNA sense strand
gaaugaagguuuaguggcu

SEQ ID NO: 2436340 - RNA, 19 nt, Homo sapiens
  misc_RNA (1)...(19): siRNA sense strand
ucggauaauggaauaguaa

SEQ ID NO: 2436341 - RNA, 19 nt, Homo sapiens
  misc_RNA (1)...(19): siRNA sense strand
agguuugccucgaagcaua

SEQ ID NO: 2436342 - RNA, 19 nt, Homo sapiens
  misc_RNA (1)...(19): siRNA sense strand
gugaugaguccauaggcaa

SEQ ID NO: 2436343 - RNA, 19 nt, Homo sapiens
  misc_RNA (1)...(19): siRNA sense strand
guccauaggcaaaggagau

SEQ ID NO: 2436344 - RNA, 19 nt, Homo sapiens
  misc_RNA (1)...(19): siRNA sense strand
cgguagauuucaugccuga

SEQ ID NO: 2436345 - RNA, 19 nt, Homo sapiens
  misc_RNA (1)...(19): siRNA sense strand
augcauucuuugcuggaaa

SEQ ID NO: 2436346 - RNA, 19 nt, Homo sapiens
  misc_RNA (1)...(19): siRNA sense strand
cagaacaugauacaggaaa

SEQ ID NO: 2436347 - RNA, 19 nt, Homo sapiens
  misc_RNA (1)...(19): siRNA sense strand
aggaaacguuggaugacuu

SEQ ID NO: 2436348 - RNA, 19 nt, Homo sapiens
  misc_RNA (1)...(19): siRNA sense strand
gggcaguguuucggauaau

SEQ ID NO: 2436349 - RNA, 19 nt, Homo sapiens
  misc_RNA (1)...(19): siRNA sense strand
acucagugaaugaagguuu

SEQ ID NO: 2436350 - RNA, 19 nt, Homo sapiens
  misc_RNA (1)...(19): siRNA sense strand
aauugaaagacuacgagaa

SEQ ID NO: 2436351 - RNA, 19 nt, Homo sapiens
  misc_RNA (1)...(19): siRNA sense strand
aggagauggcuuugacuuu

SEQ ID NO: 2436352 - RNA, 19 nt, Homo sapiens
  misc_RNA (1)...(19): siRNA sense strand
ugcugaaaguggaaaucua

SEQ ID NO: 2436353 - RNA, 19 nt, Homo sapiens
  misc_RNA (1)...(19): siRNA sense strand
ggacauugugaauuugcaa

SEQ ID NO: 2436354 - RNA, 19 nt, Homo sapiens
  misc_RNA (1)...(19): siRNA sense strand
agguuuaguggcugaaauu

SEQ ID NO: 2436355 - RNA, 19 nt, Homo sapiens
  misc_RNA (1)...(19): siRNA sense strand
auauguuggagcagcaaua

SEQ ID NO: 2436356 - RNA, 19 nt, Homo sapiens
  misc_RNA (1)...(19): siRNA sense strand
cagcugagucuaagaaaau

SEQ ID NO: 2436357 - RNA, 19 nt, Homo sapiens
  misc_RNA (1)...(19): siRNA sense strand
uggcugaaauugaaagacu

SEQ ID NO: 2436358 - RNA, 19 nt, Homo sapiens
  misc_RNA (1)...(19): siRNA sense strand
agaaugaaauugaagccca

SEQ ID NO: 2436359 - RNA, 19 nt, Homo sapiens
  misc_RNA (1)...(19): siRNA sense strand
guuuaguggcugaaauuga

SEQ ID NO: 2436360 - RNA, 19 nt, Homo sapiens
  misc_RNA (1)...(19): siRNA sense strand
gggaaaacaggaaucuaaa

SEQ ID NO: 2436361 - RNA, 19 nt, Homo sapiens
  misc_RNA (1)...(19): siRNA sense strand
agaacaugauacaggaaac

SEQ ID NO: 2436362 - RNA, 19 nt, Homo sapiens
  misc_RNA (1)...(19): siRNA sense strand
ugaauuugcaaguggagau

SEQ ID NO: 2436363 - RNA, 19 nt, Homo sapiens
  misc_RNA (1)...(19): siRNA sense strand
ugcaaguggagaugauuaa

SEQ ID NO: 2436364 - RNA, 19 nt, Homo sapiens
  misc_RNA (1)...(19): siRNA sense strand
uguuucggauaauggaaua

SEQ ID NO: 2436365 - RNA, 19 nt, Homo sapiens
  misc_RNA (1)...(19): siRNA sense strand
ucaauauguuggagcagca

SEQ ID NO: 2436366 - RNA, 19 nt, Homo sapiens
  misc_RNA (1)...(19): siRNA sense strand
aaccauaggcuuggauaaa

SEQ ID NO: 2436367 - RNA, 19 nt, Homo sapiens
  misc_RNA (1)...(19): siRNA sense strand
aagcauaaacacagacacu

SEQ ID NO: 2436368 - RNA, 19 nt, Homo sapiens
  misc_RNA (1)...(19): siRNA sense strand
ucaucuaaccaaacaagaa

SEQ ID NO: 2436369 - RNA, 19 nt, Homo sapiens
  misc_RNA (1)...(19): siRNA sense strand
uugcaaguggagaugauua

SEQ ID NO: 2436370 - RNA, 19 nt, Homo sapiens
  misc_RNA (1)...(19): siRNA sense strand
acacaucaccacauggaau

SEQ ID NO: 2436371 - RNA, 19 nt, Homo sapiens
  misc_RNA (1)...(19): siRNA sense strand
aaaugaaaaccgugaucua

SEQ ID NO: 2436372 - RNA, 19 nt, Homo sapiens
  misc_RNA (1)...(19): siRNA sense strand
ggaugacuuuagagaagca

SEQ ID NO: 2436373 - RNA, 19 nt, Homo sapiens
  misc_RNA (1)...(19): siRNA sense strand
ugggcaguguuucggauaa

SEQ ID NO: 2436374 - RNA, 19 nt, Homo sapiens
  misc_RNA (1)...(19): siRNA sense strand
cauuggaaauaaccggcaa

SEQ ID NO: 2436375 - RNA, 19 nt, Homo sapiens
  misc_RNA (1)...(19): siRNA sense strand
guguauagcauuucaguac

SEQ ID NO: 2436376 - RNA, 19 nt, Homo sapiens
  misc_RNA (1)...(19): siRNA sense strand
aaggaaacagacaguggaa

SEQ ID NO: 2436377 - RNA, 19 nt, Homo sapiens
  misc_RNA (1)...(19): siRNA sense strand
cuccagggaaagaggaaaa

SEQ ID NO: 2436378 - RNA, 19 nt, Homo sapiens
  misc_RNA (1)...(19): siRNA sense strand
acagcugagucuaagaaaa

SEQ ID NO: 2436379 - RNA, 19 nt, Homo sapiens
  misc_RNA (1)...(19): siRNA sense strand
ccgacagcauuggaaauaa

SEQ ID NO: 2436380 - RNA, 19 nt, Homo sapiens
  misc_RNA (1)...(19): siRNA sense strand
uuugguaagcggaggccua

SEQ ID NO: 2436381 - RNA, 19 nt, Homo sapiens
  misc_RNA (1)...(19): siRNA sense strand
gaaugcugcuaguggagga

SEQ ID NO: 2436382 - RNA, 19 nt, Homo sapiens
  misc_RNA (1)...(19): siRNA sense strand
ugggaaaacaggaaucuaa

SEQ ID NO: 2436383 - RNA, 19 nt, Homo sapiens
  misc_RNA (1)...(19): siRNA sense strand
cugaaaguggaaaucuaaa

SEQ ID NO: 2436384 - RNA, 19 nt, Homo sapiens
  misc_RNA (1)...(19): siRNA sense strand
cggaagaagaagaggagga

SEQ ID NO: 2436385 - RNA, 19 nt, Homo sapiens
  misc_RNA (1)...(19): siRNA sense strand
aagaggaggaagaggaaga

SEQ ID NO: 2436386 - RNA, 19 nt, Homo sapiens
  misc_RNA (1)...(19): siRNA sense strand
ucacagaggcugagcacca

SEQ ID NO: 2436387 - RNA, 19 nt, Homo sapiens
  misc_RNA (1)...(19): siRNA sense strand
cggaucaagaagagcaaga

SEQ ID NO: 2436388 - RNA, 19 nt, Homo sapiens
  misc_RNA (1)...(19): siRNA sense strand
agagugacgaugagccaaa

SEQ ID NO: 2436389 - RNA, 19 nt, Homo sapiens
  misc_RNA (1)...(19): siRNA sense strand
aagaagaggaggaagagga

SEQ ID NO: 2436390 - RNA, 19 nt, Homo sapiens
  misc_RNA (1)...(19): siRNA sense strand
aggaggaagcgcacggcaa

SEQ ID NO: 2436391 - RNA, 19 nt, Homo sapiens
  misc_RNA (1)...(19): siRNA sense strand
gugccaucguggagaggga

SEQ ID NO: 2436392 - RNA, 19 nt, Homo sapiens
  misc_RNA (1)...(19): siRNA sense strand
aggcugagcaccaggacau

SEQ ID NO: 2436393 - RNA, 19 nt, Homo sapiens
  misc_RNA (1)...(19): siRNA sense strand
gcaagaucaacgagaccau

SEQ ID NO: 2436394 - RNA, 19 nt, Homo sapiens
  misc_RNA (1)...(19): siRNA sense strand
gcagagugacgaugagcca

SEQ ID NO: 2436395 - RNA, 19 nt, Homo sapiens
  misc_RNA (1)...(19): siRNA sense strand
gcaccaaccugauggacac

SEQ ID NO: 2436396 - RNA, 19 nt, Homo sapiens
  misc_RNA (1)...(19): siRNA sense strand
acacagaacucauggaugc

SEQ ID NO: 2436397 - RNA, 19 nt, Homo sapiens
  misc_RNA (1)...(19): siRNA sense strand
cugcucaucuggaggcgua

SEQ ID NO: 2436398 - RNA, 19 nt, Homo sapiens
  misc_RNA (1)...(19): siRNA sense strand
acgaugagccaaagcggau

SEQ ID NO: 2436399 - RNA, 19 nt, Homo sapiens
  misc_RNA (1)...(19): siRNA sense strand
ggaagaggaagaaggaggu

SEQ ID NO: 2436400 - RNA, 19 nt, Homo sapiens
  misc_RNA (1)...(19): siRNA sense strand
cggaauauggagaaguaau

SEQ ID NO: 2436401 - RNA, 19 nt, Homo sapiens
  misc_RNA (1)...(19): siRNA sense strand
uggagaaguaauucagcua

SEQ ID NO: 2436402 - RNA, 19 nt, Homo sapiens
  misc_RNA (1)...(19): siRNA sense strand
uaauucagcuacaggguga

SEQ ID NO: 2436403 - RNA, 19 nt, Homo sapiens
  misc_RNA (1)...(19): siRNA sense strand
cgcugaugauuacgauaaa

SEQ ID NO: 2436404 - RNA, 19 nt, Homo sapiens
  misc_RNA (1)...(19): siRNA sense strand
agaaacuagugaaggcguu

SEQ ID NO: 2436405 - RNA, 19 nt, Homo sapiens
  misc_RNA (1)...(19): siRNA sense strand
aggcagagcgagcgggaaa

SEQ ID NO: 2436406 - RNA, 19 nt, Homo sapiens
  misc_RNA (1)...(19): siRNA sense strand
gugugaauucugugggaaa

SEQ ID NO: 2436407 - RNA, 19 nt, Homo sapiens
  misc_RNA (1)...(19): siRNA sense strand
uguuagagcaaguggaauu

SEQ ID NO: 2436408 - RNA, 19 nt, Homo sapiens
  misc_RNA (1)...(19): siRNA sense strand
auacaaaacaugcggauaa

SEQ ID NO: 2436409 - RNA, 19 nt, Homo sapiens
  misc_RNA (1)...(19): siRNA sense strand
ggaugugagaauucggaaa

SEQ ID NO: 2436410 - RNA, 19 nt, Homo sapiens
  misc_RNA (1)...(19): siRNA sense strand
gcaaauguaugcagcccaa

SEQ ID NO: 2436411 - RNA, 19 nt, Homo sapiens
  misc_RNA (1)...(19): siRNA sense strand
uaaucaaagucuugggcau

SEQ ID NO: 2436412 - RNA, 19 nt, Homo sapiens
  misc_RNA (1)...(19): siRNA sense strand
agguagaagauguguguga

SEQ ID NO: 2436413 - RNA, 19 nt, Homo sapiens
  misc_RNA (1)...(19): siRNA sense strand
agaaaugccagaagaguca

SEQ ID NO: 2436414 - RNA, 19 nt, Homo sapiens
  misc_RNA (1)...(19): siRNA sense strand
cugaagagacauuagaaga

SEQ ID NO: 2436415 - RNA, 19 nt, Homo sapiens
  misc_RNA (1)...(19): siRNA sense strand
agaagaugugugugaagaa

SEQ ID NO: 2436416 - RNA, 19 nt, Homo sapiens
  misc_RNA (1)...(19): siRNA sense strand
agaugugugugaagaagaa

SEQ ID NO: 2436417 - RNA, 19 nt, Homo sapiens
  misc_RNA (1)...(19): siRNA sense strand
ggaaaaugggauaugcuaa

SEQ ID NO: 2436418 - RNA, 19 nt, Homo sapiens
  misc_RNA (1)...(19): siRNA sense strand
gugaagaagaaaugccaga

SEQ ID NO: 2436419 - RNA, 19 nt, Homo sapiens
  misc_RNA (1)...(19): siRNA sense strand
ggauaauucaucugacaca

SEQ ID NO: 2436420 - RNA, 19 nt, Homo sapiens
  misc_RNA (1)...(19): siRNA sense strand
gguaaaccuacaagugcaa

SEQ ID NO: 2436421 - RNA, 19 nt, Homo sapiens
  misc_RNA (1)...(19): siRNA sense strand
ggaauuaccugcuguggca

SEQ ID NO: 2436422 - RNA, 19 nt, Homo sapiens
  misc_RNA (1)...(19): siRNA sense strand
gaacaaaccuccacaggcu

SEQ ID NO: 2436423 - RNA, 19 nt, Homo sapiens
  misc_RNA (1)...(19): siRNA sense strand
aguaauaagaaaggagaga

SEQ ID NO: 2436424 - RNA, 19 nt, Homo sapiens
  misc_RNA (1)...(19): siRNA sense strand
ccauguuauugaaggcuuu

SEQ ID NO: 2436425 - RNA, 19 nt, Homo sapiens
  misc_RNA (1)...(19): siRNA sense strand
cuacagugguucagaccga

SEQ ID NO: 2436426 - RNA, 19 nt, Homo sapiens
  misc_RNA (1)...(19): siRNA sense strand
aagaaaggagagagcccaa

SEQ ID NO: 2436427 - RNA, 19 nt, Homo sapiens
  misc_RNA (1)...(19): siRNA sense strand
cgguaaaccuacaagugca

SEQ ID NO: 2436428 - RNA, 19 nt, Homo sapiens
  misc_RNA (1)...(19): siRNA sense strand
agauuugacuucugaacau

SEQ ID NO: 2436429 - RNA, 19 nt, Homo sapiens
  misc_RNA (1)...(19): siRNA sense strand
uauugaaggcuuugugauu

SEQ ID NO: 2436430 - RNA, 19 nt, Homo sapiens
  misc_RNA (1)...(19): siRNA sense strand
cugcagaagcuuuggucca

SEQ ID NO: 2436431 - RNA, 19 nt, Homo sapiens
  misc_RNA (1)...(19): siRNA sense strand
aggaguaacaguacaucua

SEQ ID NO: 2436432 - RNA, 19 nt, Homo sapiens
  misc_RNA (1)...(19): siRNA sense strand
agaaauggacagugaguug

SEQ ID NO: 2436433 - RNA, 19 nt, Homo sapiens
  misc_RNA (1)...(19): siRNA sense strand
ccagaaaguaauaagaaag

SEQ ID NO: 2436434 - RNA, 19 nt, Homo sapiens
  misc_RNA (1)...(19): siRNA sense strand
cagaagagucagaugaaug

SEQ ID NO: 2436435 - RNA, 19 nt, Homo sapiens
  misc_RNA (1)...(19): siRNA sense strand
aggagggauuggagccauu

SEQ ID NO: 2436436 - RNA, 19 nt, Homo sapiens
  misc_RNA (1)...(19): siRNA sense strand
gcagaugaauucagagcac

SEQ ID NO: 2436437 - RNA, 19 nt, Homo sapiens
  misc_RNA (1)...(19): siRNA sense strand
ccucuuugcuaauagaaca

SEQ ID NO: 2436438 - RNA, 19 nt, Homo sapiens
  misc_RNA (1)...(19): siRNA sense strand
ggaaaaugccugagaacag

SEQ ID NO: 2436439 - RNA, 19 nt, Homo sapiens
  misc_RNA (1)...(19): siRNA sense strand
cacaggagauugauggaca

SEQ ID NO: 2436440 - RNA, 19 nt, Homo sapiens
  misc_RNA (1)...(19): siRNA sense strand
cagccagagcuacagaaua

SEQ ID NO: 2436441 - RNA, 19 nt, Homo sapiens
  misc_RNA (1)...(19): siRNA sense strand
gaaaaugggauaugcuaau

SEQ ID NO: 2436442 - RNA, 19 nt, Homo sapiens
  misc_RNA (1)...(19): siRNA sense strand
cuauauggacaguugauga

SEQ ID NO: 2436443 - RNA, 19 nt, Homo sapiens
  misc_RNA (1)...(19): siRNA sense strand
cagcaaauucagccaauca

SEQ ID NO: 2436444 - RNA, 19 nt, Homo sapiens
  misc_RNA (1)...(19): siRNA sense strand
gccagaagagucagaugaa

SEQ ID NO: 2436445 - RNA, 19 nt, Homo sapiens
  misc_RNA (1)...(19): siRNA sense strand
ugauaaauucagugugugu

SEQ ID NO: 2436446 - RNA, 19 nt, Homo sapiens
  misc_RNA (1)...(19): siRNA sense strand
gaauucaacucaagaccca

SEQ ID NO: 2436447 - RNA, 19 nt, Homo sapiens
  misc_RNA (1)...(19): siRNA sense strand
gcuaaucaggugcaagcua

SEQ ID NO: 2436448 - RNA, 19 nt, Homo sapiens
  misc_RNA (1)...(19): siRNA sense strand
ugggauaugcuaaugaauu

SEQ ID NO: 2436449 - RNA, 19 nt, Homo sapiens
  misc_RNA (1)...(19): siRNA sense strand
aggauaucgcagaugaauu

SEQ ID NO: 2436450 - RNA, 19 nt, Homo sapiens
  misc_RNA (1)...(19): siRNA sense strand
ccaggauaucgcagaugaa

SEQ ID NO: 2436451 - RNA, 19 nt, Homo sapiens
  misc_RNA (1)...(19): siRNA sense strand
cucaguaccuucagcaaau

SEQ ID NO: 2436452 - RNA, 19 nt, Homo sapiens
  misc_RNA (1)...(19): siRNA sense strand
ucaacaacaaccagcagua

SEQ ID NO: 2436453 - RNA, 19 nt, Homo sapiens
  misc_RNA (1)...(19): siRNA sense strand
agguauuucaacaggcauu

SEQ ID NO: 2436454 - RNA, 19 nt, Homo sapiens
  misc_RNA (1)...(19): siRNA sense strand
cuuuacaagugcagccuga

SEQ ID NO: 2436455 - RNA, 19 nt, Homo sapiens
  misc_RNA (1)...(19): siRNA sense strand
gcaucaacucucugaagga

SEQ ID NO: 2436456 - RNA, 19 nt, Homo sapiens
  misc_RNA (1)...(19): siRNA sense strand
gggaaaaugggauaugcua

SEQ ID NO: 2436457 - RNA, 19 nt, Homo sapiens
  misc_RNA (1)...(19): siRNA sense strand
ucaugaagauucugugcca

SEQ ID NO: 2436458 - RNA, 19 nt, Homo sapiens
  misc_RNA (1)...(19): siRNA sense strand
agagcgagcgggaaagaga

SEQ ID NO: 2436459 - RNA, 19 nt, Homo sapiens
  misc_RNA (1)...(19): siRNA sense strand
agccagaaguuggguguau

SEQ ID NO: 2436460 - RNA, 19 nt, Homo sapiens
  misc_RNA (1)...(19): siRNA sense strand
agucagucuccuacuauaa

SEQ ID NO: 2436461 - RNA, 19 nt, Homo sapiens
  misc_RNA (1)...(19): siRNA sense strand
auucagagcacaggagauu

SEQ ID NO: 2436462 - RNA, 19 nt, Homo sapiens
  misc_RNA (1)...(19): siRNA sense strand
cuguacagguauuucaaca

SEQ ID NO: 2436463 - RNA, 19 nt, Homo sapiens
  misc_RNA (1)...(19): siRNA sense strand
cggcaagccaagcucaaau

SEQ ID NO: 2436464 - RNA, 19 nt, Homo sapiens
  misc_RNA (1)...(19): siRNA sense strand
gggccaaauuugcagcagu

SEQ ID NO: 2436465 - RNA, 19 nt, Homo sapiens
  misc_RNA (1)...(19): siRNA sense strand
uccacaggcuauuguuaaa

SEQ ID NO: 2436466 - RNA, 19 nt, Homo sapiens
  misc_RNA (1)...(19): siRNA sense strand
gaugugagaauucggaaaa

SEQ ID NO: 2436467 - RNA, 19 nt, Homo sapiens
  misc_RNA (1)...(19): siRNA sense strand
uggaagacaugauugcuga

SEQ ID NO: 2436468 - RNA, 19 nt, Homo sapiens
  misc_RNA (1)...(19): siRNA sense strand
cacuaugucaugugccaaa

SEQ ID NO: 2436469 - RNA, 19 nt, Homo sapiens
  misc_RNA (1)...(19): siRNA sense strand
caguauuacccaacagacu

SEQ ID NO: 2436470 - RNA, 19 nt, Homo sapiens
  misc_RNA (1)...(19): siRNA sense strand
aauccauacuguagagaaa

SEQ ID NO: 2436471 - RNA, 19 nt, Homo sapiens
  misc_RNA (1)...(19): siRNA sense strand
aagcaaugcagaagacaaa

SEQ ID NO: 2436472 - RNA, 19 nt, Homo sapiens
  misc_RNA (1)...(19): siRNA sense strand
uggugagagugaagugaaa

SEQ ID NO: 2436473 - RNA, 19 nt, Homo sapiens
  misc_RNA (1)...(19): siRNA sense strand
aauucauacaggagagaaa

SEQ ID NO: 2436474 - RNA, 19 nt, Homo sapiens
  misc_RNA (1)...(19): siRNA sense strand
ccguaugaauguaaugaau

SEQ ID NO: 2436475 - RNA, 19 nt, Homo sapiens
  misc_RNA (1)...(19): siRNA sense strand
augugauguuggagaacua

SEQ ID NO: 2436476 - RNA, 19 nt, Homo sapiens
  misc_RNA (1)...(19): siRNA sense strand
aggaugugauguuggagaa

SEQ ID NO: 2436477 - RNA, 19 nt, Homo sapiens
  misc_RNA (1)...(19): siRNA sense strand
gaagcaaugcagaagacaa

SEQ ID NO: 2436478 - RNA, 19 nt, Homo sapiens
  misc_RNA (1)...(19): siRNA sense strand
agagagaagccguaugaau

SEQ ID NO: 2436479 - RNA, 19 nt, Homo sapiens
  misc_RNA (1)...(19): siRNA sense strand
cuagcaaaucauuggagaa

SEQ ID NO: 2436480 - RNA, 19 nt, Homo sapiens
  misc_RNA (1)...(19): siRNA sense strand
ccuuguacgacaucagaaa

SEQ ID NO: 2436481 - RNA, 19 nt, Homo sapiens
  misc_RNA (1)...(19): siRNA sense strand
uggagaaagaccuuacaaa

SEQ ID NO: 2436482 - RNA, 19 nt, Homo sapiens
  misc_RNA (1)...(19): siRNA sense strand
ccacaagaacagaaaguac

SEQ ID NO: 2436483 - RNA, 19 nt, Homo sapiens
  misc_RNA (1)...(19): siRNA sense strand
agaaaguacaccuuagaga

SEQ ID NO: 2436484 - RNA, 19 nt, Homo sapiens
  misc_RNA (1)...(19): siRNA sense strand
ucaaagaauucauaccaga

SEQ ID NO: 2436485 - RNA, 19 nt, Homo sapiens
  misc_RNA (1)...(19): siRNA sense strand
ggguaauaaauggauguaa

SEQ ID NO: 2436486 - RNA, 19 nt, Homo sapiens
  misc_RNA (1)...(19): siRNA sense strand
ugguaaagucuucaguaau

SEQ ID NO: 2436487 - RNA, 19 nt, Homo sapiens
  misc_RNA (1)...(19): siRNA sense strand
uagcaaaucauuggagaau

SEQ ID NO: 2436488 - RNA, 19 nt, Homo sapiens
  misc_RNA (1)...(19): siRNA sense strand
aauuuauacuggagagaag

SEQ ID NO: 2436489 - RNA, 19 nt, Homo sapiens
  misc_RNA (1)...(19): siRNA sense strand
gggacguggccauagaauu

SEQ ID NO: 2436490 - RNA, 19 nt, Homo sapiens
  misc_RNA (1)...(19): siRNA sense strand
cagccuuacuaaacaucaa

SEQ ID NO: 2436491 - RNA, 19 nt, Homo sapiens
  misc_RNA (1)...(19): siRNA sense strand
aauucauacuggagagaag

SEQ ID NO: 2436492 - RNA, 19 nt, Homo sapiens
  misc_RNA (1)...(19): siRNA sense strand
agaguaucuuccagccuua

SEQ ID NO: 2436493 - RNA, 19 nt, Homo sapiens
  misc_RNA (1)...(19): siRNA sense strand
uauacaaggaugugauguu

SEQ ID NO: 2436494 - RNA, 19 nt, Homo sapiens
  misc_RNA (1)...(19): siRNA sense strand
uuucaaaucuugcacgaca

SEQ ID NO: 2436495 - RNA, 19 nt, Homo sapiens
  misc_RNA (1)...(19): siRNA sense strand
aaacuuugcacgacaucaa

SEQ ID NO: 2436496 - RNA, 19 nt, Homo sapiens
  misc_RNA (1)...(19): siRNA sense strand
agaauucauaccagagaga

SEQ ID NO: 2436497 - RNA, 19 nt, Homo sapiens
  misc_RNA (1)...(19): siRNA sense strand
cacaagaacagaaaguaca

SEQ ID NO: 2436498 - RNA, 19 nt, Homo sapiens
  misc_RNA (1)...(19): siRNA sense strand
ggagaauucauacaggaga

SEQ ID NO: 2436499 - RNA, 19 nt, Homo sapiens
  misc_RNA (1)...(19): siRNA sense strand
guggcaaggcauucagaca

SEQ ID NO: 2436500 - RNA, 19 nt, Homo sapiens
  misc_RNA (1)...(19): siRNA sense strand
uguuggagaacuacaggaa

SEQ ID NO: 2436501 - RNA, 19 nt, Homo sapiens
  misc_RNA (1)...(19): siRNA sense strand
gggcuuuauacaaggaugu

SEQ ID NO: 2436502 - RNA, 19 nt, Homo sapiens
  misc_RNA (1)...(19): siRNA sense strand
aaauguaauucaugcggca

SEQ ID NO: 2436503 - RNA, 19 nt, Homo sapiens
  misc_RNA (1)...(19): siRNA sense strand
ugguaaaggcuucagucau

SEQ ID NO: 2436504 - RNA, 19 nt, Homo sapiens
  misc_RNA (1)...(19): siRNA sense strand
aggagagaaaccuuacaaa

SEQ ID NO: 2436505 - RNA, 19 nt, Homo sapiens
  misc_RNA (1)...(19): siRNA sense strand
augcagaagacaaaccaau

SEQ ID NO: 2436506 - RNA, 19 nt, Homo sapiens
  misc_RNA (1)...(19): siRNA sense strand
auguaaugagcauagcaaa

SEQ ID NO: 2436507 - RNA, 19 nt, Homo sapiens
  misc_RNA (1)...(19): siRNA sense strand
ggacagagaucuuuggugu

SEQ ID NO: 2436508 - RNA, 19 nt, Homo sapiens
  misc_RNA (1)...(19): siRNA sense strand
ccacauugcuguacgcaca

SEQ ID NO: 2436509 - RNA, 19 nt, Homo sapiens
  misc_RNA (1)...(19): siRNA sense strand
gaaaguagcuggugcaccu

SEQ ID NO: 2436510 - RNA, 19 nt, Homo sapiens
  misc_RNA (1)...(19): siRNA sense strand
gcuaaugacgggaggacac

SEQ ID NO: 2436511 - RNA, 19 nt, Homo sapiens
  misc_RNA (1)...(19): siRNA sense strand
aggagcugguggaagaaca

SEQ ID NO: 2436512 - RNA, 19 nt, Homo sapiens
  misc_RNA (1)...(19): siRNA sense strand
gagaaaagaugaaaggaga

SEQ ID NO: 2436513 - RNA, 19 nt, Homo sapiens
  misc_RNA (1)...(19): siRNA sense strand
ugaaaggagaacuggguau

SEQ ID NO: 2436514 - RNA, 19 nt, Homo sapiens
  misc_RNA (1)...(19): siRNA sense strand
ccaauauggcagaugguga

SEQ ID NO: 2436515 - RNA, 19 nt, Homo sapiens
  misc_RNA (1)...(19): siRNA sense strand
ugaacagaacacagagcua

SEQ ID NO: 2436516 - RNA, 19 nt, Homo sapiens
  misc_RNA (1)...(19): siRNA sense strand
ccguuaaacagaagagcca

SEQ ID NO: 2436517 - RNA, 19 nt, Homo sapiens
  misc_RNA (1)...(19): siRNA sense strand
gguuaugaaagcucagcaa

SEQ ID NO: 2436518 - RNA, 19 nt, Homo sapiens
  misc_RNA (1)...(19): siRNA sense strand
agaaaagaugaaaggagaa

SEQ ID NO: 2436519 - RNA, 19 nt, Homo sapiens
  misc_RNA (1)...(19): siRNA sense strand
cagcaauagcaucaaccaa

SEQ ID NO: 2436520 - RNA, 19 nt, Homo sapiens
  misc_RNA (1)...(19): siRNA sense strand
aagugaaaguggagaagag

SEQ ID NO: 2436521 - RNA, 19 nt, Homo sapiens
  misc_RNA (1)...(19): siRNA sense strand
gugaaaguggagaagagau

SEQ ID NO: 2436522 - RNA, 19 nt, Homo sapiens
  misc_RNA (1)...(19): siRNA sense strand
uggguaugauguugagcuu

SEQ ID NO: 2436523 - RNA, 19 nt, Homo sapiens
  misc_RNA (1)...(19): siRNA sense strand
cggagaaaucuaugugaag

SEQ ID NO: 2436524 - RNA, 19 nt, Homo sapiens
  misc_RNA (1)...(19): siRNA sense strand
ugugaagaggcuuuguuaa

SEQ ID NO: 2436525 - RNA, 19 nt, Homo sapiens
  misc_RNA (1)...(19): siRNA sense strand
ccugguuaaagguggaauu

SEQ ID NO: 2436526 - RNA, 19 nt, Homo sapiens
  misc_RNA (1)...(19): siRNA sense strand
gaaugguucaauaagggaa

SEQ ID NO: 2436527 - RNA, 19 nt, Homo sapiens
  misc_RNA (1)...(19): siRNA sense strand
acaacauuaucauuggcua

SEQ ID NO: 2436528 - RNA, 19 nt, Homo sapiens
  misc_RNA (1)...(19): siRNA sense strand
gagaagaucuugaggcaga

SEQ ID NO: 2436529 - RNA, 19 nt, Homo sapiens
  misc_RNA (1)...(19): siRNA sense strand
cagagaagaucuugaggca

SEQ ID NO: 2436530 - RNA, 19 nt, Homo sapiens
  misc_RNA (1)...(19): siRNA sense strand
agacagaguuugaccggca

SEQ ID NO: 2436531 - RNA, 19 nt, Homo sapiens
  misc_RNA (1)...(19): siRNA sense strand
gucucuugcuggagggaau

SEQ ID NO: 2436532 - RNA, 19 nt, Homo sapiens
  misc_RNA (1)...(19): siRNA sense strand
agacagaggugcugcugca

SEQ ID NO: 2436533 - RNA, 19 nt, Homo sapiens
  misc_RNA (1)...(19): siRNA sense strand
agaacuggacagagaagau

SEQ ID NO: 2436534 - RNA, 19 nt, Homo sapiens
  misc_RNA (1)...(19): siRNA sense strand
uggacaaggccgagcagga

SEQ ID NO: 2436535 - RNA, 19 nt, Homo sapiens
  misc_RNA (1)...(19): siRNA sense strand
aguucacggaggagaaauu

SEQ ID NO: 2436536 - RNA, 19 nt, Homo sapiens
  misc_RNA (1)...(19): siRNA sense strand
agacugagcuugaugccca

SEQ ID NO: 2436537 - RNA, 19 nt, Homo sapiens
  misc_RNA (1)...(19): siRNA sense strand
agaaauuuggccaggcuga

SEQ ID NO: 2436538 - RNA, 19 nt, Homo sapiens
  misc_RNA (1)...(19): siRNA sense strand
ugaagaagcuggcgucgga

SEQ ID NO: 2436539 - RNA, 19 nt, Homo sapiens
  misc_RNA (1)...(19): siRNA sense strand
aggaagaagagaagaaaga

SEQ ID NO: 2436540 - RNA, 19 nt, Homo sapiens
  misc_RNA (1)...(19): siRNA sense strand
aggaagaggaagaagagaa

SEQ ID NO: 2436541 - RNA, 19 nt, Homo sapiens
  misc_RNA (1)...(19): siRNA sense strand
auuaacaacuggaggaaca

SEQ ID NO: 2436542 - RNA, 19 nt, Homo sapiens
  misc_RNA (1)...(19): siRNA sense strand
auguggaaucagagggaaa

SEQ ID NO: 2436543 - RNA, 19 nt, Homo sapiens
  misc_RNA (1)...(19): siRNA sense strand
aagaggaagaagagaagaa

SEQ ID NO: 2436544 - RNA, 19 nt, Homo sapiens
  misc_RNA (1)...(19): siRNA sense strand
aaguaaaggaggugcauga

SEQ ID NO: 2436545 - RNA, 19 nt, Homo sapiens
  misc_RNA (1)...(19): siRNA sense strand
cagccaacucagacaguaa

SEQ ID NO: 2436546 - RNA, 19 nt, Homo sapiens
  misc_RNA (1)...(19): siRNA sense strand
caguaguacaaguggaaga

SEQ ID NO: 2436547 - RNA, 19 nt, Homo sapiens
  misc_RNA (1)...(19): siRNA sense strand
agaagaccgcagugggaua

SEQ ID NO: 2436548 - RNA, 19 nt, Homo sapiens
  misc_RNA (1)...(19): siRNA sense strand
agauaguaccagaugaaau

SEQ ID NO: 2436549 - RNA, 19 nt, Homo sapiens
  misc_RNA (1)...(19): siRNA sense strand
auaaacagacagaagacaa

SEQ ID NO: 2436550 - RNA, 19 nt, Homo sapiens
  misc_RNA (1)...(19): siRNA sense strand
gggaauguguuuuggccaa

SEQ ID NO: 2436551 - RNA, 19 nt, Homo sapiens
  misc_RNA (1)...(19): siRNA sense strand
ccacaaaagaaguaauaga

SEQ ID NO: 2436552 - RNA, 19 nt, Homo sapiens
  misc_RNA (1)...(19): siRNA sense strand
agucaugucaacagggaau

SEQ ID NO: 2436553 - RNA, 19 nt, Homo sapiens
  misc_RNA (1)...(19): siRNA sense strand
ggaagauucgagacagcaa

SEQ ID NO: 2436554 - RNA, 19 nt, Homo sapiens
  misc_RNA (1)...(19): siRNA sense strand
gggaaaaggacuaucucaa

SEQ ID NO: 2436555 - RNA, 19 nt, Homo sapiens
  misc_RNA (1)...(19): siRNA sense strand
uggcaaugcugaugggauc

SEQ ID NO: 2436556 - RNA, 19 nt, Homo sapiens
  misc_RNA (1)...(19): siRNA sense strand
agacagaagacaaaggagu

SEQ ID NO: 2436557 - RNA, 19 nt, Homo sapiens
  misc_RNA (1)...(19): siRNA sense strand
cucaagauguauaugcaaa

SEQ ID NO: 2436558 - RNA, 19 nt, Homo sapiens
  misc_RNA (1)...(19): siRNA sense strand
agaugauggcacugaagaa

SEQ ID NO: 2436559 - RNA, 19 nt, Homo sapiens
  misc_RNA (1)...(19): siRNA sense strand
ggcacagaguacagguaau

SEQ ID NO: 2436560 - RNA, 19 nt, Homo sapiens
  misc_RNA (1)...(19): siRNA sense strand
agaaguaauagaacgggaa

SEQ ID NO: 2436561 - RNA, 19 nt, Homo sapiens
  misc_RNA (1)...(19): siRNA sense strand
ugacauuaaaagaggggaa

SEQ ID NO: 2436562 - RNA, 19 nt, Homo sapiens
  misc_RNA (1)...(19): siRNA sense strand
gagcaugcgcagugccaau

SEQ ID NO: 2436563 - RNA, 19 nt, Homo sapiens
  misc_RNA (1)...(19): siRNA sense strand
ccagaauaccaucggugua

SEQ ID NO: 2436564 - RNA, 19 nt, Homo sapiens
  misc_RNA (1)...(19): siRNA sense strand
ccacgaucaacuuggguau

SEQ ID NO: 2436565 - RNA, 19 nt, Homo sapiens
  misc_RNA (1)...(19): siRNA sense strand
gauauuaacaacuggagga

SEQ ID NO: 2436566 - RNA, 19 nt, Homo sapiens
  misc_RNA (1)...(19): siRNA sense strand
aaugugaggaagaggaaga

SEQ ID NO: 2436567 - RNA, 19 nt, Homo sapiens
  misc_RNA (1)...(19): siRNA sense strand
gcaugaugaacuugaagau

SEQ ID NO: 2436568 - RNA, 19 nt, Homo sapiens
  misc_RNA (1)...(19): siRNA sense strand
cauacaagauaguaccaga

SEQ ID NO: 2436569 - RNA, 19 nt, Homo sapiens
  misc_RNA (1)...(19): siRNA sense strand
ccucugacaucuauggaca

SEQ ID NO: 2436570 - RNA, 19 nt, Homo sapiens
  misc_RNA (1)...(19): siRNA sense strand
gcagaagaccgcaguggga

SEQ ID NO: 2436571 - RNA, 19 nt, Homo sapiens
  misc_RNA (1)...(19): siRNA sense strand
ccagguagcaagaaaggau

SEQ ID NO: 2436572 - RNA, 19 nt, Homo sapiens
  misc_RNA (1)...(19): siRNA sense strand
gacaguaaugccaggacaa

SEQ ID NO: 2436573 - RNA, 19 nt, Homo sapiens
  misc_RNA (1)...(19): siRNA sense strand
cuccaaagacagaacagua

SEQ ID NO: 2436574 - RNA, 19 nt, Homo sapiens
  misc_RNA (1)...(19): siRNA sense strand
gaguucaaugugaggaaga

SEQ ID NO: 2436575 - RNA, 19 nt, Homo sapiens
  misc_RNA (1)...(19): siRNA sense strand
ucaauuaccgagauggaau

SEQ ID NO: 2436576 - RNA, 19 nt, Homo sapiens
  misc_RNA (1)...(19): siRNA sense strand
gcucaagauguauaugcaa

SEQ ID NO: 2436577 - RNA, 19 nt, Homo sapiens
  misc_RNA (1)...(19): siRNA sense strand
aggaguucaaugugaggaa

SEQ ID NO: 2436578 - RNA, 19 nt, Homo sapiens
  misc_RNA (1)...(19): siRNA sense strand
ccagggaagauucgagaca

SEQ ID NO: 2436579 - RNA, 19 nt, Homo sapiens
  misc_RNA (1)...(19): siRNA sense strand
gauagauuggugugaugaa

SEQ ID NO: 2436580 - RNA, 19 nt, Homo sapiens
  misc_RNA (1)...(19): siRNA sense strand
cagggaaugagcugcuaaa

SEQ ID NO: 2436581 - RNA, 19 nt, Homo sapiens
  misc_RNA (1)...(19): siRNA sense strand
ggacuauaucagcauacaa

SEQ ID NO: 2436582 - RNA, 19 nt, Homo sapiens
  misc_RNA (1)...(19): siRNA sense strand
guccuuacagugagugaua

SEQ ID NO: 2436583 - RNA, 19 nt, Homo sapiens
  misc_RNA (1)...(19): siRNA sense strand
agacaguaaugccaggaca

SEQ ID NO: 2436584 - RNA, 19 nt, Homo sapiens
  misc_RNA (1)...(19): siRNA sense strand
cagagguugaaguuaauaa

SEQ ID NO: 2436585 - RNA, 19 nt, Homo sapiens
  misc_RNA (1)...(19): siRNA sense strand
ucaaugugaggaagaggaa

SEQ ID NO: 2436586 - RNA, 19 nt, Homo sapiens
  misc_RNA (1)...(19): siRNA sense strand
uggaagauaccgaacuuau

SEQ ID NO: 2436587 - RNA, 19 nt, Homo sapiens
  misc_RNA (1)...(19): siRNA sense strand
agacagaacaguacgugga

SEQ ID NO: 2436588 - RNA, 19 nt, Homo sapiens
  misc_RNA (1)...(19): siRNA sense strand
agaaaggaucucaggaaug

SEQ ID NO: 2436589 - RNA, 19 nt, Homo sapiens
  misc_RNA (1)...(19): siRNA sense strand
ugcuaaauccugaagauga

SEQ ID NO: 2436590 - RNA, 19 nt, Homo sapiens
  misc_RNA (1)...(19): siRNA sense strand
acagaguacagguaaucaa

SEQ ID NO: 2436591 - RNA, 19 nt, Homo sapiens
  misc_RNA (1)...(19): siRNA sense strand
ccagaugaaauagaagaaa

SEQ ID NO: 2436592 - RNA, 19 nt, Homo sapiens
  misc_RNA (1)...(19): siRNA sense strand
augccuugaaugaggguau

SEQ ID NO: 2436593 - RNA, 19 nt, Homo sapiens
  misc_RNA (1)...(19): siRNA sense strand
aagaaguaauagaacggga

SEQ ID NO: 2436594 - RNA, 19 nt, Homo sapiens
  misc_RNA (1)...(19): siRNA sense strand
gcagcagcaaggagaacau

SEQ ID NO: 2436595 - RNA, 19 nt, Homo sapiens
  misc_RNA (1)...(19): siRNA sense strand
ugucauggcacacggugaa

SEQ ID NO: 2436596 - RNA, 19 nt, Homo sapiens
  misc_RNA (1)...(19): siRNA sense strand
cuaugaaugauaaggcaaa

SEQ ID NO: 2436597 - RNA, 19 nt, Homo sapiens
  misc_RNA (1)...(19): siRNA sense strand
ccuacaauuuagucagcaa

SEQ ID NO: 2436598 - RNA, 19 nt, Homo sapiens
  misc_RNA (1)...(19): siRNA sense strand
ggauguagggagaaagcau

SEQ ID NO: 2436599 - RNA, 19 nt, Homo sapiens
  misc_RNA (1)...(19): siRNA sense strand
guguggauguagggagaaa

SEQ ID NO: 2436600 - RNA, 19 nt, Homo sapiens
  misc_RNA (1)...(19): siRNA sense strand
ucuagagcccacagggaaa

SEQ ID NO: 2436601 - RNA, 19 nt, Homo sapiens
  misc_RNA (1)...(19): siRNA sense strand
aaaguugauaugugggaua

SEQ ID NO: 2436602 - RNA, 19 nt, Homo sapiens
  misc_RNA (1)...(19): siRNA sense strand
ucaacaaccucuuugggaa

SEQ ID NO: 2436603 - RNA, 19 nt, Homo sapiens
  misc_RNA (1)...(19): siRNA sense strand
aaccagaaucagaggaaga

SEQ ID NO: 2436604 - RNA, 19 nt, Homo sapiens
  misc_RNA (1)...(19): siRNA sense strand
aaucagaggaagagcaagu

SEQ ID NO: 2436605 - RNA, 19 nt, Homo sapiens
  misc_RNA (1)...(19): siRNA sense strand
ugaggaggccagagccaaa

SEQ ID NO: 2436606 - RNA, 19 nt, Homo sapiens
  misc_RNA (1)...(19): siRNA sense strand
ucgaagauuuaguguggau

SEQ ID NO: 2436607 - RNA, 19 nt, Homo sapiens
  misc_RNA (1)...(19): siRNA sense strand
agaaucagaggaagagcaa

SEQ ID NO: 2436608 - RNA, 19 nt, Homo sapiens
  misc_RNA (1)...(19): siRNA sense strand
uaguguggauguagggaga

SEQ ID NO: 2436609 - RNA, 19 nt, Homo sapiens
  misc_RNA (1)...(19): siRNA sense strand
gcgcagagaucaccgcaga

SEQ ID NO: 2436610 - RNA, 19 nt, Homo sapiens
  misc_RNA (1)...(19): siRNA sense strand
gggaaaucacaaagaugga

SEQ ID NO: 2436611 - RNA, 19 nt, Homo sapiens
  misc_RNA (1)...(19): siRNA sense strand
ugaucuuccugaugggcaa

SEQ ID NO: 2436612 - RNA, 19 nt, Homo sapiens
  misc_RNA (1)...(19): siRNA sense strand
ggucgauugcuuuggugaa

SEQ ID NO: 2436613 - RNA, 19 nt, Homo sapiens
  misc_RNA (1)...(19): siRNA sense strand
auagggaggcuguggaaga

SEQ ID NO: 2436614 - RNA, 19 nt, Homo sapiens
  misc_RNA (1)...(19): siRNA sense strand
gagccaaaucugaggcaac

SEQ ID NO: 2436615 - RNA, 19 nt, Homo sapiens
  misc_RNA (1)...(19): siRNA sense strand
ggcccuggaaggugacaaa

SEQ ID NO: 2436616 - RNA, 19 nt, Homo sapiens
  misc_RNA (1)...(19): siRNA sense strand
ucacaaagauggaagcccu

SEQ ID NO: 2436617 - RNA, 19 nt, Homo sapiens
  misc_RNA (1)...(19): siRNA sense strand
uugaaugggaaccgagcaa

SEQ ID NO: 2436618 - RNA, 19 nt, Homo sapiens
  misc_RNA (1)...(19): siRNA sense strand
agauggaagcccugaaguu

SEQ ID NO: 2436619 - RNA, 19 nt, Homo sapiens
  misc_RNA (1)...(19): siRNA sense strand
ggugacaaaaccaaagaaa

SEQ ID NO: 2436620 - RNA, 19 nt, Homo sapiens
  misc_RNA (1)...(19): siRNA sense strand
acuaugaaugauaaggcaa

SEQ ID NO: 2436621 - RNA, 19 nt, Homo sapiens
  misc_RNA (1)...(19): siRNA sense strand
ggccagaacaauauaggga

SEQ ID NO: 2436622 - RNA, 19 nt, Homo sapiens
  misc_RNA (1)...(19): siRNA sense strand
cuacaauuuagucagcaaa

SEQ ID NO: 2436623 - RNA, 19 nt, Homo sapiens
  misc_RNA (1)...(19): siRNA sense strand
gcucacacuggcaaagaau

SEQ ID NO: 2436624 - RNA, 19 nt, Homo sapiens
  misc_RNA (1)...(19): siRNA sense strand
ccuccaugcuagucguuga

SEQ ID NO: 2436625 - RNA, 19 nt, Homo sapiens
  misc_RNA (1)...(19): siRNA sense strand
aagugaugcuagagagccu

SEQ ID NO: 2436626 - RNA, 19 nt, Homo sapiens
  misc_RNA (1)...(19): siRNA sense strand
ccugagaguuauugauccu

SEQ ID NO: 2436627 - RNA, 19 nt, Homo sapiens
  misc_RNA (1)...(19): siRNA sense strand
ccacucaagaauauguaau

SEQ ID NO: 2436628 - RNA, 19 nt, Homo sapiens
  misc_RNA (1)...(19): siRNA sense strand
cgguugaagcggagaccaa

SEQ ID NO: 2436629 - RNA, 19 nt, Homo sapiens
  misc_RNA (1)...(19): siRNA sense strand
ccaugaaguacaucggcuu

SEQ ID NO: 2436630 - RNA, 19 nt, Homo sapiens
  misc_RNA (1)...(19): siRNA sense strand
cugagaaggcagagauggu

SEQ ID NO: 2436631 - RNA, 19 nt, Homo sapiens
  misc_RNA (1)...(19): siRNA sense strand
agagaagauccuagagcuu

SEQ ID NO: 2436632 - RNA, 19 nt, Homo sapiens
  misc_RNA (1)...(19): siRNA sense strand
acuuugagaagaugagaau

SEQ ID NO: 2436633 - RNA, 19 nt, Homo sapiens
  misc_RNA (1)...(19): siRNA sense strand
gcccaaaccucauccgaga

SEQ ID NO: 2436634 - RNA, 19 nt, Homo sapiens
  misc_RNA (1)...(19): siRNA sense strand
ccaccaucauccugcgaga

SEQ ID NO: 2436635 - RNA, 19 nt, Homo sapiens
  misc_RNA (1)...(19): siRNA sense strand
gcaaaguggugcuggugcu

SEQ ID NO: 2436636 - RNA, 19 nt, Homo sapiens
  misc_RNA (1)...(19): siRNA sense strand
aggaagugcaugagcugau

SEQ ID NO: 2436637 - RNA, 19 nt, Homo sapiens
  misc_RNA (1)...(19): siRNA sense strand
gcuucaaugagcugcagua

SEQ ID NO: 2436638 - RNA, 19 nt, Homo sapiens
  misc_RNA (1)...(19): siRNA sense strand
cucaugagauggaggagga

SEQ ID NO: 2436639 - RNA, 19 nt, Homo sapiens
  misc_RNA (1)...(19): siRNA sense strand
uggacaagcaggacuucaa

SEQ ID NO: 2436640 - RNA, 19 nt, Homo sapiens
  misc_RNA (1)...(19): siRNA sense strand
acaucaaggcuguggccca

SEQ ID NO: 2436641 - RNA, 19 nt, Homo sapiens
  misc_RNA (1)...(19): siRNA sense strand
agaccaugcggcuggaaga

SEQ ID NO: 2436642 - RNA, 19 nt, Homo sapiens
  misc_RNA (1)...(19): siRNA sense strand
ucauggaaccaccggguau

SEQ ID NO: 2436643 - RNA, 19 nt, Homo sapiens
  misc_RNA (1)...(19): siRNA sense strand
ggaucuuggcccugggacu

SEQ ID NO: 2436644 - RNA, 19 nt, Homo sapiens
  misc_RNA (1)...(19): siRNA sense strand
augagauggaggaggaguu

SEQ ID NO: 2436645 - RNA, 19 nt, Homo sapiens
  misc_RNA (1)...(19): siRNA sense strand
ucuuugaaccacacagcaa

SEQ ID NO: 2436646 - RNA, 19 nt, Homo sapiens
  misc_RNA (1)...(19): siRNA sense strand
accucaaggagcagaagaa

SEQ ID NO: 2436647 - RNA, 19 nt, Homo sapiens
  misc_RNA (1)...(19): siRNA sense strand
gggagcugguggaugggau

SEQ ID NO: 2436648 - RNA, 19 nt, Homo sapiens
  misc_RNA (1)...(19): siRNA sense strand
ucucagaccuggugggcag

SEQ ID NO: 2436649 - RNA, 19 nt, Homo sapiens
  misc_RNA (1)...(19): siRNA sense strand
aagcaggacuucaaccgua

SEQ ID NO: 2436650 - RNA, 19 nt, Homo sapiens
  misc_RNA (1)...(19): siRNA sense strand
ggaauaaacugcagggaga

SEQ ID NO: 2436651 - RNA, 19 nt, Homo sapiens
  misc_RNA (1)...(19): siRNA sense strand
ccacagagcuggugcccua

SEQ ID NO: 2436652 - RNA, 19 nt, Homo sapiens
  misc_RNA (1)...(19): siRNA sense strand
cggaggaccagaagggcaa

SEQ ID NO: 2436653 - RNA, 19 nt, Homo sapiens
  misc_RNA (1)...(19): siRNA sense strand
gugaagagcugcacggagu

SEQ ID NO: 2436654 - RNA, 19 nt, Homo sapiens
  misc_RNA (1)...(19): siRNA sense strand
ccucgguggugguggaaga

SEQ ID NO: 2436655 - RNA, 19 nt, Homo sapiens
  misc_RNA (1)...(19): siRNA sense strand
gcuuuaaggaagaccacua

SEQ ID NO: 2436656 - RNA, 19 nt, Homo sapiens
  misc_RNA (1)...(19): siRNA sense strand
uggaagaccuccugcccaa

SEQ ID NO: 2436657 - RNA, 19 nt, Homo sapiens
  misc_RNA (1)...(19): siRNA sense strand
gggagagcaucguggucau

SEQ ID NO: 2436658 - RNA, 19 nt, Homo sapiens
  misc_RNA (1)...(19): siRNA sense strand
ccuacaaguucaaggugca

SEQ ID NO: 2436659 - RNA, 19 nt, Homo sapiens
  misc_RNA (1)...(19): siRNA sense strand
aguacaggacacaggacua

SEQ ID NO: 2436660 - RNA, 19 nt, Homo sapiens
  misc_RNA (1)...(19): siRNA sense strand
ggguaaaguacuggauuca

SEQ ID NO: 2436661 - RNA, 19 nt, Homo sapiens
  misc_RNA (1)...(19): siRNA sense strand
gcugugugcacgagggaca

SEQ ID NO: 2436662 - RNA, 19 nt, Homo sapiens
  misc_RNA (1)...(19): siRNA sense strand
gaaugcaacuucaagguca

SEQ ID NO: 2436663 - RNA, 19 nt, Homo sapiens
  misc_RNA (1)...(19): siRNA sense strand
cugcugaagcuuacagaga

SEQ ID NO: 2436664 - RNA, 19 nt, Homo sapiens
  misc_RNA (1)...(19): siRNA sense strand
uggaaagagcugcagguga

SEQ ID NO: 2436665 - RNA, 19 nt, Homo sapiens
  misc_RNA (1)...(19): siRNA sense strand
gugaauggccggauggacu

SEQ ID NO: 2436666 - RNA, 19 nt, Homo sapiens
  misc_RNA (1)...(19): siRNA sense strand
cggcugagaccaacgguga

SEQ ID NO: 2436667 - RNA, 19 nt, Homo sapiens
  misc_RNA (1)...(19): siRNA sense strand
acacugaccaccagcggaa

SEQ ID NO: 2436668 - RNA, 19 nt, Homo sapiens
  misc_RNA (1)...(19): siRNA sense strand
aaugcaacuucaaggucaa

SEQ ID NO: 2436669 - RNA, 19 nt, Homo sapiens
  misc_RNA (1)...(19): siRNA sense strand
ugaacgaggucuacaggca

SEQ ID NO: 2436670 - RNA, 19 nt, Homo sapiens
  misc_RNA (1)...(19): siRNA sense strand
gcugaagcuuacagagaag

SEQ ID NO: 2436671 - RNA, 19 nt, Homo sapiens
  misc_RNA (1)...(19): siRNA sense strand
gggaggacuacgacagcuu

SEQ ID NO: 2436672 - RNA, 19 nt, Homo sapiens
  misc_RNA (1)...(19): siRNA sense strand
gcuacaguguggaguacca

SEQ ID NO: 2436673 - RNA, 19 nt, Homo sapiens
  misc_RNA (1)...(19): siRNA sense strand
aggaugacgacgagaagca

SEQ ID NO: 2436674 - RNA, 19 nt, Homo sapiens
  misc_RNA (1)...(19): siRNA sense strand
cugaggaugacgacgagaa

SEQ ID NO: 2436675 - RNA, 19 nt, Homo sapiens
  misc_RNA (1)...(19): siRNA sense strand
ccgcagaaccccaaugcua

SEQ ID NO: 2436676 - RNA, 19 nt, Homo sapiens
  misc_RNA (1)...(19): siRNA sense strand
ucucugggaccuuggcaaa

SEQ ID NO: 2436677 - RNA, 19 nt, Homo sapiens
  misc_RNA (1)...(19): siRNA sense strand
gggucaguucugcgaguau

SEQ ID NO: 2436678 - RNA, 19 nt, Homo sapiens
  misc_RNA (1)...(19): siRNA sense strand
gugcacaagaagaaggacu

SEQ ID NO: 2436679 - RNA, 19 nt, Homo sapiens
  misc_RNA (1)...(19): siRNA sense strand
caucaaggagcaagccaga

SEQ ID NO: 2436680 - RNA, 19 nt, Homo sapiens
  misc_RNA (1)...(19): siRNA sense strand
ugagauggcccaaggagga

SEQ ID NO: 2436681 - RNA, 19 nt, Homo sapiens
  misc_RNA (1)...(19): siRNA sense strand
gugugagccugguuggaca

SEQ ID NO: 2436682 - RNA, 19 nt, Homo sapiens
  misc_RNA (1)...(19): siRNA sense strand
aguacuggauucagggcga

SEQ ID NO: 2436683 - RNA, 19 nt, Homo sapiens
  misc_RNA (1)...(19): siRNA sense strand
aggguaaaguacuggauuc

SEQ ID NO: 2436684 - RNA, 19 nt, Homo sapiens
  misc_RNA (1)...(19): siRNA sense strand
cagacgagauguucaggga

SEQ ID NO: 2436685 - RNA, 19 nt, Homo sapiens
  misc_RNA (1)...(19): siRNA sense strand
ccuauugggcccaugaaga

SEQ ID NO: 2436686 - RNA, 19 nt, Homo sapiens
  misc_RNA (1)...(19): siRNA sense strand
ccaagauguuccagaagac

SEQ ID NO: 2436687 - RNA, 19 nt, Homo sapiens
  misc_RNA (1)...(19): siRNA sense strand
ucguggagcugcuggagga

SEQ ID NO: 2436688 - RNA, 19 nt, Homo sapiens
  misc_RNA (1)...(19): siRNA sense strand
cugcaaagcgaguacagca

SEQ ID NO: 2436689 - RNA, 19 nt, Homo sapiens
  misc_RNA (1)...(19): siRNA sense strand
ggaaagaguuguauggcua

SEQ ID NO: 2436690 - RNA, 19 nt, Homo sapiens
  misc_RNA (1)...(19): siRNA sense strand
aggaauggguagagaaaau

SEQ ID NO: 2436691 - RNA, 19 nt, Homo sapiens
  misc_RNA (1)...(19): siRNA sense strand
agucauggauggugaggga

SEQ ID NO: 2436692 - RNA, 19 nt, Homo sapiens
  misc_RNA (1)...(19): siRNA sense strand
augcagagggccaggacua

SEQ ID NO: 2436693 - RNA, 19 nt, Homo sapiens
  misc_RNA (1)...(19): siRNA sense strand
agcagaagcuagugaacau

SEQ ID NO: 2436694 - RNA, 19 nt, Homo sapiens
  misc_RNA (1)...(19): siRNA sense strand
cuaagaaaggucuggaaca

SEQ ID NO: 2436695 - RNA, 19 nt, Homo sapiens
  misc_RNA (1)...(19): siRNA sense strand
ucuugaaagcaaugaggaa

SEQ ID NO: 2436696 - RNA, 19 nt, Homo sapiens
  misc_RNA (1)...(19): siRNA sense strand
agaaguguuuugugggaaa

SEQ ID NO: 2436697 - RNA, 19 nt, Homo sapiens
  misc_RNA (1)...(19): siRNA sense strand
gagcauaguguuugggauc

SEQ ID NO: 2436698 - RNA, 19 nt, Homo sapiens
  misc_RNA (1)...(19): siRNA sense strand
cgagcagagacccgggaaa

SEQ ID NO: 2436699 - RNA, 19 nt, Homo sapiens
  misc_RNA (1)...(19): siRNA sense strand
ccgcaagaacagagaguug

SEQ ID NO: 2436700 - RNA, 19 nt, Homo sapiens
  misc_RNA (1)...(19): siRNA sense strand
augaaggacuaaaggaguu

SEQ ID NO: 2436701 - RNA, 19 nt, Homo sapiens
  misc_RNA (1)...(19): siRNA sense strand
gcacaguauccaagagaag

SEQ ID NO: 2436702 - RNA, 19 nt, Homo sapiens
  misc_RNA (1)...(19): siRNA sense strand
augaaauagccgaguacau

SEQ ID NO: 2436703 - RNA, 19 nt, Homo sapiens
  misc_RNA (1)...(19): siRNA sense strand
cagugaagcuaaauggguu

SEQ ID NO: 2436704 - RNA, 19 nt, Homo sapiens
  misc_RNA (1)...(19): siRNA sense strand
uugaaagcaaugaggaaga

SEQ ID NO: 2436705 - RNA, 19 nt, Homo sapiens
  misc_RNA (1)...(19): siRNA sense strand
ggaagaaaaugguggugca

SEQ ID NO: 2436706 - RNA, 19 nt, Homo sapiens
  misc_RNA (1)...(19): siRNA sense strand
uggagcaaauagugaccua

SEQ ID NO: 2436707 - RNA, 19 nt, Homo sapiens
  misc_RNA (1)...(19): siRNA sense strand
cagaaguggagcaguauca

SEQ ID NO: 2436708 - RNA, 19 nt, Homo sapiens
  misc_RNA (1)...(19): siRNA sense strand
gggaaagaguuguauggcu

SEQ ID NO: 2436709 - RNA, 19 nt, Homo sapiens
  misc_RNA (1)...(19): siRNA sense strand
gugauuaaagugaaggcau

SEQ ID NO: 2436710 - RNA, 19 nt, Homo sapiens
  misc_RNA (1)...(19): siRNA sense strand
gacuaaaggaguuaauaca

SEQ ID NO: 2436711 - RNA, 19 nt, Homo sapiens
  misc_RNA (1)...(19): siRNA sense strand
agaaaaugauggacgcaga

SEQ ID NO: 2436712 - RNA, 19 nt, Homo sapiens
  misc_RNA (1)...(19): siRNA sense strand
uugacgaagcucagaauuu

SEQ ID NO: 2436713 - RNA, 19 nt, Homo sapiens
  misc_RNA (1)...(19): siRNA sense strand
ucauggauggugagggaga

SEQ ID NO: 2436714 - RNA, 19 nt, Homo sapiens
  misc_RNA (1)...(19): siRNA sense strand
ccaccaggacauuuggaau

SEQ ID NO: 2436715 - RNA, 19 nt, Homo sapiens
  misc_RNA (1)...(19): siRNA sense strand
ucaccagaguaguucgcaa

SEQ ID NO: 2436716 - RNA, 19 nt, Homo sapiens
  misc_RNA (1)...(19): siRNA sense strand
gaagauggggacugguaua

SEQ ID NO: 2436717 - RNA, 19 nt, Homo sapiens
  misc_RNA (1)...(19): siRNA sense strand
gggcuguggaccugaacuu

SEQ ID NO: 2436718 - RNA, 19 nt, Homo sapiens
  misc_RNA (1)...(19): siRNA sense strand
ggagcauaguguuugggau

SEQ ID NO: 2436719 - RNA, 19 nt, Homo sapiens
  misc_RNA (1)...(19): siRNA sense strand
accaucacucagagagaaa

SEQ ID NO: 2436720 - RNA, 19 nt, Homo sapiens
  misc_RNA (1)...(19): siRNA sense strand
cugaggaauggguagagaa

SEQ ID NO: 2436721 - RNA, 19 nt, Homo sapiens
  misc_RNA (1)...(19): siRNA sense strand
uuuacagcaugaaggacua

SEQ ID NO: 2436722 - RNA, 19 nt, Homo sapiens
  misc_RNA (1)...(19): siRNA sense strand
ccaaaaucguagaaguguu

SEQ ID NO: 2436723 - RNA, 19 nt, Homo sapiens
  misc_RNA (1)...(19): siRNA sense strand
aagcaaugaggaagaaaau

SEQ ID NO: 2436724 - RNA, 19 nt, Homo sapiens
  misc_RNA (1)...(19): siRNA sense strand
cauacaacaagaaaugcaa

SEQ ID NO: 2436725 - RNA, 19 nt, Homo sapiens
  misc_RNA (1)...(19): siRNA sense strand
caggcaacacaaagauuau

SEQ ID NO: 2436726 - RNA, 19 nt, Homo sapiens
  misc_RNA (1)...(19): siRNA sense strand
aaaccaucacucagagaga

SEQ ID NO: 2436727 - RNA, 19 nt, Homo sapiens
  misc_RNA (1)...(19): siRNA sense strand
aauucucagugaagcuaaa

SEQ ID NO: 2436728 - RNA, 19 nt, Homo sapiens
  misc_RNA (1)...(19): siRNA sense strand
cuaaauggguuccaggugu

SEQ ID NO: 2436729 - RNA, 19 nt, Homo sapiens
  misc_RNA (1)...(19): siRNA sense strand
cccaagucauggaugguga

SEQ ID NO: 2436730 - RNA, 19 nt, Homo sapiens
  misc_RNA (1)...(19): siRNA sense strand
caggagaagccaggaguca

SEQ ID NO: 2436731 - RNA, 19 nt, Homo sapiens
  misc_RNA (1)...(19): siRNA sense strand
cggguagaguacagcacca

SEQ ID NO: 2436732 - RNA, 19 nt, Homo sapiens
  misc_RNA (1)...(19): siRNA sense strand
caagaggaaccgagggaga

SEQ ID NO: 2436733 - RNA, 19 nt, Homo sapiens
  misc_RNA (1)...(19): siRNA sense strand
cggaguugcauaagggaga

SEQ ID NO: 2436734 - RNA, 19 nt, Homo sapiens
  misc_RNA (1)...(19): siRNA sense strand
acaccuggucagagaacaa

SEQ ID NO: 2436735 - RNA, 19 nt, Homo sapiens
  misc_RNA (1)...(19): siRNA sense strand
ccgucagacccaagccaaa

SEQ ID NO: 2436736 - RNA, 19 nt, Homo sapiens
  misc_RNA (1)...(19): siRNA sense strand
ccaaagaagaggaaagagc

SEQ ID NO: 2436737 - RNA, 19 nt, Homo sapiens
  misc_RNA (1)...(19): siRNA sense strand
cauaagggagauucagauu

SEQ ID NO: 2436738 - RNA, 19 nt, Homo sapiens
  misc_RNA (1)...(19): siRNA sense strand
gagggagagaagaaaucaa

SEQ ID NO: 2436739 - RNA, 19 nt, Homo sapiens
  misc_RNA (1)...(19): siRNA sense strand
aagccaaagaagaggaaag

SEQ ID NO: 2436740 - RNA, 19 nt, Homo sapiens
  misc_RNA (1)...(19): siRNA sense strand
cggaaacaccagaucacau

SEQ ID NO: 2436741 - RNA, 19 nt, Homo sapiens
  misc_RNA (1)...(19): siRNA sense strand
aggaagaugaacccacaaa

SEQ ID NO: 2436742 - RNA, 19 nt, Homo sapiens
  misc_RNA (1)...(19): siRNA sense strand
uuaagcggcugcagggcaa

SEQ ID NO: 2436743 - RNA, 19 nt, Homo sapiens
  misc_RNA (1)...(19): siRNA sense strand
gggagcuggaacugaagaa

SEQ ID NO: 2436744 - RNA, 19 nt, Homo sapiens
  misc_RNA (1)...(19): siRNA sense strand
gcauaagggagauucagau

SEQ ID NO: 2436745 - RNA, 19 nt, Homo sapiens
  misc_RNA (1)...(19): siRNA sense strand
gcuucuaagaccaagacuu

SEQ ID NO: 2436746 - RNA, 19 nt, Homo sapiens
  misc_RNA (1)...(19): siRNA sense strand
ggcaagaggaaccgaggga

SEQ ID NO: 2436747 - RNA, 19 nt, Homo sapiens
  misc_RNA (1)...(19): siRNA sense strand
caagaggaaccgagggaga

SEQ ID NO: 2436748 - RNA, 19 nt, Homo sapiens
  misc_RNA (1)...(19): siRNA sense strand
cggaguugcauaagggaga

SEQ ID NO: 2436749 - RNA, 19 nt, Homo sapiens
  misc_RNA (1)...(19): siRNA sense strand
acaccuggucagagaacaa

SEQ ID NO: 2436750 - RNA, 19 nt, Homo sapiens
  misc_RNA (1)...(19): siRNA sense strand
ccgucagacccaagccaaa

SEQ ID NO: 2436751 - RNA, 19 nt, Homo sapiens
  misc_RNA (1)...(19): siRNA sense strand
ccaaagaagaggaaagagc

SEQ ID NO: 2436752 - RNA, 19 nt, Homo sapiens
  misc_RNA (1)...(19): siRNA sense strand
cauaagggagauucagauu

SEQ ID NO: 2436753 - RNA, 19 nt, Homo sapiens
  misc_RNA (1)...(19): siRNA sense strand
gagggagagaagaaaucaa

SEQ ID NO: 2436754 - RNA, 19 nt, Homo sapiens
  misc_RNA (1)...(19): siRNA sense strand
aagccaaagaagaggaaag

SEQ ID NO: 2436755 - RNA, 19 nt, Homo sapiens
  misc_RNA (1)...(19): siRNA sense strand
cggaaacaccagaucacau

SEQ ID NO: 2436756 - RNA, 19 nt, Homo sapiens
  misc_RNA (1)...(19): siRNA sense strand
aggaagaugaacccacaaa

SEQ ID NO: 2436757 - RNA, 19 nt, Homo sapiens
  misc_RNA (1)...(19): siRNA sense strand
uuaagcggcugcagggcaa

SEQ ID NO: 2436758 - RNA, 19 nt, Homo sapiens
  misc_RNA (1)...(19): siRNA sense strand
gggagcuggaacugaagaa

SEQ ID NO: 2436759 - RNA, 19 nt, Homo sapiens
  misc_RNA (1)...(19): siRNA sense strand
gcauaagggagauucagau

SEQ ID NO: 2436760 - RNA, 19 nt, Homo sapiens
  misc_RNA (1)...(19): siRNA sense strand
gcuucuaagaccaagacuu

SEQ ID NO: 2436761 - RNA, 19 nt, Homo sapiens
  misc_RNA (1)...(19): siRNA sense strand
ggcaagaggaaccgaggga

SEQ ID NO: 2436762 - RNA, 19 nt, Homo sapiens
  misc_RNA (1)...(19): siRNA sense strand
ggauaaagcuguaugcugu

SEQ ID NO: 2436763 - RNA, 19 nt, Homo sapiens
  misc_RNA (1)...(19): siRNA sense strand
acucaaaaguggagaagau

SEQ ID NO: 2436764 - RNA, 19 nt, Homo sapiens
  misc_RNA (1)...(19): siRNA sense strand
caucauugucagugagcuu

SEQ ID NO: 2436765 - RNA, 19 nt, Homo sapiens
  misc_RNA (1)...(19): siRNA sense strand
auacgcuaauugugggaaa

SEQ ID NO: 2436766 - RNA, 19 nt, Homo sapiens
  misc_RNA (1)...(19): siRNA sense strand
ccuaugaacucuuugccaa

SEQ ID NO: 2436767 - RNA, 19 nt, Homo sapiens
  misc_RNA (1)...(19): siRNA sense strand
ugaccaauaagaagggauu

SEQ ID NO: 2436768 - RNA, 19 nt, Homo sapiens
  misc_RNA (1)...(19): siRNA sense strand
gcuaauugugggaaagcuu

SEQ ID NO: 2436769 - RNA, 19 nt, Homo sapiens
  misc_RNA (1)...(19): siRNA sense strand
cagagaaagcagacaucau

SEQ ID NO: 2436770 - RNA, 19 nt, Homo sapiens
  misc_RNA (1)...(19): siRNA sense strand
cccuuaaucaggaagauaa

SEQ ID NO: 2436771 - RNA, 19 nt, Homo sapiens
  misc_RNA (1)...(19): siRNA sense strand
gggaauggguggcuccaga

SEQ ID NO: 2436772 - RNA, 19 nt, Homo sapiens
  misc_RNA (1)...(19): siRNA sense strand
gaguaccagaagaggagaa

SEQ ID NO: 2436773 - RNA, 19 nt, Homo sapiens
  misc_RNA (1)...(19): siRNA sense strand
acacaguacuacauggcuu

SEQ ID NO: 2436774 - RNA, 19 nt, Homo sapiens
  misc_RNA (1)...(19): siRNA sense strand
ggagaagauucgcaggaac

SEQ ID NO: 2436775 - RNA, 19 nt, Homo sapiens
  misc_RNA (1)...(19): siRNA sense strand
ccauguuacaggagcugaa

SEQ ID NO: 2436776 - RNA, 19 nt, Homo sapiens
  misc_RNA (1)...(19): siRNA sense strand
uguuacaggagcugaauuu

SEQ ID NO: 2436777 - RNA, 19 nt, Homo sapiens
  misc_RNA (1)...(19): siRNA sense strand
gaguauccguccagagacu

SEQ ID NO: 2436778 - RNA, 19 nt, Homo sapiens
  misc_RNA (1)...(19): siRNA sense strand
ccgaaauagcugacacacu

SEQ ID NO: 2436779 - RNA, 19 nt, Homo sapiens
  misc_RNA (1)...(19): siRNA sense strand
guccgagccuguagggaga

SEQ ID NO: 2436780 - RNA, 19 nt, Homo sapiens
  misc_RNA (1)...(19): siRNA sense strand
ccagacacgaucagaccua

SEQ ID NO: 2436781 - RNA, 19 nt, Homo sapiens
  misc_RNA (1)...(19): siRNA sense strand
ccaagggcuaugaagacua

SEQ ID NO: 2436782 - RNA, 19 nt, Homo sapiens
  misc_RNA (1)...(19): siRNA sense strand
auuccaagaagguguggua

SEQ ID NO: 2436783 - RNA, 19 nt, Homo sapiens
  misc_RNA (1)...(19): siRNA sense strand
gacuauaguaagaggauug

SEQ ID NO: 2436784 - RNA, 19 nt, Homo sapiens
  misc_RNA (1)...(19): siRNA sense strand
gcugaauuuuggugcauau

SEQ ID NO: 2436785 - RNA, 19 nt, Homo sapiens
  misc_RNA (1)...(19): siRNA sense strand
uaccagaagaggagaagga

SEQ ID NO: 2436786 - RNA, 19 nt, Homo sapiens
  misc_RNA (1)...(19): siRNA sense strand
aagaggagaaggauaccaa

SEQ ID NO: 2436787 - RNA, 19 nt, Homo sapiens
  misc_RNA (1)...(19): siRNA sense strand
aagaugauggugugagcau

SEQ ID NO: 2436788 - RNA, 19 nt, Homo sapiens
  misc_RNA (1)...(19): siRNA sense strand
ggagaaggaccgugacccu

SEQ ID NO: 2436789 - RNA, 19 nt, Homo sapiens
  misc_RNA (1)...(19): siRNA sense strand
aguuggaggugcaguucau

SEQ ID NO: 2436790 - RNA, 19 nt, Homo sapiens
  misc_RNA (1)...(19): siRNA sense strand
gaagaaaacaguuggggaa

SEQ ID NO: 2436791 - RNA, 19 nt, Homo sapiens
  misc_RNA (1)...(19): siRNA sense strand
agacaaaacugcaggccau

SEQ ID NO: 2436792 - RNA, 19 nt, Homo sapiens
  misc_RNA (1)...(19): siRNA sense strand
gcaagacccuucuggccaa

SEQ ID NO: 2436793 - RNA, 19 nt, Homo sapiens
  misc_RNA (1)...(19): siRNA sense strand
ggaggaagggcuggaacaa

SEQ ID NO: 2436794 - RNA, 19 nt, Homo sapiens
  misc_RNA (1)...(19): siRNA sense strand
agacaaaggaagcugcuca

SEQ ID NO: 2436795 - RNA, 19 nt, Homo sapiens
  misc_RNA (1)...(19): siRNA sense strand
ggaacaagguagcucagca

SEQ ID NO: 2436796 - RNA, 19 nt, Homo sapiens
  misc_RNA (1)...(19): siRNA sense strand
ccuuguacaugguggguuc

SEQ ID NO: 2436797 - RNA, 19 nt, Homo sapiens
  misc_RNA (1)...(19): siRNA sense strand
caucugugagccugguaaa

SEQ ID NO: 2436798 - RNA, 19 nt, Homo sapiens
  misc_RNA (1)...(19): siRNA sense strand
uggaggaagggcuggaaca

SEQ ID NO: 2436799 - RNA, 19 nt, Homo sapiens
  misc_RNA (1)...(19): siRNA sense strand
acuacagcacuaauggaaa

SEQ ID NO: 2436800 - RNA, 19 nt, Homo sapiens
  misc_RNA (1)...(19): siRNA sense strand
ggcugcaggaggugaagaa

SEQ ID NO: 2436801 - RNA, 19 nt, Homo sapiens
  misc_RNA (1)...(19): siRNA sense strand
agcucagaauucagaggua

SEQ ID NO: 2436802 - RNA, 19 nt, Homo sapiens
  misc_RNA (1)...(19): siRNA sense strand
caggaggugaagaaggaga

SEQ ID NO: 2436803 - RNA, 19 nt, Homo sapiens
  misc_RNA (1)...(19): siRNA sense strand
gugaggagaaugugcggga

SEQ ID NO: 2436804 - RNA, 19 nt, Homo sapiens
  misc_RNA (1)...(19): siRNA sense strand
aaggaaguccagagaaacu

SEQ ID NO: 2436805 - RNA, 19 nt, Homo sapiens
  misc_RNA (1)...(19): siRNA sense strand
gcaucauggaagaggaaga

SEQ ID NO: 2436806 - RNA, 19 nt, Homo sapiens
  misc_RNA (1)...(19): siRNA sense strand
aggaaggccaggagaagau

SEQ ID NO: 2436807 - RNA, 19 nt, Homo sapiens
  misc_RNA (1)...(19): siRNA sense strand
ucuuccagaucgugagcaa

SEQ ID NO: 2436808 - RNA, 19 nt, Homo sapiens
  misc_RNA (1)...(19): siRNA sense strand
cuauggugcagaagaagaa

SEQ ID NO: 2436809 - RNA, 19 nt, Homo sapiens
  misc_RNA (1)...(19): siRNA sense strand
aggaaaaggaugaugagau

SEQ ID NO: 2436810 - RNA, 19 nt, Homo sapiens
  misc_RNA (1)...(19): siRNA sense strand
cgcaggaaggccaggagaa

SEQ ID NO: 2436811 - RNA, 19 nt, Homo sapiens
  misc_RNA (1)...(19): siRNA sense strand
aagccaacaaggagcgaga

SEQ ID NO: 2436812 - RNA, 19 nt, Homo sapiens
  misc_RNA (1)...(19): siRNA sense strand
cgcgcuacauggaggaaaa

SEQ ID NO: 2436813 - RNA, 19 nt, Homo sapiens
  misc_RNA (1)...(19): siRNA sense strand
agaaggaacaacagcgagu

SEQ ID NO: 2436814 - RNA, 19 nt, Homo sapiens
  misc_RNA (1)...(19): siRNA sense strand
guauauuacucgagggguu

SEQ ID NO: 2436815 - RNA, 19 nt, Homo sapiens
  misc_RNA (1)...(19): siRNA sense strand
uuguaaugcuguuugggua

SEQ ID NO: 2436816 - RNA, 19 nt, Homo sapiens
  misc_RNA (1)...(19): siRNA sense strand
ccaagauagaaguggauuc

SEQ ID NO: 2436817 - RNA, 19 nt, Homo sapiens
  misc_RNA (1)...(19): siRNA sense strand
ucagggaaguagaucgaga

SEQ ID NO: 2436818 - RNA, 19 nt, Homo sapiens
  misc_RNA (1)...(19): siRNA sense strand
ccaaauuaccggaaaggac

SEQ ID NO: 2436819 - RNA, 19 nt, Homo sapiens
  misc_RNA (1)...(19): siRNA sense strand
gaugaagaucacaaaggau

SEQ ID NO: 2436820 - RNA, 19 nt, Homo sapiens
  misc_RNA (1)...(19): siRNA sense strand
ggguacaagcccuccaaga

SEQ ID NO: 2436821 - RNA, 19 nt, Homo sapiens
  misc_RNA (1)...(19): siRNA sense strand
ccuuggacaugcagggcaa

SEQ ID NO: 2436822 - RNA, 19 nt, Homo sapiens
  misc_RNA (1)...(19): siRNA sense strand
gcacugaacuacuccgaga

SEQ ID NO: 2436823 - RNA, 19 nt, Homo sapiens
  misc_RNA (1)...(19): siRNA sense strand
cgugaagcgaggugguaau

SEQ ID NO: 2436824 - RNA, 19 nt, Homo sapiens
  misc_RNA (1)...(19): siRNA sense strand
aggaggaagaggaggagga

SEQ ID NO: 2436825 - RNA, 19 nt, Homo sapiens
  misc_RNA (1)...(19): siRNA sense strand
acacaggucucaagcccua

SEQ ID NO: 2436826 - RNA, 19 nt, Homo sapiens
  misc_RNA (1)...(19): siRNA sense strand
uggaggaggaagaggagga

SEQ ID NO: 2436827 - RNA, 19 nt, Homo sapiens
  misc_RNA (1)...(19): siRNA sense strand
cuggaaagcugcugcugga

SEQ ID NO: 2436828 - RNA, 19 nt, Homo sapiens
  misc_RNA (1)...(19): siRNA sense strand
cagaucuggaggaggaaga

SEQ ID NO: 2436829 - RNA, 19 nt, Homo sapiens
  misc_RNA (1)...(19): siRNA sense strand
gcagaugagcugugcgaug

SEQ ID NO: 2436830 - RNA, 19 nt, Homo sapiens
  misc_RNA (1)...(19): siRNA sense strand
ggguauacgugaagcgagg

SEQ ID NO: 2436831 - RNA, 19 nt, Homo sapiens
  misc_RNA (1)...(19): siRNA sense strand
cugugaggaugaugaagau

SEQ ID NO: 2436832 - RNA, 19 nt, Homo sapiens
  misc_RNA (1)...(19): siRNA sense strand
aggaugaugaagaugaaga

SEQ ID NO: 2436833 - RNA, 19 nt, Homo sapiens
  misc_RNA (1)...(19): siRNA sense strand
ggagaugggcuucggugga

SEQ ID NO: 2436834 - RNA, 19 nt, Homo sapiens
  misc_RNA (1)...(19): siRNA sense strand
uaaagaaaguguuugcuga

SEQ ID NO: 2436835 - RNA, 19 nt, Homo sapiens
  misc_RNA (1)...(19): siRNA sense strand
acaaaggacucucgaccca

SEQ ID NO: 2436836 - RNA, 19 nt, Homo sapiens
  misc_RNA (1)...(19): siRNA sense strand
gauuauguuuguugaccca

SEQ ID NO: 2436837 - RNA, 19 nt, Homo sapiens
  misc_RNA (1)...(19): siRNA sense strand
augaaacaacugacaaaca

SEQ ID NO: 2436838 - RNA, 19 nt, Homo sapiens
  misc_RNA (1)...(19): siRNA sense strand
ucuccaaggccgugcauaa

SEQ ID NO: 2436839 - RNA, 19 nt, Homo sapiens
  misc_RNA (1)...(19): siRNA sense strand
ugaugaaauaccugggcaa

SEQ ID NO: 2436840 - RNA, 19 nt, Homo sapiens
  misc_RNA (1)...(19): siRNA sense strand
aggccaagaaacagaucaa

SEQ ID NO: 2436841 - RNA, 19 nt, Homo sapiens
  misc_RNA (1)...(19): siRNA sense strand
uuuaaaggcaaaugggaga

SEQ ID NO: 2436842 - RNA, 19 nt, Homo sapiens
  misc_RNA (1)...(19): siRNA sense strand
acaccgaggaagaggacuu

SEQ ID NO: 2436843 - RNA, 19 nt, Homo sapiens
  misc_RNA (1)...(19): siRNA sense strand
ucaacgauuacguggagaa

SEQ ID NO: 2436844 - RNA, 19 nt, Homo sapiens
  misc_RNA (1)...(19): siRNA sense strand
ggagcuugacagagacaca

SEQ ID NO: 2436845 - RNA, 19 nt, Homo sapiens
  misc_RNA (1)...(19): siRNA sense strand
augaaauccuggagggccu

SEQ ID NO: 2436846 - RNA, 19 nt, Homo sapiens
  misc_RNA (1)...(19): siRNA sense strand
gggacaccgaagaggccaa

SEQ ID NO: 2436847 - RNA, 19 nt, Homo sapiens
  misc_RNA (1)...(19): siRNA sense strand
cuucuuaaugauugaccaa

SEQ ID NO: 2436848 - RNA, 19 nt, Homo sapiens
  misc_RNA (1)...(19): siRNA sense strand
cgagaaagggacugaagcu

SEQ ID NO: 2436849 - RNA, 19 nt, Homo sapiens
  misc_RNA (1)...(19): siRNA sense strand
gaugaagcguuuaggcaug

SEQ ID NO: 2436850 - RNA, 19 nt, Homo sapiens
  misc_RNA (1)...(19): siRNA sense strand
ugaugaagcguuuaggcau

SEQ ID NO: 2436851 - RNA, 19 nt, Homo sapiens
  misc_RNA (1)...(19): siRNA sense strand
gggagagacccuuugaagu

SEQ ID NO: 2436852 - RNA, 19 nt, Homo sapiens
  misc_RNA (1)...(19): siRNA sense strand
ggagagacccuuugaaguc

SEQ ID NO: 2436853 - RNA, 19 nt, Homo sapiens
  misc_RNA (1)...(19): siRNA sense strand
ccuggaaaaugaagacaga

SEQ ID NO: 2436854 - RNA, 19 nt, Homo sapiens
  misc_RNA (1)...(19): siRNA sense strand
acaucuucuuuaaaggcaa

SEQ ID NO: 2436855 - RNA, 19 nt, Homo sapiens
  misc_RNA (1)...(19): siRNA sense strand
gggaacagcuuguaccaga

SEQ ID NO: 2436856 - RNA, 19 nt, Homo sapiens
  misc_RNA (1)...(19): siRNA sense strand
ccaccaagauccugaggca

SEQ ID NO: 2436857 - RNA, 19 nt, Homo sapiens
  misc_RNA (1)...(19): siRNA sense strand
cagaaagggucgagguggu

SEQ ID NO: 2436858 - RNA, 19 nt, Homo sapiens
  misc_RNA (1)...(19): siRNA sense strand
guuugaagagauugcuaaa

SEQ ID NO: 2436859 - RNA, 19 nt, Homo sapiens
  misc_RNA (1)...(19): siRNA sense strand
gcagaaagcaggcggugga

SEQ ID NO: 2436860 - RNA, 19 nt, Homo sapiens
  misc_RNA (1)...(19): siRNA sense strand
caucaaagcguguggacug

SEQ ID NO: 2436861 - RNA, 19 nt, Homo sapiens
  misc_RNA (1)...(19): siRNA sense strand
aggcacagcacuucaucaa

SEQ ID NO: 2436862 - RNA, 19 nt, Homo sapiens
  misc_RNA (1)...(19): siRNA sense strand
cugcgugggaccagugaau

SEQ ID NO: 2436863 - RNA, 19 nt, Homo sapiens
  misc_RNA (1)...(19): siRNA sense strand
agcucaaggugcugaagau

SEQ ID NO: 2436864 - RNA, 19 nt, Homo sapiens
  misc_RNA (1)...(19): siRNA sense strand
uggaugagcucaagcgaca

SEQ ID NO: 2436865 - RNA, 19 nt, Homo sapiens
  misc_RNA (1)...(19): siRNA sense strand
gggaggagcuggauggacu

SEQ ID NO: 2436866 - RNA, 19 nt, Homo sapiens
  misc_RNA (1)...(19): siRNA sense strand
caaagaaugaggaggacga

SEQ ID NO: 2436867 - RNA, 19 nt, Homo sapiens
  misc_RNA (1)...(19): siRNA sense strand
gaggaagcuggaagagcaa

SEQ ID NO: 2436868 - RNA, 19 nt, Homo sapiens
  misc_RNA (1)...(19): siRNA sense strand
agaaaguguacgacccaaa

SEQ ID NO: 2436869 - RNA, 19 nt, Homo sapiens
  misc_RNA (1)...(19): siRNA sense strand
ggaugcugcucaaggccaa

SEQ ID NO: 2436870 - RNA, 19 nt, Homo sapiens
  misc_RNA (1)...(19): siRNA sense strand
cggagaggaagcuggaaga

SEQ ID NO: 2436871 - RNA, 19 nt, Homo sapiens
  misc_RNA (1)...(19): siRNA sense strand
cugccuacaccgaggaaga

SEQ ID NO: 2436872 - RNA, 19 nt, Homo sapiens
  misc_RNA (1)...(19): siRNA sense strand
agaggaagcuggaagagca

SEQ ID NO: 2436873 - RNA, 19 nt, Homo sapiens
  misc_RNA (1)...(19): siRNA sense strand
cugccaaugcggaggacau

SEQ ID NO: 2436874 - RNA, 19 nt, Homo sapiens
  misc_RNA (1)...(19): siRNA sense strand
agaaugaggaggacgacau

SEQ ID NO: 2436875 - RNA, 19 nt, Homo sapiens
  misc_RNA (1)...(19): siRNA sense strand
acccaaagaaugaggagga

SEQ ID NO: 2436876 - RNA, 19 nt, Homo sapiens
  misc_RNA (1)...(19): siRNA sense strand
ggaagcuggaagagcaaca

SEQ ID NO: 2436877 - RNA, 19 nt, Homo sapiens
  misc_RNA (1)...(19): siRNA sense strand
gcugggagacaguggagau

SEQ ID NO: 2436878 - RNA, 19 nt, Homo sapiens
  misc_RNA (1)...(19): siRNA sense strand
aggaagagcugaggcgcuu

SEQ ID NO: 2436879 - RNA, 19 nt, Homo sapiens
  misc_RNA (1)...(19): siRNA sense strand
agauggaggaggagcgacu

SEQ ID NO: 2436880 - RNA, 19 nt, Homo sapiens
  misc_RNA (1)...(19): siRNA sense strand
caccaaggagcuggagaaa

SEQ ID NO: 2436881 - RNA, 19 nt, Homo sapiens
  misc_RNA (1)...(19): siRNA sense strand
ggagaaaguguacgaccca

SEQ ID NO: 2436882 - RNA, 19 nt, Homo sapiens
  misc_RNA (1)...(19): siRNA sense strand
aguugaaggagguguggga

SEQ ID NO: 2436883 - RNA, 19 nt, Homo sapiens
  misc_RNA (1)...(19): siRNA sense strand
aggccaagauggacgccga

SEQ ID NO: 2436884 - RNA, 19 nt, Homo sapiens
  misc_RNA (1)...(19): siRNA sense strand
augauaagguagagccaaa

SEQ ID NO: 2436885 - RNA, 19 nt, Homo sapiens
  misc_RNA (1)...(19): siRNA sense strand
agguagagccaaagaacaa

SEQ ID NO: 2436886 - RNA, 19 nt, Homo sapiens
  misc_RNA (1)...(19): siRNA sense strand
aggaagaauucgauccaaa

SEQ ID NO: 2436887 - RNA, 19 nt, Homo sapiens
  misc_RNA (1)...(19): siRNA sense strand
acuaauaccuucaggccaa

SEQ ID NO: 2436888 - RNA, 19 nt, Homo sapiens
  misc_RNA (1)...(19): siRNA sense strand
ccuaagaggagacaggaaa

SEQ ID NO: 2436889 - RNA, 19 nt, Homo sapiens
  misc_RNA (1)...(19): siRNA sense strand
caacagaagaauugaggau

SEQ ID NO: 2436890 - RNA, 19 nt, Homo sapiens
  misc_RNA (1)...(19): siRNA sense strand
ccaaagaaaagaagaagaa

SEQ ID NO: 2436891 - RNA, 19 nt, Homo sapiens
  misc_RNA (1)...(19): siRNA sense strand
cuaagagaccuaagaggaa

SEQ ID NO: 2436892 - RNA, 19 nt, Homo sapiens
  misc_RNA (1)...(19): siRNA sense strand
auaagaaaccaucaggaaa

SEQ ID NO: 2436893 - RNA, 19 nt, Homo sapiens
  misc_RNA (1)...(19): siRNA sense strand
gccuggaacucuaggaaga

SEQ ID NO: 2436894 - RNA, 19 nt, Homo sapiens
  misc_RNA (1)...(19): siRNA sense strand
ccucacgagcggagaauau

SEQ ID NO: 2436895 - RNA, 19 nt, Homo sapiens
  misc_RNA (1)...(19): siRNA sense strand
ggagaguaguuauggcuca

SEQ ID NO: 2436896 - RNA, 19 nt, Homo sapiens
  misc_RNA (1)...(19): siRNA sense strand
aagaaauaugcuucggaaa

SEQ ID NO: 2436897 - RNA, 19 nt, Homo sapiens
  misc_RNA (1)...(19): siRNA sense strand
ucugcgagggcgagagaaa

SEQ ID NO: 2436898 - RNA, 19 nt, Homo sapiens
  misc_RNA (1)...(19): siRNA sense strand
gcggagaauauuaaccaua

SEQ ID NO: 2436899 - RNA, 19 nt, Homo sapiens
  misc_RNA (1)...(19): siRNA sense strand
gcuaagagaccuaagagga

SEQ ID NO: 2436900 - RNA, 19 nt, Homo sapiens
  misc_RNA (1)...(19): siRNA sense strand
uaagaaaccaucaggaaaa

SEQ ID NO: 2436901 - RNA, 19 nt, Homo sapiens
  misc_RNA (1)...(19): siRNA sense strand
ugaugaugacugugaggaa

SEQ ID NO: 2436902 - RNA, 19 nt, Homo sapiens
  misc_RNA (1)...(19): siRNA sense strand
ggguagaagaacucaugaa

SEQ ID NO: 2436903 - RNA, 19 nt, Homo sapiens
  misc_RNA (1)...(19): siRNA sense strand
gggcaggugcuuugaacuu

SEQ ID NO: 2436904 - RNA, 19 nt, Homo sapiens
  misc_RNA (1)...(19): siRNA sense strand
cggaaacucgucaggacaa

SEQ ID NO: 2436905 - RNA, 19 nt, Homo sapiens
  misc_RNA (1)...(19): siRNA sense strand
aaacuaaggucuuguggca

SEQ ID NO: 2436906 - RNA, 19 nt, Homo sapiens
  misc_RNA (1)...(19): siRNA sense strand
auaacaaggucaacagcau

SEQ ID NO: 2436907 - RNA, 19 nt, Homo sapiens
  misc_RNA (1)...(19): siRNA sense strand
caaccaugccagaggaagu

SEQ ID NO: 2436908 - RNA, 19 nt, Homo sapiens
  misc_RNA (1)...(19): siRNA sense strand
ucggaaagaaauggaguua

SEQ ID NO: 2436909 - RNA, 19 nt, Homo sapiens
  misc_RNA (1)...(19): siRNA sense strand
gcaauagcucagaggacga

SEQ ID NO: 2436910 - RNA, 19 nt, Homo sapiens
  misc_RNA (1)...(19): siRNA sense strand
ucgaauuaagagagcagaa

SEQ ID NO: 2436911 - RNA, 19 nt, Homo sapiens
  misc_RNA (1)...(19): siRNA sense strand
cgauccaaauuuagcaaca

SEQ ID NO: 2436912 - RNA, 19 nt, Homo sapiens
  misc_RNA (1)...(19): siRNA sense strand
ggaucauuaugcugcggaa

SEQ ID NO: 2436913 - RNA, 19 nt, Homo sapiens
  misc_RNA (1)...(19): siRNA sense strand
guacaagacuaaagugccu

SEQ ID NO: 2436914 - RNA, 19 nt, Homo sapiens
  misc_RNA (1)...(19): siRNA sense strand
aagaaaggcagcaaaguca

SEQ ID NO: 2436915 - RNA, 19 nt, Homo sapiens
  misc_RNA (1)...(19): siRNA sense strand
ccuccaaagaaaagaagaa

SEQ ID NO: 2436916 - RNA, 19 nt, Homo sapiens
  misc_RNA (1)...(19): siRNA sense strand
aaaggguauuggugaagaa

SEQ ID NO: 2436917 - RNA, 19 nt, Homo sapiens
  misc_RNA (1)...(19): siRNA sense strand
cggaaagaaauggaguuaa

SEQ ID NO: 2436918 - RNA, 19 nt, Homo sapiens
  misc_RNA (1)...(19): siRNA sense strand
cgugauaaguggaccaauc

SEQ ID NO: 2436919 - RNA, 19 nt, Homo sapiens
  misc_RNA (1)...(19): siRNA sense strand
caaaauggguagaagaacu

SEQ ID NO: 2436920 - RNA, 19 nt, Homo sapiens
  misc_RNA (1)...(19): siRNA sense strand
acaugacacagaagacaaa

SEQ ID NO: 2436921 - RNA, 19 nt, Homo sapiens
  misc_RNA (1)...(19): siRNA sense strand
ggaaguuaccagacccaau

SEQ ID NO: 2436922 - RNA, 19 nt, Homo sapiens
  misc_RNA (1)...(19): siRNA sense strand
aggcuaaauaugaugcauu

SEQ ID NO: 2436923 - RNA, 19 nt, Homo sapiens
  misc_RNA (1)...(19): siRNA sense strand
augaagaugcacacagcua

SEQ ID NO: 2436924 - RNA, 19 nt, Homo sapiens
  misc_RNA (1)...(19): siRNA sense strand
ggcaauuaauggauggacu

SEQ ID NO: 2436925 - RNA, 19 nt, Homo sapiens
  misc_RNA (1)...(19): siRNA sense strand
caugaagaaaggcagcaaa

SEQ ID NO: 2436926 - RNA, 19 nt, Homo sapiens
  misc_RNA (1)...(19): siRNA sense strand
augcauuccuuguaaccaa

SEQ ID NO: 2436927 - RNA, 19 nt, Homo sapiens
  misc_RNA (1)...(19): siRNA sense strand
augaugacugugaggaaau

SEQ ID NO: 2436928 - RNA, 19 nt, Homo sapiens
  misc_RNA (1)...(19): siRNA sense strand
gauuacagccaccaagcaa

SEQ ID NO: 2436929 - RNA, 19 nt, Homo sapiens
  misc_RNA (1)...(19): siRNA sense strand
gcggaaacucgucaggaca

SEQ ID NO: 2436930 - RNA, 19 nt, Homo sapiens
  misc_RNA (1)...(19): siRNA sense strand
agaaauaugcuucggaaag

SEQ ID NO: 2436931 - RNA, 19 nt, Homo sapiens
  misc_RNA (1)...(19): siRNA sense strand
gguggaacgcagauggcau

SEQ ID NO: 2436932 - RNA, 19 nt, Homo sapiens
  misc_RNA (1)...(19): siRNA sense strand
aauuaagagagcagaagga

SEQ ID NO: 2436933 - RNA, 19 nt, Homo sapiens
  misc_RNA (1)...(19): siRNA sense strand
auggcauguugcaaggaaa

SEQ ID NO: 2436934 - RNA, 19 nt, Homo sapiens
  misc_RNA (1)...(19): siRNA sense strand
agaaauggaguuaacguga

SEQ ID NO: 2436935 - RNA, 19 nt, Homo sapiens
  misc_RNA (1)...(19): siRNA sense strand
cccuaagaggagacaggaa

SEQ ID NO: 2436936 - RNA, 19 nt, Homo sapiens
  misc_RNA (1)...(19): siRNA sense strand
gaauuauuuccaaagggua

SEQ ID NO: 2436937 - RNA, 19 nt, Homo sapiens
  misc_RNA (1)...(19): siRNA sense strand
ggauggacugaaacaacua

SEQ ID NO: 2436938 - RNA, 19 nt, Homo sapiens
  misc_RNA (1)...(19): siRNA sense strand
ugauauuacuuuagugccu

SEQ ID NO: 2436939 - RNA, 19 nt, Homo sapiens
  misc_RNA (1)...(19): siRNA sense strand
cagaaauccugacacucaa

SEQ ID NO: 2436940 - RNA, 19 nt, Homo sapiens
  misc_RNA (1)...(19): siRNA sense strand
aaauaaaggccgcagaaug

SEQ ID NO: 2436941 - RNA, 19 nt, Homo sapiens
  misc_RNA (1)...(19): siRNA sense strand
guuccagucgugucagaua

SEQ ID NO: 2436942 - RNA, 19 nt, Homo sapiens
  misc_RNA (1)...(19): siRNA sense strand
gcuacagguucaaggccaa

SEQ ID NO: 2436943 - RNA, 19 nt, Homo sapiens
  misc_RNA (1)...(19): siRNA sense strand
gcacaggaaacauaggcua

SEQ ID NO: 2436944 - RNA, 19 nt, Homo sapiens
  misc_RNA (1)...(19): siRNA sense strand
aggacaagccucuggucaa

SEQ ID NO: 2436945 - RNA, 19 nt, Homo sapiens
  misc_RNA (1)...(19): siRNA sense strand
cuguaguggccuugaucua

SEQ ID NO: 2436946 - RNA, 19 nt, Homo sapiens
  misc_RNA (1)...(19): siRNA sense strand
uggaagagccugaugacca

SEQ ID NO: 2436947 - RNA, 19 nt, Homo sapiens
  misc_RNA (1)...(19): siRNA sense strand
gggaaaugggagagacccu

SEQ ID NO: 2436948 - RNA, 19 nt, Homo sapiens
  misc_RNA (1)...(19): siRNA sense strand
ugccacagcuggaaggaca

SEQ ID NO: 2436949 - RNA, 19 nt, Homo sapiens
  misc_RNA (1)...(19): siRNA sense strand
gugacugggcugacugcaa

SEQ ID NO: 2436950 - RNA, 19 nt, Homo sapiens
  misc_RNA (1)...(19): siRNA sense strand
ccccaaaggcugugcugaa

SEQ ID NO: 2436951 - RNA, 19 nt, Homo sapiens
  misc_RNA (1)...(19): siRNA sense strand
gcacauaacccacagggau

SEQ ID NO: 2436952 - RNA, 19 nt, Homo sapiens
  misc_RNA (1)...(19): siRNA sense strand
acagauacaaagaagccaa

SEQ ID NO: 2436953 - RNA, 19 nt, Homo sapiens
  misc_RNA (1)...(19): siRNA sense strand
acaaagaagccaagaugcu

SEQ ID NO: 2436954 - RNA, 19 nt, Homo sapiens
  misc_RNA (1)...(19): siRNA sense strand
acggaaugcuuuuggcaau

SEQ ID NO: 2436955 - RNA, 19 nt, Homo sapiens
  misc_RNA (1)...(19): siRNA sense strand
gucuaaguaaucagcauaa

SEQ ID NO: 2436956 - RNA, 19 nt, Homo sapiens
  misc_RNA (1)...(19): siRNA sense strand
acagaaggaaagaaaacaa

SEQ ID NO: 2436957 - RNA, 19 nt, Homo sapiens
  misc_RNA (1)...(19): siRNA sense strand
caaacagaaggaaagaaaa

SEQ ID NO: 2436958 - RNA, 19 nt, Homo sapiens
  misc_RNA (1)...(19): siRNA sense strand
auguaaacagugugggaaa

SEQ ID NO: 2436959 - RNA, 19 nt, Homo sapiens
  misc_RNA (1)...(19): siRNA sense strand
auucgaagacacaggauaa

SEQ ID NO: 2436960 - RNA, 19 nt, Homo sapiens
  misc_RNA (1)...(19): siRNA sense strand
auguaagcaaugugggaaa

SEQ ID NO: 2436961 - RNA, 19 nt, Homo sapiens
  misc_RNA (1)...(19): siRNA sense strand
auguaaacagugugguaaa

SEQ ID NO: 2436962 - RNA, 19 nt, Homo sapiens
  misc_RNA (1)...(19): siRNA sense strand
augcagugagugugggaaa

SEQ ID NO: 2436963 - RNA, 19 nt, Homo sapiens
  misc_RNA (1)...(19): siRNA sense strand
aguaaaaucauguggagaa

SEQ ID NO: 2436964 - RNA, 19 nt, Homo sapiens
  misc_RNA (1)...(19): siRNA sense strand
augacaugcugaagaagaa

SEQ ID NO: 2436965 - RNA, 19 nt, Homo sapiens
  misc_RNA (1)...(19): siRNA sense strand
aacucacacuggagagaaa

SEQ ID NO: 2436966 - RNA, 19 nt, Homo sapiens
  misc_RNA (1)...(19): siRNA sense strand
gagaagucagcguggguca

SEQ ID NO: 2436967 - RNA, 19 nt, Homo sapiens
  misc_RNA (1)...(19): siRNA sense strand
ccuuaugaaugcagugagu

SEQ ID NO: 2436968 - RNA, 19 nt, Homo sapiens
  misc_RNA (1)...(19): siRNA sense strand
gaauguaaacaguguggga

SEQ ID NO: 2436969 - RNA, 19 nt, Homo sapiens
  misc_RNA (1)...(19): siRNA sense strand
accuuaugauugugaggaa

SEQ ID NO: 2436970 - RNA, 19 nt, Homo sapiens
  misc_RNA (1)...(19): siRNA sense strand
ccuucgaauacaugaaaga

SEQ ID NO: 2436971 - RNA, 19 nt, Homo sapiens
  misc_RNA (1)...(19): siRNA sense strand
cauucgaagacacaggaua

SEQ ID NO: 2436972 - RNA, 19 nt, Homo sapiens
  misc_RNA (1)...(19): siRNA sense strand
ggggagaagccguaugaau

SEQ ID NO: 2436973 - RNA, 19 nt, Homo sapiens
  misc_RNA (1)...(19): siRNA sense strand
auguaacuuuugugggaaa

SEQ ID NO: 2436974 - RNA, 19 nt, Homo sapiens
  misc_RNA (1)...(19): siRNA sense strand
gaauguaagcaauguggga

SEQ ID NO: 2436975 - RNA, 19 nt, Homo sapiens
  misc_RNA (1)...(19): siRNA sense strand
cccuaugaauguaaacaau

SEQ ID NO: 2436976 - RNA, 19 nt, Homo sapiens
  misc_RNA (1)...(19): siRNA sense strand
ccguaugaauguaaacagu

SEQ ID NO: 2436977 - RNA, 19 nt, Homo sapiens
  misc_RNA (1)...(19): siRNA sense strand
cccuaugaauguaagcaau

SEQ ID NO: 2436978 - RNA, 19 nt, Homo sapiens
  misc_RNA (1)...(19): siRNA sense strand
ccuuaugauugugaggaau

SEQ ID NO: 2436979 - RNA, 19 nt, Homo sapiens
  misc_RNA (1)...(19): siRNA sense strand
cuuucaauuccguucgaua

SEQ ID NO: 2436980 - RNA, 19 nt, Homo sapiens
  misc_RNA (1)...(19): siRNA sense strand
ggauaaugcacaguggaga

SEQ ID NO: 2436981 - RNA, 19 nt, Homo sapiens
  misc_RNA (1)...(19): siRNA sense strand
gcccuaugaauguaagcaa

SEQ ID NO: 2436982 - RNA, 19 nt, Homo sapiens
  misc_RNA (1)...(19): siRNA sense strand
aggcgagaagauugcuuaa

SEQ ID NO: 2436983 - RNA, 19 nt, Homo sapiens
  misc_RNA (1)...(19): siRNA sense strand
ccuugauguuugugaaaau

SEQ ID NO: 2436984 - RNA, 19 nt, Homo sapiens
  misc_RNA (1)...(19): siRNA sense strand
gagaagugauugacgugca

SEQ ID NO: 2436985 - RNA, 19 nt, Homo sapiens
  misc_RNA (1)...(19): siRNA sense strand
gaucagcaaaagaggagaa

SEQ ID NO: 2436986 - RNA, 19 nt, Homo sapiens
  misc_RNA (1)...(19): siRNA sense strand
ugcagagaucuuagaacua

SEQ ID NO: 2436987 - RNA, 19 nt, Homo sapiens
  misc_RNA (1)...(19): siRNA sense strand
cacccauguuugagagcga

SEQ ID NO: 2436988 - RNA, 19 nt, Homo sapiens
  misc_RNA (1)...(19): siRNA sense strand
cagaaauugccguggauau

SEQ ID NO: 2436989 - RNA, 19 nt, Homo sapiens
  misc_RNA (1)...(19): siRNA sense strand
ccaguaaaucacagaacaa

SEQ ID NO: 2436990 - RNA, 19 nt, Homo sapiens
  misc_RNA (1)...(19): siRNA sense strand
guauacagaaagaagagaa

SEQ ID NO: 2436991 - RNA, 19 nt, Homo sapiens
  misc_RNA (1)...(19): siRNA sense strand
ucacagagacgcugggcuu

SEQ ID NO: 2436992 - RNA, 19 nt, Homo sapiens
  misc_RNA (1)...(19): siRNA sense strand
uguuagcagccgacagaaa

SEQ ID NO: 2436993 - RNA, 19 nt, Homo sapiens
  misc_RNA (1)...(19): siRNA sense strand
aggacauaacgcaggacaa

SEQ ID NO: 2436994 - RNA, 19 nt, Homo sapiens
  misc_RNA (1)...(19): siRNA sense strand
ugcuauggcuuaagggaca

SEQ ID NO: 2436995 - RNA, 19 nt, Homo sapiens
  misc_RNA (1)...(19): siRNA sense strand
ugauagugugucuaagaaa

SEQ ID NO: 2436996 - RNA, 19 nt, Homo sapiens
  misc_RNA (1)...(19): siRNA sense strand
uacagaaagaagagaaaga

SEQ ID NO: 2436997 - RNA, 19 nt, Homo sapiens
  misc_RNA (1)...(19): siRNA sense strand
ugaacuaacaagaggguac

SEQ ID NO: 2436998 - RNA, 19 nt, Homo sapiens
  misc_RNA (1)...(19): siRNA sense strand
cagaaagaagagaaagagu

SEQ ID NO: 2436999 - RNA, 19 nt, Homo sapiens
  misc_RNA (1)...(19): siRNA sense strand
uugcgaauaccaagagaau

SEQ ID NO: 2437000 - RNA, 19 nt, Homo sapiens
  misc_RNA (1)...(19): siRNA sense strand
gcaucgugcuguuggggaa

SEQ ID NO: 2437001 - RNA, 19 nt, Homo sapiens
  misc_RNA (1)...(19): siRNA sense strand
gcucucuauuggacagcaa

SEQ ID NO: 2437002 - RNA, 19 nt, Homo sapiens
  misc_RNA (1)...(19): siRNA sense strand
aagccaaaauggaagagaa

SEQ ID NO: 2437003 - RNA, 19 nt, Homo sapiens
  misc_RNA (1)...(19): siRNA sense strand
aagcucaauuaaagugcaa

SEQ ID NO: 2437004 - RNA, 19 nt, Homo sapiens
  misc_RNA (1)...(19): siRNA sense strand
uggaagagaagcugucgaa

SEQ ID NO: 2437005 - RNA, 19 nt, Homo sapiens
  misc_RNA (1)...(19): siRNA sense strand
aagaagagaaagaguauac

SEQ ID NO: 2437006 - RNA, 19 nt, Homo sapiens
  misc_RNA (1)...(19): siRNA sense strand
aauuaaagugcaaggaauc

SEQ ID NO: 2437007 - RNA, 19 nt, Homo sapiens
  misc_RNA (1)...(19): siRNA sense strand
gaacaaauguaaacccucu

SEQ ID NO: 2437008 - RNA, 19 nt, Homo sapiens
  misc_RNA (1)...(19): siRNA sense strand
gcgauauuaaggaacgauu

SEQ ID NO: 2437009 - RNA, 19 nt, Homo sapiens
  misc_RNA (1)...(19): siRNA sense strand
guaugugaaggaagccaaa

SEQ ID NO: 2437010 - RNA, 19 nt, Homo sapiens
  misc_RNA (1)...(19): siRNA sense strand
caguaaaucacagaacaaa

SEQ ID NO: 2437011 - RNA, 19 nt, Homo sapiens
  misc_RNA (1)...(19): siRNA sense strand
gucuaagaaacauggaaca

SEQ ID NO: 2437012 - RNA, 19 nt, Homo sapiens
  misc_RNA (1)...(19): siRNA sense strand
cagugaauauagagccagu

SEQ ID NO: 2437013 - RNA, 19 nt, Homo sapiens
  misc_RNA (1)...(19): siRNA sense strand
guauacacuuguuugcgaa

SEQ ID NO: 2437014 - RNA, 19 nt, Homo sapiens
  misc_RNA (1)...(19): siRNA sense strand
cuguaugguaauugcauca

SEQ ID NO: 2437015 - RNA, 19 nt, Homo sapiens
  misc_RNA (1)...(19): siRNA sense strand
gguugauaucccugaaagu

SEQ ID NO: 2437016 - RNA, 19 nt, Homo sapiens
  misc_RNA (1)...(19): siRNA sense strand
ccaaguauacagaaagaag

SEQ ID NO: 2437017 - RNA, 19 nt, Homo sapiens
  misc_RNA (1)...(19): siRNA sense strand
caucagaaauugccgugga

SEQ ID NO: 2437018 - RNA, 19 nt, Homo sapiens
  misc_RNA (1)...(19): siRNA sense strand
ccaaaauggaagagaagcu

SEQ ID NO: 2437019 - RNA, 19 nt, Homo sapiens
  misc_RNA (1)...(19): siRNA sense strand
ugacaacuccagaugguga

SEQ ID NO: 2437020 - RNA, 19 nt, Homo sapiens
  misc_RNA (1)...(19): siRNA sense strand
guaaagugguugaaggaac

SEQ ID NO: 2437021 - RNA, 19 nt, Homo sapiens
  misc_RNA (1)...(19): siRNA sense strand
ugucaacauaaaugggaaa

SEQ ID NO: 2437022 - RNA, 19 nt, Homo sapiens
  misc_RNA (1)...(19): siRNA sense strand
cagaauaccaugagcacca

SEQ ID NO: 2437023 - RNA, 19 nt, Homo sapiens
  misc_RNA (1)...(19): siRNA sense strand
ggauugagguggugcucca

SEQ ID NO: 2437024 - RNA, 19 nt, Homo sapiens
  misc_RNA (1)...(19): siRNA sense strand
gaacacagcuacugcagga

SEQ ID NO: 2437025 - RNA, 19 nt, Homo sapiens
  misc_RNA (1)...(19): siRNA sense strand
ccuuagugaagaauugaaa

SEQ ID NO: 2437026 - RNA, 19 nt, Homo sapiens
  misc_RNA (1)...(19): siRNA sense strand
uggugaacuuggaugguga

SEQ ID NO: 2437027 - RNA, 19 nt, Homo sapiens
  misc_RNA (1)...(19): siRNA sense strand
aggaauugucagcaccaaa

SEQ ID NO: 2437028 - RNA, 19 nt, Homo sapiens
  misc_RNA (1)...(19): siRNA sense strand
cagucauaccugaaacaau

SEQ ID NO: 2437029 - RNA, 19 nt, Homo sapiens
  misc_RNA (1)...(19): siRNA sense strand
auguaaagugguugaagga

SEQ ID NO: 2437030 - RNA, 19 nt, Homo sapiens
  misc_RNA (1)...(19): siRNA sense strand
guacaguggcucuggguuc

SEQ ID NO: 2437031 - RNA, 19 nt, Homo sapiens
  misc_RNA (1)...(19): siRNA sense strand
agcaccagaugaaaggaaa

SEQ ID NO: 2437032 - RNA, 19 nt, Homo sapiens
  misc_RNA (1)...(19): siRNA sense strand
aggauucagauauggacua

SEQ ID NO: 2437033 - RNA, 19 nt, Homo sapiens
  misc_RNA (1)...(19): siRNA sense strand
agaugaaaggaaaggcguu

SEQ ID NO: 2437034 - RNA, 19 nt, Homo sapiens
  misc_RNA (1)...(19): siRNA sense strand
agugcaagguccugggcua

SEQ ID NO: 2437035 - RNA, 19 nt, Homo sapiens
  misc_RNA (1)...(19): siRNA sense strand
gucccaagugcaagagaaa

SEQ ID NO: 2437036 - RNA, 19 nt, Homo sapiens
  misc_RNA (1)...(19): siRNA sense strand
gcaucaagugccacaucaa

SEQ ID NO: 2437037 - RNA, 19 nt, Homo sapiens
  misc_RNA (1)...(19): siRNA sense strand
cccaagugcaagagaaaau

SEQ ID NO: 2437038 - RNA, 19 nt, Homo sapiens
  misc_RNA (1)...(19): siRNA sense strand
agaaaauggaugagcggga

SEQ ID NO: 2437039 - RNA, 19 nt, Homo sapiens
  misc_RNA (1)...(19): siRNA sense strand
acgugaccauggugggaaa

SEQ ID NO: 2437040 - RNA, 19 nt, Homo sapiens
  misc_RNA (1)...(19): siRNA sense strand
acauuaaacugcaacguga

SEQ ID NO: 2437041 - RNA, 19 nt, Homo sapiens
  misc_RNA (1)...(19): siRNA sense strand
aggacgagcaggagagguu

SEQ ID NO: 2437042 - RNA, 19 nt, Homo sapiens
  misc_RNA (1)...(19): siRNA sense strand
aggagagguuugucugcaa

SEQ ID NO: 2437043 - RNA, 19 nt, Homo sapiens
  misc_RNA (1)...(19): siRNA sense strand
aggcguacauccagggugu

SEQ ID NO: 2437044 - RNA, 19 nt, Homo sapiens
  misc_RNA (1)...(19): siRNA sense strand
ucacgaugcugcugcggau

SEQ ID NO: 2437045 - RNA, 19 nt, Homo sapiens
  misc_RNA (1)...(19): siRNA sense strand
ccaugauuguguugagcaa

SEQ ID NO: 2437046 - RNA, 19 nt, Homo sapiens
  misc_RNA (1)...(19): siRNA sense strand
uggaauucuucaaggaaaa

SEQ ID NO: 2437047 - RNA, 19 nt, Homo sapiens
  misc_RNA (1)...(19): siRNA sense strand
augaauaugaggaagagaa

SEQ ID NO: 2437048 - RNA, 19 nt, Homo sapiens
  misc_RNA (1)...(19): siRNA sense strand
aaagaauagcucaaagcaa

SEQ ID NO: 2437049 - RNA, 19 nt, Homo sapiens
  misc_RNA (1)...(19): siRNA sense strand
acagaaagagugaggacca

SEQ ID NO: 2437050 - RNA, 19 nt, Homo sapiens
  misc_RNA (1)...(19): siRNA sense strand
ugaauaugaggaagagaau

SEQ ID NO: 2437051 - RNA, 19 nt, Homo sapiens
  misc_RNA (1)...(19): siRNA sense strand
gagacauuucgaagagcaa

SEQ ID NO: 2437052 - RNA, 19 nt, Homo sapiens
  misc_RNA (1)...(19): siRNA sense strand
gcaacaaacgugaaccgaa

SEQ ID NO: 2437053 - RNA, 19 nt, Homo sapiens
  misc_RNA (1)...(19): siRNA sense strand
cgaaaagaagacagaaaga

SEQ ID NO: 2437054 - RNA, 19 nt, Homo sapiens
  misc_RNA (1)...(19): siRNA sense strand
aggaagagaaugaagagga

SEQ ID NO: 2437055 - RNA, 19 nt, Homo sapiens
  misc_RNA (1)...(19): siRNA sense strand
gaaagaaagugaagcugcu

SEQ ID NO: 2437056 - RNA, 19 nt, Homo sapiens
  misc_RNA (1)...(19): siRNA sense strand
ggaagagaaugaagaggag

SEQ ID NO: 2437057 - RNA, 19 nt, Homo sapiens
  misc_RNA (1)...(19): siRNA sense strand
augaagaggaggaugcaga

SEQ ID NO: 2437058 - RNA, 19 nt, Homo sapiens
  misc_RNA (1)...(19): siRNA sense strand
aagaauagcucaaagcaag

SEQ ID NO: 2437059 - RNA, 19 nt, Homo sapiens
  misc_RNA (1)...(19): siRNA sense strand
agcgaaaagaagacagaaa

SEQ ID NO: 2437060 - RNA, 19 nt, Homo sapiens
  misc_RNA (1)...(19): siRNA sense strand
aagaauuuacugugggcuu

SEQ ID NO: 2437061 - RNA, 19 nt, Homo sapiens
  misc_RNA (1)...(19): siRNA sense strand
aagagaaugaagaggagga

SEQ ID NO: 2437062 - RNA, 19 nt, Homo sapiens
  misc_RNA (1)...(19): siRNA sense strand
gaguguugcuauaguggga

SEQ ID NO: 2437063 - RNA, 19 nt, Homo sapiens
  misc_RNA (1)...(19): siRNA sense strand
caugaaagaaagugaagcu

SEQ ID NO: 2437064 - RNA, 19 nt, Homo sapiens
  misc_RNA (1)...(19): siRNA sense strand
cgaaugauacaaugaggca

SEQ ID NO: 2437065 - RNA, 19 nt, Homo sapiens
  misc_RNA (1)...(19): siRNA sense strand
agaauagcucaaagcaaga

SEQ ID NO: 2437066 - RNA, 19 nt, Homo sapiens
  misc_RNA (1)...(19): siRNA sense strand
aagugaagcugcuggguug

SEQ ID NO: 2437067 - RNA, 19 nt, Homo sapiens
  misc_RNA (1)...(19): siRNA sense strand
uggcaugaaagaaagugaa

SEQ ID NO: 2437068 - RNA, 19 nt, Homo sapiens
  misc_RNA (1)...(19): siRNA sense strand
agacagaaagagugaggac

SEQ ID NO: 2437069 - RNA, 19 nt, Homo sapiens
  misc_RNA (1)...(19): siRNA sense strand
uuggaguaccuaaugauaa

SEQ ID NO: 2437070 - RNA, 19 nt, Homo sapiens
  misc_RNA (1)...(19): siRNA sense strand
acaaaagggacuaacguuu

SEQ ID NO: 2437071 - RNA, 19 nt, Homo sapiens
  misc_RNA (1)...(19): siRNA sense strand
gggccaagacagagaggau

SEQ ID NO: 2437072 - RNA, 19 nt, Homo sapiens
  misc_RNA (1)...(19): siRNA sense strand
gugagaagcuccagggugu

SEQ ID NO: 2437073 - RNA, 19 nt, Homo sapiens
  misc_RNA (1)...(19): siRNA sense strand
aggaggaggcugaggcuga

SEQ ID NO: 2437074 - RNA, 19 nt, Homo sapiens
  misc_RNA (1)...(19): siRNA sense strand
aggcugaggcugaggcuga

SEQ ID NO: 2437075 - RNA, 19 nt, Homo sapiens
  misc_RNA (1)...(19): siRNA sense strand
cggggaacgugaaggggaa

SEQ ID NO: 2437076 - RNA, 19 nt, Homo sapiens
  misc_RNA (1)...(19): siRNA sense strand
ugguaugggccaagacaga

SEQ ID NO: 2437077 - RNA, 19 nt, Homo sapiens
  misc_RNA (1)...(19): siRNA sense strand
cccaaaaucagcagacaaa

SEQ ID NO: 2437078 - RNA, 19 nt, Homo sapiens
  misc_RNA (1)...(19): siRNA sense strand
ggacaagccaggugagcug

SEQ ID NO: 2437079 - RNA, 19 nt, Homo sapiens
  misc_RNA (1)...(19): siRNA sense strand
ccaucacagacgagggcau

SEQ ID NO: 2437080 - RNA, 19 nt, Homo sapiens
  misc_RNA (1)...(19): siRNA sense strand
ggucaguaggacaaagaau

SEQ ID NO: 2437081 - RNA, 19 nt, Homo sapiens
  misc_RNA (1)...(19): siRNA sense strand
gaauuuggucaguaggaca

SEQ ID NO: 2437082 - RNA, 19 nt, Homo sapiens
  misc_RNA (1)...(19): siRNA sense strand
cuccauaaugacaugaaua

SEQ ID NO: 2437083 - RNA, 19 nt, Homo sapiens
  misc_RNA (1)...(19): siRNA sense strand
auuagaacaaggauggcaa

SEQ ID NO: 2437084 - RNA, 19 nt, Homo sapiens
  misc_RNA (1)...(19): siRNA sense strand
cuguagaagaggcugugaa

SEQ ID NO: 2437085 - RNA, 19 nt, Homo sapiens
  misc_RNA (1)...(19): siRNA sense strand
gcauauuagaacaaggaug

SEQ ID NO: 2437086 - RNA, 19 nt, Homo sapiens
  misc_RNA (1)...(19): siRNA sense strand
gaacaaggauggcaagcug

SEQ ID NO: 2437087 - RNA, 19 nt, Homo sapiens
  misc_RNA (1)...(19): siRNA sense strand
ggucaguaggacaaagaau

SEQ ID NO: 2437088 - RNA, 19 nt, Homo sapiens
  misc_RNA (1)...(19): siRNA sense strand
gaauuuggucaguaggaca

SEQ ID NO: 2437089 - RNA, 19 nt, Homo sapiens
  misc_RNA (1)...(19): siRNA sense strand
auuagaacaaggauggcaa

SEQ ID NO: 2437090 - RNA, 19 nt, Homo sapiens
  misc_RNA (1)...(19): siRNA sense strand
cuguagaagaggcugugaa

SEQ ID NO: 2437091 - RNA, 19 nt, Homo sapiens
  misc_RNA (1)...(19): siRNA sense strand
gcauauuagaacaaggaug

SEQ ID NO: 2437092 - RNA, 19 nt, Homo sapiens
  misc_RNA (1)...(19): siRNA sense strand
gaacaaggauggcaagcug

SEQ ID NO: 2437093 - RNA, 19 nt, Homo sapiens
  misc_RNA (1)...(19): siRNA sense strand
gcaugaagauggacgaggu

SEQ ID NO: 2437094 - RNA, 19 nt, Homo sapiens
  misc_RNA (1)...(19): siRNA sense strand
agcaggagaugguggacau

SEQ ID NO: 2437095 - RNA, 19 nt, Homo sapiens
  misc_RNA (1)...(19): siRNA sense strand
ggauauuacagaagugccu

SEQ ID NO: 2437096 - RNA, 19 nt, Homo sapiens
  misc_RNA (1)...(19): siRNA sense strand
ccauggaggacaagcagga

SEQ ID NO: 2437097 - RNA, 19 nt, Homo sapiens
  misc_RNA (1)...(19): siRNA sense strand
gcaugaagauggacgaggu

SEQ ID NO: 2437098 - RNA, 19 nt, Homo sapiens
  misc_RNA (1)...(19): siRNA sense strand
agcaggagaugguggacau

SEQ ID NO: 2437099 - RNA, 19 nt, Homo sapiens
  misc_RNA (1)...(19): siRNA sense strand
ggauauuacagaagugccu

SEQ ID NO: 2437100 - RNA, 19 nt, Homo sapiens
  misc_RNA (1)...(19): siRNA sense strand
ccauggaggacaagcagga

SEQ ID NO: 2437101 - RNA, 19 nt, Homo sapiens
  misc_RNA (1)...(19): siRNA sense strand
gagcaagacuucuacguga

SEQ ID NO: 2437102 - RNA, 19 nt, Homo sapiens
  misc_RNA (1)...(19): siRNA sense strand
caaagcaaacgaagggcaa

SEQ ID NO: 2437103 - RNA, 19 nt, Homo sapiens
  misc_RNA (1)...(19): siRNA sense strand
agggcaagauuguggacuu

SEQ ID NO: 2437104 - RNA, 19 nt, Homo sapiens
  misc_RNA (1)...(19): siRNA sense strand
gggccaugaagcagaucaa

SEQ ID NO: 2437105 - RNA, 19 nt, Homo sapiens
  misc_RNA (1)...(19): siRNA sense strand
gagacaagcuucaaccaca

SEQ ID NO: 2437106 - RNA, 19 nt, Homo sapiens
  misc_RNA (1)...(19): siRNA sense strand
gggagaugaagaagagagu

SEQ ID NO: 2437107 - RNA, 19 nt, Homo sapiens
  misc_RNA (1)...(19): siRNA sense strand
agaagagagucgaggaccu

SEQ ID NO: 2437108 - RNA, 19 nt, Homo sapiens
  misc_RNA (1)...(19): siRNA sense strand
agaugcagcagguggagaa

SEQ ID NO: 2437109 - RNA, 19 nt, Homo sapiens
  misc_RNA (1)...(19): siRNA sense strand
gugagaaaacgcugaggaa

SEQ ID NO: 2437110 - RNA, 19 nt, Homo sapiens
  misc_RNA (1)...(19): siRNA sense strand
uuuaaagcuaagugggaga

SEQ ID NO: 2437111 - RNA, 19 nt, Homo sapiens
  misc_RNA (1)...(19): siRNA sense strand
agauuguggacuugcuuaa

SEQ ID NO: 2437112 - RNA, 19 nt, Homo sapiens
  misc_RNA (1)...(19): siRNA sense strand
cggucgugaucauggugaa

SEQ ID NO: 2437113 - RNA, 19 nt, Homo sapiens
  misc_RNA (1)...(19): siRNA sense strand
caugaugagccgcgaggau

SEQ ID NO: 2437114 - RNA, 19 nt, Homo sapiens
  misc_RNA (1)...(19): siRNA sense strand
gaaagaugcagcaggugga

SEQ ID NO: 2437115 - RNA, 19 nt, Homo sapiens
  misc_RNA (1)...(19): siRNA sense strand
gcacagaggcuuucagcag

SEQ ID NO: 2437116 - RNA, 19 nt, Homo sapiens
  misc_RNA (1)...(19): siRNA sense strand
uggagaauggacugaguga

SEQ ID NO: 2437117 - RNA, 19 nt, Homo sapiens
  misc_RNA (1)...(19): siRNA sense strand
agggaaagaugcagcaggu

SEQ ID NO: 2437118 - RNA, 19 nt, Homo sapiens
  misc_RNA (1)...(19): siRNA sense strand
gcaaagcaaacgaagggca

SEQ ID NO: 2437119 - RNA, 19 nt, Homo sapiens
  misc_RNA (1)...(19): siRNA sense strand
aggaaguggcuuaagaugu

SEQ ID NO: 2437120 - RNA, 19 nt, Homo sapiens
  misc_RNA (1)...(19): siRNA sense strand
aagcaaacgaagggcaaga

SEQ ID NO: 2437121 - RNA, 19 nt, Homo sapiens
  misc_RNA (1)...(19): siRNA sense strand
gaucagauguggaggcagu

SEQ ID NO: 2437122 - RNA, 19 nt, Homo sapiens
  misc_RNA (1)...(19): siRNA sense strand
agagaagaggauugggauu

SEQ ID NO: 2437123 - RNA, 19 nt, Homo sapiens
  misc_RNA (1)...(19): siRNA sense strand
gcgaagacgcugcaggaga

SEQ ID NO: 2437124 - RNA, 19 nt, Homo sapiens
  misc_RNA (1)...(19): siRNA sense strand
agaauaagcugcagacgca

SEQ ID NO: 2437125 - RNA, 19 nt, Homo sapiens
  misc_RNA (1)...(19): siRNA sense strand
gagaagugcuuuaaccuga

SEQ ID NO: 2437126 - RNA, 19 nt, Homo sapiens
  misc_RNA (1)...(19): siRNA sense strand
caagaacagaugagaaaau

SEQ ID NO: 2437127 - RNA, 19 nt, Homo sapiens
  misc_RNA (1)...(19): siRNA sense strand
gugacggaugugaagaaua

SEQ ID NO: 2437128 - RNA, 19 nt, Homo sapiens
  misc_RNA (1)...(19): siRNA sense strand
cucaauucauggaggccua

SEQ ID NO: 2437129 - RNA, 19 nt, Homo sapiens
  misc_RNA (1)...(19): siRNA sense strand
aggagaagugcaugggcau

SEQ ID NO: 2437130 - RNA, 19 nt, Homo sapiens
  misc_RNA (1)...(19): siRNA sense strand
ccaugaggcucuugcagga

SEQ ID NO: 2437131 - RNA, 19 nt, Homo sapiens
  misc_RNA (1)...(19): siRNA sense strand
gcuaugagcuggacaggcu

SEQ ID NO: 2437132 - RNA, 19 nt, Homo sapiens
  misc_RNA (1)...(19): siRNA sense strand
aggugacggaugugaagaa

SEQ ID NO: 2437133 - RNA, 19 nt, Homo sapiens
  misc_RNA (1)...(19): siRNA sense strand
cgagagaagaggauuggga

SEQ ID NO: 2437134 - RNA, 19 nt, Homo sapiens
  misc_RNA (1)...(19): siRNA sense strand
gggauaaccgggaugcuca

SEQ ID NO: 2437135 - RNA, 19 nt, Homo sapiens
  misc_RNA (1)...(19): siRNA sense strand
ucgacaaggagaagugcau

SEQ ID NO: 2437136 - RNA, 19 nt, Homo sapiens
  misc_RNA (1)...(19): siRNA sense strand
uugauuugguccaugacaa

SEQ ID NO: 2437137 - RNA, 19 nt, Homo sapiens
  misc_RNA (1)...(19): siRNA sense strand
ccaugacaacguggagaaa

SEQ ID NO: 2437138 - RNA, 19 nt, Homo sapiens
  misc_RNA (1)...(19): siRNA sense strand
gugaagaauaagcugcaga

SEQ ID NO: 2437139 - RNA, 19 nt, Homo sapiens
  misc_RNA (1)...(19): siRNA sense strand
ugccaagaacagaugagaa

SEQ ID NO: 2437140 - RNA, 19 nt, Homo sapiens
  misc_RNA (1)...(19): siRNA sense strand
aaggagaagugcaugggca

SEQ ID NO: 2437141 - RNA, 19 nt, Homo sapiens
  misc_RNA (1)...(19): siRNA sense strand
gcaaagagaaggaggcuga

SEQ ID NO: 2437142 - RNA, 19 nt, Homo sapiens
  misc_RNA (1)...(19): siRNA sense strand
cugaagaugucgaagggaa

SEQ ID NO: 2437143 - RNA, 19 nt, Homo sapiens
  misc_RNA (1)...(19): siRNA sense strand
gugaaauucuggaugggaa

SEQ ID NO: 2437144 - RNA, 19 nt, Homo sapiens
  misc_RNA (1)...(19): siRNA sense strand
ggaccgacggacugggaaa

SEQ ID NO: 2437145 - RNA, 19 nt, Homo sapiens
  misc_RNA (1)...(19): siRNA sense strand
cuguuaaacuggugaagau

SEQ ID NO: 2437146 - RNA, 19 nt, Homo sapiens
  misc_RNA (1)...(19): siRNA sense strand
acgaaugaauggacaagaa

SEQ ID NO: 2437147 - RNA, 19 nt, Homo sapiens
  misc_RNA (1)...(19): siRNA sense strand
ucacaaucaaggacagaaa

SEQ ID NO: 2437148 - RNA, 19 nt, Homo sapiens
  misc_RNA (1)...(19): siRNA sense strand
ccaaggaaugauugagauu

SEQ ID NO: 2437149 - RNA, 19 nt, Homo sapiens
  misc_RNA (1)...(19): siRNA sense strand
aaauaaaggcaaagagaag

SEQ ID NO: 2437150 - RNA, 19 nt, Homo sapiens
  misc_RNA (1)...(19): siRNA sense strand
gguuuggugcagaaagaaa

SEQ ID NO: 2437151 - RNA, 19 nt, Homo sapiens
  misc_RNA (1)...(19): siRNA sense strand
ccgagaaaugggugugauu

SEQ ID NO: 2437152 - RNA, 19 nt, Homo sapiens
  misc_RNA (1)...(19): siRNA sense strand
ggacauaauggguacccua

SEQ ID NO: 2437153 - RNA, 19 nt, Homo sapiens
  misc_RNA (1)...(19): siRNA sense strand
aagaaauccucccgaagaa

SEQ ID NO: 2437154 - RNA, 19 nt, Homo sapiens
  misc_RNA (1)...(19): siRNA sense strand
guaaagaaguugcaccaga

SEQ ID NO: 2437155 - RNA, 19 nt, Homo sapiens
  misc_RNA (1)...(19): siRNA sense strand
gauacgaaauccaagguga

SEQ ID NO: 2437156 - RNA, 19 nt, Homo sapiens
  misc_RNA (1)...(19): siRNA sense strand
guggcaacucugaaggaua

SEQ ID NO: 2437157 - RNA, 19 nt, Homo sapiens
  misc_RNA (1)...(19): siRNA sense strand
acuaaugaagcccgagaaa

SEQ ID NO: 2437158 - RNA, 19 nt, Homo sapiens
  misc_RNA (1)...(19): siRNA sense strand
ccaaaaguacccaguaaaa

SEQ ID NO: 2437159 - RNA, 19 nt, Homo sapiens
  misc_RNA (1)...(19): siRNA sense strand
auaugaaaggugaggucua

SEQ ID NO: 2437160 - RNA, 19 nt, Homo sapiens
  misc_RNA (1)...(19): siRNA sense strand
ugauugagauuguggagga

SEQ ID NO: 2437161 - RNA, 19 nt, Homo sapiens
  misc_RNA (1)...(19): siRNA sense strand
agaacgaaugaauggacaa

SEQ ID NO: 2437162 - RNA, 19 nt, Homo sapiens
  misc_RNA (1)...(19): siRNA sense strand
ccaaucaugauaaggaaau

SEQ ID NO: 2437163 - RNA, 19 nt, Homo sapiens
  misc_RNA (1)...(19): siRNA sense strand
agacugaguaccaaggaau

SEQ ID NO: 2437164 - RNA, 19 nt, Homo sapiens
  misc_RNA (1)...(19): siRNA sense strand
caguggaaugugugaaaga

SEQ ID NO: 2437165 - RNA, 19 nt, Homo sapiens
  misc_RNA (1)...(19): siRNA sense strand
auagugaauuuaaggguga

SEQ ID NO: 2437166 - RNA, 19 nt, Homo sapiens
  misc_RNA (1)...(19): siRNA sense strand
gggacauggucgaguauag

SEQ ID NO: 2437167 - RNA, 19 nt, Homo sapiens
  misc_RNA (1)...(19): siRNA sense strand
ggagauagcaagaagcucu

SEQ ID NO: 2437168 - RNA, 19 nt, Homo sapiens
  misc_RNA (1)...(19): siRNA sense strand
ccuaaaaccacuagcccaa

SEQ ID NO: 2437169 - RNA, 19 nt, Homo sapiens
  misc_RNA (1)...(19): siRNA sense strand
acuauugccucaaggaaca

SEQ ID NO: 2437170 - RNA, 19 nt, Homo sapiens
  misc_RNA (1)...(19): siRNA sense strand
ggagacaaagauacgaaau

SEQ ID NO: 2437171 - RNA, 19 nt, Homo sapiens
  misc_RNA (1)...(19): siRNA sense strand
uagcccaaauaaaggcaaa

SEQ ID NO: 2437172 - RNA, 19 nt, Homo sapiens
  misc_RNA (1)...(19): siRNA sense strand
ccaaggauguggaaggauc

SEQ ID NO: 2437173 - RNA, 19 nt, Homo sapiens
  misc_RNA (1)...(19): siRNA sense strand
ggaaacuggagauaaaaua

SEQ ID NO: 2437174 - RNA, 19 nt, Homo sapiens
  misc_RNA (1)...(19): siRNA sense strand
ggcaaaggcaacaaaguca

SEQ ID NO: 2437175 - RNA, 19 nt, Homo sapiens
  misc_RNA (1)...(19): siRNA sense strand
ucaggauggcauugagcua

SEQ ID NO: 2437176 - RNA, 19 nt, Homo sapiens
  misc_RNA (1)...(19): siRNA sense strand
guucacaguauaauggcaa

SEQ ID NO: 2437177 - RNA, 19 nt, Homo sapiens
  misc_RNA (1)...(19): siRNA sense strand
cuuaaaaguaggagaugau

SEQ ID NO: 2437178 - RNA, 19 nt, Homo sapiens
  misc_RNA (1)...(19): siRNA sense strand
agauaucagcauugaacau

SEQ ID NO: 2437179 - RNA, 19 nt, Homo sapiens
  misc_RNA (1)...(19): siRNA sense strand
aaauaggagauaagguuga

SEQ ID NO: 2437180 - RNA, 19 nt, Homo sapiens
  misc_RNA (1)...(19): siRNA sense strand
uguccaaaggcaaaggcaa

SEQ ID NO: 2437181 - RNA, 19 nt, Homo sapiens
  misc_RNA (1)...(19): siRNA sense strand
aaggaaugauugagauugu

SEQ ID NO: 2437182 - RNA, 19 nt, Homo sapiens
  misc_RNA (1)...(19): siRNA sense strand
caggagaugagguggaguu

SEQ ID NO: 2437183 - RNA, 19 nt, Homo sapiens
  misc_RNA (1)...(19): siRNA sense strand
gaauggacaagaaguguuu

SEQ ID NO: 2437184 - RNA, 19 nt, Homo sapiens
  misc_RNA (1)...(19): siRNA sense strand
gggaguaguuugugccaug

SEQ ID NO: 2437185 - RNA, 19 nt, Homo sapiens
  misc_RNA (1)...(19): siRNA sense strand
augcacaaacuauggcuua

SEQ ID NO: 2437186 - RNA, 19 nt, Homo sapiens
  misc_RNA (1)...(19): siRNA sense strand
augaaguaggagauagcaa

SEQ ID NO: 2437187 - RNA, 19 nt, Homo sapiens
  misc_RNA (1)...(19): siRNA sense strand
cagaugaaguagaguuuac

SEQ ID NO: 2437188 - RNA, 19 nt, Homo sapiens
  misc_RNA (1)...(19): siRNA sense strand
gccaaucaugauaaggaaa

SEQ ID NO: 2437189 - RNA, 19 nt, Homo sapiens
  misc_RNA (1)...(19): siRNA sense strand
aggagauaagguugaauuu

SEQ ID NO: 2437190 - RNA, 19 nt, Homo sapiens
  misc_RNA (1)...(19): siRNA sense strand
gguugcaacuugugugcga

SEQ ID NO: 2437191 - RNA, 19 nt, Homo sapiens
  misc_RNA (1)...(19): siRNA sense strand
caaggacagaaaugguaaa

SEQ ID NO: 2437192 - RNA, 19 nt, Homo sapiens
  misc_RNA (1)...(19): siRNA sense strand
gggaacguucagcuggaaa

SEQ ID NO: 2437193 - RNA, 19 nt, Homo sapiens
  misc_RNA (1)...(19): siRNA sense strand
cagaaaggggagagcguca

SEQ ID NO: 2437194 - RNA, 19 nt, Homo sapiens
  misc_RNA (1)...(19): siRNA sense strand
gcaccagaugucagacuau

SEQ ID NO: 2437195 - RNA, 19 nt, Homo sapiens
  misc_RNA (1)...(19): siRNA sense strand
aggcaggagaugaggugga

SEQ ID NO: 2437196 - RNA, 19 nt, Homo sapiens
  misc_RNA (1)...(19): siRNA sense strand
gggguuuggugcagaaaga

SEQ ID NO: 2437197 - RNA, 19 nt, Homo sapiens
  misc_RNA (1)...(19): siRNA sense strand
ccugaggaguguugaucca

SEQ ID NO: 2437198 - RNA, 19 nt, Homo sapiens
  misc_RNA (1)...(19): siRNA sense strand
ugaaagaucaguuuggcuu

SEQ ID NO: 2437199 - RNA, 19 nt, Homo sapiens
  misc_RNA (1)...(19): siRNA sense strand
caauaaacauacuggugcu

SEQ ID NO: 2437200 - RNA, 19 nt, Homo sapiens
  misc_RNA (1)...(19): siRNA sense strand
gguuauuggaaaacuguua

SEQ ID NO: 2437201 - RNA, 19 nt, Homo sapiens
  misc_RNA (1)...(19): siRNA sense strand
agauuguggaggagggcga

SEQ ID NO: 2437202 - RNA, 19 nt, Homo sapiens
  misc_RNA (1)...(19): siRNA sense strand
agaaagaaagauccgucaa

SEQ ID NO: 2437203 - RNA, 19 nt, Homo sapiens
  misc_RNA (1)...(19): siRNA sense strand
guauaauggcaaccugcaa

SEQ ID NO: 2437204 - RNA, 19 nt, Homo sapiens
  misc_RNA (1)...(19): siRNA sense strand
gacaaauuagagcgagcaa

SEQ ID NO: 2437205 - RNA, 19 nt, Homo sapiens
  misc_RNA (1)...(19): siRNA sense strand
ucaaggacagaaaugguaa

SEQ ID NO: 2437206 - RNA, 19 nt, Homo sapiens
  misc_RNA (1)...(19): siRNA sense strand
gagacaaagauacgaaauc

SEQ ID NO: 2437207 - RNA, 19 nt, Homo sapiens
  misc_RNA (1)...(19): siRNA sense strand
ggaaacagcccgcaggaga

SEQ ID NO: 2437208 - RNA, 19 nt, Homo sapiens
  misc_RNA (1)...(19): siRNA sense strand
ggaacgacugagacggcua

SEQ ID NO: 2437209 - RNA, 19 nt, Homo sapiens
  misc_RNA (1)...(19): siRNA sense strand
agguagagcuccgggaaca

SEQ ID NO: 2437210 - RNA, 19 nt, Homo sapiens
  misc_RNA (1)...(19): siRNA sense strand
gguagagcuccgggaacaa

SEQ ID NO: 2437211 - RNA, 19 nt, Homo sapiens
  misc_RNA (1)...(19): siRNA sense strand
cugagaagcuggcggcuga

SEQ ID NO: 2437212 - RNA, 19 nt, Homo sapiens
  misc_RNA (1)...(19): siRNA sense strand
uggagaaggcccugagcau

SEQ ID NO: 2437213 - RNA, 19 nt, Homo sapiens
  misc_RNA (1)...(19): siRNA sense strand
acaucaagacccuaggaga

SEQ ID NO: 2437214 - RNA, 19 nt, Homo sapiens
  misc_RNA (1)...(19): siRNA sense strand
caucaagacccuaggagac

SEQ ID NO: 2437215 - RNA, 19 nt, Homo sapiens
  misc_RNA (1)...(19): siRNA sense strand
ccuaugaguuugcggugga

SEQ ID NO: 2437216 - RNA, 19 nt, Homo sapiens
  misc_RNA (1)...(19): siRNA sense strand
ccuauaugugguagaguau

SEQ ID NO: 2437217 - RNA, 19 nt, Homo sapiens
  misc_RNA (1)...(19): siRNA sense strand
auuccaagagagaggagaa

SEQ ID NO: 2437218 - RNA, 19 nt, Homo sapiens
  misc_RNA (1)...(19): siRNA sense strand
augcaaauucccaguagaa

SEQ ID NO: 2437219 - RNA, 19 nt, Homo sapiens
  misc_RNA (1)...(19): siRNA sense strand
auacaaacucaaagaagca

SEQ ID NO: 2437220 - RNA, 19 nt, Homo sapiens
  misc_RNA (1)...(19): siRNA sense strand
auuugugcauggagaggaa

SEQ ID NO: 2437221 - RNA, 19 nt, Homo sapiens
  misc_RNA (1)...(19): siRNA sense strand
cugagaaucaacacaacaa

SEQ ID NO: 2437222 - RNA, 19 nt, Homo sapiens
  misc_RNA (1)...(19): siRNA sense strand
ccguuuaagaaaagggaga

SEQ ID NO: 2437223 - RNA, 19 nt, Homo sapiens
  misc_RNA (1)...(19): siRNA sense strand
acuaauugucuauugggaa

SEQ ID NO: 2437224 - RNA, 19 nt, Homo sapiens
  misc_RNA (1)...(19): siRNA sense strand
ccaagagagaggagaagcu

SEQ ID NO: 2437225 - RNA, 19 nt, Homo sapiens
  misc_RNA (1)...(19): siRNA sense strand
gugccgacuacaagcgaau

SEQ ID NO: 2437226 - RNA, 19 nt, Homo sapiens
  misc_RNA (1)...(19): siRNA sense strand
acaaacucaaagaagcaaa

SEQ ID NO: 2437227 - RNA, 19 nt, Homo sapiens
  misc_RNA (1)...(19): siRNA sense strand
ugaccagcacacugagaau

SEQ ID NO: 2437228 - RNA, 19 nt, Homo sapiens
  misc_RNA (1)...(19): siRNA sense strand
aaagaagcaaagugauaca

SEQ ID NO: 2437229 - RNA, 19 nt, Homo sapiens
  misc_RNA (1)...(19): siRNA sense strand
cugaauuggucaucccaga

SEQ ID NO: 2437230 - RNA, 19 nt, Homo sapiens
  misc_RNA (1)...(19): siRNA sense strand
gccgaagucaucuggacaa

SEQ ID NO: 2437231 - RNA, 19 nt, Homo sapiens
  misc_RNA (1)...(19): siRNA sense strand
cuggaauaacauuggcaua

SEQ ID NO: 2437232 - RNA, 19 nt, Homo sapiens
  misc_RNA (1)...(19): siRNA sense strand
gcugugaugaugagcgcua

SEQ ID NO: 2437233 - RNA, 19 nt, Homo sapiens
  misc_RNA (1)...(19): siRNA sense strand
ccuuuggucuauaggaaca

SEQ ID NO: 2437234 - RNA, 19 nt, Homo sapiens
  misc_RNA (1)...(19): siRNA sense strand
gguucaagacaucuggauu

SEQ ID NO: 2437235 - RNA, 19 nt, Homo sapiens
  misc_RNA (1)...(19): siRNA sense strand
cuggauagguauuacgcca

SEQ ID NO: 2437236 - RNA, 19 nt, Homo sapiens
  misc_RNA (1)...(19): siRNA sense strand
ugaggaggguuucggguca

SEQ ID NO: 2437237 - RNA, 19 nt, Homo sapiens
  misc_RNA (1)...(19): siRNA sense strand
guuucgggucaguggagaa

SEQ ID NO: 2437238 - RNA, 19 nt, Homo sapiens
  misc_RNA (1)...(19): siRNA sense strand
gucuauaggaacaagauga

SEQ ID NO: 2437239 - RNA, 19 nt, Homo sapiens
  misc_RNA (1)...(19): siRNA sense strand
cagccaagacccugugcau

SEQ ID NO: 2437240 - RNA, 19 nt, Homo sapiens
  misc_RNA (1)...(19): siRNA sense strand
cgguuauccugauggccau

SEQ ID NO: 2437241 - RNA, 19 nt, Homo sapiens
  misc_RNA (1)...(19): siRNA sense strand
ggacaaacuugaugcuaau

SEQ ID NO: 2437242 - RNA, 19 nt, Homo sapiens
  misc_RNA (1)...(19): siRNA sense strand
cuggaauaacauuggcaua

SEQ ID NO: 2437243 - RNA, 19 nt, Homo sapiens
  misc_RNA (1)...(19): siRNA sense strand
gcugugaugaugagcgcua

SEQ ID NO: 2437244 - RNA, 19 nt, Homo sapiens
  misc_RNA (1)...(19): siRNA sense strand
ccuuuggucuauaggaaca

SEQ ID NO: 2437245 - RNA, 19 nt, Homo sapiens
  misc_RNA (1)...(19): siRNA sense strand
gguucaagacaucuggauu

SEQ ID NO: 2437246 - RNA, 19 nt, Homo sapiens
  misc_RNA (1)...(19): siRNA sense strand
cuggauagguauuacgcca

SEQ ID NO: 2437247 - RNA, 19 nt, Homo sapiens
  misc_RNA (1)...(19): siRNA sense strand
ugaggaggguuucggguca

SEQ ID NO: 2437248 - RNA, 19 nt, Homo sapiens
  misc_RNA (1)...(19): siRNA sense strand
guuucgggucaguggagaa

SEQ ID NO: 2437249 - RNA, 19 nt, Homo sapiens
  misc_RNA (1)...(19): siRNA sense strand
gucuauaggaacaagauga

SEQ ID NO: 2437250 - RNA, 19 nt, Homo sapiens
  misc_RNA (1)...(19): siRNA sense strand
cagccaagacccugugcau

SEQ ID NO: 2437251 - RNA, 19 nt, Homo sapiens
  misc_RNA (1)...(19): siRNA sense strand
cgguuauccugauggccau

SEQ ID NO: 2437252 - RNA, 19 nt, Homo sapiens
  misc_RNA (1)...(19): siRNA sense strand
aggaaaagagaaagagaau

SEQ ID NO: 2437253 - RNA, 19 nt, Homo sapiens
  misc_RNA (1)...(19): siRNA sense strand
acaccagauacaagaggaa

SEQ ID NO: 2437254 - RNA, 19 nt, Homo sapiens
  misc_RNA (1)...(19): siRNA sense strand
ccacagaccuucagaccgu

SEQ ID NO: 2437255 - RNA, 19 nt, Homo sapiens
  misc_RNA (1)...(19): siRNA sense strand
acucagugccgccaggaaa

SEQ ID NO: 2437256 - RNA, 19 nt, Homo sapiens
  misc_RNA (1)...(19): siRNA sense strand
gcaaagggucaguggaggu

SEQ ID NO: 2437257 - RNA, 19 nt, Homo sapiens
  misc_RNA (1)...(19): siRNA sense strand
aacaggagcuggaggcaga

SEQ ID NO: 2437258 - RNA, 19 nt, Homo sapiens
  misc_RNA (1)...(19): siRNA sense strand
acgcgaagccagagcacca

SEQ ID NO: 2437259 - RNA, 19 nt, Homo sapiens
  misc_RNA (1)...(19): siRNA sense strand
caggaaaagagaaagagaa

SEQ ID NO: 2437260 - RNA, 19 nt, Homo sapiens
  misc_RNA (1)...(19): siRNA sense strand
ggucaguggagguugcaga

SEQ ID NO: 2437261 - RNA, 19 nt, Homo sapiens
  misc_RNA (1)...(19): siRNA sense strand
ccccacaaucccagagaaa

SEQ ID NO: 2437262 - RNA, 19 nt, Homo sapiens
  misc_RNA (1)...(19): siRNA sense strand
ccacugaaaucuuggaguc

SEQ ID NO: 2437263 - RNA, 19 nt, Homo sapiens
  misc_RNA (1)...(19): siRNA sense strand
gagaauccauuauugguga

SEQ ID NO: 2437264 - RNA, 19 nt, Homo sapiens
  misc_RNA (1)...(19): siRNA sense strand
ccguggagucugaauucaa

SEQ ID NO: 2437265 - RNA, 19 nt, Homo sapiens
  misc_RNA (1)...(19): siRNA sense strand
uggaggagcgagagccaga

SEQ ID NO: 2437266 - RNA, 19 nt, Homo sapiens
  misc_RNA (1)...(19): siRNA sense strand
accagauacaagaggaaca

SEQ ID NO: 2437267 - RNA, 19 nt, Homo sapiens
  misc_RNA (1)...(19): siRNA sense strand
ccguggacaaugagggaaa

SEQ ID NO: 2437268 - RNA, 19 nt, Homo sapiens
  misc_RNA (1)...(19): siRNA sense strand
aaguaugaacagagugaaa

SEQ ID NO: 2437269 - RNA, 19 nt, Homo sapiens
  misc_RNA (1)...(19): siRNA sense strand
acgcaaaggugguacgcuu

SEQ ID NO: 2437270 - RNA, 19 nt, Homo sapiens
  misc_RNA (1)...(19): siRNA sense strand
aggugaaugccguggacaa

SEQ ID NO: 2437271 - RNA, 19 nt, Homo sapiens
  misc_RNA (1)...(19): siRNA sense strand
gaagaagaucagugcaaaa

SEQ ID NO: 2437272 - RNA, 19 nt, Homo sapiens
  misc_RNA (1)...(19): siRNA sense strand
ggauugaagcuuuggaacu

SEQ ID NO: 2437273 - RNA, 19 nt, Homo sapiens
  misc_RNA (1)...(19): siRNA sense strand
cagacuggacauugugaaa

SEQ ID NO: 2437274 - RNA, 19 nt, Homo sapiens
  misc_RNA (1)...(19): siRNA sense strand
caucauuagccuaguugaa

SEQ ID NO: 2437275 - RNA, 19 nt, Homo sapiens
  misc_RNA (1)...(19): siRNA sense strand
uugugaaagagcugauaaa

SEQ ID NO: 2437276 - RNA, 19 nt, Homo sapiens
  misc_RNA (1)...(19): siRNA sense strand
ucacaaagcuccugcugga

SEQ ID NO: 2437277 - RNA, 19 nt, Homo sapiens
  misc_RNA (1)...(19): siRNA sense strand
gugaaagagcugauaaaau

SEQ ID NO: 2437278 - RNA, 19 nt, Homo sapiens
  misc_RNA (1)...(19): siRNA sense strand
guuccaagauggugauaac

SEQ ID NO: 2437279 - RNA, 19 nt, Homo sapiens
  misc_RNA (1)...(19): siRNA sense strand
gauuuuaggugcugacaau

SEQ ID NO: 2437280 - RNA, 19 nt, Homo sapiens
  misc_RNA (1)...(19): siRNA sense strand
caaaaguacaacuggggua

SEQ ID NO: 2437281 - RNA, 19 nt, Homo sapiens
  misc_RNA (1)...(19): siRNA sense strand
uagccauguuagagagguu

SEQ ID NO: 2437282 - RNA, 19 nt, Homo sapiens
  misc_RNA (1)...(19): siRNA sense strand
uggaauuugagcaguguau

SEQ ID NO: 2437283 - RNA, 19 nt, Homo sapiens
  misc_RNA (1)...(19): siRNA sense strand
cuauaguagugaauggcca

SEQ ID NO: 2437284 - RNA, 19 nt, Homo sapiens
  misc_RNA (1)...(19): siRNA sense strand
gcugauugcgaccgaagaa

SEQ ID NO: 2437285 - RNA, 19 nt, Homo sapiens
  misc_RNA (1)...(19): siRNA sense strand
ugugaaggccccagacaua

SEQ ID NO: 2437286 - RNA, 19 nt, Homo sapiens
  misc_RNA (1)...(19): siRNA sense strand
gugaauggccaugggauga

SEQ ID NO: 2437287 - RNA, 19 nt, Homo sapiens
  misc_RNA (1)...(19): siRNA sense strand
gcucaaguuuucucacaaa

SEQ ID NO: 2437288 - RNA, 19 nt, Homo sapiens
  misc_RNA (1)...(19): siRNA sense strand
cacacugacaugacgaaua

SEQ ID NO: 2437289 - RNA, 19 nt, Homo sapiens
  misc_RNA (1)...(19): siRNA sense strand
gaacaaaguaugaacagag

SEQ ID NO: 2437290 - RNA, 19 nt, Homo sapiens
  misc_RNA (1)...(19): siRNA sense strand
ggugaaugccguggacaau

SEQ ID NO: 2437291 - RNA, 19 nt, Homo sapiens
  misc_RNA (1)...(19): siRNA sense strand
ccuaaugauugcggcauau

SEQ ID NO: 2437292 - RNA, 19 nt, Homo sapiens
  misc_RNA (1)...(19): siRNA sense strand
cuucucaaccggucugaaa

SEQ ID NO: 2437293 - RNA, 19 nt, Homo sapiens
  misc_RNA (1)...(19): siRNA sense strand
gcuuaaaacucaaaugaag

SEQ ID NO: 2437294 - RNA, 19 nt, Homo sapiens
  misc_RNA (1)...(19): siRNA sense strand
gcuauggacaauuaugaau

SEQ ID NO: 2437295 - RNA, 19 nt, Homo sapiens
  misc_RNA (1)...(19): siRNA sense strand
caugacgaauaaacagaau

SEQ ID NO: 2437296 - RNA, 19 nt, Homo sapiens
  misc_RNA (1)...(19): siRNA sense strand
gugugcagcuggagcagga

SEQ ID NO: 2437297 - RNA, 19 nt, Homo sapiens
  misc_RNA (1)...(19): siRNA sense strand
cagauaccuuuuagaacaa

SEQ ID NO: 2437298 - RNA, 19 nt, Homo sapiens
  misc_RNA (1)...(19): siRNA sense strand
caucuaagcuggaggcguu

SEQ ID NO: 2437299 - RNA, 19 nt, Homo sapiens
  misc_RNA (1)...(19): siRNA sense strand
aggcagugaaggagcuuua

SEQ ID NO: 2437300 - RNA, 19 nt, Homo sapiens
  misc_RNA (1)...(19): siRNA sense strand
agauggagguagagcucau

SEQ ID NO: 2437301 - RNA, 19 nt, Homo sapiens
  misc_RNA (1)...(19): siRNA sense strand
gggacaugaucgacagcca

SEQ ID NO: 2437302 - RNA, 19 nt, Homo sapiens
  misc_RNA (1)...(19): siRNA sense strand
agcccaagauggagguaga

SEQ ID NO: 2437303 - RNA, 19 nt, Homo sapiens
  misc_RNA (1)...(19): siRNA sense strand
gggaagaacgugaagcugu

SEQ ID NO: 2437304 - RNA, 19 nt, Homo sapiens
  misc_RNA (1)...(19): siRNA sense strand
acaagaagcuggaagaccu

SEQ ID NO: 2437305 - RNA, 19 nt, Homo sapiens
  misc_RNA (1)...(19): siRNA sense strand
cuuucaauguggaucagaa

SEQ ID NO: 2437306 - RNA, 19 nt, Homo sapiens
  misc_RNA (1)...(19): siRNA sense strand
ucucgauggcgucaagaaa

SEQ ID NO: 2437307 - RNA, 19 nt, Homo sapiens
  misc_RNA (1)...(19): siRNA sense strand
ucacuaaguuucugcagga

SEQ ID NO: 2437308 - RNA, 19 nt, Homo sapiens
  misc_RNA (1)...(19): siRNA sense strand
ggcgaggaccugaaggaga

SEQ ID NO: 2437309 - RNA, 19 nt, Homo sapiens
  misc_RNA (1)...(19): siRNA sense strand
gaggaaagguacaagaagc

SEQ ID NO: 2437310 - RNA, 19 nt, Homo sapiens
  misc_RNA (1)...(19): siRNA sense strand
ucaugaagcaccugcccaa

SEQ ID NO: 2437311 - RNA, 19 nt, Homo sapiens
  misc_RNA (1)...(19): siRNA sense strand
ucaagaaaggccaggagca

SEQ ID NO: 2437312 - RNA, 19 nt, Homo sapiens
  misc_RNA (1)...(19): siRNA sense strand
gcgaggaccugaaggagac

SEQ ID NO: 2437313 - RNA, 19 nt, Homo sapiens
  misc_RNA (1)...(19): siRNA sense strand
ggcuauaacaacuggacaa

SEQ ID NO: 2437314 - RNA, 19 nt, Homo sapiens
  misc_RNA (1)...(19): siRNA sense strand
cagacuggguugaaggcua

SEQ ID NO: 2437315 - RNA, 19 nt, Homo sapiens
  misc_RNA (1)...(19): siRNA sense strand
guggagaauggaagugaaa

SEQ ID NO: 2437316 - RNA, 19 nt, Homo sapiens
  misc_RNA (1)...(19): siRNA sense strand
ggaaauaccuugaugggcu

SEQ ID NO: 2437317 - RNA, 19 nt, Homo sapiens
  misc_RNA (1)...(19): siRNA sense strand
caaaugggcuguauggcua

SEQ ID NO: 2437318 - RNA, 19 nt, Homo sapiens
  misc_RNA (1)...(19): siRNA sense strand
cuguggagcuuguggcaga

SEQ ID NO: 2437319 - RNA, 19 nt, Homo sapiens
  misc_RNA (1)...(19): siRNA sense strand
uggcagaacagaagaacca

SEQ ID NO: 2437320 - RNA, 19 nt, Homo sapiens
  misc_RNA (1)...(19): siRNA sense strand
ccaaguuacaggaaaucaa

SEQ ID NO: 2437321 - RNA, 19 nt, Homo sapiens
  misc_RNA (1)...(19): siRNA sense strand
ggacaagacaucauggaac

SEQ ID NO: 2437322 - RNA, 19 nt, Homo sapiens
  misc_RNA (1)...(19): siRNA sense strand
ugagugaagaccugggcaa

SEQ ID NO: 2437323 - RNA, 19 nt, Homo sapiens
  misc_RNA (1)...(19): siRNA sense strand
gcacuggcgaacugggcua

SEQ ID NO: 2437324 - RNA, 19 nt, Homo sapiens
  misc_RNA (1)...(19): siRNA sense strand
ccuuugaggcaguuggaga

SEQ ID NO: 2437325 - RNA, 19 nt, Homo sapiens
  misc_RNA (1)...(19): siRNA sense strand
gguuuugaguggacagauu

SEQ ID NO: 2437326 - RNA, 19 nt, Homo sapiens
  misc_RNA (1)...(19): siRNA sense strand
gguucuugauggugcuaga

SEQ ID NO: 2437327 - RNA, 19 nt, Homo sapiens
  misc_RNA (1)...(19): siRNA sense strand
cuuugaggcaguuggagaa

SEQ ID NO: 2437328 - RNA, 19 nt, Homo sapiens
  misc_RNA (1)...(19): siRNA sense strand
uggagaauuuugugaguga

SEQ ID NO: 2437329 - RNA, 19 nt, Homo sapiens
  misc_RNA (1)...(19): siRNA sense strand
gggcaaaaguggccagaag

SEQ ID NO: 2437330 - RNA, 19 nt, Homo sapiens
  misc_RNA (1)...(19): siRNA sense strand
cugaaugcccauaggagga

SEQ ID NO: 2437331 - RNA, 19 nt, Homo sapiens
  misc_RNA (1)...(19): siRNA sense strand
gggaagugacuguggagcu

SEQ ID NO: 2437332 - RNA, 19 nt, Homo sapiens
  misc_RNA (1)...(19): siRNA sense strand
guguauacgacaucaccua

SEQ ID NO: 2437333 - RNA, 19 nt, Homo sapiens
  misc_RNA (1)...(19): siRNA sense strand
uggagcaagaccuggcaua

SEQ ID NO: 2437334 - RNA, 19 nt, Homo sapiens
  misc_RNA (1)...(19): siRNA sense strand
aggaaaagguggagaaugg

SEQ ID NO: 2437335 - RNA, 19 nt, Homo sapiens
  misc_RNA (1)...(19): siRNA sense strand
uggcccaggaggugacuua

SEQ ID NO: 2437336 - RNA, 19 nt, Homo sapiens
  misc_RNA (1)...(19): siRNA sense strand
aggaggugacuuaugcaaa

SEQ ID NO: 2437337 - RNA, 19 nt, Homo sapiens
  misc_RNA (1)...(19): siRNA sense strand
uaaaggaaaagguggagaa

SEQ ID NO: 2437338 - RNA, 19 nt, Homo sapiens
  misc_RNA (1)...(19): siRNA sense strand
guuggaaggggaaguaaaa

SEQ ID NO: 2437339 - RNA, 19 nt, Homo sapiens
  misc_RNA (1)...(19): siRNA sense strand
cucagauaaaguacagaaa

SEQ ID NO: 2437340 - RNA, 19 nt, Homo sapiens
  misc_RNA (1)...(19): siRNA sense strand
ccauaagguguauacgaca

SEQ ID NO: 2437341 - RNA, 19 nt, Homo sapiens
  misc_RNA (1)...(19): siRNA sense strand
gcgaacugggcuaccuuaa

SEQ ID NO: 2437342 - RNA, 19 nt, Homo sapiens
  misc_RNA (1)...(19): siRNA sense strand
cuugauggugcuagacauu

SEQ ID NO: 2437343 - RNA, 19 nt, Homo sapiens
  misc_RNA (1)...(19): siRNA sense strand
ggugaguaccauaaggugu

SEQ ID NO: 2437344 - RNA, 19 nt, Homo sapiens
  misc_RNA (1)...(19): siRNA sense strand
cuacagagcuugcacugga

SEQ ID NO: 2437345 - RNA, 19 nt, Homo sapiens
  misc_RNA (1)...(19): siRNA sense strand
ucugcaagaauuaaaggaa

SEQ ID NO: 2437346 - RNA, 19 nt, Homo sapiens
  misc_RNA (1)...(19): siRNA sense strand
gcaugaagucacagggcua

SEQ ID NO: 2437347 - RNA, 19 nt, Homo sapiens
  misc_RNA (1)...(19): siRNA sense strand
gaaaagagccgcuggggua

SEQ ID NO: 2437348 - RNA, 19 nt, Homo sapiens
  misc_RNA (1)...(19): siRNA sense strand
guuuacaagggaagugaaa

SEQ ID NO: 2437349 - RNA, 19 nt, Homo sapiens
  misc_RNA (1)...(19): siRNA sense strand
ggauuuagaaguaccggua

SEQ ID NO: 2437350 - RNA, 19 nt, Homo sapiens
  misc_RNA (1)...(19): siRNA sense strand
acagagucaaugaaggaaa

SEQ ID NO: 2437351 - RNA, 19 nt, Homo sapiens
  misc_RNA (1)...(19): siRNA sense strand
caaugaaggaaauggcaca

SEQ ID NO: 2437352 - RNA, 19 nt, Homo sapiens
  misc_RNA (1)...(19): siRNA sense strand
cguagugaacggaagggaa

SEQ ID NO: 2437353 - RNA, 19 nt, Homo sapiens
  misc_RNA (1)...(19): siRNA sense strand
caagggaagugaaagccaa

SEQ ID NO: 2437354 - RNA, 19 nt, Homo sapiens
  misc_RNA (1)...(19): siRNA sense strand
auuuagaaguaccgguauu

SEQ ID NO: 2437355 - RNA, 19 nt, Homo sapiens
  misc_RNA (1)...(19): siRNA sense strand
cugcauuagaaaaggaaau

SEQ ID NO: 2437356 - RNA, 19 nt, Homo sapiens
  misc_RNA (1)...(19): siRNA sense strand
cugcaauuuuggaggcaau

SEQ ID NO: 2437357 - RNA, 19 nt, Homo sapiens
  misc_RNA (1)...(19): siRNA sense strand
auguaaaugaagaugccaa

SEQ ID NO: 2437358 - RNA, 19 nt, Homo sapiens
  misc_RNA (1)...(19): siRNA sense strand
aagugaaagccaaagugaa

SEQ ID NO: 2437359 - RNA, 19 nt, Homo sapiens
  misc_RNA (1)...(19): siRNA sense strand
agucaugggcagaguucuu

SEQ ID NO: 2437360 - RNA, 19 nt, Homo sapiens
  misc_RNA (1)...(19): siRNA sense strand
ggguacgauugauuggaga

SEQ ID NO: 2437361 - RNA, 19 nt, Homo sapiens
  misc_RNA (1)...(19): siRNA sense strand
acgauugauuggagagaug

SEQ ID NO: 2437362 - RNA, 19 nt, Homo sapiens
  misc_RNA (1)...(19): siRNA sense strand
agggaauacgugagaaugu

SEQ ID NO: 2437363 - RNA, 19 nt, Homo sapiens
  misc_RNA (1)...(19): siRNA sense strand
ggaaauggcacaagcgcag

SEQ ID NO: 2437364 - RNA, 19 nt, Homo sapiens
  misc_RNA (1)...(19): siRNA sense strand
ucaggaagcuggaaggaag

SEQ ID NO: 2437365 - RNA, 19 nt, Homo sapiens
  misc_RNA (1)...(19): siRNA sense strand
aggcaauggauuuagaagu

SEQ ID NO: 2437366 - RNA, 19 nt, Homo sapiens
  misc_RNA (1)...(19): siRNA sense strand
aagggaagugaaagccaaa

SEQ ID NO: 2437367 - RNA, 19 nt, Homo sapiens
  misc_RNA (1)...(19): siRNA sense strand
uggcagguggaaagagaca

SEQ ID NO: 2437368 - RNA, 19 nt, Homo sapiens
  misc_RNA (1)...(19): siRNA sense strand
cugccguggugaagcauga

SEQ ID NO: 2437369 - RNA, 19 nt, Homo sapiens
  misc_RNA (1)...(19): siRNA sense strand
cagaaggcccagaagccaa

SEQ ID NO: 2437370 - RNA, 19 nt, Homo sapiens
  misc_RNA (1)...(19): siRNA sense strand
ccaaauggacagcugguga

SEQ ID NO: 2437371 - RNA, 19 nt, Homo sapiens
  misc_RNA (1)...(19): siRNA sense strand
gcuucaagacuuucggcau

SEQ ID NO: 2437372 - RNA, 19 nt, Homo sapiens
  misc_RNA (1)...(19): siRNA sense strand
cccagaagccaaauggaca

SEQ ID NO: 2437373 - RNA, 19 nt, Homo sapiens
  misc_RNA (1)...(19): siRNA sense strand
ccaugcucguggugcacaa

SEQ ID NO: 2437374 - RNA, 19 nt, Homo sapiens
  misc_RNA (1)...(19): siRNA sense strand
ggaaaguucuuaauggaga

SEQ ID NO: 2437375 - RNA, 19 nt, Homo sapiens
  misc_RNA (1)...(19): siRNA sense strand
gaagauaucaugaagcgaa

SEQ ID NO: 2437376 - RNA, 19 nt, Homo sapiens
  misc_RNA (1)...(19): siRNA sense strand
ugucacaguuugaggcaca

SEQ ID NO: 2437377 - RNA, 19 nt, Homo sapiens
  misc_RNA (1)...(19): siRNA sense strand
aguugaaauuugcagagaa

SEQ ID NO: 2437378 - RNA, 19 nt, Homo sapiens
  misc_RNA (1)...(19): siRNA sense strand
gcucacagccauugcgguu

SEQ ID NO: 2437379 - RNA, 19 nt, Homo sapiens
  misc_RNA (1)...(19): siRNA sense strand
ugcagagaaucgagcaaau

SEQ ID NO: 2437380 - RNA, 19 nt, Homo sapiens
  misc_RNA (1)...(19): siRNA sense strand
augaugugguggaguugaa

SEQ ID NO: 2437381 - RNA, 19 nt, Homo sapiens
  misc_RNA (1)...(19): siRNA sense strand
augaagcgaaacagagcaa

SEQ ID NO: 2437382 - RNA, 19 nt, Homo sapiens
  misc_RNA (1)...(19): siRNA sense strand
ccuacaguggccugcguaa

SEQ ID NO: 2437383 - RNA, 19 nt, Homo sapiens
  misc_RNA (1)...(19): siRNA sense strand
uggccaguccaaaggguau

SEQ ID NO: 2437384 - RNA, 19 nt, Homo sapiens
  misc_RNA (1)...(19): siRNA sense strand
agaaaggaaccgggagcau

SEQ ID NO: 2437385 - RNA, 19 nt, Homo sapiens
  misc_RNA (1)...(19): siRNA sense strand
ccgagauucuagugauucu

SEQ ID NO: 2437386 - RNA, 19 nt, Homo sapiens
  misc_RNA (1)...(19): siRNA sense strand
uggcagagugugagaggga

SEQ ID NO: 2437387 - RNA, 19 nt, Homo sapiens
  misc_RNA (1)...(19): siRNA sense strand
gcacaggagccuucgccua

SEQ ID NO: 2437388 - RNA, 19 nt, Homo sapiens
  misc_RNA (1)...(19): siRNA sense strand
gaagaagugcugagggucu

SEQ ID NO: 2437389 - RNA, 19 nt, Homo sapiens
  misc_RNA (1)...(19): siRNA sense strand
uggaagaagugcugagggu

SEQ ID NO: 2437390 - RNA, 19 nt, Homo sapiens
  misc_RNA (1)...(19): siRNA sense strand
ggagagagggcacaggaga

SEQ ID NO: 2437391 - RNA, 19 nt, Homo sapiens
  misc_RNA (1)...(19): siRNA sense strand
gcucuugaugggaguggaa

SEQ ID NO: 2437392 - RNA, 19 nt, Homo sapiens
  misc_RNA (1)...(19): siRNA sense strand
gcacaggagccuucgccua

SEQ ID NO: 2437393 - RNA, 19 nt, Homo sapiens
  misc_RNA (1)...(19): siRNA sense strand
ccaacgagacggucaacau

SEQ ID NO: 2437394 - RNA, 19 nt, Homo sapiens
  misc_RNA (1)...(19): siRNA sense strand
gcgcacaccuucagcucca

SEQ ID NO: 2437395 - RNA, 19 nt, Homo sapiens
  misc_RNA (1)...(19): siRNA sense strand
cgucaggcaucaaggccaa

SEQ ID NO: 2437396 - RNA, 19 nt, Homo sapiens
  misc_RNA (1)...(19): siRNA sense strand
ggagguacuucgagccaca

SEQ ID NO: 2437397 - RNA, 19 nt, Homo sapiens
  misc_RNA (1)...(19): siRNA sense strand
agggaaagaagcuggagau

SEQ ID NO: 2437398 - RNA, 19 nt, Homo sapiens
  misc_RNA (1)...(19): siRNA sense strand
aggcagaagagaagcagca

SEQ ID NO: 2437399 - RNA, 19 nt, Homo sapiens
  misc_RNA (1)...(19): siRNA sense strand
guggaaaacggaaggguca

SEQ ID NO: 2437400 - RNA, 19 nt, Homo sapiens
  misc_RNA (1)...(19): siRNA sense strand
cucaaaagauuggaagaaa

SEQ ID NO: 2437401 - RNA, 19 nt, Homo sapiens
  misc_RNA (1)...(19): siRNA sense strand
auuuauggauuuggagcaa

SEQ ID NO: 2437402 - RNA, 19 nt, Homo sapiens
  misc_RNA (1)...(19): siRNA sense strand
acggaagggucauaagcga

SEQ ID NO: 2437403 - RNA, 19 nt, Homo sapiens
  misc_RNA (1)...(19): siRNA sense strand
gugcacaucuaccagggaa

SEQ ID NO: 2437404 - RNA, 19 nt, Homo sapiens
  misc_RNA (1)...(19): siRNA sense strand
ugugcaacguggcgagcau

SEQ ID NO: 2437405 - RNA, 19 nt, Homo sapiens
  misc_RNA (1)...(19): siRNA sense strand
agauuggaagaaagaaaga

SEQ ID NO: 2437406 - RNA, 19 nt, Homo sapiens
  misc_RNA (1)...(19): siRNA sense strand
ggauaagaaggaaggucgu

SEQ ID NO: 2437407 - RNA, 19 nt, Homo sapiens
  misc_RNA (1)...(19): siRNA sense strand
ccaccgugauccugggacu

SEQ ID NO: 2437408 - RNA, 19 nt, Homo sapiens
  misc_RNA (1)...(19): siRNA sense strand
cuggaagauuauagagaaa

SEQ ID NO: 2437409 - RNA, 19 nt, Homo sapiens
  misc_RNA (1)...(19): siRNA sense strand
cggaaggauaugaggaaga

SEQ ID NO: 2437410 - RNA, 19 nt, Homo sapiens
  misc_RNA (1)...(19): siRNA sense strand
augaagaggaagaggaaaa

SEQ ID NO: 2437411 - RNA, 19 nt, Homo sapiens
  misc_RNA (1)...(19): siRNA sense strand
aggaagaggaagaggagga

SEQ ID NO: 2437412 - RNA, 19 nt, Homo sapiens
  misc_RNA (1)...(19): siRNA sense strand
aggaggaggaagaggaaga

SEQ ID NO: 2437413 - RNA, 19 nt, Homo sapiens
  misc_RNA (1)...(19): siRNA sense strand
aagaggaagaagaggaaga

SEQ ID NO: 2437414 - RNA, 19 nt, Homo sapiens
  misc_RNA (1)...(19): siRNA sense strand
caguagaagcucugcaaaa

SEQ ID NO: 2437415 - RNA, 19 nt, Homo sapiens
  misc_RNA (1)...(19): siRNA sense strand
gauaugaggaagaggagga

SEQ ID NO: 2437416 - RNA, 19 nt, Homo sapiens
  misc_RNA (1)...(19): siRNA sense strand
gagaagaggaagugggccu

SEQ ID NO: 2437417 - RNA, 19 nt, Homo sapiens
  misc_RNA (1)...(19): siRNA sense strand
gcuuggaaguccuggcaga

SEQ ID NO: 2437418 - RNA, 19 nt, Homo sapiens
  misc_RNA (1)...(19): siRNA sense strand
cagaguugggagagggaga

SEQ ID NO: 2437419 - RNA, 19 nt, Homo sapiens
  misc_RNA (1)...(19): siRNA sense strand
augaagaagaugaugauga

SEQ ID NO: 2437420 - RNA, 19 nt, Homo sapiens
  misc_RNA (1)...(19): siRNA sense strand
aagaugaugaagaggaaga

SEQ ID NO: 2437421 - RNA, 19 nt, Homo sapiens
  misc_RNA (1)...(19): siRNA sense strand
aggaugaagaugaagauga

SEQ ID NO: 2437422 - RNA, 19 nt, Homo sapiens
  misc_RNA (1)...(19): siRNA sense strand
aggaagaggaggaugagga

SEQ ID NO: 2437423 - RNA, 19 nt, Homo sapiens
  misc_RNA (1)...(19): siRNA sense strand
aagaagaggaagaagagga

SEQ ID NO: 2437424 - RNA, 19 nt, Homo sapiens
  misc_RNA (1)...(19): siRNA sense strand
gggagaagaggaaacgaga

SEQ ID NO: 2437425 - RNA, 19 nt, Homo sapiens
  misc_RNA (1)...(19): siRNA sense strand
aggaugaagaagaugauga

SEQ ID NO: 2437426 - RNA, 19 nt, Homo sapiens
  misc_RNA (1)...(19): siRNA sense strand
gagagggagaagaggaagu

SEQ ID NO: 2437427 - RNA, 19 nt, Homo sapiens
  misc_RNA (1)...(19): siRNA sense strand
ggauuugaucaggaggaua

SEQ ID NO: 2437428 - RNA, 19 nt, Homo sapiens
  misc_RNA (1)...(19): siRNA sense strand
auggagaggaagaagauga

SEQ ID NO: 2437429 - RNA, 19 nt, Homo sapiens
  misc_RNA (1)...(19): siRNA sense strand
acgagaugcugaagacgau

SEQ ID NO: 2437430 - RNA, 19 nt, Homo sapiens
  misc_RNA (1)...(19): siRNA sense strand
ggagaagaggaaacgagau

SEQ ID NO: 2437431 - RNA, 19 nt, Homo sapiens
  misc_RNA (1)...(19): siRNA sense strand
aagacgauggagaggaaga

SEQ ID NO: 2437432 - RNA, 19 nt, Homo sapiens
  misc_RNA (1)...(19): siRNA sense strand
uugaacuacugcagcaaau

SEQ ID NO: 2437433 - RNA, 19 nt, Homo sapiens
  misc_RNA (1)...(19): siRNA sense strand
agaggaggaggaagaggaa

SEQ ID NO: 2437434 - RNA, 19 nt, Homo sapiens
  misc_RNA (1)...(19): siRNA sense strand
augaggaagaggaggagga

SEQ ID NO: 2437435 - RNA, 19 nt, Homo sapiens
  misc_RNA (1)...(19): siRNA sense strand
augcugaagacgauggaga

SEQ ID NO: 2437436 - RNA, 19 nt, Homo sapiens
  misc_RNA (1)...(19): siRNA sense strand
aggaggaagaggaagagga

SEQ ID NO: 2437437 - RNA, 19 nt, Homo sapiens
  misc_RNA (1)...(19): siRNA sense strand
acgauggagaggaagaaga

SEQ ID NO: 2437438 - RNA, 19 nt, Homo sapiens
  misc_RNA (1)...(19): siRNA sense strand
gaugaagaggaagaggaaa

SEQ ID NO: 2437439 - RNA, 19 nt, Homo sapiens
  misc_RNA (1)...(19): siRNA sense strand
agaugaagaugaagcaggu

SEQ ID NO: 2437440 - RNA, 19 nt, Homo sapiens
  misc_RNA (1)...(19): siRNA sense strand
agaucucaguacaguagaa

SEQ ID NO: 2437441 - RNA, 19 nt, Homo sapiens
  misc_RNA (1)...(19): siRNA sense strand
ccaucaaguuacagaacaa

SEQ ID NO: 2437442 - RNA, 19 nt, Homo sapiens
  misc_RNA (1)...(19): siRNA sense strand
uugcaagagauuugguaaa

SEQ ID NO: 2437443 - RNA, 19 nt, Homo sapiens
  misc_RNA (1)...(19): siRNA sense strand
aagaaacagcagaugauaa

SEQ ID NO: 2437444 - RNA, 19 nt, Homo sapiens
  misc_RNA (1)...(19): siRNA sense strand
uggaggaacaggugaagaa

SEQ ID NO: 2437445 - RNA, 19 nt, Homo sapiens
  misc_RNA (1)...(19): siRNA sense strand
guagaaauguauaagcaga

SEQ ID NO: 2437446 - RNA, 19 nt, Homo sapiens
  misc_RNA (1)...(19): siRNA sense strand
acuauaaacaggacaagaa

SEQ ID NO: 2437447 - RNA, 19 nt, Homo sapiens
  misc_RNA (1)...(19): siRNA sense strand
aggaacaggugaagaaacu

SEQ ID NO: 2437448 - RNA, 19 nt, Homo sapiens
  misc_RNA (1)...(19): siRNA sense strand
cagaaaucucagaaagaca

SEQ ID NO: 2437449 - RNA, 19 nt, Homo sapiens
  misc_RNA (1)...(19): siRNA sense strand
cuauaaacaggacaagaaa

SEQ ID NO: 2437450 - RNA, 19 nt, Homo sapiens
  misc_RNA (1)...(19): siRNA sense strand
aagcagaacaagcaagcaa

SEQ ID NO: 2437451 - RNA, 19 nt, Homo sapiens
  misc_RNA (1)...(19): siRNA sense strand
caggagaugauauuggaaa

SEQ ID NO: 2437452 - RNA, 19 nt, Homo sapiens
  misc_RNA (1)...(19): siRNA sense strand
uaguuuagccccagagaaa

SEQ ID NO: 2437453 - RNA, 19 nt, Homo sapiens
  misc_RNA (1)...(19): siRNA sense strand
uaguuuagccccagagaaa

SEQ ID NO: 2437454 - RNA, 19 nt, Homo sapiens
  misc_RNA (1)...(19): siRNA sense strand
agaaaagcucuuaggggaa

SEQ ID NO: 2437455 - RNA, 19 nt, Homo sapiens
  misc_RNA (1)...(19): siRNA sense strand
agugaaacucuuggaaaua

SEQ ID NO: 2437456 - RNA, 19 nt, Homo sapiens
  misc_RNA (1)...(19): siRNA sense strand
agaaaauaucagaggacuu

SEQ ID NO: 2437457 - RNA, 19 nt, Homo sapiens
  misc_RNA (1)...(19): siRNA sense strand
agaaaauaucagaggacuu

SEQ ID NO: 2437458 - RNA, 19 nt, Homo sapiens
  misc_RNA (1)...(19): siRNA sense strand
gcuagagaaugaaugccaa

SEQ ID NO: 2437459 - RNA, 19 nt, Homo sapiens
  misc_RNA (1)...(19): siRNA sense strand
cuagagaaugaaugccaaa

SEQ ID NO: 2437460 - RNA, 19 nt, Homo sapiens
  misc_RNA (1)...(19): siRNA sense strand
acagcagagaguagagauu

SEQ ID NO: 2437461 - RNA, 19 nt, Homo sapiens
  misc_RNA (1)...(19): siRNA sense strand
aagcaagcaaugaagggua

SEQ ID NO: 2437462 - RNA, 19 nt, Homo sapiens
  misc_RNA (1)...(19): siRNA sense strand
gugucagcccacaaagaaa

SEQ ID NO: 2437463 - RNA, 19 nt, Homo sapiens
  misc_RNA (1)...(19): siRNA sense strand
gugucagcccacaaagaaa

SEQ ID NO: 2437464 - RNA, 19 nt, Homo sapiens
  misc_RNA (1)...(19): siRNA sense strand
agaacaagcaagcaaugaa

SEQ ID NO: 2437465 - RNA, 19 nt, Homo sapiens
  misc_RNA (1)...(19): siRNA sense strand
ccuaaagaauagcagccau

SEQ ID NO: 2437466 - RNA, 19 nt, Homo sapiens
  misc_RNA (1)...(19): siRNA sense strand
cuaucagaaaucucagaaa

SEQ ID NO: 2437467 - RNA, 19 nt, Homo sapiens
  misc_RNA (1)...(19): siRNA sense strand
aauaaugaagugucggcua

SEQ ID NO: 2437468 - RNA, 19 nt, Homo sapiens
  misc_RNA (1)...(19): siRNA sense strand
ccaauauuacugaggaugu

SEQ ID NO: 2437469 - RNA, 19 nt, Homo sapiens
  misc_RNA (1)...(19): siRNA sense strand
aggagaugauauuggaaac

SEQ ID NO: 2437470 - RNA, 19 nt, Homo sapiens
  misc_RNA (1)...(19): siRNA sense strand
ccaauauuacugaggaugu

SEQ ID NO: 2437471 - RNA, 19 nt, Homo sapiens
  misc_RNA (1)...(19): siRNA sense strand
acucaacaaagucaggaaa

SEQ ID NO: 2437472 - RNA, 19 nt, Homo sapiens
  misc_RNA (1)...(19): siRNA sense strand
gugaagaaacugagccaug

SEQ ID NO: 2437473 - RNA, 19 nt, Homo sapiens
  misc_RNA (1)...(19): siRNA sense strand
cugcacagaaguuuaacaa

SEQ ID NO: 2437474 - RNA, 19 nt, Homo sapiens
  misc_RNA (1)...(19): siRNA sense strand
aagaaacaggagaugauau

SEQ ID NO: 2437475 - RNA, 19 nt, Homo sapiens
  misc_RNA (1)...(19): siRNA sense strand
uaggauuaccauugccuua

SEQ ID NO: 2437476 - RNA, 19 nt, Homo sapiens
  misc_RNA (1)...(19): siRNA sense strand
cagacugcacagaaguuua

SEQ ID NO: 2437477 - RNA, 19 nt, Homo sapiens
  misc_RNA (1)...(19): siRNA sense strand
gccaucagaagcaaagaaa

SEQ ID NO: 2437478 - RNA, 19 nt, Homo sapiens
  misc_RNA (1)...(19): siRNA sense strand
aaaagaaacaggagaugau

SEQ ID NO: 2437479 - RNA, 19 nt, Homo sapiens
  misc_RNA (1)...(19): siRNA sense strand
agcagaugauaauggaaaa

SEQ ID NO: 2437480 - RNA, 19 nt, Homo sapiens
  misc_RNA (1)...(19): siRNA sense strand
gaaacagggaacucugcaa

SEQ ID NO: 2437481 - RNA, 19 nt, Homo sapiens
  misc_RNA (1)...(19): siRNA sense strand
aaccaauauuacugaggau

SEQ ID NO: 2437482 - RNA, 19 nt, Homo sapiens
  misc_RNA (1)...(19): siRNA sense strand
aaccaauauuacugaggau

SEQ ID NO: 2437483 - RNA, 19 nt, Homo sapiens
  misc_RNA (1)...(19): siRNA sense strand
gaaagacauaagugaaacu

SEQ ID NO: 2437484 - RNA, 19 nt, Homo sapiens
  misc_RNA (1)...(19): siRNA sense strand
aggugaagaaacugagcca

SEQ ID NO: 2437485 - RNA, 19 nt, Homo sapiens
  misc_RNA (1)...(19): siRNA sense strand
augaaaagaaacaggagau

SEQ ID NO: 2437486 - RNA, 19 nt, Homo sapiens
  misc_RNA (1)...(19): siRNA sense strand
guucaauauucauguugca

SEQ ID NO: 2437487 - RNA, 19 nt, Homo sapiens
  misc_RNA (1)...(19): siRNA sense strand
ccgaagagcugcugagcca

SEQ ID NO: 2437488 - RNA, 19 nt, Homo sapiens
  misc_RNA (1)...(19): siRNA sense strand
gcgcaaacauguucgcaga

SEQ ID NO: 2437489 - RNA, 19 nt, Homo sapiens
  misc_RNA (1)...(19): siRNA sense strand
gcaacugggugucggccaa

SEQ ID NO: 2437490 - RNA, 19 nt, Homo sapiens
  misc_RNA (1)...(19): siRNA sense strand
acaaacugcugucgggcua

SEQ ID NO: 2437491 - RNA, 19 nt, Homo sapiens
  misc_RNA (1)...(19): siRNA sense strand
acaucggcguggaggacaa

SEQ ID NO: 2437492 - RNA, 19 nt, Homo sapiens
  misc_RNA (1)...(19): siRNA sense strand
cuaagaagcaguaagcaca

SEQ ID NO: 2437493 - RNA, 19 nt, Homo sapiens
  misc_RNA (1)...(19): siRNA sense strand
agggcaaggacgacaagaa

SEQ ID NO: 2437494 - RNA, 19 nt, Homo sapiens
  misc_RNA (1)...(19): siRNA sense strand
ccuaagaagcaguaagcac

SEQ ID NO: 2437495 - RNA, 19 nt, Homo sapiens
  misc_RNA (1)...(19): siRNA sense strand
cggagggcaaggacgacaa

SEQ ID NO: 2437496 - RNA, 19 nt, Homo sapiens
  misc_RNA (1)...(19): siRNA sense strand
ggguggacgaagagaacau

SEQ ID NO: 2437497 - RNA, 19 nt, Homo sapiens
  misc_RNA (1)...(19): siRNA sense strand
gcuucagaucccagaaauu

SEQ ID NO: 2437498 - RNA, 19 nt, Homo sapiens
  misc_RNA (1)...(19): siRNA sense strand
aggagauggaacaggaaga

SEQ ID NO: 2437499 - RNA, 19 nt, Homo sapiens
  misc_RNA (1)...(19): siRNA sense strand
gcagacacaucgaggccca

SEQ ID NO: 2437500 - RNA, 19 nt, Homo sapiens
  misc_RNA (1)...(19): siRNA sense strand
cccaaagcuccuugagaca

SEQ ID NO: 2437501 - RNA, 19 nt, Homo sapiens
  misc_RNA (1)...(19): siRNA sense strand
gcaauguacaagagacacu

SEQ ID NO: 2437502 - RNA, 19 nt, Homo sapiens
  misc_RNA (1)...(19): siRNA sense strand
ugaaugcuguggagcgcua

SEQ ID NO: 2437503 - RNA, 19 nt, Homo sapiens
  misc_RNA (1)...(19): siRNA sense strand
ugaaggagauggaacagga

SEQ ID NO: 2437504 - RNA, 19 nt, Homo sapiens
  misc_RNA (1)...(19): siRNA sense strand
ccaccaacuccugggcaua

SEQ ID NO: 2437505 - RNA, 19 nt, Homo sapiens
  misc_RNA (1)...(19): siRNA sense strand
ggauugaaggagauggaac

SEQ ID NO: 2437506 - RNA, 19 nt, Homo sapiens
  misc_RNA (1)...(19): siRNA sense strand
ccuuacugggagaguggaa

SEQ ID NO: 2437507 - RNA, 19 nt, Homo sapiens
  misc_RNA (1)...(19): siRNA sense strand
gggaagauguauaucaccu

SEQ ID NO: 2437508 - RNA, 19 nt, Homo sapiens
  misc_RNA (1)...(19): siRNA sense strand
cagccugagcaauguacaa

SEQ ID NO: 2437509 - RNA, 19 nt, Homo sapiens
  misc_RNA (1)...(19): siRNA sense strand
uggagcaggugcaggcuga

SEQ ID NO: 2437510 - RNA, 19 nt, Homo sapiens
  misc_RNA (1)...(19): siRNA sense strand
gagaaggacugcugggagg

SEQ ID NO: 2437511 - RNA, 19 nt, Homo sapiens
  misc_RNA (1)...(19): siRNA sense strand
cuacaaugcuaugugccaa

SEQ ID NO: 2437512 - RNA, 19 nt, Homo sapiens
  misc_RNA (1)...(19): siRNA sense strand
gagaaaaggacaaggacaa

SEQ ID NO: 2437513 - RNA, 19 nt, Homo sapiens
  misc_RNA (1)...(19): siRNA sense strand
aggagaaggccaaggagaa

SEQ ID NO: 2437514 - RNA, 19 nt, Homo sapiens
  misc_RNA (1)...(19): siRNA sense strand
agagaagggagaagugaaa

SEQ ID NO: 2437515 - RNA, 19 nt, Homo sapiens
  misc_RNA (1)...(19): siRNA sense strand
aaggaaggaaggaggauaa

SEQ ID NO: 2437516 - RNA, 19 nt, Homo sapiens
  misc_RNA (1)...(19): siRNA sense strand
acacagacgccgagaugaa

SEQ ID NO: 2437517 - RNA, 19 nt, Homo sapiens
  misc_RNA (1)...(19): siRNA sense strand
ccucaagaucucaggaauu

SEQ ID NO: 2437518 - RNA, 19 nt, Homo sapiens
  misc_RNA (1)...(19): siRNA sense strand
cggcauggaagaaggagaa

SEQ ID NO: 2437519 - RNA, 19 nt, Homo sapiens
  misc_RNA (1)...(19): siRNA sense strand
aggacaaggacaaggagaa

SEQ ID NO: 2437520 - RNA, 19 nt, Homo sapiens
  misc_RNA (1)...(19): siRNA sense strand
uggaauaaauaaugagcca

SEQ ID NO: 2437521 - RNA, 19 nt, Homo sapiens
  misc_RNA (1)...(19): siRNA sense strand
ggacagggacagacggaga

SEQ ID NO: 2437522 - RNA, 19 nt, Homo sapiens
  misc_RNA (1)...(19): siRNA sense strand
cagcaggagcagaggauca

SEQ ID NO: 2437523 - RNA, 19 nt, Homo sapiens
  misc_RNA (1)...(19): siRNA sense strand
aaggagagacugagagaca

SEQ ID NO: 2437524 - RNA, 19 nt, Homo sapiens
  misc_RNA (1)...(19): siRNA sense strand
agaaggaagaauugaaaga

SEQ ID NO: 2437525 - RNA, 19 nt, Homo sapiens
  misc_RNA (1)...(19): siRNA sense strand
gcaugguggacuugugaaa

SEQ ID NO: 2437526 - RNA, 19 nt, Homo sapiens
  misc_RNA (1)...(19): siRNA sense strand
ucugauaaugugaaggaua

SEQ ID NO: 2437527 - RNA, 19 nt, Homo sapiens
  misc_RNA (1)...(19): siRNA sense strand
gcaugacaaaccugagaaa

SEQ ID NO: 2437528 - RNA, 19 nt, Homo sapiens
  misc_RNA (1)...(19): siRNA sense strand
gagagaagggagaagugaa

SEQ ID NO: 2437529 - RNA, 19 nt, Homo sapiens
  misc_RNA (1)...(19): siRNA sense strand
uggaagaaggagaaggaca

SEQ ID NO: 2437530 - RNA, 19 nt, Homo sapiens
  misc_RNA (1)...(19): siRNA sense strand
aggacaaggagaaggccaa

SEQ ID NO: 2437531 - RNA, 19 nt, Homo sapiens
  misc_RNA (1)...(19): siRNA sense strand
guacaagcagagaucgaaa

SEQ ID NO: 2437532 - RNA, 19 nt, Homo sapiens
  misc_RNA (1)...(19): siRNA sense strand
acagagacuccgagcgcaa

SEQ ID NO: 2437533 - RNA, 19 nt, Homo sapiens
  misc_RNA (1)...(19): siRNA sense strand
uagaagaagaggagaagca

SEQ ID NO: 2437534 - RNA, 19 nt, Homo sapiens
  misc_RNA (1)...(19): siRNA sense strand
cgacagaaagacagaggca

SEQ ID NO: 2437535 - RNA, 19 nt, Homo sapiens
  misc_RNA (1)...(19): siRNA sense strand
cagagaagcagaaagguga

SEQ ID NO: 2437536 - RNA, 19 nt, Homo sapiens
  misc_RNA (1)...(19): siRNA sense strand
aacuagaagaagaggagaa

SEQ ID NO: 2437537 - RNA, 19 nt, Homo sapiens
  misc_RNA (1)...(19): siRNA sense strand
uaagaaugugcgagaagaa

SEQ ID NO: 2437538 - RNA, 19 nt, Homo sapiens
  misc_RNA (1)...(19): siRNA sense strand
caagaaggagacagagaga

SEQ ID NO: 2437539 - RNA, 19 nt, Homo sapiens
  misc_RNA (1)...(19): siRNA sense strand
auaauaagaaugugcgaga

SEQ ID NO: 2437540 - RNA, 19 nt, Homo sapiens
  misc_RNA (1)...(19): siRNA sense strand
agagagaaguacaagcaga

SEQ ID NO: 2437541 - RNA, 19 nt, Homo sapiens
  misc_RNA (1)...(19): siRNA sense strand
gaccgcaagccaagagaaa

SEQ ID NO: 2437542 - RNA, 19 nt, Homo sapiens
  misc_RNA (1)...(19): siRNA sense strand
cugacaaugaagaggauga

SEQ ID NO: 2437543 - RNA, 19 nt, Homo sapiens
  misc_RNA (1)...(19): siRNA sense strand
caaugaagaggaugaucaa

SEQ ID NO: 2437544 - RNA, 19 nt, Homo sapiens
  misc_RNA (1)...(19): siRNA sense strand
gugagaauauucagcccaa

SEQ ID NO: 2437545 - RNA, 19 nt, Homo sapiens
  misc_RNA (1)...(19): siRNA sense strand
uuguaauggugucgggaga

SEQ ID NO: 2437546 - RNA, 19 nt, Homo sapiens
  misc_RNA (1)...(19): siRNA sense strand
cgcaagaaggagacagaga

SEQ ID NO: 2437547 - RNA, 19 nt, Homo sapiens
  misc_RNA (1)...(19): siRNA sense strand
augaagaggaugaucaauu

SEQ ID NO: 2437548 - RNA, 19 nt, Homo sapiens
  misc_RNA (1)...(19): siRNA sense strand
aaagagaaggagagacuga

SEQ ID NO: 2437549 - RNA, 19 nt, Homo sapiens
  misc_RNA (1)...(19): siRNA sense strand
agggacagacggagaguga

SEQ ID NO: 2437550 - RNA, 19 nt, Homo sapiens
  misc_RNA (1)...(19): siRNA sense strand
aggaagacguggaugccau

SEQ ID NO: 2437551 - RNA, 19 nt, Homo sapiens
  misc_RNA (1)...(19): siRNA sense strand
gguuuuagcuggagagaag

SEQ ID NO: 2437552 - RNA, 19 nt, Homo sapiens
  misc_RNA (1)...(19): siRNA sense strand
ggccagacaacgagcgaca

SEQ ID NO: 2437553 - RNA, 19 nt, Homo sapiens
  misc_RNA (1)...(19): siRNA sense strand
acaacgagcgacagaaaga

SEQ ID NO: 2437554 - RNA, 19 nt, Homo sapiens
  misc_RNA (1)...(19): siRNA sense strand
agaaggagagacugagaga

SEQ ID NO: 2437555 - RNA, 19 nt, Homo sapiens
  misc_RNA (1)...(19): siRNA sense strand
gagcagaggaucacagacu

SEQ ID NO: 2437556 - RNA, 19 nt, Homo sapiens
  misc_RNA (1)...(19): siRNA sense strand
ugaucaaagaccagcaaga

SEQ ID NO: 2437557 - RNA, 19 nt, Homo sapiens
  misc_RNA (1)...(19): siRNA sense strand
aggcugaaacagagacuga

SEQ ID NO: 2437558 - RNA, 19 nt, Homo sapiens
  misc_RNA (1)...(19): siRNA sense strand
acagaaagacagaggcaac

SEQ ID NO: 2437559 - RNA, 19 nt, Homo sapiens
  misc_RNA (1)...(19): siRNA sense strand
cgagaugaagucugauaau

SEQ ID NO: 2437560 - RNA, 19 nt, Homo sapiens
  misc_RNA (1)...(19): siRNA sense strand
ccaaggagaauggcggaaa

SEQ ID NO: 2437561 - RNA, 19 nt, Homo sapiens
  misc_RNA (1)...(19): siRNA sense strand
acagagaaggggagagaga

SEQ ID NO: 2437562 - RNA, 19 nt, Homo sapiens
  misc_RNA (1)...(19): siRNA sense strand
aaaugugauuacagaguca

SEQ ID NO: 2437563 - RNA, 19 nt, Homo sapiens
  misc_RNA (1)...(19): siRNA sense strand
acaaugaagaggaugauca

SEQ ID NO: 2437564 - RNA, 19 nt, Homo sapiens
  misc_RNA (1)...(19): siRNA sense strand
gaaagaagaccgcaagcca

SEQ ID NO: 2437565 - RNA, 19 nt, Homo sapiens
  misc_RNA (1)...(19): siRNA sense strand
aaggagacagagagaaaga

SEQ ID NO: 2437566 - RNA, 19 nt, Homo sapiens
  misc_RNA (1)...(19): siRNA sense strand
gagauuuccacuagagcuu

SEQ ID NO: 2437567 - RNA, 19 nt, Homo sapiens
  misc_RNA (1)...(19): siRNA sense strand
ccaaaucaggaaacgacaa

SEQ ID NO: 2437568 - RNA, 19 nt, Homo sapiens
  misc_RNA (1)...(19): siRNA sense strand
ugaaggauaaagaugcaaa

SEQ ID NO: 2437569 - RNA, 19 nt, Homo sapiens
  misc_RNA (1)...(19): siRNA sense strand
aauugaaagaagaccgcaa

SEQ ID NO: 2437570 - RNA, 19 nt, Homo sapiens
  misc_RNA (1)...(19): siRNA sense strand
agagaaggggagagagaga

SEQ ID NO: 2437571 - RNA, 19 nt, Homo sapiens
  misc_RNA (1)...(19): siRNA sense strand
aggaagaagaaaaggauua

SEQ ID NO: 2437572 - RNA, 19 nt, Homo sapiens
  misc_RNA (1)...(19): siRNA sense strand
gggaugaggaagaagaaaa

SEQ ID NO: 2437573 - RNA, 19 nt, Homo sapiens
  misc_RNA (1)...(19): siRNA sense strand
aagcagaagaaaaggaaaa

SEQ ID NO: 2437574 - RNA, 19 nt, Homo sapiens
  misc_RNA (1)...(19): siRNA sense strand
cuguaaaacuaaagugcaa

SEQ ID NO: 2437575 - RNA, 19 nt, Homo sapiens
  misc_RNA (1)...(19): siRNA sense strand
gagcauauugaaugggcua

SEQ ID NO: 2437576 - RNA, 19 nt, Homo sapiens
  misc_RNA (1)...(19): siRNA sense strand
gggaaugggaaaugguaca

SEQ ID NO: 2437577 - RNA, 19 nt, Homo sapiens
  misc_RNA (1)...(19): siRNA sense strand
aucaauaccaugaggacaa

SEQ ID NO: 2437578 - RNA, 19 nt, Homo sapiens
  misc_RNA (1)...(19): siRNA sense strand
aagaauacugcuagagcuu

SEQ ID NO: 2437579 - RNA, 19 nt, Homo sapiens
  misc_RNA (1)...(19): siRNA sense strand
acuaaagugcaaagaauca

SEQ ID NO: 2437580 - RNA, 19 nt, Homo sapiens
  misc_RNA (1)...(19): siRNA sense strand
acgaaguaugucauggaaa

SEQ ID NO: 2437581 - RNA, 19 nt, Homo sapiens
  misc_RNA (1)...(19): siRNA sense strand
acaacugcacauaaagaaa

SEQ ID NO: 2437582 - RNA, 19 nt, Homo sapiens
  misc_RNA (1)...(19): siRNA sense strand
ccaaauugacagaugacca

SEQ ID NO: 2437583 - RNA, 19 nt, Homo sapiens
  misc_RNA (1)...(19): siRNA sense strand
gaagagagauuuccagcga

SEQ ID NO: 2437584 - RNA, 19 nt, Homo sapiens
  misc_RNA (1)...(19): siRNA sense strand
ccaugaagagaaagaaacu

SEQ ID NO: 2437585 - RNA, 19 nt, Homo sapiens
  misc_RNA (1)...(19): siRNA sense strand
ggugucgguugguggaaau

SEQ ID NO: 2437586 - RNA, 19 nt, Homo sapiens
  misc_RNA (1)...(19): siRNA sense strand
cuuagauacagcagaugaa

SEQ ID NO: 2437587 - RNA, 19 nt, Homo sapiens
  misc_RNA (1)...(19): siRNA sense strand
gaguacuaccuugggaaua

SEQ ID NO: 2437588 - RNA, 19 nt, Homo sapiens
  misc_RNA (1)...(19): siRNA sense strand
uaccaugaagagaaagaaa

SEQ ID NO: 2437589 - RNA, 19 nt, Homo sapiens
  misc_RNA (1)...(19): siRNA sense strand
uauauaugcuagagccuca

SEQ ID NO: 2437590 - RNA, 19 nt, Homo sapiens
  misc_RNA (1)...(19): siRNA sense strand
agauacagcagaugaaaau

SEQ ID NO: 2437591 - RNA, 19 nt, Homo sapiens
  misc_RNA (1)...(19): siRNA sense strand
cccuaauccaagagagcuu

SEQ ID NO: 2437592 - RNA, 19 nt, Homo sapiens
  misc_RNA (1)...(19): siRNA sense strand
uggagcagcaggaagaaau

SEQ ID NO: 2437593 - RNA, 19 nt, Homo sapiens
  misc_RNA (1)...(19): siRNA sense strand
caucaugacaacugcacau

SEQ ID NO: 2437594 - RNA, 19 nt, Homo sapiens
  misc_RNA (1)...(19): siRNA sense strand
gggugucgguugguggaaa

SEQ ID NO: 2437595 - RNA, 19 nt, Homo sapiens
  misc_RNA (1)...(19): siRNA sense strand
aggaagaaauacuaagggu

SEQ ID NO: 2437596 - RNA, 19 nt, Homo sapiens
  misc_RNA (1)...(19): siRNA sense strand
aguaccaugaagagaaaga

SEQ ID NO: 2437597 - RNA, 19 nt, Homo sapiens
  misc_RNA (1)...(19): siRNA sense strand
cagucaggauggugucaca

SEQ ID NO: 2437598 - RNA, 19 nt, Homo sapiens
  misc_RNA (1)...(19): siRNA sense strand
ccugaaucuaagcaugaaa

SEQ ID NO: 2437599 - RNA, 19 nt, Homo sapiens
  misc_RNA (1)...(19): siRNA sense strand
agagagauuuccagcgauc

SEQ ID NO: 2437600 - RNA, 19 nt, Homo sapiens
  misc_RNA (1)...(19): siRNA sense strand
uuagauacugugugggaaa

SEQ ID NO: 2437601 - RNA, 19 nt, Homo sapiens
  misc_RNA (1)...(19): siRNA sense strand
ccaugauucuaguggacau

SEQ ID NO: 2437602 - RNA, 19 nt, Homo sapiens
  misc_RNA (1)...(19): siRNA sense strand
auuuacauuuggagggcua

SEQ ID NO: 2437603 - RNA, 19 nt, Homo sapiens
  misc_RNA (1)...(19): siRNA sense strand
cuuuaauaccucugaauga

SEQ ID NO: 2437604 - RNA, 19 nt, Homo sapiens
  misc_RNA (1)...(19): siRNA sense strand
guuccaaaacugugguaua

SEQ ID NO: 2437605 - RNA, 19 nt, Homo sapiens
  misc_RNA (1)...(19): siRNA sense strand
gggaaaaugcaaaagccaa

SEQ ID NO: 2437606 - RNA, 19 nt, Homo sapiens
  misc_RNA (1)...(19): siRNA sense strand
ggaauagcccugauggcau

SEQ ID NO: 2437607 - RNA, 19 nt, Homo sapiens
  misc_RNA (1)...(19): siRNA sense strand
cuugaagaccauagugaga

SEQ ID NO: 2437608 - RNA, 19 nt, Homo sapiens
  misc_RNA (1)...(19): siRNA sense strand
aggcugaaguguuagacau

SEQ ID NO: 2437609 - RNA, 19 nt, Homo sapiens
  misc_RNA (1)...(19): siRNA sense strand
uguacggacaggauggaaa

SEQ ID NO: 2437610 - RNA, 19 nt, Homo sapiens
  misc_RNA (1)...(19): siRNA sense strand
cccugcaguugcugagaaa

SEQ ID NO: 2437611 - RNA, 19 nt, Homo sapiens
  misc_RNA (1)...(19): siRNA sense strand
acuggaagcuugaagacca

SEQ ID NO: 2437612 - RNA, 19 nt, Homo sapiens
  misc_RNA (1)...(19): siRNA sense strand
aggugaaggcugaaguguu

SEQ ID NO: 2437613 - RNA, 19 nt, Homo sapiens
  misc_RNA (1)...(19): siRNA sense strand
accagaagcuugaagacca

SEQ ID NO: 2437614 - RNA, 19 nt, Homo sapiens
  misc_RNA (1)...(19): siRNA sense strand
accagaagcuugaagacca

SEQ ID NO: 2437615 - RNA, 19 nt, Homo sapiens
  misc_RNA (1)...(19): siRNA sense strand
agucaaggaaauaucaaca

SEQ ID NO: 2437616 - RNA, 19 nt, Homo sapiens
  misc_RNA (1)...(19): siRNA sense strand
acugugguauauagaacaa

SEQ ID NO: 2437617 - RNA, 19 nt, Homo sapiens
  misc_RNA (1)...(19): siRNA sense strand
acucaaaucuuucucccua

SEQ ID NO: 2437618 - RNA, 19 nt, Homo sapiens
  misc_RNA (1)...(19): siRNA sense strand
cuggaagcuugaagaccau

SEQ ID NO: 2437619 - RNA, 19 nt, Homo sapiens
  misc_RNA (1)...(19): siRNA sense strand
aagaauagcaggaggagca

SEQ ID NO: 2437620 - RNA, 19 nt, Homo sapiens
  misc_RNA (1)...(19): siRNA sense strand
aguuagauuuguuggacau

SEQ ID NO: 2437621 - RNA, 19 nt, Homo sapiens
  misc_RNA (1)...(19): siRNA sense strand
cgaauuaagaauagcagga

SEQ ID NO: 2437622 - RNA, 19 nt, Homo sapiens
  misc_RNA (1)...(19): siRNA sense strand
ccucauuauucaaaguaca

SEQ ID NO: 2437623 - RNA, 19 nt, Homo sapiens
  misc_RNA (1)...(19): siRNA sense strand
acagagaauacaagaggau

SEQ ID NO: 2437624 - RNA, 19 nt, Homo sapiens
  misc_RNA (1)...(19): siRNA sense strand
ggagaaaagcacggaacaa

SEQ ID NO: 2437625 - RNA, 19 nt, Homo sapiens
  misc_RNA (1)...(19): siRNA sense strand
uggacaugcuaaacagaga

SEQ ID NO: 2437626 - RNA, 19 nt, Homo sapiens
  misc_RNA (1)...(19): siRNA sense strand
ggagaaaggauuugggugg

SEQ ID NO: 2437627 - RNA, 19 nt, Homo sapiens
  misc_RNA (1)...(19): siRNA sense strand
ggcuggaauaucaggagaa

SEQ ID NO: 2437628 - RNA, 19 nt, Homo sapiens
  misc_RNA (1)...(19): siRNA sense strand
caggaggagcagugaggga

SEQ ID NO: 2437629 - RNA, 19 nt, Homo sapiens
  misc_RNA (1)...(19): siRNA sense strand
guuacauaaagaagaccua

SEQ ID NO: 2437630 - RNA, 19 nt, Homo sapiens
  misc_RNA (1)...(19): siRNA sense strand
auuaagaauagcaggagga

SEQ ID NO: 2437631 - RNA, 19 nt, Homo sapiens
  misc_RNA (1)...(19): siRNA sense strand
gauuacuacacuacggauu

SEQ ID NO: 2437632 - RNA, 19 nt, Homo sapiens
  misc_RNA (1)...(19): siRNA sense strand
aaguuagauuuguuggaca

SEQ ID NO: 2437633 - RNA, 19 nt, Homo sapiens
  misc_RNA (1)...(19): siRNA sense strand
ccugagacuuuggaagcaa

SEQ ID NO: 2437634 - RNA, 19 nt, Homo sapiens
  misc_RNA (1)...(19): siRNA sense strand
cagaaaaugcaaaaggcuu

SEQ ID NO: 2437635 - RNA, 19 nt, Homo sapiens
  misc_RNA (1)...(19): siRNA sense strand
ugaccaugauccugagacu

SEQ ID NO: 2437636 - RNA, 19 nt, Homo sapiens
  misc_RNA (1)...(19): siRNA sense strand
gagaaaggauuugggugga

SEQ ID NO: 2437637 - RNA, 19 nt, Homo sapiens
  misc_RNA (1)...(19): siRNA sense strand
uugcgagaacaguggaaaa

SEQ ID NO: 2437638 - RNA, 19 nt, Homo sapiens
  misc_RNA (1)...(19): siRNA sense strand
aagaauagcaggaggagca

SEQ ID NO: 2437639 - RNA, 19 nt, Homo sapiens
  misc_RNA (1)...(19): siRNA sense strand
aguuagauuuguuggacau

SEQ ID NO: 2437640 - RNA, 19 nt, Homo sapiens
  misc_RNA (1)...(19): siRNA sense strand
cgaauuaagaauagcagga

SEQ ID NO: 2437641 - RNA, 19 nt, Homo sapiens
  misc_RNA (1)...(19): siRNA sense strand
ccucauuauucaaaguaca

SEQ ID NO: 2437642 - RNA, 19 nt, Homo sapiens
  misc_RNA (1)...(19): siRNA sense strand
acagagaauacaagaggau

SEQ ID NO: 2437643 - RNA, 19 nt, Homo sapiens
  misc_RNA (1)...(19): siRNA sense strand
ggagaaaagcacggaacaa

SEQ ID NO: 2437644 - RNA, 19 nt, Homo sapiens
  misc_RNA (1)...(19): siRNA sense strand
uggacaugcuaaacagaga

SEQ ID NO: 2437645 - RNA, 19 nt, Homo sapiens
  misc_RNA (1)...(19): siRNA sense strand
ggagaaaggauuugggugg

SEQ ID NO: 2437646 - RNA, 19 nt, Homo sapiens
  misc_RNA (1)...(19): siRNA sense strand
ggcuggaauaucaggagaa

SEQ ID NO: 2437647 - RNA, 19 nt, Homo sapiens
  misc_RNA (1)...(19): siRNA sense strand
caggaggagcagugaggga

SEQ ID NO: 2437648 - RNA, 19 nt, Homo sapiens
  misc_RNA (1)...(19): siRNA sense strand
guuacauaaagaagaccua

SEQ ID NO: 2437649 - RNA, 19 nt, Homo sapiens
  misc_RNA (1)...(19): siRNA sense strand
auuaagaauagcaggagga

SEQ ID NO: 2437650 - RNA, 19 nt, Homo sapiens
  misc_RNA (1)...(19): siRNA sense strand
gauuacuacacuacggauu

SEQ ID NO: 2437651 - RNA, 19 nt, Homo sapiens
  misc_RNA (1)...(19): siRNA sense strand
gugcugaaccguaggugga

SEQ ID NO: 2437652 - RNA, 19 nt, Homo sapiens
  misc_RNA (1)...(19): siRNA sense strand
aaguuagauuuguuggaca

SEQ ID NO: 2437653 - RNA, 19 nt, Homo sapiens
  misc_RNA (1)...(19): siRNA sense strand
ccugagacuuuggaagcaa

SEQ ID NO: 2437654 - RNA, 19 nt, Homo sapiens
  misc_RNA (1)...(19): siRNA sense strand
cagaaaaugcaaaaggcuu

SEQ ID NO: 2437655 - RNA, 19 nt, Homo sapiens
  misc_RNA (1)...(19): siRNA sense strand
ugaccaugauccugagacu

SEQ ID NO: 2437656 - RNA, 19 nt, Homo sapiens
  misc_RNA (1)...(19): siRNA sense strand
gagaaaggauuugggugga

SEQ ID NO: 2437657 - RNA, 19 nt, Homo sapiens
  misc_RNA (1)...(19): siRNA sense strand
uugcgagaacaguggaaaa

SEQ ID NO: 2437658 - RNA, 19 nt, Homo sapiens
  misc_RNA (1)...(19): siRNA sense strand
cguaaugagacuauagcaa

SEQ ID NO: 2437659 - RNA, 19 nt, Homo sapiens
  misc_RNA (1)...(19): siRNA sense strand
gcuucuuagcugaggaaaa

SEQ ID NO: 2437660 - RNA, 19 nt, Homo sapiens
  misc_RNA (1)...(19): siRNA sense strand
ggaaaguaguuguggucac

SEQ ID NO: 2437661 - RNA, 19 nt, Homo sapiens
  misc_RNA (1)...(19): siRNA sense strand
ccaucugcugcuagagaaa

SEQ ID NO: 2437662 - RNA, 19 nt, Homo sapiens
  misc_RNA (1)...(19): siRNA sense strand
cgggaaggagacagccaaa

SEQ ID NO: 2437663 - RNA, 19 nt, Homo sapiens
  misc_RNA (1)...(19): siRNA sense strand
gagucaaccacuuggguca

SEQ ID NO: 2437664 - RNA, 19 nt, Homo sapiens
  misc_RNA (1)...(19): siRNA sense strand
ccaaagagauccagaccac

SEQ ID NO: 2437665 - RNA, 19 nt, Homo sapiens
  misc_RNA (1)...(19): siRNA sense strand
cgaagacagcagauggcuu

SEQ ID NO: 2437666 - RNA, 19 nt, Homo sapiens
  misc_RNA (1)...(19): siRNA sense strand
cagagaagcaggagcggaa

SEQ ID NO: 2437667 - RNA, 19 nt, Homo sapiens
  misc_RNA (1)...(19): siRNA sense strand
acgaaaggaaacaagguga

SEQ ID NO: 2437668 - RNA, 19 nt, Homo sapiens
  misc_RNA (1)...(19): siRNA sense strand
ccaacaaguuugccagcca

SEQ ID NO: 2437669 - RNA, 19 nt, Homo sapiens
  misc_RNA (1)...(19): siRNA sense strand
gcgaagacgaaaggaaaca

SEQ ID NO: 2437670 - RNA, 19 nt, Homo sapiens
  misc_RNA (1)...(19): siRNA sense strand
ugaacgugggagugaagua

SEQ ID NO: 2437671 - RNA, 19 nt, Homo sapiens
  misc_RNA (1)...(19): siRNA sense strand
ccagcauggcgaagacgaa

SEQ ID NO: 2437672 - RNA, 19 nt, Homo sapiens
  misc_RNA (1)...(19): siRNA sense strand
gcaacuucaucaaggccau

SEQ ID NO: 2437673 - RNA, 19 nt, Homo sapiens
  misc_RNA (1)...(19): siRNA sense strand
gcuccgugaagaagaucaa

SEQ ID NO: 2437674 - RNA, 19 nt, Homo sapiens
  misc_RNA (1)...(19): siRNA sense strand
gaucaaugagucaacccaa

SEQ ID NO: 2437675 - RNA, 19 nt, Homo sapiens
  misc_RNA (1)...(19): siRNA sense strand
cuaagagaagggcggaaca

SEQ ID NO: 2437676 - RNA, 19 nt, Homo sapiens
  misc_RNA (1)...(19): siRNA sense strand
ccauggaccuggagggcuu

SEQ ID NO: 2437677 - RNA, 19 nt, Homo sapiens
  misc_RNA (1)...(19): siRNA sense strand
ccguauaagugcagagagu

SEQ ID NO: 2437678 - RNA, 19 nt, Homo sapiens
  misc_RNA (1)...(19): siRNA sense strand
gggaaaugcuuuaaccaga

SEQ ID NO: 2437679 - RNA, 19 nt, Homo sapiens
  misc_RNA (1)...(19): siRNA sense strand
aaguaauaccuccgagaaa

SEQ ID NO: 2437680 - RNA, 19 nt, Homo sapiens
  misc_RNA (1)...(19): siRNA sense strand
gggagaagacagugaaaau

SEQ ID NO: 2437681 - RNA, 19 nt, Homo sapiens
  misc_RNA (1)...(19): siRNA sense strand
aauccauacgggagagaaa

SEQ ID NO: 2437682 - RNA, 19 nt, Homo sapiens
  misc_RNA (1)...(19): siRNA sense strand
gaacaauaccagugggaug

SEQ ID NO: 2437683 - RNA, 19 nt, Homo sapiens
  misc_RNA (1)...(19): siRNA sense strand
gcagagcagcuaagggcaa

SEQ ID NO: 2437684 - RNA, 19 nt, Homo sapiens
  misc_RNA (1)...(19): siRNA sense strand
cugaagaggacuuagaaaa

SEQ ID NO: 2437685 - RNA, 19 nt, Homo sapiens
  misc_RNA (1)...(19): siRNA sense strand
cgagaaagagcaaggacca

SEQ ID NO: 2437686 - RNA, 19 nt, Homo sapiens
  misc_RNA (1)...(19): siRNA sense strand
agagcaaggaccagaguuu

SEQ ID NO: 2437687 - RNA, 19 nt, Homo sapiens
  misc_RNA (1)...(19): siRNA sense strand
cggaauuaccggaaagcca

SEQ ID NO: 2437688 - RNA, 19 nt, Homo sapiens
  misc_RNA (1)...(19): siRNA sense strand
gcagaguagugcugagacu

SEQ ID NO: 2437689 - RNA, 19 nt, Homo sapiens
  misc_RNA (1)...(19): siRNA sense strand
cuauaaaugccuugaaugu

SEQ ID NO: 2437690 - RNA, 19 nt, Homo sapiens
  misc_RNA (1)...(19): siRNA sense strand
guauaagugcagagagugu

SEQ ID NO: 2437691 - RNA, 19 nt, Homo sapiens
  misc_RNA (1)...(19): siRNA sense strand
ccucaauacccaucagaga

SEQ ID NO: 2437692 - RNA, 19 nt, Homo sapiens
  misc_RNA (1)...(19): siRNA sense strand
aaaugaggcaugaggauga

SEQ ID NO: 2437693 - RNA, 19 nt, Homo sapiens
  misc_RNA (1)...(19): siRNA sense strand
gaugaagggcaguggggaa

SEQ ID NO: 2437694 - RNA, 19 nt, Homo sapiens
  misc_RNA (1)...(19): siRNA sense strand
ccuucaaccuuguguccua

SEQ ID NO: 2437695 - RNA, 19 nt, Homo sapiens
  misc_RNA (1)...(19): siRNA sense strand
uggcaaacaugcugagaag

SEQ ID NO: 2437696 - RNA, 19 nt, Homo sapiens
  misc_RNA (1)...(19): siRNA sense strand
caaugucgcuauaggguca

SEQ ID NO: 2437697 - RNA, 19 nt, Homo sapiens
  misc_RNA (1)...(19): siRNA sense strand
augccuugaaugugggaaa

SEQ ID NO: 2437698 - RNA, 19 nt, Homo sapiens
  misc_RNA (1)...(19): siRNA sense strand
cugaacaaccucaaaguau

SEQ ID NO: 2437699 - RNA, 19 nt, Homo sapiens
  misc_RNA (1)...(19): siRNA sense strand
acgcagagauggaugagca

SEQ ID NO: 2437700 - RNA, 19 nt, Homo sapiens
  misc_RNA (1)...(19): siRNA sense strand
gugaaguggccaaugaaga

SEQ ID NO: 2437701 - RNA, 19 nt, Homo sapiens
  misc_RNA (1)...(19): siRNA sense strand
cccuauaaauguggagaau

SEQ ID NO: 2437702 - RNA, 19 nt, Homo sapiens
  misc_RNA (1)...(19): siRNA sense strand
cugagaaggagcucuguaa

SEQ ID NO: 2437703 - RNA, 19 nt, Homo sapiens
  misc_RNA (1)...(19): siRNA sense strand
ggaauuaccggaaagccaa

SEQ ID NO: 2437704 - RNA, 19 nt, Homo sapiens
  misc_RNA (1)...(19): siRNA sense strand
ugaaaugaggcaugaggau

SEQ ID NO: 2437705 - RNA, 19 nt, Homo sapiens
  misc_RNA (1)...(19): siRNA sense strand
cuuuaugaguguucugaau

SEQ ID NO: 2437706 - RNA, 19 nt, Homo sapiens
  misc_RNA (1)...(19): siRNA sense strand
gaggauuggcaccgagaga

SEQ ID NO: 2437707 - RNA, 19 nt, Homo sapiens
  misc_RNA (1)...(19): siRNA sense strand
auguggagaauguuggaaa

SEQ ID NO: 2437708 - RNA, 19 nt, Homo sapiens
  misc_RNA (1)...(19): siRNA sense strand
gggaaaagcuuuagugacc

SEQ ID NO: 2437709 - RNA, 19 nt, Homo sapiens
  misc_RNA (1)...(19): siRNA sense strand
acacaggagagaagcccua

SEQ ID NO: 2437710 - RNA, 19 nt, Homo sapiens
  misc_RNA (1)...(19): siRNA sense strand
ccuucgaagcuaccggaaa

SEQ ID NO: 2437711 - RNA, 19 nt, Homo sapiens
  misc_RNA (1)...(19): siRNA sense strand
ccaaugaagaugcugucaa

SEQ ID NO: 2437712 - RNA, 19 nt, Homo sapiens
  misc_RNA (1)...(19): siRNA sense strand
gcccuauaaauguggagaa

SEQ ID NO: 2437713 - RNA, 19 nt, Homo sapiens
  misc_RNA (1)...(19): siRNA sense strand
gcacaaacucaggggagaa

SEQ ID NO: 2437714 - RNA, 19 nt, Homo sapiens
  misc_RNA (1)...(19): siRNA sense strand
cuggagagaagccguauaa

SEQ ID NO: 2437715 - RNA, 19 nt, Homo sapiens
  misc_RNA (1)...(19): siRNA sense strand
gagugugggaaaugcuuua

SEQ ID NO: 2437716 - RNA, 19 nt, Homo sapiens
  misc_RNA (1)...(19): siRNA sense strand
cuacaagugcacagagugu

SEQ ID NO: 2437717 - RNA, 19 nt, Homo sapiens
  misc_RNA (1)...(19): siRNA sense strand
ccuacggaauuaccggaaa

SEQ ID NO: 2437718 - RNA, 19 nt, Homo sapiens
  misc_RNA (1)...(19): siRNA sense strand
guggcaaagacuucaacaa

SEQ ID NO: 2437719 - RNA, 19 nt, Homo sapiens
  misc_RNA (1)...(19): siRNA sense strand
ccaaagaauccauacggga

SEQ ID NO: 2437720 - RNA, 19 nt, Homo sapiens
  misc_RNA (1)...(19): siRNA sense strand
ggggaaaagcccuauaaau

SEQ ID NO: 2437721 - RNA, 19 nt, Homo sapiens
  misc_RNA (1)...(19): siRNA sense strand
uguggagaauguuggaaaa

SEQ ID NO: 2437722 - RNA, 19 nt, Homo sapiens
  misc_RNA (1)...(19): siRNA sense strand
gggagaaacuuuaugagug

SEQ ID NO: 2437723 - RNA, 19 nt, Homo sapiens
  misc_RNA (1)...(19): siRNA sense strand
ucugaagaggacuuagaaa

SEQ ID NO: 2437724 - RNA, 19 nt, Homo sapiens
  misc_RNA (1)...(19): siRNA sense strand
uggaaaagcuucaaccaga

SEQ ID NO: 2437725 - RNA, 19 nt, Homo sapiens
  misc_RNA (1)...(19): siRNA sense strand
gggagagaaaccauaugaa

SEQ ID NO: 2437726 - RNA, 19 nt, Homo sapiens
  misc_RNA (1)...(19): siRNA sense strand
cagagauggaugagcagga

SEQ ID NO: 2437727 - RNA, 19 nt, Homo sapiens
  misc_RNA (1)...(19): siRNA sense strand
ccggagaacccaugcagga

SEQ ID NO: 2437728 - RNA, 19 nt, Homo sapiens
  misc_RNA (1)...(19): siRNA sense strand
uggagcaguuccugacaau

SEQ ID NO: 2437729 - RNA, 19 nt, Homo sapiens
  misc_RNA (1)...(19): siRNA sense strand
ggaacaguggcaagaaagu

SEQ ID NO: 2437730 - RNA, 19 nt, Homo sapiens
  misc_RNA (1)...(19): siRNA sense strand
ccaaguaauaccuccgaga

SEQ ID NO: 2437731 - RNA, 19 nt, Homo sapiens
  misc_RNA (1)...(19): siRNA sense strand
ucacuaaauuggaggcuga

SEQ ID NO: 2437732 - RNA, 19 nt, Homo sapiens
  misc_RNA (1)...(19): siRNA sense strand
agagagacgcuguggggaa

SEQ ID NO: 2437733 - RNA, 19 nt, Homo sapiens
  misc_RNA (1)...(19): siRNA sense strand
acuagcagccaaagagaga

SEQ ID NO: 2437734 - RNA, 19 nt, Homo sapiens
  misc_RNA (1)...(19): siRNA sense strand
ggcugaaauuguaacccua

SEQ ID NO: 2437735 - RNA, 19 nt, Homo sapiens
  misc_RNA (1)...(19): siRNA sense strand
ggaguuuggugaugcggaa

SEQ ID NO: 2437736 - RNA, 19 nt, Homo sapiens
  misc_RNA (1)...(19): siRNA sense strand
cguccagccucguggucaa

SEQ ID NO: 2437737 - RNA, 19 nt, Homo sapiens
  misc_RNA (1)...(19): siRNA sense strand
ggcucaaggcccagcuaaa

SEQ ID NO: 2437738 - RNA, 19 nt, Homo sapiens
  misc_RNA (1)...(19): siRNA sense strand
ugggcaagcagcaggguga

SEQ ID NO: 2437739 - RNA, 19 nt, Homo sapiens
  misc_RNA (1)...(19): siRNA sense strand
ugaagaggcucaaggccca

SEQ ID NO: 2437740 - RNA, 19 nt, Homo sapiens
  misc_RNA (1)...(19): siRNA sense strand
gccgaggagaggaccgaaa

SEQ ID NO: 2437741 - RNA, 19 nt, Homo sapiens
  misc_RNA (1)...(19): siRNA sense strand
guucgggagucaaggggaa

SEQ ID NO: 2437742 - RNA, 19 nt, Homo sapiens
  misc_RNA (1)...(19): siRNA sense strand
gagccaccaaccagagcaa

SEQ ID NO: 2437743 - RNA, 19 nt, Homo sapiens
  misc_RNA (1)...(19): siRNA sense strand
ugaaagugaccaugaugaa

SEQ ID NO: 2437744 - RNA, 19 nt, Homo sapiens
  misc_RNA (1)...(19): siRNA sense strand
aggaaaagagggaagaaga

SEQ ID NO: 2437745 - RNA, 19 nt, Homo sapiens
  misc_RNA (1)...(19): siRNA sense strand
gcaucaaccaggaggcguu

SEQ ID NO: 2437746 - RNA, 19 nt, Homo sapiens
  misc_RNA (1)...(19): siRNA sense strand
ugauaaugaaagugaccau

SEQ ID NO: 2437747 - RNA, 19 nt, Homo sapiens
  misc_RNA (1)...(19): siRNA sense strand
guggaaaggaaaagaaagu

SEQ ID NO: 2437748 - RNA, 19 nt, Homo sapiens
  misc_RNA (1)...(19): siRNA sense strand
ugaaaaugcuuaaagagga

SEQ ID NO: 2437749 - RNA, 19 nt, Homo sapiens
  misc_RNA (1)...(19): siRNA sense strand
caguggaaaggaaaagaaa

SEQ ID NO: 2437750 - RNA, 19 nt, Homo sapiens
  misc_RNA (1)...(19): siRNA sense strand
ucgaaaugcugcaagccaa

SEQ ID NO: 2437751 - RNA, 19 nt, Homo sapiens
  misc_RNA (1)...(19): siRNA sense strand
ucgacaagacgcagcgcaa

SEQ ID NO: 2437752 - RNA, 19 nt, Homo sapiens
  misc_RNA (1)...(19): siRNA sense strand
cccugaaacagcagaagaa

SEQ ID NO: 2437753 - RNA, 19 nt, Homo sapiens
  misc_RNA (1)...(19): siRNA sense strand
gugaaagacgcucaggaga

SEQ ID NO: 2437754 - RNA, 19 nt, Homo sapiens
  misc_RNA (1)...(19): siRNA sense strand
gggacaaauuccagcagcu

SEQ ID NO: 2437755 - RNA, 19 nt, Homo sapiens
  misc_RNA (1)...(19): siRNA sense strand
accacaagcaccugggcaa

SEQ ID NO: 2437756 - RNA, 19 nt, Homo sapiens
  misc_RNA (1)...(19): siRNA sense strand
ggaacaaguuugggccgau

SEQ ID NO: 2437757 - RNA, 19 nt, Homo sapiens
  misc_RNA (1)...(19): siRNA sense strand
ccaacgugccugagcucau

SEQ ID NO: 2437758 - RNA, 19 nt, Homo sapiens
  misc_RNA (1)...(19): siRNA sense strand
gcuguauaugaaagagaaa

SEQ ID NO: 2437759 - RNA, 19 nt, Homo sapiens
  misc_RNA (1)...(19): siRNA sense strand
ccacaauguccaggaggaa

SEQ ID NO: 2437760 - RNA, 19 nt, Homo sapiens
  misc_RNA (1)...(19): siRNA sense strand
ggggcaacgacgagaagaa

SEQ ID NO: 2437761 - RNA, 19 nt, Homo sapiens
  misc_RNA (1)...(19): siRNA sense strand
cgggacaggaggacuacaa

SEQ ID NO: 2437762 - RNA, 19 nt, Homo sapiens
  misc_RNA (1)...(19): siRNA sense strand
gcgccgaggacuugaacau

SEQ ID NO: 2437763 - RNA, 19 nt, Homo sapiens
  misc_RNA (1)...(19): siRNA sense strand
gcaucagcugcauggacaa

SEQ ID NO: 2437764 - RNA, 19 nt, Homo sapiens
  misc_RNA (1)...(19): siRNA sense strand
ugagcaagcugaagagccu

SEQ ID NO: 2437765 - RNA, 19 nt, Homo sapiens
  misc_RNA (1)...(19): siRNA sense strand
aggugguacuggaggccau

SEQ ID NO: 2437766 - RNA, 19 nt, Homo sapiens
  misc_RNA (1)...(19): siRNA sense strand
acagcgaggacgaggacga

SEQ ID NO: 2437767 - RNA, 19 nt, Homo sapiens
  misc_RNA (1)...(19): siRNA sense strand
agaacuuggccgugugcuu

SEQ ID NO: 2437768 - RNA, 19 nt, Homo sapiens
  misc_RNA (1)...(19): siRNA sense strand
gcagugacagcgaggacga

SEQ ID NO: 2437769 - RNA, 19 nt, Homo sapiens
  misc_RNA (1)...(19): siRNA sense strand
agggaaagacaguggaagu

SEQ ID NO: 2437770 - RNA, 19 nt, Homo sapiens
  misc_RNA (1)...(19): siRNA sense strand
uuaaaggagauguggaaca

SEQ ID NO: 2437771 - RNA, 19 nt, Homo sapiens
  misc_RNA (1)...(19): siRNA sense strand
ggaaugugguaacaggaga

SEQ ID NO: 2437772 - RNA, 19 nt, Homo sapiens
  misc_RNA (1)...(19): siRNA sense strand
guguacuacucggaagaaa

SEQ ID NO: 2437773 - RNA, 19 nt, Homo sapiens
  misc_RNA (1)...(19): siRNA sense strand
caaagugggaauugggcca

SEQ ID NO: 2437774 - RNA, 19 nt, Homo sapiens
  misc_RNA (1)...(19): siRNA sense strand
acaucaucaaagugggaau

SEQ ID NO: 2437775 - RNA, 19 nt, Homo sapiens
  misc_RNA (1)...(19): siRNA sense strand
acuuugagcagcuggaaca

SEQ ID NO: 2437776 - RNA, 19 nt, Homo sapiens
  misc_RNA (1)...(19): siRNA sense strand
gggaauugggccaggcucu

SEQ ID NO: 2437777 - RNA, 19 nt, Homo sapiens
  misc_RNA (1)...(19): siRNA sense strand
aaagaguugagcaggagaa

SEQ ID NO: 2437778 - RNA, 19 nt, Homo sapiens
  misc_RNA (1)...(19): siRNA sense strand
gagagaugguagaagagcu

SEQ ID NO: 2437779 - RNA, 19 nt, Homo sapiens
  misc_RNA (1)...(19): siRNA sense strand
ggcaagaaguacaagcucu

SEQ ID NO: 2437780 - RNA, 19 nt, Homo sapiens
  misc_RNA (1)...(19): siRNA sense strand
cguucaguggcaagaguuu

SEQ ID NO: 2437781 - RNA, 19 nt, Homo sapiens
  misc_RNA (1)...(19): siRNA sense strand
uguacuacucggaagaaaa

SEQ ID NO: 2437782 - RNA, 19 nt, Homo sapiens
  misc_RNA (1)...(19): siRNA sense strand
agggauggcaagaaguaca

SEQ ID NO: 2437783 - RNA, 19 nt, Homo sapiens
  misc_RNA (1)...(19): siRNA sense strand
gcaccuuugagauggccaa

SEQ ID NO: 2437784 - RNA, 19 nt, Homo sapiens
  misc_RNA (1)...(19): siRNA sense strand
ggcugaugagagagggaaa

SEQ ID NO: 2437785 - RNA, 19 nt, Homo sapiens
  misc_RNA (1)...(19): siRNA sense strand
ccgaggaucuggagaggca

SEQ ID NO: 2437786 - RNA, 19 nt, Homo sapiens
  misc_RNA (1)...(19): siRNA sense strand
gugccagcgucaugggcua

SEQ ID NO: 2437787 - RNA, 19 nt, Homo sapiens
  misc_RNA (1)...(19): siRNA sense strand
ggaaggagccugaggagcu

SEQ ID NO: 2437788 - RNA, 19 nt, Homo sapiens
  misc_RNA (1)...(19): siRNA sense strand
ugguggaggaaaugaagaa

SEQ ID NO: 2437789 - RNA, 19 nt, Homo sapiens
  misc_RNA (1)...(19): siRNA sense strand
gcuccaugaugauuggcua

SEQ ID NO: 2437790 - RNA, 19 nt, Homo sapiens
  misc_RNA (1)...(19): siRNA sense strand
ugaagaagcgggaaggguu

SEQ ID NO: 2437791 - RNA, 19 nt, Homo sapiens
  misc_RNA (1)...(19): siRNA sense strand
gaaaugaagaagcgggaag

SEQ ID NO: 2437792 - RNA, 19 nt, Homo sapiens
  misc_RNA (1)...(19): siRNA sense strand
ccaacauguaugcuguaaa

SEQ ID NO: 2437793 - RNA, 19 nt, Homo sapiens
  misc_RNA (1)...(19): siRNA sense strand
aggaaaugaagaagcggga

SEQ ID NO: 2437794 - RNA, 19 nt, Homo sapiens
  misc_RNA (1)...(19): siRNA sense strand
gagacaagguggugcagug

SEQ ID NO: 2437795 - RNA, 19 nt, Homo sapiens
  misc_RNA (1)...(19): siRNA sense strand
ugucugaagcuguggcuca

SEQ ID NO: 2437796 - RNA, 19 nt, Homo sapiens
  misc_RNA (1)...(19): siRNA sense strand
gaggaggugcugaggaaac

SEQ ID NO: 2437797 - RNA, 19 nt, Homo sapiens
  misc_RNA (1)...(19): siRNA sense strand
aguccagauuaccacgaaa

SEQ ID NO: 2437798 - RNA, 19 nt, Homo sapiens
  misc_RNA (1)...(19): siRNA sense strand
gcuccagugugguggccua

SEQ ID NO: 2437799 - RNA, 19 nt, Homo sapiens
  misc_RNA (1)...(19): siRNA sense strand
cggagaaguuugacugcca

SEQ ID NO: 2437800 - RNA, 19 nt, Homo sapiens
  misc_RNA (1)...(19): siRNA sense strand
cauuguggcaggagaucaa

SEQ ID NO: 2437801 - RNA, 19 nt, Homo sapiens
  misc_RNA (1)...(19): siRNA sense strand
caucacuggguuugguaaa

SEQ ID NO: 2437802 - RNA, 19 nt, Homo sapiens
  misc_RNA (1)...(19): siRNA sense strand
ggacaauccuggcacgacu

SEQ ID NO: 2437803 - RNA, 19 nt, Homo sapiens
  misc_RNA (1)...(19): siRNA sense strand
cuaagaagcuggcugggca

SEQ ID NO: 2437804 - RNA, 19 nt, Homo sapiens
  misc_RNA (1)...(19): siRNA sense strand
aucaaaacguggaguacaa

SEQ ID NO: 2437805 - RNA, 19 nt, Homo sapiens
  misc_RNA (1)...(19): siRNA sense strand
cuguaguaacugcaagcaa

SEQ ID NO: 2437806 - RNA, 19 nt, Homo sapiens
  misc_RNA (1)...(19): siRNA sense strand
gguaaaggcuccagugugg

SEQ ID NO: 2437807 - RNA, 19 nt, Homo sapiens
  misc_RNA (1)...(19): siRNA sense strand
aggaggugcacuauaagaa

SEQ ID NO: 2437808 - RNA, 19 nt, Homo sapiens
  misc_RNA (1)...(19): siRNA sense strand
gaacaaggcugcaggcaca

SEQ ID NO: 2437809 - RNA, 19 nt, Homo sapiens
  misc_RNA (1)...(19): siRNA sense strand
gcugcaagcaacagggaaa

SEQ ID NO: 2437810 - RNA, 19 nt, Homo sapiens
  misc_RNA (1)...(19): siRNA sense strand
gguaaaggcccuaagccaa

SEQ ID NO: 2437811 - RNA, 19 nt, Homo sapiens
  misc_RNA (1)...(19): siRNA sense strand
gugaagaguuagaagggca

SEQ ID NO: 2437812 - RNA, 19 nt, Homo sapiens
  misc_RNA (1)...(19): siRNA sense strand
ccuaaagaucagagcccua

SEQ ID NO: 2437813 - RNA, 19 nt, Homo sapiens
  misc_RNA (1)...(19): siRNA sense strand
cagccaaguuucugcggaa

SEQ ID NO: 2437814 - RNA, 19 nt, Homo sapiens
  misc_RNA (1)...(19): siRNA sense strand
gagccaaggugguugcaga

SEQ ID NO: 2437815 - RNA, 19 nt, Homo sapiens
  misc_RNA (1)...(19): siRNA sense strand
gcggcaacgccuagugcaa

SEQ ID NO: 2437816 - RNA, 19 nt, Homo sapiens
  misc_RNA (1)...(19): siRNA sense strand
uagugagggcccaaggaaa

SEQ ID NO: 2437817 - RNA, 19 nt, Homo sapiens
  misc_RNA (1)...(19): siRNA sense strand
caguauaaacgucuggaga

SEQ ID NO: 2437818 - RNA, 19 nt, Homo sapiens
  misc_RNA (1)...(19): siRNA sense strand
gggccugaacauggaaaua

SEQ ID NO: 2437819 - RNA, 19 nt, Homo sapiens
  misc_RNA (1)...(19): siRNA sense strand
ugguaaaggcccuaagcca

SEQ ID NO: 2437820 - RNA, 19 nt, Homo sapiens
  misc_RNA (1)...(19): siRNA sense strand
aaucuugugcagagaguau

SEQ ID NO: 2437821 - RNA, 19 nt, Homo sapiens
  misc_RNA (1)...(19): siRNA sense strand
aguauaaacgucuggagau

SEQ ID NO: 2437822 - RNA, 19 nt, Homo sapiens
  misc_RNA (1)...(19): siRNA sense strand
gaacauagugagggcccaa

SEQ ID NO: 2437823 - RNA, 19 nt, Homo sapiens
  misc_RNA (1)...(19): siRNA sense strand
caagaccagcugugggcaa

SEQ ID NO: 2437824 - RNA, 19 nt, Homo sapiens
  misc_RNA (1)...(19): siRNA sense strand
ugcucauugugaagaguua

SEQ ID NO: 2437825 - RNA, 19 nt, Homo sapiens
  misc_RNA (1)...(19): siRNA sense strand
cuguaugagcccagagaac

SEQ ID NO: 2437826 - RNA, 19 nt, Homo sapiens
  misc_RNA (1)...(19): siRNA sense strand
ccugcagagucuagugcuu

SEQ ID NO: 2437827 - RNA, 19 nt, Homo sapiens
  misc_RNA (1)...(19): siRNA sense strand
ggaaagcaucagagcugga

SEQ ID NO: 2437828 - RNA, 19 nt, Homo sapiens
  misc_RNA (1)...(19): siRNA sense strand
ggcugaauguguuggaucu

SEQ ID NO: 2437829 - RNA, 19 nt, Homo sapiens
  misc_RNA (1)...(19): siRNA sense strand
ccaaaccagaagugagcaa

SEQ ID NO: 2437830 - RNA, 19 nt, Homo sapiens
  misc_RNA (1)...(19): siRNA sense strand
gcaaagaggccacugcaga

SEQ ID NO: 2437831 - RNA, 19 nt, Homo sapiens
  misc_RNA (1)...(19): siRNA sense strand
ucccaagguuccaggcgaa

SEQ ID NO: 2437832 - RNA, 19 nt, Homo sapiens
  misc_RNA (1)...(19): siRNA sense strand
ugguugaggaggaucgaau

SEQ ID NO: 2437833 - RNA, 19 nt, Homo sapiens
  misc_RNA (1)...(19): siRNA sense strand
cugucaacaucguggccuu

SEQ ID NO: 2437834 - RNA, 19 nt, Homo sapiens
  misc_RNA (1)...(19): siRNA sense strand
uggacgaggucaaggguga

SEQ ID NO: 2437835 - RNA, 19 nt, Homo sapiens
  misc_RNA (1)...(19): siRNA sense strand
gggaggaggaccagugcau

SEQ ID NO: 2437836 - RNA, 19 nt, Homo sapiens
  misc_RNA (1)...(19): siRNA sense strand
ggacugauuaugugcguga

SEQ ID NO: 2437837 - RNA, 19 nt, Homo sapiens
  misc_RNA (1)...(19): siRNA sense strand
agaugaagccagugcagau

SEQ ID NO: 2437838 - RNA, 19 nt, Homo sapiens
  misc_RNA (1)...(19): siRNA sense strand
gcugcaagauuguggccuu

SEQ ID NO: 2437839 - RNA, 19 nt, Homo sapiens
  misc_RNA (1)...(19): siRNA sense strand
ccaaugacacgcugggcuu

SEQ ID NO: 2437840 - RNA, 19 nt, Homo sapiens
  misc_RNA (1)...(19): siRNA sense strand
gcgcaugacacucuggaca

SEQ ID NO: 2437841 - RNA, 19 nt, Homo sapiens
  misc_RNA (1)...(19): siRNA sense strand
ugggcauggacgaggucaa

SEQ ID NO: 2437842 - RNA, 19 nt, Homo sapiens
  misc_RNA (1)...(19): siRNA sense strand
cuggcgaguguuugugaaa

SEQ ID NO: 2437843 - RNA, 19 nt, Homo sapiens
  misc_RNA (1)...(19): siRNA sense strand
agcuaaagaccgagggcuu

SEQ ID NO: 2437844 - RNA, 19 nt, Homo sapiens
  misc_RNA (1)...(19): siRNA sense strand
cggaaacagaagcuaaaga

SEQ ID NO: 2437845 - RNA, 19 nt, Homo sapiens
  misc_RNA (1)...(19): siRNA sense strand
ggacggaggaagcaggacu

SEQ ID NO: 2437846 - RNA, 19 nt, Homo sapiens
  misc_RNA (1)...(19): siRNA sense strand
gccaggaacugcugcggau

SEQ ID NO: 2437847 - RNA, 19 nt, Homo sapiens
  misc_RNA (1)...(19): siRNA sense strand
aggaagaagccgaguuggu

SEQ ID NO: 2437848 - RNA, 19 nt, Homo sapiens
  misc_RNA (1)...(19): siRNA sense strand
gugggaagguccugcggaa

SEQ ID NO: 2437849 - RNA, 19 nt, Homo sapiens
  misc_RNA (1)...(19): siRNA sense strand
gaagagaucccuuuggaca

SEQ ID NO: 2437850 - RNA, 19 nt, Homo sapiens
  misc_RNA (1)...(19): siRNA sense strand
aagagaucccuuuggacaa

SEQ ID NO: 2437851 - RNA, 19 nt, Homo sapiens
  misc_RNA (1)...(19): siRNA sense strand
ggaagugguuugagccauc

SEQ ID NO: 2437852 - RNA, 19 nt, Homo sapiens
  misc_RNA (1)...(19): siRNA sense strand
uguauuacuucaaucgcaa

SEQ ID NO: 2437853 - RNA, 19 nt, Homo sapiens
  misc_RNA (1)...(19): siRNA sense strand
ccuucuuccuccuacgaaa

SEQ ID NO: 2437854 - RNA, 19 nt, Homo sapiens
  misc_RNA (1)...(19): siRNA sense strand
ccacaaugaaccugcugau

SEQ ID NO: 2437855 - RNA, 19 nt, Homo sapiens
  misc_RNA (1)...(19): siRNA sense strand
ccuugugguguuuggagua

SEQ ID NO: 2437856 - RNA, 19 nt, Homo sapiens
  misc_RNA (1)...(19): siRNA sense strand
uugagaagucagugcguaa

SEQ ID NO: 2437857 - RNA, 19 nt, Homo sapiens
  misc_RNA (1)...(19): siRNA sense strand
gguucaaauggcugguaua

SEQ ID NO: 2437858 - RNA, 19 nt, Homo sapiens
  misc_RNA (1)...(19): siRNA sense strand
auguaaaggaccugaauga

SEQ ID NO: 2437859 - RNA, 19 nt, Homo sapiens
  misc_RNA (1)...(19): siRNA sense strand
cagaagcagugaagggcau

SEQ ID NO: 2437860 - RNA, 19 nt, Homo sapiens
  misc_RNA (1)...(19): siRNA sense strand
acguggaagaucugacuaa

SEQ ID NO: 2437861 - RNA, 19 nt, Homo sapiens
  misc_RNA (1)...(19): siRNA sense strand
acgaguaugcguugagaca

SEQ ID NO: 2437862 - RNA, 19 nt, Homo sapiens
  misc_RNA (1)...(19): siRNA sense strand
acgucaugcaguauggaaa

SEQ ID NO: 2437863 - RNA, 19 nt, Homo sapiens
  misc_RNA (1)...(19): siRNA sense strand
ccaaugaucuggaggaguc

SEQ ID NO: 2437864 - RNA, 19 nt, Homo sapiens
  misc_RNA (1)...(19): siRNA sense strand
caacaggcccaauggcaca

SEQ ID NO: 2437865 - RNA, 19 nt, Homo sapiens
  misc_RNA (1)...(19): siRNA sense strand
gcgucaacuggauggaaga

SEQ ID NO: 2437866 - RNA, 19 nt, Homo sapiens
  misc_RNA (1)...(19): siRNA sense strand
gguaugaaacgcaaagcca

SEQ ID NO: 2437867 - RNA, 19 nt, Homo sapiens
  misc_RNA (1)...(19): siRNA sense strand
auuuguacgugcuggucaa

SEQ ID NO: 2437868 - RNA, 19 nt, Homo sapiens
  misc_RNA (1)...(19): siRNA sense strand
gcaaaguccugaagagugg

SEQ ID NO: 2437869 - RNA, 19 nt, Homo sapiens
  misc_RNA (1)...(19): siRNA sense strand
ugaaaaggaaacugaugaa

SEQ ID NO: 2437870 - RNA, 19 nt, Homo sapiens
  misc_RNA (1)...(19): siRNA sense strand
uugcuuacucugaagacaa

SEQ ID NO: 2437871 - RNA, 19 nt, Homo sapiens
  misc_RNA (1)...(19): siRNA sense strand
cggcaaaguccugaagagu

SEQ ID NO: 2437872 - RNA, 19 nt, Homo sapiens
  misc_RNA (1)...(19): siRNA sense strand
gaugaaggauugaaagcca

SEQ ID NO: 2437873 - RNA, 19 nt, Homo sapiens
  misc_RNA (1)...(19): siRNA sense strand
ccucaauaccaguuacaau

SEQ ID NO: 2437874 - RNA, 19 nt, Homo sapiens
  misc_RNA (1)...(19): siRNA sense strand
aguaauaggcacugagggu

SEQ ID NO: 2437875 - RNA, 19 nt, Homo sapiens
  misc_RNA (1)...(19): siRNA sense strand
ucugauaaagagagcguga

SEQ ID NO: 2437876 - RNA, 19 nt, Homo sapiens
  misc_RNA (1)...(19): siRNA sense strand
uuacaaaguuccaaaccca

SEQ ID NO: 2437877 - RNA, 19 nt, Homo sapiens
  misc_RNA (1)...(19): siRNA sense strand
gcacucugcacaaggaaaa

SEQ ID NO: 2437878 - RNA, 19 nt, Homo sapiens
  misc_RNA (1)...(19): siRNA sense strand
ccucacagucucaaguaau

SEQ ID NO: 2437879 - RNA, 19 nt, Homo sapiens
  misc_RNA (1)...(19): siRNA sense strand
aaugcaagcacuucagcaa

SEQ ID NO: 2437880 - RNA, 19 nt, Homo sapiens
  misc_RNA (1)...(19): siRNA sense strand
augucaaacuagugaauga

SEQ ID NO: 2437881 - RNA, 19 nt, Homo sapiens
  misc_RNA (1)...(19): siRNA sense strand
uuguggaaguaguuagaaa

SEQ ID NO: 2437882 - RNA, 19 nt, Homo sapiens
  misc_RNA (1)...(19): siRNA sense strand
aggagaaauuccaggaucu

SEQ ID NO: 2437883 - RNA, 19 nt, Homo sapiens
  misc_RNA (1)...(19): siRNA sense strand
agauagugagaaacggaaa

SEQ ID NO: 2437884 - RNA, 19 nt, Homo sapiens
  misc_RNA (1)...(19): siRNA sense strand
aagaaguauaugcaggaaa

SEQ ID NO: 2437885 - RNA, 19 nt, Homo sapiens
  misc_RNA (1)...(19): siRNA sense strand
cagaaauauuccaagagga

SEQ ID NO: 2437886 - RNA, 19 nt, Homo sapiens
  misc_RNA (1)...(19): siRNA sense strand
ggaaguagaaauagagccu

SEQ ID NO: 2437887 - RNA, 19 nt, Homo sapiens
  misc_RNA (1)...(19): siRNA sense strand
ugaaaggagaggagaugau

SEQ ID NO: 2437888 - RNA, 19 nt, Homo sapiens
  misc_RNA (1)...(19): siRNA sense strand
cccaauauuugaaaggaga

SEQ ID NO: 2437889 - RNA, 19 nt, Homo sapiens
  misc_RNA (1)...(19): siRNA sense strand
ggaagaaguauaugcagga

SEQ ID NO: 2437890 - RNA, 19 nt, Homo sapiens
  misc_RNA (1)...(19): siRNA sense strand
cggcaagagaugcggacca

SEQ ID NO: 2437891 - RNA, 19 nt, Homo sapiens
  misc_RNA (1)...(19): siRNA sense strand
gaaacaaaccuguggcaag

SEQ ID NO: 2437892 - RNA, 19 nt, Homo sapiens
  misc_RNA (1)...(19): siRNA sense strand
uccaagaggaagugauauu

SEQ ID NO: 2437893 - RNA, 19 nt, Homo sapiens
  misc_RNA (1)...(19): siRNA sense strand
ccgcagaaccugagcaccu

SEQ ID NO: 2437894 - RNA, 19 nt, Homo sapiens
  misc_RNA (1)...(19): siRNA sense strand
gggucagugcagaagguau

SEQ ID NO: 2437895 - RNA, 19 nt, Homo sapiens
  misc_RNA (1)...(19): siRNA sense strand
gcuacugaaacaaggguca

SEQ ID NO: 2437896 - RNA, 19 nt, Homo sapiens
  misc_RNA (1)...(19): siRNA sense strand
ggugauugccggacgagau

SEQ ID NO: 2437897 - RNA, 19 nt, Homo sapiens
  misc_RNA (1)...(19): siRNA sense strand
guuaacagaggaagcgaga

SEQ ID NO: 2437898 - RNA, 19 nt, Homo sapiens
  misc_RNA (1)...(19): siRNA sense strand
cgcuggaaguagaaauaga

SEQ ID NO: 2437899 - RNA, 19 nt, Homo sapiens
  misc_RNA (1)...(19): siRNA sense strand
agaacaguuaacagaggaa

SEQ ID NO: 2437900 - RNA, 19 nt, Homo sapiens
  misc_RNA (1)...(19): siRNA sense strand
caggaaauuuuguggaagu

SEQ ID NO: 2437901 - RNA, 19 nt, Homo sapiens
  misc_RNA (1)...(19): siRNA sense strand
guggaaguaguuagaaaca

SEQ ID NO: 2437902 - RNA, 19 nt, Homo sapiens
  misc_RNA (1)...(19): siRNA sense strand
uuauggugaagaaggauua

SEQ ID NO: 2437903 - RNA, 19 nt, Homo sapiens
  misc_RNA (1)...(19): siRNA sense strand
acuagugaaugaagaacga

SEQ ID NO: 2437904 - RNA, 19 nt, Homo sapiens
  misc_RNA (1)...(19): siRNA sense strand
ccacaagcccaggagaaau

SEQ ID NO: 2437905 - RNA, 19 nt, Homo sapiens
  misc_RNA (1)...(19): siRNA sense strand
auuugaaaggagaggagau

SEQ ID NO: 2437906 - RNA, 19 nt, Homo sapiens
  misc_RNA (1)...(19): siRNA sense strand
gugaagaaggauuaaaaga

SEQ ID NO: 2437907 - RNA, 19 nt, Homo sapiens
  misc_RNA (1)...(19): siRNA sense strand
cuggcaaacggaagugcaa

SEQ ID NO: 2437908 - RNA, 19 nt, Homo sapiens
  misc_RNA (1)...(19): siRNA sense strand
agaagguaucaaacagcua

SEQ ID NO: 2437909 - RNA, 19 nt, Homo sapiens
  misc_RNA (1)...(19): siRNA sense strand
uggaaguaguuagaaacaa

SEQ ID NO: 2437910 - RNA, 19 nt, Homo sapiens
  misc_RNA (1)...(19): siRNA sense strand
gaagugcaauugucggcaa

SEQ ID NO: 2437911 - RNA, 19 nt, Homo sapiens
  misc_RNA (1)...(19): siRNA sense strand
acgaaugcccuaaugucaa

SEQ ID NO: 2437912 - RNA, 19 nt, Homo sapiens
  misc_RNA (1)...(19): siRNA sense strand
aggaagcgagagaagguau

SEQ ID NO: 2437913 - RNA, 19 nt, Homo sapiens
  misc_RNA (1)...(19): siRNA sense strand
ccaacuuugacaacaacaa

SEQ ID NO: 2437914 - RNA, 19 nt, Homo sapiens
  misc_RNA (1)...(19): siRNA sense strand
ugaaaagccaggagucaaa

SEQ ID NO: 2437915 - RNA, 19 nt, Homo sapiens
  misc_RNA (1)...(19): siRNA sense strand
cagcggacuugguggcaca

SEQ ID NO: 2437916 - RNA, 19 nt, Homo sapiens
  misc_RNA (1)...(19): siRNA sense strand
acgaaucucucuuuggcaa

SEQ ID NO: 2437917 - RNA, 19 nt, Homo sapiens
  misc_RNA (1)...(19): siRNA sense strand
agaaguacauccugcggga

SEQ ID NO: 2437918 - RNA, 19 nt, Homo sapiens
  misc_RNA (1)...(19): siRNA sense strand
ucaaaaugacugagcgcuu

SEQ ID NO: 2437919 - RNA, 19 nt, Homo sapiens
  misc_RNA (1)...(19): siRNA sense strand
ccuacugcguggugugcuu

SEQ ID NO: 2437920 - RNA, 19 nt, Homo sapiens
  misc_RNA (1)...(19): siRNA sense strand
cggacuugguggcacaaaa

SEQ ID NO: 2437921 - RNA, 19 nt, Homo sapiens
  misc_RNA (1)...(19): siRNA sense strand
cagcggacuugguggcaca

SEQ ID NO: 2437922 - RNA, 19 nt, Homo sapiens
  misc_RNA (1)...(19): siRNA sense strand
acgaaucucucuuuggcaa

SEQ ID NO: 2437923 - RNA, 19 nt, Homo sapiens
  misc_RNA (1)...(19): siRNA sense strand
agaaguacauccugcggga

SEQ ID NO: 2437924 - RNA, 19 nt, Homo sapiens
  misc_RNA (1)...(19): siRNA sense strand
ccuacugcguggugugcuu

SEQ ID NO: 2437925 - RNA, 19 nt, Homo sapiens
  misc_RNA (1)...(19): siRNA sense strand
cggacuugguggcacaaaa

SEQ ID NO: 2437926 - RNA, 19 nt, Homo sapiens
  misc_RNA (1)...(19): siRNA sense strand
ugaaaagccaggagucaaa

SEQ ID NO: 2437927 - RNA, 19 nt, Homo sapiens
  misc_RNA (1)...(19): siRNA sense strand
acgaaucucucuuuggcaa

SEQ ID NO: 2437928 - RNA, 19 nt, Homo sapiens
  misc_RNA (1)...(19): siRNA sense strand
agaaguacauccugcggga

SEQ ID NO: 2437929 - RNA, 19 nt, Homo sapiens
  misc_RNA (1)...(19): siRNA sense strand
ucaaaaugacugagcgcuu

SEQ ID NO: 2437930 - RNA, 19 nt, Homo sapiens
  misc_RNA (1)...(19): siRNA sense strand
ccuacugcguggugugcuu

SEQ ID NO: 2437931 - RNA, 19 nt, Homo sapiens
  misc_RNA (1)...(19): siRNA sense strand
acgaaucucucuuuggcaa

SEQ ID NO: 2437932 - RNA, 19 nt, Homo sapiens
  misc_RNA (1)...(19): siRNA sense strand
agaaguacauccugcggga

SEQ ID NO: 2437933 - RNA, 19 nt, Homo sapiens
  misc_RNA (1)...(19): siRNA sense strand
ccuacugcguggugugcuu

SEQ ID NO: 2437934 - RNA, 19 nt, Homo sapiens
  misc_RNA (1)...(19): siRNA sense strand
acauaaugcagguggcaga

SEQ ID NO: 2437935 - RNA, 19 nt, Homo sapiens
  misc_RNA (1)...(19): siRNA sense strand
augcgaaagcuuugggaga

SEQ ID NO: 2437936 - RNA, 19 nt, Homo sapiens
  misc_RNA (1)...(19): siRNA sense strand
ggacagccauucucggcaa

SEQ ID NO: 2437937 - RNA, 19 nt, Homo sapiens
  misc_RNA (1)...(19): siRNA sense strand
cagcauaaggcgugagcuc

SEQ ID NO: 2437938 - RNA, 19 nt, Homo sapiens
  misc_RNA (1)...(19): siRNA sense strand
ccaacgaauggcugaccaa

SEQ ID NO: 2437939 - RNA, 19 nt, Homo sapiens
  misc_RNA (1)...(19): siRNA sense strand
acuuugugaaggugauuaa

SEQ ID NO: 2437940 - RNA, 19 nt, Homo sapiens
  misc_RNA (1)...(19): siRNA sense strand
augugaaccuggugggacu

SEQ ID NO: 2437941 - RNA, 19 nt, Homo sapiens
  misc_RNA (1)...(19): siRNA sense strand
acugcaaucugguuggcaa

SEQ ID NO: 2437942 - RNA, 19 nt, Homo sapiens
  misc_RNA (1)...(19): siRNA sense strand
cccagaaacuucagcggga

SEQ ID NO: 2437943 - RNA, 19 nt, Homo sapiens
  misc_RNA (1)...(19): siRNA sense strand
ugucauuggugguggcuac

SEQ ID NO: 2437944 - RNA, 19 nt, Homo sapiens
  misc_RNA (1)...(19): siRNA sense strand
ucgggaaccugcuggccaa

SEQ ID NO: 2437945 - RNA, 19 nt, Homo sapiens
  misc_RNA (1)...(19): siRNA sense strand
ucaccaagagcgaaagcau

SEQ ID NO: 2437946 - RNA, 19 nt, Homo sapiens
  misc_RNA (1)...(19): siRNA sense strand
uggccaaacagcugguuga

SEQ ID NO: 2437947 - RNA, 19 nt, Homo sapiens
  misc_RNA (1)...(19): siRNA sense strand
guggcagagcccagaguca

SEQ ID NO: 2437948 - RNA, 19 nt, Homo sapiens
  misc_RNA (1)...(19): siRNA sense strand
uugcaggaguugaaggaga

SEQ ID NO: 2437949 - RNA, 19 nt, Homo sapiens
  misc_RNA (1)...(19): siRNA sense strand
gcaaguggugggaaggaca

SEQ ID NO: 2437950 - RNA, 19 nt, Homo sapiens
  misc_RNA (1)...(19): siRNA sense strand
ccuucagcccuacgggaaa

SEQ ID NO: 2437951 - RNA, 19 nt, Homo sapiens
  misc_RNA (1)...(19): siRNA sense strand
cggaugagguauaugcugu

SEQ ID NO: 2437952 - RNA, 19 nt, Homo sapiens
  misc_RNA (1)...(19): siRNA sense strand
ggaagacguuggaguccca

SEQ ID NO: 2437953 - RNA, 19 nt, Homo sapiens
  misc_RNA (1)...(19): siRNA sense strand
gccacgcggaugagguaua

SEQ ID NO: 2437954 - RNA, 19 nt, Homo sapiens
  misc_RNA (1)...(19): siRNA sense strand
agaaauaagugaaaccagu

SEQ ID NO: 2437955 - RNA, 19 nt, Homo sapiens
  misc_RNA (1)...(19): siRNA sense strand
aguuuaaaccugagauguu

SEQ ID NO: 2437956 - RNA, 19 nt, Homo sapiens
  misc_RNA (1)...(19): siRNA sense strand
agugaaugcagcugaaaga

SEQ ID NO: 2437957 - RNA, 19 nt, Homo sapiens
  misc_RNA (1)...(19): siRNA sense strand
gaacaugaaugaagccucu

SEQ ID NO: 2437958 - RNA, 19 nt, Homo sapiens
  misc_RNA (1)...(19): siRNA sense strand
ugcaaagggagcaaaggaa

SEQ ID NO: 2437959 - RNA, 19 nt, Homo sapiens
  misc_RNA (1)...(19): siRNA sense strand
uggcaguuugugaaauuaa

SEQ ID NO: 2437960 - RNA, 19 nt, Homo sapiens
  misc_RNA (1)...(19): siRNA sense strand
ugaagauagccaaugccaa

SEQ ID NO: 2437961 - RNA, 19 nt, Homo sapiens
  misc_RNA (1)...(19): siRNA sense strand
gaagauagccaaugccaag

SEQ ID NO: 2437962 - RNA, 19 nt, Homo sapiens
  misc_RNA (1)...(19): siRNA sense strand
cagcaguaccuaugggaga

SEQ ID NO: 2437963 - RNA, 19 nt, Homo sapiens
  misc_RNA (1)...(19): siRNA sense strand
ccaugaaucucuaaaggga

SEQ ID NO: 2437964 - RNA, 19 nt, Homo sapiens
  misc_RNA (1)...(19): siRNA sense strand
cuggagaaagggugaccaa

SEQ ID NO: 2437965 - RNA, 19 nt, Homo sapiens
  misc_RNA (1)...(19): siRNA sense strand
cgucacugugcuaggaauu

SEQ ID NO: 2437966 - RNA, 19 nt, Homo sapiens
  misc_RNA (1)...(19): siRNA sense strand
gcaauguggcccuggcaga

SEQ ID NO: 2437967 - RNA, 19 nt, Homo sapiens
  misc_RNA (1)...(19): siRNA sense strand
cugugagggucgcggcaau

SEQ ID NO: 2437968 - RNA, 19 nt, Homo sapiens
  misc_RNA (1)...(19): siRNA sense strand
ugaaagaucacgaggacuc

SEQ ID NO: 2437969 - RNA, 19 nt, Homo sapiens
  misc_RNA (1)...(19): siRNA sense strand
aggaagaggaagaggaaga

SEQ ID NO: 2437970 - RNA, 19 nt, Homo sapiens
  misc_RNA (1)...(19): siRNA sense strand
gguucaaagcccuggagaa

SEQ ID NO: 2437971 - RNA, 19 nt, Homo sapiens
  misc_RNA (1)...(19): siRNA sense strand
aggaagaagaggaggagga

SEQ ID NO: 2437972 - RNA, 19 nt, Homo sapiens
  misc_RNA (1)...(19): siRNA sense strand
ggaagaagggacaggcaga

SEQ ID NO: 2437973 - RNA, 19 nt, Homo sapiens
  misc_RNA (1)...(19): siRNA sense strand
aagaagaggaggaggagga

SEQ ID NO: 2437974 - RNA, 19 nt, Homo sapiens
  misc_RNA (1)...(19): siRNA sense strand
ucuaugaggaagaggaaga

SEQ ID NO: 2437975 - RNA, 19 nt, Homo sapiens
  misc_RNA (1)...(19): siRNA sense strand
uggcaaacaaggaacggaa

SEQ ID NO: 2437976 - RNA, 19 nt, Homo sapiens
  misc_RNA (1)...(19): siRNA sense strand
aggaagaggaagaagagga

SEQ ID NO: 2437977 - RNA, 19 nt, Homo sapiens
  misc_RNA (1)...(19): siRNA sense strand
aagaggaagaggaagaaga

SEQ ID NO: 2437978 - RNA, 19 nt, Homo sapiens
  misc_RNA (1)...(19): siRNA sense strand
cggcuaaagcaguuacuca

SEQ ID NO: 2437979 - RNA, 19 nt, Homo sapiens
  misc_RNA (1)...(19): siRNA sense strand
aagaggaagaagaggagga

SEQ ID NO: 2437980 - RNA, 19 nt, Homo sapiens
  misc_RNA (1)...(19): siRNA sense strand
gaaggguucuacagggaca

SEQ ID NO: 2437981 - RNA, 19 nt, Homo sapiens
  misc_RNA (1)...(19): siRNA sense strand
agggacaggcagauaagaa

SEQ ID NO: 2437982 - RNA, 19 nt, Homo sapiens
  misc_RNA (1)...(19): siRNA sense strand
ggugcagaaaggagacgaa

SEQ ID NO: 2437983 - RNA, 19 nt, Homo sapiens
  misc_RNA (1)...(19): siRNA sense strand
aggaaggguucuacaggga

SEQ ID NO: 2437984 - RNA, 19 nt, Homo sapiens
  misc_RNA (1)...(19): siRNA sense strand
gggacaaaggagauggaac

SEQ ID NO: 2437985 - RNA, 19 nt, Homo sapiens
  misc_RNA (1)...(19): siRNA sense strand
caacaacaaguuugggcuu

SEQ ID NO: 2437986 - RNA, 19 nt, Homo sapiens
  misc_RNA (1)...(19): siRNA sense strand
ccagcagagacucggcaaa

SEQ ID NO: 2437987 - RNA, 19 nt, Homo sapiens
  misc_RNA (1)...(19): siRNA sense strand
cagaccagaggaaggcaaa

SEQ ID NO: 2437988 - RNA, 19 nt, Homo sapiens
  misc_RNA (1)...(19): siRNA sense strand
ugauggaggaggagccaga

SEQ ID NO: 2437989 - RNA, 19 nt, Homo sapiens
  misc_RNA (1)...(19): siRNA sense strand
aggaacggaagaagggaca

SEQ ID NO: 2437990 - RNA, 19 nt, Homo sapiens
  misc_RNA (1)...(19): siRNA sense strand
agagaagaucacagucauu

SEQ ID NO: 2437991 - RNA, 19 nt, Homo sapiens
  misc_RNA (1)...(19): siRNA sense strand
cgagauccuucguggggaa

SEQ ID NO: 2437992 - RNA, 19 nt, Homo sapiens
  misc_RNA (1)...(19): siRNA sense strand
acuacaucuaugaggaaga

SEQ ID NO: 2437993 - RNA, 19 nt, Homo sapiens
  misc_RNA (1)...(19): siRNA sense strand
ccacaaauucaaagaucac

SEQ ID NO: 2437994 - RNA, 19 nt, Homo sapiens
  misc_RNA (1)...(19): siRNA sense strand
cagaaaaggaggugcugga

SEQ ID NO: 2437995 - RNA, 19 nt, Homo sapiens
  misc_RNA (1)...(19): siRNA sense strand
ccacuaagacggagccgaa

SEQ ID NO: 2437996 - RNA, 19 nt, Homo sapiens
  misc_RNA (1)...(19): siRNA sense strand
agcccagagccgagagaaa

SEQ ID NO: 2437997 - RNA, 19 nt, Homo sapiens
  misc_RNA (1)...(19): siRNA sense strand
ggaagaagcuggugcucgu

SEQ ID NO: 2437998 - RNA, 19 nt, Homo sapiens
  misc_RNA (1)...(19): siRNA sense strand
ggaaucagaaagacgguga

SEQ ID NO: 2437999 - RNA, 19 nt, Homo sapiens
  misc_RNA (1)...(19): siRNA sense strand
ccgcacagagaaagacaau

SEQ ID NO: 2438000 - RNA, 19 nt, Homo sapiens
  misc_RNA (1)...(19): siRNA sense strand
cuagagaaauauuugcaga

SEQ ID NO: 2438001 - RNA, 19 nt, Homo sapiens
  misc_RNA (1)...(19): siRNA sense strand
guuucaacucuguggccaa

SEQ ID NO: 2438002 - RNA, 19 nt, Homo sapiens
  misc_RNA (1)...(19): siRNA sense strand
gggaaaaggccuggggcuu

SEQ ID NO: 2438003 - RNA, 19 nt, Homo sapiens
  misc_RNA (1)...(19): siRNA sense strand
acagaugaauuauggagga

SEQ ID NO: 2438004 - RNA, 19 nt, Homo sapiens
  misc_RNA (1)...(19): siRNA sense strand
ccggaaauggagagaugga

SEQ ID NO: 2438005 - RNA, 19 nt, Homo sapiens
  misc_RNA (1)...(19): siRNA sense strand
auucgagacuacaagggaa

SEQ ID NO: 2438006 - RNA, 19 nt, Homo sapiens
  misc_RNA (1)...(19): siRNA sense strand
aggcaaacccagaagcacu

SEQ ID NO: 2438007 - RNA, 19 nt, Homo sapiens
  misc_RNA (1)...(19): siRNA sense strand
ggacgcagagugaacgcua

SEQ ID NO: 2438008 - RNA, 19 nt, Homo sapiens
  misc_RNA (1)...(19): siRNA sense strand
aagaaaagccacaggagca

SEQ ID NO: 2438009 - RNA, 19 nt, Homo sapiens
  misc_RNA (1)...(19): siRNA sense strand
ccaugaccucccaggcaaa

SEQ ID NO: 2438010 - RNA, 19 nt, Homo sapiens
  misc_RNA (1)...(19): siRNA sense strand
cagaugaauuauggaggau

SEQ ID NO: 2438011 - RNA, 19 nt, Homo sapiens
  misc_RNA (1)...(19): siRNA sense strand
ccgcugauggccaaggcaa

SEQ ID NO: 2438012 - RNA, 19 nt, Homo sapiens
  misc_RNA (1)...(19): siRNA sense strand
aggcaauucgagacuacaa

SEQ ID NO: 2438013 - RNA, 19 nt, Homo sapiens
  misc_RNA (1)...(19): siRNA sense strand
gguacaacagccugagcau

SEQ ID NO: 2438014 - RNA, 19 nt, Homo sapiens
  misc_RNA (1)...(19): siRNA sense strand
cgggagagcucuaccugga

SEQ ID NO: 2438015 - RNA, 19 nt, Homo sapiens
  misc_RNA (1)...(19): siRNA sense strand
ggucagcaaagguggugau

SEQ ID NO: 2438016 - RNA, 19 nt, Homo sapiens
  misc_RNA (1)...(19): siRNA sense strand
agaucaaggaagagaaagu

SEQ ID NO: 2438017 - RNA, 19 nt, Homo sapiens
  misc_RNA (1)...(19): siRNA sense strand
uggacgagauugagaaaau

SEQ ID NO: 2438018 - RNA, 19 nt, Homo sapiens
  misc_RNA (1)...(19): siRNA sense strand
aagagaaagucaaagcaga

SEQ ID NO: 2438019 - RNA, 19 nt, Homo sapiens
  misc_RNA (1)...(19): siRNA sense strand
uuaucaaacugaagcguga

SEQ ID NO: 2438020 - RNA, 19 nt, Homo sapiens
  misc_RNA (1)...(19): siRNA sense strand
acgagaaguuccaggccuu

SEQ ID NO: 2438021 - RNA, 19 nt, Homo sapiens
  misc_RNA (1)...(19): siRNA sense strand
uggaaagaggccagaagau

SEQ ID NO: 2438022 - RNA, 19 nt, Homo sapiens
  misc_RNA (1)...(19): siRNA sense strand
cggugaagucguuugaaga

SEQ ID NO: 2438023 - RNA, 19 nt, Homo sapiens
  misc_RNA (1)...(19): siRNA sense strand
acacagaugauuuggacga

SEQ ID NO: 2438024 - RNA, 19 nt, Homo sapiens
  misc_RNA (1)...(19): siRNA sense strand
uugaagacucuguguggaa

SEQ ID NO: 2438025 - RNA, 19 nt, Homo sapiens
  misc_RNA (1)...(19): siRNA sense strand
aagucaaagcagauaccaa

SEQ ID NO: 2438026 - RNA, 19 nt, Homo sapiens
  misc_RNA (1)...(19): siRNA sense strand
aguuccaggccuuguguaa

SEQ ID NO: 2438027 - RNA, 19 nt, Homo sapiens
  misc_RNA (1)...(19): siRNA sense strand
ugaacagaauccaggagca

SEQ ID NO: 2438028 - RNA, 19 nt, Homo sapiens
  misc_RNA (1)...(19): siRNA sense strand
ccgagaaaacagaugaaga

SEQ ID NO: 2438029 - RNA, 19 nt, Homo sapiens
  misc_RNA (1)...(19): siRNA sense strand
gagucuaugccaugggcuu

SEQ ID NO: 2438030 - RNA, 19 nt, Homo sapiens
  misc_RNA (1)...(19): siRNA sense strand
ccgagagggcaaagagaag

SEQ ID NO: 2438031 - RNA, 19 nt, Homo sapiens
  misc_RNA (1)...(19): siRNA sense strand
aacugaagcgugaggaaga

SEQ ID NO: 2438032 - RNA, 19 nt, Homo sapiens
  misc_RNA (1)...(19): siRNA sense strand
cugcggugauugagcgcuu

SEQ ID NO: 2438033 - RNA, 19 nt, Homo sapiens
  misc_RNA (1)...(19): siRNA sense strand
augauuuggacgagauuga

SEQ ID NO: 2438034 - RNA, 19 nt, Homo sapiens
  misc_RNA (1)...(19): siRNA sense strand
augaagaggagaaagagga

SEQ ID NO: 2438035 - RNA, 19 nt, Homo sapiens
  misc_RNA (1)...(19): siRNA sense strand
gagaaagaggacagagcug

SEQ ID NO: 2438036 - RNA, 19 nt, Homo sapiens
  misc_RNA (1)...(19): siRNA sense strand
auuugcagaucaaggaaga

SEQ ID NO: 2438037 - RNA, 19 nt, Homo sapiens
  misc_RNA (1)...(19): siRNA sense strand
acgaggaguucuaccgcaa

SEQ ID NO: 2438038 - RNA, 19 nt, Homo sapiens
  misc_RNA (1)...(19): siRNA sense strand
ccagaaaggagacggagca

SEQ ID NO: 2438039 - RNA, 19 nt, Homo sapiens
  misc_RNA (1)...(19): siRNA sense strand
gaggagagcgugagaggcu

SEQ ID NO: 2438040 - RNA, 19 nt, Homo sapiens
  misc_RNA (1)...(19): siRNA sense strand
ccgaaaaccuccuccgaga

SEQ ID NO: 2438041 - RNA, 19 nt, Homo sapiens
  misc_RNA (1)...(19): siRNA sense strand
ggagcauggaggagagcgu

SEQ ID NO: 2438042 - RNA, 19 nt, Homo sapiens
  misc_RNA (1)...(19): siRNA sense strand
gggcagugggugugaagcu

SEQ ID NO: 2438043 - RNA, 19 nt, Homo sapiens
  misc_RNA (1)...(19): siRNA sense strand
gggaggaguuccaggagca

SEQ ID NO: 2438044 - RNA, 19 nt, Homo sapiens
  misc_RNA (1)...(19): siRNA sense strand
uggcauacgaggagcugau

SEQ ID NO: 2438045 - RNA, 19 nt, Homo sapiens
  misc_RNA (1)...(19): siRNA sense strand
acucagagcuagaggcaga

SEQ ID NO: 2438046 - RNA, 19 nt, Homo sapiens
  misc_RNA (1)...(19): siRNA sense strand
gugaagaugaagagcagga

SEQ ID NO: 2438047 - RNA, 19 nt, Homo sapiens
  misc_RNA (1)...(19): siRNA sense strand
gggacagcagugaggccaa

SEQ ID NO: 2438048 - RNA, 19 nt, Homo sapiens
  misc_RNA (1)...(19): siRNA sense strand
gaaauggagaagaacguga

SEQ ID NO: 2438049 - RNA, 19 nt, Homo sapiens
  misc_RNA (1)...(19): siRNA sense strand
ccaaggagaccaagcggca

SEQ ID NO: 2438050 - RNA, 19 nt, Homo sapiens
  misc_RNA (1)...(19): siRNA sense strand
aggcagaggagugguacaa

SEQ ID NO: 2438051 - RNA, 19 nt, Homo sapiens
  misc_RNA (1)...(19): siRNA sense strand
acguguauggcgagugcaa

SEQ ID NO: 2438052 - RNA, 19 nt, Homo sapiens
  misc_RNA (1)...(19): siRNA sense strand
uggaaauggagaagaacgu

SEQ ID NO: 2438053 - RNA, 19 nt, Homo sapiens
  misc_RNA (1)...(19): siRNA sense strand
augaaugaacugacaacaa

SEQ ID NO: 2438054 - RNA, 19 nt, Homo sapiens
  misc_RNA (1)...(19): siRNA sense strand
ucagaugaguaaaggacca

SEQ ID NO: 2438055 - RNA, 19 nt, Homo sapiens
  misc_RNA (1)...(19): siRNA sense strand
uguaaauuuccgacagaga

SEQ ID NO: 2438056 - RNA, 19 nt, Homo sapiens
  misc_RNA (1)...(19): siRNA sense strand
acacaguacacaaagccaa

SEQ ID NO: 2438057 - RNA, 19 nt, Homo sapiens
  misc_RNA (1)...(19): siRNA sense strand
aguuagaagcuacugggaa

SEQ ID NO: 2438058 - RNA, 19 nt, Homo sapiens
  misc_RNA (1)...(19): siRNA sense strand
gauccaucugugugaggaa

SEQ ID NO: 2438059 - RNA, 19 nt, Homo sapiens
  misc_RNA (1)...(19): siRNA sense strand
aggaaaagcgugcaaguau

SEQ ID NO: 2438060 - RNA, 19 nt, Homo sapiens
  misc_RNA (1)...(19): siRNA sense strand
agacggaaaugcagcgaca

SEQ ID NO: 2438061 - RNA, 19 nt, Homo sapiens
  misc_RNA (1)...(19): siRNA sense strand
augaaagcgacgaagacaa

SEQ ID NO: 2438062 - RNA, 19 nt, Homo sapiens
  misc_RNA (1)...(19): siRNA sense strand
gugaagcgucugagcggua

SEQ ID NO: 2438063 - RNA, 19 nt, Homo sapiens
  misc_RNA (1)...(19): siRNA sense strand
gcucaauaccacagccuca

SEQ ID NO: 2438064 - RNA, 19 nt, Homo sapiens
  misc_RNA (1)...(19): siRNA sense strand
cggcaagggcugugugaag

SEQ ID NO: 2438065 - RNA, 19 nt, Homo sapiens
  misc_RNA (1)...(19): siRNA sense strand
ccguguaugagguggucua

SEQ ID NO: 2438066 - RNA, 19 nt, Homo sapiens
  misc_RNA (1)...(19): siRNA sense strand
uaacaaauacaucgugaca

SEQ ID NO: 2438067 - RNA, 19 nt, Homo sapiens
  misc_RNA (1)...(19): siRNA sense strand
ccuucaaguucucgaucuu

SEQ ID NO: 2438068 - RNA, 19 nt, Homo sapiens
  misc_RNA (1)...(19): siRNA sense strand
cgugauggcauuugagucu

SEQ ID NO: 2438069 - RNA, 19 nt, Homo sapiens
  misc_RNA (1)...(19): siRNA sense strand
cgaccgcaucaaagaagaa

SEQ ID NO: 2438070 - RNA, 19 nt, Homo sapiens
  misc_RNA (1)...(19): siRNA sense strand
cagaaucagacuaugguca

SEQ ID NO: 2438071 - RNA, 19 nt, Homo sapiens
  misc_RNA (1)...(19): siRNA sense strand
cuuaugaaagcgacgaaga

SEQ ID NO: 2438072 - RNA, 19 nt, Homo sapiens
  misc_RNA (1)...(19): siRNA sense strand
cggucggaauggagaguag

SEQ ID NO: 2438073 - RNA, 19 nt, Homo sapiens
  misc_RNA (1)...(19): siRNA sense strand
cggagauugugaagcgucu

SEQ ID NO: 2438074 - RNA, 19 nt, Homo sapiens
  misc_RNA (1)...(19): siRNA sense strand
gcccagagaaagagagcca

SEQ ID NO: 2438075 - RNA, 19 nt, Homo sapiens
  misc_RNA (1)...(19): siRNA sense strand
agaccuugcuuuaggguac

SEQ ID NO: 2438076 - RNA, 19 nt, Homo sapiens
  misc_RNA (1)...(19): siRNA sense strand
cuaguguggugauggguga

SEQ ID NO: 2438077 - RNA, 19 nt, Homo sapiens
  misc_RNA (1)...(19): siRNA sense strand
gguuagcaggucaguguau

SEQ ID NO: 2438078 - RNA, 19 nt, Homo sapiens
  misc_RNA (1)...(19): siRNA sense strand
cugcugacccugaagccaa

SEQ ID NO: 2438079 - RNA, 19 nt, Homo sapiens
  misc_RNA (1)...(19): siRNA sense strand
acaccuuggcagaagauga

SEQ ID NO: 2438080 - RNA, 19 nt, Homo sapiens
  misc_RNA (1)...(19): siRNA sense strand
ccagcuucuaugugacuua

SEQ ID NO: 2438081 - RNA, 19 nt, Homo sapiens
  misc_RNA (1)...(19): siRNA sense strand
ccgaggaagaagaggaaga

SEQ ID NO: 2438082 - RNA, 19 nt, Homo sapiens
  misc_RNA (1)...(19): siRNA sense strand
aggaagaggaggaggagga

SEQ ID NO: 2438083 - RNA, 19 nt, Homo sapiens
  misc_RNA (1)...(19): siRNA sense strand
aggaagaagaggaagaguu

SEQ ID NO: 2438084 - RNA, 19 nt, Homo sapiens
  misc_RNA (1)...(19): siRNA sense strand
acgacgagagggagggaga

SEQ ID NO: 2438085 - RNA, 19 nt, Homo sapiens
  misc_RNA (1)...(19): siRNA sense strand
cccgcaacguagugggcua

SEQ ID NO: 2438086 - RNA, 19 nt, Homo sapiens
  misc_RNA (1)...(19): siRNA sense strand
cagaguugcuggagcgugu

SEQ ID NO: 2438087 - RNA, 19 nt, Homo sapiens
  misc_RNA (1)...(19): siRNA sense strand
uggaggaagaggaggagga

SEQ ID NO: 2438088 - RNA, 19 nt, Homo sapiens
  misc_RNA (1)...(19): siRNA sense strand
aagaggaggaggaggagga

SEQ ID NO: 2438089 - RNA, 19 nt, Homo sapiens
  misc_RNA (1)...(19): siRNA sense strand
gggagggagagguuggaga

SEQ ID NO: 2438090 - RNA, 19 nt, Homo sapiens
  misc_RNA (1)...(19): siRNA sense strand
aagaagaggaagaguugga

SEQ ID NO: 2438091 - RNA, 19 nt, Homo sapiens
  misc_RNA (1)...(19): siRNA sense strand
gcccgaggaagaagaggaa

SEQ ID NO: 2438092 - RNA, 19 nt, Homo sapiens
  misc_RNA (1)...(19): siRNA sense strand
aguuggaggaagaggagga

SEQ ID NO: 2438093 - RNA, 19 nt, Homo sapiens
  misc_RNA (1)...(19): siRNA sense strand
caacugagcgccuggcaca

SEQ ID NO: 2438094 - RNA, 19 nt, Homo sapiens
  misc_RNA (1)...(19): siRNA sense strand
aggaggaggaggaguggga

SEQ ID NO: 2438095 - RNA, 19 nt, Homo sapiens
  misc_RNA (1)...(19): siRNA sense strand
aggagcagguuuggagcaa

SEQ ID NO: 2438096 - RNA, 19 nt, Homo sapiens
  misc_RNA (1)...(19): siRNA sense strand
cccagaacgugguggccuu

SEQ ID NO: 2438097 - RNA, 19 nt, Homo sapiens
  misc_RNA (1)...(19): siRNA sense strand
aagaggaagaguuggagga

SEQ ID NO: 2438098 - RNA, 19 nt, Homo sapiens
  misc_RNA (1)...(19): siRNA sense strand
agaccaaauucaagggcau

SEQ ID NO: 2438099 - RNA, 19 nt, Homo sapiens
  misc_RNA (1)...(19): siRNA sense strand
cuuucaaggccuucaguaa

SEQ ID NO: 2438100 - RNA, 19 nt, Homo sapiens
  misc_RNA (1)...(19): siRNA sense strand
ggccaagaucgcugagaca

SEQ ID NO: 2438101 - RNA, 19 nt, Homo sapiens
  misc_RNA (1)...(19): siRNA sense strand
agugagaacaaggaggaaa

SEQ ID NO: 2438102 - RNA, 19 nt, Homo sapiens
  misc_RNA (1)...(19): siRNA sense strand
cggagaaggaugagauggu

SEQ ID NO: 2438103 - RNA, 19 nt, Homo sapiens
  misc_RNA (1)...(19): siRNA sense strand
aagcggaagcggagacuca

SEQ ID NO: 2438104 - RNA, 19 nt, Homo sapiens
  misc_RNA (1)...(19): siRNA sense strand
ccaaggugaaggagagcca

SEQ ID NO: 2438105 - RNA, 19 nt, Homo sapiens
  misc_RNA (1)...(19): siRNA sense strand
guucuggaguggaggccuu

SEQ ID NO: 2438106 - RNA, 19 nt, Homo sapiens
  misc_RNA (1)...(19): siRNA sense strand
agcacaugaugcagaacua

SEQ ID NO: 2438107 - RNA, 19 nt, Homo sapiens
  misc_RNA (1)...(19): siRNA sense strand
aggacgaggcagacggcau

SEQ ID NO: 2438108 - RNA, 19 nt, Homo sapiens
  misc_RNA (1)...(19): siRNA sense strand
guaagaagauggacgacag

SEQ ID NO: 2438109 - RNA, 19 nt, Homo sapiens
  misc_RNA (1)...(19): siRNA sense strand
uggagaagacccugcgcau

SEQ ID NO: 2438110 - RNA, 19 nt, Homo sapiens
  misc_RNA (1)...(19): siRNA sense strand
aggaggacuucaucgaaaa

SEQ ID NO: 2438111 - RNA, 19 nt, Homo sapiens
  misc_RNA (1)...(19): siRNA sense strand
aggaggaugaugaugauga

SEQ ID NO: 2438112 - RNA, 19 nt, Homo sapiens
  misc_RNA (1)...(19): siRNA sense strand
acuugcaggacguggaaga

SEQ ID NO: 2438113 - RNA, 19 nt, Homo sapiens
  misc_RNA (1)...(19): siRNA sense strand
caguauggcaagaaugcaa

SEQ ID NO: 2438114 - RNA, 19 nt, Homo sapiens
  misc_RNA (1)...(19): siRNA sense strand
acaucaacuuaguggccua

SEQ ID NO: 2438115 - RNA, 19 nt, Homo sapiens
  misc_RNA (1)...(19): siRNA sense strand
gagcagagcacaucagcca

SEQ ID NO: 2438116 - RNA, 19 nt, Homo sapiens
  misc_RNA (1)...(19): siRNA sense strand
gggcauuaccucugcagga

SEQ ID NO: 2438117 - RNA, 19 nt, Homo sapiens
  misc_RNA (1)...(19): siRNA sense strand
gcaugaugggccagacaga

SEQ ID NO: 2438118 - RNA, 19 nt, Homo sapiens
  misc_RNA (1)...(19): siRNA sense strand
ggaaaugcgagcagagcac

SEQ ID NO: 2438119 - RNA, 19 nt, Homo sapiens
  misc_RNA (1)...(19): siRNA sense strand
gugaccacaaggaggagaa

SEQ ID NO: 2438120 - RNA, 19 nt, Homo sapiens
  misc_RNA (1)...(19): siRNA sense strand
agagcucacaggaggcaaa

SEQ ID NO: 2438121 - RNA, 19 nt, Homo sapiens
  misc_RNA (1)...(19): siRNA sense strand
gcaaagaguccgaaggugg

SEQ ID NO: 2438122 - RNA, 19 nt, Homo sapiens
  misc_RNA (1)...(19): siRNA sense strand
uccagaugcuagauggcaa

SEQ ID NO: 2438123 - RNA, 19 nt, Homo sapiens
  misc_RNA (1)...(19): siRNA sense strand
ccuuauguggaaagugaga

SEQ ID NO: 2438124 - RNA, 19 nt, Homo sapiens
  misc_RNA (1)...(19): siRNA sense strand
gcagugaccacaaggagga

SEQ ID NO: 2438125 - RNA, 19 nt, Homo sapiens
  misc_RNA (1)...(19): siRNA sense strand
gcguguuggaccugaagau

SEQ ID NO: 2438126 - RNA, 19 nt, Homo sapiens
  misc_RNA (1)...(19): siRNA sense strand
ucaucagcaucauggaaca

SEQ ID NO: 2438127 - RNA, 19 nt, Homo sapiens
  misc_RNA (1)...(19): siRNA sense strand
ugucccaggaagagaggaa

SEQ ID NO: 2438128 - RNA, 19 nt, Homo sapiens
  misc_RNA (1)...(19): siRNA sense strand
ccauggagcacguggugga

SEQ ID NO: 2438129 - RNA, 19 nt, Homo sapiens
  misc_RNA (1)...(19): siRNA sense strand
cugaacaaguaccgagcca

SEQ ID NO: 2438130 - RNA, 19 nt, Homo sapiens
  misc_RNA (1)...(19): siRNA sense strand
guuucaugucccaggaaga

SEQ ID NO: 2438131 - RNA, 19 nt, Homo sapiens
  misc_RNA (1)...(19): siRNA sense strand
uguccuuuguauuggguuu

SEQ ID NO: 2438132 - RNA, 19 nt, Homo sapiens
  misc_RNA (1)...(19): siRNA sense strand
ggcgaauacgugacgauau

SEQ ID NO: 2438133 - RNA, 19 nt, Homo sapiens
  misc_RNA (1)...(19): siRNA sense strand
aguacugggaugaggacca

SEQ ID NO: 2438134 - RNA, 19 nt, Homo sapiens
  misc_RNA (1)...(19): siRNA sense strand
cggagaagccugaggagga

SEQ ID NO: 2438135 - RNA, 19 nt, Homo sapiens
  misc_RNA (1)...(19): siRNA sense strand
aggaggagcuggaggagga

SEQ ID NO: 2438136 - RNA, 19 nt, Homo sapiens
  misc_RNA (1)...(19): siRNA sense strand
gcagauacuucuaggaccu

SEQ ID NO: 2438137 - RNA, 19 nt, Homo sapiens
  misc_RNA (1)...(19): siRNA sense strand
gaugagacccugucggaga

SEQ ID NO: 2438138 - RNA, 19 nt, Homo sapiens
  misc_RNA (1)...(19): siRNA sense strand
gagacggagaaguugcaaa

SEQ ID NO: 2438139 - RNA, 19 nt, Homo sapiens
  misc_RNA (1)...(19): siRNA sense strand
ccucuuuguggcucagaaa

SEQ ID NO: 2438140 - RNA, 19 nt, Homo sapiens
  misc_RNA (1)...(19): siRNA sense strand
ggaaggucguacugcggaa

SEQ ID NO: 2438141 - RNA, 19 nt, Homo sapiens
  misc_RNA (1)...(19): siRNA sense strand
acucgaaaucccaaugaaa

SEQ ID NO: 2438142 - RNA, 19 nt, Homo sapiens
  misc_RNA (1)...(19): siRNA sense strand
ggaaaagguaacagaagau

SEQ ID NO: 2438143 - RNA, 19 nt, Homo sapiens
  misc_RNA (1)...(19): siRNA sense strand
gcuguuagaaauagcaaaa

SEQ ID NO: 2438144 - RNA, 19 nt, Homo sapiens
  misc_RNA (1)...(19): siRNA sense strand
gcgaaagcucuaggaacaa

SEQ ID NO: 2438145 - RNA, 19 nt, Homo sapiens
  misc_RNA (1)...(19): siRNA sense strand
cacagcagauggagggaca

SEQ ID NO: 2438146 - RNA, 19 nt, Homo sapiens
  misc_RNA (1)...(19): siRNA sense strand
aagccugaacugucggaaa

SEQ ID NO: 2438147 - RNA, 19 nt, Homo sapiens
  misc_RNA (1)...(19): siRNA sense strand
caguguacccggaggagca

SEQ ID NO: 2438148 - RNA, 19 nt, Homo sapiens
  misc_RNA (1)...(19): siRNA sense strand
agggacagauccaggacga

SEQ ID NO: 2438149 - RNA, 19 nt, Homo sapiens
  misc_RNA (1)...(19): siRNA sense strand
agaagauggaacucgaaau

SEQ ID NO: 2438150 - RNA, 19 nt, Homo sapiens
  misc_RNA (1)...(19): siRNA sense strand
ccguggaauagguguauca

SEQ ID NO: 2438151 - RNA, 19 nt, Homo sapiens
  misc_RNA (1)...(19): siRNA sense strand
agccugaacugucggaaaa

SEQ ID NO: 2438152 - RNA, 19 nt, Homo sapiens
  misc_RNA (1)...(19): siRNA sense strand
gagcaguaucagccggaga

SEQ ID NO: 2438153 - RNA, 19 nt, Homo sapiens
  misc_RNA (1)...(19): siRNA sense strand
acuucaagccucaauacaa

SEQ ID NO: 2438154 - RNA, 19 nt, Homo sapiens
  misc_RNA (1)...(19): siRNA sense strand
agaagaagccugugggcau

SEQ ID NO: 2438155 - RNA, 19 nt, Homo sapiens
  misc_RNA (1)...(19): siRNA sense strand
gaggagaucuggaagguca

SEQ ID NO: 2438156 - RNA, 19 nt, Homo sapiens
  misc_RNA (1)...(19): siRNA sense strand
aagugaaggugauaggcua

SEQ ID NO: 2438157 - RNA, 19 nt, Homo sapiens
  misc_RNA (1)...(19): siRNA sense strand
ccaacuacaacgaggccaa

SEQ ID NO: 2438158 - RNA, 19 nt, Homo sapiens
  misc_RNA (1)...(19): siRNA sense strand
acagcaugauccagggcua

SEQ ID NO: 2438159 - RNA, 19 nt, Homo sapiens
  misc_RNA (1)...(19): siRNA sense strand
gaguaugaagugaagguga

SEQ ID NO: 2438160 - RNA, 19 nt, Homo sapiens
  misc_RNA (1)...(19): siRNA sense strand
aggaccagccagagcuaua

SEQ ID NO: 2438161 - RNA, 19 nt, Homo sapiens
  misc_RNA (1)...(19): siRNA sense strand
ccuccucggcugugacaaa

SEQ ID NO: 2438162 - RNA, 19 nt, Homo sapiens
  misc_RNA (1)...(19): siRNA sense strand
cgguggaggagaucaacaa

SEQ ID NO: 2438163 - RNA, 19 nt, Homo sapiens
  misc_RNA (1)...(19): siRNA sense strand
ucuucuacccggagcgcaa

SEQ ID NO: 2438164 - RNA, 19 nt, Homo sapiens
  misc_RNA (1)...(19): siRNA sense strand
cuggugugcugcugggcua

SEQ ID NO: 2438165 - RNA, 19 nt, Homo sapiens
  misc_RNA (1)...(19): siRNA sense strand
gcguguacucugcggucua

SEQ ID NO: 2438166 - RNA, 19 nt, Homo sapiens
  misc_RNA (1)...(19): siRNA sense strand
ccgaauaacgagugguccu

SEQ ID NO: 2438167 - RNA, 19 nt, Homo sapiens
  misc_RNA (1)...(19): siRNA sense strand
ucaaugaggugcugcgcca

SEQ ID NO: 2438168 - RNA, 19 nt, Homo sapiens
  misc_RNA (1)...(19): siRNA sense strand
ucgcgguggaggagaucaa

SEQ ID NO: 2438169 - RNA, 19 nt, Homo sapiens
  misc_RNA (1)...(19): siRNA sense strand
agucagggcaaaagaagaa

SEQ ID NO: 2438170 - RNA, 19 nt, Homo sapiens
  misc_RNA (1)...(19): siRNA sense strand
gcuucgcgguggaggagau

SEQ ID NO: 2438171 - RNA, 19 nt, Homo sapiens
  misc_RNA (1)...(19): siRNA sense strand
caagacaucuccuggcaca

SEQ ID NO: 2438172 - RNA, 19 nt, Homo sapiens
  misc_RNA (1)...(19): siRNA sense strand
gugauauucuggaggcacu

SEQ ID NO: 2438173 - RNA, 19 nt, Homo sapiens
  misc_RNA (1)...(19): siRNA sense strand
cggcugagaacucggacuu

SEQ ID NO: 2438174 - RNA, 19 nt, Homo sapiens
  misc_RNA (1)...(19): siRNA sense strand
agaucguggaugugugcua

SEQ ID NO: 2438175 - RNA, 19 nt, Homo sapiens
  misc_RNA (1)...(19): siRNA sense strand
ccgccuacuucaacagcau

SEQ ID NO: 2438176 - RNA, 19 nt, Homo sapiens
  misc_RNA (1)...(19): siRNA sense strand
cugucaugacuguggccaa

SEQ ID NO: 2438177 - RNA, 19 nt, Homo sapiens
  misc_RNA (1)...(19): siRNA sense strand
caaugggaccggagccaga

SEQ ID NO: 2438178 - RNA, 19 nt, Homo sapiens
  misc_RNA (1)...(19): siRNA sense strand
ggagaaagauuaugugcgu

SEQ ID NO: 2438179 - RNA, 19 nt, Homo sapiens
  misc_RNA (1)...(19): siRNA sense strand
ugacaaucaacgaggacau

SEQ ID NO: 2438180 - RNA, 19 nt, Homo sapiens
  misc_RNA (1)...(19): siRNA sense strand
cuggagacauaaaggcaau

SEQ ID NO: 2438181 - RNA, 19 nt, Homo sapiens
  misc_RNA (1)...(19): siRNA sense strand
cuggaaaugaagaugaauu

SEQ ID NO: 2438182 - RNA, 19 nt, Homo sapiens
  misc_RNA (1)...(19): siRNA sense strand
caacaaugaugacuggaca

SEQ ID NO: 2438183 - RNA, 19 nt, Homo sapiens
  misc_RNA (1)...(19): siRNA sense strand
gggagaggaaacagaggau

SEQ ID NO: 2438184 - RNA, 19 nt, Homo sapiens
  misc_RNA (1)...(19): siRNA sense strand
gcaauguaguggauggcca

SEQ ID NO: 2438185 - RNA, 19 nt, Homo sapiens
  misc_RNA (1)...(19): siRNA sense strand
gaauuuagaaacaugguga

SEQ ID NO: 2438186 - RNA, 19 nt, Homo sapiens
  misc_RNA (1)...(19): siRNA sense strand
auucaaguauggugcaaaa

SEQ ID NO: 2438187 - RNA, 19 nt, Homo sapiens
  misc_RNA (1)...(19): siRNA sense strand
augcacaagaucuggaaau

SEQ ID NO: 2438188 - RNA, 19 nt, Homo sapiens
  misc_RNA (1)...(19): siRNA sense strand
uggcaauugcacaggcauu

SEQ ID NO: 2438189 - RNA, 19 nt, Homo sapiens
  misc_RNA (1)...(19): siRNA sense strand
aagcaguaccuguggaagu

SEQ ID NO: 2438190 - RNA, 19 nt, Homo sapiens
  misc_RNA (1)...(19): siRNA sense strand
ugaucuggguggugagcca

SEQ ID NO: 2438191 - RNA, 19 nt, Homo sapiens
  misc_RNA (1)...(19): siRNA sense strand
ggauccauuuauugcaauu

SEQ ID NO: 2438192 - RNA, 19 nt, Homo sapiens
  misc_RNA (1)...(19): siRNA sense strand
cacuugucuuuguggauaa

SEQ ID NO: 2438193 - RNA, 19 nt, Homo sapiens
  misc_RNA (1)...(19): siRNA sense strand
gguaugauaaugggagcaa

SEQ ID NO: 2438194 - RNA, 19 nt, Homo sapiens
  misc_RNA (1)...(19): siRNA sense strand
gcacuugucuuuguggaua

SEQ ID NO: 2438195 - RNA, 19 nt, Homo sapiens
  misc_RNA (1)...(19): siRNA sense strand
cucuugaaugugagcgaua

SEQ ID NO: 2438196 - RNA, 19 nt, Homo sapiens
  misc_RNA (1)...(19): siRNA sense strand
uggccaagacaguuucaaa

SEQ ID NO: 2438197 - RNA, 19 nt, Homo sapiens
  misc_RNA (1)...(19): siRNA sense strand
gaaucaucucauugacauu

SEQ ID NO: 2438198 - RNA, 19 nt, Homo sapiens
  misc_RNA (1)...(19): siRNA sense strand
ccuggagacauaaaggcaa

SEQ ID NO: 2438199 - RNA, 19 nt, Homo sapiens
  misc_RNA (1)...(19): siRNA sense strand
auaaaauggcaguuggauu

SEQ ID NO: 2438200 - RNA, 19 nt, Homo sapiens
  misc_RNA (1)...(19): siRNA sense strand
gcacaggcauuaaaaucua

SEQ ID NO: 2438201 - RNA, 19 nt, Homo sapiens
  misc_RNA (1)...(19): siRNA sense strand
ugacugggucugugaacau

SEQ ID NO: 2438202 - RNA, 19 nt, Homo sapiens
  misc_RNA (1)...(19): siRNA sense strand
ugaucuugcacuggagaaa

SEQ ID NO: 2438203 - RNA, 19 nt, Homo sapiens
  misc_RNA (1)...(19): siRNA sense strand
agaaagauuaugugcguuc

SEQ ID NO: 2438204 - RNA, 19 nt, Homo sapiens
  misc_RNA (1)...(19): siRNA sense strand
gggauuuuaaugaugguaa

SEQ ID NO: 2438205 - RNA, 19 nt, Homo sapiens
  misc_RNA (1)...(19): siRNA sense strand
ggaaguggagauaucgaga

SEQ ID NO: 2438206 - RNA, 19 nt, Homo sapiens
  misc_RNA (1)...(19): siRNA sense strand
ugauaaugggagcaaccaa

SEQ ID NO: 2438207 - RNA, 19 nt, Homo sapiens
  misc_RNA (1)...(19): siRNA sense strand
ggcaauugcacaggcauua

SEQ ID NO: 2438208 - RNA, 19 nt, Homo sapiens
  misc_RNA (1)...(19): siRNA sense strand
cugcugaacaauugggaaa

SEQ ID NO: 2438209 - RNA, 19 nt, Homo sapiens
  misc_RNA (1)...(19): siRNA sense strand
gcucaaaauaauacggaaa

SEQ ID NO: 2438210 - RNA, 19 nt, Homo sapiens
  misc_RNA (1)...(19): siRNA sense strand
ggauagugacaaagaagau

SEQ ID NO: 2438211 - RNA, 19 nt, Homo sapiens
  misc_RNA (1)...(19): siRNA sense strand
cagaagugcaguugaccaa

SEQ ID NO: 2438212 - RNA, 19 nt, Homo sapiens
  misc_RNA (1)...(19): siRNA sense strand
gugacaaagaagaugauau

SEQ ID NO: 2438213 - RNA, 19 nt, Homo sapiens
  misc_RNA (1)...(19): siRNA sense strand
agaucuagaaagugcuaaa

SEQ ID NO: 2438214 - RNA, 19 nt, Homo sapiens
  misc_RNA (1)...(19): siRNA sense strand
acauguagaagauggaaau

SEQ ID NO: 2438215 - RNA, 19 nt, Homo sapiens
  misc_RNA (1)...(19): siRNA sense strand
guuauuugaaggaggaaaa

SEQ ID NO: 2438216 - RNA, 19 nt, Homo sapiens
  misc_RNA (1)...(19): siRNA sense strand
aaaaguggauagugacaaa

SEQ ID NO: 2438217 - RNA, 19 nt, Homo sapiens
  misc_RNA (1)...(19): siRNA sense strand
uggauuuacuggacagaca

SEQ ID NO: 2438218 - RNA, 19 nt, Homo sapiens
  misc_RNA (1)...(19): siRNA sense strand
ccuuauacgacacaguaaa

SEQ ID NO: 2438219 - RNA, 19 nt, Homo sapiens
  misc_RNA (1)...(19): siRNA sense strand
ggagaugaauccaugcaga

SEQ ID NO: 2438220 - RNA, 19 nt, Homo sapiens
  misc_RNA (1)...(19): siRNA sense strand
gugugaagccaaagaucau

SEQ ID NO: 2438221 - RNA, 19 nt, Homo sapiens
  misc_RNA (1)...(19): siRNA sense strand
cgggcagggcucuaggaaa

SEQ ID NO: 2438222 - RNA, 19 nt, Homo sapiens
  misc_RNA (1)...(19): siRNA sense strand
uagugaaauuacugggcau

SEQ ID NO: 2438223 - RNA, 19 nt, Homo sapiens
  misc_RNA (1)...(19): siRNA sense strand
ugcuaaacuuguacagauu

SEQ ID NO: 2438224 - RNA, 19 nt, Homo sapiens
  misc_RNA (1)...(19): siRNA sense strand
acuagagauuguucagcaa

SEQ ID NO: 2438225 - RNA, 19 nt, Homo sapiens
  misc_RNA (1)...(19): siRNA sense strand
gacauguagaagauggaaa

SEQ ID NO: 2438226 - RNA, 19 nt, Homo sapiens
  misc_RNA (1)...(19): siRNA sense strand
ugaacaauugggaaagaau

SEQ ID NO: 2438227 - RNA, 19 nt, Homo sapiens
  misc_RNA (1)...(19): siRNA sense strand
gaaguuauuugaaggagga

SEQ ID NO: 2438228 - RNA, 19 nt, Homo sapiens
  misc_RNA (1)...(19): siRNA sense strand
cauagcagaaguagccaaa

SEQ ID NO: 2438229 - RNA, 19 nt, Homo sapiens
  misc_RNA (1)...(19): siRNA sense strand
uagaacaugauaagagaga

SEQ ID NO: 2438230 - RNA, 19 nt, Homo sapiens
  misc_RNA (1)...(19): siRNA sense strand
ugaggauaguuuagaagga

SEQ ID NO: 2438231 - RNA, 19 nt, Homo sapiens
  misc_RNA (1)...(19): siRNA sense strand
gaauguuaauagaugcaca

SEQ ID NO: 2438232 - RNA, 19 nt, Homo sapiens
  misc_RNA (1)...(19): siRNA sense strand
ccuugaagaagcugaagau

SEQ ID NO: 2438233 - RNA, 19 nt, Homo sapiens
  misc_RNA (1)...(19): siRNA sense strand
acacaaggaaguacaggau

SEQ ID NO: 2438234 - RNA, 19 nt, Homo sapiens
  misc_RNA (1)...(19): siRNA sense strand
cucacagagcagagacuua

SEQ ID NO: 2438235 - RNA, 19 nt, Homo sapiens
  misc_RNA (1)...(19): siRNA sense strand
aauacggaaacaagugaaa

SEQ ID NO: 2438236 - RNA, 19 nt, Homo sapiens
  misc_RNA (1)...(19): siRNA sense strand
ccaaaguagcuaacaucau

SEQ ID NO: 2438237 - RNA, 19 nt, Homo sapiens
  misc_RNA (1)...(19): siRNA sense strand
ggugugaagccaaagauca

SEQ ID NO: 2438238 - RNA, 19 nt, Homo sapiens
  misc_RNA (1)...(19): siRNA sense strand
guggaauacuucagcuguu

SEQ ID NO: 2438239 - RNA, 19 nt, Homo sapiens
  misc_RNA (1)...(19): siRNA sense strand
acuauagcaaugagaauga

SEQ ID NO: 2438240 - RNA, 19 nt, Homo sapiens
  misc_RNA (1)...(19): siRNA sense strand
cugaagagcuaguaaaacu

SEQ ID NO: 2438241 - RNA, 19 nt, Homo sapiens
  misc_RNA (1)...(19): siRNA sense strand
aguacagcaugcagcacua

SEQ ID NO: 2438242 - RNA, 19 nt, Homo sapiens
  misc_RNA (1)...(19): siRNA sense strand
uggaauggugugaagccaa

SEQ ID NO: 2438243 - RNA, 19 nt, Homo sapiens
  misc_RNA (1)...(19): siRNA sense strand
cauggcaacuagugaacau

SEQ ID NO: 2438244 - RNA, 19 nt, Homo sapiens
  misc_RNA (1)...(19): siRNA sense strand
caguacaaacauugcugaa

SEQ ID NO: 2438245 - RNA, 19 nt, Homo sapiens
  misc_RNA (1)...(19): siRNA sense strand
agaagauggaaauguaaca

SEQ ID NO: 2438246 - RNA, 19 nt, Homo sapiens
  misc_RNA (1)...(19): siRNA sense strand
ggguguuauuccuaccuua

SEQ ID NO: 2438247 - RNA, 19 nt, Homo sapiens
  misc_RNA (1)...(19): siRNA sense strand
ugggaaagaauguuaaguu

SEQ ID NO: 2438248 - RNA, 19 nt, Homo sapiens
  misc_RNA (1)...(19): siRNA sense strand
agaaagaucuagaaagugc

SEQ ID NO: 2438249 - RNA, 19 nt, Homo sapiens
  misc_RNA (1)...(19): siRNA sense strand
aaguacaggauuuggcuuu

SEQ ID NO: 2438250 - RNA, 19 nt, Homo sapiens
  misc_RNA (1)...(19): siRNA sense strand
aagccaaaguagcuaacau

SEQ ID NO: 2438251 - RNA, 19 nt, Homo sapiens
  misc_RNA (1)...(19): siRNA sense strand
uaguguauuucaaagggua

SEQ ID NO: 2438252 - RNA, 19 nt, Homo sapiens
  misc_RNA (1)...(19): siRNA sense strand
uaugguagacaaugggauu

SEQ ID NO: 2438253 - RNA, 19 nt, Homo sapiens
  misc_RNA (1)...(19): siRNA sense strand
gcaaagauguuaucagcug

SEQ ID NO: 2438254 - RNA, 19 nt, Homo sapiens
  misc_RNA (1)...(19): siRNA sense strand
cugcaaagccaaaguagcu

SEQ ID NO: 2438255 - RNA, 19 nt, Homo sapiens
  misc_RNA (1)...(19): siRNA sense strand
ggaggaaaagguaguguau

SEQ ID NO: 2438256 - RNA, 19 nt, Homo sapiens
  misc_RNA (1)...(19): siRNA sense strand
uagagauuguucagcaaaa

SEQ ID NO: 2438257 - RNA, 19 nt, Homo sapiens
  misc_RNA (1)...(19): siRNA sense strand
uggacagacauguagaaga

SEQ ID NO: 2438258 - RNA, 19 nt, Homo sapiens
  misc_RNA (1)...(19): siRNA sense strand
uguucaaaguuguccgcua

SEQ ID NO: 2438259 - RNA, 19 nt, Homo sapiens
  misc_RNA (1)...(19): siRNA sense strand
ucuuggagcagaugaacaa

SEQ ID NO: 2438260 - RNA, 19 nt, Homo sapiens
  misc_RNA (1)...(19): siRNA sense strand
gugaagaaccggaugcagu

SEQ ID NO: 2438261 - RNA, 19 nt, Homo sapiens
  misc_RNA (1)...(19): siRNA sense strand
gcggaugauugaugggaag

SEQ ID NO: 2438262 - RNA, 19 nt, Homo sapiens
  misc_RNA (1)...(19): siRNA sense strand
ccaguauccugaaggcaga

SEQ ID NO: 2438263 - RNA, 19 nt, Homo sapiens
  misc_RNA (1)...(19): siRNA sense strand
cagcaugaucagcggucuu

SEQ ID NO: 2438264 - RNA, 19 nt, Homo sapiens
  misc_RNA (1)...(19): siRNA sense strand
augggaagccggaauacaa

SEQ ID NO: 2438265 - RNA, 19 nt, Homo sapiens
  misc_RNA (1)...(19): siRNA sense strand
aggagaagcagcagcggaa

SEQ ID NO: 2438266 - RNA, 19 nt, Homo sapiens
  misc_RNA (1)...(19): siRNA sense strand
ucgccuggacauagagaaa

SEQ ID NO: 2438267 - RNA, 19 nt, Homo sapiens
  misc_RNA (1)...(19): siRNA sense strand
cagcagcggaagaaggaga

SEQ ID NO: 2438268 - RNA, 19 nt, Homo sapiens
  misc_RNA (1)...(19): siRNA sense strand
ccguaaaggugcugaccag

SEQ ID NO: 2438269 - RNA, 19 nt, Homo sapiens
  misc_RNA (1)...(19): siRNA sense strand
ugaccuugugggaggagaa

SEQ ID NO: 2438270 - RNA, 19 nt, Homo sapiens
  misc_RNA (1)...(19): siRNA sense strand
gggacaagaucacggaggu

SEQ ID NO: 2438271 - RNA, 19 nt, Homo sapiens
  misc_RNA (1)...(19): siRNA sense strand
uggaggugcugaagggcca

SEQ ID NO: 2438272 - RNA, 19 nt, Homo sapiens
  misc_RNA (1)...(19): siRNA sense strand
gcaaaguggaggaaggcag

SEQ ID NO: 2438273 - RNA, 19 nt, Homo sapiens
  misc_RNA (1)...(19): siRNA sense strand
auucaguccggguggagaa

SEQ ID NO: 2438274 - RNA, 19 nt, Homo sapiens
  misc_RNA (1)...(19): siRNA sense strand
gagaauggcaucaagguag

SEQ ID NO: 2438275 - RNA, 19 nt, Homo sapiens
  misc_RNA (1)...(19): siRNA sense strand
cguggguggauguggugaa

SEQ ID NO: 2438276 - RNA, 19 nt, Homo sapiens
  misc_RNA (1)...(19): siRNA sense strand
ccuugugggaggagaagca

SEQ ID NO: 2438277 - RNA, 19 nt, Homo sapiens
  misc_RNA (1)...(19): siRNA sense strand
gcacaaauccaacaagaaa

SEQ ID NO: 2438278 - RNA, 19 nt, Homo sapiens
  misc_RNA (1)...(19): siRNA sense strand
ccagacaaaucaacagaaa

SEQ ID NO: 2438279 - RNA, 19 nt, Homo sapiens
  misc_RNA (1)...(19): siRNA sense strand
caaauaugccaaagggaau

SEQ ID NO: 2438280 - RNA, 19 nt, Homo sapiens
  misc_RNA (1)...(19): siRNA sense strand
acacaaacucuuagcacaa

SEQ ID NO: 2438281 - RNA, 19 nt, Homo sapiens
  misc_RNA (1)...(19): siRNA sense strand
gcaaggaagaguugaaaca

SEQ ID NO: 2438282 - RNA, 19 nt, Homo sapiens
  misc_RNA (1)...(19): siRNA sense strand
gcuaaauggcagggacaua

SEQ ID NO: 2438283 - RNA, 19 nt, Homo sapiens
  misc_RNA (1)...(19): siRNA sense strand
ugaaagacauacacaacaa

SEQ ID NO: 2438284 - RNA, 19 nt, Homo sapiens
  misc_RNA (1)...(19): siRNA sense strand
acaaauaugccaaagggaa

SEQ ID NO: 2438285 - RNA, 19 nt, Homo sapiens
  misc_RNA (1)...(19): siRNA sense strand
ccaagggacugaaggaaca

SEQ ID NO: 2438286 - RNA, 19 nt, Homo sapiens
  misc_RNA (1)...(19): siRNA sense strand
acagacaagaccagaguua

SEQ ID NO: 2438287 - RNA, 19 nt, Homo sapiens
  misc_RNA (1)...(19): siRNA sense strand
acagacaagaccagaguua

SEQ ID NO: 2438288 - RNA, 19 nt, Homo sapiens
  misc_RNA (1)...(19): siRNA sense strand
ggaagaucagggaggcuaa

SEQ ID NO: 2438289 - RNA, 19 nt, Homo sapiens
  misc_RNA (1)...(19): siRNA sense strand
gccuuaaaucggugugaaa

SEQ ID NO: 2438290 - RNA, 19 nt, Homo sapiens
  misc_RNA (1)...(19): siRNA sense strand
gaucagucagagagacaaa

SEQ ID NO: 2438291 - RNA, 19 nt, Homo sapiens
  misc_RNA (1)...(19): siRNA sense strand
ggacaagccucucacuuua

SEQ ID NO: 2438292 - RNA, 19 nt, Homo sapiens
  misc_RNA (1)...(19): siRNA sense strand
ggacugaaggaacaagaaa

SEQ ID NO: 2438293 - RNA, 19 nt, Homo sapiens
  misc_RNA (1)...(19): siRNA sense strand
gagaaacaagacagagauu

SEQ ID NO: 2438294 - RNA, 19 nt, Homo sapiens
  misc_RNA (1)...(19): siRNA sense strand
cugagaaacaagacagaga

SEQ ID NO: 2438295 - RNA, 19 nt, Homo sapiens
  misc_RNA (1)...(19): siRNA sense strand
cagacaaacccaugaacau

SEQ ID NO: 2438296 - RNA, 19 nt, Homo sapiens
  misc_RNA (1)...(19): siRNA sense strand
ggccaucaaacuugggaua

SEQ ID NO: 2438297 - RNA, 19 nt, Homo sapiens
  misc_RNA (1)...(19): siRNA sense strand
cccauaaagaugagcagaa

SEQ ID NO: 2438298 - RNA, 19 nt, Homo sapiens
  misc_RNA (1)...(19): siRNA sense strand
ggacaggaaggguaccaaa

SEQ ID NO: 2438299 - RNA, 19 nt, Homo sapiens
  misc_RNA (1)...(19): siRNA sense strand
agaccgagauggacauauu

SEQ ID NO: 2438300 - RNA, 19 nt, Homo sapiens
  misc_RNA (1)...(19): siRNA sense strand
gaggcuaggucaggaauua

SEQ ID NO: 2438301 - RNA, 19 nt, Homo sapiens
  misc_RNA (1)...(19): siRNA sense strand
gggacauaucuuugccuua

SEQ ID NO: 2438302 - RNA, 19 nt, Homo sapiens
  misc_RNA (1)...(19): siRNA sense strand
ggacauaucuuugccuuaa

SEQ ID NO: 2438303 - RNA, 19 nt, Homo sapiens
  misc_RNA (1)...(19): siRNA sense strand
uagcauacucagugugauu

SEQ ID NO: 2438304 - RNA, 19 nt, Homo sapiens
  misc_RNA (1)...(19): siRNA sense strand
agacaaaucaacagaaauc

SEQ ID NO: 2438305 - RNA, 19 nt, Homo sapiens
  misc_RNA (1)...(19): siRNA sense strand
agagacaagacaaggauuu

SEQ ID NO: 2438306 - RNA, 19 nt, Homo sapiens
  misc_RNA (1)...(19): siRNA sense strand
ggacagggauuccagucua

SEQ ID NO: 2438307 - RNA, 19 nt, Homo sapiens
  misc_RNA (1)...(19): siRNA sense strand
ccaucaaacuugggauaga

SEQ ID NO: 2438308 - RNA, 19 nt, Homo sapiens
  misc_RNA (1)...(19): siRNA sense strand
ccaucagagacgagacaga

SEQ ID NO: 2438309 - RNA, 19 nt, Homo sapiens
  misc_RNA (1)...(19): siRNA sense strand
gagacaagacagagauucu

SEQ ID NO: 2438310 - RNA, 19 nt, Homo sapiens
  misc_RNA (1)...(19): siRNA sense strand
aggcuaaauggcagggaca

SEQ ID NO: 2438311 - RNA, 19 nt, Homo sapiens
  misc_RNA (1)...(19): siRNA sense strand
aggcaggaccucacagcaa

SEQ ID NO: 2438312 - RNA, 19 nt, Homo sapiens
  misc_RNA (1)...(19): siRNA sense strand
gacagaggcacgaggaaga

SEQ ID NO: 2438313 - RNA, 19 nt, Homo sapiens
  misc_RNA (1)...(19): siRNA sense strand
cauuauggucagacagaca

SEQ ID NO: 2438314 - RNA, 19 nt, Homo sapiens
  misc_RNA (1)...(19): siRNA sense strand
acagaaaaggccaguguua

SEQ ID NO: 2438315 - RNA, 19 nt, Homo sapiens
  misc_RNA (1)...(19): siRNA sense strand
cauuauggucagacagaca

SEQ ID NO: 2438316 - RNA, 19 nt, Homo sapiens
  misc_RNA (1)...(19): siRNA sense strand
gggaaauacaagggcaaaa

SEQ ID NO: 2438317 - RNA, 19 nt, Homo sapiens
  misc_RNA (1)...(19): siRNA sense strand
ggaaggagcacaagacugu

SEQ ID NO: 2438318 - RNA, 19 nt, Homo sapiens
  misc_RNA (1)...(19): siRNA sense strand
cuacagucagccagacaaa

SEQ ID NO: 2438319 - RNA, 19 nt, Homo sapiens
  misc_RNA (1)...(19): siRNA sense strand
cauuaugaucagacaaaca

SEQ ID NO: 2438320 - RNA, 19 nt, Homo sapiens
  misc_RNA (1)...(19): siRNA sense strand
agaccaaaguucucacuau

SEQ ID NO: 2438321 - RNA, 19 nt, Homo sapiens
  misc_RNA (1)...(19): siRNA sense strand
acagacaaggccagagcua

SEQ ID NO: 2438322 - RNA, 19 nt, Homo sapiens
  misc_RNA (1)...(19): siRNA sense strand
cccaugaagacgagcagaa

SEQ ID NO: 2438323 - RNA, 19 nt, Homo sapiens
  misc_RNA (1)...(19): siRNA sense strand
agacaaggauuucagcuuu

SEQ ID NO: 2438324 - RNA, 19 nt, Homo sapiens
  misc_RNA (1)...(19): siRNA sense strand
agacagacaaggccagaau

SEQ ID NO: 2438325 - RNA, 19 nt, Homo sapiens
  misc_RNA (1)...(19): siRNA sense strand
gagcagaaccaucagagau

SEQ ID NO: 2438326 - RNA, 19 nt, Homo sapiens
  misc_RNA (1)...(19): siRNA sense strand
ggccagaguucccacuaua

SEQ ID NO: 2438327 - RNA, 19 nt, Homo sapiens
  misc_RNA (1)...(19): siRNA sense strand
agaucaagaccgagaugga

SEQ ID NO: 2438328 - RNA, 19 nt, Homo sapiens
  misc_RNA (1)...(19): siRNA sense strand
augguaagauagacagaca

SEQ ID NO: 2438329 - RNA, 19 nt, Homo sapiens
  misc_RNA (1)...(19): siRNA sense strand
cagaggaagagcagggcca

SEQ ID NO: 2438330 - RNA, 19 nt, Homo sapiens
  misc_RNA (1)...(19): siRNA sense strand
cgagauggacauauugauu

SEQ ID NO: 2438331 - RNA, 19 nt, Homo sapiens
  misc_RNA (1)...(19): siRNA sense strand
ggacaggcgaacccauaaa

SEQ ID NO: 2438332 - RNA, 19 nt, Homo sapiens
  misc_RNA (1)...(19): siRNA sense strand
gaacaugagcagagccauc

SEQ ID NO: 2438333 - RNA, 19 nt, Homo sapiens
  misc_RNA (1)...(19): siRNA sense strand
cugagagacaagacagaga

SEQ ID NO: 2438334 - RNA, 19 nt, Homo sapiens
  misc_RNA (1)...(19): siRNA sense strand
cugagagacaagacagaga

SEQ ID NO: 2438335 - RNA, 19 nt, Homo sapiens
  misc_RNA (1)...(19): siRNA sense strand
acagacaaggccagaguuu

SEQ ID NO: 2438336 - RNA, 19 nt, Homo sapiens
  misc_RNA (1)...(19): siRNA sense strand
ugaacaaucaggaagauca

SEQ ID NO: 2438337 - RNA, 19 nt, Homo sapiens
  misc_RNA (1)...(19): siRNA sense strand
gccacugggcagaggaaga

SEQ ID NO: 2438338 - RNA, 19 nt, Homo sapiens
  misc_RNA (1)...(19): siRNA sense strand
ggaauuaggcuguggucag

SEQ ID NO: 2438339 - RNA, 19 nt, Homo sapiens
  misc_RNA (1)...(19): siRNA sense strand
auggucaaauggacagaaa

SEQ ID NO: 2438340 - RNA, 19 nt, Homo sapiens
  misc_RNA (1)...(19): siRNA sense strand
agacaaggccagagcuauc

SEQ ID NO: 2438341 - RNA, 19 nt, Homo sapiens
  misc_RNA (1)...(19): siRNA sense strand
gggagagacuggcaaucau

SEQ ID NO: 2438342 - RNA, 19 nt, Homo sapiens
  misc_RNA (1)...(19): siRNA sense strand
cugagagacaagacggaga

SEQ ID NO: 2438343 - RNA, 19 nt, Homo sapiens
  misc_RNA (1)...(19): siRNA sense strand
gagagacaagacagagauu

SEQ ID NO: 2438344 - RNA, 19 nt, Homo sapiens
  misc_RNA (1)...(19): siRNA sense strand
gagagacaagacagagauu

SEQ ID NO: 2438345 - RNA, 19 nt, Homo sapiens
  misc_RNA (1)...(19): siRNA sense strand
agucagagagacaaaguca

SEQ ID NO: 2438346 - RNA, 19 nt, Homo sapiens
  misc_RNA (1)...(19): siRNA sense strand
auaaagaugagcagaacca

SEQ ID NO: 2438347 - RNA, 19 nt, Homo sapiens
  misc_RNA (1)...(19): siRNA sense strand
ggcaaacccaugaagacaa

SEQ ID NO: 2438348 - RNA, 19 nt, Homo sapiens
  misc_RNA (1)...(19): siRNA sense strand
aggaaacacaggcagacaa

SEQ ID NO: 2438349 - RNA, 19 nt, Homo sapiens
  misc_RNA (1)...(19): siRNA sense strand
cagacaaaucaacagaaau

SEQ ID NO: 2438350 - RNA, 19 nt, Homo sapiens
  misc_RNA (1)...(19): siRNA sense strand
agacaagaccagaguuauc

SEQ ID NO: 2438351 - RNA, 19 nt, Homo sapiens
  misc_RNA (1)...(19): siRNA sense strand
agacaagaccagaguuauc

SEQ ID NO: 2438352 - RNA, 19 nt, Homo sapiens
  misc_RNA (1)...(19): siRNA sense strand
ccaacaucaccaacacaaa

SEQ ID NO: 2438353 - RNA, 19 nt, Homo sapiens
  misc_RNA (1)...(19): siRNA sense strand
acaaauccaacaagaaaga

SEQ ID NO: 2438354 - RNA, 19 nt, Homo sapiens
  misc_RNA (1)...(19): siRNA sense strand
ccaacaagaaagaccacuu

SEQ ID NO: 2438355 - RNA, 19 nt, Homo sapiens
  misc_RNA (1)...(19): siRNA sense strand
caaaugacccagagacugu

SEQ ID NO: 2438356 - RNA, 19 nt, Homo sapiens
  misc_RNA (1)...(19): siRNA sense strand
cagagacgagacagacaaa

SEQ ID NO: 2438357 - RNA, 19 nt, Homo sapiens
  misc_RNA (1)...(19): siRNA sense strand
ggacagacaaggccagagu

SEQ ID NO: 2438358 - RNA, 19 nt, Homo sapiens
  misc_RNA (1)...(19): siRNA sense strand
ggacagacaaggccagagu

SEQ ID NO: 2438359 - RNA, 19 nt, Homo sapiens
  misc_RNA (1)...(19): siRNA sense strand
cagagacgagacaggcaaa

SEQ ID NO: 2438360 - RNA, 19 nt, Homo sapiens
  misc_RNA (1)...(19): siRNA sense strand
cccaugaagacaagcagaa

SEQ ID NO: 2438361 - RNA, 19 nt, Homo sapiens
  misc_RNA (1)...(19): siRNA sense strand
cagagacgagacaggcaaa

SEQ ID NO: 2438362 - RNA, 19 nt, Homo sapiens
  misc_RNA (1)...(19): siRNA sense strand
agaccagaguuaucauuau

SEQ ID NO: 2438363 - RNA, 19 nt, Homo sapiens
  misc_RNA (1)...(19): siRNA sense strand
ggucagacagagagacaag

SEQ ID NO: 2438364 - RNA, 19 nt, Homo sapiens
  misc_RNA (1)...(19): siRNA sense strand
agaccagaguuaucauuau

SEQ ID NO: 2438365 - RNA, 19 nt, Homo sapiens
  misc_RNA (1)...(19): siRNA sense strand
caaacuugggauagacaca

SEQ ID NO: 2438366 - RNA, 19 nt, Homo sapiens
  misc_RNA (1)...(19): siRNA sense strand
ugauugacguauuccacaa

SEQ ID NO: 2438367 - RNA, 19 nt, Homo sapiens
  misc_RNA (1)...(19): siRNA sense strand
augaagacgagcagaacca

SEQ ID NO: 2438368 - RNA, 19 nt, Homo sapiens
  misc_RNA (1)...(19): siRNA sense strand
ucuugaaccucuuagauca

SEQ ID NO: 2438369 - RNA, 19 nt, Homo sapiens
  misc_RNA (1)...(19): siRNA sense strand
cagacagaggcacgaggaa

SEQ ID NO: 2438370 - RNA, 19 nt, Homo sapiens
  misc_RNA (1)...(19): siRNA sense strand
agacagacaaggucagagu

SEQ ID NO: 2438371 - RNA, 19 nt, Homo sapiens
  misc_RNA (1)...(19): siRNA sense strand
agacagagagacaaggcca

SEQ ID NO: 2438372 - RNA, 19 nt, Homo sapiens
  misc_RNA (1)...(19): siRNA sense strand
acaacaaucugaaacacuu

SEQ ID NO: 2438373 - RNA, 19 nt, Homo sapiens
  misc_RNA (1)...(19): siRNA sense strand
agacaaacagacaaggcca

SEQ ID NO: 2438374 - RNA, 19 nt, Homo sapiens
  misc_RNA (1)...(19): siRNA sense strand
aucugaaacacuuggacaa

SEQ ID NO: 2438375 - RNA, 19 nt, Homo sapiens
  misc_RNA (1)...(19): siRNA sense strand
cuaucauaagcuagacaau

SEQ ID NO: 2438376 - RNA, 19 nt, Homo sapiens
  misc_RNA (1)...(19): siRNA sense strand
uugaucagucagagagaca

SEQ ID NO: 2438377 - RNA, 19 nt, Homo sapiens
  misc_RNA (1)...(19): siRNA sense strand
gaaugcagauccugggagu

SEQ ID NO: 2438378 - RNA, 19 nt, Homo sapiens
  misc_RNA (1)...(19): siRNA sense strand
ucucgaaacucacgcgcaa

SEQ ID NO: 2438379 - RNA, 19 nt, Homo sapiens
  misc_RNA (1)...(19): siRNA sense strand
aagaagaccuggaacagca

SEQ ID NO: 2438380 - RNA, 19 nt, Homo sapiens
  misc_RNA (1)...(19): siRNA sense strand
acagauacaagcaggagau

SEQ ID NO: 2438381 - RNA, 19 nt, Homo sapiens
  misc_RNA (1)...(19): siRNA sense strand
cgauguuggcguggaggua

SEQ ID NO: 2438382 - RNA, 19 nt, Homo sapiens
  misc_RNA (1)...(19): siRNA sense strand
cggccaggaucgaggacau

SEQ ID NO: 2438383 - RNA, 19 nt, Homo sapiens
  misc_RNA (1)...(19): siRNA sense strand
ucgauaagcugaaggagga

SEQ ID NO: 2438384 - RNA, 19 nt, Homo sapiens
  misc_RNA (1)...(19): siRNA sense strand
agcagauggcugaggacaa

SEQ ID NO: 2438385 - RNA, 19 nt, Homo sapiens
  misc_RNA (1)...(19): siRNA sense strand
agaagcuggccgagaagaa

SEQ ID NO: 2438386 - RNA, 19 nt, Homo sapiens
  misc_RNA (1)...(19): siRNA sense strand
uggccaaacaggaggugau

SEQ ID NO: 2438387 - RNA, 19 nt, Homo sapiens
  misc_RNA (1)...(19): siRNA sense strand
gagcagcugcagagggagu

SEQ ID NO: 2438388 - RNA, 19 nt, Homo sapiens
  misc_RNA (1)...(19): siRNA sense strand
aggcggacuuccaggcuga

SEQ ID NO: 2438389 - RNA, 19 nt, Homo sapiens
  misc_RNA (1)...(19): siRNA sense strand
uggagcagcugcagaggga

SEQ ID NO: 2438390 - RNA, 19 nt, Homo sapiens
  misc_RNA (1)...(19): siRNA sense strand
ccagccagagggaggagaa

SEQ ID NO: 2438391 - RNA, 19 nt, Homo sapiens
  misc_RNA (1)...(19): siRNA sense strand
cguacugggcgaagagucu

SEQ ID NO: 2438392 - RNA, 19 nt, Homo sapiens
  misc_RNA (1)...(19): siRNA sense strand
ggaggagaaucaagagcuc

SEQ ID NO: 2438393 - RNA, 19 nt, Homo sapiens
  misc_RNA (1)...(19): siRNA sense strand
ugaagaggcagaaggagca

SEQ ID NO: 2438394 - RNA, 19 nt, Homo sapiens
  misc_RNA (1)...(19): siRNA sense strand
gccagagggaggagaagga

SEQ ID NO: 2438395 - RNA, 19 nt, Homo sapiens
  misc_RNA (1)...(19): siRNA sense strand
uggaagaucucaaacagca

SEQ ID NO: 2438396 - RNA, 19 nt, Homo sapiens
  misc_RNA (1)...(19): siRNA sense strand
cacaaacgcuguaggccua

SEQ ID NO: 2438397 - RNA, 19 nt, Homo sapiens
  misc_RNA (1)...(19): siRNA sense strand
ccuauaaaugucugcacaa

SEQ ID NO: 2438398 - RNA, 19 nt, Homo sapiens
  misc_RNA (1)...(19): siRNA sense strand
gcacaaacgcuguaggccu

SEQ ID NO: 2438399 - RNA, 19 nt, Homo sapiens
  misc_RNA (1)...(19): siRNA sense strand
aaacagaauuauugacgac

SEQ ID NO: 2438400 - RNA, 19 nt, Homo sapiens
  misc_RNA (1)...(19): siRNA sense strand
aggaggaggaggagggcua

SEQ ID NO: 2438401 - RNA, 19 nt, Homo sapiens
  misc_RNA (1)...(19): siRNA sense strand
aggaagaggucgaggcgcu

SEQ ID NO: 2438402 - RNA, 19 nt, Homo sapiens
  misc_RNA (1)...(19): siRNA sense strand
aggaggaggaggaggagga

SEQ ID NO: 2438403 - RNA, 19 nt, Homo sapiens
  misc_RNA (1)...(19): siRNA sense strand
aggaggaggaggaggagga

SEQ ID NO: 2438404 - RNA, 19 nt, Homo sapiens
  misc_RNA (1)...(19): siRNA sense strand
aggaggaggaggaggagga

SEQ ID NO: 2438405 - RNA, 19 nt, Homo sapiens
  misc_RNA (1)...(19): siRNA sense strand
gcacuuugcuuccaggaga

SEQ ID NO: 2438406 - RNA, 19 nt, Homo sapiens
  misc_RNA (1)...(19): siRNA sense strand
cauucagcuuugagaacuu

SEQ ID NO: 2438407 - RNA, 19 nt, Homo sapiens
  misc_RNA (1)...(19): siRNA sense strand
aggucaggguggugaagga

SEQ ID NO: 2438408 - RNA, 19 nt, Homo sapiens
  misc_RNA (1)...(19): siRNA sense strand
gcgacugguuugagagccu

SEQ ID NO: 2438409 - RNA, 19 nt, Homo sapiens
  misc_RNA (1)...(19): siRNA sense strand
gaugagagaugccagccua

SEQ ID NO: 2438410 - RNA, 19 nt, Homo sapiens
  misc_RNA (1)...(19): siRNA sense strand
ucgaggaggaggaggagga

SEQ ID NO: 2438411 - RNA, 19 nt, Homo sapiens
  misc_RNA (1)...(19): siRNA sense strand
uggaaaagaaagugcuaga

SEQ ID NO: 2438412 - RNA, 19 nt, Homo sapiens
  misc_RNA (1)...(19): siRNA sense strand
cgaugaaagcuuuggggca

SEQ ID NO: 2438413 - RNA, 19 nt, Homo sapiens
  misc_RNA (1)...(19): siRNA sense strand
aggaggaagcggugaccca

SEQ ID NO: 2438414 - RNA, 19 nt, Homo sapiens
  misc_RNA (1)...(19): siRNA sense strand
cggagucggcugaagguca

SEQ ID NO: 2438415 - RNA, 19 nt, Homo sapiens
  misc_RNA (1)...(19): siRNA sense strand
gcuuuggggcagugaagaa

SEQ ID NO: 2438416 - RNA, 19 nt, Homo sapiens
  misc_RNA (1)...(19): siRNA sense strand
ccgcagucgagcugaagau

SEQ ID NO: 2438417 - RNA, 19 nt, Homo sapiens
  misc_RNA (1)...(19): siRNA sense strand
acggaagagacaagagauc

SEQ ID NO: 2438418 - RNA, 19 nt, Homo sapiens
  misc_RNA (1)...(19): siRNA sense strand
gagacauaaucguggccau

SEQ ID NO: 2438419 - RNA, 19 nt, Homo sapiens
  misc_RNA (1)...(19): siRNA sense strand
augccgaggcccagagcaa

SEQ ID NO: 2438420 - RNA, 19 nt, Homo sapiens
  misc_RNA (1)...(19): siRNA sense strand
acauaaucguggccaucaa

SEQ ID NO: 2438421 - RNA, 19 nt, Homo sapiens
  misc_RNA (1)...(19): siRNA sense strand
gcaggaaaaucgcgaggga

SEQ ID NO: 2438422 - RNA, 19 nt, Homo sapiens
  misc_RNA (1)...(19): siRNA sense strand
gagacauaaucguggccau

SEQ ID NO: 2438423 - RNA, 19 nt, Homo sapiens
  misc_RNA (1)...(19): siRNA sense strand
augccgaggcccagagcaa

SEQ ID NO: 2438424 - RNA, 19 nt, Homo sapiens
  misc_RNA (1)...(19): siRNA sense strand
acauaaucguggccaucaa

SEQ ID NO: 2438425 - RNA, 19 nt, Homo sapiens
  misc_RNA (1)...(19): siRNA sense strand
gcaggaaaaucgcgaggga

SEQ ID NO: 2438426 - RNA, 19 nt, Homo sapiens
  misc_RNA (1)...(19): siRNA sense strand
gagacauaaucguggccau

SEQ ID NO: 2438427 - RNA, 19 nt, Homo sapiens
  misc_RNA (1)...(19): siRNA sense strand
augccgaggcccagagcaa

SEQ ID NO: 2438428 - RNA, 19 nt, Homo sapiens
  misc_RNA (1)...(19): siRNA sense strand
acauaaucguggccaucaa

SEQ ID NO: 2438429 - RNA, 19 nt, Homo sapiens
  misc_RNA (1)...(19): siRNA sense strand
gcaggaaaaucgcgaggga

SEQ ID NO: 2438430 - RNA, 19 nt, Homo sapiens
  misc_RNA (1)...(19): siRNA sense strand
acagaagaguuuagaggca

SEQ ID NO: 2438431 - RNA, 19 nt, Homo sapiens
  misc_RNA (1)...(19): siRNA sense strand
gagagaugggcgauauaua

SEQ ID NO: 2438432 - RNA, 19 nt, Homo sapiens
  misc_RNA (1)...(19): siRNA sense strand
cagaagaguuuagaggcaa

SEQ ID NO: 2438433 - RNA, 19 nt, Homo sapiens
  misc_RNA (1)...(19): siRNA sense strand
gagaugggcgauauauaua

SEQ ID NO: 2438434 - RNA, 19 nt, Homo sapiens
  misc_RNA (1)...(19): siRNA sense strand
acaaaagaaaucuggagaa

SEQ ID NO: 2438435 - RNA, 19 nt, Homo sapiens
  misc_RNA (1)...(19): siRNA sense strand
ugaagagagaugggcgaua

SEQ ID NO: 2438436 - RNA, 19 nt, Homo sapiens
  misc_RNA (1)...(19): siRNA sense strand
agaaaagggcuucgcacaa

SEQ ID NO: 2438437 - RNA, 19 nt, Homo sapiens
  misc_RNA (1)...(19): siRNA sense strand
aagagagaugggcgauaua

SEQ ID NO: 2438438 - RNA, 19 nt, Homo sapiens
  misc_RNA (1)...(19): siRNA sense strand
caggauuggauguggucuu

SEQ ID NO: 2438439 - RNA, 19 nt, Homo sapiens
  misc_RNA (1)...(19): siRNA sense strand
ccuuaaugaagauccagaa

SEQ ID NO: 2438440 - RNA, 19 nt, Homo sapiens
  misc_RNA (1)...(19): siRNA sense strand
auguaaagaaugugggaaa

SEQ ID NO: 2438441 - RNA, 19 nt, Homo sapiens
  misc_RNA (1)...(19): siRNA sense strand
guguaaggaaugugggaaa

SEQ ID NO: 2438442 - RNA, 19 nt, Homo sapiens
  misc_RNA (1)...(19): siRNA sense strand
augcaagauaugugggaaa

SEQ ID NO: 2438443 - RNA, 19 nt, Homo sapiens
  misc_RNA (1)...(19): siRNA sense strand
ggguaauuguuauggaaaa

SEQ ID NO: 2438444 - RNA, 19 nt, Homo sapiens
  misc_RNA (1)...(19): siRNA sense strand
gacuaagaaaugugggaaa

SEQ ID NO: 2438445 - RNA, 19 nt, Homo sapiens
  misc_RNA (1)...(19): siRNA sense strand
auguaaagaauguggaaga

SEQ ID NO: 2438446 - RNA, 19 nt, Homo sapiens
  misc_RNA (1)...(19): siRNA sense strand
aguucagaauggagggaau

SEQ ID NO: 2438447 - RNA, 19 nt, Homo sapiens
  misc_RNA (1)...(19): siRNA sense strand
aggcuacaguggauggaaa

SEQ ID NO: 2438448 - RNA, 19 nt, Homo sapiens
  misc_RNA (1)...(19): siRNA sense strand
guggaagauccuuuagaaa

SEQ ID NO: 2438449 - RNA, 19 nt, Homo sapiens
  misc_RNA (1)...(19): siRNA sense strand
ccuaaguagacaugaaaga

SEQ ID NO: 2438450 - RNA, 19 nt, Homo sapiens
  misc_RNA (1)...(19): siRNA sense strand
aguucauacaggaaagaaa

SEQ ID NO: 2438451 - RNA, 19 nt, Homo sapiens
  misc_RNA (1)...(19): siRNA sense strand
cccuaugaaugcaaggaua

SEQ ID NO: 2438452 - RNA, 19 nt, Homo sapiens
  misc_RNA (1)...(19): siRNA sense strand
acuaagaaaugugggaaau

SEQ ID NO: 2438453 - RNA, 19 nt, Homo sapiens
  misc_RNA (1)...(19): siRNA sense strand
aagucacaguggaaagaaa

SEQ ID NO: 2438454 - RNA, 19 nt, Homo sapiens
  misc_RNA (1)...(19): siRNA sense strand
gggaauacuucugagggua

SEQ ID NO: 2438455 - RNA, 19 nt, Homo sapiens
  misc_RNA (1)...(19): siRNA sense strand
ccuaugaaugcaaggauau

SEQ ID NO: 2438456 - RNA, 19 nt, Homo sapiens
  misc_RNA (1)...(19): siRNA sense strand
acacaugagaguucagaau

SEQ ID NO: 2438457 - RNA, 19 nt, Homo sapiens
  misc_RNA (1)...(19): siRNA sense strand
guguacuuacugugggaaa

SEQ ID NO: 2438458 - RNA, 19 nt, Homo sapiens
  misc_RNA (1)...(19): siRNA sense strand
acgccuaaguagacaugaa

SEQ ID NO: 2438459 - RNA, 19 nt, Homo sapiens
  misc_RNA (1)...(19): siRNA sense strand
auguaaggaauguggaaaa

SEQ ID NO: 2438460 - RNA, 19 nt, Homo sapiens
  misc_RNA (1)...(19): siRNA sense strand
cccuaugaauguaaggaau

SEQ ID NO: 2438461 - RNA, 19 nt, Homo sapiens
  misc_RNA (1)...(19): siRNA sense strand
aacucauaccggagagaaa

SEQ ID NO: 2438462 - RNA, 19 nt, Homo sapiens
  misc_RNA (1)...(19): siRNA sense strand
guucagaauggagggaaua

SEQ ID NO: 2438463 - RNA, 19 nt, Homo sapiens
  misc_RNA (1)...(19): siRNA sense strand
ggagaggucuucagggaac

SEQ ID NO: 2438464 - RNA, 19 nt, Homo sapiens
  misc_RNA (1)...(19): siRNA sense strand
auacgaagucacaguggaa

SEQ ID NO: 2438465 - RNA, 19 nt, Homo sapiens
  misc_RNA (1)...(19): siRNA sense strand
acuuuaugcaccugugaaa

SEQ ID NO: 2438466 - RNA, 19 nt, Homo sapiens
  misc_RNA (1)...(19): siRNA sense strand
auguaaggaauguggccaa

SEQ ID NO: 2438467 - RNA, 19 nt, Homo sapiens
  misc_RNA (1)...(19): siRNA sense strand
ugcaaggauaugaguguua

SEQ ID NO: 2438468 - RNA, 19 nt, Homo sapiens
  misc_RNA (1)...(19): siRNA sense strand
aaucaaauauucaguggga

SEQ ID NO: 2438469 - RNA, 19 nt, Homo sapiens
  misc_RNA (1)...(19): siRNA sense strand
guggagaggucuucaggga

SEQ ID NO: 2438470 - RNA, 19 nt, Homo sapiens
  misc_RNA (1)...(19): siRNA sense strand
gaaaacucauaguggagaa

SEQ ID NO: 2438471 - RNA, 19 nt, Homo sapiens
  misc_RNA (1)...(19): siRNA sense strand
cccuaucaguguaaggaau

SEQ ID NO: 2438472 - RNA, 19 nt, Homo sapiens
  misc_RNA (1)...(19): siRNA sense strand
aggguaauuguuauggaaa

SEQ ID NO: 2438473 - RNA, 19 nt, Homo sapiens
  misc_RNA (1)...(19): siRNA sense strand
aagaacucacacuggaaua

SEQ ID NO: 2438474 - RNA, 19 nt, Homo sapiens
  misc_RNA (1)...(19): siRNA sense strand
acaaaugacaagaggcuac

SEQ ID NO: 2438475 - RNA, 19 nt, Homo sapiens
  misc_RNA (1)...(19): siRNA sense strand
aaauguaaggaauguggaa

SEQ ID NO: 2438476 - RNA, 19 nt, Homo sapiens
  misc_RNA (1)...(19): siRNA sense strand
gcauacaagaauucacaca

SEQ ID NO: 2438477 - RNA, 19 nt, Homo sapiens
  misc_RNA (1)...(19): siRNA sense strand
uguaaagaauguggaagau

SEQ ID NO: 2438478 - RNA, 19 nt, Homo sapiens
  misc_RNA (1)...(19): siRNA sense strand
ggauggaaacucugugacu

SEQ ID NO: 2438479 - RNA, 19 nt, Homo sapiens
  misc_RNA (1)...(19): siRNA sense strand
cuguaagaauuguggagag

SEQ ID NO: 2438480 - RNA, 19 nt, Homo sapiens
  misc_RNA (1)...(19): siRNA sense strand
aaagaaugugggaaagcau

SEQ ID NO: 2438481 - RNA, 19 nt, Homo sapiens
  misc_RNA (1)...(19): siRNA sense strand
agggaauacuucugagggu

SEQ ID NO: 2438482 - RNA, 19 nt, Homo sapiens
  misc_RNA (1)...(19): siRNA sense strand
auacaaaugacaagaggcu

SEQ ID NO: 2438483 - RNA, 19 nt, Homo sapiens
  misc_RNA (1)...(19): siRNA sense strand
ugacagugguggaggacgu

SEQ ID NO: 2438484 - RNA, 19 nt, Homo sapiens
  misc_RNA (1)...(19): siRNA sense strand
ccaagaagcuggugcgcuc

SEQ ID NO: 2438485 - RNA, 19 nt, Homo sapiens
  misc_RNA (1)...(19): siRNA sense strand
uuuccaauaaccagagaua

SEQ ID NO: 2438486 - RNA, 19 nt, Homo sapiens
  misc_RNA (1)...(19): siRNA sense strand
ggcuaguggccaugcacaa

SEQ ID NO: 2438487 - RNA, 19 nt, Homo sapiens
  misc_RNA (1)...(19): siRNA sense strand
aaggagugucggagaugua

SEQ ID NO: 2438488 - RNA, 19 nt, Homo sapiens
  misc_RNA (1)...(19): siRNA sense strand
uccaauaaccagagauacu

SEQ ID NO: 2438489 - RNA, 19 nt, Homo sapiens
  misc_RNA (1)...(19): siRNA sense strand
ccgcaaucaagcaggguuu

SEQ ID NO: 2438490 - RNA, 19 nt, Homo sapiens
  misc_RNA (1)...(19): siRNA sense strand
acugaagacgagaggauuu

SEQ ID NO: 2438491 - RNA, 19 nt, Homo sapiens
  misc_RNA (1)...(19): siRNA sense strand
ggugcaugcuggugagcga

SEQ ID NO: 2438492 - RNA, 19 nt, Homo sapiens
  misc_RNA (1)...(19): siRNA sense strand
uaacaaaguuggaaaggag

SEQ ID NO: 2438493 - RNA, 19 nt, Homo sapiens
  misc_RNA (1)...(19): siRNA sense strand
gcaaugagaugaacaccga

SEQ ID NO: 2438494 - RNA, 19 nt, Homo sapiens
  misc_RNA (1)...(19): siRNA sense strand
ccgacaucauccuggacau

SEQ ID NO: 2438495 - RNA, 19 nt, Homo sapiens
  misc_RNA (1)...(19): siRNA sense strand
acucaguggcggaccgaga

SEQ ID NO: 2438496 - RNA, 19 nt, Homo sapiens
  misc_RNA (1)...(19): siRNA sense strand
gcugugagguggaugucga

SEQ ID NO: 2438497 - RNA, 19 nt, Homo sapiens
  misc_RNA (1)...(19): siRNA sense strand
cagcuguggcggacaugaa

SEQ ID NO: 2438498 - RNA, 19 nt, Homo sapiens
  misc_RNA (1)...(19): siRNA sense strand
cauugagaguagagcagaa

SEQ ID NO: 2438499 - RNA, 19 nt, Homo sapiens
  misc_RNA (1)...(19): siRNA sense strand
cauugaugugguagagaaa

SEQ ID NO: 2438500 - RNA, 19 nt, Homo sapiens
  misc_RNA (1)...(19): siRNA sense strand
aguugaaaggugugaaaca

SEQ ID NO: 2438501 - RNA, 19 nt, Homo sapiens
  misc_RNA (1)...(19): siRNA sense strand
cauacaggacauuggacua

SEQ ID NO: 2438502 - RNA, 19 nt, Homo sapiens
  misc_RNA (1)...(19): siRNA sense strand
ccgccuuaguucaguggaa

SEQ ID NO: 2438503 - RNA, 19 nt, Homo sapiens
  misc_RNA (1)...(19): siRNA sense strand
acaccaguauggagcgcua

SEQ ID NO: 2438504 - RNA, 19 nt, Homo sapiens
  misc_RNA (1)...(19): siRNA sense strand
uguaauagaugcugagccu

SEQ ID NO: 2438505 - RNA, 19 nt, Homo sapiens
  misc_RNA (1)...(19): siRNA sense strand
augcagggacccaggacaa

SEQ ID NO: 2438506 - RNA, 19 nt, Homo sapiens
  misc_RNA (1)...(19): siRNA sense strand
ugagaguagagcagaaaga

SEQ ID NO: 2438507 - RNA, 19 nt, Homo sapiens
  misc_RNA (1)...(19): siRNA sense strand
uugcaggauaugaugguaa

SEQ ID NO: 2438508 - RNA, 19 nt, Homo sapiens
  misc_RNA (1)...(19): siRNA sense strand
gcgacgaaauucaggugga

SEQ ID NO: 2438509 - RNA, 19 nt, Homo sapiens
  misc_RNA (1)...(19): siRNA sense strand
gcguucuggugcaggagua

SEQ ID NO: 2438510 - RNA, 19 nt, Homo sapiens
  misc_RNA (1)...(19): siRNA sense strand
gucaaggagagguggaaaa

SEQ ID NO: 2438511 - RNA, 19 nt, Homo sapiens
  misc_RNA (1)...(19): siRNA sense strand
cccaaagacauaaugacaa

SEQ ID NO: 2438512 - RNA, 19 nt, Homo sapiens
  misc_RNA (1)...(19): siRNA sense strand
ccaagaaagagcgggaaga

SEQ ID NO: 2438513 - RNA, 19 nt, Homo sapiens
  misc_RNA (1)...(19): siRNA sense strand
cgggaagaauccuugccua

SEQ ID NO: 2438514 - RNA, 19 nt, Homo sapiens
  misc_RNA (1)...(19): siRNA sense strand
ucaguugaaaggugugaaa

SEQ ID NO: 2438515 - RNA, 19 nt, Homo sapiens
  misc_RNA (1)...(19): siRNA sense strand
gguauaucacagauguaau

SEQ ID NO: 2438516 - RNA, 19 nt, Homo sapiens
  misc_RNA (1)...(19): siRNA sense strand
cgcacugauuccuggacaa

SEQ ID NO: 2438517 - RNA, 19 nt, Homo sapiens
  misc_RNA (1)...(19): siRNA sense strand
uaaucaagugcgacgaaau

SEQ ID NO: 2438518 - RNA, 19 nt, Homo sapiens
  misc_RNA (1)...(19): siRNA sense strand
aagaaagagcgggaagaau

SEQ ID NO: 2438519 - RNA, 19 nt, Homo sapiens
  misc_RNA (1)...(19): siRNA sense strand
gguggauucugaagagcca

SEQ ID NO: 2438520 - RNA, 19 nt, Homo sapiens
  misc_RNA (1)...(19): siRNA sense strand
cuacugucuaggaggauau

SEQ ID NO: 2438521 - RNA, 19 nt, Homo sapiens
  misc_RNA (1)...(19): siRNA sense strand
ccgacgaggucuugcugga

SEQ ID NO: 2438522 - RNA, 19 nt, Homo sapiens
  misc_RNA (1)...(19): siRNA sense strand
cuucuaauugccuggguau

SEQ ID NO: 2438523 - RNA, 19 nt, Homo sapiens
  misc_RNA (1)...(19): siRNA sense strand
agucaaggagagguggaaa

SEQ ID NO: 2438524 - RNA, 19 nt, Homo sapiens
  misc_RNA (1)...(19): siRNA sense strand
uugaugaagcaaagaaguu

SEQ ID NO: 2438525 - RNA, 19 nt, Homo sapiens
  misc_RNA (1)...(19): siRNA sense strand
acacagaaacgguacaugu

SEQ ID NO: 2438526 - RNA, 19 nt, Homo sapiens
  misc_RNA (1)...(19): siRNA sense strand
uggagaauguacaagaacu

SEQ ID NO: 2438527 - RNA, 19 nt, Homo sapiens
  misc_RNA (1)...(19): siRNA sense strand
aguucauucuucugaguca

SEQ ID NO: 2438528 - RNA, 19 nt, Homo sapiens
  misc_RNA (1)...(19): siRNA sense strand
cagauguaauagaugcuga

SEQ ID NO: 2438529 - RNA, 19 nt, Homo sapiens
  misc_RNA (1)...(19): siRNA sense strand
gaucuacugucuaggagga

SEQ ID NO: 2438530 - RNA, 19 nt, Homo sapiens
  misc_RNA (1)...(19): siRNA sense strand
agaugaaauugaaggccuu

SEQ ID NO: 2438531 - RNA, 19 nt, Homo sapiens
  misc_RNA (1)...(19): siRNA sense strand
ccauguuagaucuggauau

SEQ ID NO: 2438532 - RNA, 19 nt, Homo sapiens
  misc_RNA (1)...(19): siRNA sense strand
gagaugaaauugaaggccu

SEQ ID NO: 2438533 - RNA, 19 nt, Homo sapiens
  misc_RNA (1)...(19): siRNA sense strand
aaaccauagcauuggguca

SEQ ID NO: 2438534 - RNA, 19 nt, Homo sapiens
  misc_RNA (1)...(19): siRNA sense strand
aguaaagcgaauuguccaa

SEQ ID NO: 2438535 - RNA, 19 nt, Homo sapiens
  misc_RNA (1)...(19): siRNA sense strand
aggaguugccugaggagga

SEQ ID NO: 2438536 - RNA, 19 nt, Homo sapiens
  misc_RNA (1)...(19): siRNA sense strand
ccagaaucuacaggaguaa

SEQ ID NO: 2438537 - RNA, 19 nt, Homo sapiens
  misc_RNA (1)...(19): siRNA sense strand
ccuuggaacagaagaucuu

SEQ ID NO: 2438538 - RNA, 19 nt, Homo sapiens
  misc_RNA (1)...(19): siRNA sense strand
gguugauagcauuguggau

SEQ ID NO: 2438539 - RNA, 19 nt, Homo sapiens
  misc_RNA (1)...(19): siRNA sense strand
aagaaaagugcaugcagaa

SEQ ID NO: 2438540 - RNA, 19 nt, Homo sapiens
  misc_RNA (1)...(19): siRNA sense strand
cugaggaggaugaugacuu

SEQ ID NO: 2438541 - RNA, 19 nt, Homo sapiens
  misc_RNA (1)...(19): siRNA sense strand
gaugaagaaugauaggaac

SEQ ID NO: 2438542 - RNA, 19 nt, Homo sapiens
  misc_RNA (1)...(19): siRNA sense strand
aaagcauucuggauggcaa

SEQ ID NO: 2438543 - RNA, 19 nt, Homo sapiens
  misc_RNA (1)...(19): siRNA sense strand
cagaagaucuuauugugga

SEQ ID NO: 2438544 - RNA, 19 nt, Homo sapiens
  misc_RNA (1)...(19): siRNA sense strand
ugaagaugguauaaaccga

SEQ ID NO: 2438545 - RNA, 19 nt, Homo sapiens
  misc_RNA (1)...(19): siRNA sense strand
gaguaaagcgaauugucca

SEQ ID NO: 2438546 - RNA, 19 nt, Homo sapiens
  misc_RNA (1)...(19): siRNA sense strand
aaagaaaagugcaugcaga

SEQ ID NO: 2438547 - RNA, 19 nt, Homo sapiens
  misc_RNA (1)...(19): siRNA sense strand
gcauguaaaugauggguca

SEQ ID NO: 2438548 - RNA, 19 nt, Homo sapiens
  misc_RNA (1)...(19): siRNA sense strand
ggacuaacguucuggguuc

SEQ ID NO: 2438549 - RNA, 19 nt, Homo sapiens
  misc_RNA (1)...(19): siRNA sense strand
ggaugggauuugaacgcua

SEQ ID NO: 2438550 - RNA, 19 nt, Homo sapiens
  misc_RNA (1)...(19): siRNA sense strand
ccuuucuacaugagggaua

SEQ ID NO: 2438551 - RNA, 19 nt, Homo sapiens
  misc_RNA (1)...(19): siRNA sense strand
ucaaauauaaagagaggca

SEQ ID NO: 2438552 - RNA, 19 nt, Homo sapiens
  misc_RNA (1)...(19): siRNA sense strand
auucauagcaccuggccaa

SEQ ID NO: 2438553 - RNA, 19 nt, Homo sapiens
  misc_RNA (1)...(19): siRNA sense strand
ggccuugacaguagagaau

SEQ ID NO: 2438554 - RNA, 19 nt, Homo sapiens
  misc_RNA (1)...(19): siRNA sense strand
cuuuaaggacaguggcuuu

SEQ ID NO: 2438555 - RNA, 19 nt, Homo sapiens
  misc_RNA (1)...(19): siRNA sense strand
cugaagcaguggagaucuu

SEQ ID NO: 2438556 - RNA, 19 nt, Homo sapiens
  misc_RNA (1)...(19): siRNA sense strand
ugauagaagcagagauuuc

SEQ ID NO: 2438557 - RNA, 19 nt, Homo sapiens
  misc_RNA (1)...(19): siRNA sense strand
uuaagguaccugaggagaa

SEQ ID NO: 2438558 - RNA, 19 nt, Homo sapiens
  misc_RNA (1)...(19): siRNA sense strand
agaauuaacuuuugggagu

SEQ ID NO: 2438559 - RNA, 19 nt, Homo sapiens
  misc_RNA (1)...(19): siRNA sense strand
aggacagauuagaacauau

SEQ ID NO: 2438560 - RNA, 19 nt, Homo sapiens
  misc_RNA (1)...(19): siRNA sense strand
uaugcagguuauagaggaa

SEQ ID NO: 2438561 - RNA, 19 nt, Homo sapiens
  misc_RNA (1)...(19): siRNA sense strand
auguggaacugaaggcaga

SEQ ID NO: 2438562 - RNA, 19 nt, Homo sapiens
  misc_RNA (1)...(19): siRNA sense strand
caucaaauauaaagagagg

SEQ ID NO: 2438563 - RNA, 19 nt, Homo sapiens
  misc_RNA (1)...(19): siRNA sense strand
ggcaaaauguggaacugaa

SEQ ID NO: 2438564 - RNA, 19 nt, Homo sapiens
  misc_RNA (1)...(19): siRNA sense strand
ccaaaaggacagauuagaa

SEQ ID NO: 2438565 - RNA, 19 nt, Homo sapiens
  misc_RNA (1)...(19): siRNA sense strand
uguugaacucugucacaaa

SEQ ID NO: 2438566 - RNA, 19 nt, Homo sapiens
  misc_RNA (1)...(19): siRNA sense strand
cagagaagaacgauaccau

SEQ ID NO: 2438567 - RNA, 19 nt, Homo sapiens
  misc_RNA (1)...(19): siRNA sense strand
aaauauaaagagaggcauc

SEQ ID NO: 2438568 - RNA, 19 nt, Homo sapiens
  misc_RNA (1)...(19): siRNA sense strand
gcaucuuggguguugacaa

SEQ ID NO: 2438569 - RNA, 19 nt, Homo sapiens
  misc_RNA (1)...(19): siRNA sense strand
gccucagagaagaacgaua

SEQ ID NO: 2438570 - RNA, 19 nt, Homo sapiens
  misc_RNA (1)...(19): siRNA sense strand
gcgcuuagccagaucggga

SEQ ID NO: 2438571 - RNA, 19 nt, Homo sapiens
  misc_RNA (1)...(19): siRNA sense strand
augaaaaguaccuggugaa

SEQ ID NO: 2438572 - RNA, 19 nt, Homo sapiens
  misc_RNA (1)...(19): siRNA sense strand
cuggaguaccugcgacaau

SEQ ID NO: 2438573 - RNA, 19 nt, Homo sapiens
  misc_RNA (1)...(19): siRNA sense strand
aguggagaucuuaaagcaa

SEQ ID NO: 2438574 - RNA, 19 nt, Homo sapiens
  misc_RNA (1)...(19): siRNA sense strand
cuuucuacaugagggauaa

SEQ ID NO: 2438575 - RNA, 19 nt, Homo sapiens
  misc_RNA (1)...(19): siRNA sense strand
cgaacaaaggugaggguga

SEQ ID NO: 2438576 - RNA, 19 nt, Homo sapiens
  misc_RNA (1)...(19): siRNA sense strand
cugagaagaccaagggcaa

SEQ ID NO: 2438577 - RNA, 19 nt, Homo sapiens
  misc_RNA (1)...(19): siRNA sense strand
gggugagguuugagcugaa

SEQ ID NO: 2438578 - RNA, 19 nt, Homo sapiens
  misc_RNA (1)...(19): siRNA sense strand
gcacaguggacaugagcau

SEQ ID NO: 2438579 - RNA, 19 nt, Homo sapiens
  misc_RNA (1)...(19): siRNA sense strand
ccgccaaccuggauggaga

SEQ ID NO: 2438580 - RNA, 19 nt, Homo sapiens
  misc_RNA (1)...(19): siRNA sense strand
aagaaauccacgugggaga

SEQ ID NO: 2438581 - RNA, 19 nt, Homo sapiens
  misc_RNA (1)...(19): siRNA sense strand
cauacaugacaacgggaaa

SEQ ID NO: 2438582 - RNA, 19 nt, Homo sapiens
  misc_RNA (1)...(19): siRNA sense strand
cagaugugggugugggaau

SEQ ID NO: 2438583 - RNA, 19 nt, Homo sapiens
  misc_RNA (1)...(19): siRNA sense strand
acagagaauaagaugguuu

SEQ ID NO: 2438584 - RNA, 19 nt, Homo sapiens
  misc_RNA (1)...(19): siRNA sense strand
acacaauguucgugggccu

SEQ ID NO: 2438585 - RNA, 19 nt, Homo sapiens
  misc_RNA (1)...(19): siRNA sense strand
ggagaaggugagugagugu

SEQ ID NO: 2438586 - RNA, 19 nt, Homo sapiens
  misc_RNA (1)...(19): siRNA sense strand
agaucaacgucuacaccaa

SEQ ID NO: 2438587 - RNA, 19 nt, Homo sapiens
  misc_RNA (1)...(19): siRNA sense strand
aggcagacucggaggagga

SEQ ID NO: 2438588 - RNA, 19 nt, Homo sapiens
  misc_RNA (1)...(19): siRNA sense strand
gcuccgaccacaagaucaa

SEQ ID NO: 2438589 - RNA, 19 nt, Homo sapiens
  misc_RNA (1)...(19): siRNA sense strand
cggugaagacgauagaaga

SEQ ID NO: 2438590 - RNA, 19 nt, Homo sapiens
  misc_RNA (1)...(19): siRNA sense strand
ucgaaugcgagaagccaaa

SEQ ID NO: 2438591 - RNA, 19 nt, Homo sapiens
  misc_RNA (1)...(19): siRNA sense strand
ccugaggaguccaagguga

SEQ ID NO: 2438592 - RNA, 19 nt, Homo sapiens
  misc_RNA (1)...(19): siRNA sense strand
cagcagggaagaaaagaaa

SEQ ID NO: 2438593 - RNA, 19 nt, Homo sapiens
  misc_RNA (1)...(19): siRNA sense strand
gcagcuugcagauggacaa

SEQ ID NO: 2438594 - RNA, 19 nt, Homo sapiens
  misc_RNA (1)...(19): siRNA sense strand
cagacuacuuauaggagca

SEQ ID NO: 2438595 - RNA, 19 nt, Homo sapiens
  misc_RNA (1)...(19): siRNA sense strand
acgcaggacaugaaaccaa

SEQ ID NO: 2438596 - RNA, 19 nt, Homo sapiens
  misc_RNA (1)...(19): siRNA sense strand
ccagguaccaagaggcaga

SEQ ID NO: 2438597 - RNA, 19 nt, Homo sapiens
  misc_RNA (1)...(19): siRNA sense strand
guuaggugccacugggauu

SEQ ID NO: 2438598 - RNA, 19 nt, Homo sapiens
  misc_RNA (1)...(19): siRNA sense strand
ccugcaaacugcuggacca

SEQ ID NO: 2438599 - RNA, 19 nt, Homo sapiens
  misc_RNA (1)...(19): siRNA sense strand
ggcgguaucaagagaagaa

SEQ ID NO: 2438600 - RNA, 19 nt, Homo sapiens
  misc_RNA (1)...(19): siRNA sense strand
gcaugauccagguggcaga

SEQ ID NO: 2438601 - RNA, 19 nt, Homo sapiens
  misc_RNA (1)...(19): siRNA sense strand
gcaaacugcuggaccacga

SEQ ID NO: 2438602 - RNA, 19 nt, Homo sapiens
  misc_RNA (1)...(19): siRNA sense strand
acucaguggucauggaucu

SEQ ID NO: 2438603 - RNA, 19 nt, Homo sapiens
  misc_RNA (1)...(19): siRNA sense strand
ccauucgccuggagaccaa

SEQ ID NO: 2438604 - RNA, 19 nt, Homo sapiens
  misc_RNA (1)...(19): siRNA sense strand
ccucgugaucgaugggaga

SEQ ID NO: 2438605 - RNA, 19 nt, Homo sapiens
  misc_RNA (1)...(19): siRNA sense strand
gccaacaaguccagccaca

SEQ ID NO: 2438606 - RNA, 19 nt, Homo sapiens
  misc_RNA (1)...(19): siRNA sense strand
ugaccaacccgcagcucua

SEQ ID NO: 2438607 - RNA, 19 nt, Homo sapiens
  misc_RNA (1)...(19): siRNA sense strand
gggaccugugggaggacua

SEQ ID NO: 2438608 - RNA, 19 nt, Homo sapiens
  misc_RNA (1)...(19): siRNA sense strand
gggcuaugccacaucgaga

SEQ ID NO: 2438609 - RNA, 19 nt, Homo sapiens
  misc_RNA (1)...(19): siRNA sense strand
ucacggaagacuuaggaca

SEQ ID NO: 2438610 - RNA, 19 nt, Homo sapiens
  misc_RNA (1)...(19): siRNA sense strand
ucugaguaaagaagaguau

SEQ ID NO: 2438611 - RNA, 19 nt, Homo sapiens
  misc_RNA (1)...(19): siRNA sense strand
gagccaaugaugucagcau

SEQ ID NO: 2438612 - RNA, 19 nt, Homo sapiens
  misc_RNA (1)...(19): siRNA sense strand
guuguaugacgaagaaaca

SEQ ID NO: 2438613 - RNA, 19 nt, Homo sapiens
  misc_RNA (1)...(19): siRNA sense strand
ugagaagaccaagggcaaa

SEQ ID NO: 2438614 - RNA, 19 nt, Homo sapiens
  misc_RNA (1)...(19): siRNA sense strand
cagaagagcauggugguga

SEQ ID NO: 2438615 - RNA, 19 nt, Homo sapiens
  misc_RNA (1)...(19): siRNA sense strand
ggacggagcagcuugcaga

SEQ ID NO: 2438616 - RNA, 19 nt, Homo sapiens
  misc_RNA (1)...(19): siRNA sense strand
gaaagaaauccacguggga

SEQ ID NO: 2438617 - RNA, 19 nt, Homo sapiens
  misc_RNA (1)...(19): siRNA sense strand
cuggagaaggugagugagu

SEQ ID NO: 2438618 - RNA, 19 nt, Homo sapiens
  misc_RNA (1)...(19): siRNA sense strand
gggccgacucaguggucau

SEQ ID NO: 2438619 - RNA, 19 nt, Homo sapiens
  misc_RNA (1)...(19): siRNA sense strand
ggccagaacauggaggaau

SEQ ID NO: 2438620 - RNA, 19 nt, Homo sapiens
  misc_RNA (1)...(19): siRNA sense strand
ccggaucagccacgaacaa

SEQ ID NO: 2438621 - RNA, 19 nt, Homo sapiens
  misc_RNA (1)...(19): siRNA sense strand
ccgaauccucccuggaaaa

SEQ ID NO: 2438622 - RNA, 19 nt, Homo sapiens
  misc_RNA (1)...(19): siRNA sense strand
ccaagggcaaagugagcau

SEQ ID NO: 2438623 - RNA, 19 nt, Homo sapiens
  misc_RNA (1)...(19): siRNA sense strand
gaggaguccaggagggugu

SEQ ID NO: 2438624 - RNA, 19 nt, Homo sapiens
  misc_RNA (1)...(19): siRNA sense strand
gaagaaaagaaauacguga

SEQ ID NO: 2438625 - RNA, 19 nt, Homo sapiens
  misc_RNA (1)...(19): siRNA sense strand
cuggagaggcagaugaacu

SEQ ID NO: 2438626 - RNA, 19 nt, Homo sapiens
  misc_RNA (1)...(19): siRNA sense strand
uaucaagagaagaagucau

SEQ ID NO: 2438627 - RNA, 19 nt, Homo sapiens
  misc_RNA (1)...(19): siRNA sense strand
caaaggugagggugagguu

SEQ ID NO: 2438628 - RNA, 19 nt, Homo sapiens
  misc_RNA (1)...(19): siRNA sense strand
ccgaagaugcacugugucu

SEQ ID NO: 2438629 - RNA, 19 nt, Homo sapiens
  misc_RNA (1)...(19): siRNA sense strand
cugcuagaccagugccuau

SEQ ID NO: 2438630 - RNA, 19 nt, Homo sapiens
  misc_RNA (1)...(19): siRNA sense strand
agcaagaagaagacagaaa

SEQ ID NO: 2438631 - RNA, 19 nt, Homo sapiens
  misc_RNA (1)...(19): siRNA sense strand
cuguaauauuuguggugaa

SEQ ID NO: 2438632 - RNA, 19 nt, Homo sapiens
  misc_RNA (1)...(19): siRNA sense strand
ccucagaaccagacaugaa

SEQ ID NO: 2438633 - RNA, 19 nt, Homo sapiens
  misc_RNA (1)...(19): siRNA sense strand
cggaauuauugaagcacuu

SEQ ID NO: 2438634 - RNA, 19 nt, Homo sapiens
  misc_RNA (1)...(19): siRNA sense strand
ucagauaacaagaaagaca

SEQ ID NO: 2438635 - RNA, 19 nt, Homo sapiens
  misc_RNA (1)...(19): siRNA sense strand
ggagaaacuugccaggaga

SEQ ID NO: 2438636 - RNA, 19 nt, Homo sapiens
  misc_RNA (1)...(19): siRNA sense strand
agauaauucuggaggauac

SEQ ID NO: 2438637 - RNA, 19 nt, Homo sapiens
  misc_RNA (1)...(19): siRNA sense strand
cuucagauaacaagaaaga

SEQ ID NO: 2438638 - RNA, 19 nt, Homo sapiens
  misc_RNA (1)...(19): siRNA sense strand
acuacgaaauauggagaua

SEQ ID NO: 2438639 - RNA, 19 nt, Homo sapiens
  misc_RNA (1)...(19): siRNA sense strand
agaaacuuugagaggauaa

SEQ ID NO: 2438640 - RNA, 19 nt, Homo sapiens
  misc_RNA (1)...(19): siRNA sense strand
cagauaacaagaaagacaa

SEQ ID NO: 2438641 - RNA, 19 nt, Homo sapiens
  misc_RNA (1)...(19): siRNA sense strand
ucgaacuguuauuggaauu

SEQ ID NO: 2438642 - RNA, 19 nt, Homo sapiens
  misc_RNA (1)...(19): siRNA sense strand
cgaaauauggagauagaag

SEQ ID NO: 2438643 - RNA, 19 nt, Homo sapiens
  misc_RNA (1)...(19): siRNA sense strand
aaagaggagaucugaagaa

SEQ ID NO: 2438644 - RNA, 19 nt, Homo sapiens
  misc_RNA (1)...(19): siRNA sense strand
uucagaagcugcagagaca

SEQ ID NO: 2438645 - RNA, 19 nt, Homo sapiens
  misc_RNA (1)...(19): siRNA sense strand
cagaagcugcagagacaau

SEQ ID NO: 2438646 - RNA, 19 nt, Homo sapiens
  misc_RNA (1)...(19): siRNA sense strand
caucaaggucacagucgaa

SEQ ID NO: 2438647 - RNA, 19 nt, Homo sapiens
  misc_RNA (1)...(19): siRNA sense strand
ccuacaguguggaauggaa

SEQ ID NO: 2438648 - RNA, 19 nt, Homo sapiens
  misc_RNA (1)...(19): siRNA sense strand
acaacaacaacuacgaaau

SEQ ID NO: 2438649 - RNA, 19 nt, Homo sapiens
  misc_RNA (1)...(19): siRNA sense strand
ggagaaaagcugauaugau

SEQ ID NO: 2438650 - RNA, 19 nt, Homo sapiens
  misc_RNA (1)...(19): siRNA sense strand
augcauggaaggaagguuu

SEQ ID NO: 2438651 - RNA, 19 nt, Homo sapiens
  misc_RNA (1)...(19): siRNA sense strand
aggugugaauuaugaugaa

SEQ ID NO: 2438652 - RNA, 19 nt, Homo sapiens
  misc_RNA (1)...(19): siRNA sense strand
caguccagccugaccgaaa

SEQ ID NO: 2438653 - RNA, 19 nt, Homo sapiens
  misc_RNA (1)...(19): siRNA sense strand
ggguugugguuacagaaau

SEQ ID NO: 2438654 - RNA, 19 nt, Homo sapiens
  misc_RNA (1)...(19): siRNA sense strand
gguuacagaaauuuccaaa

SEQ ID NO: 2438655 - RNA, 19 nt, Homo sapiens
  misc_RNA (1)...(19): siRNA sense strand
aguguggaauggaaguuaa

SEQ ID NO: 2438656 - RNA, 19 nt, Homo sapiens
  misc_RNA (1)...(19): siRNA sense strand
auuggaagacugugaucaa

SEQ ID NO: 2438657 - RNA, 19 nt, Homo sapiens
  misc_RNA (1)...(19): siRNA sense strand
aaacauaagcaauaccaga

SEQ ID NO: 2438658 - RNA, 19 nt, Homo sapiens
  misc_RNA (1)...(19): siRNA sense strand
cuaauuguucacauggaaa

SEQ ID NO: 2438659 - RNA, 19 nt, Homo sapiens
  misc_RNA (1)...(19): siRNA sense strand
cuuuaaaacaugaaggcuu

SEQ ID NO: 2438660 - RNA, 19 nt, Homo sapiens
  misc_RNA (1)...(19): siRNA sense strand
gaagaagacagaaagagga

SEQ ID NO: 2438661 - RNA, 19 nt, Homo sapiens
  misc_RNA (1)...(19): siRNA sense strand
acauaagcaauaccagaua

SEQ ID NO: 2438662 - RNA, 19 nt, Homo sapiens
  misc_RNA (1)...(19): siRNA sense strand
aguugucaggugugaauua

SEQ ID NO: 2438663 - RNA, 19 nt, Homo sapiens
  misc_RNA (1)...(19): siRNA sense strand
gaagaugcauggaaggaag

SEQ ID NO: 2438664 - RNA, 19 nt, Homo sapiens
  misc_RNA (1)...(19): siRNA sense strand
gaucugaagaaucaagaca

SEQ ID NO: 2438665 - RNA, 19 nt, Homo sapiens
  misc_RNA (1)...(19): siRNA sense strand
gcuuacgacgauugcuuaa

SEQ ID NO: 2438666 - RNA, 19 nt, Homo sapiens
  misc_RNA (1)...(19): siRNA sense strand
caagacaagaaauagaaga

SEQ ID NO: 2438667 - RNA, 19 nt, Homo sapiens
  misc_RNA (1)...(19): siRNA sense strand
gauugaagaugcauggaag

SEQ ID NO: 2438668 - RNA, 19 nt, Homo sapiens
  misc_RNA (1)...(19): siRNA sense strand
cuauuauucuucagaggga

SEQ ID NO: 2438669 - RNA, 19 nt, Homo sapiens
  misc_RNA (1)...(19): siRNA sense strand
aaucauuagcucuugguuu

SEQ ID NO: 2438670 - RNA, 19 nt, Homo sapiens
  misc_RNA (1)...(19): siRNA sense strand
ggguaaagugucauauugu

SEQ ID NO: 2438671 - RNA, 19 nt, Homo sapiens
  misc_RNA (1)...(19): siRNA sense strand
gcaucaaggucacagucga

SEQ ID NO: 2438672 - RNA, 19 nt, Homo sapiens
  misc_RNA (1)...(19): siRNA sense strand
cuagaaaauuccugaaaag

SEQ ID NO: 2438673 - RNA, 19 nt, Homo sapiens
  misc_RNA (1)...(19): siRNA sense strand
acaugaaagcucaccuaau

SEQ ID NO: 2438674 - RNA, 19 nt, Homo sapiens
  misc_RNA (1)...(19): siRNA sense strand
uuaccauauucuucaggaa

SEQ ID NO: 2438675 - RNA, 19 nt, Homo sapiens
  misc_RNA (1)...(19): siRNA sense strand
gaggauacaaacaacaaca

SEQ ID NO: 2438676 - RNA, 19 nt, Homo sapiens
  misc_RNA (1)...(19): siRNA sense strand
agcacaagaaggagggcaa

SEQ ID NO: 2438677 - RNA, 19 nt, Homo sapiens
  misc_RNA (1)...(19): siRNA sense strand
ugcuagagcuggagcgcga

SEQ ID NO: 2438678 - RNA, 19 nt, Homo sapiens
  misc_RNA (1)...(19): siRNA sense strand
gggcaagggcagcaaccau

SEQ ID NO: 2438679 - RNA, 19 nt, Homo sapiens
  misc_RNA (1)...(19): siRNA sense strand
gcuccgaggaugacgacga

SEQ ID NO: 2438680 - RNA, 19 nt, Homo sapiens
  misc_RNA (1)...(19): siRNA sense strand
uguccgagaagcaggugaa

SEQ ID NO: 2438681 - RNA, 19 nt, Homo sapiens
  misc_RNA (1)...(19): siRNA sense strand
acauugaagcugugagcaa

SEQ ID NO: 2438682 - RNA, 19 nt, Homo sapiens
  misc_RNA (1)...(19): siRNA sense strand
gggucaaguuugugcccau

SEQ ID NO: 2438683 - RNA, 19 nt, Homo sapiens
  misc_RNA (1)...(19): siRNA sense strand
agcaggaacuagaggaacu

SEQ ID NO: 2438684 - RNA, 19 nt, Homo sapiens
  misc_RNA (1)...(19): siRNA sense strand
uggccaugguggaggugca

SEQ ID NO: 2438685 - RNA, 19 nt, Homo sapiens
  misc_RNA (1)...(19): siRNA sense strand
uggaaagacuguugggagu

SEQ ID NO: 2438686 - RNA, 19 nt, Homo sapiens
  misc_RNA (1)...(19): siRNA sense strand
cugggaaaggagaggacaa

SEQ ID NO: 2438687 - RNA, 19 nt, Homo sapiens
  misc_RNA (1)...(19): siRNA sense strand
ccugaaggaauuuggagaa

SEQ ID NO: 2438688 - RNA, 19 nt, Homo sapiens
  misc_RNA (1)...(19): siRNA sense strand
gagcaaaguaagagaacag

SEQ ID NO: 2438689 - RNA, 19 nt, Homo sapiens
  misc_RNA (1)...(19): siRNA sense strand
caacagaauugcugagggu

SEQ ID NO: 2438690 - RNA, 19 nt, Homo sapiens
  misc_RNA (1)...(19): siRNA sense strand
guaagagaacagugaacau

SEQ ID NO: 2438691 - RNA, 19 nt, Homo sapiens
  misc_RNA (1)...(19): siRNA sense strand
ggagaaagugacaggucca

SEQ ID NO: 2438692 - RNA, 19 nt, Homo sapiens
  misc_RNA (1)...(19): siRNA sense strand
agguccaaguacagaauau

SEQ ID NO: 2438693 - RNA, 19 nt, Homo sapiens
  misc_RNA (1)...(19): siRNA sense strand
gcuagaggcuucacgggau

SEQ ID NO: 2438694 - RNA, 19 nt, Homo sapiens
  misc_RNA (1)...(19): siRNA sense strand
ucccaaaugccgaagaaau

SEQ ID NO: 2438695 - RNA, 19 nt, Homo sapiens
  misc_RNA (1)...(19): siRNA sense strand
cagguaaagagauuagcaa

SEQ ID NO: 2438696 - RNA, 19 nt, Homo sapiens
  misc_RNA (1)...(19): siRNA sense strand
cagaucagcuggaagcaga

SEQ ID NO: 2438697 - RNA, 19 nt, Homo sapiens
  misc_RNA (1)...(19): siRNA sense strand
ggaauacgccaaagaggca

SEQ ID NO: 2438698 - RNA, 19 nt, Homo sapiens
  misc_RNA (1)...(19): siRNA sense strand
ccacgagggacaagggugu

SEQ ID NO: 2438699 - RNA, 19 nt, Homo sapiens
  misc_RNA (1)...(19): siRNA sense strand
gugacagguccaacagcaa

SEQ ID NO: 2438700 - RNA, 19 nt, Homo sapiens
  misc_RNA (1)...(19): siRNA sense strand
ucggcauacuggacagauu

SEQ ID NO: 2438701 - RNA, 19 nt, Homo sapiens
  misc_RNA (1)...(19): siRNA sense strand
cguuccaggugguggucau

SEQ ID NO: 2438702 - RNA, 19 nt, Homo sapiens
  misc_RNA (1)...(19): siRNA sense strand
cuacagaacacgagggucc

SEQ ID NO: 2438703 - RNA, 19 nt, Homo sapiens
  misc_RNA (1)...(19): siRNA sense strand
gcuccaagguuuacaggcu

SEQ ID NO: 2438704 - RNA, 19 nt, Homo sapiens
  misc_RNA (1)...(19): siRNA sense strand
acagaauugcugagggucu

SEQ ID NO: 2438705 - RNA, 19 nt, Homo sapiens
  misc_RNA (1)...(19): siRNA sense strand
gggagcauuaucaggaaga

SEQ ID NO: 2438706 - RNA, 19 nt, Homo sapiens
  misc_RNA (1)...(19): siRNA sense strand
agcaagaggaauacgccaa

SEQ ID NO: 2438707 - RNA, 19 nt, Homo sapiens
  misc_RNA (1)...(19): siRNA sense strand
ccaaagaggcacagcagag

SEQ ID NO: 2438708 - RNA, 19 nt, Homo sapiens
  misc_RNA (1)...(19): siRNA sense strand
gguaaagagauuagcaagc

SEQ ID NO: 2438709 - RNA, 19 nt, Homo sapiens
  misc_RNA (1)...(19): siRNA sense strand
cugcucaagugaauggaga

SEQ ID NO: 2438710 - RNA, 19 nt, Homo sapiens
  misc_RNA (1)...(19): siRNA sense strand
aggccgaacagguccuuaa

SEQ ID NO: 2438711 - RNA, 19 nt, Homo sapiens
  misc_RNA (1)...(19): siRNA sense strand
gggagugggacuugccuga

SEQ ID NO: 2438712 - RNA, 19 nt, Homo sapiens
  misc_RNA (1)...(19): siRNA sense strand
ggggagugagcaagaggaa

SEQ ID NO: 2438713 - RNA, 19 nt, Homo sapiens
  misc_RNA (1)...(19): siRNA sense strand
cuuccugccacgagggaca

SEQ ID NO: 2438714 - RNA, 19 nt, Homo sapiens
  misc_RNA (1)...(19): siRNA sense strand
cuucuauggaccuaagauu

SEQ ID NO: 2438715 - RNA, 19 nt, Homo sapiens
  misc_RNA (1)...(19): siRNA sense strand
gcagaaagcugaaggacac

SEQ ID NO: 2438716 - RNA, 19 nt, Homo sapiens
  misc_RNA (1)...(19): siRNA sense strand
aagaaaagugggagaauga

SEQ ID NO: 2438717 - RNA, 19 nt, Homo sapiens
  misc_RNA (1)...(19): siRNA sense strand
uuacagagcaacugcguga

SEQ ID NO: 2438718 - RNA, 19 nt, Homo sapiens
  misc_RNA (1)...(19): siRNA sense strand
agcagaaagcugaaggaca

SEQ ID NO: 2438719 - RNA, 19 nt, Homo sapiens
  misc_RNA (1)...(19): siRNA sense strand
ggaagaaacuaaaugucac

SEQ ID NO: 2438720 - RNA, 19 nt, Homo sapiens
  misc_RNA (1)...(19): siRNA sense strand
augaaagaaaagugggaga

SEQ ID NO: 2438721 - RNA, 19 nt, Homo sapiens
  misc_RNA (1)...(19): siRNA sense strand
gugacauucagcuggagaa

SEQ ID NO: 2438722 - RNA, 19 nt, Homo sapiens
  misc_RNA (1)...(19): siRNA sense strand
ggagccaagugcaggagca

SEQ ID NO: 2438723 - RNA, 19 nt, Homo sapiens
  misc_RNA (1)...(19): siRNA sense strand
caucauaguugguggccga

SEQ ID NO: 2438724 - RNA, 19 nt, Homo sapiens
  misc_RNA (1)...(19): siRNA sense strand
gugaagaaaacauggauaa

SEQ ID NO: 2438725 - RNA, 19 nt, Homo sapiens
  misc_RNA (1)...(19): siRNA sense strand
ggguggaaucccauggcaa

SEQ ID NO: 2438726 - RNA, 19 nt, Homo sapiens
  misc_RNA (1)...(19): siRNA sense strand
gagaauaacuggaggggag

SEQ ID NO: 2438727 - RNA, 19 nt, Homo sapiens
  misc_RNA (1)...(19): siRNA sense strand
cgacagagcaugacccuca

SEQ ID NO: 2438728 - RNA, 19 nt, Homo sapiens
  misc_RNA (1)...(19): siRNA sense strand
ugcaagacacagugaagaa

SEQ ID NO: 2438729 - RNA, 19 nt, Homo sapiens
  misc_RNA (1)...(19): siRNA sense strand
aaacaguggcagcgcagaa

SEQ ID NO: 2438730 - RNA, 19 nt, Homo sapiens
  misc_RNA (1)...(19): siRNA sense strand
cccugaugauaaugguaua

SEQ ID NO: 2438731 - RNA, 19 nt, Homo sapiens
  misc_RNA (1)...(19): siRNA sense strand
cuacagaagaggcagacau

SEQ ID NO: 2438732 - RNA, 19 nt, Homo sapiens
  misc_RNA (1)...(19): siRNA sense strand
aguugguggccgagauauu

SEQ ID NO: 2438733 - RNA, 19 nt, Homo sapiens
  misc_RNA (1)...(19): siRNA sense strand
uaucaauggcacagcugaa

SEQ ID NO: 2438734 - RNA, 19 nt, Homo sapiens
  misc_RNA (1)...(19): siRNA sense strand
acaaaaugcuucggacaaa

SEQ ID NO: 2438735 - RNA, 19 nt, Homo sapiens
  misc_RNA (1)...(19): siRNA sense strand
ucguuuggguuaugcgaau

SEQ ID NO: 2438736 - RNA, 19 nt, Homo sapiens
  misc_RNA (1)...(19): siRNA sense strand
gcagaagagcgcagcgaag

SEQ ID NO: 2438737 - RNA, 19 nt, Homo sapiens
  misc_RNA (1)...(19): siRNA sense strand
aagcauacuuucagagggu

SEQ ID NO: 2438738 - RNA, 19 nt, Homo sapiens
  misc_RNA (1)...(19): siRNA sense strand
guuuauugguugguggauu

SEQ ID NO: 2438739 - RNA, 19 nt, Homo sapiens
  misc_RNA (1)...(19): siRNA sense strand
ucagcaaaucuauggaaaa

SEQ ID NO: 2438740 - RNA, 19 nt, Homo sapiens
  misc_RNA (1)...(19): siRNA sense strand
ugaucaucgauguggauau

SEQ ID NO: 2438741 - RNA, 19 nt, Homo sapiens
  misc_RNA (1)...(19): siRNA sense strand
agacuacagaagaggcaga

SEQ ID NO: 2438742 - RNA, 19 nt, Homo sapiens
  misc_RNA (1)...(19): siRNA sense strand
gacaaaaugcuucggacaa

SEQ ID NO: 2438743 - RNA, 19 nt, Homo sapiens
  misc_RNA (1)...(19): siRNA sense strand
gccaaguaucuauuugaaa

SEQ ID NO: 2438744 - RNA, 19 nt, Homo sapiens
  misc_RNA (1)...(19): siRNA sense strand
uguaccagguuauggccua

SEQ ID NO: 2438745 - RNA, 19 nt, Homo sapiens
  misc_RNA (1)...(19): siRNA sense strand
gugcaugccaaauaccaaa

SEQ ID NO: 2438746 - RNA, 19 nt, Homo sapiens
  misc_RNA (1)...(19): siRNA sense strand
aagaaaucguuuggguuau

SEQ ID NO: 2438747 - RNA, 19 nt, Homo sapiens
  misc_RNA (1)...(19): siRNA sense strand
agacaaaaugcuucggaca

SEQ ID NO: 2438748 - RNA, 19 nt, Homo sapiens
  misc_RNA (1)...(19): siRNA sense strand
guuuggagcaucugcaaca

SEQ ID NO: 2438749 - RNA, 19 nt, Homo sapiens
  misc_RNA (1)...(19): siRNA sense strand
cugcugugcaugccaaaua

SEQ ID NO: 2438750 - RNA, 19 nt, Homo sapiens
  misc_RNA (1)...(19): siRNA sense strand
ugugcaacguauagagaaa

SEQ ID NO: 2438751 - RNA, 19 nt, Homo sapiens
  misc_RNA (1)...(19): siRNA sense strand
gguugaacucagaggagaa

SEQ ID NO: 2438752 - RNA, 19 nt, Homo sapiens
  misc_RNA (1)...(19): siRNA sense strand
augaagaguaucaggaauu

SEQ ID NO: 2438753 - RNA, 19 nt, Homo sapiens
  misc_RNA (1)...(19): siRNA sense strand
cgggaagaaaggcagaaua

SEQ ID NO: 2438754 - RNA, 19 nt, Homo sapiens
  misc_RNA (1)...(19): siRNA sense strand
aggaguaccuggaggcuca

SEQ ID NO: 2438755 - RNA, 19 nt, Homo sapiens
  misc_RNA (1)...(19): siRNA sense strand
cguauuauguugaaggagu

SEQ ID NO: 2438756 - RNA, 19 nt, Homo sapiens
  misc_RNA (1)...(19): siRNA sense strand
aggaacaucauaauggaaa

SEQ ID NO: 2438757 - RNA, 19 nt, Homo sapiens
  misc_RNA (1)...(19): siRNA sense strand
uagcaaugaacaaggaaca

SEQ ID NO: 2438758 - RNA, 19 nt, Homo sapiens
  misc_RNA (1)...(19): siRNA sense strand
agcacauaguggagcaaau

SEQ ID NO: 2438759 - RNA, 19 nt, Homo sapiens
  misc_RNA (1)...(19): siRNA sense strand
acuccauggcacaaaguua

SEQ ID NO: 2438760 - RNA, 19 nt, Homo sapiens
  misc_RNA (1)...(19): siRNA sense strand
gcaucaacaguaugugcaa

SEQ ID NO: 2438761 - RNA, 19 nt, Homo sapiens
  misc_RNA (1)...(19): siRNA sense strand
accagaugaugaagaguau

SEQ ID NO: 2438762 - RNA, 19 nt, Homo sapiens
  misc_RNA (1)...(19): siRNA sense strand
aguacagaaaguuggauuu

SEQ ID NO: 2438763 - RNA, 19 nt, Homo sapiens
  misc_RNA (1)...(19): siRNA sense strand
gcaagcacauaguggagca

SEQ ID NO: 2438764 - RNA, 19 nt, Homo sapiens
  misc_RNA (1)...(19): siRNA sense strand
acucagaggagaaaacuaa

SEQ ID NO: 2438765 - RNA, 19 nt, Homo sapiens
  misc_RNA (1)...(19): siRNA sense strand
gaaaagaagaggagggagc

SEQ ID NO: 2438766 - RNA, 19 nt, Homo sapiens
  misc_RNA (1)...(19): siRNA sense strand
aaauuauggcaucgucaaa

SEQ ID NO: 2438767 - RNA, 19 nt, Homo sapiens
  misc_RNA (1)...(19): siRNA sense strand
cggcagaagcuucaccaca

SEQ ID NO: 2438768 - RNA, 19 nt, Homo sapiens
  misc_RNA (1)...(19): siRNA sense strand
ggauguggcuguucggaga

SEQ ID NO: 2438769 - RNA, 19 nt, Homo sapiens
  misc_RNA (1)...(19): siRNA sense strand
gggaggagucuguggcuga

SEQ ID NO: 2438770 - RNA, 19 nt, Homo sapiens
  misc_RNA (1)...(19): siRNA sense strand
ggaagauguugcagugcca

SEQ ID NO: 2438771 - RNA, 19 nt, Homo sapiens
  misc_RNA (1)...(19): siRNA sense strand
ggaagagccuccagcagca

SEQ ID NO: 2438772 - RNA, 19 nt, Homo sapiens
  misc_RNA (1)...(19): siRNA sense strand
ggugcugaauggagaggca

SEQ ID NO: 2438773 - RNA, 19 nt, Homo sapiens
  misc_RNA (1)...(19): siRNA sense strand
ggugcacagcccagaguau

SEQ ID NO: 2438774 - RNA, 19 nt, Homo sapiens
  misc_RNA (1)...(19): siRNA sense strand
ucacuggagcugugcaaaa

SEQ ID NO: 2438775 - RNA, 19 nt, Homo sapiens
  misc_RNA (1)...(19): siRNA sense strand
cgucaaaaucaucgagaaa

SEQ ID NO: 2438776 - RNA, 19 nt, Homo sapiens
  misc_RNA (1)...(19): siRNA sense strand
gaagauauguacaagcuga

SEQ ID NO: 2438777 - RNA, 19 nt, Homo sapiens
  misc_RNA (1)...(19): siRNA sense strand
uguaucagugucagggaaa

SEQ ID NO: 2438778 - RNA, 19 nt, Homo sapiens
  misc_RNA (1)...(19): siRNA sense strand
ggaguaggguguuucgaga

SEQ ID NO: 2438779 - RNA, 19 nt, Homo sapiens
  misc_RNA (1)...(19): siRNA sense strand
ccucugaauugcuuggaga

SEQ ID NO: 2438780 - RNA, 19 nt, Homo sapiens
  misc_RNA (1)...(19): siRNA sense strand
acuuggucuuugagaaauu

SEQ ID NO: 2438781 - RNA, 19 nt, Homo sapiens
  misc_RNA (1)...(19): siRNA sense strand
cugagguaguggaggucuu

SEQ ID NO: 2438782 - RNA, 19 nt, Homo sapiens
  misc_RNA (1)...(19): siRNA sense strand
ugaauugcuuggagaggga

SEQ ID NO: 2438783 - RNA, 19 nt, Homo sapiens
  misc_RNA (1)...(19): siRNA sense strand
cagaggagccagaggcacu

SEQ ID NO: 2438784 - RNA, 19 nt, Homo sapiens
  misc_RNA (1)...(19): siRNA sense strand
agagaugggcaguagcgaa

SEQ ID NO: 2438785 - RNA, 19 nt, Homo sapiens
  misc_RNA (1)...(19): siRNA sense strand
guuugaaagcauccaggaa

SEQ ID NO: 2438786 - RNA, 19 nt, Homo sapiens
  misc_RNA (1)...(19): siRNA sense strand
ggacguugcugcugcccuu

SEQ ID NO: 2438787 - RNA, 19 nt, Homo sapiens
  misc_RNA (1)...(19): siRNA sense strand
agugaaaaucugugacuuu

SEQ ID NO: 2438788 - RNA, 19 nt, Homo sapiens
  misc_RNA (1)...(19): siRNA sense strand
gcagggugugccagaacaa

SEQ ID NO: 2438789 - RNA, 19 nt, Homo sapiens
  misc_RNA (1)...(19): siRNA sense strand
gcuuggagagggagccuau

SEQ ID NO: 2438790 - RNA, 19 nt, Homo sapiens
  misc_RNA (1)...(19): siRNA sense strand
gugggaugaaacugaacaa

SEQ ID NO: 2438791 - RNA, 19 nt, Homo sapiens
  misc_RNA (1)...(19): siRNA sense strand
ccaagcuccuggugcgaga

SEQ ID NO: 2438792 - RNA, 19 nt, Homo sapiens
  misc_RNA (1)...(19): siRNA sense strand
gagagggagccuaugccaa

SEQ ID NO: 2438793 - RNA, 19 nt, Homo sapiens
  misc_RNA (1)...(19): siRNA sense strand
cuguaucagugucagggaa

SEQ ID NO: 2438794 - RNA, 19 nt, Homo sapiens
  misc_RNA (1)...(19): siRNA sense strand
cgagaaacaagcagggcac

SEQ ID NO: 2438795 - RNA, 19 nt, Homo sapiens
  misc_RNA (1)...(19): siRNA sense strand
auacauggccccugaggua

SEQ ID NO: 2438796 - RNA, 19 nt, Homo sapiens
  misc_RNA (1)...(19): siRNA sense strand
gcagauggugacaggagga

SEQ ID NO: 2438797 - RNA, 19 nt, Homo sapiens
  misc_RNA (1)...(19): siRNA sense strand
agaacgaacuagcagagga

SEQ ID NO: 2438798 - RNA, 19 nt, Homo sapiens
  misc_RNA (1)...(19): siRNA sense strand
aggccacauucuacgacaa

SEQ ID NO: 2438799 - RNA, 19 nt, Homo sapiens
  misc_RNA (1)...(19): siRNA sense strand
cgucaaaaucaucgagaaa

SEQ ID NO: 2438800 - RNA, 19 nt, Homo sapiens
  misc_RNA (1)...(19): siRNA sense strand
gaagauauguacaagcuga

SEQ ID NO: 2438801 - RNA, 19 nt, Homo sapiens
  misc_RNA (1)...(19): siRNA sense strand
uguaucagugucagggaaa

SEQ ID NO: 2438802 - RNA, 19 nt, Homo sapiens
  misc_RNA (1)...(19): siRNA sense strand
ggaguaggguguuucgaga

SEQ ID NO: 2438803 - RNA, 19 nt, Homo sapiens
  misc_RNA (1)...(19): siRNA sense strand
ccucugaauugcuuggaga

SEQ ID NO: 2438804 - RNA, 19 nt, Homo sapiens
  misc_RNA (1)...(19): siRNA sense strand
acuuggucuuugagaaauu

SEQ ID NO: 2438805 - RNA, 19 nt, Homo sapiens
  misc_RNA (1)...(19): siRNA sense strand
cugagguaguggaggucuu

SEQ ID NO: 2438806 - RNA, 19 nt, Homo sapiens
  misc_RNA (1)...(19): siRNA sense strand
ugaauugcuuggagaggga

SEQ ID NO: 2438807 - RNA, 19 nt, Homo sapiens
  misc_RNA (1)...(19): siRNA sense strand
agagaugggcaguagcgaa

SEQ ID NO: 2438808 - RNA, 19 nt, Homo sapiens
  misc_RNA (1)...(19): siRNA sense strand
guuugaaagcauccaggaa

SEQ ID NO: 2438809 - RNA, 19 nt, Homo sapiens
  misc_RNA (1)...(19): siRNA sense strand
ggacguugcugcugcccuu

SEQ ID NO: 2438810 - RNA, 19 nt, Homo sapiens
  misc_RNA (1)...(19): siRNA sense strand
agugaaaaucugugacuuu

SEQ ID NO: 2438811 - RNA, 19 nt, Homo sapiens
  misc_RNA (1)...(19): siRNA sense strand
gcagggugugccagaacaa

SEQ ID NO: 2438812 - RNA, 19 nt, Homo sapiens
  misc_RNA (1)...(19): siRNA sense strand
gcuuggagagggagccuau

SEQ ID NO: 2438813 - RNA, 19 nt, Homo sapiens
  misc_RNA (1)...(19): siRNA sense strand
gugggaugaaacugaacaa

SEQ ID NO: 2438814 - RNA, 19 nt, Homo sapiens
  misc_RNA (1)...(19): siRNA sense strand
ccaagcuccuggugcgaga

SEQ ID NO: 2438815 - RNA, 19 nt, Homo sapiens
  misc_RNA (1)...(19): siRNA sense strand
gagagggagccuaugccaa

SEQ ID NO: 2438816 - RNA, 19 nt, Homo sapiens
  misc_RNA (1)...(19): siRNA sense strand
cuguaucagugucagggaa

SEQ ID NO: 2438817 - RNA, 19 nt, Homo sapiens
  misc_RNA (1)...(19): siRNA sense strand
cgagaaacaagcagggcac

SEQ ID NO: 2438818 - RNA, 19 nt, Homo sapiens
  misc_RNA (1)...(19): siRNA sense strand
auacauggccccugaggua

SEQ ID NO: 2438819 - RNA, 19 nt, Homo sapiens
  misc_RNA (1)...(19): siRNA sense strand
gcagauggugacaggagga

SEQ ID NO: 2438820 - RNA, 19 nt, Homo sapiens
  misc_RNA (1)...(19): siRNA sense strand
aggccacauucuacgacaa

SEQ ID NO: 2438821 - RNA, 19 nt, Homo sapiens
  misc_RNA (1)...(19): siRNA sense strand
gguuauaguccaugagcga

SEQ ID NO: 2438822 - RNA, 19 nt, Homo sapiens
  misc_RNA (1)...(19): siRNA sense strand
cuucacaagcacaggucaa

SEQ ID NO: 2438823 - RNA, 19 nt, Homo sapiens
  misc_RNA (1)...(19): siRNA sense strand
uggcaguguaugggagaaa

SEQ ID NO: 2438824 - RNA, 19 nt, Homo sapiens
  misc_RNA (1)...(19): siRNA sense strand
ggcugaaggaugaaggcuu

SEQ ID NO: 2438825 - RNA, 19 nt, Homo sapiens
  misc_RNA (1)...(19): siRNA sense strand
uccgaaaauugcagaaaau

SEQ ID NO: 2438826 - RNA, 19 nt, Homo sapiens
  misc_RNA (1)...(19): siRNA sense strand
gcaaggagauggaggagca

SEQ ID NO: 2438827 - RNA, 19 nt, Homo sapiens
  misc_RNA (1)...(19): siRNA sense strand
ccaagaagaugaagaggcu

SEQ ID NO: 2438828 - RNA, 19 nt, Homo sapiens
  misc_RNA (1)...(19): siRNA sense strand
agaugaagaggcuggagaa

SEQ ID NO: 2438829 - RNA, 19 nt, Homo sapiens
  misc_RNA (1)...(19): siRNA sense strand
cggacaugcccgucaagaa

SEQ ID NO: 2438830 - RNA, 19 nt, Homo sapiens
  misc_RNA (1)...(19): siRNA sense strand
aggccgagugcaagagcaa

SEQ ID NO: 2438831 - RNA, 19 nt, Homo sapiens
  misc_RNA (1)...(19): siRNA sense strand
aggcauacucgcugguaga

SEQ ID NO: 2438832 - RNA, 19 nt, Homo sapiens
  misc_RNA (1)...(19): siRNA sense strand
ucaaggagcugauccgcaa

SEQ ID NO: 2438833 - RNA, 19 nt, Homo sapiens
  misc_RNA (1)...(19): siRNA sense strand
aggacaagguucucgacau

SEQ ID NO: 2438834 - RNA, 19 nt, Homo sapiens
  misc_RNA (1)...(19): siRNA sense strand
aggaggcggaggagaacua

SEQ ID NO: 2438835 - RNA, 19 nt, Homo sapiens
  misc_RNA (1)...(19): siRNA sense strand
cagacgcagcucagcgaaa

SEQ ID NO: 2438836 - RNA, 19 nt, Homo sapiens
  misc_RNA (1)...(19): siRNA sense strand
cuacaggagcagcaggaga

SEQ ID NO: 2438837 - RNA, 19 nt, Homo sapiens
  misc_RNA (1)...(19): siRNA sense strand
agagcaaggaggaggugau

SEQ ID NO: 2438838 - RNA, 19 nt, Homo sapiens
  misc_RNA (1)...(19): siRNA sense strand
ugguggaacuugagacgca

SEQ ID NO: 2438839 - RNA, 19 nt, Homo sapiens
  misc_RNA (1)...(19): siRNA sense strand
caguacuuccagagaguga

SEQ ID NO: 2438840 - RNA, 19 nt, Homo sapiens
  misc_RNA (1)...(19): siRNA sense strand
aagcugauccgcagggaca

SEQ ID NO: 2438841 - RNA, 19 nt, Homo sapiens
  misc_RNA (1)...(19): siRNA sense strand
aggagauggaggagcagau

SEQ ID NO: 2438842 - RNA, 19 nt, Homo sapiens
  misc_RNA (1)...(19): siRNA sense strand
ucgaggagcugaaggccga

SEQ ID NO: 2438843 - RNA, 19 nt, Homo sapiens
  misc_RNA (1)...(19): siRNA sense strand
aggagaacuacgucaucaa

SEQ ID NO: 2438844 - RNA, 19 nt, Homo sapiens
  misc_RNA (1)...(19): siRNA sense strand
aggacgagcugaugagcgu

SEQ ID NO: 2438845 - RNA, 19 nt, Homo sapiens
  misc_RNA (1)...(19): siRNA sense strand
aggaggaggugauggcugu

SEQ ID NO: 2438846 - RNA, 19 nt, Homo sapiens
  misc_RNA (1)...(19): siRNA sense strand
gaacaguggcuccucgcua

SEQ ID NO: 2438847 - RNA, 19 nt, Homo sapiens
  misc_RNA (1)...(19): siRNA sense strand
gccaugaagagcaaggaga

SEQ ID NO: 2438848 - RNA, 19 nt, Homo sapiens
  misc_RNA (1)...(19): siRNA sense strand
cagaaggcacagagcacca

SEQ ID NO: 2438849 - RNA, 19 nt, Homo sapiens
  misc_RNA (1)...(19): siRNA sense strand
gcaccuacccggaacacga

SEQ ID NO: 2438850 - RNA, 19 nt, Homo sapiens
  misc_RNA (1)...(19): siRNA sense strand
ugaccagacgauagagaaa

SEQ ID NO: 2438851 - RNA, 19 nt, Homo sapiens
  misc_RNA (1)...(19): siRNA sense strand
cagaaagagaggagaucau

SEQ ID NO: 2438852 - RNA, 19 nt, Homo sapiens
  misc_RNA (1)...(19): siRNA sense strand
uggaaagaaagcaguuaaa

SEQ ID NO: 2438853 - RNA, 19 nt, Homo sapiens
  misc_RNA (1)...(19): siRNA sense strand
ggugaaagguugagccaug

SEQ ID NO: 2438854 - RNA, 19 nt, Homo sapiens
  misc_RNA (1)...(19): siRNA sense strand
cugaacaagcagaaagaga

SEQ ID NO: 2438855 - RNA, 19 nt, Homo sapiens
  misc_RNA (1)...(19): siRNA sense strand
aagcagaaagagaggagau

SEQ ID NO: 2438856 - RNA, 19 nt, Homo sapiens
  misc_RNA (1)...(19): siRNA sense strand
uagcaaugccugugcguga

SEQ ID NO: 2438857 - RNA, 19 nt, Homo sapiens
  misc_RNA (1)...(19): siRNA sense strand
cuggaaagaaagcaguuaa

SEQ ID NO: 2438858 - RNA, 19 nt, Homo sapiens
  misc_RNA (1)...(19): siRNA sense strand
ggacacaggugaaagguug

SEQ ID NO: 2438859 - RNA, 19 nt, Homo sapiens
  misc_RNA (1)...(19): siRNA sense strand
cugugaagaugcuguaaaa

SEQ ID NO: 2438860 - RNA, 19 nt, Homo sapiens
  misc_RNA (1)...(19): siRNA sense strand
uuucaaugguguagaugau

SEQ ID NO: 2438861 - RNA, 19 nt, Homo sapiens
  misc_RNA (1)...(19): siRNA sense strand
aagaaagcugaaacagaua

SEQ ID NO: 2438862 - RNA, 19 nt, Homo sapiens
  misc_RNA (1)...(19): siRNA sense strand
cagccuguuuagagcgcaa

SEQ ID NO: 2438863 - RNA, 19 nt, Homo sapiens
  misc_RNA (1)...(19): siRNA sense strand
cagaagcgggagaaggaau

SEQ ID NO: 2438864 - RNA, 19 nt, Homo sapiens
  misc_RNA (1)...(19): siRNA sense strand
augcagaggaagacugauu

SEQ ID NO: 2438865 - RNA, 19 nt, Homo sapiens
  misc_RNA (1)...(19): siRNA sense strand
caaggaaauugcagccaca

SEQ ID NO: 2438866 - RNA, 19 nt, Homo sapiens
  misc_RNA (1)...(19): siRNA sense strand
ccucccagaugguggccaa

SEQ ID NO: 2438867 - RNA, 19 nt, Homo sapiens
  misc_RNA (1)...(19): siRNA sense strand
ucaugaaacaaaugcaaga

SEQ ID NO: 2438868 - RNA, 19 nt, Homo sapiens
  misc_RNA (1)...(19): siRNA sense strand
agcugaaacagauaagaua

SEQ ID NO: 2438869 - RNA, 19 nt, Homo sapiens
  misc_RNA (1)...(19): siRNA sense strand
auguagaaguugaugaauc

SEQ ID NO: 2438870 - RNA, 19 nt, Homo sapiens
  misc_RNA (1)...(19): siRNA sense strand
aguccuauccuguggccaa

SEQ ID NO: 2438871 - RNA, 19 nt, Homo sapiens
  misc_RNA (1)...(19): siRNA sense strand
ugaccaaaccagugacagu

SEQ ID NO: 2438872 - RNA, 19 nt, Homo sapiens
  misc_RNA (1)...(19): siRNA sense strand
gguuaaguaccuuggccau

SEQ ID NO: 2438873 - RNA, 19 nt, Homo sapiens
  misc_RNA (1)...(19): siRNA sense strand
gaacaauccucaugccauc

SEQ ID NO: 2438874 - RNA, 19 nt, Homo sapiens
  misc_RNA (1)...(19): siRNA sense strand
ucagaguuguggaugaaaa

SEQ ID NO: 2438875 - RNA, 19 nt, Homo sapiens
  misc_RNA (1)...(19): siRNA sense strand
guggcagacagaugaagaa

SEQ ID NO: 2438876 - RNA, 19 nt, Homo sapiens
  misc_RNA (1)...(19): siRNA sense strand
cuuccaagcuaauggcacu

SEQ ID NO: 2438877 - RNA, 19 nt, Homo sapiens
  misc_RNA (1)...(19): siRNA sense strand
aggagaucaugaaacaaau

SEQ ID NO: 2438878 - RNA, 19 nt, Homo sapiens
  misc_RNA (1)...(19): siRNA sense strand
augcagugccagaaguaga

SEQ ID NO: 2438879 - RNA, 19 nt, Homo sapiens
  misc_RNA (1)...(19): siRNA sense strand
agaagauauuggaagcaaa

SEQ ID NO: 2438880 - RNA, 19 nt, Homo sapiens
  misc_RNA (1)...(19): siRNA sense strand
ggguggauuuggaaggcaa

SEQ ID NO: 2438881 - RNA, 19 nt, Homo sapiens
  misc_RNA (1)...(19): siRNA sense strand
uuggaaggcaauagaauaa

SEQ ID NO: 2438882 - RNA, 19 nt, Homo sapiens
  misc_RNA (1)...(19): siRNA sense strand
ccuggaaaggauagagauu

SEQ ID NO: 2438883 - RNA, 19 nt, Homo sapiens
  misc_RNA (1)...(19): siRNA sense strand
ggcuaauucuagaugacaa

SEQ ID NO: 2438884 - RNA, 19 nt, Homo sapiens
  misc_RNA (1)...(19): siRNA sense strand
guguaaauggugacuuaaa

SEQ ID NO: 2438885 - RNA, 19 nt, Homo sapiens
  misc_RNA (1)...(19): siRNA sense strand
uggaaauaccagacacaau

SEQ ID NO: 2438886 - RNA, 19 nt, Homo sapiens
  misc_RNA (1)...(19): siRNA sense strand
cugucuagcaauacgauaa

SEQ ID NO: 2438887 - RNA, 19 nt, Homo sapiens
  misc_RNA (1)...(19): siRNA sense strand
cacaaacaucagaggaaau

SEQ ID NO: 2438888 - RNA, 19 nt, Homo sapiens
  misc_RNA (1)...(19): siRNA sense strand
gcuaauucuagaugacaau

SEQ ID NO: 2438889 - RNA, 19 nt, Homo sapiens
  misc_RNA (1)...(19): siRNA sense strand
uggagaaguuccuggucau

SEQ ID NO: 2438890 - RNA, 19 nt, Homo sapiens
  misc_RNA (1)...(19): siRNA sense strand
ccuacuugacuuuggagaa

SEQ ID NO: 2438891 - RNA, 19 nt, Homo sapiens
  misc_RNA (1)...(19): siRNA sense strand
uauuggaagcaaaggguau

SEQ ID NO: 2438892 - RNA, 19 nt, Homo sapiens
  misc_RNA (1)...(19): siRNA sense strand
agaauauuugucuggguua

SEQ ID NO: 2438893 - RNA, 19 nt, Homo sapiens
  misc_RNA (1)...(19): siRNA sense strand
uggaaacuuuuaugggaaa

SEQ ID NO: 2438894 - RNA, 19 nt, Homo sapiens
  misc_RNA (1)...(19): siRNA sense strand
gguggaaauaccagacaca

SEQ ID NO: 2438895 - RNA, 19 nt, Homo sapiens
  misc_RNA (1)...(19): siRNA sense strand
uggaauguguaaaugguga

SEQ ID NO: 2438896 - RNA, 19 nt, Homo sapiens
  misc_RNA (1)...(19): siRNA sense strand
aggauagagauuccaaaua

SEQ ID NO: 2438897 - RNA, 19 nt, Homo sapiens
  misc_RNA (1)...(19): siRNA sense strand
gugugaacuugcuggcuuu

SEQ ID NO: 2438898 - RNA, 19 nt, Homo sapiens
  misc_RNA (1)...(19): siRNA sense strand
ugcacaaacaucagaggaa

SEQ ID NO: 2438899 - RNA, 19 nt, Homo sapiens
  misc_RNA (1)...(19): siRNA sense strand
aaacaucagaggaaaucaa

SEQ ID NO: 2438900 - RNA, 19 nt, Homo sapiens
  misc_RNA (1)...(19): siRNA sense strand
ccuuaacacaggagugcuu

SEQ ID NO: 2438901 - RNA, 19 nt, Homo sapiens
  misc_RNA (1)...(19): siRNA sense strand
uaacauucgaccuggaaaa

SEQ ID NO: 2438902 - RNA, 19 nt, Homo sapiens
  misc_RNA (1)...(19): siRNA sense strand
cugcaaagaaacugaauug

SEQ ID NO: 2438903 - RNA, 19 nt, Homo sapiens
  misc_RNA (1)...(19): siRNA sense strand
cuggaauauucaaagacuu

SEQ ID NO: 2438904 - RNA, 19 nt, Homo sapiens
  misc_RNA (1)...(19): siRNA sense strand
uuuggaaggcaauagaaua

SEQ ID NO: 2438905 - RNA, 19 nt, Homo sapiens
  misc_RNA (1)...(19): siRNA sense strand
ugcugugacugcaaagaaa

SEQ ID NO: 2438906 - RNA, 19 nt, Homo sapiens
  misc_RNA (1)...(19): siRNA sense strand
gaccacagaaguaaggaau

SEQ ID NO: 2438907 - RNA, 19 nt, Homo sapiens
  misc_RNA (1)...(19): siRNA sense strand
cucuagaccuggaaaggau

SEQ ID NO: 2438908 - RNA, 19 nt, Homo sapiens
  misc_RNA (1)...(19): siRNA sense strand
ggugugaacuugcuggcuu

SEQ ID NO: 2438909 - RNA, 19 nt, Homo sapiens
  misc_RNA (1)...(19): siRNA sense strand
aauaacacuuggagacagu

SEQ ID NO: 2438910 - RNA, 19 nt, Homo sapiens
  misc_RNA (1)...(19): siRNA sense strand
acugaauuggaauguguaa

SEQ ID NO: 2438911 - RNA, 19 nt, Homo sapiens
  misc_RNA (1)...(19): siRNA sense strand
caucagcuaacuuggcuaa

SEQ ID NO: 2438912 - RNA, 19 nt, Homo sapiens
  misc_RNA (1)...(19): siRNA sense strand
aguuaacagugcuuugaau

SEQ ID NO: 2438913 - RNA, 19 nt, Homo sapiens
  misc_RNA (1)...(19): siRNA sense strand
cguucugaucaaugucaaa

SEQ ID NO: 2438914 - RNA, 19 nt, Homo sapiens
  misc_RNA (1)...(19): siRNA sense strand
cuugcagaccacagaagua

SEQ ID NO: 2438915 - RNA, 19 nt, Homo sapiens
  misc_RNA (1)...(19): siRNA sense strand
guacugagguugauggaga

SEQ ID NO: 2438916 - RNA, 19 nt, Homo sapiens
  misc_RNA (1)...(19): siRNA sense strand
gcaaacuacuucuggcuga

SEQ ID NO: 2438917 - RNA, 19 nt, Homo sapiens
  misc_RNA (1)...(19): siRNA sense strand
agguugauggagagcguua

SEQ ID NO: 2438918 - RNA, 19 nt, Homo sapiens
  misc_RNA (1)...(19): siRNA sense strand
ggaaagauguugaagucac

SEQ ID NO: 2438919 - RNA, 19 nt, Homo sapiens
  misc_RNA (1)...(19): siRNA sense strand
acucaaagacaaaagcaaa

SEQ ID NO: 2438920 - RNA, 19 nt, Homo sapiens
  misc_RNA (1)...(19): siRNA sense strand
cggucaaggugcagacaac

SEQ ID NO: 2438921 - RNA, 19 nt, Homo sapiens
  misc_RNA (1)...(19): siRNA sense strand
agugaagauucgucugcaa

SEQ ID NO: 2438922 - RNA, 19 nt, Homo sapiens
  misc_RNA (1)...(19): siRNA sense strand
gggcauaaccggaagaagc

SEQ ID NO: 2438923 - RNA, 19 nt, Homo sapiens
  misc_RNA (1)...(19): siRNA sense strand
caggaagauucuccgggaa

SEQ ID NO: 2438924 - RNA, 19 nt, Homo sapiens
  misc_RNA (1)...(19): siRNA sense strand
uguuuaugcucauugcaaa

SEQ ID NO: 2438925 - RNA, 19 nt, Homo sapiens
  misc_RNA (1)...(19): siRNA sense strand
ccauguucauaguggcuuu

SEQ ID NO: 2438926 - RNA, 19 nt, Homo sapiens
  misc_RNA (1)...(19): siRNA sense strand
gaguggaaauggagaggug

SEQ ID NO: 2438927 - RNA, 19 nt, Homo sapiens
  misc_RNA (1)...(19): siRNA sense strand
cguaagauauauagcacuc

SEQ ID NO: 2438928 - RNA, 19 nt, Homo sapiens
  misc_RNA (1)...(19): siRNA sense strand
auaucagcuugcagacuua

SEQ ID NO: 2438929 - RNA, 19 nt, Homo sapiens
  misc_RNA (1)...(19): siRNA sense strand
gauccaaauaguaacccaa

SEQ ID NO: 2438930 - RNA, 19 nt, Homo sapiens
  misc_RNA (1)...(19): siRNA sense strand
ggcaggaguagcugaucaa

SEQ ID NO: 2438931 - RNA, 19 nt, Homo sapiens
  misc_RNA (1)...(19): siRNA sense strand
aagacuuuguucagcgcua

SEQ ID NO: 2438932 - RNA, 19 nt, Homo sapiens
  misc_RNA (1)...(19): siRNA sense strand
cucaaagacaaaagcaaaa

SEQ ID NO: 2438933 - RNA, 19 nt, Homo sapiens
  misc_RNA (1)...(19): siRNA sense strand
gaaagggacugcagcucga

SEQ ID NO: 2438934 - RNA, 19 nt, Homo sapiens
  misc_RNA (1)...(19): siRNA sense strand
uggcaggaguagcugauca

SEQ ID NO: 2438935 - RNA, 19 nt, Homo sapiens
  misc_RNA (1)...(19): siRNA sense strand
ccagagugccauacgcuau

SEQ ID NO: 2438936 - RNA, 19 nt, Homo sapiens
  misc_RNA (1)...(19): siRNA sense strand
uggacacgugggagguuua

SEQ ID NO: 2438937 - RNA, 19 nt, Homo sapiens
  misc_RNA (1)...(19): siRNA sense strand
aggggauccucaugaguua

SEQ ID NO: 2438938 - RNA, 19 nt, Homo sapiens
  misc_RNA (1)...(19): siRNA sense strand
ccacaggaaaauagagaua

SEQ ID NO: 2438939 - RNA, 19 nt, Homo sapiens
  misc_RNA (1)...(19): siRNA sense strand
cagcugaugaagagacaau

SEQ ID NO: 2438940 - RNA, 19 nt, Homo sapiens
  misc_RNA (1)...(19): siRNA sense strand
cgguggaaagccaggaaga

SEQ ID NO: 2438941 - RNA, 19 nt, Homo sapiens
  misc_RNA (1)...(19): siRNA sense strand
ggcugauguucauggaaaa

SEQ ID NO: 2438942 - RNA, 19 nt, Homo sapiens
  misc_RNA (1)...(19): siRNA sense strand
auauagaugcuuugaggga

SEQ ID NO: 2438943 - RNA, 19 nt, Homo sapiens
  misc_RNA (1)...(19): siRNA sense strand
ggagaagacagcuguggca

SEQ ID NO: 2438944 - RNA, 19 nt, Homo sapiens
  misc_RNA (1)...(19): siRNA sense strand
cacaagaaucagagugcca

SEQ ID NO: 2438945 - RNA, 19 nt, Homo sapiens
  misc_RNA (1)...(19): siRNA sense strand
cauuacagcagcagaucau

SEQ ID NO: 2438946 - RNA, 19 nt, Homo sapiens
  misc_RNA (1)...(19): siRNA sense strand
cugcagcgguggaaagcca

SEQ ID NO: 2438947 - RNA, 19 nt, Homo sapiens
  misc_RNA (1)...(19): siRNA sense strand
ccuccaaagccaaugaguu

SEQ ID NO: 2438948 - RNA, 19 nt, Homo sapiens
  misc_RNA (1)...(19): siRNA sense strand
aagaauuagcucguggaaa

SEQ ID NO: 2438949 - RNA, 19 nt, Homo sapiens
  misc_RNA (1)...(19): siRNA sense strand
acacaaauccagugggcua

SEQ ID NO: 2438950 - RNA, 19 nt, Homo sapiens
  misc_RNA (1)...(19): siRNA sense strand
gcgacauggaagagagcaa

SEQ ID NO: 2438951 - RNA, 19 nt, Homo sapiens
  misc_RNA (1)...(19): siRNA sense strand
cuuuauacccuuaaggaaa

SEQ ID NO: 2438952 - RNA, 19 nt, Homo sapiens
  misc_RNA (1)...(19): siRNA sense strand
uggcaagagcugugucaaa

SEQ ID NO: 2438953 - RNA, 19 nt, Homo sapiens
  misc_RNA (1)...(19): siRNA sense strand
gcagauaaguggagcacgu

SEQ ID NO: 2438954 - RNA, 19 nt, Homo sapiens
  misc_RNA (1)...(19): siRNA sense strand
uggcauugcacgcuggaaa

SEQ ID NO: 2438955 - RNA, 19 nt, Homo sapiens
  misc_RNA (1)...(19): siRNA sense strand
cauuuaagacucaggacau

SEQ ID NO: 2438956 - RNA, 19 nt, Homo sapiens
  misc_RNA (1)...(19): siRNA sense strand
caggaagauuggacggcuu

SEQ ID NO: 2438957 - RNA, 19 nt, Homo sapiens
  misc_RNA (1)...(19): siRNA sense strand
ggaaauacuuuauacccuu

SEQ ID NO: 2438958 - RNA, 19 nt, Homo sapiens
  misc_RNA (1)...(19): siRNA sense strand
ccgauauugaggagacauu

SEQ ID NO: 2438959 - RNA, 19 nt, Homo sapiens
  misc_RNA (1)...(19): siRNA sense strand
gcugaauaugccaguuuaa

SEQ ID NO: 2438960 - RNA, 19 nt, Homo sapiens
  misc_RNA (1)...(19): siRNA sense strand
acuuggaggcacugaagaa

SEQ ID NO: 2438961 - RNA, 19 nt, Homo sapiens
  misc_RNA (1)...(19): siRNA sense strand
ccgugauguugaagcccua

SEQ ID NO: 2438962 - RNA, 19 nt, Homo sapiens
  misc_RNA (1)...(19): siRNA sense strand
auuuaagacucaggacaua

SEQ ID NO: 2438963 - RNA, 19 nt, Homo sapiens
  misc_RNA (1)...(19): siRNA sense strand
cagacgacuucgacgugaa

SEQ ID NO: 2438964 - RNA, 19 nt, Homo sapiens
  misc_RNA (1)...(19): siRNA sense strand
acuauagacaggucagcaa

SEQ ID NO: 2438965 - RNA, 19 nt, Homo sapiens
  misc_RNA (1)...(19): siRNA sense strand
ucuccaaguuccuggcaga

SEQ ID NO: 2438966 - RNA, 19 nt, Homo sapiens
  misc_RNA (1)...(19): siRNA sense strand
ccauacgaaagaagugcaa

SEQ ID NO: 2438967 - RNA, 19 nt, Homo sapiens
  misc_RNA (1)...(19): siRNA sense strand
aggagagcaucuugacaga

SEQ ID NO: 2438968 - RNA, 19 nt, Homo sapiens
  misc_RNA (1)...(19): siRNA sense strand
gaauauaauuaccuccaga

SEQ ID NO: 2438969 - RNA, 19 nt, Homo sapiens
  misc_RNA (1)...(19): siRNA sense strand
augaacacaaucugguaaa

SEQ ID NO: 2438970 - RNA, 19 nt, Homo sapiens
  misc_RNA (1)...(19): siRNA sense strand
uggacaacauggcugacaa

SEQ ID NO: 2438971 - RNA, 19 nt, Homo sapiens
  misc_RNA (1)...(19): siRNA sense strand
gguaugcagaacagcuuaa

SEQ ID NO: 2438972 - RNA, 19 nt, Homo sapiens
  misc_RNA (1)...(19): siRNA sense strand
agguguugguagaaauuga

SEQ ID NO: 2438973 - RNA, 19 nt, Homo sapiens
  misc_RNA (1)...(19): siRNA sense strand
ugguaauggugcugcugau

SEQ ID NO: 2438974 - RNA, 19 nt, Homo sapiens
  misc_RNA (1)...(19): siRNA sense strand
agaaauugaccaagugaag

SEQ ID NO: 2438975 - RNA, 19 nt, Homo sapiens
  misc_RNA (1)...(19): siRNA sense strand
agugaaguccagaaugcaa

SEQ ID NO: 2438976 - RNA, 19 nt, Homo sapiens
  misc_RNA (1)...(19): siRNA sense strand
acuuuauacccuuaaggaa

SEQ ID NO: 2438977 - RNA, 19 nt, Homo sapiens
  misc_RNA (1)...(19): siRNA sense strand
cagcugaaguauggcgaca

SEQ ID NO: 2438978 - RNA, 19 nt, Homo sapiens
  misc_RNA (1)...(19): siRNA sense strand
cuauagacaggucagcaaa

SEQ ID NO: 2438979 - RNA, 19 nt, Homo sapiens
  misc_RNA (1)...(19): siRNA sense strand
ugaaaucccucuuugccaa

SEQ ID NO: 2438980 - RNA, 19 nt, Homo sapiens
  misc_RNA (1)...(19): siRNA sense strand
agugcaaacuggaccacau

SEQ ID NO: 2438981 - RNA, 19 nt, Homo sapiens
  misc_RNA (1)...(19): siRNA sense strand
gcucagaaaaugacagaaa

SEQ ID NO: 2438982 - RNA, 19 nt, Homo sapiens
  misc_RNA (1)...(19): siRNA sense strand
ccaaaugaacagaugguca

SEQ ID NO: 2438983 - RNA, 19 nt, Homo sapiens
  misc_RNA (1)...(19): siRNA sense strand
guggagaagcagaagguga

SEQ ID NO: 2438984 - RNA, 19 nt, Homo sapiens
  misc_RNA (1)...(19): siRNA sense strand
ggagaagggcacagggucu

SEQ ID NO: 2438985 - RNA, 19 nt, Homo sapiens
  misc_RNA (1)...(19): siRNA sense strand
acugaaacguccagcugaa

SEQ ID NO: 2438986 - RNA, 19 nt, Homo sapiens
  misc_RNA (1)...(19): siRNA sense strand
cuucaacgccacugagcaa

SEQ ID NO: 2438987 - RNA, 19 nt, Homo sapiens
  misc_RNA (1)...(19): siRNA sense strand
aggugaagaagcuuaaaua

SEQ ID NO: 2438988 - RNA, 19 nt, Homo sapiens
  misc_RNA (1)...(19): siRNA sense strand
cacuggagcugguggaaaa

SEQ ID NO: 2438989 - RNA, 19 nt, Homo sapiens
  misc_RNA (1)...(19): siRNA sense strand
aaagaaggacccaggaaca

SEQ ID NO: 2438990 - RNA, 19 nt, Homo sapiens
  misc_RNA (1)...(19): siRNA sense strand
caguaagaaccgccacaaa

SEQ ID NO: 2438991 - RNA, 19 nt, Homo sapiens
  misc_RNA (1)...(19): siRNA sense strand
gcuuaaggaaccaaaugaa

SEQ ID NO: 2438992 - RNA, 19 nt, Homo sapiens
  misc_RNA (1)...(19): siRNA sense strand
ccuaugaagaugccguaaa

SEQ ID NO: 2438993 - RNA, 19 nt, Homo sapiens
  misc_RNA (1)...(19): siRNA sense strand
cagaagcagaaaaggaaua

SEQ ID NO: 2438994 - RNA, 19 nt, Homo sapiens
  misc_RNA (1)...(19): siRNA sense strand
gccagaaacaggugcaaca

SEQ ID NO: 2438995 - RNA, 19 nt, Homo sapiens
  misc_RNA (1)...(19): siRNA sense strand
ggaucuugcuucuggcuca

SEQ ID NO: 2438996 - RNA, 19 nt, Homo sapiens
  misc_RNA (1)...(19): siRNA sense strand
cugugaaagaggccauaaa

SEQ ID NO: 2438997 - RNA, 19 nt, Homo sapiens
  misc_RNA (1)...(19): siRNA sense strand
agaagcagaaggugaucaa

SEQ ID NO: 2438998 - RNA, 19 nt, Homo sapiens
  misc_RNA (1)...(19): siRNA sense strand
uggauagugacaaggcuaa

SEQ ID NO: 2438999 - RNA, 19 nt, Homo sapiens
  misc_RNA (1)...(19): siRNA sense strand
cagaaaugacucagccuca

SEQ ID NO: 2439000 - RNA, 19 nt, Homo sapiens
  misc_RNA (1)...(19): siRNA sense strand
caaugaacucaccuggaaa

SEQ ID NO: 2439001 - RNA, 19 nt, Homo sapiens
  misc_RNA (1)...(19): siRNA sense strand
uggagaagcagaaggugau

SEQ ID NO: 2439002 - RNA, 19 nt, Homo sapiens
  misc_RNA (1)...(19): siRNA sense strand
ggauagugacaaggcuaaa

SEQ ID NO: 2439003 - RNA, 19 nt, Homo sapiens
  misc_RNA (1)...(19): siRNA sense strand
acaaagaaggacccaggaa

SEQ ID NO: 2439004 - RNA, 19 nt, Homo sapiens
  misc_RNA (1)...(19): siRNA sense strand
ugaauuaagacaacagcuu

SEQ ID NO: 2439005 - RNA, 19 nt, Homo sapiens
  misc_RNA (1)...(19): siRNA sense strand
acaguuaagacuucaacaa

SEQ ID NO: 2439006 - RNA, 19 nt, Homo sapiens
  misc_RNA (1)...(19): siRNA sense strand
aggacaagaugcuggugga

SEQ ID NO: 2439007 - RNA, 19 nt, Homo sapiens
  misc_RNA (1)...(19): siRNA sense strand
gagaagaagccgcugccuu

SEQ ID NO: 2439008 - RNA, 19 nt, Homo sapiens
  misc_RNA (1)...(19): siRNA sense strand
uguggauucugcugugaaa

SEQ ID NO: 2439009 - RNA, 19 nt, Homo sapiens
  misc_RNA (1)...(19): siRNA sense strand
ccaaggaccccaagccaaa

SEQ ID NO: 2439010 - RNA, 19 nt, Homo sapiens
  misc_RNA (1)...(19): siRNA sense strand
gugccgaacuuuggggaua

SEQ ID NO: 2439011 - RNA, 19 nt, Homo sapiens
  misc_RNA (1)...(19): siRNA sense strand
ggauauaacgacugucacu

SEQ ID NO: 2439012 - RNA, 19 nt, Homo sapiens
  misc_RNA (1)...(19): siRNA sense strand
cuucaaugcacaugagauc

SEQ ID NO: 2439013 - RNA, 19 nt, Homo sapiens
  misc_RNA (1)...(19): siRNA sense strand
aauccuugggugacaguaa

SEQ ID NO: 2439014 - RNA, 19 nt, Homo sapiens
  misc_RNA (1)...(19): siRNA sense strand
gaggaaagucucaugagca

SEQ ID NO: 2439015 - RNA, 19 nt, Homo sapiens
  misc_RNA (1)...(19): siRNA sense strand
agaucaaaccaauguacuu

SEQ ID NO: 2439016 - RNA, 19 nt, Homo sapiens
  misc_RNA (1)...(19): siRNA sense strand
uauugaaagcggagaaaug

SEQ ID NO: 2439017 - RNA, 19 nt, Homo sapiens
  misc_RNA (1)...(19): siRNA sense strand
gcggagaaaugccagcaga

SEQ ID NO: 2439018 - RNA, 19 nt, Homo sapiens
  misc_RNA (1)...(19): siRNA sense strand
ggaacaacuggcuaaccaa

SEQ ID NO: 2439019 - RNA, 19 nt, Homo sapiens
  misc_RNA (1)...(19): siRNA sense strand
aaacauuuggauagugaca

SEQ ID NO: 2439020 - RNA, 19 nt, Homo sapiens
  misc_RNA (1)...(19): siRNA sense strand
auaacuguucagagaagaa

SEQ ID NO: 2439021 - RNA, 19 nt, Homo sapiens
  misc_RNA (1)...(19): siRNA sense strand
cagcagcagcgaugggcuu

SEQ ID NO: 2439022 - RNA, 19 nt, Homo sapiens
  misc_RNA (1)...(19): siRNA sense strand
gcauaauaccaccacugaa

SEQ ID NO: 2439023 - RNA, 19 nt, Homo sapiens
  misc_RNA (1)...(19): siRNA sense strand
aagaaggacccaggaacaa

SEQ ID NO: 2439024 - RNA, 19 nt, Homo sapiens
  misc_RNA (1)...(19): siRNA sense strand
agguggaggagcugaggau

SEQ ID NO: 2439025 - RNA, 19 nt, Homo sapiens
  misc_RNA (1)...(19): siRNA sense strand
gugaaaagacaaagcagca

SEQ ID NO: 2439026 - RNA, 19 nt, Homo sapiens
  misc_RNA (1)...(19): siRNA sense strand
cugauaagguggggccaaa

SEQ ID NO: 2439027 - RNA, 19 nt, Homo sapiens
  misc_RNA (1)...(19): siRNA sense strand
cagcaauuucagagguaac

SEQ ID NO: 2439028 - RNA, 19 nt, Homo sapiens
  misc_RNA (1)...(19): siRNA sense strand
gcgcaaagccagaaacagg

SEQ ID NO: 2439029 - RNA, 19 nt, Homo sapiens
  misc_RNA (1)...(19): siRNA sense strand
gccgaugaucucaaugaaa

SEQ ID NO: 2439030 - RNA, 19 nt, Homo sapiens
  misc_RNA (1)...(19): siRNA sense strand
aaacauucuuccuguggau

SEQ ID NO: 2439031 - RNA, 19 nt, Homo sapiens
  misc_RNA (1)...(19): siRNA sense strand
aguaagaaccgccacaaaa

SEQ ID NO: 2439032 - RNA, 19 nt, Homo sapiens
  misc_RNA (1)...(19): siRNA sense strand
agcaaugggcugcaguuaa

SEQ ID NO: 2439033 - RNA, 19 nt, Homo sapiens
  misc_RNA (1)...(19): siRNA sense strand
aggaaagucucaugagcag

SEQ ID NO: 2439034 - RNA, 19 nt, Homo sapiens
  misc_RNA (1)...(19): siRNA sense strand
uggaugaacuccuggacgu

SEQ ID NO: 2439035 - RNA, 19 nt, Homo sapiens
  misc_RNA (1)...(19): siRNA sense strand
gggaaaccauggaguggcu

SEQ ID NO: 2439036 - RNA, 19 nt, Homo sapiens
  misc_RNA (1)...(19): siRNA sense strand
uguucaagaccaugagaaa

SEQ ID NO: 2439037 - RNA, 19 nt, Homo sapiens
  misc_RNA (1)...(19): siRNA sense strand
gggaggagcuuauggacca

SEQ ID NO: 2439038 - RNA, 19 nt, Homo sapiens
  misc_RNA (1)...(19): siRNA sense strand
ggagaaaggcuguggcaac

SEQ ID NO: 2439039 - RNA, 19 nt, Homo sapiens
  misc_RNA (1)...(19): siRNA sense strand
gcgaagaguaugcuggaca

SEQ ID NO: 2439040 - RNA, 19 nt, Homo sapiens
  misc_RNA (1)...(19): siRNA sense strand
gggaugaccucuuugccua

SEQ ID NO: 2439041 - RNA, 19 nt, Homo sapiens
  misc_RNA (1)...(19): siRNA sense strand
agccaauagagaugacaaa

SEQ ID NO: 2439042 - RNA, 19 nt, Homo sapiens
  misc_RNA (1)...(19): siRNA sense strand
gagcauguuuccagcgcau

SEQ ID NO: 2439043 - RNA, 19 nt, Homo sapiens
  misc_RNA (1)...(19): siRNA sense strand
aggcaaguccucagagcau

SEQ ID NO: 2439044 - RNA, 19 nt, Homo sapiens
  misc_RNA (1)...(19): siRNA sense strand
aggugaaagccgccacaaa

SEQ ID NO: 2439045 - RNA, 19 nt, Homo sapiens
  misc_RNA (1)...(19): siRNA sense strand
cuacagaacuugcugagga

SEQ ID NO: 2439046 - RNA, 19 nt, Homo sapiens
  misc_RNA (1)...(19): siRNA sense strand
gcaaagaacuuagagcuca

SEQ ID NO: 2439047 - RNA, 19 nt, Homo sapiens
  misc_RNA (1)...(19): siRNA sense strand
cucuuugccuauugggaaa

SEQ ID NO: 2439048 - RNA, 19 nt, Homo sapiens
  misc_RNA (1)...(19): siRNA sense strand
gauuaaagaggcagcagca

SEQ ID NO: 2439049 - RNA, 19 nt, Homo sapiens
  misc_RNA (1)...(19): siRNA sense strand
gggcacaccacauggcaga

SEQ ID NO: 2439050 - RNA, 19 nt, Homo sapiens
  misc_RNA (1)...(19): siRNA sense strand
gagaagugauugaugugca

SEQ ID NO: 2439051 - RNA, 19 nt, Homo sapiens
  misc_RNA (1)...(19): siRNA sense strand
cagccugaguggacagcau

SEQ ID NO: 2439052 - RNA, 19 nt, Homo sapiens
  misc_RNA (1)...(19): siRNA sense strand
caggaggaaacaaaggcaa

SEQ ID NO: 2439053 - RNA, 19 nt, Homo sapiens
  misc_RNA (1)...(19): siRNA sense strand
gaaagaagggaaaaggaca

SEQ ID NO: 2439054 - RNA, 19 nt, Homo sapiens
  misc_RNA (1)...(19): siRNA sense strand
cggacaucauggagacagu

SEQ ID NO: 2439055 - RNA, 19 nt, Homo sapiens
  misc_RNA (1)...(19): siRNA sense strand
caccgauauuugagagcga

SEQ ID NO: 2439056 - RNA, 19 nt, Homo sapiens
  misc_RNA (1)...(19): siRNA sense strand
uucaagaccaugagaaaca

SEQ ID NO: 2439057 - RNA, 19 nt, Homo sapiens
  misc_RNA (1)...(19): siRNA sense strand
caucgaugcaggaggaaac

SEQ ID NO: 2439058 - RNA, 19 nt, Homo sapiens
  misc_RNA (1)...(19): siRNA sense strand
ugcaaggaggggagggaaa

SEQ ID NO: 2439059 - RNA, 19 nt, Homo sapiens
  misc_RNA (1)...(19): siRNA sense strand
gcauaaaggugucagccac

SEQ ID NO: 2439060 - RNA, 19 nt, Homo sapiens
  misc_RNA (1)...(19): siRNA sense strand
cauaaaggugucagccaca

SEQ ID NO: 2439061 - RNA, 19 nt, Homo sapiens
  misc_RNA (1)...(19): siRNA sense strand
auggagaguaacagcagua

SEQ ID NO: 2439062 - RNA, 19 nt, Homo sapiens
  misc_RNA (1)...(19): siRNA sense strand
ccaucgaugcaggaggaaa

SEQ ID NO: 2439063 - RNA, 19 nt, Homo sapiens
  misc_RNA (1)...(19): siRNA sense strand
ccucuuugccuauugggaa

SEQ ID NO: 2439064 - RNA, 19 nt, Homo sapiens
  misc_RNA (1)...(19): siRNA sense strand
ggggagggaaagaagggaa

SEQ ID NO: 2439065 - RNA, 19 nt, Homo sapiens
  misc_RNA (1)...(19): siRNA sense strand
ggcaaagagacaagagaaa

SEQ ID NO: 2439066 - RNA, 19 nt, Homo sapiens
  misc_RNA (1)...(19): siRNA sense strand
aggcaaugaacuucggaaa

SEQ ID NO: 2439067 - RNA, 19 nt, Homo sapiens
  misc_RNA (1)...(19): siRNA sense strand
aggaggaagaagaggaaga

SEQ ID NO: 2439068 - RNA, 19 nt, Homo sapiens
  misc_RNA (1)...(19): siRNA sense strand
cugaagaagaugaggagga

SEQ ID NO: 2439069 - RNA, 19 nt, Homo sapiens
  misc_RNA (1)...(19): siRNA sense strand
gugcaguggcaaagagaca

SEQ ID NO: 2439070 - RNA, 19 nt, Homo sapiens
  misc_RNA (1)...(19): siRNA sense strand
aggaagaggauuaugaaga

SEQ ID NO: 2439071 - RNA, 19 nt, Homo sapiens
  misc_RNA (1)...(19): siRNA sense strand
cugcaaagacauugaaaau

SEQ ID NO: 2439072 - RNA, 19 nt, Homo sapiens
  misc_RNA (1)...(19): siRNA sense strand
cugugaagaccuaacgaaa

SEQ ID NO: 2439073 - RNA, 19 nt, Homo sapiens
  misc_RNA (1)...(19): siRNA sense strand
caucacagcaagagaggau

SEQ ID NO: 2439074 - RNA, 19 nt, Homo sapiens
  misc_RNA (1)...(19): siRNA sense strand
ccaaggucaaggaaggaaa

SEQ ID NO: 2439075 - RNA, 19 nt, Homo sapiens
  misc_RNA (1)...(19): siRNA sense strand
ccucagaauuuguuaacca

SEQ ID NO: 2439076 - RNA, 19 nt, Homo sapiens
  misc_RNA (1)...(19): siRNA sense strand
gaacaaacucugaugagca

SEQ ID NO: 2439077 - RNA, 19 nt, Homo sapiens
  misc_RNA (1)...(19): siRNA sense strand
uggcaaagagacaagagaa

SEQ ID NO: 2439078 - RNA, 19 nt, Homo sapiens
  misc_RNA (1)...(19): siRNA sense strand
aagaagaugaggaggacga

SEQ ID NO: 2439079 - RNA, 19 nt, Homo sapiens
  misc_RNA (1)...(19): siRNA sense strand
aggaagaagaggaagagga

SEQ ID NO: 2439080 - RNA, 19 nt, Homo sapiens
  misc_RNA (1)...(19): siRNA sense strand
gaagacugcagaagggaau

SEQ ID NO: 2439081 - RNA, 19 nt, Homo sapiens
  misc_RNA (1)...(19): siRNA sense strand
uggauagagagaugaacua

SEQ ID NO: 2439082 - RNA, 19 nt, Homo sapiens
  misc_RNA (1)...(19): siRNA sense strand
uggcuuacaucauggaaaa

SEQ ID NO: 2439083 - RNA, 19 nt, Homo sapiens
  misc_RNA (1)...(19): siRNA sense strand
augaagaugacaaggauga

SEQ ID NO: 2439084 - RNA, 19 nt, Homo sapiens
  misc_RNA (1)...(19): siRNA sense strand
ccaucaagcaagagauugu

SEQ ID NO: 2439085 - RNA, 19 nt, Homo sapiens
  misc_RNA (1)...(19): siRNA sense strand
aggauuaugaagaugacaa

SEQ ID NO: 2439086 - RNA, 19 nt, Homo sapiens
  misc_RNA (1)...(19): siRNA sense strand
ugggcaaaccucagaauuu

SEQ ID NO: 2439087 - RNA, 19 nt, Homo sapiens
  misc_RNA (1)...(19): siRNA sense strand
cggaagagagguaaaagaa

SEQ ID NO: 2439088 - RNA, 19 nt, Homo sapiens
  misc_RNA (1)...(19): siRNA sense strand
gagaggaugcugagaccau

SEQ ID NO: 2439089 - RNA, 19 nt, Homo sapiens
  misc_RNA (1)...(19): siRNA sense strand
aaaaugaggaggaggaaga

SEQ ID NO: 2439090 - RNA, 19 nt, Homo sapiens
  misc_RNA (1)...(19): siRNA sense strand
agaucaacccagugcaaca

SEQ ID NO: 2439091 - RNA, 19 nt, Homo sapiens
  misc_RNA (1)...(19): siRNA sense strand
uuaaagaaacccaggaacu

SEQ ID NO: 2439092 - RNA, 19 nt, Homo sapiens
  misc_RNA (1)...(19): siRNA sense strand
augacaaggaugaugauau

SEQ ID NO: 2439093 - RNA, 19 nt, Homo sapiens
  misc_RNA (1)...(19): siRNA sense strand
gguuaaagaagaaagccca

SEQ ID NO: 2439094 - RNA, 19 nt, Homo sapiens
  misc_RNA (1)...(19): siRNA sense strand
cuguagaagaccugaagga

SEQ ID NO: 2439095 - RNA, 19 nt, Homo sapiens
  misc_RNA (1)...(19): siRNA sense strand
cugggaguauagugaacaa

SEQ ID NO: 2439096 - RNA, 19 nt, Homo sapiens
  misc_RNA (1)...(19): siRNA sense strand
gguacagaauccaagagau

SEQ ID NO: 2439097 - RNA, 19 nt, Homo sapiens
  misc_RNA (1)...(19): siRNA sense strand
gaauccaagagaugagaga

SEQ ID NO: 2439098 - RNA, 19 nt, Homo sapiens
  misc_RNA (1)...(19): siRNA sense strand
cuggaggccuuguaggauu

SEQ ID NO: 2439099 - RNA, 19 nt, Homo sapiens
  misc_RNA (1)...(19): siRNA sense strand
cagccuaguguaagcggaa

SEQ ID NO: 2439100 - RNA, 19 nt, Homo sapiens
  misc_RNA (1)...(19): siRNA sense strand
gcaaagagacaagagaaaa

SEQ ID NO: 2439101 - RNA, 19 nt, Homo sapiens
  misc_RNA (1)...(19): siRNA sense strand
gcuugaaauccucauuaaa

SEQ ID NO: 2439102 - RNA, 19 nt, Homo sapiens
  misc_RNA (1)...(19): siRNA sense strand
ugugaagaccuaacgaaau

SEQ ID NO: 2439103 - RNA, 19 nt, Homo sapiens
  misc_RNA (1)...(19): siRNA sense strand
accaagaugaagagguuau

SEQ ID NO: 2439104 - RNA, 19 nt, Homo sapiens
  misc_RNA (1)...(19): siRNA sense strand
gggugaacagccaacuaaa

SEQ ID NO: 2439105 - RNA, 19 nt, Homo sapiens
  misc_RNA (1)...(19): siRNA sense strand
augaggaggaggaagaaga

SEQ ID NO: 2439106 - RNA, 19 nt, Homo sapiens
  misc_RNA (1)...(19): siRNA sense strand
cggaaacugaauaagguga

SEQ ID NO: 2439107 - RNA, 19 nt, Homo sapiens
  misc_RNA (1)...(19): siRNA sense strand
ucugaguggaaccgagaua

SEQ ID NO: 2439108 - RNA, 19 nt, Homo sapiens
  misc_RNA (1)...(19): siRNA sense strand
ggauuaaggauaccaacau

SEQ ID NO: 2439109 - RNA, 19 nt, Homo sapiens
  misc_RNA (1)...(19): siRNA sense strand
cagaugcagcaaaggagaa

SEQ ID NO: 2439110 - RNA, 19 nt, Homo sapiens
  misc_RNA (1)...(19): siRNA sense strand
augcaguccugaagaagau

SEQ ID NO: 2439111 - RNA, 19 nt, Homo sapiens
  misc_RNA (1)...(19): siRNA sense strand
cugaaaaugaggaggagga

SEQ ID NO: 2439112 - RNA, 19 nt, Homo sapiens
  misc_RNA (1)...(19): siRNA sense strand
ggaugaugauauuagugau

SEQ ID NO: 2439113 - RNA, 19 nt, Homo sapiens
  misc_RNA (1)...(19): siRNA sense strand
aguaaagaagucacggaga

SEQ ID NO: 2439114 - RNA, 19 nt, Homo sapiens
  misc_RNA (1)...(19): siRNA sense strand
ggaaacugaauaaggugau

SEQ ID NO: 2439115 - RNA, 19 nt, Homo sapiens
  misc_RNA (1)...(19): siRNA sense strand
acagaauccuagagacaac

SEQ ID NO: 2439116 - RNA, 19 nt, Homo sapiens
  misc_RNA (1)...(19): siRNA sense strand
ccaguaugaagcuaauaaa

SEQ ID NO: 2439117 - RNA, 19 nt, Homo sapiens
  misc_RNA (1)...(19): siRNA sense strand
gggccucaacacagaauau

SEQ ID NO: 2439118 - RNA, 19 nt, Homo sapiens
  misc_RNA (1)...(19): siRNA sense strand
caacuugggugaacagcca

SEQ ID NO: 2439119 - RNA, 19 nt, Homo sapiens
  misc_RNA (1)...(19): siRNA sense strand
cacucauggucgagagaaa

SEQ ID NO: 2439120 - RNA, 19 nt, Homo sapiens
  misc_RNA (1)...(19): siRNA sense strand
augugaagaaugugggaaa

SEQ ID NO: 2439121 - RNA, 19 nt, Homo sapiens
  misc_RNA (1)...(19): siRNA sense strand
gaacauuuccugaagccaa

SEQ ID NO: 2439122 - RNA, 19 nt, Homo sapiens
  misc_RNA (1)...(19): siRNA sense strand
gggagauuccauaagacaa

SEQ ID NO: 2439123 - RNA, 19 nt, Homo sapiens
  misc_RNA (1)...(19): siRNA sense strand
ccaacaggcaccagcggaa

SEQ ID NO: 2439124 - RNA, 19 nt, Homo sapiens
  misc_RNA (1)...(19): siRNA sense strand
ccguaugaaugugggaaau

SEQ ID NO: 2439125 - RNA, 19 nt, Homo sapiens
  misc_RNA (1)...(19): siRNA sense strand
acacauauaaggagccaca

SEQ ID NO: 2439126 - RNA, 19 nt, Homo sapiens
  misc_RNA (1)...(19): siRNA sense strand
augugggaaaugugggaaa

SEQ ID NO: 2439127 - RNA, 19 nt, Homo sapiens
  misc_RNA (1)...(19): siRNA sense strand
gggaaagucauucgggagu

SEQ ID NO: 2439128 - RNA, 19 nt, Homo sapiens
  misc_RNA (1)...(19): siRNA sense strand
uguauaccgcagagacaaa

SEQ ID NO: 2439129 - RNA, 19 nt, Homo sapiens
  misc_RNA (1)...(19): siRNA sense strand
cuggaaaauucuaggaacu

SEQ ID NO: 2439130 - RNA, 19 nt, Homo sapiens
  misc_RNA (1)...(19): siRNA sense strand
acacaacacucauggucga

SEQ ID NO: 2439131 - RNA, 19 nt, Homo sapiens
  misc_RNA (1)...(19): siRNA sense strand
guuguauaccgcagagaca

SEQ ID NO: 2439132 - RNA, 19 nt, Homo sapiens
  misc_RNA (1)...(19): siRNA sense strand
gucuuaaacgauagucaaa

SEQ ID NO: 2439133 - RNA, 19 nt, Homo sapiens
  misc_RNA (1)...(19): siRNA sense strand
cagacguggcugugaacuu

SEQ ID NO: 2439134 - RNA, 19 nt, Homo sapiens
  misc_RNA (1)...(19): siRNA sense strand
cgaaugugggagagccuuu

SEQ ID NO: 2439135 - RNA, 19 nt, Homo sapiens
  misc_RNA (1)...(19): siRNA sense strand
uguuagcauuugugaagau

SEQ ID NO: 2439136 - RNA, 19 nt, Homo sapiens
  misc_RNA (1)...(19): siRNA sense strand
gggaaaugugggaaagccu

SEQ ID NO: 2439137 - RNA, 19 nt, Homo sapiens
  misc_RNA (1)...(19): siRNA sense strand
gcauucauagauugggcaa

SEQ ID NO: 2439138 - RNA, 19 nt, Homo sapiens
  misc_RNA (1)...(19): siRNA sense strand
accguaugaaugugggaaa

SEQ ID NO: 2439139 - RNA, 19 nt, Homo sapiens
  misc_RNA (1)...(19): siRNA sense strand
cgagagaaaauguaugauu

SEQ ID NO: 2439140 - RNA, 19 nt, Homo sapiens
  misc_RNA (1)...(19): siRNA sense strand
agucauugcacuggagaga

SEQ ID NO: 2439141 - RNA, 19 nt, Homo sapiens
  misc_RNA (1)...(19): siRNA sense strand
acaacgaagacgauggagu

SEQ ID NO: 2439142 - RNA, 19 nt, Homo sapiens
  misc_RNA (1)...(19): siRNA sense strand
ccgccaaagcccagaagau

SEQ ID NO: 2439143 - RNA, 19 nt, Homo sapiens
  misc_RNA (1)...(19): siRNA sense strand
aggcacugcugguggagga

SEQ ID NO: 2439144 - RNA, 19 nt, Homo sapiens
  misc_RNA (1)...(19): siRNA sense strand
guucaaggccugugaggac

SEQ ID NO: 2439145 - RNA, 19 nt, Homo sapiens
  misc_RNA (1)...(19): siRNA sense strand
ccgcagugaaaccgccaaa

SEQ ID NO: 2439146 - RNA, 19 nt, Homo sapiens
  misc_RNA (1)...(19): siRNA sense strand
ccuacagggccgaguacga

SEQ ID NO: 2439147 - RNA, 19 nt, Homo sapiens
  misc_RNA (1)...(19): siRNA sense strand
agccagugugaaagacaua

SEQ ID NO: 2439148 - RNA, 19 nt, Homo sapiens
  misc_RNA (1)...(19): siRNA sense strand
ccgccaaagcccagaagau

SEQ ID NO: 2439149 - RNA, 19 nt, Homo sapiens
  misc_RNA (1)...(19): siRNA sense strand
aggcacugcugguggagga

SEQ ID NO: 2439150 - RNA, 19 nt, Homo sapiens
  misc_RNA (1)...(19): siRNA sense strand
guucaaggccugugaggac

SEQ ID NO: 2439151 - RNA, 19 nt, Homo sapiens
  misc_RNA (1)...(19): siRNA sense strand
ccgcagugaaaccgccaaa

SEQ ID NO: 2439152 - RNA, 19 nt, Homo sapiens
  misc_RNA (1)...(19): siRNA sense strand
ccuacagggccgaguacga

SEQ ID NO: 2439153 - RNA, 19 nt, Homo sapiens
  misc_RNA (1)...(19): siRNA sense strand
agccagugugaaagacaua

SEQ ID NO: 2439154 - RNA, 19 nt, Homo sapiens
  misc_RNA (1)...(19): siRNA sense strand
ccgagugaggguugaacua

SEQ ID NO: 2439155 - RNA, 19 nt, Homo sapiens
  misc_RNA (1)...(19): siRNA sense strand
gggcgguacggaggagaaa

SEQ ID NO: 2439156 - RNA, 19 nt, Homo sapiens
  misc_RNA (1)...(19): siRNA sense strand
gguacggaggagaaaccaa

SEQ ID NO: 2439157 - RNA, 19 nt, Homo sapiens
  misc_RNA (1)...(19): siRNA sense strand
ggagaguuagaaagggcuu

SEQ ID NO: 2439158 - RNA, 19 nt, Homo sapiens
  misc_RNA (1)...(19): siRNA sense strand
ugcuaugaguguggcgaaa

SEQ ID NO: 2439159 - RNA, 19 nt, Homo sapiens
  misc_RNA (1)...(19): siRNA sense strand
gaagaaaguccgagaggga

SEQ ID NO: 2439160 - RNA, 19 nt, Homo sapiens
  misc_RNA (1)...(19): siRNA sense strand
cgucaaaucaccagaaaau

SEQ ID NO: 2439161 - RNA, 19 nt, Homo sapiens
  misc_RNA (1)...(19): siRNA sense strand
ccagcaacacggugagcaa

SEQ ID NO: 2439162 - RNA, 19 nt, Homo sapiens
  misc_RNA (1)...(19): siRNA sense strand
agaaaguccgagagggaga

SEQ ID NO: 2439163 - RNA, 19 nt, Homo sapiens
  misc_RNA (1)...(19): siRNA sense strand
uggaagaugaagaggagga

SEQ ID NO: 2439164 - RNA, 19 nt, Homo sapiens
  misc_RNA (1)...(19): siRNA sense strand
aggugaagcggcuggagaa

SEQ ID NO: 2439165 - RNA, 19 nt, Homo sapiens
  misc_RNA (1)...(19): siRNA sense strand
aggaaaagguggaagaaag

SEQ ID NO: 2439166 - RNA, 19 nt, Homo sapiens
  misc_RNA (1)...(19): siRNA sense strand
agucaguggcccuggaaca

SEQ ID NO: 2439167 - RNA, 19 nt, Homo sapiens
  misc_RNA (1)...(19): siRNA sense strand
ucgccagaacaucgagaaa

SEQ ID NO: 2439168 - RNA, 19 nt, Homo sapiens
  misc_RNA (1)...(19): siRNA sense strand
ugaagaaaguggauagccu

SEQ ID NO: 2439169 - RNA, 19 nt, Homo sapiens
  misc_RNA (1)...(19): siRNA sense strand
ugccaaaugaccaggaaga

SEQ ID NO: 2439170 - RNA, 19 nt, Homo sapiens
  misc_RNA (1)...(19): siRNA sense strand
cgugaagggcauccagaau

SEQ ID NO: 2439171 - RNA, 19 nt, Homo sapiens
  misc_RNA (1)...(19): siRNA sense strand
gagaagucccgcaagguca

SEQ ID NO: 2439172 - RNA, 19 nt, Homo sapiens
  misc_RNA (1)...(19): siRNA sense strand
augaggaggcccuggaaga

SEQ ID NO: 2439173 - RNA, 19 nt, Homo sapiens
  misc_RNA (1)...(19): siRNA sense strand
aagacagugccgaggaaaa

SEQ ID NO: 2439174 - RNA, 19 nt, Homo sapiens
  misc_RNA (1)...(19): siRNA sense strand
ggaacacagaggaggccau

SEQ ID NO: 2439175 - RNA, 19 nt, Homo sapiens
  misc_RNA (1)...(19): siRNA sense strand
acaagauggagcagcgaca

SEQ ID NO: 2439176 - RNA, 19 nt, Homo sapiens
  misc_RNA (1)...(19): siRNA sense strand
ucuguagagaggagagaga

SEQ ID NO: 2439177 - RNA, 19 nt, Homo sapiens
  misc_RNA (1)...(19): siRNA sense strand
augcagaaaaugagaccaa

SEQ ID NO: 2439178 - RNA, 19 nt, Homo sapiens
  misc_RNA (1)...(19): siRNA sense strand
ccgaggaaaagguggaaga

SEQ ID NO: 2439179 - RNA, 19 nt, Homo sapiens
  misc_RNA (1)...(19): siRNA sense strand
gaggaaaagguggaagaaa

SEQ ID NO: 2439180 - RNA, 19 nt, Homo sapiens
  misc_RNA (1)...(19): siRNA sense strand
aggcacagaagguacgcua

SEQ ID NO: 2439181 - RNA, 19 nt, Homo sapiens
  misc_RNA (1)...(19): siRNA sense strand
cugacaugcggcaggaaaa

SEQ ID NO: 2439182 - RNA, 19 nt, Homo sapiens
  misc_RNA (1)...(19): siRNA sense strand
aguggauagccucaagaaa

SEQ ID NO: 2439183 - RNA, 19 nt, Homo sapiens
  misc_RNA (1)...(19): siRNA sense strand
caaaugaccaggaagagga

SEQ ID NO: 2439184 - RNA, 19 nt, Homo sapiens
  misc_RNA (1)...(19): siRNA sense strand
aaaguagggcagagaaaau

SEQ ID NO: 2439185 - RNA, 19 nt, Homo sapiens
  misc_RNA (1)...(19): siRNA sense strand
augaagaggaggagucagu

SEQ ID NO: 2439186 - RNA, 19 nt, Homo sapiens
  misc_RNA (1)...(19): siRNA sense strand
ggaagaagggugugggcaa

SEQ ID NO: 2439187 - RNA, 19 nt, Homo sapiens
  misc_RNA (1)...(19): siRNA sense strand
aauacgaagacgaggcaaa

SEQ ID NO: 2439188 - RNA, 19 nt, Homo sapiens
  misc_RNA (1)...(19): siRNA sense strand
ggaaauggaagaagggugu

SEQ ID NO: 2439189 - RNA, 19 nt, Homo sapiens
  misc_RNA (1)...(19): siRNA sense strand
acaaaucacucgacggcau

SEQ ID NO: 2439190 - RNA, 19 nt, Homo sapiens
  misc_RNA (1)...(19): siRNA sense strand
gcgaucuacacuacggaaa

SEQ ID NO: 2439191 - RNA, 19 nt, Homo sapiens
  misc_RNA (1)...(19): siRNA sense strand
cguacaaguuacagcuguu

SEQ ID NO: 2439192 - RNA, 19 nt, Homo sapiens
  misc_RNA (1)...(19): siRNA sense strand
acacugagcucauggcgau

SEQ ID NO: 2439193 - RNA, 19 nt, Homo sapiens
  misc_RNA (1)...(19): siRNA sense strand
aaguucaacagaaggcaaa

SEQ ID NO: 2439194 - RNA, 19 nt, Homo sapiens
  misc_RNA (1)...(19): siRNA sense strand
cuguguucuugauggcaua

SEQ ID NO: 2439195 - RNA, 19 nt, Homo sapiens
  misc_RNA (1)...(19): siRNA sense strand
acuccagaggaaagaggaa

SEQ ID NO: 2439196 - RNA, 19 nt, Homo sapiens
  misc_RNA (1)...(19): siRNA sense strand
acauuggaguuuugggaau

SEQ ID NO: 2439197 - RNA, 19 nt, Homo sapiens
  misc_RNA (1)...(19): siRNA sense strand
cgaucuacacuacggaaaa

SEQ ID NO: 2439198 - RNA, 19 nt, Homo sapiens
  misc_RNA (1)...(19): siRNA sense strand
gggugugggcaaagggaac

SEQ ID NO: 2439199 - RNA, 19 nt, Homo sapiens
  misc_RNA (1)...(19): siRNA sense strand
cagaaggcaaauacgaaga

SEQ ID NO: 2439200 - RNA, 19 nt, Homo sapiens
  misc_RNA (1)...(19): siRNA sense strand
ccucuuugugcuuggauuu

SEQ ID NO: 2439201 - RNA, 19 nt, Homo sapiens
  misc_RNA (1)...(19): siRNA sense strand
aggaaagaggaauccggaa

SEQ ID NO: 2439202 - RNA, 19 nt, Homo sapiens
  misc_RNA (1)...(19): siRNA sense strand
gaaguucaacagaaggcaa

SEQ ID NO: 2439203 - RNA, 19 nt, Homo sapiens
  misc_RNA (1)...(19): siRNA sense strand
ggauaacaggaaucgauca

SEQ ID NO: 2439204 - RNA, 19 nt, Homo sapiens
  misc_RNA (1)...(19): siRNA sense strand
guucaacagaaggcaaaua

SEQ ID NO: 2439205 - RNA, 19 nt, Homo sapiens
  misc_RNA (1)...(19): siRNA sense strand
ggaagaagggugugggcaa

SEQ ID NO: 2439206 - RNA, 19 nt, Homo sapiens
  misc_RNA (1)...(19): siRNA sense strand
aauacgaagacgaggcaaa

SEQ ID NO: 2439207 - RNA, 19 nt, Homo sapiens
  misc_RNA (1)...(19): siRNA sense strand
ggaaauggaagaagggugu

SEQ ID NO: 2439208 - RNA, 19 nt, Homo sapiens
  misc_RNA (1)...(19): siRNA sense strand
acaaaucacucgacggcau

SEQ ID NO: 2439209 - RNA, 19 nt, Homo sapiens
  misc_RNA (1)...(19): siRNA sense strand
gcgaucuacacuacggaaa

SEQ ID NO: 2439210 - RNA, 19 nt, Homo sapiens
  misc_RNA (1)...(19): siRNA sense strand
cguacaaguuacagcuguu

SEQ ID NO: 2439211 - RNA, 19 nt, Homo sapiens
  misc_RNA (1)...(19): siRNA sense strand
acacugagcucauggcgau

SEQ ID NO: 2439212 - RNA, 19 nt, Homo sapiens
  misc_RNA (1)...(19): siRNA sense strand
aaguucaacagaaggcaaa

SEQ ID NO: 2439213 - RNA, 19 nt, Homo sapiens
  misc_RNA (1)...(19): siRNA sense strand
cuguguucuugauggcaua

SEQ ID NO: 2439214 - RNA, 19 nt, Homo sapiens
  misc_RNA (1)...(19): siRNA sense strand
acuccagaggaaagaggaa

SEQ ID NO: 2439215 - RNA, 19 nt, Homo sapiens
  misc_RNA (1)...(19): siRNA sense strand
acauuggaguuuugggaau

SEQ ID NO: 2439216 - RNA, 19 nt, Homo sapiens
  misc_RNA (1)...(19): siRNA sense strand
cgaucuacacuacggaaaa

SEQ ID NO: 2439217 - RNA, 19 nt, Homo sapiens
  misc_RNA (1)...(19): siRNA sense strand
gggugugggcaaagggaac

SEQ ID NO: 2439218 - RNA, 19 nt, Homo sapiens
  misc_RNA (1)...(19): siRNA sense strand
cagaaggcaaauacgaaga

SEQ ID NO: 2439219 - RNA, 19 nt, Homo sapiens
  misc_RNA (1)...(19): siRNA sense strand
ccucuuugugcuuggauuu

SEQ ID NO: 2439220 - RNA, 19 nt, Homo sapiens
  misc_RNA (1)...(19): siRNA sense strand
aggaaagaggaauccggaa

SEQ ID NO: 2439221 - RNA, 19 nt, Homo sapiens
  misc_RNA (1)...(19): siRNA sense strand
gaaguucaacagaaggcaa

SEQ ID NO: 2439222 - RNA, 19 nt, Homo sapiens
  misc_RNA (1)...(19): siRNA sense strand
ggauaacaggaaucgauca

SEQ ID NO: 2439223 - RNA, 19 nt, Homo sapiens
  misc_RNA (1)...(19): siRNA sense strand
guucaacagaaggcaaaua

SEQ ID NO: 2439224 - RNA, 19 nt, Homo sapiens
  misc_RNA (1)...(19): siRNA sense strand
ucugcgagaucguggccaa

SEQ ID NO: 2439225 - RNA, 19 nt, Homo sapiens
  misc_RNA (1)...(19): siRNA sense strand
augaaagagcucaacaaga

SEQ ID NO: 2439226 - RNA, 19 nt, Homo sapiens
  misc_RNA (1)...(19): siRNA sense strand
ugaucauguuggagagcaa

SEQ ID NO: 2439227 - RNA, 19 nt, Homo sapiens
  misc_RNA (1)...(19): siRNA sense strand
gagacaucguugugcggaa

SEQ ID NO: 2439228 - RNA, 19 nt, Homo sapiens
  misc_RNA (1)...(19): siRNA sense strand
ccuccaagcugcugcguga

SEQ ID NO: 2439229 - RNA, 19 nt, Homo sapiens
  misc_RNA (1)...(19): siRNA sense strand
cugagaaggaugagaggca

SEQ ID NO: 2439230 - RNA, 19 nt, Homo sapiens
  misc_RNA (1)...(19): siRNA sense strand
guaucuuauccgauggaaa

SEQ ID NO: 2439231 - RNA, 19 nt, Homo sapiens
  misc_RNA (1)...(19): siRNA sense strand
gaagaaggguucacgcaca

SEQ ID NO: 2439232 - RNA, 19 nt, Homo sapiens
  misc_RNA (1)...(19): siRNA sense strand
augagaggcacuuuggaaa

SEQ ID NO: 2439233 - RNA, 19 nt, Homo sapiens
  misc_RNA (1)...(19): siRNA sense strand
cccauaaacggaagcgaau

SEQ ID NO: 2439234 - RNA, 19 nt, Homo sapiens
  misc_RNA (1)...(19): siRNA sense strand
gagagcaagauauggguga

SEQ ID NO: 2439235 - RNA, 19 nt, Homo sapiens
  misc_RNA (1)...(19): siRNA sense strand
gagcaagauaugggugaau

SEQ ID NO: 2439236 - RNA, 19 nt, Homo sapiens
  misc_RNA (1)...(19): siRNA sense strand
cggagaaggacuacgucuu

SEQ ID NO: 2439237 - RNA, 19 nt, Homo sapiens
  misc_RNA (1)...(19): siRNA sense strand
gcagaagccaucagggacu

SEQ ID NO: 2439238 - RNA, 19 nt, Homo sapiens
  misc_RNA (1)...(19): siRNA sense strand
ggaagcuggaagcggagaa

SEQ ID NO: 2439239 - RNA, 19 nt, Homo sapiens
  misc_RNA (1)...(19): siRNA sense strand
agaggaagcuggaagcgga

SEQ ID NO: 2439240 - RNA, 19 nt, Homo sapiens
  misc_RNA (1)...(19): siRNA sense strand
gggacuuugugaaggccuu

SEQ ID NO: 2439241 - RNA, 19 nt, Homo sapiens
  misc_RNA (1)...(19): siRNA sense strand
gagaaggaugagaggcacu

SEQ ID NO: 2439242 - RNA, 19 nt, Homo sapiens
  misc_RNA (1)...(19): siRNA sense strand
ugaaugaucauguuggaga

SEQ ID NO: 2439243 - RNA, 19 nt, Homo sapiens
  misc_RNA (1)...(19): siRNA sense strand
gcggaaggaagaaggguuc

SEQ ID NO: 2439244 - RNA, 19 nt, Homo sapiens
  misc_RNA (1)...(19): siRNA sense strand
cagccacagacgacagcaa

SEQ ID NO: 2439245 - RNA, 19 nt, Homo sapiens
  misc_RNA (1)...(19): siRNA sense strand
uccaaggacaagaggauca

SEQ ID NO: 2439246 - RNA, 19 nt, Homo sapiens
  misc_RNA (1)...(19): siRNA sense strand
ccaaaugccucgugcggag

SEQ ID NO: 2439247 - RNA, 19 nt, Homo sapiens
  misc_RNA (1)...(19): siRNA sense strand
cuggaagacgugaacgaga

SEQ ID NO: 2439248 - RNA, 19 nt, Homo sapiens
  misc_RNA (1)...(19): siRNA sense strand
ucccauaaacggaagcgaa

SEQ ID NO: 2439249 - RNA, 19 nt, Homo sapiens
  misc_RNA (1)...(19): siRNA sense strand
ggaugaacagacagacaca

SEQ ID NO: 2439250 - RNA, 19 nt, Homo sapiens
  misc_RNA (1)...(19): siRNA sense strand
caggaugaacagacagaca

SEQ ID NO: 2439251 - RNA, 19 nt, Homo sapiens
  misc_RNA (1)...(19): siRNA sense strand
agacagacacagagaaccu

SEQ ID NO: 2439252 - RNA, 19 nt, Homo sapiens
  misc_RNA (1)...(19): siRNA sense strand
gaaauugggagaagugcca

SEQ ID NO: 2439253 - RNA, 19 nt, Homo sapiens
  misc_RNA (1)...(19): siRNA sense strand
ccguggaaacgcugacaga

SEQ ID NO: 2439254 - RNA, 19 nt, Homo sapiens
  misc_RNA (1)...(19): siRNA sense strand
ggccaagacaggcgagacu

SEQ ID NO: 2439255 - RNA, 19 nt, Homo sapiens
  misc_RNA (1)...(19): siRNA sense strand
gggagaagugccaagucuu

SEQ ID NO: 2439256 - RNA, 19 nt, Homo sapiens
  misc_RNA (1)...(19): siRNA sense strand
agaugcaacaaauggaaga

SEQ ID NO: 2439257 - RNA, 19 nt, Homo sapiens
  misc_RNA (1)...(19): siRNA sense strand
gagcagauuccucggagca

SEQ ID NO: 2439258 - RNA, 19 nt, Homo sapiens
  misc_RNA (1)...(19): siRNA sense strand
gggaauugaugguuagcga

SEQ ID NO: 2439259 - RNA, 19 nt, Homo sapiens
  misc_RNA (1)...(19): siRNA sense strand
auguggaccuagagaguga

SEQ ID NO: 2439260 - RNA, 19 nt, Homo sapiens
  misc_RNA (1)...(19): siRNA sense strand
auggagaagggcaggcaua

SEQ ID NO: 2439261 - RNA, 19 nt, Homo sapiens
  misc_RNA (1)...(19): siRNA sense strand
accuagagagugagaagua

SEQ ID NO: 2439262 - RNA, 19 nt, Homo sapiens
  misc_RNA (1)...(19): siRNA sense strand
ggaaagguguguuugcagu

SEQ ID NO: 2439263 - RNA, 19 nt, Homo sapiens
  misc_RNA (1)...(19): siRNA sense strand
gagacgggcugaugcacga

SEQ ID NO: 2439264 - RNA, 19 nt, Homo sapiens
  misc_RNA (1)...(19): siRNA sense strand
gggaauugaugguuagcga

SEQ ID NO: 2439265 - RNA, 19 nt, Homo sapiens
  misc_RNA (1)...(19): siRNA sense strand
auguggaccuagagaguga

SEQ ID NO: 2439266 - RNA, 19 nt, Homo sapiens
  misc_RNA (1)...(19): siRNA sense strand
auggagaagggcaggcaua

SEQ ID NO: 2439267 - RNA, 19 nt, Homo sapiens
  misc_RNA (1)...(19): siRNA sense strand
accuagagagugagaagua

SEQ ID NO: 2439268 - RNA, 19 nt, Homo sapiens
  misc_RNA (1)...(19): siRNA sense strand
gcaccgauaaggagcugaa

SEQ ID NO: 2439269 - RNA, 19 nt, Homo sapiens
  misc_RNA (1)...(19): siRNA sense strand
ggaaagguguguuugcagu

SEQ ID NO: 2439270 - RNA, 19 nt, Homo sapiens
  misc_RNA (1)...(19): siRNA sense strand
gagacgggcugaugcacga

SEQ ID NO: 2439271 - RNA, 19 nt, Homo sapiens
  misc_RNA (1)...(19): siRNA sense strand
cuuaagaaguauugggaca

SEQ ID NO: 2439272 - RNA, 19 nt, Homo sapiens
  misc_RNA (1)...(19): siRNA sense strand
cugaaguaggagaggauaa

SEQ ID NO: 2439273 - RNA, 19 nt, Homo sapiens
  misc_RNA (1)...(19): siRNA sense strand
ggcaauaagagaagaaaga

SEQ ID NO: 2439274 - RNA, 19 nt, Homo sapiens
  misc_RNA (1)...(19): siRNA sense strand
agaagaaagaugaguagua

SEQ ID NO: 2439275 - RNA, 19 nt, Homo sapiens
  misc_RNA (1)...(19): siRNA sense strand
ugaauaugccagagaggaa

SEQ ID NO: 2439276 - RNA, 19 nt, Homo sapiens
  misc_RNA (1)...(19): siRNA sense strand
gaagaaagaugaguaguaa

SEQ ID NO: 2439277 - RNA, 19 nt, Homo sapiens
  misc_RNA (1)...(19): siRNA sense strand
gagaauucugggaggaaau

SEQ ID NO: 2439278 - RNA, 19 nt, Homo sapiens
  misc_RNA (1)...(19): siRNA sense strand
gggaaucgaagaaggaaau

SEQ ID NO: 2439279 - RNA, 19 nt, Homo sapiens
  misc_RNA (1)...(19): siRNA sense strand
agaaagaugaguaguaaga

SEQ ID NO: 2439280 - RNA, 19 nt, Homo sapiens
  misc_RNA (1)...(19): siRNA sense strand
ugggaaucgaagaaggaaa

SEQ ID NO: 2439281 - RNA, 19 nt, Homo sapiens
  misc_RNA (1)...(19): siRNA sense strand
ggauaaugacagaaaugau

SEQ ID NO: 2439282 - RNA, 19 nt, Homo sapiens
  misc_RNA (1)...(19): siRNA sense strand
ggacguggguuggcaauaa

SEQ ID NO: 2439283 - RNA, 19 nt, Homo sapiens
  misc_RNA (1)...(19): siRNA sense strand
acucacaccaggagaggaa

SEQ ID NO: 2439284 - RNA, 19 nt, Homo sapiens
  misc_RNA (1)...(19): siRNA sense strand
cugaaguagaacaaguaaa

SEQ ID NO: 2439285 - RNA, 19 nt, Homo sapiens
  misc_RNA (1)...(19): siRNA sense strand
ugucauuguaacugguaua

SEQ ID NO: 2439286 - RNA, 19 nt, Homo sapiens
  misc_RNA (1)...(19): siRNA sense strand
cuggagaugcugaggauga

SEQ ID NO: 2439287 - RNA, 19 nt, Homo sapiens
  misc_RNA (1)...(19): siRNA sense strand
gaaucuacguucuguauuu

SEQ ID NO: 2439288 - RNA, 19 nt, Homo sapiens
  misc_RNA (1)...(19): siRNA sense strand
cagucagaaaugugguuaa

SEQ ID NO: 2439289 - RNA, 19 nt, Homo sapiens
  misc_RNA (1)...(19): siRNA sense strand
ccaaugaaguuguuccgaa

SEQ ID NO: 2439290 - RNA, 19 nt, Homo sapiens
  misc_RNA (1)...(19): siRNA sense strand
aagagaagaaagaugagua

SEQ ID NO: 2439291 - RNA, 19 nt, Homo sapiens
  misc_RNA (1)...(19): siRNA sense strand
cagcagucuucuuggacau

SEQ ID NO: 2439292 - RNA, 19 nt, Homo sapiens
  misc_RNA (1)...(19): siRNA sense strand
caggaagaaauaugccaaa

SEQ ID NO: 2439293 - RNA, 19 nt, Homo sapiens
  misc_RNA (1)...(19): siRNA sense strand
auucaaucacgcaaagaaa

SEQ ID NO: 2439294 - RNA, 19 nt, Homo sapiens
  misc_RNA (1)...(19): siRNA sense strand
gaacacaaaacuuggaaau

SEQ ID NO: 2439295 - RNA, 19 nt, Homo sapiens
  misc_RNA (1)...(19): siRNA sense strand
cagacaucacagucagaaa

SEQ ID NO: 2439296 - RNA, 19 nt, Homo sapiens
  misc_RNA (1)...(19): siRNA sense strand
agagaauucugggaggaaa

SEQ ID NO: 2439297 - RNA, 19 nt, Homo sapiens
  misc_RNA (1)...(19): siRNA sense strand
acaaauuacagaagcacau

SEQ ID NO: 2439298 - RNA, 19 nt, Homo sapiens
  misc_RNA (1)...(19): siRNA sense strand
aauugaaccaguugggauu

SEQ ID NO: 2439299 - RNA, 19 nt, Homo sapiens
  misc_RNA (1)...(19): siRNA sense strand
guagaacaacaaaggauuu

SEQ ID NO: 2439300 - RNA, 19 nt, Homo sapiens
  misc_RNA (1)...(19): siRNA sense strand
caauaagagaagaaagaug

SEQ ID NO: 2439301 - RNA, 19 nt, Homo sapiens
  misc_RNA (1)...(19): siRNA sense strand
acaaacaaacauacagaca

SEQ ID NO: 2439302 - RNA, 19 nt, Homo sapiens
  misc_RNA (1)...(19): siRNA sense strand
aggagaggauaaugacaga

SEQ ID NO: 2439303 - RNA, 19 nt, Homo sapiens
  misc_RNA (1)...(19): siRNA sense strand
cuuacugugccuuggauua

SEQ ID NO: 2439304 - RNA, 19 nt, Homo sapiens
  misc_RNA (1)...(19): siRNA sense strand
gccugaaguaggagaggau

SEQ ID NO: 2439305 - RNA, 19 nt, Homo sapiens
  misc_RNA (1)...(19): siRNA sense strand
gaauuagaggaaauggauu

SEQ ID NO: 2439306 - RNA, 19 nt, Homo sapiens
  misc_RNA (1)...(19): siRNA sense strand
ggaacagcaacaacaggaa

SEQ ID NO: 2439307 - RNA, 19 nt, Homo sapiens
  misc_RNA (1)...(19): siRNA sense strand
cuguagaacaacaaaggau

SEQ ID NO: 2439308 - RNA, 19 nt, Homo sapiens
  misc_RNA (1)...(19): siRNA sense strand
ccaauugagauuaucacaa

SEQ ID NO: 2439309 - RNA, 19 nt, Homo sapiens
  misc_RNA (1)...(19): siRNA sense strand
aagacagacaagugugcua

SEQ ID NO: 2439310 - RNA, 19 nt, Homo sapiens
  misc_RNA (1)...(19): siRNA sense strand
ugaaaugacaguaccucaa

SEQ ID NO: 2439311 - RNA, 19 nt, Homo sapiens
  misc_RNA (1)...(19): siRNA sense strand
ggaaugacaaaucaaagua

SEQ ID NO: 2439312 - RNA, 19 nt, Homo sapiens
  misc_RNA (1)...(19): siRNA sense strand
gcucgagauucaaaagcaa

SEQ ID NO: 2439313 - RNA, 19 nt, Homo sapiens
  misc_RNA (1)...(19): siRNA sense strand
uguagaacaacaaaggauu

SEQ ID NO: 2439314 - RNA, 19 nt, Homo sapiens
  misc_RNA (1)...(19): siRNA sense strand
gacaaguagcacacuguaa

SEQ ID NO: 2439315 - RNA, 19 nt, Homo sapiens
  misc_RNA (1)...(19): siRNA sense strand
ccaggaagaaauaugccaa

SEQ ID NO: 2439316 - RNA, 19 nt, Homo sapiens
  misc_RNA (1)...(19): siRNA sense strand
acauacagacacacaaauu

SEQ ID NO: 2439317 - RNA, 19 nt, Homo sapiens
  misc_RNA (1)...(19): siRNA sense strand
aaagaugaguaguaagaac

SEQ ID NO: 2439318 - RNA, 19 nt, Homo sapiens
  misc_RNA (1)...(19): siRNA sense strand
agucagaaaugugguuaau

SEQ ID NO: 2439319 - RNA, 19 nt, Homo sapiens
  misc_RNA (1)...(19): siRNA sense strand
ucaaguaggcaaggaacaa

SEQ ID NO: 2439320 - RNA, 19 nt, Homo sapiens
  misc_RNA (1)...(19): siRNA sense strand
caguauucaaucacgcaaa

SEQ ID NO: 2439321 - RNA, 19 nt, Homo sapiens
  misc_RNA (1)...(19): siRNA sense strand
auaccaagcuauucgagau

SEQ ID NO: 2439322 - RNA, 19 nt, Homo sapiens
  misc_RNA (1)...(19): siRNA sense strand
cagaaaacagccacuaaaa

SEQ ID NO: 2439323 - RNA, 19 nt, Homo sapiens
  misc_RNA (1)...(19): siRNA sense strand
cuagcucagcagaaggaaa

SEQ ID NO: 2439324 - RNA, 19 nt, Homo sapiens
  misc_RNA (1)...(19): siRNA sense strand
aaguaggagaggauaauga

SEQ ID NO: 2439325 - RNA, 19 nt, Homo sapiens
  misc_RNA (1)...(19): siRNA sense strand
gaggauaaugacagaaaug

SEQ ID NO: 2439326 - RNA, 19 nt, Homo sapiens
  misc_RNA (1)...(19): siRNA sense strand
gcuugauauuagcaaugaa

SEQ ID NO: 2439327 - RNA, 19 nt, Homo sapiens
  misc_RNA (1)...(19): siRNA sense strand
aagcugaugauaaggaaca

SEQ ID NO: 2439328 - RNA, 19 nt, Homo sapiens
  misc_RNA (1)...(19): siRNA sense strand
aaaacaacaccgagcgaaa

SEQ ID NO: 2439329 - RNA, 19 nt, Homo sapiens
  misc_RNA (1)...(19): siRNA sense strand
gcacagaggaggagccaag

SEQ ID NO: 2439330 - RNA, 19 nt, Homo sapiens
  misc_RNA (1)...(19): siRNA sense strand
cugguauugaugagaauua

SEQ ID NO: 2439331 - RNA, 19 nt, Homo sapiens
  misc_RNA (1)...(19): siRNA sense strand
ugagaauuaucgugggcca

SEQ ID NO: 2439332 - RNA, 19 nt, Homo sapiens
  misc_RNA (1)...(19): siRNA sense strand
aagaacacucaguaugaaa

SEQ ID NO: 2439333 - RNA, 19 nt, Homo sapiens
  misc_RNA (1)...(19): siRNA sense strand
augcaaaucuccauggcga

SEQ ID NO: 2439334 - RNA, 19 nt, Homo sapiens
  misc_RNA (1)...(19): siRNA sense strand
augaugaagccaaugcuaa

SEQ ID NO: 2439335 - RNA, 19 nt, Homo sapiens
  misc_RNA (1)...(19): siRNA sense strand
ggcagugagaagaguguuu

SEQ ID NO: 2439336 - RNA, 19 nt, Homo sapiens
  misc_RNA (1)...(19): siRNA sense strand
cauaaagagcagcagagga

SEQ ID NO: 2439337 - RNA, 19 nt, Homo sapiens
  misc_RNA (1)...(19): siRNA sense strand
auaaagagcagcagaggac

SEQ ID NO: 2439338 - RNA, 19 nt, Homo sapiens
  misc_RNA (1)...(19): siRNA sense strand
gagaauaugucaugcagga

SEQ ID NO: 2439339 - RNA, 19 nt, Homo sapiens
  misc_RNA (1)...(19): siRNA sense strand
gggaagagcuuuggccgaa

SEQ ID NO: 2439340 - RNA, 19 nt, Homo sapiens
  misc_RNA (1)...(19): siRNA sense strand
gagaagagcuuuggccgaa

SEQ ID NO: 2439341 - RNA, 19 nt, Homo sapiens
  misc_RNA (1)...(19): siRNA sense strand
gagaagaccuuugggcgaa

SEQ ID NO: 2439342 - RNA, 19 nt, Homo sapiens
  misc_RNA (1)...(19): siRNA sense strand
caugaugagagcugggauu

SEQ ID NO: 2439343 - RNA, 19 nt, Homo sapiens
  misc_RNA (1)...(19): siRNA sense strand
cagcugggacagaggaaca

SEQ ID NO: 2439344 - RNA, 19 nt, Homo sapiens
  misc_RNA (1)...(19): siRNA sense strand
ugagaagaccuuugggcga

SEQ ID NO: 2439345 - RNA, 19 nt, Homo sapiens
  misc_RNA (1)...(19): siRNA sense strand
agacagacuuuuauggaga

SEQ ID NO: 2439346 - RNA, 19 nt, Homo sapiens
  misc_RNA (1)...(19): siRNA sense strand
agugcaugcagaaggcaaa

SEQ ID NO: 2439347 - RNA, 19 nt, Homo sapiens
  misc_RNA (1)...(19): siRNA sense strand
ggaaaggggaagccaggaa

SEQ ID NO: 2439348 - RNA, 19 nt, Homo sapiens
  misc_RNA (1)...(19): siRNA sense strand
uagaaggaggagaagaaca

SEQ ID NO: 2439349 - RNA, 19 nt, Homo sapiens
  misc_RNA (1)...(19): siRNA sense strand
aggagguggaagugaacau

SEQ ID NO: 2439350 - RNA, 19 nt, Homo sapiens
  misc_RNA (1)...(19): siRNA sense strand
gagugcaugcagaaggcaa

SEQ ID NO: 2439351 - RNA, 19 nt, Homo sapiens
  misc_RNA (1)...(19): siRNA sense strand
gagcccuggcacaaggaaa

SEQ ID NO: 2439352 - RNA, 19 nt, Homo sapiens
  misc_RNA (1)...(19): siRNA sense strand
ggaagagcggccauggaga

SEQ ID NO: 2439353 - RNA, 19 nt, Homo sapiens
  misc_RNA (1)...(19): siRNA sense strand
cugaaugugggaagagcuu

SEQ ID NO: 2439354 - RNA, 19 nt, Homo sapiens
  misc_RNA (1)...(19): siRNA sense strand
aggacuuagaggagaggga

SEQ ID NO: 2439355 - RNA, 19 nt, Homo sapiens
  misc_RNA (1)...(19): siRNA sense strand
gacuuagaggagagggaca

SEQ ID NO: 2439356 - RNA, 19 nt, Homo sapiens
  misc_RNA (1)...(19): siRNA sense strand
caaugaauguacagcugga

SEQ ID NO: 2439357 - RNA, 19 nt, Homo sapiens
  misc_RNA (1)...(19): siRNA sense strand
gcugugaccuugaagagga

SEQ ID NO: 2439358 - RNA, 19 nt, Homo sapiens
  misc_RNA (1)...(19): siRNA sense strand
ccacagucccuucaggaga

SEQ ID NO: 2439359 - RNA, 19 nt, Homo sapiens
  misc_RNA (1)...(19): siRNA sense strand
auauacaggagguggaagu

SEQ ID NO: 2439360 - RNA, 19 nt, Homo sapiens
  misc_RNA (1)...(19): siRNA sense strand
aauaugucaugcaggaaaa

SEQ ID NO: 2439361 - RNA, 19 nt, Homo sapiens
  misc_RNA (1)...(19): siRNA sense strand
agggacauucugaggguca

SEQ ID NO: 2439362 - RNA, 19 nt, Homo sapiens
  misc_RNA (1)...(19): siRNA sense strand
gcacagagauggauucccu

SEQ ID NO: 2439363 - RNA, 19 nt, Homo sapiens
  misc_RNA (1)...(19): siRNA sense strand
ccaacaagagagagaccaa

SEQ ID NO: 2439364 - RNA, 19 nt, Homo sapiens
  misc_RNA (1)...(19): siRNA sense strand
caaacaaacuucaagggau

SEQ ID NO: 2439365 - RNA, 19 nt, Homo sapiens
  misc_RNA (1)...(19): siRNA sense strand
cuacaguaucugagaguca

SEQ ID NO: 2439366 - RNA, 19 nt, Homo sapiens
  misc_RNA (1)...(19): siRNA sense strand
aaacaaacuucaagggaug

SEQ ID NO: 2439367 - RNA, 19 nt, Homo sapiens
  misc_RNA (1)...(19): siRNA sense strand
agugauaagaguccagaaa

SEQ ID NO: 2439368 - RNA, 19 nt, Homo sapiens
  misc_RNA (1)...(19): siRNA sense strand
gggaauucgaagcaaacaa

SEQ ID NO: 2439369 - RNA, 19 nt, Homo sapiens
  misc_RNA (1)...(19): siRNA sense strand
ggagccaacaagagagaga

SEQ ID NO: 2439370 - RNA, 19 nt, Homo sapiens
  misc_RNA (1)...(19): siRNA sense strand
acacauugcuuuuggaaca

SEQ ID NO: 2439371 - RNA, 19 nt, Homo sapiens
  misc_RNA (1)...(19): siRNA sense strand
cuucaagggaugcagcaaa

SEQ ID NO: 2439372 - RNA, 19 nt, Homo sapiens
  misc_RNA (1)...(19): siRNA sense strand
cugacuaagccuggaguaa

SEQ ID NO: 2439373 - RNA, 19 nt, Homo sapiens
  misc_RNA (1)...(19): siRNA sense strand
aagcagaaaaguugaacaa

SEQ ID NO: 2439374 - RNA, 19 nt, Homo sapiens
  misc_RNA (1)...(19): siRNA sense strand
ccuguaaaauccagaauau

SEQ ID NO: 2439375 - RNA, 19 nt, Homo sapiens
  misc_RNA (1)...(19): siRNA sense strand
caauacaagaccaagucaa

SEQ ID NO: 2439376 - RNA, 19 nt, Homo sapiens
  misc_RNA (1)...(19): siRNA sense strand
agaauuuagaggagaaacu

SEQ ID NO: 2439377 - RNA, 19 nt, Homo sapiens
  misc_RNA (1)...(19): siRNA sense strand
gcagcaaacugaagagcuc

SEQ ID NO: 2439378 - RNA, 19 nt, Homo sapiens
  misc_RNA (1)...(19): siRNA sense strand
aaacaagaauuuagaggag

SEQ ID NO: 2439379 - RNA, 19 nt, Homo sapiens
  misc_RNA (1)...(19): siRNA sense strand
acugaagagcucugugcua

SEQ ID NO: 2439380 - RNA, 19 nt, Homo sapiens
  misc_RNA (1)...(19): siRNA sense strand
caagaauuuagaggagaaa

SEQ ID NO: 2439381 - RNA, 19 nt, Homo sapiens
  misc_RNA (1)...(19): siRNA sense strand
gaggagaaacugacggucu

SEQ ID NO: 2439382 - RNA, 19 nt, Homo sapiens
  misc_RNA (1)...(19): siRNA sense strand
gaacuugaaaagcgugaaa

SEQ ID NO: 2439383 - RNA, 19 nt, Homo sapiens
  misc_RNA (1)...(19): siRNA sense strand
cagcaauacaagaccaagu

SEQ ID NO: 2439384 - RNA, 19 nt, Homo sapiens
  misc_RNA (1)...(19): siRNA sense strand
ugagugaugaacaggagaa

SEQ ID NO: 2439385 - RNA, 19 nt, Homo sapiens
  misc_RNA (1)...(19): siRNA sense strand
cggcccaagucucuagcua

SEQ ID NO: 2439386 - RNA, 19 nt, Homo sapiens
  misc_RNA (1)...(19): siRNA sense strand
gcgaaauugacuuguccuu

SEQ ID NO: 2439387 - RNA, 19 nt, Homo sapiens
  misc_RNA (1)...(19): siRNA sense strand
gggcagcaauacaagacca

SEQ ID NO: 2439388 - RNA, 19 nt, Homo sapiens
  misc_RNA (1)...(19): siRNA sense strand
uggugguucugaagccaaa

SEQ ID NO: 2439389 - RNA, 19 nt, Homo sapiens
  misc_RNA (1)...(19): siRNA sense strand
ccaaugacuacuugaccuu

SEQ ID NO: 2439390 - RNA, 19 nt, Homo sapiens
  misc_RNA (1)...(19): siRNA sense strand
aagccaaaccucugaucuu

SEQ ID NO: 2439391 - RNA, 19 nt, Homo sapiens
  misc_RNA (1)...(19): siRNA sense strand
gcaaacaaacuucaaggga

SEQ ID NO: 2439392 - RNA, 19 nt, Homo sapiens
  misc_RNA (1)...(19): siRNA sense strand
ggugguagaugaaggccaa

SEQ ID NO: 2439393 - RNA, 19 nt, Homo sapiens
  misc_RNA (1)...(19): siRNA sense strand
acucagaaagagagaaaca

SEQ ID NO: 2439394 - RNA, 19 nt, Homo sapiens
  misc_RNA (1)...(19): siRNA sense strand
gaacaaaccuccauccaga

SEQ ID NO: 2439395 - RNA, 19 nt, Homo sapiens
  misc_RNA (1)...(19): siRNA sense strand
ggaugugccuggacgggaa

SEQ ID NO: 2439396 - RNA, 19 nt, Homo sapiens
  misc_RNA (1)...(19): siRNA sense strand
ugucaguggcugugggcuu

SEQ ID NO: 2439397 - RNA, 19 nt, Homo sapiens
  misc_RNA (1)...(19): siRNA sense strand
gcaagaugcugguggagac

SEQ ID NO: 2439398 - RNA, 19 nt, Homo sapiens
  misc_RNA (1)...(19): siRNA sense strand
gagagaaacaagagccgga

SEQ ID NO: 2439399 - RNA, 19 nt, Homo sapiens
  misc_RNA (1)...(19): siRNA sense strand
cgugcauguucuuggugaa

SEQ ID NO: 2439400 - RNA, 19 nt, Homo sapiens
  misc_RNA (1)...(19): siRNA sense strand
agaugaaggccaagaccga

SEQ ID NO: 2439401 - RNA, 19 nt, Homo sapiens
  misc_RNA (1)...(19): siRNA sense strand
cgaacaucgugaacagcau

SEQ ID NO: 2439402 - RNA, 19 nt, Homo sapiens
  misc_RNA (1)...(19): siRNA sense strand
ccuccaaccuggugacgga

SEQ ID NO: 2439403 - RNA, 19 nt, Homo sapiens
  misc_RNA (1)...(19): siRNA sense strand
agagagaggagcuggagca

SEQ ID NO: 2439404 - RNA, 19 nt, Homo sapiens
  misc_RNA (1)...(19): siRNA sense strand
agaaaguuccagaagcaga

SEQ ID NO: 2439405 - RNA, 19 nt, Homo sapiens
  misc_RNA (1)...(19): siRNA sense strand
aggccgaggguuugaugaa

SEQ ID NO: 2439406 - RNA, 19 nt, Homo sapiens
  misc_RNA (1)...(19): siRNA sense strand
ccgaagcugccgaaggaga

SEQ ID NO: 2439407 - RNA, 19 nt, Homo sapiens
  misc_RNA (1)...(19): siRNA sense strand
uggagcaggcccagaucaa

SEQ ID NO: 2439408 - RNA, 19 nt, Homo sapiens
  misc_RNA (1)...(19): siRNA sense strand
cuggaugagccgucaguga

SEQ ID NO: 2439409 - RNA, 19 nt, Homo sapiens
  misc_RNA (1)...(19): siRNA sense strand
cgaaggagagagaggagcu

SEQ ID NO: 2439410 - RNA, 19 nt, Homo sapiens
  misc_RNA (1)...(19): siRNA sense strand
gcagcuugcuuucugggaa

SEQ ID NO: 2439411 - RNA, 19 nt, Homo sapiens
  misc_RNA (1)...(19): siRNA sense strand
ucguggacaaagugaaaga

SEQ ID NO: 2439412 - RNA, 19 nt, Homo sapiens
  misc_RNA (1)...(19): siRNA sense strand
cguaaagaagccucccaaa

SEQ ID NO: 2439413 - RNA, 19 nt, Homo sapiens
  misc_RNA (1)...(19): siRNA sense strand
augaagaaacgaaggauac

SEQ ID NO: 2439414 - RNA, 19 nt, Homo sapiens
  misc_RNA (1)...(19): siRNA sense strand
gugaugaguucaauggugu

SEQ ID NO: 2439415 - RNA, 19 nt, Homo sapiens
  misc_RNA (1)...(19): siRNA sense strand
aggaggaggcugaggcuga

SEQ ID NO: 2439416 - RNA, 19 nt, Homo sapiens
  misc_RNA (1)...(19): siRNA sense strand
cagcguggguaguggagga

SEQ ID NO: 2439417 - RNA, 19 nt, Homo sapiens
  misc_RNA (1)...(19): siRNA sense strand
caucccagacauugagcaa

SEQ ID NO: 2439418 - RNA, 19 nt, Homo sapiens
  misc_RNA (1)...(19): siRNA sense strand
augccgacguugagaacca

SEQ ID NO: 2439419 - RNA, 19 nt, Homo sapiens
  misc_RNA (1)...(19): siRNA sense strand
ggaccauugcggaggugga

SEQ ID NO: 2439420 - RNA, 19 nt, Homo sapiens
  misc_RNA (1)...(19): siRNA sense strand
guugagaaccagucaggca

SEQ ID NO: 2439421 - RNA, 19 nt, Homo sapiens
  misc_RNA (1)...(19): siRNA sense strand
gcacagaucugcugcggga

SEQ ID NO: 2439422 - RNA, 19 nt, Homo sapiens
  misc_RNA (1)...(19): siRNA sense strand
cggaagaggaacguggaau

SEQ ID NO: 2439423 - RNA, 19 nt, Homo sapiens
  misc_RNA (1)...(19): siRNA sense strand
ucaacgugcggaagaggaa

SEQ ID NO: 2439424 - RNA, 19 nt, Homo sapiens
  misc_RNA (1)...(19): siRNA sense strand
gcggaagaggaacguggaa

SEQ ID NO: 2439425 - RNA, 19 nt, Homo sapiens
  misc_RNA (1)...(19): siRNA sense strand
acgccaacgucauccgcua

SEQ ID NO: 2439426 - RNA, 19 nt, Homo sapiens
  misc_RNA (1)...(19): siRNA sense strand
cugcaaagucagcacagau

SEQ ID NO: 2439427 - RNA, 19 nt, Homo sapiens
  misc_RNA (1)...(19): siRNA sense strand
gugaaaggaucaaaggcua

SEQ ID NO: 2439428 - RNA, 19 nt, Homo sapiens
  misc_RNA (1)...(19): siRNA sense strand
ggguaugggugaugggcga

SEQ ID NO: 2439429 - RNA, 19 nt, Homo sapiens
  misc_RNA (1)...(19): siRNA sense strand
caaagaaagagaauggcaa

SEQ ID NO: 2439430 - RNA, 19 nt, Homo sapiens
  misc_RNA (1)...(19): siRNA sense strand
cuucaagaugagagaggaa

SEQ ID NO: 2439431 - RNA, 19 nt, Homo sapiens
  misc_RNA (1)...(19): siRNA sense strand
aagcagaacaggaggcaga

SEQ ID NO: 2439432 - RNA, 19 nt, Homo sapiens
  misc_RNA (1)...(19): siRNA sense strand
aggcagaagagcccagaaa

SEQ ID NO: 2439433 - RNA, 19 nt, Homo sapiens
  misc_RNA (1)...(19): siRNA sense strand
acuaaagacaucuggaaga

SEQ ID NO: 2439434 - RNA, 19 nt, Homo sapiens
  misc_RNA (1)...(19): siRNA sense strand
ugaaaggaucaaaggcuau

SEQ ID NO: 2439435 - RNA, 19 nt, Homo sapiens
  misc_RNA (1)...(19): siRNA sense strand
agagaagcagcuauggaaa

SEQ ID NO: 2439436 - RNA, 19 nt, Homo sapiens
  misc_RNA (1)...(19): siRNA sense strand
uggaauaucacaaggagga

SEQ ID NO: 2439437 - RNA, 19 nt, Homo sapiens
  misc_RNA (1)...(19): siRNA sense strand
ucaagaugagagaggaaca

SEQ ID NO: 2439438 - RNA, 19 nt, Homo sapiens
  misc_RNA (1)...(19): siRNA sense strand
auggaaagaaagagaagca

SEQ ID NO: 2439439 - RNA, 19 nt, Homo sapiens
  misc_RNA (1)...(19): siRNA sense strand
ccagaaaggaagaggcggu

SEQ ID NO: 2439440 - RNA, 19 nt, Homo sapiens
  misc_RNA (1)...(19): siRNA sense strand
uggaagaaaguggcagaaa

SEQ ID NO: 2439441 - RNA, 19 nt, Homo sapiens
  misc_RNA (1)...(19): siRNA sense strand
agauacugucggagaugua

SEQ ID NO: 2439442 - RNA, 19 nt, Homo sapiens
  misc_RNA (1)...(19): siRNA sense strand
acagauccgacgauggaaa

SEQ ID NO: 2439443 - RNA, 19 nt, Homo sapiens
  misc_RNA (1)...(19): siRNA sense strand
ccgacgauggaaagaaaga

SEQ ID NO: 2439444 - RNA, 19 nt, Homo sapiens
  misc_RNA (1)...(19): siRNA sense strand
augcauuucaccagaagaa

SEQ ID NO: 2439445 - RNA, 19 nt, Homo sapiens
  misc_RNA (1)...(19): siRNA sense strand
ccaaagaaagagaauggca

SEQ ID NO: 2439446 - RNA, 19 nt, Homo sapiens
  misc_RNA (1)...(19): siRNA sense strand
ggcuaaacaagcacgagaa

SEQ ID NO: 2439447 - RNA, 19 nt, Homo sapiens
  misc_RNA (1)...(19): siRNA sense strand
cugcagacgccuacagcuu

SEQ ID NO: 2439448 - RNA, 19 nt, Homo sapiens
  misc_RNA (1)...(19): siRNA sense strand
gagcaaggaucuaggccag

SEQ ID NO: 2439449 - RNA, 19 nt, Homo sapiens
  misc_RNA (1)...(19): siRNA sense strand
cagaccaaagaaagagaau

SEQ ID NO: 2439450 - RNA, 19 nt, Homo sapiens
  misc_RNA (1)...(19): siRNA sense strand
aggaagaggcggugagagg

SEQ ID NO: 2439451 - RNA, 19 nt, Homo sapiens
  misc_RNA (1)...(19): siRNA sense strand
gaaagaaagagaagcagcu

SEQ ID NO: 2439452 - RNA, 19 nt, Homo sapiens
  misc_RNA (1)...(19): siRNA sense strand
uggaaagaagacucggaau

SEQ ID NO: 2439453 - RNA, 19 nt, Homo sapiens
  misc_RNA (1)...(19): siRNA sense strand
gguuuaaagaggagcagcu

SEQ ID NO: 2439454 - RNA, 19 nt, Homo sapiens
  misc_RNA (1)...(19): siRNA sense strand
acucaagaaagcaaaugaa

SEQ ID NO: 2439455 - RNA, 19 nt, Homo sapiens
  misc_RNA (1)...(19): siRNA sense strand
cugacuaccuggagcuguu

SEQ ID NO: 2439456 - RNA, 19 nt, Homo sapiens
  misc_RNA (1)...(19): siRNA sense strand
cgagaagacuacaagaggu

SEQ ID NO: 2439457 - RNA, 19 nt, Homo sapiens
  misc_RNA (1)...(19): siRNA sense strand
ucagcgaagaacagaaaca

SEQ ID NO: 2439458 - RNA, 19 nt, Homo sapiens
  misc_RNA (1)...(19): siRNA sense strand
ggaauaucacaaggaggaa

SEQ ID NO: 2439459 - RNA, 19 nt, Homo sapiens
  misc_RNA (1)...(19): siRNA sense strand
aagaaagagaagcagcuau

SEQ ID NO: 2439460 - RNA, 19 nt, Homo sapiens
  misc_RNA (1)...(19): siRNA sense strand
ugauaaggaagucugggua

SEQ ID NO: 2439461 - RNA, 19 nt, Homo sapiens
  misc_RNA (1)...(19): siRNA sense strand
cgauggaaagaaagagaag

SEQ ID NO: 2439462 - RNA, 19 nt, Homo sapiens
  misc_RNA (1)...(19): siRNA sense strand
aacccuggaagaagagaaa

SEQ ID NO: 2439463 - RNA, 19 nt, Homo sapiens
  misc_RNA (1)...(19): siRNA sense strand
aagaaagagaauggcaaau

SEQ ID NO: 2439464 - RNA, 19 nt, Homo sapiens
  misc_RNA (1)...(19): siRNA sense strand
ggagcaaggaucuaggcca

SEQ ID NO: 2439465 - RNA, 19 nt, Homo sapiens
  misc_RNA (1)...(19): siRNA sense strand
uagcagagcaccaggccaa

SEQ ID NO: 2439466 - RNA, 19 nt, Homo sapiens
  misc_RNA (1)...(19): siRNA sense strand
acaucgugcucaaggacaa

SEQ ID NO: 2439467 - RNA, 19 nt, Homo sapiens
  misc_RNA (1)...(19): siRNA sense strand
acaaugauuucuugcggaa

SEQ ID NO: 2439468 - RNA, 19 nt, Homo sapiens
  misc_RNA (1)...(19): siRNA sense strand
ggaggaaguagcugaggca

SEQ ID NO: 2439469 - RNA, 19 nt, Homo sapiens
  misc_RNA (1)...(19): siRNA sense strand
acgagaagccggugcagga

SEQ ID NO: 2439470 - RNA, 19 nt, Homo sapiens
  misc_RNA (1)...(19): siRNA sense strand
gagaugagcacuuugcaga

SEQ ID NO: 2439471 - RNA, 19 nt, Homo sapiens
  misc_RNA (1)...(19): siRNA sense strand
agacaguguuccagaggcu

SEQ ID NO: 2439472 - RNA, 19 nt, Homo sapiens
  misc_RNA (1)...(19): siRNA sense strand
cagagaaggcaguugaaac

SEQ ID NO: 2439473 - RNA, 19 nt, Homo sapiens
  misc_RNA (1)...(19): siRNA sense strand
cgauaagggcccaauggca

SEQ ID NO: 2439474 - RNA, 19 nt, Homo sapiens
  misc_RNA (1)...(19): siRNA sense strand
acacaauagccuuggcauc

SEQ ID NO: 2439475 - RNA, 19 nt, Homo sapiens
  misc_RNA (1)...(19): siRNA sense strand
acaguguuccagaggcuaa

SEQ ID NO: 2439476 - RNA, 19 nt, Homo sapiens
  misc_RNA (1)...(19): siRNA sense strand
ccuccucagaguugggcaa

SEQ ID NO: 2439477 - RNA, 19 nt, Homo sapiens
  misc_RNA (1)...(19): siRNA sense strand
gggcccaauggcagaaaca

SEQ ID NO: 2439478 - RNA, 19 nt, Homo sapiens
  misc_RNA (1)...(19): siRNA sense strand
aggauaaagacaagguaaa

SEQ ID NO: 2439479 - RNA, 19 nt, Homo sapiens
  misc_RNA (1)...(19): siRNA sense strand
caugaaaguccgauggaau

SEQ ID NO: 2439480 - RNA, 19 nt, Homo sapiens
  misc_RNA (1)...(19): siRNA sense strand
ucugaauguucgagccaaa

SEQ ID NO: 2439481 - RNA, 19 nt, Homo sapiens
  misc_RNA (1)...(19): siRNA sense strand
aaggagaggaggaggaaaa

SEQ ID NO: 2439482 - RNA, 19 nt, Homo sapiens
  misc_RNA (1)...(19): siRNA sense strand
gcauauacuauuucggcua

SEQ ID NO: 2439483 - RNA, 19 nt, Homo sapiens
  misc_RNA (1)...(19): siRNA sense strand
aaucaggagcagagggaga

SEQ ID NO: 2439484 - RNA, 19 nt, Homo sapiens
  misc_RNA (1)...(19): siRNA sense strand
acuucuaaauggugggaga

SEQ ID NO: 2439485 - RNA, 19 nt, Homo sapiens
  misc_RNA (1)...(19): siRNA sense strand
cgaccaacuuugaauaaaa

SEQ ID NO: 2439486 - RNA, 19 nt, Homo sapiens
  misc_RNA (1)...(19): siRNA sense strand
uguuaauguucguguguca

SEQ ID NO: 2439487 - RNA, 19 nt, Homo sapiens
  misc_RNA (1)...(19): siRNA sense strand
ccuccugauugguggaaga

SEQ ID NO: 2439488 - RNA, 19 nt, Homo sapiens
  misc_RNA (1)...(19): siRNA sense strand
cuggaagaaacgucaguua

SEQ ID NO: 2439489 - RNA, 19 nt, Homo sapiens
  misc_RNA (1)...(19): siRNA sense strand
aaggauaaagacaagguaa

SEQ ID NO: 2439490 - RNA, 19 nt, Homo sapiens
  misc_RNA (1)...(19): siRNA sense strand
agaacugggcacaggcuua

SEQ ID NO: 2439491 - RNA, 19 nt, Homo sapiens
  misc_RNA (1)...(19): siRNA sense strand
cuuguuaugcaaugggaaa

SEQ ID NO: 2439492 - RNA, 19 nt, Homo sapiens
  misc_RNA (1)...(19): siRNA sense strand
ggauaaagacaagguaaaa

SEQ ID NO: 2439493 - RNA, 19 nt, Homo sapiens
  misc_RNA (1)...(19): siRNA sense strand
ccuugaacugagugggaau

SEQ ID NO: 2439494 - RNA, 19 nt, Homo sapiens
  misc_RNA (1)...(19): siRNA sense strand
ugaugaacuuggagcacuu

SEQ ID NO: 2439495 - RNA, 19 nt, Homo sapiens
  misc_RNA (1)...(19): siRNA sense strand
augaacagcacuuggauuu

SEQ ID NO: 2439496 - RNA, 19 nt, Homo sapiens
  misc_RNA (1)...(19): siRNA sense strand
ucuuaaugaaguugaguga

SEQ ID NO: 2439497 - RNA, 19 nt, Homo sapiens
  misc_RNA (1)...(19): siRNA sense strand
cguauuuggaggagcccua

SEQ ID NO: 2439498 - RNA, 19 nt, Homo sapiens
  misc_RNA (1)...(19): siRNA sense strand
ucccagagcugcuaggcaa

SEQ ID NO: 2439499 - RNA, 19 nt, Homo sapiens
  misc_RNA (1)...(19): siRNA sense strand
uuaaugaaguugagugacu

SEQ ID NO: 2439500 - RNA, 19 nt, Homo sapiens
  misc_RNA (1)...(19): siRNA sense strand
uggaaaagggucagcagua

SEQ ID NO: 2439501 - RNA, 19 nt, Homo sapiens
  misc_RNA (1)...(19): siRNA sense strand
uggaaguggagcugcagaa

SEQ ID NO: 2439502 - RNA, 19 nt, Homo sapiens
  misc_RNA (1)...(19): siRNA sense strand
aauuaagugccuugcaaau

SEQ ID NO: 2439503 - RNA, 19 nt, Homo sapiens
  misc_RNA (1)...(19): siRNA sense strand
cagaaaucauugaggaguc

SEQ ID NO: 2439504 - RNA, 19 nt, Homo sapiens
  misc_RNA (1)...(19): siRNA sense strand
uggaaugcuuguuaugcaa

SEQ ID NO: 2439505 - RNA, 19 nt, Homo sapiens
  misc_RNA (1)...(19): siRNA sense strand
aaaggaauccaguggugaa

SEQ ID NO: 2439506 - RNA, 19 nt, Homo sapiens
  misc_RNA (1)...(19): siRNA sense strand
agauggaaguggagcugca

SEQ ID NO: 2439507 - RNA, 19 nt, Homo sapiens
  misc_RNA (1)...(19): siRNA sense strand
ugccagaggccuucagcaa

SEQ ID NO: 2439508 - RNA, 19 nt, Homo sapiens
  misc_RNA (1)...(19): siRNA sense strand
ggcaccaacuggagacaca

SEQ ID NO: 2439509 - RNA, 19 nt, Homo sapiens
  misc_RNA (1)...(19): siRNA sense strand
cagcaaagugagccagcuu

SEQ ID NO: 2439510 - RNA, 19 nt, Homo sapiens
  misc_RNA (1)...(19): siRNA sense strand
agucaggagagcugcagua

SEQ ID NO: 2439511 - RNA, 19 nt, Homo sapiens
  misc_RNA (1)...(19): siRNA sense strand
caaucagaauccagugcuu

SEQ ID NO: 2439512 - RNA, 19 nt, Homo sapiens
  misc_RNA (1)...(19): siRNA sense strand
ugagcgaggcaauggguuu

SEQ ID NO: 2439513 - RNA, 19 nt, Homo sapiens
  misc_RNA (1)...(19): siRNA sense strand
ggaagcaaucccugagcga

SEQ ID NO: 2439514 - RNA, 19 nt, Homo sapiens
  misc_RNA (1)...(19): siRNA sense strand
ccugauugguggaagaaag

SEQ ID NO: 2439515 - RNA, 19 nt, Homo sapiens
  misc_RNA (1)...(19): siRNA sense strand
gaaucaucuugucagcaaa

SEQ ID NO: 2439516 - RNA, 19 nt, Homo sapiens
  misc_RNA (1)...(19): siRNA sense strand
acgaucagcuauagaagca

SEQ ID NO: 2439517 - RNA, 19 nt, Homo sapiens
  misc_RNA (1)...(19): siRNA sense strand
ccuuacagguauugacucu

SEQ ID NO: 2439518 - RNA, 19 nt, Homo sapiens
  misc_RNA (1)...(19): siRNA sense strand
gugaagacaccauagacuu

SEQ ID NO: 2439519 - RNA, 19 nt, Homo sapiens
  misc_RNA (1)...(19): siRNA sense strand
ggagaaugaaacuaacaca

SEQ ID NO: 2439520 - RNA, 19 nt, Homo sapiens
  misc_RNA (1)...(19): siRNA sense strand
ucacggacucccuggacua

SEQ ID NO: 2439521 - RNA, 19 nt, Homo sapiens
  misc_RNA (1)...(19): siRNA sense strand
ggucagaauggcccuuaaa

SEQ ID NO: 2439522 - RNA, 19 nt, Homo sapiens
  misc_RNA (1)...(19): siRNA sense strand
guauacagucacuucuaaa

SEQ ID NO: 2439523 - RNA, 19 nt, Homo sapiens
  misc_RNA (1)...(19): siRNA sense strand
aaauggugggagaaugaaa

SEQ ID NO: 2439524 - RNA, 19 nt, Homo sapiens
  misc_RNA (1)...(19): siRNA sense strand
ggacucgguaauagcaauu

SEQ ID NO: 2439525 - RNA, 19 nt, Homo sapiens
  misc_RNA (1)...(19): siRNA sense strand
cugauugucaacauggaaa

SEQ ID NO: 2439526 - RNA, 19 nt, Homo sapiens
  misc_RNA (1)...(19): siRNA sense strand
acuuaacagauuacaggua

SEQ ID NO: 2439527 - RNA, 19 nt, Homo sapiens
  misc_RNA (1)...(19): siRNA sense strand
ccuugcaaauuuaguauca

SEQ ID NO: 2439528 - RNA, 19 nt, Homo sapiens
  misc_RNA (1)...(19): siRNA sense strand
gggagaugacacuggagca

SEQ ID NO: 2439529 - RNA, 19 nt, Homo sapiens
  misc_RNA (1)...(19): siRNA sense strand
gaaccugcaugaagggaac

SEQ ID NO: 2439530 - RNA, 19 nt, Homo sapiens
  misc_RNA (1)...(19): siRNA sense strand
gcuugcagcauuagagagu

SEQ ID NO: 2439531 - RNA, 19 nt, Homo sapiens
  misc_RNA (1)...(19): siRNA sense strand
uuggagaggugauuugcaa

SEQ ID NO: 2439532 - RNA, 19 nt, Homo sapiens
  misc_RNA (1)...(19): siRNA sense strand
ccaucuugccagaggccuu

SEQ ID NO: 2439533 - RNA, 19 nt, Homo sapiens
  misc_RNA (1)...(19): siRNA sense strand
ugauucaccucuugagcuu

SEQ ID NO: 2439534 - RNA, 19 nt, Homo sapiens
  misc_RNA (1)...(19): siRNA sense strand
uggacuaaacauagagaug

SEQ ID NO: 2439535 - RNA, 19 nt, Homo sapiens
  misc_RNA (1)...(19): siRNA sense strand
ugaaagaaacccuugaacu

SEQ ID NO: 2439536 - RNA, 19 nt, Homo sapiens
  misc_RNA (1)...(19): siRNA sense strand
ggaggcaugcagaguaaaa

SEQ ID NO: 2439537 - RNA, 19 nt, Homo sapiens
  misc_RNA (1)...(19): siRNA sense strand
uaauuaagugccuugcaaa

SEQ ID NO: 2439538 - RNA, 19 nt, Homo sapiens
  misc_RNA (1)...(19): siRNA sense strand
ugaccaaagucuggaacca

SEQ ID NO: 2439539 - RNA, 19 nt, Homo sapiens
  misc_RNA (1)...(19): siRNA sense strand
caggcuuaauacagcagua

SEQ ID NO: 2439540 - RNA, 19 nt, Homo sapiens
  misc_RNA (1)...(19): siRNA sense strand
cguacugggagcagaagaa

SEQ ID NO: 2439541 - RNA, 19 nt, Homo sapiens
  misc_RNA (1)...(19): siRNA sense strand
gcucauggcuccaggcugu

SEQ ID NO: 2439542 - RNA, 19 nt, Homo sapiens
  misc_RNA (1)...(19): siRNA sense strand
cggccuacgcucagaauca

SEQ ID NO: 2439543 - RNA, 19 nt, Homo sapiens
  misc_RNA (1)...(19): siRNA sense strand
ccucguacugggagcagaa

SEQ ID NO: 2439544 - RNA, 19 nt, Homo sapiens
  misc_RNA (1)...(19): siRNA sense strand
cgucuggacagcugggaga

SEQ ID NO: 2439545 - RNA, 19 nt, Homo sapiens
  misc_RNA (1)...(19): siRNA sense strand
ucacggugccugagggcuu

SEQ ID NO: 2439546 - RNA, 19 nt, Homo sapiens
  misc_RNA (1)...(19): siRNA sense strand
cugccaacccugaguggau

SEQ ID NO: 2439547 - RNA, 19 nt, Homo sapiens
  misc_RNA (1)...(19): siRNA sense strand
ugaagguggagguagaaga

SEQ ID NO: 2439548 - RNA, 19 nt, Homo sapiens
  misc_RNA (1)...(19): siRNA sense strand
gggaggaugaggaggaaau

SEQ ID NO: 2439549 - RNA, 19 nt, Homo sapiens
  misc_RNA (1)...(19): siRNA sense strand
gcaaagacagcaaggguga

SEQ ID NO: 2439550 - RNA, 19 nt, Homo sapiens
  misc_RNA (1)...(19): siRNA sense strand
ggaaggaggaggaggagga

SEQ ID NO: 2439551 - RNA, 19 nt, Homo sapiens
  misc_RNA (1)...(19): siRNA sense strand
ggguggagcucuuugggaa

SEQ ID NO: 2439552 - RNA, 19 nt, Homo sapiens
  misc_RNA (1)...(19): siRNA sense strand
agacuaagggucagggaga

SEQ ID NO: 2439553 - RNA, 19 nt, Homo sapiens
  misc_RNA (1)...(19): siRNA sense strand
ggaaaugaucacucgggaa

SEQ ID NO: 2439554 - RNA, 19 nt, Homo sapiens
  misc_RNA (1)...(19): siRNA sense strand
ggaacgugcuggauggcuu

SEQ ID NO: 2439555 - RNA, 19 nt, Homo sapiens
  misc_RNA (1)...(19): siRNA sense strand
ucagggagaugaagggaga

SEQ ID NO: 2439556 - RNA, 19 nt, Homo sapiens
  misc_RNA (1)...(19): siRNA sense strand
gugucgugguggagaacuu

SEQ ID NO: 2439557 - RNA, 19 nt, Homo sapiens
  misc_RNA (1)...(19): siRNA sense strand
aggaggaggaggaggagga

SEQ ID NO: 2439558 - RNA, 19 nt, Homo sapiens
  misc_RNA (1)...(19): siRNA sense strand
gcggcaucguggacagcaa

SEQ ID NO: 2439559 - RNA, 19 nt, Homo sapiens
  misc_RNA (1)...(19): siRNA sense strand
ugcugaagcugguggcauu

SEQ ID NO: 2439560 - RNA, 19 nt, Homo sapiens
  misc_RNA (1)...(19): siRNA sense strand
cguccauccugcuggguga

SEQ ID NO: 2439561 - RNA, 19 nt, Homo sapiens
  misc_RNA (1)...(19): siRNA sense strand
cggaggaggaugaugagau

SEQ ID NO: 2439562 - RNA, 19 nt, Homo sapiens
  misc_RNA (1)...(19): siRNA sense strand
aggaggaggaggaggagca

SEQ ID NO: 2439563 - RNA, 19 nt, Homo sapiens
  misc_RNA (1)...(19): siRNA sense strand
ccaggaggcugaagaggca

SEQ ID NO: 2439564 - RNA, 19 nt, Homo sapiens
  misc_RNA (1)...(19): siRNA sense strand
ugugugagauggaggagau

SEQ ID NO: 2439565 - RNA, 19 nt, Homo sapiens
  misc_RNA (1)...(19): siRNA sense strand
ccaacauagaagaguuuga

SEQ ID NO: 2439566 - RNA, 19 nt, Homo sapiens
  misc_RNA (1)...(19): siRNA sense strand
gcaacaaggaggcgcagga

SEQ ID NO: 2439567 - RNA, 19 nt, Homo sapiens
  misc_RNA (1)...(19): siRNA sense strand
gcuccuucuucaugaucaa

SEQ ID NO: 2439568 - RNA, 19 nt, Homo sapiens
  misc_RNA (1)...(19): siRNA sense strand
ucaacauguuugugggugu

SEQ ID NO: 2439569 - RNA, 19 nt, Homo sapiens
  misc_RNA (1)...(19): siRNA sense strand
acaaggaggcgcaggagga

SEQ ID NO: 2439570 - RNA, 19 nt, Homo sapiens
  misc_RNA (1)...(19): siRNA sense strand
gccugaagcugguggugga

SEQ ID NO: 2439571 - RNA, 19 nt, Homo sapiens
  misc_RNA (1)...(19): siRNA sense strand
ggugacaacuggaacggga

SEQ ID NO: 2439572 - RNA, 19 nt, Homo sapiens
  misc_RNA (1)...(19): siRNA sense strand
acacggugcccgacaggaa

SEQ ID NO: 2439573 - RNA, 19 nt, Homo sapiens
  misc_RNA (1)...(19): siRNA sense strand
ccauccugguggagggcuu

SEQ ID NO: 2439574 - RNA, 19 nt, Homo sapiens
  misc_RNA (1)...(19): siRNA sense strand
ugcugaagcuguugaagau

SEQ ID NO: 2439575 - RNA, 19 nt, Homo sapiens
  misc_RNA (1)...(19): siRNA sense strand
cgcuguacuucgugagcuu

SEQ ID NO: 2439576 - RNA, 19 nt, Homo sapiens
  misc_RNA (1)...(19): siRNA sense strand
acgacaagcaagaggugca

SEQ ID NO: 2439577 - RNA, 19 nt, Homo sapiens
  misc_RNA (1)...(19): siRNA sense strand
cggaacuggugcaucaaga

SEQ ID NO: 2439578 - RNA, 19 nt, Homo sapiens
  misc_RNA (1)...(19): siRNA sense strand
gagaugacauugaagguag

SEQ ID NO: 2439579 - RNA, 19 nt, Homo sapiens
  misc_RNA (1)...(19): siRNA sense strand
ccagaaaggcccagaaaag

SEQ ID NO: 2439580 - RNA, 19 nt, Homo sapiens
  misc_RNA (1)...(19): siRNA sense strand
ucaugaagcaccuggacga

SEQ ID NO: 2439581 - RNA, 19 nt, Homo sapiens
  misc_RNA (1)...(19): siRNA sense strand
ccaccuggccgcaaagaca

SEQ ID NO: 2439582 - RNA, 19 nt, Homo sapiens
  misc_RNA (1)...(19): siRNA sense strand
ugggugucgugguggagaa

SEQ ID NO: 2439583 - RNA, 19 nt, Homo sapiens
  misc_RNA (1)...(19): siRNA sense strand
augggaagacuaaggguca

SEQ ID NO: 2439584 - RNA, 19 nt, Homo sapiens
  misc_RNA (1)...(19): siRNA sense strand
ugcugaaacuggugcgcuu

SEQ ID NO: 2439585 - RNA, 19 nt, Homo sapiens
  misc_RNA (1)...(19): siRNA sense strand
uggcugagacggaggccuu

SEQ ID NO: 2439586 - RNA, 19 nt, Homo sapiens
  misc_RNA (1)...(19): siRNA sense strand
gcgacugcuacgaggagau

SEQ ID NO: 2439587 - RNA, 19 nt, Homo sapiens
  misc_RNA (1)...(19): siRNA sense strand
acaacaucuucgacagcau

SEQ ID NO: 2439588 - RNA, 19 nt, Homo sapiens
  misc_RNA (1)...(19): siRNA sense strand
ucaugaggguucugcgcau

SEQ ID NO: 2439589 - RNA, 19 nt, Homo sapiens
  misc_RNA (1)...(19): siRNA sense strand
gcaugggcaucgagcacca

SEQ ID NO: 2439590 - RNA, 19 nt, Homo sapiens
  misc_RNA (1)...(19): siRNA sense strand
ugaagauggccacaggaau

SEQ ID NO: 2439591 - RNA, 19 nt, Homo sapiens
  misc_RNA (1)...(19): siRNA sense strand
agaugaucgacgucuauaa

SEQ ID NO: 2439592 - RNA, 19 nt, Homo sapiens
  misc_RNA (1)...(19): siRNA sense strand
gguuugaaugugucagcau

SEQ ID NO: 2439593 - RNA, 19 nt, Homo sapiens
  misc_RNA (1)...(19): siRNA sense strand
aggaggacgccgagaugga

SEQ ID NO: 2439594 - RNA, 19 nt, Homo sapiens
  misc_RNA (1)...(19): siRNA sense strand
gaucagaugggaagcggaa

SEQ ID NO: 2439595 - RNA, 19 nt, Homo sapiens
  misc_RNA (1)...(19): siRNA sense strand
acagagagcacuuggagau

SEQ ID NO: 2439596 - RNA, 19 nt, Homo sapiens
  misc_RNA (1)...(19): siRNA sense strand
gagcuaugcuggacuggga

SEQ ID NO: 2439597 - RNA, 19 nt, Homo sapiens
  misc_RNA (1)...(19): siRNA sense strand
ggagcgaacucuugcugca

SEQ ID NO: 2439598 - RNA, 19 nt, Homo sapiens
  misc_RNA (1)...(19): siRNA sense strand
gaucagaugggaagcggaa

SEQ ID NO: 2439599 - RNA, 19 nt, Homo sapiens
  misc_RNA (1)...(19): siRNA sense strand
acagagagcacuuggagau

SEQ ID NO: 2439600 - RNA, 19 nt, Homo sapiens
  misc_RNA (1)...(19): siRNA sense strand
gagcuaugcuggacuggga

SEQ ID NO: 2439601 - RNA, 19 nt, Homo sapiens
  misc_RNA (1)...(19): siRNA sense strand
ggagcgaacucuugcugca

SEQ ID NO: 2439602 - RNA, 19 nt, Homo sapiens
  misc_RNA (1)...(19): siRNA sense strand
aggaacaggaaauuagaaa

SEQ ID NO: 2439603 - RNA, 19 nt, Homo sapiens
  misc_RNA (1)...(19): siRNA sense strand
cagaaauggaagcugucaa

SEQ ID NO: 2439604 - RNA, 19 nt, Homo sapiens
  misc_RNA (1)...(19): siRNA sense strand
gaugaagaacguagcggau

SEQ ID NO: 2439605 - RNA, 19 nt, Homo sapiens
  misc_RNA (1)...(19): siRNA sense strand
agcugaaggaacaggaaau

SEQ ID NO: 2439606 - RNA, 19 nt, Homo sapiens
  misc_RNA (1)...(19): siRNA sense strand
caaagaagaccgagagacc

SEQ ID NO: 2439607 - RNA, 19 nt, Homo sapiens
  misc_RNA (1)...(19): siRNA sense strand
ggggaaagacauuggagga

SEQ ID NO: 2439608 - RNA, 19 nt, Homo sapiens
  misc_RNA (1)...(19): siRNA sense strand
gaaagacauuggaggacgu

SEQ ID NO: 2439609 - RNA, 19 nt, Homo sapiens
  misc_RNA (1)...(19): siRNA sense strand
gacacugagaugaggaaaa

SEQ ID NO: 2439610 - RNA, 19 nt, Homo sapiens
  misc_RNA (1)...(19): siRNA sense strand
auguggagaauuugaguau

SEQ ID NO: 2439611 - RNA, 19 nt, Homo sapiens
  misc_RNA (1)...(19): siRNA sense strand
cugaauugagcaaagaaga

SEQ ID NO: 2439612 - RNA, 19 nt, Homo sapiens
  misc_RNA (1)...(19): siRNA sense strand
gagaugaggaaaagacuau

SEQ ID NO: 2439613 - RNA, 19 nt, Homo sapiens
  misc_RNA (1)...(19): siRNA sense strand
ggaaaagacuauguggaga

SEQ ID NO: 2439614 - RNA, 19 nt, Homo sapiens
  misc_RNA (1)...(19): siRNA sense strand
acuuugaccagaugaagaa

SEQ ID NO: 2439615 - RNA, 19 nt, Homo sapiens
  misc_RNA (1)...(19): siRNA sense strand
aagcugaaggaacaggaaa

SEQ ID NO: 2439616 - RNA, 19 nt, Homo sapiens
  misc_RNA (1)...(19): siRNA sense strand
ucgaaggugcggagcugua

SEQ ID NO: 2439617 - RNA, 19 nt, Homo sapiens
  misc_RNA (1)...(19): siRNA sense strand
agacauuggaggacguguu

SEQ ID NO: 2439618 - RNA, 19 nt, Homo sapiens
  misc_RNA (1)...(19): siRNA sense strand
cuauccaaccuucggcaaa

SEQ ID NO: 2439619 - RNA, 19 nt, Homo sapiens
  misc_RNA (1)...(19): siRNA sense strand
gcgugagguacaaaugaau

SEQ ID NO: 2439620 - RNA, 19 nt, Homo sapiens
  misc_RNA (1)...(19): siRNA sense strand
aaauggaagcugucaacau

SEQ ID NO: 2439621 - RNA, 19 nt, Homo sapiens
  misc_RNA (1)...(19): siRNA sense strand
ugagcaaagaagaccgaga

SEQ ID NO: 2439622 - RNA, 19 nt, Homo sapiens
  misc_RNA (1)...(19): siRNA sense strand
caaccaaauaacagcggaa

SEQ ID NO: 2439623 - RNA, 19 nt, Homo sapiens
  misc_RNA (1)...(19): siRNA sense strand
ugucagaaacagugugcau

SEQ ID NO: 2439624 - RNA, 19 nt, Homo sapiens
  misc_RNA (1)...(19): siRNA sense strand
aaauaacagcggaacggaa

SEQ ID NO: 2439625 - RNA, 19 nt, Homo sapiens
  misc_RNA (1)...(19): siRNA sense strand
aaacaguacucuucagcca

SEQ ID NO: 2439626 - RNA, 19 nt, Homo sapiens
  misc_RNA (1)...(19): siRNA sense strand
cugaagaggaggaugauac

SEQ ID NO: 2439627 - RNA, 19 nt, Homo sapiens
  misc_RNA (1)...(19): siRNA sense strand
cuggagaaggagagugcga

SEQ ID NO: 2439628 - RNA, 19 nt, Homo sapiens
  misc_RNA (1)...(19): siRNA sense strand
gguagaggaagaugcgcuu

SEQ ID NO: 2439629 - RNA, 19 nt, Homo sapiens
  misc_RNA (1)...(19): siRNA sense strand
ucaacuuggagcagcggaa

SEQ ID NO: 2439630 - RNA, 19 nt, Homo sapiens
  misc_RNA (1)...(19): siRNA sense strand
cuuccaaagagucugcaaa

SEQ ID NO: 2439631 - RNA, 19 nt, Homo sapiens
  misc_RNA (1)...(19): siRNA sense strand
cugcaaaacucuaugguuc

SEQ ID NO: 2439632 - RNA, 19 nt, Homo sapiens
  misc_RNA (1)...(19): siRNA sense strand
gaugaaaaccagcacgaau

SEQ ID NO: 2439633 - RNA, 19 nt, Homo sapiens
  misc_RNA (1)...(19): siRNA sense strand
cagcaaaagggcauaauca

SEQ ID NO: 2439634 - RNA, 19 nt, Homo sapiens
  misc_RNA (1)...(19): siRNA sense strand
acgaggacgacgaguacaa

SEQ ID NO: 2439635 - RNA, 19 nt, Homo sapiens
  misc_RNA (1)...(19): siRNA sense strand
aggaccaaguggcggaaga

SEQ ID NO: 2439636 - RNA, 19 nt, Homo sapiens
  misc_RNA (1)...(19): siRNA sense strand
cggagaacgaggacgacga

SEQ ID NO: 2439637 - RNA, 19 nt, Homo sapiens
  misc_RNA (1)...(19): siRNA sense strand
aggacgacgaguacaacaa

SEQ ID NO: 2439638 - RNA, 19 nt, Homo sapiens
  misc_RNA (1)...(19): siRNA sense strand
accaaguggcggaagaaga

SEQ ID NO: 2439639 - RNA, 19 nt, Homo sapiens
  misc_RNA (1)...(19): siRNA sense strand
ccacaaagcuggcgagguc

SEQ ID NO: 2439640 - RNA, 19 nt, Homo sapiens
  misc_RNA (1)...(19): siRNA sense strand
cuguugaucuugagcgcga

SEQ ID NO: 2439641 - RNA, 19 nt, Homo sapiens
  misc_RNA (1)...(19): siRNA sense strand
gcuugacauuagugagaau

SEQ ID NO: 2439642 - RNA, 19 nt, Homo sapiens
  misc_RNA (1)...(19): siRNA sense strand
uguguggagccgagggaaa

SEQ ID NO: 2439643 - RNA, 19 nt, Homo sapiens
  misc_RNA (1)...(19): siRNA sense strand
gagggaaaggcaagcacaa

SEQ ID NO: 2439644 - RNA, 19 nt, Homo sapiens
  misc_RNA (1)...(19): siRNA sense strand
gggaaaggcaagcacaaaa

SEQ ID NO: 2439645 - RNA, 19 nt, Homo sapiens
  misc_RNA (1)...(19): siRNA sense strand
ggaaacuuuggaagagaau

SEQ ID NO: 2439646 - RNA, 19 nt, Homo sapiens
  misc_RNA (1)...(19): siRNA sense strand
gagauugacuauuggccuu

SEQ ID NO: 2439647 - RNA, 19 nt, Homo sapiens
  misc_RNA (1)...(19): siRNA sense strand
aagagauagacuugaguga

SEQ ID NO: 2439648 - RNA, 19 nt, Homo sapiens
  misc_RNA (1)...(19): siRNA sense strand
ggauaugaugccugccaau

SEQ ID NO: 2439649 - RNA, 19 nt, Homo sapiens
  misc_RNA (1)...(19): siRNA sense strand
gcuaguagaugaagggcag

SEQ ID NO: 2439650 - RNA, 19 nt, Homo sapiens
  misc_RNA (1)...(19): siRNA sense strand
uguuguggaaggagaggua

SEQ ID NO: 2439651 - RNA, 19 nt, Homo sapiens
  misc_RNA (1)...(19): siRNA sense strand
ccuaaaaggcaaucgucua

SEQ ID NO: 2439652 - RNA, 19 nt, Homo sapiens
  misc_RNA (1)...(19): siRNA sense strand
ccaaaauccgugaaaagaa

SEQ ID NO: 2439653 - RNA, 19 nt, Homo sapiens
  misc_RNA (1)...(19): siRNA sense strand
ggaucaagacagcgggaug

SEQ ID NO: 2439654 - RNA, 19 nt, Homo sapiens
  misc_RNA (1)...(19): siRNA sense strand
gugcuguuguggaaggaga

SEQ ID NO: 2439655 - RNA, 19 nt, Homo sapiens
  misc_RNA (1)...(19): siRNA sense strand
gugacaacaucauugccaa

SEQ ID NO: 2439656 - RNA, 19 nt, Homo sapiens
  misc_RNA (1)...(19): siRNA sense strand
gugauggcaccuuggaaau

SEQ ID NO: 2439657 - RNA, 19 nt, Homo sapiens
  misc_RNA (1)...(19): siRNA sense strand
guguuaaucuucaugggau

SEQ ID NO: 2439658 - RNA, 19 nt, Homo sapiens
  misc_RNA (1)...(19): siRNA sense strand
ccugugauuuccuggguga

SEQ ID NO: 2439659 - RNA, 19 nt, Homo sapiens
  misc_RNA (1)...(19): siRNA sense strand
acaccuagagauugacuau

SEQ ID NO: 2439660 - RNA, 19 nt, Homo sapiens
  misc_RNA (1)...(19): siRNA sense strand
aaacuuuggaagagaaugu

SEQ ID NO: 2439661 - RNA, 19 nt, Homo sapiens
  misc_RNA (1)...(19): siRNA sense strand
cucuggaggucuugagcau

SEQ ID NO: 2439662 - RNA, 19 nt, Homo sapiens
  misc_RNA (1)...(19): siRNA sense strand
ccaauagccucuacggucu

SEQ ID NO: 2439663 - RNA, 19 nt, Homo sapiens
  misc_RNA (1)...(19): siRNA sense strand
aagcuugacauuagugaga

SEQ ID NO: 2439664 - RNA, 19 nt, Homo sapiens
  misc_RNA (1)...(19): siRNA sense strand
aaaucuuggaccucaguaa

SEQ ID NO: 2439665 - RNA, 19 nt, Homo sapiens
  misc_RNA (1)...(19): siRNA sense strand
cuggaaacuuuggaagaga

SEQ ID NO: 2439666 - RNA, 19 nt, Homo sapiens
  misc_RNA (1)...(19): siRNA sense strand
agggaaaggcaagcacaaa

SEQ ID NO: 2439667 - RNA, 19 nt, Homo sapiens
  misc_RNA (1)...(19): siRNA sense strand
ggaaggagagguagcugga

SEQ ID NO: 2439668 - RNA, 19 nt, Homo sapiens
  misc_RNA (1)...(19): siRNA sense strand
cuaaaaggcaaucgucuaa

SEQ ID NO: 2439669 - RNA, 19 nt, Homo sapiens
  misc_RNA (1)...(19): siRNA sense strand
uggaacagcacaauggcaa

SEQ ID NO: 2439670 - RNA, 19 nt, Homo sapiens
  misc_RNA (1)...(19): siRNA sense strand
gggccguggaacagcacaa

SEQ ID NO: 2439671 - RNA, 19 nt, Homo sapiens
  misc_RNA (1)...(19): siRNA sense strand
gcuaugaggaggugagcgu

SEQ ID NO: 2439672 - RNA, 19 nt, Homo sapiens
  misc_RNA (1)...(19): siRNA sense strand
ugguagaaucugagugucu

SEQ ID NO: 2439673 - RNA, 19 nt, Homo sapiens
  misc_RNA (1)...(19): siRNA sense strand
gaaaguaacagcagugccu

SEQ ID NO: 2439674 - RNA, 19 nt, Homo sapiens
  misc_RNA (1)...(19): siRNA sense strand
uguuguucucugaagauua

SEQ ID NO: 2439675 - RNA, 19 nt, Homo sapiens
  misc_RNA (1)...(19): siRNA sense strand
gaggagaucugcuggacga

SEQ ID NO: 2439676 - RNA, 19 nt, Homo sapiens
  misc_RNA (1)...(19): siRNA sense strand
ccgagcugguggugcagaa

SEQ ID NO: 2439677 - RNA, 19 nt, Homo sapiens
  misc_RNA (1)...(19): siRNA sense strand
ucucggaugaugaggaaga

SEQ ID NO: 2439678 - RNA, 19 nt, Homo sapiens
  misc_RNA (1)...(19): siRNA sense strand
gcaaccaacuggaccgcau

SEQ ID NO: 2439679 - RNA, 19 nt, Homo sapiens
  misc_RNA (1)...(19): siRNA sense strand
gcggaagcauagagaggca

SEQ ID NO: 2439680 - RNA, 19 nt, Homo sapiens
  misc_RNA (1)...(19): siRNA sense strand
auucaauugcggaagcaua

SEQ ID NO: 2439681 - RNA, 19 nt, Homo sapiens
  misc_RNA (1)...(19): siRNA sense strand
gguuugaugcugaagccaa

SEQ ID NO: 2439682 - RNA, 19 nt, Homo sapiens
  misc_RNA (1)...(19): siRNA sense strand
guggaugguuugaugcuga

SEQ ID NO: 2439683 - RNA, 19 nt, Homo sapiens
  misc_RNA (1)...(19): siRNA sense strand
gaacaaguguggaugcuuc

SEQ ID NO: 2439684 - RNA, 19 nt, Homo sapiens
  misc_RNA (1)...(19): siRNA sense strand
aggcaucuuaugagaguca

SEQ ID NO: 2439685 - RNA, 19 nt, Homo sapiens
  misc_RNA (1)...(19): siRNA sense strand
acucauuuaagaugccaaa

SEQ ID NO: 2439686 - RNA, 19 nt, Homo sapiens
  misc_RNA (1)...(19): siRNA sense strand
gcuuauggcaugaaggaca

SEQ ID NO: 2439687 - RNA, 19 nt, Homo sapiens
  misc_RNA (1)...(19): siRNA sense strand
cggaaagacaagcugaaaa

SEQ ID NO: 2439688 - RNA, 19 nt, Homo sapiens
  misc_RNA (1)...(19): siRNA sense strand
ugaaggacauggagcggca

SEQ ID NO: 2439689 - RNA, 19 nt, Homo sapiens
  misc_RNA (1)...(19): siRNA sense strand
aauucacacgggagacaaa

SEQ ID NO: 2439690 - RNA, 19 nt, Homo sapiens
  misc_RNA (1)...(19): siRNA sense strand
ggcaagugcuuuagccgga

SEQ ID NO: 2439691 - RNA, 19 nt, Homo sapiens
  misc_RNA (1)...(19): siRNA sense strand
gcuuauggcaugaaggaca

SEQ ID NO: 2439692 - RNA, 19 nt, Homo sapiens
  misc_RNA (1)...(19): siRNA sense strand
cggaaagacaagcugaaaa

SEQ ID NO: 2439693 - RNA, 19 nt, Homo sapiens
  misc_RNA (1)...(19): siRNA sense strand
ugaaggacauggagcggca

SEQ ID NO: 2439694 - RNA, 19 nt, Homo sapiens
  misc_RNA (1)...(19): siRNA sense strand
aauucacacgggagacaaa

SEQ ID NO: 2439695 - RNA, 19 nt, Homo sapiens
  misc_RNA (1)...(19): siRNA sense strand
ggcaagugcuuuagccgga

SEQ ID NO: 2439696 - RNA, 19 nt, Homo sapiens
  misc_RNA (1)...(19): siRNA sense strand
gcuuauggcaugaaggaca

SEQ ID NO: 2439697 - RNA, 19 nt, Homo sapiens
  misc_RNA (1)...(19): siRNA sense strand
cggaaagacaagcugaaaa

SEQ ID NO: 2439698 - RNA, 19 nt, Homo sapiens
  misc_RNA (1)...(19): siRNA sense strand
ugaaggacauggagcggca

SEQ ID NO: 2439699 - RNA, 19 nt, Homo sapiens
  misc_RNA (1)...(19): siRNA sense strand
aauucacacgggagacaaa

SEQ ID NO: 2439700 - RNA, 19 nt, Homo sapiens
  misc_RNA (1)...(19): siRNA sense strand
ggcaagugcuuuagccgga

SEQ ID NO: 2439701 - RNA, 19 nt, Homo sapiens
  misc_RNA (1)...(19): siRNA sense strand
gcuuauggcaugaaggaca

SEQ ID NO: 2439702 - RNA, 19 nt, Homo sapiens
  misc_RNA (1)...(19): siRNA sense strand
cggaaagacaagcugaaaa

SEQ ID NO: 2439703 - RNA, 19 nt, Homo sapiens
  misc_RNA (1)...(19): siRNA sense strand
ugaaggacauggagcggca

SEQ ID NO: 2439704 - RNA, 19 nt, Homo sapiens
  misc_RNA (1)...(19): siRNA sense strand
aauucacacgggagacaaa

SEQ ID NO: 2439705 - RNA, 19 nt, Homo sapiens
  misc_RNA (1)...(19): siRNA sense strand
ggcaagugcuuuagccgga

SEQ ID NO: 2439706 - RNA, 19 nt, Homo sapiens
  misc_RNA (1)...(19): siRNA sense strand
aggaagaggaggagggaga

SEQ ID NO: 2439707 - RNA, 19 nt, Homo sapiens
  misc_RNA (1)...(19): siRNA sense strand
gagaagaggaagaggagga

SEQ ID NO: 2439708 - RNA, 19 nt, Homo sapiens
  misc_RNA (1)...(19): siRNA sense strand
gcaacaaacucaagucgca

SEQ ID NO: 2439709 - RNA, 19 nt, Homo sapiens
  misc_RNA (1)...(19): siRNA sense strand
aagagaaggcccaggagga

SEQ ID NO: 2439710 - RNA, 19 nt, Homo sapiens
  misc_RNA (1)...(19): siRNA sense strand
ugugguuacuagugccaaa

SEQ ID NO: 2439711 - RNA, 19 nt, Homo sapiens
  misc_RNA (1)...(19): siRNA sense strand
agcugaagauggagaggga

SEQ ID NO: 2439712 - RNA, 19 nt, Homo sapiens
  misc_RNA (1)...(19): siRNA sense strand
aggaggagggagaggagga

SEQ ID NO: 2439713 - RNA, 19 nt, Homo sapiens
  misc_RNA (1)...(19): siRNA sense strand
aggaggacgaggagaggga

SEQ ID NO: 2439714 - RNA, 19 nt, Homo sapiens
  misc_RNA (1)...(19): siRNA sense strand
cccaggaggaagaagagaa

SEQ ID NO: 2439715 - RNA, 19 nt, Homo sapiens
  misc_RNA (1)...(19): siRNA sense strand
aggagggagaggaggacga

SEQ ID NO: 2439716 - RNA, 19 nt, Homo sapiens
  misc_RNA (1)...(19): siRNA sense strand
gagaggaggacgaggagag

SEQ ID NO: 2439717 - RNA, 19 nt, Homo sapiens
  misc_RNA (1)...(19): siRNA sense strand
agggagaggaggacgagga

SEQ ID NO: 2439718 - RNA, 19 nt, Homo sapiens
  misc_RNA (1)...(19): siRNA sense strand
cugcaggagcuaagggaug

SEQ ID NO: 2439719 - RNA, 19 nt, Homo sapiens
  misc_RNA (1)...(19): siRNA sense strand
cugaggagaugcugggcaa

SEQ ID NO: 2439720 - RNA, 19 nt, Homo sapiens
  misc_RNA (1)...(19): siRNA sense strand
gagaaaucgcccuggccaa

SEQ ID NO: 2439721 - RNA, 19 nt, Homo sapiens
  misc_RNA (1)...(19): siRNA sense strand
agaaagaagagguucgaga

SEQ ID NO: 2439722 - RNA, 19 nt, Homo sapiens
  misc_RNA (1)...(19): siRNA sense strand
aggaugaguugauggcaga

SEQ ID NO: 2439723 - RNA, 19 nt, Homo sapiens
  misc_RNA (1)...(19): siRNA sense strand
gaacaugggcuuugcagca

SEQ ID NO: 2439724 - RNA, 19 nt, Homo sapiens
  misc_RNA (1)...(19): siRNA sense strand
gcaacaggauaucgcccaa

SEQ ID NO: 2439725 - RNA, 19 nt, Homo sapiens
  misc_RNA (1)...(19): siRNA sense strand
cagcaaaagcgaugaaauc

SEQ ID NO: 2439726 - RNA, 19 nt, Homo sapiens
  misc_RNA (1)...(19): siRNA sense strand
aagaauuggaacaggagga

SEQ ID NO: 2439727 - RNA, 19 nt, Homo sapiens
  misc_RNA (1)...(19): siRNA sense strand
cugcauuacaggcacuaaa

SEQ ID NO: 2439728 - RNA, 19 nt, Homo sapiens
  misc_RNA (1)...(19): siRNA sense strand
aagaaaucucagaagcauu

SEQ ID NO: 2439729 - RNA, 19 nt, Homo sapiens
  misc_RNA (1)...(19): siRNA sense strand
aacaagaguaccuggaaaa

SEQ ID NO: 2439730 - RNA, 19 nt, Homo sapiens
  misc_RNA (1)...(19): siRNA sense strand
uugaagaauuggaacagga

SEQ ID NO: 2439731 - RNA, 19 nt, Homo sapiens
  misc_RNA (1)...(19): siRNA sense strand
cuaaagagaaagaagaggu

SEQ ID NO: 2439732 - RNA, 19 nt, Homo sapiens
  misc_RNA (1)...(19): siRNA sense strand
aggauaucgcccaagaaau

SEQ ID NO: 2439733 - RNA, 19 nt, Homo sapiens
  misc_RNA (1)...(19): siRNA sense strand
gugaugacuuugaugagga

SEQ ID NO: 2439734 - RNA, 19 nt, Homo sapiens
  misc_RNA (1)...(19): siRNA sense strand
cccagagggcagaagaaga

SEQ ID NO: 2439735 - RNA, 19 nt, Homo sapiens
  misc_RNA (1)...(19): siRNA sense strand
aagcagaaccagagccgga

SEQ ID NO: 2439736 - RNA, 19 nt, Homo sapiens
  misc_RNA (1)...(19): siRNA sense strand
cuaaagaggcugaaccgga

SEQ ID NO: 2439737 - RNA, 19 nt, Homo sapiens
  misc_RNA (1)...(19): siRNA sense strand
ccauagcagccaagaugau

SEQ ID NO: 2439738 - RNA, 19 nt, Homo sapiens
  misc_RNA (1)...(19): siRNA sense strand
ccauagcagccaagaugau

SEQ ID NO: 2439739 - RNA, 19 nt, Homo sapiens
  misc_RNA (1)...(19): siRNA sense strand
gggcaaaggacaucagcau

SEQ ID NO: 2439740 - RNA, 19 nt, Homo sapiens
  misc_RNA (1)...(19): siRNA sense strand
agagaagaucauagaagaa

SEQ ID NO: 2439741 - RNA, 19 nt, Homo sapiens
  misc_RNA (1)...(19): siRNA sense strand
cuaaagaaaugguggcacu

SEQ ID NO: 2439742 - RNA, 19 nt, Homo sapiens
  misc_RNA (1)...(19): siRNA sense strand
ugaccaaaccucagaccaa

SEQ ID NO: 2439743 - RNA, 19 nt, Homo sapiens
  misc_RNA (1)...(19): siRNA sense strand
ucauagaagaacagagcuu

SEQ ID NO: 2439744 - RNA, 19 nt, Homo sapiens
  misc_RNA (1)...(19): siRNA sense strand
ccauggauucaaagaagaa

SEQ ID NO: 2439745 - RNA, 19 nt, Homo sapiens
  misc_RNA (1)...(19): siRNA sense strand
aggucaagguguauauuau

SEQ ID NO: 2439746 - RNA, 19 nt, Homo sapiens
  misc_RNA (1)...(19): siRNA sense strand
ccauaaagaccucagggau

SEQ ID NO: 2439747 - RNA, 19 nt, Homo sapiens
  misc_RNA (1)...(19): siRNA sense strand
agaagaucauagaagaaca

SEQ ID NO: 2439748 - RNA, 19 nt, Homo sapiens
  misc_RNA (1)...(19): siRNA sense strand
uuauggauuugguggagaa

SEQ ID NO: 2439749 - RNA, 19 nt, Homo sapiens
  misc_RNA (1)...(19): siRNA sense strand
aggacagguaucaggaauu

SEQ ID NO: 2439750 - RNA, 19 nt, Homo sapiens
  misc_RNA (1)...(19): siRNA sense strand
gggcgcugaaagagaguau

SEQ ID NO: 2439751 - RNA, 19 nt, Homo sapiens
  misc_RNA (1)...(19): siRNA sense strand
uaucaggaauuaagggagu

SEQ ID NO: 2439752 - RNA, 19 nt, Homo sapiens
  misc_RNA (1)...(19): siRNA sense strand
uuugaagacaagagguaau

SEQ ID NO: 2439753 - RNA, 19 nt, Homo sapiens
  misc_RNA (1)...(19): siRNA sense strand
acucuaaugaauugcacaa

SEQ ID NO: 2439754 - RNA, 19 nt, Homo sapiens
  misc_RNA (1)...(19): siRNA sense strand
aaucaauucuagaagacca

SEQ ID NO: 2439755 - RNA, 19 nt, Homo sapiens
  misc_RNA (1)...(19): siRNA sense strand
auuauuugacccagaacaa

SEQ ID NO: 2439756 - RNA, 19 nt, Homo sapiens
  misc_RNA (1)...(19): siRNA sense strand
aagugaugucuauggaaau

SEQ ID NO: 2439757 - RNA, 19 nt, Homo sapiens
  misc_RNA (1)...(19): siRNA sense strand
aaagauaggauuugaccca

SEQ ID NO: 2439758 - RNA, 19 nt, Homo sapiens
  misc_RNA (1)...(19): siRNA sense strand
agauaggauuugacccaga

SEQ ID NO: 2439759 - RNA, 19 nt, Homo sapiens
  misc_RNA (1)...(19): siRNA sense strand
aggauauugaagagaagau

SEQ ID NO: 2439760 - RNA, 19 nt, Homo sapiens
  misc_RNA (1)...(19): siRNA sense strand
ggagagaucugcuugccau

SEQ ID NO: 2439761 - RNA, 19 nt, Homo sapiens
  misc_RNA (1)...(19): siRNA sense strand
gacccagagccgcaagaaa

SEQ ID NO: 2439762 - RNA, 19 nt, Homo sapiens
  misc_RNA (1)...(19): siRNA sense strand
guuuugaagacaagaggua

SEQ ID NO: 2439763 - RNA, 19 nt, Homo sapiens
  misc_RNA (1)...(19): siRNA sense strand
gagagaucugcuugccaua

SEQ ID NO: 2439764 - RNA, 19 nt, Homo sapiens
  misc_RNA (1)...(19): siRNA sense strand
ccaggauauugaagagaag

SEQ ID NO: 2439765 - RNA, 19 nt, Homo sapiens
  misc_RNA (1)...(19): siRNA sense strand
uuuaaguaagccagaagaa

SEQ ID NO: 2439766 - RNA, 19 nt, Homo sapiens
  misc_RNA (1)...(19): siRNA sense strand
gcaccaauucuauggccau

SEQ ID NO: 2439767 - RNA, 19 nt, Homo sapiens
  misc_RNA (1)...(19): siRNA sense strand
gcauuauggauuuggugga

SEQ ID NO: 2439768 - RNA, 19 nt, Homo sapiens
  misc_RNA (1)...(19): siRNA sense strand
acccagagccgcaagaaaa

SEQ ID NO: 2439769 - RNA, 19 nt, Homo sapiens
  misc_RNA (1)...(19): siRNA sense strand
gauauugaagagaagauca

SEQ ID NO: 2439770 - RNA, 19 nt, Homo sapiens
  misc_RNA (1)...(19): siRNA sense strand
cauaaagccauuuccaaaa

SEQ ID NO: 2439771 - RNA, 19 nt, Homo sapiens
  misc_RNA (1)...(19): siRNA sense strand
gguggagaaaccuggccaa

SEQ ID NO: 2439772 - RNA, 19 nt, Homo sapiens
  misc_RNA (1)...(19): siRNA sense strand
acaacaaagaccagcgaaa

SEQ ID NO: 2439773 - RNA, 19 nt, Homo sapiens
  misc_RNA (1)...(19): siRNA sense strand
cugagaaagacaaggaaau

SEQ ID NO: 2439774 - RNA, 19 nt, Homo sapiens
  misc_RNA (1)...(19): siRNA sense strand
ccugagaaagacaaggaaa

SEQ ID NO: 2439775 - RNA, 19 nt, Homo sapiens
  misc_RNA (1)...(19): siRNA sense strand
aggagaagaaggagaaagu

SEQ ID NO: 2439776 - RNA, 19 nt, Homo sapiens
  misc_RNA (1)...(19): siRNA sense strand
cgucauuaucacagacuuu

SEQ ID NO: 2439777 - RNA, 19 nt, Homo sapiens
  misc_RNA (1)...(19): siRNA sense strand
aucacagacuuuaaggaaa

SEQ ID NO: 2439778 - RNA, 19 nt, Homo sapiens
  misc_RNA (1)...(19): siRNA sense strand
agaaggagaaaguugaaaa

SEQ ID NO: 2439779 - RNA, 19 nt, Homo sapiens
  misc_RNA (1)...(19): siRNA sense strand
cagcagaaccagagcagcu

SEQ ID NO: 2439780 - RNA, 19 nt, Homo sapiens
  misc_RNA (1)...(19): siRNA sense strand
uggcacaacaaguggcaca

SEQ ID NO: 2439781 - RNA, 19 nt, Homo sapiens
  misc_RNA (1)...(19): siRNA sense strand
uugaaaagcaggacaaaga

SEQ ID NO: 2439782 - RNA, 19 nt, Homo sapiens
  misc_RNA (1)...(19): siRNA sense strand
gagaaaccugagaaagaca

SEQ ID NO: 2439783 - RNA, 19 nt, Homo sapiens
  misc_RNA (1)...(19): siRNA sense strand
aacaaagaccagcgaaaca

SEQ ID NO: 2439784 - RNA, 19 nt, Homo sapiens
  misc_RNA (1)...(19): siRNA sense strand
aggagaaaguugaaaagca

SEQ ID NO: 2439785 - RNA, 19 nt, Homo sapiens
  misc_RNA (1)...(19): siRNA sense strand
aaaaggagaagaaggagaa

SEQ ID NO: 2439786 - RNA, 19 nt, Homo sapiens
  misc_RNA (1)...(19): siRNA sense strand
gggucagagagcacagaca

SEQ ID NO: 2439787 - RNA, 19 nt, Homo sapiens
  misc_RNA (1)...(19): siRNA sense strand
auguaacuuuccugggaua

SEQ ID NO: 2439788 - RNA, 19 nt, Homo sapiens
  misc_RNA (1)...(19): siRNA sense strand
ugggauucuuugagacaau

SEQ ID NO: 2439789 - RNA, 19 nt, Homo sapiens
  misc_RNA (1)...(19): siRNA sense strand
uucuauaaguacagaguga

SEQ ID NO: 2439790 - RNA, 19 nt, Homo sapiens
  misc_RNA (1)...(19): siRNA sense strand
acgaaggaccagugggcca

SEQ ID NO: 2439791 - RNA, 19 nt, Homo sapiens
  misc_RNA (1)...(19): siRNA sense strand
acgacagagcagagacuau

SEQ ID NO: 2439792 - RNA, 19 nt, Homo sapiens
  misc_RNA (1)...(19): siRNA sense strand
ggaaauaccuuaugguugg

SEQ ID NO: 2439793 - RNA, 19 nt, Homo sapiens
  misc_RNA (1)...(19): siRNA sense strand
gcuacaaauaucugagaag

SEQ ID NO: 2439794 - RNA, 19 nt, Homo sapiens
  misc_RNA (1)...(19): siRNA sense strand
aguauuuagugaaacgaca

SEQ ID NO: 2439795 - RNA, 19 nt, Homo sapiens
  misc_RNA (1)...(19): siRNA sense strand
cauagauuguguaggcguu

SEQ ID NO: 2439796 - RNA, 19 nt, Homo sapiens
  misc_RNA (1)...(19): siRNA sense strand
gaaaacagacgaaggacca

SEQ ID NO: 2439797 - RNA, 19 nt, Homo sapiens
  misc_RNA (1)...(19): siRNA sense strand
cugaagaaauagacgaauu

SEQ ID NO: 2439798 - RNA, 19 nt, Homo sapiens
  misc_RNA (1)...(19): siRNA sense strand
gggaaaaggagcugggaag

SEQ ID NO: 2439799 - RNA, 19 nt, Homo sapiens
  misc_RNA (1)...(19): siRNA sense strand
ggacauaugugccgagcuc

SEQ ID NO: 2439800 - RNA, 19 nt, Homo sapiens
  misc_RNA (1)...(19): siRNA sense strand
aggcaagaaggaugacaau

SEQ ID NO: 2439801 - RNA, 19 nt, Homo sapiens
  misc_RNA (1)...(19): siRNA sense strand
agacagucgcagauacauu

SEQ ID NO: 2439802 - RNA, 19 nt, Homo sapiens
  misc_RNA (1)...(19): siRNA sense strand
ggccaaaccacaccggcua

SEQ ID NO: 2439803 - RNA, 19 nt, Homo sapiens
  misc_RNA (1)...(19): siRNA sense strand
cccugaagaaauagacgaa

SEQ ID NO: 2439804 - RNA, 19 nt, Homo sapiens
  misc_RNA (1)...(19): siRNA sense strand
agaaauagacgaauuagga

SEQ ID NO: 2439805 - RNA, 19 nt, Homo sapiens
  misc_RNA (1)...(19): siRNA sense strand
ccaaagacagucgcagaua

SEQ ID NO: 2439806 - RNA, 19 nt, Homo sapiens
  misc_RNA (1)...(19): siRNA sense strand
aaggcaagaaggaugacaa

SEQ ID NO: 2439807 - RNA, 19 nt, Homo sapiens
  misc_RNA (1)...(19): siRNA sense strand
gaacuuauuugcagagcuc

SEQ ID NO: 2439808 - RNA, 19 nt, Homo sapiens
  misc_RNA (1)...(19): siRNA sense strand
gccagguagacuugaagaa

SEQ ID NO: 2439809 - RNA, 19 nt, Homo sapiens
  misc_RNA (1)...(19): siRNA sense strand
ucgcagauacauuugagaa

SEQ ID NO: 2439810 - RNA, 19 nt, Homo sapiens
  misc_RNA (1)...(19): siRNA sense strand
ggggaaaaggagcugggaa

SEQ ID NO: 2439811 - RNA, 19 nt, Homo sapiens
  misc_RNA (1)...(19): siRNA sense strand
ucaagauccucaaggccau

SEQ ID NO: 2439812 - RNA, 19 nt, Homo sapiens
  misc_RNA (1)...(19): siRNA sense strand
ggucauguauuccugguga

SEQ ID NO: 2439813 - RNA, 19 nt, Homo sapiens
  misc_RNA (1)...(19): siRNA sense strand
gcucagaaguccucagaua

SEQ ID NO: 2439814 - RNA, 19 nt, Homo sapiens
  misc_RNA (1)...(19): siRNA sense strand
gagaagaaacugaaggaau

SEQ ID NO: 2439815 - RNA, 19 nt, Homo sapiens
  misc_RNA (1)...(19): siRNA sense strand
gaagagauacugagugaaa

SEQ ID NO: 2439816 - RNA, 19 nt, Homo sapiens
  misc_RNA (1)...(19): siRNA sense strand
ccacaagagcagggaaaua

SEQ ID NO: 2439817 - RNA, 19 nt, Homo sapiens
  misc_RNA (1)...(19): siRNA sense strand
gaggaacacuuaaaggaaa

SEQ ID NO: 2439818 - RNA, 19 nt, Homo sapiens
  misc_RNA (1)...(19): siRNA sense strand
ggaaauugcagaucugaaa

SEQ ID NO: 2439819 - RNA, 19 nt, Homo sapiens
  misc_RNA (1)...(19): siRNA sense strand
aagaagagauacugaguga

SEQ ID NO: 2439820 - RNA, 19 nt, Homo sapiens
  misc_RNA (1)...(19): siRNA sense strand
uaaagaugguggaggauuu

SEQ ID NO: 2439821 - RNA, 19 nt, Homo sapiens
  misc_RNA (1)...(19): siRNA sense strand
gaccaaagcaguaaacaaa

SEQ ID NO: 2439822 - RNA, 19 nt, Homo sapiens
  misc_RNA (1)...(19): siRNA sense strand
uggaauuacugcagcacaa

SEQ ID NO: 2439823 - RNA, 19 nt, Homo sapiens
  misc_RNA (1)...(19): siRNA sense strand
ucagagggcuggugggcaa

SEQ ID NO: 2439824 - RNA, 19 nt, Homo sapiens
  misc_RNA (1)...(19): siRNA sense strand
cuacaaagaucuuggauuc

SEQ ID NO: 2439825 - RNA, 19 nt, Homo sapiens
  misc_RNA (1)...(19): siRNA sense strand
uguuaaagaugguggagga

SEQ ID NO: 2439826 - RNA, 19 nt, Homo sapiens
  misc_RNA (1)...(19): siRNA sense strand
gaggaacuacagagagaaa

SEQ ID NO: 2439827 - RNA, 19 nt, Homo sapiens
  misc_RNA (1)...(19): siRNA sense strand
gcugaacacugcugugaaa

SEQ ID NO: 2439828 - RNA, 19 nt, Homo sapiens
  misc_RNA (1)...(19): siRNA sense strand
gggaagaagaacaagcaau

SEQ ID NO: 2439829 - RNA, 19 nt, Homo sapiens
  misc_RNA (1)...(19): siRNA sense strand
uaagauagccgcugacaua

SEQ ID NO: 2439830 - RNA, 19 nt, Homo sapiens
  misc_RNA (1)...(19): siRNA sense strand
gaagagagguugcuggaga

SEQ ID NO: 2439831 - RNA, 19 nt, Homo sapiens
  misc_RNA (1)...(19): siRNA sense strand
agaccaaagcaguaaacaa

SEQ ID NO: 2439832 - RNA, 19 nt, Homo sapiens
  misc_RNA (1)...(19): siRNA sense strand
ggaaaauaccuuugugaau

SEQ ID NO: 2439833 - RNA, 19 nt, Homo sapiens
  misc_RNA (1)...(19): siRNA sense strand
gccagagagccuugggaaa

SEQ ID NO: 2439834 - RNA, 19 nt, Homo sapiens
  misc_RNA (1)...(19): siRNA sense strand
aaguaaagagagagcagaa

SEQ ID NO: 2439835 - RNA, 19 nt, Homo sapiens
  misc_RNA (1)...(19): siRNA sense strand
gugaaagugaccauggaaa

SEQ ID NO: 2439836 - RNA, 19 nt, Homo sapiens
  misc_RNA (1)...(19): siRNA sense strand
aggaacacuuaaaggaaau

SEQ ID NO: 2439837 - RNA, 19 nt, Homo sapiens
  misc_RNA (1)...(19): siRNA sense strand
uggaagaguugcuuggaau

SEQ ID NO: 2439838 - RNA, 19 nt, Homo sapiens
  misc_RNA (1)...(19): siRNA sense strand
ccuuuaaccugaagcagaa

SEQ ID NO: 2439839 - RNA, 19 nt, Homo sapiens
  misc_RNA (1)...(19): siRNA sense strand
gagcagaagccuugaugau

SEQ ID NO: 2439840 - RNA, 19 nt, Homo sapiens
  misc_RNA (1)...(19): siRNA sense strand
cagagagaaaggaggagaa

SEQ ID NO: 2439841 - RNA, 19 nt, Homo sapiens
  misc_RNA (1)...(19): siRNA sense strand
agaagaaacugaaggaaug

SEQ ID NO: 2439842 - RNA, 19 nt, Homo sapiens
  misc_RNA (1)...(19): siRNA sense strand
ugucauuacugcaguggaa

SEQ ID NO: 2439843 - RNA, 19 nt, Homo sapiens
  misc_RNA (1)...(19): siRNA sense strand
acaaacaguuggaugaaaa

SEQ ID NO: 2439844 - RNA, 19 nt, Homo sapiens
  misc_RNA (1)...(19): siRNA sense strand
caauaaugaugauacggaa

SEQ ID NO: 2439845 - RNA, 19 nt, Homo sapiens
  misc_RNA (1)...(19): siRNA sense strand
acugauugcuccagagaga

SEQ ID NO: 2439846 - RNA, 19 nt, Homo sapiens
  misc_RNA (1)...(19): siRNA sense strand
ugaaauggguucugcguca

SEQ ID NO: 2439847 - RNA, 19 nt, Homo sapiens
  misc_RNA (1)...(19): siRNA sense strand
acuaaucgguguagcaaau

SEQ ID NO: 2439848 - RNA, 19 nt, Homo sapiens
  misc_RNA (1)...(19): siRNA sense strand
uaaagaagcuugaaagugu

SEQ ID NO: 2439849 - RNA, 19 nt, Homo sapiens
  misc_RNA (1)...(19): siRNA sense strand
cugaacaacugaaagaaga

SEQ ID NO: 2439850 - RNA, 19 nt, Homo sapiens
  misc_RNA (1)...(19): siRNA sense strand
uccgaagagucuagauaua

SEQ ID NO: 2439851 - RNA, 19 nt, Homo sapiens
  misc_RNA (1)...(19): siRNA sense strand
uugaggaacuacagagaga

SEQ ID NO: 2439852 - RNA, 19 nt, Homo sapiens
  misc_RNA (1)...(19): siRNA sense strand
ggugauauaugguggaauc

SEQ ID NO: 2439853 - RNA, 19 nt, Homo sapiens
  misc_RNA (1)...(19): siRNA sense strand
cgaagagucuagauauauu

SEQ ID NO: 2439854 - RNA, 19 nt, Homo sapiens
  misc_RNA (1)...(19): siRNA sense strand
cugcuaaagacgagagacu

SEQ ID NO: 2439855 - RNA, 19 nt, Homo sapiens
  misc_RNA (1)...(19): siRNA sense strand
uaaacaaacaguuggauga

SEQ ID NO: 2439856 - RNA, 19 nt, Homo sapiens
  misc_RNA (1)...(19): siRNA sense strand
agacaauaucaucgccaaa

SEQ ID NO: 2439857 - RNA, 19 nt, Homo sapiens
  misc_RNA (1)...(19): siRNA sense strand
ccgcugacauauuaauuaa

SEQ ID NO: 2439858 - RNA, 19 nt, Homo sapiens
  misc_RNA (1)...(19): siRNA sense strand
ccacuuuccauuugcgaua

SEQ ID NO: 2439859 - RNA, 19 nt, Homo sapiens
  misc_RNA (1)...(19): siRNA sense strand
acuaaacugcagugugaaa

SEQ ID NO: 2439860 - RNA, 19 nt, Homo sapiens
  misc_RNA (1)...(19): siRNA sense strand
caagaauauuugugcgagu

SEQ ID NO: 2439861 - RNA, 19 nt, Homo sapiens
  misc_RNA (1)...(19): siRNA sense strand
gcugcaacauacaugauaa

SEQ ID NO: 2439862 - RNA, 19 nt, Homo sapiens
  misc_RNA (1)...(19): siRNA sense strand
ugaaagugaccauggaaaa

SEQ ID NO: 2439863 - RNA, 19 nt, Homo sapiens
  misc_RNA (1)...(19): siRNA sense strand
gagcagggaaauauggaau

SEQ ID NO: 2439864 - RNA, 19 nt, Homo sapiens
  misc_RNA (1)...(19): siRNA sense strand
cugaaggaauggaugguca

SEQ ID NO: 2439865 - RNA, 19 nt, Homo sapiens
  misc_RNA (1)...(19): siRNA sense strand
aaacagugcugcagacuca

SEQ ID NO: 2439866 - RNA, 19 nt, Homo sapiens
  misc_RNA (1)...(19): siRNA sense strand
gggugaugaagaaggaaga

SEQ ID NO: 2439867 - RNA, 19 nt, Homo sapiens
  misc_RNA (1)...(19): siRNA sense strand
ccaaagcaguaaacaaaca

SEQ ID NO: 2439868 - RNA, 19 nt, Homo sapiens
  misc_RNA (1)...(19): siRNA sense strand
gcuacaaagaucuuggauu

SEQ ID NO: 2439869 - RNA, 19 nt, Homo sapiens
  misc_RNA (1)...(19): siRNA sense strand
ucauaaaggugcaucuaga

SEQ ID NO: 2439870 - RNA, 19 nt, Homo sapiens
  misc_RNA (1)...(19): siRNA sense strand
ggagguucuuacuggcaaa

SEQ ID NO: 2439871 - RNA, 19 nt, Homo sapiens
  misc_RNA (1)...(19): siRNA sense strand
uacaauacuucaugggauu

SEQ ID NO: 2439872 - RNA, 19 nt, Homo sapiens
  misc_RNA (1)...(19): siRNA sense strand
ugccacaagagcagggaaa

SEQ ID NO: 2439873 - RNA, 19 nt, Homo sapiens
  misc_RNA (1)...(19): siRNA sense strand
ggaagaguugcuuggaauu

SEQ ID NO: 2439874 - RNA, 19 nt, Homo sapiens
  misc_RNA (1)...(19): siRNA sense strand
ucauguuacaggagaagaa

SEQ ID NO: 2439875 - RNA, 19 nt, Homo sapiens
  misc_RNA (1)...(19): siRNA sense strand
agauguuguauuagaggaa

SEQ ID NO: 2439876 - RNA, 19 nt, Homo sapiens
  misc_RNA (1)...(19): siRNA sense strand
cugggaaaguauaaugaau

SEQ ID NO: 2439877 - RNA, 19 nt, Homo sapiens
  misc_RNA (1)...(19): siRNA sense strand
ucaucauguuacaggagaa

SEQ ID NO: 2439878 - RNA, 19 nt, Homo sapiens
  misc_RNA (1)...(19): siRNA sense strand
cugaacaacugcuagaaaa

SEQ ID NO: 2439879 - RNA, 19 nt, Homo sapiens
  misc_RNA (1)...(19): siRNA sense strand
ugaacaaguccgaauagaa

SEQ ID NO: 2439880 - RNA, 19 nt, Homo sapiens
  misc_RNA (1)...(19): siRNA sense strand
gaaauauggaauacaccaa

SEQ ID NO: 2439881 - RNA, 19 nt, Homo sapiens
  misc_RNA (1)...(19): siRNA sense strand
uggccauugugcagcguaa

SEQ ID NO: 2439882 - RNA, 19 nt, Homo sapiens
  misc_RNA (1)...(19): siRNA sense strand
agaacaacuuagaccauuu

SEQ ID NO: 2439883 - RNA, 19 nt, Homo sapiens
  misc_RNA (1)...(19): siRNA sense strand
gggacuagaaagagacauu

SEQ ID NO: 2439884 - RNA, 19 nt, Homo sapiens
  misc_RNA (1)...(19): siRNA sense strand
agaacaugggucugggaaa

SEQ ID NO: 2439885 - RNA, 19 nt, Homo sapiens
  misc_RNA (1)...(19): siRNA sense strand
cuuuaugagcuuuggaaau

SEQ ID NO: 2439886 - RNA, 19 nt, Homo sapiens
  misc_RNA (1)...(19): siRNA sense strand
uggaggaagcagaaagaau

SEQ ID NO: 2439887 - RNA, 19 nt, Homo sapiens
  misc_RNA (1)...(19): siRNA sense strand
agaaagaauagcuagagaa

SEQ ID NO: 2439888 - RNA, 19 nt, Homo sapiens
  misc_RNA (1)...(19): siRNA sense strand
uggaaaucaggaagauaua

SEQ ID NO: 2439889 - RNA, 19 nt, Homo sapiens
  misc_RNA (1)...(19): siRNA sense strand
cgaucuaaauaaggugaaa

SEQ ID NO: 2439890 - RNA, 19 nt, Homo sapiens
  misc_RNA (1)...(19): siRNA sense strand
ugugagaaccagagaaguu

SEQ ID NO: 2439891 - RNA, 19 nt, Homo sapiens
  misc_RNA (1)...(19): siRNA sense strand
caacaauauuuacgaggca

SEQ ID NO: 2439892 - RNA, 19 nt, Homo sapiens
  misc_RNA (1)...(19): siRNA sense strand
gaaccagagaaguuggaau

SEQ ID NO: 2439893 - RNA, 19 nt, Homo sapiens
  misc_RNA (1)...(19): siRNA sense strand
cugugaaggcaguguguga

SEQ ID NO: 2439894 - RNA, 19 nt, Homo sapiens
  misc_RNA (1)...(19): siRNA sense strand
caggaguagagcaugguaa

SEQ ID NO: 2439895 - RNA, 19 nt, Homo sapiens
  misc_RNA (1)...(19): siRNA sense strand
acaccgaauagaacaguua

SEQ ID NO: 2439896 - RNA, 19 nt, Homo sapiens
  misc_RNA (1)...(19): siRNA sense strand
gcuuuaugagcuuuggaaa

SEQ ID NO: 2439897 - RNA, 19 nt, Homo sapiens
  misc_RNA (1)...(19): siRNA sense strand
cugcaugaagcgacauuua

SEQ ID NO: 2439898 - RNA, 19 nt, Homo sapiens
  misc_RNA (1)...(19): siRNA sense strand
ggggaaagacaucgaucua

SEQ ID NO: 2439899 - RNA, 19 nt, Homo sapiens
  misc_RNA (1)...(19): siRNA sense strand
ugggaaaaucgcugugaua

SEQ ID NO: 2439900 - RNA, 19 nt, Homo sapiens
  misc_RNA (1)...(19): siRNA sense strand
acgugggacuagaaagaga

SEQ ID NO: 2439901 - RNA, 19 nt, Homo sapiens
  misc_RNA (1)...(19): siRNA sense strand
ggcacuugcaagaaugaaa

SEQ ID NO: 2439902 - RNA, 19 nt, Homo sapiens
  misc_RNA (1)...(19): siRNA sense strand
gcagaagcggaaaggagau

SEQ ID NO: 2439903 - RNA, 19 nt, Homo sapiens
  misc_RNA (1)...(19): siRNA sense strand
ggcagaagcggaaaggaga

SEQ ID NO: 2439904 - RNA, 19 nt, Homo sapiens
  misc_RNA (1)...(19): siRNA sense strand
cggaauacagugucgagau

SEQ ID NO: 2439905 - RNA, 19 nt, Homo sapiens
  misc_RNA (1)...(19): siRNA sense strand
gcugauggaggaagcagaa

SEQ ID NO: 2439906 - RNA, 19 nt, Homo sapiens
  misc_RNA (1)...(19): siRNA sense strand
agaaagagacauugaacag

SEQ ID NO: 2439907 - RNA, 19 nt, Homo sapiens
  misc_RNA (1)...(19): siRNA sense strand
uuggaaaucaggaagauau

SEQ ID NO: 2439908 - RNA, 19 nt, Homo sapiens
  misc_RNA (1)...(19): siRNA sense strand
gguugaauugguaaggaga

SEQ ID NO: 2439909 - RNA, 19 nt, Homo sapiens
  misc_RNA (1)...(19): siRNA sense strand
ccaaccuccaugagagcua

SEQ ID NO: 2439910 - RNA, 19 nt, Homo sapiens
  misc_RNA (1)...(19): siRNA sense strand
gcuuuggaaaucaggaaga

SEQ ID NO: 2439911 - RNA, 19 nt, Homo sapiens
  misc_RNA (1)...(19): siRNA sense strand
caucaguuuuacaggaaau

SEQ ID NO: 2439912 - RNA, 19 nt, Homo sapiens
  misc_RNA (1)...(19): siRNA sense strand
agaccagauuacugcauga

SEQ ID NO: 2439913 - RNA, 19 nt, Homo sapiens
  misc_RNA (1)...(19): siRNA sense strand
ugcaaaugguggcugggaa

SEQ ID NO: 2439914 - RNA, 19 nt, Homo sapiens
  misc_RNA (1)...(19): siRNA sense strand
auuccaaugccuuuaguua

SEQ ID NO: 2439915 - RNA, 19 nt, Homo sapiens
  misc_RNA (1)...(19): siRNA sense strand
uggucauaguguggauaaa

SEQ ID NO: 2439916 - RNA, 19 nt, Homo sapiens
  misc_RNA (1)...(19): siRNA sense strand
guuuauggcccuuccagaa

SEQ ID NO: 2439917 - RNA, 19 nt, Homo sapiens
  misc_RNA (1)...(19): siRNA sense strand
uagaaagagacauugaaca

SEQ ID NO: 2439918 - RNA, 19 nt, Homo sapiens
  misc_RNA (1)...(19): siRNA sense strand
gagcuuuggaaaucaggaa

SEQ ID NO: 2439919 - RNA, 19 nt, Homo sapiens
  misc_RNA (1)...(19): siRNA sense strand
cgcaaguguucagaagaaa

SEQ ID NO: 2439920 - RNA, 19 nt, Homo sapiens
  misc_RNA (1)...(19): siRNA sense strand
ugcccaaguuaaaggcgaa

SEQ ID NO: 2439921 - RNA, 19 nt, Homo sapiens
  misc_RNA (1)...(19): siRNA sense strand
ggaagauauaagaguuacu

SEQ ID NO: 2439922 - RNA, 19 nt, Homo sapiens
  misc_RNA (1)...(19): siRNA sense strand
cgaauuggguggagguguc

SEQ ID NO: 2439923 - RNA, 19 nt, Homo sapiens
  misc_RNA (1)...(19): siRNA sense strand
aguuaaaggcgaaacccau

SEQ ID NO: 2439924 - RNA, 19 nt, Homo sapiens
  misc_RNA (1)...(19): siRNA sense strand
agucauuucaccuggccaa

SEQ ID NO: 2439925 - RNA, 19 nt, Homo sapiens
  misc_RNA (1)...(19): siRNA sense strand
cucacaaaguguauuggaa

SEQ ID NO: 2439926 - RNA, 19 nt, Homo sapiens
  misc_RNA (1)...(19): siRNA sense strand
aggcagugugugagucauu

SEQ ID NO: 2439927 - RNA, 19 nt, Homo sapiens
  misc_RNA (1)...(19): siRNA sense strand
cuaaauaaggugaaaacca

SEQ ID NO: 2439928 - RNA, 19 nt, Homo sapiens
  misc_RNA (1)...(19): siRNA sense strand
uugaauugguaaggagaga

SEQ ID NO: 2439929 - RNA, 19 nt, Homo sapiens
  misc_RNA (1)...(19): siRNA sense strand
uaccgaguacagagggaua

SEQ ID NO: 2439930 - RNA, 19 nt, Homo sapiens
  misc_RNA (1)...(19): siRNA sense strand
aagaaaagccaguuagaaa

SEQ ID NO: 2439931 - RNA, 19 nt, Homo sapiens
  misc_RNA (1)...(19): siRNA sense strand
aggaacaagaagaacauua

SEQ ID NO: 2439932 - RNA, 19 nt, Homo sapiens
  misc_RNA (1)...(19): siRNA sense strand
gggacaagggagaggucuu

SEQ ID NO: 2439933 - RNA, 19 nt, Homo sapiens
  misc_RNA (1)...(19): siRNA sense strand
gggaggaaauagagacgca

SEQ ID NO: 2439934 - RNA, 19 nt, Homo sapiens
  misc_RNA (1)...(19): siRNA sense strand
augaauugguggaaguuau

SEQ ID NO: 2439935 - RNA, 19 nt, Homo sapiens
  misc_RNA (1)...(19): siRNA sense strand
agauaagggcacacaguau

SEQ ID NO: 2439936 - RNA, 19 nt, Homo sapiens
  misc_RNA (1)...(19): siRNA sense strand
cauuaucagaccagggcaa

SEQ ID NO: 2439937 - RNA, 19 nt, Homo sapiens
  misc_RNA (1)...(19): siRNA sense strand
cugaaagaacugaagcauu

SEQ ID NO: 2439938 - RNA, 19 nt, Homo sapiens
  misc_RNA (1)...(19): siRNA sense strand
ccuacaggaacaagaagaa

SEQ ID NO: 2439939 - RNA, 19 nt, Homo sapiens
  misc_RNA (1)...(19): siRNA sense strand
aagaaaugagugagaagau

SEQ ID NO: 2439940 - RNA, 19 nt, Homo sapiens
  misc_RNA (1)...(19): siRNA sense strand
uuacaagaaaugagugaga

SEQ ID NO: 2439941 - RNA, 19 nt, Homo sapiens
  misc_RNA (1)...(19): siRNA sense strand
augcagaacuucagggaug

SEQ ID NO: 2439942 - RNA, 19 nt, Homo sapiens
  misc_RNA (1)...(19): siRNA sense strand
gaaaauacuuacaugguga

SEQ ID NO: 2439943 - RNA, 19 nt, Homo sapiens
  misc_RNA (1)...(19): siRNA sense strand
agaaaagccaguuagaaaa

SEQ ID NO: 2439944 - RNA, 19 nt, Homo sapiens
  misc_RNA (1)...(19): siRNA sense strand
gggcuaauggcauaggcua

SEQ ID NO: 2439945 - RNA, 19 nt, Homo sapiens
  misc_RNA (1)...(19): siRNA sense strand
aagacaaacgagaugaauu

SEQ ID NO: 2439946 - RNA, 19 nt, Homo sapiens
  misc_RNA (1)...(19): siRNA sense strand
cugaugaagaugaugaaca

SEQ ID NO: 2439947 - RNA, 19 nt, Homo sapiens
  misc_RNA (1)...(19): siRNA sense strand
augaaagugaagagugaga

SEQ ID NO: 2439948 - RNA, 19 nt, Homo sapiens
  misc_RNA (1)...(19): siRNA sense strand
uggggaaaauuaugguaaa

SEQ ID NO: 2439949 - RNA, 19 nt, Homo sapiens
  misc_RNA (1)...(19): siRNA sense strand
gccuagaagaggacugauu

SEQ ID NO: 2439950 - RNA, 19 nt, Homo sapiens
  misc_RNA (1)...(19): siRNA sense strand
ccgguuaaaugcugagcca

SEQ ID NO: 2439951 - RNA, 19 nt, Homo sapiens
  misc_RNA (1)...(19): siRNA sense strand
acugcaagaaagaaggaau

SEQ ID NO: 2439952 - RNA, 19 nt, Homo sapiens
  misc_RNA (1)...(19): siRNA sense strand
acaagaaaugagugagaag

SEQ ID NO: 2439953 - RNA, 19 nt, Homo sapiens
  misc_RNA (1)...(19): siRNA sense strand
caacaaagagcaagcaccu

SEQ ID NO: 2439954 - RNA, 19 nt, Homo sapiens
  misc_RNA (1)...(19): siRNA sense strand
augaagaugaugaacaaga

SEQ ID NO: 2439955 - RNA, 19 nt, Homo sapiens
  misc_RNA (1)...(19): siRNA sense strand
augaugaacaagaagauga

SEQ ID NO: 2439956 - RNA, 19 nt, Homo sapiens
  misc_RNA (1)...(19): siRNA sense strand
gccaaauugcccaacuaaa

SEQ ID NO: 2439957 - RNA, 19 nt, Homo sapiens
  misc_RNA (1)...(19): siRNA sense strand
gguuauuaucgcacugaga

SEQ ID NO: 2439958 - RNA, 19 nt, Homo sapiens
  misc_RNA (1)...(19): siRNA sense strand
ucagagcaacaaagagcaa

SEQ ID NO: 2439959 - RNA, 19 nt, Homo sapiens
  misc_RNA (1)...(19): siRNA sense strand
agaugaugaacaagaagau

SEQ ID NO: 2439960 - RNA, 19 nt, Homo sapiens
  misc_RNA (1)...(19): siRNA sense strand
ugucaguaucguucagauu

SEQ ID NO: 2439961 - RNA, 19 nt, Homo sapiens
  misc_RNA (1)...(19): siRNA sense strand
gaaagcagaccuuacggaa

SEQ ID NO: 2439962 - RNA, 19 nt, Homo sapiens
  misc_RNA (1)...(19): siRNA sense strand
acgccaaauugcccaacua

SEQ ID NO: 2439963 - RNA, 19 nt, Homo sapiens
  misc_RNA (1)...(19): siRNA sense strand
cugcaagaaagaaggaaug

SEQ ID NO: 2439964 - RNA, 19 nt, Homo sapiens
  misc_RNA (1)...(19): siRNA sense strand
aagugaagagugagaugau

SEQ ID NO: 2439965 - RNA, 19 nt, Homo sapiens
  misc_RNA (1)...(19): siRNA sense strand
gugcuagacaugagagaca

SEQ ID NO: 2439966 - RNA, 19 nt, Homo sapiens
  misc_RNA (1)...(19): siRNA sense strand
caucauuugcaguggguga

SEQ ID NO: 2439967 - RNA, 19 nt, Homo sapiens
  misc_RNA (1)...(19): siRNA sense strand
ccuauauccuggaggccuu

SEQ ID NO: 2439968 - RNA, 19 nt, Homo sapiens
  misc_RNA (1)...(19): siRNA sense strand
gguugacagcacugaguau

SEQ ID NO: 2439969 - RNA, 19 nt, Homo sapiens
  misc_RNA (1)...(19): siRNA sense strand
cuucauuaacugugccuau

SEQ ID NO: 2439970 - RNA, 19 nt, Homo sapiens
  misc_RNA (1)...(19): siRNA sense strand
augcuaaaguauuggcacu

SEQ ID NO: 2439971 - RNA, 19 nt, Homo sapiens
  misc_RNA (1)...(19): siRNA sense strand
gaucaagaauccugagagg

SEQ ID NO: 2439972 - RNA, 19 nt, Homo sapiens
  misc_RNA (1)...(19): siRNA sense strand
ggauuuggaagauggagga

SEQ ID NO: 2439973 - RNA, 19 nt, Homo sapiens
  misc_RNA (1)...(19): siRNA sense strand
agacaaucgcaguggaaaa

SEQ ID NO: 2439974 - RNA, 19 nt, Homo sapiens
  misc_RNA (1)...(19): siRNA sense strand
ggcugaaggccuuggacaa

SEQ ID NO: 2439975 - RNA, 19 nt, Homo sapiens
  misc_RNA (1)...(19): siRNA sense strand
caaugagagaagaagacaa

SEQ ID NO: 2439976 - RNA, 19 nt, Homo sapiens
  misc_RNA (1)...(19): siRNA sense strand
gggacuggagagagaguga

SEQ ID NO: 2439977 - RNA, 19 nt, Homo sapiens
  misc_RNA (1)...(19): siRNA sense strand
gauacaaaagagacagaaa

SEQ ID NO: 2439978 - RNA, 19 nt, Homo sapiens
  misc_RNA (1)...(19): siRNA sense strand
ccgauaauccagaaggcuu

SEQ ID NO: 2439979 - RNA, 19 nt, Homo sapiens
  misc_RNA (1)...(19): siRNA sense strand
cugauauugcuguuaguaa

SEQ ID NO: 2439980 - RNA, 19 nt, Homo sapiens
  misc_RNA (1)...(19): siRNA sense strand
cagcaaaagacgcuaacaa

SEQ ID NO: 2439981 - RNA, 19 nt, Homo sapiens
  misc_RNA (1)...(19): siRNA sense strand
uggcaaugagagaagaaga

SEQ ID NO: 2439982 - RNA, 19 nt, Homo sapiens
  misc_RNA (1)...(19): siRNA sense strand
ggcuauagagauugcaaga

SEQ ID NO: 2439983 - RNA, 19 nt, Homo sapiens
  misc_RNA (1)...(19): siRNA sense strand
cgacuaugcccacaggcua

SEQ ID NO: 2439984 - RNA, 19 nt, Homo sapiens
  misc_RNA (1)...(19): siRNA sense strand
aggaaagcggcuauagaga

SEQ ID NO: 2439985 - RNA, 19 nt, Homo sapiens
  misc_RNA (1)...(19): siRNA sense strand
gagcuaggcuaccgaggga

SEQ ID NO: 2439986 - RNA, 19 nt, Homo sapiens
  misc_RNA (1)...(19): siRNA sense strand
aagcaaggaaagcggcuau

SEQ ID NO: 2439987 - RNA, 19 nt, Homo sapiens
  misc_RNA (1)...(19): siRNA sense strand
gggcugaaggccuuggaca

SEQ ID NO: 2439988 - RNA, 19 nt, Homo sapiens
  misc_RNA (1)...(19): siRNA sense strand
ucuuuauucgugacagaaa

SEQ ID NO: 2439989 - RNA, 19 nt, Homo sapiens
  misc_RNA (1)...(19): siRNA sense strand
cuuuauucgugacagaaau

SEQ ID NO: 2439990 - RNA, 19 nt, Homo sapiens
  misc_RNA (1)...(19): siRNA sense strand
guuaguaauucaaguccca

SEQ ID NO: 2439991 - RNA, 19 nt, Homo sapiens
  misc_RNA (1)...(19): siRNA sense strand
gggaggaagcugaggagug

SEQ ID NO: 2439992 - RNA, 19 nt, Homo sapiens
  misc_RNA (1)...(19): siRNA sense strand
agaccaagggcgacuguca

SEQ ID NO: 2439993 - RNA, 19 nt, Homo sapiens
  misc_RNA (1)...(19): siRNA sense strand
gcauugaagaggaggacaa

SEQ ID NO: 2439994 - RNA, 19 nt, Homo sapiens
  misc_RNA (1)...(19): siRNA sense strand
ccugauggaaagagguuua

SEQ ID NO: 2439995 - RNA, 19 nt, Homo sapiens
  misc_RNA (1)...(19): siRNA sense strand
cuuuaaaugcugagauuca

SEQ ID NO: 2439996 - RNA, 19 nt, Homo sapiens
  misc_RNA (1)...(19): siRNA sense strand
guggaggugcugagacaaa

SEQ ID NO: 2439997 - RNA, 19 nt, Homo sapiens
  misc_RNA (1)...(19): siRNA sense strand
gaaaauaccuccaagccaa

SEQ ID NO: 2439998 - RNA, 19 nt, Homo sapiens
  misc_RNA (1)...(19): siRNA sense strand
cuucaggaacuaacagaaa

SEQ ID NO: 2439999 - RNA, 19 nt, Homo sapiens
  misc_RNA (1)...(19): siRNA sense strand
ggaaagagguuuacccacu

SEQ ID NO: 2440000 - RNA, 19 nt, Homo sapiens
  misc_RNA (1)...(19): siRNA sense strand
aguuaaaggcuacuggcaa

SEQ ID NO: 2440001 - RNA, 19 nt, Homo sapiens
  misc_RNA (1)...(19): siRNA sense strand
cagacuacagaauggauaa

SEQ ID NO: 2440002 - RNA, 19 nt, Homo sapiens
  misc_RNA (1)...(19): siRNA sense strand
ucguggaggugcugagaca

SEQ ID NO: 2440003 - RNA, 19 nt, Homo sapiens
  misc_RNA (1)...(19): siRNA sense strand
aagccaagccugagcccua

SEQ ID NO: 2440004 - RNA, 19 nt, Homo sapiens
  misc_RNA (1)...(19): siRNA sense strand
gcaugaacaaagagaccuu

SEQ ID NO: 2440005 - RNA, 19 nt, Homo sapiens
  misc_RNA (1)...(19): siRNA sense strand
uaugaaugcuccaggcaga

SEQ ID NO: 2440006 - RNA, 19 nt, Homo sapiens
  misc_RNA (1)...(19): siRNA sense strand
guuaaaggcuacuggcaac

SEQ ID NO: 2440007 - RNA, 19 nt, Homo sapiens
  misc_RNA (1)...(19): siRNA sense strand
agcuaaucuuauaggucaa

SEQ ID NO: 2440008 - RNA, 19 nt, Homo sapiens
  misc_RNA (1)...(19): siRNA sense strand
ggaagaaacuccaagugcu

SEQ ID NO: 2440009 - RNA, 19 nt, Homo sapiens
  misc_RNA (1)...(19): siRNA sense strand
aagaauuaccagagacacu

SEQ ID NO: 2440010 - RNA, 19 nt, Homo sapiens
  misc_RNA (1)...(19): siRNA sense strand
aagcuaaucuuauagguca

SEQ ID NO: 2440011 - RNA, 19 nt, Homo sapiens
  misc_RNA (1)...(19): siRNA sense strand
agaagcagugugugggaga

SEQ ID NO: 2440012 - RNA, 19 nt, Homo sapiens
  misc_RNA (1)...(19): siRNA sense strand
caaacaaguguauggacca

SEQ ID NO: 2440013 - RNA, 19 nt, Homo sapiens
  misc_RNA (1)...(19): siRNA sense strand
acacagaccucauuaggca

SEQ ID NO: 2440014 - RNA, 19 nt, Homo sapiens
  misc_RNA (1)...(19): siRNA sense strand
guggaauaugagagaacca

SEQ ID NO: 2440015 - RNA, 19 nt, Homo sapiens
  misc_RNA (1)...(19): siRNA sense strand
caggaaauuuuggaagaaa

SEQ ID NO: 2440016 - RNA, 19 nt, Homo sapiens
  misc_RNA (1)...(19): siRNA sense strand
cuugcaagcagguuaacaa

SEQ ID NO: 2440017 - RNA, 19 nt, Homo sapiens
  misc_RNA (1)...(19): siRNA sense strand
uuugaagaaaucagagaga

SEQ ID NO: 2440018 - RNA, 19 nt, Homo sapiens
  misc_RNA (1)...(19): siRNA sense strand
ugcaaauggacauggccaa

SEQ ID NO: 2440019 - RNA, 19 nt, Homo sapiens
  misc_RNA (1)...(19): siRNA sense strand
ucagagaguuaaaggcuac

SEQ ID NO: 2440020 - RNA, 19 nt, Homo sapiens
  misc_RNA (1)...(19): siRNA sense strand
ugguggaauaugagagaac

SEQ ID NO: 2440021 - RNA, 19 nt, Homo sapiens
  misc_RNA (1)...(19): siRNA sense strand
ccaacaacauggugggugc

SEQ ID NO: 2440022 - RNA, 19 nt, Homo sapiens
  misc_RNA (1)...(19): siRNA sense strand
aaauauacuucgaaagcug

SEQ ID NO: 2440023 - RNA, 19 nt, Homo sapiens
  misc_RNA (1)...(19): siRNA sense strand
agaacaaagaggugaagga

SEQ ID NO: 2440024 - RNA, 19 nt, Homo sapiens
  misc_RNA (1)...(19): siRNA sense strand
uggagaacaaagaggugaa

SEQ ID NO: 2440025 - RNA, 19 nt, Homo sapiens
  misc_RNA (1)...(19): siRNA sense strand
cagcagagguucaggcccu

SEQ ID NO: 2440026 - RNA, 19 nt, Homo sapiens
  misc_RNA (1)...(19): siRNA sense strand
acaaaaugguggugcaagu

SEQ ID NO: 2440027 - RNA, 19 nt, Homo sapiens
  misc_RNA (1)...(19): siRNA sense strand
gggacuggcaaaugcugaa

SEQ ID NO: 2440028 - RNA, 19 nt, Homo sapiens
  misc_RNA (1)...(19): siRNA sense strand
gauacaaaaugguggugca

SEQ ID NO: 2440029 - RNA, 19 nt, Homo sapiens
  misc_RNA (1)...(19): siRNA sense strand
cugagaaaauugagggcua

SEQ ID NO: 2440030 - RNA, 19 nt, Homo sapiens
  misc_RNA (1)...(19): siRNA sense strand
ucaugaaauggcugagaaa

SEQ ID NO: 2440031 - RNA, 19 nt, Homo sapiens
  misc_RNA (1)...(19): siRNA sense strand
augaaauggcugagaaaau

SEQ ID NO: 2440032 - RNA, 19 nt, Homo sapiens
  misc_RNA (1)...(19): siRNA sense strand
aguuaugaacagaggagga

SEQ ID NO: 2440033 - RNA, 19 nt, Homo sapiens
  misc_RNA (1)...(19): siRNA sense strand
ccgggcagucacaaagaaa

SEQ ID NO: 2440034 - RNA, 19 nt, Homo sapiens
  misc_RNA (1)...(19): siRNA sense strand
agaaagaaagauuggcaaa

SEQ ID NO: 2440035 - RNA, 19 nt, Homo sapiens
  misc_RNA (1)...(19): siRNA sense strand
cguaagaagcauagaaaau

SEQ ID NO: 2440036 - RNA, 19 nt, Homo sapiens
  misc_RNA (1)...(19): siRNA sense strand
aaacagaagaauacagcaa

SEQ ID NO: 2440037 - RNA, 19 nt, Homo sapiens
  misc_RNA (1)...(19): siRNA sense strand
aagaaaacuuggacgguaa

SEQ ID NO: 2440038 - RNA, 19 nt, Homo sapiens
  misc_RNA (1)...(19): siRNA sense strand
uuucagaauuagaggcauu

SEQ ID NO: 2440039 - RNA, 19 nt, Homo sapiens
  misc_RNA (1)...(19): siRNA sense strand
gcuaaaagagaaagaaaga

SEQ ID NO: 2440040 - RNA, 19 nt, Homo sapiens
  misc_RNA (1)...(19): siRNA sense strand
gagaaagaaagauuggcaa

SEQ ID NO: 2440041 - RNA, 19 nt, Homo sapiens
  misc_RNA (1)...(19): siRNA sense strand
ccacaauuuagcucagaaa

SEQ ID NO: 2440042 - RNA, 19 nt, Homo sapiens
  misc_RNA (1)...(19): siRNA sense strand
ugaaagacaaagaaagaca

SEQ ID NO: 2440043 - RNA, 19 nt, Homo sapiens
  misc_RNA (1)...(19): siRNA sense strand
agacaaagaaagacaacca

SEQ ID NO: 2440044 - RNA, 19 nt, Homo sapiens
  misc_RNA (1)...(19): siRNA sense strand
gucggaaaucagugaaaua

SEQ ID NO: 2440045 - RNA, 19 nt, Homo sapiens
  misc_RNA (1)...(19): siRNA sense strand
aagcauggauuuugugaaa

SEQ ID NO: 2440046 - RNA, 19 nt, Homo sapiens
  misc_RNA (1)...(19): siRNA sense strand
acaaaugaaagaagagcuu

SEQ ID NO: 2440047 - RNA, 19 nt, Homo sapiens
  misc_RNA (1)...(19): siRNA sense strand
uagagauaauccagcuaaa

SEQ ID NO: 2440048 - RNA, 19 nt, Homo sapiens
  misc_RNA (1)...(19): siRNA sense strand
cagcuaaaagagaaagaaa

SEQ ID NO: 2440049 - RNA, 19 nt, Homo sapiens
  misc_RNA (1)...(19): siRNA sense strand
cugcagugacacagaauau

SEQ ID NO: 2440050 - RNA, 19 nt, Homo sapiens
  misc_RNA (1)...(19): siRNA sense strand
cagagaaucaagaagaaaa

SEQ ID NO: 2440051 - RNA, 19 nt, Homo sapiens
  misc_RNA (1)...(19): siRNA sense strand
acauuaacucugagaacuu

SEQ ID NO: 2440052 - RNA, 19 nt, Homo sapiens
  misc_RNA (1)...(19): siRNA sense strand
cggaaaucagugaaauauu

SEQ ID NO: 2440053 - RNA, 19 nt, Homo sapiens
  misc_RNA (1)...(19): siRNA sense strand
cagacaaauuauggaaaga

SEQ ID NO: 2440054 - RNA, 19 nt, Homo sapiens
  misc_RNA (1)...(19): siRNA sense strand
gcaucuucaacgagaauau

SEQ ID NO: 2440055 - RNA, 19 nt, Homo sapiens
  misc_RNA (1)...(19): siRNA sense strand
gugauauggccauuguaaa

SEQ ID NO: 2440056 - RNA, 19 nt, Homo sapiens
  misc_RNA (1)...(19): siRNA sense strand
cugagaacuucaacagaca

SEQ ID NO: 2440057 - RNA, 19 nt, Homo sapiens
  misc_RNA (1)...(19): siRNA sense strand
uggaaagagaaauugagaa

SEQ ID NO: 2440058 - RNA, 19 nt, Homo sapiens
  misc_RNA (1)...(19): siRNA sense strand
aauuagaggcauuagugaa

SEQ ID NO: 2440059 - RNA, 19 nt, Homo sapiens
  misc_RNA (1)...(19): siRNA sense strand
gcaugguacagucggaaau

SEQ ID NO: 2440060 - RNA, 19 nt, Homo sapiens
  misc_RNA (1)...(19): siRNA sense strand
cauacagaaaguugaaaca

SEQ ID NO: 2440061 - RNA, 19 nt, Homo sapiens
  misc_RNA (1)...(19): siRNA sense strand
cacaaaacucaaagugaua

SEQ ID NO: 2440062 - RNA, 19 nt, Homo sapiens
  misc_RNA (1)...(19): siRNA sense strand
gaaagaaagauuggcaaaa

SEQ ID NO: 2440063 - RNA, 19 nt, Homo sapiens
  misc_RNA (1)...(19): siRNA sense strand
acacaaaacucaaagugau

SEQ ID NO: 2440064 - RNA, 19 nt, Homo sapiens
  misc_RNA (1)...(19): siRNA sense strand
gucagaaauuggcaaggaa

SEQ ID NO: 2440065 - RNA, 19 nt, Homo sapiens
  misc_RNA (1)...(19): siRNA sense strand
agaaucugguugaagaaaa

SEQ ID NO: 2440066 - RNA, 19 nt, Homo sapiens
  misc_RNA (1)...(19): siRNA sense strand
gcauaaugacccuucaaaa

SEQ ID NO: 2440067 - RNA, 19 nt, Homo sapiens
  misc_RNA (1)...(19): siRNA sense strand
cagucggaaaucagugaaa

SEQ ID NO: 2440068 - RNA, 19 nt, Homo sapiens
  misc_RNA (1)...(19): siRNA sense strand
ucucaagcugauacaguaa

SEQ ID NO: 2440069 - RNA, 19 nt, Homo sapiens
  misc_RNA (1)...(19): siRNA sense strand
gugaaaugcacaggggaaa

SEQ ID NO: 2440070 - RNA, 19 nt, Homo sapiens
  misc_RNA (1)...(19): siRNA sense strand
cuuuagagaagcaacaaau

SEQ ID NO: 2440071 - RNA, 19 nt, Homo sapiens
  misc_RNA (1)...(19): siRNA sense strand
cugcaaggccaaaauaaaa

SEQ ID NO: 2440072 - RNA, 19 nt, Homo sapiens
  misc_RNA (1)...(19): siRNA sense strand
cuaccaaucuacugccgaa

SEQ ID NO: 2440073 - RNA, 19 nt, Homo sapiens
  misc_RNA (1)...(19): siRNA sense strand
cagaguaggccuuuggcuu

SEQ ID NO: 2440074 - RNA, 19 nt, Homo sapiens
  misc_RNA (1)...(19): siRNA sense strand
agugaaaugcacaggggaa

SEQ ID NO: 2440075 - RNA, 19 nt, Homo sapiens
  misc_RNA (1)...(19): siRNA sense strand
ggaacuggagagugaaaau

SEQ ID NO: 2440076 - RNA, 19 nt, Homo sapiens
  misc_RNA (1)...(19): siRNA sense strand
ccuugaaacaacauuacaa

SEQ ID NO: 2440077 - RNA, 19 nt, Homo sapiens
  misc_RNA (1)...(19): siRNA sense strand
gcauagaaaaugaaaggga

SEQ ID NO: 2440078 - RNA, 19 nt, Homo sapiens
  misc_RNA (1)...(19): siRNA sense strand
acagagaaucaagaagaaa

SEQ ID NO: 2440079 - RNA, 19 nt, Homo sapiens
  misc_RNA (1)...(19): siRNA sense strand
cauuucaggcuuugcgaau

SEQ ID NO: 2440080 - RNA, 19 nt, Homo sapiens
  misc_RNA (1)...(19): siRNA sense strand
uggcaaggaaugugaaaug

SEQ ID NO: 2440081 - RNA, 19 nt, Homo sapiens
  misc_RNA (1)...(19): siRNA sense strand
uagaggcauuagugaagaa

SEQ ID NO: 2440082 - RNA, 19 nt, Homo sapiens
  misc_RNA (1)...(19): siRNA sense strand
auuccagaguuccaagaua

SEQ ID NO: 2440083 - RNA, 19 nt, Homo sapiens
  misc_RNA (1)...(19): siRNA sense strand
caacaaaugauggaagcau

SEQ ID NO: 2440084 - RNA, 19 nt, Homo sapiens
  misc_RNA (1)...(19): siRNA sense strand
agaauagcuugucagaaau

SEQ ID NO: 2440085 - RNA, 19 nt, Homo sapiens
  misc_RNA (1)...(19): siRNA sense strand
ucagaaauuggcaaggaau

SEQ ID NO: 2440086 - RNA, 19 nt, Homo sapiens
  misc_RNA (1)...(19): siRNA sense strand
acacauuaacucugagaac

SEQ ID NO: 2440087 - RNA, 19 nt, Homo sapiens
  misc_RNA (1)...(19): siRNA sense strand
gaagaaaacuuggacggua

SEQ ID NO: 2440088 - RNA, 19 nt, Homo sapiens
  misc_RNA (1)...(19): siRNA sense strand
aucuaaaccuuaaguccaa

SEQ ID NO: 2440089 - RNA, 19 nt, Homo sapiens
  misc_RNA (1)...(19): siRNA sense strand
uagaaauggaagcaaugaa

SEQ ID NO: 2440090 - RNA, 19 nt, Homo sapiens
  misc_RNA (1)...(19): siRNA sense strand
aagaauacuuuguggccua

SEQ ID NO: 2440091 - RNA, 19 nt, Homo sapiens
  misc_RNA (1)...(19): siRNA sense strand
gaaaggagcacuugggaca

SEQ ID NO: 2440092 - RNA, 19 nt, Homo sapiens
  misc_RNA (1)...(19): siRNA sense strand
ucgaagagguccaggcaga

SEQ ID NO: 2440093 - RNA, 19 nt, Homo sapiens
  misc_RNA (1)...(19): siRNA sense strand
guggaagagccgugggauu

SEQ ID NO: 2440094 - RNA, 19 nt, Homo sapiens
  misc_RNA (1)...(19): siRNA sense strand
gcgaagagauggagcugga

SEQ ID NO: 2440095 - RNA, 19 nt, Homo sapiens
  misc_RNA (1)...(19): siRNA sense strand
ggagaaagcuguugcugca

SEQ ID NO: 2440096 - RNA, 19 nt, Homo sapiens
  misc_RNA (1)...(19): siRNA sense strand
agagauugcaagagaaaca

SEQ ID NO: 2440097 - RNA, 19 nt, Homo sapiens
  misc_RNA (1)...(19): siRNA sense strand
cuacuauaacauugggaau

SEQ ID NO: 2440098 - RNA, 19 nt, Homo sapiens
  misc_RNA (1)...(19): siRNA sense strand
ggaaagaggucaagacagg

SEQ ID NO: 2440099 - RNA, 19 nt, Homo sapiens
  misc_RNA (1)...(19): siRNA sense strand
ucacugaacuggaugccaa

SEQ ID NO: 2440100 - RNA, 19 nt, Homo sapiens
  misc_RNA (1)...(19): siRNA sense strand
acaccuucuucgugggcaa

SEQ ID NO: 2440101 - RNA, 19 nt, Homo sapiens
  misc_RNA (1)...(19): siRNA sense strand
agcuaugcuuggagaagaa

SEQ ID NO: 2440102 - RNA, 19 nt, Homo sapiens
  misc_RNA (1)...(19): siRNA sense strand
cagaagucagaacgggaaa

SEQ ID NO: 2440103 - RNA, 19 nt, Homo sapiens
  misc_RNA (1)...(19): siRNA sense strand
acuacaacgugacggagaa

SEQ ID NO: 2440104 - RNA, 19 nt, Homo sapiens
  misc_RNA (1)...(19): siRNA sense strand
gaagagaagaccaaggagu

SEQ ID NO: 2440105 - RNA, 19 nt, Homo sapiens
  misc_RNA (1)...(19): siRNA sense strand
agguccaggcagagaggaa

SEQ ID NO: 2440106 - RNA, 19 nt, Homo sapiens
  misc_RNA (1)...(19): siRNA sense strand
ucgccuacuucaagaucaa

SEQ ID NO: 2440107 - RNA, 19 nt, Homo sapiens
  misc_RNA (1)...(19): siRNA sense strand
gggaaacagccguacgcau

SEQ ID NO: 2440108 - RNA, 19 nt, Homo sapiens
  misc_RNA (1)...(19): siRNA sense strand
gcaagaauuucgacuggga

SEQ ID NO: 2440109 - RNA, 19 nt, Homo sapiens
  misc_RNA (1)...(19): siRNA sense strand
ccuaugacuacgauggcua

SEQ ID NO: 2440110 - RNA, 19 nt, Homo sapiens
  misc_RNA (1)...(19): siRNA sense strand
gaguaggaccugcugggaa

SEQ ID NO: 2440111 - RNA, 19 nt, Homo sapiens
  misc_RNA (1)...(19): siRNA sense strand
caggagaagugauucccaa

SEQ ID NO: 2440112 - RNA, 19 nt, Homo sapiens
  misc_RNA (1)...(19): siRNA sense strand
acucagaggaacagccaca

SEQ ID NO: 2440113 - RNA, 19 nt, Homo sapiens
  misc_RNA (1)...(19): siRNA sense strand
aagugauucccaagagauu

SEQ ID NO: 2440114 - RNA, 19 nt, Homo sapiens
  misc_RNA (1)...(19): siRNA sense strand
aauccugagcacauggaaa

SEQ ID NO: 2440115 - RNA, 19 nt, Homo sapiens
  misc_RNA (1)...(19): siRNA sense strand
gugccaaggaguaccgaca

SEQ ID NO: 2440116 - RNA, 19 nt, Homo sapiens
  misc_RNA (1)...(19): siRNA sense strand
aaucgagacccuuguggaa

SEQ ID NO: 2440117 - RNA, 19 nt, Homo sapiens
  misc_RNA (1)...(19): siRNA sense strand
augacgaggugaugaacca

SEQ ID NO: 2440118 - RNA, 19 nt, Homo sapiens
  misc_RNA (1)...(19): siRNA sense strand
uugaaugugccaagaccua

SEQ ID NO: 2440119 - RNA, 19 nt, Homo sapiens
  misc_RNA (1)...(19): siRNA sense strand
ugaaggaaaucgagacccu

SEQ ID NO: 2440120 - RNA, 19 nt, Homo sapiens
  misc_RNA (1)...(19): siRNA sense strand
ggaaacagccguacgcauc

SEQ ID NO: 2440121 - RNA, 19 nt, Homo sapiens
  misc_RNA (1)...(19): siRNA sense strand
uggaaaugcagcagaaccu

SEQ ID NO: 2440122 - RNA, 19 nt, Homo sapiens
  misc_RNA (1)...(19): siRNA sense strand
gagugaaggaggccgacuu

SEQ ID NO: 2440123 - RNA, 19 nt, Homo sapiens
  misc_RNA (1)...(19): siRNA sense strand
gagaaacagaagucagaac

SEQ ID NO: 2440124 - RNA, 19 nt, Homo sapiens
  misc_RNA (1)...(19): siRNA sense strand
acagaagucagaacgggaa

SEQ ID NO: 2440125 - RNA, 19 nt, Homo sapiens
  misc_RNA (1)...(19): siRNA sense strand
ggaccugcugggaaggaga

SEQ ID NO: 2440126 - RNA, 19 nt, Homo sapiens
  misc_RNA (1)...(19): siRNA sense strand
uggaggaggcagugggaaa

SEQ ID NO: 2440127 - RNA, 19 nt, Homo sapiens
  misc_RNA (1)...(19): siRNA sense strand
agauagugaaguagagauu

SEQ ID NO: 2440128 - RNA, 19 nt, Homo sapiens
  misc_RNA (1)...(19): siRNA sense strand
gaaagaugguguagcggau

SEQ ID NO: 2440129 - RNA, 19 nt, Homo sapiens
  misc_RNA (1)...(19): siRNA sense strand
aaguagagauugugggagu

SEQ ID NO: 2440130 - RNA, 19 nt, Homo sapiens
  misc_RNA (1)...(19): siRNA sense strand
ccggcaauccagugauaaa

SEQ ID NO: 2440131 - RNA, 19 nt, Homo sapiens
  misc_RNA (1)...(19): siRNA sense strand
ggagcuaccuggaggacca

SEQ ID NO: 2440132 - RNA, 19 nt, Homo sapiens
  misc_RNA (1)...(19): siRNA sense strand
auuccuagcaagugacaaa

SEQ ID NO: 2440133 - RNA, 19 nt, Homo sapiens
  misc_RNA (1)...(19): siRNA sense strand
aggcagaaacggcgguaga

SEQ ID NO: 2440134 - RNA, 19 nt, Homo sapiens
  misc_RNA (1)...(19): siRNA sense strand
ucgccaagguuaaagguca

SEQ ID NO: 2440135 - RNA, 19 nt, Homo sapiens
  misc_RNA (1)...(19): siRNA sense strand
aagcacaaggagaggauca

SEQ ID NO: 2440136 - RNA, 19 nt, Homo sapiens
  misc_RNA (1)...(19): siRNA sense strand
cgccaagguuaaaggucau

SEQ ID NO: 2440137 - RNA, 19 nt, Homo sapiens
  misc_RNA (1)...(19): siRNA sense strand
cagcagaaguuguugaccu

SEQ ID NO: 2440138 - RNA, 19 nt, Homo sapiens
  misc_RNA (1)...(19): siRNA sense strand
gguuaaaggucaucggagc

SEQ ID NO: 2440139 - RNA, 19 nt, Homo sapiens
  misc_RNA (1)...(19): siRNA sense strand
accaaaagcaucugaacaa

SEQ ID NO: 2440140 - RNA, 19 nt, Homo sapiens
  misc_RNA (1)...(19): siRNA sense strand
caguaguaccagugauagu

SEQ ID NO: 2440141 - RNA, 19 nt, Homo sapiens
  misc_RNA (1)...(19): siRNA sense strand
ggagcugaaugcagaggca

SEQ ID NO: 2440142 - RNA, 19 nt, Homo sapiens
  misc_RNA (1)...(19): siRNA sense strand
ccaaggaggaagauggauc

SEQ ID NO: 2440143 - RNA, 19 nt, Homo sapiens
  misc_RNA (1)...(19): siRNA sense strand
agaaauuaacauugcgucu

SEQ ID NO: 2440144 - RNA, 19 nt, Homo sapiens
  misc_RNA (1)...(19): siRNA sense strand
aaacggcgguagaaggaga

SEQ ID NO: 2440145 - RNA, 19 nt, Homo sapiens
  misc_RNA (1)...(19): siRNA sense strand
gccgagucgccaagguuaa

SEQ ID NO: 2440146 - RNA, 19 nt, Homo sapiens
  misc_RNA (1)...(19): siRNA sense strand
aagugguaaauguggacaa

SEQ ID NO: 2440147 - RNA, 19 nt, Homo sapiens
  misc_RNA (1)...(19): siRNA sense strand
gaugaggauagcaggcgua

SEQ ID NO: 2440148 - RNA, 19 nt, Homo sapiens
  misc_RNA (1)...(19): siRNA sense strand
cagaagugguaaaugugga

SEQ ID NO: 2440149 - RNA, 19 nt, Homo sapiens
  misc_RNA (1)...(19): siRNA sense strand
cugcaguaguucaagagca

SEQ ID NO: 2440150 - RNA, 19 nt, Homo sapiens
  misc_RNA (1)...(19): siRNA sense strand
uagaggagcugaaugcaga

SEQ ID NO: 2440151 - RNA, 19 nt, Homo sapiens
  misc_RNA (1)...(19): siRNA sense strand
gaacagaacuccaggccau

SEQ ID NO: 2440152 - RNA, 19 nt, Homo sapiens
  misc_RNA (1)...(19): siRNA sense strand
ccugcaaccuggaagucaa

SEQ ID NO: 2440153 - RNA, 19 nt, Homo sapiens
  misc_RNA (1)...(19): siRNA sense strand
agguguuagugguguguuu

SEQ ID NO: 2440154 - RNA, 19 nt, Homo sapiens
  misc_RNA (1)...(19): siRNA sense strand
acacagaaagggaaaauau

SEQ ID NO: 2440155 - RNA, 19 nt, Homo sapiens
  misc_RNA (1)...(19): siRNA sense strand
auagaauuggacacagaaa

SEQ ID NO: 2440156 - RNA, 19 nt, Homo sapiens
  misc_RNA (1)...(19): siRNA sense strand
gggaaaauaugaagugcgu

SEQ ID NO: 2440157 - RNA, 19 nt, Homo sapiens
  misc_RNA (1)...(19): siRNA sense strand
gcuaugacagcuuuggcaa

SEQ ID NO: 2440158 - RNA, 19 nt, Homo sapiens
  misc_RNA (1)...(19): siRNA sense strand
auguuuaccuucagauuca

SEQ ID NO: 2440159 - RNA, 19 nt, Homo sapiens
  misc_RNA (1)...(19): siRNA sense strand
acuuaguagcccauaguuu

SEQ ID NO: 2440160 - RNA, 19 nt, Homo sapiens
  misc_RNA (1)...(19): siRNA sense strand
ggaaacaaaugauggaucg

SEQ ID NO: 2440161 - RNA, 19 nt, Homo sapiens
  misc_RNA (1)...(19): siRNA sense strand
ucgcauuagccuugucuuu

SEQ ID NO: 2440162 - RNA, 19 nt, Homo sapiens
  misc_RNA (1)...(19): siRNA sense strand
ggacaaauuacgaagggaa

SEQ ID NO: 2440163 - RNA, 19 nt, Homo sapiens
  misc_RNA (1)...(19): siRNA sense strand
cggaugauguggagcgguu

SEQ ID NO: 2440164 - RNA, 19 nt, Homo sapiens
  misc_RNA (1)...(19): siRNA sense strand
cauacaaaguagaacgcuu

SEQ ID NO: 2440165 - RNA, 19 nt, Homo sapiens
  misc_RNA (1)...(19): siRNA sense strand
aaacagaagcagagcucau

SEQ ID NO: 2440166 - RNA, 19 nt, Homo sapiens
  misc_RNA (1)...(19): siRNA sense strand
gguuugaacuugcucggaa

SEQ ID NO: 2440167 - RNA, 19 nt, Homo sapiens
  misc_RNA (1)...(19): siRNA sense strand
uuaaagaggaagaguucau

SEQ ID NO: 2440168 - RNA, 19 nt, Homo sapiens
  misc_RNA (1)...(19): siRNA sense strand
gaugaagggaaguggagca

SEQ ID NO: 2440169 - RNA, 19 nt, Homo sapiens
  misc_RNA (1)...(19): siRNA sense strand
aguuggaggaacagaaaca

SEQ ID NO: 2440170 - RNA, 19 nt, Homo sapiens
  misc_RNA (1)...(19): siRNA sense strand
ucuuucaguuggaggaaca

SEQ ID NO: 2440171 - RNA, 19 nt, Homo sapiens
  misc_RNA (1)...(19): siRNA sense strand
cauccauuaaagaggaaga

SEQ ID NO: 2440172 - RNA, 19 nt, Homo sapiens
  misc_RNA (1)...(19): siRNA sense strand
cauuaugagaugaacacau

SEQ ID NO: 2440173 - RNA, 19 nt, Homo sapiens
  misc_RNA (1)...(19): siRNA sense strand
cgaauugggguuuggaaga

SEQ ID NO: 2440174 - RNA, 19 nt, Homo sapiens
  misc_RNA (1)...(19): siRNA sense strand
ggacaaauuacgaagggaa

SEQ ID NO: 2440175 - RNA, 19 nt, Homo sapiens
  misc_RNA (1)...(19): siRNA sense strand
cggaugauguggagcgguu

SEQ ID NO: 2440176 - RNA, 19 nt, Homo sapiens
  misc_RNA (1)...(19): siRNA sense strand
cauacaaaguagaacgcuu

SEQ ID NO: 2440177 - RNA, 19 nt, Homo sapiens
  misc_RNA (1)...(19): siRNA sense strand
aaacagaagcagagcucau

SEQ ID NO: 2440178 - RNA, 19 nt, Homo sapiens
  misc_RNA (1)...(19): siRNA sense strand
uuaaagaggaagaguucau

SEQ ID NO: 2440179 - RNA, 19 nt, Homo sapiens
  misc_RNA (1)...(19): siRNA sense strand
gaugaagggaaguggagca

SEQ ID NO: 2440180 - RNA, 19 nt, Homo sapiens
  misc_RNA (1)...(19): siRNA sense strand
aguuggaggaacagaaaca

SEQ ID NO: 2440181 - RNA, 19 nt, Homo sapiens
  misc_RNA (1)...(19): siRNA sense strand
ucuuucaguuggaggaaca

SEQ ID NO: 2440182 - RNA, 19 nt, Homo sapiens
  misc_RNA (1)...(19): siRNA sense strand
cauccauuaaagaggaaga

SEQ ID NO: 2440183 - RNA, 19 nt, Homo sapiens
  misc_RNA (1)...(19): siRNA sense strand
cauuaugagaugaacacau

SEQ ID NO: 2440184 - RNA, 19 nt, Homo sapiens
  misc_RNA (1)...(19): siRNA sense strand
cgaauugggguuuggaaga

SEQ ID NO: 2440185 - RNA, 19 nt, Homo sapiens
  misc_RNA (1)...(19): siRNA sense strand
ccuugagagcagagaacaa

SEQ ID NO: 2440186 - RNA, 19 nt, Homo sapiens
  misc_RNA (1)...(19): siRNA sense strand
aagaaaacgauguggacaa

SEQ ID NO: 2440187 - RNA, 19 nt, Homo sapiens
  misc_RNA (1)...(19): siRNA sense strand
acauaaacauagaggaagc

SEQ ID NO: 2440188 - RNA, 19 nt, Homo sapiens
  misc_RNA (1)...(19): siRNA sense strand
ccagcaucaucaagcgcua

SEQ ID NO: 2440189 - RNA, 19 nt, Homo sapiens
  misc_RNA (1)...(19): siRNA sense strand
gguuccuaguggagaagau

SEQ ID NO: 2440190 - RNA, 19 nt, Homo sapiens
  misc_RNA (1)...(19): siRNA sense strand
uggaaaagugaucuggaua

SEQ ID NO: 2440191 - RNA, 19 nt, Homo sapiens
  misc_RNA (1)...(19): siRNA sense strand
ucuucaaggugcuggugau

SEQ ID NO: 2440192 - RNA, 19 nt, Homo sapiens
  misc_RNA (1)...(19): siRNA sense strand
ggcaggagcgauuuggcaa

SEQ ID NO: 2440193 - RNA, 19 nt, Homo sapiens
  misc_RNA (1)...(19): siRNA sense strand
ccaacguggaugaaguaaa

SEQ ID NO: 2440194 - RNA, 19 nt, Homo sapiens
  misc_RNA (1)...(19): siRNA sense strand
auuuggaacugcagggcua

SEQ ID NO: 2440195 - RNA, 19 nt, Homo sapiens
  misc_RNA (1)...(19): siRNA sense strand
ggaaaacagugaaugggaa

SEQ ID NO: 2440196 - RNA, 19 nt, Homo sapiens
  misc_RNA (1)...(19): siRNA sense strand
agguagaagaugacuggaa

SEQ ID NO: 2440197 - RNA, 19 nt, Homo sapiens
  misc_RNA (1)...(19): siRNA sense strand
cagaaaacaugaagagcca

SEQ ID NO: 2440198 - RNA, 19 nt, Homo sapiens
  misc_RNA (1)...(19): siRNA sense strand
gccacaagcaagagaagau

SEQ ID NO: 2440199 - RNA, 19 nt, Homo sapiens
  misc_RNA (1)...(19): siRNA sense strand
guagaagaugacuggaaau

SEQ ID NO: 2440200 - RNA, 19 nt, Homo sapiens
  misc_RNA (1)...(19): siRNA sense strand
cagaguauuucuuugggua

SEQ ID NO: 2440201 - RNA, 19 nt, Homo sapiens
  misc_RNA (1)...(19): siRNA sense strand
uuuaagaguuccugcccua

SEQ ID NO: 2440202 - RNA, 19 nt, Homo sapiens
  misc_RNA (1)...(19): siRNA sense strand
ucaucaggccuguggaaaa

SEQ ID NO: 2440203 - RNA, 19 nt, Homo sapiens
  misc_RNA (1)...(19): siRNA sense strand
aguagaaggcaaaacaaaa

SEQ ID NO: 2440204 - RNA, 19 nt, Homo sapiens
  misc_RNA (1)...(19): siRNA sense strand
caauggaauaugauggcau

SEQ ID NO: 2440205 - RNA, 19 nt, Homo sapiens
  misc_RNA (1)...(19): siRNA sense strand
gcagauaagauuuggaagc

SEQ ID NO: 2440206 - RNA, 19 nt, Homo sapiens
  misc_RNA (1)...(19): siRNA sense strand
augacaaagcugaaauuga

SEQ ID NO: 2440207 - RNA, 19 nt, Homo sapiens
  misc_RNA (1)...(19): siRNA sense strand
ccauggugguggacagagu

SEQ ID NO: 2440208 - RNA, 19 nt, Homo sapiens
  misc_RNA (1)...(19): siRNA sense strand
ggacguaugacaaagcuga

SEQ ID NO: 2440209 - RNA, 19 nt, Homo sapiens
  misc_RNA (1)...(19): siRNA sense strand
aagauuaagucaucagcca

SEQ ID NO: 2440210 - RNA, 19 nt, Homo sapiens
  misc_RNA (1)...(19): siRNA sense strand
acuguugugaagagauaua

SEQ ID NO: 2440211 - RNA, 19 nt, Homo sapiens
  misc_RNA (1)...(19): siRNA sense strand
uggccaacguggaugaagu

SEQ ID NO: 2440212 - RNA, 19 nt, Homo sapiens
  misc_RNA (1)...(19): siRNA sense strand
aaguagaaggcaaaacaaa

SEQ ID NO: 2440213 - RNA, 19 nt, Homo sapiens
  misc_RNA (1)...(19): siRNA sense strand
uacagugggugguggaaaa

SEQ ID NO: 2440214 - RNA, 19 nt, Homo sapiens
  misc_RNA (1)...(19): siRNA sense strand
ccagcaaggggcagggauu

SEQ ID NO: 2440215 - RNA, 19 nt, Homo sapiens
  misc_RNA (1)...(19): siRNA sense strand
cuacuugggaacacaggaa

SEQ ID NO: 2440216 - RNA, 19 nt, Homo sapiens
  misc_RNA (1)...(19): siRNA sense strand
ccuucggacuguggugaaa

SEQ ID NO: 2440217 - RNA, 19 nt, Homo sapiens
  misc_RNA (1)...(19): siRNA sense strand
agaccaaagagguggcuga

SEQ ID NO: 2440218 - RNA, 19 nt, Homo sapiens
  misc_RNA (1)...(19): siRNA sense strand
ggucaaucauggauggugu

SEQ ID NO: 2440219 - RNA, 19 nt, Homo sapiens
  misc_RNA (1)...(19): siRNA sense strand
gcaacucggaacugggcaa

SEQ ID NO: 2440220 - RNA, 19 nt, Homo sapiens
  misc_RNA (1)...(19): siRNA sense strand
gcaugaagcugcaccgugu

SEQ ID NO: 2440221 - RNA, 19 nt, Homo sapiens
  misc_RNA (1)...(19): siRNA sense strand
agggagacauggagaacac

SEQ ID NO: 2440222 - RNA, 19 nt, Homo sapiens
  misc_RNA (1)...(19): siRNA sense strand
ccgcaaguucuuucgguca

SEQ ID NO: 2440223 - RNA, 19 nt, Homo sapiens
  misc_RNA (1)...(19): siRNA sense strand
ucauggauggugugaaaca

SEQ ID NO: 2440224 - RNA, 19 nt, Homo sapiens
  misc_RNA (1)...(19): siRNA sense strand
ggucauaccacaagccuac

SEQ ID NO: 2440225 - RNA, 19 nt, Homo sapiens
  misc_RNA (1)...(19): siRNA sense strand
acccagaugaggaaagaaa

SEQ ID NO: 2440226 - RNA, 19 nt, Homo sapiens
  misc_RNA (1)...(19): siRNA sense strand
gcuccaaugaugauggcua

SEQ ID NO: 2440227 - RNA, 19 nt, Homo sapiens
  misc_RNA (1)...(19): siRNA sense strand
uagagaaaggucagagaca

SEQ ID NO: 2440228 - RNA, 19 nt, Homo sapiens
  misc_RNA (1)...(19): siRNA sense strand
aggaaacccagaugaggaa

SEQ ID NO: 2440229 - RNA, 19 nt, Homo sapiens
  misc_RNA (1)...(19): siRNA sense strand
aaagaaaacggcaggaaau

SEQ ID NO: 2440230 - RNA, 19 nt, Homo sapiens
  misc_RNA (1)...(19): siRNA sense strand
ggaaauuaucuccugcgaa

SEQ ID NO: 2440231 - RNA, 19 nt, Homo sapiens
  misc_RNA (1)...(19): siRNA sense strand
ggaaagaaaacggcaggaa

SEQ ID NO: 2440232 - RNA, 19 nt, Homo sapiens
  misc_RNA (1)...(19): siRNA sense strand
aagaagcccaagaaaggaa

SEQ ID NO: 2440233 - RNA, 19 nt, Homo sapiens
  misc_RNA (1)...(19): siRNA sense strand
guuucaacgaggugggcaa

SEQ ID NO: 2440234 - RNA, 19 nt, Homo sapiens
  misc_RNA (1)...(19): siRNA sense strand
gggccaugagagagcagua

SEQ ID NO: 2440235 - RNA, 19 nt, Homo sapiens
  misc_RNA (1)...(19): siRNA sense strand
ccguuguguuggucgggaa

SEQ ID NO: 2440236 - RNA, 19 nt, Homo sapiens
  misc_RNA (1)...(19): siRNA sense strand
ggaacaaggcagaucugga

SEQ ID NO: 2440237 - RNA, 19 nt, Homo sapiens
  misc_RNA (1)...(19): siRNA sense strand
ccggaaauaccaggaacaa

SEQ ID NO: 2440238 - RNA, 19 nt, Homo sapiens
  misc_RNA (1)...(19): siRNA sense strand
ucaacguggacgaggcuuu

SEQ ID NO: 2440239 - RNA, 19 nt, Homo sapiens
  misc_RNA (1)...(19): siRNA sense strand
ccaugagagagcaguacau

SEQ ID NO: 2440240 - RNA, 19 nt, Homo sapiens
  misc_RNA (1)...(19): siRNA sense strand
ugaaggaccuggaggcgga

SEQ ID NO: 2440241 - RNA, 19 nt, Homo sapiens
  misc_RNA (1)...(19): siRNA sense strand
gcgagaaacgggagcugga

SEQ ID NO: 2440242 - RNA, 19 nt, Homo sapiens
  misc_RNA (1)...(19): siRNA sense strand
uggaggagcuggugcgucu

SEQ ID NO: 2440243 - RNA, 19 nt, Homo sapiens
  misc_RNA (1)...(19): siRNA sense strand
acguggcuguggagcguaa

SEQ ID NO: 2440244 - RNA, 19 nt, Homo sapiens
  misc_RNA (1)...(19): siRNA sense strand
ugguacagcaaguggcaca

SEQ ID NO: 2440245 - RNA, 19 nt, Homo sapiens
  misc_RNA (1)...(19): siRNA sense strand
agacacagcuucaugagca

SEQ ID NO: 2440246 - RNA, 19 nt, Homo sapiens
  misc_RNA (1)...(19): siRNA sense strand
ccggaaugcugaucggacu

SEQ ID NO: 2440247 - RNA, 19 nt, Homo sapiens
  misc_RNA (1)...(19): siRNA sense strand
gugaaaacgcugcuggaga

SEQ ID NO: 2440248 - RNA, 19 nt, Homo sapiens
  misc_RNA (1)...(19): siRNA sense strand
ccagcaacuccaagcucua

SEQ ID NO: 2440249 - RNA, 19 nt, Homo sapiens
  misc_RNA (1)...(19): siRNA sense strand
aggugaaggaagagagaga

SEQ ID NO: 2440250 - RNA, 19 nt, Homo sapiens
  misc_RNA (1)...(19): siRNA sense strand
gcuauggacugaagagcca

SEQ ID NO: 2440251 - RNA, 19 nt, Homo sapiens
  misc_RNA (1)...(19): siRNA sense strand
cagaggaugaugagggcuu

SEQ ID NO: 2440252 - RNA, 19 nt, Homo sapiens
  misc_RNA (1)...(19): siRNA sense strand
cuacaagggcugugggcgu

SEQ ID NO: 2440253 - RNA, 19 nt, Homo sapiens
  misc_RNA (1)...(19): siRNA sense strand
ccaggugacgguacagaaa

SEQ ID NO: 2440254 - RNA, 19 nt, Homo sapiens
  misc_RNA (1)...(19): siRNA sense strand
aggaagagagagaugacau

SEQ ID NO: 2440255 - RNA, 19 nt, Homo sapiens
  misc_RNA (1)...(19): siRNA sense strand
ccuuagaggaggccaucaa

SEQ ID NO: 2440256 - RNA, 19 nt, Homo sapiens
  misc_RNA (1)...(19): siRNA sense strand
aggugacgguacagaaaga

SEQ ID NO: 2440257 - RNA, 19 nt, Homo sapiens
  misc_RNA (1)...(19): siRNA sense strand
ccaccuuggccaugcacaa

SEQ ID NO: 2440258 - RNA, 19 nt, Homo sapiens
  misc_RNA (1)...(19): siRNA sense strand
cgauggugacugaagaaga

SEQ ID NO: 2440259 - RNA, 19 nt, Homo sapiens
  misc_RNA (1)...(19): siRNA sense strand
ggcaagaccuaccggcaga

SEQ ID NO: 2440260 - RNA, 19 nt, Homo sapiens
  misc_RNA (1)...(19): siRNA sense strand
gggaaacgcuucaccgagu

SEQ ID NO: 2440261 - RNA, 19 nt, Homo sapiens
  misc_RNA (1)...(19): siRNA sense strand
gugaaggaagagagagaug

SEQ ID NO: 2440262 - RNA, 19 nt, Homo sapiens
  misc_RNA (1)...(19): siRNA sense strand
gaagauggcagcauggcuu

SEQ ID NO: 2440263 - RNA, 19 nt, Homo sapiens
  misc_RNA (1)...(19): siRNA sense strand
cuuaaaggugcaugaacga

SEQ ID NO: 2440264 - RNA, 19 nt, Homo sapiens
  misc_RNA (1)...(19): siRNA sense strand
auaagaaucacgugcgcau

SEQ ID NO: 2440265 - RNA, 19 nt, Homo sapiens
  misc_RNA (1)...(19): siRNA sense strand
gacccuuagugaugggaca

SEQ ID NO: 2440266 - RNA, 19 nt, Homo sapiens
  misc_RNA (1)...(19): siRNA sense strand
acacaggggagaagccaua

SEQ ID NO: 2440267 - RNA, 19 nt, Homo sapiens
  misc_RNA (1)...(19): siRNA sense strand
ccuucaagaccucaggaga

SEQ ID NO: 2440268 - RNA, 19 nt, Homo sapiens
  misc_RNA (1)...(19): siRNA sense strand
agagauacccacugcggaa

SEQ ID NO: 2440269 - RNA, 19 nt, Homo sapiens
  misc_RNA (1)...(19): siRNA sense strand
ucacagacauugauggguu

SEQ ID NO: 2440270 - RNA, 19 nt, Homo sapiens
  misc_RNA (1)...(19): siRNA sense strand
cugcaacaucauuagcaaa

SEQ ID NO: 2440271 - RNA, 19 nt, Homo sapiens
  misc_RNA (1)...(19): siRNA sense strand
ccuggagcccugugagaga

SEQ ID NO: 2440272 - RNA, 19 nt, Homo sapiens
  misc_RNA (1)...(19): siRNA sense strand
cagccgaagcccuggagau

SEQ ID NO: 2440273 - RNA, 19 nt, Homo sapiens
  misc_RNA (1)...(19): siRNA sense strand
guggaaacccagaggagcu

SEQ ID NO: 2440274 - RNA, 19 nt, Homo sapiens
  misc_RNA (1)...(19): siRNA sense strand
caucauuagcaaauacaca

SEQ ID NO: 2440275 - RNA, 19 nt, Homo sapiens
  misc_RNA (1)...(19): siRNA sense strand
gcauacagcaccaaccaga

SEQ ID NO: 2440276 - RNA, 19 nt, Homo sapiens
  misc_RNA (1)...(19): siRNA sense strand
acauaaacaacgugggaaa

SEQ ID NO: 2440277 - RNA, 19 nt, Homo sapiens
  misc_RNA (1)...(19): siRNA sense strand
augcaagauaugugggaaa

SEQ ID NO: 2440278 - RNA, 19 nt, Homo sapiens
  misc_RNA (1)...(19): siRNA sense strand
augcaagguaugugggaaa

SEQ ID NO: 2440279 - RNA, 19 nt, Homo sapiens
  misc_RNA (1)...(19): siRNA sense strand
auguaagauaugugggaaa

SEQ ID NO: 2440280 - RNA, 19 nt, Homo sapiens
  misc_RNA (1)...(19): siRNA sense strand
auguaaacagugugggaaa

SEQ ID NO: 2440281 - RNA, 19 nt, Homo sapiens
  misc_RNA (1)...(19): siRNA sense strand
ggagaaacauuuagccuca

SEQ ID NO: 2440282 - RNA, 19 nt, Homo sapiens
  misc_RNA (1)...(19): siRNA sense strand
guguaagcaaugcgggaaa

SEQ ID NO: 2440283 - RNA, 19 nt, Homo sapiens
  misc_RNA (1)...(19): siRNA sense strand
gucauaugguagagagauu

SEQ ID NO: 2440284 - RNA, 19 nt, Homo sapiens
  misc_RNA (1)...(19): siRNA sense strand
guguaaggaauguggaaaa

SEQ ID NO: 2440285 - RNA, 19 nt, Homo sapiens
  misc_RNA (1)...(19): siRNA sense strand
augcaagcagugugggaaa

SEQ ID NO: 2440286 - RNA, 19 nt, Homo sapiens
  misc_RNA (1)...(19): siRNA sense strand
augcaagcagugugggaaa

SEQ ID NO: 2440287 - RNA, 19 nt, Homo sapiens
  misc_RNA (1)...(19): siRNA sense strand
ggacuguauaagaaugaua

SEQ ID NO: 2440288 - RNA, 19 nt, Homo sapiens
  misc_RNA (1)...(19): siRNA sense strand
cgcuaugaguguaaggaau

SEQ ID NO: 2440289 - RNA, 19 nt, Homo sapiens
  misc_RNA (1)...(19): siRNA sense strand
agauaugugaugcaagaaa

SEQ ID NO: 2440290 - RNA, 19 nt, Homo sapiens
  misc_RNA (1)...(19): siRNA sense strand
auguaaguugugugggaaa

SEQ ID NO: 2440291 - RNA, 19 nt, Homo sapiens
  misc_RNA (1)...(19): siRNA sense strand
cagugaaaguaaagacagu

SEQ ID NO: 2440292 - RNA, 19 nt, Homo sapiens
  misc_RNA (1)...(19): siRNA sense strand
gguagugcaagguggaaau

SEQ ID NO: 2440293 - RNA, 19 nt, Homo sapiens
  misc_RNA (1)...(19): siRNA sense strand
agaaacgcuaugaguguaa

SEQ ID NO: 2440294 - RNA, 19 nt, Homo sapiens
  misc_RNA (1)...(19): siRNA sense strand
cgggagaugggccgaauaa

SEQ ID NO: 2440295 - RNA, 19 nt, Homo sapiens
  misc_RNA (1)...(19): siRNA sense strand
gccucacacuggaaagaaa

SEQ ID NO: 2440296 - RNA, 19 nt, Homo sapiens
  misc_RNA (1)...(19): siRNA sense strand
uuucgaagacauaugguaa

SEQ ID NO: 2440297 - RNA, 19 nt, Homo sapiens
  misc_RNA (1)...(19): siRNA sense strand
ugauaugggaagaacagaa

SEQ ID NO: 2440298 - RNA, 19 nt, Homo sapiens
  misc_RNA (1)...(19): siRNA sense strand
agugcaagguggaaauaga

SEQ ID NO: 2440299 - RNA, 19 nt, Homo sapiens
  misc_RNA (1)...(19): siRNA sense strand
aacucacacuggagagaaa

SEQ ID NO: 2440300 - RNA, 19 nt, Homo sapiens
  misc_RNA (1)...(19): siRNA sense strand
cuaucgaagacaugagaga

SEQ ID NO: 2440301 - RNA, 19 nt, Homo sapiens
  misc_RNA (1)...(19): siRNA sense strand
aacucacacuggagagaaa

SEQ ID NO: 2440302 - RNA, 19 nt, Homo sapiens
  misc_RNA (1)...(19): siRNA sense strand
ucuuggaagcuuucagaua

SEQ ID NO: 2440303 - RNA, 19 nt, Homo sapiens
  misc_RNA (1)...(19): siRNA sense strand
aguugauucuggacacaaa

SEQ ID NO: 2440304 - RNA, 19 nt, Homo sapiens
  misc_RNA (1)...(19): siRNA sense strand
aaauguaaguuguguggga

SEQ ID NO: 2440305 - RNA, 19 nt, Homo sapiens
  misc_RNA (1)...(19): siRNA sense strand
gaguguaaggaauguggaa

SEQ ID NO: 2440306 - RNA, 19 nt, Homo sapiens
  misc_RNA (1)...(19): siRNA sense strand
agaacagaauacugaagau

SEQ ID NO: 2440307 - RNA, 19 nt, Homo sapiens
  misc_RNA (1)...(19): siRNA sense strand
aagaagucauaauggguca

SEQ ID NO: 2440308 - RNA, 19 nt, Homo sapiens
  misc_RNA (1)...(19): siRNA sense strand
gcagugugggaaagcguua

SEQ ID NO: 2440309 - RNA, 19 nt, Homo sapiens
  misc_RNA (1)...(19): siRNA sense strand
caguuuaguucgauaucau

SEQ ID NO: 2440310 - RNA, 19 nt, Homo sapiens
  misc_RNA (1)...(19): siRNA sense strand
ugguaaugcauacgggaga

SEQ ID NO: 2440311 - RNA, 19 nt, Homo sapiens
  misc_RNA (1)...(19): siRNA sense strand
caguagucaguguggagaa

SEQ ID NO: 2440312 - RNA, 19 nt, Homo sapiens
  misc_RNA (1)...(19): siRNA sense strand
uagucaguguggagaaaca

SEQ ID NO: 2440313 - RNA, 19 nt, Homo sapiens
  misc_RNA (1)...(19): siRNA sense strand
gguccaucacagaagaauu

SEQ ID NO: 2440314 - RNA, 19 nt, Homo sapiens
  misc_RNA (1)...(19): siRNA sense strand
guucuaaagccuugccuga

SEQ ID NO: 2440315 - RNA, 19 nt, Homo sapiens
  misc_RNA (1)...(19): siRNA sense strand
uuucgaagacacaugauaa

SEQ ID NO: 2440316 - RNA, 19 nt, Homo sapiens
  misc_RNA (1)...(19): siRNA sense strand
cauuuguccuggagaagau

SEQ ID NO: 2440317 - RNA, 19 nt, Homo sapiens
  misc_RNA (1)...(19): siRNA sense strand
cccuaugaguguaagcaau

SEQ ID NO: 2440318 - RNA, 19 nt, Homo sapiens
  misc_RNA (1)...(19): siRNA sense strand
gaaugauaugggaagaaca

SEQ ID NO: 2440319 - RNA, 19 nt, Homo sapiens
  misc_RNA (1)...(19): siRNA sense strand
aguagucaguguggagaaa

SEQ ID NO: 2440320 - RNA, 19 nt, Homo sapiens
  misc_RNA (1)...(19): siRNA sense strand
ucguagaaaccuucgaaga

SEQ ID NO: 2440321 - RNA, 19 nt, Homo sapiens
  misc_RNA (1)...(19): siRNA sense strand
aucgaagacaugagagaau

SEQ ID NO: 2440322 - RNA, 19 nt, Homo sapiens
  misc_RNA (1)...(19): siRNA sense strand
aggauguggcugugaacuu

SEQ ID NO: 2440323 - RNA, 19 nt, Homo sapiens
  misc_RNA (1)...(19): siRNA sense strand
gucaaagcgcugaguguga

SEQ ID NO: 2440324 - RNA, 19 nt, Homo sapiens
  misc_RNA (1)...(19): siRNA sense strand
gcaagaaaccaucaggaac

SEQ ID NO: 2440325 - RNA, 19 nt, Homo sapiens
  misc_RNA (1)...(19): siRNA sense strand
cgaauaaaugcaagguaug

SEQ ID NO: 2440326 - RNA, 19 nt, Homo sapiens
  misc_RNA (1)...(19): siRNA sense strand
ggggagaaaccguaugaau

SEQ ID NO: 2440327 - RNA, 19 nt, Homo sapiens
  misc_RNA (1)...(19): siRNA sense strand
agaaacccuaugaguguaa

SEQ ID NO: 2440328 - RNA, 19 nt, Homo sapiens
  misc_RNA (1)...(19): siRNA sense strand
ccguaugaauguaagcagu

SEQ ID NO: 2440329 - RNA, 19 nt, Homo sapiens
  misc_RNA (1)...(19): siRNA sense strand
ccguaugaauguaagcagu

SEQ ID NO: 2440330 - RNA, 19 nt, Homo sapiens
  misc_RNA (1)...(19): siRNA sense strand
guauaagaaugauauggga

SEQ ID NO: 2440331 - RNA, 19 nt, Homo sapiens
  misc_RNA (1)...(19): siRNA sense strand
aagaaugauaugggaagaa

SEQ ID NO: 2440332 - RNA, 19 nt, Homo sapiens
  misc_RNA (1)...(19): siRNA sense strand
gaguguaagcaaugcggga

SEQ ID NO: 2440333 - RNA, 19 nt, Homo sapiens
  misc_RNA (1)...(19): siRNA sense strand
guuuauuacguaugcauga

SEQ ID NO: 2440334 - RNA, 19 nt, Homo sapiens
  misc_RNA (1)...(19): siRNA sense strand
aagacuaacaagaaagcaa

SEQ ID NO: 2440335 - RNA, 19 nt, Homo sapiens
  misc_RNA (1)...(19): siRNA sense strand
ggucuggagagcagggcaa

SEQ ID NO: 2440336 - RNA, 19 nt, Homo sapiens
  misc_RNA (1)...(19): siRNA sense strand
gggaagagguucacacgga

SEQ ID NO: 2440337 - RNA, 19 nt, Homo sapiens
  misc_RNA (1)...(19): siRNA sense strand
gggagaagaggucuggaga

SEQ ID NO: 2440338 - RNA, 19 nt, Homo sapiens
  misc_RNA (1)...(19): siRNA sense strand
ccauccaaguacagcccaa

SEQ ID NO: 2440339 - RNA, 19 nt, Homo sapiens
  misc_RNA (1)...(19): siRNA sense strand
auccagaagucgaguacga

SEQ ID NO: 2440340 - RNA, 19 nt, Homo sapiens
  misc_RNA (1)...(19): siRNA sense strand
ggacaaacgcuucgagugc

SEQ ID NO: 2440341 - RNA, 19 nt, Homo sapiens
  misc_RNA (1)...(19): siRNA sense strand
gaagaggucuggagagcag

SEQ ID NO: 2440342 - RNA, 19 nt, Homo sapiens
  misc_RNA (1)...(19): siRNA sense strand
acaucauccaggcaggaaa

SEQ ID NO: 2440343 - RNA, 19 nt, Homo sapiens
  misc_RNA (1)...(19): siRNA sense strand
gagaagaggucuggagagc

SEQ ID NO: 2440344 - RNA, 19 nt, Homo sapiens
  misc_RNA (1)...(19): siRNA sense strand
caaagaaggcucaagcaca

SEQ ID NO: 2440345 - RNA, 19 nt, Homo sapiens
  misc_RNA (1)...(19): siRNA sense strand
cuuccuagguccaggggua

SEQ ID NO: 2440346 - RNA, 19 nt, Homo sapiens
  misc_RNA (1)...(19): siRNA sense strand
agacaauugccaagugcau

SEQ ID NO: 2440347 - RNA, 19 nt, Homo sapiens
  misc_RNA (1)...(19): siRNA sense strand
gacugaucccugaggaauu

SEQ ID NO: 2440348 - RNA, 19 nt, Homo sapiens
  misc_RNA (1)...(19): siRNA sense strand
gaccuaaagcugcuggcaa

SEQ ID NO: 2440349 - RNA, 19 nt, Homo sapiens
  misc_RNA (1)...(19): siRNA sense strand
uggacugaucccugaggaa

SEQ ID NO: 2440350 - RNA, 19 nt, Homo sapiens
  misc_RNA (1)...(19): siRNA sense strand
gucgaaaggaacaagaaca

SEQ ID NO: 2440351 - RNA, 19 nt, Homo sapiens
  misc_RNA (1)...(19): siRNA sense strand
aggaaaaguucguuaugga

SEQ ID NO: 2440352 - RNA, 19 nt, Homo sapiens
  misc_RNA (1)...(19): siRNA sense strand
gcgucgaaaggaacaagaa

SEQ ID NO: 2440353 - RNA, 19 nt, Homo sapiens
  misc_RNA (1)...(19): siRNA sense strand
uccuaaaacugguguaaca

SEQ ID NO: 2440354 - RNA, 19 nt, Homo sapiens
  misc_RNA (1)...(19): siRNA sense strand
gaguaaagcaugaagccau

SEQ ID NO: 2440355 - RNA, 19 nt, Homo sapiens
  misc_RNA (1)...(19): siRNA sense strand
aggaggacgacgaggccua

SEQ ID NO: 2440356 - RNA, 19 nt, Homo sapiens
  misc_RNA (1)...(19): siRNA sense strand
ccaugguggaggagcagua

SEQ ID NO: 2440357 - RNA, 19 nt, Homo sapiens
  misc_RNA (1)...(19): siRNA sense strand
acgaggaggacgaggagga

SEQ ID NO: 2440358 - RNA, 19 nt, Homo sapiens
  misc_RNA (1)...(19): siRNA sense strand
ccaucguggucaagggcca

SEQ ID NO: 2440359 - RNA, 19 nt, Homo sapiens
  misc_RNA (1)...(19): siRNA sense strand
aggaggacgaggaggacga

SEQ ID NO: 2440360 - RNA, 19 nt, Homo sapiens
  misc_RNA (1)...(19): siRNA sense strand
cggcacagguguucgagca

SEQ ID NO: 2440361 - RNA, 19 nt, Homo sapiens
  misc_RNA (1)...(19): siRNA sense strand
cugugaaauuguacuguca

SEQ ID NO: 2440362 - RNA, 19 nt, Homo sapiens
  misc_RNA (1)...(19): siRNA sense strand
aagagaagccugagccagu

SEQ ID NO: 2440363 - RNA, 19 nt, Homo sapiens
  misc_RNA (1)...(19): siRNA sense strand
gcaagagaagccugagcca

SEQ ID NO: 2440364 - RNA, 19 nt, Homo sapiens
  misc_RNA (1)...(19): siRNA sense strand
uccugaacgcugugaaauu

SEQ ID NO: 2440365 - RNA, 19 nt, Homo sapiens
  misc_RNA (1)...(19): siRNA sense strand
ggguaaugacaaagagugu

SEQ ID NO: 2440366 - RNA, 19 nt, Homo sapiens
  misc_RNA (1)...(19): siRNA sense strand
agggaaacaguucggguaa

SEQ ID NO: 2440367 - RNA, 19 nt, Homo sapiens
  misc_RNA (1)...(19): siRNA sense strand
aaaacagaccauugagaua

SEQ ID NO: 2440368 - RNA, 19 nt, Homo sapiens
  misc_RNA (1)...(19): siRNA sense strand
ugcaauaugacauggcaaa

SEQ ID NO: 2440369 - RNA, 19 nt, Homo sapiens
  misc_RNA (1)...(19): siRNA sense strand
auaaugaccccaagggaaa

SEQ ID NO: 2440370 - RNA, 19 nt, Homo sapiens
  misc_RNA (1)...(19): siRNA sense strand
aagcaaacggaucgugcaa

SEQ ID NO: 2440371 - RNA, 19 nt, Homo sapiens
  misc_RNA (1)...(19): siRNA sense strand
aagaagaauuuacagacga

SEQ ID NO: 2440372 - RNA, 19 nt, Homo sapiens
  misc_RNA (1)...(19): siRNA sense strand
aagaauuuacagacgaaga

SEQ ID NO: 2440373 - RNA, 19 nt, Homo sapiens
  misc_RNA (1)...(19): siRNA sense strand
ggaucgugcaaguggagca

SEQ ID NO: 2440374 - RNA, 19 nt, Homo sapiens
  misc_RNA (1)...(19): siRNA sense strand
uuacagacgaagagaugca

SEQ ID NO: 2440375 - RNA, 19 nt, Homo sapiens
  misc_RNA (1)...(19): siRNA sense strand
ugacaugacagucuggaga

SEQ ID NO: 2440376 - RNA, 19 nt, Homo sapiens
  misc_RNA (1)...(19): siRNA sense strand
caaugagaccacaggaaaa

SEQ ID NO: 2440377 - RNA, 19 nt, Homo sapiens
  misc_RNA (1)...(19): siRNA sense strand
cauccauagaagagacaau

SEQ ID NO: 2440378 - RNA, 19 nt, Homo sapiens
  misc_RNA (1)...(19): siRNA sense strand
ccuccaagcagcagagaag

SEQ ID NO: 2440379 - RNA, 19 nt, Homo sapiens
  misc_RNA (1)...(19): siRNA sense strand
ggauucgagggaugagcaa

SEQ ID NO: 2440380 - RNA, 19 nt, Homo sapiens
  misc_RNA (1)...(19): siRNA sense strand
acacagugguggagcccua

SEQ ID NO: 2440381 - RNA, 19 nt, Homo sapiens
  misc_RNA (1)...(19): siRNA sense strand
cugaggaggagguggccua

SEQ ID NO: 2440382 - RNA, 19 nt, Homo sapiens
  misc_RNA (1)...(19): siRNA sense strand
aggaggaggcugaggagga

SEQ ID NO: 2440383 - RNA, 19 nt, Homo sapiens
  misc_RNA (1)...(19): siRNA sense strand
gaaaggaggcugagagcug

SEQ ID NO: 2440384 - RNA, 19 nt, Homo sapiens
  misc_RNA (1)...(19): siRNA sense strand
gcuuaauguccaaaacaaa

SEQ ID NO: 2440385 - RNA, 19 nt, Homo sapiens
  misc_RNA (1)...(19): siRNA sense strand
agggcgaguucgaggagga

SEQ ID NO: 2440386 - RNA, 19 nt, Homo sapiens
  misc_RNA (1)...(19): siRNA sense strand
aguucgaggaggaggcuga

SEQ ID NO: 2440387 - RNA, 19 nt, Homo sapiens
  misc_RNA (1)...(19): siRNA sense strand
aggaguacccagacaggau

SEQ ID NO: 2440388 - RNA, 19 nt, Homo sapiens
  misc_RNA (1)...(19): siRNA sense strand
cgggaggaguacccagaca

SEQ ID NO: 2440389 - RNA, 19 nt, Homo sapiens
  misc_RNA (1)...(19): siRNA sense strand
aagucaaggccgagggcua

SEQ ID NO: 2440390 - RNA, 19 nt, Homo sapiens
  misc_RNA (1)...(19): siRNA sense strand
gcaacauggcacugggcaa

SEQ ID NO: 2440391 - RNA, 19 nt, Homo sapiens
  misc_RNA (1)...(19): siRNA sense strand
agaagaaacugcaccggaa

SEQ ID NO: 2440392 - RNA, 19 nt, Homo sapiens
  misc_RNA (1)...(19): siRNA sense strand
acuucaaagccaaggacua

SEQ ID NO: 2440393 - RNA, 19 nt, Homo sapiens
  misc_RNA (1)...(19): siRNA sense strand
agggugaggugaaggccaa

SEQ ID NO: 2440394 - RNA, 19 nt, Homo sapiens
  misc_RNA (1)...(19): siRNA sense strand
ucaacauauucgagcucaa

SEQ ID NO: 2440395 - RNA, 19 nt, Homo sapiens
  misc_RNA (1)...(19): siRNA sense strand
ccaucaaguucuacagcca

SEQ ID NO: 2440396 - RNA, 19 nt, Homo sapiens
  misc_RNA (1)...(19): siRNA sense strand
ggucagauccacagccaca

SEQ ID NO: 2440397 - RNA, 19 nt, Homo sapiens
  misc_RNA (1)...(19): siRNA sense strand
acuacgagacgguggucaa

SEQ ID NO: 2440398 - RNA, 19 nt, Homo sapiens
  misc_RNA (1)...(19): siRNA sense strand
aagagaacaaccuggacua

SEQ ID NO: 2440399 - RNA, 19 nt, Homo sapiens
  misc_RNA (1)...(19): siRNA sense strand
gggccauugagcuggacaa

SEQ ID NO: 2440400 - RNA, 19 nt, Homo sapiens
  misc_RNA (1)...(19): siRNA sense strand
guuucgagggugaggugaa

SEQ ID NO: 2440401 - RNA, 19 nt, Homo sapiens
  misc_RNA (1)...(19): siRNA sense strand
acgucaagcccauggccua

SEQ ID NO: 2440402 - RNA, 19 nt, Homo sapiens
  misc_RNA (1)...(19): siRNA sense strand
agacagacaacaugaacca

SEQ ID NO: 2440403 - RNA, 19 nt, Homo sapiens
  misc_RNA (1)...(19): siRNA sense strand
acucaaagagacagagaag

SEQ ID NO: 2440404 - RNA, 19 nt, Homo sapiens
  misc_RNA (1)...(19): siRNA sense strand
acaacaugaaccagaucua

SEQ ID NO: 2440405 - RNA, 19 nt, Homo sapiens
  misc_RNA (1)...(19): siRNA sense strand
uggacaagaaguacaucaa

SEQ ID NO: 2440406 - RNA, 19 nt, Homo sapiens
  misc_RNA (1)...(19): siRNA sense strand
ccuccagggcucugaccua

SEQ ID NO: 2440407 - RNA, 19 nt, Homo sapiens
  misc_RNA (1)...(19): siRNA sense strand
agauucugguacaggucaa

SEQ ID NO: 2440408 - RNA, 19 nt, Homo sapiens
  misc_RNA (1)...(19): siRNA sense strand
acggcaaagugcugaucau

SEQ ID NO: 2440409 - RNA, 19 nt, Homo sapiens
  misc_RNA (1)...(19): siRNA sense strand
ccacacucaaagagacaga

SEQ ID NO: 2440410 - RNA, 19 nt, Homo sapiens
  misc_RNA (1)...(19): siRNA sense strand
ucuacgguuucgaggguga

SEQ ID NO: 2440411 - RNA, 19 nt, Homo sapiens
  misc_RNA (1)...(19): siRNA sense strand
gagcuggacaagaaguaca

SEQ ID NO: 2440412 - RNA, 19 nt, Homo sapiens
  misc_RNA (1)...(19): siRNA sense strand
uguacgagcucuuuagcga

SEQ ID NO: 2440413 - RNA, 19 nt, Homo sapiens
  misc_RNA (1)...(19): siRNA sense strand
ggaagaacguggaggccau

SEQ ID NO: 2440414 - RNA, 19 nt, Homo sapiens
  misc_RNA (1)...(19): siRNA sense strand
gauacgacauugaggccaa

SEQ ID NO: 2440415 - RNA, 19 nt, Homo sapiens
  misc_RNA (1)...(19): siRNA sense strand
ugguggaugaggagcgaua

SEQ ID NO: 2440416 - RNA, 19 nt, Homo sapiens
  misc_RNA (1)...(19): siRNA sense strand
aggaagacacagagaagga

SEQ ID NO: 2440417 - RNA, 19 nt, Homo sapiens
  misc_RNA (1)...(19): siRNA sense strand
aggcugagaaggugcgcua

SEQ ID NO: 2440418 - RNA, 19 nt, Homo sapiens
  misc_RNA (1)...(19): siRNA sense strand
auggaaggccggaagaaga

SEQ ID NO: 2440419 - RNA, 19 nt, Homo sapiens
  misc_RNA (1)...(19): siRNA sense strand
accucaagucugugaagaa

SEQ ID NO: 2440420 - RNA, 19 nt, Homo sapiens
  misc_RNA (1)...(19): siRNA sense strand
acgccaagguggagguggu

SEQ ID NO: 2440421 - RNA, 19 nt, Homo sapiens
  misc_RNA (1)...(19): siRNA sense strand
agucugugaagaaggaaga

SEQ ID NO: 2440422 - RNA, 19 nt, Homo sapiens
  misc_RNA (1)...(19): siRNA sense strand
aguugauaguugagaggaa

SEQ ID NO: 2440423 - RNA, 19 nt, Homo sapiens
  misc_RNA (1)...(19): siRNA sense strand
gcaccaagccaguagggaa

SEQ ID NO: 2440424 - RNA, 19 nt, Homo sapiens
  misc_RNA (1)...(19): siRNA sense strand
acgaagaagaaguuugaaa

SEQ ID NO: 2440425 - RNA, 19 nt, Homo sapiens
  misc_RNA (1)...(19): siRNA sense strand
caccaagccaguagggaaa

SEQ ID NO: 2440426 - RNA, 19 nt, Homo sapiens
  misc_RNA (1)...(19): siRNA sense strand
ggaugauacaagauacaaa

SEQ ID NO: 2440427 - RNA, 19 nt, Homo sapiens
  misc_RNA (1)...(19): siRNA sense strand
ggauauaauuugauagcag

SEQ ID NO: 2440428 - RNA, 19 nt, Homo sapiens
  misc_RNA (1)...(19): siRNA sense strand
cgaagaagaaguuugaaaa

SEQ ID NO: 2440429 - RNA, 19 nt, Homo sapiens
  misc_RNA (1)...(19): siRNA sense strand
ggaaagacuggaaggagga

SEQ ID NO: 2440430 - RNA, 19 nt, Homo sapiens
  misc_RNA (1)...(19): siRNA sense strand
acugaauaucccauagaaa

SEQ ID NO: 2440431 - RNA, 19 nt, Homo sapiens
  misc_RNA (1)...(19): siRNA sense strand
gggaaagacuggaaggagg

SEQ ID NO: 2440432 - RNA, 19 nt, Homo sapiens
  misc_RNA (1)...(19): siRNA sense strand
uagggaaacuuguaggaca

SEQ ID NO: 2440433 - RNA, 19 nt, Homo sapiens
  misc_RNA (1)...(19): siRNA sense strand
gggcaggagaugaaggugu

SEQ ID NO: 2440434 - RNA, 19 nt, Homo sapiens
  misc_RNA (1)...(19): siRNA sense strand
uggacauuauuguggauau

SEQ ID NO: 2440435 - RNA, 19 nt, Homo sapiens
  misc_RNA (1)...(19): siRNA sense strand
uguuaaggcaaaugugauu

SEQ ID NO: 2440436 - RNA, 19 nt, Homo sapiens
  misc_RNA (1)...(19): siRNA sense strand
gcauuacaggaaagaagaa

SEQ ID NO: 2440437 - RNA, 19 nt, Homo sapiens
  misc_RNA (1)...(19): siRNA sense strand
aggguaaggaagaugauau

SEQ ID NO: 2440438 - RNA, 19 nt, Homo sapiens
  misc_RNA (1)...(19): siRNA sense strand
ggaucuaguguuauggaca

SEQ ID NO: 2440439 - RNA, 19 nt, Homo sapiens
  misc_RNA (1)...(19): siRNA sense strand
uugaaguggaacaggauuu

SEQ ID NO: 2440440 - RNA, 19 nt, Homo sapiens
  misc_RNA (1)...(19): siRNA sense strand
uccuaagauucgaagauau

SEQ ID NO: 2440441 - RNA, 19 nt, Homo sapiens
  misc_RNA (1)...(19): siRNA sense strand
ugucgaugaaaguggauuu

SEQ ID NO: 2440442 - RNA, 19 nt, Homo sapiens
  misc_RNA (1)...(19): siRNA sense strand
agaugaagguguugccgga

SEQ ID NO: 2440443 - RNA, 19 nt, Homo sapiens
  misc_RNA (1)...(19): siRNA sense strand
ucacuggaggagaugauaa

SEQ ID NO: 2440444 - RNA, 19 nt, Homo sapiens
  misc_RNA (1)...(19): siRNA sense strand
ucgccgagaucguaaccaa

SEQ ID NO: 2440445 - RNA, 19 nt, Homo sapiens
  misc_RNA (1)...(19): siRNA sense strand
augucaugcuuuacaacaa

SEQ ID NO: 2440446 - RNA, 19 nt, Homo sapiens
  misc_RNA (1)...(19): siRNA sense strand
gcaaguucacagagaagca

SEQ ID NO: 2440447 - RNA, 19 nt, Homo sapiens
  misc_RNA (1)...(19): siRNA sense strand
gagacaggaacauggcuau

SEQ ID NO: 2440448 - RNA, 19 nt, Homo sapiens
  misc_RNA (1)...(19): siRNA sense strand
agggaaacuuguaggacac

SEQ ID NO: 2440449 - RNA, 19 nt, Homo sapiens
  misc_RNA (1)...(19): siRNA sense strand
gaauccauaauuaggguau

SEQ ID NO: 2440450 - RNA, 19 nt, Homo sapiens
  misc_RNA (1)...(19): siRNA sense strand
ggguaaggaagaugauauc

SEQ ID NO: 2440451 - RNA, 19 nt, Homo sapiens
  misc_RNA (1)...(19): siRNA sense strand
ccuuugaaguggaacagga

SEQ ID NO: 2440452 - RNA, 19 nt, Homo sapiens
  misc_RNA (1)...(19): siRNA sense strand
agagacaggaacauggcua

SEQ ID NO: 2440453 - RNA, 19 nt, Homo sapiens
  misc_RNA (1)...(19): siRNA sense strand
agugaacugcauugauuua

SEQ ID NO: 2440454 - RNA, 19 nt, Homo sapiens
  misc_RNA (1)...(19): siRNA sense strand
gcuccaaguauaccagauu

SEQ ID NO: 2440455 - RNA, 19 nt, Homo sapiens
  misc_RNA (1)...(19): siRNA sense strand
ggaaggaggacgagcacug

SEQ ID NO: 2440456 - RNA, 19 nt, Homo sapiens
  misc_RNA (1)...(19): siRNA sense strand
uagauauauuucagcccua

SEQ ID NO: 2440457 - RNA, 19 nt, Homo sapiens
  misc_RNA (1)...(19): siRNA sense strand
aaaaguaacacgaagaaga

SEQ ID NO: 2440458 - RNA, 19 nt, Homo sapiens
  misc_RNA (1)...(19): siRNA sense strand
ccacaaauaaaucuggcuu

SEQ ID NO: 2440459 - RNA, 19 nt, Homo sapiens
  misc_RNA (1)...(19): siRNA sense strand
gaaagaagaagggagguca

SEQ ID NO: 2440460 - RNA, 19 nt, Homo sapiens
  misc_RNA (1)...(19): siRNA sense strand
aaagaagaagggaggucau

SEQ ID NO: 2440461 - RNA, 19 nt, Homo sapiens
  misc_RNA (1)...(19): siRNA sense strand
cgugcucauucuuuggaaa

SEQ ID NO: 2440462 - RNA, 19 nt, Homo sapiens
  misc_RNA (1)...(19): siRNA sense strand
ccuaagauucgaagauauc

SEQ ID NO: 2440463 - RNA, 19 nt, Homo sapiens
  misc_RNA (1)...(19): siRNA sense strand
ggaaagaagaagggagguc

SEQ ID NO: 2440464 - RNA, 19 nt, Homo sapiens
  misc_RNA (1)...(19): siRNA sense strand
gggaggaccaggagacaug

SEQ ID NO: 2440465 - RNA, 19 nt, Homo sapiens
  misc_RNA (1)...(19): siRNA sense strand
acuaggaugauacaagaua

SEQ ID NO: 2440466 - RNA, 19 nt, Homo sapiens
  misc_RNA (1)...(19): siRNA sense strand
auaauuugccugucagaga

SEQ ID NO: 2440467 - RNA, 19 nt, Homo sapiens
  misc_RNA (1)...(19): siRNA sense strand
agguguugccggaggggaa

SEQ ID NO: 2440468 - RNA, 19 nt, Homo sapiens
  misc_RNA (1)...(19): siRNA sense strand
uugaagagacucgaggaua

SEQ ID NO: 2440469 - RNA, 19 nt, Homo sapiens
  misc_RNA (1)...(19): siRNA sense strand
cugagguguuagaguggaa

SEQ ID NO: 2440470 - RNA, 19 nt, Homo sapiens
  misc_RNA (1)...(19): siRNA sense strand
guguuagaguggaauaaaa

SEQ ID NO: 2440471 - RNA, 19 nt, Homo sapiens
  misc_RNA (1)...(19): siRNA sense strand
caacuggacuggaggcucu

SEQ ID NO: 2440472 - RNA, 19 nt, Homo sapiens
  misc_RNA (1)...(19): siRNA sense strand
aggaagcgcaggagugcaa

SEQ ID NO: 2440473 - RNA, 19 nt, Homo sapiens
  misc_RNA (1)...(19): siRNA sense strand
gcgcaggagugcaaugcca

SEQ ID NO: 2440474 - RNA, 19 nt, Homo sapiens
  misc_RNA (1)...(19): siRNA sense strand
ccaccagaaacuagccuau

SEQ ID NO: 2440475 - RNA, 19 nt, Homo sapiens
  misc_RNA (1)...(19): siRNA sense strand
aggaagcgcaggagugcaa

SEQ ID NO: 2440476 - RNA, 19 nt, Homo sapiens
  misc_RNA (1)...(19): siRNA sense strand
gcgcaggagugcaaugcca

SEQ ID NO: 2440477 - RNA, 19 nt, Homo sapiens
  misc_RNA (1)...(19): siRNA sense strand
ccaccagaaacuagccuau

SEQ ID NO: 2440478 - RNA, 19 nt, Homo sapiens
  misc_RNA (1)...(19): siRNA sense strand
gggaggaagaggaggagga

SEQ ID NO: 2440479 - RNA, 19 nt, Homo sapiens
  misc_RNA (1)...(19): siRNA sense strand
gaucuaaacuuccuggaca

SEQ ID NO: 2440480 - RNA, 19 nt, Homo sapiens
  misc_RNA (1)...(19): siRNA sense strand
ccaagcagcuagagcacca

SEQ ID NO: 2440481 - RNA, 19 nt, Homo sapiens
  misc_RNA (1)...(19): siRNA sense strand
ccgccaacgcauugaggau

SEQ ID NO: 2440482 - RNA, 19 nt, Homo sapiens
  misc_RNA (1)...(19): siRNA sense strand
ggucagaagaagugcaccu

SEQ ID NO: 2440483 - RNA, 19 nt, Homo sapiens
  misc_RNA (1)...(19): siRNA sense strand
cggccuggcaagaaggaga

SEQ ID NO: 2440484 - RNA, 19 nt, Homo sapiens
  misc_RNA (1)...(19): siRNA sense strand
cuuucaugaacgagaguga

SEQ ID NO: 2440485 - RNA, 19 nt, Homo sapiens
  misc_RNA (1)...(19): siRNA sense strand
ggaaacauguccagagagg

SEQ ID NO: 2440486 - RNA, 19 nt, Homo sapiens
  misc_RNA (1)...(19): siRNA sense strand
gagagaacauucaaccuca

SEQ ID NO: 2440487 - RNA, 19 nt, Homo sapiens
  misc_RNA (1)...(19): siRNA sense strand
aagaggaggaggaagacga

SEQ ID NO: 2440488 - RNA, 19 nt, Homo sapiens
  misc_RNA (1)...(19): siRNA sense strand
cggcgaacgcugcgaaaca

SEQ ID NO: 2440489 - RNA, 19 nt, Homo sapiens
  misc_RNA (1)...(19): siRNA sense strand
gaaacaagccaucacgcaa

SEQ ID NO: 2440490 - RNA, 19 nt, Homo sapiens
  misc_RNA (1)...(19): siRNA sense strand
ccuccuggucuuacagaaa

SEQ ID NO: 2440491 - RNA, 19 nt, Homo sapiens
  misc_RNA (1)...(19): siRNA sense strand
ugacaagcuuggaggccga

SEQ ID NO: 2440492 - RNA, 19 nt, Homo sapiens
  misc_RNA (1)...(19): siRNA sense strand
caaggaaccucgaugggau

SEQ ID NO: 2440493 - RNA, 19 nt, Homo sapiens
  misc_RNA (1)...(19): siRNA sense strand
guacaugauuacaggcaag

SEQ ID NO: 2440494 - RNA, 19 nt, Homo sapiens
  misc_RNA (1)...(19): siRNA sense strand
cuguucuggcaguggauua

SEQ ID NO: 2440495 - RNA, 19 nt, Homo sapiens
  misc_RNA (1)...(19): siRNA sense strand
cuaagauccaagagagcca

SEQ ID NO: 2440496 - RNA, 19 nt, Homo sapiens
  misc_RNA (1)...(19): siRNA sense strand
auuaaugaggcaaagggaa

SEQ ID NO: 2440497 - RNA, 19 nt, Homo sapiens
  misc_RNA (1)...(19): siRNA sense strand
aguacaugauuacaggcaa

SEQ ID NO: 2440498 - RNA, 19 nt, Homo sapiens
  misc_RNA (1)...(19): siRNA sense strand
ccuucaaugccgucgucaa

SEQ ID NO: 2440499 - RNA, 19 nt, Homo sapiens
  misc_RNA (1)...(19): siRNA sense strand
ugcaacaacuggugccgua

SEQ ID NO: 2440500 - RNA, 19 nt, Homo sapiens
  misc_RNA (1)...(19): siRNA sense strand
auuccauuaaugaggcaaa

SEQ ID NO: 2440501 - RNA, 19 nt, Homo sapiens
  misc_RNA (1)...(19): siRNA sense strand
ugauuacaggcaaggaauu

SEQ ID NO: 2440502 - RNA, 19 nt, Homo sapiens
  misc_RNA (1)...(19): siRNA sense strand
uuaaugaggcaaagggaac

SEQ ID NO: 2440503 - RNA, 19 nt, Homo sapiens
  misc_RNA (1)...(19): siRNA sense strand
aggaagacgcagugguaua

SEQ ID NO: 2440504 - RNA, 19 nt, Homo sapiens
  misc_RNA (1)...(19): siRNA sense strand
gaauaaggacaguggguca

SEQ ID NO: 2440505 - RNA, 19 nt, Homo sapiens
  misc_RNA (1)...(19): siRNA sense strand
gcaagaagccagagagcag

SEQ ID NO: 2440506 - RNA, 19 nt, Homo sapiens
  misc_RNA (1)...(19): siRNA sense strand
aggacaagaucaaggggaa

SEQ ID NO: 2440507 - RNA, 19 nt, Homo sapiens
  misc_RNA (1)...(19): siRNA sense strand
augaugagucugugguuaa

SEQ ID NO: 2440508 - RNA, 19 nt, Homo sapiens
  misc_RNA (1)...(19): siRNA sense strand
ugguauaaguugaaaucca

SEQ ID NO: 2440509 - RNA, 19 nt, Homo sapiens
  misc_RNA (1)...(19): siRNA sense strand
cggugauccaggugggcaa

SEQ ID NO: 2440510 - RNA, 19 nt, Homo sapiens
  misc_RNA (1)...(19): siRNA sense strand
agaucaaggggaagaauaa

SEQ ID NO: 2440511 - RNA, 19 nt, Homo sapiens
  misc_RNA (1)...(19): siRNA sense strand
ucacagaaccagaagcuga

SEQ ID NO: 2440512 - RNA, 19 nt, Homo sapiens
  misc_RNA (1)...(19): siRNA sense strand
cgauaagcaagaaggaguu

SEQ ID NO: 2440513 - RNA, 19 nt, Homo sapiens
  misc_RNA (1)...(19): siRNA sense strand
aaggaaacgauaagcaaga

SEQ ID NO: 2440514 - RNA, 19 nt, Homo sapiens
  misc_RNA (1)...(19): siRNA sense strand
acgcagugguauaaguuga

SEQ ID NO: 2440515 - RNA, 19 nt, Homo sapiens
  misc_RNA (1)...(19): siRNA sense strand
ggagggagaaggaaggcau

SEQ ID NO: 2440516 - RNA, 19 nt, Homo sapiens
  misc_RNA (1)...(19): siRNA sense strand
acgauaagcaagaaggagu

SEQ ID NO: 2440517 - RNA, 19 nt, Homo sapiens
  misc_RNA (1)...(19): siRNA sense strand
aagcugagccagaguccaa

SEQ ID NO: 2440518 - RNA, 19 nt, Homo sapiens
  misc_RNA (1)...(19): siRNA sense strand
gagaaauugagguugacau

SEQ ID NO: 2440519 - RNA, 19 nt, Homo sapiens
  misc_RNA (1)...(19): siRNA sense strand
aagaagcuaaggagagcaa

SEQ ID NO: 2440520 - RNA, 19 nt, Homo sapiens
  misc_RNA (1)...(19): siRNA sense strand
gggaagaaggauguggcua

SEQ ID NO: 2440521 - RNA, 19 nt, Homo sapiens
  misc_RNA (1)...(19): siRNA sense strand
uggaagacuacauugacaa

SEQ ID NO: 2440522 - RNA, 19 nt, Homo sapiens
  misc_RNA (1)...(19): siRNA sense strand
aagucaaauuugcagaaga

SEQ ID NO: 2440523 - RNA, 19 nt, Homo sapiens
  misc_RNA (1)...(19): siRNA sense strand
agcugaaggacaagaucaa

SEQ ID NO: 2440524 - RNA, 19 nt, Homo sapiens
  misc_RNA (1)...(19): siRNA sense strand
agucaaauuugcagaagac

SEQ ID NO: 2440525 - RNA, 19 nt, Homo sapiens
  misc_RNA (1)...(19): siRNA sense strand
ucacaagagaacagcgagu

SEQ ID NO: 2440526 - RNA, 19 nt, Homo sapiens
  misc_RNA (1)...(19): siRNA sense strand
ugaagaugacaaugaggau

SEQ ID NO: 2440527 - RNA, 19 nt, Homo sapiens
  misc_RNA (1)...(19): siRNA sense strand
aaccagaagcugagccaga

SEQ ID NO: 2440528 - RNA, 19 nt, Homo sapiens
  misc_RNA (1)...(19): siRNA sense strand
uugucagggucauggaaga

SEQ ID NO: 2440529 - RNA, 19 nt, Homo sapiens
  misc_RNA (1)...(19): siRNA sense strand
ccuugaagucuaugaccuu

SEQ ID NO: 2440530 - RNA, 19 nt, Homo sapiens
  misc_RNA (1)...(19): siRNA sense strand
cuggaagacuacauugaca

SEQ ID NO: 2440531 - RNA, 19 nt, Homo sapiens
  misc_RNA (1)...(19): siRNA sense strand
aaaccaggaaagaaggaca

SEQ ID NO: 2440532 - RNA, 19 nt, Homo sapiens
  misc_RNA (1)...(19): siRNA sense strand
ccgcaaacucagaggccac

SEQ ID NO: 2440533 - RNA, 19 nt, Homo sapiens
  misc_RNA (1)...(19): siRNA sense strand
aaccaggaaagaaggacaa

SEQ ID NO: 2440534 - RNA, 19 nt, Homo sapiens
  misc_RNA (1)...(19): siRNA sense strand
ggaaagaaggacaaggagc

SEQ ID NO: 2440535 - RNA, 19 nt, Homo sapiens
  misc_RNA (1)...(19): siRNA sense strand
agguugacauccaguuuau

SEQ ID NO: 2440536 - RNA, 19 nt, Homo sapiens
  misc_RNA (1)...(19): siRNA sense strand
uuuggaaagcugaaggaca

SEQ ID NO: 2440537 - RNA, 19 nt, Homo sapiens
  misc_RNA (1)...(19): siRNA sense strand
gcuaacugcagcuugggaa

SEQ ID NO: 2440538 - RNA, 19 nt, Homo sapiens
  misc_RNA (1)...(19): siRNA sense strand
cagaaggaaacgauaagca

SEQ ID NO: 2440539 - RNA, 19 nt, Homo sapiens
  misc_RNA (1)...(19): siRNA sense strand
aggccaaggaugagcugaa

SEQ ID NO: 2440540 - RNA, 19 nt, Homo sapiens
  misc_RNA (1)...(19): siRNA sense strand
augagaucuugcaggcaua

SEQ ID NO: 2440541 - RNA, 19 nt, Homo sapiens
  misc_RNA (1)...(19): siRNA sense strand
gaugagaucuugcaggcau

SEQ ID NO: 2440542 - RNA, 19 nt, Homo sapiens
  misc_RNA (1)...(19): siRNA sense strand
aggagaucgaugagaacau

SEQ ID NO: 2440543 - RNA, 19 nt, Homo sapiens
  misc_RNA (1)...(19): siRNA sense strand
cuggagaagcugcuggaga

SEQ ID NO: 2440544 - RNA, 19 nt, Homo sapiens
  misc_RNA (1)...(19): siRNA sense strand
cugaagaggaacaggagcu

SEQ ID NO: 2440545 - RNA, 19 nt, Homo sapiens
  misc_RNA (1)...(19): siRNA sense strand
aaggaugagcugaacgaga

SEQ ID NO: 2440546 - RNA, 19 nt, Homo sapiens
  misc_RNA (1)...(19): siRNA sense strand
caacauugagaacuggcaa

SEQ ID NO: 2440547 - RNA, 19 nt, Homo sapiens
  misc_RNA (1)...(19): siRNA sense strand
ggagaagcugcuggagaau

SEQ ID NO: 2440548 - RNA, 19 nt, Homo sapiens
  misc_RNA (1)...(19): siRNA sense strand
gugcgagagcugcaggaga

SEQ ID NO: 2440549 - RNA, 19 nt, Homo sapiens
  misc_RNA (1)...(19): siRNA sense strand
agcaagaauggaagaucaa

SEQ ID NO: 2440550 - RNA, 19 nt, Homo sapiens
  misc_RNA (1)...(19): siRNA sense strand
aaauuuaaaggcaggguca

SEQ ID NO: 2440551 - RNA, 19 nt, Homo sapiens
  misc_RNA (1)...(19): siRNA sense strand
cgaccagaagauuguagaa

SEQ ID NO: 2440552 - RNA, 19 nt, Homo sapiens
  misc_RNA (1)...(19): siRNA sense strand
ccagaaaaucuaaguacuu

SEQ ID NO: 2440553 - RNA, 19 nt, Homo sapiens
  misc_RNA (1)...(19): siRNA sense strand
gcaccuacaucaugagggu

SEQ ID NO: 2440554 - RNA, 19 nt, Homo sapiens
  misc_RNA (1)...(19): siRNA sense strand
gggucagacuugauccuca

SEQ ID NO: 2440555 - RNA, 19 nt, Homo sapiens
  misc_RNA (1)...(19): siRNA sense strand
gcuccagaacagugugcuu

SEQ ID NO: 2440556 - RNA, 19 nt, Homo sapiens
  misc_RNA (1)...(19): siRNA sense strand
gauucagagauuagacaaa

SEQ ID NO: 2440557 - RNA, 19 nt, Homo sapiens
  misc_RNA (1)...(19): siRNA sense strand
cggcuaagagauggagaua

SEQ ID NO: 2440558 - RNA, 19 nt, Homo sapiens
  misc_RNA (1)...(19): siRNA sense strand
aaguaggcaacaagauaaa

SEQ ID NO: 2440559 - RNA, 19 nt, Homo sapiens
  misc_RNA (1)...(19): siRNA sense strand
ucaucuaagaaguaggcaa

SEQ ID NO: 2440560 - RNA, 19 nt, Homo sapiens
  misc_RNA (1)...(19): siRNA sense strand
cugaauuggugaaaggaac

SEQ ID NO: 2440561 - RNA, 19 nt, Homo sapiens
  misc_RNA (1)...(19): siRNA sense strand
ggguagagaccacgggauc

SEQ ID NO: 2440562 - RNA, 19 nt, Homo sapiens
  misc_RNA (1)...(19): siRNA sense strand
cggaaauucaggaaaccau

SEQ ID NO: 2440563 - RNA, 19 nt, Homo sapiens
  misc_RNA (1)...(19): siRNA sense strand
ccugaauuggugaaaggaa

SEQ ID NO: 2440564 - RNA, 19 nt, Homo sapiens
  misc_RNA (1)...(19): siRNA sense strand
guaugaaaacccuggagua

SEQ ID NO: 2440565 - RNA, 19 nt, Homo sapiens
  misc_RNA (1)...(19): siRNA sense strand
ugggugaagaugcuagaaa

SEQ ID NO: 2440566 - RNA, 19 nt, Homo sapiens
  misc_RNA (1)...(19): siRNA sense strand
gugaaauuuccgaaggcca

SEQ ID NO: 2440567 - RNA, 19 nt, Homo sapiens
  misc_RNA (1)...(19): siRNA sense strand
gguacaagagugggaccaa

SEQ ID NO: 2440568 - RNA, 19 nt, Homo sapiens
  misc_RNA (1)...(19): siRNA sense strand
augugacaguucuggcaaa

SEQ ID NO: 2440569 - RNA, 19 nt, Homo sapiens
  misc_RNA (1)...(19): siRNA sense strand
agaccugauuccugguaca

SEQ ID NO: 2440570 - RNA, 19 nt, Homo sapiens
  misc_RNA (1)...(19): siRNA sense strand
gcggcuaagagauggagau

SEQ ID NO: 2440571 - RNA, 19 nt, Homo sapiens
  misc_RNA (1)...(19): siRNA sense strand
cacucagagagcagauaaa

SEQ ID NO: 2440572 - RNA, 19 nt, Homo sapiens
  misc_RNA (1)...(19): siRNA sense strand
uugauaaggauauggaguu

SEQ ID NO: 2440573 - RNA, 19 nt, Homo sapiens
  misc_RNA (1)...(19): siRNA sense strand
cagcacguuugcagcggaa

SEQ ID NO: 2440574 - RNA, 19 nt, Homo sapiens
  misc_RNA (1)...(19): siRNA sense strand
aggauauggaguuaaguca

SEQ ID NO: 2440575 - RNA, 19 nt, Homo sapiens
  misc_RNA (1)...(19): siRNA sense strand
caucuaagaaguaggcaac

SEQ ID NO: 2440576 - RNA, 19 nt, Homo sapiens
  misc_RNA (1)...(19): siRNA sense strand
ugagaaaguuguacggcuc

SEQ ID NO: 2440577 - RNA, 19 nt, Homo sapiens
  misc_RNA (1)...(19): siRNA sense strand
gugacaauggugacagcau

SEQ ID NO: 2440578 - RNA, 19 nt, Homo sapiens
  misc_RNA (1)...(19): siRNA sense strand
ccacugaagacuacgacca

SEQ ID NO: 2440579 - RNA, 19 nt, Homo sapiens
  misc_RNA (1)...(19): siRNA sense strand
cugaagacuacgaccauga

SEQ ID NO: 2440580 - RNA, 19 nt, Homo sapiens
  misc_RNA (1)...(19): siRNA sense strand
ggcaaguauuucagcacca

SEQ ID NO: 2440581 - RNA, 19 nt, Homo sapiens
  misc_RNA (1)...(19): siRNA sense strand
ggaauuauccacuagagga

SEQ ID NO: 2440582 - RNA, 19 nt, Homo sapiens
  misc_RNA (1)...(19): siRNA sense strand
aaugagaagcagaggaaaa

SEQ ID NO: 2440583 - RNA, 19 nt, Homo sapiens
  misc_RNA (1)...(19): siRNA sense strand
cguccaaggaggagguguu

SEQ ID NO: 2440584 - RNA, 19 nt, Homo sapiens
  misc_RNA (1)...(19): siRNA sense strand
cuucaagauggguguguuu

SEQ ID NO: 2440585 - RNA, 19 nt, Homo sapiens
  misc_RNA (1)...(19): siRNA sense strand
cgggcgacaugaagaccaa

SEQ ID NO: 2440586 - RNA, 19 nt, Homo sapiens
  misc_RNA (1)...(19): siRNA sense strand
aagaagacgcuguccauuu

SEQ ID NO: 2440587 - RNA, 19 nt, Homo sapiens
  misc_RNA (1)...(19): siRNA sense strand
uuucagaggaagcugcaaa

SEQ ID NO: 2440588 - RNA, 19 nt, Homo sapiens
  misc_RNA (1)...(19): siRNA sense strand
gcaaaacaaaugagaagca

SEQ ID NO: 2440589 - RNA, 19 nt, Homo sapiens
  misc_RNA (1)...(19): siRNA sense strand
aggaggagguguuucgcuu

SEQ ID NO: 2440590 - RNA, 19 nt, Homo sapiens
  misc_RNA (1)...(19): siRNA sense strand
uuacauuccccuugugaaa

SEQ ID NO: 2440591 - RNA, 19 nt, Homo sapiens
  misc_RNA (1)...(19): siRNA sense strand
acagagaauaguugagaaa

SEQ ID NO: 2440592 - RNA, 19 nt, Homo sapiens
  misc_RNA (1)...(19): siRNA sense strand
agguaaauacacugaguaa

SEQ ID NO: 2440593 - RNA, 19 nt, Homo sapiens
  misc_RNA (1)...(19): siRNA sense strand
augacaaagugaagaagaa

SEQ ID NO: 2440594 - RNA, 19 nt, Homo sapiens
  misc_RNA (1)...(19): siRNA sense strand
cacaagaagcacagagaau

SEQ ID NO: 2440595 - RNA, 19 nt, Homo sapiens
  misc_RNA (1)...(19): siRNA sense strand
ugguguggauguagcgaaa

SEQ ID NO: 2440596 - RNA, 19 nt, Homo sapiens
  misc_RNA (1)...(19): siRNA sense strand
ccaaagaaucaaaggccuu

SEQ ID NO: 2440597 - RNA, 19 nt, Homo sapiens
  misc_RNA (1)...(19): siRNA sense strand
gggaggaggacuugagguu

SEQ ID NO: 2440598 - RNA, 19 nt, Homo sapiens
  misc_RNA (1)...(19): siRNA sense strand
gagaaaacuuccaaagaca

SEQ ID NO: 2440599 - RNA, 19 nt, Homo sapiens
  misc_RNA (1)...(19): siRNA sense strand
uguaaugaccaaagaauca

SEQ ID NO: 2440600 - RNA, 19 nt, Homo sapiens
  misc_RNA (1)...(19): siRNA sense strand
ggugugaagaggaaggauu

SEQ ID NO: 2440601 - RNA, 19 nt, Homo sapiens
  misc_RNA (1)...(19): siRNA sense strand
acaagggauugguggaaaa

SEQ ID NO: 2440602 - RNA, 19 nt, Homo sapiens
  misc_RNA (1)...(19): siRNA sense strand
caauagaauaccuagaaga

SEQ ID NO: 2440603 - RNA, 19 nt, Homo sapiens
  misc_RNA (1)...(19): siRNA sense strand
ugaaugacaaagugaagaa

SEQ ID NO: 2440604 - RNA, 19 nt, Homo sapiens
  misc_RNA (1)...(19): siRNA sense strand
gguaaauacacugaguaaa

SEQ ID NO: 2440605 - RNA, 19 nt, Homo sapiens
  misc_RNA (1)...(19): siRNA sense strand
ggacaauagaauaccuaga

SEQ ID NO: 2440606 - RNA, 19 nt, Homo sapiens
  misc_RNA (1)...(19): siRNA sense strand
aggucaucauugugguuaa

SEQ ID NO: 2440607 - RNA, 19 nt, Homo sapiens
  misc_RNA (1)...(19): siRNA sense strand
cccaagucuccguggauaa

SEQ ID NO: 2440608 - RNA, 19 nt, Homo sapiens
  misc_RNA (1)...(19): siRNA sense strand
gugugaagaggaaggauuu

SEQ ID NO: 2440609 - RNA, 19 nt, Homo sapiens
  misc_RNA (1)...(19): siRNA sense strand
uggcggaagaucugggcaa

SEQ ID NO: 2440610 - RNA, 19 nt, Homo sapiens
  misc_RNA (1)...(19): siRNA sense strand
aggagggugugaagaggaa

SEQ ID NO: 2440611 - RNA, 19 nt, Homo sapiens
  misc_RNA (1)...(19): siRNA sense strand
ugacaaagugaagaagaaa

SEQ ID NO: 2440612 - RNA, 19 nt, Homo sapiens
  misc_RNA (1)...(19): siRNA sense strand
gauuaucacgaccgagaaa

SEQ ID NO: 2440613 - RNA, 19 nt, Homo sapiens
  misc_RNA (1)...(19): siRNA sense strand
acacaaaggcugcccaaaa

SEQ ID NO: 2440614 - RNA, 19 nt, Homo sapiens
  misc_RNA (1)...(19): siRNA sense strand
ccaaagagagacaagggau

SEQ ID NO: 2440615 - RNA, 19 nt, Homo sapiens
  misc_RNA (1)...(19): siRNA sense strand
augaaugaaaucugggcua

SEQ ID NO: 2440616 - RNA, 19 nt, Homo sapiens
  misc_RNA (1)...(19): siRNA sense strand
cugagaaggugauuggcau

SEQ ID NO: 2440617 - RNA, 19 nt, Homo sapiens
  misc_RNA (1)...(19): siRNA sense strand
ucaagaaguaacacagcua

SEQ ID NO: 2440618 - RNA, 19 nt, Homo sapiens
  misc_RNA (1)...(19): siRNA sense strand
aggaaggaguugacccgaa

SEQ ID NO: 2440619 - RNA, 19 nt, Homo sapiens
  misc_RNA (1)...(19): siRNA sense strand
gggcaaagaaaaugggacu

SEQ ID NO: 2440620 - RNA, 19 nt, Homo sapiens
  misc_RNA (1)...(19): siRNA sense strand
acagagugcuaaaggaagu

SEQ ID NO: 2440621 - RNA, 19 nt, Homo sapiens
  misc_RNA (1)...(19): siRNA sense strand
guguggauguagcgaaaca

SEQ ID NO: 2440622 - RNA, 19 nt, Homo sapiens
  misc_RNA (1)...(19): siRNA sense strand
ggauugaaugacaaaguga

SEQ ID NO: 2440623 - RNA, 19 nt, Homo sapiens
  misc_RNA (1)...(19): siRNA sense strand
gagauuaucacgaccgaga

SEQ ID NO: 2440624 - RNA, 19 nt, Homo sapiens
  misc_RNA (1)...(19): siRNA sense strand
aggaacggacaauagaaua

SEQ ID NO: 2440625 - RNA, 19 nt, Homo sapiens
  misc_RNA (1)...(19): siRNA sense strand
acccagaacugcugacaca

SEQ ID NO: 2440626 - RNA, 19 nt, Homo sapiens
  misc_RNA (1)...(19): siRNA sense strand
ccaauacagaauagcaaca

SEQ ID NO: 2440627 - RNA, 19 nt, Homo sapiens
  misc_RNA (1)...(19): siRNA sense strand
ggugauugaagcuguguuu

SEQ ID NO: 2440628 - RNA, 19 nt, Homo sapiens
  misc_RNA (1)...(19): siRNA sense strand
ggauaguauuuuagcgagu

SEQ ID NO: 2440629 - RNA, 19 nt, Homo sapiens
  misc_RNA (1)...(19): siRNA sense strand
ucucccaauucaaagguaa

SEQ ID NO: 2440630 - RNA, 19 nt, Homo sapiens
  misc_RNA (1)...(19): siRNA sense strand
gcagacagggcaaagaaaa

SEQ ID NO: 2440631 - RNA, 19 nt, Homo sapiens
  misc_RNA (1)...(19): siRNA sense strand
gauaaggggcuaaagacua

SEQ ID NO: 2440632 - RNA, 19 nt, Homo sapiens
  misc_RNA (1)...(19): siRNA sense strand
agaaauaugaagcugccua

SEQ ID NO: 2440633 - RNA, 19 nt, Homo sapiens
  misc_RNA (1)...(19): siRNA sense strand
uugcaagacccuucaagaa

SEQ ID NO: 2440634 - RNA, 19 nt, Homo sapiens
  misc_RNA (1)...(19): siRNA sense strand
gcugacugguagaagcauu

SEQ ID NO: 2440635 - RNA, 19 nt, Homo sapiens
  misc_RNA (1)...(19): siRNA sense strand
ugucugaagucauccgaau

SEQ ID NO: 2440636 - RNA, 19 nt, Homo sapiens
  misc_RNA (1)...(19): siRNA sense strand
cagacagggcaaagaaaau

SEQ ID NO: 2440637 - RNA, 19 nt, Homo sapiens
  misc_RNA (1)...(19): siRNA sense strand
gcacacaaaggcugcccaa

SEQ ID NO: 2440638 - RNA, 19 nt, Homo sapiens
  misc_RNA (1)...(19): siRNA sense strand
ggaacggacaauagaauac

SEQ ID NO: 2440639 - RNA, 19 nt, Homo sapiens
  misc_RNA (1)...(19): siRNA sense strand
aaagacuggaauugagcaa

SEQ ID NO: 2440640 - RNA, 19 nt, Homo sapiens
  misc_RNA (1)...(19): siRNA sense strand
gauugaaugacaaagugaa

SEQ ID NO: 2440641 - RNA, 19 nt, Homo sapiens
  misc_RNA (1)...(19): siRNA sense strand
gagacaagggauuggugga

SEQ ID NO: 2440642 - RNA, 19 nt, Homo sapiens
  misc_RNA (1)...(19): siRNA sense strand
agacaagggauugguggaa

SEQ ID NO: 2440643 - RNA, 19 nt, Homo sapiens
  misc_RNA (1)...(19): siRNA sense strand
auucugacauggauaguau

SEQ ID NO: 2440644 - RNA, 19 nt, Homo sapiens
  misc_RNA (1)...(19): siRNA sense strand
ggacuagcugauaagaaga

SEQ ID NO: 2440645 - RNA, 19 nt, Homo sapiens
  misc_RNA (1)...(19): siRNA sense strand
ggcggaagaucugggcaaa

SEQ ID NO: 2440646 - RNA, 19 nt, Homo sapiens
  misc_RNA (1)...(19): siRNA sense strand
ccacaccugcagagggaga

SEQ ID NO: 2440647 - RNA, 19 nt, Homo sapiens
  misc_RNA (1)...(19): siRNA sense strand
uacacugaguaaagagcua

SEQ ID NO: 2440648 - RNA, 19 nt, Homo sapiens
  misc_RNA (1)...(19): siRNA sense strand
gugcagacagggcaaagaa

SEQ ID NO: 2440649 - RNA, 19 nt, Homo sapiens
  misc_RNA (1)...(19): siRNA sense strand
uggaauugagcaagggagu

SEQ ID NO: 2440650 - RNA, 19 nt, Homo sapiens
  misc_RNA (1)...(19): siRNA sense strand
guccugugcaagaagaaua

SEQ ID NO: 2440651 - RNA, 19 nt, Homo sapiens
  misc_RNA (1)...(19): siRNA sense strand
ugauugaagcuguguuuga

SEQ ID NO: 2440652 - RNA, 19 nt, Homo sapiens
  misc_RNA (1)...(19): siRNA sense strand
cagcaaaagaccugagaag

SEQ ID NO: 2440653 - RNA, 19 nt, Homo sapiens
  misc_RNA (1)...(19): siRNA sense strand
gcuagaccgaggacagcaa

SEQ ID NO: 2440654 - RNA, 19 nt, Homo sapiens
  misc_RNA (1)...(19): siRNA sense strand
cuuccuaggucguaaaucu

SEQ ID NO: 2440655 - RNA, 19 nt, Homo sapiens
  misc_RNA (1)...(19): siRNA sense strand
aguuugaaauccaggguau

SEQ ID NO: 2440656 - RNA, 19 nt, Homo sapiens
  misc_RNA (1)...(19): siRNA sense strand
ucaacuaucugcugggcaa

SEQ ID NO: 2440657 - RNA, 19 nt, Homo sapiens
  misc_RNA (1)...(19): siRNA sense strand
acaaaggagucuaacguga

SEQ ID NO: 2440658 - RNA, 19 nt, Homo sapiens
  misc_RNA (1)...(19): siRNA sense strand
cagcagaaaaggagaauga

SEQ ID NO: 2440659 - RNA, 19 nt, Homo sapiens
  misc_RNA (1)...(19): siRNA sense strand
acgcuggaguaaaggagaa

SEQ ID NO: 2440660 - RNA, 19 nt, Homo sapiens
  misc_RNA (1)...(19): siRNA sense strand
aggagaaguaccugaguga

SEQ ID NO: 2440661 - RNA, 19 nt, Homo sapiens
  misc_RNA (1)...(19): siRNA sense strand
cugacugauugcauggaaa

SEQ ID NO: 2440662 - RNA, 19 nt, Homo sapiens
  misc_RNA (1)...(19): siRNA sense strand
agaaagucucucaggaaaa

SEQ ID NO: 2440663 - RNA, 19 nt, Homo sapiens
  misc_RNA (1)...(19): siRNA sense strand
cuggaguaaaggagaagua

SEQ ID NO: 2440664 - RNA, 19 nt, Homo sapiens
  misc_RNA (1)...(19): siRNA sense strand
cauuacuggccaagaggaa

SEQ ID NO: 2440665 - RNA, 19 nt, Homo sapiens
  misc_RNA (1)...(19): siRNA sense strand
ucuggaaagauaugguaua

SEQ ID NO: 2440666 - RNA, 19 nt, Homo sapiens
  misc_RNA (1)...(19): siRNA sense strand
agaacaaagcauugccaga

SEQ ID NO: 2440667 - RNA, 19 nt, Homo sapiens
  misc_RNA (1)...(19): siRNA sense strand
agccuugggaggagauaaa

SEQ ID NO: 2440668 - RNA, 19 nt, Homo sapiens
  misc_RNA (1)...(19): siRNA sense strand
gaguaaaggagaaguaccu

SEQ ID NO: 2440669 - RNA, 19 nt, Homo sapiens
  misc_RNA (1)...(19): siRNA sense strand
agaaacuggccaaggacau

SEQ ID NO: 2440670 - RNA, 19 nt, Homo sapiens
  misc_RNA (1)...(19): siRNA sense strand
caaaggagucuaacgugaa

SEQ ID NO: 2440671 - RNA, 19 nt, Homo sapiens
  misc_RNA (1)...(19): siRNA sense strand
cuauaaguggccagcagaa

SEQ ID NO: 2440672 - RNA, 19 nt, Homo sapiens
  misc_RNA (1)...(19): siRNA sense strand
gcagaaaaggagaaugaca

SEQ ID NO: 2440673 - RNA, 19 nt, Homo sapiens
  misc_RNA (1)...(19): siRNA sense strand
cagaaaacaaggugguuca

SEQ ID NO: 2440674 - RNA, 19 nt, Homo sapiens
  misc_RNA (1)...(19): siRNA sense strand
agaagaaugcaggguuaaa

SEQ ID NO: 2440675 - RNA, 19 nt, Homo sapiens
  misc_RNA (1)...(19): siRNA sense strand
ggguuaaagguccuggaau

SEQ ID NO: 2440676 - RNA, 19 nt, Homo sapiens
  misc_RNA (1)...(19): siRNA sense strand
ggugcaucaaguagaagaa

SEQ ID NO: 2440677 - RNA, 19 nt, Homo sapiens
  misc_RNA (1)...(19): siRNA sense strand
cauggaaagagcuagggaa

SEQ ID NO: 2440678 - RNA, 19 nt, Homo sapiens
  misc_RNA (1)...(19): siRNA sense strand
guaaugaaauucucaggga

SEQ ID NO: 2440679 - RNA, 19 nt, Homo sapiens
  misc_RNA (1)...(19): siRNA sense strand
agguagugaacguaaguga

SEQ ID NO: 2440680 - RNA, 19 nt, Homo sapiens
  misc_RNA (1)...(19): siRNA sense strand
aagaagguagugaacguaa

SEQ ID NO: 2440681 - RNA, 19 nt, Homo sapiens
  misc_RNA (1)...(19): siRNA sense strand
caggaucauuacuggccaa

SEQ ID NO: 2440682 - RNA, 19 nt, Homo sapiens
  misc_RNA (1)...(19): siRNA sense strand
gguucagcauagucccaua

SEQ ID NO: 2440683 - RNA, 19 nt, Homo sapiens
  misc_RNA (1)...(19): siRNA sense strand
ggguauuggaaacuaucaa

SEQ ID NO: 2440684 - RNA, 19 nt, Homo sapiens
  misc_RNA (1)...(19): siRNA sense strand
ccggcuggacuuugggcua

SEQ ID NO: 2440685 - RNA, 19 nt, Homo sapiens
  misc_RNA (1)...(19): siRNA sense strand
ccaagaauauccuagccau

SEQ ID NO: 2440686 - RNA, 19 nt, Homo sapiens
  misc_RNA (1)...(19): siRNA sense strand
gugacugagaugaugaaaa

SEQ ID NO: 2440687 - RNA, 19 nt, Homo sapiens
  misc_RNA (1)...(19): siRNA sense strand
gcucaggauggaaagugaa

SEQ ID NO: 2440688 - RNA, 19 nt, Homo sapiens
  misc_RNA (1)...(19): siRNA sense strand
acuacaaugucuacacaca

SEQ ID NO: 2440689 - RNA, 19 nt, Homo sapiens
  misc_RNA (1)...(19): siRNA sense strand
cauucagguugcaaguaau

SEQ ID NO: 2440690 - RNA, 19 nt, Homo sapiens
  misc_RNA (1)...(19): siRNA sense strand
ccaagagauuugagaugac

SEQ ID NO: 2440691 - RNA, 19 nt, Homo sapiens
  misc_RNA (1)...(19): siRNA sense strand
aaacguuaaguaugggauu

SEQ ID NO: 2440692 - RNA, 19 nt, Homo sapiens
  misc_RNA (1)...(19): siRNA sense strand
guaaaggagaaguaccuga

SEQ ID NO: 2440693 - RNA, 19 nt, Homo sapiens
  misc_RNA (1)...(19): siRNA sense strand
uagaagaaugcaggguuaa

SEQ ID NO: 2440694 - RNA, 19 nt, Homo sapiens
  misc_RNA (1)...(19): siRNA sense strand
aagauacaaaggagucuaa

SEQ ID NO: 2440695 - RNA, 19 nt, Homo sapiens
  misc_RNA (1)...(19): siRNA sense strand
cgguugcucaggauggaaa

SEQ ID NO: 2440696 - RNA, 19 nt, Homo sapiens
  misc_RNA (1)...(19): siRNA sense strand
ugauagaugugaagcccaa

SEQ ID NO: 2440697 - RNA, 19 nt, Homo sapiens
  misc_RNA (1)...(19): siRNA sense strand
gcaaggaggaacagagcca

SEQ ID NO: 2440698 - RNA, 19 nt, Homo sapiens
  misc_RNA (1)...(19): siRNA sense strand
gcccagaacagcaaggcua

SEQ ID NO: 2440699 - RNA, 19 nt, Homo sapiens
  misc_RNA (1)...(19): siRNA sense strand
cgagagagacgaagggaag

SEQ ID NO: 2440700 - RNA, 19 nt, Homo sapiens
  misc_RNA (1)...(19): siRNA sense strand
cgccaaaguugcugccaga

SEQ ID NO: 2440701 - RNA, 19 nt, Homo sapiens
  misc_RNA (1)...(19): siRNA sense strand
cagaaauggcaaggaggaa

SEQ ID NO: 2440702 - RNA, 19 nt, Homo sapiens
  misc_RNA (1)...(19): siRNA sense strand
cuauaaaagcagaugauga

SEQ ID NO: 2440703 - RNA, 19 nt, Homo sapiens
  misc_RNA (1)...(19): siRNA sense strand
acgagagagacgaagggaa

SEQ ID NO: 2440704 - RNA, 19 nt, Homo sapiens
  misc_RNA (1)...(19): siRNA sense strand
cggaggaacaacugcgaca

SEQ ID NO: 2440705 - RNA, 19 nt, Homo sapiens
  misc_RNA (1)...(19): siRNA sense strand
ggccacaagcccagcacaa

SEQ ID NO: 2440706 - RNA, 19 nt, Homo sapiens
  misc_RNA (1)...(19): siRNA sense strand
cugaugaaacugaagucua

SEQ ID NO: 2440707 - RNA, 19 nt, Homo sapiens
  misc_RNA (1)...(19): siRNA sense strand
caaaggagauaguucgcuu

SEQ ID NO: 2440708 - RNA, 19 nt, Homo sapiens
  misc_RNA (1)...(19): siRNA sense strand
cuaaagagaacauggugga

SEQ ID NO: 2440709 - RNA, 19 nt, Homo sapiens
  misc_RNA (1)...(19): siRNA sense strand
ccucaggccacaaaagaaa

SEQ ID NO: 2440710 - RNA, 19 nt, Homo sapiens
  misc_RNA (1)...(19): siRNA sense strand
gcaccucaacugaagggaa

SEQ ID NO: 2440711 - RNA, 19 nt, Homo sapiens
  misc_RNA (1)...(19): siRNA sense strand
ugcaagaaguuccuggcaa

SEQ ID NO: 2440712 - RNA, 19 nt, Homo sapiens
  misc_RNA (1)...(19): siRNA sense strand
agagagacgaagggaagaa

SEQ ID NO: 2440713 - RNA, 19 nt, Homo sapiens
  misc_RNA (1)...(19): siRNA sense strand
acagaaauggcaaggagga

SEQ ID NO: 2440714 - RNA, 19 nt, Homo sapiens
  misc_RNA (1)...(19): siRNA sense strand
gacugauauucuuguggaa

SEQ ID NO: 2440715 - RNA, 19 nt, Homo sapiens
  misc_RNA (1)...(19): siRNA sense strand
cgacaacagcucacggagu

SEQ ID NO: 2440716 - RNA, 19 nt, Homo sapiens
  misc_RNA (1)...(19): siRNA sense strand
cacccaggaacuagacuaa

SEQ ID NO: 2440717 - RNA, 19 nt, Homo sapiens
  misc_RNA (1)...(19): siRNA sense strand
ccaacaaccugcuccgcuu

SEQ ID NO: 2440718 - RNA, 19 nt, Homo sapiens
  misc_RNA (1)...(19): siRNA sense strand
uggagauuaaagaaggcaa

SEQ ID NO: 2440719 - RNA, 19 nt, Homo sapiens
  misc_RNA (1)...(19): siRNA sense strand
agaaaauggcuguaaaguu

SEQ ID NO: 2440720 - RNA, 19 nt, Homo sapiens
  misc_RNA (1)...(19): siRNA sense strand
ggaugagaucacugggucu

SEQ ID NO: 2440721 - RNA, 19 nt, Homo sapiens
  misc_RNA (1)...(19): siRNA sense strand
auugaguguaucagaacua

SEQ ID NO: 2440722 - RNA, 19 nt, Homo sapiens
  misc_RNA (1)...(19): siRNA sense strand
cugaaucuaaagagaacau

SEQ ID NO: 2440723 - RNA, 19 nt, Homo sapiens
  misc_RNA (1)...(19): siRNA sense strand
agacgagagaugcaggaaa

SEQ ID NO: 2440724 - RNA, 19 nt, Homo sapiens
  misc_RNA (1)...(19): siRNA sense strand
cuuacaaaugggaggaaaa

SEQ ID NO: 2440725 - RNA, 19 nt, Homo sapiens
  misc_RNA (1)...(19): siRNA sense strand
acuacagaaacauggaaua

SEQ ID NO: 2440726 - RNA, 19 nt, Homo sapiens
  misc_RNA (1)...(19): siRNA sense strand
aggaaaaguucuugugcau

SEQ ID NO: 2440727 - RNA, 19 nt, Homo sapiens
  misc_RNA (1)...(19): siRNA sense strand
cacaugaagaagaggauga

SEQ ID NO: 2440728 - RNA, 19 nt, Homo sapiens
  misc_RNA (1)...(19): siRNA sense strand
ccuggauauugcagauaau

SEQ ID NO: 2440729 - RNA, 19 nt, Homo sapiens
  misc_RNA (1)...(19): siRNA sense strand
aggaauaugaagccaucua

SEQ ID NO: 2440730 - RNA, 19 nt, Homo sapiens
  misc_RNA (1)...(19): siRNA sense strand
cgacaaaauauugaagcaa

SEQ ID NO: 2440731 - RNA, 19 nt, Homo sapiens
  misc_RNA (1)...(19): siRNA sense strand
gaacacaugaagaagagga

SEQ ID NO: 2440732 - RNA, 19 nt, Homo sapiens
  misc_RNA (1)...(19): siRNA sense strand
aggaagacgccgaggagug

SEQ ID NO: 2440733 - RNA, 19 nt, Homo sapiens
  misc_RNA (1)...(19): siRNA sense strand
aagcaagcuaccuguacua

SEQ ID NO: 2440734 - RNA, 19 nt, Homo sapiens
  misc_RNA (1)...(19): siRNA sense strand
ugcuuauguucaagaaaga

SEQ ID NO: 2440735 - RNA, 19 nt, Homo sapiens
  misc_RNA (1)...(19): siRNA sense strand
gggagaaggaagagguguu

SEQ ID NO: 2440736 - RNA, 19 nt, Homo sapiens
  misc_RNA (1)...(19): siRNA sense strand
aaacggaagcgcagggaga

SEQ ID NO: 2440737 - RNA, 19 nt, Homo sapiens
  misc_RNA (1)...(19): siRNA sense strand
acagaaaugaagauggaga

SEQ ID NO: 2440738 - RNA, 19 nt, Homo sapiens
  misc_RNA (1)...(19): siRNA sense strand
uggaaacagauucaagaaa

SEQ ID NO: 2440739 - RNA, 19 nt, Homo sapiens
  misc_RNA (1)...(19): siRNA sense strand
acaaaaguguggagagguu

SEQ ID NO: 2440740 - RNA, 19 nt, Homo sapiens
  misc_RNA (1)...(19): siRNA sense strand
accaaggagcagauggaua

SEQ ID NO: 2440741 - RNA, 19 nt, Homo sapiens
  misc_RNA (1)...(19): siRNA sense strand
uggauuuggauguggauuu

SEQ ID NO: 2440742 - RNA, 19 nt, Homo sapiens
  misc_RNA (1)...(19): siRNA sense strand
ggauaugguacaaaacuaa

SEQ ID NO: 2440743 - RNA, 19 nt, Homo sapiens
  misc_RNA (1)...(19): siRNA sense strand
uucaaaugcuacuggagaa

SEQ ID NO: 2440744 - RNA, 19 nt, Homo sapiens
  misc_RNA (1)...(19): siRNA sense strand
cuucugauaaagaugguaa

SEQ ID NO: 2440745 - RNA, 19 nt, Homo sapiens
  misc_RNA (1)...(19): siRNA sense strand
aacuaaaccugaagggcga

SEQ ID NO: 2440746 - RNA, 19 nt, Homo sapiens
  misc_RNA (1)...(19): siRNA sense strand
gaaucaugggagugaggau

SEQ ID NO: 2440747 - RNA, 19 nt, Homo sapiens
  misc_RNA (1)...(19): siRNA sense strand
gcaaaucguuggagggagc

SEQ ID NO: 2440748 - RNA, 19 nt, Homo sapiens
  misc_RNA (1)...(19): siRNA sense strand
ugauuuggcaacagagaga

SEQ ID NO: 2440749 - RNA, 19 nt, Homo sapiens
  misc_RNA (1)...(19): siRNA sense strand
aaucuguaguaaaggugaa

SEQ ID NO: 2440750 - RNA, 19 nt, Homo sapiens
  misc_RNA (1)...(19): siRNA sense strand
ugcauuauuuaaagggcua

SEQ ID NO: 2440751 - RNA, 19 nt, Homo sapiens
  misc_RNA (1)...(19): siRNA sense strand
aagaaacagaauagcucua

SEQ ID NO: 2440752 - RNA, 19 nt, Homo sapiens
  misc_RNA (1)...(19): siRNA sense strand
uguuaaaagucgaggaggu

SEQ ID NO: 2440753 - RNA, 19 nt, Homo sapiens
  misc_RNA (1)...(19): siRNA sense strand
aaggaagagguguuugaaa

SEQ ID NO: 2440754 - RNA, 19 nt, Homo sapiens
  misc_RNA (1)...(19): siRNA sense strand
ucucaucugaaauggaaua

SEQ ID NO: 2440755 - RNA, 19 nt, Homo sapiens
  misc_RNA (1)...(19): siRNA sense strand
ggauguugcugcugugcca

SEQ ID NO: 2440756 - RNA, 19 nt, Homo sapiens
  misc_RNA (1)...(19): siRNA sense strand
ucagauuguacgugaacuu

SEQ ID NO: 2440757 - RNA, 19 nt, Homo sapiens
  misc_RNA (1)...(19): siRNA sense strand
cagacccaguaaagacaaa

SEQ ID NO: 2440758 - RNA, 19 nt, Homo sapiens
  misc_RNA (1)...(19): siRNA sense strand
agaacauuccagaagaaaa

SEQ ID NO: 2440759 - RNA, 19 nt, Homo sapiens
  misc_RNA (1)...(19): siRNA sense strand
acauacuugugaagcacua

SEQ ID NO: 2440760 - RNA, 19 nt, Homo sapiens
  misc_RNA (1)...(19): siRNA sense strand
acgaaauggauuggaguga

SEQ ID NO: 2440761 - RNA, 19 nt, Homo sapiens
  misc_RNA (1)...(19): siRNA sense strand
aggauaugguacaaaacua

SEQ ID NO: 2440762 - RNA, 19 nt, Homo sapiens
  misc_RNA (1)...(19): siRNA sense strand
cuucaaaugcuacuggaga

SEQ ID NO: 2440763 - RNA, 19 nt, Homo sapiens
  misc_RNA (1)...(19): siRNA sense strand
aaaugcuacuggagaacau

SEQ ID NO: 2440764 - RNA, 19 nt, Homo sapiens
  misc_RNA (1)...(19): siRNA sense strand
ucacaauugcagugggaug

SEQ ID NO: 2440765 - RNA, 19 nt, Homo sapiens
  misc_RNA (1)...(19): siRNA sense strand
auggagacauggucaucaa

SEQ ID NO: 2440766 - RNA, 19 nt, Homo sapiens
  misc_RNA (1)...(19): siRNA sense strand
ggacauaccaccuccagga

SEQ ID NO: 2440767 - RNA, 19 nt, Homo sapiens
  misc_RNA (1)...(19): siRNA sense strand
acaagugacucgggagcau

SEQ ID NO: 2440768 - RNA, 19 nt, Homo sapiens
  misc_RNA (1)...(19): siRNA sense strand
agcacuauguacuggauuu

SEQ ID NO: 2440769 - RNA, 19 nt, Homo sapiens
  misc_RNA (1)...(19): siRNA sense strand
ccagaaagcccuaagccaa

SEQ ID NO: 2440770 - RNA, 19 nt, Homo sapiens
  misc_RNA (1)...(19): siRNA sense strand
aggaggugguggagggcau

SEQ ID NO: 2440771 - RNA, 19 nt, Homo sapiens
  misc_RNA (1)...(19): siRNA sense strand
ucaaagugguucauggaga

SEQ ID NO: 2440772 - RNA, 19 nt, Homo sapiens
  misc_RNA (1)...(19): siRNA sense strand
agggcgaaguggagauuca

SEQ ID NO: 2440773 - RNA, 19 nt, Homo sapiens
  misc_RNA (1)...(19): siRNA sense strand
ccuacgaccuggugcggau

SEQ ID NO: 2440774 - RNA, 19 nt, Homo sapiens
  misc_RNA (1)...(19): siRNA sense strand
ccgcagauguucauggacu

SEQ ID NO: 2440775 - RNA, 19 nt, Homo sapiens
  misc_RNA (1)...(19): siRNA sense strand
agaaaaggggccugaauau

SEQ ID NO: 2440776 - RNA, 19 nt, Homo sapiens
  misc_RNA (1)...(19): siRNA sense strand
ccagaugacaggaggccga

SEQ ID NO: 2440777 - RNA, 19 nt, Homo sapiens
  misc_RNA (1)...(19): siRNA sense strand
caauggaggcugaagagga

SEQ ID NO: 2440778 - RNA, 19 nt, Homo sapiens
  misc_RNA (1)...(19): siRNA sense strand
guggagauucagcgggaca

SEQ ID NO: 2440779 - RNA, 19 nt, Homo sapiens
  misc_RNA (1)...(19): siRNA sense strand
caguauagcuccaagggga

SEQ ID NO: 2440780 - RNA, 19 nt, Homo sapiens
  misc_RNA (1)...(19): siRNA sense strand
cagccaaggccaaggacgu

SEQ ID NO: 2440781 - RNA, 19 nt, Homo sapiens
  misc_RNA (1)...(19): siRNA sense strand
ucaacaguaagguggagaa

SEQ ID NO: 2440782 - RNA, 19 nt, Homo sapiens
  misc_RNA (1)...(19): siRNA sense strand
ugaauaucauugagcagca

SEQ ID NO: 2440783 - RNA, 19 nt, Homo sapiens
  misc_RNA (1)...(19): siRNA sense strand
aggaagaggaagaggagga

SEQ ID NO: 2440784 - RNA, 19 nt, Homo sapiens
  misc_RNA (1)...(19): siRNA sense strand
gcucaugggcuucgagaga

SEQ ID NO: 2440785 - RNA, 19 nt, Homo sapiens
  misc_RNA (1)...(19): siRNA sense strand
gggucaaaguggauacuga

SEQ ID NO: 2440786 - RNA, 19 nt, Homo sapiens
  misc_RNA (1)...(19): siRNA sense strand
aggaagaggaggaaggcga

SEQ ID NO: 2440787 - RNA, 19 nt, Homo sapiens
  misc_RNA (1)...(19): siRNA sense strand
gcaugaaccucaaacguca

SEQ ID NO: 2440788 - RNA, 19 nt, Homo sapiens
  misc_RNA (1)...(19): siRNA sense strand
gaucagaaccacugccaga

SEQ ID NO: 2440789 - RNA, 19 nt, Homo sapiens
  misc_RNA (1)...(19): siRNA sense strand
uugaggaggaagaggaaga

SEQ ID NO: 2440790 - RNA, 19 nt, Homo sapiens
  misc_RNA (1)...(19): siRNA sense strand
aggaggaaggcgacggcaa

SEQ ID NO: 2440791 - RNA, 19 nt, Homo sapiens
  misc_RNA (1)...(19): siRNA sense strand
agagagacucggaaggaga

SEQ ID NO: 2440792 - RNA, 19 nt, Homo sapiens
  misc_RNA (1)...(19): siRNA sense strand
ggucaaaguggauacugaa

SEQ ID NO: 2440793 - RNA, 19 nt, Homo sapiens
  misc_RNA (1)...(19): siRNA sense strand
uggccaaccucaagcguca

SEQ ID NO: 2440794 - RNA, 19 nt, Homo sapiens
  misc_RNA (1)...(19): siRNA sense strand
ucaugggcuucgagagaga

SEQ ID NO: 2440795 - RNA, 19 nt, Homo sapiens
  misc_RNA (1)...(19): siRNA sense strand
guuugaggaggaagaggaa

SEQ ID NO: 2440796 - RNA, 19 nt, Homo sapiens
  misc_RNA (1)...(19): siRNA sense strand
gugaccagcucaugggcuu

SEQ ID NO: 2440797 - RNA, 19 nt, Homo sapiens
  misc_RNA (1)...(19): siRNA sense strand
cgacauacccgcacccaca

SEQ ID NO: 2440798 - RNA, 19 nt, Homo sapiens
  misc_RNA (1)...(19): siRNA sense strand
uggaguuugaggaggaaga

SEQ ID NO: 2440799 - RNA, 19 nt, Homo sapiens
  misc_RNA (1)...(19): siRNA sense strand
cguccauacaggagagaag

SEQ ID NO: 2440800 - RNA, 19 nt, Homo sapiens
  misc_RNA (1)...(19): siRNA sense strand
cgguguagccuuugcaacu

SEQ ID NO: 2440801 - RNA, 19 nt, Homo sapiens
  misc_RNA (1)...(19): siRNA sense strand
gggacaacuacaagcgcca

SEQ ID NO: 2440802 - RNA, 19 nt, Homo sapiens
  misc_RNA (1)...(19): siRNA sense strand
cccugguauuggagaguga

SEQ ID NO: 2440803 - RNA, 19 nt, Homo sapiens
  misc_RNA (1)...(19): siRNA sense strand
auacaggagagaagcccua

SEQ ID NO: 2440804 - RNA, 19 nt, Homo sapiens
  misc_RNA (1)...(19): siRNA sense strand
aggaggaagaggaagagga

SEQ ID NO: 2440805 - RNA, 19 nt, Homo sapiens
  misc_RNA (1)...(19): siRNA sense strand
gagugaaguugaggagcca

SEQ ID NO: 2440806 - RNA, 19 nt, Homo sapiens
  misc_RNA (1)...(19): siRNA sense strand
cggcacaugcagacacaca

SEQ ID NO: 2440807 - RNA, 19 nt, Homo sapiens
  misc_RNA (1)...(19): siRNA sense strand
ccacagagaagcugcggaa

SEQ ID NO: 2440808 - RNA, 19 nt, Homo sapiens
  misc_RNA (1)...(19): siRNA sense strand
aagaggagcaagaggagaa

SEQ ID NO: 2440809 - RNA, 19 nt, Homo sapiens
  misc_RNA (1)...(19): siRNA sense strand
aggcaggacuacaggugaa

SEQ ID NO: 2440810 - RNA, 19 nt, Homo sapiens
  misc_RNA (1)...(19): siRNA sense strand
aggaugaagagaaggagaa

SEQ ID NO: 2440811 - RNA, 19 nt, Homo sapiens
  misc_RNA (1)...(19): siRNA sense strand
gagcagagccugaagagga

SEQ ID NO: 2440812 - RNA, 19 nt, Homo sapiens
  misc_RNA (1)...(19): siRNA sense strand
aggagaaggaggaugaaga

SEQ ID NO: 2440813 - RNA, 19 nt, Homo sapiens
  misc_RNA (1)...(19): siRNA sense strand
ugagaguacacaagagcua

SEQ ID NO: 2440814 - RNA, 19 nt, Homo sapiens
  misc_RNA (1)...(19): siRNA sense strand
gggcgagaggagugcacaa

SEQ ID NO: 2440815 - RNA, 19 nt, Homo sapiens
  misc_RNA (1)...(19): siRNA sense strand
caaagaaggcugaggacuc

SEQ ID NO: 2440816 - RNA, 19 nt, Homo sapiens
  misc_RNA (1)...(19): siRNA sense strand
ggauggaagcacugcccua

SEQ ID NO: 2440817 - RNA, 19 nt, Homo sapiens
  misc_RNA (1)...(19): siRNA sense strand
uggggaagcuggaggaaga

SEQ ID NO: 2440818 - RNA, 19 nt, Homo sapiens
  misc_RNA (1)...(19): siRNA sense strand
ccuaagagcucauggagag

SEQ ID NO: 2440819 - RNA, 19 nt, Homo sapiens
  misc_RNA (1)...(19): siRNA sense strand
cuaccaagccacagaggga

SEQ ID NO: 2440820 - RNA, 19 nt, Homo sapiens
  misc_RNA (1)...(19): siRNA sense strand
ugaaagagaagauggagca

SEQ ID NO: 2440821 - RNA, 19 nt, Homo sapiens
  misc_RNA (1)...(19): siRNA sense strand
uccaaaggccugacagaau

SEQ ID NO: 2440822 - RNA, 19 nt, Homo sapiens
  misc_RNA (1)...(19): siRNA sense strand
agcaggagcuggugcaaaa

SEQ ID NO: 2440823 - RNA, 19 nt, Homo sapiens
  misc_RNA (1)...(19): siRNA sense strand
ugacaaaugaacuggccau

SEQ ID NO: 2440824 - RNA, 19 nt, Homo sapiens
  misc_RNA (1)...(19): siRNA sense strand
uccuggacguguuggauaa

SEQ ID NO: 2440825 - RNA, 19 nt, Homo sapiens
  misc_RNA (1)...(19): siRNA sense strand
guguaagacucaagcugca

SEQ ID NO: 2440826 - RNA, 19 nt, Homo sapiens
  misc_RNA (1)...(19): siRNA sense strand
gcgaagggacagcuggaga

SEQ ID NO: 2440827 - RNA, 19 nt, Homo sapiens
  misc_RNA (1)...(19): siRNA sense strand
gaggaguggagguggaagu

SEQ ID NO: 2440828 - RNA, 19 nt, Homo sapiens
  misc_RNA (1)...(19): siRNA sense strand
gaaccagauucgagagcag

SEQ ID NO: 2440829 - RNA, 19 nt, Homo sapiens
  misc_RNA (1)...(19): siRNA sense strand
cuaaggaccugcuggcuga

SEQ ID NO: 2440830 - RNA, 19 nt, Homo sapiens
  misc_RNA (1)...(19): siRNA sense strand
aguugaaccaggaggcaca

SEQ ID NO: 2440831 - RNA, 19 nt, Homo sapiens
  misc_RNA (1)...(19): siRNA sense strand
uggaacaugaaguguacaa

SEQ ID NO: 2440832 - RNA, 19 nt, Homo sapiens
  misc_RNA (1)...(19): siRNA sense strand
agaguacacaagagcuaaa

SEQ ID NO: 2440833 - RNA, 19 nt, Homo sapiens
  misc_RNA (1)...(19): siRNA sense strand
ggucccaaccagaagaaca

SEQ ID NO: 2440834 - RNA, 19 nt, Homo sapiens
  misc_RNA (1)...(19): siRNA sense strand
cugaagaggagcaagagga

SEQ ID NO: 2440835 - RNA, 19 nt, Homo sapiens
  misc_RNA (1)...(19): siRNA sense strand
ggacagcuggagaaggaga

SEQ ID NO: 2440836 - RNA, 19 nt, Homo sapiens
  misc_RNA (1)...(19): siRNA sense strand
ccuccaaaggccugacaga

SEQ ID NO: 2440837 - RNA, 19 nt, Homo sapiens
  misc_RNA (1)...(19): siRNA sense strand
gcaagaaugaggauggaag

SEQ ID NO: 2440838 - RNA, 19 nt, Homo sapiens
  misc_RNA (1)...(19): siRNA sense strand
gggcaaaggcaggacuaca

SEQ ID NO: 2440839 - RNA, 19 nt, Homo sapiens
  misc_RNA (1)...(19): siRNA sense strand
caggaugaagagaaggaga

SEQ ID NO: 2440840 - RNA, 19 nt, Homo sapiens
  misc_RNA (1)...(19): siRNA sense strand
gcagaaaaccguaguccau

SEQ ID NO: 2440841 - RNA, 19 nt, Homo sapiens
  misc_RNA (1)...(19): siRNA sense strand
cgaguuaauguuacagaca

SEQ ID NO: 2440842 - RNA, 19 nt, Homo sapiens
  misc_RNA (1)...(19): siRNA sense strand
caguauuagcuccaaagaa

SEQ ID NO: 2440843 - RNA, 19 nt, Homo sapiens
  misc_RNA (1)...(19): siRNA sense strand
gcgggaagagccaggagau

SEQ ID NO: 2440844 - RNA, 19 nt, Homo sapiens
  misc_RNA (1)...(19): siRNA sense strand
agcaagaggagaaggagga

SEQ ID NO: 2440845 - RNA, 19 nt, Homo sapiens
  misc_RNA (1)...(19): siRNA sense strand
gguggaaguaugaagagga

SEQ ID NO: 2440846 - RNA, 19 nt, Homo sapiens
  misc_RNA (1)...(19): siRNA sense strand
ggcagagguugcagaggga

SEQ ID NO: 2440847 - RNA, 19 nt, Homo sapiens
  misc_RNA (1)...(19): siRNA sense strand
agagggaguggcugagcua

SEQ ID NO: 2440848 - RNA, 19 nt, Homo sapiens
  misc_RNA (1)...(19): siRNA sense strand
cagccgaacaagagcgcca

SEQ ID NO: 2440849 - RNA, 19 nt, Homo sapiens
  misc_RNA (1)...(19): siRNA sense strand
augaagaggagcggaggaa

SEQ ID NO: 2440850 - RNA, 19 nt, Homo sapiens
  misc_RNA (1)...(19): siRNA sense strand
caggaaagccacaggacag

SEQ ID NO: 2440851 - RNA, 19 nt, Homo sapiens
  misc_RNA (1)...(19): siRNA sense strand
acaucaacagcaagaauga

SEQ ID NO: 2440852 - RNA, 19 nt, Homo sapiens
  misc_RNA (1)...(19): siRNA sense strand
gaaugaggauggaagcacu

SEQ ID NO: 2440853 - RNA, 19 nt, Homo sapiens
  misc_RNA (1)...(19): siRNA sense strand
gaacaagagcgccaggcca

SEQ ID NO: 2440854 - RNA, 19 nt, Homo sapiens
  misc_RNA (1)...(19): siRNA sense strand
gagacaaggaagccaagau

SEQ ID NO: 2440855 - RNA, 19 nt, Homo sapiens
  misc_RNA (1)...(19): siRNA sense strand
aguuaauguuacagacaag

SEQ ID NO: 2440856 - RNA, 19 nt, Homo sapiens
  misc_RNA (1)...(19): siRNA sense strand
ccuacggcaacacgagaaa

SEQ ID NO: 2440857 - RNA, 19 nt, Homo sapiens
  misc_RNA (1)...(19): siRNA sense strand
ucggaggaguggaggugga

SEQ ID NO: 2440858 - RNA, 19 nt, Homo sapiens
  misc_RNA (1)...(19): siRNA sense strand
guguggggcugcugacaaa

SEQ ID NO: 2440859 - RNA, 19 nt, Homo sapiens
  misc_RNA (1)...(19): siRNA sense strand
augaacuggccauggagaa

SEQ ID NO: 2440860 - RNA, 19 nt, Homo sapiens
  misc_RNA (1)...(19): siRNA sense strand
gcacaguggcugaaccagu

SEQ ID NO: 2440861 - RNA, 19 nt, Homo sapiens
  misc_RNA (1)...(19): siRNA sense strand
agccugaagaggagcaaga

SEQ ID NO: 2440862 - RNA, 19 nt, Homo sapiens
  misc_RNA (1)...(19): siRNA sense strand
uguaacaaccggagagaau

SEQ ID NO: 2440863 - RNA, 19 nt, Homo sapiens
  misc_RNA (1)...(19): siRNA sense strand
aggaaauccaacaaagaaa

SEQ ID NO: 2440864 - RNA, 19 nt, Homo sapiens
  misc_RNA (1)...(19): siRNA sense strand
augaaaagcgcuugaauaa

SEQ ID NO: 2440865 - RNA, 19 nt, Homo sapiens
  misc_RNA (1)...(19): siRNA sense strand
aggaaauggaacaggguca

SEQ ID NO: 2440866 - RNA, 19 nt, Homo sapiens
  misc_RNA (1)...(19): siRNA sense strand
cgagagaagcccaggagga

SEQ ID NO: 2440867 - RNA, 19 nt, Homo sapiens
  misc_RNA (1)...(19): siRNA sense strand
cagaaaaggugacgcgaga

SEQ ID NO: 2440868 - RNA, 19 nt, Homo sapiens
  misc_RNA (1)...(19): siRNA sense strand
cucaaaggacagaagguua

SEQ ID NO: 2440869 - RNA, 19 nt, Homo sapiens
  misc_RNA (1)...(19): siRNA sense strand
caauacaguacuuggaaaa

SEQ ID NO: 2440870 - RNA, 19 nt, Homo sapiens
  misc_RNA (1)...(19): siRNA sense strand
gugaaauccuagcugggaa

SEQ ID NO: 2440871 - RNA, 19 nt, Homo sapiens
  misc_RNA (1)...(19): siRNA sense strand
acagaaauugcaaggaaau

SEQ ID NO: 2440872 - RNA, 19 nt, Homo sapiens
  misc_RNA (1)...(19): siRNA sense strand
gugacaaagaaaugagcau

SEQ ID NO: 2440873 - RNA, 19 nt, Homo sapiens
  misc_RNA (1)...(19): siRNA sense strand
ugaaauccuagcugggaaa

SEQ ID NO: 2440874 - RNA, 19 nt, Homo sapiens
  misc_RNA (1)...(19): siRNA sense strand
gagaagcccaggaggaaaa

SEQ ID NO: 2440875 - RNA, 19 nt, Homo sapiens
  misc_RNA (1)...(19): siRNA sense strand
gagauuauguguuugccaa

SEQ ID NO: 2440876 - RNA, 19 nt, Homo sapiens
  misc_RNA (1)...(19): siRNA sense strand
ucaauaucuacaagcgaaa

SEQ ID NO: 2440877 - RNA, 19 nt, Homo sapiens
  misc_RNA (1)...(19): siRNA sense strand
gaauaaaauuguuuggcga

SEQ ID NO: 2440878 - RNA, 19 nt, Homo sapiens
  misc_RNA (1)...(19): siRNA sense strand
gccaagaagaauuaugcaa

SEQ ID NO: 2440879 - RNA, 19 nt, Homo sapiens
  misc_RNA (1)...(19): siRNA sense strand
uaguuaaggaaauggaaca

SEQ ID NO: 2440880 - RNA, 19 nt, Homo sapiens
  misc_RNA (1)...(19): siRNA sense strand
gaaaaguggaacaggcaau

SEQ ID NO: 2440881 - RNA, 19 nt, Homo sapiens
  misc_RNA (1)...(19): siRNA sense strand
ggagaagaugcaagaccuu

SEQ ID NO: 2440882 - RNA, 19 nt, Homo sapiens
  misc_RNA (1)...(19): siRNA sense strand
cagcaagcaucaaaaggaa

SEQ ID NO: 2440883 - RNA, 19 nt, Homo sapiens
  misc_RNA (1)...(19): siRNA sense strand
cauuaucucaagaggaaaa

SEQ ID NO: 2440884 - RNA, 19 nt, Homo sapiens
  misc_RNA (1)...(19): siRNA sense strand
gcuuuagaacgguugaauu

SEQ ID NO: 2440885 - RNA, 19 nt, Homo sapiens
  misc_RNA (1)...(19): siRNA sense strand
aggauguggaggcgaggaa

SEQ ID NO: 2440886 - RNA, 19 nt, Homo sapiens
  misc_RNA (1)...(19): siRNA sense strand
ggauggagacagcaagcau

SEQ ID NO: 2440887 - RNA, 19 nt, Homo sapiens
  misc_RNA (1)...(19): siRNA sense strand
gcgagaaggaagccagguu

SEQ ID NO: 2440888 - RNA, 19 nt, Homo sapiens
  misc_RNA (1)...(19): siRNA sense strand
gguuauugcaagaugugau

SEQ ID NO: 2440889 - RNA, 19 nt, Homo sapiens
  misc_RNA (1)...(19): siRNA sense strand
ugaaagaagcggacacgca

SEQ ID NO: 2440890 - RNA, 19 nt, Homo sapiens
  misc_RNA (1)...(19): siRNA sense strand
cugaauauguugaagggac

SEQ ID NO: 2440891 - RNA, 19 nt, Homo sapiens
  misc_RNA (1)...(19): siRNA sense strand
agaaaguccuucacgcaga

SEQ ID NO: 2440892 - RNA, 19 nt, Homo sapiens
  misc_RNA (1)...(19): siRNA sense strand
agagaagcccaggaggaaa

SEQ ID NO: 2440893 - RNA, 19 nt, Homo sapiens
  misc_RNA (1)...(19): siRNA sense strand
gcaggauuccagagagcca

SEQ ID NO: 2440894 - RNA, 19 nt, Homo sapiens
  misc_RNA (1)...(19): siRNA sense strand
cucaauaucuacaagcgaa

SEQ ID NO: 2440895 - RNA, 19 nt, Homo sapiens
  misc_RNA (1)...(19): siRNA sense strand
uaugaaaagcgcuugaaua

SEQ ID NO: 2440896 - RNA, 19 nt, Homo sapiens
  misc_RNA (1)...(19): siRNA sense strand
gagcugucgaugcuggaaa

SEQ ID NO: 2440897 - RNA, 19 nt, Homo sapiens
  misc_RNA (1)...(19): siRNA sense strand
ccaauaagcauguggccac

SEQ ID NO: 2440898 - RNA, 19 nt, Homo sapiens
  misc_RNA (1)...(19): siRNA sense strand
gagcauuaucucaagagga

SEQ ID NO: 2440899 - RNA, 19 nt, Homo sapiens
  misc_RNA (1)...(19): siRNA sense strand
guugugaagaaguguguga

SEQ ID NO: 2440900 - RNA, 19 nt, Homo sapiens
  misc_RNA (1)...(19): siRNA sense strand
agaucaaaagguucagaaa

SEQ ID NO: 2440901 - RNA, 19 nt, Homo sapiens
  misc_RNA (1)...(19): siRNA sense strand
ugcaagaugugaugaaaau

SEQ ID NO: 2440902 - RNA, 19 nt, Homo sapiens
  misc_RNA (1)...(19): siRNA sense strand
uaucauuccaccugaaaca

SEQ ID NO: 2440903 - RNA, 19 nt, Homo sapiens
  misc_RNA (1)...(19): siRNA sense strand
cugaaacaguuauagacca

SEQ ID NO: 2440904 - RNA, 19 nt, Homo sapiens
  misc_RNA (1)...(19): siRNA sense strand
gcuugaaaauggugggaca

SEQ ID NO: 2440905 - RNA, 19 nt, Homo sapiens
  misc_RNA (1)...(19): siRNA sense strand
gggaauccaaggagggucu

SEQ ID NO: 2440906 - RNA, 19 nt, Homo sapiens
  misc_RNA (1)...(19): siRNA sense strand
gcuugaaaauggugggaca

SEQ ID NO: 2440907 - RNA, 19 nt, Homo sapiens
  misc_RNA (1)...(19): siRNA sense strand
gggaauccaaggagggucu

SEQ ID NO: 2440908 - RNA, 19 nt, Homo sapiens
  misc_RNA (1)...(19): siRNA sense strand
gcuugaaaauggugggaca

SEQ ID NO: 2440909 - RNA, 19 nt, Homo sapiens
  misc_RNA (1)...(19): siRNA sense strand
gggaauccaaggagggucu

SEQ ID NO: 2440910 - RNA, 19 nt, Homo sapiens
  misc_RNA (1)...(19): siRNA sense strand
gcuugaaaauggugggaca

SEQ ID NO: 2440911 - RNA, 19 nt, Homo sapiens
  misc_RNA (1)...(19): siRNA sense strand
gggaauccaaggagggucu

SEQ ID NO: 2440912 - RNA, 19 nt, Homo sapiens
  misc_RNA (1)...(19): siRNA sense strand
ccaccaaugugaaggacca

SEQ ID NO: 2440913 - RNA, 19 nt, Homo sapiens
  misc_RNA (1)...(19): siRNA sense strand
cccuggaaucacugagaaa

SEQ ID NO: 2440914 - RNA, 19 nt, Homo sapiens
  misc_RNA (1)...(19): siRNA sense strand
gcggcguggacaagacaaa

SEQ ID NO: 2440915 - RNA, 19 nt, Homo sapiens
  misc_RNA (1)...(19): siRNA sense strand
gaacagagcuacuucguac

SEQ ID NO: 2440916 - RNA, 19 nt, Homo sapiens
  misc_RNA (1)...(19): siRNA sense strand
ugguggaaggccaggagaa

SEQ ID NO: 2440917 - RNA, 19 nt, Homo sapiens
  misc_RNA (1)...(19): siRNA sense strand
gagauggugucuagcgcca

SEQ ID NO: 2440918 - RNA, 19 nt, Homo sapiens
  misc_RNA (1)...(19): siRNA sense strand
cggcaggaacagagcuacu

SEQ ID NO: 2440919 - RNA, 19 nt, Homo sapiens
  misc_RNA (1)...(19): siRNA sense strand
uggaagaaccgguacagca

SEQ ID NO: 2440920 - RNA, 19 nt, Homo sapiens
  misc_RNA (1)...(19): siRNA sense strand
aagcagaaaugaagaccua

SEQ ID NO: 2440921 - RNA, 19 nt, Homo sapiens
  misc_RNA (1)...(19): siRNA sense strand
acaaaggagcaaagggaga

SEQ ID NO: 2440922 - RNA, 19 nt, Homo sapiens
  misc_RNA (1)...(19): siRNA sense strand
acauaggaccucagggcaa

SEQ ID NO: 2440923 - RNA, 19 nt, Homo sapiens
  misc_RNA (1)...(19): siRNA sense strand
auuccaagacagagggcaa

SEQ ID NO: 2440924 - RNA, 19 nt, Homo sapiens
  misc_RNA (1)...(19): siRNA sense strand
agacaaaggagcaaaggga

SEQ ID NO: 2440925 - RNA, 19 nt, Homo sapiens
  misc_RNA (1)...(19): siRNA sense strand
caacgaugauggcggguca

SEQ ID NO: 2440926 - RNA, 19 nt, Homo sapiens
  misc_RNA (1)...(19): siRNA sense strand
ggacaaaggcauuccugga

SEQ ID NO: 2440927 - RNA, 19 nt, Homo sapiens
  misc_RNA (1)...(19): siRNA sense strand
cgauggacgggaugggaga

SEQ ID NO: 2440928 - RNA, 19 nt, Homo sapiens
  misc_RNA (1)...(19): siRNA sense strand
agaacaacgcccagugcuu

SEQ ID NO: 2440929 - RNA, 19 nt, Homo sapiens
  misc_RNA (1)...(19): siRNA sense strand
ggcagcagguugaggccuu

SEQ ID NO: 2440930 - RNA, 19 nt, Homo sapiens
  misc_RNA (1)...(19): siRNA sense strand
aggacuguguggagaucuu

SEQ ID NO: 2440931 - RNA, 19 nt, Homo sapiens
  misc_RNA (1)...(19): siRNA sense strand
gagcaaagggagaaagugg

SEQ ID NO: 2440932 - RNA, 19 nt, Homo sapiens
  misc_RNA (1)...(19): siRNA sense strand
aaagggagaaagugggcuu

SEQ ID NO: 2440933 - RNA, 19 nt, Homo sapiens
  misc_RNA (1)...(19): siRNA sense strand
cugcuuucucucaguauaa

SEQ ID NO: 2440934 - RNA, 19 nt, Homo sapiens
  misc_RNA (1)...(19): siRNA sense strand
agaaaguggcagagauaca

SEQ ID NO: 2440935 - RNA, 19 nt, Homo sapiens
  misc_RNA (1)...(19): siRNA sense strand
gggaagaaccuacggcaga

SEQ ID NO: 2440936 - RNA, 19 nt, Homo sapiens
  misc_RNA (1)...(19): siRNA sense strand
aggcagacuuuaacgccaa

SEQ ID NO: 2440937 - RNA, 19 nt, Homo sapiens
  misc_RNA (1)...(19): siRNA sense strand
ugccagaggaacagagaga

SEQ ID NO: 2440938 - RNA, 19 nt, Homo sapiens
  misc_RNA (1)...(19): siRNA sense strand
ccucaaugucaaugccaau

SEQ ID NO: 2440939 - RNA, 19 nt, Homo sapiens
  misc_RNA (1)...(19): siRNA sense strand
ccagaggaacagagagaag

SEQ ID NO: 2440940 - RNA, 19 nt, Homo sapiens
  misc_RNA (1)...(19): siRNA sense strand
uggacaacaccaagcauau

SEQ ID NO: 2440941 - RNA, 19 nt, Homo sapiens
  misc_RNA (1)...(19): siRNA sense strand
ggcagaugagcaaggacua

SEQ ID NO: 2440942 - RNA, 19 nt, Homo sapiens
  misc_RNA (1)...(19): siRNA sense strand
cugcacuggcuguggugaa

SEQ ID NO: 2440943 - RNA, 19 nt, Homo sapiens
  misc_RNA (1)...(19): siRNA sense strand
cggcagaugagcaaggacu

SEQ ID NO: 2440944 - RNA, 19 nt, Homo sapiens
  misc_RNA (1)...(19): siRNA sense strand
gcccuuagacgcauggcua

SEQ ID NO: 2440945 - RNA, 19 nt, Homo sapiens
  misc_RNA (1)...(19): siRNA sense strand
ccaucauugaccaggugaa

SEQ ID NO: 2440946 - RNA, 19 nt, Homo sapiens
  misc_RNA (1)...(19): siRNA sense strand
ggaaagacugggaggagcu

SEQ ID NO: 2440947 - RNA, 19 nt, Homo sapiens
  misc_RNA (1)...(19): siRNA sense strand
acgugaugcaggagaccua

SEQ ID NO: 2440948 - RNA, 19 nt, Homo sapiens
  misc_RNA (1)...(19): siRNA sense strand
gaggaagucccaagagcca

SEQ ID NO: 2440949 - RNA, 19 nt, Homo sapiens
  misc_RNA (1)...(19): siRNA sense strand
aggaagaggaaccggagga

SEQ ID NO: 2440950 - RNA, 19 nt, Homo sapiens
  misc_RNA (1)...(19): siRNA sense strand
ggaaggaagaggaaccgga

SEQ ID NO: 2440951 - RNA, 19 nt, Homo sapiens
  misc_RNA (1)...(19): siRNA sense strand
auacuaccacacagagaaa

SEQ ID NO: 2440952 - RNA, 19 nt, Homo sapiens
  misc_RNA (1)...(19): siRNA sense strand
gggaggugaugcagcguga

SEQ ID NO: 2440953 - RNA, 19 nt, Homo sapiens
  misc_RNA (1)...(19): siRNA sense strand
ggaaaucaagaaagcucaa

SEQ ID NO: 2440954 - RNA, 19 nt, Homo sapiens
  misc_RNA (1)...(19): siRNA sense strand
caagaaagcucaaaggacc

SEQ ID NO: 2440955 - RNA, 19 nt, Homo sapiens
  misc_RNA (1)...(19): siRNA sense strand
ccgaggagagccuggugaa

SEQ ID NO: 2440956 - RNA, 19 nt, Homo sapiens
  misc_RNA (1)...(19): siRNA sense strand
aggccuacgcagagcugaa

SEQ ID NO: 2440957 - RNA, 19 nt, Homo sapiens
  misc_RNA (1)...(19): siRNA sense strand
cggcgaggagaacggcaaa

SEQ ID NO: 2440958 - RNA, 19 nt, Homo sapiens
  misc_RNA (1)...(19): siRNA sense strand
gggaauaaauacagugcuc

SEQ ID NO: 2440959 - RNA, 19 nt, Homo sapiens
  misc_RNA (1)...(19): siRNA sense strand
ugguuagaauacaggguca

SEQ ID NO: 2440960 - RNA, 19 nt, Homo sapiens
  misc_RNA (1)...(19): siRNA sense strand
aagcaagccaacaaagaau

SEQ ID NO: 2440961 - RNA, 19 nt, Homo sapiens
  misc_RNA (1)...(19): siRNA sense strand
ggacugaguaaggggaaua

SEQ ID NO: 2440962 - RNA, 19 nt, Homo sapiens
  misc_RNA (1)...(19): siRNA sense strand
aguugucgcuacuggagaa

SEQ ID NO: 2440963 - RNA, 19 nt, Homo sapiens
  misc_RNA (1)...(19): siRNA sense strand
gagauggucugcaggggaa

SEQ ID NO: 2440964 - RNA, 19 nt, Homo sapiens
  misc_RNA (1)...(19): siRNA sense strand
ggauggugcuacuggugga

SEQ ID NO: 2440965 - RNA, 19 nt, Homo sapiens
  misc_RNA (1)...(19): siRNA sense strand
cgcagaagagggagaagga

SEQ ID NO: 2440966 - RNA, 19 nt, Homo sapiens
  misc_RNA (1)...(19): siRNA sense strand
gagcagaaacuggggaaga

SEQ ID NO: 2440967 - RNA, 19 nt, Homo sapiens
  misc_RNA (1)...(19): siRNA sense strand
uggccuacuucgagagcaa

SEQ ID NO: 2440968 - RNA, 19 nt, Homo sapiens
  misc_RNA (1)...(19): siRNA sense strand
uggauuauuuugagggcua

SEQ ID NO: 2440969 - RNA, 19 nt, Homo sapiens
  misc_RNA (1)...(19): siRNA sense strand
agaacacacgugagggcua

SEQ ID NO: 2440970 - RNA, 19 nt, Homo sapiens
  misc_RNA (1)...(19): siRNA sense strand
gaccauuguaaaaggaaaa

SEQ ID NO: 2440971 - RNA, 19 nt, Homo sapiens
  misc_RNA (1)...(19): siRNA sense strand
acgauggaggccuggauua

SEQ ID NO: 2440972 - RNA, 19 nt, Homo sapiens
  misc_RNA (1)...(19): siRNA sense strand
agaccauuguaaaaggaaa

SEQ ID NO: 2440973 - RNA, 19 nt, Homo sapiens
  misc_RNA (1)...(19): siRNA sense strand
uugcacaguggcuaagaaa

SEQ ID NO: 2440974 - RNA, 19 nt, Homo sapiens
  misc_RNA (1)...(19): siRNA sense strand
ugucauucucugaggaaaa

SEQ ID NO: 2440975 - RNA, 19 nt, Homo sapiens
  misc_RNA (1)...(19): siRNA sense strand
ccauuuagagaaagaacca

SEQ ID NO: 2440976 - RNA, 19 nt, Homo sapiens
  misc_RNA (1)...(19): siRNA sense strand
cgauauggagauugggaac

SEQ ID NO: 2440977 - RNA, 19 nt, Homo sapiens
  misc_RNA (1)...(19): siRNA sense strand
auguuaauccagugaccaa

SEQ ID NO: 2440978 - RNA, 19 nt, Homo sapiens
  misc_RNA (1)...(19): siRNA sense strand
ccgauauggagauugggaa

SEQ ID NO: 2440979 - RNA, 19 nt, Homo sapiens
  misc_RNA (1)...(19): siRNA sense strand
cuuaagaagccgaaguuac

SEQ ID NO: 2440980 - RNA, 19 nt, Homo sapiens
  misc_RNA (1)...(19): siRNA sense strand
aauccagugaccaaagaaa

SEQ ID NO: 2440981 - RNA, 19 nt, Homo sapiens
  misc_RNA (1)...(19): siRNA sense strand
auggagauugggaacgaaa

SEQ ID NO: 2440982 - RNA, 19 nt, Homo sapiens
  misc_RNA (1)...(19): siRNA sense strand
gggcaaggaaccaaggcua

SEQ ID NO: 2440983 - RNA, 19 nt, Homo sapiens
  misc_RNA (1)...(19): siRNA sense strand
acauagagacagagagguu

SEQ ID NO: 2440984 - RNA, 19 nt, Homo sapiens
  misc_RNA (1)...(19): siRNA sense strand
ccaaagugggaguugaaau

SEQ ID NO: 2440985 - RNA, 19 nt, Homo sapiens
  misc_RNA (1)...(19): siRNA sense strand
cggcaggugcuucaggaaa

SEQ ID NO: 2440986 - RNA, 19 nt, Homo sapiens
  misc_RNA (1)...(19): siRNA sense strand
ccggcuaucaggugacaaa

SEQ ID NO: 2440987 - RNA, 19 nt, Homo sapiens
  misc_RNA (1)...(19): siRNA sense strand
acagaaaacaucagggaga

SEQ ID NO: 2440988 - RNA, 19 nt, Homo sapiens
  misc_RNA (1)...(19): siRNA sense strand
acucagauucaauggaaaa

SEQ ID NO: 2440989 - RNA, 19 nt, Homo sapiens
  misc_RNA (1)...(19): siRNA sense strand
guccaaagugggaguugaa

SEQ ID NO: 2440990 - RNA, 19 nt, Homo sapiens
  misc_RNA (1)...(19): siRNA sense strand
ggaaaauggauaacaacau

SEQ ID NO: 2440991 - RNA, 19 nt, Homo sapiens
  misc_RNA (1)...(19): siRNA sense strand
ggcaaggaaccaaggcuau

SEQ ID NO: 2440992 - RNA, 19 nt, Homo sapiens
  misc_RNA (1)...(19): siRNA sense strand
cacccggaauagagaggua

SEQ ID NO: 2440993 - RNA, 19 nt, Homo sapiens
  misc_RNA (1)...(19): siRNA sense strand
aaaugaugaaggaucguaa

SEQ ID NO: 2440994 - RNA, 19 nt, Homo sapiens
  misc_RNA (1)...(19): siRNA sense strand
ccuaagaagcccagccacu

SEQ ID NO: 2440995 - RNA, 19 nt, Homo sapiens
  misc_RNA (1)...(19): siRNA sense strand
cacucagauucaauggaaa

SEQ ID NO: 2440996 - RNA, 19 nt, Homo sapiens
  misc_RNA (1)...(19): siRNA sense strand
gugaauaucuggaugacag

SEQ ID NO: 2440997 - RNA, 19 nt, Homo sapiens
  misc_RNA (1)...(19): siRNA sense strand
ccugugaggcucugaccua

SEQ ID NO: 2440998 - RNA, 19 nt, Homo sapiens
  misc_RNA (1)...(19): siRNA sense strand
agaugcacauagagacaga

SEQ ID NO: 2440999 - RNA, 19 nt, Homo sapiens
  misc_RNA (1)...(19): siRNA sense strand
cuacaugaccacccggaau

SEQ ID NO: 2441000 - RNA, 19 nt, Homo sapiens
  misc_RNA (1)...(19): siRNA sense strand
gcacauagagacagagagg

SEQ ID NO: 2441001 - RNA, 19 nt, Homo sapiens
  misc_RNA (1)...(19): siRNA sense strand
uaucuuacagacaaggaaa

SEQ ID NO: 2441002 - RNA, 19 nt, Homo sapiens
  misc_RNA (1)...(19): siRNA sense strand
guugaaaugaugaaggauc

SEQ ID NO: 2441003 - RNA, 19 nt, Homo sapiens
  misc_RNA (1)...(19): siRNA sense strand
aggugauggacuucaacaa

SEQ ID NO: 2441004 - RNA, 19 nt, Homo sapiens
  misc_RNA (1)...(19): siRNA sense strand
agggagaugcacauagaga

SEQ ID NO: 2441005 - RNA, 19 nt, Homo sapiens
  misc_RNA (1)...(19): siRNA sense strand
gcaaauuuguuaauggcac

SEQ ID NO: 2441006 - RNA, 19 nt, Homo sapiens
  misc_RNA (1)...(19): siRNA sense strand
ccacaggauaagaggguca

SEQ ID NO: 2441007 - RNA, 19 nt, Homo sapiens
  misc_RNA (1)...(19): siRNA sense strand
gaaugauugcugaggaaau

SEQ ID NO: 2441008 - RNA, 19 nt, Homo sapiens
  misc_RNA (1)...(19): siRNA sense strand
aagcauggacacagacaaa

SEQ ID NO: 2441009 - RNA, 19 nt, Homo sapiens
  misc_RNA (1)...(19): siRNA sense strand
cgcgauagauggaaaguuu

SEQ ID NO: 2441010 - RNA, 19 nt, Homo sapiens
  misc_RNA (1)...(19): siRNA sense strand
uccuaaagauauugccaaa

SEQ ID NO: 2441011 - RNA, 19 nt, Homo sapiens
  misc_RNA (1)...(19): siRNA sense strand
ccaagaugacauaggacau

SEQ ID NO: 2441012 - RNA, 19 nt, Homo sapiens
  misc_RNA (1)...(19): siRNA sense strand
ccucauggaagguuagaau

SEQ ID NO: 2441013 - RNA, 19 nt, Homo sapiens
  misc_RNA (1)...(19): siRNA sense strand
gcugaggaaaucauggaaa

SEQ ID NO: 2441014 - RNA, 19 nt, Homo sapiens
  misc_RNA (1)...(19): siRNA sense strand
guccaggaaauuagauaaa

SEQ ID NO: 2441015 - RNA, 19 nt, Homo sapiens
  misc_RNA (1)...(19): siRNA sense strand
guaccaacaugcaacgcaa

SEQ ID NO: 2441016 - RNA, 19 nt, Homo sapiens
  misc_RNA (1)...(19): siRNA sense strand
ucauggaagguuagaauau

SEQ ID NO: 2441017 - RNA, 19 nt, Homo sapiens
  misc_RNA (1)...(19): siRNA sense strand
agggugaaaucuauggaau

SEQ ID NO: 2441018 - RNA, 19 nt, Homo sapiens
  misc_RNA (1)...(19): siRNA sense strand
agacaacgaaccagacaau

SEQ ID NO: 2441019 - RNA, 19 nt, Homo sapiens
  misc_RNA (1)...(19): siRNA sense strand
ggaugaagacaacgaacca

SEQ ID NO: 2441020 - RNA, 19 nt, Homo sapiens
  misc_RNA (1)...(19): siRNA sense strand
gguuagaauauacagaaca

SEQ ID NO: 2441021 - RNA, 19 nt, Homo sapiens
  misc_RNA (1)...(19): siRNA sense strand
gggaaaucagggugaaauc

SEQ ID NO: 2441022 - RNA, 19 nt, Homo sapiens
  misc_RNA (1)...(19): siRNA sense strand
guuuuacagacgagagaaa

SEQ ID NO: 2441023 - RNA, 19 nt, Homo sapiens
  misc_RNA (1)...(19): siRNA sense strand
cagacgaugaauugaaaca

SEQ ID NO: 2441024 - RNA, 19 nt, Homo sapiens
  misc_RNA (1)...(19): siRNA sense strand
aguaaagguugaagacaag

SEQ ID NO: 2441025 - RNA, 19 nt, Homo sapiens
  misc_RNA (1)...(19): siRNA sense strand
agguugaagacaaggacuu

SEQ ID NO: 2441026 - RNA, 19 nt, Homo sapiens
  misc_RNA (1)...(19): siRNA sense strand
agaacaccaaggaaggaua

SEQ ID NO: 2441027 - RNA, 19 nt, Homo sapiens
  misc_RNA (1)...(19): siRNA sense strand
ggcacgcgauagauggaaa

SEQ ID NO: 2441028 - RNA, 19 nt, Homo sapiens
  misc_RNA (1)...(19): siRNA sense strand
agaaugaucugauugguca

SEQ ID NO: 2441029 - RNA, 19 nt, Homo sapiens
  misc_RNA (1)...(19): siRNA sense strand
uugccaaagucaaggagca

SEQ ID NO: 2441030 - RNA, 19 nt, Homo sapiens
  misc_RNA (1)...(19): siRNA sense strand
uuuguagaccagagggcaa

SEQ ID NO: 2441031 - RNA, 19 nt, Homo sapiens
  misc_RNA (1)...(19): siRNA sense strand
ccaagaaagcauggacaca

SEQ ID NO: 2441032 - RNA, 19 nt, Homo sapiens
  misc_RNA (1)...(19): siRNA sense strand
ccugcauccuaaagauauu

SEQ ID NO: 2441033 - RNA, 19 nt, Homo sapiens
  misc_RNA (1)...(19): siRNA sense strand
agaauauacagaacaccaa

SEQ ID NO: 2441034 - RNA, 19 nt, Homo sapiens
  misc_RNA (1)...(19): siRNA sense strand
uguccaggaaauuagauaa

SEQ ID NO: 2441035 - RNA, 19 nt, Homo sapiens
  misc_RNA (1)...(19): siRNA sense strand
agauauaaccccugggcca

SEQ ID NO: 2441036 - RNA, 19 nt, Homo sapiens
  misc_RNA (1)...(19): siRNA sense strand
auccauacacagaagcaaa

SEQ ID NO: 2441037 - RNA, 19 nt, Homo sapiens
  misc_RNA (1)...(19): siRNA sense strand
gcagaaugucauaggcaag

SEQ ID NO: 2441038 - RNA, 19 nt, Homo sapiens
  misc_RNA (1)...(19): siRNA sense strand
ugcagaaugucauaggcaa

SEQ ID NO: 2441039 - RNA, 19 nt, Homo sapiens
  misc_RNA (1)...(19): siRNA sense strand
gcuccagcccauugaacau

SEQ ID NO: 2441040 - RNA, 19 nt, Homo sapiens
  misc_RNA (1)...(19): siRNA sense strand
cgaccaaggaucaaguagu

SEQ ID NO: 2441041 - RNA, 19 nt, Homo sapiens
  misc_RNA (1)...(19): siRNA sense strand
cugacuaccaagaaagcau

SEQ ID NO: 2441042 - RNA, 19 nt, Homo sapiens
  misc_RNA (1)...(19): siRNA sense strand
cuacggagucgaugguuca

SEQ ID NO: 2441043 - RNA, 19 nt, Homo sapiens
  misc_RNA (1)...(19): siRNA sense strand
acgcaauguccaggaaauu

SEQ ID NO: 2441044 - RNA, 19 nt, Homo sapiens
  misc_RNA (1)...(19): siRNA sense strand
agucgaugguucaguuuca

SEQ ID NO: 2441045 - RNA, 19 nt, Homo sapiens
  misc_RNA (1)...(19): siRNA sense strand
gugaagaaaaugugaagua

SEQ ID NO: 2441046 - RNA, 19 nt, Homo sapiens
  misc_RNA (1)...(19): siRNA sense strand
guauaauaaucgugagcgu

SEQ ID NO: 2441047 - RNA, 19 nt, Homo sapiens
  misc_RNA (1)...(19): siRNA sense strand
cugaaagagacuugugaga

SEQ ID NO: 2441048 - RNA, 19 nt, Homo sapiens
  misc_RNA (1)...(19): siRNA sense strand
ucugaagagaagagaauuu

SEQ ID NO: 2441049 - RNA, 19 nt, Homo sapiens
  misc_RNA (1)...(19): siRNA sense strand
gaagagaauuucaugcaga

SEQ ID NO: 2441050 - RNA, 19 nt, Homo sapiens
  misc_RNA (1)...(19): siRNA sense strand
cugcaaugcucgcuggaga

SEQ ID NO: 2441051 - RNA, 19 nt, Homo sapiens
  misc_RNA (1)...(19): siRNA sense strand
cuguaguggaggagagcuu

SEQ ID NO: 2441052 - RNA, 19 nt, Homo sapiens
  misc_RNA (1)...(19): siRNA sense strand
uggaauaacucacagggau

SEQ ID NO: 2441053 - RNA, 19 nt, Homo sapiens
  misc_RNA (1)...(19): siRNA sense strand
gugauggauuggaguucaa

SEQ ID NO: 2441054 - RNA, 19 nt, Homo sapiens
  misc_RNA (1)...(19): siRNA sense strand
ucacaggagagaaggcaau

SEQ ID NO: 2441055 - RNA, 19 nt, Homo sapiens
  misc_RNA (1)...(19): siRNA sense strand
ccucaaaaucucagacuuu

SEQ ID NO: 2441056 - RNA, 19 nt, Homo sapiens
  misc_RNA (1)...(19): siRNA sense strand
gagaaggugccuauggaga

SEQ ID NO: 2441057 - RNA, 19 nt, Homo sapiens
  misc_RNA (1)...(19): siRNA sense strand
auaaauugguacaagggau

SEQ ID NO: 2441058 - RNA, 19 nt, Homo sapiens
  misc_RNA (1)...(19): siRNA sense strand
gaacaagaugugugguacu

SEQ ID NO: 2441059 - RNA, 19 nt, Homo sapiens
  misc_RNA (1)...(19): siRNA sense strand
guugagaauccaucagcaa

SEQ ID NO: 2441060 - RNA, 19 nt, Homo sapiens
  misc_RNA (1)...(19): siRNA sense strand
ucaacaacugauaggagaa

SEQ ID NO: 2441061 - RNA, 19 nt, Homo sapiens
  misc_RNA (1)...(19): siRNA sense strand
acaacugauaggagaaaca

SEQ ID NO: 2441062 - RNA, 19 nt, Homo sapiens
  misc_RNA (1)...(19): siRNA sense strand
ccugaagauuaaagggaag

SEQ ID NO: 2441063 - RNA, 19 nt, Homo sapiens
  misc_RNA (1)...(19): siRNA sense strand
uguuugguccuguggaaua

SEQ ID NO: 2441064 - RNA, 19 nt, Homo sapiens
  misc_RNA (1)...(19): siRNA sense strand
cuguuggaugaaagggaua

SEQ ID NO: 2441065 - RNA, 19 nt, Homo sapiens
  misc_RNA (1)...(19): siRNA sense strand
aaccagaugcucagagauu

SEQ ID NO: 2441066 - RNA, 19 nt, Homo sapiens
  misc_RNA (1)...(19): siRNA sense strand
gcuuuugaauagucaguua

SEQ ID NO: 2441067 - RNA, 19 nt, Homo sapiens
  misc_RNA (1)...(19): siRNA sense strand
aagaaagagaucuguauca

SEQ ID NO: 2441068 - RNA, 19 nt, Homo sapiens
  misc_RNA (1)...(19): siRNA sense strand
ggcuaucaauggaagaaaa

SEQ ID NO: 2441069 - RNA, 19 nt, Homo sapiens
  misc_RNA (1)...(19): siRNA sense strand
uugaacaagauguguggua

SEQ ID NO: 2441070 - RNA, 19 nt, Homo sapiens
  misc_RNA (1)...(19): siRNA sense strand
cuugugagaaguugggcua

SEQ ID NO: 2441071 - RNA, 19 nt, Homo sapiens
  misc_RNA (1)...(19): siRNA sense strand
cugauaggagaaacaauaa

SEQ ID NO: 2441072 - RNA, 19 nt, Homo sapiens
  misc_RNA (1)...(19): siRNA sense strand
aggagaaacaauaaacuca

SEQ ID NO: 2441073 - RNA, 19 nt, Homo sapiens
  misc_RNA (1)...(19): siRNA sense strand
auauguugcuccagaacuu

SEQ ID NO: 2441074 - RNA, 19 nt, Homo sapiens
  misc_RNA (1)...(19): siRNA sense strand
ggugcaaacccugggagaa

SEQ ID NO: 2441075 - RNA, 19 nt, Homo sapiens
  misc_RNA (1)...(19): siRNA sense strand
uuucuaagggugauggauu

SEQ ID NO: 2441076 - RNA, 19 nt, Homo sapiens
  misc_RNA (1)...(19): siRNA sense strand
agggauauuaaaccagaaa

SEQ ID NO: 2441077 - RNA, 19 nt, Homo sapiens
  misc_RNA (1)...(19): siRNA sense strand
agauaugaagcgugccgua

SEQ ID NO: 2441078 - RNA, 19 nt, Homo sapiens
  misc_RNA (1)...(19): siRNA sense strand
aagcagucgcagugaagau

SEQ ID NO: 2441079 - RNA, 19 nt, Homo sapiens
  misc_RNA (1)...(19): siRNA sense strand
cuugcugugaauagaguaa

SEQ ID NO: 2441080 - RNA, 19 nt, Homo sapiens
  misc_RNA (1)...(19): siRNA sense strand
agaauuucaugcagaacca

SEQ ID NO: 2441081 - RNA, 19 nt, Homo sapiens
  misc_RNA (1)...(19): siRNA sense strand
ugagaauccaucagcaaga

SEQ ID NO: 2441082 - RNA, 19 nt, Homo sapiens
  misc_RNA (1)...(19): siRNA sense strand
gggcuaucaauggaagaaa

SEQ ID NO: 2441083 - RNA, 19 nt, Homo sapiens
  misc_RNA (1)...(19): siRNA sense strand
gaugaaagggauaaccuca

SEQ ID NO: 2441084 - RNA, 19 nt, Homo sapiens
  misc_RNA (1)...(19): siRNA sense strand
uccugaagauuaaagggaa

SEQ ID NO: 2441085 - RNA, 19 nt, Homo sapiens
  misc_RNA (1)...(19): siRNA sense strand
agugaagauuguagauaug

SEQ ID NO: 2441086 - RNA, 19 nt, Homo sapiens
  misc_RNA (1)...(19): siRNA sense strand
cugaagaagcagucgcagu

SEQ ID NO: 2441087 - RNA, 19 nt, Homo sapiens
  misc_RNA (1)...(19): siRNA sense strand
guacaagggaucagcuuuu

SEQ ID NO: 2441088 - RNA, 19 nt, Homo sapiens
  misc_RNA (1)...(19): siRNA sense strand
aguuguaugaaucagguua

SEQ ID NO: 2441089 - RNA, 19 nt, Homo sapiens
  misc_RNA (1)...(19): siRNA sense strand
guauuauggaagagaguuu

SEQ ID NO: 2441090 - RNA, 19 nt, Homo sapiens
  misc_RNA (1)...(19): siRNA sense strand
acacaugaugagagagauu

SEQ ID NO: 2441091 - RNA, 19 nt, Homo sapiens
  misc_RNA (1)...(19): siRNA sense strand
guuuauagaaucugccaaa

SEQ ID NO: 2441092 - RNA, 19 nt, Homo sapiens
  misc_RNA (1)...(19): siRNA sense strand
ucuuaauucugaaggacua

SEQ ID NO: 2441093 - RNA, 19 nt, Homo sapiens
  misc_RNA (1)...(19): siRNA sense strand
agacacaugaugagagaga

SEQ ID NO: 2441094 - RNA, 19 nt, Homo sapiens
  misc_RNA (1)...(19): siRNA sense strand
gaagagaguuucauggcau

SEQ ID NO: 2441095 - RNA, 19 nt, Homo sapiens
  misc_RNA (1)...(19): siRNA sense strand
ccggaugagcaauuggaaa

SEQ ID NO: 2441096 - RNA, 19 nt, Homo sapiens
  misc_RNA (1)...(19): siRNA sense strand
ugaaagaaaacgagcaaau

SEQ ID NO: 2441097 - RNA, 19 nt, Homo sapiens
  misc_RNA (1)...(19): siRNA sense strand
ggccaauggugguagacau

SEQ ID NO: 2441098 - RNA, 19 nt, Homo sapiens
  misc_RNA (1)...(19): siRNA sense strand
gcacuuuguuggggagaaa

SEQ ID NO: 2441099 - RNA, 19 nt, Homo sapiens
  misc_RNA (1)...(19): siRNA sense strand
gcauacauucagagggcca

SEQ ID NO: 2441100 - RNA, 19 nt, Homo sapiens
  misc_RNA (1)...(19): siRNA sense strand
guucauaagcaguguucca

SEQ ID NO: 2441101 - RNA, 19 nt, Homo sapiens
  misc_RNA (1)...(19): siRNA sense strand
cggaugagcaauuggaaac

SEQ ID NO: 2441102 - RNA, 19 nt, Homo sapiens
  misc_RNA (1)...(19): siRNA sense strand
guacuugcgagguggaaaa

SEQ ID NO: 2441103 - RNA, 19 nt, Homo sapiens
  misc_RNA (1)...(19): siRNA sense strand
gauugagucuagaggucuu

SEQ ID NO: 2441104 - RNA, 19 nt, Homo sapiens
  misc_RNA (1)...(19): siRNA sense strand
ggaaaacagaccaaaguau

SEQ ID NO: 2441105 - RNA, 19 nt, Homo sapiens
  misc_RNA (1)...(19): siRNA sense strand
cagcagaauacauugccaa

SEQ ID NO: 2441106 - RNA, 19 nt, Homo sapiens
  misc_RNA (1)...(19): siRNA sense strand
ggauggggugucagagaaa

SEQ ID NO: 2441107 - RNA, 19 nt, Homo sapiens
  misc_RNA (1)...(19): siRNA sense strand
cugugaacauguaugaaga

SEQ ID NO: 2441108 - RNA, 19 nt, Homo sapiens
  misc_RNA (1)...(19): siRNA sense strand
ccaccugcucacugcgaaa

SEQ ID NO: 2441109 - RNA, 19 nt, Homo sapiens
  misc_RNA (1)...(19): siRNA sense strand
gugaaagcacauaccacua

SEQ ID NO: 2441110 - RNA, 19 nt, Homo sapiens
  misc_RNA (1)...(19): siRNA sense strand
cgagcaaauuccaaaauau

SEQ ID NO: 2441111 - RNA, 19 nt, Homo sapiens
  misc_RNA (1)...(19): siRNA sense strand
gagauugagucuagagguc

SEQ ID NO: 2441112 - RNA, 19 nt, Homo sapiens
  misc_RNA (1)...(19): siRNA sense strand
ucuuaugaaugcagagaac

SEQ ID NO: 2441113 - RNA, 19 nt, Homo sapiens
  misc_RNA (1)...(19): siRNA sense strand
augcagagaaccuuggaau

SEQ ID NO: 2441114 - RNA, 19 nt, Homo sapiens
  misc_RNA (1)...(19): siRNA sense strand
gggagugaaaugugcagau

SEQ ID NO: 2441115 - RNA, 19 nt, Homo sapiens
  misc_RNA (1)...(19): siRNA sense strand
ggagaaacgcuuugagucc

SEQ ID NO: 2441116 - RNA, 19 nt, Homo sapiens
  misc_RNA (1)...(19): siRNA sense strand
gagaaaagguugacaucac

SEQ ID NO: 2441117 - RNA, 19 nt, Homo sapiens
  misc_RNA (1)...(19): siRNA sense strand
cugaaggacuauaccgagu

SEQ ID NO: 2441118 - RNA, 19 nt, Homo sapiens
  misc_RNA (1)...(19): siRNA sense strand
gaagaugucaagauggcuu

SEQ ID NO: 2441119 - RNA, 19 nt, Homo sapiens
  misc_RNA (1)...(19): siRNA sense strand
ggcuuuaagauuuggaagu

SEQ ID NO: 2441120 - RNA, 19 nt, Homo sapiens
  misc_RNA (1)...(19): siRNA sense strand
cuccagaacuagacgccau

SEQ ID NO: 2441121 - RNA, 19 nt, Homo sapiens
  misc_RNA (1)...(19): siRNA sense strand
auuucaaggugcauacauu

SEQ ID NO: 2441122 - RNA, 19 nt, Homo sapiens
  misc_RNA (1)...(19): siRNA sense strand
ugaacauggacgagcucaa

SEQ ID NO: 2441123 - RNA, 19 nt, Homo sapiens
  misc_RNA (1)...(19): siRNA sense strand
uggacgagcucaagcacca

SEQ ID NO: 2441124 - RNA, 19 nt, Homo sapiens
  misc_RNA (1)...(19): siRNA sense strand
uggcagagcuggaggacga

SEQ ID NO: 2441125 - RNA, 19 nt, Homo sapiens
  misc_RNA (1)...(19): siRNA sense strand
cugaggacacugugggaca

SEQ ID NO: 2441126 - RNA, 19 nt, Homo sapiens
  misc_RNA (1)...(19): siRNA sense strand
cggcuuauuaugaggagca

SEQ ID NO: 2441127 - RNA, 19 nt, Homo sapiens
  misc_RNA (1)...(19): siRNA sense strand
acgacuucaaagagggcua

SEQ ID NO: 2441128 - RNA, 19 nt, Homo sapiens
  misc_RNA (1)...(19): siRNA sense strand
gugaaaaguuggaacgcau

SEQ ID NO: 2441129 - RNA, 19 nt, Homo sapiens
  misc_RNA (1)...(19): siRNA sense strand
uauuaaagcuuuuggacga

SEQ ID NO: 2441130 - RNA, 19 nt, Homo sapiens
  misc_RNA (1)...(19): siRNA sense strand
ggaacauugcugaagaacu

SEQ ID NO: 2441131 - RNA, 19 nt, Homo sapiens
  misc_RNA (1)...(19): siRNA sense strand
caaguauguccgugguuca

SEQ ID NO: 2441132 - RNA, 19 nt, Homo sapiens
  misc_RNA (1)...(19): siRNA sense strand
uauuaaagcuuuuggacga

SEQ ID NO: 2441133 - RNA, 19 nt, Homo sapiens
  misc_RNA (1)...(19): siRNA sense strand
caaguauguccgugguuca

SEQ ID NO: 2441134 - RNA, 19 nt, Homo sapiens
  misc_RNA (1)...(19): siRNA sense strand
ccaaauuacuacaaagcau

SEQ ID NO: 2441135 - RNA, 19 nt, Homo sapiens
  misc_RNA (1)...(19): siRNA sense strand
gcauacacuggacgagaaa

SEQ ID NO: 2441136 - RNA, 19 nt, Homo sapiens
  misc_RNA (1)...(19): siRNA sense strand
ccugugaaccuaagaguga

SEQ ID NO: 2441137 - RNA, 19 nt, Homo sapiens
  misc_RNA (1)...(19): siRNA sense strand
gugaaauacgggaccgaga

SEQ ID NO: 2441138 - RNA, 19 nt, Homo sapiens
  misc_RNA (1)...(19): siRNA sense strand
ccggucagucccaggguaa

SEQ ID NO: 2441139 - RNA, 19 nt, Homo sapiens
  misc_RNA (1)...(19): siRNA sense strand
cauauguaguagacgguca

SEQ ID NO: 2441140 - RNA, 19 nt, Homo sapiens
  misc_RNA (1)...(19): siRNA sense strand
ggaccgagaugguggcaug

SEQ ID NO: 2441141 - RNA, 19 nt, Homo sapiens
  misc_RNA (1)...(19): siRNA sense strand
guaaagcaacccauugaaa

SEQ ID NO: 2441142 - RNA, 19 nt, Homo sapiens
  misc_RNA (1)...(19): siRNA sense strand
acccuaugaaugugaaaua

SEQ ID NO: 2441143 - RNA, 19 nt, Homo sapiens
  misc_RNA (1)...(19): siRNA sense strand
ggugauaggacuagaggag

SEQ ID NO: 2441144 - RNA, 19 nt, Homo sapiens
  misc_RNA (1)...(19): siRNA sense strand
aaccuaagagugagaacua

SEQ ID NO: 2441145 - RNA, 19 nt, Homo sapiens
  misc_RNA (1)...(19): siRNA sense strand
auacacuggacgagaaaca

SEQ ID NO: 2441146 - RNA, 19 nt, Homo sapiens
  misc_RNA (1)...(19): siRNA sense strand
ccuaagagugagaacuaca

SEQ ID NO: 2441147 - RNA, 19 nt, Homo sapiens
  misc_RNA (1)...(19): siRNA sense strand
aagcgaggugauaggacua

SEQ ID NO: 2441148 - RNA, 19 nt, Homo sapiens
  misc_RNA (1)...(19): siRNA sense strand
ccacaauuugccucagaau

SEQ ID NO: 2441149 - RNA, 19 nt, Homo sapiens
  misc_RNA (1)...(19): siRNA sense strand
caucugguacaaaggacaa

SEQ ID NO: 2441150 - RNA, 19 nt, Homo sapiens
  misc_RNA (1)...(19): siRNA sense strand
accuacauuugguggcuaa

SEQ ID NO: 2441151 - RNA, 19 nt, Homo sapiens
  misc_RNA (1)...(19): siRNA sense strand
gcuccaaauccaugacagu

SEQ ID NO: 2441152 - RNA, 19 nt, Homo sapiens
  misc_RNA (1)...(19): siRNA sense strand
uggacgagaaacaguauau

SEQ ID NO: 2441153 - RNA, 19 nt, Homo sapiens
  misc_RNA (1)...(19): siRNA sense strand
agugagaacuacaccuaca

SEQ ID NO: 2441154 - RNA, 19 nt, Homo sapiens
  misc_RNA (1)...(19): siRNA sense strand
ggacccuaugaaugugaaa

SEQ ID NO: 2441155 - RNA, 19 nt, Homo sapiens
  misc_RNA (1)...(19): siRNA sense strand
guuucagcaaucaggacaa

SEQ ID NO: 2441156 - RNA, 19 nt, Homo sapiens
  misc_RNA (1)...(19): siRNA sense strand
gggcaagugcagacaccuu

SEQ ID NO: 2441157 - RNA, 19 nt, Homo sapiens
  misc_RNA (1)...(19): siRNA sense strand
acaucuguguggaggacuu

SEQ ID NO: 2441158 - RNA, 19 nt, Homo sapiens
  misc_RNA (1)...(19): siRNA sense strand
acugcaagugggucaauaa

SEQ ID NO: 2441159 - RNA, 19 nt, Homo sapiens
  misc_RNA (1)...(19): siRNA sense strand
guuuaagagaguagaggaa

SEQ ID NO: 2441160 - RNA, 19 nt, Homo sapiens
  misc_RNA (1)...(19): siRNA sense strand
ugaaagaauuugaagcugu

SEQ ID NO: 2441161 - RNA, 19 nt, Homo sapiens
  misc_RNA (1)...(19): siRNA sense strand
uggauuuggucuagggagu

SEQ ID NO: 2441162 - RNA, 19 nt, Homo sapiens
  misc_RNA (1)...(19): siRNA sense strand
acgcaaguugguagaagaa

SEQ ID NO: 2441163 - RNA, 19 nt, Homo sapiens
  misc_RNA (1)...(19): siRNA sense strand
ccgacauauuucagcauga

SEQ ID NO: 2441164 - RNA, 19 nt, Homo sapiens
  misc_RNA (1)...(19): siRNA sense strand
ucucacagaaagacagaau

SEQ ID NO: 2441165 - RNA, 19 nt, Homo sapiens
  misc_RNA (1)...(19): siRNA sense strand
cccagaaagaaguagaaaa

SEQ ID NO: 2441166 - RNA, 19 nt, Homo sapiens
  misc_RNA (1)...(19): siRNA sense strand
uggagauagagaagagcuu

SEQ ID NO: 2441167 - RNA, 19 nt, Homo sapiens
  misc_RNA (1)...(19): siRNA sense strand
cugaagaaguuuaagagag

SEQ ID NO: 2441168 - RNA, 19 nt, Homo sapiens
  misc_RNA (1)...(19): siRNA sense strand
gaaacugguaaaagagaaa

SEQ ID NO: 2441169 - RNA, 19 nt, Homo sapiens
  misc_RNA (1)...(19): siRNA sense strand
agauggaagaacugcuaaa

SEQ ID NO: 2441170 - RNA, 19 nt, Homo sapiens
  misc_RNA (1)...(19): siRNA sense strand
cuguaugagcaaauugaaa

SEQ ID NO: 2441171 - RNA, 19 nt, Homo sapiens
  misc_RNA (1)...(19): siRNA sense strand
acuacaaaugagugccaua

SEQ ID NO: 2441172 - RNA, 19 nt, Homo sapiens
  misc_RNA (1)...(19): siRNA sense strand
acagauaaucaauggaagu

SEQ ID NO: 2441173 - RNA, 19 nt, Homo sapiens
  misc_RNA (1)...(19): siRNA sense strand
gcaaguggcuguaugagca

SEQ ID NO: 2441174 - RNA, 19 nt, Homo sapiens
  misc_RNA (1)...(19): siRNA sense strand
aaucaauggaaguguggau

SEQ ID NO: 2441175 - RNA, 19 nt, Homo sapiens
  misc_RNA (1)...(19): siRNA sense strand
caaaaugcacacagauaau

SEQ ID NO: 2441176 - RNA, 19 nt, Homo sapiens
  misc_RNA (1)...(19): siRNA sense strand
gaaugacacuuucugggaa

SEQ ID NO: 2441177 - RNA, 19 nt, Homo sapiens
  misc_RNA (1)...(19): siRNA sense strand
acgaauccaggaaggcaaa

SEQ ID NO: 2441178 - RNA, 19 nt, Homo sapiens
  misc_RNA (1)...(19): siRNA sense strand
agaaacugguaaaagagaa

SEQ ID NO: 2441179 - RNA, 19 nt, Homo sapiens
  misc_RNA (1)...(19): siRNA sense strand
gugaaaucauagaagcaaa

SEQ ID NO: 2441180 - RNA, 19 nt, Homo sapiens
  misc_RNA (1)...(19): siRNA sense strand
ggaccugagcuuaggacaa

SEQ ID NO: 2441181 - RNA, 19 nt, Homo sapiens
  misc_RNA (1)...(19): siRNA sense strand
gggagaaggaggaccgaau

SEQ ID NO: 2441182 - RNA, 19 nt, Homo sapiens
  misc_RNA (1)...(19): siRNA sense strand
ccaagaaacauuugcaaaa

SEQ ID NO: 2441183 - RNA, 19 nt, Homo sapiens
  misc_RNA (1)...(19): siRNA sense strand
gugaaguguccaacagaua

SEQ ID NO: 2441184 - RNA, 19 nt, Homo sapiens
  misc_RNA (1)...(19): siRNA sense strand
caggauggaggaagaguaa

SEQ ID NO: 2441185 - RNA, 19 nt, Homo sapiens
  misc_RNA (1)...(19): siRNA sense strand
gagacgaggcagagcaaca

SEQ ID NO: 2441186 - RNA, 19 nt, Homo sapiens
  misc_RNA (1)...(19): siRNA sense strand
acaaaugaguacacggaca

SEQ ID NO: 2441187 - RNA, 19 nt, Homo sapiens
  misc_RNA (1)...(19): siRNA sense strand
ggaaacaauccuuacgcaa

SEQ ID NO: 2441188 - RNA, 19 nt, Homo sapiens
  misc_RNA (1)...(19): siRNA sense strand
gcucaugcacaaugggaau

SEQ ID NO: 2441189 - RNA, 19 nt, Homo sapiens
  misc_RNA (1)...(19): siRNA sense strand
cgaaaauguccaagccaua

SEQ ID NO: 2441190 - RNA, 19 nt, Homo sapiens
  misc_RNA (1)...(19): siRNA sense strand
ucucagagcaucaggguca

SEQ ID NO: 2441191 - RNA, 19 nt, Homo sapiens
  misc_RNA (1)...(19): siRNA sense strand
ccuaaauggccgaauccaa

SEQ ID NO: 2441192 - RNA, 19 nt, Homo sapiens
  misc_RNA (1)...(19): siRNA sense strand
agcaaagaccuuaggaaaa

SEQ ID NO: 2441193 - RNA, 19 nt, Homo sapiens
  misc_RNA (1)...(19): siRNA sense strand
caguagacaaagagagcga

SEQ ID NO: 2441194 - RNA, 19 nt, Homo sapiens
  misc_RNA (1)...(19): siRNA sense strand
ccguauuacuccauuaaau

SEQ ID NO: 2441195 - RNA, 19 nt, Homo sapiens
  misc_RNA (1)...(19): siRNA sense strand
gagagagacacgauggaga

SEQ ID NO: 2441196 - RNA, 19 nt, Homo sapiens
  misc_RNA (1)...(19): siRNA sense strand
cuacgauauugaaugcaaa

SEQ ID NO: 2441197 - RNA, 19 nt, Homo sapiens
  misc_RNA (1)...(19): siRNA sense strand
cgccaagauggaagagcaa

SEQ ID NO: 2441198 - RNA, 19 nt, Homo sapiens
  misc_RNA (1)...(19): siRNA sense strand
auggaaggcucccaagaaa

SEQ ID NO: 2441199 - RNA, 19 nt, Homo sapiens
  misc_RNA (1)...(19): siRNA sense strand
aaaugugggacuugguaua

SEQ ID NO: 2441200 - RNA, 19 nt, Homo sapiens
  misc_RNA (1)...(19): siRNA sense strand
ugguauaaguucacacuga

SEQ ID NO: 2441201 - RNA, 19 nt, Homo sapiens
  misc_RNA (1)...(19): siRNA sense strand
gaaagacaguaacgggaca

SEQ ID NO: 2441202 - RNA, 19 nt, Homo sapiens
  misc_RNA (1)...(19): siRNA sense strand
ugcaaagaguuuagcugaa

SEQ ID NO: 2441203 - RNA, 19 nt, Homo sapiens
  misc_RNA (1)...(19): siRNA sense strand
cagaaaaccaugagaggca

SEQ ID NO: 2441204 - RNA, 19 nt, Homo sapiens
  misc_RNA (1)...(19): siRNA sense strand
cgugaaacagccacugaaa

SEQ ID NO: 2441205 - RNA, 19 nt, Homo sapiens
  misc_RNA (1)...(19): siRNA sense strand
gggccuucuucucaggaaa

SEQ ID NO: 2441206 - RNA, 19 nt, Homo sapiens
  misc_RNA (1)...(19): siRNA sense strand
ucauagaagcaaagaccuu

SEQ ID NO: 2441207 - RNA, 19 nt, Homo sapiens
  misc_RNA (1)...(19): siRNA sense strand
cuucagauacguuaagcaa

SEQ ID NO: 2441208 - RNA, 19 nt, Homo sapiens
  misc_RNA (1)...(19): siRNA sense strand
ugacaggaacugaggacca

SEQ ID NO: 2441209 - RNA, 19 nt, Homo sapiens
  misc_RNA (1)...(19): siRNA sense strand
cccaagaaacauuugcaaa

SEQ ID NO: 2441210 - RNA, 19 nt, Homo sapiens
  misc_RNA (1)...(19): siRNA sense strand
uguccaagccauagcaaca

SEQ ID NO: 2441211 - RNA, 19 nt, Homo sapiens
  misc_RNA (1)...(19): siRNA sense strand
caacaucaccagaaagcau

SEQ ID NO: 2441212 - RNA, 19 nt, Homo sapiens
  misc_RNA (1)...(19): siRNA sense strand
cggagagcugggugagauu

SEQ ID NO: 2441213 - RNA, 19 nt, Homo sapiens
  misc_RNA (1)...(19): siRNA sense strand
gucaaauggaugaaagaca

SEQ ID NO: 2441214 - RNA, 19 nt, Homo sapiens
  misc_RNA (1)...(19): siRNA sense strand
gagagcugggugagauuaa

SEQ ID NO: 2441215 - RNA, 19 nt, Homo sapiens
  misc_RNA (1)...(19): siRNA sense strand
cugcaggaucaguagacaa

SEQ ID NO: 2441216 - RNA, 19 nt, Homo sapiens
  misc_RNA (1)...(19): siRNA sense strand
uggaagagcaacugaggca

SEQ ID NO: 2441217 - RNA, 19 nt, Homo sapiens
  misc_RNA (1)...(19): siRNA sense strand
cggcagggacaaaugagua

SEQ ID NO: 2441218 - RNA, 19 nt, Homo sapiens
  misc_RNA (1)...(19): siRNA sense strand
ggacaaaugaguacacgga

SEQ ID NO: 2441219 - RNA, 19 nt, Homo sapiens
  misc_RNA (1)...(19): siRNA sense strand
caggaucaguagacaaaga

SEQ ID NO: 2441220 - RNA, 19 nt, Homo sapiens
  misc_RNA (1)...(19): siRNA sense strand
ccacauuaccucagcggga

SEQ ID NO: 2441221 - RNA, 19 nt, Homo sapiens
  misc_RNA (1)...(19): siRNA sense strand
cggaacugcuaaggugaua

SEQ ID NO: 2441222 - RNA, 19 nt, Homo sapiens
  misc_RNA (1)...(19): siRNA sense strand
cagucaaauggaugaaaga

SEQ ID NO: 2441223 - RNA, 19 nt, Homo sapiens
  misc_RNA (1)...(19): siRNA sense strand
ggcuaaagaggcugcgaga

SEQ ID NO: 2441224 - RNA, 19 nt, Homo sapiens
  misc_RNA (1)...(19): siRNA sense strand
aaacaauccuuacgcaaaa

SEQ ID NO: 2441225 - RNA, 19 nt, Homo sapiens
  misc_RNA (1)...(19): siRNA sense strand
aaucuuacacccugguaua

SEQ ID NO: 2441226 - RNA, 19 nt, Homo sapiens
  misc_RNA (1)...(19): siRNA sense strand
ccacgggcgaggagaucua

SEQ ID NO: 2441227 - RNA, 19 nt, Homo sapiens
  misc_RNA (1)...(19): siRNA sense strand
aggcagagcaacagcgcca

SEQ ID NO: 2441228 - RNA, 19 nt, Homo sapiens
  misc_RNA (1)...(19): siRNA sense strand
agguuuacacccuggacaa

SEQ ID NO: 2441229 - RNA, 19 nt, Homo sapiens
  misc_RNA (1)...(19): siRNA sense strand
aagcagaagacuccggcua

SEQ ID NO: 2441230 - RNA, 19 nt, Homo sapiens
  misc_RNA (1)...(19): siRNA sense strand
gagagacgaggcagagcaa

SEQ ID NO: 2441231 - RNA, 19 nt, Homo sapiens
  misc_RNA (1)...(19): siRNA sense strand
aaguggcauuugagaacaa

SEQ ID NO: 2441232 - RNA, 19 nt, Homo sapiens
  misc_RNA (1)...(19): siRNA sense strand
aggacgggauuuauggcaa

SEQ ID NO: 2441233 - RNA, 19 nt, Homo sapiens
  misc_RNA (1)...(19): siRNA sense strand
gcaagaagcagcauggucu

SEQ ID NO: 2441234 - RNA, 19 nt, Homo sapiens
  misc_RNA (1)...(19): siRNA sense strand
ccaagauggaagagcaacu

SEQ ID NO: 2441235 - RNA, 19 nt, Homo sapiens
  misc_RNA (1)...(19): siRNA sense strand
cagucgagccacuagcaaa

SEQ ID NO: 2441236 - RNA, 19 nt, Homo sapiens
  misc_RNA (1)...(19): siRNA sense strand
ggauggaggaagaguaaug

SEQ ID NO: 2441237 - RNA, 19 nt, Homo sapiens
  misc_RNA (1)...(19): siRNA sense strand
ugaauauggcaguuccaaa

SEQ ID NO: 2441238 - RNA, 19 nt, Homo sapiens
  misc_RNA (1)...(19): siRNA sense strand
ccacgggagccuuguauau

SEQ ID NO: 2441239 - RNA, 19 nt, Homo sapiens
  misc_RNA (1)...(19): siRNA sense strand
uagcaggacgggacacaua

SEQ ID NO: 2441240 - RNA, 19 nt, Homo sapiens
  misc_RNA (1)...(19): siRNA sense strand
agaggcaacagcagugaaa

SEQ ID NO: 2441241 - RNA, 19 nt, Homo sapiens
  misc_RNA (1)...(19): siRNA sense strand
agacaaagagagcgacagu

SEQ ID NO: 2441242 - RNA, 19 nt, Homo sapiens
  misc_RNA (1)...(19): siRNA sense strand
ccuuugaguuuccaagauu

SEQ ID NO: 2441243 - RNA, 19 nt, Homo sapiens
  misc_RNA (1)...(19): siRNA sense strand
ucagagaaccaaagauguu

SEQ ID NO: 2441244 - RNA, 19 nt, Homo sapiens
  misc_RNA (1)...(19): siRNA sense strand
accagaaagcauaucaaua

SEQ ID NO: 2441245 - RNA, 19 nt, Homo sapiens
  misc_RNA (1)...(19): siRNA sense strand
acgccaagauggaagagca

SEQ ID NO: 2441246 - RNA, 19 nt, Homo sapiens
  misc_RNA (1)...(19): siRNA sense strand
gugaaaucauagaagcaaa

SEQ ID NO: 2441247 - RNA, 19 nt, Homo sapiens
  misc_RNA (1)...(19): siRNA sense strand
gggagaaggaggaccgaau

SEQ ID NO: 2441248 - RNA, 19 nt, Homo sapiens
  misc_RNA (1)...(19): siRNA sense strand
ccaagaaacauuugcaaaa

SEQ ID NO: 2441249 - RNA, 19 nt, Homo sapiens
  misc_RNA (1)...(19): siRNA sense strand
gugaaguguccaacagaua

SEQ ID NO: 2441250 - RNA, 19 nt, Homo sapiens
  misc_RNA (1)...(19): siRNA sense strand
gagacgaggcagagcaaca

SEQ ID NO: 2441251 - RNA, 19 nt, Homo sapiens
  misc_RNA (1)...(19): siRNA sense strand
gcucaugcacaaugggaau

SEQ ID NO: 2441252 - RNA, 19 nt, Homo sapiens
  misc_RNA (1)...(19): siRNA sense strand
cgaaaauguccaagccaua

SEQ ID NO: 2441253 - RNA, 19 nt, Homo sapiens
  misc_RNA (1)...(19): siRNA sense strand
ucucagagcaucaggguca

SEQ ID NO: 2441254 - RNA, 19 nt, Homo sapiens
  misc_RNA (1)...(19): siRNA sense strand
ccuaaauggccgaauccaa

SEQ ID NO: 2441255 - RNA, 19 nt, Homo sapiens
  misc_RNA (1)...(19): siRNA sense strand
agcaaagaccuuaggaaaa

SEQ ID NO: 2441256 - RNA, 19 nt, Homo sapiens
  misc_RNA (1)...(19): siRNA sense strand
ccguauuacuccauuaaau

SEQ ID NO: 2441257 - RNA, 19 nt, Homo sapiens
  misc_RNA (1)...(19): siRNA sense strand
cuacgauauugaaugcaaa

SEQ ID NO: 2441258 - RNA, 19 nt, Homo sapiens
  misc_RNA (1)...(19): siRNA sense strand
auggaaggcucccaagaaa

SEQ ID NO: 2441259 - RNA, 19 nt, Homo sapiens
  misc_RNA (1)...(19): siRNA sense strand
aaaugugggacuugguaua

SEQ ID NO: 2441260 - RNA, 19 nt, Homo sapiens
  misc_RNA (1)...(19): siRNA sense strand
ugguauaaguucacacuga

SEQ ID NO: 2441261 - RNA, 19 nt, Homo sapiens
  misc_RNA (1)...(19): siRNA sense strand
gaaagacaguaacgggaca

SEQ ID NO: 2441262 - RNA, 19 nt, Homo sapiens
  misc_RNA (1)...(19): siRNA sense strand
cagaaaaccaugagaggca

SEQ ID NO: 2441263 - RNA, 19 nt, Homo sapiens
  misc_RNA (1)...(19): siRNA sense strand
cgugaaacagccacugaaa

SEQ ID NO: 2441264 - RNA, 19 nt, Homo sapiens
  misc_RNA (1)...(19): siRNA sense strand
gggccuucuucucaggaaa

SEQ ID NO: 2441265 - RNA, 19 nt, Homo sapiens
  misc_RNA (1)...(19): siRNA sense strand
ucauagaagcaaagaccuu

SEQ ID NO: 2441266 - RNA, 19 nt, Homo sapiens
  misc_RNA (1)...(19): siRNA sense strand
ugacaggaacugaggacca

SEQ ID NO: 2441267 - RNA, 19 nt, Homo sapiens
  misc_RNA (1)...(19): siRNA sense strand
cccaagaaacauuugcaaa

SEQ ID NO: 2441268 - RNA, 19 nt, Homo sapiens
  misc_RNA (1)...(19): siRNA sense strand
uguccaagccauagcaaca

SEQ ID NO: 2441269 - RNA, 19 nt, Homo sapiens
  misc_RNA (1)...(19): siRNA sense strand
caacaucaccagaaagcau

SEQ ID NO: 2441270 - RNA, 19 nt, Homo sapiens
  misc_RNA (1)...(19): siRNA sense strand
cggagagcugggugagauu

SEQ ID NO: 2441271 - RNA, 19 nt, Homo sapiens
  misc_RNA (1)...(19): siRNA sense strand
gucaaauggaugaaagaca

SEQ ID NO: 2441272 - RNA, 19 nt, Homo sapiens
  misc_RNA (1)...(19): siRNA sense strand
gagagcugggugagauuaa

SEQ ID NO: 2441273 - RNA, 19 nt, Homo sapiens
  misc_RNA (1)...(19): siRNA sense strand
cggaacugcuaaggugaua

SEQ ID NO: 2441274 - RNA, 19 nt, Homo sapiens
  misc_RNA (1)...(19): siRNA sense strand
cagucaaauggaugaaaga

SEQ ID NO: 2441275 - RNA, 19 nt, Homo sapiens
  misc_RNA (1)...(19): siRNA sense strand
ggcuaaagaggcugcgaga

SEQ ID NO: 2441276 - RNA, 19 nt, Homo sapiens
  misc_RNA (1)...(19): siRNA sense strand
ccacgggcgaggagaucua

SEQ ID NO: 2441277 - RNA, 19 nt, Homo sapiens
  misc_RNA (1)...(19): siRNA sense strand
aggcagagcaacagcgcca

SEQ ID NO: 2441278 - RNA, 19 nt, Homo sapiens
  misc_RNA (1)...(19): siRNA sense strand
agguuuacacccuggacaa

SEQ ID NO: 2441279 - RNA, 19 nt, Homo sapiens
  misc_RNA (1)...(19): siRNA sense strand
aagcagaagacuccggcua

SEQ ID NO: 2441280 - RNA, 19 nt, Homo sapiens
  misc_RNA (1)...(19): siRNA sense strand
gagagacgaggcagagcaa

SEQ ID NO: 2441281 - RNA, 19 nt, Homo sapiens
  misc_RNA (1)...(19): siRNA sense strand
aaguggcauuugagaacaa

SEQ ID NO: 2441282 - RNA, 19 nt, Homo sapiens
  misc_RNA (1)...(19): siRNA sense strand
aggacgggauuuauggcaa

SEQ ID NO: 2441283 - RNA, 19 nt, Homo sapiens
  misc_RNA (1)...(19): siRNA sense strand
cagucgagccacuagcaaa

SEQ ID NO: 2441284 - RNA, 19 nt, Homo sapiens
  misc_RNA (1)...(19): siRNA sense strand
ccacgggagccuuguauau

SEQ ID NO: 2441285 - RNA, 19 nt, Homo sapiens
  misc_RNA (1)...(19): siRNA sense strand
uagcaggacgggacacaua

SEQ ID NO: 2441286 - RNA, 19 nt, Homo sapiens
  misc_RNA (1)...(19): siRNA sense strand
agaggcaacagcagugaaa

SEQ ID NO: 2441287 - RNA, 19 nt, Homo sapiens
  misc_RNA (1)...(19): siRNA sense strand
ccuuugaguuuccaagauu

SEQ ID NO: 2441288 - RNA, 19 nt, Homo sapiens
  misc_RNA (1)...(19): siRNA sense strand
ucagagaaccaaagauguu

SEQ ID NO: 2441289 - RNA, 19 nt, Homo sapiens
  misc_RNA (1)...(19): siRNA sense strand
accagaaagcauaucaaua

SEQ ID NO: 2441290 - RNA, 19 nt, Homo sapiens
  misc_RNA (1)...(19): siRNA sense strand
gagaaggaggaccgaauca

SEQ ID NO: 2441291 - RNA, 19 nt, Homo sapiens
  misc_RNA (1)...(19): siRNA sense strand
gugacuacuccauggauga

SEQ ID NO: 2441292 - RNA, 19 nt, Homo sapiens
  misc_RNA (1)...(19): siRNA sense strand
ugcaguacuccgaggacaa

SEQ ID NO: 2441293 - RNA, 19 nt, Homo sapiens
  misc_RNA (1)...(19): siRNA sense strand
gugaaaagguggugagucc

SEQ ID NO: 2441294 - RNA, 19 nt, Homo sapiens
  misc_RNA (1)...(19): siRNA sense strand
ccaaguggcauuugagaac

SEQ ID NO: 2441295 - RNA, 19 nt, Homo sapiens
  misc_RNA (1)...(19): siRNA sense strand
gguuaaaauuccugcgaug

SEQ ID NO: 2441296 - RNA, 19 nt, Homo sapiens
  misc_RNA (1)...(19): siRNA sense strand
gagcuggacgggcuggaaa

SEQ ID NO: 2441297 - RNA, 19 nt, Homo sapiens
  misc_RNA (1)...(19): siRNA sense strand
gaguaggaaucgucaguac

SEQ ID NO: 2441298 - RNA, 19 nt, Homo sapiens
  misc_RNA (1)...(19): siRNA sense strand
aagugaaaucauagaagca

SEQ ID NO: 2441299 - RNA, 19 nt, Homo sapiens
  misc_RNA (1)...(19): siRNA sense strand
cuauaucaucucagagcau

SEQ ID NO: 2441300 - RNA, 19 nt, Homo sapiens
  misc_RNA (1)...(19): siRNA sense strand
aauggaugaaagacaguaa

SEQ ID NO: 2441301 - RNA, 19 nt, Homo sapiens
  misc_RNA (1)...(19): siRNA sense strand
gcauaagugaaaucauaga

SEQ ID NO: 2441302 - RNA, 19 nt, Homo sapiens
  misc_RNA (1)...(19): siRNA sense strand
gggaccaggacgggauuua

SEQ ID NO: 2441303 - RNA, 19 nt, Homo sapiens
  misc_RNA (1)...(19): siRNA sense strand
ggaggaagacaguggcuac

SEQ ID NO: 2441304 - RNA, 19 nt, Homo sapiens
  misc_RNA (1)...(19): siRNA sense strand
aggcaacagcagugaaauc

SEQ ID NO: 2441305 - RNA, 19 nt, Homo sapiens
  misc_RNA (1)...(19): siRNA sense strand
ccagggcgcauaagugaaa

SEQ ID NO: 2441306 - RNA, 19 nt, Homo sapiens
  misc_RNA (1)...(19): siRNA sense strand
cgggagccuuguauauuaa

SEQ ID NO: 2441307 - RNA, 19 nt, Homo sapiens
  misc_RNA (1)...(19): siRNA sense strand
ccugcaagcauucgaccaa

SEQ ID NO: 2441308 - RNA, 19 nt, Homo sapiens
  misc_RNA (1)...(19): siRNA sense strand
ccgaaaauguccaagccau

SEQ ID NO: 2441309 - RNA, 19 nt, Homo sapiens
  misc_RNA (1)...(19): siRNA sense strand
caucacagcaauagcagga

SEQ ID NO: 2441310 - RNA, 19 nt, Homo sapiens
  misc_RNA (1)...(19): siRNA sense strand
gggaauuacaccugcauag

SEQ ID NO: 2441311 - RNA, 19 nt, Homo sapiens
  misc_RNA (1)...(19): siRNA sense strand
cucccaaguuugugguuca

SEQ ID NO: 2441312 - RNA, 19 nt, Homo sapiens
  misc_RNA (1)...(19): siRNA sense strand
agcaugucguggaggaaga

SEQ ID NO: 2441313 - RNA, 19 nt, Homo sapiens
  misc_RNA (1)...(19): siRNA sense strand
guggaagaugcgagggcaa

SEQ ID NO: 2441314 - RNA, 19 nt, Homo sapiens
  misc_RNA (1)...(19): siRNA sense strand
gcaagcuggugguggguca

SEQ ID NO: 2441315 - RNA, 19 nt, Homo sapiens
  misc_RNA (1)...(19): siRNA sense strand
aggcacugaaagaggacau

SEQ ID NO: 2441316 - RNA, 19 nt, Homo sapiens
  misc_RNA (1)...(19): siRNA sense strand
gauuacagaacccggguca

SEQ ID NO: 2441317 - RNA, 19 nt, Homo sapiens
  misc_RNA (1)...(19): siRNA sense strand
agagaauguugaugagaaa

SEQ ID NO: 2441318 - RNA, 19 nt, Homo sapiens
  misc_RNA (1)...(19): siRNA sense strand
ggauuaugcaugagagcaa

SEQ ID NO: 2441319 - RNA, 19 nt, Homo sapiens
  misc_RNA (1)...(19): siRNA sense strand
gugacagguuggaaagaaa

SEQ ID NO: 2441320 - RNA, 19 nt, Homo sapiens
  misc_RNA (1)...(19): siRNA sense strand
uggcaaagauggaaggguu

SEQ ID NO: 2441321 - RNA, 19 nt, Homo sapiens
  misc_RNA (1)...(19): siRNA sense strand
ggcaaagauggaaggguua

SEQ ID NO: 2441322 - RNA, 19 nt, Homo sapiens
  misc_RNA (1)...(19): siRNA sense strand
uaccaagaguuuagggcaa

SEQ ID NO: 2441323 - RNA, 19 nt, Homo sapiens
  misc_RNA (1)...(19): siRNA sense strand
acaagggagcugagguuaa

SEQ ID NO: 2441324 - RNA, 19 nt, Homo sapiens
  misc_RNA (1)...(19): siRNA sense strand
uggucaggcuggagaauuu

SEQ ID NO: 2441325 - RNA, 19 nt, Homo sapiens
  misc_RNA (1)...(19): siRNA sense strand
cguccaauuucuugucaaa

SEQ ID NO: 2441326 - RNA, 19 nt, Homo sapiens
  misc_RNA (1)...(19): siRNA sense strand
cagcauugaccuagugauu

SEQ ID NO: 2441327 - RNA, 19 nt, Homo sapiens
  misc_RNA (1)...(19): siRNA sense strand
uuguauaagaugcgugaua

SEQ ID NO: 2441328 - RNA, 19 nt, Homo sapiens
  misc_RNA (1)...(19): siRNA sense strand
guauaagaugcgugauauu

SEQ ID NO: 2441329 - RNA, 19 nt, Homo sapiens
  misc_RNA (1)...(19): siRNA sense strand
gggcaaaggagauuggguu

SEQ ID NO: 2441330 - RNA, 19 nt, Homo sapiens
  misc_RNA (1)...(19): siRNA sense strand
ugaaugaagcacuggaauu

SEQ ID NO: 2441331 - RNA, 19 nt, Homo sapiens
  misc_RNA (1)...(19): siRNA sense strand
ccagaaagcuuuacggaug

SEQ ID NO: 2441332 - RNA, 19 nt, Homo sapiens
  misc_RNA (1)...(19): siRNA sense strand
agauugaauuugaagguca

SEQ ID NO: 2441333 - RNA, 19 nt, Homo sapiens
  misc_RNA (1)...(19): siRNA sense strand
gguuaaacagauugauaca

SEQ ID NO: 2441334 - RNA, 19 nt, Homo sapiens
  misc_RNA (1)...(19): siRNA sense strand
ugucaaaguguacggcaaa

SEQ ID NO: 2441335 - RNA, 19 nt, Homo sapiens
  misc_RNA (1)...(19): siRNA sense strand
ggagcugagguuaaagaaa

SEQ ID NO: 2441336 - RNA, 19 nt, Homo sapiens
  misc_RNA (1)...(19): siRNA sense strand
cauaauuccugcugacuau

SEQ ID NO: 2441337 - RNA, 19 nt, Homo sapiens
  misc_RNA (1)...(19): siRNA sense strand
agaacagccagauggguua

SEQ ID NO: 2441338 - RNA, 19 nt, Homo sapiens
  misc_RNA (1)...(19): siRNA sense strand
gaaaugaugucuuggugau

SEQ ID NO: 2441339 - RNA, 19 nt, Homo sapiens
  misc_RNA (1)...(19): siRNA sense strand
augucaaaguguacggcaa

SEQ ID NO: 2441340 - RNA, 19 nt, Homo sapiens
  misc_RNA (1)...(19): siRNA sense strand
agacaagggagcugagguu

SEQ ID NO: 2441341 - RNA, 19 nt, Homo sapiens
  misc_RNA (1)...(19): siRNA sense strand
ucuuggugauugaguguaa

SEQ ID NO: 2441342 - RNA, 19 nt, Homo sapiens
  misc_RNA (1)...(19): siRNA sense strand
ucagaaugucagaaagauu

SEQ ID NO: 2441343 - RNA, 19 nt, Homo sapiens
  misc_RNA (1)...(19): siRNA sense strand
ggauccaaauaaacagaau

SEQ ID NO: 2441344 - RNA, 19 nt, Homo sapiens
  misc_RNA (1)...(19): siRNA sense strand
ucacaaacaaacaggcuuu

SEQ ID NO: 2441345 - RNA, 19 nt, Homo sapiens
  misc_RNA (1)...(19): siRNA sense strand
gugugaaaguccugggaac

SEQ ID NO: 2441346 - RNA, 19 nt, Homo sapiens
  misc_RNA (1)...(19): siRNA sense strand
agaaaagguuccugcaauu

SEQ ID NO: 2441347 - RNA, 19 nt, Homo sapiens
  misc_RNA (1)...(19): siRNA sense strand
aguaaagcgaggagcugaa

SEQ ID NO: 2441348 - RNA, 19 nt, Homo sapiens
  misc_RNA (1)...(19): siRNA sense strand
aaucaguacaggaaacuua

SEQ ID NO: 2441349 - RNA, 19 nt, Homo sapiens
  misc_RNA (1)...(19): siRNA sense strand
aggaauauggugugaaagu

SEQ ID NO: 2441350 - RNA, 19 nt, Homo sapiens
  misc_RNA (1)...(19): siRNA sense strand
acccagugguccugacaaa

SEQ ID NO: 2441351 - RNA, 19 nt, Homo sapiens
  misc_RNA (1)...(19): siRNA sense strand
cugcaucauugaagugaau

SEQ ID NO: 2441352 - RNA, 19 nt, Homo sapiens
  misc_RNA (1)...(19): siRNA sense strand
gaaagauuuuggagaguga

SEQ ID NO: 2441353 - RNA, 19 nt, Homo sapiens
  misc_RNA (1)...(19): siRNA sense strand
ggagagaauccuagacauc

SEQ ID NO: 2441354 - RNA, 19 nt, Homo sapiens
  misc_RNA (1)...(19): siRNA sense strand
ccugauaggcauccagcaa

SEQ ID NO: 2441355 - RNA, 19 nt, Homo sapiens
  misc_RNA (1)...(19): siRNA sense strand
gaguuuagggcaauggcua

SEQ ID NO: 2441356 - RNA, 19 nt, Homo sapiens
  misc_RNA (1)...(19): siRNA sense strand
ucgagaugcugaugacaau

SEQ ID NO: 2441357 - RNA, 19 nt, Homo sapiens
  misc_RNA (1)...(19): siRNA sense strand
cagcagacaccauuggcua

SEQ ID NO: 2441358 - RNA, 19 nt, Homo sapiens
  misc_RNA (1)...(19): siRNA sense strand
gggcagaaucagccuguuu

SEQ ID NO: 2441359 - RNA, 19 nt, Homo sapiens
  misc_RNA (1)...(19): siRNA sense strand
agaccaaugaggugggcuu

SEQ ID NO: 2441360 - RNA, 19 nt, Homo sapiens
  misc_RNA (1)...(19): siRNA sense strand
ggucauggcuauuggucgu

SEQ ID NO: 2441361 - RNA, 19 nt, Homo sapiens
  misc_RNA (1)...(19): siRNA sense strand
guaccuuugaggagaguuu

SEQ ID NO: 2441362 - RNA, 19 nt, Homo sapiens
  misc_RNA (1)...(19): siRNA sense strand
cugacuauguugcaauuaa

SEQ ID NO: 2441363 - RNA, 19 nt, Homo sapiens
  misc_RNA (1)...(19): siRNA sense strand
cuacaauggucaggagcau

SEQ ID NO: 2441364 - RNA, 19 nt, Homo sapiens
  misc_RNA (1)...(19): siRNA sense strand
cagcaaucauuccggccaa

SEQ ID NO: 2441365 - RNA, 19 nt, Homo sapiens
  misc_RNA (1)...(19): siRNA sense strand
gcaguacagugcuggaaaa

SEQ ID NO: 2441366 - RNA, 19 nt, Homo sapiens
  misc_RNA (1)...(19): siRNA sense strand
ugguauucucugaggauga

SEQ ID NO: 2441367 - RNA, 19 nt, Homo sapiens
  misc_RNA (1)...(19): siRNA sense strand
ggaaaugaugucuugguga

SEQ ID NO: 2441368 - RNA, 19 nt, Homo sapiens
  misc_RNA (1)...(19): siRNA sense strand
ccaacagagggcagaauca

SEQ ID NO: 2441369 - RNA, 19 nt, Homo sapiens
  misc_RNA (1)...(19): siRNA sense strand
gaaccaagcagcacgcgua

SEQ ID NO: 2441370 - RNA, 19 nt, Homo sapiens
  misc_RNA (1)...(19): siRNA sense strand
cagaacagccagauggguu

SEQ ID NO: 2441371 - RNA, 19 nt, Homo sapiens
  misc_RNA (1)...(19): siRNA sense strand
aauaugaagugguucgaga

SEQ ID NO: 2441372 - RNA, 19 nt, Homo sapiens
  misc_RNA (1)...(19): siRNA sense strand
cugaacaauuacacaauga

SEQ ID NO: 2441373 - RNA, 19 nt, Homo sapiens
  misc_RNA (1)...(19): siRNA sense strand
ggacagaaucccagccucu

SEQ ID NO: 2441374 - RNA, 19 nt, Homo sapiens
  misc_RNA (1)...(19): siRNA sense strand
caacccuauuauugggaau

SEQ ID NO: 2441375 - RNA, 19 nt, Homo sapiens
  misc_RNA (1)...(19): siRNA sense strand
guuugcuggugcuggauua

SEQ ID NO: 2441376 - RNA, 19 nt, Homo sapiens
  misc_RNA (1)...(19): siRNA sense strand
aaguguacggcaaaggaaa

SEQ ID NO: 2441377 - RNA, 19 nt, Homo sapiens
  misc_RNA (1)...(19): siRNA sense strand
agauuggguucucagauaa

SEQ ID NO: 2441378 - RNA, 19 nt, Homo sapiens
  misc_RNA (1)...(19): siRNA sense strand
ccauaauuccugcugacua

SEQ ID NO: 2441379 - RNA, 19 nt, Homo sapiens
  misc_RNA (1)...(19): siRNA sense strand
uuucauuacugcucagaau

SEQ ID NO: 2441380 - RNA, 19 nt, Homo sapiens
  misc_RNA (1)...(19): siRNA sense strand
caagaugguuuaugggaga

SEQ ID NO: 2441381 - RNA, 19 nt, Homo sapiens
  misc_RNA (1)...(19): siRNA sense strand
ggaaagagaauaugcugga

SEQ ID NO: 2441382 - RNA, 19 nt, Homo sapiens
  misc_RNA (1)...(19): siRNA sense strand
agaauaugcuggagagcug

SEQ ID NO: 2441383 - RNA, 19 nt, Homo sapiens
  misc_RNA (1)...(19): siRNA sense strand
gguuuaugggagaaauauu

SEQ ID NO: 2441384 - RNA, 19 nt, Homo sapiens
  misc_RNA (1)...(19): siRNA sense strand
gggagaaauauuagccagu

SEQ ID NO: 2441385 - RNA, 19 nt, Homo sapiens
  misc_RNA (1)...(19): siRNA sense strand
augguuuaugggagaaaua

SEQ ID NO: 2441386 - RNA, 19 nt, Homo sapiens
  misc_RNA (1)...(19): siRNA sense strand
ccaagagaauaguucggau

SEQ ID NO: 2441387 - RNA, 19 nt, Homo sapiens
  misc_RNA (1)...(19): siRNA sense strand
cagggaagaugaaugcaga

SEQ ID NO: 2441388 - RNA, 19 nt, Homo sapiens
  misc_RNA (1)...(19): siRNA sense strand
gggaccaggagguuggaca

SEQ ID NO: 2441389 - RNA, 19 nt, Homo sapiens
  misc_RNA (1)...(19): siRNA sense strand
ugaacguuuccaagagaau

SEQ ID NO: 2441390 - RNA, 19 nt, Homo sapiens
  misc_RNA (1)...(19): siRNA sense strand
aaagagaauaugcuggaga

SEQ ID NO: 2441391 - RNA, 19 nt, Homo sapiens
  misc_RNA (1)...(19): siRNA sense strand
caacauaacucugaaccca

SEQ ID NO: 2441392 - RNA, 19 nt, Homo sapiens
  misc_RNA (1)...(19): siRNA sense strand
cagcagauccugagccuga

SEQ ID NO: 2441393 - RNA, 19 nt, Homo sapiens
  misc_RNA (1)...(19): siRNA sense strand
ucacaaauaugguagguuc

SEQ ID NO: 2441394 - RNA, 19 nt, Homo sapiens
  misc_RNA (1)...(19): siRNA sense strand
cgagcagcagggaaggaaa

SEQ ID NO: 2441395 - RNA, 19 nt, Homo sapiens
  misc_RNA (1)...(19): siRNA sense strand
gggaaggaaaugauaccau

SEQ ID NO: 2441396 - RNA, 19 nt, Homo sapiens
  misc_RNA (1)...(19): siRNA sense strand
gguucaugucuguaagcau

SEQ ID NO: 2441397 - RNA, 19 nt, Homo sapiens
  misc_RNA (1)...(19): siRNA sense strand
uggacaaguauguggaaau

SEQ ID NO: 2441398 - RNA, 19 nt, Homo sapiens
  misc_RNA (1)...(19): siRNA sense strand
cugcuaucguuguggaaau

SEQ ID NO: 2441399 - RNA, 19 nt, Homo sapiens
  misc_RNA (1)...(19): siRNA sense strand
aaucaugagaguagacaga

SEQ ID NO: 2441400 - RNA, 19 nt, Homo sapiens
  misc_RNA (1)...(19): siRNA sense strand
cuuuaauagaugagcagau

SEQ ID NO: 2441401 - RNA, 19 nt, Homo sapiens
  misc_RNA (1)...(19): siRNA sense strand
agucaaauguucagccagu

SEQ ID NO: 2441402 - RNA, 19 nt, Homo sapiens
  misc_RNA (1)...(19): siRNA sense strand
gccaaaccaaauauggaaa

SEQ ID NO: 2441403 - RNA, 19 nt, Homo sapiens
  misc_RNA (1)...(19): siRNA sense strand
augcuaaugccuggagaua

SEQ ID NO: 2441404 - RNA, 19 nt, Homo sapiens
  misc_RNA (1)...(19): siRNA sense strand
ccgaggagcagguuggcuu

SEQ ID NO: 2441405 - RNA, 19 nt, Homo sapiens
  misc_RNA (1)...(19): siRNA sense strand
aguaacaguguguggagau

SEQ ID NO: 2441406 - RNA, 19 nt, Homo sapiens
  misc_RNA (1)...(19): siRNA sense strand
ggaucaaauucgaaccauc

SEQ ID NO: 2441407 - RNA, 19 nt, Homo sapiens
  misc_RNA (1)...(19): siRNA sense strand
ucgaacggaaucaggaaau

SEQ ID NO: 2441408 - RNA, 19 nt, Homo sapiens
  misc_RNA (1)...(19): siRNA sense strand
cuggagauacuguaccaaa

SEQ ID NO: 2441409 - RNA, 19 nt, Homo sapiens
  misc_RNA (1)...(19): siRNA sense strand
cuucuugcauuaaaggcua

SEQ ID NO: 2441410 - RNA, 19 nt, Homo sapiens
  misc_RNA (1)...(19): siRNA sense strand
cuggacaaguauguggaaa

SEQ ID NO: 2441411 - RNA, 19 nt, Homo sapiens
  misc_RNA (1)...(19): siRNA sense strand
acuauaguuuggagaccuu

SEQ ID NO: 2441412 - RNA, 19 nt, Homo sapiens
  misc_RNA (1)...(19): siRNA sense strand
caucgaacggaaucaggaa

SEQ ID NO: 2441413 - RNA, 19 nt, Homo sapiens
  misc_RNA (1)...(19): siRNA sense strand
gcaaggaguucaucccaaa

SEQ ID NO: 2441414 - RNA, 19 nt, Homo sapiens
  misc_RNA (1)...(19): siRNA sense strand
cagaaauagaagaaguuca

SEQ ID NO: 2441415 - RNA, 19 nt, Homo sapiens
  misc_RNA (1)...(19): siRNA sense strand
uggagaaagcuguugugaa

SEQ ID NO: 2441416 - RNA, 19 nt, Homo sapiens
  misc_RNA (1)...(19): siRNA sense strand
uagaagaaguucaagccuu

SEQ ID NO: 2441417 - RNA, 19 nt, Homo sapiens
  misc_RNA (1)...(19): siRNA sense strand
agaugaagauuauagagga

SEQ ID NO: 2441418 - RNA, 19 nt, Homo sapiens
  misc_RNA (1)...(19): siRNA sense strand
cuuuauugauguaggagcu

SEQ ID NO: 2441419 - RNA, 19 nt, Homo sapiens
  misc_RNA (1)...(19): siRNA sense strand
ccuccaaggcuuagagaau

SEQ ID NO: 2441420 - RNA, 19 nt, Homo sapiens
  misc_RNA (1)...(19): siRNA sense strand
agaagaaaucaguggacua

SEQ ID NO: 2441421 - RNA, 19 nt, Homo sapiens
  misc_RNA (1)...(19): siRNA sense strand
uccugaagcuugugggaaa

SEQ ID NO: 2441422 - RNA, 19 nt, Homo sapiens
  misc_RNA (1)...(19): siRNA sense strand
cagaauuagaucagaagaa

SEQ ID NO: 2441423 - RNA, 19 nt, Homo sapiens
  misc_RNA (1)...(19): siRNA sense strand
gagaggaggcuguggccaa

SEQ ID NO: 2441424 - RNA, 19 nt, Homo sapiens
  misc_RNA (1)...(19): siRNA sense strand
gggcagaagacgaaaggca

SEQ ID NO: 2441425 - RNA, 19 nt, Homo sapiens
  misc_RNA (1)...(19): siRNA sense strand
ccugaaaccugaagcgcau

SEQ ID NO: 2441426 - RNA, 19 nt, Homo sapiens
  misc_RNA (1)...(19): siRNA sense strand
ggacuagagaugugcaaca

SEQ ID NO: 2441427 - RNA, 19 nt, Homo sapiens
  misc_RNA (1)...(19): siRNA sense strand
uggcaaugagauagaagaa

SEQ ID NO: 2441428 - RNA, 19 nt, Homo sapiens
  misc_RNA (1)...(19): siRNA sense strand
gggccaaacuuucagccaa

SEQ ID NO: 2441429 - RNA, 19 nt, Homo sapiens
  misc_RNA (1)...(19): siRNA sense strand
auacuuugucugagcaaua

SEQ ID NO: 2441430 - RNA, 19 nt, Homo sapiens
  misc_RNA (1)...(19): siRNA sense strand
gagaugaggaccagggcga

SEQ ID NO: 2441431 - RNA, 19 nt, Homo sapiens
  misc_RNA (1)...(19): siRNA sense strand
gaauuagaucagaagaaga

SEQ ID NO: 2441432 - RNA, 19 nt, Homo sapiens
  misc_RNA (1)...(19): siRNA sense strand
agggauauuugcggagaaa

SEQ ID NO: 2441433 - RNA, 19 nt, Homo sapiens
  misc_RNA (1)...(19): siRNA sense strand
agguguaagaaguuugaaa

SEQ ID NO: 2441434 - RNA, 19 nt, Homo sapiens
  misc_RNA (1)...(19): siRNA sense strand
auucagucgugcagaaauu

SEQ ID NO: 2441435 - RNA, 19 nt, Homo sapiens
  misc_RNA (1)...(19): siRNA sense strand
gagggauauuugcggagaa

SEQ ID NO: 2441436 - RNA, 19 nt, Homo sapiens
  misc_RNA (1)...(19): siRNA sense strand
auugcugagcugagagaaa

SEQ ID NO: 2441437 - RNA, 19 nt, Homo sapiens
  misc_RNA (1)...(19): siRNA sense strand
gggacaccguagaagguau

SEQ ID NO: 2441438 - RNA, 19 nt, Homo sapiens
  misc_RNA (1)...(19): siRNA sense strand
uugaugaaauggugaacau

SEQ ID NO: 2441439 - RNA, 19 nt, Homo sapiens
  misc_RNA (1)...(19): siRNA sense strand
cggcaagcucuaaugggaa

SEQ ID NO: 2441440 - RNA, 19 nt, Homo sapiens
  misc_RNA (1)...(19): siRNA sense strand
gcugagagaaauagaauac

SEQ ID NO: 2441441 - RNA, 19 nt, Homo sapiens
  misc_RNA (1)...(19): siRNA sense strand
uagcauucucuguggauau

SEQ ID NO: 2441442 - RNA, 19 nt, Homo sapiens
  misc_RNA (1)...(19): siRNA sense strand
gcaagagaugguuuggcaa

SEQ ID NO: 2441443 - RNA, 19 nt, Homo sapiens
  misc_RNA (1)...(19): siRNA sense strand
agaagaagauuaaagugga

SEQ ID NO: 2441444 - RNA, 19 nt, Homo sapiens
  misc_RNA (1)...(19): siRNA sense strand
agaagauuaaaguggaaga

SEQ ID NO: 2441445 - RNA, 19 nt, Homo sapiens
  misc_RNA (1)...(19): siRNA sense strand
ugaagugguugcagcucaa

SEQ ID NO: 2441446 - RNA, 19 nt, Homo sapiens
  misc_RNA (1)...(19): siRNA sense strand
aacaauaagaucacgacaa

SEQ ID NO: 2441447 - RNA, 19 nt, Homo sapiens
  misc_RNA (1)...(19): siRNA sense strand
gcuuaaacaaguuaccaau

SEQ ID NO: 2441448 - RNA, 19 nt, Homo sapiens
  misc_RNA (1)...(19): siRNA sense strand
gggauauuuugaugaggua

SEQ ID NO: 2441449 - RNA, 19 nt, Homo sapiens
  misc_RNA (1)...(19): siRNA sense strand
agucagcucauuagagaau

SEQ ID NO: 2441450 - RNA, 19 nt, Homo sapiens
  misc_RNA (1)...(19): siRNA sense strand
ccgcagaggaucuuugaca

SEQ ID NO: 2441451 - RNA, 19 nt, Homo sapiens
  misc_RNA (1)...(19): siRNA sense strand
uuuggauggcaaugagaua

SEQ ID NO: 2441452 - RNA, 19 nt, Homo sapiens
  misc_RNA (1)...(19): siRNA sense strand
ucacagguuuggaggaucu

SEQ ID NO: 2441453 - RNA, 19 nt, Homo sapiens
  misc_RNA (1)...(19): siRNA sense strand
cggacggagaugaggacca

SEQ ID NO: 2441454 - RNA, 19 nt, Homo sapiens
  misc_RNA (1)...(19): siRNA sense strand
cggaaagagauucuauaca

SEQ ID NO: 2441455 - RNA, 19 nt, Homo sapiens
  misc_RNA (1)...(19): siRNA sense strand
uuuagaagaacucuggaaa

SEQ ID NO: 2441456 - RNA, 19 nt, Homo sapiens
  misc_RNA (1)...(19): siRNA sense strand
ggcaaugagauagaagaaa

SEQ ID NO: 2441457 - RNA, 19 nt, Homo sapiens
  misc_RNA (1)...(19): siRNA sense strand
ugguggugcccaugaacaa

SEQ ID NO: 2441458 - RNA, 19 nt, Homo sapiens
  misc_RNA (1)...(19): siRNA sense strand
ggcuuaaacaaguuaccaa

SEQ ID NO: 2441459 - RNA, 19 nt, Homo sapiens
  misc_RNA (1)...(19): siRNA sense strand
gcuguauucauauggaaau

SEQ ID NO: 2441460 - RNA, 19 nt, Homo sapiens
  misc_RNA (1)...(19): siRNA sense strand
acaccagcggaaagagauu

SEQ ID NO: 2441461 - RNA, 19 nt, Homo sapiens
  misc_RNA (1)...(19): siRNA sense strand
uuagaagaacucuggaaaa

SEQ ID NO: 2441462 - RNA, 19 nt, Homo sapiens
  misc_RNA (1)...(19): siRNA sense strand
ggaucaggagccagugaca

SEQ ID NO: 2441463 - RNA, 19 nt, Homo sapiens
  misc_RNA (1)...(19): siRNA sense strand
gggcagaucccgaacugga

SEQ ID NO: 2441464 - RNA, 19 nt, Homo sapiens
  misc_RNA (1)...(19): siRNA sense strand
uccaaggcuuagagaauca

SEQ ID NO: 2441465 - RNA, 19 nt, Homo sapiens
  misc_RNA (1)...(19): siRNA sense strand
agcucuaaugggaaggaua

SEQ ID NO: 2441466 - RNA, 19 nt, Homo sapiens
  misc_RNA (1)...(19): siRNA sense strand
gggaaauucauucuaacau

SEQ ID NO: 2441467 - RNA, 19 nt, Homo sapiens
  misc_RNA (1)...(19): siRNA sense strand
cuuuagaagaacucuggaa

SEQ ID NO: 2441468 - RNA, 19 nt, Homo sapiens
  misc_RNA (1)...(19): siRNA sense strand
guuggaucuuucagcgaau

SEQ ID NO: 2441469 - RNA, 19 nt, Homo sapiens
  misc_RNA (1)...(19): siRNA sense strand
cugaagugguugcagcuca

SEQ ID NO: 2441470 - RNA, 19 nt, Homo sapiens
  misc_RNA (1)...(19): siRNA sense strand
aaauagaagguguaagaag

SEQ ID NO: 2441471 - RNA, 19 nt, Homo sapiens
  misc_RNA (1)...(19): siRNA sense strand
auuauucagucgugcagaa

SEQ ID NO: 2441472 - RNA, 19 nt, Homo sapiens
  misc_RNA (1)...(19): siRNA sense strand
aaucaguggacuagagaug

SEQ ID NO: 2441473 - RNA, 19 nt, Homo sapiens
  misc_RNA (1)...(19): siRNA sense strand
auauggaaauagaaggugu

SEQ ID NO: 2441474 - RNA, 19 nt, Homo sapiens
  misc_RNA (1)...(19): siRNA sense strand
guuacaguuucgcgcagaa

SEQ ID NO: 2441475 - RNA, 19 nt, Homo sapiens
  misc_RNA (1)...(19): siRNA sense strand
caauggaugaagaggagua

SEQ ID NO: 2441476 - RNA, 19 nt, Homo sapiens
  misc_RNA (1)...(19): siRNA sense strand
agaacauguuugugggcca

SEQ ID NO: 2441477 - RNA, 19 nt, Homo sapiens
  misc_RNA (1)...(19): siRNA sense strand
ccgcggauguggacuggaa

SEQ ID NO: 2441478 - RNA, 19 nt, Homo sapiens
  misc_RNA (1)...(19): siRNA sense strand
gcaccagugggaugaacaa

SEQ ID NO: 2441479 - RNA, 19 nt, Homo sapiens
  misc_RNA (1)...(19): siRNA sense strand
ccagaagccgggagcugaa

SEQ ID NO: 2441480 - RNA, 19 nt, Homo sapiens
  misc_RNA (1)...(19): siRNA sense strand
cuucagaggacaaugacuu

SEQ ID NO: 2441481 - RNA, 19 nt, Homo sapiens
  misc_RNA (1)...(19): siRNA sense strand
caaccagcucccagcacaa

SEQ ID NO: 2441482 - RNA, 19 nt, Homo sapiens
  misc_RNA (1)...(19): siRNA sense strand
acaucaacuacaaggacau

SEQ ID NO: 2441483 - RNA, 19 nt, Homo sapiens
  misc_RNA (1)...(19): siRNA sense strand
gaugaagaggaguacguga

SEQ ID NO: 2441484 - RNA, 19 nt, Homo sapiens
  misc_RNA (1)...(19): siRNA sense strand
gggaauacagaguggaaaa

SEQ ID NO: 2441485 - RNA, 19 nt, Homo sapiens
  misc_RNA (1)...(19): siRNA sense strand
ggaaauaaagaaagcccaa

SEQ ID NO: 2441486 - RNA, 19 nt, Homo sapiens
  misc_RNA (1)...(19): siRNA sense strand
uggaagaagaaaugaaaca

SEQ ID NO: 2441487 - RNA, 19 nt, Homo sapiens
  misc_RNA (1)...(19): siRNA sense strand
aagaaacauucaaaggaga

SEQ ID NO: 2441488 - RNA, 19 nt, Homo sapiens
  misc_RNA (1)...(19): siRNA sense strand
agcgaaacgaggaaauaaa

SEQ ID NO: 2441489 - RNA, 19 nt, Homo sapiens
  misc_RNA (1)...(19): siRNA sense strand
acugggaagaggugcauaa

SEQ ID NO: 2441490 - RNA, 19 nt, Homo sapiens
  misc_RNA (1)...(19): siRNA sense strand
agcuaaaacugcaaugaaa

SEQ ID NO: 2441491 - RNA, 19 nt, Homo sapiens
  misc_RNA (1)...(19): siRNA sense strand
ugaaacaacuagaacacga

SEQ ID NO: 2441492 - RNA, 19 nt, Homo sapiens
  misc_RNA (1)...(19): siRNA sense strand
gcauaauugaaaagcacaa

SEQ ID NO: 2441493 - RNA, 19 nt, Homo sapiens
  misc_RNA (1)...(19): siRNA sense strand
ucaucaugggaguggcuaa

SEQ ID NO: 2441494 - RNA, 19 nt, Homo sapiens
  misc_RNA (1)...(19): siRNA sense strand
gauaaaagaacuggagaca

SEQ ID NO: 2441495 - RNA, 19 nt, Homo sapiens
  misc_RNA (1)...(19): siRNA sense strand
gaucguuauauccaggaaa

SEQ ID NO: 2441496 - RNA, 19 nt, Homo sapiens
  misc_RNA (1)...(19): siRNA sense strand
ggcuggaagaagaaaugaa

SEQ ID NO: 2441497 - RNA, 19 nt, Homo sapiens
  misc_RNA (1)...(19): siRNA sense strand
guaaaagaugacaugcaaa

SEQ ID NO: 2441498 - RNA, 19 nt, Homo sapiens
  misc_RNA (1)...(19): siRNA sense strand
augaagaaagggaggcagu

SEQ ID NO: 2441499 - RNA, 19 nt, Homo sapiens
  misc_RNA (1)...(19): siRNA sense strand
aagaagauccgcaagcaga

SEQ ID NO: 2441500 - RNA, 19 nt, Homo sapiens
  misc_RNA (1)...(19): siRNA sense strand
guguaaggagugugggaaa

SEQ ID NO: 2441501 - RNA, 19 nt, Homo sapiens
  misc_RNA (1)...(19): siRNA sense strand
auguaaggaaugugggaaa

SEQ ID NO: 2441502 - RNA, 19 nt, Homo sapiens
  misc_RNA (1)...(19): siRNA sense strand
cccuauaaauguaaggaau

SEQ ID NO: 2441503 - RNA, 19 nt, Homo sapiens
  misc_RNA (1)...(19): siRNA sense strand
cugugauaaaugugggaaa

SEQ ID NO: 2441504 - RNA, 19 nt, Homo sapiens
  misc_RNA (1)...(19): siRNA sense strand
ucacaguacaucagagaau

SEQ ID NO: 2441505 - RNA, 19 nt, Homo sapiens
  misc_RNA (1)...(19): siRNA sense strand
ccucaugguacaucagaaa

SEQ ID NO: 2441506 - RNA, 19 nt, Homo sapiens
  misc_RNA (1)...(19): siRNA sense strand
auguaaggaauguaggaaa

SEQ ID NO: 2441507 - RNA, 19 nt, Homo sapiens
  misc_RNA (1)...(19): siRNA sense strand
aggaaagccaagcuggaaa

SEQ ID NO: 2441508 - RNA, 19 nt, Homo sapiens
  misc_RNA (1)...(19): siRNA sense strand
aagucacacaggagagaaa

SEQ ID NO: 2441509 - RNA, 19 nt, Homo sapiens
  misc_RNA (1)...(19): siRNA sense strand
aggaaaagagccauggaua

SEQ ID NO: 2441510 - RNA, 19 nt, Homo sapiens
  misc_RNA (1)...(19): siRNA sense strand
aacccaugcaggagagaaa

SEQ ID NO: 2441511 - RNA, 19 nt, Homo sapiens
  misc_RNA (1)...(19): siRNA sense strand
cccuaugaauguaaggaau

SEQ ID NO: 2441512 - RNA, 19 nt, Homo sapiens
  misc_RNA (1)...(19): siRNA sense strand
aggauguuauuguggaauu

SEQ ID NO: 2441513 - RNA, 19 nt, Homo sapiens
  misc_RNA (1)...(19): siRNA sense strand
uggaauucaccaaggaaga

SEQ ID NO: 2441514 - RNA, 19 nt, Homo sapiens
  misc_RNA (1)...(19): siRNA sense strand
ugugauaaaugugggaaau

SEQ ID NO: 2441515 - RNA, 19 nt, Homo sapiens
  misc_RNA (1)...(19): siRNA sense strand
accuaugaguguaaagaau

SEQ ID NO: 2441516 - RNA, 19 nt, Homo sapiens
  misc_RNA (1)...(19): siRNA sense strand
ucaccaaggaagaauggaa

SEQ ID NO: 2441517 - RNA, 19 nt, Homo sapiens
  misc_RNA (1)...(19): siRNA sense strand
ccucauaguacaucagcau

SEQ ID NO: 2441518 - RNA, 19 nt, Homo sapiens
  misc_RNA (1)...(19): siRNA sense strand
caagauaccaggaaagcca

SEQ ID NO: 2441519 - RNA, 19 nt, Homo sapiens
  misc_RNA (1)...(19): siRNA sense strand
aggaugugaugcuggaaaa

SEQ ID NO: 2441520 - RNA, 19 nt, Homo sapiens
  misc_RNA (1)...(19): siRNA sense strand
aaaauucacacgagagaua

SEQ ID NO: 2441521 - RNA, 19 nt, Homo sapiens
  misc_RNA (1)...(19): siRNA sense strand
ucucacagaacaucagaaa

SEQ ID NO: 2441522 - RNA, 19 nt, Homo sapiens
  misc_RNA (1)...(19): siRNA sense strand
agauaaaaccuaugagugu

SEQ ID NO: 2441523 - RNA, 19 nt, Homo sapiens
  misc_RNA (1)...(19): siRNA sense strand
cugaagaccuauggagcau

SEQ ID NO: 2441524 - RNA, 19 nt, Homo sapiens
  misc_RNA (1)...(19): siRNA sense strand
gauaaaugugggaaaucuu

SEQ ID NO: 2441525 - RNA, 19 nt, Homo sapiens
  misc_RNA (1)...(19): siRNA sense strand
aggaaaugcuucuaccaga

SEQ ID NO: 2441526 - RNA, 19 nt, Homo sapiens
  misc_RNA (1)...(19): siRNA sense strand
acacaggagagaagcccua

SEQ ID NO: 2441527 - RNA, 19 nt, Homo sapiens
  misc_RNA (1)...(19): siRNA sense strand
caucagaagacacacacaa

SEQ ID NO: 2441528 - RNA, 19 nt, Homo sapiens
  misc_RNA (1)...(19): siRNA sense strand
cccuaugaaugcacagaau

SEQ ID NO: 2441529 - RNA, 19 nt, Homo sapiens
  misc_RNA (1)...(19): siRNA sense strand
gcacaucagaagacacaca

SEQ ID NO: 2441530 - RNA, 19 nt, Homo sapiens
  misc_RNA (1)...(19): siRNA sense strand
cauucaugaucuagaagca

SEQ ID NO: 2441531 - RNA, 19 nt, Homo sapiens
  misc_RNA (1)...(19): siRNA sense strand
aacucauaccacagagaaa

SEQ ID NO: 2441532 - RNA, 19 nt, Homo sapiens
  misc_RNA (1)...(19): siRNA sense strand
aaaggauguuauuguggaa

SEQ ID NO: 2441533 - RNA, 19 nt, Homo sapiens
  misc_RNA (1)...(19): siRNA sense strand
acucaaagggcaaauccua

SEQ ID NO: 2441534 - RNA, 19 nt, Homo sapiens
  misc_RNA (1)...(19): siRNA sense strand
cagauuacaucaaaggacu

SEQ ID NO: 2441535 - RNA, 19 nt, Homo sapiens
  misc_RNA (1)...(19): siRNA sense strand
ugucaggaguguggggaaa

SEQ ID NO: 2441536 - RNA, 19 nt, Homo sapiens
  misc_RNA (1)...(19): siRNA sense strand
ucacaaaacaucagaaaac

SEQ ID NO: 2441537 - RNA, 19 nt, Homo sapiens
  misc_RNA (1)...(19): siRNA sense strand
gccugugaauguaaggaau

SEQ ID NO: 2441538 - RNA, 19 nt, Homo sapiens
  misc_RNA (1)...(19): siRNA sense strand
gaguguaaagaauguaaga

SEQ ID NO: 2441539 - RNA, 19 nt, Homo sapiens
  misc_RNA (1)...(19): siRNA sense strand
agaaacccuaugaguguaa

SEQ ID NO: 2441540 - RNA, 19 nt, Homo sapiens
  misc_RNA (1)...(19): siRNA sense strand
ccugaagaccuauggagca

SEQ ID NO: 2441541 - RNA, 19 nt, Homo sapiens
  misc_RNA (1)...(19): siRNA sense strand
aauucacacgagagauaaa

SEQ ID NO: 2441542 - RNA, 19 nt, Homo sapiens
  misc_RNA (1)...(19): siRNA sense strand
gccauggauauuagaagua

SEQ ID NO: 2441543 - RNA, 19 nt, Homo sapiens
  misc_RNA (1)...(19): siRNA sense strand
ccuauaaauguaaggaaug

SEQ ID NO: 2441544 - RNA, 19 nt, Homo sapiens
  misc_RNA (1)...(19): siRNA sense strand
cauggauauuagaaguaga

SEQ ID NO: 2441545 - RNA, 19 nt, Homo sapiens
  misc_RNA (1)...(19): siRNA sense strand
ccucacaguacaucagaga

SEQ ID NO: 2441546 - RNA, 19 nt, Homo sapiens
  misc_RNA (1)...(19): siRNA sense strand
cuaugaaugcacagaaugu

SEQ ID NO: 2441547 - RNA, 19 nt, Homo sapiens
  misc_RNA (1)...(19): siRNA sense strand
cccuaugcaugcaaggaau

SEQ ID NO: 2441548 - RNA, 19 nt, Homo sapiens
  misc_RNA (1)...(19): siRNA sense strand
agaaagccugugaauguaa

SEQ ID NO: 2441549 - RNA, 19 nt, Homo sapiens
  misc_RNA (1)...(19): siRNA sense strand
cccuaugaguguaaggagu

SEQ ID NO: 2441550 - RNA, 19 nt, Homo sapiens
  misc_RNA (1)...(19): siRNA sense strand
gaguguaaggaguguggga

SEQ ID NO: 2441551 - RNA, 19 nt, Homo sapiens
  misc_RNA (1)...(19): siRNA sense strand
auccuaugacugugauaaa

SEQ ID NO: 2441552 - RNA, 19 nt, Homo sapiens
  misc_RNA (1)...(19): siRNA sense strand
ccugcaagcaugaggauaa

SEQ ID NO: 2441553 - RNA, 19 nt, Homo sapiens
  misc_RNA (1)...(19): siRNA sense strand
cuaacaaaauggcggaaua

SEQ ID NO: 2441554 - RNA, 19 nt, Homo sapiens
  misc_RNA (1)...(19): siRNA sense strand
auggaagaccagaaagaaa

SEQ ID NO: 2441555 - RNA, 19 nt, Homo sapiens
  misc_RNA (1)...(19): siRNA sense strand
gcuuguaaacucagaaaga

SEQ ID NO: 2441556 - RNA, 19 nt, Homo sapiens
  misc_RNA (1)...(19): siRNA sense strand
ugauaugggacuaaagcaa

SEQ ID NO: 2441557 - RNA, 19 nt, Homo sapiens
  misc_RNA (1)...(19): siRNA sense strand
agaaagaagaugagcugau

SEQ ID NO: 2441558 - RNA, 19 nt, Homo sapiens
  misc_RNA (1)...(19): siRNA sense strand
caugaggauaagagagcua

SEQ ID NO: 2441559 - RNA, 19 nt, Homo sapiens
  misc_RNA (1)...(19): siRNA sense strand
gaaggaaauaaaaggguua

SEQ ID NO: 2441560 - RNA, 19 nt, Homo sapiens
  misc_RNA (1)...(19): siRNA sense strand
ugugauaauauguggucaa

SEQ ID NO: 2441561 - RNA, 19 nt, Homo sapiens
  misc_RNA (1)...(19): siRNA sense strand
cagaugaaucaaugagaca

SEQ ID NO: 2441562 - RNA, 19 nt, Homo sapiens
  misc_RNA (1)...(19): siRNA sense strand
uggcaaauuguguaagaau

SEQ ID NO: 2441563 - RNA, 19 nt, Homo sapiens
  misc_RNA (1)...(19): siRNA sense strand
uggagauguuaucggcaaa

SEQ ID NO: 2441564 - RNA, 19 nt, Homo sapiens
  misc_RNA (1)...(19): siRNA sense strand
caucuaaaguucagcagca

SEQ ID NO: 2441565 - RNA, 19 nt, Homo sapiens
  misc_RNA (1)...(19): siRNA sense strand
ccuugaggaccuucagaua

SEQ ID NO: 2441566 - RNA, 19 nt, Homo sapiens
  misc_RNA (1)...(19): siRNA sense strand
aagaagaugagcugauauu

SEQ ID NO: 2441567 - RNA, 19 nt, Homo sapiens
  misc_RNA (1)...(19): siRNA sense strand
agauccgauuugaaggaaa

SEQ ID NO: 2441568 - RNA, 19 nt, Homo sapiens
  misc_RNA (1)...(19): siRNA sense strand
cuccggaauugaugauaaa

SEQ ID NO: 2441569 - RNA, 19 nt, Homo sapiens
  misc_RNA (1)...(19): siRNA sense strand
aaguucagcagcaggaaua

SEQ ID NO: 2441570 - RNA, 19 nt, Homo sapiens
  misc_RNA (1)...(19): siRNA sense strand
acuccggaauugaugauaa

SEQ ID NO: 2441571 - RNA, 19 nt, Homo sapiens
  misc_RNA (1)...(19): siRNA sense strand
auacagcagugaagaccaa

SEQ ID NO: 2441572 - RNA, 19 nt, Homo sapiens
  misc_RNA (1)...(19): siRNA sense strand
uggaagaccagaaagaaaa

SEQ ID NO: 2441573 - RNA, 19 nt, Homo sapiens
  misc_RNA (1)...(19): siRNA sense strand
ccuuagaauuaacagugaa

SEQ ID NO: 2441574 - RNA, 19 nt, Homo sapiens
  misc_RNA (1)...(19): siRNA sense strand
cagaaagauccgauuugaa

SEQ ID NO: 2441575 - RNA, 19 nt, Homo sapiens
  misc_RNA (1)...(19): siRNA sense strand
auauggaagaccagaaaga

SEQ ID NO: 2441576 - RNA, 19 nt, Homo sapiens
  misc_RNA (1)...(19): siRNA sense strand
gcaagacauaagaguaaaa

SEQ ID NO: 2441577 - RNA, 19 nt, Homo sapiens
  misc_RNA (1)...(19): siRNA sense strand
gaugaaucaaugagacaca

SEQ ID NO: 2441578 - RNA, 19 nt, Homo sapiens
  misc_RNA (1)...(19): siRNA sense strand
guggaaugcuauugauuuu

SEQ ID NO: 2441579 - RNA, 19 nt, Homo sapiens
  misc_RNA (1)...(19): siRNA sense strand
gcggaauacagcaagacau

SEQ ID NO: 2441580 - RNA, 19 nt, Homo sapiens
  misc_RNA (1)...(19): siRNA sense strand
acagcaagacauaagagua

SEQ ID NO: 2441581 - RNA, 19 nt, Homo sapiens
  misc_RNA (1)...(19): siRNA sense strand
cugcagaagaauccaauuu

SEQ ID NO: 2441582 - RNA, 19 nt, Homo sapiens
  misc_RNA (1)...(19): siRNA sense strand
gcuuacaguaccugaacuu

SEQ ID NO: 2441583 - RNA, 19 nt, Homo sapiens
  misc_RNA (1)...(19): siRNA sense strand
cagacaaaggcuuacagua

SEQ ID NO: 2441584 - RNA, 19 nt, Homo sapiens
  misc_RNA (1)...(19): siRNA sense strand
auaugggacuaaagcaauu

SEQ ID NO: 2441585 - RNA, 19 nt, Homo sapiens
  misc_RNA (1)...(19): siRNA sense strand
ugaggauaagagagcuaaa

SEQ ID NO: 2441586 - RNA, 19 nt, Homo sapiens
  misc_RNA (1)...(19): siRNA sense strand
auggagauguuaucggcaa

SEQ ID NO: 2441587 - RNA, 19 nt, Homo sapiens
  misc_RNA (1)...(19): siRNA sense strand
guuaccugaaagagcaaua

SEQ ID NO: 2441588 - RNA, 19 nt, Homo sapiens
  misc_RNA (1)...(19): siRNA sense strand
uggcugacugcaagggaau

SEQ ID NO: 2441589 - RNA, 19 nt, Homo sapiens
  misc_RNA (1)...(19): siRNA sense strand
guguaagaauuggugauau

SEQ ID NO: 2441590 - RNA, 19 nt, Homo sapiens
  misc_RNA (1)...(19): siRNA sense strand
cagacgguucacagacaaa

SEQ ID NO: 2441591 - RNA, 19 nt, Homo sapiens
  misc_RNA (1)...(19): siRNA sense strand
cugacggacaacuguguaa

SEQ ID NO: 2441592 - RNA, 19 nt, Homo sapiens
  misc_RNA (1)...(19): siRNA sense strand
aggauaagagagcuaaauu

SEQ ID NO: 2441593 - RNA, 19 nt, Homo sapiens
  misc_RNA (1)...(19): siRNA sense strand
gcuuauugcagacgguuca

SEQ ID NO: 2441594 - RNA, 19 nt, Homo sapiens
  misc_RNA (1)...(19): siRNA sense strand
acucagcaauggagauguu

SEQ ID NO: 2441595 - RNA, 19 nt, Homo sapiens
  misc_RNA (1)...(19): siRNA sense strand
uuauauggaagaccagaaa

SEQ ID NO: 2441596 - RNA, 19 nt, Homo sapiens
  misc_RNA (1)...(19): siRNA sense strand
cuuauauggaagaccagaa

SEQ ID NO: 2441597 - RNA, 19 nt, Homo sapiens
  misc_RNA (1)...(19): siRNA sense strand
augauggaauucaggcauu

SEQ ID NO: 2441598 - RNA, 19 nt, Homo sapiens
  misc_RNA (1)...(19): siRNA sense strand
gcugacugcaagggaauaa

SEQ ID NO: 2441599 - RNA, 19 nt, Homo sapiens
  misc_RNA (1)...(19): siRNA sense strand
caauagaucucucuggaac

SEQ ID NO: 2441600 - RNA, 19 nt, Homo sapiens
  misc_RNA (1)...(19): siRNA sense strand
cagaauugcuggauaggga

SEQ ID NO: 2441601 - RNA, 19 nt, Homo sapiens
  misc_RNA (1)...(19): siRNA sense strand
gggaaaaugacaagacaga

SEQ ID NO: 2441602 - RNA, 19 nt, Homo sapiens
  misc_RNA (1)...(19): siRNA sense strand
ggauguuauacgagaaaau

SEQ ID NO: 2441603 - RNA, 19 nt, Homo sapiens
  misc_RNA (1)...(19): siRNA sense strand
caucacaggagaaaagaaa

SEQ ID NO: 2441604 - RNA, 19 nt, Homo sapiens
  misc_RNA (1)...(19): siRNA sense strand
gaauccagcaaaaggaaaa

SEQ ID NO: 2441605 - RNA, 19 nt, Homo sapiens
  misc_RNA (1)...(19): siRNA sense strand
ccauaaacaaguugcagca

SEQ ID NO: 2441606 - RNA, 19 nt, Homo sapiens
  misc_RNA (1)...(19): siRNA sense strand
gaugcuuaucaaagacaua

SEQ ID NO: 2441607 - RNA, 19 nt, Homo sapiens
  misc_RNA (1)...(19): siRNA sense strand
auagggaagaagcaagaaa

SEQ ID NO: 2441608 - RNA, 19 nt, Homo sapiens
  misc_RNA (1)...(19): siRNA sense strand
aggcuuaaagaguugggaa

SEQ ID NO: 2441609 - RNA, 19 nt, Homo sapiens
  misc_RNA (1)...(19): siRNA sense strand
auaaacaaguugcagcaga

SEQ ID NO: 2441610 - RNA, 19 nt, Homo sapiens
  misc_RNA (1)...(19): siRNA sense strand
gggaaguuaauuuugguua

SEQ ID NO: 2441611 - RNA, 19 nt, Homo sapiens
  misc_RNA (1)...(19): siRNA sense strand
agcauggugagaagagaaa

SEQ ID NO: 2441612 - RNA, 19 nt, Homo sapiens
  misc_RNA (1)...(19): siRNA sense strand
gaaaaugacaagacagacu

SEQ ID NO: 2441613 - RNA, 19 nt, Homo sapiens
  misc_RNA (1)...(19): siRNA sense strand
aggaggacgaaauggacau

SEQ ID NO: 2441614 - RNA, 19 nt, Homo sapiens
  misc_RNA (1)...(19): siRNA sense strand
gcuuaaagaguugggaagu

SEQ ID NO: 2441615 - RNA, 19 nt, Homo sapiens
  misc_RNA (1)...(19): siRNA sense strand
ggaugaaggcagugggaca

SEQ ID NO: 2441616 - RNA, 19 nt, Homo sapiens
  misc_RNA (1)...(19): siRNA sense strand
cagaaguggcuuuggucaa

SEQ ID NO: 2441617 - RNA, 19 nt, Homo sapiens
  misc_RNA (1)...(19): siRNA sense strand
ucguggaaggagagugaaa

SEQ ID NO: 2441618 - RNA, 19 nt, Homo sapiens
  misc_RNA (1)...(19): siRNA sense strand
aggcaaaggaaucugggaa

SEQ ID NO: 2441619 - RNA, 19 nt, Homo sapiens
  misc_RNA (1)...(19): siRNA sense strand
ucuggaugucugaggauaa

SEQ ID NO: 2441620 - RNA, 19 nt, Homo sapiens
  misc_RNA (1)...(19): siRNA sense strand
caguaaggaaagcaagcaa

SEQ ID NO: 2441621 - RNA, 19 nt, Homo sapiens
  misc_RNA (1)...(19): siRNA sense strand
aguaaggaaagcaagcaaa

SEQ ID NO: 2441622 - RNA, 19 nt, Homo sapiens
  misc_RNA (1)...(19): siRNA sense strand
guuccauaucugacauuaa

SEQ ID NO: 2441623 - RNA, 19 nt, Homo sapiens
  misc_RNA (1)...(19): siRNA sense strand
aggaaagcaagcaaagaga

SEQ ID NO: 2441624 - RNA, 19 nt, Homo sapiens
  misc_RNA (1)...(19): siRNA sense strand
cuguaagcggcaaagcaaa

SEQ ID NO: 2441625 - RNA, 19 nt, Homo sapiens
  misc_RNA (1)...(19): siRNA sense strand
aguuaccaaaugagcgaaa

SEQ ID NO: 2441626 - RNA, 19 nt, Homo sapiens
  misc_RNA (1)...(19): siRNA sense strand
augaagaaaccaaagcaga

SEQ ID NO: 2441627 - RNA, 19 nt, Homo sapiens
  misc_RNA (1)...(19): siRNA sense strand
gaaguuaccaaaugagcga

SEQ ID NO: 2441628 - RNA, 19 nt, Homo sapiens
  misc_RNA (1)...(19): siRNA sense strand
guggaaggagagugaaagu

SEQ ID NO: 2441629 - RNA, 19 nt, Homo sapiens
  misc_RNA (1)...(19): siRNA sense strand
gcggcaaagcaaagacagu

SEQ ID NO: 2441630 - RNA, 19 nt, Homo sapiens
  misc_RNA (1)...(19): siRNA sense strand
ccaacaugacagugauacu

SEQ ID NO: 2441631 - RNA, 19 nt, Homo sapiens
  misc_RNA (1)...(19): siRNA sense strand
gaaucugggaaguuaccaa

SEQ ID NO: 2441632 - RNA, 19 nt, Homo sapiens
  misc_RNA (1)...(19): siRNA sense strand
caaaugagcgaaaggcacu

SEQ ID NO: 2441633 - RNA, 19 nt, Homo sapiens
  misc_RNA (1)...(19): siRNA sense strand
gcaacaaagacaaggaaaa

SEQ ID NO: 2441634 - RNA, 19 nt, Homo sapiens
  misc_RNA (1)...(19): siRNA sense strand
gaguuagguaugagaacaa

SEQ ID NO: 2441635 - RNA, 19 nt, Homo sapiens
  misc_RNA (1)...(19): siRNA sense strand
cggugauguaagugugaaa

SEQ ID NO: 2441636 - RNA, 19 nt, Homo sapiens
  misc_RNA (1)...(19): siRNA sense strand
gcaccauagacuaccgaaa

SEQ ID NO: 2441637 - RNA, 19 nt, Homo sapiens
  misc_RNA (1)...(19): siRNA sense strand
gugacaagcgagaccguaa

SEQ ID NO: 2441638 - RNA, 19 nt, Homo sapiens
  misc_RNA (1)...(19): siRNA sense strand
gaggaugaucagcgagcua

SEQ ID NO: 2441639 - RNA, 19 nt, Homo sapiens
  misc_RNA (1)...(19): siRNA sense strand
aguccagaauugagcagua

SEQ ID NO: 2441640 - RNA, 19 nt, Homo sapiens
  misc_RNA (1)...(19): siRNA sense strand
agauagaagcuguguaugu

SEQ ID NO: 2441641 - RNA, 19 nt, Homo sapiens
  misc_RNA (1)...(19): siRNA sense strand
cagcugaacgagauaggaa

SEQ ID NO: 2441642 - RNA, 19 nt, Homo sapiens
  misc_RNA (1)...(19): siRNA sense strand
ggcaacaaagacaaggaaa

SEQ ID NO: 2441643 - RNA, 19 nt, Homo sapiens
  misc_RNA (1)...(19): siRNA sense strand
ggacgcucuucuugggcaa

SEQ ID NO: 2441644 - RNA, 19 nt, Homo sapiens
  misc_RNA (1)...(19): siRNA sense strand
guagauaucaagaggccuu

SEQ ID NO: 2441645 - RNA, 19 nt, Homo sapiens
  misc_RNA (1)...(19): siRNA sense strand
uggagaagagccaggguga

SEQ ID NO: 2441646 - RNA, 19 nt, Homo sapiens
  misc_RNA (1)...(19): siRNA sense strand
uggccaaaucugaagaaga

SEQ ID NO: 2441647 - RNA, 19 nt, Homo sapiens
  misc_RNA (1)...(19): siRNA sense strand
ggguagccuuugugaacuu

SEQ ID NO: 2441648 - RNA, 19 nt, Homo sapiens
  misc_RNA (1)...(19): siRNA sense strand
ggacgagguaguuuggaga

SEQ ID NO: 2441649 - RNA, 19 nt, Homo sapiens
  misc_RNA (1)...(19): siRNA sense strand
gugacgaagcgguggagga

SEQ ID NO: 2441650 - RNA, 19 nt, Homo sapiens
  misc_RNA (1)...(19): siRNA sense strand
cgagaccuggagagagaaa

SEQ ID NO: 2441651 - RNA, 19 nt, Homo sapiens
  misc_RNA (1)...(19): siRNA sense strand
augagaacaagaagagaga

SEQ ID NO: 2441652 - RNA, 19 nt, Homo sapiens
  misc_RNA (1)...(19): siRNA sense strand
agaccuggagagagaaaga

SEQ ID NO: 2441653 - RNA, 19 nt, Homo sapiens
  misc_RNA (1)...(19): siRNA sense strand
cuauacagagaucgugaua

SEQ ID NO: 2441654 - RNA, 19 nt, Homo sapiens
  misc_RNA (1)...(19): siRNA sense strand
agguaugagaacaagaaga

SEQ ID NO: 2441655 - RNA, 19 nt, Homo sapiens
  misc_RNA (1)...(19): siRNA sense strand
guucaaacgcuucggugau

SEQ ID NO: 2441656 - RNA, 19 nt, Homo sapiens
  misc_RNA (1)...(19): siRNA sense strand
gcaucagcugaacgagaua

SEQ ID NO: 2441657 - RNA, 19 nt, Homo sapiens
  misc_RNA (1)...(19): siRNA sense strand
agauuucacccgaggauga

SEQ ID NO: 2441658 - RNA, 19 nt, Homo sapiens
  misc_RNA (1)...(19): siRNA sense strand
uguaacggagagugauuua

SEQ ID NO: 2441659 - RNA, 19 nt, Homo sapiens
  misc_RNA (1)...(19): siRNA sense strand
ggaccgggacagaggugau

SEQ ID NO: 2441660 - RNA, 19 nt, Homo sapiens
  misc_RNA (1)...(19): siRNA sense strand
gcuuugggauacagagacu

SEQ ID NO: 2441661 - RNA, 19 nt, Homo sapiens
  misc_RNA (1)...(19): siRNA sense strand
gaagaagauuaccugguca

SEQ ID NO: 2441662 - RNA, 19 nt, Homo sapiens
  misc_RNA (1)...(19): siRNA sense strand
aauacaagacucugaagau

SEQ ID NO: 2441663 - RNA, 19 nt, Homo sapiens
  misc_RNA (1)...(19): siRNA sense strand
gggacagaggugaucgaga

SEQ ID NO: 2441664 - RNA, 19 nt, Homo sapiens
  misc_RNA (1)...(19): siRNA sense strand
ggagaguggaggacgucau

SEQ ID NO: 2441665 - RNA, 19 nt, Homo sapiens
  misc_RNA (1)...(19): siRNA sense strand
gaucguuacaacagcgaca

SEQ ID NO: 2441666 - RNA, 19 nt, Homo sapiens
  misc_RNA (1)...(19): siRNA sense strand
gaacaagaagagagaaaac

SEQ ID NO: 2441667 - RNA, 19 nt, Homo sapiens
  misc_RNA (1)...(19): siRNA sense strand
cuuucagagaaguggauga

SEQ ID NO: 2441668 - RNA, 19 nt, Homo sapiens
  misc_RNA (1)...(19): siRNA sense strand
ugguuaugguaaagcuaca

SEQ ID NO: 2441669 - RNA, 19 nt, Homo sapiens
  misc_RNA (1)...(19): siRNA sense strand
ugacaagcgagaccguaaa

SEQ ID NO: 2441670 - RNA, 19 nt, Homo sapiens
  misc_RNA (1)...(19): siRNA sense strand
ugaaguaacucgacgcauc

SEQ ID NO: 2441671 - RNA, 19 nt, Homo sapiens
  misc_RNA (1)...(19): siRNA sense strand
acuguaacggagagugauu

SEQ ID NO: 2441672 - RNA, 19 nt, Homo sapiens
  misc_RNA (1)...(19): siRNA sense strand
cugcaucagcugaacgaga

SEQ ID NO: 2441673 - RNA, 19 nt, Homo sapiens
  misc_RNA (1)...(19): siRNA sense strand
gggaugagcggguagccuu

SEQ ID NO: 2441674 - RNA, 19 nt, Homo sapiens
  misc_RNA (1)...(19): siRNA sense strand
cuggagagagaaagagacu

SEQ ID NO: 2441675 - RNA, 19 nt, Homo sapiens
  misc_RNA (1)...(19): siRNA sense strand
agaucgacgccuuagagua

SEQ ID NO: 2441676 - RNA, 19 nt, Homo sapiens
  misc_RNA (1)...(19): siRNA sense strand
aggagaaagccaaggagau

SEQ ID NO: 2441677 - RNA, 19 nt, Homo sapiens
  misc_RNA (1)...(19): siRNA sense strand
aggagcaagcugugggaga

SEQ ID NO: 2441678 - RNA, 19 nt, Homo sapiens
  misc_RNA (1)...(19): siRNA sense strand
uggcagagaugcuggucga

SEQ ID NO: 2441679 - RNA, 19 nt, Homo sapiens
  misc_RNA (1)...(19): siRNA sense strand
gaggagaaagccaaggaga

SEQ ID NO: 2441680 - RNA, 19 nt, Homo sapiens
  misc_RNA (1)...(19): siRNA sense strand
gugucggaguugugcgaga

SEQ ID NO: 2441681 - RNA, 19 nt, Homo sapiens
  misc_RNA (1)...(19): siRNA sense strand
cgaauagagagaagcgagu

SEQ ID NO: 2441682 - RNA, 19 nt, Homo sapiens
  misc_RNA (1)...(19): siRNA sense strand
cgucuggcgaauagagaga

SEQ ID NO: 2441683 - RNA, 19 nt, Homo sapiens
  misc_RNA (1)...(19): siRNA sense strand
acgagaugcgcgaggacau

SEQ ID NO: 2441684 - RNA, 19 nt, Homo sapiens
  misc_RNA (1)...(19): siRNA sense strand
cugaggaaguggaggugcu

SEQ ID NO: 2441685 - RNA, 19 nt, Homo sapiens
  misc_RNA (1)...(19): siRNA sense strand
cgaagauggcagagaugcu

SEQ ID NO: 2441686 - RNA, 19 nt, Homo sapiens
  misc_RNA (1)...(19): siRNA sense strand
aggagaaagccaaggagau

SEQ ID NO: 2441687 - RNA, 19 nt, Homo sapiens
  misc_RNA (1)...(19): siRNA sense strand
aggagcaagcugugggaga

SEQ ID NO: 2441688 - RNA, 19 nt, Homo sapiens
  misc_RNA (1)...(19): siRNA sense strand
uggcgaagccgacgagaga

SEQ ID NO: 2441689 - RNA, 19 nt, Homo sapiens
  misc_RNA (1)...(19): siRNA sense strand
uggcagagaugcuggucga

SEQ ID NO: 2441690 - RNA, 19 nt, Homo sapiens
  misc_RNA (1)...(19): siRNA sense strand
gaggagaaagccaaggaga

SEQ ID NO: 2441691 - RNA, 19 nt, Homo sapiens
  misc_RNA (1)...(19): siRNA sense strand
gugucggaguugugcgaga

SEQ ID NO: 2441692 - RNA, 19 nt, Homo sapiens
  misc_RNA (1)...(19): siRNA sense strand
cgaauagagagaagcgagu

SEQ ID NO: 2441693 - RNA, 19 nt, Homo sapiens
  misc_RNA (1)...(19): siRNA sense strand
gagauggacaauaugcuua

SEQ ID NO: 2441694 - RNA, 19 nt, Homo sapiens
  misc_RNA (1)...(19): siRNA sense strand
cgucuggcgaauagagaga

SEQ ID NO: 2441695 - RNA, 19 nt, Homo sapiens
  misc_RNA (1)...(19): siRNA sense strand
gcgaagccgacgagagagu

SEQ ID NO: 2441696 - RNA, 19 nt, Homo sapiens
  misc_RNA (1)...(19): siRNA sense strand
acgagaugcgcgaggacau

SEQ ID NO: 2441697 - RNA, 19 nt, Homo sapiens
  misc_RNA (1)...(19): siRNA sense strand
acgagagagugucggaguu

SEQ ID NO: 2441698 - RNA, 19 nt, Homo sapiens
  misc_RNA (1)...(19): siRNA sense strand
cugaggaaguggaggugcu

SEQ ID NO: 2441699 - RNA, 19 nt, Homo sapiens
  misc_RNA (1)...(19): siRNA sense strand
cgaagauggcagagaugcu

SEQ ID NO: 2441700 - RNA, 19 nt, Homo sapiens
  misc_RNA (1)...(19): siRNA sense strand
gggauaagaaggaagguga

SEQ ID NO: 2441701 - RNA, 19 nt, Homo sapiens
  misc_RNA (1)...(19): siRNA sense strand
acaggauagcagugagauu

SEQ ID NO: 2441702 - RNA, 19 nt, Homo sapiens
  misc_RNA (1)...(19): siRNA sense strand
ugggaauggaggaagaaga

SEQ ID NO: 2441703 - RNA, 19 nt, Homo sapiens
  misc_RNA (1)...(19): siRNA sense strand
ucuuugagggucagagaau

SEQ ID NO: 2441704 - RNA, 19 nt, Homo sapiens
  misc_RNA (1)...(19): siRNA sense strand
gguuucucuuugaggguca

SEQ ID NO: 2441705 - RNA, 19 nt, Homo sapiens
  misc_RNA (1)...(19): siRNA sense strand
cuccaaaagaacugggaau

SEQ ID NO: 2441706 - RNA, 19 nt, Homo sapiens
  misc_RNA (1)...(19): siRNA sense strand
acucaaagucauuggacag

SEQ ID NO: 2441707 - RNA, 19 nt, Homo sapiens
  misc_RNA (1)...(19): siRNA sense strand
gggucaaagaucccagaaa

SEQ ID NO: 2441708 - RNA, 19 nt, Homo sapiens
  misc_RNA (1)...(19): siRNA sense strand
cugggauggcugugauaaa

SEQ ID NO: 2441709 - RNA, 19 nt, Homo sapiens
  misc_RNA (1)...(19): siRNA sense strand
gcagagaaggagaagagca

SEQ ID NO: 2441710 - RNA, 19 nt, Homo sapiens
  misc_RNA (1)...(19): siRNA sense strand
aagagcagcuucugggaca

SEQ ID NO: 2441711 - RNA, 19 nt, Homo sapiens
  misc_RNA (1)...(19): siRNA sense strand
ggacuagcgugauccgaca

SEQ ID NO: 2441712 - RNA, 19 nt, Homo sapiens
  misc_RNA (1)...(19): siRNA sense strand
gcaucuuggagcagacaga

SEQ ID NO: 2441713 - RNA, 19 nt, Homo sapiens
  misc_RNA (1)...(19): siRNA sense strand
gcacaagucugguggccug

SEQ ID NO: 2441714 - RNA, 19 nt, Homo sapiens
  misc_RNA (1)...(19): siRNA sense strand
cagagaaggagaagagcag

SEQ ID NO: 2441715 - RNA, 19 nt, Homo sapiens
  misc_RNA (1)...(19): siRNA sense strand
gagaaggagaagagcagcu

SEQ ID NO: 2441716 - RNA, 19 nt, Homo sapiens
  misc_RNA (1)...(19): siRNA sense strand
aggacagaguuuaggguau

SEQ ID NO: 2441717 - RNA, 19 nt, Homo sapiens
  misc_RNA (1)...(19): siRNA sense strand
acguaaaggugauucguga

SEQ ID NO: 2441718 - RNA, 19 nt, Homo sapiens
  misc_RNA (1)...(19): siRNA sense strand
auaagaggauugaggcaga

SEQ ID NO: 2441719 - RNA, 19 nt, Homo sapiens
  misc_RNA (1)...(19): siRNA sense strand
ccuuuggagcagugaacaa

SEQ ID NO: 2441720 - RNA, 19 nt, Homo sapiens
  misc_RNA (1)...(19): siRNA sense strand
ccucaaucagggaugcuaa

SEQ ID NO: 2441721 - RNA, 19 nt, Homo sapiens
  misc_RNA (1)...(19): siRNA sense strand
aggcagaagaagccaucaa

SEQ ID NO: 2441722 - RNA, 19 nt, Homo sapiens
  misc_RNA (1)...(19): siRNA sense strand
uaauauggccuauggcgua

SEQ ID NO: 2441723 - RNA, 19 nt, Homo sapiens
  misc_RNA (1)...(19): siRNA sense strand
caaccacagaugacagcaa

SEQ ID NO: 2441724 - RNA, 19 nt, Homo sapiens
  misc_RNA (1)...(19): siRNA sense strand
gugaacaacguaaagguga

SEQ ID NO: 2441725 - RNA, 19 nt, Homo sapiens
  misc_RNA (1)...(19): siRNA sense strand
ccuccagcaacaacagaaa

SEQ ID NO: 2441726 - RNA, 19 nt, Homo sapiens
  misc_RNA (1)...(19): siRNA sense strand
ugauaagaggauugaggca

SEQ ID NO: 2441727 - RNA, 19 nt, Homo sapiens
  misc_RNA (1)...(19): siRNA sense strand
ucaaagggcugaauggcca

SEQ ID NO: 2441728 - RNA, 19 nt, Homo sapiens
  misc_RNA (1)...(19): siRNA sense strand
gugaaauagaauccugcaa

SEQ ID NO: 2441729 - RNA, 19 nt, Homo sapiens
  misc_RNA (1)...(19): siRNA sense strand
ggccuauggcguaaagaga

SEQ ID NO: 2441730 - RNA, 19 nt, Homo sapiens
  misc_RNA (1)...(19): siRNA sense strand
ccuauggcguaaagagacu

SEQ ID NO: 2441731 - RNA, 19 nt, Homo sapiens
  misc_RNA (1)...(19): siRNA sense strand
gaaugaacaucccugguca

SEQ ID NO: 2441732 - RNA, 19 nt, Homo sapiens
  misc_RNA (1)...(19): siRNA sense strand
caagaagaauucaggaguc

SEQ ID NO: 2441733 - RNA, 19 nt, Homo sapiens
  misc_RNA (1)...(19): siRNA sense strand
agacaaaauuacaggacag

SEQ ID NO: 2441734 - RNA, 19 nt, Homo sapiens
  misc_RNA (1)...(19): siRNA sense strand
ccaagaagaauucaggagu

SEQ ID NO: 2441735 - RNA, 19 nt, Homo sapiens
  misc_RNA (1)...(19): siRNA sense strand
gcucagagguucaggcugg

SEQ ID NO: 2441736 - RNA, 19 nt, Homo sapiens
  misc_RNA (1)...(19): siRNA sense strand
gaucaaaggacuuggcaga

SEQ ID NO: 2441737 - RNA, 19 nt, Homo sapiens
  misc_RNA (1)...(19): siRNA sense strand
gguuugauaaagauggaaa

SEQ ID NO: 2441738 - RNA, 19 nt, Homo sapiens
  misc_RNA (1)...(19): siRNA sense strand
ccuccaauguccagagcca

SEQ ID NO: 2441739 - RNA, 19 nt, Homo sapiens
  misc_RNA (1)...(19): siRNA sense strand
aggacuuggcagaguguuu

SEQ ID NO: 2441740 - RNA, 19 nt, Homo sapiens
  misc_RNA (1)...(19): siRNA sense strand
ccuaugacaaagauggauu

SEQ ID NO: 2441741 - RNA, 19 nt, Homo sapiens
  misc_RNA (1)...(19): siRNA sense strand
uaaagauggaaauggaaca

SEQ ID NO: 2441742 - RNA, 19 nt, Homo sapiens
  misc_RNA (1)...(19): siRNA sense strand
augcuguggucauggaaaa

SEQ ID NO: 2441743 - RNA, 19 nt, Homo sapiens
  misc_RNA (1)...(19): siRNA sense strand
agaagagguggaagaacuu

SEQ ID NO: 2441744 - RNA, 19 nt, Homo sapiens
  misc_RNA (1)...(19): siRNA sense strand
agguaaucaugcaagcuuu

SEQ ID NO: 2441745 - RNA, 19 nt, Homo sapiens
  misc_RNA (1)...(19): siRNA sense strand
gguuaaaugauuaugcugu

SEQ ID NO: 2441746 - RNA, 19 nt, Homo sapiens
  misc_RNA (1)...(19): siRNA sense strand
ccagaaaagagguaaucau

SEQ ID NO: 2441747 - RNA, 19 nt, Homo sapiens
  misc_RNA (1)...(19): siRNA sense strand
gcgaguacaugaagcgcua

SEQ ID NO: 2441748 - RNA, 19 nt, Homo sapiens
  misc_RNA (1)...(19): siRNA sense strand
acagaagacagguggaaaa

SEQ ID NO: 2441749 - RNA, 19 nt, Homo sapiens
  misc_RNA (1)...(19): siRNA sense strand
cccaaagaucaucgaguaa

SEQ ID NO: 2441750 - RNA, 19 nt, Homo sapiens
  misc_RNA (1)...(19): siRNA sense strand
cagugaaagauguagaaga

SEQ ID NO: 2441751 - RNA, 19 nt, Homo sapiens
  misc_RNA (1)...(19): siRNA sense strand
agaagauaaaccugaacaa

SEQ ID NO: 2441752 - RNA, 19 nt, Homo sapiens
  misc_RNA (1)...(19): siRNA sense strand
gggugaagagcgaguacau

SEQ ID NO: 2441753 - RNA, 19 nt, Homo sapiens
  misc_RNA (1)...(19): siRNA sense strand
cuuuauggcuggggagaaa

SEQ ID NO: 2441754 - RNA, 19 nt, Homo sapiens
  misc_RNA (1)...(19): siRNA sense strand
cuuauuugcuagaggaaac

SEQ ID NO: 2441755 - RNA, 19 nt, Homo sapiens
  misc_RNA (1)...(19): siRNA sense strand
acucuguggauguggagaa

SEQ ID NO: 2441756 - RNA, 19 nt, Homo sapiens
  misc_RNA (1)...(19): siRNA sense strand
auguggagaagaacagaaa

SEQ ID NO: 2441757 - RNA, 19 nt, Homo sapiens
  misc_RNA (1)...(19): siRNA sense strand
aaccagaacaagagagacu

SEQ ID NO: 2441758 - RNA, 19 nt, Homo sapiens
  misc_RNA (1)...(19): siRNA sense strand
ugcuagaggaaacaggaaa

SEQ ID NO: 2441759 - RNA, 19 nt, Homo sapiens
  misc_RNA (1)...(19): siRNA sense strand
agaacaagagagacugaca

SEQ ID NO: 2441760 - RNA, 19 nt, Homo sapiens
  misc_RNA (1)...(19): siRNA sense strand
aaaggaaacugguugcuca

SEQ ID NO: 2441761 - RNA, 19 nt, Homo sapiens
  misc_RNA (1)...(19): siRNA sense strand
augaggugcuauucggcaa

SEQ ID NO: 2441762 - RNA, 19 nt, Homo sapiens
  misc_RNA (1)...(19): siRNA sense strand
ccacagauggcacgggcaa

SEQ ID NO: 2441763 - RNA, 19 nt, Homo sapiens
  misc_RNA (1)...(19): siRNA sense strand
guucagaaucagaagacga

SEQ ID NO: 2441764 - RNA, 19 nt, Homo sapiens
  misc_RNA (1)...(19): siRNA sense strand
ucuucaaacaguucggaua

SEQ ID NO: 2441765 - RNA, 19 nt, Homo sapiens
  misc_RNA (1)...(19): siRNA sense strand
ccuuauuggaccagguaca

SEQ ID NO: 2441766 - RNA, 19 nt, Homo sapiens
  misc_RNA (1)...(19): siRNA sense strand
gccucauaguaaaguuaua

SEQ ID NO: 2441767 - RNA, 19 nt, Homo sapiens
  misc_RNA (1)...(19): siRNA sense strand
agaaauggcagcugcacca

SEQ ID NO: 2441768 - RNA, 19 nt, Homo sapiens
  misc_RNA (1)...(19): siRNA sense strand
aagacgaagaugacagcau

SEQ ID NO: 2441769 - RNA, 19 nt, Homo sapiens
  misc_RNA (1)...(19): siRNA sense strand
guggaaaaggcaagauuga

SEQ ID NO: 2441770 - RNA, 19 nt, Homo sapiens
  misc_RNA (1)...(19): siRNA sense strand
uacaaauggauguggcuuu

SEQ ID NO: 2441771 - RNA, 19 nt, Homo sapiens
  misc_RNA (1)...(19): siRNA sense strand
gagcaaaagggaagacauu

SEQ ID NO: 2441772 - RNA, 19 nt, Homo sapiens
  misc_RNA (1)...(19): siRNA sense strand
acuugaagacucagaauau

SEQ ID NO: 2441773 - RNA, 19 nt, Homo sapiens
  misc_RNA (1)...(19): siRNA sense strand
cgacagugaaagaaaggau

SEQ ID NO: 2441774 - RNA, 19 nt, Homo sapiens
  misc_RNA (1)...(19): siRNA sense strand
ugaucaugaaagaggacua

SEQ ID NO: 2441775 - RNA, 19 nt, Homo sapiens
  misc_RNA (1)...(19): siRNA sense strand
augaagaaaguuugccaua

SEQ ID NO: 2441776 - RNA, 19 nt, Homo sapiens
  misc_RNA (1)...(19): siRNA sense strand
aauagaaaguggaugggca

SEQ ID NO: 2441777 - RNA, 19 nt, Homo sapiens
  misc_RNA (1)...(19): siRNA sense strand
acaaaguuacagaguguuu

SEQ ID NO: 2441778 - RNA, 19 nt, Homo sapiens
  misc_RNA (1)...(19): siRNA sense strand
uguaaaucaugguccacaa

SEQ ID NO: 2441779 - RNA, 19 nt, Homo sapiens
  misc_RNA (1)...(19): siRNA sense strand
aaacuaugaaccuggacaa

SEQ ID NO: 2441780 - RNA, 19 nt, Homo sapiens
  misc_RNA (1)...(19): siRNA sense strand
cucaaaagucagacaauua

SEQ ID NO: 2441781 - RNA, 19 nt, Homo sapiens
  misc_RNA (1)...(19): siRNA sense strand
cuacugacauccaaggaga

SEQ ID NO: 2441782 - RNA, 19 nt, Homo sapiens
  misc_RNA (1)...(19): siRNA sense strand
gaacauuugaagagauaac

SEQ ID NO: 2441783 - RNA, 19 nt, Homo sapiens
  misc_RNA (1)...(19): siRNA sense strand
uggaauuaucucugaacau

SEQ ID NO: 2441784 - RNA, 19 nt, Homo sapiens
  misc_RNA (1)...(19): siRNA sense strand
agcaguggauccagagcaa

SEQ ID NO: 2441785 - RNA, 19 nt, Homo sapiens
  misc_RNA (1)...(19): siRNA sense strand
caguggauccagagcaaaa

SEQ ID NO: 2441786 - RNA, 19 nt, Homo sapiens
  misc_RNA (1)...(19): siRNA sense strand
uuaucaaaguggcgcauga

SEQ ID NO: 2441787 - RNA, 19 nt, Homo sapiens
  misc_RNA (1)...(19): siRNA sense strand
ccgugaagcaccugcacau

SEQ ID NO: 2441788 - RNA, 19 nt, Homo sapiens
  misc_RNA (1)...(19): siRNA sense strand
uaauagaacuugaaccagu

SEQ ID NO: 2441789 - RNA, 19 nt, Homo sapiens
  misc_RNA (1)...(19): siRNA sense strand
ugucuuaagagaagcugaa

SEQ ID NO: 2441790 - RNA, 19 nt, Homo sapiens
  misc_RNA (1)...(19): siRNA sense strand
agaaaguggaugggcacaa

SEQ ID NO: 2441791 - RNA, 19 nt, Homo sapiens
  misc_RNA (1)...(19): siRNA sense strand
ggcacaaaauccagaugaa

SEQ ID NO: 2441792 - RNA, 19 nt, Homo sapiens
  misc_RNA (1)...(19): siRNA sense strand
gcacaaaauccagaugaaa

SEQ ID NO: 2441793 - RNA, 19 nt, Homo sapiens
  misc_RNA (1)...(19): siRNA sense strand
ugaacauaccuguaaauca

SEQ ID NO: 2441794 - RNA, 19 nt, Homo sapiens
  misc_RNA (1)...(19): siRNA sense strand
uugcuuggccauugagauu

SEQ ID NO: 2441795 - RNA, 19 nt, Homo sapiens
  misc_RNA (1)...(19): siRNA sense strand
caucaugacuugaagacuc

SEQ ID NO: 2441796 - RNA, 19 nt, Homo sapiens
  misc_RNA (1)...(19): siRNA sense strand
cuaugugacaagaagaaaa

SEQ ID NO: 2441797 - RNA, 19 nt, Homo sapiens
  misc_RNA (1)...(19): siRNA sense strand
uuacugaauacaugccaaa

SEQ ID NO: 2441798 - RNA, 19 nt, Homo sapiens
  misc_RNA (1)...(19): siRNA sense strand
cuacauaggaaaacugaau

SEQ ID NO: 2441799 - RNA, 19 nt, Homo sapiens
  misc_RNA (1)...(19): siRNA sense strand
gaaccaguuuugagaacau

SEQ ID NO: 2441800 - RNA, 19 nt, Homo sapiens
  misc_RNA (1)...(19): siRNA sense strand
uugcaaugagccugaauuu

SEQ ID NO: 2441801 - RNA, 19 nt, Homo sapiens
  misc_RNA (1)...(19): siRNA sense strand
acguaugaucucucuaaua

SEQ ID NO: 2441802 - RNA, 19 nt, Homo sapiens
  misc_RNA (1)...(19): siRNA sense strand
acaaaauccagaugaaaga

SEQ ID NO: 2441803 - RNA, 19 nt, Homo sapiens
  misc_RNA (1)...(19): siRNA sense strand
gggaauuugcaaugagccu

SEQ ID NO: 2441804 - RNA, 19 nt, Homo sapiens
  misc_RNA (1)...(19): siRNA sense strand
auacaugccaaauggauca

SEQ ID NO: 2441805 - RNA, 19 nt, Homo sapiens
  misc_RNA (1)...(19): siRNA sense strand
ucuuaagagaagcugaaau

SEQ ID NO: 2441806 - RNA, 19 nt, Homo sapiens
  misc_RNA (1)...(19): siRNA sense strand
acaaaugggucuucagccu

SEQ ID NO: 2441807 - RNA, 19 nt, Homo sapiens
  misc_RNA (1)...(19): siRNA sense strand
aaaucaagggccaguauca

SEQ ID NO: 2441808 - RNA, 19 nt, Homo sapiens
  misc_RNA (1)...(19): siRNA sense strand
gggccaguaucaagcacga

SEQ ID NO: 2441809 - RNA, 19 nt, Homo sapiens
  misc_RNA (1)...(19): siRNA sense strand
auaacaaacaaaugggucu

SEQ ID NO: 2441810 - RNA, 19 nt, Homo sapiens
  misc_RNA (1)...(19): siRNA sense strand
caagaaagcaaaucggaga

SEQ ID NO: 2441811 - RNA, 19 nt, Homo sapiens
  misc_RNA (1)...(19): siRNA sense strand
cggauaaagacguggcacu

SEQ ID NO: 2441812 - RNA, 19 nt, Homo sapiens
  misc_RNA (1)...(19): siRNA sense strand
cugaguucuuugaggauga

SEQ ID NO: 2441813 - RNA, 19 nt, Homo sapiens
  misc_RNA (1)...(19): siRNA sense strand
cguccagccaagaaagcaa

SEQ ID NO: 2441814 - RNA, 19 nt, Homo sapiens
  misc_RNA (1)...(19): siRNA sense strand
cgacugaguucuuugagga

SEQ ID NO: 2441815 - RNA, 19 nt, Homo sapiens
  misc_RNA (1)...(19): siRNA sense strand
gugugauacucgagcccau

SEQ ID NO: 2441816 - RNA, 19 nt, Homo sapiens
  misc_RNA (1)...(19): siRNA sense strand
aagaaagcaaaucggagaa

SEQ ID NO: 2441817 - RNA, 19 nt, Homo sapiens
  misc_RNA (1)...(19): siRNA sense strand
gcaaacggcggaaacggaa

SEQ ID NO: 2441818 - RNA, 19 nt, Homo sapiens
  misc_RNA (1)...(19): siRNA sense strand
acagcaacagcaagaagaa

SEQ ID NO: 2441819 - RNA, 19 nt, Homo sapiens
  misc_RNA (1)...(19): siRNA sense strand
cacaagaccuacagccuca

SEQ ID NO: 2441820 - RNA, 19 nt, Homo sapiens
  misc_RNA (1)...(19): siRNA sense strand
acgacaugaugcggauaaa

SEQ ID NO: 2441821 - RNA, 19 nt, Homo sapiens
  misc_RNA (1)...(19): siRNA sense strand
agcaacagcaagaagaaga

SEQ ID NO: 2441822 - RNA, 19 nt, Homo sapiens
  misc_RNA (1)...(19): siRNA sense strand
agaagaaagaugaggucua

SEQ ID NO: 2441823 - RNA, 19 nt, Homo sapiens
  misc_RNA (1)...(19): siRNA sense strand
acuaaggauucgucaggaa

SEQ ID NO: 2441824 - RNA, 19 nt, Homo sapiens
  misc_RNA (1)...(19): siRNA sense strand
gcagcugguccgaggagaa

SEQ ID NO: 2441825 - RNA, 19 nt, Homo sapiens
  misc_RNA (1)...(19): siRNA sense strand
cggaaacaguauacagagu

SEQ ID NO: 2441826 - RNA, 19 nt, Homo sapiens
  misc_RNA (1)...(19): siRNA sense strand
ucaagaaaguauugcagga

SEQ ID NO: 2441827 - RNA, 19 nt, Homo sapiens
  misc_RNA (1)...(19): siRNA sense strand
agggagcaaaucagagaaa

SEQ ID NO: 2441828 - RNA, 19 nt, Homo sapiens
  misc_RNA (1)...(19): siRNA sense strand
gggauagugguguggauca

SEQ ID NO: 2441829 - RNA, 19 nt, Homo sapiens
  misc_RNA (1)...(19): siRNA sense strand
acauaguccgauugcguua

SEQ ID NO: 2441830 - RNA, 19 nt, Homo sapiens
  misc_RNA (1)...(19): siRNA sense strand
caggagaacuggucgccau

SEQ ID NO: 2441831 - RNA, 19 nt, Homo sapiens
  misc_RNA (1)...(19): siRNA sense strand
acuuugugauucaggagaa

SEQ ID NO: 2441832 - RNA, 19 nt, Homo sapiens
  misc_RNA (1)...(19): siRNA sense strand
uaaucaagguccugggaac

SEQ ID NO: 2441833 - RNA, 19 nt, Homo sapiens
  misc_RNA (1)...(19): siRNA sense strand
cuaccaaaugggcgagaca

SEQ ID NO: 2441834 - RNA, 19 nt, Homo sapiens
  misc_RNA (1)...(19): siRNA sense strand
ggccacaagaagucagcua

SEQ ID NO: 2441835 - RNA, 19 nt, Homo sapiens
  misc_RNA (1)...(19): siRNA sense strand
aagaaaguauugcaggaca

SEQ ID NO: 2441836 - RNA, 19 nt, Homo sapiens
  misc_RNA (1)...(19): siRNA sense strand
uaguauagauguauggucu

SEQ ID NO: 2441837 - RNA, 19 nt, Homo sapiens
  misc_RNA (1)...(19): siRNA sense strand
gagacaaggacggcagcaa

SEQ ID NO: 2441838 - RNA, 19 nt, Homo sapiens
  misc_RNA (1)...(19): siRNA sense strand
augaaaguuagcagagaca

SEQ ID NO: 2441839 - RNA, 19 nt, Homo sapiens
  misc_RNA (1)...(19): siRNA sense strand
agcuccagaucaugagaaa

SEQ ID NO: 2441840 - RNA, 19 nt, Homo sapiens
  misc_RNA (1)...(19): siRNA sense strand
ugacaacagugguggcaac

SEQ ID NO: 2441841 - RNA, 19 nt, Homo sapiens
  misc_RNA (1)...(19): siRNA sense strand
caaacuaccaaaugggcga

SEQ ID NO: 2441842 - RNA, 19 nt, Homo sapiens
  misc_RNA (1)...(19): siRNA sense strand
aggacaagagauuuaagaa

SEQ ID NO: 2441843 - RNA, 19 nt, Homo sapiens
  misc_RNA (1)...(19): siRNA sense strand
ccagaucaugagaaagcua

SEQ ID NO: 2441844 - RNA, 19 nt, Homo sapiens
  misc_RNA (1)...(19): siRNA sense strand
aacccaaacuacacagaau

SEQ ID NO: 2441845 - RNA, 19 nt, Homo sapiens
  misc_RNA (1)...(19): siRNA sense strand
ccgacuaacaccacuggaa

SEQ ID NO: 2441846 - RNA, 19 nt, Homo sapiens
  misc_RNA (1)...(19): siRNA sense strand
augaauuacgggacccaaa

SEQ ID NO: 2441847 - RNA, 19 nt, Homo sapiens
  misc_RNA (1)...(19): siRNA sense strand
cuuuggagccacugauuau

SEQ ID NO: 2441848 - RNA, 19 nt, Homo sapiens
  misc_RNA (1)...(19): siRNA sense strand
auuuaagaaucgagagcuc

SEQ ID NO: 2441849 - RNA, 19 nt, Homo sapiens
  misc_RNA (1)...(19): siRNA sense strand
cagaguugccagacacuau

SEQ ID NO: 2441850 - RNA, 19 nt, Homo sapiens
  misc_RNA (1)...(19): siRNA sense strand
accaaaugggcgagacaca

SEQ ID NO: 2441851 - RNA, 19 nt, Homo sapiens
  misc_RNA (1)...(19): siRNA sense strand
acuccaguggugagaagaa

SEQ ID NO: 2441852 - RNA, 19 nt, Homo sapiens
  misc_RNA (1)...(19): siRNA sense strand
cagcaugaaaguuagcaga

SEQ ID NO: 2441853 - RNA, 19 nt, Homo sapiens
  misc_RNA (1)...(19): siRNA sense strand
cugcuggaguauacaccaa

SEQ ID NO: 2441854 - RNA, 19 nt, Homo sapiens
  misc_RNA (1)...(19): siRNA sense strand
uauugcaggacaagagauu

SEQ ID NO: 2441855 - RNA, 19 nt, Homo sapiens
  misc_RNA (1)...(19): siRNA sense strand
cuaucaaacucgaaaggga

SEQ ID NO: 2441856 - RNA, 19 nt, Homo sapiens
  misc_RNA (1)...(19): siRNA sense strand
aguaugaagugaagcgucu

SEQ ID NO: 2441857 - RNA, 19 nt, Homo sapiens
  misc_RNA (1)...(19): siRNA sense strand
acugaagugucaagaaaau

SEQ ID NO: 2441858 - RNA, 19 nt, Homo sapiens
  misc_RNA (1)...(19): siRNA sense strand
cauuaaagauggacugcuc

SEQ ID NO: 2441859 - RNA, 19 nt, Homo sapiens
  misc_RNA (1)...(19): siRNA sense strand
ucgaaagggaguaugaagu

SEQ ID NO: 2441860 - RNA, 19 nt, Homo sapiens
  misc_RNA (1)...(19): siRNA sense strand
auucaaagcauguaaccau

SEQ ID NO: 2441861 - RNA, 19 nt, Homo sapiens
  misc_RNA (1)...(19): siRNA sense strand
ucuccauggaaaucagaua

SEQ ID NO: 2441862 - RNA, 19 nt, Homo sapiens
  misc_RNA (1)...(19): siRNA sense strand
acucuaucuucaugacaau

SEQ ID NO: 2441863 - RNA, 19 nt, Homo sapiens
  misc_RNA (1)...(19): siRNA sense strand
ugagaaaggagaaaaugaa

SEQ ID NO: 2441864 - RNA, 19 nt, Homo sapiens
  misc_RNA (1)...(19): siRNA sense strand
aaggagaaaaugaagcaua

SEQ ID NO: 2441865 - RNA, 19 nt, Homo sapiens
  misc_RNA (1)...(19): siRNA sense strand
ccccaguaccugaagaaaa

SEQ ID NO: 2441866 - RNA, 19 nt, Homo sapiens
  misc_RNA (1)...(19): siRNA sense strand
agaaggagaagaagggcaa

SEQ ID NO: 2441867 - RNA, 19 nt, Homo sapiens
  misc_RNA (1)...(19): siRNA sense strand
aagaagaaccugauggaga

SEQ ID NO: 2441868 - RNA, 19 nt, Homo sapiens
  misc_RNA (1)...(19): siRNA sense strand
aggagaagaagaaggagaa

SEQ ID NO: 2441869 - RNA, 19 nt, Homo sapiens
  misc_RNA (1)...(19): siRNA sense strand
caaucaaagucgauggcau

SEQ ID NO: 2441870 - RNA, 19 nt, Homo sapiens
  misc_RNA (1)...(19): siRNA sense strand
agaggaaggagaaggagaa

SEQ ID NO: 2441871 - RNA, 19 nt, Homo sapiens
  misc_RNA (1)...(19): siRNA sense strand
aagaagaaggagaaggaga

SEQ ID NO: 2441872 - RNA, 19 nt, Homo sapiens
  misc_RNA (1)...(19): siRNA sense strand
ggauauugaucgaggacuc

SEQ ID NO: 2441873 - RNA, 19 nt, Homo sapiens
  misc_RNA (1)...(19): siRNA sense strand
gagaaggacaagaggagga

SEQ ID NO: 2441874 - RNA, 19 nt, Homo sapiens
  misc_RNA (1)...(19): siRNA sense strand
aaagagaaagagagagaca

SEQ ID NO: 2441875 - RNA, 19 nt, Homo sapiens
  misc_RNA (1)...(19): siRNA sense strand
ccuaagaagaagaagcaca

SEQ ID NO: 2441876 - RNA, 19 nt, Homo sapiens
  misc_RNA (1)...(19): siRNA sense strand
ggaugguguccaagaagaa

SEQ ID NO: 2441877 - RNA, 19 nt, Homo sapiens
  misc_RNA (1)...(19): siRNA sense strand
agaucaagcaggagcugaa

SEQ ID NO: 2441878 - RNA, 19 nt, Homo sapiens
  misc_RNA (1)...(19): siRNA sense strand
guagaaaagaagagcaaga

SEQ ID NO: 2441879 - RNA, 19 nt, Homo sapiens
  misc_RNA (1)...(19): siRNA sense strand
acccaagaagaaagagaaa

SEQ ID NO: 2441880 - RNA, 19 nt, Homo sapiens
  misc_RNA (1)...(19): siRNA sense strand
augugaagcuggaggagga

SEQ ID NO: 2441881 - RNA, 19 nt, Homo sapiens
  misc_RNA (1)...(19): siRNA sense strand
auucagaaacacagaaaca

SEQ ID NO: 2441882 - RNA, 19 nt, Homo sapiens
  misc_RNA (1)...(19): siRNA sense strand
ggaagcaggagcaggccaa

SEQ ID NO: 2441883 - RNA, 19 nt, Homo sapiens
  misc_RNA (1)...(19): siRNA sense strand
aaggagaagaagaaggaga

SEQ ID NO: 2441884 - RNA, 19 nt, Homo sapiens
  misc_RNA (1)...(19): siRNA sense strand
ugaagaagcugaugaccca

SEQ ID NO: 2441885 - RNA, 19 nt, Homo sapiens
  misc_RNA (1)...(19): siRNA sense strand
aagagagagacaaggagaa

SEQ ID NO: 2441886 - RNA, 19 nt, Homo sapiens
  misc_RNA (1)...(19): siRNA sense strand
cggagagcgacgaggacau

SEQ ID NO: 2441887 - RNA, 19 nt, Homo sapiens
  misc_RNA (1)...(19): siRNA sense strand
aggacaacauagcggugaa

SEQ ID NO: 2441888 - RNA, 19 nt, Homo sapiens
  misc_RNA (1)...(19): siRNA sense strand
gcgugaaggccauccgcaa

SEQ ID NO: 2441889 - RNA, 19 nt, Homo sapiens
  misc_RNA (1)...(19): siRNA sense strand
ccuacagggcucuggauau

SEQ ID NO: 2441890 - RNA, 19 nt, Homo sapiens
  misc_RNA (1)...(19): siRNA sense strand
acauagcggugaaggcgaa

SEQ ID NO: 2441891 - RNA, 19 nt, Homo sapiens
  misc_RNA (1)...(19): siRNA sense strand
uggauauugaccuggauaa

SEQ ID NO: 2441892 - RNA, 19 nt, Homo sapiens
  misc_RNA (1)...(19): siRNA sense strand
ugguagaaaagaagagcaa

SEQ ID NO: 2441893 - RNA, 19 nt, Homo sapiens
  misc_RNA (1)...(19): siRNA sense strand
aaggacaagaggaggaaaa

SEQ ID NO: 2441894 - RNA, 19 nt, Homo sapiens
  misc_RNA (1)...(19): siRNA sense strand
uccagaagcuucaggccaa

SEQ ID NO: 2441895 - RNA, 19 nt, Homo sapiens
  misc_RNA (1)...(19): siRNA sense strand
gcagcauccucaagggcau

SEQ ID NO: 2441896 - RNA, 19 nt, Homo sapiens
  misc_RNA (1)...(19): siRNA sense strand
agaacguggucaagcucua

SEQ ID NO: 2441897 - RNA, 19 nt, Homo sapiens
  misc_RNA (1)...(19): siRNA sense strand
gagaaggagaagaagggca

SEQ ID NO: 2441898 - RNA, 19 nt, Homo sapiens
  misc_RNA (1)...(19): siRNA sense strand
agaaaagaagagcaagaaa

SEQ ID NO: 2441899 - RNA, 19 nt, Homo sapiens
  misc_RNA (1)...(19): siRNA sense strand
aaggagaaggagaagaaga

SEQ ID NO: 2441900 - RNA, 19 nt, Homo sapiens
  misc_RNA (1)...(19): siRNA sense strand
cucccaagccuaagaagaa

SEQ ID NO: 2441901 - RNA, 19 nt, Homo sapiens
  misc_RNA (1)...(19): siRNA sense strand
ggcaagaagaaguccaaga

SEQ ID NO: 2441902 - RNA, 19 nt, Homo sapiens
  misc_RNA (1)...(19): siRNA sense strand
uagacaaggcagaggguac

SEQ ID NO: 2441903 - RNA, 19 nt, Homo sapiens
  misc_RNA (1)...(19): siRNA sense strand
aagaggaaggagaaggaga

SEQ ID NO: 2441904 - RNA, 19 nt, Homo sapiens
  misc_RNA (1)...(19): siRNA sense strand
uggccaucgugcuggagaa

SEQ ID NO: 2441905 - RNA, 19 nt, Homo sapiens
  misc_RNA (1)...(19): siRNA sense strand
ucacagaggagaugccuga

SEQ ID NO: 2441906 - RNA, 19 nt, Homo sapiens
  misc_RNA (1)...(19): siRNA sense strand
ccaagauccugaagaccca

SEQ ID NO: 2441907 - RNA, 19 nt, Homo sapiens
  misc_RNA (1)...(19): siRNA sense strand
cuauucagaaacacagaaa

SEQ ID NO: 2441908 - RNA, 19 nt, Homo sapiens
  misc_RNA (1)...(19): siRNA sense strand
agagaaagagagagacaag

SEQ ID NO: 2441909 - RNA, 19 nt, Homo sapiens
  misc_RNA (1)...(19): siRNA sense strand
aagaagagcaagaaaccca

SEQ ID NO: 2441910 - RNA, 19 nt, Homo sapiens
  misc_RNA (1)...(19): siRNA sense strand
agagacaaggagaagaaga

SEQ ID NO: 2441911 - RNA, 19 nt, Homo sapiens
  misc_RNA (1)...(19): siRNA sense strand
agaagcuggagaaggacaa

SEQ ID NO: 2441912 - RNA, 19 nt, Homo sapiens
  misc_RNA (1)...(19): siRNA sense strand
agcaagaaacccaagaaga

SEQ ID NO: 2441913 - RNA, 19 nt, Homo sapiens
  misc_RNA (1)...(19): siRNA sense strand
aagaagcacaggaaggaga

SEQ ID NO: 2441914 - RNA, 19 nt, Homo sapiens
  misc_RNA (1)...(19): siRNA sense strand
aggcgaacgcggucugcaa

SEQ ID NO: 2441915 - RNA, 19 nt, Homo sapiens
  misc_RNA (1)...(19): siRNA sense strand
ccuucaagcgaauuggcua

SEQ ID NO: 2441916 - RNA, 19 nt, Homo sapiens
  misc_RNA (1)...(19): siRNA sense strand
aaagagagagacaaggaga

SEQ ID NO: 2441917 - RNA, 19 nt, Homo sapiens
  misc_RNA (1)...(19): siRNA sense strand
gagaaggaggagcggacca

SEQ ID NO: 2441918 - RNA, 19 nt, Homo sapiens
  misc_RNA (1)...(19): siRNA sense strand
cuggagaacaggagcagca

SEQ ID NO: 2441919 - RNA, 19 nt, Homo sapiens
  misc_RNA (1)...(19): siRNA sense strand
gagaacaggagcagcagca

SEQ ID NO: 2441920 - RNA, 19 nt, Homo sapiens
  misc_RNA (1)...(19): siRNA sense strand
ccagcgacgaggaugacaa

SEQ ID NO: 2441921 - RNA, 19 nt, Homo sapiens
  misc_RNA (1)...(19): siRNA sense strand
gggcaucagcaaagggaac

SEQ ID NO: 2441922 - RNA, 19 nt, Homo sapiens
  misc_RNA (1)...(19): siRNA sense strand
guggagaagagguacaaca

SEQ ID NO: 2441923 - RNA, 19 nt, Homo sapiens
  misc_RNA (1)...(19): siRNA sense strand
ucgggaugccaguggagaa

SEQ ID NO: 2441924 - RNA, 19 nt, Homo sapiens
  misc_RNA (1)...(19): siRNA sense strand
ugccaguggagaagaggua

SEQ ID NO: 2441925 - RNA, 19 nt, Homo sapiens
  misc_RNA (1)...(19): siRNA sense strand
ccaguggagaagagguaca

SEQ ID NO: 2441926 - RNA, 19 nt, Homo sapiens
  misc_RNA (1)...(19): siRNA sense strand
gggaaguugcugccgugaa

SEQ ID NO: 2441927 - RNA, 19 nt, Homo sapiens
  misc_RNA (1)...(19): siRNA sense strand
gcgcagaagugguggcaca

SEQ ID NO: 2441928 - RNA, 19 nt, Homo sapiens
  misc_RNA (1)...(19): siRNA sense strand
aguuagagcccgagaagca

SEQ ID NO: 2441929 - RNA, 19 nt, Homo sapiens
  misc_RNA (1)...(19): siRNA sense strand
gguucgggacauagagaau

SEQ ID NO: 2441930 - RNA, 19 nt, Homo sapiens
  misc_RNA (1)...(19): siRNA sense strand
uggcgggagccgagaagaa

SEQ ID NO: 2441931 - RNA, 19 nt, Homo sapiens
  misc_RNA (1)...(19): siRNA sense strand
cugugaagggccagaguga

SEQ ID NO: 2441932 - RNA, 19 nt, Homo sapiens
  misc_RNA (1)...(19): siRNA sense strand
gccugaaacuggagccuca

SEQ ID NO: 2441933 - RNA, 19 nt, Homo sapiens
  misc_RNA (1)...(19): siRNA sense strand
ugaaugaguuagagcccga

SEQ ID NO: 2441934 - RNA, 19 nt, Homo sapiens
  misc_RNA (1)...(19): siRNA sense strand
gagaagaauggucugguga

SEQ ID NO: 2441935 - RNA, 19 nt, Homo sapiens
  misc_RNA (1)...(19): siRNA sense strand
cugagugaccagcggagua

SEQ ID NO: 2441936 - RNA, 19 nt, Homo sapiens
  misc_RNA (1)...(19): siRNA sense strand
acacaguauuugaaugcca

SEQ ID NO: 2441937 - RNA, 19 nt, Homo sapiens
  misc_RNA (1)...(19): siRNA sense strand
cggcuaaguucacgggccu

SEQ ID NO: 2441938 - RNA, 19 nt, Homo sapiens
  misc_RNA (1)...(19): siRNA sense strand
cacaagaaccagaaggaug

SEQ ID NO: 2441939 - RNA, 19 nt, Homo sapiens
  misc_RNA (1)...(19): siRNA sense strand
ccgugaaggcagaggaaau

SEQ ID NO: 2441940 - RNA, 19 nt, Homo sapiens
  misc_RNA (1)...(19): siRNA sense strand
ugauaaacaccuaggagaa

SEQ ID NO: 2441941 - RNA, 19 nt, Homo sapiens
  misc_RNA (1)...(19): siRNA sense strand
ccauaagaaccaagaaaga

SEQ ID NO: 2441942 - RNA, 19 nt, Homo sapiens
  misc_RNA (1)...(19): siRNA sense strand
gagcaaaaucgaagacuaa

SEQ ID NO: 2441943 - RNA, 19 nt, Homo sapiens
  misc_RNA (1)...(19): siRNA sense strand
cugaagaucugcagggaca

SEQ ID NO: 2441944 - RNA, 19 nt, Homo sapiens
  misc_RNA (1)...(19): siRNA sense strand
ccaagaaagaaguugcaaa

SEQ ID NO: 2441945 - RNA, 19 nt, Homo sapiens
  misc_RNA (1)...(19): siRNA sense strand
gagagauggaagacaguaa

SEQ ID NO: 2441946 - RNA, 19 nt, Homo sapiens
  misc_RNA (1)...(19): siRNA sense strand
ccaagaaaugauucagaaa

SEQ ID NO: 2441947 - RNA, 19 nt, Homo sapiens
  misc_RNA (1)...(19): siRNA sense strand
acgaagaaacuuacugaaa

SEQ ID NO: 2441948 - RNA, 19 nt, Homo sapiens
  misc_RNA (1)...(19): siRNA sense strand
acagaaaacuggaagaaau

SEQ ID NO: 2441949 - RNA, 19 nt, Homo sapiens
  misc_RNA (1)...(19): siRNA sense strand
acugagaguuuaaggaaga

SEQ ID NO: 2441950 - RNA, 19 nt, Homo sapiens
  misc_RNA (1)...(19): siRNA sense strand
agaacauggaagugacuaa

SEQ ID NO: 2441951 - RNA, 19 nt, Homo sapiens
  misc_RNA (1)...(19): siRNA sense strand
ugagcugagucgacagaaa

SEQ ID NO: 2441952 - RNA, 19 nt, Homo sapiens
  misc_RNA (1)...(19): siRNA sense strand
guacaauggaacaugaauu

SEQ ID NO: 2441953 - RNA, 19 nt, Homo sapiens
  misc_RNA (1)...(19): siRNA sense strand
aagaaaugcaccaaagauu

SEQ ID NO: 2441954 - RNA, 19 nt, Homo sapiens
  misc_RNA (1)...(19): siRNA sense strand
uggaagacaguaauagaaa

SEQ ID NO: 2441955 - RNA, 19 nt, Homo sapiens
  misc_RNA (1)...(19): siRNA sense strand
aagaagaagacauagagaa

SEQ ID NO: 2441956 - RNA, 19 nt, Homo sapiens
  misc_RNA (1)...(19): siRNA sense strand
ccaaauuagagcugagagu

SEQ ID NO: 2441957 - RNA, 19 nt, Homo sapiens
  misc_RNA (1)...(19): siRNA sense strand
agagguaggaacugacaua

SEQ ID NO: 2441958 - RNA, 19 nt, Homo sapiens
  misc_RNA (1)...(19): siRNA sense strand
agguaggaacugacauaua

SEQ ID NO: 2441959 - RNA, 19 nt, Homo sapiens
  misc_RNA (1)...(19): siRNA sense strand
augaugaaacagucagaaa

SEQ ID NO: 2441960 - RNA, 19 nt, Homo sapiens
  misc_RNA (1)...(19): siRNA sense strand
agucagaaaccuucaagaa

SEQ ID NO: 2441961 - RNA, 19 nt, Homo sapiens
  misc_RNA (1)...(19): siRNA sense strand
cgacuuucugagagagcaa

SEQ ID NO: 2441962 - RNA, 19 nt, Homo sapiens
  misc_RNA (1)...(19): siRNA sense strand
gagagagaacugugggcuu

SEQ ID NO: 2441963 - RNA, 19 nt, Homo sapiens
  misc_RNA (1)...(19): siRNA sense strand
ggcuaaaacuucagcaaga

SEQ ID NO: 2441964 - RNA, 19 nt, Homo sapiens
  misc_RNA (1)...(19): siRNA sense strand
acauauaugcagaugauga

SEQ ID NO: 2441965 - RNA, 19 nt, Homo sapiens
  misc_RNA (1)...(19): siRNA sense strand
aagcaaagugcaaugaauu

SEQ ID NO: 2441966 - RNA, 19 nt, Homo sapiens
  misc_RNA (1)...(19): siRNA sense strand
gguggaaagaagaaacgaa

SEQ ID NO: 2441967 - RNA, 19 nt, Homo sapiens
  misc_RNA (1)...(19): siRNA sense strand
aagaagaaacgaagaaacu

SEQ ID NO: 2441968 - RNA, 19 nt, Homo sapiens
  misc_RNA (1)...(19): siRNA sense strand
aaagcuaauucuagagcau

SEQ ID NO: 2441969 - RNA, 19 nt, Homo sapiens
  misc_RNA (1)...(19): siRNA sense strand
agcaaagugcaaugaauua

SEQ ID NO: 2441970 - RNA, 19 nt, Homo sapiens
  misc_RNA (1)...(19): siRNA sense strand
agauaugaggcuauuguaa

SEQ ID NO: 2441971 - RNA, 19 nt, Homo sapiens
  misc_RNA (1)...(19): siRNA sense strand
aggcucuacuugaggagaa

SEQ ID NO: 2441972 - RNA, 19 nt, Homo sapiens
  misc_RNA (1)...(19): siRNA sense strand
uggaagaagaacuagaaaa

SEQ ID NO: 2441973 - RNA, 19 nt, Homo sapiens
  misc_RNA (1)...(19): siRNA sense strand
aggcagaggaaaugagugu

SEQ ID NO: 2441974 - RNA, 19 nt, Homo sapiens
  misc_RNA (1)...(19): siRNA sense strand
caauagguggaaagaagaa

SEQ ID NO: 2441975 - RNA, 19 nt, Homo sapiens
  misc_RNA (1)...(19): siRNA sense strand
cuaaaugggcagcugaaau

SEQ ID NO: 2441976 - RNA, 19 nt, Homo sapiens
  misc_RNA (1)...(19): siRNA sense strand
agcaaaaguggaagaguua

SEQ ID NO: 2441977 - RNA, 19 nt, Homo sapiens
  misc_RNA (1)...(19): siRNA sense strand
auuguaagagccagaaaua

SEQ ID NO: 2441978 - RNA, 19 nt, Homo sapiens
  misc_RNA (1)...(19): siRNA sense strand
uauuggagucugagagaga

SEQ ID NO: 2441979 - RNA, 19 nt, Homo sapiens
  misc_RNA (1)...(19): siRNA sense strand
uacugaaagugcagaaauu

SEQ ID NO: 2441980 - RNA, 19 nt, Homo sapiens
  misc_RNA (1)...(19): siRNA sense strand
uggaaauggcaaaugaaaa

SEQ ID NO: 2441981 - RNA, 19 nt, Homo sapiens
  misc_RNA (1)...(19): siRNA sense strand
cuggaaauggcaaaugaaa

SEQ ID NO: 2441982 - RNA, 19 nt, Homo sapiens
  misc_RNA (1)...(19): siRNA sense strand
cugaacaaagugugauaau

SEQ ID NO: 2441983 - RNA, 19 nt, Homo sapiens
  misc_RNA (1)...(19): siRNA sense strand
augaaagguugcacaguga

SEQ ID NO: 2441984 - RNA, 19 nt, Homo sapiens
  misc_RNA (1)...(19): siRNA sense strand
uagcaaaaguggaagaguu

SEQ ID NO: 2441985 - RNA, 19 nt, Homo sapiens
  misc_RNA (1)...(19): siRNA sense strand
ugacaauccaagaagccaa

SEQ ID NO: 2441986 - RNA, 19 nt, Homo sapiens
  misc_RNA (1)...(19): siRNA sense strand
cauauaugcagaugaugaa

SEQ ID NO: 2441987 - RNA, 19 nt, Homo sapiens
  misc_RNA (1)...(19): siRNA sense strand
ucgauuaacagaagaacuu

SEQ ID NO: 2441988 - RNA, 19 nt, Homo sapiens
  misc_RNA (1)...(19): siRNA sense strand
aaaccuaguauuugaccaa

SEQ ID NO: 2441989 - RNA, 19 nt, Homo sapiens
  misc_RNA (1)...(19): siRNA sense strand
aaagagacugagaguuuaa

SEQ ID NO: 2441990 - RNA, 19 nt, Homo sapiens
  misc_RNA (1)...(19): siRNA sense strand
ugaaaagguagcugagaau

SEQ ID NO: 2441991 - RNA, 19 nt, Homo sapiens
  misc_RNA (1)...(19): siRNA sense strand
uggaagagaggaagcauca

SEQ ID NO: 2441992 - RNA, 19 nt, Homo sapiens
  misc_RNA (1)...(19): siRNA sense strand
aaaacagaccagagagcua

SEQ ID NO: 2441993 - RNA, 19 nt, Homo sapiens
  misc_RNA (1)...(19): siRNA sense strand
cuacuugaggagaagcaaa

SEQ ID NO: 2441994 - RNA, 19 nt, Homo sapiens
  misc_RNA (1)...(19): siRNA sense strand
ggaacguggauuugaaguu

SEQ ID NO: 2441995 - RNA, 19 nt, Homo sapiens
  misc_RNA (1)...(19): siRNA sense strand
gaacugacauauaugcaga

SEQ ID NO: 2441996 - RNA, 19 nt, Homo sapiens
  misc_RNA (1)...(19): siRNA sense strand
ugacugaggcccagauuca

SEQ ID NO: 2441997 - RNA, 19 nt, Homo sapiens
  misc_RNA (1)...(19): siRNA sense strand
ugaacgagucauuaaggaa

SEQ ID NO: 2441998 - RNA, 19 nt, Homo sapiens
  misc_RNA (1)...(19): siRNA sense strand
aaaucgacuuucugagaga

SEQ ID NO: 2441999 - RNA, 19 nt, Homo sapiens
  misc_RNA (1)...(19): siRNA sense strand
agaggaaaugagugugauu

SEQ ID NO: 2442000 - RNA, 19 nt, Homo sapiens
  misc_RNA (1)...(19): siRNA sense strand
augaaaagguagcugagaa

SEQ ID NO: 2442001 - RNA, 19 nt, Homo sapiens
  misc_RNA (1)...(19): siRNA sense strand
accagaaacagguggguga

SEQ ID NO: 2442002 - RNA, 19 nt, Homo sapiens
  misc_RNA (1)...(19): siRNA sense strand
agagaaaaugaaagagaca

SEQ ID NO: 2442003 - RNA, 19 nt, Homo sapiens
  misc_RNA (1)...(19): siRNA sense strand
agagcaaaaucgaagacua

SEQ ID NO: 2442004 - RNA, 19 nt, Homo sapiens
  misc_RNA (1)...(19): siRNA sense strand
ccuccagagaugaaagaua

SEQ ID NO: 2442005 - RNA, 19 nt, Homo sapiens
  misc_RNA (1)...(19): siRNA sense strand
gugggaaccaagagguaua

SEQ ID NO: 2442006 - RNA, 19 nt, Homo sapiens
  misc_RNA (1)...(19): siRNA sense strand
gaaauuuaccagacgguca

SEQ ID NO: 2442007 - RNA, 19 nt, Homo sapiens
  misc_RNA (1)...(19): siRNA sense strand
guggcaaaguugugaagca

SEQ ID NO: 2442008 - RNA, 19 nt, Homo sapiens
  misc_RNA (1)...(19): siRNA sense strand
ucaggaaauaguaggaaaa

SEQ ID NO: 2442009 - RNA, 19 nt, Homo sapiens
  misc_RNA (1)...(19): siRNA sense strand
guguucagucggaggaauu

SEQ ID NO: 2442010 - RNA, 19 nt, Homo sapiens
  misc_RNA (1)...(19): siRNA sense strand
ggaaauagcccggaggugu

SEQ ID NO: 2442011 - RNA, 19 nt, Homo sapiens
  misc_RNA (1)...(19): siRNA sense strand
gugucaaagaagacugcaa

SEQ ID NO: 2442012 - RNA, 19 nt, Homo sapiens
  misc_RNA (1)...(19): siRNA sense strand
uucaggaaauaguaggaaa

SEQ ID NO: 2442013 - RNA, 19 nt, Homo sapiens
  misc_RNA (1)...(19): siRNA sense strand
gaauagaaauauagugacc

SEQ ID NO: 2442014 - RNA, 19 nt, Homo sapiens
  misc_RNA (1)...(19): siRNA sense strand
gcuugaugauacaaugaau

SEQ ID NO: 2442015 - RNA, 19 nt, Homo sapiens
  misc_RNA (1)...(19): siRNA sense strand
aggaguaccaauugccuua

SEQ ID NO: 2442016 - RNA, 19 nt, Homo sapiens
  misc_RNA (1)...(19): siRNA sense strand
gcugcugacaacaaagaua

SEQ ID NO: 2442017 - RNA, 19 nt, Homo sapiens
  misc_RNA (1)...(19): siRNA sense strand
gaaggagcauguugggcau

SEQ ID NO: 2442018 - RNA, 19 nt, Homo sapiens
  misc_RNA (1)...(19): siRNA sense strand
cugcugacaacaaagauaa

SEQ ID NO: 2442019 - RNA, 19 nt, Homo sapiens
  misc_RNA (1)...(19): siRNA sense strand
uguugguacacaagguaaa

SEQ ID NO: 2442020 - RNA, 19 nt, Homo sapiens
  misc_RNA (1)...(19): siRNA sense strand
caugcuaaccaauggaaaa

SEQ ID NO: 2442021 - RNA, 19 nt, Homo sapiens
  misc_RNA (1)...(19): siRNA sense strand
aucccaaaccaguggcaaa

SEQ ID NO: 2442022 - RNA, 19 nt, Homo sapiens
  misc_RNA (1)...(19): siRNA sense strand
ucugguaaaugcuggaaaa

SEQ ID NO: 2442023 - RNA, 19 nt, Homo sapiens
  misc_RNA (1)...(19): siRNA sense strand
uggaagaugguguggggaa

SEQ ID NO: 2442024 - RNA, 19 nt, Homo sapiens
  misc_RNA (1)...(19): siRNA sense strand
cucugaaagaucugauuua

SEQ ID NO: 2442025 - RNA, 19 nt, Homo sapiens
  misc_RNA (1)...(19): siRNA sense strand
cugccaaacagaaggagca

SEQ ID NO: 2442026 - RNA, 19 nt, Homo sapiens
  misc_RNA (1)...(19): siRNA sense strand
gaccaaauguggaggaacc

SEQ ID NO: 2442027 - RNA, 19 nt, Homo sapiens
  misc_RNA (1)...(19): siRNA sense strand
gguauauggcuccugaaau

SEQ ID NO: 2442028 - RNA, 19 nt, Homo sapiens
  misc_RNA (1)...(19): siRNA sense strand
agguauauggcuccugaaa

SEQ ID NO: 2442029 - RNA, 19 nt, Homo sapiens
  misc_RNA (1)...(19): siRNA sense strand
ggaaauaguaggaaaaggu

SEQ ID NO: 2442030 - RNA, 19 nt, Homo sapiens
  misc_RNA (1)...(19): siRNA sense strand
cggaggaauuguugaggag

SEQ ID NO: 2442031 - RNA, 19 nt, Homo sapiens
  misc_RNA (1)...(19): siRNA sense strand
cugagugcaaucugguaaa

SEQ ID NO: 2442032 - RNA, 19 nt, Homo sapiens
  misc_RNA (1)...(19): siRNA sense strand
gcugcgaugcugacaguau

SEQ ID NO: 2442033 - RNA, 19 nt, Homo sapiens
  misc_RNA (1)...(19): siRNA sense strand
aagugggaaccaagaggua

SEQ ID NO: 2442034 - RNA, 19 nt, Homo sapiens
  misc_RNA (1)...(19): siRNA sense strand
gcaaaguugugaagcacuc

SEQ ID NO: 2442035 - RNA, 19 nt, Homo sapiens
  misc_RNA (1)...(19): siRNA sense strand
aagcagauuucucaggcaa

SEQ ID NO: 2442036 - RNA, 19 nt, Homo sapiens
  misc_RNA (1)...(19): siRNA sense strand
ccuagcaggaggagcgaga

SEQ ID NO: 2442037 - RNA, 19 nt, Homo sapiens
  misc_RNA (1)...(19): siRNA sense strand
aaacaaaagccuaagcaga

SEQ ID NO: 2442038 - RNA, 19 nt, Homo sapiens
  misc_RNA (1)...(19): siRNA sense strand
uagcaggaggagcgagaga

SEQ ID NO: 2442039 - RNA, 19 nt, Homo sapiens
  misc_RNA (1)...(19): siRNA sense strand
gggccaggaaggugaagaa

SEQ ID NO: 2442040 - RNA, 19 nt, Homo sapiens
  misc_RNA (1)...(19): siRNA sense strand
gguccgaguaguagccaaa

SEQ ID NO: 2442041 - RNA, 19 nt, Homo sapiens
  misc_RNA (1)...(19): siRNA sense strand
cuuguaaagcuaauggaaa

SEQ ID NO: 2442042 - RNA, 19 nt, Homo sapiens
  misc_RNA (1)...(19): siRNA sense strand
cagcauuggauggcagaaa

SEQ ID NO: 2442043 - RNA, 19 nt, Homo sapiens
  misc_RNA (1)...(19): siRNA sense strand
ccuuaaagaaugagaacug

SEQ ID NO: 2442044 - RNA, 19 nt, Homo sapiens
  misc_RNA (1)...(19): siRNA sense strand
auagaagacaagagguaca

SEQ ID NO: 2442045 - RNA, 19 nt, Homo sapiens
  misc_RNA (1)...(19): siRNA sense strand
ugguauuuguugaagcauu

SEQ ID NO: 2442046 - RNA, 19 nt, Homo sapiens
  misc_RNA (1)...(19): siRNA sense strand
gugggaagcugcugggugu

SEQ ID NO: 2442047 - RNA, 19 nt, Homo sapiens
  misc_RNA (1)...(19): siRNA sense strand
auggagaccagcauggaaa

SEQ ID NO: 2442048 - RNA, 19 nt, Homo sapiens
  misc_RNA (1)...(19): siRNA sense strand
cagaacagcguaauggaga

SEQ ID NO: 2442049 - RNA, 19 nt, Homo sapiens
  misc_RNA (1)...(19): siRNA sense strand
cgacgcaccucaagcccua

SEQ ID NO: 2442050 - RNA, 19 nt, Homo sapiens
  misc_RNA (1)...(19): siRNA sense strand
ggguggaagccauuaccua

SEQ ID NO: 2442051 - RNA, 19 nt, Homo sapiens
  misc_RNA (1)...(19): siRNA sense strand
aacaagucauagaagacaa

SEQ ID NO: 2442052 - RNA, 19 nt, Homo sapiens
  misc_RNA (1)...(19): siRNA sense strand
uggaaauauuugggacuca

SEQ ID NO: 2442053 - RNA, 19 nt, Homo sapiens
  misc_RNA (1)...(19): siRNA sense strand
gccaggaaggugaagaaga

SEQ ID NO: 2442054 - RNA, 19 nt, Homo sapiens
  misc_RNA (1)...(19): siRNA sense strand
ccagaaggcucuaggccag

SEQ ID NO: 2442055 - RNA, 19 nt, Homo sapiens
  misc_RNA (1)...(19): siRNA sense strand
gguuuguccuuguggccuu

SEQ ID NO: 2442056 - RNA, 19 nt, Homo sapiens
  misc_RNA (1)...(19): siRNA sense strand
acugacacuuacaaugaaa

SEQ ID NO: 2442057 - RNA, 19 nt, Homo sapiens
  misc_RNA (1)...(19): siRNA sense strand
cauugaugucuuuguguuu

SEQ ID NO: 2442058 - RNA, 19 nt, Homo sapiens
  misc_RNA (1)...(19): siRNA sense strand
cugccaaaauccugacaau

SEQ ID NO: 2442059 - RNA, 19 nt, Homo sapiens
  misc_RNA (1)...(19): siRNA sense strand
aggaaggugaagaagacau

SEQ ID NO: 2442060 - RNA, 19 nt, Homo sapiens
  misc_RNA (1)...(19): siRNA sense strand
agauauuaaagaggaggaa

SEQ ID NO: 2442061 - RNA, 19 nt, Homo sapiens
  misc_RNA (1)...(19): siRNA sense strand
cuauuaaaccaguaccaca

SEQ ID NO: 2442062 - RNA, 19 nt, Homo sapiens
  misc_RNA (1)...(19): siRNA sense strand
cuucaagagcauggucaua

SEQ ID NO: 2442063 - RNA, 19 nt, Homo sapiens
  misc_RNA (1)...(19): siRNA sense strand
ccuuguaaagcuaauggaa

SEQ ID NO: 2442064 - RNA, 19 nt, Homo sapiens
  misc_RNA (1)...(19): siRNA sense strand
ggugggcagaacagcguaa

SEQ ID NO: 2442065 - RNA, 19 nt, Homo sapiens
  misc_RNA (1)...(19): siRNA sense strand
gggaguuguucaagggaau

SEQ ID NO: 2442066 - RNA, 19 nt, Homo sapiens
  misc_RNA (1)...(19): siRNA sense strand
aacaaaugcuaguggacaa

SEQ ID NO: 2442067 - RNA, 19 nt, Homo sapiens
  misc_RNA (1)...(19): siRNA sense strand
cgaaaagagaggaaagcaa

SEQ ID NO: 2442068 - RNA, 19 nt, Homo sapiens
  misc_RNA (1)...(19): siRNA sense strand
ucaaacaguaagaggaaaa

SEQ ID NO: 2442069 - RNA, 19 nt, Homo sapiens
  misc_RNA (1)...(19): siRNA sense strand
ggaagaaggucaagccucu

SEQ ID NO: 2442070 - RNA, 19 nt, Homo sapiens
  misc_RNA (1)...(19): siRNA sense strand
cggaagauaaugaugaaaa

SEQ ID NO: 2442071 - RNA, 19 nt, Homo sapiens
  misc_RNA (1)...(19): siRNA sense strand
auuugugacuacagaguua

SEQ ID NO: 2442072 - RNA, 19 nt, Homo sapiens
  misc_RNA (1)...(19): siRNA sense strand
ugucuugaggaaagggaaa

SEQ ID NO: 2442073 - RNA, 19 nt, Homo sapiens
  misc_RNA (1)...(19): siRNA sense strand
aggauuauagugagaguau

SEQ ID NO: 2442074 - RNA, 19 nt, Homo sapiens
  misc_RNA (1)...(19): siRNA sense strand
caguuaggaaagaaacaaa

SEQ ID NO: 2442075 - RNA, 19 nt, Homo sapiens
  misc_RNA (1)...(19): siRNA sense strand
cugcaaucaaauagaucaa

SEQ ID NO: 2442076 - RNA, 19 nt, Homo sapiens
  misc_RNA (1)...(19): siRNA sense strand
cugaaugagagaacaaauu

SEQ ID NO: 2442077 - RNA, 19 nt, Homo sapiens
  misc_RNA (1)...(19): siRNA sense strand
auuagaugaugaugaggaa

SEQ ID NO: 2442078 - RNA, 19 nt, Homo sapiens
  misc_RNA (1)...(19): siRNA sense strand
agggaggauuauagugaga

SEQ ID NO: 2442079 - RNA, 19 nt, Homo sapiens
  misc_RNA (1)...(19): siRNA sense strand
gcaaauagguucacacccu

SEQ ID NO: 2442080 - RNA, 19 nt, Homo sapiens
  misc_RNA (1)...(19): siRNA sense strand
uagaugaugaugaggaaga

SEQ ID NO: 2442081 - RNA, 19 nt, Homo sapiens
  misc_RNA (1)...(19): siRNA sense strand
augaagaucaguuggauga

SEQ ID NO: 2442082 - RNA, 19 nt, Homo sapiens
  misc_RNA (1)...(19): siRNA sense strand
gcacagaaacaaagauccu

SEQ ID NO: 2442083 - RNA, 19 nt, Homo sapiens
  misc_RNA (1)...(19): siRNA sense strand
ggaggauuauagugagagu

SEQ ID NO: 2442084 - RNA, 19 nt, Homo sapiens
  misc_RNA (1)...(19): siRNA sense strand
acagaaacaaagauccuaa

SEQ ID NO: 2442085 - RNA, 19 nt, Homo sapiens
  misc_RNA (1)...(19): siRNA sense strand
aagaagagagcgaggauac

SEQ ID NO: 2442086 - RNA, 19 nt, Homo sapiens
  misc_RNA (1)...(19): siRNA sense strand
agaaaauguccuuccaaaa

SEQ ID NO: 2442087 - RNA, 19 nt, Homo sapiens
  misc_RNA (1)...(19): siRNA sense strand
acaagaagucugcaaucaa

SEQ ID NO: 2442088 - RNA, 19 nt, Homo sapiens
  misc_RNA (1)...(19): siRNA sense strand
gaacaaauuuccaaagcug

SEQ ID NO: 2442089 - RNA, 19 nt, Homo sapiens
  misc_RNA (1)...(19): siRNA sense strand
aaauuggacagcacagaaa

SEQ ID NO: 2442090 - RNA, 19 nt, Homo sapiens
  misc_RNA (1)...(19): siRNA sense strand
gaugaagaggagaucacua

SEQ ID NO: 2442091 - RNA, 19 nt, Homo sapiens
  misc_RNA (1)...(19): siRNA sense strand
caaagggaacagagaacca

SEQ ID NO: 2442092 - RNA, 19 nt, Homo sapiens
  misc_RNA (1)...(19): siRNA sense strand
cgauacuauuccaagugaa

SEQ ID NO: 2442093 - RNA, 19 nt, Homo sapiens
  misc_RNA (1)...(19): siRNA sense strand
uaaugaagaugccagggaa

SEQ ID NO: 2442094 - RNA, 19 nt, Homo sapiens
  misc_RNA (1)...(19): siRNA sense strand
agagaacaaauuugaguca

SEQ ID NO: 2442095 - RNA, 19 nt, Homo sapiens
  misc_RNA (1)...(19): siRNA sense strand
augaugaggaagacgaaga

SEQ ID NO: 2442096 - RNA, 19 nt, Homo sapiens
  misc_RNA (1)...(19): siRNA sense strand
gagacacauccguuugaaa

SEQ ID NO: 2442097 - RNA, 19 nt, Homo sapiens
  misc_RNA (1)...(19): siRNA sense strand
ugaaacauacuuugaggau

SEQ ID NO: 2442098 - RNA, 19 nt, Homo sapiens
  misc_RNA (1)...(19): siRNA sense strand
uggacagcacagaaacaaa

SEQ ID NO: 2442099 - RNA, 19 nt, Homo sapiens
  misc_RNA (1)...(19): siRNA sense strand
aagaaaauguccuuccaaa

SEQ ID NO: 2442100 - RNA, 19 nt, Homo sapiens
  misc_RNA (1)...(19): siRNA sense strand
augcaaagggaacagagaa

SEQ ID NO: 2442101 - RNA, 19 nt, Homo sapiens
  misc_RNA (1)...(19): siRNA sense strand
gggcauuagaguaaauuuu

SEQ ID NO: 2442102 - RNA, 19 nt, Homo sapiens
  misc_RNA (1)...(19): siRNA sense strand
ccaacaagaaccuggugga

SEQ ID NO: 2442103 - RNA, 19 nt, Homo sapiens
  misc_RNA (1)...(19): siRNA sense strand
acuuugaggaugaagauca

SEQ ID NO: 2442104 - RNA, 19 nt, Homo sapiens
  misc_RNA (1)...(19): siRNA sense strand
aacucuagcuggugcgaga

SEQ ID NO: 2442105 - RNA, 19 nt, Homo sapiens
  misc_RNA (1)...(19): siRNA sense strand
cagaaacaaagauccuaaa

SEQ ID NO: 2442106 - RNA, 19 nt, Homo sapiens
  misc_RNA (1)...(19): siRNA sense strand
ugggaguuguucaagggaa

SEQ ID NO: 2442107 - RNA, 19 nt, Homo sapiens
  misc_RNA (1)...(19): siRNA sense strand
aguuggaugaaguggugaa

SEQ ID NO: 2442108 - RNA, 19 nt, Homo sapiens
  misc_RNA (1)...(19): siRNA sense strand
cuacagaggaaacugccua

SEQ ID NO: 2442109 - RNA, 19 nt, Homo sapiens
  misc_RNA (1)...(19): siRNA sense strand
augaagaggagaucacuau

SEQ ID NO: 2442110 - RNA, 19 nt, Homo sapiens
  misc_RNA (1)...(19): siRNA sense strand
acaaaugcuaguggacaaa

SEQ ID NO: 2442111 - RNA, 19 nt, Homo sapiens
  misc_RNA (1)...(19): siRNA sense strand
gugacuacagaguuagaau

SEQ ID NO: 2442112 - RNA, 19 nt, Homo sapiens
  misc_RNA (1)...(19): siRNA sense strand
gaaagaaacaaaacaggau

SEQ ID NO: 2442113 - RNA, 19 nt, Homo sapiens
  misc_RNA (1)...(19): siRNA sense strand
aguauugacuggugcaucu

SEQ ID NO: 2442114 - RNA, 19 nt, Homo sapiens
  misc_RNA (1)...(19): siRNA sense strand
guguaaauuaugugggaaa

SEQ ID NO: 2442115 - RNA, 19 nt, Homo sapiens
  misc_RNA (1)...(19): siRNA sense strand
guguaaggaaugugggaaa

SEQ ID NO: 2442116 - RNA, 19 nt, Homo sapiens
  misc_RNA (1)...(19): siRNA sense strand
augcaaacaaugugggaaa

SEQ ID NO: 2442117 - RNA, 19 nt, Homo sapiens
  misc_RNA (1)...(19): siRNA sense strand
gugcaagcaaugugggaaa

SEQ ID NO: 2442118 - RNA, 19 nt, Homo sapiens
  misc_RNA (1)...(19): siRNA sense strand
auguaagcauugugggaaa

SEQ ID NO: 2442119 - RNA, 19 nt, Homo sapiens
  misc_RNA (1)...(19): siRNA sense strand
gacucaugguggagagaaa

SEQ ID NO: 2442120 - RNA, 19 nt, Homo sapiens
  misc_RNA (1)...(19): siRNA sense strand
aacacauacuagagagaaa

SEQ ID NO: 2442121 - RNA, 19 nt, Homo sapiens
  misc_RNA (1)...(19): siRNA sense strand
cugugaaaguaaugaucaa

SEQ ID NO: 2442122 - RNA, 19 nt, Homo sapiens
  misc_RNA (1)...(19): siRNA sense strand
augcaagcuaugugggaaa

SEQ ID NO: 2442123 - RNA, 19 nt, Homo sapiens
  misc_RNA (1)...(19): siRNA sense strand
auguaagcaaugugggaaa

SEQ ID NO: 2442124 - RNA, 19 nt, Homo sapiens
  misc_RNA (1)...(19): siRNA sense strand
acugcacacuggagagaaa

SEQ ID NO: 2442125 - RNA, 19 nt, Homo sapiens
  misc_RNA (1)...(19): siRNA sense strand
ccacaaaccaggggagaaa

SEQ ID NO: 2442126 - RNA, 19 nt, Homo sapiens
  misc_RNA (1)...(19): siRNA sense strand
auguaagcagugugggaaa

SEQ ID NO: 2442127 - RNA, 19 nt, Homo sapiens
  misc_RNA (1)...(19): siRNA sense strand
agucacaccaggagagaga

SEQ ID NO: 2442128 - RNA, 19 nt, Homo sapiens
  misc_RNA (1)...(19): siRNA sense strand
gaauacaacacguacggaa

SEQ ID NO: 2442129 - RNA, 19 nt, Homo sapiens
  misc_RNA (1)...(19): siRNA sense strand
aauacaacacguacggaaa

SEQ ID NO: 2442130 - RNA, 19 nt, Homo sapiens
  misc_RNA (1)...(19): siRNA sense strand
ccuaagaaugcaugugaga

SEQ ID NO: 2442131 - RNA, 19 nt, Homo sapiens
  misc_RNA (1)...(19): siRNA sense strand
caguagagaucauggguug

SEQ ID NO: 2442132 - RNA, 19 nt, Homo sapiens
  misc_RNA (1)...(19): siRNA sense strand
auuuaaggccaguggguca

SEQ ID NO: 2442133 - RNA, 19 nt, Homo sapiens
  misc_RNA (1)...(19): siRNA sense strand
gagaaaauacccaaggaau

SEQ ID NO: 2442134 - RNA, 19 nt, Homo sapiens
  misc_RNA (1)...(19): siRNA sense strand
cccuaugaauguaaggaau

SEQ ID NO: 2442135 - RNA, 19 nt, Homo sapiens
  misc_RNA (1)...(19): siRNA sense strand
aaccaacaauggagagaga

SEQ ID NO: 2442136 - RNA, 19 nt, Homo sapiens
  misc_RNA (1)...(19): siRNA sense strand
gaauguaagcaguguggga

SEQ ID NO: 2442137 - RNA, 19 nt, Homo sapiens
  misc_RNA (1)...(19): siRNA sense strand
auguaaggaaugugcggaa

SEQ ID NO: 2442138 - RNA, 19 nt, Homo sapiens
  misc_RNA (1)...(19): siRNA sense strand
ugaaaggacucauggugga

SEQ ID NO: 2442139 - RNA, 19 nt, Homo sapiens
  misc_RNA (1)...(19): siRNA sense strand
ccauaucagugccaggaau

SEQ ID NO: 2442140 - RNA, 19 nt, Homo sapiens
  misc_RNA (1)...(19): siRNA sense strand
ggagaagcccucagccaga

SEQ ID NO: 2442141 - RNA, 19 nt, Homo sapiens
  misc_RNA (1)...(19): siRNA sense strand
uuucgaagacacacaauaa

SEQ ID NO: 2442142 - RNA, 19 nt, Homo sapiens
  misc_RNA (1)...(19): siRNA sense strand
uuucgaagacacaugauaa

SEQ ID NO: 2442143 - RNA, 19 nt, Homo sapiens
  misc_RNA (1)...(19): siRNA sense strand
gcgggaaagcauucaguca

SEQ ID NO: 2442144 - RNA, 19 nt, Homo sapiens
  misc_RNA (1)...(19): siRNA sense strand
caggauauuuauggagaga

SEQ ID NO: 2442145 - RNA, 19 nt, Homo sapiens
  misc_RNA (1)...(19): siRNA sense strand
aguucacacuggacacaaa

SEQ ID NO: 2442146 - RNA, 19 nt, Homo sapiens
  misc_RNA (1)...(19): siRNA sense strand
agaacacauacuagagaga

SEQ ID NO: 2442147 - RNA, 19 nt, Homo sapiens
  misc_RNA (1)...(19): siRNA sense strand
caguagaugaugaaacuca

SEQ ID NO: 2442148 - RNA, 19 nt, Homo sapiens
  misc_RNA (1)...(19): siRNA sense strand
caucgaagaucaaaccaca

SEQ ID NO: 2442149 - RNA, 19 nt, Homo sapiens
  misc_RNA (1)...(19): siRNA sense strand
gaauguaagcaauguggga

SEQ ID NO: 2442150 - RNA, 19 nt, Homo sapiens
  misc_RNA (1)...(19): siRNA sense strand
agacauaugauuucacaca

SEQ ID NO: 2442151 - RNA, 19 nt, Homo sapiens
  misc_RNA (1)...(19): siRNA sense strand
uaagaaugcaugugagaac

SEQ ID NO: 2442152 - RNA, 19 nt, Homo sapiens
  misc_RNA (1)...(19): siRNA sense strand
ucgaagacaugaaaggacu

SEQ ID NO: 2442153 - RNA, 19 nt, Homo sapiens
  misc_RNA (1)...(19): siRNA sense strand
aggauguggcuguggacuu

SEQ ID NO: 2442154 - RNA, 19 nt, Homo sapiens
  misc_RNA (1)...(19): siRNA sense strand
uucgagaacaugugagaau

SEQ ID NO: 2442155 - RNA, 19 nt, Homo sapiens
  misc_RNA (1)...(19): siRNA sense strand
aggaaugugggcaggccua

SEQ ID NO: 2442156 - RNA, 19 nt, Homo sapiens
  misc_RNA (1)...(19): siRNA sense strand
guguguaaauuauguggga

SEQ ID NO: 2442157 - RNA, 19 nt, Homo sapiens
  misc_RNA (1)...(19): siRNA sense strand
augcaagcagugugggaca

SEQ ID NO: 2442158 - RNA, 19 nt, Homo sapiens
  misc_RNA (1)...(19): siRNA sense strand
augugaugcuggagaccuu

SEQ ID NO: 2442159 - RNA, 19 nt, Homo sapiens
  misc_RNA (1)...(19): siRNA sense strand
cccuaugagugcaagcaau

SEQ ID NO: 2442160 - RNA, 19 nt, Homo sapiens
  misc_RNA (1)...(19): siRNA sense strand
aguagaugaugaaacucaa

SEQ ID NO: 2442161 - RNA, 19 nt, Homo sapiens
  misc_RNA (1)...(19): siRNA sense strand
uaaugaucaauguggagaa

SEQ ID NO: 2442162 - RNA, 19 nt, Homo sapiens
  misc_RNA (1)...(19): siRNA sense strand
ggaguaaaacaguaugaau

SEQ ID NO: 2442163 - RNA, 19 nt, Homo sapiens
  misc_RNA (1)...(19): siRNA sense strand
acaccggagagaagccaua

SEQ ID NO: 2442164 - RNA, 19 nt, Homo sapiens
  misc_RNA (1)...(19): siRNA sense strand
cauauaaguguaaggaaug

SEQ ID NO: 2442165 - RNA, 19 nt, Homo sapiens
  misc_RNA (1)...(19): siRNA sense strand
gccauauaaauguaaggaa

SEQ ID NO: 2442166 - RNA, 19 nt, Homo sapiens
  misc_RNA (1)...(19): siRNA sense strand
agaaaauacccaaggaauc

SEQ ID NO: 2442167 - RNA, 19 nt, Homo sapiens
  misc_RNA (1)...(19): siRNA sense strand
augcaaccagugcgggaaa

SEQ ID NO: 2442168 - RNA, 19 nt, Homo sapiens
  misc_RNA (1)...(19): siRNA sense strand
guaaauaugguguugccuu

SEQ ID NO: 2442169 - RNA, 19 nt, Homo sapiens
  misc_RNA (1)...(19): siRNA sense strand
ggcgagaagccauauaaau

SEQ ID NO: 2442170 - RNA, 19 nt, Homo sapiens
  misc_RNA (1)...(19): siRNA sense strand
ggcccauaucuuuacgaaa

SEQ ID NO: 2442171 - RNA, 19 nt, Homo sapiens
  misc_RNA (1)...(19): siRNA sense strand
aagcauugugggaaagcau

SEQ ID NO: 2442172 - RNA, 19 nt, Homo sapiens
  misc_RNA (1)...(19): siRNA sense strand
ucgaagaucaaaccacaaa

SEQ ID NO: 2442173 - RNA, 19 nt, Homo sapiens
  misc_RNA (1)...(19): siRNA sense strand
ggccaaaggacuaggaaau

SEQ ID NO: 2442174 - RNA, 19 nt, Homo sapiens
  misc_RNA (1)...(19): siRNA sense strand
gcauauuagcccaggaaga

SEQ ID NO: 2442175 - RNA, 19 nt, Homo sapiens
  misc_RNA (1)...(19): siRNA sense strand
ugguggaacucuuggacaa

SEQ ID NO: 2442176 - RNA, 19 nt, Homo sapiens
  misc_RNA (1)...(19): siRNA sense strand
ccaacaggaaagauauaaa

SEQ ID NO: 2442177 - RNA, 19 nt, Homo sapiens
  misc_RNA (1)...(19): siRNA sense strand
aggccaaaggacuaggaaa

SEQ ID NO: 2442178 - RNA, 19 nt, Homo sapiens
  misc_RNA (1)...(19): siRNA sense strand
aggaagggccaaugucaua

SEQ ID NO: 2442179 - RNA, 19 nt, Homo sapiens
  misc_RNA (1)...(19): siRNA sense strand
aguaaaugaaccagaacuu

SEQ ID NO: 2442180 - RNA, 19 nt, Homo sapiens
  misc_RNA (1)...(19): siRNA sense strand
gcuccugcuccaugggaaa

SEQ ID NO: 2442181 - RNA, 19 nt, Homo sapiens
  misc_RNA (1)...(19): siRNA sense strand
cggcauuuguaguacuaau

SEQ ID NO: 2442182 - RNA, 19 nt, Homo sapiens
  misc_RNA (1)...(19): siRNA sense strand
ggaaaagaacagaugauca

SEQ ID NO: 2442183 - RNA, 19 nt, Homo sapiens
  misc_RNA (1)...(19): siRNA sense strand
agaaagaagguguggugca

SEQ ID NO: 2442184 - RNA, 19 nt, Homo sapiens
  misc_RNA (1)...(19): siRNA sense strand
ugucaaagaaagaaggugu

SEQ ID NO: 2442185 - RNA, 19 nt, Homo sapiens
  misc_RNA (1)...(19): siRNA sense strand
auaaagagacugaagaagu

SEQ ID NO: 2442186 - RNA, 19 nt, Homo sapiens
  misc_RNA (1)...(19): siRNA sense strand
ggaaaacacaauggagaua

SEQ ID NO: 2442187 - RNA, 19 nt, Homo sapiens
  misc_RNA (1)...(19): siRNA sense strand
gguccuuccuauauaguau

SEQ ID NO: 2442188 - RNA, 19 nt, Homo sapiens
  misc_RNA (1)...(19): siRNA sense strand
gcgagagaggguacaaauu

SEQ ID NO: 2442189 - RNA, 19 nt, Homo sapiens
  misc_RNA (1)...(19): siRNA sense strand
ucaauagagccaauagcaa

SEQ ID NO: 2442190 - RNA, 19 nt, Homo sapiens
  misc_RNA (1)...(19): siRNA sense strand
gucucacgauggugggaaa

SEQ ID NO: 2442191 - RNA, 19 nt, Homo sapiens
  misc_RNA (1)...(19): siRNA sense strand
cuauggaacaauaaagaca

SEQ ID NO: 2442192 - RNA, 19 nt, Homo sapiens
  misc_RNA (1)...(19): siRNA sense strand
cagcaguaacgcauggauu

SEQ ID NO: 2442193 - RNA, 19 nt, Homo sapiens
  misc_RNA (1)...(19): siRNA sense strand
aauuauaaccucagggaug

SEQ ID NO: 2442194 - RNA, 19 nt, Homo sapiens
  misc_RNA (1)...(19): siRNA sense strand
ccucagggauggugauaag

SEQ ID NO: 2442195 - RNA, 19 nt, Homo sapiens
  misc_RNA (1)...(19): siRNA sense strand
uggaaugaugauauggaau

SEQ ID NO: 2442196 - RNA, 19 nt, Homo sapiens
  misc_RNA (1)...(19): siRNA sense strand
ccuucaaugucaauuacaa

SEQ ID NO: 2442197 - RNA, 19 nt, Homo sapiens
  misc_RNA (1)...(19): siRNA sense strand
augacuuugcauugggaua

SEQ ID NO: 2442198 - RNA, 19 nt, Homo sapiens
  misc_RNA (1)...(19): siRNA sense strand
ucgaaagguaccuguauau

SEQ ID NO: 2442199 - RNA, 19 nt, Homo sapiens
  misc_RNA (1)...(19): siRNA sense strand
ucaacauggaaguagaaau

SEQ ID NO: 2442200 - RNA, 19 nt, Homo sapiens
  misc_RNA (1)...(19): siRNA sense strand
caggaagcuaugaagguuu

SEQ ID NO: 2442201 - RNA, 19 nt, Homo sapiens
  misc_RNA (1)...(19): siRNA sense strand
ugauagucgauuuagcaaa

SEQ ID NO: 2442202 - RNA, 19 nt, Homo sapiens
  misc_RNA (1)...(19): siRNA sense strand
ucuugauggacuuggaaau

SEQ ID NO: 2442203 - RNA, 19 nt, Homo sapiens
  misc_RNA (1)...(19): siRNA sense strand
gguacaaauuccuguugga

SEQ ID NO: 2442204 - RNA, 19 nt, Homo sapiens
  misc_RNA (1)...(19): siRNA sense strand
aggaagaagaacaguaucu

SEQ ID NO: 2442205 - RNA, 19 nt, Homo sapiens
  misc_RNA (1)...(19): siRNA sense strand
gggaugaguacuuguuuua

SEQ ID NO: 2442206 - RNA, 19 nt, Homo sapiens
  misc_RNA (1)...(19): siRNA sense strand
gcccaucaauagagccaau

SEQ ID NO: 2442207 - RNA, 19 nt, Homo sapiens
  misc_RNA (1)...(19): siRNA sense strand
ccaccuucaaugucaauua

SEQ ID NO: 2442208 - RNA, 19 nt, Homo sapiens
  misc_RNA (1)...(19): siRNA sense strand
cuggaaugaugauauggaa

SEQ ID NO: 2442209 - RNA, 19 nt, Homo sapiens
  misc_RNA (1)...(19): siRNA sense strand
caaaagaagacuugaauuc

SEQ ID NO: 2442210 - RNA, 19 nt, Homo sapiens
  misc_RNA (1)...(19): siRNA sense strand
aauaaagacacagcagaaa

SEQ ID NO: 2442211 - RNA, 19 nt, Homo sapiens
  misc_RNA (1)...(19): siRNA sense strand
ccguggugaagcugugaua

SEQ ID NO: 2442212 - RNA, 19 nt, Homo sapiens
  misc_RNA (1)...(19): siRNA sense strand
cggacaggccuucuagcaa

SEQ ID NO: 2442213 - RNA, 19 nt, Homo sapiens
  misc_RNA (1)...(19): siRNA sense strand
uauucuugaucgaaaggua

SEQ ID NO: 2442214 - RNA, 19 nt, Homo sapiens
  misc_RNA (1)...(19): siRNA sense strand
cauccugauagcuggcaua

SEQ ID NO: 2442215 - RNA, 19 nt, Homo sapiens
  misc_RNA (1)...(19): siRNA sense strand
aauucaacauggaaguaga

SEQ ID NO: 2442216 - RNA, 19 nt, Homo sapiens
  misc_RNA (1)...(19): siRNA sense strand
gcuaugaagguuucgauca

SEQ ID NO: 2442217 - RNA, 19 nt, Homo sapiens
  misc_RNA (1)...(19): siRNA sense strand
aagaagaacaguaucuaca

SEQ ID NO: 2442218 - RNA, 19 nt, Homo sapiens
  misc_RNA (1)...(19): siRNA sense strand
uaacaucaacccaggccaa

SEQ ID NO: 2442219 - RNA, 19 nt, Homo sapiens
  misc_RNA (1)...(19): siRNA sense strand
gugcagagaaaugguggaa

SEQ ID NO: 2442220 - RNA, 19 nt, Homo sapiens
  misc_RNA (1)...(19): siRNA sense strand
gaucagucucagagccaca

SEQ ID NO: 2442221 - RNA, 19 nt, Homo sapiens
  misc_RNA (1)...(19): siRNA sense strand
cuaauuuaccugcagagaa

SEQ ID NO: 2442222 - RNA, 19 nt, Homo sapiens
  misc_RNA (1)...(19): siRNA sense strand
gaguaugaauuccgggaug

SEQ ID NO: 2442223 - RNA, 19 nt, Homo sapiens
  misc_RNA (1)...(19): siRNA sense strand
gacuuuauguugaguuaca

SEQ ID NO: 2442224 - RNA, 19 nt, Homo sapiens
  misc_RNA (1)...(19): siRNA sense strand
auaaagacacagcagaaaa

SEQ ID NO: 2442225 - RNA, 19 nt, Homo sapiens
  misc_RNA (1)...(19): siRNA sense strand
uauccgaaacauugucaaa

SEQ ID NO: 2442226 - RNA, 19 nt, Homo sapiens
  misc_RNA (1)...(19): siRNA sense strand
cuccaacaggaaagauaua

SEQ ID NO: 2442227 - RNA, 19 nt, Homo sapiens
  misc_RNA (1)...(19): siRNA sense strand
gggaaauggugaauuacac

SEQ ID NO: 2442228 - RNA, 19 nt, Homo sapiens
  misc_RNA (1)...(19): siRNA sense strand
ccgcauauuagcccaggaa

SEQ ID NO: 2442229 - RNA, 19 nt, Homo sapiens
  misc_RNA (1)...(19): siRNA sense strand
gaguccagcaccaguaaau

SEQ ID NO: 2442230 - RNA, 19 nt, Homo sapiens
  misc_RNA (1)...(19): siRNA sense strand
gcuaauugaagucggccuu

SEQ ID NO: 2442231 - RNA, 19 nt, Homo sapiens
  misc_RNA (1)...(19): siRNA sense strand
cagcuaaacuucuggugcu

SEQ ID NO: 2442232 - RNA, 19 nt, Homo sapiens
  misc_RNA (1)...(19): siRNA sense strand
aagcugugauauacggaga

SEQ ID NO: 2442233 - RNA, 19 nt, Homo sapiens
  misc_RNA (1)...(19): siRNA sense strand
cagccuuacuggaaugcuu

SEQ ID NO: 2442234 - RNA, 19 nt, Homo sapiens
  misc_RNA (1)...(19): siRNA sense strand
gucgagagcucuugggcua

SEQ ID NO: 2442235 - RNA, 19 nt, Homo sapiens
  misc_RNA (1)...(19): siRNA sense strand
ccaaaguacuaucuggcaa

SEQ ID NO: 2442236 - RNA, 19 nt, Homo sapiens
  misc_RNA (1)...(19): siRNA sense strand
ggaacaaagcaaaaguaaa

SEQ ID NO: 2442237 - RNA, 19 nt, Homo sapiens
  misc_RNA (1)...(19): siRNA sense strand
acauaaaggaagaagaucu

SEQ ID NO: 2442238 - RNA, 19 nt, Homo sapiens
  misc_RNA (1)...(19): siRNA sense strand
gugaagugcuggcagguca

SEQ ID NO: 2442239 - RNA, 19 nt, Homo sapiens
  misc_RNA (1)...(19): siRNA sense strand
gguuuggcaaggagggcaa

SEQ ID NO: 2442240 - RNA, 19 nt, Homo sapiens
  misc_RNA (1)...(19): siRNA sense strand
ccacacaggcacagaggca

SEQ ID NO: 2442241 - RNA, 19 nt, Homo sapiens
  misc_RNA (1)...(19): siRNA sense strand
gaggauaguugcuggcagu

SEQ ID NO: 2442242 - RNA, 19 nt, Homo sapiens
  misc_RNA (1)...(19): siRNA sense strand
ugguaaagcuagcugcuga

SEQ ID NO: 2442243 - RNA, 19 nt, Homo sapiens
  misc_RNA (1)...(19): siRNA sense strand
gcugcugagaauacagaaa

SEQ ID NO: 2442244 - RNA, 19 nt, Homo sapiens
  misc_RNA (1)...(19): siRNA sense strand
agguacggcacuauggaua

SEQ ID NO: 2442245 - RNA, 19 nt, Homo sapiens
  misc_RNA (1)...(19): siRNA sense strand
ucucagaaaagaugguaaa

SEQ ID NO: 2442246 - RNA, 19 nt, Homo sapiens
  misc_RNA (1)...(19): siRNA sense strand
cggaacaaagcaaaaguaa

SEQ ID NO: 2442247 - RNA, 19 nt, Homo sapiens
  misc_RNA (1)...(19): siRNA sense strand
acacaggcacagaggcaga

SEQ ID NO: 2442248 - RNA, 19 nt, Homo sapiens
  misc_RNA (1)...(19): siRNA sense strand
aauuagaagcuuuccagaa

SEQ ID NO: 2442249 - RNA, 19 nt, Homo sapiens
  misc_RNA (1)...(19): siRNA sense strand
cgaaagugguauauggcuc

SEQ ID NO: 2442250 - RNA, 19 nt, Homo sapiens
  misc_RNA (1)...(19): siRNA sense strand
agaaaagaugguaaagcua

SEQ ID NO: 2442251 - RNA, 19 nt, Homo sapiens
  misc_RNA (1)...(19): siRNA sense strand
acccaaacguguugagaag

SEQ ID NO: 2442252 - RNA, 19 nt, Homo sapiens
  misc_RNA (1)...(19): siRNA sense strand
ugaaagaguccuagaggug

SEQ ID NO: 2442253 - RNA, 19 nt, Homo sapiens
  misc_RNA (1)...(19): siRNA sense strand
gagaauacagaaaugcaga

SEQ ID NO: 2442254 - RNA, 19 nt, Homo sapiens
  misc_RNA (1)...(19): siRNA sense strand
gcagauugaaguuccggaa

SEQ ID NO: 2442255 - RNA, 19 nt, Homo sapiens
  misc_RNA (1)...(19): siRNA sense strand
uugggaacauaaaggaaga

SEQ ID NO: 2442256 - RNA, 19 nt, Homo sapiens
  misc_RNA (1)...(19): siRNA sense strand
agcaagauuaagauagcua

SEQ ID NO: 2442257 - RNA, 19 nt, Homo sapiens
  misc_RNA (1)...(19): siRNA sense strand
cgguuggaacgaacagcua

SEQ ID NO: 2442258 - RNA, 19 nt, Homo sapiens
  misc_RNA (1)...(19): siRNA sense strand
uccuagagguggugucaca

SEQ ID NO: 2442259 - RNA, 19 nt, Homo sapiens
  misc_RNA (1)...(19): siRNA sense strand
aacaaagccagcagaaaga

SEQ ID NO: 2442260 - RNA, 19 nt, Homo sapiens
  misc_RNA (1)...(19): siRNA sense strand
aagaaagcuuaucuggaca

SEQ ID NO: 2442261 - RNA, 19 nt, Homo sapiens
  misc_RNA (1)...(19): siRNA sense strand
acagaguauuagaaucgaa

SEQ ID NO: 2442262 - RNA, 19 nt, Homo sapiens
  misc_RNA (1)...(19): siRNA sense strand
gcuacgacccugagagcga

SEQ ID NO: 2442263 - RNA, 19 nt, Homo sapiens
  misc_RNA (1)...(19): siRNA sense strand
caccagauggaaagcgaaa

SEQ ID NO: 2442264 - RNA, 19 nt, Homo sapiens
  misc_RNA (1)...(19): siRNA sense strand
acucgaagcggguggccaa

SEQ ID NO: 2442265 - RNA, 19 nt, Homo sapiens
  misc_RNA (1)...(19): siRNA sense strand
uggaaacagaggcggaaau

SEQ ID NO: 2442266 - RNA, 19 nt, Homo sapiens
  misc_RNA (1)...(19): siRNA sense strand
agaagagucaggaggcgua

SEQ ID NO: 2442267 - RNA, 19 nt, Homo sapiens
  misc_RNA (1)...(19): siRNA sense strand
acaagaucgagaagaguca

SEQ ID NO: 2442268 - RNA, 19 nt, Homo sapiens
  misc_RNA (1)...(19): siRNA sense strand
ggagaacagugccagguca

SEQ ID NO: 2442269 - RNA, 19 nt, Homo sapiens
  misc_RNA (1)...(19): siRNA sense strand
cguucgagcacuacgucaa

SEQ ID NO: 2442270 - RNA, 19 nt, Homo sapiens
  misc_RNA (1)...(19): siRNA sense strand
gaacagaagccaagcaagg

SEQ ID NO: 2442271 - RNA, 19 nt, Homo sapiens
  misc_RNA (1)...(19): siRNA sense strand
ccaucuuugaacugggcaa

SEQ ID NO: 2442272 - RNA, 19 nt, Homo sapiens
  misc_RNA (1)...(19): siRNA sense strand
ggcggaaggaggagaugau

SEQ ID NO: 2442273 - RNA, 19 nt, Homo sapiens
  misc_RNA (1)...(19): siRNA sense strand
gcuacgacccugagagcga

SEQ ID NO: 2442274 - RNA, 19 nt, Homo sapiens
  misc_RNA (1)...(19): siRNA sense strand
caccagauggaaagcgaaa

SEQ ID NO: 2442275 - RNA, 19 nt, Homo sapiens
  misc_RNA (1)...(19): siRNA sense strand
acucgaagcggguggccaa

SEQ ID NO: 2442276 - RNA, 19 nt, Homo sapiens
  misc_RNA (1)...(19): siRNA sense strand
uggaaacagaggcggaaau

SEQ ID NO: 2442277 - RNA, 19 nt, Homo sapiens
  misc_RNA (1)...(19): siRNA sense strand
agaagagucaggaggcgua

SEQ ID NO: 2442278 - RNA, 19 nt, Homo sapiens
  misc_RNA (1)...(19): siRNA sense strand
acaagaucgagaagaguca

SEQ ID NO: 2442279 - RNA, 19 nt, Homo sapiens
  misc_RNA (1)...(19): siRNA sense strand
ggagaacagugccagguca

SEQ ID NO: 2442280 - RNA, 19 nt, Homo sapiens
  misc_RNA (1)...(19): siRNA sense strand
cguucgagcacuacgucaa

SEQ ID NO: 2442281 - RNA, 19 nt, Homo sapiens
  misc_RNA (1)...(19): siRNA sense strand
gaacagaagccaagcaagg

SEQ ID NO: 2442282 - RNA, 19 nt, Homo sapiens
  misc_RNA (1)...(19): siRNA sense strand
ccaucuuugaacugggcaa

SEQ ID NO: 2442283 - RNA, 19 nt, Homo sapiens
  misc_RNA (1)...(19): siRNA sense strand
ggcggaaggaggagaugau

SEQ ID NO: 2442284 - RNA, 19 nt, Homo sapiens
  misc_RNA (1)...(19): siRNA sense strand
cugcgaaggaggaugccaa

SEQ ID NO: 2442285 - RNA, 19 nt, Homo sapiens
  misc_RNA (1)...(19): siRNA sense strand
ccaacaacgucgaggccug

SEQ ID NO: 2442286 - RNA, 19 nt, Homo sapiens
  misc_RNA (1)...(19): siRNA sense strand
agaugagcuccguggccua

SEQ ID NO: 2442287 - RNA, 19 nt, Homo sapiens
  misc_RNA (1)...(19): siRNA sense strand
ggguagaggucgagagucc

SEQ ID NO: 2442288 - RNA, 19 nt, Homo sapiens
  misc_RNA (1)...(19): siRNA sense strand
aggucaacguggagcacau

SEQ ID NO: 2442289 - RNA, 19 nt, Homo sapiens
  misc_RNA (1)...(19): siRNA sense strand
gggacaggaaagaggaagu

SEQ ID NO: 2442290 - RNA, 19 nt, Homo sapiens
  misc_RNA (1)...(19): siRNA sense strand
gggucaggugcaagaagua

SEQ ID NO: 2442291 - RNA, 19 nt, Homo sapiens
  misc_RNA (1)...(19): siRNA sense strand
acuuaaaggucaacgugga

SEQ ID NO: 2442292 - RNA, 19 nt, Homo sapiens
  misc_RNA (1)...(19): siRNA sense strand
uaaccaggguagaggucga

SEQ ID NO: 2442293 - RNA, 19 nt, Homo sapiens
  misc_RNA (1)...(19): siRNA sense strand
cauuuaugugggugccaaa

SEQ ID NO: 2442294 - RNA, 19 nt, Homo sapiens
  misc_RNA (1)...(19): siRNA sense strand
caucagagggcaagggcgu

SEQ ID NO: 2442295 - RNA, 19 nt, Homo sapiens
  misc_RNA (1)...(19): siRNA sense strand
ccaagaggacccugcccaa

SEQ ID NO: 2442296 - RNA, 19 nt, Homo sapiens
  misc_RNA (1)...(19): siRNA sense strand
guaaaugccgccauggaga

SEQ ID NO: 2442297 - RNA, 19 nt, Homo sapiens
  misc_RNA (1)...(19): siRNA sense strand
ggaagugaccucagagccu

SEQ ID NO: 2442298 - RNA, 19 nt, Homo sapiens
  misc_RNA (1)...(19): siRNA sense strand
acgagaagugccaugacua

SEQ ID NO: 2442299 - RNA, 19 nt, Homo sapiens
  misc_RNA (1)...(19): siRNA sense strand
uguacucaucagagggcaa

SEQ ID NO: 2442300 - RNA, 19 nt, Homo sapiens
  misc_RNA (1)...(19): siRNA sense strand
gcgugaucggccugaagaa

SEQ ID NO: 2442301 - RNA, 19 nt, Homo sapiens
  misc_RNA (1)...(19): siRNA sense strand
cgucacugagcucaagaaa

SEQ ID NO: 2442302 - RNA, 19 nt, Homo sapiens
  misc_RNA (1)...(19): siRNA sense strand
ccauugaccgcaacgggaa

SEQ ID NO: 2442303 - RNA, 19 nt, Homo sapiens
  misc_RNA (1)...(19): siRNA sense strand
uggagggaggugagaacau

SEQ ID NO: 2442304 - RNA, 19 nt, Homo sapiens
  misc_RNA (1)...(19): siRNA sense strand
ucgguggguuugaggccua

SEQ ID NO: 2442305 - RNA, 19 nt, Homo sapiens
  misc_RNA (1)...(19): siRNA sense strand
ccagagagcaggagcggau

SEQ ID NO: 2442306 - RNA, 19 nt, Homo sapiens
  misc_RNA (1)...(19): siRNA sense strand
cgaagaugacagaggagca

SEQ ID NO: 2442307 - RNA, 19 nt, Homo sapiens
  misc_RNA (1)...(19): siRNA sense strand
cagacauggcugugcagaa

SEQ ID NO: 2442308 - RNA, 19 nt, Homo sapiens
  misc_RNA (1)...(19): siRNA sense strand
gaucagacauccugccaca

SEQ ID NO: 2442309 - RNA, 19 nt, Homo sapiens
  misc_RNA (1)...(19): siRNA sense strand
gaaaggugcuggcaggaca

SEQ ID NO: 2442310 - RNA, 19 nt, Homo sapiens
  misc_RNA (1)...(19): siRNA sense strand
acagguuggccgaggagaa

SEQ ID NO: 2442311 - RNA, 19 nt, Homo sapiens
  misc_RNA (1)...(19): siRNA sense strand
cucacaagguggaggacga

SEQ ID NO: 2442312 - RNA, 19 nt, Homo sapiens
  misc_RNA (1)...(19): siRNA sense strand
ugcagaacuucgugggaga

SEQ ID NO: 2442313 - RNA, 19 nt, Homo sapiens
  misc_RNA (1)...(19): siRNA sense strand
gggaaucguucauggcacu

SEQ ID NO: 2442314 - RNA, 19 nt, Homo sapiens
  misc_RNA (1)...(19): siRNA sense strand
cagggaaccagaaggccua

SEQ ID NO: 2442315 - RNA, 19 nt, Homo sapiens
  misc_RNA (1)...(19): siRNA sense strand
uggaagugacugacagcuu

SEQ ID NO: 2442316 - RNA, 19 nt, Homo sapiens
  misc_RNA (1)...(19): siRNA sense strand
ugcacaugauuaugaacaa

SEQ ID NO: 2442317 - RNA, 19 nt, Homo sapiens
  misc_RNA (1)...(19): siRNA sense strand
gaagaaaggugcuggcagg

SEQ ID NO: 2442318 - RNA, 19 nt, Homo sapiens
  misc_RNA (1)...(19): siRNA sense strand
ugaggaacgcccugcgcua

SEQ ID NO: 2442319 - RNA, 19 nt, Homo sapiens
  misc_RNA (1)...(19): siRNA sense strand
aagauuuacuagaagguca

SEQ ID NO: 2442320 - RNA, 19 nt, Homo sapiens
  misc_RNA (1)...(19): siRNA sense strand
ccaaaaucaaugaagcuaa

SEQ ID NO: 2442321 - RNA, 19 nt, Homo sapiens
  misc_RNA (1)...(19): siRNA sense strand
agauuuacuagaaggucaa

SEQ ID NO: 2442322 - RNA, 19 nt, Homo sapiens
  misc_RNA (1)...(19): siRNA sense strand
aagauuuacuagaagguca

SEQ ID NO: 2442323 - RNA, 19 nt, Homo sapiens
  misc_RNA (1)...(19): siRNA sense strand
ccaaaaucaaugaagcuaa

SEQ ID NO: 2442324 - RNA, 19 nt, Homo sapiens
  misc_RNA (1)...(19): siRNA sense strand
agauuuacuagaaggucaa

SEQ ID NO: 2442325 - RNA, 19 nt, Homo sapiens
  misc_RNA (1)...(19): siRNA sense strand
cgcaaaagcugcaaggaga

SEQ ID NO: 2442326 - RNA, 19 nt, Homo sapiens
  misc_RNA (1)...(19): siRNA sense strand
caacaagaucaaaggcaga

SEQ ID NO: 2442327 - RNA, 19 nt, Homo sapiens
  misc_RNA (1)...(19): siRNA sense strand
agaauaugcuggaaggagu

SEQ ID NO: 2442328 - RNA, 19 nt, Homo sapiens
  misc_RNA (1)...(19): siRNA sense strand
ugcagaaagcugaggaaca

SEQ ID NO: 2442329 - RNA, 19 nt, Homo sapiens
  misc_RNA (1)...(19): siRNA sense strand
aagaaagaucugaguggau

SEQ ID NO: 2442330 - RNA, 19 nt, Homo sapiens
  misc_RNA (1)...(19): siRNA sense strand
auugagaaacguaggaaga

SEQ ID NO: 2442331 - RNA, 19 nt, Homo sapiens
  misc_RNA (1)...(19): siRNA sense strand
cugaggaacaagaagaaaa

SEQ ID NO: 2442332 - RNA, 19 nt, Homo sapiens
  misc_RNA (1)...(19): siRNA sense strand
ucuacuuacuggugcacaa

SEQ ID NO: 2442333 - RNA, 19 nt, Homo sapiens
  misc_RNA (1)...(19): siRNA sense strand
cuagaauuguucagagcca

SEQ ID NO: 2442334 - RNA, 19 nt, Homo sapiens
  misc_RNA (1)...(19): siRNA sense strand
agccagagauugaaaacaa

SEQ ID NO: 2442335 - RNA, 19 nt, Homo sapiens
  misc_RNA (1)...(19): siRNA sense strand
aggaguuggaguugacauu

SEQ ID NO: 2442336 - RNA, 19 nt, Homo sapiens
  misc_RNA (1)...(19): siRNA sense strand
aagauguuauugaagggaa

SEQ ID NO: 2442337 - RNA, 19 nt, Homo sapiens
  misc_RNA (1)...(19): siRNA sense strand
aucaaaggcagaagcuuaa

SEQ ID NO: 2442338 - RNA, 19 nt, Homo sapiens
  misc_RNA (1)...(19): siRNA sense strand
aagaguuggagaagaauca

SEQ ID NO: 2442339 - RNA, 19 nt, Homo sapiens
  misc_RNA (1)...(19): siRNA sense strand
ugaguggaucagaggaaga

SEQ ID NO: 2442340 - RNA, 19 nt, Homo sapiens
  misc_RNA (1)...(19): siRNA sense strand
cagcagcaagagauagcaa

SEQ ID NO: 2442341 - RNA, 19 nt, Homo sapiens
  misc_RNA (1)...(19): siRNA sense strand
aagcugaggaacaagaaga

SEQ ID NO: 2442342 - RNA, 19 nt, Homo sapiens
  misc_RNA (1)...(19): siRNA sense strand
agauguuauugaagggaag

SEQ ID NO: 2442343 - RNA, 19 nt, Homo sapiens
  misc_RNA (1)...(19): siRNA sense strand
gguucaggcaggagagaau

SEQ ID NO: 2442344 - RNA, 19 nt, Homo sapiens
  misc_RNA (1)...(19): siRNA sense strand
cguaggucuauaugggaaa

SEQ ID NO: 2442345 - RNA, 19 nt, Homo sapiens
  misc_RNA (1)...(19): siRNA sense strand
ugacauacgcacaguugaa

SEQ ID NO: 2442346 - RNA, 19 nt, Homo sapiens
  misc_RNA (1)...(19): siRNA sense strand
caucuuggguuuaacgaau

SEQ ID NO: 2442347 - RNA, 19 nt, Homo sapiens
  misc_RNA (1)...(19): siRNA sense strand
ccaagagccugcagggaac

SEQ ID NO: 2442348 - RNA, 19 nt, Homo sapiens
  misc_RNA (1)...(19): siRNA sense strand
gcugagggucaauggaaca

SEQ ID NO: 2442349 - RNA, 19 nt, Homo sapiens
  misc_RNA (1)...(19): siRNA sense strand
ucguaggucuauaugggaa

SEQ ID NO: 2442350 - RNA, 19 nt, Homo sapiens
  misc_RNA (1)...(19): siRNA sense strand
accaagagccugcagggaa

SEQ ID NO: 2442351 - RNA, 19 nt, Homo sapiens
  misc_RNA (1)...(19): siRNA sense strand
acaacagaauauuccggaa

SEQ ID NO: 2442352 - RNA, 19 nt, Homo sapiens
  misc_RNA (1)...(19): siRNA sense strand
uguccaaagaagacgggau

SEQ ID NO: 2442353 - RNA, 19 nt, Homo sapiens
  misc_RNA (1)...(19): siRNA sense strand
ccagcaacccuguggugau

SEQ ID NO: 2442354 - RNA, 19 nt, Homo sapiens
  misc_RNA (1)...(19): siRNA sense strand
cuucaucgcuggugugcca

SEQ ID NO: 2442355 - RNA, 19 nt, Homo sapiens
  misc_RNA (1)...(19): siRNA sense strand
acuuccugguggagagaaa

SEQ ID NO: 2442356 - RNA, 19 nt, Homo sapiens
  misc_RNA (1)...(19): siRNA sense strand
gguucauccuauugggcuu

SEQ ID NO: 2442357 - RNA, 19 nt, Homo sapiens
  misc_RNA (1)...(19): siRNA sense strand
acucaacugaccagaacaa

SEQ ID NO: 2442358 - RNA, 19 nt, Homo sapiens
  misc_RNA (1)...(19): siRNA sense strand
ucauuuaugugaugcccaa

SEQ ID NO: 2442359 - RNA, 19 nt, Homo sapiens
  misc_RNA (1)...(19): siRNA sense strand
gcuuaacagaugauccaau

SEQ ID NO: 2442360 - RNA, 19 nt, Homo sapiens
  misc_RNA (1)...(19): siRNA sense strand
ccucaggaacaaggagauu

SEQ ID NO: 2442361 - RNA, 19 nt, Homo sapiens
  misc_RNA (1)...(19): siRNA sense strand
agaaauuggcagagaacaa

SEQ ID NO: 2442362 - RNA, 19 nt, Homo sapiens
  misc_RNA (1)...(19): siRNA sense strand
gcaccaaacucgcggagga

SEQ ID NO: 2442363 - RNA, 19 nt, Homo sapiens
  misc_RNA (1)...(19): siRNA sense strand
uugcaaaguuucagagcga

SEQ ID NO: 2442364 - RNA, 19 nt, Homo sapiens
  misc_RNA (1)...(19): siRNA sense strand
cggugugaucugagggcaa

SEQ ID NO: 2442365 - RNA, 19 nt, Homo sapiens
  misc_RNA (1)...(19): siRNA sense strand
uggcuguggaggugagaua

SEQ ID NO: 2442366 - RNA, 19 nt, Homo sapiens
  misc_RNA (1)...(19): siRNA sense strand
ugccuugcuuggagagaaa

SEQ ID NO: 2442367 - RNA, 19 nt, Homo sapiens
  misc_RNA (1)...(19): siRNA sense strand
gugaagaaugucugcuaau

SEQ ID NO: 2442368 - RNA, 19 nt, Homo sapiens
  misc_RNA (1)...(19): siRNA sense strand
ucgcggaggagaugaggaa

SEQ ID NO: 2442369 - RNA, 19 nt, Homo sapiens
  misc_RNA (1)...(19): siRNA sense strand
gagaagauuggcuggcgaa

SEQ ID NO: 2442370 - RNA, 19 nt, Homo sapiens
  misc_RNA (1)...(19): siRNA sense strand
ggagaagauuggcuggcga

SEQ ID NO: 2442371 - RNA, 19 nt, Homo sapiens
  misc_RNA (1)...(19): siRNA sense strand
ccaaacucgcggaggagau

SEQ ID NO: 2442372 - RNA, 19 nt, Homo sapiens
  misc_RNA (1)...(19): siRNA sense strand
guucggaaacagagggugu

SEQ ID NO: 2442373 - RNA, 19 nt, Homo sapiens
  misc_RNA (1)...(19): siRNA sense strand
ucaaugaggaaguucggaa

SEQ ID NO: 2442374 - RNA, 19 nt, Homo sapiens
  misc_RNA (1)...(19): siRNA sense strand
ccauuauacagaaagccua

SEQ ID NO: 2442375 - RNA, 19 nt, Homo sapiens
  misc_RNA (1)...(19): siRNA sense strand
ggggagaaccagagcgugu

SEQ ID NO: 2442376 - RNA, 19 nt, Homo sapiens
  misc_RNA (1)...(19): siRNA sense strand
cauuauacagaaagccuau

SEQ ID NO: 2442377 - RNA, 19 nt, Homo sapiens
  misc_RNA (1)...(19): siRNA sense strand
agaggaagugugagggucu

SEQ ID NO: 2442378 - RNA, 19 nt, Homo sapiens
  misc_RNA (1)...(19): siRNA sense strand
ccuucaacaaguucaacaa

SEQ ID NO: 2442379 - RNA, 19 nt, Homo sapiens
  misc_RNA (1)...(19): siRNA sense strand
agagaaauuggcagagaac

SEQ ID NO: 2442380 - RNA, 19 nt, Homo sapiens
  misc_RNA (1)...(19): siRNA sense strand
ggucagaggaagugugagg

SEQ ID NO: 2442381 - RNA, 19 nt, Homo sapiens
  misc_RNA (1)...(19): siRNA sense strand
uggaagaagaagaggaaau

SEQ ID NO: 2442382 - RNA, 19 nt, Homo sapiens
  misc_RNA (1)...(19): siRNA sense strand
acgaaguaaccgaggagaa

SEQ ID NO: 2442383 - RNA, 19 nt, Homo sapiens
  misc_RNA (1)...(19): siRNA sense strand
gacagaaugaggagggaau

SEQ ID NO: 2442384 - RNA, 19 nt, Homo sapiens
  misc_RNA (1)...(19): siRNA sense strand
ccauaaacggagugaucuu

SEQ ID NO: 2442385 - RNA, 19 nt, Homo sapiens
  misc_RNA (1)...(19): siRNA sense strand
gggaaugguaggcgagcuu

SEQ ID NO: 2442386 - RNA, 19 nt, Homo sapiens
  misc_RNA (1)...(19): siRNA sense strand
ggagaggaggagcuggaaa

SEQ ID NO: 2442387 - RNA, 19 nt, Homo sapiens
  misc_RNA (1)...(19): siRNA sense strand
cauaguaccugcaaggaca

SEQ ID NO: 2442388 - RNA, 19 nt, Homo sapiens
  misc_RNA (1)...(19): siRNA sense strand
aguggaagaagaagaggaa

SEQ ID NO: 2442389 - RNA, 19 nt, Homo sapiens
  misc_RNA (1)...(19): siRNA sense strand
agcaugaguuucugagcaa

SEQ ID NO: 2442390 - RNA, 19 nt, Homo sapiens
  misc_RNA (1)...(19): siRNA sense strand
aguucugaccuguaagaua

SEQ ID NO: 2442391 - RNA, 19 nt, Homo sapiens
  misc_RNA (1)...(19): siRNA sense strand
uggauuuaucugagcuuaa

SEQ ID NO: 2442392 - RNA, 19 nt, Homo sapiens
  misc_RNA (1)...(19): siRNA sense strand
ggacagaaugaggagggaa

SEQ ID NO: 2442393 - RNA, 19 nt, Homo sapiens
  misc_RNA (1)...(19): siRNA sense strand
aauugaaguggaagaagaa

SEQ ID NO: 2442394 - RNA, 19 nt, Homo sapiens
  misc_RNA (1)...(19): siRNA sense strand
ggacaguggccaugcagga

SEQ ID NO: 2442395 - RNA, 19 nt, Homo sapiens
  misc_RNA (1)...(19): siRNA sense strand
cuguaagauagaagaacuu

SEQ ID NO: 2442396 - RNA, 19 nt, Homo sapiens
  misc_RNA (1)...(19): siRNA sense strand
gcacuaacugggagcuaca

SEQ ID NO: 2442397 - RNA, 19 nt, Homo sapiens
  misc_RNA (1)...(19): siRNA sense strand
ugagaaauugguagagcuu

SEQ ID NO: 2442398 - RNA, 19 nt, Homo sapiens
  misc_RNA (1)...(19): siRNA sense strand
gcuaauugaaguggaagaa

SEQ ID NO: 2442399 - RNA, 19 nt, Homo sapiens
  misc_RNA (1)...(19): siRNA sense strand
ccuguaagauagaagaacu

SEQ ID NO: 2442400 - RNA, 19 nt, Homo sapiens
  misc_RNA (1)...(19): siRNA sense strand
ccacugaagaggaugcaga

SEQ ID NO: 2442401 - RNA, 19 nt, Homo sapiens
  misc_RNA (1)...(19): siRNA sense strand
agcaugaacagguggagaa

SEQ ID NO: 2442402 - RNA, 19 nt, Homo sapiens
  misc_RNA (1)...(19): siRNA sense strand
cugcaaggacaguggccau

SEQ ID NO: 2442403 - RNA, 19 nt, Homo sapiens
  misc_RNA (1)...(19): siRNA sense strand
cagaaauacaacucacgaa

SEQ ID NO: 2442404 - RNA, 19 nt, Homo sapiens
  misc_RNA (1)...(19): siRNA sense strand
gagcugagguacuucguga

SEQ ID NO: 2442405 - RNA, 19 nt, Homo sapiens
  misc_RNA (1)...(19): siRNA sense strand
agaagaacuuggcagcgaa

SEQ ID NO: 2442406 - RNA, 19 nt, Homo sapiens
  misc_RNA (1)...(19): siRNA sense strand
cugaagaggaugcagacuu

SEQ ID NO: 2442407 - RNA, 19 nt, Homo sapiens
  misc_RNA (1)...(19): siRNA sense strand
gccgaauacucaagcacau

SEQ ID NO: 2442408 - RNA, 19 nt, Homo sapiens
  misc_RNA (1)...(19): siRNA sense strand
aagcagugucuacgaacaa

SEQ ID NO: 2442409 - RNA, 19 nt, Homo sapiens
  misc_RNA (1)...(19): siRNA sense strand
uugaaguggaagaagaaga

SEQ ID NO: 2442410 - RNA, 19 nt, Homo sapiens
  misc_RNA (1)...(19): siRNA sense strand
gccugaaggucuugggaug

SEQ ID NO: 2442411 - RNA, 19 nt, Homo sapiens
  misc_RNA (1)...(19): siRNA sense strand
gagaggaggagcuggaaac

SEQ ID NO: 2442412 - RNA, 19 nt, Homo sapiens
  misc_RNA (1)...(19): siRNA sense strand
gcuacaaauccauguuuca

SEQ ID NO: 2442413 - RNA, 19 nt, Homo sapiens
  misc_RNA (1)...(19): siRNA sense strand
ggaggcucuaauugagaaa

SEQ ID NO: 2442414 - RNA, 19 nt, Homo sapiens
  misc_RNA (1)...(19): siRNA sense strand
gaaugguaggcgagcuuau

SEQ ID NO: 2442415 - RNA, 19 nt, Homo sapiens
  misc_RNA (1)...(19): siRNA sense strand
acaacaagucagugauucu

SEQ ID NO: 2442416 - RNA, 19 nt, Homo sapiens
  misc_RNA (1)...(19): siRNA sense strand
gagcaugaguuucugagca

SEQ ID NO: 2442417 - RNA, 19 nt, Homo sapiens
  misc_RNA (1)...(19): siRNA sense strand
gcaugaacagguggagaau

SEQ ID NO: 2442418 - RNA, 19 nt, Homo sapiens
  misc_RNA (1)...(19): siRNA sense strand
cccaagaagacauggccau

SEQ ID NO: 2442419 - RNA, 19 nt, Homo sapiens
  misc_RNA (1)...(19): siRNA sense strand
ucagacagauucagccgaa

SEQ ID NO: 2442420 - RNA, 19 nt, Homo sapiens
  misc_RNA (1)...(19): siRNA sense strand
cguucuauguuuacgcaca

SEQ ID NO: 2442421 - RNA, 19 nt, Homo sapiens
  misc_RNA (1)...(19): siRNA sense strand
uuaucgaaagccaggcaua

SEQ ID NO: 2442422 - RNA, 19 nt, Homo sapiens
  misc_RNA (1)...(19): siRNA sense strand
agcuaauugaaguggaaga

SEQ ID NO: 2442423 - RNA, 19 nt, Homo sapiens
  misc_RNA (1)...(19): siRNA sense strand
uguucaguauggacagaau

SEQ ID NO: 2442424 - RNA, 19 nt, Homo sapiens
  misc_RNA (1)...(19): siRNA sense strand
ucagaagcucccagacauu

SEQ ID NO: 2442425 - RNA, 19 nt, Homo sapiens
  misc_RNA (1)...(19): siRNA sense strand
gcaaagugcaagaaggaga

SEQ ID NO: 2442426 - RNA, 19 nt, Homo sapiens
  misc_RNA (1)...(19): siRNA sense strand
agaagaaauuccacgggua

SEQ ID NO: 2442427 - RNA, 19 nt, Homo sapiens
  misc_RNA (1)...(19): siRNA sense strand
uguuugaguucgugggcga

SEQ ID NO: 2442428 - RNA, 19 nt, Homo sapiens
  misc_RNA (1)...(19): siRNA sense strand
ccguggagagcgacgaaau

SEQ ID NO: 2442429 - RNA, 19 nt, Homo sapiens
  misc_RNA (1)...(19): siRNA sense strand
caguggacgcccugcacaa

SEQ ID NO: 2442430 - RNA, 19 nt, Homo sapiens
  misc_RNA (1)...(19): siRNA sense strand
ugcaagaaggagagaccau

SEQ ID NO: 2442431 - RNA, 19 nt, Homo sapiens
  misc_RNA (1)...(19): siRNA sense strand
gcaaagugcaagaaggaga

SEQ ID NO: 2442432 - RNA, 19 nt, Homo sapiens
  misc_RNA (1)...(19): siRNA sense strand
agaagaaauuccacgggua

SEQ ID NO: 2442433 - RNA, 19 nt, Homo sapiens
  misc_RNA (1)...(19): siRNA sense strand
uguuugaguucgugggcga

SEQ ID NO: 2442434 - RNA, 19 nt, Homo sapiens
  misc_RNA (1)...(19): siRNA sense strand
ccguggagagcgacgaaau

SEQ ID NO: 2442435 - RNA, 19 nt, Homo sapiens
  misc_RNA (1)...(19): siRNA sense strand
caguggacgcccugcacaa

SEQ ID NO: 2442436 - RNA, 19 nt, Homo sapiens
  misc_RNA (1)...(19): siRNA sense strand
ugcaagaaggagagaccau

SEQ ID NO: 2442437 - RNA, 19 nt, Homo sapiens
  misc_RNA (1)...(19): siRNA sense strand
gcaaagugcaagaaggaga

SEQ ID NO: 2442438 - RNA, 19 nt, Homo sapiens
  misc_RNA (1)...(19): siRNA sense strand
agaagaaauuccacgggua

SEQ ID NO: 2442439 - RNA, 19 nt, Homo sapiens
  misc_RNA (1)...(19): siRNA sense strand
uguuugaguucgugggcga

SEQ ID NO: 2442440 - RNA, 19 nt, Homo sapiens
  misc_RNA (1)...(19): siRNA sense strand
ccguggagagcgacgaaau

SEQ ID NO: 2442441 - RNA, 19 nt, Homo sapiens
  misc_RNA (1)...(19): siRNA sense strand
caguggacgcccugcacaa

SEQ ID NO: 2442442 - RNA, 19 nt, Homo sapiens
  misc_RNA (1)...(19): siRNA sense strand
ugcaagaaggagagaccau

SEQ ID NO: 2442443 - RNA, 19 nt, Homo sapiens
  misc_RNA (1)...(19): siRNA sense strand
gcaaagugcaagaaggaga

SEQ ID NO: 2442444 - RNA, 19 nt, Homo sapiens
  misc_RNA (1)...(19): siRNA sense strand
agaagaaauuccacgggua

SEQ ID NO: 2442445 - RNA, 19 nt, Homo sapiens
  misc_RNA (1)...(19): siRNA sense strand
uguuugaguucgugggcga

SEQ ID NO: 2442446 - RNA, 19 nt, Homo sapiens
  misc_RNA (1)...(19): siRNA sense strand
ccguggagagcgacgaaau

SEQ ID NO: 2442447 - RNA, 19 nt, Homo sapiens
  misc_RNA (1)...(19): siRNA sense strand
caguggacgcccugcacaa

SEQ ID NO: 2442448 - RNA, 19 nt, Homo sapiens
  misc_RNA (1)...(19): siRNA sense strand
ugcaagaaggagagaccau

SEQ ID NO: 2442449 - RNA, 19 nt, Homo sapiens
  misc_RNA (1)...(19): siRNA sense strand
gcaaagugcaagaaggaga

SEQ ID NO: 2442450 - RNA, 19 nt, Homo sapiens
  misc_RNA (1)...(19): siRNA sense strand
agaagaaauuccacgggua

SEQ ID NO: 2442451 - RNA, 19 nt, Homo sapiens
  misc_RNA (1)...(19): siRNA sense strand
uguuugaguucgugggcga

SEQ ID NO: 2442452 - RNA, 19 nt, Homo sapiens
  misc_RNA (1)...(19): siRNA sense strand
ccguggagagcgacgaaau

SEQ ID NO: 2442453 - RNA, 19 nt, Homo sapiens
  misc_RNA (1)...(19): siRNA sense strand
caguggacgcccugcacaa

SEQ ID NO: 2442454 - RNA, 19 nt, Homo sapiens
  misc_RNA (1)...(19): siRNA sense strand
ugcaagaaggagagaccau

SEQ ID NO: 2442455 - RNA, 19 nt, Homo sapiens
  misc_RNA (1)...(19): siRNA sense strand
gcaaagugcaagaaggaga

SEQ ID NO: 2442456 - RNA, 19 nt, Homo sapiens
  misc_RNA (1)...(19): siRNA sense strand
agaagaaauuccacgggua

SEQ ID NO: 2442457 - RNA, 19 nt, Homo sapiens
  misc_RNA (1)...(19): siRNA sense strand
uguuugaguucgugggcga

SEQ ID NO: 2442458 - RNA, 19 nt, Homo sapiens
  misc_RNA (1)...(19): siRNA sense strand
ccguggagagcgacgaaau

SEQ ID NO: 2442459 - RNA, 19 nt, Homo sapiens
  misc_RNA (1)...(19): siRNA sense strand
caguggacgcccugcacaa

SEQ ID NO: 2442460 - RNA, 19 nt, Homo sapiens
  misc_RNA (1)...(19): siRNA sense strand
ugcaagaaggagagaccau

SEQ ID NO: 2442461 - RNA, 19 nt, Homo sapiens
  misc_RNA (1)...(19): siRNA sense strand
gcaaagugcaagaaggaga

SEQ ID NO: 2442462 - RNA, 19 nt, Homo sapiens
  misc_RNA (1)...(19): siRNA sense strand
agaagaaauuccacgggua

SEQ ID NO: 2442463 - RNA, 19 nt, Homo sapiens
  misc_RNA (1)...(19): siRNA sense strand
uguuugaguucgugggcga

SEQ ID NO: 2442464 - RNA, 19 nt, Homo sapiens
  misc_RNA (1)...(19): siRNA sense strand
ccguggagagcgacgaaau

SEQ ID NO: 2442465 - RNA, 19 nt, Homo sapiens
  misc_RNA (1)...(19): siRNA sense strand
caguggacgcccugcacaa

SEQ ID NO: 2442466 - RNA, 19 nt, Homo sapiens
  misc_RNA (1)...(19): siRNA sense strand
ugcaagaaggagagaccau

SEQ ID NO: 2442467 - RNA, 19 nt, Homo sapiens
  misc_RNA (1)...(19): siRNA sense strand
gcaucagggcagaagacuu

SEQ ID NO: 2442468 - RNA, 19 nt, Homo sapiens
  misc_RNA (1)...(19): siRNA sense strand
aggaaugugaugaggugau

SEQ ID NO: 2442469 - RNA, 19 nt, Homo sapiens
  misc_RNA (1)...(19): siRNA sense strand
augaguggcuggagcuaca

SEQ ID NO: 2442470 - RNA, 19 nt, Homo sapiens
  misc_RNA (1)...(19): siRNA sense strand
cucaguuuguggaggaaaa

SEQ ID NO: 2442471 - RNA, 19 nt, Homo sapiens
  misc_RNA (1)...(19): siRNA sense strand
ggaaagcuguacauggcca

SEQ ID NO: 2442472 - RNA, 19 nt, Homo sapiens
  misc_RNA (1)...(19): siRNA sense strand
gugucaagagugugggaaa

SEQ ID NO: 2442473 - RNA, 19 nt, Homo sapiens
  misc_RNA (1)...(19): siRNA sense strand
gggaaaggauucugccagu

SEQ ID NO: 2442474 - RNA, 19 nt, Homo sapiens
  misc_RNA (1)...(19): siRNA sense strand
ggcaagaccaccugcgaga

SEQ ID NO: 2442475 - RNA, 19 nt, Homo sapiens
  misc_RNA (1)...(19): siRNA sense strand
ccacagugccuucggacca

SEQ ID NO: 2442476 - RNA, 19 nt, Homo sapiens
  misc_RNA (1)...(19): siRNA sense strand
cgcaagaagauccggccaa

SEQ ID NO: 2442477 - RNA, 19 nt, Homo sapiens
  misc_RNA (1)...(19): siRNA sense strand
uccaagaccaagaaggaau

SEQ ID NO: 2442478 - RNA, 19 nt, Homo sapiens
  misc_RNA (1)...(19): siRNA sense strand
aaagaguccaggagagaaa

SEQ ID NO: 2442479 - RNA, 19 nt, Homo sapiens
  misc_RNA (1)...(19): siRNA sense strand
augucauaauugugggaaa

SEQ ID NO: 2442480 - RNA, 19 nt, Homo sapiens
  misc_RNA (1)...(19): siRNA sense strand
ggagaauagagaagagcca

SEQ ID NO: 2442481 - RNA, 19 nt, Homo sapiens
  misc_RNA (1)...(19): siRNA sense strand
ggauagaaaaugaagaaga

SEQ ID NO: 2442482 - RNA, 19 nt, Homo sapiens
  misc_RNA (1)...(19): siRNA sense strand
agagaagagccauggguga

SEQ ID NO: 2442483 - RNA, 19 nt, Homo sapiens
  misc_RNA (1)...(19): siRNA sense strand
cccagagaauagagaaaga

SEQ ID NO: 2442484 - RNA, 19 nt, Homo sapiens
  misc_RNA (1)...(19): siRNA sense strand
gagauagagaccuggguga

SEQ ID NO: 2442485 - RNA, 19 nt, Homo sapiens
  misc_RNA (1)...(19): siRNA sense strand
ccacagagauagagaccug

SEQ ID NO: 2442486 - RNA, 19 nt, Homo sapiens
  misc_RNA (1)...(19): siRNA sense strand
ugucauaauugugggaaaa

SEQ ID NO: 2442487 - RNA, 19 nt, Homo sapiens
  misc_RNA (1)...(19): siRNA sense strand
cuauggugcuacuggagaa

SEQ ID NO: 2442488 - RNA, 19 nt, Homo sapiens
  misc_RNA (1)...(19): siRNA sense strand
gagccaugggugaaggaau

SEQ ID NO: 2442489 - RNA, 19 nt, Homo sapiens
  misc_RNA (1)...(19): siRNA sense strand
aggagaagaaccucacaaa

SEQ ID NO: 2442490 - RNA, 19 nt, Homo sapiens
  misc_RNA (1)...(19): siRNA sense strand
ugcccagagaauagagaaa

SEQ ID NO: 2442491 - RNA, 19 nt, Homo sapiens
  misc_RNA (1)...(19): siRNA sense strand
cgggauagaaaaugaagaa

SEQ ID NO: 2442492 - RNA, 19 nt, Homo sapiens
  misc_RNA (1)...(19): siRNA sense strand
cuguauauccauuaccaaa

SEQ ID NO: 2442493 - RNA, 19 nt, Homo sapiens
  misc_RNA (1)...(19): siRNA sense strand
guuagaaaaucaaugggaa

SEQ ID NO: 2442494 - RNA, 19 nt, Homo sapiens
  misc_RNA (1)...(19): siRNA sense strand
agacuuacagagagaacuu

SEQ ID NO: 2442495 - RNA, 19 nt, Homo sapiens
  misc_RNA (1)...(19): siRNA sense strand
gaggauuuacagacagauu

SEQ ID NO: 2442496 - RNA, 19 nt, Homo sapiens
  misc_RNA (1)...(19): siRNA sense strand
gacuauguacaguuagaaa

SEQ ID NO: 2442497 - RNA, 19 nt, Homo sapiens
  misc_RNA (1)...(19): siRNA sense strand
uagagaaagaguuguguca

SEQ ID NO: 2442498 - RNA, 19 nt, Homo sapiens
  misc_RNA (1)...(19): siRNA sense strand
ggugaaggaauuacaggau

SEQ ID NO: 2442499 - RNA, 19 nt, Homo sapiens
  misc_RNA (1)...(19): siRNA sense strand
uuugagaucgggauagaaa

SEQ ID NO: 2442500 - RNA, 19 nt, Homo sapiens
  misc_RNA (1)...(19): siRNA sense strand
gggagagacaccugagaac

SEQ ID NO: 2442501 - RNA, 19 nt, Homo sapiens
  misc_RNA (1)...(19): siRNA sense strand
augucuugagugugggaaa

SEQ ID NO: 2442502 - RNA, 19 nt, Homo sapiens
  misc_RNA (1)...(19): siRNA sense strand
augaaugcacuguauguaa

SEQ ID NO: 2442503 - RNA, 19 nt, Homo sapiens
  misc_RNA (1)...(19): siRNA sense strand
uuacugggcaucagagaau

SEQ ID NO: 2442504 - RNA, 19 nt, Homo sapiens
  misc_RNA (1)...(19): siRNA sense strand
ggagcacugcccagagaau

SEQ ID NO: 2442505 - RNA, 19 nt, Homo sapiens
  misc_RNA (1)...(19): siRNA sense strand
cuggagaaugucagaacuu

SEQ ID NO: 2442506 - RNA, 19 nt, Homo sapiens
  misc_RNA (1)...(19): siRNA sense strand
aauucauucaggagaagaa

SEQ ID NO: 2442507 - RNA, 19 nt, Homo sapiens
  misc_RNA (1)...(19): siRNA sense strand
cgucagcgcuucaggcagu

SEQ ID NO: 2442508 - RNA, 19 nt, Homo sapiens
  misc_RNA (1)...(19): siRNA sense strand
uaacaaacucugggagcuu

SEQ ID NO: 2442509 - RNA, 19 nt, Homo sapiens
  misc_RNA (1)...(19): siRNA sense strand
ccuaaaccccacaagaaaa

SEQ ID NO: 2442510 - RNA, 19 nt, Homo sapiens
  misc_RNA (1)...(19): siRNA sense strand
ggucacaucuuauagggca

SEQ ID NO: 2442511 - RNA, 19 nt, Homo sapiens
  misc_RNA (1)...(19): siRNA sense strand
aguuuuagacagagaccaa

SEQ ID NO: 2442512 - RNA, 19 nt, Homo sapiens
  misc_RNA (1)...(19): siRNA sense strand
acacaggggagaagccaua

SEQ ID NO: 2442513 - RNA, 19 nt, Homo sapiens
  misc_RNA (1)...(19): siRNA sense strand
agagaauagagaaagaguu

SEQ ID NO: 2442514 - RNA, 19 nt, Homo sapiens
  misc_RNA (1)...(19): siRNA sense strand
aagacuauguacaguuaga

SEQ ID NO: 2442515 - RNA, 19 nt, Homo sapiens
  misc_RNA (1)...(19): siRNA sense strand
aagccaaagaugcgcucua

SEQ ID NO: 2442516 - RNA, 19 nt, Homo sapiens
  misc_RNA (1)...(19): siRNA sense strand
cccagaggauuuacagaca

SEQ ID NO: 2442517 - RNA, 19 nt, Homo sapiens
  misc_RNA (1)...(19): siRNA sense strand
cagagaagcagcugggccu

SEQ ID NO: 2442518 - RNA, 19 nt, Homo sapiens
  misc_RNA (1)...(19): siRNA sense strand
ccaaagaaagcaaagccua

SEQ ID NO: 2442519 - RNA, 19 nt, Homo sapiens
  misc_RNA (1)...(19): siRNA sense strand
guacauaacucccgcagga

SEQ ID NO: 2442520 - RNA, 19 nt, Homo sapiens
  misc_RNA (1)...(19): siRNA sense strand
ccucagagauuuaaggaug

SEQ ID NO: 2442521 - RNA, 19 nt, Homo sapiens
  misc_RNA (1)...(19): siRNA sense strand
cuauggaagagaugugaau

SEQ ID NO: 2442522 - RNA, 19 nt, Homo sapiens
  misc_RNA (1)...(19): siRNA sense strand
cugcaaaggaagacgugga

SEQ ID NO: 2442523 - RNA, 19 nt, Homo sapiens
  misc_RNA (1)...(19): siRNA sense strand
agcaaagccuacagggagu

SEQ ID NO: 2442524 - RNA, 19 nt, Homo sapiens
  misc_RNA (1)...(19): siRNA sense strand
cucagagauuuaaggauga

SEQ ID NO: 2442525 - RNA, 19 nt, Homo sapiens
  misc_RNA (1)...(19): siRNA sense strand
caaagaaagcaaagccuac

SEQ ID NO: 2442526 - RNA, 19 nt, Homo sapiens
  misc_RNA (1)...(19): siRNA sense strand
gagauuuaaggaugagcuu

SEQ ID NO: 2442527 - RNA, 19 nt, Homo sapiens
  misc_RNA (1)...(19): siRNA sense strand
ccaaagaaagcaaagccua

SEQ ID NO: 2442528 - RNA, 19 nt, Homo sapiens
  misc_RNA (1)...(19): siRNA sense strand
guacauaacucccgcagga

SEQ ID NO: 2442529 - RNA, 19 nt, Homo sapiens
  misc_RNA (1)...(19): siRNA sense strand
ccucagagauuuaaggaug

SEQ ID NO: 2442530 - RNA, 19 nt, Homo sapiens
  misc_RNA (1)...(19): siRNA sense strand
cuauggaagagaugugaau

SEQ ID NO: 2442531 - RNA, 19 nt, Homo sapiens
  misc_RNA (1)...(19): siRNA sense strand
agcaaagccuacagggagu

SEQ ID NO: 2442532 - RNA, 19 nt, Homo sapiens
  misc_RNA (1)...(19): siRNA sense strand
cucagagauuuaaggauga

SEQ ID NO: 2442533 - RNA, 19 nt, Homo sapiens
  misc_RNA (1)...(19): siRNA sense strand
caaagaaagcaaagccuac

SEQ ID NO: 2442534 - RNA, 19 nt, Homo sapiens
  misc_RNA (1)...(19): siRNA sense strand
gagauuuaaggaugagcuu

SEQ ID NO: 2442535 - RNA, 19 nt, Homo sapiens
  misc_RNA (1)...(19): siRNA sense strand
augaagagcgagagaucaa

SEQ ID NO: 2442536 - RNA, 19 nt, Homo sapiens
  misc_RNA (1)...(19): siRNA sense strand
gagcaugggagguaaagua

SEQ ID NO: 2442537 - RNA, 19 nt, Homo sapiens
  misc_RNA (1)...(19): siRNA sense strand
aggaagacuuaaaggcaga

SEQ ID NO: 2442538 - RNA, 19 nt, Homo sapiens
  misc_RNA (1)...(19): siRNA sense strand
gcgaaaacaugaagagcga

SEQ ID NO: 2442539 - RNA, 19 nt, Homo sapiens
  misc_RNA (1)...(19): siRNA sense strand
ggagagcaugggagguaaa

SEQ ID NO: 2442540 - RNA, 19 nt, Homo sapiens
  misc_RNA (1)...(19): siRNA sense strand
gcgagagaucaaagaaaga

SEQ ID NO: 2442541 - RNA, 19 nt, Homo sapiens
  misc_RNA (1)...(19): siRNA sense strand
caguaaauugucagccaaa

SEQ ID NO: 2442542 - RNA, 19 nt, Homo sapiens
  misc_RNA (1)...(19): siRNA sense strand
ugucaaaauaccagagcaa

SEQ ID NO: 2442543 - RNA, 19 nt, Homo sapiens
  misc_RNA (1)...(19): siRNA sense strand
aggcuaaaucagaagaaaa

SEQ ID NO: 2442544 - RNA, 19 nt, Homo sapiens
  misc_RNA (1)...(19): siRNA sense strand
uugcagaacauuggagaaa

SEQ ID NO: 2442545 - RNA, 19 nt, Homo sapiens
  misc_RNA (1)...(19): siRNA sense strand
aguccuaaaugauggugaa

SEQ ID NO: 2442546 - RNA, 19 nt, Homo sapiens
  misc_RNA (1)...(19): siRNA sense strand
gcaaagagggccagugucu

SEQ ID NO: 2442547 - RNA, 19 nt, Homo sapiens
  misc_RNA (1)...(19): siRNA sense strand
agaaaugggagaugaaaau

SEQ ID NO: 2442548 - RNA, 19 nt, Homo sapiens
  misc_RNA (1)...(19): siRNA sense strand
acagaaaauugcagaacau

SEQ ID NO: 2442549 - RNA, 19 nt, Homo sapiens
  misc_RNA (1)...(19): siRNA sense strand
gagagaucaaagaaagaau

SEQ ID NO: 2442550 - RNA, 19 nt, Homo sapiens
  misc_RNA (1)...(19): siRNA sense strand
aagaaaugggagaugaaaa

SEQ ID NO: 2442551 - RNA, 19 nt, Homo sapiens
  misc_RNA (1)...(19): siRNA sense strand
agaugaaaauguggagaua

SEQ ID NO: 2442552 - RNA, 19 nt, Homo sapiens
  misc_RNA (1)...(19): siRNA sense strand
aagaaagaauagaacgagu

SEQ ID NO: 2442553 - RNA, 19 nt, Homo sapiens
  misc_RNA (1)...(19): siRNA sense strand
ggcuaaaucagaagaaaau

SEQ ID NO: 2442554 - RNA, 19 nt, Homo sapiens
  misc_RNA (1)...(19): siRNA sense strand
aagaaaauaccaaggaaga

SEQ ID NO: 2442555 - RNA, 19 nt, Homo sapiens
  misc_RNA (1)...(19): siRNA sense strand
ucagaaggcuaaaucagaa

SEQ ID NO: 2442556 - RNA, 19 nt, Homo sapiens
  misc_RNA (1)...(19): siRNA sense strand
ugaaauucuuagugaucca

SEQ ID NO: 2442557 - RNA, 19 nt, Homo sapiens
  misc_RNA (1)...(19): siRNA sense strand
ggaggaagacuuaaaggca

SEQ ID NO: 2442558 - RNA, 19 nt, Homo sapiens
  misc_RNA (1)...(19): siRNA sense strand
aggaaagugaucuagaaau

SEQ ID NO: 2442559 - RNA, 19 nt, Homo sapiens
  misc_RNA (1)...(19): siRNA sense strand
agauaacggaggagaugau

SEQ ID NO: 2442560 - RNA, 19 nt, Homo sapiens
  misc_RNA (1)...(19): siRNA sense strand
cagaaguuaugguggccuu

SEQ ID NO: 2442561 - RNA, 19 nt, Homo sapiens
  misc_RNA (1)...(19): siRNA sense strand
cugcaaagugaacgagcuu

SEQ ID NO: 2442562 - RNA, 19 nt, Homo sapiens
  misc_RNA (1)...(19): siRNA sense strand
agguggaggaagacuuaaa

SEQ ID NO: 2442563 - RNA, 19 nt, Homo sapiens
  misc_RNA (1)...(19): siRNA sense strand
uggagauaacggaggagau

SEQ ID NO: 2442564 - RNA, 19 nt, Homo sapiens
  misc_RNA (1)...(19): siRNA sense strand
gaaaacaugaagagcgaga

SEQ ID NO: 2442565 - RNA, 19 nt, Homo sapiens
  misc_RNA (1)...(19): siRNA sense strand
acaugaagagcgagagauc

SEQ ID NO: 2442566 - RNA, 19 nt, Homo sapiens
  misc_RNA (1)...(19): siRNA sense strand
ggaagaagccagacgacag

SEQ ID NO: 2442567 - RNA, 19 nt, Homo sapiens
  misc_RNA (1)...(19): siRNA sense strand
aagaagagcaggagagagc

SEQ ID NO: 2442568 - RNA, 19 nt, Homo sapiens
  misc_RNA (1)...(19): siRNA sense strand
cgaaccaucaacugaggaa

SEQ ID NO: 2442569 - RNA, 19 nt, Homo sapiens
  misc_RNA (1)...(19): siRNA sense strand
caucaacugaggaaaguga

SEQ ID NO: 2442570 - RNA, 19 nt, Homo sapiens
  misc_RNA (1)...(19): siRNA sense strand
aggagagagcccagaggga

SEQ ID NO: 2442571 - RNA, 19 nt, Homo sapiens
  misc_RNA (1)...(19): siRNA sense strand
gugacagagccauugaaau

SEQ ID NO: 2442572 - RNA, 19 nt, Homo sapiens
  misc_RNA (1)...(19): siRNA sense strand
aggaaugccuggaauggga

SEQ ID NO: 2442573 - RNA, 19 nt, Homo sapiens
  misc_RNA (1)...(19): siRNA sense strand
ccugcuacucagaaggcua

SEQ ID NO: 2442574 - RNA, 19 nt, Homo sapiens
  misc_RNA (1)...(19): siRNA sense strand
augaaaauguggagauaac

SEQ ID NO: 2442575 - RNA, 19 nt, Homo sapiens
  misc_RNA (1)...(19): siRNA sense strand
agaacauuggagaaaguau

SEQ ID NO: 2442576 - RNA, 19 nt, Homo sapiens
  misc_RNA (1)...(19): siRNA sense strand
cuuaaaggcagacgaacca

SEQ ID NO: 2442577 - RNA, 19 nt, Homo sapiens
  misc_RNA (1)...(19): siRNA sense strand
gagaugaaaauguggagau

SEQ ID NO: 2442578 - RNA, 19 nt, Homo sapiens
  misc_RNA (1)...(19): siRNA sense strand
auaguaagguggaggaaga

SEQ ID NO: 2442579 - RNA, 19 nt, Homo sapiens
  misc_RNA (1)...(19): siRNA sense strand
aggaagacuuaaaggcaga

SEQ ID NO: 2442580 - RNA, 19 nt, Homo sapiens
  misc_RNA (1)...(19): siRNA sense strand
agguacugcuacucagaaa

SEQ ID NO: 2442581 - RNA, 19 nt, Homo sapiens
  misc_RNA (1)...(19): siRNA sense strand
agaaaugggagaugaaaau

SEQ ID NO: 2442582 - RNA, 19 nt, Homo sapiens
  misc_RNA (1)...(19): siRNA sense strand
acagaaaauugcagaacau

SEQ ID NO: 2442583 - RNA, 19 nt, Homo sapiens
  misc_RNA (1)...(19): siRNA sense strand
ccgcaaagugaacgagcuu

SEQ ID NO: 2442584 - RNA, 19 nt, Homo sapiens
  misc_RNA (1)...(19): siRNA sense strand
aagaaaugggagaugaaaa

SEQ ID NO: 2442585 - RNA, 19 nt, Homo sapiens
  misc_RNA (1)...(19): siRNA sense strand
aagaaaauaccaaggaaga

SEQ ID NO: 2442586 - RNA, 19 nt, Homo sapiens
  misc_RNA (1)...(19): siRNA sense strand
ggaggaagacuuaaaggca

SEQ ID NO: 2442587 - RNA, 19 nt, Homo sapiens
  misc_RNA (1)...(19): siRNA sense strand
aggaaagugaucuagaaau

SEQ ID NO: 2442588 - RNA, 19 nt, Homo sapiens
  misc_RNA (1)...(19): siRNA sense strand
agguggaggaagacuuaaa

SEQ ID NO: 2442589 - RNA, 19 nt, Homo sapiens
  misc_RNA (1)...(19): siRNA sense strand
agaugaaaaugcggagaua

SEQ ID NO: 2442590 - RNA, 19 nt, Homo sapiens
  misc_RNA (1)...(19): siRNA sense strand
aagugaggaaagugaucua

SEQ ID NO: 2442591 - RNA, 19 nt, Homo sapiens
  misc_RNA (1)...(19): siRNA sense strand
gugacagagccauugaaau

SEQ ID NO: 2442592 - RNA, 19 nt, Homo sapiens
  misc_RNA (1)...(19): siRNA sense strand
cagagaaaguaugagcgaa

SEQ ID NO: 2442593 - RNA, 19 nt, Homo sapiens
  misc_RNA (1)...(19): siRNA sense strand
guaagguggaggaagacuu

SEQ ID NO: 2442594 - RNA, 19 nt, Homo sapiens
  misc_RNA (1)...(19): siRNA sense strand
cuuaaaggcagacgaacca

SEQ ID NO: 2442595 - RNA, 19 nt, Homo sapiens
  misc_RNA (1)...(19): siRNA sense strand
agcccuaaaugauggugaa

SEQ ID NO: 2442596 - RNA, 19 nt, Homo sapiens
  misc_RNA (1)...(19): siRNA sense strand
cuggcgagguauugggaaa

SEQ ID NO: 2442597 - RNA, 19 nt, Homo sapiens
  misc_RNA (1)...(19): siRNA sense strand
aauaaaugaaggagagcau

SEQ ID NO: 2442598 - RNA, 19 nt, Homo sapiens
  misc_RNA (1)...(19): siRNA sense strand
augaagaggacgacgagaa

SEQ ID NO: 2442599 - RNA, 19 nt, Homo sapiens
  misc_RNA (1)...(19): siRNA sense strand
ucuucacaccggagagaaa

SEQ ID NO: 2442600 - RNA, 19 nt, Homo sapiens
  misc_RNA (1)...(19): siRNA sense strand
agaaaucgcuccaggcuca

SEQ ID NO: 2442601 - RNA, 19 nt, Homo sapiens
  misc_RNA (1)...(19): siRNA sense strand
gaggugaggacgaggagga

SEQ ID NO: 2442602 - RNA, 19 nt, Homo sapiens
  misc_RNA (1)...(19): siRNA sense strand
agauacuguccgcgauuua

SEQ ID NO: 2442603 - RNA, 19 nt, Homo sapiens
  misc_RNA (1)...(19): siRNA sense strand
gcacacaacgugacgcuca

SEQ ID NO: 2442604 - RNA, 19 nt, Homo sapiens
  misc_RNA (1)...(19): siRNA sense strand
agucugaugaagaggacga

SEQ ID NO: 2442605 - RNA, 19 nt, Homo sapiens
  misc_RNA (1)...(19): siRNA sense strand
agagaggagcccacggaca

SEQ ID NO: 2442606 - RNA, 19 nt, Homo sapiens
  misc_RNA (1)...(19): siRNA sense strand
aagaaagcuuuaagggaca

SEQ ID NO: 2442607 - RNA, 19 nt, Homo sapiens
  misc_RNA (1)...(19): siRNA sense strand
ggacaaaggauggcggaga

SEQ ID NO: 2442608 - RNA, 19 nt, Homo sapiens
  misc_RNA (1)...(19): siRNA sense strand
uggccaaagcagugcggaa

SEQ ID NO: 2442609 - RNA, 19 nt, Homo sapiens
  misc_RNA (1)...(19): siRNA sense strand
caagaaagcuuuaagggac

SEQ ID NO: 2442610 - RNA, 19 nt, Homo sapiens
  misc_RNA (1)...(19): siRNA sense strand
cuugugaauccaaaggaaa

SEQ ID NO: 2442611 - RNA, 19 nt, Homo sapiens
  misc_RNA (1)...(19): siRNA sense strand
cuggcaaggcauaaaggaa

SEQ ID NO: 2442612 - RNA, 19 nt, Homo sapiens
  misc_RNA (1)...(19): siRNA sense strand
aggcauaaaggaacguauu

SEQ ID NO: 2442613 - RNA, 19 nt, Homo sapiens
  misc_RNA (1)...(19): siRNA sense strand
acaagaaagcuuuaaggga

SEQ ID NO: 2442614 - RNA, 19 nt, Homo sapiens
  misc_RNA (1)...(19): siRNA sense strand
ccacaaacaccauuggcca

SEQ ID NO: 2442615 - RNA, 19 nt, Homo sapiens
  misc_RNA (1)...(19): siRNA sense strand
gagaauuaccagauccuga

SEQ ID NO: 2442616 - RNA, 19 nt, Homo sapiens
  misc_RNA (1)...(19): siRNA sense strand
aagucaaugcugaagagaa

SEQ ID NO: 2442617 - RNA, 19 nt, Homo sapiens
  misc_RNA (1)...(19): siRNA sense strand
ugugagugguagggagcua

SEQ ID NO: 2442618 - RNA, 19 nt, Homo sapiens
  misc_RNA (1)...(19): siRNA sense strand
acuugugaauccaaaggaa

SEQ ID NO: 2442619 - RNA, 19 nt, Homo sapiens
  misc_RNA (1)...(19): siRNA sense strand
ggccaaagcagugcggaau

SEQ ID NO: 2442620 - RNA, 19 nt, Homo sapiens
  misc_RNA (1)...(19): siRNA sense strand
cugcagaguagaucacgaa

SEQ ID NO: 2442621 - RNA, 19 nt, Homo sapiens
  misc_RNA (1)...(19): siRNA sense strand
uugugaauccaaaggaaaa

SEQ ID NO: 2442622 - RNA, 19 nt, Homo sapiens
  misc_RNA (1)...(19): siRNA sense strand
cacaaacaccauuggccaa

SEQ ID NO: 2442623 - RNA, 19 nt, Homo sapiens
  misc_RNA (1)...(19): siRNA sense strand
cuuuaagggacaauaggau

SEQ ID NO: 2442624 - RNA, 19 nt, Homo sapiens
  misc_RNA (1)...(19): siRNA sense strand
agggaauuccagaagacaa

SEQ ID NO: 2442625 - RNA, 19 nt, Homo sapiens
  misc_RNA (1)...(19): siRNA sense strand
aguaaagggaauuccagaa

SEQ ID NO: 2442626 - RNA, 19 nt, Homo sapiens
  misc_RNA (1)...(19): siRNA sense strand
aagauuugccagagaagga

SEQ ID NO: 2442627 - RNA, 19 nt, Homo sapiens
  misc_RNA (1)...(19): siRNA sense strand
acggaaggaacgaugggaa

SEQ ID NO: 2442628 - RNA, 19 nt, Homo sapiens
  misc_RNA (1)...(19): siRNA sense strand
cggaaggaacgaugggaac

SEQ ID NO: 2442629 - RNA, 19 nt, Homo sapiens
  misc_RNA (1)...(19): siRNA sense strand
guguauucauggaugcaga

SEQ ID NO: 2442630 - RNA, 19 nt, Homo sapiens
  misc_RNA (1)...(19): siRNA sense strand
cugaaacagcacaggacca

SEQ ID NO: 2442631 - RNA, 19 nt, Homo sapiens
  misc_RNA (1)...(19): siRNA sense strand
agaucaggccuuugugaca

SEQ ID NO: 2442632 - RNA, 19 nt, Homo sapiens
  misc_RNA (1)...(19): siRNA sense strand
caaacgaugccuacgccaa

SEQ ID NO: 2442633 - RNA, 19 nt, Homo sapiens
  misc_RNA (1)...(19): siRNA sense strand
auuuauaaccuaagcagca

SEQ ID NO: 2442634 - RNA, 19 nt, Homo sapiens
  misc_RNA (1)...(19): siRNA sense strand
gcuaugugcuguauggaga

SEQ ID NO: 2442635 - RNA, 19 nt, Homo sapiens
  misc_RNA (1)...(19): siRNA sense strand
acguaaugaugguguggaa

SEQ ID NO: 2442636 - RNA, 19 nt, Homo sapiens
  misc_RNA (1)...(19): siRNA sense strand
uuugauagggagagacaua

SEQ ID NO: 2442637 - RNA, 19 nt, Homo sapiens
  misc_RNA (1)...(19): siRNA sense strand
uugccaaggugcagggaca

SEQ ID NO: 2442638 - RNA, 19 nt, Homo sapiens
  misc_RNA (1)...(19): siRNA sense strand
cugaaggaguacaacacaa

SEQ ID NO: 2442639 - RNA, 19 nt, Homo sapiens
  misc_RNA (1)...(19): siRNA sense strand
ggagcuuggaggagcggaa

SEQ ID NO: 2442640 - RNA, 19 nt, Homo sapiens
  misc_RNA (1)...(19): siRNA sense strand
aggcauuccauguagcaaa

SEQ ID NO: 2442641 - RNA, 19 nt, Homo sapiens
  misc_RNA (1)...(19): siRNA sense strand
ugauagggagagacauaaa

SEQ ID NO: 2442642 - RNA, 19 nt, Homo sapiens
  misc_RNA (1)...(19): siRNA sense strand
aggaaauaaaucagcugaa

SEQ ID NO: 2442643 - RNA, 19 nt, Homo sapiens
  misc_RNA (1)...(19): siRNA sense strand
cggaaaaccugaaaagacu

SEQ ID NO: 2442644 - RNA, 19 nt, Homo sapiens
  misc_RNA (1)...(19): siRNA sense strand
cguuugauagggagagaca

SEQ ID NO: 2442645 - RNA, 19 nt, Homo sapiens
  misc_RNA (1)...(19): siRNA sense strand
cuucaagauccaugugaga

SEQ ID NO: 2442646 - RNA, 19 nt, Homo sapiens
  misc_RNA (1)...(19): siRNA sense strand
auauggagcagauggagaa

SEQ ID NO: 2442647 - RNA, 19 nt, Homo sapiens
  misc_RNA (1)...(19): siRNA sense strand
gucgaaugacuuugagaau

SEQ ID NO: 2442648 - RNA, 19 nt, Homo sapiens
  misc_RNA (1)...(19): siRNA sense strand
gggacaacucuuugggauc

SEQ ID NO: 2442649 - RNA, 19 nt, Homo sapiens
  misc_RNA (1)...(19): siRNA sense strand
ccucacagcagcagcccaa

SEQ ID NO: 2442650 - RNA, 19 nt, Homo sapiens
  misc_RNA (1)...(19): siRNA sense strand
ccaugaaugucaaucccaa

SEQ ID NO: 2442651 - RNA, 19 nt, Homo sapiens
  misc_RNA (1)...(19): siRNA sense strand
cauauggagcagauggaga

SEQ ID NO: 2442652 - RNA, 19 nt, Homo sapiens
  misc_RNA (1)...(19): siRNA sense strand
gagaauaggcggucagagc

SEQ ID NO: 2442653 - RNA, 19 nt, Homo sapiens
  misc_RNA (1)...(19): siRNA sense strand
aagcuagacuucuggcuga

SEQ ID NO: 2442654 - RNA, 19 nt, Homo sapiens
  misc_RNA (1)...(19): siRNA sense strand
cguaaugaugguguggaaa

SEQ ID NO: 2442655 - RNA, 19 nt, Homo sapiens
  misc_RNA (1)...(19): siRNA sense strand
aauaagauguggauugcca

SEQ ID NO: 2442656 - RNA, 19 nt, Homo sapiens
  misc_RNA (1)...(19): siRNA sense strand
uggcugcagaggaggaaau

SEQ ID NO: 2442657 - RNA, 19 nt, Homo sapiens
  misc_RNA (1)...(19): siRNA sense strand
uggaggagcggaagcguga

SEQ ID NO: 2442658 - RNA, 19 nt, Homo sapiens
  misc_RNA (1)...(19): siRNA sense strand
ccacagaaacacagaucag

SEQ ID NO: 2442659 - RNA, 19 nt, Homo sapiens
  misc_RNA (1)...(19): siRNA sense strand
cggaaaaggaggacaggau

SEQ ID NO: 2442660 - RNA, 19 nt, Homo sapiens
  misc_RNA (1)...(19): siRNA sense strand
augcaaaacacgugccuaa

SEQ ID NO: 2442661 - RNA, 19 nt, Homo sapiens
  misc_RNA (1)...(19): siRNA sense strand
aacuaaacaaagaggaaga

SEQ ID NO: 2442662 - RNA, 19 nt, Homo sapiens
  misc_RNA (1)...(19): siRNA sense strand
uauuugaaccaguaggaau

SEQ ID NO: 2442663 - RNA, 19 nt, Homo sapiens
  misc_RNA (1)...(19): siRNA sense strand
ucuacagguuucuaggcaa

SEQ ID NO: 2442664 - RNA, 19 nt, Homo sapiens
  misc_RNA (1)...(19): siRNA sense strand
uugccuagacagagaacuu

SEQ ID NO: 2442665 - RNA, 19 nt, Homo sapiens
  misc_RNA (1)...(19): siRNA sense strand
augcugagaaugaguucaa

SEQ ID NO: 2442666 - RNA, 19 nt, Homo sapiens
  misc_RNA (1)...(19): siRNA sense strand
caguaggaaugaagaagcu

SEQ ID NO: 2442667 - RNA, 19 nt, Homo sapiens
  misc_RNA (1)...(19): siRNA sense strand
agauuggugaggaaagaau

SEQ ID NO: 2442668 - RNA, 19 nt, Homo sapiens
  misc_RNA (1)...(19): siRNA sense strand
cagcaacagcaaagggaaa

SEQ ID NO: 2442669 - RNA, 19 nt, Homo sapiens
  misc_RNA (1)...(19): siRNA sense strand
cagcaaugaagaagaggaa

SEQ ID NO: 2442670 - RNA, 19 nt, Homo sapiens
  misc_RNA (1)...(19): siRNA sense strand
caggcgaagacaagagaaa

SEQ ID NO: 2442671 - RNA, 19 nt, Homo sapiens
  misc_RNA (1)...(19): siRNA sense strand
ucacaaggaaagaggaaaa

SEQ ID NO: 2442672 - RNA, 19 nt, Homo sapiens
  misc_RNA (1)...(19): siRNA sense strand
aauccaaggccaagagcaa

SEQ ID NO: 2442673 - RNA, 19 nt, Homo sapiens
  misc_RNA (1)...(19): siRNA sense strand
aagaagaggaagaaaguga

SEQ ID NO: 2442674 - RNA, 19 nt, Homo sapiens
  misc_RNA (1)...(19): siRNA sense strand
gccaaagggaagaggaaca

SEQ ID NO: 2442675 - RNA, 19 nt, Homo sapiens
  misc_RNA (1)...(19): siRNA sense strand
caguaaaagaggcaagaaa

SEQ ID NO: 2442676 - RNA, 19 nt, Homo sapiens
  misc_RNA (1)...(19): siRNA sense strand
acuuggaguuucaggcaaa

SEQ ID NO: 2442677 - RNA, 19 nt, Homo sapiens
  misc_RNA (1)...(19): siRNA sense strand
gugccaaagggaagaggaa

SEQ ID NO: 2442678 - RNA, 19 nt, Homo sapiens
  misc_RNA (1)...(19): siRNA sense strand
gaaaggaaggagaaggaga

SEQ ID NO: 2442679 - RNA, 19 nt, Homo sapiens
  misc_RNA (1)...(19): siRNA sense strand
aagaagaccaaaagggaaa

SEQ ID NO: 2442680 - RNA, 19 nt, Homo sapiens
  misc_RNA (1)...(19): siRNA sense strand
ccucaagguuauaaaggau

SEQ ID NO: 2442681 - RNA, 19 nt, Homo sapiens
  misc_RNA (1)...(19): siRNA sense strand
acaagagaaagaagugaaa

SEQ ID NO: 2442682 - RNA, 19 nt, Homo sapiens
  misc_RNA (1)...(19): siRNA sense strand
gggagaagaaagaagacuu

SEQ ID NO: 2442683 - RNA, 19 nt, Homo sapiens
  misc_RNA (1)...(19): siRNA sense strand
ccaugaaugaagacagcaa

SEQ ID NO: 2442684 - RNA, 19 nt, Homo sapiens
  misc_RNA (1)...(19): siRNA sense strand
ggaacaagggaggcagaaa

SEQ ID NO: 2442685 - RNA, 19 nt, Homo sapiens
  misc_RNA (1)...(19): siRNA sense strand
aggcagucauugaaaggaa

SEQ ID NO: 2442686 - RNA, 19 nt, Homo sapiens
  misc_RNA (1)...(19): siRNA sense strand
ggcgaagacaagagaaaga

SEQ ID NO: 2442687 - RNA, 19 nt, Homo sapiens
  misc_RNA (1)...(19): siRNA sense strand
guaaaagaggcaagaaaau

SEQ ID NO: 2442688 - RNA, 19 nt, Homo sapiens
  misc_RNA (1)...(19): siRNA sense strand
gcagaaagaaacggagcaa

SEQ ID NO: 2442689 - RNA, 19 nt, Homo sapiens
  misc_RNA (1)...(19): siRNA sense strand
aguaaaagaggcaagaaaa

SEQ ID NO: 2442690 - RNA, 19 nt, Homo sapiens
  misc_RNA (1)...(19): siRNA sense strand
cugggugacgugagagaaa

SEQ ID NO: 2442691 - RNA, 19 nt, Homo sapiens
  misc_RNA (1)...(19): siRNA sense strand
cugcagacuacauuggaaa

SEQ ID NO: 2442692 - RNA, 19 nt, Homo sapiens
  misc_RNA (1)...(19): siRNA sense strand
ugaccuauguggugggcau

SEQ ID NO: 2442693 - RNA, 19 nt, Homo sapiens
  misc_RNA (1)...(19): siRNA sense strand
gaccaaaagggaaaagaaa

SEQ ID NO: 2442694 - RNA, 19 nt, Homo sapiens
  misc_RNA (1)...(19): siRNA sense strand
caggagacaagcaggagaa

SEQ ID NO: 2442695 - RNA, 19 nt, Homo sapiens
  misc_RNA (1)...(19): siRNA sense strand
cugugaagccaguggagau

SEQ ID NO: 2442696 - RNA, 19 nt, Homo sapiens
  misc_RNA (1)...(19): siRNA sense strand
gugaggaggaggaggagga

SEQ ID NO: 2442697 - RNA, 19 nt, Homo sapiens
  misc_RNA (1)...(19): siRNA sense strand
gccagaaauccaaggccaa

SEQ ID NO: 2442698 - RNA, 19 nt, Homo sapiens
  misc_RNA (1)...(19): siRNA sense strand
cgaacugcgcagccagaaa

SEQ ID NO: 2442699 - RNA, 19 nt, Homo sapiens
  misc_RNA (1)...(19): siRNA sense strand
cugcaggccaagugccaaa

SEQ ID NO: 2442700 - RNA, 19 nt, Homo sapiens
  misc_RNA (1)...(19): siRNA sense strand
aagcaagaguggugaggcu

SEQ ID NO: 2442701 - RNA, 19 nt, Homo sapiens
  misc_RNA (1)...(19): siRNA sense strand
acaagauggugaaaggcuu

SEQ ID NO: 2442702 - RNA, 19 nt, Homo sapiens
  misc_RNA (1)...(19): siRNA sense strand
uggacagggagaagaaaga

SEQ ID NO: 2442703 - RNA, 19 nt, Homo sapiens
  misc_RNA (1)...(19): siRNA sense strand
gaagaaaagcagaagcuga

SEQ ID NO: 2442704 - RNA, 19 nt, Homo sapiens
  misc_RNA (1)...(19): siRNA sense strand
ggaaagauugacugcggau

SEQ ID NO: 2442705 - RNA, 19 nt, Homo sapiens
  misc_RNA (1)...(19): siRNA sense strand
ccaaacaagaggaaaccuu

SEQ ID NO: 2442706 - RNA, 19 nt, Homo sapiens
  misc_RNA (1)...(19): siRNA sense strand
uggguauugucguggagaa

SEQ ID NO: 2442707 - RNA, 19 nt, Homo sapiens
  misc_RNA (1)...(19): siRNA sense strand
acuggaaguugcuggccaa

SEQ ID NO: 2442708 - RNA, 19 nt, Homo sapiens
  misc_RNA (1)...(19): siRNA sense strand
aagaaaagcagaagcugaa

SEQ ID NO: 2442709 - RNA, 19 nt, Homo sapiens
  misc_RNA (1)...(19): siRNA sense strand
guggagauagagauugaaa

SEQ ID NO: 2442710 - RNA, 19 nt, Homo sapiens
  misc_RNA (1)...(19): siRNA sense strand
gagaugucacacagaggua

SEQ ID NO: 2442711 - RNA, 19 nt, Homo sapiens
  misc_RNA (1)...(19): siRNA sense strand
ucauugaaaggaaggagaa

SEQ ID NO: 2442712 - RNA, 19 nt, Homo sapiens
  misc_RNA (1)...(19): siRNA sense strand
ggccaagugccaaagggaa

SEQ ID NO: 2442713 - RNA, 19 nt, Homo sapiens
  misc_RNA (1)...(19): siRNA sense strand
ccaaagggaagaggaacaa

SEQ ID NO: 2442714 - RNA, 19 nt, Homo sapiens
  misc_RNA (1)...(19): siRNA sense strand
ucugugagcaggaggaaaa

SEQ ID NO: 2442715 - RNA, 19 nt, Homo sapiens
  misc_RNA (1)...(19): siRNA sense strand
uugaaaggaaggagaagga

SEQ ID NO: 2442716 - RNA, 19 nt, Homo sapiens
  misc_RNA (1)...(19): siRNA sense strand
ggccaaggugacuguuaaa

SEQ ID NO: 2442717 - RNA, 19 nt, Homo sapiens
  misc_RNA (1)...(19): siRNA sense strand
ugaagacagcaaugaagaa

SEQ ID NO: 2442718 - RNA, 19 nt, Homo sapiens
  misc_RNA (1)...(19): siRNA sense strand
agaggaagaaagugaaaau

SEQ ID NO: 2442719 - RNA, 19 nt, Homo sapiens
  misc_RNA (1)...(19): siRNA sense strand
ugaagaacuuagugagccu

SEQ ID NO: 2442720 - RNA, 19 nt, Homo sapiens
  misc_RNA (1)...(19): siRNA sense strand
gagagaaaguacagccuuc

SEQ ID NO: 2442721 - RNA, 19 nt, Homo sapiens
  misc_RNA (1)...(19): siRNA sense strand
gcggucuacuccagggauu

SEQ ID NO: 2442722 - RNA, 19 nt, Homo sapiens
  misc_RNA (1)...(19): siRNA sense strand
gaagaaagcaagaguggug

SEQ ID NO: 2442723 - RNA, 19 nt, Homo sapiens
  misc_RNA (1)...(19): siRNA sense strand
ccggaacgaguuugggaau

SEQ ID NO: 2442724 - RNA, 19 nt, Homo sapiens
  misc_RNA (1)...(19): siRNA sense strand
ccacacagaugcaggaggu

SEQ ID NO: 2442725 - RNA, 19 nt, Homo sapiens
  misc_RNA (1)...(19): siRNA sense strand
ggaaagaggaaaagaggcu

SEQ ID NO: 2442726 - RNA, 19 nt, Homo sapiens
  misc_RNA (1)...(19): siRNA sense strand
aagaagcauagcugguaua

SEQ ID NO: 2442727 - RNA, 19 nt, Homo sapiens
  misc_RNA (1)...(19): siRNA sense strand
cuacauuggaaaggagauu

SEQ ID NO: 2442728 - RNA, 19 nt, Homo sapiens
  misc_RNA (1)...(19): siRNA sense strand
cucgagaugaugaggaauu

SEQ ID NO: 2442729 - RNA, 19 nt, Homo sapiens
  misc_RNA (1)...(19): siRNA sense strand
caaugaagaagaggaagaa

SEQ ID NO: 2442730 - RNA, 19 nt, Homo sapiens
  misc_RNA (1)...(19): siRNA sense strand
cagccagugaacaagauaa

SEQ ID NO: 2442731 - RNA, 19 nt, Homo sapiens
  misc_RNA (1)...(19): siRNA sense strand
gaagcgggcucuagggaac

SEQ ID NO: 2442732 - RNA, 19 nt, Homo sapiens
  misc_RNA (1)...(19): siRNA sense strand
ccagagcaggcgaagacaa

SEQ ID NO: 2442733 - RNA, 19 nt, Homo sapiens
  misc_RNA (1)...(19): siRNA sense strand
agaagaaggagcaaggcaa

SEQ ID NO: 2442734 - RNA, 19 nt, Homo sapiens
  misc_RNA (1)...(19): siRNA sense strand
aggcgguacugcaggccaa

SEQ ID NO: 2442735 - RNA, 19 nt, Homo sapiens
  misc_RNA (1)...(19): siRNA sense strand
ucugggugcucgugggcua

SEQ ID NO: 2442736 - RNA, 19 nt, Homo sapiens
  misc_RNA (1)...(19): siRNA sense strand
gcaucacggugcugggcuu

SEQ ID NO: 2442737 - RNA, 19 nt, Homo sapiens
  misc_RNA (1)...(19): siRNA sense strand
gcguguacauacugggugu

SEQ ID NO: 2442738 - RNA, 19 nt, Homo sapiens
  misc_RNA (1)...(19): siRNA sense strand
ccaaagacgguccugggaa

SEQ ID NO: 2442739 - RNA, 19 nt, Homo sapiens
  misc_RNA (1)...(19): siRNA sense strand
aagucuuccuggugccaua

SEQ ID NO: 2442740 - RNA, 19 nt, Homo sapiens
  misc_RNA (1)...(19): siRNA sense strand
cagaagaaggagcaaggca

SEQ ID NO: 2442741 - RNA, 19 nt, Homo sapiens
  misc_RNA (1)...(19): siRNA sense strand
gcaaguaccuguucagccu

SEQ ID NO: 2442742 - RNA, 19 nt, Homo sapiens
  misc_RNA (1)...(19): siRNA sense strand
caaagacgguccugggaag

SEQ ID NO: 2442743 - RNA, 19 nt, Homo sapiens
  misc_RNA (1)...(19): siRNA sense strand
gggaguuccaggccagcaa

SEQ ID NO: 2442744 - RNA, 19 nt, Homo sapiens
  misc_RNA (1)...(19): siRNA sense strand
ggugaauaccagagaagaa

SEQ ID NO: 2442745 - RNA, 19 nt, Homo sapiens
  misc_RNA (1)...(19): siRNA sense strand
caguaggacuugagggacu

SEQ ID NO: 2442746 - RNA, 19 nt, Homo sapiens
  misc_RNA (1)...(19): siRNA sense strand
ugagaguggaacagguaaa

SEQ ID NO: 2442747 - RNA, 19 nt, Homo sapiens
  misc_RNA (1)...(19): siRNA sense strand
ccagagaagaaguugaaga

SEQ ID NO: 2442748 - RNA, 19 nt, Homo sapiens
  misc_RNA (1)...(19): siRNA sense strand
gggaaucaguacaucgaga

SEQ ID NO: 2442749 - RNA, 19 nt, Homo sapiens
  misc_RNA (1)...(19): siRNA sense strand
cagaaucagggcagagaga

SEQ ID NO: 2442750 - RNA, 19 nt, Homo sapiens
  misc_RNA (1)...(19): siRNA sense strand
cuguugagcagcagggaga

SEQ ID NO: 2442751 - RNA, 19 nt, Homo sapiens
  misc_RNA (1)...(19): siRNA sense strand
cagacauuguggaggggaa

SEQ ID NO: 2442752 - RNA, 19 nt, Homo sapiens
  misc_RNA (1)...(19): siRNA sense strand
agguaucagugcugcagaa

SEQ ID NO: 2442753 - RNA, 19 nt, Homo sapiens
  misc_RNA (1)...(19): siRNA sense strand
gaaucagggcagagagaug

SEQ ID NO: 2442754 - RNA, 19 nt, Homo sapiens
  misc_RNA (1)...(19): siRNA sense strand
ugaagcaugccaagagaau

SEQ ID NO: 2442755 - RNA, 19 nt, Homo sapiens
  misc_RNA (1)...(19): siRNA sense strand
ggaggaaggauguuggcca

SEQ ID NO: 2442756 - RNA, 19 nt, Homo sapiens
  misc_RNA (1)...(19): siRNA sense strand
gcugaaagaaauggcaauu

SEQ ID NO: 2442757 - RNA, 19 nt, Homo sapiens
  misc_RNA (1)...(19): siRNA sense strand
gauuguucuuucagaugua

SEQ ID NO: 2442758 - RNA, 19 nt, Homo sapiens
  misc_RNA (1)...(19): siRNA sense strand
ugauaugcugagaguggaa

SEQ ID NO: 2442759 - RNA, 19 nt, Homo sapiens
  misc_RNA (1)...(19): siRNA sense strand
guucguucuuggagcaaca

SEQ ID NO: 2442760 - RNA, 19 nt, Homo sapiens
  misc_RNA (1)...(19): siRNA sense strand
cagcugaaagaaauggcaa

SEQ ID NO: 2442761 - RNA, 19 nt, Homo sapiens
  misc_RNA (1)...(19): siRNA sense strand
ugagcagagagcagaaauu

SEQ ID NO: 2442762 - RNA, 19 nt, Homo sapiens
  misc_RNA (1)...(19): siRNA sense strand
gaaucaguacaucgagaau

SEQ ID NO: 2442763 - RNA, 19 nt, Homo sapiens
  misc_RNA (1)...(19): siRNA sense strand
cagaugaugcaaagcuuau

SEQ ID NO: 2442764 - RNA, 19 nt, Homo sapiens
  misc_RNA (1)...(19): siRNA sense strand
cauggaagccaaggugaaa

SEQ ID NO: 2442765 - RNA, 19 nt, Homo sapiens
  misc_RNA (1)...(19): siRNA sense strand
ugauaaggucaccaggcua

SEQ ID NO: 2442766 - RNA, 19 nt, Homo sapiens
  misc_RNA (1)...(19): siRNA sense strand
gagccguagccuuuggcaa

SEQ ID NO: 2442767 - RNA, 19 nt, Homo sapiens
  misc_RNA (1)...(19): siRNA sense strand
gcuuuggagacuuuguuaa

SEQ ID NO: 2442768 - RNA, 19 nt, Homo sapiens
  misc_RNA (1)...(19): siRNA sense strand
guugagcagcagggagaaa

SEQ ID NO: 2442769 - RNA, 19 nt, Homo sapiens
  misc_RNA (1)...(19): siRNA sense strand
agagaaucguggugaagcu

SEQ ID NO: 2442770 - RNA, 19 nt, Homo sapiens
  misc_RNA (1)...(19): siRNA sense strand
aagacuuggaggaggcaga

SEQ ID NO: 2442771 - RNA, 19 nt, Homo sapiens
  misc_RNA (1)...(19): siRNA sense strand
ggcuaucgcaaguggcaau

SEQ ID NO: 2442772 - RNA, 19 nt, Homo sapiens
  misc_RNA (1)...(19): siRNA sense strand
ucaaggaggccgugcaacu

SEQ ID NO: 2442773 - RNA, 19 nt, Homo sapiens
  misc_RNA (1)...(19): siRNA sense strand
ccgugcaacuggugaauac

SEQ ID NO: 2442774 - RNA, 19 nt, Homo sapiens
  misc_RNA (1)...(19): siRNA sense strand
ucccuauuccucagagaaa

SEQ ID NO: 2442775 - RNA, 19 nt, Homo sapiens
  misc_RNA (1)...(19): siRNA sense strand
cuucccagcuggucagaga

SEQ ID NO: 2442776 - RNA, 19 nt, Homo sapiens
  misc_RNA (1)...(19): siRNA sense strand
cuguaaugcuuuggagacu

SEQ ID NO: 2442777 - RNA, 19 nt, Homo sapiens
  misc_RNA (1)...(19): siRNA sense strand
acaaagaccuggagggaca

SEQ ID NO: 2442778 - RNA, 19 nt, Homo sapiens
  misc_RNA (1)...(19): siRNA sense strand
cuacaagaacagagggauu

SEQ ID NO: 2442779 - RNA, 19 nt, Homo sapiens
  misc_RNA (1)...(19): siRNA sense strand
ggaaaguaucaacgggaca

SEQ ID NO: 2442780 - RNA, 19 nt, Homo sapiens
  misc_RNA (1)...(19): siRNA sense strand
caauacaagaacuggaaga

SEQ ID NO: 2442781 - RNA, 19 nt, Homo sapiens
  misc_RNA (1)...(19): siRNA sense strand
agagcaacgucuggagaaa

SEQ ID NO: 2442782 - RNA, 19 nt, Homo sapiens
  misc_RNA (1)...(19): siRNA sense strand
agaaauugauaaugccaga

SEQ ID NO: 2442783 - RNA, 19 nt, Homo sapiens
  misc_RNA (1)...(19): siRNA sense strand
gaacaaagaccuggaggga

SEQ ID NO: 2442784 - RNA, 19 nt, Homo sapiens
  misc_RNA (1)...(19): siRNA sense strand
uuagauggcucaaaggcaa

SEQ ID NO: 2442785 - RNA, 19 nt, Homo sapiens
  misc_RNA (1)...(19): siRNA sense strand
caaugugaaacaauggaaa

SEQ ID NO: 2442786 - RNA, 19 nt, Homo sapiens
  misc_RNA (1)...(19): siRNA sense strand
aaggaagaggaaauagaaa

SEQ ID NO: 2442787 - RNA, 19 nt, Homo sapiens
  misc_RNA (1)...(19): siRNA sense strand
acccaaacacaaagaagaa

SEQ ID NO: 2442788 - RNA, 19 nt, Homo sapiens
  misc_RNA (1)...(19): siRNA sense strand
aacugaaggaagaggaaau

SEQ ID NO: 2442789 - RNA, 19 nt, Homo sapiens
  misc_RNA (1)...(19): siRNA sense strand
aaguagaaauucggaacaa

SEQ ID NO: 2442790 - RNA, 19 nt, Homo sapiens
  misc_RNA (1)...(19): siRNA sense strand
aguagaaauucggaacaaa

SEQ ID NO: 2442791 - RNA, 19 nt, Homo sapiens
  misc_RNA (1)...(19): siRNA sense strand
acaaagaagaacuggguac

SEQ ID NO: 2442792 - RNA, 19 nt, Homo sapiens
  misc_RNA (1)...(19): siRNA sense strand
ccguuuauggauugggauu

SEQ ID NO: 2442793 - RNA, 19 nt, Homo sapiens
  misc_RNA (1)...(19): siRNA sense strand
uguuaguagccaagcaaau

SEQ ID NO: 2442794 - RNA, 19 nt, Homo sapiens
  misc_RNA (1)...(19): siRNA sense strand
acaagaacuggaagagaca

SEQ ID NO: 2442795 - RNA, 19 nt, Homo sapiens
  misc_RNA (1)...(19): siRNA sense strand
uggaagagacacugaaacu

SEQ ID NO: 2442796 - RNA, 19 nt, Homo sapiens
  misc_RNA (1)...(19): siRNA sense strand
ggcucaaaggcaauaauaa

SEQ ID NO: 2442797 - RNA, 19 nt, Homo sapiens
  misc_RNA (1)...(19): siRNA sense strand
gcaaacauugggaggcuga

SEQ ID NO: 2442798 - RNA, 19 nt, Homo sapiens
  misc_RNA (1)...(19): siRNA sense strand
cagaauuacgagauaacuu

SEQ ID NO: 2442799 - RNA, 19 nt, Homo sapiens
  misc_RNA (1)...(19): siRNA sense strand
cuaucaagaggaagcagaa

SEQ ID NO: 2442800 - RNA, 19 nt, Homo sapiens
  misc_RNA (1)...(19): siRNA sense strand
cucagaaacuacaggaagu

SEQ ID NO: 2442801 - RNA, 19 nt, Homo sapiens
  misc_RNA (1)...(19): siRNA sense strand
ugaauguguuaguagccaa

SEQ ID NO: 2442802 - RNA, 19 nt, Homo sapiens
  misc_RNA (1)...(19): siRNA sense strand
acacagaacucagagccaa

SEQ ID NO: 2442803 - RNA, 19 nt, Homo sapiens
  misc_RNA (1)...(19): siRNA sense strand
ggaaguagaaauucggaac

SEQ ID NO: 2442804 - RNA, 19 nt, Homo sapiens
  misc_RNA (1)...(19): siRNA sense strand
gaaccaacucagaaugcau

SEQ ID NO: 2442805 - RNA, 19 nt, Homo sapiens
  misc_RNA (1)...(19): siRNA sense strand
ucacaagagaagauggaac

SEQ ID NO: 2442806 - RNA, 19 nt, Homo sapiens
  misc_RNA (1)...(19): siRNA sense strand
cuucagcacucgagcucau

SEQ ID NO: 2442807 - RNA, 19 nt, Homo sapiens
  misc_RNA (1)...(19): siRNA sense strand
gaaaagucagaaugaacaa

SEQ ID NO: 2442808 - RNA, 19 nt, Homo sapiens
  misc_RNA (1)...(19): siRNA sense strand
acugaaggaagaggaaaua

SEQ ID NO: 2442809 - RNA, 19 nt, Homo sapiens
  misc_RNA (1)...(19): siRNA sense strand
gagaaaagucagaaugaac

SEQ ID NO: 2442810 - RNA, 19 nt, Homo sapiens
  misc_RNA (1)...(19): siRNA sense strand
aagucagaaugaacaagaa

SEQ ID NO: 2442811 - RNA, 19 nt, Homo sapiens
  misc_RNA (1)...(19): siRNA sense strand
aggaagaggaaauagaaag

SEQ ID NO: 2442812 - RNA, 19 nt, Homo sapiens
  misc_RNA (1)...(19): siRNA sense strand
ccaaacacaaagaagaacu

SEQ ID NO: 2442813 - RNA, 19 nt, Homo sapiens
  misc_RNA (1)...(19): siRNA sense strand
aggaaguagaaauucggaa

SEQ ID NO: 2442814 - RNA, 19 nt, Homo sapiens
  misc_RNA (1)...(19): siRNA sense strand
uugaagauuucgugcgcua

SEQ ID NO: 2442815 - RNA, 19 nt, Homo sapiens
  misc_RNA (1)...(19): siRNA sense strand
acuuuaagcucuuugggua

SEQ ID NO: 2442816 - RNA, 19 nt, Homo sapiens
  misc_RNA (1)...(19): siRNA sense strand
gcagaaauucagaagcgau

SEQ ID NO: 2442817 - RNA, 19 nt, Homo sapiens
  misc_RNA (1)...(19): siRNA sense strand
cgguuugagccuugguaca

SEQ ID NO: 2442818 - RNA, 19 nt, Homo sapiens
  misc_RNA (1)...(19): siRNA sense strand
cgggcauuaccguguauaa

SEQ ID NO: 2442819 - RNA, 19 nt, Homo sapiens
  misc_RNA (1)...(19): siRNA sense strand
ccugaggaacugaagccaa

SEQ ID NO: 2442820 - RNA, 19 nt, Homo sapiens
  misc_RNA (1)...(19): siRNA sense strand
ccagauguguacagugcca

SEQ ID NO: 2442821 - RNA, 19 nt, Homo sapiens
  misc_RNA (1)...(19): siRNA sense strand
cugugcucccugugagaua

SEQ ID NO: 2442822 - RNA, 19 nt, Homo sapiens
  misc_RNA (1)...(19): siRNA sense strand
agauguguacagugccaaa

SEQ ID NO: 2442823 - RNA, 19 nt, Homo sapiens
  misc_RNA (1)...(19): siRNA sense strand
uguucaugguggcuagcaa

SEQ ID NO: 2442824 - RNA, 19 nt, Homo sapiens
  misc_RNA (1)...(19): siRNA sense strand
cuuaaaagaggcuggcauu

SEQ ID NO: 2442825 - RNA, 19 nt, Homo sapiens
  misc_RNA (1)...(19): siRNA sense strand
ugcacgaccacgagaagaa

SEQ ID NO: 2442826 - RNA, 19 nt, Homo sapiens
  misc_RNA (1)...(19): siRNA sense strand
aggcaagcgccaaggacaa

SEQ ID NO: 2442827 - RNA, 19 nt, Homo sapiens
  misc_RNA (1)...(19): siRNA sense strand
cagcagggcaagagcggua

SEQ ID NO: 2442828 - RNA, 19 nt, Homo sapiens
  misc_RNA (1)...(19): siRNA sense strand
gcaacagcagcgugggcaa

SEQ ID NO: 2442829 - RNA, 19 nt, Homo sapiens
  misc_RNA (1)...(19): siRNA sense strand
aggugcugcugguaggaaa

SEQ ID NO: 2442830 - RNA, 19 nt, Homo sapiens
  misc_RNA (1)...(19): siRNA sense strand
aggacaacauuaacgucaa

SEQ ID NO: 2442831 - RNA, 19 nt, Homo sapiens
  misc_RNA (1)...(19): siRNA sense strand
gaggcaagcgccaaggaca

SEQ ID NO: 2442832 - RNA, 19 nt, Homo sapiens
  misc_RNA (1)...(19): siRNA sense strand
cgcaacgacaagaggauca

SEQ ID NO: 2442833 - RNA, 19 nt, Homo sapiens
  misc_RNA (1)...(19): siRNA sense strand
ccaucuaucgcaacgacaa

SEQ ID NO: 2442834 - RNA, 19 nt, Homo sapiens
  misc_RNA (1)...(19): siRNA sense strand
ugguaggaaacaaguguga

SEQ ID NO: 2442835 - RNA, 19 nt, Homo sapiens
  misc_RNA (1)...(19): siRNA sense strand
ccaaagaagaggagggauc

SEQ ID NO: 2442836 - RNA, 19 nt, Homo sapiens
  misc_RNA (1)...(19): siRNA sense strand
gugcagaauugguggcuga

SEQ ID NO: 2442837 - RNA, 19 nt, Homo sapiens
  misc_RNA (1)...(19): siRNA sense strand
aggaugaggaugaggaaga

SEQ ID NO: 2442838 - RNA, 19 nt, Homo sapiens
  misc_RNA (1)...(19): siRNA sense strand
aagaggaaagagagaagaa

SEQ ID NO: 2442839 - RNA, 19 nt, Homo sapiens
  misc_RNA (1)...(19): siRNA sense strand
ugauacugccaaauggaaa

SEQ ID NO: 2442840 - RNA, 19 nt, Homo sapiens
  misc_RNA (1)...(19): siRNA sense strand
aggaagggaaggaucgaau

SEQ ID NO: 2442841 - RNA, 19 nt, Homo sapiens
  misc_RNA (1)...(19): siRNA sense strand
augaggaagaggaaagaga

SEQ ID NO: 2442842 - RNA, 19 nt, Homo sapiens
  misc_RNA (1)...(19): siRNA sense strand
aggaugaggaagaggaaag

SEQ ID NO: 2442843 - RNA, 19 nt, Homo sapiens
  misc_RNA (1)...(19): siRNA sense strand
agagaagaagccagcagaa

SEQ ID NO: 2442844 - RNA, 19 nt, Homo sapiens
  misc_RNA (1)...(19): siRNA sense strand
auggauugauacugccaaa

SEQ ID NO: 2442845 - RNA, 19 nt, Homo sapiens
  misc_RNA (1)...(19): siRNA sense strand
cagcggucccuguggagaa

SEQ ID NO: 2442846 - RNA, 19 nt, Homo sapiens
  misc_RNA (1)...(19): siRNA sense strand
cagaacaagcagaagaaac

SEQ ID NO: 2442847 - RNA, 19 nt, Homo sapiens
  misc_RNA (1)...(19): siRNA sense strand
ggaaacauuaacuggaacu

SEQ ID NO: 2442848 - RNA, 19 nt, Homo sapiens
  misc_RNA (1)...(19): siRNA sense strand
ugaggaugaggaagaggaa

SEQ ID NO: 2442849 - RNA, 19 nt, Homo sapiens
  misc_RNA (1)...(19): siRNA sense strand
agcagaacaagcagaagaa

SEQ ID NO: 2442850 - RNA, 19 nt, Homo sapiens
  misc_RNA (1)...(19): siRNA sense strand
aggaagaggaaagagagaa

SEQ ID NO: 2442851 - RNA, 19 nt, Homo sapiens
  misc_RNA (1)...(19): siRNA sense strand
agaggaugaggaugaggaa

SEQ ID NO: 2442852 - RNA, 19 nt, Homo sapiens
  misc_RNA (1)...(19): siRNA sense strand
gcgagauccucaagggcaa

SEQ ID NO: 2442853 - RNA, 19 nt, Homo sapiens
  misc_RNA (1)...(19): siRNA sense strand
gaacauggacuuuggagga

SEQ ID NO: 2442854 - RNA, 19 nt, Homo sapiens
  misc_RNA (1)...(19): siRNA sense strand
uacaauagcugaugaggga

SEQ ID NO: 2442855 - RNA, 19 nt, Homo sapiens
  misc_RNA (1)...(19): siRNA sense strand
aaagcuuacauuagagaga

SEQ ID NO: 2442856 - RNA, 19 nt, Homo sapiens
  misc_RNA (1)...(19): siRNA sense strand
agcuuacauuagagagauu

SEQ ID NO: 2442857 - RNA, 19 nt, Homo sapiens
  misc_RNA (1)...(19): siRNA sense strand
gggauaaaguggagcggau

SEQ ID NO: 2442858 - RNA, 19 nt, Homo sapiens
  misc_RNA (1)...(19): siRNA sense strand
gaaauaaggcuguuggaga

SEQ ID NO: 2442859 - RNA, 19 nt, Homo sapiens
  misc_RNA (1)...(19): siRNA sense strand
uggaaugggacgcgagaga

SEQ ID NO: 2442860 - RNA, 19 nt, Homo sapiens
  misc_RNA (1)...(19): siRNA sense strand
gaguaguacaacacagcaa

SEQ ID NO: 2442861 - RNA, 19 nt, Homo sapiens
  misc_RNA (1)...(19): siRNA sense strand
cuggauaacaagggauaaa

SEQ ID NO: 2442862 - RNA, 19 nt, Homo sapiens
  misc_RNA (1)...(19): siRNA sense strand
ucguaaagccgucggacau

SEQ ID NO: 2442863 - RNA, 19 nt, Homo sapiens
  misc_RNA (1)...(19): siRNA sense strand
aguauaugucguagaugua

SEQ ID NO: 2442864 - RNA, 19 nt, Homo sapiens
  misc_RNA (1)...(19): siRNA sense strand
cuggaagacaguuaaacaa

SEQ ID NO: 2442865 - RNA, 19 nt, Homo sapiens
  misc_RNA (1)...(19): siRNA sense strand
cugaaauugaggaugugaa

SEQ ID NO: 2442866 - RNA, 19 nt, Homo sapiens
  misc_RNA (1)...(19): siRNA sense strand
gagagaugcauuuccggaa

SEQ ID NO: 2442867 - RNA, 19 nt, Homo sapiens
  misc_RNA (1)...(19): siRNA sense strand
uuggaagagaggauagauu

SEQ ID NO: 2442868 - RNA, 19 nt, Homo sapiens
  misc_RNA (1)...(19): siRNA sense strand
uggagagaaaguagugaga

SEQ ID NO: 2442869 - RNA, 19 nt, Homo sapiens
  misc_RNA (1)...(19): siRNA sense strand
aaauaaggcuguuggagag

SEQ ID NO: 2442870 - RNA, 19 nt, Homo sapiens
  misc_RNA (1)...(19): siRNA sense strand
uccugaugccaaugggaaa

SEQ ID NO: 2442871 - RNA, 19 nt, Homo sapiens
  misc_RNA (1)...(19): siRNA sense strand
agaaaagacagaagaucaa

SEQ ID NO: 2442872 - RNA, 19 nt, Homo sapiens
  misc_RNA (1)...(19): siRNA sense strand
cgguggggaaagaggaaaa

SEQ ID NO: 2442873 - RNA, 19 nt, Homo sapiens
  misc_RNA (1)...(19): siRNA sense strand
gaaucaagaauauggacca

SEQ ID NO: 2442874 - RNA, 19 nt, Homo sapiens
  misc_RNA (1)...(19): siRNA sense strand
aagaaaagacagaagauca

SEQ ID NO: 2442875 - RNA, 19 nt, Homo sapiens
  misc_RNA (1)...(19): siRNA sense strand
cagcaauacauuagguuuu

SEQ ID NO: 2442876 - RNA, 19 nt, Homo sapiens
  misc_RNA (1)...(19): siRNA sense strand
acuauuacgacaagaacau

SEQ ID NO: 2442877 - RNA, 19 nt, Homo sapiens
  misc_RNA (1)...(19): siRNA sense strand
ggagugacccaguggagca

SEQ ID NO: 2442878 - RNA, 19 nt, Homo sapiens
  misc_RNA (1)...(19): siRNA sense strand
cagcuggacuggagacgga

SEQ ID NO: 2442879 - RNA, 19 nt, Homo sapiens
  misc_RNA (1)...(19): siRNA sense strand
gcaaaugaucaaagaaaac

SEQ ID NO: 2442880 - RNA, 19 nt, Homo sapiens
  misc_RNA (1)...(19): siRNA sense strand
ccgaggaacugcacgccau

SEQ ID NO: 2442881 - RNA, 19 nt, Homo sapiens
  misc_RNA (1)...(19): siRNA sense strand
cuaaaugaccugcaggcua

SEQ ID NO: 2442882 - RNA, 19 nt, Homo sapiens
  misc_RNA (1)...(19): siRNA sense strand
caagaagauuaaagcacca

SEQ ID NO: 2442883 - RNA, 19 nt, Homo sapiens
  misc_RNA (1)...(19): siRNA sense strand
ccuguaaagcagaagagau

SEQ ID NO: 2442884 - RNA, 19 nt, Homo sapiens
  misc_RNA (1)...(19): siRNA sense strand
ggucucaaucucuggaaaa

SEQ ID NO: 2442885 - RNA, 19 nt, Homo sapiens
  misc_RNA (1)...(19): siRNA sense strand
cuuccaaguccaaggaugu

SEQ ID NO: 2442886 - RNA, 19 nt, Homo sapiens
  misc_RNA (1)...(19): siRNA sense strand
guuuaaugggauuguggaa

SEQ ID NO: 2442887 - RNA, 19 nt, Homo sapiens
  misc_RNA (1)...(19): siRNA sense strand
ggugaaaagaauauagaga

SEQ ID NO: 2442888 - RNA, 19 nt, Homo sapiens
  misc_RNA (1)...(19): siRNA sense strand
ugggauuguggaagagaau

SEQ ID NO: 2442889 - RNA, 19 nt, Homo sapiens
  misc_RNA (1)...(19): siRNA sense strand
ucaugagaggcgagcacaa

SEQ ID NO: 2442890 - RNA, 19 nt, Homo sapiens
  misc_RNA (1)...(19): siRNA sense strand
acauggaaagcuaccgaaa

SEQ ID NO: 2442891 - RNA, 19 nt, Homo sapiens
  misc_RNA (1)...(19): siRNA sense strand
guguugguuuaaugggauu

SEQ ID NO: 2442892 - RNA, 19 nt, Homo sapiens
  misc_RNA (1)...(19): siRNA sense strand
auuuggaaguucugguaca

SEQ ID NO: 2442893 - RNA, 19 nt, Homo sapiens
  misc_RNA (1)...(19): siRNA sense strand
aagaauauagagaacguca

SEQ ID NO: 2442894 - RNA, 19 nt, Homo sapiens
  misc_RNA (1)...(19): siRNA sense strand
cggcaaagcuuuagagguc

SEQ ID NO: 2442895 - RNA, 19 nt, Homo sapiens
  misc_RNA (1)...(19): siRNA sense strand
aggcagaaaaugaaggaua

SEQ ID NO: 2442896 - RNA, 19 nt, Homo sapiens
  misc_RNA (1)...(19): siRNA sense strand
uugaaagacuugaagccaa

SEQ ID NO: 2442897 - RNA, 19 nt, Homo sapiens
  misc_RNA (1)...(19): siRNA sense strand
agaaagaacacgucagcga

SEQ ID NO: 2442898 - RNA, 19 nt, Homo sapiens
  misc_RNA (1)...(19): siRNA sense strand
ccaaaguaguugaacccuu

SEQ ID NO: 2442899 - RNA, 19 nt, Homo sapiens
  misc_RNA (1)...(19): siRNA sense strand
ugaaugaaauuaacgcgua

SEQ ID NO: 2442900 - RNA, 19 nt, Homo sapiens
  misc_RNA (1)...(19): siRNA sense strand
aggcagaaacggaauuaca

SEQ ID NO: 2442901 - RNA, 19 nt, Homo sapiens
  misc_RNA (1)...(19): siRNA sense strand
cagagaucacugucagcua

SEQ ID NO: 2442902 - RNA, 19 nt, Homo sapiens
  misc_RNA (1)...(19): siRNA sense strand
gcguaugcugcuacagaga

SEQ ID NO: 2442903 - RNA, 19 nt, Homo sapiens
  misc_RNA (1)...(19): siRNA sense strand
gaaagaacacgucagcgaa

SEQ ID NO: 2442904 - RNA, 19 nt, Homo sapiens
  misc_RNA (1)...(19): siRNA sense strand
gcaauggaugcuagccgaa

SEQ ID NO: 2442905 - RNA, 19 nt, Homo sapiens
  misc_RNA (1)...(19): siRNA sense strand
cggaaaacugccaggcuga

SEQ ID NO: 2442906 - RNA, 19 nt, Homo sapiens
  misc_RNA (1)...(19): siRNA sense strand
gcagaaaaugaaggauaua

SEQ ID NO: 2442907 - RNA, 19 nt, Homo sapiens
  misc_RNA (1)...(19): siRNA sense strand
acauugaugaagaugaaga

SEQ ID NO: 2442908 - RNA, 19 nt, Homo sapiens
  misc_RNA (1)...(19): siRNA sense strand
ccaaauaucuggcugggua

SEQ ID NO: 2442909 - RNA, 19 nt, Homo sapiens
  misc_RNA (1)...(19): siRNA sense strand
aguauuuccucauggccaa

SEQ ID NO: 2442910 - RNA, 19 nt, Homo sapiens
  misc_RNA (1)...(19): siRNA sense strand
cugucuacauugacgaaga

SEQ ID NO: 2442911 - RNA, 19 nt, Homo sapiens
  misc_RNA (1)...(19): siRNA sense strand
ggauugaggccacuggaca

SEQ ID NO: 2442912 - RNA, 19 nt, Homo sapiens
  misc_RNA (1)...(19): siRNA sense strand
ccaaugaaaugaagcacac

SEQ ID NO: 2442913 - RNA, 19 nt, Homo sapiens
  misc_RNA (1)...(19): siRNA sense strand
guacagaauuccucaggcu

SEQ ID NO: 2442914 - RNA, 19 nt, Homo sapiens
  misc_RNA (1)...(19): siRNA sense strand
gggacaucauaucaggcua

SEQ ID NO: 2442915 - RNA, 19 nt, Homo sapiens
  misc_RNA (1)...(19): siRNA sense strand
gggccaagccggacuucaa

SEQ ID NO: 2442916 - RNA, 19 nt, Homo sapiens
  misc_RNA (1)...(19): siRNA sense strand
ggucugaggagauggagga

SEQ ID NO: 2442917 - RNA, 19 nt, Homo sapiens
  misc_RNA (1)...(19): siRNA sense strand
ccgacugcgaugugaguga

SEQ ID NO: 2442918 - RNA, 19 nt, Homo sapiens
  misc_RNA (1)...(19): siRNA sense strand
cuggagucgcuguggguga

SEQ ID NO: 2442919 - RNA, 19 nt, Homo sapiens
  misc_RNA (1)...(19): siRNA sense strand
gcaacaacaggcuggagga

SEQ ID NO: 2442920 - RNA, 19 nt, Homo sapiens
  misc_RNA (1)...(19): siRNA sense strand
gggccaagccggacuucaa

SEQ ID NO: 2442921 - RNA, 19 nt, Homo sapiens
  misc_RNA (1)...(19): siRNA sense strand
ggucugaggagauggagga

SEQ ID NO: 2442922 - RNA, 19 nt, Homo sapiens
  misc_RNA (1)...(19): siRNA sense strand
ccgacugcgaugugaguga

SEQ ID NO: 2442923 - RNA, 19 nt, Homo sapiens
  misc_RNA (1)...(19): siRNA sense strand
cuggagucgcuguggguga

SEQ ID NO: 2442924 - RNA, 19 nt, Homo sapiens
  misc_RNA (1)...(19): siRNA sense strand
gcaacaacaggcuggagga

SEQ ID NO: 2442925 - RNA, 19 nt, Homo sapiens
  misc_RNA (1)...(19): siRNA sense strand
gggccaagccggacuucaa

SEQ ID NO: 2442926 - RNA, 19 nt, Homo sapiens
  misc_RNA (1)...(19): siRNA sense strand
ggucugaggagauggagga

SEQ ID NO: 2442927 - RNA, 19 nt, Homo sapiens
  misc_RNA (1)...(19): siRNA sense strand
ccgacugcgaugugaguga

SEQ ID NO: 2442928 - RNA, 19 nt, Homo sapiens
  misc_RNA (1)...(19): siRNA sense strand
cuggagucgcuguggguga

SEQ ID NO: 2442929 - RNA, 19 nt, Homo sapiens
  misc_RNA (1)...(19): siRNA sense strand
gcaacaacaggcuggagga

SEQ ID NO: 2442930 - RNA, 19 nt, Homo sapiens
  misc_RNA (1)...(19): siRNA sense strand
gggccaagccggacuucaa

SEQ ID NO: 2442931 - RNA, 19 nt, Homo sapiens
  misc_RNA (1)...(19): siRNA sense strand
ggucugaggagauggagga

SEQ ID NO: 2442932 - RNA, 19 nt, Homo sapiens
  misc_RNA (1)...(19): siRNA sense strand
ccgacugcgaugugaguga

SEQ ID NO: 2442933 - RNA, 19 nt, Homo sapiens
  misc_RNA (1)...(19): siRNA sense strand
cuggagucgcuguggguga

SEQ ID NO: 2442934 - RNA, 19 nt, Homo sapiens
  misc_RNA (1)...(19): siRNA sense strand
gcaacaacaggcuggagga

SEQ ID NO: 2442935 - RNA, 19 nt, Homo sapiens
  misc_RNA (1)...(19): siRNA sense strand
gggccaagccggacuucaa

SEQ ID NO: 2442936 - RNA, 19 nt, Homo sapiens
  misc_RNA (1)...(19): siRNA sense strand
ggucugaggagauggagga

SEQ ID NO: 2442937 - RNA, 19 nt, Homo sapiens
  misc_RNA (1)...(19): siRNA sense strand
ccgacugcgaugugaguga

SEQ ID NO: 2442938 - RNA, 19 nt, Homo sapiens
  misc_RNA (1)...(19): siRNA sense strand
cuggagucgcuguggguga

SEQ ID NO: 2442939 - RNA, 19 nt, Homo sapiens
  misc_RNA (1)...(19): siRNA sense strand
gcaacaacaggcuggagga

SEQ ID NO: 2442940 - RNA, 19 nt, Homo sapiens
  misc_RNA (1)...(19): siRNA sense strand
gggccaagccggacuucaa

SEQ ID NO: 2442941 - RNA, 19 nt, Homo sapiens
  misc_RNA (1)...(19): siRNA sense strand
ggucugaggagauggagga

SEQ ID NO: 2442942 - RNA, 19 nt, Homo sapiens
  misc_RNA (1)...(19): siRNA sense strand
ccgacugcgaugugaguga

SEQ ID NO: 2442943 - RNA, 19 nt, Homo sapiens
  misc_RNA (1)...(19): siRNA sense strand
cuggagucgcuguggguga

SEQ ID NO: 2442944 - RNA, 19 nt, Homo sapiens
  misc_RNA (1)...(19): siRNA sense strand
gcaacaacaggcuggagga

SEQ ID NO: 2442945 - RNA, 19 nt, Homo sapiens
  misc_RNA (1)...(19): siRNA sense strand
gggccaagccggacuucaa

SEQ ID NO: 2442946 - RNA, 19 nt, Homo sapiens
  misc_RNA (1)...(19): siRNA sense strand
ggucugaggagauggagga

SEQ ID NO: 2442947 - RNA, 19 nt, Homo sapiens
  misc_RNA (1)...(19): siRNA sense strand
ccgacugcgaugugaguga

SEQ ID NO: 2442948 - RNA, 19 nt, Homo sapiens
  misc_RNA (1)...(19): siRNA sense strand
cuggagucgcuguggguga

SEQ ID NO: 2442949 - RNA, 19 nt, Homo sapiens
  misc_RNA (1)...(19): siRNA sense strand
gcaacaacaggcuggagga

SEQ ID NO: 2442950 - RNA, 19 nt, Homo sapiens
  misc_RNA (1)...(19): siRNA sense strand
gggccaagccggacuucaa

SEQ ID NO: 2442951 - RNA, 19 nt, Homo sapiens
  misc_RNA (1)...(19): siRNA sense strand
ggucugaggagauggagga

SEQ ID NO: 2442952 - RNA, 19 nt, Homo sapiens
  misc_RNA (1)...(19): siRNA sense strand
ccgacugcgaugugaguga

SEQ ID NO: 2442953 - RNA, 19 nt, Homo sapiens
  misc_RNA (1)...(19): siRNA sense strand
cuggagucgcuguggguga

SEQ ID NO: 2442954 - RNA, 19 nt, Homo sapiens
  misc_RNA (1)...(19): siRNA sense strand
gcaacaacaggcuggagga

SEQ ID NO: 2442955 - RNA, 19 nt, Homo sapiens
  misc_RNA (1)...(19): siRNA sense strand
gggaauuagacgacggaca

SEQ ID NO: 2442956 - RNA, 19 nt, Homo sapiens
  misc_RNA (1)...(19): siRNA sense strand
ggaaacaucuaaaggggaa

SEQ ID NO: 2442957 - RNA, 19 nt, Homo sapiens
  misc_RNA (1)...(19): siRNA sense strand
gauuaaugucgcugcuaaa

SEQ ID NO: 2442958 - RNA, 19 nt, Homo sapiens
  misc_RNA (1)...(19): siRNA sense strand
gguucuaguaggaaaggaa

SEQ ID NO: 2442959 - RNA, 19 nt, Homo sapiens
  misc_RNA (1)...(19): siRNA sense strand
gcuacaaagcagaucguau

SEQ ID NO: 2442960 - RNA, 19 nt, Homo sapiens
  misc_RNA (1)...(19): siRNA sense strand
guggaaacaaagacagaau

SEQ ID NO: 2442961 - RNA, 19 nt, Homo sapiens
  misc_RNA (1)...(19): siRNA sense strand
agggagaagccucagauaa

SEQ ID NO: 2442962 - RNA, 19 nt, Homo sapiens
  misc_RNA (1)...(19): siRNA sense strand
acaugacagugaagggaau

SEQ ID NO: 2442963 - RNA, 19 nt, Homo sapiens
  misc_RNA (1)...(19): siRNA sense strand
acauaaaaggugaagacaa

SEQ ID NO: 2442964 - RNA, 19 nt, Homo sapiens
  misc_RNA (1)...(19): siRNA sense strand
caucaaacccagaagucau

SEQ ID NO: 2442965 - RNA, 19 nt, Homo sapiens
  misc_RNA (1)...(19): siRNA sense strand
cggaauugaggaagaacuu

SEQ ID NO: 2442966 - RNA, 19 nt, Homo sapiens
  misc_RNA (1)...(19): siRNA sense strand
gauucauaucacagcauua

SEQ ID NO: 2442967 - RNA, 19 nt, Homo sapiens
  misc_RNA (1)...(19): siRNA sense strand
cuucugaggcacaaacaaa

SEQ ID NO: 2442968 - RNA, 19 nt, Homo sapiens
  misc_RNA (1)...(19): siRNA sense strand
cagcaaaagaacugauaga

SEQ ID NO: 2442969 - RNA, 19 nt, Homo sapiens
  misc_RNA (1)...(19): siRNA sense strand
gcuaaaagaggaaugaaau

SEQ ID NO: 2442970 - RNA, 19 nt, Homo sapiens
  misc_RNA (1)...(19): siRNA sense strand
uggaaugaagggacguuaa

SEQ ID NO: 2442971 - RNA, 19 nt, Homo sapiens
  misc_RNA (1)...(19): siRNA sense strand
guuauugagggaugugaaa

SEQ ID NO: 2442972 - RNA, 19 nt, Homo sapiens
  misc_RNA (1)...(19): siRNA sense strand
acaaagacgcccaaggcuu

SEQ ID NO: 2442973 - RNA, 19 nt, Homo sapiens
  misc_RNA (1)...(19): siRNA sense strand
ggaaaggaaaugaugccau

SEQ ID NO: 2442974 - RNA, 19 nt, Homo sapiens
  misc_RNA (1)...(19): siRNA sense strand
cccagaagucaucaagaua

SEQ ID NO: 2442975 - RNA, 19 nt, Homo sapiens
  misc_RNA (1)...(19): siRNA sense strand
gaacaaaauggcagcccua

SEQ ID NO: 2442976 - RNA, 19 nt, Homo sapiens
  misc_RNA (1)...(19): siRNA sense strand
cuaaaucaagaaagggaga

SEQ ID NO: 2442977 - RNA, 19 nt, Homo sapiens
  misc_RNA (1)...(19): siRNA sense strand
ggacuguuauugagggaug

SEQ ID NO: 2442978 - RNA, 19 nt, Homo sapiens
  misc_RNA (1)...(19): siRNA sense strand
agacaagaauaaagccacu

SEQ ID NO: 2442979 - RNA, 19 nt, Homo sapiens
  misc_RNA (1)...(19): siRNA sense strand
cuguagaaguuggaaugaa

SEQ ID NO: 2442980 - RNA, 19 nt, Homo sapiens
  misc_RNA (1)...(19): siRNA sense strand
ccuacuuccucuaaaucaa

SEQ ID NO: 2442981 - RNA, 19 nt, Homo sapiens
  misc_RNA (1)...(19): siRNA sense strand
agugaagggaauuuggcua

SEQ ID NO: 2442982 - RNA, 19 nt, Homo sapiens
  misc_RNA (1)...(19): siRNA sense strand
gaguggugcuauugcgcuu

SEQ ID NO: 2442983 - RNA, 19 nt, Homo sapiens
  misc_RNA (1)...(19): siRNA sense strand
ugcuaaaagaggaaugaaa

SEQ ID NO: 2442984 - RNA, 19 nt, Homo sapiens
  misc_RNA (1)...(19): siRNA sense strand
aagaaaaggaucagucauu

SEQ ID NO: 2442985 - RNA, 19 nt, Homo sapiens
  misc_RNA (1)...(19): siRNA sense strand
cgaugcuacaugugagaca

SEQ ID NO: 2442986 - RNA, 19 nt, Homo sapiens
  misc_RNA (1)...(19): siRNA sense strand
aagaaagggagaagccuca

SEQ ID NO: 2442987 - RNA, 19 nt, Homo sapiens
  misc_RNA (1)...(19): siRNA sense strand
cggacaguuugaucaggaa

SEQ ID NO: 2442988 - RNA, 19 nt, Homo sapiens
  misc_RNA (1)...(19): siRNA sense strand
guucuaguaggaaaggaaa

SEQ ID NO: 2442989 - RNA, 19 nt, Homo sapiens
  misc_RNA (1)...(19): siRNA sense strand
ugauagcagcccuggaaaa

SEQ ID NO: 2442990 - RNA, 19 nt, Homo sapiens
  misc_RNA (1)...(19): siRNA sense strand
caugauggagauauagaau

SEQ ID NO: 2442991 - RNA, 19 nt, Homo sapiens
  misc_RNA (1)...(19): siRNA sense strand
ccgcaaguggaaacaaaga

SEQ ID NO: 2442992 - RNA, 19 nt, Homo sapiens
  misc_RNA (1)...(19): siRNA sense strand
ggacaguaucaaauggaac

SEQ ID NO: 2442993 - RNA, 19 nt, Homo sapiens
  misc_RNA (1)...(19): siRNA sense strand
gaagacaagaauaaagcca

SEQ ID NO: 2442994 - RNA, 19 nt, Homo sapiens
  misc_RNA (1)...(19): siRNA sense strand
ggcagcacccaguggacaa

SEQ ID NO: 2442995 - RNA, 19 nt, Homo sapiens
  misc_RNA (1)...(19): siRNA sense strand
ggguucagcagcagugaca

SEQ ID NO: 2442996 - RNA, 19 nt, Homo sapiens
  misc_RNA (1)...(19): siRNA sense strand
auauagaaucgaugcuaca

SEQ ID NO: 2442997 - RNA, 19 nt, Homo sapiens
  misc_RNA (1)...(19): siRNA sense strand
aggccaguuauguggaauu

SEQ ID NO: 2442998 - RNA, 19 nt, Homo sapiens
  misc_RNA (1)...(19): siRNA sense strand
aagcaucggauuagacaca

SEQ ID NO: 2442999 - RNA, 19 nt, Homo sapiens
  misc_RNA (1)...(19): siRNA sense strand
aaguggaaacaaagacaga

SEQ ID NO: 2443000 - RNA, 19 nt, Homo sapiens
  misc_RNA (1)...(19): siRNA sense strand
gcugauuggcuggaguuaa

SEQ ID NO: 2443001 - RNA, 19 nt, Homo sapiens
  misc_RNA (1)...(19): siRNA sense strand
ccaccaagugugaggccga

SEQ ID NO: 2443002 - RNA, 19 nt, Homo sapiens
  misc_RNA (1)...(19): siRNA sense strand
ggggcaaacccuacaacua

SEQ ID NO: 2443003 - RNA, 19 nt, Homo sapiens
  misc_RNA (1)...(19): siRNA sense strand
agaaggaagaagaggagaa

SEQ ID NO: 2443004 - RNA, 19 nt, Homo sapiens
  misc_RNA (1)...(19): siRNA sense strand
aggaagaagaggagaagga

SEQ ID NO: 2443005 - RNA, 19 nt, Homo sapiens
  misc_RNA (1)...(19): siRNA sense strand
ggaagaaggaagaagagga

SEQ ID NO: 2443006 - RNA, 19 nt, Homo sapiens
  misc_RNA (1)...(19): siRNA sense strand
gaagaagaggagaaggaga

SEQ ID NO: 2443007 - RNA, 19 nt, Homo sapiens
  misc_RNA (1)...(19): siRNA sense strand
aggaaacagccauugguaa

SEQ ID NO: 2443008 - RNA, 19 nt, Homo sapiens
  misc_RNA (1)...(19): siRNA sense strand
cugaugaggaggaugacaa

SEQ ID NO: 2443009 - RNA, 19 nt, Homo sapiens
  misc_RNA (1)...(19): siRNA sense strand
agaaggagcggguggccua

SEQ ID NO: 2443010 - RNA, 19 nt, Homo sapiens
  misc_RNA (1)...(19): siRNA sense strand
cuuccaacccaaugagcaa

SEQ ID NO: 2443011 - RNA, 19 nt, Homo sapiens
  misc_RNA (1)...(19): siRNA sense strand
gugagaggaagaaggaaga

SEQ ID NO: 2443012 - RNA, 19 nt, Homo sapiens
  misc_RNA (1)...(19): siRNA sense strand
ccagaagguccaagcccaa

SEQ ID NO: 2443013 - RNA, 19 nt, Homo sapiens
  misc_RNA (1)...(19): siRNA sense strand
gaaucaacguggugcccau

SEQ ID NO: 2443014 - RNA, 19 nt, Homo sapiens
  misc_RNA (1)...(19): siRNA sense strand
aagaagaagggcagaaagu

SEQ ID NO: 2443015 - RNA, 19 nt, Homo sapiens
  misc_RNA (1)...(19): siRNA sense strand
uccagaagccagaggaaaa

SEQ ID NO: 2443016 - RNA, 19 nt, Homo sapiens
  misc_RNA (1)...(19): siRNA sense strand
agucugaugaggaggauga

SEQ ID NO: 2443017 - RNA, 19 nt, Homo sapiens
  misc_RNA (1)...(19): siRNA sense strand
gauccagaagccagaggaa

SEQ ID NO: 2443018 - RNA, 19 nt, Homo sapiens
  misc_RNA (1)...(19): siRNA sense strand
aggaugacaaacaggagaa

SEQ ID NO: 2443019 - RNA, 19 nt, Homo sapiens
  misc_RNA (1)...(19): siRNA sense strand
cgugagaagcagagcgaug

SEQ ID NO: 2443020 - RNA, 19 nt, Homo sapiens
  misc_RNA (1)...(19): siRNA sense strand
ccacagaagaagaagcauc

SEQ ID NO: 2443021 - RNA, 19 nt, Homo sapiens
  misc_RNA (1)...(19): siRNA sense strand
ccagcaaaaugcaggaaca

SEQ ID NO: 2443022 - RNA, 19 nt, Homo sapiens
  misc_RNA (1)...(19): siRNA sense strand
acacaugcgcauuggacuu

SEQ ID NO: 2443023 - RNA, 19 nt, Homo sapiens
  misc_RNA (1)...(19): siRNA sense strand
aaguugagauggaggucga

SEQ ID NO: 2443024 - RNA, 19 nt, Homo sapiens
  misc_RNA (1)...(19): siRNA sense strand
gcgaguucaaggaagggaa

SEQ ID NO: 2443025 - RNA, 19 nt, Homo sapiens
  misc_RNA (1)...(19): siRNA sense strand
caggaacgugagaggaaga

SEQ ID NO: 2443026 - RNA, 19 nt, Homo sapiens
  misc_RNA (1)...(19): siRNA sense strand
ugaugaggaggaugacaaa

SEQ ID NO: 2443027 - RNA, 19 nt, Homo sapiens
  misc_RNA (1)...(19): siRNA sense strand
gaagauucaugaagccaca

SEQ ID NO: 2443028 - RNA, 19 nt, Homo sapiens
  misc_RNA (1)...(19): siRNA sense strand
cgugagaggaagaaggaag

SEQ ID NO: 2443029 - RNA, 19 nt, Homo sapiens
  misc_RNA (1)...(19): siRNA sense strand
cagaaagagcagcgcaacu

SEQ ID NO: 2443030 - RNA, 19 nt, Homo sapiens
  misc_RNA (1)...(19): siRNA sense strand
aagaggagaaggagaagga

SEQ ID NO: 2443031 - RNA, 19 nt, Homo sapiens
  misc_RNA (1)...(19): siRNA sense strand
aaguacaagauauggauga

SEQ ID NO: 2443032 - RNA, 19 nt, Homo sapiens
  misc_RNA (1)...(19): siRNA sense strand
gcaaaaugcaggaacacau

SEQ ID NO: 2443033 - RNA, 19 nt, Homo sapiens
  misc_RNA (1)...(19): siRNA sense strand
aggagcagauugaggccau

SEQ ID NO: 2443034 - RNA, 19 nt, Homo sapiens
  misc_RNA (1)...(19): siRNA sense strand
agcuacaguaugaggguau

SEQ ID NO: 2443035 - RNA, 19 nt, Homo sapiens
  misc_RNA (1)...(19): siRNA sense strand
ugcagaaagagcagcgcaa

SEQ ID NO: 2443036 - RNA, 19 nt, Homo sapiens
  misc_RNA (1)...(19): siRNA sense strand
ucaagaaagaggcugaaaa

SEQ ID NO: 2443037 - RNA, 19 nt, Homo sapiens
  misc_RNA (1)...(19): siRNA sense strand
uccaggaacgugagaggaa

SEQ ID NO: 2443038 - RNA, 19 nt, Homo sapiens
  misc_RNA (1)...(19): siRNA sense strand
augcaggauaagacggaau

SEQ ID NO: 2443039 - RNA, 19 nt, Homo sapiens
  misc_RNA (1)...(19): siRNA sense strand
aaguaauccaagagaccau

SEQ ID NO: 2443040 - RNA, 19 nt, Homo sapiens
  misc_RNA (1)...(19): siRNA sense strand
ugguggaaacaguggacuu

SEQ ID NO: 2443041 - RNA, 19 nt, Homo sapiens
  misc_RNA (1)...(19): siRNA sense strand
aggaugacacuaaagagaa

SEQ ID NO: 2443042 - RNA, 19 nt, Homo sapiens
  misc_RNA (1)...(19): siRNA sense strand
uggugaagcugacggcuca

SEQ ID NO: 2443043 - RNA, 19 nt, Homo sapiens
  misc_RNA (1)...(19): siRNA sense strand
augaggaggaugacaaaca

SEQ ID NO: 2443044 - RNA, 19 nt, Homo sapiens
  misc_RNA (1)...(19): siRNA sense strand
ucaaaguccaggugcccaa

SEQ ID NO: 2443045 - RNA, 19 nt, Homo sapiens
  misc_RNA (1)...(19): siRNA sense strand
gugcccaacaugcaggaua

SEQ ID NO: 2443046 - RNA, 19 nt, Homo sapiens
  misc_RNA (1)...(19): siRNA sense strand
gggagagugaggaaguuga

SEQ ID NO: 2443047 - RNA, 19 nt, Homo sapiens
  misc_RNA (1)...(19): siRNA sense strand
cagggaaacagaagcuaca

SEQ ID NO: 2443048 - RNA, 19 nt, Homo sapiens
  misc_RNA (1)...(19): siRNA sense strand
agagcgaugaugaggugua

SEQ ID NO: 2443049 - RNA, 19 nt, Homo sapiens
  misc_RNA (1)...(19): siRNA sense strand
agauugaggccauucacaa

SEQ ID NO: 2443050 - RNA, 19 nt, Homo sapiens
  misc_RNA (1)...(19): siRNA sense strand
augaagaagaagggcagaa

SEQ ID NO: 2443051 - RNA, 19 nt, Homo sapiens
  misc_RNA (1)...(19): siRNA sense strand
ucgacuuggauguggugaa

SEQ ID NO: 2443052 - RNA, 19 nt, Homo sapiens
  misc_RNA (1)...(19): siRNA sense strand
aagauauggaugaggguuc

SEQ ID NO: 2443053 - RNA, 19 nt, Homo sapiens
  misc_RNA (1)...(19): siRNA sense strand
ccaacaacauuaugggcau

SEQ ID NO: 2443054 - RNA, 19 nt, Homo sapiens
  misc_RNA (1)...(19): siRNA sense strand
gcaaacugcugcugcgacu

SEQ ID NO: 2443055 - RNA, 19 nt, Homo sapiens
  misc_RNA (1)...(19): siRNA sense strand
cggcaagcacuacggccaa

SEQ ID NO: 2443056 - RNA, 19 nt, Homo sapiens
  misc_RNA (1)...(19): siRNA sense strand
cguccguuugguagguaaa

SEQ ID NO: 2443057 - RNA, 19 nt, Homo sapiens
  misc_RNA (1)...(19): siRNA sense strand
cggaugagauugaggccca

SEQ ID NO: 2443058 - RNA, 19 nt, Homo sapiens
  misc_RNA (1)...(19): siRNA sense strand
aggaagacuuugaguacca

SEQ ID NO: 2443059 - RNA, 19 nt, Homo sapiens
  misc_RNA (1)...(19): siRNA sense strand
aguccaagcacgagcugaa

SEQ ID NO: 2443060 - RNA, 19 nt, Homo sapiens
  misc_RNA (1)...(19): siRNA sense strand
agcugaaacugcuggagaa

SEQ ID NO: 2443061 - RNA, 19 nt, Homo sapiens
  misc_RNA (1)...(19): siRNA sense strand
gaaaagaggggcuggguca

SEQ ID NO: 2443062 - RNA, 19 nt, Homo sapiens
  misc_RNA (1)...(19): siRNA sense strand
augaguugcuccuggacaa

SEQ ID NO: 2443063 - RNA, 19 nt, Homo sapiens
  misc_RNA (1)...(19): siRNA sense strand
aagaggacguggaggagga

SEQ ID NO: 2443064 - RNA, 19 nt, Homo sapiens
  misc_RNA (1)...(19): siRNA sense strand
uugaagaggacguggagga

SEQ ID NO: 2443065 - RNA, 19 nt, Homo sapiens
  misc_RNA (1)...(19): siRNA sense strand
ucaagaagcgagaggagca

SEQ ID NO: 2443066 - RNA, 19 nt, Homo sapiens
  misc_RNA (1)...(19): siRNA sense strand
agaucaaggccgaggauag

SEQ ID NO: 2443067 - RNA, 19 nt, Homo sapiens
  misc_RNA (1)...(19): siRNA sense strand
ccaagauucaggaagucaa

SEQ ID NO: 2443068 - RNA, 19 nt, Homo sapiens
  misc_RNA (1)...(19): siRNA sense strand
gcuccaaguccaagcacga

SEQ ID NO: 2443069 - RNA, 19 nt, Homo sapiens
  misc_RNA (1)...(19): siRNA sense strand
ggaagaaugccaaagguuc

SEQ ID NO: 2443070 - RNA, 19 nt, Homo sapiens
  misc_RNA (1)...(19): siRNA sense strand
agguggagcgagagcguga

SEQ ID NO: 2443071 - RNA, 19 nt, Homo sapiens
  misc_RNA (1)...(19): siRNA sense strand
cggaaggcagagaggacca

SEQ ID NO: 2443072 - RNA, 19 nt, Homo sapiens
  misc_RNA (1)...(19): siRNA sense strand
gagcugaaacugcuggaga

SEQ ID NO: 2443073 - RNA, 19 nt, Homo sapiens
  misc_RNA (1)...(19): siRNA sense strand
agguguuuguggagcugaa

SEQ ID NO: 2443074 - RNA, 19 nt, Homo sapiens
  misc_RNA (1)...(19): siRNA sense strand
gcucaagaagcgagaggag

SEQ ID NO: 2443075 - RNA, 19 nt, Homo sapiens
  misc_RNA (1)...(19): siRNA sense strand
uggccgugcucuuuggaau

SEQ ID NO: 2443076 - RNA, 19 nt, Homo sapiens
  misc_RNA (1)...(19): siRNA sense strand
gcuacaaccuucaggagag

SEQ ID NO: 2443077 - RNA, 19 nt, Homo sapiens
  misc_RNA (1)...(19): siRNA sense strand
gucaaggagcagcggguga

SEQ ID NO: 2443078 - RNA, 19 nt, Homo sapiens
  misc_RNA (1)...(19): siRNA sense strand
aggguguggacgaguacaa

SEQ ID NO: 2443079 - RNA, 19 nt, Homo sapiens
  misc_RNA (1)...(19): siRNA sense strand
agccaaagaggaagcuaau

SEQ ID NO: 2443080 - RNA, 19 nt, Homo sapiens
  misc_RNA (1)...(19): siRNA sense strand
cgguugaucacaagcccaa

SEQ ID NO: 2443081 - RNA, 19 nt, Homo sapiens
  misc_RNA (1)...(19): siRNA sense strand
aggacgaggacgaggacaa

SEQ ID NO: 2443082 - RNA, 19 nt, Homo sapiens
  misc_RNA (1)...(19): siRNA sense strand
cggagcaagaggaagggaa

SEQ ID NO: 2443083 - RNA, 19 nt, Homo sapiens
  misc_RNA (1)...(19): siRNA sense strand
agugcagagcccagcauaa

SEQ ID NO: 2443084 - RNA, 19 nt, Homo sapiens
  misc_RNA (1)...(19): siRNA sense strand
ggagcaagaggaagggaag

SEQ ID NO: 2443085 - RNA, 19 nt, Homo sapiens
  misc_RNA (1)...(19): siRNA sense strand
gcaucaucuuagugggcau

SEQ ID NO: 2443086 - RNA, 19 nt, Homo sapiens
  misc_RNA (1)...(19): siRNA sense strand
ggguaauaucagcauaauu

SEQ ID NO: 2443087 - RNA, 19 nt, Homo sapiens
  misc_RNA (1)...(19): siRNA sense strand
acucaacugaccagaacaa

SEQ ID NO: 2443088 - RNA, 19 nt, Homo sapiens
  misc_RNA (1)...(19): siRNA sense strand
ucauuuaugugaugcccaa

SEQ ID NO: 2443089 - RNA, 19 nt, Homo sapiens
  misc_RNA (1)...(19): siRNA sense strand
ucuuguguuucuaggaauu

SEQ ID NO: 2443090 - RNA, 19 nt, Homo sapiens
  misc_RNA (1)...(19): siRNA sense strand
auggguaauaucagcauaa

SEQ ID NO: 2443091 - RNA, 19 nt, Homo sapiens
  misc_RNA (1)...(19): siRNA sense strand
ccucaggaacaaggagauu

SEQ ID NO: 2443092 - RNA, 19 nt, Homo sapiens
  misc_RNA (1)...(19): siRNA sense strand
ccggaguauucgagaguau

SEQ ID NO: 2443093 - RNA, 19 nt, Homo sapiens
  misc_RNA (1)...(19): siRNA sense strand
cagaagugauuauagguca

SEQ ID NO: 2443094 - RNA, 19 nt, Homo sapiens
  misc_RNA (1)...(19): siRNA sense strand
gcuggaacagagugagaau

SEQ ID NO: 2443095 - RNA, 19 nt, Homo sapiens
  misc_RNA (1)...(19): siRNA sense strand
ugguggauguccuggagaa

SEQ ID NO: 2443096 - RNA, 19 nt, Homo sapiens
  misc_RNA (1)...(19): siRNA sense strand
gugcaaaugugaagccaac

SEQ ID NO: 2443097 - RNA, 19 nt, Homo sapiens
  misc_RNA (1)...(19): siRNA sense strand
cugucauacccaagcuaua

SEQ ID NO: 2443098 - RNA, 19 nt, Homo sapiens
  misc_RNA (1)...(19): siRNA sense strand
gguggauguccuggagaaa

SEQ ID NO: 2443099 - RNA, 19 nt, Homo sapiens
  misc_RNA (1)...(19): siRNA sense strand
ucuucaacgaggagaccaa

SEQ ID NO: 2443100 - RNA, 19 nt, Homo sapiens
  misc_RNA (1)...(19): siRNA sense strand
ggaccagagaggaagcuca

SEQ ID NO: 2443101 - RNA, 19 nt, Homo sapiens
  misc_RNA (1)...(19): siRNA sense strand
acacuaugcccuuugggaa

SEQ ID NO: 2443102 - RNA, 19 nt, Homo sapiens
  misc_RNA (1)...(19): siRNA sense strand
agaccaagauugaggugcu

SEQ ID NO: 2443103 - RNA, 19 nt, Homo sapiens
  misc_RNA (1)...(19): siRNA sense strand
cggugaaagcgaggagaca

SEQ ID NO: 2443104 - RNA, 19 nt, Homo sapiens
  misc_RNA (1)...(19): siRNA sense strand
cccuggaaauuaaagacaa

SEQ ID NO: 2443105 - RNA, 19 nt, Homo sapiens
  misc_RNA (1)...(19): siRNA sense strand
agauugaggugcuggugga

SEQ ID NO: 2443106 - RNA, 19 nt, Homo sapiens
  misc_RNA (1)...(19): siRNA sense strand
aaacagaacuggacguggu

SEQ ID NO: 2443107 - RNA, 19 nt, Homo sapiens
  misc_RNA (1)...(19): siRNA sense strand
ugaccguaauaguggcuga

SEQ ID NO: 2443108 - RNA, 19 nt, Homo sapiens
  misc_RNA (1)...(19): siRNA sense strand
ccucaagauauuggucaua

SEQ ID NO: 2443109 - RNA, 19 nt, Homo sapiens
  misc_RNA (1)...(19): siRNA sense strand
guacggaacagaagcggaa

SEQ ID NO: 2443110 - RNA, 19 nt, Homo sapiens
  misc_RNA (1)...(19): siRNA sense strand
cguuguggcgcgagagaga

SEQ ID NO: 2443111 - RNA, 19 nt, Homo sapiens
  misc_RNA (1)...(19): siRNA sense strand
aggaagugaaugaugagaa

SEQ ID NO: 2443112 - RNA, 19 nt, Homo sapiens
  misc_RNA (1)...(19): siRNA sense strand
acaucgaggaagugaauga

SEQ ID NO: 2443113 - RNA, 19 nt, Homo sapiens
  misc_RNA (1)...(19): siRNA sense strand
cggcgaggacaucgaggaa

SEQ ID NO: 2443114 - RNA, 19 nt, Homo sapiens
  misc_RNA (1)...(19): siRNA sense strand
cgaccaagaccgugagggu

SEQ ID NO: 2443115 - RNA, 19 nt, Homo sapiens
  misc_RNA (1)...(19): siRNA sense strand
gaugagaaacuuaccguga

SEQ ID NO: 2443116 - RNA, 19 nt, Homo sapiens
  misc_RNA (1)...(19): siRNA sense strand
uuucagaacagaagagcca

SEQ ID NO: 2443117 - RNA, 19 nt, Homo sapiens
  misc_RNA (1)...(19): siRNA sense strand
ccacagugauauuggcuac

SEQ ID NO: 2443118 - RNA, 19 nt, Homo sapiens
  misc_RNA (1)...(19): siRNA sense strand
aagugaaugaugagaaacu

SEQ ID NO: 2443119 - RNA, 19 nt, Homo sapiens
  misc_RNA (1)...(19): siRNA sense strand
aaacaacguuggcacggaa

SEQ ID NO: 2443120 - RNA, 19 nt, Homo sapiens
  misc_RNA (1)...(19): siRNA sense strand
uggcagucggcgaggacau

SEQ ID NO: 2443121 - RNA, 19 nt, Homo sapiens
  misc_RNA (1)...(19): siRNA sense strand
gccacaaaccgcugaggga

SEQ ID NO: 2443122 - RNA, 19 nt, Homo sapiens
  misc_RNA (1)...(19): siRNA sense strand
augaaagaugagagugcaa

SEQ ID NO: 2443123 - RNA, 19 nt, Homo sapiens
  misc_RNA (1)...(19): siRNA sense strand
aauaaaacuuugacggaca

SEQ ID NO: 2443124 - RNA, 19 nt, Homo sapiens
  misc_RNA (1)...(19): siRNA sense strand
guguaaaauagcugaguca

SEQ ID NO: 2443125 - RNA, 19 nt, Homo sapiens
  misc_RNA (1)...(19): siRNA sense strand
ccugaaagucccagauuuu

SEQ ID NO: 2443126 - RNA, 19 nt, Homo sapiens
  misc_RNA (1)...(19): siRNA sense strand
uggcaggacuuuugaggau

SEQ ID NO: 2443127 - RNA, 19 nt, Homo sapiens
  misc_RNA (1)...(19): siRNA sense strand
caucaaugcuccugagacg

SEQ ID NO: 2443128 - RNA, 19 nt, Homo sapiens
  misc_RNA (1)...(19): siRNA sense strand
gggaagaaggugaaggaga

SEQ ID NO: 2443129 - RNA, 19 nt, Homo sapiens
  misc_RNA (1)...(19): siRNA sense strand
ccucccaagaagaagaaua

SEQ ID NO: 2443130 - RNA, 19 nt, Homo sapiens
  misc_RNA (1)...(19): siRNA sense strand
aagaauaagcacaagcaca

SEQ ID NO: 2443131 - RNA, 19 nt, Homo sapiens
  misc_RNA (1)...(19): siRNA sense strand
aagaagaagaauaagcaca

SEQ ID NO: 2443132 - RNA, 19 nt, Homo sapiens
  misc_RNA (1)...(19): siRNA sense strand
uaauaaauucugugggaag

SEQ ID NO: 2443133 - RNA, 19 nt, Homo sapiens
  misc_RNA (1)...(19): siRNA sense strand
aagcacaaacagagccgua

SEQ ID NO: 2443134 - RNA, 19 nt, Homo sapiens
  misc_RNA (1)...(19): siRNA sense strand
gcacagagcugacaggcag

SEQ ID NO: 2443135 - RNA, 19 nt, Homo sapiens
  misc_RNA (1)...(19): siRNA sense strand
aaggugaaggagaagcuaa

SEQ ID NO: 2443136 - RNA, 19 nt, Homo sapiens
  misc_RNA (1)...(19): siRNA sense strand
cugagugggcagaggauaa

SEQ ID NO: 2443137 - RNA, 19 nt, Homo sapiens
  misc_RNA (1)...(19): siRNA sense strand
uggaauugcuucaggcaga

SEQ ID NO: 2443138 - RNA, 19 nt, Homo sapiens
  misc_RNA (1)...(19): siRNA sense strand
acauaugaguugguggaaa

SEQ ID NO: 2443139 - RNA, 19 nt, Homo sapiens
  misc_RNA (1)...(19): siRNA sense strand
ggggagaugugaagagaca

SEQ ID NO: 2443140 - RNA, 19 nt, Homo sapiens
  misc_RNA (1)...(19): siRNA sense strand
ucucagaggagcaguggaa

SEQ ID NO: 2443141 - RNA, 19 nt, Homo sapiens
  misc_RNA (1)...(19): siRNA sense strand
augaaggcuuugaaggcaa

SEQ ID NO: 2443142 - RNA, 19 nt, Homo sapiens
  misc_RNA (1)...(19): siRNA sense strand
ccacaggaaaugaagacau

SEQ ID NO: 2443143 - RNA, 19 nt, Homo sapiens
  misc_RNA (1)...(19): siRNA sense strand
gcugaaaagcccugaugaa

SEQ ID NO: 2443144 - RNA, 19 nt, Homo sapiens
  misc_RNA (1)...(19): siRNA sense strand
ggcaaaucucuuuaugaaa

SEQ ID NO: 2443145 - RNA, 19 nt, Homo sapiens
  misc_RNA (1)...(19): siRNA sense strand
ucacagugucuaugaaaca

SEQ ID NO: 2443146 - RNA, 19 nt, Homo sapiens
  misc_RNA (1)...(19): siRNA sense strand
uauugauccauuaggguua

SEQ ID NO: 2443147 - RNA, 19 nt, Homo sapiens
  misc_RNA (1)...(19): siRNA sense strand
ugauguacagcuugguaua

SEQ ID NO: 2443148 - RNA, 19 nt, Homo sapiens
  misc_RNA (1)...(19): siRNA sense strand
ugguauacaaccuaacaaa

SEQ ID NO: 2443149 - RNA, 19 nt, Homo sapiens
  misc_RNA (1)...(19): siRNA sense strand
ggauaagcaaauugggauc

SEQ ID NO: 2443150 - RNA, 19 nt, Homo sapiens
  misc_RNA (1)...(19): siRNA sense strand
gagcuuuggaacacugaaa

SEQ ID NO: 2443151 - RNA, 19 nt, Homo sapiens
  misc_RNA (1)...(19): siRNA sense strand
agggaugguguuugagcua

SEQ ID NO: 2443152 - RNA, 19 nt, Homo sapiens
  misc_RNA (1)...(19): siRNA sense strand
gcuuccaaguucagcgaga

SEQ ID NO: 2443153 - RNA, 19 nt, Homo sapiens
  misc_RNA (1)...(19): siRNA sense strand
caggaaaugaagacauaca

SEQ ID NO: 2443154 - RNA, 19 nt, Homo sapiens
  misc_RNA (1)...(19): siRNA sense strand
caaacaaauucagcggcua

SEQ ID NO: 2443155 - RNA, 19 nt, Homo sapiens
  misc_RNA (1)...(19): siRNA sense strand
ugugaggagcuuuggaaca

SEQ ID NO: 2443156 - RNA, 19 nt, Homo sapiens
  misc_RNA (1)...(19): siRNA sense strand
ugacaaaagcaacccaaua

SEQ ID NO: 2443157 - RNA, 19 nt, Homo sapiens
  misc_RNA (1)...(19): siRNA sense strand
aaacauaugaguuggugga

SEQ ID NO: 2443158 - RNA, 19 nt, Homo sapiens
  misc_RNA (1)...(19): siRNA sense strand
uggaaagagcauuuauuga

SEQ ID NO: 2443159 - RNA, 19 nt, Homo sapiens
  misc_RNA (1)...(19): siRNA sense strand
cugggaugcagaagaauuu

SEQ ID NO: 2443160 - RNA, 19 nt, Homo sapiens
  misc_RNA (1)...(19): siRNA sense strand
aggauaagcaaauugggau

SEQ ID NO: 2443161 - RNA, 19 nt, Homo sapiens
  misc_RNA (1)...(19): siRNA sense strand
augaaacauccacaggaaa

SEQ ID NO: 2443162 - RNA, 19 nt, Homo sapiens
  misc_RNA (1)...(19): siRNA sense strand
agacaagaucagaggaaaa

SEQ ID NO: 2443163 - RNA, 19 nt, Homo sapiens
  misc_RNA (1)...(19): siRNA sense strand
augaagacuuagacaagau

SEQ ID NO: 2443164 - RNA, 19 nt, Homo sapiens
  misc_RNA (1)...(19): siRNA sense strand
acugagaaggacagcagaa

SEQ ID NO: 2443165 - RNA, 19 nt, Homo sapiens
  misc_RNA (1)...(19): siRNA sense strand
uuagacaagaucagaggaa

SEQ ID NO: 2443166 - RNA, 19 nt, Homo sapiens
  misc_RNA (1)...(19): siRNA sense strand
cugagaaggacagcagaaa

SEQ ID NO: 2443167 - RNA, 19 nt, Homo sapiens
  misc_RNA (1)...(19): siRNA sense strand
cgauaaacuccaugaagac

SEQ ID NO: 2443168 - RNA, 19 nt, Homo sapiens
  misc_RNA (1)...(19): siRNA sense strand
gugaaaaggagcagguaga

SEQ ID NO: 2443169 - RNA, 19 nt, Homo sapiens
  misc_RNA (1)...(19): siRNA sense strand
aggaaauuguugagcgugu

SEQ ID NO: 2443170 - RNA, 19 nt, Homo sapiens
  misc_RNA (1)...(19): siRNA sense strand
ccuaugaauccaacacaaa

SEQ ID NO: 2443171 - RNA, 19 nt, Homo sapiens
  misc_RNA (1)...(19): siRNA sense strand
gggaccugcuggaagggaa

SEQ ID NO: 2443172 - RNA, 19 nt, Homo sapiens
  misc_RNA (1)...(19): siRNA sense strand
augcaaacgguguucaaua

SEQ ID NO: 2443173 - RNA, 19 nt, Homo sapiens
  misc_RNA (1)...(19): siRNA sense strand
acaaauugggagaugauga

SEQ ID NO: 2443174 - RNA, 19 nt, Homo sapiens
  misc_RNA (1)...(19): siRNA sense strand
agaccagacuacagcauca

SEQ ID NO: 2443175 - RNA, 19 nt, Homo sapiens
  misc_RNA (1)...(19): siRNA sense strand
gaacaaaggggaaaggcuu

SEQ ID NO: 2443176 - RNA, 19 nt, Homo sapiens
  misc_RNA (1)...(19): siRNA sense strand
gcagcuuaugagagaagaa

SEQ ID NO: 2443177 - RNA, 19 nt, Homo sapiens
  misc_RNA (1)...(19): siRNA sense strand
agaagaguacacugagcaa

SEQ ID NO: 2443178 - RNA, 19 nt, Homo sapiens
  misc_RNA (1)...(19): siRNA sense strand
gggauggauaucagcagaa

SEQ ID NO: 2443179 - RNA, 19 nt, Homo sapiens
  misc_RNA (1)...(19): siRNA sense strand
gguugaaugaacaguauga

SEQ ID NO: 2443180 - RNA, 19 nt, Homo sapiens
  misc_RNA (1)...(19): siRNA sense strand
cugcuggaagggaaggaaa

SEQ ID NO: 2443181 - RNA, 19 nt, Homo sapiens
  misc_RNA (1)...(19): siRNA sense strand
ccaggaagucacaaauaau

SEQ ID NO: 2443182 - RNA, 19 nt, Homo sapiens
  misc_RNA (1)...(19): siRNA sense strand
caauauuguccgaagagga

SEQ ID NO: 2443183 - RNA, 19 nt, Homo sapiens
  misc_RNA (1)...(19): siRNA sense strand
gcuugagguugaaugaaca

SEQ ID NO: 2443184 - RNA, 19 nt, Homo sapiens
  misc_RNA (1)...(19): siRNA sense strand
aaacgguugaggugguaaa

SEQ ID NO: 2443185 - RNA, 19 nt, Homo sapiens
  misc_RNA (1)...(19): siRNA sense strand
aguuauaaccagagcuuuu

SEQ ID NO: 2443186 - RNA, 19 nt, Homo sapiens
  misc_RNA (1)...(19): siRNA sense strand
acgaaugaacaaaggggaa

SEQ ID NO: 2443187 - RNA, 19 nt, Homo sapiens
  misc_RNA (1)...(19): siRNA sense strand
cgaaugaacaaaggggaaa

SEQ ID NO: 2443188 - RNA, 19 nt, Homo sapiens
  misc_RNA (1)...(19): siRNA sense strand
caguggaaucaauguaaau

SEQ ID NO: 2443189 - RNA, 19 nt, Homo sapiens
  misc_RNA (1)...(19): siRNA sense strand
acaaacagagcuucagcaa

SEQ ID NO: 2443190 - RNA, 19 nt, Homo sapiens
  misc_RNA (1)...(19): siRNA sense strand
aguagaacaaacagagcuu

SEQ ID NO: 2443191 - RNA, 19 nt, Homo sapiens
  misc_RNA (1)...(19): siRNA sense strand
gugcuagaggcuugaugaa

SEQ ID NO: 2443192 - RNA, 19 nt, Homo sapiens
  misc_RNA (1)...(19): siRNA sense strand
gccuaugaauccaacacaa

SEQ ID NO: 2443193 - RNA, 19 nt, Homo sapiens
  misc_RNA (1)...(19): siRNA sense strand
caauagucguggugugucu

SEQ ID NO: 2443194 - RNA, 19 nt, Homo sapiens
  misc_RNA (1)...(19): siRNA sense strand
uggauucagaggaggauau

SEQ ID NO: 2443195 - RNA, 19 nt, Homo sapiens
  misc_RNA (1)...(19): siRNA sense strand
gggacaugagcuugagguu

SEQ ID NO: 2443196 - RNA, 19 nt, Homo sapiens
  misc_RNA (1)...(19): siRNA sense strand
gaaugggcugugugaggaa

SEQ ID NO: 2443197 - RNA, 19 nt, Homo sapiens
  misc_RNA (1)...(19): siRNA sense strand
cgacaagaaacuucggaac

SEQ ID NO: 2443198 - RNA, 19 nt, Homo sapiens
  misc_RNA (1)...(19): siRNA sense strand
caauguaaaugcagcucca

SEQ ID NO: 2443199 - RNA, 19 nt, Homo sapiens
  misc_RNA (1)...(19): siRNA sense strand
aaagaauuacagaggaguu

SEQ ID NO: 2443200 - RNA, 19 nt, Homo sapiens
  misc_RNA (1)...(19): siRNA sense strand
ccaccuauaaaguucuaaa

SEQ ID NO: 2443201 - RNA, 19 nt, Homo sapiens
  misc_RNA (1)...(19): siRNA sense strand
gugagaagacagcgaguac

SEQ ID NO: 2443202 - RNA, 19 nt, Homo sapiens
  misc_RNA (1)...(19): siRNA sense strand
uguacaaccagaagcgaca

SEQ ID NO: 2443203 - RNA, 19 nt, Homo sapiens
  misc_RNA (1)...(19): siRNA sense strand
caauggauucagaggagga

SEQ ID NO: 2443204 - RNA, 19 nt, Homo sapiens
  misc_RNA (1)...(19): siRNA sense strand
uguuaaugaaccagaaacu

SEQ ID NO: 2443205 - RNA, 19 nt, Homo sapiens
  misc_RNA (1)...(19): siRNA sense strand
agaccgaggccaugaagca

SEQ ID NO: 2443206 - RNA, 19 nt, Homo sapiens
  misc_RNA (1)...(19): siRNA sense strand
ggacaguugaaacgguuga

SEQ ID NO: 2443207 - RNA, 19 nt, Homo sapiens
  misc_RNA (1)...(19): siRNA sense strand
ugagagaagaagcugaaca

SEQ ID NO: 2443208 - RNA, 19 nt, Homo sapiens
  misc_RNA (1)...(19): siRNA sense strand
aaaggaaauuguugagcgu

SEQ ID NO: 2443209 - RNA, 19 nt, Homo sapiens
  misc_RNA (1)...(19): siRNA sense strand
uucggaaccuggagaagaa

SEQ ID NO: 2443210 - RNA, 19 nt, Homo sapiens
  misc_RNA (1)...(19): siRNA sense strand
augauuaccaggaacgaau

SEQ ID NO: 2443211 - RNA, 19 nt, Homo sapiens
  misc_RNA (1)...(19): siRNA sense strand
ccaguuauaaccagagcuu

SEQ ID NO: 2443212 - RNA, 19 nt, Homo sapiens
  misc_RNA (1)...(19): siRNA sense strand
ucaccaaguagaacaaaca

SEQ ID NO: 2443213 - RNA, 19 nt, Homo sapiens
  misc_RNA (1)...(19): siRNA sense strand
uuucauggcacuaagucaa

SEQ ID NO: 2443214 - RNA, 19 nt, Homo sapiens
  misc_RNA (1)...(19): siRNA sense strand
agacaguucauggcagaaa

SEQ ID NO: 2443215 - RNA, 19 nt, Homo sapiens
  misc_RNA (1)...(19): siRNA sense strand
caaaagaauuacagaggag

SEQ ID NO: 2443216 - RNA, 19 nt, Homo sapiens
  misc_RNA (1)...(19): siRNA sense strand
agguuugaauggagugcca

SEQ ID NO: 2443217 - RNA, 19 nt, Homo sapiens
  misc_RNA (1)...(19): siRNA sense strand
gggugaucgacaagaaacu

SEQ ID NO: 2443218 - RNA, 19 nt, Homo sapiens
  misc_RNA (1)...(19): siRNA sense strand
auagacaguucauggcaga

SEQ ID NO: 2443219 - RNA, 19 nt, Homo sapiens
  misc_RNA (1)...(19): siRNA sense strand
gugaaaaggagcagguaga

SEQ ID NO: 2443220 - RNA, 19 nt, Homo sapiens
  misc_RNA (1)...(19): siRNA sense strand
aggaaauuguugagcgugu

SEQ ID NO: 2443221 - RNA, 19 nt, Homo sapiens
  misc_RNA (1)...(19): siRNA sense strand
ccuaugaauccaacacaaa

SEQ ID NO: 2443222 - RNA, 19 nt, Homo sapiens
  misc_RNA (1)...(19): siRNA sense strand
gggaccugcuggaagggaa

SEQ ID NO: 2443223 - RNA, 19 nt, Homo sapiens
  misc_RNA (1)...(19): siRNA sense strand
augcaaacgguguucaaua

SEQ ID NO: 2443224 - RNA, 19 nt, Homo sapiens
  misc_RNA (1)...(19): siRNA sense strand
acaaauugggagaugauga

SEQ ID NO: 2443225 - RNA, 19 nt, Homo sapiens
  misc_RNA (1)...(19): siRNA sense strand
agaccagacuacagcauca

SEQ ID NO: 2443226 - RNA, 19 nt, Homo sapiens
  misc_RNA (1)...(19): siRNA sense strand
gaacaaaggggaaaggcuu

SEQ ID NO: 2443227 - RNA, 19 nt, Homo sapiens
  misc_RNA (1)...(19): siRNA sense strand
gcagcuuaugagagaagaa

SEQ ID NO: 2443228 - RNA, 19 nt, Homo sapiens
  misc_RNA (1)...(19): siRNA sense strand
agaagaguacacugagcaa

SEQ ID NO: 2443229 - RNA, 19 nt, Homo sapiens
  misc_RNA (1)...(19): siRNA sense strand
gggauggauaucagcagaa

SEQ ID NO: 2443230 - RNA, 19 nt, Homo sapiens
  misc_RNA (1)...(19): siRNA sense strand
gguugaaugaacaguauga

SEQ ID NO: 2443231 - RNA, 19 nt, Homo sapiens
  misc_RNA (1)...(19): siRNA sense strand
cugcuggaagggaaggaaa

SEQ ID NO: 2443232 - RNA, 19 nt, Homo sapiens
  misc_RNA (1)...(19): siRNA sense strand
ccaggaagucacaaauaau

SEQ ID NO: 2443233 - RNA, 19 nt, Homo sapiens
  misc_RNA (1)...(19): siRNA sense strand
caauauuguccgaagagga

SEQ ID NO: 2443234 - RNA, 19 nt, Homo sapiens
  misc_RNA (1)...(19): siRNA sense strand
gcuugagguugaaugaaca

SEQ ID NO: 2443235 - RNA, 19 nt, Homo sapiens
  misc_RNA (1)...(19): siRNA sense strand
aaacgguugaggugguaaa

SEQ ID NO: 2443236 - RNA, 19 nt, Homo sapiens
  misc_RNA (1)...(19): siRNA sense strand
aguuauaaccagagcuuuu

SEQ ID NO: 2443237 - RNA, 19 nt, Homo sapiens
  misc_RNA (1)...(19): siRNA sense strand
acgaaugaacaaaggggaa

SEQ ID NO: 2443238 - RNA, 19 nt, Homo sapiens
  misc_RNA (1)...(19): siRNA sense strand
cgaaugaacaaaggggaaa

SEQ ID NO: 2443239 - RNA, 19 nt, Homo sapiens
  misc_RNA (1)...(19): siRNA sense strand
caguggaaucaauguaaau

SEQ ID NO: 2443240 - RNA, 19 nt, Homo sapiens
  misc_RNA (1)...(19): siRNA sense strand
acaaacagagcuucagcaa

SEQ ID NO: 2443241 - RNA, 19 nt, Homo sapiens
  misc_RNA (1)...(19): siRNA sense strand
aguagaacaaacagagcuu

SEQ ID NO: 2443242 - RNA, 19 nt, Homo sapiens
  misc_RNA (1)...(19): siRNA sense strand
gugcuagaggcuugaugaa

SEQ ID NO: 2443243 - RNA, 19 nt, Homo sapiens
  misc_RNA (1)...(19): siRNA sense strand
gccuaugaauccaacacaa

SEQ ID NO: 2443244 - RNA, 19 nt, Homo sapiens
  misc_RNA (1)...(19): siRNA sense strand
caauagucguggugugucu

SEQ ID NO: 2443245 - RNA, 19 nt, Homo sapiens
  misc_RNA (1)...(19): siRNA sense strand
uggauucagaggaggauau

SEQ ID NO: 2443246 - RNA, 19 nt, Homo sapiens
  misc_RNA (1)...(19): siRNA sense strand
gggacaugagcuugagguu

SEQ ID NO: 2443247 - RNA, 19 nt, Homo sapiens
  misc_RNA (1)...(19): siRNA sense strand
gaaugggcugugugaggaa

SEQ ID NO: 2443248 - RNA, 19 nt, Homo sapiens
  misc_RNA (1)...(19): siRNA sense strand
cgacaagaaacuucggaac

SEQ ID NO: 2443249 - RNA, 19 nt, Homo sapiens
  misc_RNA (1)...(19): siRNA sense strand
caauguaaaugcagcucca

SEQ ID NO: 2443250 - RNA, 19 nt, Homo sapiens
  misc_RNA (1)...(19): siRNA sense strand
aaagaauuacagaggaguu

SEQ ID NO: 2443251 - RNA, 19 nt, Homo sapiens
  misc_RNA (1)...(19): siRNA sense strand
ccaccuauaaaguucuaaa

SEQ ID NO: 2443252 - RNA, 19 nt, Homo sapiens
  misc_RNA (1)...(19): siRNA sense strand
gugagaagacagcgaguac

SEQ ID NO: 2443253 - RNA, 19 nt, Homo sapiens
  misc_RNA (1)...(19): siRNA sense strand
uguacaaccagaagcgaca

SEQ ID NO: 2443254 - RNA, 19 nt, Homo sapiens
  misc_RNA (1)...(19): siRNA sense strand
caauggauucagaggagga

SEQ ID NO: 2443255 - RNA, 19 nt, Homo sapiens
  misc_RNA (1)...(19): siRNA sense strand
uguuaaugaaccagaaacu

SEQ ID NO: 2443256 - RNA, 19 nt, Homo sapiens
  misc_RNA (1)...(19): siRNA sense strand
agaccgaggccaugaagca

SEQ ID NO: 2443257 - RNA, 19 nt, Homo sapiens
  misc_RNA (1)...(19): siRNA sense strand
ggacaguugaaacgguuga

SEQ ID NO: 2443258 - RNA, 19 nt, Homo sapiens
  misc_RNA (1)...(19): siRNA sense strand
ugagagaagaagcugaaca

SEQ ID NO: 2443259 - RNA, 19 nt, Homo sapiens
  misc_RNA (1)...(19): siRNA sense strand
aaaggaaauuguugagcgu

SEQ ID NO: 2443260 - RNA, 19 nt, Homo sapiens
  misc_RNA (1)...(19): siRNA sense strand
uucggaaccuggagaagaa

SEQ ID NO: 2443261 - RNA, 19 nt, Homo sapiens
  misc_RNA (1)...(19): siRNA sense strand
augauuaccaggaacgaau

SEQ ID NO: 2443262 - RNA, 19 nt, Homo sapiens
  misc_RNA (1)...(19): siRNA sense strand
ccaguuauaaccagagcuu

SEQ ID NO: 2443263 - RNA, 19 nt, Homo sapiens
  misc_RNA (1)...(19): siRNA sense strand
ucaccaaguagaacaaaca

SEQ ID NO: 2443264 - RNA, 19 nt, Homo sapiens
  misc_RNA (1)...(19): siRNA sense strand
uuucauggcacuaagucaa

SEQ ID NO: 2443265 - RNA, 19 nt, Homo sapiens
  misc_RNA (1)...(19): siRNA sense strand
agacaguucauggcagaaa

SEQ ID NO: 2443266 - RNA, 19 nt, Homo sapiens
  misc_RNA (1)...(19): siRNA sense strand
caaaagaauuacagaggag

SEQ ID NO: 2443267 - RNA, 19 nt, Homo sapiens
  misc_RNA (1)...(19): siRNA sense strand
agguuugaauggagugcca

SEQ ID NO: 2443268 - RNA, 19 nt, Homo sapiens
  misc_RNA (1)...(19): siRNA sense strand
gggugaucgacaagaaacu

SEQ ID NO: 2443269 - RNA, 19 nt, Homo sapiens
  misc_RNA (1)...(19): siRNA sense strand
auagacaguucauggcaga

SEQ ID NO: 2443270 - RNA, 19 nt, Homo sapiens
  misc_RNA (1)...(19): siRNA sense strand
acgauagaucagugggaua

SEQ ID NO: 2443271 - RNA, 19 nt, Homo sapiens
  misc_RNA (1)...(19): siRNA sense strand
gugaagaagcuaaagaaaa

SEQ ID NO: 2443272 - RNA, 19 nt, Homo sapiens
  misc_RNA (1)...(19): siRNA sense strand
agaaaaguggugugagaaa

SEQ ID NO: 2443273 - RNA, 19 nt, Homo sapiens
  misc_RNA (1)...(19): siRNA sense strand
uggagaaacaagugaccaa

SEQ ID NO: 2443274 - RNA, 19 nt, Homo sapiens
  misc_RNA (1)...(19): siRNA sense strand
gcagaauaccgaaggcaga

SEQ ID NO: 2443275 - RNA, 19 nt, Homo sapiens
  misc_RNA (1)...(19): siRNA sense strand
cagaaugggcaggaagaaa

SEQ ID NO: 2443276 - RNA, 19 nt, Homo sapiens
  misc_RNA (1)...(19): siRNA sense strand
agaaaugacaagaaggcau

SEQ ID NO: 2443277 - RNA, 19 nt, Homo sapiens
  misc_RNA (1)...(19): siRNA sense strand
cagcaggaauugagccaca

SEQ ID NO: 2443278 - RNA, 19 nt, Homo sapiens
  misc_RNA (1)...(19): siRNA sense strand
aaucagaggguuggagaaa

SEQ ID NO: 2443279 - RNA, 19 nt, Homo sapiens
  misc_RNA (1)...(19): siRNA sense strand
caucaugaacucaaggcaa

SEQ ID NO: 2443280 - RNA, 19 nt, Homo sapiens
  misc_RNA (1)...(19): siRNA sense strand
gaauuaaaucagaggguug

SEQ ID NO: 2443281 - RNA, 19 nt, Homo sapiens
  misc_RNA (1)...(19): siRNA sense strand
gcauauaggaagaggagug

SEQ ID NO: 2443282 - RNA, 19 nt, Homo sapiens
  misc_RNA (1)...(19): siRNA sense strand
gugugagaaagcagugaaa

SEQ ID NO: 2443283 - RNA, 19 nt, Homo sapiens
  misc_RNA (1)...(19): siRNA sense strand
auuagaugagcuugagaaa

SEQ ID NO: 2443284 - RNA, 19 nt, Homo sapiens
  misc_RNA (1)...(19): siRNA sense strand
gggacugaguacaccaaau

SEQ ID NO: 2443285 - RNA, 19 nt, Homo sapiens
  misc_RNA (1)...(19): siRNA sense strand
ccuaagugauagugcaauc

SEQ ID NO: 2443286 - RNA, 19 nt, Homo sapiens
  misc_RNA (1)...(19): siRNA sense strand
cuaucagagaguugagaca

SEQ ID NO: 2443287 - RNA, 19 nt, Homo sapiens
  misc_RNA (1)...(19): siRNA sense strand
agaaugggcaggaagaaaa

SEQ ID NO: 2443288 - RNA, 19 nt, Homo sapiens
  misc_RNA (1)...(19): siRNA sense strand
uggacaaaguauuaacuca

SEQ ID NO: 2443289 - RNA, 19 nt, Homo sapiens
  misc_RNA (1)...(19): siRNA sense strand
gaagucagcuggugggucu

SEQ ID NO: 2443290 - RNA, 19 nt, Homo sapiens
  misc_RNA (1)...(19): siRNA sense strand
uaucagugaagauggagaa

SEQ ID NO: 2443291 - RNA, 19 nt, Homo sapiens
  misc_RNA (1)...(19): siRNA sense strand
gugaagagacugcugggau

SEQ ID NO: 2443292 - RNA, 19 nt, Homo sapiens
  misc_RNA (1)...(19): siRNA sense strand
aggaugaaguauguguaaa

SEQ ID NO: 2443293 - RNA, 19 nt, Homo sapiens
  misc_RNA (1)...(19): siRNA sense strand
uggauauaucagugaagau

SEQ ID NO: 2443294 - RNA, 19 nt, Homo sapiens
  misc_RNA (1)...(19): siRNA sense strand
aaggaugaaguauguguaa

SEQ ID NO: 2443295 - RNA, 19 nt, Homo sapiens
  misc_RNA (1)...(19): siRNA sense strand
aaaucagaggguuggagaa

SEQ ID NO: 2443296 - RNA, 19 nt, Homo sapiens
  misc_RNA (1)...(19): siRNA sense strand
ccucuacagugguuggaca

SEQ ID NO: 2443297 - RNA, 19 nt, Homo sapiens
  misc_RNA (1)...(19): siRNA sense strand
ugaagagacugcugggaug

SEQ ID NO: 2443298 - RNA, 19 nt, Homo sapiens
  misc_RNA (1)...(19): siRNA sense strand
guauuaacucagaugggau

SEQ ID NO: 2443299 - RNA, 19 nt, Homo sapiens
  misc_RNA (1)...(19): siRNA sense strand
uggugaagaagcuaaagaa

SEQ ID NO: 2443300 - RNA, 19 nt, Homo sapiens
  misc_RNA (1)...(19): siRNA sense strand
aucaugaacucaaggcaau

SEQ ID NO: 2443301 - RNA, 19 nt, Homo sapiens
  misc_RNA (1)...(19): siRNA sense strand
ucuucaacaaccaggaauu

SEQ ID NO: 2443302 - RNA, 19 nt, Homo sapiens
  misc_RNA (1)...(19): siRNA sense strand
gcuaaagaaaacaggacga

SEQ ID NO: 2443303 - RNA, 19 nt, Homo sapiens
  misc_RNA (1)...(19): siRNA sense strand
ccgaaaugccacgguagaa

SEQ ID NO: 2443304 - RNA, 19 nt, Homo sapiens
  misc_RNA (1)...(19): siRNA sense strand
gaggagagcagaaugggca

SEQ ID NO: 2443305 - RNA, 19 nt, Homo sapiens
  misc_RNA (1)...(19): siRNA sense strand
cuaacuagaaugugcacca

SEQ ID NO: 2443306 - RNA, 19 nt, Homo sapiens
  misc_RNA (1)...(19): siRNA sense strand
aggaagaggagugcgcuua

SEQ ID NO: 2443307 - RNA, 19 nt, Homo sapiens
  misc_RNA (1)...(19): siRNA sense strand
cgccaguugugaagagacu

SEQ ID NO: 2443308 - RNA, 19 nt, Homo sapiens
  misc_RNA (1)...(19): siRNA sense strand
gggcaugagugaugggcuu

SEQ ID NO: 2443309 - RNA, 19 nt, Homo sapiens
  misc_RNA (1)...(19): siRNA sense strand
aguuauuagcagaagcaaa

SEQ ID NO: 2443310 - RNA, 19 nt, Homo sapiens
  misc_RNA (1)...(19): siRNA sense strand
cuuauaaagcagaugguuu

SEQ ID NO: 2443311 - RNA, 19 nt, Homo sapiens
  misc_RNA (1)...(19): siRNA sense strand
aguacuuggaggagagcaa

SEQ ID NO: 2443312 - RNA, 19 nt, Homo sapiens
  misc_RNA (1)...(19): siRNA sense strand
uuugaggauuugaaggaaa

SEQ ID NO: 2443313 - RNA, 19 nt, Homo sapiens
  misc_RNA (1)...(19): siRNA sense strand
cauggaaccugcaggguca

SEQ ID NO: 2443314 - RNA, 19 nt, Homo sapiens
  misc_RNA (1)...(19): siRNA sense strand
gcaugaaguacuuggagga

SEQ ID NO: 2443315 - RNA, 19 nt, Homo sapiens
  misc_RNA (1)...(19): siRNA sense strand
gggaauaugugaagcagac

SEQ ID NO: 2443316 - RNA, 19 nt, Homo sapiens
  misc_RNA (1)...(19): siRNA sense strand
cuggagaagcugaucgcua

SEQ ID NO: 2443317 - RNA, 19 nt, Homo sapiens
  misc_RNA (1)...(19): siRNA sense strand
acuacaaguucuccagcaa

SEQ ID NO: 2443318 - RNA, 19 nt, Homo sapiens
  misc_RNA (1)...(19): siRNA sense strand
aagcaaaugucaugcagca

SEQ ID NO: 2443319 - RNA, 19 nt, Homo sapiens
  misc_RNA (1)...(19): siRNA sense strand
ccaucgagcgggagcugaa

SEQ ID NO: 2443320 - RNA, 19 nt, Homo sapiens
  misc_RNA (1)...(19): siRNA sense strand
gcaggguguccaagagaga

SEQ ID NO: 2443321 - RNA, 19 nt, Homo sapiens
  misc_RNA (1)...(19): siRNA sense strand
ucgggaagaaucugagcaa

SEQ ID NO: 2443322 - RNA, 19 nt, Homo sapiens
  misc_RNA (1)...(19): siRNA sense strand
cgggaagaaucugagcaaa

SEQ ID NO: 2443323 - RNA, 19 nt, Homo sapiens
  misc_RNA (1)...(19): siRNA sense strand
aaaucggcacacagggaaa

SEQ ID NO: 2443324 - RNA, 19 nt, Homo sapiens
  misc_RNA (1)...(19): siRNA sense strand
agaacugggcucugguaau

SEQ ID NO: 2443325 - RNA, 19 nt, Homo sapiens
  misc_RNA (1)...(19): siRNA sense strand
uaucgagggaugaaaggaa

SEQ ID NO: 2443326 - RNA, 19 nt, Homo sapiens
  misc_RNA (1)...(19): siRNA sense strand
uagagaaaggagagcggau

SEQ ID NO: 2443327 - RNA, 19 nt, Homo sapiens
  misc_RNA (1)...(19): siRNA sense strand
uugaggauuugaaggaaaa

SEQ ID NO: 2443328 - RNA, 19 nt, Homo sapiens
  misc_RNA (1)...(19): siRNA sense strand
acuacuaugacguggugaa

SEQ ID NO: 2443329 - RNA, 19 nt, Homo sapiens
  misc_RNA (1)...(19): siRNA sense strand
acgcggacccugaggagau

SEQ ID NO: 2443330 - RNA, 19 nt, Homo sapiens
  misc_RNA (1)...(19): siRNA sense strand
acaaagacaagacagggaa

SEQ ID NO: 2443331 - RNA, 19 nt, Homo sapiens
  misc_RNA (1)...(19): siRNA sense strand
gaaagaaguucgacacgcu

SEQ ID NO: 2443332 - RNA, 19 nt, Homo sapiens
  misc_RNA (1)...(19): siRNA sense strand
aagaugaguuauuagcaga

SEQ ID NO: 2443333 - RNA, 19 nt, Homo sapiens
  misc_RNA (1)...(19): siRNA sense strand
ggaugcuaguuauggagau

SEQ ID NO: 2443334 - RNA, 19 nt, Homo sapiens
  misc_RNA (1)...(19): siRNA sense strand
gagggaaagaaguucgaca

SEQ ID NO: 2443335 - RNA, 19 nt, Homo sapiens
  misc_RNA (1)...(19): siRNA sense strand
uggaauaaucucaagaauc

SEQ ID NO: 2443336 - RNA, 19 nt, Homo sapiens
  misc_RNA (1)...(19): siRNA sense strand
aggcccagacccauggaaa

SEQ ID NO: 2443337 - RNA, 19 nt, Homo sapiens
  misc_RNA (1)...(19): siRNA sense strand
agggaugaaaggaagugaa

SEQ ID NO: 2443338 - RNA, 19 nt, Homo sapiens
  misc_RNA (1)...(19): siRNA sense strand
gacaaagacaagacaggga

SEQ ID NO: 2443339 - RNA, 19 nt, Homo sapiens
  misc_RNA (1)...(19): siRNA sense strand
aggauaagaacaucauaga

SEQ ID NO: 2443340 - RNA, 19 nt, Homo sapiens
  misc_RNA (1)...(19): siRNA sense strand
cggauucgcagcaguggaa

SEQ ID NO: 2443341 - RNA, 19 nt, Homo sapiens
  misc_RNA (1)...(19): siRNA sense strand
ggugaauggcggcuagcaa

SEQ ID NO: 2443342 - RNA, 19 nt, Homo sapiens
  misc_RNA (1)...(19): siRNA sense strand
uggcagagcagguggagcu

SEQ ID NO: 2443343 - RNA, 19 nt, Homo sapiens
  misc_RNA (1)...(19): siRNA sense strand
cggcugugcaggacaugaa

SEQ ID NO: 2443344 - RNA, 19 nt, Homo sapiens
  misc_RNA (1)...(19): siRNA sense strand
cggaaguacuggugcagga

SEQ ID NO: 2443345 - RNA, 19 nt, Homo sapiens
  misc_RNA (1)...(19): siRNA sense strand
gggaagagcugagggacca

SEQ ID NO: 2443346 - RNA, 19 nt, Homo sapiens
  misc_RNA (1)...(19): siRNA sense strand
ccaucuaugcagaagaaga

SEQ ID NO: 2443347 - RNA, 19 nt, Homo sapiens
  misc_RNA (1)...(19): siRNA sense strand
uggagggcccagaggaaau

SEQ ID NO: 2443348 - RNA, 19 nt, Homo sapiens
  misc_RNA (1)...(19): siRNA sense strand
agaagaaggccaggagaca

SEQ ID NO: 2443349 - RNA, 19 nt, Homo sapiens
  misc_RNA (1)...(19): siRNA sense strand
guggagaaaggaagcucaa

SEQ ID NO: 2443350 - RNA, 19 nt, Homo sapiens
  misc_RNA (1)...(19): siRNA sense strand
augcagaagaagaaggcca

SEQ ID NO: 2443351 - RNA, 19 nt, Homo sapiens
  misc_RNA (1)...(19): siRNA sense strand
cugaggaggagcugggcuu

SEQ ID NO: 2443352 - RNA, 19 nt, Homo sapiens
  misc_RNA (1)...(19): siRNA sense strand
caacacgccugcagcccaa

SEQ ID NO: 2443353 - RNA, 19 nt, Homo sapiens
  misc_RNA (1)...(19): siRNA sense strand
gcuugacugcggaggaaaa

SEQ ID NO: 2443354 - RNA, 19 nt, Homo sapiens
  misc_RNA (1)...(19): siRNA sense strand
gcucaacaggccacggaga

SEQ ID NO: 2443355 - RNA, 19 nt, Homo sapiens
  misc_RNA (1)...(19): siRNA sense strand
acaaugaagggcagggugu

SEQ ID NO: 2443356 - RNA, 19 nt, Homo sapiens
  misc_RNA (1)...(19): siRNA sense strand
ucacauaucucgacggcua

SEQ ID NO: 2443357 - RNA, 19 nt, Homo sapiens
  misc_RNA (1)...(19): siRNA sense strand
agguagaugacgaggaaga

SEQ ID NO: 2443358 - RNA, 19 nt, Homo sapiens
  misc_RNA (1)...(19): siRNA sense strand
acgaggaggacgaggauga

SEQ ID NO: 2443359 - RNA, 19 nt, Homo sapiens
  misc_RNA (1)...(19): siRNA sense strand
aggaggaugaagaagguua

SEQ ID NO: 2443360 - RNA, 19 nt, Homo sapiens
  misc_RNA (1)...(19): siRNA sense strand
agggagaagaugaugacua

SEQ ID NO: 2443361 - RNA, 19 nt, Homo sapiens
  misc_RNA (1)...(19): siRNA sense strand
auuaaagaccucagcacaa

SEQ ID NO: 2443362 - RNA, 19 nt, Homo sapiens
  misc_RNA (1)...(19): siRNA sense strand
uggaagacgaggaggacga

SEQ ID NO: 2443363 - RNA, 19 nt, Homo sapiens
  misc_RNA (1)...(19): siRNA sense strand
acucggaugcugagggcua

SEQ ID NO: 2443364 - RNA, 19 nt, Homo sapiens
  misc_RNA (1)...(19): siRNA sense strand
guggagaggaggaggagga

SEQ ID NO: 2443365 - RNA, 19 nt, Homo sapiens
  misc_RNA (1)...(19): siRNA sense strand
acuuaagaagcuugaacua

SEQ ID NO: 2443366 - RNA, 19 nt, Homo sapiens
  misc_RNA (1)...(19): siRNA sense strand
augaugaggaggaggauga

SEQ ID NO: 2443367 - RNA, 19 nt, Homo sapiens
  misc_RNA (1)...(19): siRNA sense strand
aggaugaggaugaggagga

SEQ ID NO: 2443368 - RNA, 19 nt, Homo sapiens
  misc_RNA (1)...(19): siRNA sense strand
acgaggaagaugaagaaga

SEQ ID NO: 2443369 - RNA, 19 nt, Homo sapiens
  misc_RNA (1)...(19): siRNA sense strand
caucuaaauuuaaguggca

SEQ ID NO: 2443370 - RNA, 19 nt, Homo sapiens
  misc_RNA (1)...(19): siRNA sense strand
ggaggaaggugaagaggag

SEQ ID NO: 2443371 - RNA, 19 nt, Homo sapiens
  misc_RNA (1)...(19): siRNA sense strand
aggaggaggaggaugaaga

SEQ ID NO: 2443372 - RNA, 19 nt, Homo sapiens
  misc_RNA (1)...(19): siRNA sense strand
ggacgugaguggagaggag

SEQ ID NO: 2443373 - RNA, 19 nt, Homo sapiens
  misc_RNA (1)...(19): siRNA sense strand
augcucagguaguggaaga

SEQ ID NO: 2443374 - RNA, 19 nt, Homo sapiens
  misc_RNA (1)...(19): siRNA sense strand
augaggaugaggaggagua

SEQ ID NO: 2443375 - RNA, 19 nt, Homo sapiens
  misc_RNA (1)...(19): siRNA sense strand
aggacgaggaugaggagga

SEQ ID NO: 2443376 - RNA, 19 nt, Homo sapiens
  misc_RNA (1)...(19): siRNA sense strand
uggaaguauuggcagaaaa

SEQ ID NO: 2443377 - RNA, 19 nt, Homo sapiens
  misc_RNA (1)...(19): siRNA sense strand
aggaggaguaugaugaaga

SEQ ID NO: 2443378 - RNA, 19 nt, Homo sapiens
  misc_RNA (1)...(19): siRNA sense strand
ugaaagaacuuguccugga

SEQ ID NO: 2443379 - RNA, 19 nt, Homo sapiens
  misc_RNA (1)...(19): siRNA sense strand
gccuggaaguauuggcaga

SEQ ID NO: 2443380 - RNA, 19 nt, Homo sapiens
  misc_RNA (1)...(19): siRNA sense strand
cauuuagagcugcggaaca

SEQ ID NO: 2443381 - RNA, 19 nt, Homo sapiens
  misc_RNA (1)...(19): siRNA sense strand
auggagagguagaugacga

SEQ ID NO: 2443382 - RNA, 19 nt, Homo sapiens
  misc_RNA (1)...(19): siRNA sense strand
aaccugaagaugagggaga

SEQ ID NO: 2443383 - RNA, 19 nt, Homo sapiens
  misc_RNA (1)...(19): siRNA sense strand
ugaagaugagggagaagau

SEQ ID NO: 2443384 - RNA, 19 nt, Homo sapiens
  misc_RNA (1)...(19): siRNA sense strand
augaggaggaggaagguga

SEQ ID NO: 2443385 - RNA, 19 nt, Homo sapiens
  misc_RNA (1)...(19): siRNA sense strand
aggaaggugaagaggagga

SEQ ID NO: 2443386 - RNA, 19 nt, Homo sapiens
  misc_RNA (1)...(19): siRNA sense strand
gaagaagguuauaacgaug

SEQ ID NO: 2443387 - RNA, 19 nt, Homo sapiens
  misc_RNA (1)...(19): siRNA sense strand
augaagaagagcuugguga

SEQ ID NO: 2443388 - RNA, 19 nt, Homo sapiens
  misc_RNA (1)...(19): siRNA sense strand
ccucagcacaauagagcca

SEQ ID NO: 2443389 - RNA, 19 nt, Homo sapiens
  misc_RNA (1)...(19): siRNA sense strand
uggaugaugaggaggagga

SEQ ID NO: 2443390 - RNA, 19 nt, Homo sapiens
  misc_RNA (1)...(19): siRNA sense strand
uaguggaagacgaggagga

SEQ ID NO: 2443391 - RNA, 19 nt, Homo sapiens
  misc_RNA (1)...(19): siRNA sense strand
augacgaggaagaugaaga

SEQ ID NO: 2443392 - RNA, 19 nt, Homo sapiens
  misc_RNA (1)...(19): siRNA sense strand
agacagaagcagaagcgga

SEQ ID NO: 2443393 - RNA, 19 nt, Homo sapiens
  misc_RNA (1)...(19): siRNA sense strand
gcggcgagaagaagcgcaa

SEQ ID NO: 2443394 - RNA, 19 nt, Homo sapiens
  misc_RNA (1)...(19): siRNA sense strand
gagaagaagcgcaagcgga

SEQ ID NO: 2443395 - RNA, 19 nt, Homo sapiens
  misc_RNA (1)...(19): siRNA sense strand
acaacaugaucgcgcucaa

SEQ ID NO: 2443396 - RNA, 19 nt, Homo sapiens
  misc_RNA (1)...(19): siRNA sense strand
gacagaagcagaagcggau

SEQ ID NO: 2443397 - RNA, 19 nt, Homo sapiens
  misc_RNA (1)...(19): siRNA sense strand
ccgccaucgccgagaaacu

SEQ ID NO: 2443398 - RNA, 19 nt, Homo sapiens
  misc_RNA (1)...(19): siRNA sense strand
gcacagaguuuaaugagca

SEQ ID NO: 2443399 - RNA, 19 nt, Homo sapiens
  misc_RNA (1)...(19): siRNA sense strand
uguccaagugggaggcuaa

SEQ ID NO: 2443400 - RNA, 19 nt, Homo sapiens
  misc_RNA (1)...(19): siRNA sense strand
uggagaucaucgaggcuau

SEQ ID NO: 2443401 - RNA, 19 nt, Homo sapiens
  misc_RNA (1)...(19): siRNA sense strand
uguaugaccuggaugguga

SEQ ID NO: 2443402 - RNA, 19 nt, Homo sapiens
  misc_RNA (1)...(19): siRNA sense strand
cugaagugauggaggaccu

SEQ ID NO: 2443403 - RNA, 19 nt, Homo sapiens
  misc_RNA (1)...(19): siRNA sense strand
agaacaaagaugaccagau

SEQ ID NO: 2443404 - RNA, 19 nt, Homo sapiens
  misc_RNA (1)...(19): siRNA sense strand
aggaauuucagcagcucua

SEQ ID NO: 2443405 - RNA, 19 nt, Homo sapiens
  misc_RNA (1)...(19): siRNA sense strand
caaagaagcugcaaagagc

SEQ ID NO: 2443406 - RNA, 19 nt, Homo sapiens
  misc_RNA (1)...(19): siRNA sense strand
ggauaagaacaaagaugac

SEQ ID NO: 2443407 - RNA, 19 nt, Homo sapiens
  misc_RNA (1)...(19): siRNA sense strand
gggaagcagaauagcaaac

SEQ ID NO: 2443408 - RNA, 19 nt, Homo sapiens
  misc_RNA (1)...(19): siRNA sense strand
aauucaaagaagcugcaaa

SEQ ID NO: 2443409 - RNA, 19 nt, Homo sapiens
  misc_RNA (1)...(19): siRNA sense strand
uugagaaugaagaggaaua

SEQ ID NO: 2443410 - RNA, 19 nt, Homo sapiens
  misc_RNA (1)...(19): siRNA sense strand
ucucaggaauggaaggcaa

SEQ ID NO: 2443411 - RNA, 19 nt, Homo sapiens
  misc_RNA (1)...(19): siRNA sense strand
uggaacaguugcaggguca

SEQ ID NO: 2443412 - RNA, 19 nt, Homo sapiens
  misc_RNA (1)...(19): siRNA sense strand
cugcagagugauacagaau

SEQ ID NO: 2443413 - RNA, 19 nt, Homo sapiens
  misc_RNA (1)...(19): siRNA sense strand
caggaaugaaacugaaaca

SEQ ID NO: 2443414 - RNA, 19 nt, Homo sapiens
  misc_RNA (1)...(19): siRNA sense strand
acucauugacuuuggacuu

SEQ ID NO: 2443415 - RNA, 19 nt, Homo sapiens
  misc_RNA (1)...(19): siRNA sense strand
cagaagcagaauugcaaaa

SEQ ID NO: 2443416 - RNA, 19 nt, Homo sapiens
  misc_RNA (1)...(19): siRNA sense strand
auuguggagugcagagaau

SEQ ID NO: 2443417 - RNA, 19 nt, Homo sapiens
  misc_RNA (1)...(19): siRNA sense strand
ggaugucaguguuucggaa

SEQ ID NO: 2443418 - RNA, 19 nt, Homo sapiens
  misc_RNA (1)...(19): siRNA sense strand
uugcagggucacagaaaca

SEQ ID NO: 2443419 - RNA, 19 nt, Homo sapiens
  misc_RNA (1)...(19): siRNA sense strand
aaggcaaucaggauguaaa

SEQ ID NO: 2443420 - RNA, 19 nt, Homo sapiens
  misc_RNA (1)...(19): siRNA sense strand
ugauccaagcagaagaauu

SEQ ID NO: 2443421 - RNA, 19 nt, Homo sapiens
  misc_RNA (1)...(19): siRNA sense strand
uugagaaugaagaggaaua

SEQ ID NO: 2443422 - RNA, 19 nt, Homo sapiens
  misc_RNA (1)...(19): siRNA sense strand
ucucaggaauggaaggcaa

SEQ ID NO: 2443423 - RNA, 19 nt, Homo sapiens
  misc_RNA (1)...(19): siRNA sense strand
uggaacaguugcaggguca

SEQ ID NO: 2443424 - RNA, 19 nt, Homo sapiens
  misc_RNA (1)...(19): siRNA sense strand
gaaggauguuugaugggaa

SEQ ID NO: 2443425 - RNA, 19 nt, Homo sapiens
  misc_RNA (1)...(19): siRNA sense strand
cugcagagugauacagaau

SEQ ID NO: 2443426 - RNA, 19 nt, Homo sapiens
  misc_RNA (1)...(19): siRNA sense strand
caggaaugaaacugaaaca

SEQ ID NO: 2443427 - RNA, 19 nt, Homo sapiens
  misc_RNA (1)...(19): siRNA sense strand
acucauugacuuuggacuu

SEQ ID NO: 2443428 - RNA, 19 nt, Homo sapiens
  misc_RNA (1)...(19): siRNA sense strand
cagaagcagaauugcaaaa

SEQ ID NO: 2443429 - RNA, 19 nt, Homo sapiens
  misc_RNA (1)...(19): siRNA sense strand
auuguggagugcagagaau

SEQ ID NO: 2443430 - RNA, 19 nt, Homo sapiens
  misc_RNA (1)...(19): siRNA sense strand
ggaugucaguguuucggaa

SEQ ID NO: 2443431 - RNA, 19 nt, Homo sapiens
  misc_RNA (1)...(19): siRNA sense strand
ggaaguuuguuguggcuac

SEQ ID NO: 2443432 - RNA, 19 nt, Homo sapiens
  misc_RNA (1)...(19): siRNA sense strand
uugcagggucacagaaaca

SEQ ID NO: 2443433 - RNA, 19 nt, Homo sapiens
  misc_RNA (1)...(19): siRNA sense strand
aaggcaaucaggauguaaa

SEQ ID NO: 2443434 - RNA, 19 nt, Homo sapiens
  misc_RNA (1)...(19): siRNA sense strand
auuccaaagcugcgcagaa

SEQ ID NO: 2443435 - RNA, 19 nt, Homo sapiens
  misc_RNA (1)...(19): siRNA sense strand
ugauccaagcagaagaauu

SEQ ID NO: 2443436 - RNA, 19 nt, Homo sapiens
  misc_RNA (1)...(19): siRNA sense strand
uggagaugcuggaggaaaa

SEQ ID NO: 2443437 - RNA, 19 nt, Homo sapiens
  misc_RNA (1)...(19): siRNA sense strand
gcuuggagaugcuggagga

SEQ ID NO: 2443438 - RNA, 19 nt, Homo sapiens
  misc_RNA (1)...(19): siRNA sense strand
uggagaugcuggaggaaaa

SEQ ID NO: 2443439 - RNA, 19 nt, Homo sapiens
  misc_RNA (1)...(19): siRNA sense strand
gcuuggagaugcuggagga

SEQ ID NO: 2443440 - RNA, 19 nt, Homo sapiens
  misc_RNA (1)...(19): siRNA sense strand
ccuuugagaaugugguaaa

SEQ ID NO: 2443441 - RNA, 19 nt, Homo sapiens
  misc_RNA (1)...(19): siRNA sense strand
gcuacuaucucaaggggaa

SEQ ID NO: 2443442 - RNA, 19 nt, Homo sapiens
  misc_RNA (1)...(19): siRNA sense strand
agacuaugggacugugaaa

SEQ ID NO: 2443443 - RNA, 19 nt, Homo sapiens
  misc_RNA (1)...(19): siRNA sense strand
aaaugaagauccugggugu

SEQ ID NO: 2443444 - RNA, 19 nt, Homo sapiens
  misc_RNA (1)...(19): siRNA sense strand
agcuaagguuccugaaaga

SEQ ID NO: 2443445 - RNA, 19 nt, Homo sapiens
  misc_RNA (1)...(19): siRNA sense strand
uugccaacagcauggguaa

SEQ ID NO: 2443446 - RNA, 19 nt, Homo sapiens
  misc_RNA (1)...(19): siRNA sense strand
cugaugugcuccaggacca

SEQ ID NO: 2443447 - RNA, 19 nt, Homo sapiens
  misc_RNA (1)...(19): siRNA sense strand
ggaccauaucaccaagcua

SEQ ID NO: 2443448 - RNA, 19 nt, Homo sapiens
  misc_RNA (1)...(19): siRNA sense strand
ccugcagcccuuugagaau

SEQ ID NO: 2443449 - RNA, 19 nt, Homo sapiens
  misc_RNA (1)...(19): siRNA sense strand
acagcauggguaagggcua

SEQ ID NO: 2443450 - RNA, 19 nt, Homo sapiens
  misc_RNA (1)...(19): siRNA sense strand
aguuugaccuggagcucau

SEQ ID NO: 2443451 - RNA, 19 nt, Homo sapiens
  misc_RNA (1)...(19): siRNA sense strand
aguaaagugcugaggaaaa

SEQ ID NO: 2443452 - RNA, 19 nt, Homo sapiens
  misc_RNA (1)...(19): siRNA sense strand
ucucagggucaguggauaa

SEQ ID NO: 2443453 - RNA, 19 nt, Homo sapiens
  misc_RNA (1)...(19): siRNA sense strand
aaaaggaagcaauggaaaa

SEQ ID NO: 2443454 - RNA, 19 nt, Homo sapiens
  misc_RNA (1)...(19): siRNA sense strand
cguacaagucccaugacaa

SEQ ID NO: 2443455 - RNA, 19 nt, Homo sapiens
  misc_RNA (1)...(19): siRNA sense strand
gcuacugguucaauggaca

SEQ ID NO: 2443456 - RNA, 19 nt, Homo sapiens
  misc_RNA (1)...(19): siRNA sense strand
gaugcuagucucaggguca

SEQ ID NO: 2443457 - RNA, 19 nt, Homo sapiens
  misc_RNA (1)...(19): siRNA sense strand
gcuacuugcuccuuggaca

SEQ ID NO: 2443458 - RNA, 19 nt, Homo sapiens
  misc_RNA (1)...(19): siRNA sense strand
agcacaugaucuuggaauu

SEQ ID NO: 2443459 - RNA, 19 nt, Homo sapiens
  misc_RNA (1)...(19): siRNA sense strand
cuacuugcuccuuggacaa

SEQ ID NO: 2443460 - RNA, 19 nt, Homo sapiens
  misc_RNA (1)...(19): siRNA sense strand
uaguaaagugcugaggaaa

SEQ ID NO: 2443461 - RNA, 19 nt, Homo sapiens
  misc_RNA (1)...(19): siRNA sense strand
ccuauggaauacugaaaau

SEQ ID NO: 2443462 - RNA, 19 nt, Homo sapiens
  misc_RNA (1)...(19): siRNA sense strand
gaugaauaacauugaugga

SEQ ID NO: 2443463 - RNA, 19 nt, Homo sapiens
  misc_RNA (1)...(19): siRNA sense strand
augcacagucauacaaauu

SEQ ID NO: 2443464 - RNA, 19 nt, Homo sapiens
  misc_RNA (1)...(19): siRNA sense strand
acagugaacaucuggcaau

SEQ ID NO: 2443465 - RNA, 19 nt, Homo sapiens
  misc_RNA (1)...(19): siRNA sense strand
gaggaaaauugaagagcuc

SEQ ID NO: 2443466 - RNA, 19 nt, Homo sapiens
  misc_RNA (1)...(19): siRNA sense strand
cugaaaauggccaucaaua

SEQ ID NO: 2443467 - RNA, 19 nt, Homo sapiens
  misc_RNA (1)...(19): siRNA sense strand
aucaauagauggcuggaga

SEQ ID NO: 2443468 - RNA, 19 nt, Homo sapiens
  misc_RNA (1)...(19): siRNA sense strand
caauagauggcuggagaca

SEQ ID NO: 2443469 - RNA, 19 nt, Homo sapiens
  misc_RNA (1)...(19): siRNA sense strand
cagaguaagaaguggagga

SEQ ID NO: 2443470 - RNA, 19 nt, Homo sapiens
  misc_RNA (1)...(19): siRNA sense strand
aguaagaaguggaggaucc

SEQ ID NO: 2443471 - RNA, 19 nt, Homo sapiens
  misc_RNA (1)...(19): siRNA sense strand
ugacagagcccgacccuga

SEQ ID NO: 2443472 - RNA, 19 nt, Homo sapiens
  misc_RNA (1)...(19): siRNA sense strand
ugaagaaagacuauggaaa

SEQ ID NO: 2443473 - RNA, 19 nt, Homo sapiens
  misc_RNA (1)...(19): siRNA sense strand
gaagaaagacuauggaaaa

SEQ ID NO: 2443474 - RNA, 19 nt, Homo sapiens
  misc_RNA (1)...(19): siRNA sense strand
ccuggaaaaugcugagaaa

SEQ ID NO: 2443475 - RNA, 19 nt, Homo sapiens
  misc_RNA (1)...(19): siRNA sense strand
uggaaaaugcugagaaaga

SEQ ID NO: 2443476 - RNA, 19 nt, Homo sapiens
  misc_RNA (1)...(19): siRNA sense strand
aaauaguggaggcgguaua

SEQ ID NO: 2443477 - RNA, 19 nt, Homo sapiens
  misc_RNA (1)...(19): siRNA sense strand
ggggauaaggacaaaguaa

SEQ ID NO: 2443478 - RNA, 19 nt, Homo sapiens
  misc_RNA (1)...(19): siRNA sense strand
auacauauucagagguaga

SEQ ID NO: 2443479 - RNA, 19 nt, Homo sapiens
  misc_RNA (1)...(19): siRNA sense strand
gauacuuacacaaggagaa

SEQ ID NO: 2443480 - RNA, 19 nt, Homo sapiens
  misc_RNA (1)...(19): siRNA sense strand
ucucaaagaucaugguagu

SEQ ID NO: 2443481 - RNA, 19 nt, Homo sapiens
  misc_RNA (1)...(19): siRNA sense strand
uuaaggaaauagaggcuga

SEQ ID NO: 2443482 - RNA, 19 nt, Homo sapiens
  misc_RNA (1)...(19): siRNA sense strand
ccauuuuacugaagaaaga

SEQ ID NO: 2443483 - RNA, 19 nt, Homo sapiens
  misc_RNA (1)...(19): siRNA sense strand
cagagguagaugaugaauu

SEQ ID NO: 2443484 - RNA, 19 nt, Homo sapiens
  misc_RNA (1)...(19): siRNA sense strand
cuucaggaggagaaagaca

SEQ ID NO: 2443485 - RNA, 19 nt, Homo sapiens
  misc_RNA (1)...(19): siRNA sense strand
gggauaaggacaaaguaac

SEQ ID NO: 2443486 - RNA, 19 nt, Homo sapiens
  misc_RNA (1)...(19): siRNA sense strand
augcugagaaagauacaua

SEQ ID NO: 2443487 - RNA, 19 nt, Homo sapiens
  misc_RNA (1)...(19): siRNA sense strand
cauagagaucugacaccaa

SEQ ID NO: 2443488 - RNA, 19 nt, Homo sapiens
  misc_RNA (1)...(19): siRNA sense strand
ccucacuccugaugcggaa

SEQ ID NO: 2443489 - RNA, 19 nt, Homo sapiens
  misc_RNA (1)...(19): siRNA sense strand
gagaagaggauuguccaua

SEQ ID NO: 2443490 - RNA, 19 nt, Homo sapiens
  misc_RNA (1)...(19): siRNA sense strand
cugcugugauucuucgaaa

SEQ ID NO: 2443491 - RNA, 19 nt, Homo sapiens
  misc_RNA (1)...(19): siRNA sense strand
cugaagaaagacuauggaa

SEQ ID NO: 2443492 - RNA, 19 nt, Homo sapiens
  misc_RNA (1)...(19): siRNA sense strand
ggagaagaggauuguccau

SEQ ID NO: 2443493 - RNA, 19 nt, Homo sapiens
  misc_RNA (1)...(19): siRNA sense strand
aggagaaagacaaucccaa

SEQ ID NO: 2443494 - RNA, 19 nt, Homo sapiens
  misc_RNA (1)...(19): siRNA sense strand
cuccuaugguaaagacgaa

SEQ ID NO: 2443495 - RNA, 19 nt, Homo sapiens
  misc_RNA (1)...(19): siRNA sense strand
aagagaaguuuuagugcuu

SEQ ID NO: 2443496 - RNA, 19 nt, Homo sapiens
  misc_RNA (1)...(19): siRNA sense strand
uggaggaacaggaucaaga

SEQ ID NO: 2443497 - RNA, 19 nt, Homo sapiens
  misc_RNA (1)...(19): siRNA sense strand
gugcuuagcucuucgauac

SEQ ID NO: 2443498 - RNA, 19 nt, Homo sapiens
  misc_RNA (1)...(19): siRNA sense strand
ggaacaauccuguauucuu

SEQ ID NO: 2443499 - RNA, 19 nt, Homo sapiens
  misc_RNA (1)...(19): siRNA sense strand
caagaaaacaguaaacuca

SEQ ID NO: 2443500 - RNA, 19 nt, Homo sapiens
  misc_RNA (1)...(19): siRNA sense strand
cauuaaggaaauagaggcu

SEQ ID NO: 2443501 - RNA, 19 nt, Homo sapiens
  misc_RNA (1)...(19): siRNA sense strand
aggucgaguuccagagauu

SEQ ID NO: 2443502 - RNA, 19 nt, Homo sapiens
  misc_RNA (1)...(19): siRNA sense strand
ggacaaacuggauggcaca

SEQ ID NO: 2443503 - RNA, 19 nt, Homo sapiens
  misc_RNA (1)...(19): siRNA sense strand
cgcucaaagucaagaucaa

SEQ ID NO: 2443504 - RNA, 19 nt, Homo sapiens
  misc_RNA (1)...(19): siRNA sense strand
gagcaaaggucgaucacgu

SEQ ID NO: 2443505 - RNA, 19 nt, Homo sapiens
  misc_RNA (1)...(19): siRNA sense strand
uggcagaaauauuaggcuu

SEQ ID NO: 2443506 - RNA, 19 nt, Homo sapiens
  misc_RNA (1)...(19): siRNA sense strand
acuggauggcacagaaaua

SEQ ID NO: 2443507 - RNA, 19 nt, Homo sapiens
  misc_RNA (1)...(19): siRNA sense strand
cagaaauaaauggcagaaa

SEQ ID NO: 2443508 - RNA, 19 nt, Homo sapiens
  misc_RNA (1)...(19): siRNA sense strand
agaucaagguccaggucga

SEQ ID NO: 2443509 - RNA, 19 nt, Homo sapiens
  misc_RNA (1)...(19): siRNA sense strand
acauaggacgccugagcua

SEQ ID NO: 2443510 - RNA, 19 nt, Homo sapiens
  misc_RNA (1)...(19): siRNA sense strand
cgaacaaaugaggguguaa

SEQ ID NO: 2443511 - RNA, 19 nt, Homo sapiens
  misc_RNA (1)...(19): siRNA sense strand
aaucuagaucaaagagcaa

SEQ ID NO: 2443512 - RNA, 19 nt, Homo sapiens
  misc_RNA (1)...(19): siRNA sense strand
cguucuagaucucgcucaa

SEQ ID NO: 2443513 - RNA, 19 nt, Homo sapiens
  misc_RNA (1)...(19): siRNA sense strand
gcacagaaauaaauggcag

SEQ ID NO: 2443514 - RNA, 19 nt, Homo sapiens
  misc_RNA (1)...(19): siRNA sense strand
agaaggacauccagcgcuu

SEQ ID NO: 2443515 - RNA, 19 nt, Homo sapiens
  misc_RNA (1)...(19): siRNA sense strand
uuuacgagcugaacggcaa

SEQ ID NO: 2443516 - RNA, 19 nt, Homo sapiens
  misc_RNA (1)...(19): siRNA sense strand
ugaaguaaccuaugcggau

SEQ ID NO: 2443517 - RNA, 19 nt, Homo sapiens
  misc_RNA (1)...(19): siRNA sense strand
cgaucaaaaggcaggaaau

SEQ ID NO: 2443518 - RNA, 19 nt, Homo sapiens
  misc_RNA (1)...(19): siRNA sense strand
aggaugaguaugagaaauc

SEQ ID NO: 2443519 - RNA, 19 nt, Homo sapiens
  misc_RNA (1)...(19): siRNA sense strand
ggaacgaacaaaugagggu

SEQ ID NO: 2443520 - RNA, 19 nt, Homo sapiens
  misc_RNA (1)...(19): siRNA sense strand
aagaaaauggaaaggguga

SEQ ID NO: 2443521 - RNA, 19 nt, Homo sapiens
  misc_RNA (1)...(19): siRNA sense strand
aagucaaaauccagaucaa

SEQ ID NO: 2443522 - RNA, 19 nt, Homo sapiens
  misc_RNA (1)...(19): siRNA sense strand
agagcaaaucuaagcccaa

SEQ ID NO: 2443523 - RNA, 19 nt, Homo sapiens
  misc_RNA (1)...(19): siRNA sense strand
aagucaagaucaaggucca

SEQ ID NO: 2443524 - RNA, 19 nt, Homo sapiens
  misc_RNA (1)...(19): siRNA sense strand
gucgaguuccagagauuaa

SEQ ID NO: 2443525 - RNA, 19 nt, Homo sapiens
  misc_RNA (1)...(19): siRNA sense strand
uggauggcacagaaauaaa

SEQ ID NO: 2443526 - RNA, 19 nt, Homo sapiens
  misc_RNA (1)...(19): siRNA sense strand
cgaaguaggagucgcagga

SEQ ID NO: 2443527 - RNA, 19 nt, Homo sapiens
  misc_RNA (1)...(19): siRNA sense strand
cgcacaagccauaggcgau

SEQ ID NO: 2443528 - RNA, 19 nt, Homo sapiens
  misc_RNA (1)...(19): siRNA sense strand
cgaagcagaucuaaggaug

SEQ ID NO: 2443529 - RNA, 19 nt, Homo sapiens
  misc_RNA (1)...(19): siRNA sense strand
aggaaaucuagaucaaaga

SEQ ID NO: 2443530 - RNA, 19 nt, Homo sapiens
  misc_RNA (1)...(19): siRNA sense strand
ggguaccaccagagggaaa

SEQ ID NO: 2443531 - RNA, 19 nt, Homo sapiens
  misc_RNA (1)...(19): siRNA sense strand
agggagaaguagaagccaa

SEQ ID NO: 2443532 - RNA, 19 nt, Homo sapiens
  misc_RNA (1)...(19): siRNA sense strand
cucuaaaggagcugauaaa

SEQ ID NO: 2443533 - RNA, 19 nt, Homo sapiens
  misc_RNA (1)...(19): siRNA sense strand
aaguagaagccaagguuga

SEQ ID NO: 2443534 - RNA, 19 nt, Homo sapiens
  misc_RNA (1)...(19): siRNA sense strand
aguuaagggagaaguagaa

SEQ ID NO: 2443535 - RNA, 19 nt, Homo sapiens
  misc_RNA (1)...(19): siRNA sense strand
aucuacaaguuaagggaga

SEQ ID NO: 2443536 - RNA, 19 nt, Homo sapiens
  misc_RNA (1)...(19): siRNA sense strand
aaguuaagggagaaguaga

SEQ ID NO: 2443537 - RNA, 19 nt, Homo sapiens
  misc_RNA (1)...(19): siRNA sense strand
ggcaaaagcuggagggugc

SEQ ID NO: 2443538 - RNA, 19 nt, Homo sapiens
  misc_RNA (1)...(19): siRNA sense strand
ucuacaaguuaagggagaa

SEQ ID NO: 2443539 - RNA, 19 nt, Homo sapiens
  misc_RNA (1)...(19): siRNA sense strand
ucguguugaccgagauuau

SEQ ID NO: 2443540 - RNA, 19 nt, Homo sapiens
  misc_RNA (1)...(19): siRNA sense strand
gagugcucuuaaaggaaau

SEQ ID NO: 2443541 - RNA, 19 nt, Homo sapiens
  misc_RNA (1)...(19): siRNA sense strand
uuaccagacucuugggcca

SEQ ID NO: 2443542 - RNA, 19 nt, Homo sapiens
  misc_RNA (1)...(19): siRNA sense strand
guguaaagagugugggaaa

SEQ ID NO: 2443543 - RNA, 19 nt, Homo sapiens
  misc_RNA (1)...(19): siRNA sense strand
auguaaugaaugugggaaa

SEQ ID NO: 2443544 - RNA, 19 nt, Homo sapiens
  misc_RNA (1)...(19): siRNA sense strand
uguuaaagaggcagagaau

SEQ ID NO: 2443545 - RNA, 19 nt, Homo sapiens
  misc_RNA (1)...(19): siRNA sense strand
cugcagcgaaugugggaaa

SEQ ID NO: 2443546 - RNA, 19 nt, Homo sapiens
  misc_RNA (1)...(19): siRNA sense strand
cuguaacgacuguggcaaa

SEQ ID NO: 2443547 - RNA, 19 nt, Homo sapiens
  misc_RNA (1)...(19): siRNA sense strand
aauucacacugcagagaaa

SEQ ID NO: 2443548 - RNA, 19 nt, Homo sapiens
  misc_RNA (1)...(19): siRNA sense strand
guguagcgugugugggaaa

SEQ ID NO: 2443549 - RNA, 19 nt, Homo sapiens
  misc_RNA (1)...(19): siRNA sense strand
gaaacauguuaaagaggca

SEQ ID NO: 2443550 - RNA, 19 nt, Homo sapiens
  misc_RNA (1)...(19): siRNA sense strand
cagacaagugauagugaau

SEQ ID NO: 2443551 - RNA, 19 nt, Homo sapiens
  misc_RNA (1)...(19): siRNA sense strand
gagaauucacaguggagau

SEQ ID NO: 2443552 - RNA, 19 nt, Homo sapiens
  misc_RNA (1)...(19): siRNA sense strand
aggaggaggaagaagaaga

SEQ ID NO: 2443553 - RNA, 19 nt, Homo sapiens
  misc_RNA (1)...(19): siRNA sense strand
aggaggaagaagaagaaaa

SEQ ID NO: 2443554 - RNA, 19 nt, Homo sapiens
  misc_RNA (1)...(19): siRNA sense strand
ccuuacgacugcagcgaau

SEQ ID NO: 2443555 - RNA, 19 nt, Homo sapiens
  misc_RNA (1)...(19): siRNA sense strand
aggaaaaccagaaauguaa

SEQ ID NO: 2443556 - RNA, 19 nt, Homo sapiens
  misc_RNA (1)...(19): siRNA sense strand
gcucaaaccucauugucca

SEQ ID NO: 2443557 - RNA, 19 nt, Homo sapiens
  misc_RNA (1)...(19): siRNA sense strand
ccucaucauaucagaaaga

SEQ ID NO: 2443558 - RNA, 19 nt, Homo sapiens
  misc_RNA (1)...(19): siRNA sense strand
gcgguaguccugaaagcaa

SEQ ID NO: 2443559 - RNA, 19 nt, Homo sapiens
  misc_RNA (1)...(19): siRNA sense strand
agauuucagacaagugaua

SEQ ID NO: 2443560 - RNA, 19 nt, Homo sapiens
  misc_RNA (1)...(19): siRNA sense strand
aagaaaagggucagaacau

SEQ ID NO: 2443561 - RNA, 19 nt, Homo sapiens
  misc_RNA (1)...(19): siRNA sense strand
gccuuuacccagagugcaa

SEQ ID NO: 2443562 - RNA, 19 nt, Homo sapiens
  misc_RNA (1)...(19): siRNA sense strand
guguaaugaaugugggaag

SEQ ID NO: 2443563 - RNA, 19 nt, Homo sapiens
  misc_RNA (1)...(19): siRNA sense strand
gagaauaaagagagaaaag

SEQ ID NO: 2443564 - RNA, 19 nt, Homo sapiens
  misc_RNA (1)...(19): siRNA sense strand
aggagaagcuugugaaaag

SEQ ID NO: 2443565 - RNA, 19 nt, Homo sapiens
  misc_RNA (1)...(19): siRNA sense strand
uguaaugaaugugggaaaa

SEQ ID NO: 2443566 - RNA, 19 nt, Homo sapiens
  misc_RNA (1)...(19): siRNA sense strand
acucacaccucaugcgaca

SEQ ID NO: 2443567 - RNA, 19 nt, Homo sapiens
  misc_RNA (1)...(19): siRNA sense strand
acauuuacuaggagcucaa

SEQ ID NO: 2443568 - RNA, 19 nt, Homo sapiens
  misc_RNA (1)...(19): siRNA sense strand
aggaagaagaagaaaacuu

SEQ ID NO: 2443569 - RNA, 19 nt, Homo sapiens
  misc_RNA (1)...(19): siRNA sense strand
cuuugaaugucaugagugu

SEQ ID NO: 2443570 - RNA, 19 nt, Homo sapiens
  misc_RNA (1)...(19): siRNA sense strand
agacaggccuugauggauc

SEQ ID NO: 2443571 - RNA, 19 nt, Homo sapiens
  misc_RNA (1)...(19): siRNA sense strand
ggaucagaagaggaagaaa

SEQ ID NO: 2443572 - RNA, 19 nt, Homo sapiens
  misc_RNA (1)...(19): siRNA sense strand
ucguugugcaucagagaau

SEQ ID NO: 2443573 - RNA, 19 nt, Homo sapiens
  misc_RNA (1)...(19): siRNA sense strand
aagccauacuggugagaag

SEQ ID NO: 2443574 - RNA, 19 nt, Homo sapiens
  misc_RNA (1)...(19): siRNA sense strand
ccuacuuauucaucagaga

SEQ ID NO: 2443575 - RNA, 19 nt, Homo sapiens
  misc_RNA (1)...(19): siRNA sense strand
gaggcagagaauaaagaga

SEQ ID NO: 2443576 - RNA, 19 nt, Homo sapiens
  misc_RNA (1)...(19): siRNA sense strand
gugggaaagccuucaguca

SEQ ID NO: 2443577 - RNA, 19 nt, Homo sapiens
  misc_RNA (1)...(19): siRNA sense strand
aacccaucuuguugaauaa

SEQ ID NO: 2443578 - RNA, 19 nt, Homo sapiens
  misc_RNA (1)...(19): siRNA sense strand
uuauugugcaccagagaau

SEQ ID NO: 2443579 - RNA, 19 nt, Homo sapiens
  misc_RNA (1)...(19): siRNA sense strand
gcagagaaaccuuacgacu

SEQ ID NO: 2443580 - RNA, 19 nt, Homo sapiens
  misc_RNA (1)...(19): siRNA sense strand
caacaagugcacuccgaga

SEQ ID NO: 2443581 - RNA, 19 nt, Homo sapiens
  misc_RNA (1)...(19): siRNA sense strand
agagaauucauaauggaga

SEQ ID NO: 2443582 - RNA, 19 nt, Homo sapiens
  misc_RNA (1)...(19): siRNA sense strand
auggaucagaagaggaaga

SEQ ID NO: 2443583 - RNA, 19 nt, Homo sapiens
  misc_RNA (1)...(19): siRNA sense strand
cagcaaaggaagaagaaaa

SEQ ID NO: 2443584 - RNA, 19 nt, Homo sapiens
  misc_RNA (1)...(19): siRNA sense strand
gggaaaacaagaagagaga

SEQ ID NO: 2443585 - RNA, 19 nt, Homo sapiens
  misc_RNA (1)...(19): siRNA sense strand
cuaaagaacaauagggaac

SEQ ID NO: 2443586 - RNA, 19 nt, Homo sapiens
  misc_RNA (1)...(19): siRNA sense strand
ucauaagaggccagaggaa

SEQ ID NO: 2443587 - RNA, 19 nt, Homo sapiens
  misc_RNA (1)...(19): siRNA sense strand
ggccagaggaagagcgcuu

SEQ ID NO: 2443588 - RNA, 19 nt, Homo sapiens
  misc_RNA (1)...(19): siRNA sense strand
ccacaaugucgcaggagca

SEQ ID NO: 2443589 - RNA, 19 nt, Homo sapiens
  misc_RNA (1)...(19): siRNA sense strand
agguacagaaggugaaaca

SEQ ID NO: 2443590 - RNA, 19 nt, Homo sapiens
  misc_RNA (1)...(19): siRNA sense strand
ggaaaggacaggaggacag

SEQ ID NO: 2443591 - RNA, 19 nt, Homo sapiens
  misc_RNA (1)...(19): siRNA sense strand
guuuagaagugcaccgguu

SEQ ID NO: 2443592 - RNA, 19 nt, Homo sapiens
  misc_RNA (1)...(19): siRNA sense strand
gaucauaaagaaaagggaa

SEQ ID NO: 2443593 - RNA, 19 nt, Homo sapiens
  misc_RNA (1)...(19): siRNA sense strand
agaaaagggaaaacaagaa

SEQ ID NO: 2443594 - RNA, 19 nt, Homo sapiens
  misc_RNA (1)...(19): siRNA sense strand
gggaacaaguagaaguggu

SEQ ID NO: 2443595 - RNA, 19 nt, Homo sapiens
  misc_RNA (1)...(19): siRNA sense strand
agaacacaaagcaggcuaa

SEQ ID NO: 2443596 - RNA, 19 nt, Homo sapiens
  misc_RNA (1)...(19): siRNA sense strand
guaucacggguuauggaaa

SEQ ID NO: 2443597 - RNA, 19 nt, Homo sapiens
  misc_RNA (1)...(19): siRNA sense strand
aggaagaagaaaagagacu

SEQ ID NO: 2443598 - RNA, 19 nt, Homo sapiens
  misc_RNA (1)...(19): siRNA sense strand
uggagguacagaaggugaa

SEQ ID NO: 2443599 - RNA, 19 nt, Homo sapiens
  misc_RNA (1)...(19): siRNA sense strand
aggcagcaaaggaagaaga

SEQ ID NO: 2443600 - RNA, 19 nt, Homo sapiens
  misc_RNA (1)...(19): siRNA sense strand
ggaagauuguggagggcau

SEQ ID NO: 2443601 - RNA, 19 nt, Homo sapiens
  misc_RNA (1)...(19): siRNA sense strand
gcuugaacuuccagagacu

SEQ ID NO: 2443602 - RNA, 19 nt, Homo sapiens
  misc_RNA (1)...(19): siRNA sense strand
cagaauguggccuggacaa

SEQ ID NO: 2443603 - RNA, 19 nt, Homo sapiens
  misc_RNA (1)...(19): siRNA sense strand
aggagaaacgccaggcuga

SEQ ID NO: 2443604 - RNA, 19 nt, Homo sapiens
  misc_RNA (1)...(19): siRNA sense strand
ggugagugacacacggaga

SEQ ID NO: 2443605 - RNA, 19 nt, Homo sapiens
  misc_RNA (1)...(19): siRNA sense strand
gugcugaaccugugggacu

SEQ ID NO: 2443606 - RNA, 19 nt, Homo sapiens
  misc_RNA (1)...(19): siRNA sense strand
acguggaaguuuugauuua

SEQ ID NO: 2443607 - RNA, 19 nt, Homo sapiens
  misc_RNA (1)...(19): siRNA sense strand
ggucgauaaucuucgccaa

SEQ ID NO: 2443608 - RNA, 19 nt, Homo sapiens
  misc_RNA (1)...(19): siRNA sense strand
uuuuaaagagcgagaggaa

SEQ ID NO: 2443609 - RNA, 19 nt, Homo sapiens
  misc_RNA (1)...(19): siRNA sense strand
ccggaaacacuuugagaag

SEQ ID NO: 2443610 - RNA, 19 nt, Homo sapiens
  misc_RNA (1)...(19): siRNA sense strand
cguacgugaugguggucau

SEQ ID NO: 2443611 - RNA, 19 nt, Homo sapiens
  misc_RNA (1)...(19): siRNA sense strand
cccaaaucauugaggccga

SEQ ID NO: 2443612 - RNA, 19 nt, Homo sapiens
  misc_RNA (1)...(19): siRNA sense strand
ccucaggaauuuugcccaa

SEQ ID NO: 2443613 - RNA, 19 nt, Homo sapiens
  misc_RNA (1)...(19): siRNA sense strand
cgauauugauagagaguau

SEQ ID NO: 2443614 - RNA, 19 nt, Homo sapiens
  misc_RNA (1)...(19): siRNA sense strand
agauauagauacagaggua

SEQ ID NO: 2443615 - RNA, 19 nt, Homo sapiens
  misc_RNA (1)...(19): siRNA sense strand
agaacagacugcagagaaa

SEQ ID NO: 2443616 - RNA, 19 nt, Homo sapiens
  misc_RNA (1)...(19): siRNA sense strand
ccuaaugaaucuacagaaa

SEQ ID NO: 2443617 - RNA, 19 nt, Homo sapiens
  misc_RNA (1)...(19): siRNA sense strand
ccagaaacuaugagaacaa

SEQ ID NO: 2443618 - RNA, 19 nt, Homo sapiens
  misc_RNA (1)...(19): siRNA sense strand
caguaaacccuguggaauu

SEQ ID NO: 2443619 - RNA, 19 nt, Homo sapiens
  misc_RNA (1)...(19): siRNA sense strand
ggaaauggaagaugggcua

SEQ ID NO: 2443620 - RNA, 19 nt, Homo sapiens
  misc_RNA (1)...(19): siRNA sense strand
ccgaaaggcaugagaccaa

SEQ ID NO: 2443621 - RNA, 19 nt, Homo sapiens
  misc_RNA (1)...(19): siRNA sense strand
ggaugaauggaaaggauaa

SEQ ID NO: 2443622 - RNA, 19 nt, Homo sapiens
  misc_RNA (1)...(19): siRNA sense strand
acaaagaggacaaggauuu

SEQ ID NO: 2443623 - RNA, 19 nt, Homo sapiens
  misc_RNA (1)...(19): siRNA sense strand
gaauaaaagcugaagcaaa

SEQ ID NO: 2443624 - RNA, 19 nt, Homo sapiens
  misc_RNA (1)...(19): siRNA sense strand
acccaaacauccagggaaa

SEQ ID NO: 2443625 - RNA, 19 nt, Homo sapiens
  misc_RNA (1)...(19): siRNA sense strand
caaacuagugguaggauaa

SEQ ID NO: 2443626 - RNA, 19 nt, Homo sapiens
  misc_RNA (1)...(19): siRNA sense strand
gagaaauacuacugauaca

SEQ ID NO: 2443627 - RNA, 19 nt, Homo sapiens
  misc_RNA (1)...(19): siRNA sense strand
gagaagaggaugaugaaga

SEQ ID NO: 2443628 - RNA, 19 nt, Homo sapiens
  misc_RNA (1)...(19): siRNA sense strand
gguaaucauuggagaauca

SEQ ID NO: 2443629 - RNA, 19 nt, Homo sapiens
  misc_RNA (1)...(19): siRNA sense strand
ggaaaagauuugaaagaga

SEQ ID NO: 2443630 - RNA, 19 nt, Homo sapiens
  misc_RNA (1)...(19): siRNA sense strand
ugauuuaggcucaggauua

SEQ ID NO: 2443631 - RNA, 19 nt, Homo sapiens
  misc_RNA (1)...(19): siRNA sense strand
agaugaaguucuaggugaa

SEQ ID NO: 2443632 - RNA, 19 nt, Homo sapiens
  misc_RNA (1)...(19): siRNA sense strand
ggauauugauuuaggcuca

SEQ ID NO: 2443633 - RNA, 19 nt, Homo sapiens
  misc_RNA (1)...(19): siRNA sense strand
agaagaagaugaagauaca

SEQ ID NO: 2443634 - RNA, 19 nt, Homo sapiens
  misc_RNA (1)...(19): siRNA sense strand
acaaacuagugguaggaua

SEQ ID NO: 2443635 - RNA, 19 nt, Homo sapiens
  misc_RNA (1)...(19): siRNA sense strand
ccaacagaaguaagagaua

SEQ ID NO: 2443636 - RNA, 19 nt, Homo sapiens
  misc_RNA (1)...(19): siRNA sense strand
ggacagaguaguugcugaa

SEQ ID NO: 2443637 - RNA, 19 nt, Homo sapiens
  misc_RNA (1)...(19): siRNA sense strand
gguuacugaugaagacaua

SEQ ID NO: 2443638 - RNA, 19 nt, Homo sapiens
  misc_RNA (1)...(19): siRNA sense strand
cuuugaagguaguggguca

SEQ ID NO: 2443639 - RNA, 19 nt, Homo sapiens
  misc_RNA (1)...(19): siRNA sense strand
ccuuaaaaccuaacagaaa

SEQ ID NO: 2443640 - RNA, 19 nt, Homo sapiens
  misc_RNA (1)...(19): siRNA sense strand
gggaugaauggaaaggaua

SEQ ID NO: 2443641 - RNA, 19 nt, Homo sapiens
  misc_RNA (1)...(19): siRNA sense strand
aagaaaugaaggaggaaga

SEQ ID NO: 2443642 - RNA, 19 nt, Homo sapiens
  misc_RNA (1)...(19): siRNA sense strand
accaagaagcccugggaua

SEQ ID NO: 2443643 - RNA, 19 nt, Homo sapiens
  misc_RNA (1)...(19): siRNA sense strand
agaaaccacuacugagaaa

SEQ ID NO: 2443644 - RNA, 19 nt, Homo sapiens
  misc_RNA (1)...(19): siRNA sense strand
ugaaacaacaucagaggaa

SEQ ID NO: 2443645 - RNA, 19 nt, Homo sapiens
  misc_RNA (1)...(19): siRNA sense strand
auaaagucaaagugggaaa

SEQ ID NO: 2443646 - RNA, 19 nt, Homo sapiens
  misc_RNA (1)...(19): siRNA sense strand
ggaaggaggaggagggaac

SEQ ID NO: 2443647 - RNA, 19 nt, Homo sapiens
  misc_RNA (1)...(19): siRNA sense strand
uagagaaggaggaaguaaa

SEQ ID NO: 2443648 - RNA, 19 nt, Homo sapiens
  misc_RNA (1)...(19): siRNA sense strand
ccagagaugagaacagaua

SEQ ID NO: 2443649 - RNA, 19 nt, Homo sapiens
  misc_RNA (1)...(19): siRNA sense strand
uggcauuaaugaagaguca

SEQ ID NO: 2443650 - RNA, 19 nt, Homo sapiens
  misc_RNA (1)...(19): siRNA sense strand
gggauggugucguggaaga

SEQ ID NO: 2443651 - RNA, 19 nt, Homo sapiens
  misc_RNA (1)...(19): siRNA sense strand
agaaagaacagaaacacua

SEQ ID NO: 2443652 - RNA, 19 nt, Homo sapiens
  misc_RNA (1)...(19): siRNA sense strand
ggaauuugaaaguggaaca

SEQ ID NO: 2443653 - RNA, 19 nt, Homo sapiens
  misc_RNA (1)...(19): siRNA sense strand
cccuuuaguugaugaauua

SEQ ID NO: 2443654 - RNA, 19 nt, Homo sapiens
  misc_RNA (1)...(19): siRNA sense strand
cagagaaauacuacugaua

SEQ ID NO: 2443655 - RNA, 19 nt, Homo sapiens
  misc_RNA (1)...(19): siRNA sense strand
cagcagaaguggaagguac

SEQ ID NO: 2443656 - RNA, 19 nt, Homo sapiens
  misc_RNA (1)...(19): siRNA sense strand
auaaagaaaugaaggagga

SEQ ID NO: 2443657 - RNA, 19 nt, Homo sapiens
  misc_RNA (1)...(19): siRNA sense strand
acaaaugguuucugauaga

SEQ ID NO: 2443658 - RNA, 19 nt, Homo sapiens
  misc_RNA (1)...(19): siRNA sense strand
aguaagagauauggaggaa

SEQ ID NO: 2443659 - RNA, 19 nt, Homo sapiens
  misc_RNA (1)...(19): siRNA sense strand
cuaccaaguuuguaaguga

SEQ ID NO: 2443660 - RNA, 19 nt, Homo sapiens
  misc_RNA (1)...(19): siRNA sense strand
ugucaaauacagugucaua

SEQ ID NO: 2443661 - RNA, 19 nt, Homo sapiens
  misc_RNA (1)...(19): siRNA sense strand
augagugauuugaguguaa

SEQ ID NO: 2443662 - RNA, 19 nt, Homo sapiens
  misc_RNA (1)...(19): siRNA sense strand
agaagaagagugugcaaau

SEQ ID NO: 2443663 - RNA, 19 nt, Homo sapiens
  misc_RNA (1)...(19): siRNA sense strand
agaaguaacauuuggugaa

SEQ ID NO: 2443664 - RNA, 19 nt, Homo sapiens
  misc_RNA (1)...(19): siRNA sense strand
caguagagaaggaggaagu

SEQ ID NO: 2443665 - RNA, 19 nt, Homo sapiens
  misc_RNA (1)...(19): siRNA sense strand
gggagaagaggaugaugaa

SEQ ID NO: 2443666 - RNA, 19 nt, Homo sapiens
  misc_RNA (1)...(19): siRNA sense strand
cuucuacauuugagguaua

SEQ ID NO: 2443667 - RNA, 19 nt, Homo sapiens
  misc_RNA (1)...(19): siRNA sense strand
agaaauaaacccugaaacu

SEQ ID NO: 2443668 - RNA, 19 nt, Homo sapiens
  misc_RNA (1)...(19): siRNA sense strand
cuggagacuucuaaugaaa

SEQ ID NO: 2443669 - RNA, 19 nt, Homo sapiens
  misc_RNA (1)...(19): siRNA sense strand
ggaugaagauaauacaaca

SEQ ID NO: 2443670 - RNA, 19 nt, Homo sapiens
  misc_RNA (1)...(19): siRNA sense strand
gguggaaggauuagcauuu

SEQ ID NO: 2443671 - RNA, 19 nt, Homo sapiens
  misc_RNA (1)...(19): siRNA sense strand
ugaaaguggaacagccaaa

SEQ ID NO: 2443672 - RNA, 19 nt, Homo sapiens
  misc_RNA (1)...(19): siRNA sense strand
uggagaaggaucuggagaa

SEQ ID NO: 2443673 - RNA, 19 nt, Homo sapiens
  misc_RNA (1)...(19): siRNA sense strand
ggaauuuaauacugagguu

SEQ ID NO: 2443674 - RNA, 19 nt, Homo sapiens
  misc_RNA (1)...(19): siRNA sense strand
agaagagaaagaacagaaa

SEQ ID NO: 2443675 - RNA, 19 nt, Homo sapiens
  misc_RNA (1)...(19): siRNA sense strand
aagagaaagaacagaaaca

SEQ ID NO: 2443676 - RNA, 19 nt, Homo sapiens
  misc_RNA (1)...(19): siRNA sense strand
augaagaagaagaagaaga

SEQ ID NO: 2443677 - RNA, 19 nt, Homo sapiens
  misc_RNA (1)...(19): siRNA sense strand
gaagaagaagagugugcaa

SEQ ID NO: 2443678 - RNA, 19 nt, Homo sapiens
  misc_RNA (1)...(19): siRNA sense strand
acacagucugaaagggaaa

SEQ ID NO: 2443679 - RNA, 19 nt, Homo sapiens
  misc_RNA (1)...(19): siRNA sense strand
ccucaucagcaaaggacaa

SEQ ID NO: 2443680 - RNA, 19 nt, Homo sapiens
  misc_RNA (1)...(19): siRNA sense strand
acagcaucguacagaaaua

SEQ ID NO: 2443681 - RNA, 19 nt, Homo sapiens
  misc_RNA (1)...(19): siRNA sense strand
uagcacagaaacagaauua

SEQ ID NO: 2443682 - RNA, 19 nt, Homo sapiens
  misc_RNA (1)...(19): siRNA sense strand
acaagauguuugagcauga

SEQ ID NO: 2443683 - RNA, 19 nt, Homo sapiens
  misc_RNA (1)...(19): siRNA sense strand
cagaugaaauacaagaaga

SEQ ID NO: 2443684 - RNA, 19 nt, Homo sapiens
  misc_RNA (1)...(19): siRNA sense strand
gaagaaacaaccagugaca

SEQ ID NO: 2443685 - RNA, 19 nt, Homo sapiens
  misc_RNA (1)...(19): siRNA sense strand
gggcagaaucagucacaga

SEQ ID NO: 2443686 - RNA, 19 nt, Homo sapiens
  misc_RNA (1)...(19): siRNA sense strand
aagcagaagaagaugaaga

SEQ ID NO: 2443687 - RNA, 19 nt, Homo sapiens
  misc_RNA (1)...(19): siRNA sense strand
ggauaaucacagaaagcuu

SEQ ID NO: 2443688 - RNA, 19 nt, Homo sapiens
  misc_RNA (1)...(19): siRNA sense strand
ccaaacauccagggaaaua

SEQ ID NO: 2443689 - RNA, 19 nt, Homo sapiens
  misc_RNA (1)...(19): siRNA sense strand
aguggugacuuuagagaau

SEQ ID NO: 2443690 - RNA, 19 nt, Homo sapiens
  misc_RNA (1)...(19): siRNA sense strand
gcauggaagaaauggcaaa

SEQ ID NO: 2443691 - RNA, 19 nt, Homo sapiens
  misc_RNA (1)...(19): siRNA sense strand
augaagaccugaagcgaga

SEQ ID NO: 2443692 - RNA, 19 nt, Homo sapiens
  misc_RNA (1)...(19): siRNA sense strand
cagugaaggcacagaugaa

SEQ ID NO: 2443693 - RNA, 19 nt, Homo sapiens
  misc_RNA (1)...(19): siRNA sense strand
uuaaccaagcuaagagaaa

SEQ ID NO: 2443694 - RNA, 19 nt, Homo sapiens
  misc_RNA (1)...(19): siRNA sense strand
gcacagaugaagaagagga

SEQ ID NO: 2443695 - RNA, 19 nt, Homo sapiens
  misc_RNA (1)...(19): siRNA sense strand
aagcaacaaacuugaacaa

SEQ ID NO: 2443696 - RNA, 19 nt, Homo sapiens
  misc_RNA (1)...(19): siRNA sense strand
gaacuaaguaauugugcca

SEQ ID NO: 2443697 - RNA, 19 nt, Homo sapiens
  misc_RNA (1)...(19): siRNA sense strand
uguaaaggaaguuugggaa

SEQ ID NO: 2443698 - RNA, 19 nt, Homo sapiens
  misc_RNA (1)...(19): siRNA sense strand
ugaagaagaggaacgggaa

SEQ ID NO: 2443699 - RNA, 19 nt, Homo sapiens
  misc_RNA (1)...(19): siRNA sense strand
cuuccugauacuauagaaa

SEQ ID NO: 2443700 - RNA, 19 nt, Homo sapiens
  misc_RNA (1)...(19): siRNA sense strand
gugaaggcacagaugaaga

SEQ ID NO: 2443701 - RNA, 19 nt, Homo sapiens
  misc_RNA (1)...(19): siRNA sense strand
aagaagaggaacgggaauu

SEQ ID NO: 2443702 - RNA, 19 nt, Homo sapiens
  misc_RNA (1)...(19): siRNA sense strand
ggagaagagcagaucacca

SEQ ID NO: 2443703 - RNA, 19 nt, Homo sapiens
  misc_RNA (1)...(19): siRNA sense strand
agggaagauggaagaguca

SEQ ID NO: 2443704 - RNA, 19 nt, Homo sapiens
  misc_RNA (1)...(19): siRNA sense strand
gagaaaaggucaccaggga

SEQ ID NO: 2443705 - RNA, 19 nt, Homo sapiens
  misc_RNA (1)...(19): siRNA sense strand
gcaaaaucuacauacguua

SEQ ID NO: 2443706 - RNA, 19 nt, Homo sapiens
  misc_RNA (1)...(19): siRNA sense strand
gugccagcuuggagaaacu

SEQ ID NO: 2443707 - RNA, 19 nt, Homo sapiens
  misc_RNA (1)...(19): siRNA sense strand
cacagaugaagaagaggaa

SEQ ID NO: 2443708 - RNA, 19 nt, Homo sapiens
  misc_RNA (1)...(19): siRNA sense strand
cauacaagagucacggaga

SEQ ID NO: 2443709 - RNA, 19 nt, Homo sapiens
  misc_RNA (1)...(19): siRNA sense strand
uccugauacuauagaaaga

SEQ ID NO: 2443710 - RNA, 19 nt, Homo sapiens
  misc_RNA (1)...(19): siRNA sense strand
ccaguaugcauggaagaaa

SEQ ID NO: 2443711 - RNA, 19 nt, Homo sapiens
  misc_RNA (1)...(19): siRNA sense strand
aacacaagcuagugcggau

SEQ ID NO: 2443712 - RNA, 19 nt, Homo sapiens
  misc_RNA (1)...(19): siRNA sense strand
cugaagcgagagaaggaau

SEQ ID NO: 2443713 - RNA, 19 nt, Homo sapiens
  misc_RNA (1)...(19): siRNA sense strand
cuguaaaggaaguuuggga

SEQ ID NO: 2443714 - RNA, 19 nt, Homo sapiens
  misc_RNA (1)...(19): siRNA sense strand
gcuuacuagacuucaggaa

SEQ ID NO: 2443715 - RNA, 19 nt, Homo sapiens
  misc_RNA (1)...(19): siRNA sense strand
cugcaagauauuccaguau

SEQ ID NO: 2443716 - RNA, 19 nt, Homo sapiens
  misc_RNA (1)...(19): siRNA sense strand
augaagaagaggaacggga

SEQ ID NO: 2443717 - RNA, 19 nt, Homo sapiens
  misc_RNA (1)...(19): siRNA sense strand
cugaauucauuggaagauu

SEQ ID NO: 2443718 - RNA, 19 nt, Homo sapiens
  misc_RNA (1)...(19): siRNA sense strand
ugaacaacuuccugauacu

SEQ ID NO: 2443719 - RNA, 19 nt, Homo sapiens
  misc_RNA (1)...(19): siRNA sense strand
gggagaugacagagcggau

SEQ ID NO: 2443720 - RNA, 19 nt, Homo sapiens
  misc_RNA (1)...(19): siRNA sense strand
agguguucgccaaggacaa

SEQ ID NO: 2443721 - RNA, 19 nt, Homo sapiens
  misc_RNA (1)...(19): siRNA sense strand
ccgugcacgugguggacuu

SEQ ID NO: 2443722 - RNA, 19 nt, Homo sapiens
  misc_RNA (1)...(19): siRNA sense strand
gcuauauggcauugcucau

SEQ ID NO: 2443723 - RNA, 19 nt, Homo sapiens
  misc_RNA (1)...(19): siRNA sense strand
ggaucgaaggccucaucaa

SEQ ID NO: 2443724 - RNA, 19 nt, Homo sapiens
  misc_RNA (1)...(19): siRNA sense strand
ugaagcagguguucgccaa

SEQ ID NO: 2443725 - RNA, 19 nt, Homo sapiens
  misc_RNA (1)...(19): siRNA sense strand
gggagaugacagagcggau

SEQ ID NO: 2443726 - RNA, 19 nt, Homo sapiens
  misc_RNA (1)...(19): siRNA sense strand
agguguucgccaaggacaa

SEQ ID NO: 2443727 - RNA, 19 nt, Homo sapiens
  misc_RNA (1)...(19): siRNA sense strand
ccgugcacgugguggacuu

SEQ ID NO: 2443728 - RNA, 19 nt, Homo sapiens
  misc_RNA (1)...(19): siRNA sense strand
gcuauauggcauugcucau

SEQ ID NO: 2443729 - RNA, 19 nt, Homo sapiens
  misc_RNA (1)...(19): siRNA sense strand
ggaucgaaggccucaucaa

SEQ ID NO: 2443730 - RNA, 19 nt, Homo sapiens
  misc_RNA (1)...(19): siRNA sense strand
ugaagcagguguucgccaa

SEQ ID NO: 2443731 - RNA, 19 nt, Homo sapiens
  misc_RNA (1)...(19): siRNA sense strand
ggucagaucauuaggguuc

SEQ ID NO: 2443732 - RNA, 19 nt, Homo sapiens
  misc_RNA (1)...(19): siRNA sense strand
cugcuggaguaucgggcua

SEQ ID NO: 2443733 - RNA, 19 nt, Homo sapiens
  misc_RNA (1)...(19): siRNA sense strand
ccucuuuccugaagggcau

SEQ ID NO: 2443734 - RNA, 19 nt, Homo sapiens
  misc_RNA (1)...(19): siRNA sense strand
uggaaagggcagagagcac

SEQ ID NO: 2443735 - RNA, 19 nt, Homo sapiens
  misc_RNA (1)...(19): siRNA sense strand
ccaaagauggcuaugcaga

SEQ ID NO: 2443736 - RNA, 19 nt, Homo sapiens
  misc_RNA (1)...(19): siRNA sense strand
cugugauggcucuggcuua

SEQ ID NO: 2443737 - RNA, 19 nt, Homo sapiens
  misc_RNA (1)...(19): siRNA sense strand
agaaaucgcaucaagguga

SEQ ID NO: 2443738 - RNA, 19 nt, Homo sapiens
  misc_RNA (1)...(19): siRNA sense strand
ggaauaagacagaggucga

SEQ ID NO: 2443739 - RNA, 19 nt, Homo sapiens
  misc_RNA (1)...(19): siRNA sense strand
uagccaagagccaggacaa

SEQ ID NO: 2443740 - RNA, 19 nt, Homo sapiens
  misc_RNA (1)...(19): siRNA sense strand
cuggaaacccacaggcaca

SEQ ID NO: 2443741 - RNA, 19 nt, Homo sapiens
  misc_RNA (1)...(19): siRNA sense strand
ccgucuuccaugaaauaaa

SEQ ID NO: 2443742 - RNA, 19 nt, Homo sapiens
  misc_RNA (1)...(19): siRNA sense strand
uggucaaugcagacggaca

SEQ ID NO: 2443743 - RNA, 19 nt, Homo sapiens
  misc_RNA (1)...(19): siRNA sense strand
ggaggaagaccaagggaga

SEQ ID NO: 2443744 - RNA, 19 nt, Homo sapiens
  misc_RNA (1)...(19): siRNA sense strand
aggagaaagaacaggagaa

SEQ ID NO: 2443745 - RNA, 19 nt, Homo sapiens
  misc_RNA (1)...(19): siRNA sense strand
aggaggaagaggaggaaga

SEQ ID NO: 2443746 - RNA, 19 nt, Homo sapiens
  misc_RNA (1)...(19): siRNA sense strand
cuggaaaugaagaggaaga

SEQ ID NO: 2443747 - RNA, 19 nt, Homo sapiens
  misc_RNA (1)...(19): siRNA sense strand
augaagaggaagaaucaaa

SEQ ID NO: 2443748 - RNA, 19 nt, Homo sapiens
  misc_RNA (1)...(19): siRNA sense strand
aggaagaggaggaagacca

SEQ ID NO: 2443749 - RNA, 19 nt, Homo sapiens
  misc_RNA (1)...(19): siRNA sense strand
ugacugaggaggagccaga

SEQ ID NO: 2443750 - RNA, 19 nt, Homo sapiens
  misc_RNA (1)...(19): siRNA sense strand
ccaagggagaaccaggaaa

SEQ ID NO: 2443751 - RNA, 19 nt, Homo sapiens
  misc_RNA (1)...(19): siRNA sense strand
augaaaggaaaguggcaca

SEQ ID NO: 2443752 - RNA, 19 nt, Homo sapiens
  misc_RNA (1)...(19): siRNA sense strand
gaaugaaaggaaaguggca

SEQ ID NO: 2443753 - RNA, 19 nt, Homo sapiens
  misc_RNA (1)...(19): siRNA sense strand
gggagaaccaggaaacgga

SEQ ID NO: 2443754 - RNA, 19 nt, Homo sapiens
  misc_RNA (1)...(19): siRNA sense strand
aagcagcgcaugaaggaga

SEQ ID NO: 2443755 - RNA, 19 nt, Homo sapiens
  misc_RNA (1)...(19): siRNA sense strand
uggaaaugaagaggaagaa

SEQ ID NO: 2443756 - RNA, 19 nt, Homo sapiens
  misc_RNA (1)...(19): siRNA sense strand
aggcaaugaaagagagcua

SEQ ID NO: 2443757 - RNA, 19 nt, Homo sapiens
  misc_RNA (1)...(19): siRNA sense strand
gugagaacguugauggcaa

SEQ ID NO: 2443758 - RNA, 19 nt, Homo sapiens
  misc_RNA (1)...(19): siRNA sense strand
aggaagaagaagagaaguu

SEQ ID NO: 2443759 - RNA, 19 nt, Homo sapiens
  misc_RNA (1)...(19): siRNA sense strand
gggaguuggaagagagaga

SEQ ID NO: 2443760 - RNA, 19 nt, Homo sapiens
  misc_RNA (1)...(19): siRNA sense strand
agaaagagcaggaagcaga

SEQ ID NO: 2443761 - RNA, 19 nt, Homo sapiens
  misc_RNA (1)...(19): siRNA sense strand
ucgagaugucguagaguua

SEQ ID NO: 2443762 - RNA, 19 nt, Homo sapiens
  misc_RNA (1)...(19): siRNA sense strand
cagccaauacagaggaaau

SEQ ID NO: 2443763 - RNA, 19 nt, Homo sapiens
  misc_RNA (1)...(19): siRNA sense strand
aggaaagcaaggaaggcaa

SEQ ID NO: 2443764 - RNA, 19 nt, Homo sapiens
  misc_RNA (1)...(19): siRNA sense strand
gugcagaugugaaugccaa

SEQ ID NO: 2443765 - RNA, 19 nt, Homo sapiens
  misc_RNA (1)...(19): siRNA sense strand
ggacuaaaguagacaggac

SEQ ID NO: 2443766 - RNA, 19 nt, Homo sapiens
  misc_RNA (1)...(19): siRNA sense strand
ugugcaagauggacagcaa

SEQ ID NO: 2443767 - RNA, 19 nt, Homo sapiens
  misc_RNA (1)...(19): siRNA sense strand
cuuugguggacuugggaaa

SEQ ID NO: 2443768 - RNA, 19 nt, Homo sapiens
  misc_RNA (1)...(19): siRNA sense strand
cuguaauuaaagaggaaga

SEQ ID NO: 2443769 - RNA, 19 nt, Homo sapiens
  misc_RNA (1)...(19): siRNA sense strand
ccacuaacaaagaaaccaa

SEQ ID NO: 2443770 - RNA, 19 nt, Homo sapiens
  misc_RNA (1)...(19): siRNA sense strand
agacaaacaguguggagga

SEQ ID NO: 2443771 - RNA, 19 nt, Homo sapiens
  misc_RNA (1)...(19): siRNA sense strand
aagaggaagaagaagagaa

SEQ ID NO: 2443772 - RNA, 19 nt, Homo sapiens
  misc_RNA (1)...(19): siRNA sense strand
guuggaagagagagagaca

SEQ ID NO: 2443773 - RNA, 19 nt, Homo sapiens
  misc_RNA (1)...(19): siRNA sense strand
acaccagcuccuaaagaaa

SEQ ID NO: 2443774 - RNA, 19 nt, Homo sapiens
  misc_RNA (1)...(19): siRNA sense strand
aacaaagaaaccaaggaua

SEQ ID NO: 2443775 - RNA, 19 nt, Homo sapiens
  misc_RNA (1)...(19): siRNA sense strand
gucuuaagcuggaggccau

SEQ ID NO: 2443776 - RNA, 19 nt, Homo sapiens
  misc_RNA (1)...(19): siRNA sense strand
gaguuggaagagagagaga

SEQ ID NO: 2443777 - RNA, 19 nt, Homo sapiens
  misc_RNA (1)...(19): siRNA sense strand
ucguagaguuacuuaucaa

SEQ ID NO: 2443778 - RNA, 19 nt, Homo sapiens
  misc_RNA (1)...(19): siRNA sense strand
aggaaggcaaugaaagaga

SEQ ID NO: 2443779 - RNA, 19 nt, Homo sapiens
  misc_RNA (1)...(19): siRNA sense strand
aucgaagagcccaggaaua

SEQ ID NO: 2443780 - RNA, 19 nt, Homo sapiens
  misc_RNA (1)...(19): siRNA sense strand
aggauaggagagaagacaa

SEQ ID NO: 2443781 - RNA, 19 nt, Homo sapiens
  misc_RNA (1)...(19): siRNA sense strand
aagaaaaggccaagaugau

SEQ ID NO: 2443782 - RNA, 19 nt, Homo sapiens
  misc_RNA (1)...(19): siRNA sense strand
aguggaggccagaggguca

SEQ ID NO: 2443783 - RNA, 19 nt, Homo sapiens
  misc_RNA (1)...(19): siRNA sense strand
caucaauccagcaaguaau

SEQ ID NO: 2443784 - RNA, 19 nt, Homo sapiens
  misc_RNA (1)...(19): siRNA sense strand
aagagguggcugagguaga

SEQ ID NO: 2443785 - RNA, 19 nt, Homo sapiens
  misc_RNA (1)...(19): siRNA sense strand
auggagucccucuggguaa

SEQ ID NO: 2443786 - RNA, 19 nt, Homo sapiens
  misc_RNA (1)...(19): siRNA sense strand
ggguaauauccaaacuuca

SEQ ID NO: 2443787 - RNA, 19 nt, Homo sapiens
  misc_RNA (1)...(19): siRNA sense strand
ugggaaagagguugcuaga

SEQ ID NO: 2443788 - RNA, 19 nt, Homo sapiens
  misc_RNA (1)...(19): siRNA sense strand
acaaacaguguggaggaaa

SEQ ID NO: 2443789 - RNA, 19 nt, Homo sapiens
  misc_RNA (1)...(19): siRNA sense strand
gcaaugaaagagagcuacu

SEQ ID NO: 2443790 - RNA, 19 nt, Homo sapiens
  misc_RNA (1)...(19): siRNA sense strand
ugguugaagagguggcuga

SEQ ID NO: 2443791 - RNA, 19 nt, Homo sapiens
  misc_RNA (1)...(19): siRNA sense strand
acaguguggaggaaagcaa

SEQ ID NO: 2443792 - RNA, 19 nt, Homo sapiens
  misc_RNA (1)...(19): siRNA sense strand
caaugcagaaucaggugaa

SEQ ID NO: 2443793 - RNA, 19 nt, Homo sapiens
  misc_RNA (1)...(19): siRNA sense strand
caagaaaaggccaagauga

SEQ ID NO: 2443794 - RNA, 19 nt, Homo sapiens
  misc_RNA (1)...(19): siRNA sense strand
agaggaagaagaagagaag

SEQ ID NO: 2443795 - RNA, 19 nt, Homo sapiens
  misc_RNA (1)...(19): siRNA sense strand
acuagaguuuccauggcaa

SEQ ID NO: 2443796 - RNA, 19 nt, Homo sapiens
  misc_RNA (1)...(19): siRNA sense strand
uguacaggagggagaguau

SEQ ID NO: 2443797 - RNA, 19 nt, Homo sapiens
  misc_RNA (1)...(19): siRNA sense strand
gugguguacaggagggaga

SEQ ID NO: 2443798 - RNA, 19 nt, Homo sapiens
  misc_RNA (1)...(19): siRNA sense strand
gaucggaggugcagccagu

SEQ ID NO: 2443799 - RNA, 19 nt, Homo sapiens
  misc_RNA (1)...(19): siRNA sense strand
gggagaguauguucggcuu

SEQ ID NO: 2443800 - RNA, 19 nt, Homo sapiens
  misc_RNA (1)...(19): siRNA sense strand
guuucgggacggaggugaa

SEQ ID NO: 2443801 - RNA, 19 nt, Homo sapiens
  misc_RNA (1)...(19): siRNA sense strand
aggaagaagaggagguuaa

SEQ ID NO: 2443802 - RNA, 19 nt, Homo sapiens
  misc_RNA (1)...(19): siRNA sense strand
aggaagaagagguggaauu

SEQ ID NO: 2443803 - RNA, 19 nt, Homo sapiens
  misc_RNA (1)...(19): siRNA sense strand
cugaagauccagaggaaga

SEQ ID NO: 2443804 - RNA, 19 nt, Homo sapiens
  misc_RNA (1)...(19): siRNA sense strand
aggaagaagaggaagaaga

SEQ ID NO: 2443805 - RNA, 19 nt, Homo sapiens
  misc_RNA (1)...(19): siRNA sense strand
agguuaaggaggaggaaga

SEQ ID NO: 2443806 - RNA, 19 nt, Homo sapiens
  misc_RNA (1)...(19): siRNA sense strand
uuagaauaucugugggaaa

SEQ ID NO: 2443807 - RNA, 19 nt, Homo sapiens
  misc_RNA (1)...(19): siRNA sense strand
uggaauuagaggaggaaga

SEQ ID NO: 2443808 - RNA, 19 nt, Homo sapiens
  misc_RNA (1)...(19): siRNA sense strand
aggaggaagaagaggaaga

SEQ ID NO: 2443809 - RNA, 19 nt, Homo sapiens
  misc_RNA (1)...(19): siRNA sense strand
aggaagaggagguugagaa

SEQ ID NO: 2443810 - RNA, 19 nt, Homo sapiens
  misc_RNA (1)...(19): siRNA sense strand
cagagaaagcuguggcuga

SEQ ID NO: 2443811 - RNA, 19 nt, Homo sapiens
  misc_RNA (1)...(19): siRNA sense strand
cccugaagauccagaggaa

SEQ ID NO: 2443812 - RNA, 19 nt, Homo sapiens
  misc_RNA (1)...(19): siRNA sense strand
ccaauaugaaccugggcua

SEQ ID NO: 2443813 - RNA, 19 nt, Homo sapiens
  misc_RNA (1)...(19): siRNA sense strand
aauuagaggaggaagaaga

SEQ ID NO: 2443814 - RNA, 19 nt, Homo sapiens
  misc_RNA (1)...(19): siRNA sense strand
cagaggaagaggagguuga

SEQ ID NO: 2443815 - RNA, 19 nt, Homo sapiens
  misc_RNA (1)...(19): siRNA sense strand
ccaagaaaggucucagcaa

SEQ ID NO: 2443816 - RNA, 19 nt, Homo sapiens
  misc_RNA (1)...(19): siRNA sense strand
aggaagaagaugaugacuu

SEQ ID NO: 2443817 - RNA, 19 nt, Homo sapiens
  misc_RNA (1)...(19): siRNA sense strand
cagacaugcaagaagcaaa

SEQ ID NO: 2443818 - RNA, 19 nt, Homo sapiens
  misc_RNA (1)...(19): siRNA sense strand
ugggaguacccgugaacaa

SEQ ID NO: 2443819 - RNA, 19 nt, Homo sapiens
  misc_RNA (1)...(19): siRNA sense strand
ccucuaugcccaagccaaa

SEQ ID NO: 2443820 - RNA, 19 nt, Homo sapiens
  misc_RNA (1)...(19): siRNA sense strand
ccagguaggcugaagaaaa

SEQ ID NO: 2443821 - RNA, 19 nt, Homo sapiens
  misc_RNA (1)...(19): siRNA sense strand
cgaggaggaagaagaggaa

SEQ ID NO: 2443822 - RNA, 19 nt, Homo sapiens
  misc_RNA (1)...(19): siRNA sense strand
gguugagaaggaagggaau

SEQ ID NO: 2443823 - RNA, 19 nt, Homo sapiens
  misc_RNA (1)...(19): siRNA sense strand
gaucaaaguaccugccuga

SEQ ID NO: 2443824 - RNA, 19 nt, Homo sapiens
  misc_RNA (1)...(19): siRNA sense strand
agacaaacgccaagugacu

SEQ ID NO: 2443825 - RNA, 19 nt, Homo sapiens
  misc_RNA (1)...(19): siRNA sense strand
cccagguacugaagacaaa

SEQ ID NO: 2443826 - RNA, 19 nt, Homo sapiens
  misc_RNA (1)...(19): siRNA sense strand
aagaaaggucucagcaaga

SEQ ID NO: 2443827 - RNA, 19 nt, Homo sapiens
  misc_RNA (1)...(19): siRNA sense strand
ggcaauggagacagaggaa

SEQ ID NO: 2443828 - RNA, 19 nt, Homo sapiens
  misc_RNA (1)...(19): siRNA sense strand
agguggaauuagaggagga

SEQ ID NO: 2443829 - RNA, 19 nt, Homo sapiens
  misc_RNA (1)...(19): siRNA sense strand
aagaggagguuaaggagga

SEQ ID NO: 2443830 - RNA, 19 nt, Homo sapiens
  misc_RNA (1)...(19): siRNA sense strand
ggucucagcaagagcaaga

SEQ ID NO: 2443831 - RNA, 19 nt, Homo sapiens
  misc_RNA (1)...(19): siRNA sense strand
aggaggaggaagaagauga

SEQ ID NO: 2443832 - RNA, 19 nt, Homo sapiens
  misc_RNA (1)...(19): siRNA sense strand
agacaugcaagaagcaaau

SEQ ID NO: 2443833 - RNA, 19 nt, Homo sapiens
  misc_RNA (1)...(19): siRNA sense strand
agguugagaaggaagggaa

SEQ ID NO: 2443834 - RNA, 19 nt, Homo sapiens
  misc_RNA (1)...(19): siRNA sense strand
ggagaagguaguagcagga

SEQ ID NO: 2443835 - RNA, 19 nt, Homo sapiens
  misc_RNA (1)...(19): siRNA sense strand
ucuuaaacuuugagcccuu

SEQ ID NO: 2443836 - RNA, 19 nt, Homo sapiens
  misc_RNA (1)...(19): siRNA sense strand
uaguagcaggagagguaaa

SEQ ID NO: 2443837 - RNA, 19 nt, Homo sapiens
  misc_RNA (1)...(19): siRNA sense strand
augaugacgaggaggaaga

SEQ ID NO: 2443838 - RNA, 19 nt, Homo sapiens
  misc_RNA (1)...(19): siRNA sense strand
aggaggaagaagaugauga

SEQ ID NO: 2443839 - RNA, 19 nt, Homo sapiens
  misc_RNA (1)...(19): siRNA sense strand
ccgagagguucguuguaga

SEQ ID NO: 2443840 - RNA, 19 nt, Homo sapiens
  misc_RNA (1)...(19): siRNA sense strand
ccgugaacaaacagcagaa

SEQ ID NO: 2443841 - RNA, 19 nt, Homo sapiens
  misc_RNA (1)...(19): siRNA sense strand
cagaagaugcccagguacu

SEQ ID NO: 2443842 - RNA, 19 nt, Homo sapiens
  misc_RNA (1)...(19): siRNA sense strand
agaagguaguagcaggaga

SEQ ID NO: 2443843 - RNA, 19 nt, Homo sapiens
  misc_RNA (1)...(19): siRNA sense strand
cgagaugggaccaagcgaa

SEQ ID NO: 2443844 - RNA, 19 nt, Homo sapiens
  misc_RNA (1)...(19): siRNA sense strand
ccaagaaagaucaaaguac

SEQ ID NO: 2443845 - RNA, 19 nt, Homo sapiens
  misc_RNA (1)...(19): siRNA sense strand
uccaccagcuacugagaaa

SEQ ID NO: 2443846 - RNA, 19 nt, Homo sapiens
  misc_RNA (1)...(19): siRNA sense strand
cuagaaaggaaaaugcuaa

SEQ ID NO: 2443847 - RNA, 19 nt, Homo sapiens
  misc_RNA (1)...(19): siRNA sense strand
gguucguuguagagagacu

SEQ ID NO: 2443848 - RNA, 19 nt, Homo sapiens
  misc_RNA (1)...(19): siRNA sense strand
cagagugaccagcaagaau

SEQ ID NO: 2443849 - RNA, 19 nt, Homo sapiens
  misc_RNA (1)...(19): siRNA sense strand
cuacaguggagaugcccua

SEQ ID NO: 2443850 - RNA, 19 nt, Homo sapiens
  misc_RNA (1)...(19): siRNA sense strand
aagaacggcuagugaccau

SEQ ID NO: 2443851 - RNA, 19 nt, Homo sapiens
  misc_RNA (1)...(19): siRNA sense strand
augacgaggaggaagaaga

SEQ ID NO: 2443852 - RNA, 19 nt, Homo sapiens
  misc_RNA (1)...(19): siRNA sense strand
gugaacaaacagcagaaaa

SEQ ID NO: 2443853 - RNA, 19 nt, Homo sapiens
  misc_RNA (1)...(19): siRNA sense strand
gguuaaggaggaggaagaa

SEQ ID NO: 2443854 - RNA, 19 nt, Homo sapiens
  misc_RNA (1)...(19): siRNA sense strand
ggagcaaagguucugggaa

SEQ ID NO: 2443855 - RNA, 19 nt, Homo sapiens
  misc_RNA (1)...(19): siRNA sense strand
gugacauaauagcagaaca

SEQ ID NO: 2443856 - RNA, 19 nt, Homo sapiens
  misc_RNA (1)...(19): siRNA sense strand
ccuauacucgagaggcuua

SEQ ID NO: 2443857 - RNA, 19 nt, Homo sapiens
  misc_RNA (1)...(19): siRNA sense strand
acauaauagcagaacagga

SEQ ID NO: 2443858 - RNA, 19 nt, Homo sapiens
  misc_RNA (1)...(19): siRNA sense strand
aggagaagcccgucuuaga

SEQ ID NO: 2443859 - RNA, 19 nt, Homo sapiens
  misc_RNA (1)...(19): siRNA sense strand
gggaauuaccucagcuuuc

SEQ ID NO: 2443860 - RNA, 19 nt, Homo sapiens
  misc_RNA (1)...(19): siRNA sense strand
caagaaaggucucagcaag

SEQ ID NO: 2443861 - RNA, 19 nt, Homo sapiens
  misc_RNA (1)...(19): siRNA sense strand
aagcuguggcugagaaguu

SEQ ID NO: 2443862 - RNA, 19 nt, Homo sapiens
  misc_RNA (1)...(19): siRNA sense strand
cugagaaaauggccuguaa

SEQ ID NO: 2443863 - RNA, 19 nt, Homo sapiens
  misc_RNA (1)...(19): siRNA sense strand
ugacauaauagcagaacag

SEQ ID NO: 2443864 - RNA, 19 nt, Homo sapiens
  misc_RNA (1)...(19): siRNA sense strand
ccuacaaggucuaugcuga

SEQ ID NO: 2443865 - RNA, 19 nt, Homo sapiens
  misc_RNA (1)...(19): siRNA sense strand
acaagaggcuggacgcaca

SEQ ID NO: 2443866 - RNA, 19 nt, Homo sapiens
  misc_RNA (1)...(19): siRNA sense strand
ccaucggauuucugagguu

SEQ ID NO: 2443867 - RNA, 19 nt, Homo sapiens
  misc_RNA (1)...(19): siRNA sense strand
ccaugaacccgcacgacau

SEQ ID NO: 2443868 - RNA, 19 nt, Homo sapiens
  misc_RNA (1)...(19): siRNA sense strand
gugagguggagcagguaaa

SEQ ID NO: 2443869 - RNA, 19 nt, Homo sapiens
  misc_RNA (1)...(19): siRNA sense strand
acaaacagcccaaggcaca

SEQ ID NO: 2443870 - RNA, 19 nt, Homo sapiens
  misc_RNA (1)...(19): siRNA sense strand
gcacagaggaccugcccuu

SEQ ID NO: 2443871 - RNA, 19 nt, Homo sapiens
  misc_RNA (1)...(19): siRNA sense strand
gaaaauccgcuuuggggaa

SEQ ID NO: 2443872 - RNA, 19 nt, Homo sapiens
  misc_RNA (1)...(19): siRNA sense strand
acuuugggcaggugaagaa

SEQ ID NO: 2443873 - RNA, 19 nt, Homo sapiens
  misc_RNA (1)...(19): siRNA sense strand
cggcgaaaugguugcacuu

SEQ ID NO: 2443874 - RNA, 19 nt, Homo sapiens
  misc_RNA (1)...(19): siRNA sense strand
ugaaaacaggacagaaaau

SEQ ID NO: 2443875 - RNA, 19 nt, Homo sapiens
  misc_RNA (1)...(19): siRNA sense strand
gaggagaaguccagagcca

SEQ ID NO: 2443876 - RNA, 19 nt, Homo sapiens
  misc_RNA (1)...(19): siRNA sense strand
aggaggagcaggagggaga

SEQ ID NO: 2443877 - RNA, 19 nt, Homo sapiens
  misc_RNA (1)...(19): siRNA sense strand
acuacaggcgggugagaaa

SEQ ID NO: 2443878 - RNA, 19 nt, Homo sapiens
  misc_RNA (1)...(19): siRNA sense strand
acgaggagagccugagaaa

SEQ ID NO: 2443879 - RNA, 19 nt, Homo sapiens
  misc_RNA (1)...(19): siRNA sense strand
augaaagauugcugaugaa

SEQ ID NO: 2443880 - RNA, 19 nt, Homo sapiens
  misc_RNA (1)...(19): siRNA sense strand
auggaugauugguuggaaa

SEQ ID NO: 2443881 - RNA, 19 nt, Homo sapiens
  misc_RNA (1)...(19): siRNA sense strand
cguccaagagcaaggaaga

SEQ ID NO: 2443882 - RNA, 19 nt, Homo sapiens
  misc_RNA (1)...(19): siRNA sense strand
ggucaaucuaccuggaaaa

SEQ ID NO: 2443883 - RNA, 19 nt, Homo sapiens
  misc_RNA (1)...(19): siRNA sense strand
acuccaggucgaugggaaa

SEQ ID NO: 2443884 - RNA, 19 nt, Homo sapiens
  misc_RNA (1)...(19): siRNA sense strand
guucagaauuccaggccca

SEQ ID NO: 2443885 - RNA, 19 nt, Homo sapiens
  misc_RNA (1)...(19): siRNA sense strand
aaggaagacuguaucgcua

SEQ ID NO: 2443886 - RNA, 19 nt, Homo sapiens
  misc_RNA (1)...(19): siRNA sense strand
agccggagccagaggagaa

SEQ ID NO: 2443887 - RNA, 19 nt, Homo sapiens
  misc_RNA (1)...(19): siRNA sense strand
gauugaaggaaaaggaaga

SEQ ID NO: 2443888 - RNA, 19 nt, Homo sapiens
  misc_RNA (1)...(19): siRNA sense strand
ucagaaaagcauaucguaa

SEQ ID NO: 2443889 - RNA, 19 nt, Homo sapiens
  misc_RNA (1)...(19): siRNA sense strand
gaugaugaacgaaggcaga

SEQ ID NO: 2443890 - RNA, 19 nt, Homo sapiens
  misc_RNA (1)...(19): siRNA sense strand
uggcauuacucuuguucau

SEQ ID NO: 2443891 - RNA, 19 nt, Homo sapiens
  misc_RNA (1)...(19): siRNA sense strand
uggucaaucuaccuggaaa

SEQ ID NO: 2443892 - RNA, 19 nt, Homo sapiens
  misc_RNA (1)...(19): siRNA sense strand
gacucaaaaucaacagaaa

SEQ ID NO: 2443893 - RNA, 19 nt, Homo sapiens
  misc_RNA (1)...(19): siRNA sense strand
ccauagaagaaauugagga

SEQ ID NO: 2443894 - RNA, 19 nt, Homo sapiens
  misc_RNA (1)...(19): siRNA sense strand
caggaaccgaacacagaaa

SEQ ID NO: 2443895 - RNA, 19 nt, Homo sapiens
  misc_RNA (1)...(19): siRNA sense strand
ugguugaacugguccaaaa

SEQ ID NO: 2443896 - RNA, 19 nt, Homo sapiens
  misc_RNA (1)...(19): siRNA sense strand
cugaauggacagaagagga

SEQ ID NO: 2443897 - RNA, 19 nt, Homo sapiens
  misc_RNA (1)...(19): siRNA sense strand
gggaaaagauugcccacga

SEQ ID NO: 2443898 - RNA, 19 nt, Homo sapiens
  misc_RNA (1)...(19): siRNA sense strand
cggcagaaggacuuugaca

SEQ ID NO: 2443899 - RNA, 19 nt, Homo sapiens
  misc_RNA (1)...(19): siRNA sense strand
agagcaaggaagacuguau

SEQ ID NO: 2443900 - RNA, 19 nt, Homo sapiens
  misc_RNA (1)...(19): siRNA sense strand
agaugaaaaugcagaaacu

SEQ ID NO: 2443901 - RNA, 19 nt, Homo sapiens
  misc_RNA (1)...(19): siRNA sense strand
cuuuacauccagacaagaa

SEQ ID NO: 2443902 - RNA, 19 nt, Homo sapiens
  misc_RNA (1)...(19): siRNA sense strand
ccaccuugcccgaugacau

SEQ ID NO: 2443903 - RNA, 19 nt, Homo sapiens
  misc_RNA (1)...(19): siRNA sense strand
uugaggaacaaauggauga

SEQ ID NO: 2443904 - RNA, 19 nt, Homo sapiens
  misc_RNA (1)...(19): siRNA sense strand
ggcagagguaugaugauau

SEQ ID NO: 2443905 - RNA, 19 nt, Homo sapiens
  misc_RNA (1)...(19): siRNA sense strand
ggcagaaggacuuugacau

SEQ ID NO: 2443906 - RNA, 19 nt, Homo sapiens
  misc_RNA (1)...(19): siRNA sense strand
caauaugguucgaguggga

SEQ ID NO: 2443907 - RNA, 19 nt, Homo sapiens
  misc_RNA (1)...(19): siRNA sense strand
cuuugagaguugggagaua

SEQ ID NO: 2443908 - RNA, 19 nt, Homo sapiens
  misc_RNA (1)...(19): siRNA sense strand
ggaaagguaucgaaggaug

SEQ ID NO: 2443909 - RNA, 19 nt, Homo sapiens
  misc_RNA (1)...(19): siRNA sense strand
ucaccuugguucugggaca

SEQ ID NO: 2443910 - RNA, 19 nt, Homo sapiens
  misc_RNA (1)...(19): siRNA sense strand
uggauuggaauguccgaaa

SEQ ID NO: 2443911 - RNA, 19 nt, Homo sapiens
  misc_RNA (1)...(19): siRNA sense strand
gguuacacgacuaggaauc

SEQ ID NO: 2443912 - RNA, 19 nt, Homo sapiens
  misc_RNA (1)...(19): siRNA sense strand
cugucaaagcagcuggauu

SEQ ID NO: 2443913 - RNA, 19 nt, Homo sapiens
  misc_RNA (1)...(19): siRNA sense strand
cuaaauucugugaaagcau

SEQ ID NO: 2443914 - RNA, 19 nt, Homo sapiens
  misc_RNA (1)...(19): siRNA sense strand
gcagugauguggagagcag

SEQ ID NO: 2443915 - RNA, 19 nt, Homo sapiens
  misc_RNA (1)...(19): siRNA sense strand
aggaagaagaugugaccac

SEQ ID NO: 2443916 - RNA, 19 nt, Homo sapiens
  misc_RNA (1)...(19): siRNA sense strand
cugcuauggaauuagauuu

SEQ ID NO: 2443917 - RNA, 19 nt, Homo sapiens
  misc_RNA (1)...(19): siRNA sense strand
ggaagaaccugguggccau

SEQ ID NO: 2443918 - RNA, 19 nt, Homo sapiens
  misc_RNA (1)...(19): siRNA sense strand
ccgaaauagggcagaaaca

SEQ ID NO: 2443919 - RNA, 19 nt, Homo sapiens
  misc_RNA (1)...(19): siRNA sense strand
ugacggaacuggagaccca

SEQ ID NO: 2443920 - RNA, 19 nt, Homo sapiens
  misc_RNA (1)...(19): siRNA sense strand
aggugguggucgugcggaa

SEQ ID NO: 2443921 - RNA, 19 nt, Homo sapiens
  misc_RNA (1)...(19): siRNA sense strand
ugguuaacuuggaccucaa

SEQ ID NO: 2443922 - RNA, 19 nt, Homo sapiens
  misc_RNA (1)...(19): siRNA sense strand
gggaagaaccugguggcca

SEQ ID NO: 2443923 - RNA, 19 nt, Homo sapiens
  misc_RNA (1)...(19): siRNA sense strand
gcaggaugaagaaggacga

SEQ ID NO: 2443924 - RNA, 19 nt, Homo sapiens
  misc_RNA (1)...(19): siRNA sense strand
aggaagaccccaaguucaa

SEQ ID NO: 2443925 - RNA, 19 nt, Homo sapiens
  misc_RNA (1)...(19): siRNA sense strand
agcucagcguggugaagaa

SEQ ID NO: 2443926 - RNA, 19 nt, Homo sapiens
  misc_RNA (1)...(19): siRNA sense strand
ccaaaguguacaaagccaa

SEQ ID NO: 2443927 - RNA, 19 nt, Homo sapiens
  misc_RNA (1)...(19): siRNA sense strand
ccaaggaacuggaggcccu

SEQ ID NO: 2443928 - RNA, 19 nt, Homo sapiens
  misc_RNA (1)...(19): siRNA sense strand
cagugaagggagugguguu

SEQ ID NO: 2443929 - RNA, 19 nt, Homo sapiens
  misc_RNA (1)...(19): siRNA sense strand
ggacuccacuagaggggua

SEQ ID NO: 2443930 - RNA, 19 nt, Homo sapiens
  misc_RNA (1)...(19): siRNA sense strand
gggacugucucgagggcaa

SEQ ID NO: 2443931 - RNA, 19 nt, Homo sapiens
  misc_RNA (1)...(19): siRNA sense strand
accaaguggagaagaacaa

SEQ ID NO: 2443932 - RNA, 19 nt, Homo sapiens
  misc_RNA (1)...(19): siRNA sense strand
gcggcuggaaggaggaaga

SEQ ID NO: 2443933 - RNA, 19 nt, Homo sapiens
  misc_RNA (1)...(19): siRNA sense strand
agcaaagaguacugggacu

SEQ ID NO: 2443934 - RNA, 19 nt, Homo sapiens
  misc_RNA (1)...(19): siRNA sense strand
ccucaugaagugggagaau

SEQ ID NO: 2443935 - RNA, 19 nt, Homo sapiens
  misc_RNA (1)...(19): siRNA sense strand
ucagcuaccaaguggagaa

SEQ ID NO: 2443936 - RNA, 19 nt, Homo sapiens
  misc_RNA (1)...(19): siRNA sense strand
ugguacugacccugagcaa

SEQ ID NO: 2443937 - RNA, 19 nt, Homo sapiens
  misc_RNA (1)...(19): siRNA sense strand
uggagaagaacaaguacga

SEQ ID NO: 2443938 - RNA, 19 nt, Homo sapiens
  misc_RNA (1)...(19): siRNA sense strand
ccaugagguacuacuacaa

SEQ ID NO: 2443939 - RNA, 19 nt, Homo sapiens
  misc_RNA (1)...(19): siRNA sense strand
cugucaagguggugggcga

SEQ ID NO: 2443940 - RNA, 19 nt, Homo sapiens
  misc_RNA (1)...(19): siRNA sense strand
gcgaacacguggaggugca

SEQ ID NO: 2443941 - RNA, 19 nt, Homo sapiens
  misc_RNA (1)...(19): siRNA sense strand
acuucucgccggaggaaau

SEQ ID NO: 2443942 - RNA, 19 nt, Homo sapiens
  misc_RNA (1)...(19): siRNA sense strand
ggaaauugcugucaaggug

SEQ ID NO: 2443943 - RNA, 19 nt, Homo sapiens
  misc_RNA (1)...(19): siRNA sense strand
agaacaaggugguggcacu

SEQ ID NO: 2443944 - RNA, 19 nt, Homo sapiens
  misc_RNA (1)...(19): siRNA sense strand
uggugaaagaggacaauau

SEQ ID NO: 2443945 - RNA, 19 nt, Homo sapiens
  misc_RNA (1)...(19): siRNA sense strand
guguggugaaagaggacaa

SEQ ID NO: 2443946 - RNA, 19 nt, Homo sapiens
  misc_RNA (1)...(19): siRNA sense strand
ggacaauaucagcgagcgu

SEQ ID NO: 2443947 - RNA, 19 nt, Homo sapiens
  misc_RNA (1)...(19): siRNA sense strand
acuuugaggaugagaagau

SEQ ID NO: 2443948 - RNA, 19 nt, Homo sapiens
  misc_RNA (1)...(19): siRNA sense strand
cggacaaguuccaggagac

SEQ ID NO: 2443949 - RNA, 19 nt, Homo sapiens
  misc_RNA (1)...(19): siRNA sense strand
gccaggugucugugcguaa

SEQ ID NO: 2443950 - RNA, 19 nt, Homo sapiens
  misc_RNA (1)...(19): siRNA sense strand
gggagaaugugacggugca

SEQ ID NO: 2443951 - RNA, 19 nt, Homo sapiens
  misc_RNA (1)...(19): siRNA sense strand
ccgcaaugauccugagcug

SEQ ID NO: 2443952 - RNA, 19 nt, Homo sapiens
  misc_RNA (1)...(19): siRNA sense strand
ggauauugccauagaugac

SEQ ID NO: 2443953 - RNA, 19 nt, Homo sapiens
  misc_RNA (1)...(19): siRNA sense strand
cuacauguucaucgagaca

SEQ ID NO: 2443954 - RNA, 19 nt, Homo sapiens
  misc_RNA (1)...(19): siRNA sense strand
gugcaagguuagugagucc

SEQ ID NO: 2443955 - RNA, 19 nt, Homo sapiens
  misc_RNA (1)...(19): siRNA sense strand
ggaagcagacggaucccaa

SEQ ID NO: 2443956 - RNA, 19 nt, Homo sapiens
  misc_RNA (1)...(19): siRNA sense strand
acgugaucaaagagaguga

SEQ ID NO: 2443957 - RNA, 19 nt, Homo sapiens
  misc_RNA (1)...(19): siRNA sense strand
agcacaaugcgguggucaa

SEQ ID NO: 2443958 - RNA, 19 nt, Homo sapiens
  misc_RNA (1)...(19): siRNA sense strand
gugaucaaagagagugaga

SEQ ID NO: 2443959 - RNA, 19 nt, Homo sapiens
  misc_RNA (1)...(19): siRNA sense strand
gggacaaggaccuggugga

SEQ ID NO: 2443960 - RNA, 19 nt, Homo sapiens
  misc_RNA (1)...(19): siRNA sense strand
gaacgagccuguagcccuu

SEQ ID NO: 2443961 - RNA, 19 nt, Homo sapiens
  misc_RNA (1)...(19): siRNA sense strand
ucaaagugguggauuggga

SEQ ID NO: 2443962 - RNA, 19 nt, Homo sapiens
  misc_RNA (1)...(19): siRNA sense strand
cagaaauuacugagggaga

SEQ ID NO: 2443963 - RNA, 19 nt, Homo sapiens
  misc_RNA (1)...(19): siRNA sense strand
gaucaugcgcagggagaaa

SEQ ID NO: 2443964 - RNA, 19 nt, Homo sapiens
  misc_RNA (1)...(19): siRNA sense strand
ugaagagugaagaggagaa

SEQ ID NO: 2443965 - RNA, 19 nt, Homo sapiens
  misc_RNA (1)...(19): siRNA sense strand
gggaugacgcagaccaaau

SEQ ID NO: 2443966 - RNA, 19 nt, Homo sapiens
  misc_RNA (1)...(19): siRNA sense strand
ccuuaagguuccaucagaa

SEQ ID NO: 2443967 - RNA, 19 nt, Homo sapiens
  misc_RNA (1)...(19): siRNA sense strand
augaagagcaugugcggau

SEQ ID NO: 2443968 - RNA, 19 nt, Homo sapiens
  misc_RNA (1)...(19): siRNA sense strand
aaagauuagccuuguacaa

SEQ ID NO: 2443969 - RNA, 19 nt, Homo sapiens
  misc_RNA (1)...(19): siRNA sense strand
ccugaacugaggacagaaa

SEQ ID NO: 2443970 - RNA, 19 nt, Homo sapiens
  misc_RNA (1)...(19): siRNA sense strand
aggccuacguggagcacuu

SEQ ID NO: 2443971 - RNA, 19 nt, Homo sapiens
  misc_RNA (1)...(19): siRNA sense strand
gguugugggaggagaacga

SEQ ID NO: 2443972 - RNA, 19 nt, Homo sapiens
  misc_RNA (1)...(19): siRNA sense strand
gcugcuugucagaggaauu

SEQ ID NO: 2443973 - RNA, 19 nt, Homo sapiens
  misc_RNA (1)...(19): siRNA sense strand
cuaccuuggauguggaaga

SEQ ID NO: 2443974 - RNA, 19 nt, Homo sapiens
  misc_RNA (1)...(19): siRNA sense strand
ggaagauaauaacugguga

SEQ ID NO: 2443975 - RNA, 19 nt, Homo sapiens
  misc_RNA (1)...(19): siRNA sense strand
ggugguugugggaggagaa

SEQ ID NO: 2443976 - RNA, 19 nt, Homo sapiens
  misc_RNA (1)...(19): siRNA sense strand
aguaaaagauccugagaug

SEQ ID NO: 2443977 - RNA, 19 nt, Homo sapiens
  misc_RNA (1)...(19): siRNA sense strand
agagagaaaaugaagacaa

SEQ ID NO: 2443978 - RNA, 19 nt, Homo sapiens
  misc_RNA (1)...(19): siRNA sense strand
agaaagucaucuugccaca

SEQ ID NO: 2443979 - RNA, 19 nt, Homo sapiens
  misc_RNA (1)...(19): siRNA sense strand
cagauuuggccuagagaac

SEQ ID NO: 2443980 - RNA, 19 nt, Homo sapiens
  misc_RNA (1)...(19): siRNA sense strand
cuggaaguggcuuuggaaa

SEQ ID NO: 2443981 - RNA, 19 nt, Homo sapiens
  misc_RNA (1)...(19): siRNA sense strand
aagcuaggaggaauggaaa

SEQ ID NO: 2443982 - RNA, 19 nt, Homo sapiens
  misc_RNA (1)...(19): siRNA sense strand
gaacagugcuuuaaagagc

SEQ ID NO: 2443983 - RNA, 19 nt, Homo sapiens
  misc_RNA (1)...(19): siRNA sense strand
ggaucagagaacagugcuu

SEQ ID NO: 2443984 - RNA, 19 nt, Homo sapiens
  misc_RNA (1)...(19): siRNA sense strand
uggaaguggcuuuggaaac

SEQ ID NO: 2443985 - RNA, 19 nt, Homo sapiens
  misc_RNA (1)...(19): siRNA sense strand
ggcugaaggcugggaagaa

SEQ ID NO: 2443986 - RNA, 19 nt, Homo sapiens
  misc_RNA (1)...(19): siRNA sense strand
uucuggaaguugugaauuu

SEQ ID NO: 2443987 - RNA, 19 nt, Homo sapiens
  misc_RNA (1)...(19): siRNA sense strand
ugucucacaucgaggccua

SEQ ID NO: 2443988 - RNA, 19 nt, Homo sapiens
  misc_RNA (1)...(19): siRNA sense strand
aagaagaaggggagcugaa

SEQ ID NO: 2443989 - RNA, 19 nt, Homo sapiens
  misc_RNA (1)...(19): siRNA sense strand
aauaagagacccagcaucu

SEQ ID NO: 2443990 - RNA, 19 nt, Homo sapiens
  misc_RNA (1)...(19): siRNA sense strand
cugauaugaucccagaaau

SEQ ID NO: 2443991 - RNA, 19 nt, Homo sapiens
  misc_RNA (1)...(19): siRNA sense strand
gugaagauggacacuggaa

SEQ ID NO: 2443992 - RNA, 19 nt, Homo sapiens
  misc_RNA (1)...(19): siRNA sense strand
uggaaaguuugcucacaau

SEQ ID NO: 2443993 - RNA, 19 nt, Homo sapiens
  misc_RNA (1)...(19): siRNA sense strand
cuguacugcaagauggcaa

SEQ ID NO: 2443994 - RNA, 19 nt, Homo sapiens
  misc_RNA (1)...(19): siRNA sense strand
cuguggaagcggauggcau

SEQ ID NO: 2443995 - RNA, 19 nt, Homo sapiens
  misc_RNA (1)...(19): siRNA sense strand
agcagaaauuacugaggga

SEQ ID NO: 2443996 - RNA, 19 nt, Homo sapiens
  misc_RNA (1)...(19): siRNA sense strand
gucaagucccagugcacua

SEQ ID NO: 2443997 - RNA, 19 nt, Homo sapiens
  misc_RNA (1)...(19): siRNA sense strand
cagaaauuacugagggaga

SEQ ID NO: 2443998 - RNA, 19 nt, Homo sapiens
  misc_RNA (1)...(19): siRNA sense strand
gaucaugcgcagggagaaa

SEQ ID NO: 2443999 - RNA, 19 nt, Homo sapiens
  misc_RNA (1)...(19): siRNA sense strand
ugaagagugaagaggagaa

SEQ ID NO: 2444000 - RNA, 19 nt, Homo sapiens
  misc_RNA (1)...(19): siRNA sense strand
gggaugacgcagaccaaau

SEQ ID NO: 2444001 - RNA, 19 nt, Homo sapiens
  misc_RNA (1)...(19): siRNA sense strand
ccuuaagguuccaucagaa

SEQ ID NO: 2444002 - RNA, 19 nt, Homo sapiens
  misc_RNA (1)...(19): siRNA sense strand
augaagagcaugugcggau

SEQ ID NO: 2444003 - RNA, 19 nt, Homo sapiens
  misc_RNA (1)...(19): siRNA sense strand
aaagauuagccuuguacaa

SEQ ID NO: 2444004 - RNA, 19 nt, Homo sapiens
  misc_RNA (1)...(19): siRNA sense strand
ccugaacugaggacagaaa

SEQ ID NO: 2444005 - RNA, 19 nt, Homo sapiens
  misc_RNA (1)...(19): siRNA sense strand
aggccuacguggagcacuu

SEQ ID NO: 2444006 - RNA, 19 nt, Homo sapiens
  misc_RNA (1)...(19): siRNA sense strand
gguugugggaggagaacga

SEQ ID NO: 2444007 - RNA, 19 nt, Homo sapiens
  misc_RNA (1)...(19): siRNA sense strand
gcugcuugucagaggaauu

SEQ ID NO: 2444008 - RNA, 19 nt, Homo sapiens
  misc_RNA (1)...(19): siRNA sense strand
cuaccuuggauguggaaga

SEQ ID NO: 2444009 - RNA, 19 nt, Homo sapiens
  misc_RNA (1)...(19): siRNA sense strand
ggaagauaauaacugguga

SEQ ID NO: 2444010 - RNA, 19 nt, Homo sapiens
  misc_RNA (1)...(19): siRNA sense strand
ggugguugugggaggagaa

SEQ ID NO: 2444011 - RNA, 19 nt, Homo sapiens
  misc_RNA (1)...(19): siRNA sense strand
aguaaaagauccugagaug

SEQ ID NO: 2444012 - RNA, 19 nt, Homo sapiens
  misc_RNA (1)...(19): siRNA sense strand
agagagaaaaugaagacaa

SEQ ID NO: 2444013 - RNA, 19 nt, Homo sapiens
  misc_RNA (1)...(19): siRNA sense strand
agaaagucaucuugccaca

SEQ ID NO: 2444014 - RNA, 19 nt, Homo sapiens
  misc_RNA (1)...(19): siRNA sense strand
cagauuuggccuagagaac

SEQ ID NO: 2444015 - RNA, 19 nt, Homo sapiens
  misc_RNA (1)...(19): siRNA sense strand
cuggaaguggcuuuggaaa

SEQ ID NO: 2444016 - RNA, 19 nt, Homo sapiens
  misc_RNA (1)...(19): siRNA sense strand
aagcuaggaggaauggaaa

SEQ ID NO: 2444017 - RNA, 19 nt, Homo sapiens
  misc_RNA (1)...(19): siRNA sense strand
gaacagugcuuuaaagagc

SEQ ID NO: 2444018 - RNA, 19 nt, Homo sapiens
  misc_RNA (1)...(19): siRNA sense strand
ggaucagagaacagugcuu

SEQ ID NO: 2444019 - RNA, 19 nt, Homo sapiens
  misc_RNA (1)...(19): siRNA sense strand
uggaaguggcuuuggaaac

SEQ ID NO: 2444020 - RNA, 19 nt, Homo sapiens
  misc_RNA (1)...(19): siRNA sense strand
ggcugaaggcugggaagaa

SEQ ID NO: 2444021 - RNA, 19 nt, Homo sapiens
  misc_RNA (1)...(19): siRNA sense strand
uucuggaaguugugaauuu

SEQ ID NO: 2444022 - RNA, 19 nt, Homo sapiens
  misc_RNA (1)...(19): siRNA sense strand
ugucucacaucgaggccua

SEQ ID NO: 2444023 - RNA, 19 nt, Homo sapiens
  misc_RNA (1)...(19): siRNA sense strand
aagaagaaggggagcugaa

SEQ ID NO: 2444024 - RNA, 19 nt, Homo sapiens
  misc_RNA (1)...(19): siRNA sense strand
aauaagagacccagcaucu

SEQ ID NO: 2444025 - RNA, 19 nt, Homo sapiens
  misc_RNA (1)...(19): siRNA sense strand
cugauaugaucccagaaau

SEQ ID NO: 2444026 - RNA, 19 nt, Homo sapiens
  misc_RNA (1)...(19): siRNA sense strand
gugaagauggacacuggaa

SEQ ID NO: 2444027 - RNA, 19 nt, Homo sapiens
  misc_RNA (1)...(19): siRNA sense strand
uggaaaguuugcucacaau

SEQ ID NO: 2444028 - RNA, 19 nt, Homo sapiens
  misc_RNA (1)...(19): siRNA sense strand
cuguacugcaagauggcaa

SEQ ID NO: 2444029 - RNA, 19 nt, Homo sapiens
  misc_RNA (1)...(19): siRNA sense strand
cuguggaagcggauggcau

SEQ ID NO: 2444030 - RNA, 19 nt, Homo sapiens
  misc_RNA (1)...(19): siRNA sense strand
agcagaaauuacugaggga

SEQ ID NO: 2444031 - RNA, 19 nt, Homo sapiens
  misc_RNA (1)...(19): siRNA sense strand
gucaagucccagugcacua

SEQ ID NO: 2444032 - RNA, 19 nt, Homo sapiens
  misc_RNA (1)...(19): siRNA sense strand
gagaaaaggagaagggaau

SEQ ID NO: 2444033 - RNA, 19 nt, Homo sapiens
  misc_RNA (1)...(19): siRNA sense strand
cagaagaucucguggcaga

SEQ ID NO: 2444034 - RNA, 19 nt, Homo sapiens
  misc_RNA (1)...(19): siRNA sense strand
ugaagaagauggaagccaa

SEQ ID NO: 2444035 - RNA, 19 nt, Homo sapiens
  misc_RNA (1)...(19): siRNA sense strand
cgaagggauaagaaggaaa

SEQ ID NO: 2444036 - RNA, 19 nt, Homo sapiens
  misc_RNA (1)...(19): siRNA sense strand
uggaagaggaagaggaacu

SEQ ID NO: 2444037 - RNA, 19 nt, Homo sapiens
  misc_RNA (1)...(19): siRNA sense strand
gcaucaguguggaagacaa

SEQ ID NO: 2444038 - RNA, 19 nt, Homo sapiens
  misc_RNA (1)...(19): siRNA sense strand
gggauaagaaggaaaacaa

SEQ ID NO: 2444039 - RNA, 19 nt, Homo sapiens
  misc_RNA (1)...(19): siRNA sense strand
uggaagaacaagugaaacu

SEQ ID NO: 2444040 - RNA, 19 nt, Homo sapiens
  misc_RNA (1)...(19): siRNA sense strand
ccaaaauggugaucaggaa

SEQ ID NO: 2444041 - RNA, 19 nt, Homo sapiens
  misc_RNA (1)...(19): siRNA sense strand
cccagaaagaagagcacaa

SEQ ID NO: 2444042 - RNA, 19 nt, Homo sapiens
  misc_RNA (1)...(19): siRNA sense strand
ucaagaaaguagugccuca

SEQ ID NO: 2444043 - RNA, 19 nt, Homo sapiens
  misc_RNA (1)...(19): siRNA sense strand
ccaccaaagagcagcccaa

SEQ ID NO: 2444044 - RNA, 19 nt, Homo sapiens
  misc_RNA (1)...(19): siRNA sense strand
gcaacauguacaagagcau

SEQ ID NO: 2444045 - RNA, 19 nt, Homo sapiens
  misc_RNA (1)...(19): siRNA sense strand
uaaaggagcaagauggcua

SEQ ID NO: 2444046 - RNA, 19 nt, Homo sapiens
  misc_RNA (1)...(19): siRNA sense strand
ccuggaagaggaagaggaa

SEQ ID NO: 2444047 - RNA, 19 nt, Homo sapiens
  misc_RNA (1)...(19): siRNA sense strand
acuggaggguggagaguca

SEQ ID NO: 2444048 - RNA, 19 nt, Homo sapiens
  misc_RNA (1)...(19): siRNA sense strand
aaugaagacaccugcauaa

SEQ ID NO: 2444049 - RNA, 19 nt, Homo sapiens
  misc_RNA (1)...(19): siRNA sense strand
cauaauaaccauuugacca

SEQ ID NO: 2444050 - RNA, 19 nt, Homo sapiens
  misc_RNA (1)...(19): siRNA sense strand
uggaagacaauaacggcaa

SEQ ID NO: 2444051 - RNA, 19 nt, Homo sapiens
  misc_RNA (1)...(19): siRNA sense strand
ccaccaagguagaaagcac

SEQ ID NO: 2444052 - RNA, 19 nt, Homo sapiens
  misc_RNA (1)...(19): siRNA sense strand
ggaaacugacaaugggcuu

SEQ ID NO: 2444053 - RNA, 19 nt, Homo sapiens
  misc_RNA (1)...(19): siRNA sense strand
ggauaagaaggaaaacaaa

SEQ ID NO: 2444054 - RNA, 19 nt, Homo sapiens
  misc_RNA (1)...(19): siRNA sense strand
agaaagaagagcacaaaau

SEQ ID NO: 2444055 - RNA, 19 nt, Homo sapiens
  misc_RNA (1)...(19): siRNA sense strand
ucaaaagaguccagauuca

SEQ ID NO: 2444056 - RNA, 19 nt, Homo sapiens
  misc_RNA (1)...(19): siRNA sense strand
ggguggagagucagcagaa

SEQ ID NO: 2444057 - RNA, 19 nt, Homo sapiens
  misc_RNA (1)...(19): siRNA sense strand
gcccaaacugugaagaaga

SEQ ID NO: 2444058 - RNA, 19 nt, Homo sapiens
  misc_RNA (1)...(19): siRNA sense strand
uggaagaucauguucgaau

SEQ ID NO: 2444059 - RNA, 19 nt, Homo sapiens
  misc_RNA (1)...(19): siRNA sense strand
acacacagucagucaauau

SEQ ID NO: 2444060 - RNA, 19 nt, Homo sapiens
  misc_RNA (1)...(19): siRNA sense strand
ugagaaaaggagaagggaa

SEQ ID NO: 2444061 - RNA, 19 nt, Homo sapiens
  misc_RNA (1)...(19): siRNA sense strand
guggagagucagcagaauu

SEQ ID NO: 2444062 - RNA, 19 nt, Homo sapiens
  misc_RNA (1)...(19): siRNA sense strand
ccuggacagcagugugaaa

SEQ ID NO: 2444063 - RNA, 19 nt, Homo sapiens
  misc_RNA (1)...(19): siRNA sense strand
aagugauugcccagauaaa

SEQ ID NO: 2444064 - RNA, 19 nt, Homo sapiens
  misc_RNA (1)...(19): siRNA sense strand
cggaagagcauggugaaga

SEQ ID NO: 2444065 - RNA, 19 nt, Homo sapiens
  misc_RNA (1)...(19): siRNA sense strand
caucaguguggaagacaau

SEQ ID NO: 2444066 - RNA, 19 nt, Homo sapiens
  misc_RNA (1)...(19): siRNA sense strand
aggucaucucggaggacaa

SEQ ID NO: 2444067 - RNA, 19 nt, Homo sapiens
  misc_RNA (1)...(19): siRNA sense strand
gggacaaugacuuuaccua

SEQ ID NO: 2444068 - RNA, 19 nt, Homo sapiens
  misc_RNA (1)...(19): siRNA sense strand
agguagaaagcacgggaca

SEQ ID NO: 2444069 - RNA, 19 nt, Homo sapiens
  misc_RNA (1)...(19): siRNA sense strand
gaagggauaagaaggaaaa

SEQ ID NO: 2444070 - RNA, 19 nt, Homo sapiens
  misc_RNA (1)...(19): siRNA sense strand
guuuaauacccucaccaaa

SEQ ID NO: 2444071 - RNA, 19 nt, Homo sapiens
  misc_RNA (1)...(19): siRNA sense strand
ccauggaagaacaagugaa

SEQ ID NO: 2444072 - RNA, 19 nt, Homo sapiens
  misc_RNA (1)...(19): siRNA sense strand
cuacucaagaggugucuaa

SEQ ID NO: 2444073 - RNA, 19 nt, Homo sapiens
  misc_RNA (1)...(19): siRNA sense strand
ggagaagggaauuugaagu

SEQ ID NO: 2444074 - RNA, 19 nt, Homo sapiens
  misc_RNA (1)...(19): siRNA sense strand
gggaaguuuuaaagacaga

SEQ ID NO: 2444075 - RNA, 19 nt, Homo sapiens
  misc_RNA (1)...(19): siRNA sense strand
ccucaaaagaguccagauu

SEQ ID NO: 2444076 - RNA, 19 nt, Homo sapiens
  misc_RNA (1)...(19): siRNA sense strand
gagccaaaaucauugagaa

SEQ ID NO: 2444077 - RNA, 19 nt, Homo sapiens
  misc_RNA (1)...(19): siRNA sense strand
agagcauggugaagagacu

SEQ ID NO: 2444078 - RNA, 19 nt, Homo sapiens
  misc_RNA (1)...(19): siRNA sense strand
ccaccaucucucaguuuaa

SEQ ID NO: 2444079 - RNA, 19 nt, Homo sapiens
  misc_RNA (1)...(19): siRNA sense strand
gacagcagugugaaagaaa

SEQ ID NO: 2444080 - RNA, 19 nt, Homo sapiens
  misc_RNA (1)...(19): siRNA sense strand
aaagaaaaccagaagcgua

SEQ ID NO: 2444081 - RNA, 19 nt, Homo sapiens
  misc_RNA (1)...(19): siRNA sense strand
gcugugauccagagagcca

SEQ ID NO: 2444082 - RNA, 19 nt, Homo sapiens
  misc_RNA (1)...(19): siRNA sense strand
ucaguguggaagacaauaa

SEQ ID NO: 2444083 - RNA, 19 nt, Homo sapiens
  misc_RNA (1)...(19): siRNA sense strand
ggaguuacagacacagcaa

SEQ ID NO: 2444084 - RNA, 19 nt, Homo sapiens
  misc_RNA (1)...(19): siRNA sense strand
aguuacagacacagcaaaa

SEQ ID NO: 2444085 - RNA, 19 nt, Homo sapiens
  misc_RNA (1)...(19): siRNA sense strand
gguagaggaaggagcuguu

SEQ ID NO: 2444086 - RNA, 19 nt, Homo sapiens
  misc_RNA (1)...(19): siRNA sense strand
ugccaauaaaggagcaaga

SEQ ID NO: 2444087 - RNA, 19 nt, Homo sapiens
  misc_RNA (1)...(19): siRNA sense strand
aagcccaaacugugaagaa

SEQ ID NO: 2444088 - RNA, 19 nt, Homo sapiens
  misc_RNA (1)...(19): siRNA sense strand
agccaaaguucaucagagu

SEQ ID NO: 2444089 - RNA, 19 nt, Homo sapiens
  misc_RNA (1)...(19): siRNA sense strand
agaaguggaaacugacaau

SEQ ID NO: 2444090 - RNA, 19 nt, Homo sapiens
  misc_RNA (1)...(19): siRNA sense strand
agauaaagcucuuacaguc

SEQ ID NO: 2444091 - RNA, 19 nt, Homo sapiens
  misc_RNA (1)...(19): siRNA sense strand
gcaucauguugacgagcca

SEQ ID NO: 2444092 - RNA, 19 nt, Homo sapiens
  misc_RNA (1)...(19): siRNA sense strand
acucaagaggugucuaaau

SEQ ID NO: 2444093 - RNA, 19 nt, Homo sapiens
  misc_RNA (1)...(19): siRNA sense strand
ggaagaagauccugccgga

SEQ ID NO: 2444094 - RNA, 19 nt, Homo sapiens
  misc_RNA (1)...(19): siRNA sense strand
aggagaaaacgcaggacaa

SEQ ID NO: 2444095 - RNA, 19 nt, Homo sapiens
  misc_RNA (1)...(19): siRNA sense strand
aagaggagcucaugaggca

SEQ ID NO: 2444096 - RNA, 19 nt, Homo sapiens
  misc_RNA (1)...(19): siRNA sense strand
ccauggaagcugagacucu

SEQ ID NO: 2444097 - RNA, 19 nt, Homo sapiens
  misc_RNA (1)...(19): siRNA sense strand
aagccuagcucguggcgga

SEQ ID NO: 2444098 - RNA, 19 nt, Homo sapiens
  misc_RNA (1)...(19): siRNA sense strand
gagaugaccuucacggcca

SEQ ID NO: 2444099 - RNA, 19 nt, Homo sapiens
  misc_RNA (1)...(19): siRNA sense strand
ccauaucauucgagggagc

SEQ ID NO: 2444100 - RNA, 19 nt, Homo sapiens
  misc_RNA (1)...(19): siRNA sense strand
cagaaugccugcaaggaug

SEQ ID NO: 2444101 - RNA, 19 nt, Homo sapiens
  misc_RNA (1)...(19): siRNA sense strand
gaugagagcuugagccuga

SEQ ID NO: 2444102 - RNA, 19 nt, Homo sapiens
  misc_RNA (1)...(19): siRNA sense strand
cggaggaauaguacaacaa

SEQ ID NO: 2444103 - RNA, 19 nt, Homo sapiens
  misc_RNA (1)...(19): siRNA sense strand
agggaaaugcaaacggcaa

SEQ ID NO: 2444104 - RNA, 19 nt, Homo sapiens
  misc_RNA (1)...(19): siRNA sense strand
agacagaaagucagcccaa

SEQ ID NO: 2444105 - RNA, 19 nt, Homo sapiens
  misc_RNA (1)...(19): siRNA sense strand
acuuagaacucggaggaau

SEQ ID NO: 2444106 - RNA, 19 nt, Homo sapiens
  misc_RNA (1)...(19): siRNA sense strand
acucggaggaauaguacaa

SEQ ID NO: 2444107 - RNA, 19 nt, Homo sapiens
  misc_RNA (1)...(19): siRNA sense strand
gaaagauguucgugagcag

SEQ ID NO: 2444108 - RNA, 19 nt, Homo sapiens
  misc_RNA (1)...(19): siRNA sense strand
cggcaaugcagauaagcca

SEQ ID NO: 2444109 - RNA, 19 nt, Homo sapiens
  misc_RNA (1)...(19): siRNA sense strand
uaguagcagcaguggcuua

SEQ ID NO: 2444110 - RNA, 19 nt, Homo sapiens
  misc_RNA (1)...(19): siRNA sense strand
aguccagucaagugcauua

SEQ ID NO: 2444111 - RNA, 19 nt, Homo sapiens
  misc_RNA (1)...(19): siRNA sense strand
acaugaaagggaaaugcaa

SEQ ID NO: 2444112 - RNA, 19 nt, Homo sapiens
  misc_RNA (1)...(19): siRNA sense strand
ugauacuguuuguggcgaa

SEQ ID NO: 2444113 - RNA, 19 nt, Homo sapiens
  misc_RNA (1)...(19): siRNA sense strand
ggauacucguucuggcuca

SEQ ID NO: 2444114 - RNA, 19 nt, Homo sapiens
  misc_RNA (1)...(19): siRNA sense strand
ggaauaugcuccaagggac

SEQ ID NO: 2444115 - RNA, 19 nt, Homo sapiens
  misc_RNA (1)...(19): siRNA sense strand
acuugcagaaccaaagaaa

SEQ ID NO: 2444116 - RNA, 19 nt, Homo sapiens
  misc_RNA (1)...(19): siRNA sense strand
gcugcugagcucuggguuu

SEQ ID NO: 2444117 - RNA, 19 nt, Homo sapiens
  misc_RNA (1)...(19): siRNA sense strand
uggggagaguagugaagaa

SEQ ID NO: 2444118 - RNA, 19 nt, Homo sapiens
  misc_RNA (1)...(19): siRNA sense strand
aggccagauaccagcggaa

SEQ ID NO: 2444119 - RNA, 19 nt, Homo sapiens
  misc_RNA (1)...(19): siRNA sense strand
agaauaaagaacuggcaga

SEQ ID NO: 2444120 - RNA, 19 nt, Homo sapiens
  misc_RNA (1)...(19): siRNA sense strand
augaagcacuuaaggaaaa

SEQ ID NO: 2444121 - RNA, 19 nt, Homo sapiens
  misc_RNA (1)...(19): siRNA sense strand
aguauauggcagagcuaau

SEQ ID NO: 2444122 - RNA, 19 nt, Homo sapiens
  misc_RNA (1)...(19): siRNA sense strand
agcagaaacaagaagaaau

SEQ ID NO: 2444123 - RNA, 19 nt, Homo sapiens
  misc_RNA (1)...(19): siRNA sense strand
gguuauugucccagaaucu

SEQ ID NO: 2444124 - RNA, 19 nt, Homo sapiens
  misc_RNA (1)...(19): siRNA sense strand
ggcagaaguagcagaacau

SEQ ID NO: 2444125 - RNA, 19 nt, Homo sapiens
  misc_RNA (1)...(19): siRNA sense strand
cccagaaucuagugaaaau

SEQ ID NO: 2444126 - RNA, 19 nt, Homo sapiens
  misc_RNA (1)...(19): siRNA sense strand
ccaguaugaagcagaaaca

SEQ ID NO: 2444127 - RNA, 19 nt, Homo sapiens
  misc_RNA (1)...(19): siRNA sense strand
uagagagacugaaugguga

SEQ ID NO: 2444128 - RNA, 19 nt, Homo sapiens
  misc_RNA (1)...(19): siRNA sense strand
aagaagaaacuguugagga

SEQ ID NO: 2444129 - RNA, 19 nt, Homo sapiens
  misc_RNA (1)...(19): siRNA sense strand
ggcagagcuaauagagaga

SEQ ID NO: 2444130 - RNA, 19 nt, Homo sapiens
  misc_RNA (1)...(19): siRNA sense strand
acaguauauggcagagcua

SEQ ID NO: 2444131 - RNA, 19 nt, Homo sapiens
  misc_RNA (1)...(19): siRNA sense strand
agagagacugaauggugaa

SEQ ID NO: 2444132 - RNA, 19 nt, Homo sapiens
  misc_RNA (1)...(19): siRNA sense strand
cagagcuaauagagagacu

SEQ ID NO: 2444133 - RNA, 19 nt, Homo sapiens
  misc_RNA (1)...(19): siRNA sense strand
cagaaguagcagaacaugu

SEQ ID NO: 2444134 - RNA, 19 nt, Homo sapiens
  misc_RNA (1)...(19): siRNA sense strand
caguaaauaucuagcggau

SEQ ID NO: 2444135 - RNA, 19 nt, Homo sapiens
  misc_RNA (1)...(19): siRNA sense strand
agucaaaagaacaggaauu

SEQ ID NO: 2444136 - RNA, 19 nt, Homo sapiens
  misc_RNA (1)...(19): siRNA sense strand
aagaacaggaauucggaaa

SEQ ID NO: 2444137 - RNA, 19 nt, Homo sapiens
  misc_RNA (1)...(19): siRNA sense strand
aagacaguucagugaguua

SEQ ID NO: 2444138 - RNA, 19 nt, Homo sapiens
  misc_RNA (1)...(19): siRNA sense strand
cagucgagccaguguagaa

SEQ ID NO: 2444139 - RNA, 19 nt, Homo sapiens
  misc_RNA (1)...(19): siRNA sense strand
ggauauacguacugugggu

SEQ ID NO: 2444140 - RNA, 19 nt, Homo sapiens
  misc_RNA (1)...(19): siRNA sense strand
caggaauguuugaacgcau

SEQ ID NO: 2444141 - RNA, 19 nt, Homo sapiens
  misc_RNA (1)...(19): siRNA sense strand
cggaaaacucuucaguaaa

SEQ ID NO: 2444142 - RNA, 19 nt, Homo sapiens
  misc_RNA (1)...(19): siRNA sense strand
ugaccuucguauugaccaa

SEQ ID NO: 2444143 - RNA, 19 nt, Homo sapiens
  misc_RNA (1)...(19): siRNA sense strand
augaagaugaacacaguau

SEQ ID NO: 2444144 - RNA, 19 nt, Homo sapiens
  misc_RNA (1)...(19): siRNA sense strand
acagcuaaagccauggaaa

SEQ ID NO: 2444145 - RNA, 19 nt, Homo sapiens
  misc_RNA (1)...(19): siRNA sense strand
accaaaagauuuacggaga

SEQ ID NO: 2444146 - RNA, 19 nt, Homo sapiens
  misc_RNA (1)...(19): siRNA sense strand
agaacaggaauucggaaaa

SEQ ID NO: 2444147 - RNA, 19 nt, Homo sapiens
  misc_RNA (1)...(19): siRNA sense strand
ggguguuauuaaaugcuau

SEQ ID NO: 2444148 - RNA, 19 nt, Homo sapiens
  misc_RNA (1)...(19): siRNA sense strand
guggauauauauaggacac

SEQ ID NO: 2444149 - RNA, 19 nt, Homo sapiens
  misc_RNA (1)...(19): siRNA sense strand
guaaauaucuagcggaucc

SEQ ID NO: 2444150 - RNA, 19 nt, Homo sapiens
  misc_RNA (1)...(19): siRNA sense strand
ccuuauacagcuaaagcca

SEQ ID NO: 2444151 - RNA, 19 nt, Homo sapiens
  misc_RNA (1)...(19): siRNA sense strand
gcacagagaugccuggcua

SEQ ID NO: 2444152 - RNA, 19 nt, Homo sapiens
  misc_RNA (1)...(19): siRNA sense strand
gcguggaguucucagggaa

SEQ ID NO: 2444153 - RNA, 19 nt, Homo sapiens
  misc_RNA (1)...(19): siRNA sense strand
agacggacggugaaggcaa

SEQ ID NO: 2444154 - RNA, 19 nt, Homo sapiens
  misc_RNA (1)...(19): siRNA sense strand
gagcagaagcugagcacag

SEQ ID NO: 2444155 - RNA, 19 nt, Homo sapiens
  misc_RNA (1)...(19): siRNA sense strand
gucaagugugugaggagaa

SEQ ID NO: 2444156 - RNA, 19 nt, Homo sapiens
  misc_RNA (1)...(19): siRNA sense strand
ggucaagugugugaggaga

SEQ ID NO: 2444157 - RNA, 19 nt, Homo sapiens
  misc_RNA (1)...(19): siRNA sense strand
accugaagcuggagcgguu

SEQ ID NO: 2444158 - RNA, 19 nt, Homo sapiens
  misc_RNA (1)...(19): siRNA sense strand
acgugcagccggaggauga

SEQ ID NO: 2444159 - RNA, 19 nt, Homo sapiens
  misc_RNA (1)...(19): siRNA sense strand
ugagaaacgugcagccgga

SEQ ID NO: 2444160 - RNA, 19 nt, Homo sapiens
  misc_RNA (1)...(19): siRNA sense strand
agggcaagacggacgguga

SEQ ID NO: 2444161 - RNA, 19 nt, Homo sapiens
  misc_RNA (1)...(19): siRNA sense strand
gggauuuacaacugcuaca

SEQ ID NO: 2444162 - RNA, 19 nt, Homo sapiens
  misc_RNA (1)...(19): siRNA sense strand
uggaggaggcugagggcaa

SEQ ID NO: 2444163 - RNA, 19 nt, Homo sapiens
  misc_RNA (1)...(19): siRNA sense strand
agguaacagcccaggaaau

SEQ ID NO: 2444164 - RNA, 19 nt, Homo sapiens
  misc_RNA (1)...(19): siRNA sense strand
caagaagccucaagccuga

SEQ ID NO: 2444165 - RNA, 19 nt, Homo sapiens
  misc_RNA (1)...(19): siRNA sense strand
agcaaagggacucagguaa

SEQ ID NO: 2444166 - RNA, 19 nt, Homo sapiens
  misc_RNA (1)...(19): siRNA sense strand
cugaguuggaggaggcuga

SEQ ID NO: 2444167 - RNA, 19 nt, Homo sapiens
  misc_RNA (1)...(19): siRNA sense strand
ggaaaugcauucuacagca

SEQ ID NO: 2444168 - RNA, 19 nt, Homo sapiens
  misc_RNA (1)...(19): siRNA sense strand
caaagaagagugaggacug

SEQ ID NO: 2444169 - RNA, 19 nt, Homo sapiens
  misc_RNA (1)...(19): siRNA sense strand
aacagaaaccggaucgcaa

SEQ ID NO: 2444170 - RNA, 19 nt, Homo sapiens
  misc_RNA (1)...(19): siRNA sense strand
gguacaagugcaagagaca

SEQ ID NO: 2444171 - RNA, 19 nt, Homo sapiens
  misc_RNA (1)...(19): siRNA sense strand
gguucaagcagcagcggua

SEQ ID NO: 2444172 - RNA, 19 nt, Homo sapiens
  misc_RNA (1)...(19): siRNA sense strand
acgaggaagacgagggcga

SEQ ID NO: 2444173 - RNA, 19 nt, Homo sapiens
  misc_RNA (1)...(19): siRNA sense strand
ccaaggaacaugaagagga

SEQ ID NO: 2444174 - RNA, 19 nt, Homo sapiens
  misc_RNA (1)...(19): siRNA sense strand
aggcggacuuggagcacca

SEQ ID NO: 2444175 - RNA, 19 nt, Homo sapiens
  misc_RNA (1)...(19): siRNA sense strand
ccgccuacggcuaugggaa

SEQ ID NO: 2444176 - RNA, 19 nt, Homo sapiens
  misc_RNA (1)...(19): siRNA sense strand
uggaugaagaggagaaacu

SEQ ID NO: 2444177 - RNA, 19 nt, Homo sapiens
  misc_RNA (1)...(19): siRNA sense strand
ugccagaccaggaggugaa

SEQ ID NO: 2444178 - RNA, 19 nt, Homo sapiens
  misc_RNA (1)...(19): siRNA sense strand
aggagaaacuggaacugca

SEQ ID NO: 2444179 - RNA, 19 nt, Homo sapiens
  misc_RNA (1)...(19): siRNA sense strand
ccaagucaggagcaggaaa

SEQ ID NO: 2444180 - RNA, 19 nt, Homo sapiens
  misc_RNA (1)...(19): siRNA sense strand
caagucaggagcaggaaaa

SEQ ID NO: 2444181 - RNA, 19 nt, Homo sapiens
  misc_RNA (1)...(19): siRNA sense strand
gucuggaugaagaggagaa

SEQ ID NO: 2444182 - RNA, 19 nt, Homo sapiens
  misc_RNA (1)...(19): siRNA sense strand
aggaaaagguaaacugacu

SEQ ID NO: 2444183 - RNA, 19 nt, Homo sapiens
  misc_RNA (1)...(19): siRNA sense strand
uggaugaagaggagaaacu

SEQ ID NO: 2444184 - RNA, 19 nt, Homo sapiens
  misc_RNA (1)...(19): siRNA sense strand
ugccagaccaggaggugaa

SEQ ID NO: 2444185 - RNA, 19 nt, Homo sapiens
  misc_RNA (1)...(19): siRNA sense strand
aggagaaacuggaacugca

SEQ ID NO: 2444186 - RNA, 19 nt, Homo sapiens
  misc_RNA (1)...(19): siRNA sense strand
ccaagucaggagcaggaaa

SEQ ID NO: 2444187 - RNA, 19 nt, Homo sapiens
  misc_RNA (1)...(19): siRNA sense strand
caagucaggagcaggaaaa

SEQ ID NO: 2444188 - RNA, 19 nt, Homo sapiens
  misc_RNA (1)...(19): siRNA sense strand
gucuggaugaagaggagaa

SEQ ID NO: 2444189 - RNA, 19 nt, Homo sapiens
  misc_RNA (1)...(19): siRNA sense strand
aggaaaagguaaacugacu

SEQ ID NO: 2444190 - RNA, 19 nt, Homo sapiens
  misc_RNA (1)...(19): siRNA sense strand
ggaagugagugcuggguca

SEQ ID NO: 2444191 - RNA, 19 nt, Homo sapiens
  misc_RNA (1)...(19): siRNA sense strand
ccugagugaaggugaggaa

SEQ ID NO: 2444192 - RNA, 19 nt, Homo sapiens
  misc_RNA (1)...(19): siRNA sense strand
gagcacagcuacagcgagu

SEQ ID NO: 2444193 - RNA, 19 nt, Homo sapiens
  misc_RNA (1)...(19): siRNA sense strand
aaggagacagaguggaaau

SEQ ID NO: 2444194 - RNA, 19 nt, Homo sapiens
  misc_RNA (1)...(19): siRNA sense strand
cugagaugaaggagacaga

SEQ ID NO: 2444195 - RNA, 19 nt, Homo sapiens
  misc_RNA (1)...(19): siRNA sense strand
ccuacaucaaggagcggaa

SEQ ID NO: 2444196 - RNA, 19 nt, Homo sapiens
  misc_RNA (1)...(19): siRNA sense strand
gcaacgucacuguggccua

SEQ ID NO: 2444197 - RNA, 19 nt, Homo sapiens
  misc_RNA (1)...(19): siRNA sense strand
gugccugagaugaaggaga

SEQ ID NO: 2444198 - RNA, 19 nt, Homo sapiens
  misc_RNA (1)...(19): siRNA sense strand
gcugacacaaugagugaca

SEQ ID NO: 2444199 - RNA, 19 nt, Homo sapiens
  misc_RNA (1)...(19): siRNA sense strand
gggcauuggugacgaggug

SEQ ID NO: 2444200 - RNA, 19 nt, Homo sapiens
  misc_RNA (1)...(19): siRNA sense strand
caagaaagcucaagggaga

SEQ ID NO: 2444201 - RNA, 19 nt, Homo sapiens
  misc_RNA (1)...(19): siRNA sense strand
uagacaaacugaaaggcaa

SEQ ID NO: 2444202 - RNA, 19 nt, Homo sapiens
  misc_RNA (1)...(19): siRNA sense strand
agacaaacugaaaggcaau

SEQ ID NO: 2444203 - RNA, 19 nt, Homo sapiens
  misc_RNA (1)...(19): siRNA sense strand
ucaaacaacaauauggaga

SEQ ID NO: 2444204 - RNA, 19 nt, Homo sapiens
  misc_RNA (1)...(19): siRNA sense strand
cacuagaggacuacagaga

SEQ ID NO: 2444205 - RNA, 19 nt, Homo sapiens
  misc_RNA (1)...(19): siRNA sense strand
cagaaaccucagagagacu

SEQ ID NO: 2444206 - RNA, 19 nt, Homo sapiens
  misc_RNA (1)...(19): siRNA sense strand
cagagaaugucaagaggac

SEQ ID NO: 2444207 - RNA, 19 nt, Homo sapiens
  misc_RNA (1)...(19): siRNA sense strand
ccaaauaugcaguggaagg

SEQ ID NO: 2444208 - RNA, 19 nt, Homo sapiens
  misc_RNA (1)...(19): siRNA sense strand
caacagcuuuaaaggcaga

SEQ ID NO: 2444209 - RNA, 19 nt, Homo sapiens
  misc_RNA (1)...(19): siRNA sense strand
aagucuagacaaacugaaa

SEQ ID NO: 2444210 - RNA, 19 nt, Homo sapiens
  misc_RNA (1)...(19): siRNA sense strand
ucauuaugccgcuggaaaa

SEQ ID NO: 2444211 - RNA, 19 nt, Homo sapiens
  misc_RNA (1)...(19): siRNA sense strand
guggacucguaaaggaaaa

SEQ ID NO: 2444212 - RNA, 19 nt, Homo sapiens
  misc_RNA (1)...(19): siRNA sense strand
gguuucaaugacagcuuaa

SEQ ID NO: 2444213 - RNA, 19 nt, Homo sapiens
  misc_RNA (1)...(19): siRNA sense strand
cagaaagcagagcuggcua

SEQ ID NO: 2444214 - RNA, 19 nt, Homo sapiens
  misc_RNA (1)...(19): siRNA sense strand
caagaaagcucaagggaga

SEQ ID NO: 2444215 - RNA, 19 nt, Homo sapiens
  misc_RNA (1)...(19): siRNA sense strand
uagacaaacugaaaggcaa

SEQ ID NO: 2444216 - RNA, 19 nt, Homo sapiens
  misc_RNA (1)...(19): siRNA sense strand
agacaaacugaaaggcaau

SEQ ID NO: 2444217 - RNA, 19 nt, Homo sapiens
  misc_RNA (1)...(19): siRNA sense strand
ucaaacaacaauauggaga

SEQ ID NO: 2444218 - RNA, 19 nt, Homo sapiens
  misc_RNA (1)...(19): siRNA sense strand
cacuagaggacuacagaga

SEQ ID NO: 2444219 - RNA, 19 nt, Homo sapiens
  misc_RNA (1)...(19): siRNA sense strand
cagaaaccucagagagacu

SEQ ID NO: 2444220 - RNA, 19 nt, Homo sapiens
  misc_RNA (1)...(19): siRNA sense strand
cagagaaugucaagaggac

SEQ ID NO: 2444221 - RNA, 19 nt, Homo sapiens
  misc_RNA (1)...(19): siRNA sense strand
ccaaauaugcaguggaagg

SEQ ID NO: 2444222 - RNA, 19 nt, Homo sapiens
  misc_RNA (1)...(19): siRNA sense strand
caacagcuuuaaaggcaga

SEQ ID NO: 2444223 - RNA, 19 nt, Homo sapiens
  misc_RNA (1)...(19): siRNA sense strand
aagucuagacaaacugaaa

SEQ ID NO: 2444224 - RNA, 19 nt, Homo sapiens
  misc_RNA (1)...(19): siRNA sense strand
ucauuaugccgcuggaaaa

SEQ ID NO: 2444225 - RNA, 19 nt, Homo sapiens
  misc_RNA (1)...(19): siRNA sense strand
guggacucguaaaggaaaa

SEQ ID NO: 2444226 - RNA, 19 nt, Homo sapiens
  misc_RNA (1)...(19): siRNA sense strand
gguuucaaugacagcuuaa

SEQ ID NO: 2444227 - RNA, 19 nt, Homo sapiens
  misc_RNA (1)...(19): siRNA sense strand
cagaaagcagagcuggcua

SEQ ID NO: 2444228 - RNA, 19 nt, Homo sapiens
  misc_RNA (1)...(19): siRNA sense strand
aggaauaacaggugauaau

SEQ ID NO: 2444229 - RNA, 19 nt, Homo sapiens
  misc_RNA (1)...(19): siRNA sense strand
uggaacaaauaaagggaau

SEQ ID NO: 2444230 - RNA, 19 nt, Homo sapiens
  misc_RNA (1)...(19): siRNA sense strand
aaaagaagaucgagggaau

SEQ ID NO: 2444231 - RNA, 19 nt, Homo sapiens
  misc_RNA (1)...(19): siRNA sense strand
aaacaguggcaaaguguaa

SEQ ID NO: 2444232 - RNA, 19 nt, Homo sapiens
  misc_RNA (1)...(19): siRNA sense strand
cggaagauaauguggcaau

SEQ ID NO: 2444233 - RNA, 19 nt, Homo sapiens
  misc_RNA (1)...(19): siRNA sense strand
ggaacaaauaaagggaaua

SEQ ID NO: 2444234 - RNA, 19 nt, Homo sapiens
  misc_RNA (1)...(19): siRNA sense strand
aauuggaaauguuggcaua

SEQ ID NO: 2444235 - RNA, 19 nt, Homo sapiens
  misc_RNA (1)...(19): siRNA sense strand
agacauacgucgagggguu

SEQ ID NO: 2444236 - RNA, 19 nt, Homo sapiens
  misc_RNA (1)...(19): siRNA sense strand
acucagaauugaagaucau

SEQ ID NO: 2444237 - RNA, 19 nt, Homo sapiens
  misc_RNA (1)...(19): siRNA sense strand
gcaaaauagaugccaaaua

SEQ ID NO: 2444238 - RNA, 19 nt, Homo sapiens
  misc_RNA (1)...(19): siRNA sense strand
uguccuauguguucagaaa

SEQ ID NO: 2444239 - RNA, 19 nt, Homo sapiens
  misc_RNA (1)...(19): siRNA sense strand
uggaacuguuaaaggaaau

SEQ ID NO: 2444240 - RNA, 19 nt, Homo sapiens
  misc_RNA (1)...(19): siRNA sense strand
uggagaaaaugcugugaaa

SEQ ID NO: 2444241 - RNA, 19 nt, Homo sapiens
  misc_RNA (1)...(19): siRNA sense strand
cuaucaaagcauugccuua

SEQ ID NO: 2444242 - RNA, 19 nt, Homo sapiens
  misc_RNA (1)...(19): siRNA sense strand
gcccaagcucggaagauaa

SEQ ID NO: 2444243 - RNA, 19 nt, Homo sapiens
  misc_RNA (1)...(19): siRNA sense strand
ggagaugagaagggauuua

SEQ ID NO: 2444244 - RNA, 19 nt, Homo sapiens
  misc_RNA (1)...(19): siRNA sense strand
ggucaaaaguuggaaguuu

SEQ ID NO: 2444245 - RNA, 19 nt, Homo sapiens
  misc_RNA (1)...(19): siRNA sense strand
cagcaaaauagaugccaaa

SEQ ID NO: 2444246 - RNA, 19 nt, Homo sapiens
  misc_RNA (1)...(19): siRNA sense strand
ggaaugaauaaucgagcuu

SEQ ID NO: 2444247 - RNA, 19 nt, Homo sapiens
  misc_RNA (1)...(19): siRNA sense strand
auacaaggagccaagguua

SEQ ID NO: 2444248 - RNA, 19 nt, Homo sapiens
  misc_RNA (1)...(19): siRNA sense strand
cuggagaugagaagggauu

SEQ ID NO: 2444249 - RNA, 19 nt, Homo sapiens
  misc_RNA (1)...(19): siRNA sense strand
agaaauggcaauugaaacu

SEQ ID NO: 2444250 - RNA, 19 nt, Homo sapiens
  misc_RNA (1)...(19): siRNA sense strand
gcgaaaucuuggaugcuca

SEQ ID NO: 2444251 - RNA, 19 nt, Homo sapiens
  misc_RNA (1)...(19): siRNA sense strand
gcuaaacacugaaagcaca

SEQ ID NO: 2444252 - RNA, 19 nt, Homo sapiens
  misc_RNA (1)...(19): siRNA sense strand
ccaaacacagaguggaaaa

SEQ ID NO: 2444253 - RNA, 19 nt, Homo sapiens
  misc_RNA (1)...(19): siRNA sense strand
ggcaaaaguuggugaucuu

SEQ ID NO: 2444254 - RNA, 19 nt, Homo sapiens
  misc_RNA (1)...(19): siRNA sense strand
uggcaauagaaauggcaau

SEQ ID NO: 2444255 - RNA, 19 nt, Homo sapiens
  misc_RNA (1)...(19): siRNA sense strand
gcucuaagaauugggcaaa

SEQ ID NO: 2444256 - RNA, 19 nt, Homo sapiens
  misc_RNA (1)...(19): siRNA sense strand
ccucuguccuggauguaaa

SEQ ID NO: 2444257 - RNA, 19 nt, Homo sapiens
  misc_RNA (1)...(19): siRNA sense strand
ucaagaagaacgugagacu

SEQ ID NO: 2444258 - RNA, 19 nt, Homo sapiens
  misc_RNA (1)...(19): siRNA sense strand
caacacaacaaaauggaaa

SEQ ID NO: 2444259 - RNA, 19 nt, Homo sapiens
  misc_RNA (1)...(19): siRNA sense strand
cugaaaucccagaagauca

SEQ ID NO: 2444260 - RNA, 19 nt, Homo sapiens
  misc_RNA (1)...(19): siRNA sense strand
ccugaauaccgcagcaaaa

SEQ ID NO: 2444261 - RNA, 19 nt, Homo sapiens
  misc_RNA (1)...(19): siRNA sense strand
acacagaguggaaaaguaa

SEQ ID NO: 2444262 - RNA, 19 nt, Homo sapiens
  misc_RNA (1)...(19): siRNA sense strand
ugccaaacacagaguggaa

SEQ ID NO: 2444263 - RNA, 19 nt, Homo sapiens
  misc_RNA (1)...(19): siRNA sense strand
gcugagaaaucuagcugca

SEQ ID NO: 2444264 - RNA, 19 nt, Homo sapiens
  misc_RNA (1)...(19): siRNA sense strand
cgcucuaagaauugggcaa

SEQ ID NO: 2444265 - RNA, 19 nt, Homo sapiens
  misc_RNA (1)...(19): siRNA sense strand
gucaauauuguuagagaga

SEQ ID NO: 2444266 - RNA, 19 nt, Homo sapiens
  misc_RNA (1)...(19): siRNA sense strand
uugaaggagaaaagagaua

SEQ ID NO: 2444267 - RNA, 19 nt, Homo sapiens
  misc_RNA (1)...(19): siRNA sense strand
caggaaggugacacgauaa

SEQ ID NO: 2444268 - RNA, 19 nt, Homo sapiens
  misc_RNA (1)...(19): siRNA sense strand
aagacuugguugacuuaaa

SEQ ID NO: 2444269 - RNA, 19 nt, Homo sapiens
  misc_RNA (1)...(19): siRNA sense strand
gaauaaucgagcuugguuu

SEQ ID NO: 2444270 - RNA, 19 nt, Homo sapiens
  misc_RNA (1)...(19): siRNA sense strand
cauuugauagaaagcgaaa

SEQ ID NO: 2444271 - RNA, 19 nt, Homo sapiens
  misc_RNA (1)...(19): siRNA sense strand
aguaacaggagcugauuau

SEQ ID NO: 2444272 - RNA, 19 nt, Homo sapiens
  misc_RNA (1)...(19): siRNA sense strand
cuuuagguggugaagauaa

SEQ ID NO: 2444273 - RNA, 19 nt, Homo sapiens
  misc_RNA (1)...(19): siRNA sense strand
gaaaggaauaacaggugau

SEQ ID NO: 2444274 - RNA, 19 nt, Homo sapiens
  misc_RNA (1)...(19): siRNA sense strand
caauauuguuagagagacc

SEQ ID NO: 2444275 - RNA, 19 nt, Homo sapiens
  misc_RNA (1)...(19): siRNA sense strand
acaaauaagaccagccagu

SEQ ID NO: 2444276 - RNA, 19 nt, Homo sapiens
  misc_RNA (1)...(19): siRNA sense strand
gaaaacuggccaauggaua

SEQ ID NO: 2444277 - RNA, 19 nt, Homo sapiens
  misc_RNA (1)...(19): siRNA sense strand
agaaaggaauaacagguga

SEQ ID NO: 2444278 - RNA, 19 nt, Homo sapiens
  misc_RNA (1)...(19): siRNA sense strand
gccaacaacaucagcaaau

SEQ ID NO: 2444279 - RNA, 19 nt, Homo sapiens
  misc_RNA (1)...(19): siRNA sense strand
ggaaaacauacuaagagaa

SEQ ID NO: 2444280 - RNA, 19 nt, Homo sapiens
  misc_RNA (1)...(19): siRNA sense strand
gaaaauaaaggauugggua

SEQ ID NO: 2444281 - RNA, 19 nt, Homo sapiens
  misc_RNA (1)...(19): siRNA sense strand
uggcuguaggaaugaauaa

SEQ ID NO: 2444282 - RNA, 19 nt, Homo sapiens
  misc_RNA (1)...(19): siRNA sense strand
gcuauauaauggagagcug

SEQ ID NO: 2444283 - RNA, 19 nt, Homo sapiens
  misc_RNA (1)...(19): siRNA sense strand
acugaaagcacauguccua

SEQ ID NO: 2444284 - RNA, 19 nt, Homo sapiens
  misc_RNA (1)...(19): siRNA sense strand
aagagacuguggagccaua

SEQ ID NO: 2444285 - RNA, 19 nt, Homo sapiens
  misc_RNA (1)...(19): siRNA sense strand
cggcccaacuguaugaaaa

SEQ ID NO: 2444286 - RNA, 19 nt, Homo sapiens
  misc_RNA (1)...(19): siRNA sense strand
acuuaaacacuuccugaaa

SEQ ID NO: 2444287 - RNA, 19 nt, Homo sapiens
  misc_RNA (1)...(19): siRNA sense strand
ggauugggauaaagaugga

SEQ ID NO: 2444288 - RNA, 19 nt, Homo sapiens
  misc_RNA (1)...(19): siRNA sense strand
gacaauggcaugagggauc

SEQ ID NO: 2444289 - RNA, 19 nt, Homo sapiens
  misc_RNA (1)...(19): siRNA sense strand
uggaaaacauacuaagaga

SEQ ID NO: 2444290 - RNA, 19 nt, Homo sapiens
  misc_RNA (1)...(19): siRNA sense strand
agaucagagccuagcaaca

SEQ ID NO: 2444291 - RNA, 19 nt, Homo sapiens
  misc_RNA (1)...(19): siRNA sense strand
ugggaaaugugcaggauuc

SEQ ID NO: 2444292 - RNA, 19 nt, Homo sapiens
  misc_RNA (1)...(19): siRNA sense strand
cgauaaagcagcaucuguu

SEQ ID NO: 2444293 - RNA, 19 nt, Homo sapiens
  misc_RNA (1)...(19): siRNA sense strand
cugucaauauuguuagaga

SEQ ID NO: 2444294 - RNA, 19 nt, Homo sapiens
  misc_RNA (1)...(19): siRNA sense strand
cuuccagaauggugagaaa

SEQ ID NO: 2444295 - RNA, 19 nt, Homo sapiens
  misc_RNA (1)...(19): siRNA sense strand
ggacaaaggucgugccaug

SEQ ID NO: 2444296 - RNA, 19 nt, Homo sapiens
  misc_RNA (1)...(19): siRNA sense strand
gagcaaugaaugauggcaa

SEQ ID NO: 2444297 - RNA, 19 nt, Homo sapiens
  misc_RNA (1)...(19): siRNA sense strand
aagcaaaaguaauggggaa

SEQ ID NO: 2444298 - RNA, 19 nt, Homo sapiens
  misc_RNA (1)...(19): siRNA sense strand
agcaaugaaugauggcaaa

SEQ ID NO: 2444299 - RNA, 19 nt, Homo sapiens
  misc_RNA (1)...(19): siRNA sense strand
uguuaaagcacuugaagga

SEQ ID NO: 2444300 - RNA, 19 nt, Homo sapiens
  misc_RNA (1)...(19): siRNA sense strand
ccaguagagaugaggguga

SEQ ID NO: 2444301 - RNA, 19 nt, Homo sapiens
  misc_RNA (1)...(19): siRNA sense strand
agaagagauccgauagcua

SEQ ID NO: 2444302 - RNA, 19 nt, Homo sapiens
  misc_RNA (1)...(19): siRNA sense strand
aguugaaggauauggaaca

SEQ ID NO: 2444303 - RNA, 19 nt, Homo sapiens
  misc_RNA (1)...(19): siRNA sense strand
agaugagggugaaagaaaa

SEQ ID NO: 2444304 - RNA, 19 nt, Homo sapiens
  misc_RNA (1)...(19): siRNA sense strand
gcaaagagcgcaucaggga

SEQ ID NO: 2444305 - RNA, 19 nt, Homo sapiens
  misc_RNA (1)...(19): siRNA sense strand
ugaucuuggccuacaguaa

SEQ ID NO: 2444306 - RNA, 19 nt, Homo sapiens
  misc_RNA (1)...(19): siRNA sense strand
agaggguguuuauaggaaa

SEQ ID NO: 2444307 - RNA, 19 nt, Homo sapiens
  misc_RNA (1)...(19): siRNA sense strand
ccauguucuuaguggccaa

SEQ ID NO: 2444308 - RNA, 19 nt, Homo sapiens
  misc_RNA (1)...(19): siRNA sense strand
gagaggaaccggugugcga

SEQ ID NO: 2444309 - RNA, 19 nt, Homo sapiens
  misc_RNA (1)...(19): siRNA sense strand
aaggcgaguugaaggauau

SEQ ID NO: 2444310 - RNA, 19 nt, Homo sapiens
  misc_RNA (1)...(19): siRNA sense strand
gcaaacaagcugauggaug

SEQ ID NO: 2444311 - RNA, 19 nt, Homo sapiens
  misc_RNA (1)...(19): siRNA sense strand
cgaagaaagcagaagcucu

SEQ ID NO: 2444312 - RNA, 19 nt, Homo sapiens
  misc_RNA (1)...(19): siRNA sense strand
uggcaaauucagugcagau

SEQ ID NO: 2444313 - RNA, 19 nt, Homo sapiens
  misc_RNA (1)...(19): siRNA sense strand
guaauggggaagagggcua

SEQ ID NO: 2444314 - RNA, 19 nt, Homo sapiens
  misc_RNA (1)...(19): siRNA sense strand
gaaccaaaugucagaggca

SEQ ID NO: 2444315 - RNA, 19 nt, Homo sapiens
  misc_RNA (1)...(19): siRNA sense strand
ccucugaaacagugcugaa

SEQ ID NO: 2444316 - RNA, 19 nt, Homo sapiens
  misc_RNA (1)...(19): siRNA sense strand
cagcagaacaacacagagu

SEQ ID NO: 2444317 - RNA, 19 nt, Homo sapiens
  misc_RNA (1)...(19): siRNA sense strand
cggcaaacaagcugaugga

SEQ ID NO: 2444318 - RNA, 19 nt, Homo sapiens
  misc_RNA (1)...(19): siRNA sense strand
gcaccauggcacugcaaca

SEQ ID NO: 2444319 - RNA, 19 nt, Homo sapiens
  misc_RNA (1)...(19): siRNA sense strand
ucaauagcauagagggugu

SEQ ID NO: 2444320 - RNA, 19 nt, Homo sapiens
  misc_RNA (1)...(19): siRNA sense strand
gcugcagggcccagauauu

SEQ ID NO: 2444321 - RNA, 19 nt, Homo sapiens
  misc_RNA (1)...(19): siRNA sense strand
ggcuauggccggagcuuga

SEQ ID NO: 2444322 - RNA, 19 nt, Homo sapiens
  misc_RNA (1)...(19): siRNA sense strand
uguaagagaagaggaggua

SEQ ID NO: 2444323 - RNA, 19 nt, Homo sapiens
  misc_RNA (1)...(19): siRNA sense strand
uuacaagcucagaaccaaa

SEQ ID NO: 2444324 - RNA, 19 nt, Homo sapiens
  misc_RNA (1)...(19): siRNA sense strand
cgggcgugcagcagaacaa

SEQ ID NO: 2444325 - RNA, 19 nt, Homo sapiens
  misc_RNA (1)...(19): siRNA sense strand
uggcugaaggcgaguugaa

SEQ ID NO: 2444326 - RNA, 19 nt, Homo sapiens
  misc_RNA (1)...(19): siRNA sense strand
agacaguggaggaugcuga

SEQ ID NO: 2444327 - RNA, 19 nt, Homo sapiens
  misc_RNA (1)...(19): siRNA sense strand
caaacaagcugauggaugc

SEQ ID NO: 2444328 - RNA, 19 nt, Homo sapiens
  misc_RNA (1)...(19): siRNA sense strand
uagagaugagggugaaaga

SEQ ID NO: 2444329 - RNA, 19 nt, Homo sapiens
  misc_RNA (1)...(19): siRNA sense strand
gauucuuaccggagccgaa

SEQ ID NO: 2444330 - RNA, 19 nt, Homo sapiens
  misc_RNA (1)...(19): siRNA sense strand
accaaaugucagaggcaca

SEQ ID NO: 2444331 - RNA, 19 nt, Homo sapiens
  misc_RNA (1)...(19): siRNA sense strand
cuguaagagaagaggaggu

SEQ ID NO: 2444332 - RNA, 19 nt, Homo sapiens
  misc_RNA (1)...(19): siRNA sense strand
uaagagaagaggagguauc

SEQ ID NO: 2444333 - RNA, 19 nt, Homo sapiens
  misc_RNA (1)...(19): siRNA sense strand
ugcagaaggaauuaaacaa

SEQ ID NO: 2444334 - RNA, 19 nt, Homo sapiens
  misc_RNA (1)...(19): siRNA sense strand
gccaagaacuauuuugcaa

SEQ ID NO: 2444335 - RNA, 19 nt, Homo sapiens
  misc_RNA (1)...(19): siRNA sense strand
auacaguuugacagagcaa

SEQ ID NO: 2444336 - RNA, 19 nt, Homo sapiens
  misc_RNA (1)...(19): siRNA sense strand
cagauauuacacugucaaa

SEQ ID NO: 2444337 - RNA, 19 nt, Homo sapiens
  misc_RNA (1)...(19): siRNA sense strand
gagccgaaagcaaaaguaa

SEQ ID NO: 2444338 - RNA, 19 nt, Homo sapiens
  misc_RNA (1)...(19): siRNA sense strand
uaucagcaucgcacagaaa

SEQ ID NO: 2444339 - RNA, 19 nt, Homo sapiens
  misc_RNA (1)...(19): siRNA sense strand
cugggaagacggcaaacaa

SEQ ID NO: 2444340 - RNA, 19 nt, Homo sapiens
  misc_RNA (1)...(19): siRNA sense strand
cugucagagcucaucgaua

SEQ ID NO: 2444341 - RNA, 19 nt, Homo sapiens
  misc_RNA (1)...(19): siRNA sense strand
cagaacaggccuuaagucu

SEQ ID NO: 2444342 - RNA, 19 nt, Homo sapiens
  misc_RNA (1)...(19): siRNA sense strand
gucacaugaucuuggccua

SEQ ID NO: 2444343 - RNA, 19 nt, Homo sapiens
  misc_RNA (1)...(19): siRNA sense strand
uuaccggagccgaaagcaa

SEQ ID NO: 2444344 - RNA, 19 nt, Homo sapiens
  misc_RNA (1)...(19): siRNA sense strand
ucucaauagcauagagggu

SEQ ID NO: 2444345 - RNA, 19 nt, Homo sapiens
  misc_RNA (1)...(19): siRNA sense strand
cuaaagagcuuguacggaa

SEQ ID NO: 2444346 - RNA, 19 nt, Homo sapiens
  misc_RNA (1)...(19): siRNA sense strand
agagaaaggugaaggccau

SEQ ID NO: 2444347 - RNA, 19 nt, Homo sapiens
  misc_RNA (1)...(19): siRNA sense strand
ugaaugaccuggaggcaga

SEQ ID NO: 2444348 - RNA, 19 nt, Homo sapiens
  misc_RNA (1)...(19): siRNA sense strand
agaggaagauggaggugga

SEQ ID NO: 2444349 - RNA, 19 nt, Homo sapiens
  misc_RNA (1)...(19): siRNA sense strand
ccagaaaagaaaggaaaua

SEQ ID NO: 2444350 - RNA, 19 nt, Homo sapiens
  misc_RNA (1)...(19): siRNA sense strand
ggcaaaacccggaggcaga

SEQ ID NO: 2444351 - RNA, 19 nt, Homo sapiens
  misc_RNA (1)...(19): siRNA sense strand
ccggaaugcucgacggaag

SEQ ID NO: 2444352 - RNA, 19 nt, Homo sapiens
  misc_RNA (1)...(19): siRNA sense strand
ggaccacgcuaaaucggua

SEQ ID NO: 2444353 - RNA, 19 nt, Homo sapiens
  misc_RNA (1)...(19): siRNA sense strand
aggccauggagguggacau

SEQ ID NO: 2444354 - RNA, 19 nt, Homo sapiens
  misc_RNA (1)...(19): siRNA sense strand
gacauagaggagaggccua

SEQ ID NO: 2444355 - RNA, 19 nt, Homo sapiens
  misc_RNA (1)...(19): siRNA sense strand
aagagaaaggugaaggcca

SEQ ID NO: 2444356 - RNA, 19 nt, Homo sapiens
  misc_RNA (1)...(19): siRNA sense strand
gggaggacuauaaggccau

SEQ ID NO: 2444357 - RNA, 19 nt, Homo sapiens
  misc_RNA (1)...(19): siRNA sense strand
acauagaggagaggccuaa

SEQ ID NO: 2444358 - RNA, 19 nt, Homo sapiens
  misc_RNA (1)...(19): siRNA sense strand
gcuaaaucgguacggcaga

SEQ ID NO: 2444359 - RNA, 19 nt, Homo sapiens
  misc_RNA (1)...(19): siRNA sense strand
aggaaaugaagaaggcaua

SEQ ID NO: 2444360 - RNA, 19 nt, Homo sapiens
  misc_RNA (1)...(19): siRNA sense strand
cugcaaagaauauggucaa

SEQ ID NO: 2444361 - RNA, 19 nt, Homo sapiens
  misc_RNA (1)...(19): siRNA sense strand
agaucaagaagaugagaga

SEQ ID NO: 2444362 - RNA, 19 nt, Homo sapiens
  misc_RNA (1)...(19): siRNA sense strand
gugaugagcuucuggcuga

SEQ ID NO: 2444363 - RNA, 19 nt, Homo sapiens
  misc_RNA (1)...(19): siRNA sense strand
uagugaaguauaaggauca

SEQ ID NO: 2444364 - RNA, 19 nt, Homo sapiens
  misc_RNA (1)...(19): siRNA sense strand
aaggaaaugaagaaggcau

SEQ ID NO: 2444365 - RNA, 19 nt, Homo sapiens
  misc_RNA (1)...(19): siRNA sense strand
ggaugaauuuggauugcca

SEQ ID NO: 2444366 - RNA, 19 nt, Homo sapiens
  misc_RNA (1)...(19): siRNA sense strand
aggcauacaagcaagugaa

SEQ ID NO: 2444367 - RNA, 19 nt, Homo sapiens
  misc_RNA (1)...(19): siRNA sense strand
aaaugaaauccaagaagca

SEQ ID NO: 2444368 - RNA, 19 nt, Homo sapiens
  misc_RNA (1)...(19): siRNA sense strand
auaugauggaagaugcaaa

SEQ ID NO: 2444369 - RNA, 19 nt, Homo sapiens
  misc_RNA (1)...(19): siRNA sense strand
ggauaugauggaagaugca

SEQ ID NO: 2444370 - RNA, 19 nt, Homo sapiens
  misc_RNA (1)...(19): siRNA sense strand
aagcagaguuggaugcacu

SEQ ID NO: 2444371 - RNA, 19 nt, Homo sapiens
  misc_RNA (1)...(19): siRNA sense strand
auggaguucugguggauga

SEQ ID NO: 2444372 - RNA, 19 nt, Homo sapiens
  misc_RNA (1)...(19): siRNA sense strand
aagaugauuuagaagcaga

SEQ ID NO: 2444373 - RNA, 19 nt, Homo sapiens
  misc_RNA (1)...(19): siRNA sense strand
ccugcaaagaauaugguca

SEQ ID NO: 2444374 - RNA, 19 nt, Homo sapiens
  misc_RNA (1)...(19): siRNA sense strand
gggaagagaugcagcgcua

SEQ ID NO: 2444375 - RNA, 19 nt, Homo sapiens
  misc_RNA (1)...(19): siRNA sense strand
cggcaagagaugauggaaa

SEQ ID NO: 2444376 - RNA, 19 nt, Homo sapiens
  misc_RNA (1)...(19): siRNA sense strand
ggaagaagauugaggagcu

SEQ ID NO: 2444377 - RNA, 19 nt, Homo sapiens
  misc_RNA (1)...(19): siRNA sense strand
ucacagaagaagauggcaa

SEQ ID NO: 2444378 - RNA, 19 nt, Homo sapiens
  misc_RNA (1)...(19): siRNA sense strand
cugcacaacucuaagguga

SEQ ID NO: 2444379 - RNA, 19 nt, Homo sapiens
  misc_RNA (1)...(19): siRNA sense strand
gcaugaagcuggagagugc

SEQ ID NO: 2444380 - RNA, 19 nt, Homo sapiens
  misc_RNA (1)...(19): siRNA sense strand
ggugaacaggagagagaca

SEQ ID NO: 2444381 - RNA, 19 nt, Homo sapiens
  misc_RNA (1)...(19): siRNA sense strand
ccaaauggagggaggagga

SEQ ID NO: 2444382 - RNA, 19 nt, Homo sapiens
  misc_RNA (1)...(19): siRNA sense strand
uguggaaggccgagcagaa

SEQ ID NO: 2444383 - RNA, 19 nt, Homo sapiens
  misc_RNA (1)...(19): siRNA sense strand
aaggugaacaggagagaga

SEQ ID NO: 2444384 - RNA, 19 nt, Homo sapiens
  misc_RNA (1)...(19): siRNA sense strand
agaagauggaggagaagga

SEQ ID NO: 2444385 - RNA, 19 nt, Homo sapiens
  misc_RNA (1)...(19): siRNA sense strand
gggagaucacagaagaaga

SEQ ID NO: 2444386 - RNA, 19 nt, Homo sapiens
  misc_RNA (1)...(19): siRNA sense strand
aagaagagcaccagggaag

SEQ ID NO: 2444387 - RNA, 19 nt, Homo sapiens
  misc_RNA (1)...(19): siRNA sense strand
uugcaaaugagucuggaaa

SEQ ID NO: 2444388 - RNA, 19 nt, Homo sapiens
  misc_RNA (1)...(19): siRNA sense strand
caggagagagacaggccaa

SEQ ID NO: 2444389 - RNA, 19 nt, Homo sapiens
  misc_RNA (1)...(19): siRNA sense strand
ccagugaaaaugaagaaaa

SEQ ID NO: 2444390 - RNA, 19 nt, Homo sapiens
  misc_RNA (1)...(19): siRNA sense strand
agcaugaggcugagcggaa

SEQ ID NO: 2444391 - RNA, 19 nt, Homo sapiens
  misc_RNA (1)...(19): siRNA sense strand
cagggagaucacagaagaa

SEQ ID NO: 2444392 - RNA, 19 nt, Homo sapiens
  misc_RNA (1)...(19): siRNA sense strand
caagaagagcaccagggaa

SEQ ID NO: 2444393 - RNA, 19 nt, Homo sapiens
  misc_RNA (1)...(19): siRNA sense strand
agcagaagcaugaggcuga

SEQ ID NO: 2444394 - RNA, 19 nt, Homo sapiens
  misc_RNA (1)...(19): siRNA sense strand
aagaaaaguuggacuggau

SEQ ID NO: 2444395 - RNA, 19 nt, Homo sapiens
  misc_RNA (1)...(19): siRNA sense strand
ggccaaacuaggagcccau

SEQ ID NO: 2444396 - RNA, 19 nt, Homo sapiens
  misc_RNA (1)...(19): siRNA sense strand
aggaucgggugaagcggaa

SEQ ID NO: 2444397 - RNA, 19 nt, Homo sapiens
  misc_RNA (1)...(19): siRNA sense strand
aggccgagcagaagcauga

SEQ ID NO: 2444398 - RNA, 19 nt, Homo sapiens
  misc_RNA (1)...(19): siRNA sense strand
ucaggaagaaggaggagga

SEQ ID NO: 2444399 - RNA, 19 nt, Homo sapiens
  misc_RNA (1)...(19): siRNA sense strand
gcgaaaacggcaagagaug

SEQ ID NO: 2444400 - RNA, 19 nt, Homo sapiens
  misc_RNA (1)...(19): siRNA sense strand
gaggcugagcggaagaaga

SEQ ID NO: 2444401 - RNA, 19 nt, Homo sapiens
  misc_RNA (1)...(19): siRNA sense strand
cacaagaaacauaagcaca

SEQ ID NO: 2444402 - RNA, 19 nt, Homo sapiens
  misc_RNA (1)...(19): siRNA sense strand
cuucgguagcucuggagaa

SEQ ID NO: 2444403 - RNA, 19 nt, Homo sapiens
  misc_RNA (1)...(19): siRNA sense strand
uggugaaccgugacgagua

SEQ ID NO: 2444404 - RNA, 19 nt, Homo sapiens
  misc_RNA (1)...(19): siRNA sense strand
aggaagaaggaggaggaga

SEQ ID NO: 2444405 - RNA, 19 nt, Homo sapiens
  misc_RNA (1)...(19): siRNA sense strand
agggaggaggagagacuga

SEQ ID NO: 2444406 - RNA, 19 nt, Homo sapiens
  misc_RNA (1)...(19): siRNA sense strand
gguuaaagaagaugggaca

SEQ ID NO: 2444407 - RNA, 19 nt, Homo sapiens
  misc_RNA (1)...(19): siRNA sense strand
aagaauaauaggaggaaga

SEQ ID NO: 2444408 - RNA, 19 nt, Homo sapiens
  misc_RNA (1)...(19): siRNA sense strand
gaggacagcuggagggaca

SEQ ID NO: 2444409 - RNA, 19 nt, Homo sapiens
  misc_RNA (1)...(19): siRNA sense strand
cauuaaugagggagaguau

SEQ ID NO: 2444410 - RNA, 19 nt, Homo sapiens
  misc_RNA (1)...(19): siRNA sense strand
gcagacagcucauggccaa

SEQ ID NO: 2444411 - RNA, 19 nt, Homo sapiens
  misc_RNA (1)...(19): siRNA sense strand
gggccaaaacagagagaga

SEQ ID NO: 2444412 - RNA, 19 nt, Homo sapiens
  misc_RNA (1)...(19): siRNA sense strand
gaaaaggaugugaggcaaa

SEQ ID NO: 2444413 - RNA, 19 nt, Homo sapiens
  misc_RNA (1)...(19): siRNA sense strand
cgggaucgguugugaccaa

SEQ ID NO: 2444414 - RNA, 19 nt, Homo sapiens
  misc_RNA (1)...(19): siRNA sense strand
uauuauaccuggaggacca

SEQ ID NO: 2444415 - RNA, 19 nt, Homo sapiens
  misc_RNA (1)...(19): siRNA sense strand
uggaaauaacccagaugaa

SEQ ID NO: 2444416 - RNA, 19 nt, Homo sapiens
  misc_RNA (1)...(19): siRNA sense strand
cugcaaagaaggagcaagu

SEQ ID NO: 2444417 - RNA, 19 nt, Homo sapiens
  misc_RNA (1)...(19): siRNA sense strand
aauaggaggaagagcuuua

SEQ ID NO: 2444418 - RNA, 19 nt, Homo sapiens
  misc_RNA (1)...(19): siRNA sense strand
agaaauuguacgugugaca

SEQ ID NO: 2444419 - RNA, 19 nt, Homo sapiens
  misc_RNA (1)...(19): siRNA sense strand
gggagaguauucaggccaa

SEQ ID NO: 2444420 - RNA, 19 nt, Homo sapiens
  misc_RNA (1)...(19): siRNA sense strand
ucaaagaauaauaggagga

SEQ ID NO: 2444421 - RNA, 19 nt, Homo sapiens
  misc_RNA (1)...(19): siRNA sense strand
agaaaagaguuguggagga

SEQ ID NO: 2444422 - RNA, 19 nt, Homo sapiens
  misc_RNA (1)...(19): siRNA sense strand
gugcagauggagaaagaga

SEQ ID NO: 2444423 - RNA, 19 nt, Homo sapiens
  misc_RNA (1)...(19): siRNA sense strand
cugaacugcuacagggaca

SEQ ID NO: 2444424 - RNA, 19 nt, Homo sapiens
  misc_RNA (1)...(19): siRNA sense strand
augcaggcucaaagaauaa

SEQ ID NO: 2444425 - RNA, 19 nt, Homo sapiens
  misc_RNA (1)...(19): siRNA sense strand
aaagaauucaccagggcaa

SEQ ID NO: 2444426 - RNA, 19 nt, Homo sapiens
  misc_RNA (1)...(19): siRNA sense strand
cuggaguucuugaggguca

SEQ ID NO: 2444427 - RNA, 19 nt, Homo sapiens
  misc_RNA (1)...(19): siRNA sense strand
gaucaaaccaggagggcag

SEQ ID NO: 2444428 - RNA, 19 nt, Homo sapiens
  misc_RNA (1)...(19): siRNA sense strand
uaucaugagacuuggaaga

SEQ ID NO: 2444429 - RNA, 19 nt, Homo sapiens
  misc_RNA (1)...(19): siRNA sense strand
aggagaggcuguacugcaa

SEQ ID NO: 2444430 - RNA, 19 nt, Homo sapiens
  misc_RNA (1)...(19): siRNA sense strand
guuaaagggugcugguucu

SEQ ID NO: 2444431 - RNA, 19 nt, Homo sapiens
  misc_RNA (1)...(19): siRNA sense strand
agagagagaccuugggcca

SEQ ID NO: 2444432 - RNA, 19 nt, Homo sapiens
  misc_RNA (1)...(19): siRNA sense strand
gcaugcaggcucaaagaau

SEQ ID NO: 2444433 - RNA, 19 nt, Homo sapiens
  misc_RNA (1)...(19): siRNA sense strand
ucgugcagauggagaaaga

SEQ ID NO: 2444434 - RNA, 19 nt, Homo sapiens
  misc_RNA (1)...(19): siRNA sense strand
uugucggguucaugagaaa

SEQ ID NO: 2444435 - RNA, 19 nt, Homo sapiens
  misc_RNA (1)...(19): siRNA sense strand
ucagaaagaagcacggaga

SEQ ID NO: 2444436 - RNA, 19 nt, Homo sapiens
  misc_RNA (1)...(19): siRNA sense strand
uggaaaaggaugugaggca

SEQ ID NO: 2444437 - RNA, 19 nt, Homo sapiens
  misc_RNA (1)...(19): siRNA sense strand
uggcauauaugaaaagcaa

SEQ ID NO: 2444438 - RNA, 19 nt, Homo sapiens
  misc_RNA (1)...(19): siRNA sense strand
acaucagucuggagggcuu

SEQ ID NO: 2444439 - RNA, 19 nt, Homo sapiens
  misc_RNA (1)...(19): siRNA sense strand
ucagaaggcugguuggcuu

SEQ ID NO: 2444440 - RNA, 19 nt, Homo sapiens
  misc_RNA (1)...(19): siRNA sense strand
ggcagauccuacaggguga

SEQ ID NO: 2444441 - RNA, 19 nt, Homo sapiens
  misc_RNA (1)...(19): siRNA sense strand
ggaaaaggaugugaggcaa

SEQ ID NO: 2444442 - RNA, 19 nt, Homo sapiens
  misc_RNA (1)...(19): siRNA sense strand
cugcagcuucggaaagaua

SEQ ID NO: 2444443 - RNA, 19 nt, Homo sapiens
  misc_RNA (1)...(19): siRNA sense strand
aggaagaggcugcguggga

SEQ ID NO: 2444444 - RNA, 19 nt, Homo sapiens
  misc_RNA (1)...(19): siRNA sense strand
ccugaaggcuggagagagc

SEQ ID NO: 2444445 - RNA, 19 nt, Homo sapiens
  misc_RNA (1)...(19): siRNA sense strand
uggaacugguuaaagaaga

SEQ ID NO: 2444446 - RNA, 19 nt, Homo sapiens
  misc_RNA (1)...(19): siRNA sense strand
gaagaggcugcgugggaca

SEQ ID NO: 2444447 - RNA, 19 nt, Homo sapiens
  misc_RNA (1)...(19): siRNA sense strand
agauugucaugcucagaaa

SEQ ID NO: 2444448 - RNA, 19 nt, Homo sapiens
  misc_RNA (1)...(19): siRNA sense strand
cugaagagugccuguguga

SEQ ID NO: 2444449 - RNA, 19 nt, Homo sapiens
  misc_RNA (1)...(19): siRNA sense strand
ccaugauaaguuugugcaa

SEQ ID NO: 2444450 - RNA, 19 nt, Homo sapiens
  misc_RNA (1)...(19): siRNA sense strand
augcaaacuucaccaagaa

SEQ ID NO: 2444451 - RNA, 19 nt, Homo sapiens
  misc_RNA (1)...(19): siRNA sense strand
uugccaaccucgaggaacu

SEQ ID NO: 2444452 - RNA, 19 nt, Homo sapiens
  misc_RNA (1)...(19): siRNA sense strand
aaauaacccagaugaagaa

SEQ ID NO: 2444453 - RNA, 19 nt, Homo sapiens
  misc_RNA (1)...(19): siRNA sense strand
aggccagagucuucccaaa

SEQ ID NO: 2444454 - RNA, 19 nt, Homo sapiens
  misc_RNA (1)...(19): siRNA sense strand
agucugaucgagaggauga

SEQ ID NO: 2444455 - RNA, 19 nt, Homo sapiens
  misc_RNA (1)...(19): siRNA sense strand
aaaagguguugguggaaau

SEQ ID NO: 2444456 - RNA, 19 nt, Homo sapiens
  misc_RNA (1)...(19): siRNA sense strand
agggacagagugaggauga

SEQ ID NO: 2444457 - RNA, 19 nt, Homo sapiens
  misc_RNA (1)...(19): siRNA sense strand
gcaauuacccuaaggaggu

SEQ ID NO: 2444458 - RNA, 19 nt, Homo sapiens
  misc_RNA (1)...(19): siRNA sense strand
agguggagaguaagccaua

SEQ ID NO: 2444459 - RNA, 19 nt, Homo sapiens
  misc_RNA (1)...(19): siRNA sense strand
caucaauggauaacuucaa

SEQ ID NO: 2444460 - RNA, 19 nt, Homo sapiens
  misc_RNA (1)...(19): siRNA sense strand
ccucagaagaccuccauga

SEQ ID NO: 2444461 - RNA, 19 nt, Homo sapiens
  misc_RNA (1)...(19): siRNA sense strand
aaaucuacuuuguggaacu

SEQ ID NO: 2444462 - RNA, 19 nt, Homo sapiens
  misc_RNA (1)...(19): siRNA sense strand
cuaaugacagcaugggaga

SEQ ID NO: 2444463 - RNA, 19 nt, Homo sapiens
  misc_RNA (1)...(19): siRNA sense strand
cgagucugaucgagaggau

SEQ ID NO: 2444464 - RNA, 19 nt, Homo sapiens
  misc_RNA (1)...(19): siRNA sense strand
gguccagguugaagucuca

SEQ ID NO: 2444465 - RNA, 19 nt, Homo sapiens
  misc_RNA (1)...(19): siRNA sense strand
ccaacaagggagagcaaca

SEQ ID NO: 2444466 - RNA, 19 nt, Homo sapiens
  misc_RNA (1)...(19): siRNA sense strand
gggagaaguucguggaggu

SEQ ID NO: 2444467 - RNA, 19 nt, Homo sapiens
  misc_RNA (1)...(19): siRNA sense strand
gauucauacaggagucaaa

SEQ ID NO: 2444468 - RNA, 19 nt, Homo sapiens
  misc_RNA (1)...(19): siRNA sense strand
agacaaagguuaugccuac

SEQ ID NO: 2444469 - RNA, 19 nt, Homo sapiens
  misc_RNA (1)...(19): siRNA sense strand
ggauguucucccugacaaa

SEQ ID NO: 2444470 - RNA, 19 nt, Homo sapiens
  misc_RNA (1)...(19): siRNA sense strand
aggcagcgacucagaggaa

SEQ ID NO: 2444471 - RNA, 19 nt, Homo sapiens
  misc_RNA (1)...(19): siRNA sense strand
ccacagaaguagcucggga

SEQ ID NO: 2444472 - RNA, 19 nt, Homo sapiens
  misc_RNA (1)...(19): siRNA sense strand
auuccaagacaaagguuau

SEQ ID NO: 2444473 - RNA, 19 nt, Homo sapiens
  misc_RNA (1)...(19): siRNA sense strand
cugccagcuuggaauuaaa

SEQ ID NO: 2444474 - RNA, 19 nt, Homo sapiens
  misc_RNA (1)...(19): siRNA sense strand
aguaucagacggcgagauu

SEQ ID NO: 2444475 - RNA, 19 nt, Homo sapiens
  misc_RNA (1)...(19): siRNA sense strand
aaccaacaagggagagcaa

SEQ ID NO: 2444476 - RNA, 19 nt, Homo sapiens
  misc_RNA (1)...(19): siRNA sense strand
ugaaauaccgagaggccaa

SEQ ID NO: 2444477 - RNA, 19 nt, Homo sapiens
  misc_RNA (1)...(19): siRNA sense strand
acgaaaacuuguaugagaa

SEQ ID NO: 2444478 - RNA, 19 nt, Homo sapiens
  misc_RNA (1)...(19): siRNA sense strand
acccagaacccgaggacga

SEQ ID NO: 2444479 - RNA, 19 nt, Homo sapiens
  misc_RNA (1)...(19): siRNA sense strand
agaacaaggucucugggaa

SEQ ID NO: 2444480 - RNA, 19 nt, Homo sapiens
  misc_RNA (1)...(19): siRNA sense strand
guuugauggaagugaauga

SEQ ID NO: 2444481 - RNA, 19 nt, Homo sapiens
  misc_RNA (1)...(19): siRNA sense strand
cuacagcacucuaaccgaa

SEQ ID NO: 2444482 - RNA, 19 nt, Homo sapiens
  misc_RNA (1)...(19): siRNA sense strand
auuaaugccacaacagcua

SEQ ID NO: 2444483 - RNA, 19 nt, Homo sapiens
  misc_RNA (1)...(19): siRNA sense strand
gugcagagguacauccaga

SEQ ID NO: 2444484 - RNA, 19 nt, Homo sapiens
  misc_RNA (1)...(19): siRNA sense strand
accucaaacacgagagaga

SEQ ID NO: 2444485 - RNA, 19 nt, Homo sapiens
  misc_RNA (1)...(19): siRNA sense strand
ugaaguggugugaggucaa

SEQ ID NO: 2444486 - RNA, 19 nt, Homo sapiens
  misc_RNA (1)...(19): siRNA sense strand
uggaacaucucaaccgcua

SEQ ID NO: 2444487 - RNA, 19 nt, Homo sapiens
  misc_RNA (1)...(19): siRNA sense strand
ggucaagagccgagacagc

SEQ ID NO: 2444488 - RNA, 19 nt, Homo sapiens
  misc_RNA (1)...(19): siRNA sense strand
gaacugauuugcaagggua

SEQ ID NO: 2444489 - RNA, 19 nt, Homo sapiens
  misc_RNA (1)...(19): siRNA sense strand
gccaacaagcugagcgaga

SEQ ID NO: 2444490 - RNA, 19 nt, Homo sapiens
  misc_RNA (1)...(19): siRNA sense strand
ugggauucuuucugaacaa

SEQ ID NO: 2444491 - RNA, 19 nt, Homo sapiens
  misc_RNA (1)...(19): siRNA sense strand
gcaacuuagcccugaggau

SEQ ID NO: 2444492 - RNA, 19 nt, Homo sapiens
  misc_RNA (1)...(19): siRNA sense strand
gaggaugaugagacgacaa

SEQ ID NO: 2444493 - RNA, 19 nt, Homo sapiens
  misc_RNA (1)...(19): siRNA sense strand
cugugugaaucccaggaaa

SEQ ID NO: 2444494 - RNA, 19 nt, Homo sapiens
  misc_RNA (1)...(19): siRNA sense strand
ccugcagcacugagaauau

SEQ ID NO: 2444495 - RNA, 19 nt, Homo sapiens
  misc_RNA (1)...(19): siRNA sense strand
aacaauaggucguggagac

SEQ ID NO: 2444496 - RNA, 19 nt, Homo sapiens
  misc_RNA (1)...(19): siRNA sense strand
ugugugaaucccaggaaaa

SEQ ID NO: 2444497 - RNA, 19 nt, Homo sapiens
  misc_RNA (1)...(19): siRNA sense strand
gcuccagugauguggcuuu

SEQ ID NO: 2444498 - RNA, 19 nt, Homo sapiens
  misc_RNA (1)...(19): siRNA sense strand
ucaaugaagaacugaaacu

SEQ ID NO: 2444499 - RNA, 19 nt, Homo sapiens
  misc_RNA (1)...(19): siRNA sense strand
gaauaugaccuaugggcug

SEQ ID NO: 2444500 - RNA, 19 nt, Homo sapiens
  misc_RNA (1)...(19): siRNA sense strand
uuggaagacauaugcacaa

SEQ ID NO: 2444501 - RNA, 19 nt, Homo sapiens
  misc_RNA (1)...(19): siRNA sense strand
aggugauguuggagaauua

SEQ ID NO: 2444502 - RNA, 19 nt, Homo sapiens
  misc_RNA (1)...(19): siRNA sense strand
aauucauacuggugagaaa

SEQ ID NO: 2444503 - RNA, 19 nt, Homo sapiens
  misc_RNA (1)...(19): siRNA sense strand
aauucauacuggugagaaa

SEQ ID NO: 2444504 - RNA, 19 nt, Homo sapiens
  misc_RNA (1)...(19): siRNA sense strand
aauucauacuggugagaaa

SEQ ID NO: 2444505 - RNA, 19 nt, Homo sapiens
  misc_RNA (1)...(19): siRNA sense strand
ggguuaacauggaagaauu

SEQ ID NO: 2444506 - RNA, 19 nt, Homo sapiens
  misc_RNA (1)...(19): siRNA sense strand
agggacaagaggaggguua

SEQ ID NO: 2444507 - RNA, 19 nt, Homo sapiens
  misc_RNA (1)...(19): siRNA sense strand
uaaugaggcuacagacaua

SEQ ID NO: 2444508 - RNA, 19 nt, Homo sapiens
  misc_RNA (1)...(19): siRNA sense strand
guucagagauguggcuaua

SEQ ID NO: 2444509 - RNA, 19 nt, Homo sapiens
  misc_RNA (1)...(19): siRNA sense strand
cccuaugaguguaaggaau

SEQ ID NO: 2444510 - RNA, 19 nt, Homo sapiens
  misc_RNA (1)...(19): siRNA sense strand
aggaggugauguuggagaa

SEQ ID NO: 2444511 - RNA, 19 nt, Homo sapiens
  misc_RNA (1)...(19): siRNA sense strand
ccucauuggagcaagggaa

SEQ ID NO: 2444512 - RNA, 19 nt, Homo sapiens
  misc_RNA (1)...(19): siRNA sense strand
ggaagauggugcccaggua

SEQ ID NO: 2444513 - RNA, 19 nt, Homo sapiens
  misc_RNA (1)...(19): siRNA sense strand
gugcccagguacauggaaa

SEQ ID NO: 2444514 - RNA, 19 nt, Homo sapiens
  misc_RNA (1)...(19): siRNA sense strand
ugcaaugaguguaaagaau

SEQ ID NO: 2444515 - RNA, 19 nt, Homo sapiens
  misc_RNA (1)...(19): siRNA sense strand
ucaaaagacaucagagaau

SEQ ID NO: 2444516 - RNA, 19 nt, Homo sapiens
  misc_RNA (1)...(19): siRNA sense strand
gcgcagaggaauuuguaca

SEQ ID NO: 2444517 - RNA, 19 nt, Homo sapiens
  misc_RNA (1)...(19): siRNA sense strand
gguuaacauggaagaauuu

SEQ ID NO: 2444518 - RNA, 19 nt, Homo sapiens
  misc_RNA (1)...(19): siRNA sense strand
agacauaaaugcagacuug

SEQ ID NO: 2444519 - RNA, 19 nt, Homo sapiens
  misc_RNA (1)...(19): siRNA sense strand
aagccauaguccugagaga

SEQ ID NO: 2444520 - RNA, 19 nt, Homo sapiens
  misc_RNA (1)...(19): siRNA sense strand
cccuaugaauguaaggaau

SEQ ID NO: 2444521 - RNA, 19 nt, Homo sapiens
  misc_RNA (1)...(19): siRNA sense strand
agaacuuacucuacaucaa

SEQ ID NO: 2444522 - RNA, 19 nt, Homo sapiens
  misc_RNA (1)...(19): siRNA sense strand
gagggaagagacaggaaga

SEQ ID NO: 2444523 - RNA, 19 nt, Homo sapiens
  misc_RNA (1)...(19): siRNA sense strand
cacaauaauuucuuggaca

SEQ ID NO: 2444524 - RNA, 19 nt, Homo sapiens
  misc_RNA (1)...(19): siRNA sense strand
cccuaugaaugucgggaau

SEQ ID NO: 2444525 - RNA, 19 nt, Homo sapiens
  misc_RNA (1)...(19): siRNA sense strand
gguugugagggaagagaca

SEQ ID NO: 2444526 - RNA, 19 nt, Homo sapiens
  misc_RNA (1)...(19): siRNA sense strand
cuacagacauaaaugcaga

SEQ ID NO: 2444527 - RNA, 19 nt, Homo sapiens
  misc_RNA (1)...(19): siRNA sense strand
gggaagacuuuuagacagu

SEQ ID NO: 2444528 - RNA, 19 nt, Homo sapiens
  misc_RNA (1)...(19): siRNA sense strand
cgcuaugaauguaacgaau

SEQ ID NO: 2444529 - RNA, 19 nt, Homo sapiens
  misc_RNA (1)...(19): siRNA sense strand
auguaaagaaugugggaag

SEQ ID NO: 2444530 - RNA, 19 nt, Homo sapiens
  misc_RNA (1)...(19): siRNA sense strand
ccuggaugguugugaggga

SEQ ID NO: 2444531 - RNA, 19 nt, Homo sapiens
  misc_RNA (1)...(19): siRNA sense strand
ccucaaaagacaucagaga

SEQ ID NO: 2444532 - RNA, 19 nt, Homo sapiens
  misc_RNA (1)...(19): siRNA sense strand
ggacaauaaugaggcuaca

SEQ ID NO: 2444533 - RNA, 19 nt, Homo sapiens
  misc_RNA (1)...(19): siRNA sense strand
auguaaagaauguggaaag

SEQ ID NO: 2444534 - RNA, 19 nt, Homo sapiens
  misc_RNA (1)...(19): siRNA sense strand
ucucaggaggaaugggaau

SEQ ID NO: 2444535 - RNA, 19 nt, Homo sapiens
  misc_RNA (1)...(19): siRNA sense strand
guguaaggaaugugggaag

SEQ ID NO: 2444536 - RNA, 19 nt, Homo sapiens
  misc_RNA (1)...(19): siRNA sense strand
guguaaagaauguuggaag

SEQ ID NO: 2444537 - RNA, 19 nt, Homo sapiens
  misc_RNA (1)...(19): siRNA sense strand
uguacaaggaggugauguu

SEQ ID NO: 2444538 - RNA, 19 nt, Homo sapiens
  misc_RNA (1)...(19): siRNA sense strand
gcgcuaucugggaaggcaa

SEQ ID NO: 2444539 - RNA, 19 nt, Homo sapiens
  misc_RNA (1)...(19): siRNA sense strand
gaauguaagcaauguggga

SEQ ID NO: 2444540 - RNA, 19 nt, Homo sapiens
  misc_RNA (1)...(19): siRNA sense strand
aauaaugaggcuacagaca

SEQ ID NO: 2444541 - RNA, 19 nt, Homo sapiens
  misc_RNA (1)...(19): siRNA sense strand
ggacaagaggaggguuauu

SEQ ID NO: 2444542 - RNA, 19 nt, Homo sapiens
  misc_RNA (1)...(19): siRNA sense strand
augcaaugaguguaaagaa

SEQ ID NO: 2444543 - RNA, 19 nt, Homo sapiens
  misc_RNA (1)...(19): siRNA sense strand
gugggaaggccuuuagaca

SEQ ID NO: 2444544 - RNA, 19 nt, Homo sapiens
  misc_RNA (1)...(19): siRNA sense strand
gggaaugugggaaggccuu

SEQ ID NO: 2444545 - RNA, 19 nt, Homo sapiens
  misc_RNA (1)...(19): siRNA sense strand
uguuggagaauuauagcaa

SEQ ID NO: 2444546 - RNA, 19 nt, Homo sapiens
  misc_RNA (1)...(19): siRNA sense strand
cccuaugaauguaagcaau

SEQ ID NO: 2444547 - RNA, 19 nt, Homo sapiens
  misc_RNA (1)...(19): siRNA sense strand
agaaacccuaugaguguaa

SEQ ID NO: 2444548 - RNA, 19 nt, Homo sapiens
  misc_RNA (1)...(19): siRNA sense strand
ugguaaggccuuuagacuu

SEQ ID NO: 2444549 - RNA, 19 nt, Homo sapiens
  misc_RNA (1)...(19): siRNA sense strand
caacugucauuuugagcaa

SEQ ID NO: 2444550 - RNA, 19 nt, Homo sapiens
  misc_RNA (1)...(19): siRNA sense strand
uguaaggaaugugggaaga

SEQ ID NO: 2444551 - RNA, 19 nt, Homo sapiens
  misc_RNA (1)...(19): siRNA sense strand
aggaaugugggaagacuuu

SEQ ID NO: 2444552 - RNA, 19 nt, Homo sapiens
  misc_RNA (1)...(19): siRNA sense strand
uggaaagaaaccuuaucaa

SEQ ID NO: 2444553 - RNA, 19 nt, Homo sapiens
  misc_RNA (1)...(19): siRNA sense strand
auguaaagaaugcacagaa

SEQ ID NO: 2444554 - RNA, 19 nt, Homo sapiens
  misc_RNA (1)...(19): siRNA sense strand
uaauuauggcucagaacuu

SEQ ID NO: 2444555 - RNA, 19 nt, Homo sapiens
  misc_RNA (1)...(19): siRNA sense strand
gagaugagccccagaaguu

SEQ ID NO: 2444556 - RNA, 19 nt, Homo sapiens
  misc_RNA (1)...(19): siRNA sense strand
gggauauuuaugaaacaga

SEQ ID NO: 2444557 - RNA, 19 nt, Homo sapiens
  misc_RNA (1)...(19): siRNA sense strand
cccaugaguuggugauguu

SEQ ID NO: 2444558 - RNA, 19 nt, Homo sapiens
  misc_RNA (1)...(19): siRNA sense strand
agaucaauuuucagcgcua

SEQ ID NO: 2444559 - RNA, 19 nt, Homo sapiens
  misc_RNA (1)...(19): siRNA sense strand
caacaagaucgaaagccua

SEQ ID NO: 2444560 - RNA, 19 nt, Homo sapiens
  misc_RNA (1)...(19): siRNA sense strand
uaugauaaguacauggaga

SEQ ID NO: 2444561 - RNA, 19 nt, Homo sapiens
  misc_RNA (1)...(19): siRNA sense strand
acaacaagaucgaaagccu

SEQ ID NO: 2444562 - RNA, 19 nt, Homo sapiens
  misc_RNA (1)...(19): siRNA sense strand
uucgagaacuggaaggcua

SEQ ID NO: 2444563 - RNA, 19 nt, Homo sapiens
  misc_RNA (1)...(19): siRNA sense strand
caagaagaauuuugcguga

SEQ ID NO: 2444564 - RNA, 19 nt, Homo sapiens
  misc_RNA (1)...(19): siRNA sense strand
gcuuaaggaccgagggcug

SEQ ID NO: 2444565 - RNA, 19 nt, Homo sapiens
  misc_RNA (1)...(19): siRNA sense strand
uccaacaacaagaucgaaa

SEQ ID NO: 2444566 - RNA, 19 nt, Homo sapiens
  misc_RNA (1)...(19): siRNA sense strand
guggaaacggcgcagaaaa

SEQ ID NO: 2444567 - RNA, 19 nt, Homo sapiens
  misc_RNA (1)...(19): siRNA sense strand
acgaagaaguuaaacgcua

SEQ ID NO: 2444568 - RNA, 19 nt, Homo sapiens
  misc_RNA (1)...(19): siRNA sense strand
aagaagaaccagaaagcau

SEQ ID NO: 2444569 - RNA, 19 nt, Homo sapiens
  misc_RNA (1)...(19): siRNA sense strand
auguagaaagugugaggaa

SEQ ID NO: 2444570 - RNA, 19 nt, Homo sapiens
  misc_RNA (1)...(19): siRNA sense strand
ugaaauggcuauuacgaca

SEQ ID NO: 2444571 - RNA, 19 nt, Homo sapiens
  misc_RNA (1)...(19): siRNA sense strand
cuucagaggcaugggcaua

SEQ ID NO: 2444572 - RNA, 19 nt, Homo sapiens
  misc_RNA (1)...(19): siRNA sense strand
aggacacacaggauagaaa

SEQ ID NO: 2444573 - RNA, 19 nt, Homo sapiens
  misc_RNA (1)...(19): siRNA sense strand
agugugaauugcagcgaau

SEQ ID NO: 2444574 - RNA, 19 nt, Homo sapiens
  misc_RNA (1)...(19): siRNA sense strand
aggaaaaggccauaugauu

SEQ ID NO: 2444575 - RNA, 19 nt, Homo sapiens
  misc_RNA (1)...(19): siRNA sense strand
gcacaaaggacacacagga

SEQ ID NO: 2444576 - RNA, 19 nt, Homo sapiens
  misc_RNA (1)...(19): siRNA sense strand
uggacaaauauguagauga

SEQ ID NO: 2444577 - RNA, 19 nt, Homo sapiens
  misc_RNA (1)...(19): siRNA sense strand
auauuaacccugagaagga

SEQ ID NO: 2444578 - RNA, 19 nt, Homo sapiens
  misc_RNA (1)...(19): siRNA sense strand
aagacagacuucagaggca

SEQ ID NO: 2444579 - RNA, 19 nt, Homo sapiens
  misc_RNA (1)...(19): siRNA sense strand
gggugaugaucccaagaca

SEQ ID NO: 2444580 - RNA, 19 nt, Homo sapiens
  misc_RNA (1)...(19): siRNA sense strand
cagagauggcuuauagcuu

SEQ ID NO: 2444581 - RNA, 19 nt, Homo sapiens
  misc_RNA (1)...(19): siRNA sense strand
gcuagaaucuccaagcagu

SEQ ID NO: 2444582 - RNA, 19 nt, Homo sapiens
  misc_RNA (1)...(19): siRNA sense strand
ugugaauugcagcgaauau

SEQ ID NO: 2444583 - RNA, 19 nt, Homo sapiens
  misc_RNA (1)...(19): siRNA sense strand
aaguuaaacgcuagaaucu

SEQ ID NO: 2444584 - RNA, 19 nt, Homo sapiens
  misc_RNA (1)...(19): siRNA sense strand
cgaagaaguuaaacgcuag

SEQ ID NO: 2444585 - RNA, 19 nt, Homo sapiens
  misc_RNA (1)...(19): siRNA sense strand
acucaugaagcuuuggaau

SEQ ID NO: 2444586 - RNA, 19 nt, Homo sapiens
  misc_RNA (1)...(19): siRNA sense strand
guuugaagaagaaccagaa

SEQ ID NO: 2444587 - RNA, 19 nt, Homo sapiens
  misc_RNA (1)...(19): siRNA sense strand
auaaagaaacagagagcaa

SEQ ID NO: 2444588 - RNA, 19 nt, Homo sapiens
  misc_RNA (1)...(19): siRNA sense strand
cugaaaugaaagagucaaa

SEQ ID NO: 2444589 - RNA, 19 nt, Homo sapiens
  misc_RNA (1)...(19): siRNA sense strand
aagaugaagcgcuggguaa

SEQ ID NO: 2444590 - RNA, 19 nt, Homo sapiens
  misc_RNA (1)...(19): siRNA sense strand
guaaauaucaugaggccuu

SEQ ID NO: 2444591 - RNA, 19 nt, Homo sapiens
  misc_RNA (1)...(19): siRNA sense strand
gcaaguauguagauggcau

SEQ ID NO: 2444592 - RNA, 19 nt, Homo sapiens
  misc_RNA (1)...(19): siRNA sense strand
ggucaagagauguccaaau

SEQ ID NO: 2444593 - RNA, 19 nt, Homo sapiens
  misc_RNA (1)...(19): siRNA sense strand
ucauauaacaagugcccaa

SEQ ID NO: 2444594 - RNA, 19 nt, Homo sapiens
  misc_RNA (1)...(19): siRNA sense strand
gguucagaauacaguacaa

SEQ ID NO: 2444595 - RNA, 19 nt, Homo sapiens
  misc_RNA (1)...(19): siRNA sense strand
cuggcagauucuagacaaa

SEQ ID NO: 2444596 - RNA, 19 nt, Homo sapiens
  misc_RNA (1)...(19): siRNA sense strand
aggaacuaugcuugggaaa

SEQ ID NO: 2444597 - RNA, 19 nt, Homo sapiens
  misc_RNA (1)...(19): siRNA sense strand
ugaaaauguuggcggguuu

SEQ ID NO: 2444598 - RNA, 19 nt, Homo sapiens
  misc_RNA (1)...(19): siRNA sense strand
auacaguagugaagcauca

SEQ ID NO: 2444599 - RNA, 19 nt, Homo sapiens
  misc_RNA (1)...(19): siRNA sense strand
uggaagacuaucagcagaa

SEQ ID NO: 2444600 - RNA, 19 nt, Homo sapiens
  misc_RNA (1)...(19): siRNA sense strand
cucugaaagugaagaugaa

SEQ ID NO: 2444601 - RNA, 19 nt, Homo sapiens
  misc_RNA (1)...(19): siRNA sense strand
aaagaaacagagagcaaaa

SEQ ID NO: 2444602 - RNA, 19 nt, Homo sapiens
  misc_RNA (1)...(19): siRNA sense strand
agacaaaggaacuaugcuu

SEQ ID NO: 2444603 - RNA, 19 nt, Homo sapiens
  misc_RNA (1)...(19): siRNA sense strand
cagaaauuggggacaguaa

SEQ ID NO: 2444604 - RNA, 19 nt, Homo sapiens
  misc_RNA (1)...(19): siRNA sense strand
agaugaagcgcuggguaaa

SEQ ID NO: 2444605 - RNA, 19 nt, Homo sapiens
  misc_RNA (1)...(19): siRNA sense strand
caguagugaagcaucaaua

SEQ ID NO: 2444606 - RNA, 19 nt, Homo sapiens
  misc_RNA (1)...(19): siRNA sense strand
ugaaggaagcacaggucau

SEQ ID NO: 2444607 - RNA, 19 nt, Homo sapiens
  misc_RNA (1)...(19): siRNA sense strand
gguuuagacuguauggugu

SEQ ID NO: 2444608 - RNA, 19 nt, Homo sapiens
  misc_RNA (1)...(19): siRNA sense strand
ugguguacaucgcaugaaa

SEQ ID NO: 2444609 - RNA, 19 nt, Homo sapiens
  misc_RNA (1)...(19): siRNA sense strand
cuggagaagaagaacucaa

SEQ ID NO: 2444610 - RNA, 19 nt, Homo sapiens
  misc_RNA (1)...(19): siRNA sense strand
ucauguacacccucagaaa

SEQ ID NO: 2444611 - RNA, 19 nt, Homo sapiens
  misc_RNA (1)...(19): siRNA sense strand
caagaugcucauauaacaa

SEQ ID NO: 2444612 - RNA, 19 nt, Homo sapiens
  misc_RNA (1)...(19): siRNA sense strand
ucagagaaugagaagaaca

SEQ ID NO: 2444613 - RNA, 19 nt, Homo sapiens
  misc_RNA (1)...(19): siRNA sense strand
ccucugaaagugaagauga

SEQ ID NO: 2444614 - RNA, 19 nt, Homo sapiens
  misc_RNA (1)...(19): siRNA sense strand
gauucuagacaaaggaacu

SEQ ID NO: 2444615 - RNA, 19 nt, Homo sapiens
  misc_RNA (1)...(19): siRNA sense strand
uauaauuccuacauggaca

SEQ ID NO: 2444616 - RNA, 19 nt, Homo sapiens
  misc_RNA (1)...(19): siRNA sense strand
ugaaaagagaagagaugau

SEQ ID NO: 2444617 - RNA, 19 nt, Homo sapiens
  misc_RNA (1)...(19): siRNA sense strand
gagaagagaugauaggcug

SEQ ID NO: 2444618 - RNA, 19 nt, Homo sapiens
  misc_RNA (1)...(19): siRNA sense strand
ugaaagagucaaaaggaca

SEQ ID NO: 2444619 - RNA, 19 nt, Homo sapiens
  misc_RNA (1)...(19): siRNA sense strand
aucaauagaugaaggaaac

SEQ ID NO: 2444620 - RNA, 19 nt, Homo sapiens
  misc_RNA (1)...(19): siRNA sense strand
auguacacccucagaaauu

SEQ ID NO: 2444621 - RNA, 19 nt, Homo sapiens
  misc_RNA (1)...(19): siRNA sense strand
guuuagacuguauggugua

SEQ ID NO: 2444622 - RNA, 19 nt, Homo sapiens
  misc_RNA (1)...(19): siRNA sense strand
cuauaaagaaacagagagc

SEQ ID NO: 2444623 - RNA, 19 nt, Homo sapiens
  misc_RNA (1)...(19): siRNA sense strand
ugggaaacaaggcagaaau

SEQ ID NO: 2444624 - RNA, 19 nt, Homo sapiens
  misc_RNA (1)...(19): siRNA sense strand
ccuacauggacaaagauga

SEQ ID NO: 2444625 - RNA, 19 nt, Homo sapiens
  misc_RNA (1)...(19): siRNA sense strand
uggauacaguagugaagca

SEQ ID NO: 2444626 - RNA, 19 nt, Homo sapiens
  misc_RNA (1)...(19): siRNA sense strand
auuccuacauggacaaaga

SEQ ID NO: 2444627 - RNA, 19 nt, Homo sapiens
  misc_RNA (1)...(19): siRNA sense strand
gaaauuaugcaguucgguu

SEQ ID NO: 2444628 - RNA, 19 nt, Homo sapiens
  misc_RNA (1)...(19): siRNA sense strand
cagcucuggagaagaagaa

SEQ ID NO: 2444629 - RNA, 19 nt, Homo sapiens
  misc_RNA (1)...(19): siRNA sense strand
gugcaauauaugugggaaa

SEQ ID NO: 2444630 - RNA, 19 nt, Homo sapiens
  misc_RNA (1)...(19): siRNA sense strand
gugcaauguaugugggaaa

SEQ ID NO: 2444631 - RNA, 19 nt, Homo sapiens
  misc_RNA (1)...(19): siRNA sense strand
gcacauagaagcagggaga

SEQ ID NO: 2444632 - RNA, 19 nt, Homo sapiens
  misc_RNA (1)...(19): siRNA sense strand
guguauggaaugugggaaa

SEQ ID NO: 2444633 - RNA, 19 nt, Homo sapiens
  misc_RNA (1)...(19): siRNA sense strand
gcguagggaauaugggaaa

SEQ ID NO: 2444634 - RNA, 19 nt, Homo sapiens
  misc_RNA (1)...(19): siRNA sense strand
gugcaucgaaugugggaaa

SEQ ID NO: 2444635 - RNA, 19 nt, Homo sapiens
  misc_RNA (1)...(19): siRNA sense strand
gugcaucauaugugggaaa

SEQ ID NO: 2444636 - RNA, 19 nt, Homo sapiens
  misc_RNA (1)...(19): siRNA sense strand
ccuuaugagugcaaagaau

SEQ ID NO: 2444637 - RNA, 19 nt, Homo sapiens
  misc_RNA (1)...(19): siRNA sense strand
aauccauacuagagaacaa

SEQ ID NO: 2444638 - RNA, 19 nt, Homo sapiens
  misc_RNA (1)...(19): siRNA sense strand
gugcaaugaauguggaaaa

SEQ ID NO: 2444639 - RNA, 19 nt, Homo sapiens
  misc_RNA (1)...(19): siRNA sense strand
gggaaauccuugagcucca

SEQ ID NO: 2444640 - RNA, 19 nt, Homo sapiens
  misc_RNA (1)...(19): siRNA sense strand
gugcaaagaaugugggaag

SEQ ID NO: 2444641 - RNA, 19 nt, Homo sapiens
  misc_RNA (1)...(19): siRNA sense strand
augcaaagauguugagaag

SEQ ID NO: 2444642 - RNA, 19 nt, Homo sapiens
  misc_RNA (1)...(19): siRNA sense strand
ucaacaaagacguuacaaa

SEQ ID NO: 2444643 - RNA, 19 nt, Homo sapiens
  misc_RNA (1)...(19): siRNA sense strand
ccuuauguguguauggaau

SEQ ID NO: 2444644 - RNA, 19 nt, Homo sapiens
  misc_RNA (1)...(19): siRNA sense strand
gucuguggccagugggaaa

SEQ ID NO: 2444645 - RNA, 19 nt, Homo sapiens
  misc_RNA (1)...(19): siRNA sense strand
gggaaaugcuuuagacacc

SEQ ID NO: 2444646 - RNA, 19 nt, Homo sapiens
  misc_RNA (1)...(19): siRNA sense strand
augugaugcuggagaacuu

SEQ ID NO: 2444647 - RNA, 19 nt, Homo sapiens
  misc_RNA (1)...(19): siRNA sense strand
gcuuaugaaugcagugacu

SEQ ID NO: 2444648 - RNA, 19 nt, Homo sapiens
  misc_RNA (1)...(19): siRNA sense strand
gugggaaagccuucaacaa

SEQ ID NO: 2444649 - RNA, 19 nt, Homo sapiens
  misc_RNA (1)...(19): siRNA sense strand
augugguaaaugugggaaa

SEQ ID NO: 2444650 - RNA, 19 nt, Homo sapiens
  misc_RNA (1)...(19): siRNA sense strand
gagaauucacacuagagaa

SEQ ID NO: 2444651 - RNA, 19 nt, Homo sapiens
  misc_RNA (1)...(19): siRNA sense strand
gcagaaaccuuauacgucu

SEQ ID NO: 2444652 - RNA, 19 nt, Homo sapiens
  misc_RNA (1)...(19): siRNA sense strand
augcagugaauguggaaaa

SEQ ID NO: 2444653 - RNA, 19 nt, Homo sapiens
  misc_RNA (1)...(19): siRNA sense strand
ccaugugaccuuugaggau

SEQ ID NO: 2444654 - RNA, 19 nt, Homo sapiens
  misc_RNA (1)...(19): siRNA sense strand
ucagaaaggaggagagcag

SEQ ID NO: 2444655 - RNA, 19 nt, Homo sapiens
  misc_RNA (1)...(19): siRNA sense strand
ccuuaugugugcaauguau

SEQ ID NO: 2444656 - RNA, 19 nt, Homo sapiens
  misc_RNA (1)...(19): siRNA sense strand
caugcaaagauguugagaa

SEQ ID NO: 2444657 - RNA, 19 nt, Homo sapiens
  misc_RNA (1)...(19): siRNA sense strand
acaaacacuucuuaagcau

SEQ ID NO: 2444658 - RNA, 19 nt, Homo sapiens
  misc_RNA (1)...(19): siRNA sense strand
ccucauucaacaccagaaa

SEQ ID NO: 2444659 - RNA, 19 nt, Homo sapiens
  misc_RNA (1)...(19): siRNA sense strand
gguuaaacuucuucagcac

SEQ ID NO: 2444660 - RNA, 19 nt, Homo sapiens
  misc_RNA (1)...(19): siRNA sense strand
gccguaugaaugugguaaa

SEQ ID NO: 2444661 - RNA, 19 nt, Homo sapiens
  misc_RNA (1)...(19): siRNA sense strand
ccguaugaaugugguaaau

SEQ ID NO: 2444662 - RNA, 19 nt, Homo sapiens
  misc_RNA (1)...(19): siRNA sense strand
aauacucacuuguggaaca

SEQ ID NO: 2444663 - RNA, 19 nt, Homo sapiens
  misc_RNA (1)...(19): siRNA sense strand
augaugugaugcuggagaa

SEQ ID NO: 2444664 - RNA, 19 nt, Homo sapiens
  misc_RNA (1)...(19): siRNA sense strand
gcuucugaauagcugcaaa

SEQ ID NO: 2444665 - RNA, 19 nt, Homo sapiens
  misc_RNA (1)...(19): siRNA sense strand
uuauaagcguagggaauau

SEQ ID NO: 2444666 - RNA, 19 nt, Homo sapiens
  misc_RNA (1)...(19): siRNA sense strand
cuucauauacaaacaguca

SEQ ID NO: 2444667 - RNA, 19 nt, Homo sapiens
  misc_RNA (1)...(19): siRNA sense strand
acguuacaaaugugagcaa

SEQ ID NO: 2444668 - RNA, 19 nt, Homo sapiens
  misc_RNA (1)...(19): siRNA sense strand
aggacaguggagagaaaca

SEQ ID NO: 2444669 - RNA, 19 nt, Homo sapiens
  misc_RNA (1)...(19): siRNA sense strand
guuacaaaugugagcaagu

SEQ ID NO: 2444670 - RNA, 19 nt, Homo sapiens
  misc_RNA (1)...(19): siRNA sense strand
cguagggaauaugggaaau

SEQ ID NO: 2444671 - RNA, 19 nt, Homo sapiens
  misc_RNA (1)...(19): siRNA sense strand
aagccuuaugugugcaaua

SEQ ID NO: 2444672 - RNA, 19 nt, Homo sapiens
  misc_RNA (1)...(19): siRNA sense strand
gaauagaggcugaggaggc

SEQ ID NO: 2444673 - RNA, 19 nt, Homo sapiens
  misc_RNA (1)...(19): siRNA sense strand
guauccuggucaugaaaga

SEQ ID NO: 2444674 - RNA, 19 nt, Homo sapiens
  misc_RNA (1)...(19): siRNA sense strand
aguucauguuacugagcau

SEQ ID NO: 2444675 - RNA, 19 nt, Homo sapiens
  misc_RNA (1)...(19): siRNA sense strand
gguaaaugugggaaagccu

SEQ ID NO: 2444676 - RNA, 19 nt, Homo sapiens
  misc_RNA (1)...(19): siRNA sense strand
auauaacagaagagcccua

SEQ ID NO: 2444677 - RNA, 19 nt, Homo sapiens
  misc_RNA (1)...(19): siRNA sense strand
aggaaauacucaagcaacu

SEQ ID NO: 2444678 - RNA, 19 nt, Homo sapiens
  misc_RNA (1)...(19): siRNA sense strand
gggccaaggaaauagaaaa

SEQ ID NO: 2444679 - RNA, 19 nt, Homo sapiens
  misc_RNA (1)...(19): siRNA sense strand
caggcaguaaagagggaua

SEQ ID NO: 2444680 - RNA, 19 nt, Homo sapiens
  misc_RNA (1)...(19): siRNA sense strand
uuuggaaauugcagaggaa

SEQ ID NO: 2444681 - RNA, 19 nt, Homo sapiens
  misc_RNA (1)...(19): siRNA sense strand
cuacuuuagaacuggcaaa

SEQ ID NO: 2444682 - RNA, 19 nt, Homo sapiens
  misc_RNA (1)...(19): siRNA sense strand
ccacagauccacagccaca

SEQ ID NO: 2444683 - RNA, 19 nt, Homo sapiens
  misc_RNA (1)...(19): siRNA sense strand
ugugaaaugcagagcuuau

SEQ ID NO: 2444684 - RNA, 19 nt, Homo sapiens
  misc_RNA (1)...(19): siRNA sense strand
auagaaagagauuguggaa

SEQ ID NO: 2444685 - RNA, 19 nt, Homo sapiens
  misc_RNA (1)...(19): siRNA sense strand
ggaauuucacagaggagga

SEQ ID NO: 2444686 - RNA, 19 nt, Homo sapiens
  misc_RNA (1)...(19): siRNA sense strand
cgaugagucagcugaagaa

SEQ ID NO: 2444687 - RNA, 19 nt, Homo sapiens
  misc_RNA (1)...(19): siRNA sense strand
ggacuuacacgcugggcca

SEQ ID NO: 2444688 - RNA, 19 nt, Homo sapiens
  misc_RNA (1)...(19): siRNA sense strand
ggccaaggaaauagaaaau

SEQ ID NO: 2444689 - RNA, 19 nt, Homo sapiens
  misc_RNA (1)...(19): siRNA sense strand
uggaaauugcagaggaaac

SEQ ID NO: 2444690 - RNA, 19 nt, Homo sapiens
  misc_RNA (1)...(19): siRNA sense strand
gcaaaacauaggugugauu

SEQ ID NO: 2444691 - RNA, 19 nt, Homo sapiens
  misc_RNA (1)...(19): siRNA sense strand
agucaagcuucauuggaca

SEQ ID NO: 2444692 - RNA, 19 nt, Homo sapiens
  misc_RNA (1)...(19): siRNA sense strand
acuuuuaguucuuggagua

SEQ ID NO: 2444693 - RNA, 19 nt, Homo sapiens
  misc_RNA (1)...(19): siRNA sense strand
aggugugauugcagcauuu

SEQ ID NO: 2444694 - RNA, 19 nt, Homo sapiens
  misc_RNA (1)...(19): siRNA sense strand
cuguaaaccuuaagggugc

SEQ ID NO: 2444695 - RNA, 19 nt, Homo sapiens
  misc_RNA (1)...(19): siRNA sense strand
agaggaaauacucaagcaa

SEQ ID NO: 2444696 - RNA, 19 nt, Homo sapiens
  misc_RNA (1)...(19): siRNA sense strand
guugcugaucguugugaaa

SEQ ID NO: 2444697 - RNA, 19 nt, Homo sapiens
  misc_RNA (1)...(19): siRNA sense strand
cagaugaugaacaaccaaa

SEQ ID NO: 2444698 - RNA, 19 nt, Homo sapiens
  misc_RNA (1)...(19): siRNA sense strand
guccagauauguagcgguu

SEQ ID NO: 2444699 - RNA, 19 nt, Homo sapiens
  misc_RNA (1)...(19): siRNA sense strand
uggacaacacagaugauga

SEQ ID NO: 2444700 - RNA, 19 nt, Homo sapiens
  misc_RNA (1)...(19): siRNA sense strand
gggauauauugaacacagu

SEQ ID NO: 2444701 - RNA, 19 nt, Homo sapiens
  misc_RNA (1)...(19): siRNA sense strand
acaagaaaucaaagcaaca

SEQ ID NO: 2444702 - RNA, 19 nt, Homo sapiens
  misc_RNA (1)...(19): siRNA sense strand
aauagaagcucauucggaa

SEQ ID NO: 2444703 - RNA, 19 nt, Homo sapiens
  misc_RNA (1)...(19): siRNA sense strand
caguguccaaagagagaaa

SEQ ID NO: 2444704 - RNA, 19 nt, Homo sapiens
  misc_RNA (1)...(19): siRNA sense strand
gcaccauuuacuggagaaa

SEQ ID NO: 2444705 - RNA, 19 nt, Homo sapiens
  misc_RNA (1)...(19): siRNA sense strand
gggauaucauggagccagu

SEQ ID NO: 2444706 - RNA, 19 nt, Homo sapiens
  misc_RNA (1)...(19): siRNA sense strand
aaguagaagaacucaauga

SEQ ID NO: 2444707 - RNA, 19 nt, Homo sapiens
  misc_RNA (1)...(19): siRNA sense strand
caaaaugaagauaagggua

SEQ ID NO: 2444708 - RNA, 19 nt, Homo sapiens
  misc_RNA (1)...(19): siRNA sense strand
cuugcuaaggcuaaagaau

SEQ ID NO: 2444709 - RNA, 19 nt, Homo sapiens
  misc_RNA (1)...(19): siRNA sense strand
acacuggaauggaggguga

SEQ ID NO: 2444710 - RNA, 19 nt, Homo sapiens
  misc_RNA (1)...(19): siRNA sense strand
ccaaaagaagauagaagaa

SEQ ID NO: 2444711 - RNA, 19 nt, Homo sapiens
  misc_RNA (1)...(19): siRNA sense strand
ucaccgaaggagagagaga

SEQ ID NO: 2444712 - RNA, 19 nt, Homo sapiens
  misc_RNA (1)...(19): siRNA sense strand
accgaaggagagagagaaa

SEQ ID NO: 2444713 - RNA, 19 nt, Homo sapiens
  misc_RNA (1)...(19): siRNA sense strand
cugaauucaucaauggaga

SEQ ID NO: 2444714 - RNA, 19 nt, Homo sapiens
  misc_RNA (1)...(19): siRNA sense strand
uaauaauccaagaggaauc

SEQ ID NO: 2444715 - RNA, 19 nt, Homo sapiens
  misc_RNA (1)...(19): siRNA sense strand
cagccuuguaugcagguua

SEQ ID NO: 2444716 - RNA, 19 nt, Homo sapiens
  misc_RNA (1)...(19): siRNA sense strand
aaggagagagagaaagcuu

SEQ ID NO: 2444717 - RNA, 19 nt, Homo sapiens
  misc_RNA (1)...(19): siRNA sense strand
ggaauaaugcccuggguca

SEQ ID NO: 2444718 - RNA, 19 nt, Homo sapiens
  misc_RNA (1)...(19): siRNA sense strand
aggacaagugcuagaacaa

SEQ ID NO: 2444719 - RNA, 19 nt, Homo sapiens
  misc_RNA (1)...(19): siRNA sense strand
ugcuaugauccaagagaua

SEQ ID NO: 2444720 - RNA, 19 nt, Homo sapiens
  misc_RNA (1)...(19): siRNA sense strand
aggagaugcuauuggcuca

SEQ ID NO: 2444721 - RNA, 19 nt, Homo sapiens
  misc_RNA (1)...(19): siRNA sense strand
ccaucuacuuggucaucaa

SEQ ID NO: 2444722 - RNA, 19 nt, Homo sapiens
  misc_RNA (1)...(19): siRNA sense strand
cauccaaguaucugcagaa

SEQ ID NO: 2444723 - RNA, 19 nt, Homo sapiens
  misc_RNA (1)...(19): siRNA sense strand
cuaugauccaagagauaau

SEQ ID NO: 2444724 - RNA, 19 nt, Homo sapiens
  misc_RNA (1)...(19): siRNA sense strand
accaagggccagagccaua

SEQ ID NO: 2444725 - RNA, 19 nt, Homo sapiens
  misc_RNA (1)...(19): siRNA sense strand
gucagaagaaacucagaaa

SEQ ID NO: 2444726 - RNA, 19 nt, Homo sapiens
  misc_RNA (1)...(19): siRNA sense strand
guccugaaaucuuaggcaa

SEQ ID NO: 2444727 - RNA, 19 nt, Homo sapiens
  misc_RNA (1)...(19): siRNA sense strand
cagaaacaccaaaggaaac

SEQ ID NO: 2444728 - RNA, 19 nt, Homo sapiens
  misc_RNA (1)...(19): siRNA sense strand
ccgccuucuucuugauaau

SEQ ID NO: 2444729 - RNA, 19 nt, Homo sapiens
  misc_RNA (1)...(19): siRNA sense strand
cugcaggcaaccagaaaga

SEQ ID NO: 2444730 - RNA, 19 nt, Homo sapiens
  misc_RNA (1)...(19): siRNA sense strand
guaaggcaguucaaggaga

SEQ ID NO: 2444731 - RNA, 19 nt, Homo sapiens
  misc_RNA (1)...(19): siRNA sense strand
auaucugggcuuagagaca

SEQ ID NO: 2444732 - RNA, 19 nt, Homo sapiens
  misc_RNA (1)...(19): siRNA sense strand
gugccaaccaguaugaaaa

SEQ ID NO: 2444733 - RNA, 19 nt, Homo sapiens
  misc_RNA (1)...(19): siRNA sense strand
agacaaugccaggugggaa

SEQ ID NO: 2444734 - RNA, 19 nt, Homo sapiens
  misc_RNA (1)...(19): siRNA sense strand
uggcaggacaagugcuaga

SEQ ID NO: 2444735 - RNA, 19 nt, Homo sapiens
  misc_RNA (1)...(19): siRNA sense strand
uagugaagacugcaggcaa

SEQ ID NO: 2444736 - RNA, 19 nt, Homo sapiens
  misc_RNA (1)...(19): siRNA sense strand
cgguaaggcaguucaagga

SEQ ID NO: 2444737 - RNA, 19 nt, Homo sapiens
  misc_RNA (1)...(19): siRNA sense strand
gcauagagcuuacccagca

SEQ ID NO: 2444738 - RNA, 19 nt, Homo sapiens
  misc_RNA (1)...(19): siRNA sense strand
caagaagaauacaaggaug

SEQ ID NO: 2444739 - RNA, 19 nt, Homo sapiens
  misc_RNA (1)...(19): siRNA sense strand
aguucaaggagaugcuauu

SEQ ID NO: 2444740 - RNA, 19 nt, Homo sapiens
  misc_RNA (1)...(19): siRNA sense strand
acaacaagcacgaagucca

SEQ ID NO: 2444741 - RNA, 19 nt, Homo sapiens
  misc_RNA (1)...(19): siRNA sense strand
ggaaacagcagcagagugc

SEQ ID NO: 2444742 - RNA, 19 nt, Homo sapiens
  misc_RNA (1)...(19): siRNA sense strand
agauaaugcagauccaaca

SEQ ID NO: 2444743 - RNA, 19 nt, Homo sapiens
  misc_RNA (1)...(19): siRNA sense strand
cuucaaacaccucagccaa

SEQ ID NO: 2444744 - RNA, 19 nt, Homo sapiens
  misc_RNA (1)...(19): siRNA sense strand
agugaagacugcaggcaac

SEQ ID NO: 2444745 - RNA, 19 nt, Homo sapiens
  misc_RNA (1)...(19): siRNA sense strand
gacagacauuaaaggguga

SEQ ID NO: 2444746 - RNA, 19 nt, Homo sapiens
  misc_RNA (1)...(19): siRNA sense strand
gaucgaggaugaaagggaa

SEQ ID NO: 2444747 - RNA, 19 nt, Homo sapiens
  misc_RNA (1)...(19): siRNA sense strand
uuuagagaccacugggaaa

SEQ ID NO: 2444748 - RNA, 19 nt, Homo sapiens
  misc_RNA (1)...(19): siRNA sense strand
agacaggaguugugcagca

SEQ ID NO: 2444749 - RNA, 19 nt, Homo sapiens
  misc_RNA (1)...(19): siRNA sense strand
agaaauuguacuucgggua

SEQ ID NO: 2444750 - RNA, 19 nt, Homo sapiens
  misc_RNA (1)...(19): siRNA sense strand
agcaagagucgaaagagaa

SEQ ID NO: 2444751 - RNA, 19 nt, Homo sapiens
  misc_RNA (1)...(19): siRNA sense strand
agaaaagcccagugaacau

SEQ ID NO: 2444752 - RNA, 19 nt, Homo sapiens
  misc_RNA (1)...(19): siRNA sense strand
gaaauuguacuucggguau

SEQ ID NO: 2444753 - RNA, 19 nt, Homo sapiens
  misc_RNA (1)...(19): siRNA sense strand
augaguagcaagagucgaa

SEQ ID NO: 2444754 - RNA, 19 nt, Homo sapiens
  misc_RNA (1)...(19): siRNA sense strand
aacaaagcgaccagaaauu

SEQ ID NO: 2444755 - RNA, 19 nt, Homo sapiens
  misc_RNA (1)...(19): siRNA sense strand
gaaagggaaagacgggaga

SEQ ID NO: 2444756 - RNA, 19 nt, Homo sapiens
  misc_RNA (1)...(19): siRNA sense strand
gaaagagaaucaugcccga

SEQ ID NO: 2444757 - RNA, 19 nt, Homo sapiens
  misc_RNA (1)...(19): siRNA sense strand
aaaacaaagcgaccagaaa

SEQ ID NO: 2444758 - RNA, 19 nt, Homo sapiens
  misc_RNA (1)...(19): siRNA sense strand
gagaagaccuacggggaga

SEQ ID NO: 2444759 - RNA, 19 nt, Homo sapiens
  misc_RNA (1)...(19): siRNA sense strand
uggagcacuucaagguaau

SEQ ID NO: 2444760 - RNA, 19 nt, Homo sapiens
  misc_RNA (1)...(19): siRNA sense strand
aagaauggaaugaguagca

SEQ ID NO: 2444761 - RNA, 19 nt, Homo sapiens
  misc_RNA (1)...(19): siRNA sense strand
cgguaagaaaccaguaucu

SEQ ID NO: 2444762 - RNA, 19 nt, Homo sapiens
  misc_RNA (1)...(19): siRNA sense strand
agaucgaggaugaaaggga

SEQ ID NO: 2444763 - RNA, 19 nt, Homo sapiens
  misc_RNA (1)...(19): siRNA sense strand
gggagagcucacacagaca

SEQ ID NO: 2444764 - RNA, 19 nt, Homo sapiens
  misc_RNA (1)...(19): siRNA sense strand
ggcggaagguucugggcaa

SEQ ID NO: 2444765 - RNA, 19 nt, Homo sapiens
  misc_RNA (1)...(19): siRNA sense strand
gcaccaaaggccugcgcaa

SEQ ID NO: 2444766 - RNA, 19 nt, Homo sapiens
  misc_RNA (1)...(19): siRNA sense strand
ccgacuaccaagugaacau

SEQ ID NO: 2444767 - RNA, 19 nt, Homo sapiens
  misc_RNA (1)...(19): siRNA sense strand
acaacgaggugcugugcga

SEQ ID NO: 2444768 - RNA, 19 nt, Homo sapiens
  misc_RNA (1)...(19): siRNA sense strand
gcaacaccgucuugggcca

SEQ ID NO: 2444769 - RNA, 19 nt, Homo sapiens
  misc_RNA (1)...(19): siRNA sense strand
cggugaugaccacgcuaua

SEQ ID NO: 2444770 - RNA, 19 nt, Homo sapiens
  misc_RNA (1)...(19): siRNA sense strand
ccuggagaacaucgacaaa

SEQ ID NO: 2444771 - RNA, 19 nt, Homo sapiens
  misc_RNA (1)...(19): siRNA sense strand
gccacaacauccacggaga

SEQ ID NO: 2444772 - RNA, 19 nt, Homo sapiens
  misc_RNA (1)...(19): siRNA sense strand
gccugugccuggagaacau

SEQ ID NO: 2444773 - RNA, 19 nt, Homo sapiens
  misc_RNA (1)...(19): siRNA sense strand
ugcacuuccuggugggcaa

SEQ ID NO: 2444774 - RNA, 19 nt, Homo sapiens
  misc_RNA (1)...(19): siRNA sense strand
ggaucaacuuccagccaga

SEQ ID NO: 2444775 - RNA, 19 nt, Homo sapiens
  misc_RNA (1)...(19): siRNA sense strand
cgaagauggaaaugggcga

SEQ ID NO: 2444776 - RNA, 19 nt, Homo sapiens
  misc_RNA (1)...(19): siRNA sense strand
acaucaagcuggaggacag

SEQ ID NO: 2444777 - RNA, 19 nt, Homo sapiens
  misc_RNA (1)...(19): siRNA sense strand
cggcugaggaucacugcaa

SEQ ID NO: 2444778 - RNA, 19 nt, Homo sapiens
  misc_RNA (1)...(19): siRNA sense strand
aggaaggagcagcugggaa

SEQ ID NO: 2444779 - RNA, 19 nt, Homo sapiens
  misc_RNA (1)...(19): siRNA sense strand
caaagggacagauggccua

SEQ ID NO: 2444780 - RNA, 19 nt, Homo sapiens
  misc_RNA (1)...(19): siRNA sense strand
gaagaagaaggaaggagca

SEQ ID NO: 2444781 - RNA, 19 nt, Homo sapiens
  misc_RNA (1)...(19): siRNA sense strand
gaccauuucaaguggguga

SEQ ID NO: 2444782 - RNA, 19 nt, Homo sapiens
  misc_RNA (1)...(19): siRNA sense strand
ggaucaguuuccuggcaca

SEQ ID NO: 2444783 - RNA, 19 nt, Homo sapiens
  misc_RNA (1)...(19): siRNA sense strand
ggaucacugcaaagggaca

SEQ ID NO: 2444784 - RNA, 19 nt, Homo sapiens
  misc_RNA (1)...(19): siRNA sense strand
gcaaagggacagauggccu

SEQ ID NO: 2444785 - RNA, 19 nt, Homo sapiens
  misc_RNA (1)...(19): siRNA sense strand
gugaugaaagugaggaaga

SEQ ID NO: 2444786 - RNA, 19 nt, Homo sapiens
  misc_RNA (1)...(19): siRNA sense strand
ggcucaaagaggaggaaga

SEQ ID NO: 2444787 - RNA, 19 nt, Homo sapiens
  misc_RNA (1)...(19): siRNA sense strand
ccacaaaucuggagagucg

SEQ ID NO: 2444788 - RNA, 19 nt, Homo sapiens
  misc_RNA (1)...(19): siRNA sense strand
ucaaagaggaggaagacga

SEQ ID NO: 2444789 - RNA, 19 nt, Homo sapiens
  misc_RNA (1)...(19): siRNA sense strand
gauuaugggagguggacca

SEQ ID NO: 2444790 - RNA, 19 nt, Homo sapiens
  misc_RNA (1)...(19): siRNA sense strand
aggaggaagacgaguauga

SEQ ID NO: 2444791 - RNA, 19 nt, Homo sapiens
  misc_RNA (1)...(19): siRNA sense strand
ggccaggacauuugggaca

SEQ ID NO: 2444792 - RNA, 19 nt, Homo sapiens
  misc_RNA (1)...(19): siRNA sense strand
caggcaaggagcagcaaau

SEQ ID NO: 2444793 - RNA, 19 nt, Homo sapiens
  misc_RNA (1)...(19): siRNA sense strand
ggggagcauuggagaagaa

SEQ ID NO: 2444794 - RNA, 19 nt, Homo sapiens
  misc_RNA (1)...(19): siRNA sense strand
aagaggaggaagacgagua

SEQ ID NO: 2444795 - RNA, 19 nt, Homo sapiens
  misc_RNA (1)...(19): siRNA sense strand
gaugaaucaaagugguuau

SEQ ID NO: 2444796 - RNA, 19 nt, Homo sapiens
  misc_RNA (1)...(19): siRNA sense strand
agaagcaggcugagaaagu

SEQ ID NO: 2444797 - RNA, 19 nt, Homo sapiens
  misc_RNA (1)...(19): siRNA sense strand
cauaucuaguagugaugaa

SEQ ID NO: 2444798 - RNA, 19 nt, Homo sapiens
  misc_RNA (1)...(19): siRNA sense strand
gagaaaguggugaucaaaa

SEQ ID NO: 2444799 - RNA, 19 nt, Homo sapiens
  misc_RNA (1)...(19): siRNA sense strand
uagugaugaaagugaggaa

SEQ ID NO: 2444800 - RNA, 19 nt, Homo sapiens
  misc_RNA (1)...(19): siRNA sense strand
augaaagugaggaagaaaa

SEQ ID NO: 2444801 - RNA, 19 nt, Homo sapiens
  misc_RNA (1)...(19): siRNA sense strand
ggugauaagcgagaggcua

SEQ ID NO: 2444802 - RNA, 19 nt, Homo sapiens
  misc_RNA (1)...(19): siRNA sense strand
uguucugaguuuaaagaga

SEQ ID NO: 2444803 - RNA, 19 nt, Homo sapiens
  misc_RNA (1)...(19): siRNA sense strand
gugaggaagaaaagccaaa

SEQ ID NO: 2444804 - RNA, 19 nt, Homo sapiens
  misc_RNA (1)...(19): siRNA sense strand
ccgaugaaucaaagugguu

SEQ ID NO: 2444805 - RNA, 19 nt, Homo sapiens
  misc_RNA (1)...(19): siRNA sense strand
ucuccagacuucaguaaaa

SEQ ID NO: 2444806 - RNA, 19 nt, Homo sapiens
  misc_RNA (1)...(19): siRNA sense strand
ggaaguaaagaucggccau

SEQ ID NO: 2444807 - RNA, 19 nt, Homo sapiens
  misc_RNA (1)...(19): siRNA sense strand
gcugcacacaagaggaaaa

SEQ ID NO: 2444808 - RNA, 19 nt, Homo sapiens
  misc_RNA (1)...(19): siRNA sense strand
gaguucaggaagaagccaa

SEQ ID NO: 2444809 - RNA, 19 nt, Homo sapiens
  misc_RNA (1)...(19): siRNA sense strand
ggaacacaccacacgaaaa

SEQ ID NO: 2444810 - RNA, 19 nt, Homo sapiens
  misc_RNA (1)...(19): siRNA sense strand
gggagguggaccauaucua

SEQ ID NO: 2444811 - RNA, 19 nt, Homo sapiens
  misc_RNA (1)...(19): siRNA sense strand
aggcugagaaaguggugau

SEQ ID NO: 2444812 - RNA, 19 nt, Homo sapiens
  misc_RNA (1)...(19): siRNA sense strand
uggagaaguaugaggaaaa

SEQ ID NO: 2444813 - RNA, 19 nt, Homo sapiens
  misc_RNA (1)...(19): siRNA sense strand
agaaacagauugugcccaa

SEQ ID NO: 2444814 - RNA, 19 nt, Homo sapiens
  misc_RNA (1)...(19): siRNA sense strand
uugaaagggaguauggaaa

SEQ ID NO: 2444815 - RNA, 19 nt, Homo sapiens
  misc_RNA (1)...(19): siRNA sense strand
gggaggacuuugaagccaa

SEQ ID NO: 2444816 - RNA, 19 nt, Homo sapiens
  misc_RNA (1)...(19): siRNA sense strand
gggaacaggccuugcagga

SEQ ID NO: 2444817 - RNA, 19 nt, Homo sapiens
  misc_RNA (1)...(19): siRNA sense strand
acaggaggcugcaggccaa

SEQ ID NO: 2444818 - RNA, 19 nt, Homo sapiens
  misc_RNA (1)...(19): siRNA sense strand
ugcagaaagacaugaagaa

SEQ ID NO: 2444819 - RNA, 19 nt, Homo sapiens
  misc_RNA (1)...(19): siRNA sense strand
gguggagaaguaugaggaa

SEQ ID NO: 2444820 - RNA, 19 nt, Homo sapiens
  misc_RNA (1)...(19): siRNA sense strand
gcacaagaucuuuggagac

SEQ ID NO: 2444821 - RNA, 19 nt, Homo sapiens
  misc_RNA (1)...(19): siRNA sense strand
ugaagauauccuuggacuu

SEQ ID NO: 2444822 - RNA, 19 nt, Homo sapiens
  misc_RNA (1)...(19): siRNA sense strand
cugcagaaagacaugaaga

SEQ ID NO: 2444823 - RNA, 19 nt, Homo sapiens
  misc_RNA (1)...(19): siRNA sense strand
aggaaaaggugaaccagau

SEQ ID NO: 2444824 - RNA, 19 nt, Homo sapiens
  misc_RNA (1)...(19): siRNA sense strand
gaacaggccuugcaggacu

SEQ ID NO: 2444825 - RNA, 19 nt, Homo sapiens
  misc_RNA (1)...(19): siRNA sense strand
aguaugaggaaaaggagaa

SEQ ID NO: 2444826 - RNA, 19 nt, Homo sapiens
  misc_RNA (1)...(19): siRNA sense strand
gugaagauauccuuggacu

SEQ ID NO: 2444827 - RNA, 19 nt, Homo sapiens
  misc_RNA (1)...(19): siRNA sense strand
agacugugaucgagcccuu

SEQ ID NO: 2444828 - RNA, 19 nt, Homo sapiens
  misc_RNA (1)...(19): siRNA sense strand
gcauaugcacugaagaaaa

SEQ ID NO: 2444829 - RNA, 19 nt, Homo sapiens
  misc_RNA (1)...(19): siRNA sense strand
gcuugcacacccagagaaa

SEQ ID NO: 2444830 - RNA, 19 nt, Homo sapiens
  misc_RNA (1)...(19): siRNA sense strand
ugguauucaugcaagagaa

SEQ ID NO: 2444831 - RNA, 19 nt, Homo sapiens
  misc_RNA (1)...(19): siRNA sense strand
uggaagaucauaugaggga

SEQ ID NO: 2444832 - RNA, 19 nt, Homo sapiens
  misc_RNA (1)...(19): siRNA sense strand
aaaacaaggucaaggaacu

SEQ ID NO: 2444833 - RNA, 19 nt, Homo sapiens
  misc_RNA (1)...(19): siRNA sense strand
caguauacgggguacgaua

SEQ ID NO: 2444834 - RNA, 19 nt, Homo sapiens
  misc_RNA (1)...(19): siRNA sense strand
auaucaugccuguguuuaa

SEQ ID NO: 2444835 - RNA, 19 nt, Homo sapiens
  misc_RNA (1)...(19): siRNA sense strand
ucccaaaacagaagaggaa

SEQ ID NO: 2444836 - RNA, 19 nt, Homo sapiens
  misc_RNA (1)...(19): siRNA sense strand
ccuaucaacuuaaggugga

SEQ ID NO: 2444837 - RNA, 19 nt, Homo sapiens
  misc_RNA (1)...(19): siRNA sense strand
agugaaguggugugaugaa

SEQ ID NO: 2444838 - RNA, 19 nt, Homo sapiens
  misc_RNA (1)...(19): siRNA sense strand
gcuaaagaaaugucccuga

SEQ ID NO: 2444839 - RNA, 19 nt, Homo sapiens
  misc_RNA (1)...(19): siRNA sense strand
ggaagaucauaugagggaa

SEQ ID NO: 2444840 - RNA, 19 nt, Homo sapiens
  misc_RNA (1)...(19): siRNA sense strand
augcauaugcucagauguu

SEQ ID NO: 2444841 - RNA, 19 nt, Homo sapiens
  misc_RNA (1)...(19): siRNA sense strand
guguggaaucugcagcuua

SEQ ID NO: 2444842 - RNA, 19 nt, Homo sapiens
  misc_RNA (1)...(19): siRNA sense strand
ccuauguaucagagggaac

SEQ ID NO: 2444843 - RNA, 19 nt, Homo sapiens
  misc_RNA (1)...(19): siRNA sense strand
gaagaucauaugagggaag

SEQ ID NO: 2444844 - RNA, 19 nt, Homo sapiens
  misc_RNA (1)...(19): siRNA sense strand
gugacccagccaugagaaa

SEQ ID NO: 2444845 - RNA, 19 nt, Homo sapiens
  misc_RNA (1)...(19): siRNA sense strand
agugaaggcuguagcuaac

SEQ ID NO: 2444846 - RNA, 19 nt, Homo sapiens
  misc_RNA (1)...(19): siRNA sense strand
gagaauuucaacuggguga

SEQ ID NO: 2444847 - RNA, 19 nt, Homo sapiens
  misc_RNA (1)...(19): siRNA sense strand
caacgcaaguccaaggaga

SEQ ID NO: 2444848 - RNA, 19 nt, Homo sapiens
  misc_RNA (1)...(19): siRNA sense strand
cuaucaacacggagaacau

SEQ ID NO: 2444849 - RNA, 19 nt, Homo sapiens
  misc_RNA (1)...(19): siRNA sense strand
gcuuaagagacguccaaaa

SEQ ID NO: 2444850 - RNA, 19 nt, Homo sapiens
  misc_RNA (1)...(19): siRNA sense strand
uggaagaucgacugaccaa

SEQ ID NO: 2444851 - RNA, 19 nt, Homo sapiens
  misc_RNA (1)...(19): siRNA sense strand
aggugcaaauugugagcau

SEQ ID NO: 2444852 - RNA, 19 nt, Homo sapiens
  misc_RNA (1)...(19): siRNA sense strand
aguccaaggagaucgacaa

SEQ ID NO: 2444853 - RNA, 19 nt, Homo sapiens
  misc_RNA (1)...(19): siRNA sense strand
caugaauacgacuuugaaa

SEQ ID NO: 2444854 - RNA, 19 nt, Homo sapiens
  misc_RNA (1)...(19): siRNA sense strand
ggagauaagaugaugucgu

SEQ ID NO: 2444855 - RNA, 19 nt, Homo sapiens
  misc_RNA (1)...(19): siRNA sense strand
cccaaggaaugguggaaac

SEQ ID NO: 2444856 - RNA, 19 nt, Homo sapiens
  misc_RNA (1)...(19): siRNA sense strand
uugaggagaaggugcaaau

SEQ ID NO: 2444857 - RNA, 19 nt, Homo sapiens
  misc_RNA (1)...(19): siRNA sense strand
ccuagaauuugaaggggau

SEQ ID NO: 2444858 - RNA, 19 nt, Homo sapiens
  misc_RNA (1)...(19): siRNA sense strand
guccaaggagaucgacaaa

SEQ ID NO: 2444859 - RNA, 19 nt, Homo sapiens
  misc_RNA (1)...(19): siRNA sense strand
acuuggagaaccagauuau

SEQ ID NO: 2444860 - RNA, 19 nt, Homo sapiens
  misc_RNA (1)...(19): siRNA sense strand
agacagacuugcuugagga

SEQ ID NO: 2444861 - RNA, 19 nt, Homo sapiens
  misc_RNA (1)...(19): siRNA sense strand
gcccaaggaaugguggaaa

SEQ ID NO: 2444862 - RNA, 19 nt, Homo sapiens
  misc_RNA (1)...(19): siRNA sense strand
aggccgagcagcaacgcaa

SEQ ID NO: 2444863 - RNA, 19 nt, Homo sapiens
  misc_RNA (1)...(19): siRNA sense strand
cggaagaaggagcgggaga

SEQ ID NO: 2444864 - RNA, 19 nt, Homo sapiens
  misc_RNA (1)...(19): siRNA sense strand
agaucaaggcccuggaaca

SEQ ID NO: 2444865 - RNA, 19 nt, Homo sapiens
  misc_RNA (1)...(19): siRNA sense strand
aggaacagcuugagcgucu

SEQ ID NO: 2444866 - RNA, 19 nt, Homo sapiens
  misc_RNA (1)...(19): siRNA sense strand
agaagaagaucaaggcccu

SEQ ID NO: 2444867 - RNA, 19 nt, Homo sapiens
  misc_RNA (1)...(19): siRNA sense strand
ccgugaagaaagccaagaa

SEQ ID NO: 2444868 - RNA, 19 nt, Homo sapiens
  misc_RNA (1)...(19): siRNA sense strand
ccuuggaaguggaugccau

SEQ ID NO: 2444869 - RNA, 19 nt, Homo sapiens
  misc_RNA (1)...(19): siRNA sense strand
gugacacuggccagggaua

SEQ ID NO: 2444870 - RNA, 19 nt, Homo sapiens
  misc_RNA (1)...(19): siRNA sense strand
ugggacagaagaagaucaa

SEQ ID NO: 2444871 - RNA, 19 nt, Homo sapiens
  misc_RNA (1)...(19): siRNA sense strand
gugccaacugcgaguauga

SEQ ID NO: 2444872 - RNA, 19 nt, Homo sapiens
  misc_RNA (1)...(19): siRNA sense strand
uggcagaggaggaguaccu

SEQ ID NO: 2444873 - RNA, 19 nt, Homo sapiens
  misc_RNA (1)...(19): siRNA sense strand
gcuucuaccggcagaucaa

SEQ ID NO: 2444874 - RNA, 19 nt, Homo sapiens
  misc_RNA (1)...(19): siRNA sense strand
gcugggacagaaagaacaa

SEQ ID NO: 2444875 - RNA, 19 nt, Homo sapiens
  misc_RNA (1)...(19): siRNA sense strand
gaugauaccuggaacccaa

SEQ ID NO: 2444876 - RNA, 19 nt, Homo sapiens
  misc_RNA (1)...(19): siRNA sense strand
gagauuacauaaacggaga

SEQ ID NO: 2444877 - RNA, 19 nt, Homo sapiens
  misc_RNA (1)...(19): siRNA sense strand
caacaaacaaugaagugga

SEQ ID NO: 2444878 - RNA, 19 nt, Homo sapiens
  misc_RNA (1)...(19): siRNA sense strand
ucugcaaagaugacauaaa

SEQ ID NO: 2444879 - RNA, 19 nt, Homo sapiens
  misc_RNA (1)...(19): siRNA sense strand
ugacauaaagcaugggaac

SEQ ID NO: 2444880 - RNA, 19 nt, Homo sapiens
  misc_RNA (1)...(19): siRNA sense strand
gccucagauuaaugaacaa

SEQ ID NO: 2444881 - RNA, 19 nt, Homo sapiens
  misc_RNA (1)...(19): siRNA sense strand
cuuccaaagacgggagcua

SEQ ID NO: 2444882 - RNA, 19 nt, Homo sapiens
  misc_RNA (1)...(19): siRNA sense strand
uugcuaaucucuuugggaa

SEQ ID NO: 2444883 - RNA, 19 nt, Homo sapiens
  misc_RNA (1)...(19): siRNA sense strand
ggagaaugugaauacucaa

SEQ ID NO: 2444884 - RNA, 19 nt, Homo sapiens
  misc_RNA (1)...(19): siRNA sense strand
ggggaaaauacuagcaaua

SEQ ID NO: 2444885 - RNA, 19 nt, Homo sapiens
  misc_RNA (1)...(19): siRNA sense strand
cggaggaagggaagcguca

SEQ ID NO: 2444886 - RNA, 19 nt, Homo sapiens
  misc_RNA (1)...(19): siRNA sense strand
agauguaaucacagccauu

SEQ ID NO: 2444887 - RNA, 19 nt, Homo sapiens
  misc_RNA (1)...(19): siRNA sense strand
aggauucagaaguguuaaa

SEQ ID NO: 2444888 - RNA, 19 nt, Homo sapiens
  misc_RNA (1)...(19): siRNA sense strand
ugacacacuuggaagcuca

SEQ ID NO: 2444889 - RNA, 19 nt, Homo sapiens
  misc_RNA (1)...(19): siRNA sense strand
gcacugggauuguuggugu

SEQ ID NO: 2444890 - RNA, 19 nt, Homo sapiens
  misc_RNA (1)...(19): siRNA sense strand
acaagaagcaggagaggga

SEQ ID NO: 2444891 - RNA, 19 nt, Homo sapiens
  misc_RNA (1)...(19): siRNA sense strand
aggacaaggacaaugacaa

SEQ ID NO: 2444892 - RNA, 19 nt, Homo sapiens
  misc_RNA (1)...(19): siRNA sense strand
guguagagauggaggacug

SEQ ID NO: 2444893 - RNA, 19 nt, Homo sapiens
  misc_RNA (1)...(19): siRNA sense strand
uggaggacugggagggcaa

SEQ ID NO: 2444894 - RNA, 19 nt, Homo sapiens
  misc_RNA (1)...(19): siRNA sense strand
caggagagggacuggguca

SEQ ID NO: 2444895 - RNA, 19 nt, Homo sapiens
  misc_RNA (1)...(19): siRNA sense strand
ugaaggagcucaaggccca

SEQ ID NO: 2444896 - RNA, 19 nt, Homo sapiens
  misc_RNA (1)...(19): siRNA sense strand
gugaggaggugaaggagcu

SEQ ID NO: 2444897 - RNA, 19 nt, Homo sapiens
  misc_RNA (1)...(19): siRNA sense strand
cugaacaagaagcaggaga

SEQ ID NO: 2444898 - RNA, 19 nt, Homo sapiens
  misc_RNA (1)...(19): siRNA sense strand
augacaacugcuuggacaa

SEQ ID NO: 2444899 - RNA, 19 nt, Homo sapiens
  misc_RNA (1)...(19): siRNA sense strand
ggacaagugugcacagcuc

SEQ ID NO: 2444900 - RNA, 19 nt, Homo sapiens
  misc_RNA (1)...(19): siRNA sense strand
aggaggugaaggagcucaa

SEQ ID NO: 2444901 - RNA, 19 nt, Homo sapiens
  misc_RNA (1)...(19): siRNA sense strand
gcacaagacaccagcacag

SEQ ID NO: 2444902 - RNA, 19 nt, Homo sapiens
  misc_RNA (1)...(19): siRNA sense strand
uggagaugaccgugagaca

SEQ ID NO: 2444903 - RNA, 19 nt, Homo sapiens
  misc_RNA (1)...(19): siRNA sense strand
aggcggacauccuggagau

SEQ ID NO: 2444904 - RNA, 19 nt, Homo sapiens
  misc_RNA (1)...(19): siRNA sense strand
gcucaaagguucaagccaa

SEQ ID NO: 2444905 - RNA, 19 nt, Homo sapiens
  misc_RNA (1)...(19): siRNA sense strand
gcgagaagguggagcagga

SEQ ID NO: 2444906 - RNA, 19 nt, Homo sapiens
  misc_RNA (1)...(19): siRNA sense strand
ccauagaagaugagaggca

SEQ ID NO: 2444907 - RNA, 19 nt, Homo sapiens
  misc_RNA (1)...(19): siRNA sense strand
aguugaauuuggcgggaaa

SEQ ID NO: 2444908 - RNA, 19 nt, Homo sapiens
  misc_RNA (1)...(19): siRNA sense strand
gcuauggcuucaugggaaa

SEQ ID NO: 2444909 - RNA, 19 nt, Homo sapiens
  misc_RNA (1)...(19): siRNA sense strand
acucacagauacagagauu

SEQ ID NO: 2444910 - RNA, 19 nt, Homo sapiens
  misc_RNA (1)...(19): siRNA sense strand
cagaaaauuaccuggaaaa

SEQ ID NO: 2444911 - RNA, 19 nt, Homo sapiens
  misc_RNA (1)...(19): siRNA sense strand
ggacaauagccgagcccuu

SEQ ID NO: 2444912 - RNA, 19 nt, Homo sapiens
  misc_RNA (1)...(19): siRNA sense strand
uggugaagauauugacauu

SEQ ID NO: 2444913 - RNA, 19 nt, Homo sapiens
  misc_RNA (1)...(19): siRNA sense strand
cugaagaagauguguuuau

SEQ ID NO: 2444914 - RNA, 19 nt, Homo sapiens
  misc_RNA (1)...(19): siRNA sense strand
aaaucgaagcccugauaaa

SEQ ID NO: 2444915 - RNA, 19 nt, Homo sapiens
  misc_RNA (1)...(19): siRNA sense strand
gggaaaaggcugcagaaga

SEQ ID NO: 2444916 - RNA, 19 nt, Homo sapiens
  misc_RNA (1)...(19): siRNA sense strand
gagcagugauggauggcuu

SEQ ID NO: 2444917 - RNA, 19 nt, Homo sapiens
  misc_RNA (1)...(19): siRNA sense strand
cucaaagguucaagccaaa

SEQ ID NO: 2444918 - RNA, 19 nt, Homo sapiens
  misc_RNA (1)...(19): siRNA sense strand
ugacugacagcuuggguaa

SEQ ID NO: 2444919 - RNA, 19 nt, Homo sapiens
  misc_RNA (1)...(19): siRNA sense strand
gugcaauccagauggguga

SEQ ID NO: 2444920 - RNA, 19 nt, Homo sapiens
  misc_RNA (1)...(19): siRNA sense strand
gggaaugguuacuugcaga

SEQ ID NO: 2444921 - RNA, 19 nt, Homo sapiens
  misc_RNA (1)...(19): siRNA sense strand
uggaaagaacccucugaaa

SEQ ID NO: 2444922 - RNA, 19 nt, Homo sapiens
  misc_RNA (1)...(19): siRNA sense strand
agccagaggaggugaccaa

SEQ ID NO: 2444923 - RNA, 19 nt, Homo sapiens
  misc_RNA (1)...(19): siRNA sense strand
uuggagagggaauggauua

SEQ ID NO: 2444924 - RNA, 19 nt, Homo sapiens
  misc_RNA (1)...(19): siRNA sense strand
cagaaggagacuuggacga

SEQ ID NO: 2444925 - RNA, 19 nt, Homo sapiens
  misc_RNA (1)...(19): siRNA sense strand
ugggaaugacuguuauaaa

SEQ ID NO: 2444926 - RNA, 19 nt, Homo sapiens
  misc_RNA (1)...(19): siRNA sense strand
ugaccuauuuguauggaau

SEQ ID NO: 2444927 - RNA, 19 nt, Homo sapiens
  misc_RNA (1)...(19): siRNA sense strand
gcucaggauuuaaaggacu

SEQ ID NO: 2444928 - RNA, 19 nt, Homo sapiens
  misc_RNA (1)...(19): siRNA sense strand
acgauuuggcucaggauuu

SEQ ID NO: 2444929 - RNA, 19 nt, Homo sapiens
  misc_RNA (1)...(19): siRNA sense strand
cagaaauccaggugcuuga

SEQ ID NO: 2444930 - RNA, 19 nt, Homo sapiens
  misc_RNA (1)...(19): siRNA sense strand
caggauguguccagcguga

SEQ ID NO: 2444931 - RNA, 19 nt, Homo sapiens
  misc_RNA (1)...(19): siRNA sense strand
acgaagacucagcaguuua

SEQ ID NO: 2444932 - RNA, 19 nt, Homo sapiens
  misc_RNA (1)...(19): siRNA sense strand
aagcuuucuuucaagguaa

SEQ ID NO: 2444933 - RNA, 19 nt, Homo sapiens
  misc_RNA (1)...(19): siRNA sense strand
cugacauuggagagggaau

SEQ ID NO: 2444934 - RNA, 19 nt, Homo sapiens
  misc_RNA (1)...(19): siRNA sense strand
ucagaaaauuaccuggaaa

SEQ ID NO: 2444935 - RNA, 19 nt, Homo sapiens
  misc_RNA (1)...(19): siRNA sense strand
ucugaaucgcgaagaagua

SEQ ID NO: 2444936 - RNA, 19 nt, Homo sapiens
  misc_RNA (1)...(19): siRNA sense strand
gggaaucuggcaaaggcaa

SEQ ID NO: 2444937 - RNA, 19 nt, Homo sapiens
  misc_RNA (1)...(19): siRNA sense strand
cuugauggcuacaaugaau

SEQ ID NO: 2444938 - RNA, 19 nt, Homo sapiens
  misc_RNA (1)...(19): siRNA sense strand
cuugaguauucaugaccua

SEQ ID NO: 2444939 - RNA, 19 nt, Homo sapiens
  misc_RNA (1)...(19): siRNA sense strand
ugaaugaagaagaugcuau

SEQ ID NO: 2444940 - RNA, 19 nt, Homo sapiens
  misc_RNA (1)...(19): siRNA sense strand
ggaugcugcuagagggauc

SEQ ID NO: 2444941 - RNA, 19 nt, Homo sapiens
  misc_RNA (1)...(19): siRNA sense strand
gauuagaauuuuaggugca

SEQ ID NO: 2444942 - RNA, 19 nt, Homo sapiens
  misc_RNA (1)...(19): siRNA sense strand
uccgagaagugcugaucaa

SEQ ID NO: 2444943 - RNA, 19 nt, Homo sapiens
  misc_RNA (1)...(19): siRNA sense strand
ggaaugguuacuugcagaa

SEQ ID NO: 2444944 - RNA, 19 nt, Homo sapiens
  misc_RNA (1)...(19): siRNA sense strand
ccaccagggcuguuaugaa

SEQ ID NO: 2444945 - RNA, 19 nt, Homo sapiens
  misc_RNA (1)...(19): siRNA sense strand
agugcaaggcucugaccaa

SEQ ID NO: 2444946 - RNA, 19 nt, Homo sapiens
  misc_RNA (1)...(19): siRNA sense strand
caaucaggaagcagacauu

SEQ ID NO: 2444947 - RNA, 19 nt, Homo sapiens
  misc_RNA (1)...(19): siRNA sense strand
gcuucaagaacauggucau

SEQ ID NO: 2444948 - RNA, 19 nt, Homo sapiens
  misc_RNA (1)...(19): siRNA sense strand
ucaacuggaagcaggaauu

SEQ ID NO: 2444949 - RNA, 19 nt, Homo sapiens
  misc_RNA (1)...(19): siRNA sense strand
ccgauuacuuauuugacuu

SEQ ID NO: 2444950 - RNA, 19 nt, Homo sapiens
  misc_RNA (1)...(19): siRNA sense strand
agcuauggcuucaugggaa

SEQ ID NO: 2444951 - RNA, 19 nt, Homo sapiens
  misc_RNA (1)...(19): siRNA sense strand
cagcaaguugaauaagcaa

SEQ ID NO: 2444952 - RNA, 19 nt, Homo sapiens
  misc_RNA (1)...(19): siRNA sense strand
agauggaaaugaagcucuu

SEQ ID NO: 2444953 - RNA, 19 nt, Homo sapiens
  misc_RNA (1)...(19): siRNA sense strand
cgacaggaugaacgugcua

SEQ ID NO: 2444954 - RNA, 19 nt, Homo sapiens
  misc_RNA (1)...(19): siRNA sense strand
auuuaaaggacuuguacca

SEQ ID NO: 2444955 - RNA, 19 nt, Homo sapiens
  misc_RNA (1)...(19): siRNA sense strand
cugcaucauugaaggggaa

SEQ ID NO: 2444956 - RNA, 19 nt, Homo sapiens
  misc_RNA (1)...(19): siRNA sense strand
ggauguguccagcgugaau

SEQ ID NO: 2444957 - RNA, 19 nt, Homo sapiens
  misc_RNA (1)...(19): siRNA sense strand
cugaaaaccuugaguauuc

SEQ ID NO: 2444958 - RNA, 19 nt, Homo sapiens
  misc_RNA (1)...(19): siRNA sense strand
acuugaagaaccuuacaaa

SEQ ID NO: 2444959 - RNA, 19 nt, Homo sapiens
  misc_RNA (1)...(19): siRNA sense strand
ccccagaacugcccagaaa

SEQ ID NO: 2444960 - RNA, 19 nt, Homo sapiens
  misc_RNA (1)...(19): siRNA sense strand
agguucaagccaaaguaua

SEQ ID NO: 2444961 - RNA, 19 nt, Homo sapiens
  misc_RNA (1)...(19): siRNA sense strand
cuucaugaacugaucgaca

SEQ ID NO: 2444962 - RNA, 19 nt, Homo sapiens
  misc_RNA (1)...(19): siRNA sense strand
ugauaaggucagaggcuau

SEQ ID NO: 2444963 - RNA, 19 nt, Homo sapiens
  misc_RNA (1)...(19): siRNA sense strand
uggacaaagcccagcgcua

SEQ ID NO: 2444964 - RNA, 19 nt, Homo sapiens
  misc_RNA (1)...(19): siRNA sense strand
guggagaacaagaagguga

SEQ ID NO: 2444965 - RNA, 19 nt, Homo sapiens
  misc_RNA (1)...(19): siRNA sense strand
cugaagacccagaggagga

SEQ ID NO: 2444966 - RNA, 19 nt, Homo sapiens
  misc_RNA (1)...(19): siRNA sense strand
ccugagugaucgagagacu

SEQ ID NO: 2444967 - RNA, 19 nt, Homo sapiens
  misc_RNA (1)...(19): siRNA sense strand
accugaugguggagaacaa

SEQ ID NO: 2444968 - RNA, 19 nt, Homo sapiens
  misc_RNA (1)...(19): siRNA sense strand
uggagaacaagaaggugaa

SEQ ID NO: 2444969 - RNA, 19 nt, Homo sapiens
  misc_RNA (1)...(19): siRNA sense strand
gugaccugaugguggagaa

SEQ ID NO: 2444970 - RNA, 19 nt, Homo sapiens
  misc_RNA (1)...(19): siRNA sense strand
caguaucaguguugggauc

SEQ ID NO: 2444971 - RNA, 19 nt, Homo sapiens
  misc_RNA (1)...(19): siRNA sense strand
ggaauauaaagaucgggau

SEQ ID NO: 2444972 - RNA, 19 nt, Homo sapiens
  misc_RNA (1)...(19): siRNA sense strand
ccuaugaggccguggagcu

SEQ ID NO: 2444973 - RNA, 19 nt, Homo sapiens
  misc_RNA (1)...(19): siRNA sense strand
ugaagaugauggugggcaa

SEQ ID NO: 2444974 - RNA, 19 nt, Homo sapiens
  misc_RNA (1)...(19): siRNA sense strand
ccaucaucauccuggacaa

SEQ ID NO: 2444975 - RNA, 19 nt, Homo sapiens
  misc_RNA (1)...(19): siRNA sense strand
acaaggauggcgaugggaa

SEQ ID NO: 2444976 - RNA, 19 nt, Homo sapiens
  misc_RNA (1)...(19): siRNA sense strand
acauggauaaagauggcua

SEQ ID NO: 2444977 - RNA, 19 nt, Homo sapiens
  misc_RNA (1)...(19): siRNA sense strand
caaagaagauggagcagga

SEQ ID NO: 2444978 - RNA, 19 nt, Homo sapiens
  misc_RNA (1)...(19): siRNA sense strand
aggaggaggaggaggauga

SEQ ID NO: 2444979 - RNA, 19 nt, Homo sapiens
  misc_RNA (1)...(19): siRNA sense strand
gauauucaccagagggcaa

SEQ ID NO: 2444980 - RNA, 19 nt, Homo sapiens
  misc_RNA (1)...(19): siRNA sense strand
ugacaaaguuccuggcucu

SEQ ID NO: 2444981 - RNA, 19 nt, Homo sapiens
  misc_RNA (1)...(19): siRNA sense strand
ccacaaaauugaaacccaa

SEQ ID NO: 2444982 - RNA, 19 nt, Homo sapiens
  misc_RNA (1)...(19): siRNA sense strand
aggaggaggaggaggagga

SEQ ID NO: 2444983 - RNA, 19 nt, Homo sapiens
  misc_RNA (1)...(19): siRNA sense strand
cagccaucauaaagcuuaa

SEQ ID NO: 2444984 - RNA, 19 nt, Homo sapiens
  misc_RNA (1)...(19): siRNA sense strand
uggagaauuugcugaacau

SEQ ID NO: 2444985 - RNA, 19 nt, Homo sapiens
  misc_RNA (1)...(19): siRNA sense strand
acaucaacuucgagguguu

SEQ ID NO: 2444986 - RNA, 19 nt, Homo sapiens
  misc_RNA (1)...(19): siRNA sense strand
cugaagugaagccgagaau

SEQ ID NO: 2444987 - RNA, 19 nt, Homo sapiens
  misc_RNA (1)...(19): siRNA sense strand
ucucaaagaagauggagca

SEQ ID NO: 2444988 - RNA, 19 nt, Homo sapiens
  misc_RNA (1)...(19): siRNA sense strand
uugcuuugucagagaggaa

SEQ ID NO: 2444989 - RNA, 19 nt, Homo sapiens
  misc_RNA (1)...(19): siRNA sense strand
cuggagaauuugcugaaca

SEQ ID NO: 2444990 - RNA, 19 nt, Homo sapiens
  misc_RNA (1)...(19): siRNA sense strand
aggagggaguucuggacuu

SEQ ID NO: 2444991 - RNA, 19 nt, Homo sapiens
  misc_RNA (1)...(19): siRNA sense strand
ccggaaggccauucaugaa

SEQ ID NO: 2444992 - RNA, 19 nt, Homo sapiens
  misc_RNA (1)...(19): siRNA sense strand
uaauaagauaugccgggaa

SEQ ID NO: 2444993 - RNA, 19 nt, Homo sapiens
  misc_RNA (1)...(19): siRNA sense strand
gggccuacaaagugaauac

SEQ ID NO: 2444994 - RNA, 19 nt, Homo sapiens
  misc_RNA (1)...(19): siRNA sense strand
gggagguggacgaggaaga

SEQ ID NO: 2444995 - RNA, 19 nt, Homo sapiens
  misc_RNA (1)...(19): siRNA sense strand
acacacaggcugaaggaga

SEQ ID NO: 2444996 - RNA, 19 nt, Homo sapiens
  misc_RNA (1)...(19): siRNA sense strand
ccacggaguucaugggagu

SEQ ID NO: 2444997 - RNA, 19 nt, Homo sapiens
  misc_RNA (1)...(19): siRNA sense strand
ggucauacaaccaggagca

SEQ ID NO: 2444998 - RNA, 19 nt, Homo sapiens
  misc_RNA (1)...(19): siRNA sense strand
agaaggagcacgaggccau

SEQ ID NO: 2444999 - RNA, 19 nt, Homo sapiens
  misc_RNA (1)...(19): siRNA sense strand
cagugaaccuccuggggaa

SEQ ID NO: 2445000 - RNA, 19 nt, Homo sapiens
  misc_RNA (1)...(19): siRNA sense strand
cagacacagaugaguacaa

SEQ ID NO: 2445001 - RNA, 19 nt, Homo sapiens
  misc_RNA (1)...(19): siRNA sense strand
ggaagagacuggcggagcu

SEQ ID NO: 2445002 - RNA, 19 nt, Homo sapiens
  misc_RNA (1)...(19): siRNA sense strand
cagaggagcagaaggagca

SEQ ID NO: 2445003 - RNA, 19 nt, Homo sapiens
  misc_RNA (1)...(19): siRNA sense strand
gaacagagucauccagcca

SEQ ID NO: 2445004 - RNA, 19 nt, Homo sapiens
  misc_RNA (1)...(19): siRNA sense strand
caggaugccaugugcgaga

SEQ ID NO: 2445005 - RNA, 19 nt, Homo sapiens
  misc_RNA (1)...(19): siRNA sense strand
cagaggaguuccacggcca

SEQ ID NO: 2445006 - RNA, 19 nt, Homo sapiens
  misc_RNA (1)...(19): siRNA sense strand
ugggaaugcugcuggccuu

SEQ ID NO: 2445007 - RNA, 19 nt, Homo sapiens
  misc_RNA (1)...(19): siRNA sense strand
gggugacuccugaagggaa

SEQ ID NO: 2445008 - RNA, 19 nt, Homo sapiens
  misc_RNA (1)...(19): siRNA sense strand
cuagagaagcguuugcaca

SEQ ID NO: 2445009 - RNA, 19 nt, Homo sapiens
  misc_RNA (1)...(19): siRNA sense strand
gggccaguacucagaggau

SEQ ID NO: 2445010 - RNA, 19 nt, Homo sapiens
  misc_RNA (1)...(19): siRNA sense strand
gaggaugaggacacagaca

SEQ ID NO: 2445011 - RNA, 19 nt, Homo sapiens
  misc_RNA (1)...(19): siRNA sense strand
ggggagaugcugcggaaca

SEQ ID NO: 2445012 - RNA, 19 nt, Homo sapiens
  misc_RNA (1)...(19): siRNA sense strand
cuauggagggcaugacaga

SEQ ID NO: 2445013 - RNA, 19 nt, Homo sapiens
  misc_RNA (1)...(19): siRNA sense strand
uugaagagcugaagggaca

SEQ ID NO: 2445014 - RNA, 19 nt, Homo sapiens
  misc_RNA (1)...(19): siRNA sense strand
ggguagaugacaaggugaa

SEQ ID NO: 2445015 - RNA, 19 nt, Homo sapiens
  misc_RNA (1)...(19): siRNA sense strand
cuaugaacuugauggacga

SEQ ID NO: 2445016 - RNA, 19 nt, Homo sapiens
  misc_RNA (1)...(19): siRNA sense strand
cggcccagcaugagaacuu

SEQ ID NO: 2445017 - RNA, 19 nt, Homo sapiens
  misc_RNA (1)...(19): siRNA sense strand
cccugaagacagagcaaaa

SEQ ID NO: 2445018 - RNA, 19 nt, Homo sapiens
  misc_RNA (1)...(19): siRNA sense strand
cagcucaagccgauggaga

SEQ ID NO: 2445019 - RNA, 19 nt, Homo sapiens
  misc_RNA (1)...(19): siRNA sense strand
acgcaguggccaauaauca

SEQ ID NO: 2445020 - RNA, 19 nt, Homo sapiens
  misc_RNA (1)...(19): siRNA sense strand
uuaacaacguggauggcca

SEQ ID NO: 2445021 - RNA, 19 nt, Homo sapiens
  misc_RNA (1)...(19): siRNA sense strand
gguaauggcagcacggcuu

SEQ ID NO: 2445022 - RNA, 19 nt, Homo sapiens
  misc_RNA (1)...(19): siRNA sense strand
ccaacaaacuacagcugca

SEQ ID NO: 2445023 - RNA, 19 nt, Homo sapiens
  misc_RNA (1)...(19): siRNA sense strand
cggaggagcugucucgcua

SEQ ID NO: 2445024 - RNA, 19 nt, Homo sapiens
  misc_RNA (1)...(19): siRNA sense strand
ccagaagaguggaggugug

SEQ ID NO: 2445025 - RNA, 19 nt, Homo sapiens
  misc_RNA (1)...(19): siRNA sense strand
cuguauaagccaggugcua

SEQ ID NO: 2445026 - RNA, 19 nt, Homo sapiens
  misc_RNA (1)...(19): siRNA sense strand
cggcacugacccagguaga

SEQ ID NO: 2445027 - RNA, 19 nt, Homo sapiens
  misc_RNA (1)...(19): siRNA sense strand
ugaauauacuagagggcau

SEQ ID NO: 2445028 - RNA, 19 nt, Homo sapiens
  misc_RNA (1)...(19): siRNA sense strand
caacauuucugcuggcuca

SEQ ID NO: 2445029 - RNA, 19 nt, Homo sapiens
  misc_RNA (1)...(19): siRNA sense strand
aagagaauuucgugggugu

SEQ ID NO: 2445030 - RNA, 19 nt, Homo sapiens
  misc_RNA (1)...(19): siRNA sense strand
cagcaguggcuaaugucaa

SEQ ID NO: 2445031 - RNA, 19 nt, Homo sapiens
  misc_RNA (1)...(19): siRNA sense strand
acacagaccuugucccaga

SEQ ID NO: 2445032 - RNA, 19 nt, Homo sapiens
  misc_RNA (1)...(19): siRNA sense strand
ccuccauggugcuggcuga

SEQ ID NO: 2445033 - RNA, 19 nt, Homo sapiens
  misc_RNA (1)...(19): siRNA sense strand
cgaacaguuacuugcaaca

SEQ ID NO: 2445034 - RNA, 19 nt, Homo sapiens
  misc_RNA (1)...(19): siRNA sense strand
gcuaaagaaugcugggaaa

SEQ ID NO: 2445035 - RNA, 19 nt, Homo sapiens
  misc_RNA (1)...(19): siRNA sense strand
cagaagacuccuugguuua

SEQ ID NO: 2445036 - RNA, 19 nt, Homo sapiens
  misc_RNA (1)...(19): siRNA sense strand
gugccagggugguggacua

SEQ ID NO: 2445037 - RNA, 19 nt, Homo sapiens
  misc_RNA (1)...(19): siRNA sense strand
uggcagaggcauauggcaa

SEQ ID NO: 2445038 - RNA, 19 nt, Homo sapiens
  misc_RNA (1)...(19): siRNA sense strand
aggagaaaggguacgauaa

SEQ ID NO: 2445039 - RNA, 19 nt, Homo sapiens
  misc_RNA (1)...(19): siRNA sense strand
cagcaugcauucagauauu

SEQ ID NO: 2445040 - RNA, 19 nt, Homo sapiens
  misc_RNA (1)...(19): siRNA sense strand
aggcauauggcaagaaaga

SEQ ID NO: 2445041 - RNA, 19 nt, Homo sapiens
  misc_RNA (1)...(19): siRNA sense strand
gcauauggcaagaaagagu

SEQ ID NO: 2445042 - RNA, 19 nt, Homo sapiens
  misc_RNA (1)...(19): siRNA sense strand
ugaagcaaucgcagaauua

SEQ ID NO: 2445043 - RNA, 19 nt, Homo sapiens
  misc_RNA (1)...(19): siRNA sense strand
gaagaaaaugacuggcaaa

SEQ ID NO: 2445044 - RNA, 19 nt, Homo sapiens
  misc_RNA (1)...(19): siRNA sense strand
ccucuagagaagaaaggaa

SEQ ID NO: 2445045 - RNA, 19 nt, Homo sapiens
  misc_RNA (1)...(19): siRNA sense strand
ggauaaaccuggcugguac

SEQ ID NO: 2445046 - RNA, 19 nt, Homo sapiens
  misc_RNA (1)...(19): siRNA sense strand
cacuauaguaauugggaga

SEQ ID NO: 2445047 - RNA, 19 nt, Homo sapiens
  misc_RNA (1)...(19): siRNA sense strand
acgauaaggaauugcucaa

SEQ ID NO: 2445048 - RNA, 19 nt, Homo sapiens
  misc_RNA (1)...(19): siRNA sense strand
cucuagagaagaaaggaaa

SEQ ID NO: 2445049 - RNA, 19 nt, Homo sapiens
  misc_RNA (1)...(19): siRNA sense strand
ccucuggacuacaaauuua

SEQ ID NO: 2445050 - RNA, 19 nt, Homo sapiens
  misc_RNA (1)...(19): siRNA sense strand
acagaagacuccuugguuu

SEQ ID NO: 2445051 - RNA, 19 nt, Homo sapiens
  misc_RNA (1)...(19): siRNA sense strand
uaaggaaaacuguggaaua

SEQ ID NO: 2445052 - RNA, 19 nt, Homo sapiens
  misc_RNA (1)...(19): siRNA sense strand
gcucgucacuauaguaauu

SEQ ID NO: 2445053 - RNA, 19 nt, Homo sapiens
  misc_RNA (1)...(19): siRNA sense strand
ggaagaacucagaggggau

SEQ ID NO: 2445054 - RNA, 19 nt, Homo sapiens
  misc_RNA (1)...(19): siRNA sense strand
aaggagaaaggguacgaua

SEQ ID NO: 2445055 - RNA, 19 nt, Homo sapiens
  misc_RNA (1)...(19): siRNA sense strand
agacacugauauccaaaua

SEQ ID NO: 2445056 - RNA, 19 nt, Homo sapiens
  misc_RNA (1)...(19): siRNA sense strand
cugcuauacaacacaauua

SEQ ID NO: 2445057 - RNA, 19 nt, Homo sapiens
  misc_RNA (1)...(19): siRNA sense strand
cuauaguaauugggagaca

SEQ ID NO: 2445058 - RNA, 19 nt, Homo sapiens
  misc_RNA (1)...(19): siRNA sense strand
uaguuaaggagaaagggua

SEQ ID NO: 2445059 - RNA, 19 nt, Homo sapiens
  misc_RNA (1)...(19): siRNA sense strand
uguaagagaaucaguacuu

SEQ ID NO: 2445060 - RNA, 19 nt, Homo sapiens
  misc_RNA (1)...(19): siRNA sense strand
ggaaaacuguggaauauau

SEQ ID NO: 2445061 - RNA, 19 nt, Homo sapiens
  misc_RNA (1)...(19): siRNA sense strand
uuacauaguuguccugaau

SEQ ID NO: 2445062 - RNA, 19 nt, Homo sapiens
  misc_RNA (1)...(19): siRNA sense strand
ugggaaaauucuucuguua

SEQ ID NO: 2445063 - RNA, 19 nt, Homo sapiens
  misc_RNA (1)...(19): siRNA sense strand
uuacagcacuauugcaauu

SEQ ID NO: 2445064 - RNA, 19 nt, Homo sapiens
  misc_RNA (1)...(19): siRNA sense strand
gggaaaauucuucuguuaa

SEQ ID NO: 2445065 - RNA, 19 nt, Homo sapiens
  misc_RNA (1)...(19): siRNA sense strand
cuaaagaaugcugggaaaa

SEQ ID NO: 2445066 - RNA, 19 nt, Homo sapiens
  misc_RNA (1)...(19): siRNA sense strand
agauccaggcagauauuua

SEQ ID NO: 2445067 - RNA, 19 nt, Homo sapiens
  misc_RNA (1)...(19): siRNA sense strand
ccaggcagauauuuacaua

SEQ ID NO: 2445068 - RNA, 19 nt, Homo sapiens
  misc_RNA (1)...(19): siRNA sense strand
aaggguacgauaaggaauu

SEQ ID NO: 2445069 - RNA, 19 nt, Homo sapiens
  misc_RNA (1)...(19): siRNA sense strand
uggcauuggaucuagaaga

SEQ ID NO: 2445070 - RNA, 19 nt, Homo sapiens
  misc_RNA (1)...(19): siRNA sense strand
aggugcuggcagaggcaua

SEQ ID NO: 2445071 - RNA, 19 nt, Homo sapiens
  misc_RNA (1)...(19): siRNA sense strand
ggagaaaggguacgauaag

SEQ ID NO: 2445072 - RNA, 19 nt, Homo sapiens
  misc_RNA (1)...(19): siRNA sense strand
ucgagaaugaugaggagca

SEQ ID NO: 2445073 - RNA, 19 nt, Homo sapiens
  misc_RNA (1)...(19): siRNA sense strand
agaaaggguacgauaagga

SEQ ID NO: 2445074 - RNA, 19 nt, Homo sapiens
  misc_RNA (1)...(19): siRNA sense strand
gcaagaaagaguggaagca

SEQ ID NO: 2445075 - RNA, 19 nt, Homo sapiens
  misc_RNA (1)...(19): siRNA sense strand
auggcaagaaagaguggaa

SEQ ID NO: 2445076 - RNA, 19 nt, Homo sapiens
  misc_RNA (1)...(19): siRNA sense strand
gugguggacuauuuaacaa

SEQ ID NO: 2445077 - RNA, 19 nt, Homo sapiens
  misc_RNA (1)...(19): siRNA sense strand
uuaccaagucagagaccuu

SEQ ID NO: 2445078 - RNA, 19 nt, Homo sapiens
  misc_RNA (1)...(19): siRNA sense strand
aggcagauauuuacauagu

SEQ ID NO: 2445079 - RNA, 19 nt, Homo sapiens
  misc_RNA (1)...(19): siRNA sense strand
gcuucgacagcuaaagaau

SEQ ID NO: 2445080 - RNA, 19 nt, Homo sapiens
  misc_RNA (1)...(19): siRNA sense strand
aaggaaaacuguggaauau

SEQ ID NO: 2445081 - RNA, 19 nt, Homo sapiens
  misc_RNA (1)...(19): siRNA sense strand
aaagagauccaggcagaua

SEQ ID NO: 2445082 - RNA, 19 nt, Homo sapiens
  misc_RNA (1)...(19): siRNA sense strand
gcagauauuuacauaguug

SEQ ID NO: 2445083 - RNA, 19 nt, Homo sapiens
  misc_RNA (1)...(19): siRNA sense strand
agaaugaugaggagcagga

SEQ ID NO: 2445084 - RNA, 19 nt, Homo sapiens
  misc_RNA (1)...(19): siRNA sense strand
agaggcauauggcaagaaa

SEQ ID NO: 2445085 - RNA, 19 nt, Homo sapiens
  misc_RNA (1)...(19): siRNA sense strand
ccagggugguggacuauuu

SEQ ID NO: 2445086 - RNA, 19 nt, Homo sapiens
  misc_RNA (1)...(19): siRNA sense strand
agcuaaagaaugcugggaa

SEQ ID NO: 2445087 - RNA, 19 nt, Homo sapiens
  misc_RNA (1)...(19): siRNA sense strand
ucagagaccuuuccggaca

SEQ ID NO: 2445088 - RNA, 19 nt, Homo sapiens
  misc_RNA (1)...(19): siRNA sense strand
gcacugccaucucuggaua

SEQ ID NO: 2445089 - RNA, 19 nt, Homo sapiens
  misc_RNA (1)...(19): siRNA sense strand
caacauugcuacuggacca

SEQ ID NO: 2445090 - RNA, 19 nt, Homo sapiens
  misc_RNA (1)...(19): siRNA sense strand
gaaauaggguggaugagga

SEQ ID NO: 2445091 - RNA, 19 nt, Homo sapiens
  misc_RNA (1)...(19): siRNA sense strand
auaggguggaugaggauaa

SEQ ID NO: 2445092 - RNA, 19 nt, Homo sapiens
  misc_RNA (1)...(19): siRNA sense strand
augaggauaaugaggaaga

SEQ ID NO: 2445093 - RNA, 19 nt, Homo sapiens
  misc_RNA (1)...(19): siRNA sense strand
uagcagaacuacaguauua

SEQ ID NO: 2445094 - RNA, 19 nt, Homo sapiens
  misc_RNA (1)...(19): siRNA sense strand
cuacuuaggacaagaauua

SEQ ID NO: 2445095 - RNA, 19 nt, Homo sapiens
  misc_RNA (1)...(19): siRNA sense strand
caucauugaaucagaguua

SEQ ID NO: 2445096 - RNA, 19 nt, Homo sapiens
  misc_RNA (1)...(19): siRNA sense strand
gcacauuauagcagaacua

SEQ ID NO: 2445097 - RNA, 19 nt, Homo sapiens
  misc_RNA (1)...(19): siRNA sense strand
caacauuguaauagagaca

SEQ ID NO: 2445098 - RNA, 19 nt, Homo sapiens
  misc_RNA (1)...(19): siRNA sense strand
cuaaguauuuggagucaua

SEQ ID NO: 2445099 - RNA, 19 nt, Homo sapiens
  misc_RNA (1)...(19): siRNA sense strand
agagaugauguuaggguaa

SEQ ID NO: 2445100 - RNA, 19 nt, Homo sapiens
  misc_RNA (1)...(19): siRNA sense strand
cuuaaaagauggugcagaa

SEQ ID NO: 2445101 - RNA, 19 nt, Homo sapiens
  misc_RNA (1)...(19): siRNA sense strand
uuacauaugaccaaggaaa

SEQ ID NO: 2445102 - RNA, 19 nt, Homo sapiens
  misc_RNA (1)...(19): siRNA sense strand
cagagaaguauauggaaga

SEQ ID NO: 2445103 - RNA, 19 nt, Homo sapiens
  misc_RNA (1)...(19): siRNA sense strand
ggaauauggaagagaugau

SEQ ID NO: 2445104 - RNA, 19 nt, Homo sapiens
  misc_RNA (1)...(19): siRNA sense strand
uuuaaagcauugugagaga

SEQ ID NO: 2445105 - RNA, 19 nt, Homo sapiens
  misc_RNA (1)...(19): siRNA sense strand
guggauacucagugaucaa

SEQ ID NO: 2445106 - RNA, 19 nt, Homo sapiens
  misc_RNA (1)...(19): siRNA sense strand
gugagagauuccugaaaca

SEQ ID NO: 2445107 - RNA, 19 nt, Homo sapiens
  misc_RNA (1)...(19): siRNA sense strand
uaggaaagcugaugaaacu

SEQ ID NO: 2445108 - RNA, 19 nt, Homo sapiens
  misc_RNA (1)...(19): siRNA sense strand
aaauguugccugugguuaa

SEQ ID NO: 2445109 - RNA, 19 nt, Homo sapiens
  misc_RNA (1)...(19): siRNA sense strand
gcaaaaugaugaaagccaa

SEQ ID NO: 2445110 - RNA, 19 nt, Homo sapiens
  misc_RNA (1)...(19): siRNA sense strand
ggaagaaauuguggagagu

SEQ ID NO: 2445111 - RNA, 19 nt, Homo sapiens
  misc_RNA (1)...(19): siRNA sense strand
aagaaauuguggagaguac

SEQ ID NO: 2445112 - RNA, 19 nt, Homo sapiens
  misc_RNA (1)...(19): siRNA sense strand
cauucaaagcauugcagaa

SEQ ID NO: 2445113 - RNA, 19 nt, Homo sapiens
  misc_RNA (1)...(19): siRNA sense strand
cugaugaaacuuugggaca

SEQ ID NO: 2445114 - RNA, 19 nt, Homo sapiens
  misc_RNA (1)...(19): siRNA sense strand
gagaaguauauggaagaaa

SEQ ID NO: 2445115 - RNA, 19 nt, Homo sapiens
  misc_RNA (1)...(19): siRNA sense strand
ggucuaagggacuuuauaa

SEQ ID NO: 2445116 - RNA, 19 nt, Homo sapiens
  misc_RNA (1)...(19): siRNA sense strand
ucaaagcauugcagaaaca

SEQ ID NO: 2445117 - RNA, 19 nt, Homo sapiens
  misc_RNA (1)...(19): siRNA sense strand
cagcaaacuuccauaaaau

SEQ ID NO: 2445118 - RNA, 19 nt, Homo sapiens
  misc_RNA (1)...(19): siRNA sense strand
ccagagaaguauauggaag

SEQ ID NO: 2445119 - RNA, 19 nt, Homo sapiens
  misc_RNA (1)...(19): siRNA sense strand
aaaagauggugcagaaaau

SEQ ID NO: 2445120 - RNA, 19 nt, Homo sapiens
  misc_RNA (1)...(19): siRNA sense strand
uugcauuaguugauaccaa

SEQ ID NO: 2445121 - RNA, 19 nt, Homo sapiens
  misc_RNA (1)...(19): siRNA sense strand
gaugaaacuuugggacauu

SEQ ID NO: 2445122 - RNA, 19 nt, Homo sapiens
  misc_RNA (1)...(19): siRNA sense strand
gaucagaaauguugccugu

SEQ ID NO: 2445123 - RNA, 19 nt, Homo sapiens
  misc_RNA (1)...(19): siRNA sense strand
uguaaggaaucaagaucuu

SEQ ID NO: 2445124 - RNA, 19 nt, Homo sapiens
  misc_RNA (1)...(19): siRNA sense strand
auucaaagcauugcagaaa

SEQ ID NO: 2445125 - RNA, 19 nt, Homo sapiens
  misc_RNA (1)...(19): siRNA sense strand
caucacauccauugccaaa

SEQ ID NO: 2445126 - RNA, 19 nt, Homo sapiens
  misc_RNA (1)...(19): siRNA sense strand
aagccaaaccugauauaau

SEQ ID NO: 2445127 - RNA, 19 nt, Homo sapiens
  misc_RNA (1)...(19): siRNA sense strand
caaaaggagaaaagccaua

SEQ ID NO: 2445128 - RNA, 19 nt, Homo sapiens
  misc_RNA (1)...(19): siRNA sense strand
uggacuacucucugugaaa

SEQ ID NO: 2445129 - RNA, 19 nt, Homo sapiens
  misc_RNA (1)...(19): siRNA sense strand
aagaauugcaucuguagaa

SEQ ID NO: 2445130 - RNA, 19 nt, Homo sapiens
  misc_RNA (1)...(19): siRNA sense strand
aagagaugauguuagggua

SEQ ID NO: 2445131 - RNA, 19 nt, Homo sapiens
  misc_RNA (1)...(19): siRNA sense strand
cgucacauauauaguacau

SEQ ID NO: 2445132 - RNA, 19 nt, Homo sapiens
  misc_RNA (1)...(19): siRNA sense strand
uggaagaaauuguggagag

SEQ ID NO: 2445133 - RNA, 19 nt, Homo sapiens
  misc_RNA (1)...(19): siRNA sense strand
cuauaaacaaggcagaaaa

SEQ ID NO: 2445134 - RNA, 19 nt, Homo sapiens
  misc_RNA (1)...(19): siRNA sense strand
guggagaggccuuaauaga

SEQ ID NO: 2445135 - RNA, 19 nt, Homo sapiens
  misc_RNA (1)...(19): siRNA sense strand
uaucaaugaaugugugaca

SEQ ID NO: 2445136 - RNA, 19 nt, Homo sapiens
  misc_RNA (1)...(19): siRNA sense strand
ccuaaagaggugagauaug

SEQ ID NO: 2445137 - RNA, 19 nt, Homo sapiens
  misc_RNA (1)...(19): siRNA sense strand
uaaacaaggcagaaaacua

SEQ ID NO: 2445138 - RNA, 19 nt, Homo sapiens
  misc_RNA (1)...(19): siRNA sense strand
aaugaaaggaaaugaggca

SEQ ID NO: 2445139 - RNA, 19 nt, Homo sapiens
  misc_RNA (1)...(19): siRNA sense strand
cgaaaucaagaaaggcaga

SEQ ID NO: 2445140 - RNA, 19 nt, Homo sapiens
  misc_RNA (1)...(19): siRNA sense strand
gaucuauaaacaaggcaga

SEQ ID NO: 2445141 - RNA, 19 nt, Homo sapiens
  misc_RNA (1)...(19): siRNA sense strand
ucuauaaacaaggcagaaa

SEQ ID NO: 2445142 - RNA, 19 nt, Homo sapiens
  misc_RNA (1)...(19): siRNA sense strand
cauuauggcuugggaagau

SEQ ID NO: 2445143 - RNA, 19 nt, Homo sapiens
  misc_RNA (1)...(19): siRNA sense strand
uuacaggucagcaggcaua

SEQ ID NO: 2445144 - RNA, 19 nt, Homo sapiens
  misc_RNA (1)...(19): siRNA sense strand
acugaaagcccaucugaau

SEQ ID NO: 2445145 - RNA, 19 nt, Homo sapiens
  misc_RNA (1)...(19): siRNA sense strand
aaaagaaugugcaguggaa

SEQ ID NO: 2445146 - RNA, 19 nt, Homo sapiens
  misc_RNA (1)...(19): siRNA sense strand
acaaguuugcuaucagaaa

SEQ ID NO: 2445147 - RNA, 19 nt, Homo sapiens
  misc_RNA (1)...(19): siRNA sense strand
caaaaugaugaaagccaaa

SEQ ID NO: 2445148 - RNA, 19 nt, Homo sapiens
  misc_RNA (1)...(19): siRNA sense strand
ugaugaaacuuugggacau

SEQ ID NO: 2445149 - RNA, 19 nt, Homo sapiens
  misc_RNA (1)...(19): siRNA sense strand
aauugcaucuguagaagaa

SEQ ID NO: 2445150 - RNA, 19 nt, Homo sapiens
  misc_RNA (1)...(19): siRNA sense strand
cgucauccagagaaguaua

SEQ ID NO: 2445151 - RNA, 19 nt, Homo sapiens
  misc_RNA (1)...(19): siRNA sense strand
agauaugaagccuugcaaa

SEQ ID NO: 2445152 - RNA, 19 nt, Homo sapiens
  misc_RNA (1)...(19): siRNA sense strand
gauaugaagccuugcaaac

SEQ ID NO: 2445153 - RNA, 19 nt, Homo sapiens
  misc_RNA (1)...(19): siRNA sense strand
ucaccaaguuguccaaaga

SEQ ID NO: 2445154 - RNA, 19 nt, Homo sapiens
  misc_RNA (1)...(19): siRNA sense strand
ccaaguuguccaaagauga

SEQ ID NO: 2445155 - RNA, 19 nt, Homo sapiens
  misc_RNA (1)...(19): siRNA sense strand
cuucaaagaacaggugcua

SEQ ID NO: 2445156 - RNA, 19 nt, Homo sapiens
  misc_RNA (1)...(19): siRNA sense strand
caaucuggaauauggaaga

SEQ ID NO: 2445157 - RNA, 19 nt, Homo sapiens
  misc_RNA (1)...(19): siRNA sense strand
gaguauggugacugaaguu

SEQ ID NO: 2445158 - RNA, 19 nt, Homo sapiens
  misc_RNA (1)...(19): siRNA sense strand
gugaagguuugcagguguu

SEQ ID NO: 2445159 - RNA, 19 nt, Homo sapiens
  misc_RNA (1)...(19): siRNA sense strand
ucaaagaacaggugcuauc

SEQ ID NO: 2445160 - RNA, 19 nt, Homo sapiens
  misc_RNA (1)...(19): siRNA sense strand
gagacacgaaaucaagaaa

SEQ ID NO: 2445161 - RNA, 19 nt, Homo sapiens
  misc_RNA (1)...(19): siRNA sense strand
acauaugaccaaggaaauu

SEQ ID NO: 2445162 - RNA, 19 nt, Homo sapiens
  misc_RNA (1)...(19): siRNA sense strand
agagaaguauauggaagaa

SEQ ID NO: 2445163 - RNA, 19 nt, Homo sapiens
  misc_RNA (1)...(19): siRNA sense strand
gaacuacaguauuaagacu

SEQ ID NO: 2445164 - RNA, 19 nt, Homo sapiens
  misc_RNA (1)...(19): siRNA sense strand
caguggaaugcuuauauaa

SEQ ID NO: 2445165 - RNA, 19 nt, Homo sapiens
  misc_RNA (1)...(19): siRNA sense strand
aaaucaagaaaggcagaaa

SEQ ID NO: 2445166 - RNA, 19 nt, Homo sapiens
  misc_RNA (1)...(19): siRNA sense strand
agaaagaauuccuacucca

SEQ ID NO: 2445167 - RNA, 19 nt, Homo sapiens
  misc_RNA (1)...(19): siRNA sense strand
gaauaaaucuuguuggugg

SEQ ID NO: 2445168 - RNA, 19 nt, Homo sapiens
  misc_RNA (1)...(19): siRNA sense strand
acaagaaaugcugguauaa

SEQ ID NO: 2445169 - RNA, 19 nt, Homo sapiens
  misc_RNA (1)...(19): siRNA sense strand
agaaaaggaaagaggaaaa

SEQ ID NO: 2445170 - RNA, 19 nt, Homo sapiens
  misc_RNA (1)...(19): siRNA sense strand
uggauaaaggacagagaga

SEQ ID NO: 2445171 - RNA, 19 nt, Homo sapiens
  misc_RNA (1)...(19): siRNA sense strand
gaggaaaagaacagagaca

SEQ ID NO: 2445172 - RNA, 19 nt, Homo sapiens
  misc_RNA (1)...(19): siRNA sense strand
augaagagccuuuggcaga

SEQ ID NO: 2445173 - RNA, 19 nt, Homo sapiens
  misc_RNA (1)...(19): siRNA sense strand
agacaauggacucagaaaa

SEQ ID NO: 2445174 - RNA, 19 nt, Homo sapiens
  misc_RNA (1)...(19): siRNA sense strand
gaacagagacaauggacuc

SEQ ID NO: 2445175 - RNA, 19 nt, Homo sapiens
  misc_RNA (1)...(19): siRNA sense strand
gauaaaggacagagagacc

SEQ ID NO: 2445176 - RNA, 19 nt, Homo sapiens
  misc_RNA (1)...(19): siRNA sense strand
ggugaaagcuccagugagg

SEQ ID NO: 2445177 - RNA, 19 nt, Homo sapiens
  misc_RNA (1)...(19): siRNA sense strand
cgugcagacagaugaaauu

SEQ ID NO: 2445178 - RNA, 19 nt, Homo sapiens
  misc_RNA (1)...(19): siRNA sense strand
uuagaaaaggaaagaggaa

SEQ ID NO: 2445179 - RNA, 19 nt, Homo sapiens
  misc_RNA (1)...(19): siRNA sense strand
gcagaauugucaaaggaag

SEQ ID NO: 2445180 - RNA, 19 nt, Homo sapiens
  misc_RNA (1)...(19): siRNA sense strand
aaggaagaauugugcgcca

SEQ ID NO: 2445181 - RNA, 19 nt, Homo sapiens
  misc_RNA (1)...(19): siRNA sense strand
acuaacaaacacccggaaa

SEQ ID NO: 2445182 - RNA, 19 nt, Homo sapiens
  misc_RNA (1)...(19): siRNA sense strand
gugacauggauaaaggaca

SEQ ID NO: 2445183 - RNA, 19 nt, Homo sapiens
  misc_RNA (1)...(19): siRNA sense strand
gcuucaaguguuaccacaa

SEQ ID NO: 2445184 - RNA, 19 nt, Homo sapiens
  misc_RNA (1)...(19): siRNA sense strand
ggaaagaggaaaagaacag

SEQ ID NO: 2445185 - RNA, 19 nt, Homo sapiens
  misc_RNA (1)...(19): siRNA sense strand
ugacauggauaaaggacag

SEQ ID NO: 2445186 - RNA, 19 nt, Homo sapiens
  misc_RNA (1)...(19): siRNA sense strand
aggaagaauugugcgccaa

SEQ ID NO: 2445187 - RNA, 19 nt, Homo sapiens
  misc_RNA (1)...(19): siRNA sense strand
ugauugggucagagugaua

SEQ ID NO: 2445188 - RNA, 19 nt, Homo sapiens
  misc_RNA (1)...(19): siRNA sense strand
cgaucugagagccgggaua

SEQ ID NO: 2445189 - RNA, 19 nt, Homo sapiens
  misc_RNA (1)...(19): siRNA sense strand
aagcacaauucaaaggaga

SEQ ID NO: 2445190 - RNA, 19 nt, Homo sapiens
  misc_RNA (1)...(19): siRNA sense strand
cugcagaagcauucacaau

SEQ ID NO: 2445191 - RNA, 19 nt, Homo sapiens
  misc_RNA (1)...(19): siRNA sense strand
aagaauuaugacugggauu

SEQ ID NO: 2445192 - RNA, 19 nt, Homo sapiens
  misc_RNA (1)...(19): siRNA sense strand
ugauaguucccauggagaa

SEQ ID NO: 2445193 - RNA, 19 nt, Homo sapiens
  misc_RNA (1)...(19): siRNA sense strand
ugacagaugagaaggagga

SEQ ID NO: 2445194 - RNA, 19 nt, Homo sapiens
  misc_RNA (1)...(19): siRNA sense strand
ugugaugaucgaagcuaua

SEQ ID NO: 2445195 - RNA, 19 nt, Homo sapiens
  misc_RNA (1)...(19): siRNA sense strand
gcagccagaaggaggaaaa

SEQ ID NO: 2445196 - RNA, 19 nt, Homo sapiens
  misc_RNA (1)...(19): siRNA sense strand
cagccuuauuagaugguga

SEQ ID NO: 2445197 - RNA, 19 nt, Homo sapiens
  misc_RNA (1)...(19): siRNA sense strand
cagcaaaugagguguucca

SEQ ID NO: 2445198 - RNA, 19 nt, Homo sapiens
  misc_RNA (1)...(19): siRNA sense strand
aggaggugcugcuggacuu

SEQ ID NO: 2445199 - RNA, 19 nt, Homo sapiens
  misc_RNA (1)...(19): siRNA sense strand
ugauugugccagugugauu

SEQ ID NO: 2445200 - RNA, 19 nt, Homo sapiens
  misc_RNA (1)...(19): siRNA sense strand
cggcaucgagauuaagcua

SEQ ID NO: 2445201 - RNA, 19 nt, Homo sapiens
  misc_RNA (1)...(19): siRNA sense strand
ccuuauuaaacugguguaa

SEQ ID NO: 2445202 - RNA, 19 nt, Homo sapiens
  misc_RNA (1)...(19): siRNA sense strand
uaugaaguauggagcccaa

SEQ ID NO: 2445203 - RNA, 19 nt, Homo sapiens
  misc_RNA (1)...(19): siRNA sense strand
cuugauugggucagaguga

SEQ ID NO: 2445204 - RNA, 19 nt, Homo sapiens
  misc_RNA (1)...(19): siRNA sense strand
gggacacacaacacagcaa

SEQ ID NO: 2445205 - RNA, 19 nt, Homo sapiens
  misc_RNA (1)...(19): siRNA sense strand
aggagaaucaugcugaaau

SEQ ID NO: 2445206 - RNA, 19 nt, Homo sapiens
  misc_RNA (1)...(19): siRNA sense strand
gccgaaaugccuugcugaa

SEQ ID NO: 2445207 - RNA, 19 nt, Homo sapiens
  misc_RNA (1)...(19): siRNA sense strand
cugaaaucaugcaggcugu

SEQ ID NO: 2445208 - RNA, 19 nt, Homo sapiens
  misc_RNA (1)...(19): siRNA sense strand
cagaugagaaggaggaggu

SEQ ID NO: 2445209 - RNA, 19 nt, Homo sapiens
  misc_RNA (1)...(19): siRNA sense strand
gcucauaccagaagaaaac

SEQ ID NO: 2445210 - RNA, 19 nt, Homo sapiens
  misc_RNA (1)...(19): siRNA sense strand
aggugaugcuccuggaaga

SEQ ID NO: 2445211 - RNA, 19 nt, Homo sapiens
  misc_RNA (1)...(19): siRNA sense strand
caaggaaauuugagaggcu

SEQ ID NO: 2445212 - RNA, 19 nt, Homo sapiens
  misc_RNA (1)...(19): siRNA sense strand
acaaauguuacgugagcuu

SEQ ID NO: 2445213 - RNA, 19 nt, Homo sapiens
  misc_RNA (1)...(19): siRNA sense strand
agaaugagucagagcccau

SEQ ID NO: 2445214 - RNA, 19 nt, Homo sapiens
  misc_RNA (1)...(19): siRNA sense strand
ggucuacguuauagccaga

SEQ ID NO: 2445215 - RNA, 19 nt, Homo sapiens
  misc_RNA (1)...(19): siRNA sense strand
gggccauguugcagcucau

SEQ ID NO: 2445216 - RNA, 19 nt, Homo sapiens
  misc_RNA (1)...(19): siRNA sense strand
caauagagccaggggauau

SEQ ID NO: 2445217 - RNA, 19 nt, Homo sapiens
  misc_RNA (1)...(19): siRNA sense strand
ggccaugccaauagagcca

SEQ ID NO: 2445218 - RNA, 19 nt, Homo sapiens
  misc_RNA (1)...(19): siRNA sense strand
ccaauagagccaggggaua

SEQ ID NO: 2445219 - RNA, 19 nt, Homo sapiens
  misc_RNA (1)...(19): siRNA sense strand
aagagaaagaggaggaaga

SEQ ID NO: 2445220 - RNA, 19 nt, Homo sapiens
  misc_RNA (1)...(19): siRNA sense strand
aggaagaagaagaggagga

SEQ ID NO: 2445221 - RNA, 19 nt, Homo sapiens
  misc_RNA (1)...(19): siRNA sense strand
cuguggaggucaaggucaa

SEQ ID NO: 2445222 - RNA, 19 nt, Homo sapiens
  misc_RNA (1)...(19): siRNA sense strand
cugaagaccuaaauggaga

SEQ ID NO: 2445223 - RNA, 19 nt, Homo sapiens
  misc_RNA (1)...(19): siRNA sense strand
aagaagagaaagaggagga

SEQ ID NO: 2445224 - RNA, 19 nt, Homo sapiens
  misc_RNA (1)...(19): siRNA sense strand
aggcauuggaggaagaaga

SEQ ID NO: 2445225 - RNA, 19 nt, Homo sapiens
  misc_RNA (1)...(19): siRNA sense strand
aagaagaggaggaggugga

SEQ ID NO: 2445226 - RNA, 19 nt, Homo sapiens
  misc_RNA (1)...(19): siRNA sense strand
cauuggaggaagaagagaa

SEQ ID NO: 2445227 - RNA, 19 nt, Homo sapiens
  misc_RNA (1)...(19): siRNA sense strand
augaagaugaagaagagaa

SEQ ID NO: 2445228 - RNA, 19 nt, Homo sapiens
  misc_RNA (1)...(19): siRNA sense strand
ugacagagacccuggagga

SEQ ID NO: 2445229 - RNA, 19 nt, Homo sapiens
  misc_RNA (1)...(19): siRNA sense strand
aagaggaggaagaagaaga

SEQ ID NO: 2445230 - RNA, 19 nt, Homo sapiens
  misc_RNA (1)...(19): siRNA sense strand
aagaagaagaggaggaggu

SEQ ID NO: 2445231 - RNA, 19 nt, Homo sapiens
  misc_RNA (1)...(19): siRNA sense strand
auuggaggaagaagagaaa

SEQ ID NO: 2445232 - RNA, 19 nt, Homo sapiens
  misc_RNA (1)...(19): siRNA sense strand
agguaaggcauuggaggaa

SEQ ID NO: 2445233 - RNA, 19 nt, Homo sapiens
  misc_RNA (1)...(19): siRNA sense strand
aggaagccacagagaguga

SEQ ID NO: 2445234 - RNA, 19 nt, Homo sapiens
  misc_RNA (1)...(19): siRNA sense strand
aagaggaagguaaggcauu

SEQ ID NO: 2445235 - RNA, 19 nt, Homo sapiens
  misc_RNA (1)...(19): siRNA sense strand
acggagacauggauggcuu

SEQ ID NO: 2445236 - RNA, 19 nt, Homo sapiens
  misc_RNA (1)...(19): siRNA sense strand
ucaaggugaacgaggccua

SEQ ID NO: 2445237 - RNA, 19 nt, Homo sapiens
  misc_RNA (1)...(19): siRNA sense strand
aagaggaggagguggagga

SEQ ID NO: 2445238 - RNA, 19 nt, Homo sapiens
  misc_RNA (1)...(19): siRNA sense strand
ggaacuaugguguggugga

SEQ ID NO: 2445239 - RNA, 19 nt, Homo sapiens
  misc_RNA (1)...(19): siRNA sense strand
gaugaggcucugugggcau

SEQ ID NO: 2445240 - RNA, 19 nt, Homo sapiens
  misc_RNA (1)...(19): siRNA sense strand
ggacuagaggcuaucguca

SEQ ID NO: 2445241 - RNA, 19 nt, Homo sapiens
  misc_RNA (1)...(19): siRNA sense strand
aggaggaagaagaagagga

SEQ ID NO: 2445242 - RNA, 19 nt, Homo sapiens
  misc_RNA (1)...(19): siRNA sense strand
uccuagaauuugaaacaca

SEQ ID NO: 2445243 - RNA, 19 nt, Homo sapiens
  misc_RNA (1)...(19): siRNA sense strand
augaagaagagaaagagga

SEQ ID NO: 2445244 - RNA, 19 nt, Homo sapiens
  misc_RNA (1)...(19): siRNA sense strand
ccucaggaagccacagaga

SEQ ID NO: 2445245 - RNA, 19 nt, Homo sapiens
  misc_RNA (1)...(19): siRNA sense strand
gaagaggaagguaaggcau

SEQ ID NO: 2445246 - RNA, 19 nt, Homo sapiens
  misc_RNA (1)...(19): siRNA sense strand
aagagaaagaggaggaaga

SEQ ID NO: 2445247 - RNA, 19 nt, Homo sapiens
  misc_RNA (1)...(19): siRNA sense strand
aggaagaagaagaggagga

SEQ ID NO: 2445248 - RNA, 19 nt, Homo sapiens
  misc_RNA (1)...(19): siRNA sense strand
cuguggaggucaaggucaa

SEQ ID NO: 2445249 - RNA, 19 nt, Homo sapiens
  misc_RNA (1)...(19): siRNA sense strand
cugaagaccuaaauggaga

SEQ ID NO: 2445250 - RNA, 19 nt, Homo sapiens
  misc_RNA (1)...(19): siRNA sense strand
aagaagagaaagaggagga

SEQ ID NO: 2445251 - RNA, 19 nt, Homo sapiens
  misc_RNA (1)...(19): siRNA sense strand
aggcauuggaggaagaaga

SEQ ID NO: 2445252 - RNA, 19 nt, Homo sapiens
  misc_RNA (1)...(19): siRNA sense strand
aagaagaggaggaggugga

SEQ ID NO: 2445253 - RNA, 19 nt, Homo sapiens
  misc_RNA (1)...(19): siRNA sense strand
cauuggaggaagaagagaa

SEQ ID NO: 2445254 - RNA, 19 nt, Homo sapiens
  misc_RNA (1)...(19): siRNA sense strand
augaagaugaagaagagaa

SEQ ID NO: 2445255 - RNA, 19 nt, Homo sapiens
  misc_RNA (1)...(19): siRNA sense strand
ugacagagacccuggagga

SEQ ID NO: 2445256 - RNA, 19 nt, Homo sapiens
  misc_RNA (1)...(19): siRNA sense strand
aagaggaggaagaagaaga

SEQ ID NO: 2445257 - RNA, 19 nt, Homo sapiens
  misc_RNA (1)...(19): siRNA sense strand
aagaagaagaggaggaggu

SEQ ID NO: 2445258 - RNA, 19 nt, Homo sapiens
  misc_RNA (1)...(19): siRNA sense strand
auuggaggaagaagagaaa

SEQ ID NO: 2445259 - RNA, 19 nt, Homo sapiens
  misc_RNA (1)...(19): siRNA sense strand
agguaaggcauuggaggaa

SEQ ID NO: 2445260 - RNA, 19 nt, Homo sapiens
  misc_RNA (1)...(19): siRNA sense strand
aggaagccacagagaguga

SEQ ID NO: 2445261 - RNA, 19 nt, Homo sapiens
  misc_RNA (1)...(19): siRNA sense strand
aagaggaagguaaggcauu

SEQ ID NO: 2445262 - RNA, 19 nt, Homo sapiens
  misc_RNA (1)...(19): siRNA sense strand
acggagacauggauggcuu

SEQ ID NO: 2445263 - RNA, 19 nt, Homo sapiens
  misc_RNA (1)...(19): siRNA sense strand
ucaaggugaacgaggccua

SEQ ID NO: 2445264 - RNA, 19 nt, Homo sapiens
  misc_RNA (1)...(19): siRNA sense strand
aagaggaggagguggagga

SEQ ID NO: 2445265 - RNA, 19 nt, Homo sapiens
  misc_RNA (1)...(19): siRNA sense strand
ggaacuaugguguggugga

SEQ ID NO: 2445266 - RNA, 19 nt, Homo sapiens
  misc_RNA (1)...(19): siRNA sense strand
gaugaggcucugugggcau

SEQ ID NO: 2445267 - RNA, 19 nt, Homo sapiens
  misc_RNA (1)...(19): siRNA sense strand
ggacuagaggcuaucguca

SEQ ID NO: 2445268 - RNA, 19 nt, Homo sapiens
  misc_RNA (1)...(19): siRNA sense strand
aggaggaagaagaagagga

SEQ ID NO: 2445269 - RNA, 19 nt, Homo sapiens
  misc_RNA (1)...(19): siRNA sense strand
uccuagaauuugaaacaca

SEQ ID NO: 2445270 - RNA, 19 nt, Homo sapiens
  misc_RNA (1)...(19): siRNA sense strand
augaagaagagaaagagga

SEQ ID NO: 2445271 - RNA, 19 nt, Homo sapiens
  misc_RNA (1)...(19): siRNA sense strand
ccucaggaagccacagaga

SEQ ID NO: 2445272 - RNA, 19 nt, Homo sapiens
  misc_RNA (1)...(19): siRNA sense strand
gaagaggaagguaaggcau

SEQ ID NO: 2445273 - RNA, 19 nt, Homo sapiens
  misc_RNA (1)...(19): siRNA sense strand
ggacaaagggugaugagga

SEQ ID NO: 2445274 - RNA, 19 nt, Homo sapiens
  misc_RNA (1)...(19): siRNA sense strand
agauagaacagaagagcuu

SEQ ID NO: 2445275 - RNA, 19 nt, Homo sapiens
  misc_RNA (1)...(19): siRNA sense strand
agaucauuauugaggcaaa

SEQ ID NO: 2445276 - RNA, 19 nt, Homo sapiens
  misc_RNA (1)...(19): siRNA sense strand
caggaguaagguagauaaa

SEQ ID NO: 2445277 - RNA, 19 nt, Homo sapiens
  misc_RNA (1)...(19): siRNA sense strand
ggaaguaucucauggucca

SEQ ID NO: 2445278 - RNA, 19 nt, Homo sapiens
  misc_RNA (1)...(19): siRNA sense strand
caaagaacuggcugggcua

SEQ ID NO: 2445279 - RNA, 19 nt, Homo sapiens
  misc_RNA (1)...(19): siRNA sense strand
ucgcaaauucgauggaaga

SEQ ID NO: 2445280 - RNA, 19 nt, Homo sapiens
  misc_RNA (1)...(19): siRNA sense strand
uagaagaggcaguaagcau

SEQ ID NO: 2445281 - RNA, 19 nt, Homo sapiens
  misc_RNA (1)...(19): siRNA sense strand
ugaagaggacacugagcaa

SEQ ID NO: 2445282 - RNA, 19 nt, Homo sapiens
  misc_RNA (1)...(19): siRNA sense strand
augucaaucugguggaaga

SEQ ID NO: 2445283 - RNA, 19 nt, Homo sapiens
  misc_RNA (1)...(19): siRNA sense strand
cagcuaaagagccgaaaca

SEQ ID NO: 2445284 - RNA, 19 nt, Homo sapiens
  misc_RNA (1)...(19): siRNA sense strand
aguauagggauuacagcaa

SEQ ID NO: 2445285 - RNA, 19 nt, Homo sapiens
  misc_RNA (1)...(19): siRNA sense strand
uaagcaugcaugauggaaa

SEQ ID NO: 2445286 - RNA, 19 nt, Homo sapiens
  misc_RNA (1)...(19): siRNA sense strand
aggaaauaggggaucaaaa

SEQ ID NO: 2445287 - RNA, 19 nt, Homo sapiens
  misc_RNA (1)...(19): siRNA sense strand
agggugaugaggaggagua

SEQ ID NO: 2445288 - RNA, 19 nt, Homo sapiens
  misc_RNA (1)...(19): siRNA sense strand
ccgcacacauacaggacca

SEQ ID NO: 2445289 - RNA, 19 nt, Homo sapiens
  misc_RNA (1)...(19): siRNA sense strand
agauauuacaggaguaugu

SEQ ID NO: 2445290 - RNA, 19 nt, Homo sapiens
  misc_RNA (1)...(19): siRNA sense strand
augaugaccuggagcgagu

SEQ ID NO: 2445291 - RNA, 19 nt, Homo sapiens
  misc_RNA (1)...(19): siRNA sense strand
ugcagauauuacaggagua

SEQ ID NO: 2445292 - RNA, 19 nt, Homo sapiens
  misc_RNA (1)...(19): siRNA sense strand
cuucagguuccuagauaga

SEQ ID NO: 2445293 - RNA, 19 nt, Homo sapiens
  misc_RNA (1)...(19): siRNA sense strand
aggagaagauugaugcucu

SEQ ID NO: 2445294 - RNA, 19 nt, Homo sapiens
  misc_RNA (1)...(19): siRNA sense strand
uugcuagcauacaggagua

SEQ ID NO: 2445295 - RNA, 19 nt, Homo sapiens
  misc_RNA (1)...(19): siRNA sense strand
ccuuaaggaaauaggggau

SEQ ID NO: 2445296 - RNA, 19 nt, Homo sapiens
  misc_RNA (1)...(19): siRNA sense strand
gaaugauguagaugcccua

SEQ ID NO: 2445297 - RNA, 19 nt, Homo sapiens
  misc_RNA (1)...(19): siRNA sense strand
gcauacaggaguaagguag

SEQ ID NO: 2445298 - RNA, 19 nt, Homo sapiens
  misc_RNA (1)...(19): siRNA sense strand
gcacaacuacccaagccua

SEQ ID NO: 2445299 - RNA, 19 nt, Homo sapiens
  misc_RNA (1)...(19): siRNA sense strand
cuggaacgucagaucauua

SEQ ID NO: 2445300 - RNA, 19 nt, Homo sapiens
  misc_RNA (1)...(19): siRNA sense strand
uguuugacgcagagggaua

SEQ ID NO: 2445301 - RNA, 19 nt, Homo sapiens
  misc_RNA (1)...(19): siRNA sense strand
acgcagagggauaugugaa

SEQ ID NO: 2445302 - RNA, 19 nt, Homo sapiens
  misc_RNA (1)...(19): siRNA sense strand
uugcauugacauugugauu

SEQ ID NO: 2445303 - RNA, 19 nt, Homo sapiens
  misc_RNA (1)...(19): siRNA sense strand
ggauugugucuguggccuu

SEQ ID NO: 2445304 - RNA, 19 nt, Homo sapiens
  misc_RNA (1)...(19): siRNA sense strand
gcauugagcugucugagga

SEQ ID NO: 2445305 - RNA, 19 nt, Homo sapiens
  misc_RNA (1)...(19): siRNA sense strand
ccagacacuuccaggagca

SEQ ID NO: 2445306 - RNA, 19 nt, Homo sapiens
  misc_RNA (1)...(19): siRNA sense strand
aggaugagguggaggagga

SEQ ID NO: 2445307 - RNA, 19 nt, Homo sapiens
  misc_RNA (1)...(19): siRNA sense strand
agguggaggaggagaguga

SEQ ID NO: 2445308 - RNA, 19 nt, Homo sapiens
  misc_RNA (1)...(19): siRNA sense strand
ccacuaaucuucuggcuga

SEQ ID NO: 2445309 - RNA, 19 nt, Homo sapiens
  misc_RNA (1)...(19): siRNA sense strand
gagccgaggaugaggugga

SEQ ID NO: 2445310 - RNA, 19 nt, Homo sapiens
  misc_RNA (1)...(19): siRNA sense strand
guggaggaggagagugaca

SEQ ID NO: 2445311 - RNA, 19 nt, Homo sapiens
  misc_RNA (1)...(19): siRNA sense strand
ccgaggaugagguggagga

SEQ ID NO: 2445312 - RNA, 19 nt, Homo sapiens
  misc_RNA (1)...(19): siRNA sense strand
ggaccggaucaaaggcuca

SEQ ID NO: 2445313 - RNA, 19 nt, Homo sapiens
  misc_RNA (1)...(19): siRNA sense strand
cgggaaaugcauucggcaa

SEQ ID NO: 2445314 - RNA, 19 nt, Homo sapiens
  misc_RNA (1)...(19): siRNA sense strand
cuggagaacuguuuggaca

SEQ ID NO: 2445315 - RNA, 19 nt, Homo sapiens
  misc_RNA (1)...(19): siRNA sense strand
cagagaacaucuugggugu

SEQ ID NO: 2445316 - RNA, 19 nt, Homo sapiens
  misc_RNA (1)...(19): siRNA sense strand
aggcuaacgccgaguucaa

SEQ ID NO: 2445317 - RNA, 19 nt, Homo sapiens
  misc_RNA (1)...(19): siRNA sense strand
caacauggaauauggcaga

SEQ ID NO: 2445318 - RNA, 19 nt, Homo sapiens
  misc_RNA (1)...(19): siRNA sense strand
ccguggacccugaggacuu

SEQ ID NO: 2445319 - RNA, 19 nt, Homo sapiens
  misc_RNA (1)...(19): siRNA sense strand
gauccugggucgugggaac

SEQ ID NO: 2445320 - RNA, 19 nt, Homo sapiens
  misc_RNA (1)...(19): siRNA sense strand
ccauacagaugcuggccca

SEQ ID NO: 2445321 - RNA, 19 nt, Homo sapiens
  misc_RNA (1)...(19): siRNA sense strand
augcauucggcaagaagua

SEQ ID NO: 2445322 - RNA, 19 nt, Homo sapiens
  misc_RNA (1)...(19): siRNA sense strand
cgguacacgggcaaggcua

SEQ ID NO: 2445323 - RNA, 19 nt, Homo sapiens
  misc_RNA (1)...(19): siRNA sense strand
gggaaaugcauucggcaag

SEQ ID NO: 2445324 - RNA, 19 nt, Homo sapiens
  misc_RNA (1)...(19): siRNA sense strand
auggaauauggcagaaauu

SEQ ID NO: 2445325 - RNA, 19 nt, Homo sapiens
  misc_RNA (1)...(19): siRNA sense strand
ccuuugagacagcagagaa

SEQ ID NO: 2445326 - RNA, 19 nt, Homo sapiens
  misc_RNA (1)...(19): siRNA sense strand
ucgucaucaacauggaaua

SEQ ID NO: 2445327 - RNA, 19 nt, Homo sapiens
  misc_RNA (1)...(19): siRNA sense strand
ugaaggacagcaaaggcaa

SEQ ID NO: 2445328 - RNA, 19 nt, Homo sapiens
  misc_RNA (1)...(19): siRNA sense strand
gaaugaggcuucugggcuc

SEQ ID NO: 2445329 - RNA, 19 nt, Homo sapiens
  misc_RNA (1)...(19): siRNA sense strand
cuggcaagguaguggugau

SEQ ID NO: 2445330 - RNA, 19 nt, Homo sapiens
  misc_RNA (1)...(19): siRNA sense strand
cuaggaauccggugggagu

SEQ ID NO: 2445331 - RNA, 19 nt, Homo sapiens
  misc_RNA (1)...(19): siRNA sense strand
gagucugcugccagugaaa

SEQ ID NO: 2445332 - RNA, 19 nt, Homo sapiens
  misc_RNA (1)...(19): siRNA sense strand
gagucaaccaccugggcca

SEQ ID NO: 2445333 - RNA, 19 nt, Homo sapiens
  misc_RNA (1)...(19): siRNA sense strand
ccaagacagcugauggcuu

SEQ ID NO: 2445334 - RNA, 19 nt, Homo sapiens
  misc_RNA (1)...(19): siRNA sense strand
ucgagaaaugcgaggcaaa

SEQ ID NO: 2445335 - RNA, 19 nt, Homo sapiens
  misc_RNA (1)...(19): siRNA sense strand
ccauggagaaggaggaaaa

SEQ ID NO: 2445336 - RNA, 19 nt, Homo sapiens
  misc_RNA (1)...(19): siRNA sense strand
gugcgaaggaggaggagau

SEQ ID NO: 2445337 - RNA, 19 nt, Homo sapiens
  misc_RNA (1)...(19): siRNA sense strand
gaguggugcugguggaaaa

SEQ ID NO: 2445338 - RNA, 19 nt, Homo sapiens
  misc_RNA (1)...(19): siRNA sense strand
acuaaagguggcagagaau

SEQ ID NO: 2445339 - RNA, 19 nt, Homo sapiens
  misc_RNA (1)...(19): siRNA sense strand
cccuagagguguuggcuga

SEQ ID NO: 2445340 - RNA, 19 nt, Homo sapiens
  misc_RNA (1)...(19): siRNA sense strand
gcuuggagauggaggccga

SEQ ID NO: 2445341 - RNA, 19 nt, Homo sapiens
  misc_RNA (1)...(19): siRNA sense strand
gcaaaagaaacuaugggua

SEQ ID NO: 2445342 - RNA, 19 nt, Homo sapiens
  misc_RNA (1)...(19): siRNA sense strand
agaucaaggaccagcucaa

SEQ ID NO: 2445343 - RNA, 19 nt, Homo sapiens
  misc_RNA (1)...(19): siRNA sense strand
gugcagaggaacaacgaca

SEQ ID NO: 2445344 - RNA, 19 nt, Homo sapiens
  misc_RNA (1)...(19): siRNA sense strand
ggaucuacaaccagagcuu

SEQ ID NO: 2445345 - RNA, 19 nt, Homo sapiens
  misc_RNA (1)...(19): siRNA sense strand
gcaccguggaggagacaca

SEQ ID NO: 2445346 - RNA, 19 nt, Homo sapiens
  misc_RNA (1)...(19): siRNA sense strand
cagaaaacaugcaucgcaa

SEQ ID NO: 2445347 - RNA, 19 nt, Homo sapiens
  misc_RNA (1)...(19): siRNA sense strand
gagccugugcagaggaaca

SEQ ID NO: 2445348 - RNA, 19 nt, Homo sapiens
  misc_RNA (1)...(19): siRNA sense strand
cagagaaugagcugggcau

SEQ ID NO: 2445349 - RNA, 19 nt, Homo sapiens
  misc_RNA (1)...(19): siRNA sense strand
gggcacuaaagguggcaga

SEQ ID NO: 2445350 - RNA, 19 nt, Homo sapiens
  misc_RNA (1)...(19): siRNA sense strand
ugagggagcuagaggccga

SEQ ID NO: 2445351 - RNA, 19 nt, Homo sapiens
  misc_RNA (1)...(19): siRNA sense strand
caagacagauacagggaug

SEQ ID NO: 2445352 - RNA, 19 nt, Homo sapiens
  misc_RNA (1)...(19): siRNA sense strand
acaugaaccgggaagaaaa

SEQ ID NO: 2445353 - RNA, 19 nt, Homo sapiens
  misc_RNA (1)...(19): siRNA sense strand
gcuucaaaguucgagaaau

SEQ ID NO: 2445354 - RNA, 19 nt, Homo sapiens
  misc_RNA (1)...(19): siRNA sense strand
agguguuggcugagcguga

SEQ ID NO: 2445355 - RNA, 19 nt, Homo sapiens
  misc_RNA (1)...(19): siRNA sense strand
gaggagaugaagagguucu

SEQ ID NO: 2445356 - RNA, 19 nt, Homo sapiens
  misc_RNA (1)...(19): siRNA sense strand
ugaaucuggaggagaaaca

SEQ ID NO: 2445357 - RNA, 19 nt, Homo sapiens
  misc_RNA (1)...(19): siRNA sense strand
cccaguaccacaagaucaa

SEQ ID NO: 2445358 - RNA, 19 nt, Homo sapiens
  misc_RNA (1)...(19): siRNA sense strand
gcacccaggagauggacau

SEQ ID NO: 2445359 - RNA, 19 nt, Homo sapiens
  misc_RNA (1)...(19): siRNA sense strand
ugcuacagcucguugacaa

SEQ ID NO: 2445360 - RNA, 19 nt, Homo sapiens
  misc_RNA (1)...(19): siRNA sense strand
aggaauugaaucuggagga

SEQ ID NO: 2445361 - RNA, 19 nt, Homo sapiens
  misc_RNA (1)...(19): siRNA sense strand
ggaagaagaagaugugccu

SEQ ID NO: 2445362 - RNA, 19 nt, Homo sapiens
  misc_RNA (1)...(19): siRNA sense strand
gagguaaauucgucccuga

SEQ ID NO: 2445363 - RNA, 19 nt, Homo sapiens
  misc_RNA (1)...(19): siRNA sense strand
gaugcagccuggaugguga

SEQ ID NO: 2445364 - RNA, 19 nt, Homo sapiens
  misc_RNA (1)...(19): siRNA sense strand
ccuuugacuucacgagcau

SEQ ID NO: 2445365 - RNA, 19 nt, Homo sapiens
  misc_RNA (1)...(19): siRNA sense strand
cuccugggcugaugggcua

SEQ ID NO: 2445366 - RNA, 19 nt, Homo sapiens
  misc_RNA (1)...(19): siRNA sense strand
agaugaagagguucugcaa

SEQ ID NO: 2445367 - RNA, 19 nt, Homo sapiens
  misc_RNA (1)...(19): siRNA sense strand
accacaagaucaaggacca

SEQ ID NO: 2445368 - RNA, 19 nt, Homo sapiens
  misc_RNA (1)...(19): siRNA sense strand
ugauaaaggaagagagcga

SEQ ID NO: 2445369 - RNA, 19 nt, Homo sapiens
  misc_RNA (1)...(19): siRNA sense strand
aggaagaaaucgagaucca

SEQ ID NO: 2445370 - RNA, 19 nt, Homo sapiens
  misc_RNA (1)...(19): siRNA sense strand
agaucaagacacaggcaua

SEQ ID NO: 2445371 - RNA, 19 nt, Homo sapiens
  misc_RNA (1)...(19): siRNA sense strand
acgcaaagaaagaaaguca

SEQ ID NO: 2445372 - RNA, 19 nt, Homo sapiens
  misc_RNA (1)...(19): siRNA sense strand
aggaguaggacaaggagua

SEQ ID NO: 2445373 - RNA, 19 nt, Homo sapiens
  misc_RNA (1)...(19): siRNA sense strand
aggcacaaacgcaaagaaa

SEQ ID NO: 2445374 - RNA, 19 nt, Homo sapiens
  misc_RNA (1)...(19): siRNA sense strand
cggaagaagucucgaucca

SEQ ID NO: 2445375 - RNA, 19 nt, Homo sapiens
  misc_RNA (1)...(19): siRNA sense strand
aggcauaggacuagaagca

SEQ ID NO: 2445376 - RNA, 19 nt, Homo sapiens
  misc_RNA (1)...(19): siRNA sense strand
ccagaagcagagagaggaa

SEQ ID NO: 2445377 - RNA, 19 nt, Homo sapiens
  misc_RNA (1)...(19): siRNA sense strand
agaagcaggaguaggacaa

SEQ ID NO: 2445378 - RNA, 19 nt, Homo sapiens
  misc_RNA (1)...(19): siRNA sense strand
ccagauagagauaagaaaa

SEQ ID NO: 2445379 - RNA, 19 nt, Homo sapiens
  misc_RNA (1)...(19): siRNA sense strand
aggacuagaagcaggagua

SEQ ID NO: 2445380 - RNA, 19 nt, Homo sapiens
  misc_RNA (1)...(19): siRNA sense strand
ggguauuaagagugaagau

SEQ ID NO: 2445381 - RNA, 19 nt, Homo sapiens
  misc_RNA (1)...(19): siRNA sense strand
agauccagaagcagggaaa

SEQ ID NO: 2445382 - RNA, 19 nt, Homo sapiens
  misc_RNA (1)...(19): siRNA sense strand
cuucagaggcagaaacaca

SEQ ID NO: 2445383 - RNA, 19 nt, Homo sapiens
  misc_RNA (1)...(19): siRNA sense strand
gagccggagcagaagcaaa

SEQ ID NO: 2445384 - RNA, 19 nt, Homo sapiens
  misc_RNA (1)...(19): siRNA sense strand
aggaagagagcgacuaaau

SEQ ID NO: 2445385 - RNA, 19 nt, Homo sapiens
  misc_RNA (1)...(19): siRNA sense strand
acaaacgcaaagaaagaaa

SEQ ID NO: 2445386 - RNA, 19 nt, Homo sapiens
  misc_RNA (1)...(19): siRNA sense strand
agaaagucaucaagaggca

SEQ ID NO: 2445387 - RNA, 19 nt, Homo sapiens
  misc_RNA (1)...(19): siRNA sense strand
agaaagaaaacgaaaguca

SEQ ID NO: 2445388 - RNA, 19 nt, Homo sapiens
  misc_RNA (1)...(19): siRNA sense strand
cagauaaugaaggaagaaa

SEQ ID NO: 2445389 - RNA, 19 nt, Homo sapiens
  misc_RNA (1)...(19): siRNA sense strand
aacauaagucugaggaaca

SEQ ID NO: 2445390 - RNA, 19 nt, Homo sapiens
  misc_RNA (1)...(19): siRNA sense strand
guagaagcagggagcggaa

SEQ ID NO: 2445391 - RNA, 19 nt, Homo sapiens
  misc_RNA (1)...(19): siRNA sense strand
aggaguagggagcggaaga

SEQ ID NO: 2445392 - RNA, 19 nt, Homo sapiens
  misc_RNA (1)...(19): siRNA sense strand
uuuaggaaauugaugggua

SEQ ID NO: 2445393 - RNA, 19 nt, Homo sapiens
  misc_RNA (1)...(19): siRNA sense strand
cugaggaacauaaugacaa

SEQ ID NO: 2445394 - RNA, 19 nt, Homo sapiens
  misc_RNA (1)...(19): siRNA sense strand
gucagauaaugaaggaaga

SEQ ID NO: 2445395 - RNA, 19 nt, Homo sapiens
  misc_RNA (1)...(19): siRNA sense strand
agaagcagagagaggaaga

SEQ ID NO: 2445396 - RNA, 19 nt, Homo sapiens
  misc_RNA (1)...(19): siRNA sense strand
gagugaagaugaagcugga

SEQ ID NO: 2445397 - RNA, 19 nt, Homo sapiens
  misc_RNA (1)...(19): siRNA sense strand
gcucaguaugaaauggcaa

SEQ ID NO: 2445398 - RNA, 19 nt, Homo sapiens
  misc_RNA (1)...(19): siRNA sense strand
cacaaagaggaauggguuu

SEQ ID NO: 2445399 - RNA, 19 nt, Homo sapiens
  misc_RNA (1)...(19): siRNA sense strand
agaaaacgaaagucagaua

SEQ ID NO: 2445400 - RNA, 19 nt, Homo sapiens
  misc_RNA (1)...(19): siRNA sense strand
aguagggagcggaagaaau

SEQ ID NO: 2445401 - RNA, 19 nt, Homo sapiens
  misc_RNA (1)...(19): siRNA sense strand
aagcagagagaggaagaaa

SEQ ID NO: 2445402 - RNA, 19 nt, Homo sapiens
  misc_RNA (1)...(19): siRNA sense strand
cgcucaagaucaagacaca

SEQ ID NO: 2445403 - RNA, 19 nt, Homo sapiens
  misc_RNA (1)...(19): siRNA sense strand
gcaagaaagaaggggacaa

SEQ ID NO: 2445404 - RNA, 19 nt, Homo sapiens
  misc_RNA (1)...(19): siRNA sense strand
gaagaaaguuacaagacuc

SEQ ID NO: 2445405 - RNA, 19 nt, Homo sapiens
  misc_RNA (1)...(19): siRNA sense strand
ggcuagugauacagagcga

SEQ ID NO: 2445406 - RNA, 19 nt, Homo sapiens
  misc_RNA (1)...(19): siRNA sense strand
acacaaagaggaauggguu

SEQ ID NO: 2445407 - RNA, 19 nt, Homo sapiens
  misc_RNA (1)...(19): siRNA sense strand
uuggaaagggcaaagaaau

SEQ ID NO: 2445408 - RNA, 19 nt, Homo sapiens
  misc_RNA (1)...(19): siRNA sense strand
acuagaagcaggaguagga

SEQ ID NO: 2445409 - RNA, 19 nt, Homo sapiens
  misc_RNA (1)...(19): siRNA sense strand
ugauaaaggaagagagcga

SEQ ID NO: 2445410 - RNA, 19 nt, Homo sapiens
  misc_RNA (1)...(19): siRNA sense strand
aggaagaaaucgagaucca

SEQ ID NO: 2445411 - RNA, 19 nt, Homo sapiens
  misc_RNA (1)...(19): siRNA sense strand
agaucaagacacaggcaua

SEQ ID NO: 2445412 - RNA, 19 nt, Homo sapiens
  misc_RNA (1)...(19): siRNA sense strand
acgcaaagaaagaaaguca

SEQ ID NO: 2445413 - RNA, 19 nt, Homo sapiens
  misc_RNA (1)...(19): siRNA sense strand
aggaguaggacaaggagua

SEQ ID NO: 2445414 - RNA, 19 nt, Homo sapiens
  misc_RNA (1)...(19): siRNA sense strand
aggcacaaacgcaaagaaa

SEQ ID NO: 2445415 - RNA, 19 nt, Homo sapiens
  misc_RNA (1)...(19): siRNA sense strand
cggaagaagucucgaucca

SEQ ID NO: 2445416 - RNA, 19 nt, Homo sapiens
  misc_RNA (1)...(19): siRNA sense strand
aggcauaggacuagaagca

SEQ ID NO: 2445417 - RNA, 19 nt, Homo sapiens
  misc_RNA (1)...(19): siRNA sense strand
ccagaagcagagagaggaa

SEQ ID NO: 2445418 - RNA, 19 nt, Homo sapiens
  misc_RNA (1)...(19): siRNA sense strand
agaagcaggaguaggacaa

SEQ ID NO: 2445419 - RNA, 19 nt, Homo sapiens
  misc_RNA (1)...(19): siRNA sense strand
aggacuagaagcaggagua

SEQ ID NO: 2445420 - RNA, 19 nt, Homo sapiens
  misc_RNA (1)...(19): siRNA sense strand
ggguauuaagagugaagau

SEQ ID NO: 2445421 - RNA, 19 nt, Homo sapiens
  misc_RNA (1)...(19): siRNA sense strand
agauccagaagcagggaaa

SEQ ID NO: 2445422 - RNA, 19 nt, Homo sapiens
  misc_RNA (1)...(19): siRNA sense strand
cuucagaggcagaaacaca

SEQ ID NO: 2445423 - RNA, 19 nt, Homo sapiens
  misc_RNA (1)...(19): siRNA sense strand
aggaagagagcgacuaaau

SEQ ID NO: 2445424 - RNA, 19 nt, Homo sapiens
  misc_RNA (1)...(19): siRNA sense strand
acaaacgcaaagaaagaaa

SEQ ID NO: 2445425 - RNA, 19 nt, Homo sapiens
  misc_RNA (1)...(19): siRNA sense strand
agaaagucaucaagaggca

SEQ ID NO: 2445426 - RNA, 19 nt, Homo sapiens
  misc_RNA (1)...(19): siRNA sense strand
aacauaagucugaggaaca

SEQ ID NO: 2445427 - RNA, 19 nt, Homo sapiens
  misc_RNA (1)...(19): siRNA sense strand
guagaagcagggagcggaa

SEQ ID NO: 2445428 - RNA, 19 nt, Homo sapiens
  misc_RNA (1)...(19): siRNA sense strand
aggaguagggagcggaaga

SEQ ID NO: 2445429 - RNA, 19 nt, Homo sapiens
  misc_RNA (1)...(19): siRNA sense strand
uuuaggaaauugaugggua

SEQ ID NO: 2445430 - RNA, 19 nt, Homo sapiens
  misc_RNA (1)...(19): siRNA sense strand
cugaggaacauaaugacaa

SEQ ID NO: 2445431 - RNA, 19 nt, Homo sapiens
  misc_RNA (1)...(19): siRNA sense strand
agaagcagagagaggaaga

SEQ ID NO: 2445432 - RNA, 19 nt, Homo sapiens
  misc_RNA (1)...(19): siRNA sense strand
gagugaagaugaagcugga

SEQ ID NO: 2445433 - RNA, 19 nt, Homo sapiens
  misc_RNA (1)...(19): siRNA sense strand
gcucaguaugaaauggcaa

SEQ ID NO: 2445434 - RNA, 19 nt, Homo sapiens
  misc_RNA (1)...(19): siRNA sense strand
cacaaagaggaauggguuu

SEQ ID NO: 2445435 - RNA, 19 nt, Homo sapiens
  misc_RNA (1)...(19): siRNA sense strand
aguagggagcggaagaaau

SEQ ID NO: 2445436 - RNA, 19 nt, Homo sapiens
  misc_RNA (1)...(19): siRNA sense strand
aagcagagagaggaagaaa

SEQ ID NO: 2445437 - RNA, 19 nt, Homo sapiens
  misc_RNA (1)...(19): siRNA sense strand
cgcucaagaucaagacaca

SEQ ID NO: 2445438 - RNA, 19 nt, Homo sapiens
  misc_RNA (1)...(19): siRNA sense strand
gcaagaaagaaggggacaa

SEQ ID NO: 2445439 - RNA, 19 nt, Homo sapiens
  misc_RNA (1)...(19): siRNA sense strand
gaagaaaguuacaagacuc

SEQ ID NO: 2445440 - RNA, 19 nt, Homo sapiens
  misc_RNA (1)...(19): siRNA sense strand
acacaaagaggaauggguu

SEQ ID NO: 2445441 - RNA, 19 nt, Homo sapiens
  misc_RNA (1)...(19): siRNA sense strand
uuggaaagggcaaagaaau

SEQ ID NO: 2445442 - RNA, 19 nt, Homo sapiens
  misc_RNA (1)...(19): siRNA sense strand
acuagaagcaggaguagga

SEQ ID NO: 2445443 - RNA, 19 nt, Homo sapiens
  misc_RNA (1)...(19): siRNA sense strand
gaguagggagcggaagaaa

SEQ ID NO: 2445444 - RNA, 19 nt, Homo sapiens
  misc_RNA (1)...(19): siRNA sense strand
agagagaggaagaaaucga

SEQ ID NO: 2445445 - RNA, 19 nt, Homo sapiens
  misc_RNA (1)...(19): siRNA sense strand
aggaaauugauggguauua

SEQ ID NO: 2445446 - RNA, 19 nt, Homo sapiens
  misc_RNA (1)...(19): siRNA sense strand
gggaagaagacaugaaucc

SEQ ID NO: 2445447 - RNA, 19 nt, Homo sapiens
  misc_RNA (1)...(19): siRNA sense strand
ggguauuaagagugaagau

SEQ ID NO: 2445448 - RNA, 19 nt, Homo sapiens
  misc_RNA (1)...(19): siRNA sense strand
uuuaggaaauugaugggua

SEQ ID NO: 2445449 - RNA, 19 nt, Homo sapiens
  misc_RNA (1)...(19): siRNA sense strand
gagugaagaugaagcugga

SEQ ID NO: 2445450 - RNA, 19 nt, Homo sapiens
  misc_RNA (1)...(19): siRNA sense strand
gcucaguaugaaauggcaa

SEQ ID NO: 2445451 - RNA, 19 nt, Homo sapiens
  misc_RNA (1)...(19): siRNA sense strand
cacaaagaggaauggguuu

SEQ ID NO: 2445452 - RNA, 19 nt, Homo sapiens
  misc_RNA (1)...(19): siRNA sense strand
gcaagaaagaaggggacaa

SEQ ID NO: 2445453 - RNA, 19 nt, Homo sapiens
  misc_RNA (1)...(19): siRNA sense strand
gaagaaaguuacaagacuc

SEQ ID NO: 2445454 - RNA, 19 nt, Homo sapiens
  misc_RNA (1)...(19): siRNA sense strand
acacaaagaggaauggguu

SEQ ID NO: 2445455 - RNA, 19 nt, Homo sapiens
  misc_RNA (1)...(19): siRNA sense strand
uuggaaagggcaaagaaau

SEQ ID NO: 2445456 - RNA, 19 nt, Homo sapiens
  misc_RNA (1)...(19): siRNA sense strand
aggaaauugauggguauua

SEQ ID NO: 2445457 - RNA, 19 nt, Homo sapiens
  misc_RNA (1)...(19): siRNA sense strand
uuagcuagaagguuggaaa

SEQ ID NO: 2445458 - RNA, 19 nt, Homo sapiens
  misc_RNA (1)...(19): siRNA sense strand
agaagguuggaaagggcaa

SEQ ID NO: 2445459 - RNA, 19 nt, Homo sapiens
  misc_RNA (1)...(19): siRNA sense strand
aauuacaagaacagcgaga

SEQ ID NO: 2445460 - RNA, 19 nt, Homo sapiens
  misc_RNA (1)...(19): siRNA sense strand
cgcuguuaauccaaugaaa

SEQ ID NO: 2445461 - RNA, 19 nt, Homo sapiens
  misc_RNA (1)...(19): siRNA sense strand
cucugaagcagcaggaaga

SEQ ID NO: 2445462 - RNA, 19 nt, Homo sapiens
  misc_RNA (1)...(19): siRNA sense strand
gaaauuacaagaacagcga

SEQ ID NO: 2445463 - RNA, 19 nt, Homo sapiens
  misc_RNA (1)...(19): siRNA sense strand
cugcugaaauaugggaaaa

SEQ ID NO: 2445464 - RNA, 19 nt, Homo sapiens
  misc_RNA (1)...(19): siRNA sense strand
ucugcugaaauaugggaaa

SEQ ID NO: 2445465 - RNA, 19 nt, Homo sapiens
  misc_RNA (1)...(19): siRNA sense strand
ugauaaaggaagagagcga

SEQ ID NO: 2445466 - RNA, 19 nt, Homo sapiens
  misc_RNA (1)...(19): siRNA sense strand
aggaagaaaucgagaucca

SEQ ID NO: 2445467 - RNA, 19 nt, Homo sapiens
  misc_RNA (1)...(19): siRNA sense strand
agaucaagacacaggcaua

SEQ ID NO: 2445468 - RNA, 19 nt, Homo sapiens
  misc_RNA (1)...(19): siRNA sense strand
acgcaaagaaagaaaguca

SEQ ID NO: 2445469 - RNA, 19 nt, Homo sapiens
  misc_RNA (1)...(19): siRNA sense strand
aggaguaggacaaggagua

SEQ ID NO: 2445470 - RNA, 19 nt, Homo sapiens
  misc_RNA (1)...(19): siRNA sense strand
aggcacaaacgcaaagaaa

SEQ ID NO: 2445471 - RNA, 19 nt, Homo sapiens
  misc_RNA (1)...(19): siRNA sense strand
cggaagaagucucgaucca

SEQ ID NO: 2445472 - RNA, 19 nt, Homo sapiens
  misc_RNA (1)...(19): siRNA sense strand
aggcauaggacuagaagca

SEQ ID NO: 2445473 - RNA, 19 nt, Homo sapiens
  misc_RNA (1)...(19): siRNA sense strand
ccagaagcagagagaggaa

SEQ ID NO: 2445474 - RNA, 19 nt, Homo sapiens
  misc_RNA (1)...(19): siRNA sense strand
agaagcaggaguaggacaa

SEQ ID NO: 2445475 - RNA, 19 nt, Homo sapiens
  misc_RNA (1)...(19): siRNA sense strand
ccagauagagauaagaaaa

SEQ ID NO: 2445476 - RNA, 19 nt, Homo sapiens
  misc_RNA (1)...(19): siRNA sense strand
aggacuagaagcaggagua

SEQ ID NO: 2445477 - RNA, 19 nt, Homo sapiens
  misc_RNA (1)...(19): siRNA sense strand
ggguauuaagagugaagau

SEQ ID NO: 2445478 - RNA, 19 nt, Homo sapiens
  misc_RNA (1)...(19): siRNA sense strand
agauccagaagcagggaaa

SEQ ID NO: 2445479 - RNA, 19 nt, Homo sapiens
  misc_RNA (1)...(19): siRNA sense strand
cuucagaggcagaaacaca

SEQ ID NO: 2445480 - RNA, 19 nt, Homo sapiens
  misc_RNA (1)...(19): siRNA sense strand
gagccggagcagaagcaaa

SEQ ID NO: 2445481 - RNA, 19 nt, Homo sapiens
  misc_RNA (1)...(19): siRNA sense strand
aggaagagagcgacuaaau

SEQ ID NO: 2445482 - RNA, 19 nt, Homo sapiens
  misc_RNA (1)...(19): siRNA sense strand
acaaacgcaaagaaagaaa

SEQ ID NO: 2445483 - RNA, 19 nt, Homo sapiens
  misc_RNA (1)...(19): siRNA sense strand
agaaagucaucaagaggca

SEQ ID NO: 2445484 - RNA, 19 nt, Homo sapiens
  misc_RNA (1)...(19): siRNA sense strand
agaaagaaaacgaaaguca

SEQ ID NO: 2445485 - RNA, 19 nt, Homo sapiens
  misc_RNA (1)...(19): siRNA sense strand
cagauaaugaaggaagaaa

SEQ ID NO: 2445486 - RNA, 19 nt, Homo sapiens
  misc_RNA (1)...(19): siRNA sense strand
aacauaagucugaggaaca

SEQ ID NO: 2445487 - RNA, 19 nt, Homo sapiens
  misc_RNA (1)...(19): siRNA sense strand
guagaagcagggagcggaa

SEQ ID NO: 2445488 - RNA, 19 nt, Homo sapiens
  misc_RNA (1)...(19): siRNA sense strand
aggaguagggagcggaaga

SEQ ID NO: 2445489 - RNA, 19 nt, Homo sapiens
  misc_RNA (1)...(19): siRNA sense strand
uuuaggaaauugaugggua

SEQ ID NO: 2445490 - RNA, 19 nt, Homo sapiens
  misc_RNA (1)...(19): siRNA sense strand
cugaggaacauaaugacaa

SEQ ID NO: 2445491 - RNA, 19 nt, Homo sapiens
  misc_RNA (1)...(19): siRNA sense strand
gucagauaaugaaggaaga

SEQ ID NO: 2445492 - RNA, 19 nt, Homo sapiens
  misc_RNA (1)...(19): siRNA sense strand
agaagcagagagaggaaga

SEQ ID NO: 2445493 - RNA, 19 nt, Homo sapiens
  misc_RNA (1)...(19): siRNA sense strand
gagugaagaugaagcugga

SEQ ID NO: 2445494 - RNA, 19 nt, Homo sapiens
  misc_RNA (1)...(19): siRNA sense strand
gcucaguaugaaauggcaa

SEQ ID NO: 2445495 - RNA, 19 nt, Homo sapiens
  misc_RNA (1)...(19): siRNA sense strand
cacaaagaggaauggguuu

SEQ ID NO: 2445496 - RNA, 19 nt, Homo sapiens
  misc_RNA (1)...(19): siRNA sense strand
agaaaacgaaagucagaua

SEQ ID NO: 2445497 - RNA, 19 nt, Homo sapiens
  misc_RNA (1)...(19): siRNA sense strand
aguagggagcggaagaaau

SEQ ID NO: 2445498 - RNA, 19 nt, Homo sapiens
  misc_RNA (1)...(19): siRNA sense strand
aagcagagagaggaagaaa

SEQ ID NO: 2445499 - RNA, 19 nt, Homo sapiens
  misc_RNA (1)...(19): siRNA sense strand
cgcucaagaucaagacaca

SEQ ID NO: 2445500 - RNA, 19 nt, Homo sapiens
  misc_RNA (1)...(19): siRNA sense strand
gcaagaaagaaggggacaa

SEQ ID NO: 2445501 - RNA, 19 nt, Homo sapiens
  misc_RNA (1)...(19): siRNA sense strand
gaagaaaguuacaagacuc

SEQ ID NO: 2445502 - RNA, 19 nt, Homo sapiens
  misc_RNA (1)...(19): siRNA sense strand
ggcuagugauacagagcga

SEQ ID NO: 2445503 - RNA, 19 nt, Homo sapiens
  misc_RNA (1)...(19): siRNA sense strand
acacaaagaggaauggguu

SEQ ID NO: 2445504 - RNA, 19 nt, Homo sapiens
  misc_RNA (1)...(19): siRNA sense strand
uuggaaagggcaaagaaau

SEQ ID NO: 2445505 - RNA, 19 nt, Homo sapiens
  misc_RNA (1)...(19): siRNA sense strand
acuagaagcaggaguagga

SEQ ID NO: 2445506 - RNA, 19 nt, Homo sapiens
  misc_RNA (1)...(19): siRNA sense strand
agaaagggagggaagaaaa

SEQ ID NO: 2445507 - RNA, 19 nt, Homo sapiens
  misc_RNA (1)...(19): siRNA sense strand
gaugagaaagggagggaag

SEQ ID NO: 2445508 - RNA, 19 nt, Homo sapiens
  misc_RNA (1)...(19): siRNA sense strand
auggagucaugaucagaaa

SEQ ID NO: 2445509 - RNA, 19 nt, Homo sapiens
  misc_RNA (1)...(19): siRNA sense strand
cagaguguggagaggguca

SEQ ID NO: 2445510 - RNA, 19 nt, Homo sapiens
  misc_RNA (1)...(19): siRNA sense strand
cuguggagaugagggacaa

SEQ ID NO: 2445511 - RNA, 19 nt, Homo sapiens
  misc_RNA (1)...(19): siRNA sense strand
gugggaacuagaugagaau

SEQ ID NO: 2445512 - RNA, 19 nt, Homo sapiens
  misc_RNA (1)...(19): siRNA sense strand
guggacaccaagaguacaa

SEQ ID NO: 2445513 - RNA, 19 nt, Homo sapiens
  misc_RNA (1)...(19): siRNA sense strand
aguaugagcaugaugacau

SEQ ID NO: 2445514 - RNA, 19 nt, Homo sapiens
  misc_RNA (1)...(19): siRNA sense strand
uuucaugcagcgaggacaa

SEQ ID NO: 2445515 - RNA, 19 nt, Homo sapiens
  misc_RNA (1)...(19): siRNA sense strand
aguuggaggcugcgcggua

SEQ ID NO: 2445516 - RNA, 19 nt, Homo sapiens
  misc_RNA (1)...(19): siRNA sense strand
gcuguugaauugugggaac

SEQ ID NO: 2445517 - RNA, 19 nt, Homo sapiens
  misc_RNA (1)...(19): siRNA sense strand
cugcugagaagaagggcaa

SEQ ID NO: 2445518 - RNA, 19 nt, Homo sapiens
  misc_RNA (1)...(19): siRNA sense strand
uggccaacaaggagaagaa

SEQ ID NO: 2445519 - RNA, 19 nt, Homo sapiens
  misc_RNA (1)...(19): siRNA sense strand
ccaaggugcugaagggcca

SEQ ID NO: 2445520 - RNA, 19 nt, Homo sapiens
  misc_RNA (1)...(19): siRNA sense strand
ucccaaggccaguggacaa

SEQ ID NO: 2445521 - RNA, 19 nt, Homo sapiens
  misc_RNA (1)...(19): siRNA sense strand
cugagauacuuuuggagaa

SEQ ID NO: 2445522 - RNA, 19 nt, Homo sapiens
  misc_RNA (1)...(19): siRNA sense strand
agaaugacaugaaggccau

SEQ ID NO: 2445523 - RNA, 19 nt, Homo sapiens
  misc_RNA (1)...(19): siRNA sense strand
agggcaaggugcaggucuu

SEQ ID NO: 2445524 - RNA, 19 nt, Homo sapiens
  misc_RNA (1)...(19): siRNA sense strand
ugacaucugcacugggcaa

SEQ ID NO: 2445525 - RNA, 19 nt, Homo sapiens
  misc_RNA (1)...(19): siRNA sense strand
aagaaugacaugaaggcca

SEQ ID NO: 2445526 - RNA, 19 nt, Homo sapiens
  misc_RNA (1)...(19): siRNA sense strand
agaaagagucaaaggucgu

SEQ ID NO: 2445527 - RNA, 19 nt, Homo sapiens
  misc_RNA (1)...(19): siRNA sense strand
agugugacaaugagaaaga

SEQ ID NO: 2445528 - RNA, 19 nt, Homo sapiens
  misc_RNA (1)...(19): siRNA sense strand
guuuaagaccauugcagga

SEQ ID NO: 2445529 - RNA, 19 nt, Homo sapiens
  misc_RNA (1)...(19): siRNA sense strand
agaagaagggcaaggugca

SEQ ID NO: 2445530 - RNA, 19 nt, Homo sapiens
  misc_RNA (1)...(19): siRNA sense strand
ucuaagaggcugucgagga

SEQ ID NO: 2445531 - RNA, 19 nt, Homo sapiens
  misc_RNA (1)...(19): siRNA sense strand
ccuucuuugcagagcgauu

SEQ ID NO: 2445532 - RNA, 19 nt, Homo sapiens
  misc_RNA (1)...(19): siRNA sense strand
cugcagaguaucauguaca

SEQ ID NO: 2445533 - RNA, 19 nt, Homo sapiens
  misc_RNA (1)...(19): siRNA sense strand
cuucaaggcaucagaccca

SEQ ID NO: 2445534 - RNA, 19 nt, Homo sapiens
  misc_RNA (1)...(19): siRNA sense strand
aggccgaggaggcucaaua

SEQ ID NO: 2445535 - RNA, 19 nt, Homo sapiens
  misc_RNA (1)...(19): siRNA sense strand
cgauagaaguggcaccauc

SEQ ID NO: 2445536 - RNA, 19 nt, Homo sapiens
  misc_RNA (1)...(19): siRNA sense strand
gguucaaaauggaaaguau

SEQ ID NO: 2445537 - RNA, 19 nt, Homo sapiens
  misc_RNA (1)...(19): siRNA sense strand
ggaaaguauuuauugacca

SEQ ID NO: 2445538 - RNA, 19 nt, Homo sapiens
  misc_RNA (1)...(19): siRNA sense strand
auuaacaggucuuuggaga

SEQ ID NO: 2445539 - RNA, 19 nt, Homo sapiens
  misc_RNA (1)...(19): siRNA sense strand
caguaagacaucagaguac

SEQ ID NO: 2445540 - RNA, 19 nt, Homo sapiens
  misc_RNA (1)...(19): siRNA sense strand
gagaagaucugguaagguc

SEQ ID NO: 2445541 - RNA, 19 nt, Homo sapiens
  misc_RNA (1)...(19): siRNA sense strand
guuuaauuuucgaggcgua

SEQ ID NO: 2445542 - RNA, 19 nt, Homo sapiens
  misc_RNA (1)...(19): siRNA sense strand
uuaacaggucuuuggagaa

SEQ ID NO: 2445543 - RNA, 19 nt, Homo sapiens
  misc_RNA (1)...(19): siRNA sense strand
augaaagauaccuuaggaa

SEQ ID NO: 2445544 - RNA, 19 nt, Homo sapiens
  misc_RNA (1)...(19): siRNA sense strand
cagcugaagccauggguuc

SEQ ID NO: 2445545 - RNA, 19 nt, Homo sapiens
  misc_RNA (1)...(19): siRNA sense strand
gguucaaaauggaaaguau

SEQ ID NO: 2445546 - RNA, 19 nt, Homo sapiens
  misc_RNA (1)...(19): siRNA sense strand
ggaaaguauuuauugacca

SEQ ID NO: 2445547 - RNA, 19 nt, Homo sapiens
  misc_RNA (1)...(19): siRNA sense strand
auuaacaggucuuuggaga

SEQ ID NO: 2445548 - RNA, 19 nt, Homo sapiens
  misc_RNA (1)...(19): siRNA sense strand
caguaagacaucagaguac

SEQ ID NO: 2445549 - RNA, 19 nt, Homo sapiens
  misc_RNA (1)...(19): siRNA sense strand
gagaagaucugguaagguc

SEQ ID NO: 2445550 - RNA, 19 nt, Homo sapiens
  misc_RNA (1)...(19): siRNA sense strand
guuuaauuuucgaggcgua

SEQ ID NO: 2445551 - RNA, 19 nt, Homo sapiens
  misc_RNA (1)...(19): siRNA sense strand
uuaacaggucuuuggagaa

SEQ ID NO: 2445552 - RNA, 19 nt, Homo sapiens
  misc_RNA (1)...(19): siRNA sense strand
augaaagauaccuuaggaa

SEQ ID NO: 2445553 - RNA, 19 nt, Homo sapiens
  misc_RNA (1)...(19): siRNA sense strand
cagcugaagccauggguuc

SEQ ID NO: 2445554 - RNA, 19 nt, Homo sapiens
  misc_RNA (1)...(19): siRNA sense strand
aggcaacaugagugagaau

SEQ ID NO: 2445555 - RNA, 19 nt, Homo sapiens
  misc_RNA (1)...(19): siRNA sense strand
agagauaccauuugggcuu

SEQ ID NO: 2445556 - RNA, 19 nt, Homo sapiens
  misc_RNA (1)...(19): siRNA sense strand
gcuccuaccuccugcgaca

SEQ ID NO: 2445557 - RNA, 19 nt, Homo sapiens
  misc_RNA (1)...(19): siRNA sense strand
ggcaagugcuauagccaga

SEQ ID NO: 2445558 - RNA, 19 nt, Homo sapiens
  misc_RNA (1)...(19): siRNA sense strand
gcccagaauuugaagcuca

SEQ ID NO: 2445559 - RNA, 19 nt, Homo sapiens
  misc_RNA (1)...(19): siRNA sense strand
aggaaauuucucagcaaga

SEQ ID NO: 2445560 - RNA, 19 nt, Homo sapiens
  misc_RNA (1)...(19): siRNA sense strand
gcuaugaaucugagagcuc

SEQ ID NO: 2445561 - RNA, 19 nt, Homo sapiens
  misc_RNA (1)...(19): siRNA sense strand
acccagaagcccugaauca

SEQ ID NO: 2445562 - RNA, 19 nt, Homo sapiens
  misc_RNA (1)...(19): siRNA sense strand
caugagugagaaugaggaa

SEQ ID NO: 2445563 - RNA, 19 nt, Homo sapiens
  misc_RNA (1)...(19): siRNA sense strand
ggaaaggccuucucccaga

SEQ ID NO: 2445564 - RNA, 19 nt, Homo sapiens
  misc_RNA (1)...(19): siRNA sense strand
cccagaacacugagcucaa

SEQ ID NO: 2445565 - RNA, 19 nt, Homo sapiens
  misc_RNA (1)...(19): siRNA sense strand
gugagaaugaggaagagga

SEQ ID NO: 2445566 - RNA, 19 nt, Homo sapiens
  misc_RNA (1)...(19): siRNA sense strand
cggaggaagugcuggccaa

SEQ ID NO: 2445567 - RNA, 19 nt, Homo sapiens
  misc_RNA (1)...(19): siRNA sense strand
cagucaaauauguuggaaa

SEQ ID NO: 2445568 - RNA, 19 nt, Homo sapiens
  misc_RNA (1)...(19): siRNA sense strand
aaucagaaugagauggcaa

SEQ ID NO: 2445569 - RNA, 19 nt, Homo sapiens
  misc_RNA (1)...(19): siRNA sense strand
uggcauuagcucugaauca

SEQ ID NO: 2445570 - RNA, 19 nt, Homo sapiens
  misc_RNA (1)...(19): siRNA sense strand
uggccaaauuugaugagau

SEQ ID NO: 2445571 - RNA, 19 nt, Homo sapiens
  misc_RNA (1)...(19): siRNA sense strand
cuggccaaagugagggaaa

SEQ ID NO: 2445572 - RNA, 19 nt, Homo sapiens
  misc_RNA (1)...(19): siRNA sense strand
ugaugagaucuaugggaca

SEQ ID NO: 2445573 - RNA, 19 nt, Homo sapiens
  misc_RNA (1)...(19): siRNA sense strand
ucaugaauccagaaagcau

SEQ ID NO: 2445574 - RNA, 19 nt, Homo sapiens
  misc_RNA (1)...(19): siRNA sense strand
uggccaaagugagggaaaa

SEQ ID NO: 2445575 - RNA, 19 nt, Homo sapiens
  misc_RNA (1)...(19): siRNA sense strand
cuuugcaaguauugauaga

SEQ ID NO: 2445576 - RNA, 19 nt, Homo sapiens
  misc_RNA (1)...(19): siRNA sense strand
uuaaacaagaggaugguca

SEQ ID NO: 2445577 - RNA, 19 nt, Homo sapiens
  misc_RNA (1)...(19): siRNA sense strand
acauaauggaguuggaaca

SEQ ID NO: 2445578 - RNA, 19 nt, Homo sapiens
  misc_RNA (1)...(19): siRNA sense strand
gacaaagaucauuggaaau

SEQ ID NO: 2445579 - RNA, 19 nt, Homo sapiens
  misc_RNA (1)...(19): siRNA sense strand
uguaaaugggcaucagaaa

SEQ ID NO: 2445580 - RNA, 19 nt, Homo sapiens
  misc_RNA (1)...(19): siRNA sense strand
gcuucuucuucuugcguua

SEQ ID NO: 2445581 - RNA, 19 nt, Homo sapiens
  misc_RNA (1)...(19): siRNA sense strand
acuucaagggauucagaaa

SEQ ID NO: 2445582 - RNA, 19 nt, Homo sapiens
  misc_RNA (1)...(19): siRNA sense strand
agaugaacaagaagaugaa

SEQ ID NO: 2445583 - RNA, 19 nt, Homo sapiens
  misc_RNA (1)...(19): siRNA sense strand
cuucagcaugggaaagaaa

SEQ ID NO: 2445584 - RNA, 19 nt, Homo sapiens
  misc_RNA (1)...(19): siRNA sense strand
ugucuucaucgguggaaua

SEQ ID NO: 2445585 - RNA, 19 nt, Homo sapiens
  misc_RNA (1)...(19): siRNA sense strand
augaaacagcaaugccaaa

SEQ ID NO: 2445586 - RNA, 19 nt, Homo sapiens
  misc_RNA (1)...(19): siRNA sense strand
aagaaagaugacacaacua

SEQ ID NO: 2445587 - RNA, 19 nt, Homo sapiens
  misc_RNA (1)...(19): siRNA sense strand
ugucgagaacacugggaau

SEQ ID NO: 2445588 - RNA, 19 nt, Homo sapiens
  misc_RNA (1)...(19): siRNA sense strand
caagagaaaaucagaugaa

SEQ ID NO: 2445589 - RNA, 19 nt, Homo sapiens
  misc_RNA (1)...(19): siRNA sense strand
agagaaaaucagaugaaca

SEQ ID NO: 2445590 - RNA, 19 nt, Homo sapiens
  misc_RNA (1)...(19): siRNA sense strand
aaucagaugaacaagaaga

SEQ ID NO: 2445591 - RNA, 19 nt, Homo sapiens
  misc_RNA (1)...(19): siRNA sense strand
augaacaagaagaugaaga

SEQ ID NO: 2445592 - RNA, 19 nt, Homo sapiens
  misc_RNA (1)...(19): siRNA sense strand
uacuauauucaguggcuaa

SEQ ID NO: 2445593 - RNA, 19 nt, Homo sapiens
  misc_RNA (1)...(19): siRNA sense strand
ucauuaccuuagaggaaga

SEQ ID NO: 2445594 - RNA, 19 nt, Homo sapiens
  misc_RNA (1)...(19): siRNA sense strand
ccuuagaggaagaagcacu

SEQ ID NO: 2445595 - RNA, 19 nt, Homo sapiens
  misc_RNA (1)...(19): siRNA sense strand
ccaagaaagaugacacaac

SEQ ID NO: 2445596 - RNA, 19 nt, Homo sapiens
  misc_RNA (1)...(19): siRNA sense strand
gaauacaacauaauggagu

SEQ ID NO: 2445597 - RNA, 19 nt, Homo sapiens
  misc_RNA (1)...(19): siRNA sense strand
cauaauggaguuggaacaa

SEQ ID NO: 2445598 - RNA, 19 nt, Homo sapiens
  misc_RNA (1)...(19): siRNA sense strand
cgguggaauacaacauaau

SEQ ID NO: 2445599 - RNA, 19 nt, Homo sapiens
  misc_RNA (1)...(19): siRNA sense strand
gaugaaacagcaaugccaa

SEQ ID NO: 2445600 - RNA, 19 nt, Homo sapiens
  misc_RNA (1)...(19): siRNA sense strand
cucugcaguucgagaagaa

SEQ ID NO: 2445601 - RNA, 19 nt, Homo sapiens
  misc_RNA (1)...(19): siRNA sense strand
accaaauacuucaagggau

SEQ ID NO: 2445602 - RNA, 19 nt, Homo sapiens
  misc_RNA (1)...(19): siRNA sense strand
caaaauuagagaggcgaaa

SEQ ID NO: 2445603 - RNA, 19 nt, Homo sapiens
  misc_RNA (1)...(19): siRNA sense strand
gccuauugguugaugaaac

SEQ ID NO: 2445604 - RNA, 19 nt, Homo sapiens
  misc_RNA (1)...(19): siRNA sense strand
gcuucauaaacuucacuua

SEQ ID NO: 2445605 - RNA, 19 nt, Homo sapiens
  misc_RNA (1)...(19): siRNA sense strand
aguaugaaggagugaaauu

SEQ ID NO: 2445606 - RNA, 19 nt, Homo sapiens
  misc_RNA (1)...(19): siRNA sense strand
aggcaauggaacaagguuu

SEQ ID NO: 2445607 - RNA, 19 nt, Homo sapiens
  misc_RNA (1)...(19): siRNA sense strand
gguacaaguaugaaggagu

SEQ ID NO: 2445608 - RNA, 19 nt, Homo sapiens
  misc_RNA (1)...(19): siRNA sense strand
gugaaauuugagaagggaa

SEQ ID NO: 2445609 - RNA, 19 nt, Homo sapiens
  misc_RNA (1)...(19): siRNA sense strand
uauaaagaaugcaugguga

SEQ ID NO: 2445610 - RNA, 19 nt, Homo sapiens
  misc_RNA (1)...(19): siRNA sense strand
ccaaaguauauuaugccaa

SEQ ID NO: 2445611 - RNA, 19 nt, Homo sapiens
  misc_RNA (1)...(19): siRNA sense strand
ggaacaagguuuacgagac

SEQ ID NO: 2445612 - RNA, 19 nt, Homo sapiens
  misc_RNA (1)...(19): siRNA sense strand
gaggagacacaaagagcca

SEQ ID NO: 2445613 - RNA, 19 nt, Homo sapiens
  misc_RNA (1)...(19): siRNA sense strand
auacuuuggaacagacuaa

SEQ ID NO: 2445614 - RNA, 19 nt, Homo sapiens
  misc_RNA (1)...(19): siRNA sense strand
aaugagaagcggugaggca

SEQ ID NO: 2445615 - RNA, 19 nt, Homo sapiens
  misc_RNA (1)...(19): siRNA sense strand
ugagaagcggugaggcaau

SEQ ID NO: 2445616 - RNA, 19 nt, Homo sapiens
  misc_RNA (1)...(19): siRNA sense strand
agugaugaggagacacaaa

SEQ ID NO: 2445617 - RNA, 19 nt, Homo sapiens
  misc_RNA (1)...(19): siRNA sense strand
gcaaguaaacucugccuca

SEQ ID NO: 2445618 - RNA, 19 nt, Homo sapiens
  misc_RNA (1)...(19): siRNA sense strand
caacagugguaguggugac

SEQ ID NO: 2445619 - RNA, 19 nt, Homo sapiens
  misc_RNA (1)...(19): siRNA sense strand
ccucauggugccaaaucaa

SEQ ID NO: 2445620 - RNA, 19 nt, Homo sapiens
  misc_RNA (1)...(19): siRNA sense strand
uuguuguggaagagggauu

SEQ ID NO: 2445621 - RNA, 19 nt, Homo sapiens
  misc_RNA (1)...(19): siRNA sense strand
cuguaauugaagcuguaaa

SEQ ID NO: 2445622 - RNA, 19 nt, Homo sapiens
  misc_RNA (1)...(19): siRNA sense strand
agagugaugaggagacaca

SEQ ID NO: 2445623 - RNA, 19 nt, Homo sapiens
  misc_RNA (1)...(19): siRNA sense strand
cggugaggcaauggaacaa

SEQ ID NO: 2445624 - RNA, 19 nt, Homo sapiens
  misc_RNA (1)...(19): siRNA sense strand
agguggaggucgagggauu

SEQ ID NO: 2445625 - RNA, 19 nt, Homo sapiens
  misc_RNA (1)...(19): siRNA sense strand
ccaugaaacuaaagcggau

SEQ ID NO: 2445626 - RNA, 19 nt, Homo sapiens
  misc_RNA (1)...(19): siRNA sense strand
gcuaaagagaacagaaagu

SEQ ID NO: 2445627 - RNA, 19 nt, Homo sapiens
  misc_RNA (1)...(19): siRNA sense strand
ccaacaagaacaacggcua

SEQ ID NO: 2445628 - RNA, 19 nt, Homo sapiens
  misc_RNA (1)...(19): siRNA sense strand
gggcugaagcagaguacau

SEQ ID NO: 2445629 - RNA, 19 nt, Homo sapiens
  misc_RNA (1)...(19): siRNA sense strand
uugcuaaagagaacagaaa

SEQ ID NO: 2445630 - RNA, 19 nt, Homo sapiens
  misc_RNA (1)...(19): siRNA sense strand
agaaaguggaauugcaaga

SEQ ID NO: 2445631 - RNA, 19 nt, Homo sapiens
  misc_RNA (1)...(19): siRNA sense strand
gacaacaacuucagcgaga

SEQ ID NO: 2445632 - RNA, 19 nt, Homo sapiens
  misc_RNA (1)...(19): siRNA sense strand
acggcuaauggaagagaaa

SEQ ID NO: 2445633 - RNA, 19 nt, Homo sapiens
  misc_RNA (1)...(19): siRNA sense strand
auguagaagccgaugaaga

SEQ ID NO: 2445634 - RNA, 19 nt, Homo sapiens
  misc_RNA (1)...(19): siRNA sense strand
agaaguagaaucaaggaga

SEQ ID NO: 2445635 - RNA, 19 nt, Homo sapiens
  misc_RNA (1)...(19): siRNA sense strand
aggcagagaccaugaaacu

SEQ ID NO: 2445636 - RNA, 19 nt, Homo sapiens
  misc_RNA (1)...(19): siRNA sense strand
cagaaggaguugcaggcuu

SEQ ID NO: 2445637 - RNA, 19 nt, Homo sapiens
  misc_RNA (1)...(19): siRNA sense strand
cuccaaagccagauugcaa

SEQ ID NO: 2445638 - RNA, 19 nt, Homo sapiens
  misc_RNA (1)...(19): siRNA sense strand
agcgcaagacugagauaaa

SEQ ID NO: 2445639 - RNA, 19 nt, Homo sapiens
  misc_RNA (1)...(19): siRNA sense strand
guacgaucauacagcaaaa

SEQ ID NO: 2445640 - RNA, 19 nt, Homo sapiens
  misc_RNA (1)...(19): siRNA sense strand
cuuuggagcuugaggugga

SEQ ID NO: 2445641 - RNA, 19 nt, Homo sapiens
  misc_RNA (1)...(19): siRNA sense strand
acagaaagugucaagaaca

SEQ ID NO: 2445642 - RNA, 19 nt, Homo sapiens
  misc_RNA (1)...(19): siRNA sense strand
ccaaaagaacucaggcaga

SEQ ID NO: 2445643 - RNA, 19 nt, Homo sapiens
  misc_RNA (1)...(19): siRNA sense strand
agcuagauauacagcgcaa

SEQ ID NO: 2445644 - RNA, 19 nt, Homo sapiens
  misc_RNA (1)...(19): siRNA sense strand
gggcagcaguguuggcagu

SEQ ID NO: 2445645 - RNA, 19 nt, Homo sapiens
  misc_RNA (1)...(19): siRNA sense strand
gggcauugaaagucagcca

SEQ ID NO: 2445646 - RNA, 19 nt, Homo sapiens
  misc_RNA (1)...(19): siRNA sense strand
gcuaaagcuauugcagaaa

SEQ ID NO: 2445647 - RNA, 19 nt, Homo sapiens
  misc_RNA (1)...(19): siRNA sense strand
ccagauugcaaauuggaga

SEQ ID NO: 2445648 - RNA, 19 nt, Homo sapiens
  misc_RNA (1)...(19): siRNA sense strand
cagauugcaaauuggagaa

SEQ ID NO: 2445649 - RNA, 19 nt, Homo sapiens
  misc_RNA (1)...(19): siRNA sense strand
aaguggaauugcaagaaaa

SEQ ID NO: 2445650 - RNA, 19 nt, Homo sapiens
  misc_RNA (1)...(19): siRNA sense strand
agccaaaggaacugggacu

SEQ ID NO: 2445651 - RNA, 19 nt, Homo sapiens
  misc_RNA (1)...(19): siRNA sense strand
agaacaacggcuaauggaa

SEQ ID NO: 2445652 - RNA, 19 nt, Homo sapiens
  misc_RNA (1)...(19): siRNA sense strand
aaacuaaagcggauccaga

SEQ ID NO: 2445653 - RNA, 19 nt, Homo sapiens
  misc_RNA (1)...(19): siRNA sense strand
cuuguagagcaaagccaaa

SEQ ID NO: 2445654 - RNA, 19 nt, Homo sapiens
  misc_RNA (1)...(19): siRNA sense strand
cccaaaucaagaagguaau

SEQ ID NO: 2445655 - RNA, 19 nt, Homo sapiens
  misc_RNA (1)...(19): siRNA sense strand
gauucuaccuccaaagcca

SEQ ID NO: 2445656 - RNA, 19 nt, Homo sapiens
  misc_RNA (1)...(19): siRNA sense strand
agauguagaagccgaugaa

SEQ ID NO: 2445657 - RNA, 19 nt, Homo sapiens
  misc_RNA (1)...(19): siRNA sense strand
ugaaagucagccaaaggaa

SEQ ID NO: 2445658 - RNA, 19 nt, Homo sapiens
  misc_RNA (1)...(19): siRNA sense strand
ggaccuuaucccagcucua

SEQ ID NO: 2445659 - RNA, 19 nt, Homo sapiens
  misc_RNA (1)...(19): siRNA sense strand
agaaguuggccgagucaga

SEQ ID NO: 2445660 - RNA, 19 nt, Homo sapiens
  misc_RNA (1)...(19): siRNA sense strand
gaccaauccuagagaccca

SEQ ID NO: 2445661 - RNA, 19 nt, Homo sapiens
  misc_RNA (1)...(19): siRNA sense strand
acgcaggagccaucaagaa

SEQ ID NO: 2445662 - RNA, 19 nt, Homo sapiens
  misc_RNA (1)...(19): siRNA sense strand
cagcagacauuaaggaguc

SEQ ID NO: 2445663 - RNA, 19 nt, Homo sapiens
  misc_RNA (1)...(19): siRNA sense strand
ccaucaagaauaaggccca

SEQ ID NO: 2445664 - RNA, 19 nt, Homo sapiens
  misc_RNA (1)...(19): siRNA sense strand
uagaauaugaagagcacaa

SEQ ID NO: 2445665 - RNA, 19 nt, Homo sapiens
  misc_RNA (1)...(19): siRNA sense strand
agguaaaggucgaaauacu

SEQ ID NO: 2445666 - RNA, 19 nt, Homo sapiens
  misc_RNA (1)...(19): siRNA sense strand
aggcaaaguauaaggaagu

SEQ ID NO: 2445667 - RNA, 19 nt, Homo sapiens
  misc_RNA (1)...(19): siRNA sense strand
cugaaauguuugaagcaga

SEQ ID NO: 2445668 - RNA, 19 nt, Homo sapiens
  misc_RNA (1)...(19): siRNA sense strand
aggaaguaaaggcaagaaa

SEQ ID NO: 2445669 - RNA, 19 nt, Homo sapiens
  misc_RNA (1)...(19): siRNA sense strand
agaaagaaucaucagggaa

SEQ ID NO: 2445670 - RNA, 19 nt, Homo sapiens
  misc_RNA (1)...(19): siRNA sense strand
aggaacagcaacagaguga

SEQ ID NO: 2445671 - RNA, 19 nt, Homo sapiens
  misc_RNA (1)...(19): siRNA sense strand
agauggaagaauugaaaga

SEQ ID NO: 2445672 - RNA, 19 nt, Homo sapiens
  misc_RNA (1)...(19): siRNA sense strand
agaacagcuuacagaauau

SEQ ID NO: 2445673 - RNA, 19 nt, Homo sapiens
  misc_RNA (1)...(19): siRNA sense strand
gcaaaguauaaggaaguaa

SEQ ID NO: 2445674 - RNA, 19 nt, Homo sapiens
  misc_RNA (1)...(19): siRNA sense strand
ucgaaauacuggaaagucu

SEQ ID NO: 2445675 - RNA, 19 nt, Homo sapiens
  misc_RNA (1)...(19): siRNA sense strand
uggaaaagguaaaggucga

SEQ ID NO: 2445676 - RNA, 19 nt, Homo sapiens
  misc_RNA (1)...(19): siRNA sense strand
aaaugaaagauaaggcaga

SEQ ID NO: 2445677 - RNA, 19 nt, Homo sapiens
  misc_RNA (1)...(19): siRNA sense strand
gcugaaauccagaagcuga

SEQ ID NO: 2445678 - RNA, 19 nt, Homo sapiens
  misc_RNA (1)...(19): siRNA sense strand
cauuagaacaagaaagauc

SEQ ID NO: 2445679 - RNA, 19 nt, Homo sapiens
  misc_RNA (1)...(19): siRNA sense strand
aagcaaaugagcucaggaa

SEQ ID NO: 2445680 - RNA, 19 nt, Homo sapiens
  misc_RNA (1)...(19): siRNA sense strand
ggauaguggcaguggcucu

SEQ ID NO: 2445681 - RNA, 19 nt, Homo sapiens
  misc_RNA (1)...(19): siRNA sense strand
agagaacagcuuacagaau

SEQ ID NO: 2445682 - RNA, 19 nt, Homo sapiens
  misc_RNA (1)...(19): siRNA sense strand
aggaaggugaaaugaaaga

SEQ ID NO: 2445683 - RNA, 19 nt, Homo sapiens
  misc_RNA (1)...(19): siRNA sense strand
ugaaaguauuacaagcaga

SEQ ID NO: 2445684 - RNA, 19 nt, Homo sapiens
  misc_RNA (1)...(19): siRNA sense strand
gggaaaagaaacucugaau

SEQ ID NO: 2445685 - RNA, 19 nt, Homo sapiens
  misc_RNA (1)...(19): siRNA sense strand
ucacucaaugggaggcaaa

SEQ ID NO: 2445686 - RNA, 19 nt, Homo sapiens
  misc_RNA (1)...(19): siRNA sense strand
agauaauuguacagcucau

SEQ ID NO: 2445687 - RNA, 19 nt, Homo sapiens
  misc_RNA (1)...(19): siRNA sense strand
cugaaauccagaagcugaa

SEQ ID NO: 2445688 - RNA, 19 nt, Homo sapiens
  misc_RNA (1)...(19): siRNA sense strand
gaggcaaaguauaaggaag

SEQ ID NO: 2445689 - RNA, 19 nt, Homo sapiens
  misc_RNA (1)...(19): siRNA sense strand
guauaaggaaguaaaggca

SEQ ID NO: 2445690 - RNA, 19 nt, Homo sapiens
  misc_RNA (1)...(19): siRNA sense strand
aagaaagaaucaucaggga

SEQ ID NO: 2445691 - RNA, 19 nt, Homo sapiens
  misc_RNA (1)...(19): siRNA sense strand
gguucugaaagauggaaga

SEQ ID NO: 2445692 - RNA, 19 nt, Homo sapiens
  misc_RNA (1)...(19): siRNA sense strand
caauagacuggaagaugau

SEQ ID NO: 2445693 - RNA, 19 nt, Homo sapiens
  misc_RNA (1)...(19): siRNA sense strand
ugaaaggaaagaugcugaa

SEQ ID NO: 2445694 - RNA, 19 nt, Homo sapiens
  misc_RNA (1)...(19): siRNA sense strand
caaugggaggcaaaguaua

SEQ ID NO: 2445695 - RNA, 19 nt, Homo sapiens
  misc_RNA (1)...(19): siRNA sense strand
agaaaagggaaaagaaacu

SEQ ID NO: 2445696 - RNA, 19 nt, Homo sapiens
  misc_RNA (1)...(19): siRNA sense strand
agacugaggaauugaguuc

SEQ ID NO: 2445697 - RNA, 19 nt, Homo sapiens
  misc_RNA (1)...(19): siRNA sense strand
ugcauuagaacaagaaaga

SEQ ID NO: 2445698 - RNA, 19 nt, Homo sapiens
  misc_RNA (1)...(19): siRNA sense strand
acaagcagaguuagccaaa

SEQ ID NO: 2445699 - RNA, 19 nt, Homo sapiens
  misc_RNA (1)...(19): siRNA sense strand
gaguggagacaaagagaug

SEQ ID NO: 2445700 - RNA, 19 nt, Homo sapiens
  misc_RNA (1)...(19): siRNA sense strand
aguaaaggcaagaaaugca

SEQ ID NO: 2445701 - RNA, 19 nt, Homo sapiens
  misc_RNA (1)...(19): siRNA sense strand
augaaagauaaggcagaaa

SEQ ID NO: 2445702 - RNA, 19 nt, Homo sapiens
  misc_RNA (1)...(19): siRNA sense strand
aagauaaggcagaaauacu

SEQ ID NO: 2445703 - RNA, 19 nt, Homo sapiens
  misc_RNA (1)...(19): siRNA sense strand
ggguggcagaaaagggaaa

SEQ ID NO: 2445704 - RNA, 19 nt, Homo sapiens
  misc_RNA (1)...(19): siRNA sense strand
auggaagaauugaaagacu

SEQ ID NO: 2445705 - RNA, 19 nt, Homo sapiens
  misc_RNA (1)...(19): siRNA sense strand
uauaaggaaguaaaggcaa

SEQ ID NO: 2445706 - RNA, 19 nt, Homo sapiens
  misc_RNA (1)...(19): siRNA sense strand
aggcaagaaaugcacaauu

SEQ ID NO: 2445707 - RNA, 19 nt, Homo sapiens
  misc_RNA (1)...(19): siRNA sense strand
acaaguggauaguggcagu

SEQ ID NO: 2445708 - RNA, 19 nt, Homo sapiens
  misc_RNA (1)...(19): siRNA sense strand
ggaguaugaagaugcugaa

SEQ ID NO: 2445709 - RNA, 19 nt, Homo sapiens
  misc_RNA (1)...(19): siRNA sense strand
aaaggaaagaugcugaaau

SEQ ID NO: 2445710 - RNA, 19 nt, Homo sapiens
  misc_RNA (1)...(19): siRNA sense strand
agcaacagagugaagcaaa

SEQ ID NO: 2445711 - RNA, 19 nt, Homo sapiens
  misc_RNA (1)...(19): siRNA sense strand
ggugaggacaugaggaaaa

SEQ ID NO: 2445712 - RNA, 19 nt, Homo sapiens
  misc_RNA (1)...(19): siRNA sense strand
gggugaagggccagagcuu

SEQ ID NO: 2445713 - RNA, 19 nt, Homo sapiens
  misc_RNA (1)...(19): siRNA sense strand
gcacagagaagguggacgu

SEQ ID NO: 2445714 - RNA, 19 nt, Homo sapiens
  misc_RNA (1)...(19): siRNA sense strand
ugaucagggugaagggcca

SEQ ID NO: 2445715 - RNA, 19 nt, Homo sapiens
  misc_RNA (1)...(19): siRNA sense strand
ccuauucgggcaagggcua

SEQ ID NO: 2445716 - RNA, 19 nt, Homo sapiens
  misc_RNA (1)...(19): siRNA sense strand
agaagguggacgugcccaa

SEQ ID NO: 2445717 - RNA, 19 nt, Homo sapiens
  misc_RNA (1)...(19): siRNA sense strand
acguucaggaugagaccua

SEQ ID NO: 2445718 - RNA, 19 nt, Homo sapiens
  misc_RNA (1)...(19): siRNA sense strand
auggugaggacaugaggaa

SEQ ID NO: 2445719 - RNA, 19 nt, Homo sapiens
  misc_RNA (1)...(19): siRNA sense strand
uagaaaagaucaacagcca

SEQ ID NO: 2445720 - RNA, 19 nt, Homo sapiens
  misc_RNA (1)...(19): siRNA sense strand
cugggaggacggagaacau

SEQ ID NO: 2445721 - RNA, 19 nt, Homo sapiens
  misc_RNA (1)...(19): siRNA sense strand
agaaguacaaccagcgcuu

SEQ ID NO: 2445722 - RNA, 19 nt, Homo sapiens
  misc_RNA (1)...(19): siRNA sense strand
agguauaaucagaggauau

SEQ ID NO: 2445723 - RNA, 19 nt, Homo sapiens
  misc_RNA (1)...(19): siRNA sense strand
aggaaauacuagccagcaa

SEQ ID NO: 2445724 - RNA, 19 nt, Homo sapiens
  misc_RNA (1)...(19): siRNA sense strand
aggagaaaguucaggcagu

SEQ ID NO: 2445725 - RNA, 19 nt, Homo sapiens
  misc_RNA (1)...(19): siRNA sense strand
caaaucacucagaggaaaa

SEQ ID NO: 2445726 - RNA, 19 nt, Homo sapiens
  misc_RNA (1)...(19): siRNA sense strand
augaaagacaucagggcga

SEQ ID NO: 2445727 - RNA, 19 nt, Homo sapiens
  misc_RNA (1)...(19): siRNA sense strand
uggagacaguggugaggau

SEQ ID NO: 2445728 - RNA, 19 nt, Homo sapiens
  misc_RNA (1)...(19): siRNA sense strand
ccaaagagcagcuggagac

SEQ ID NO: 2445729 - RNA, 19 nt, Homo sapiens
  misc_RNA (1)...(19): siRNA sense strand
guuugcagcugaaggcaga

SEQ ID NO: 2445730 - RNA, 19 nt, Homo sapiens
  misc_RNA (1)...(19): siRNA sense strand
cuuuaugccucgaccucaa

SEQ ID NO: 2445731 - RNA, 19 nt, Homo sapiens
  misc_RNA (1)...(19): siRNA sense strand
ugccaaagugauuaaagaa

SEQ ID NO: 2445732 - RNA, 19 nt, Homo sapiens
  misc_RNA (1)...(19): siRNA sense strand
gaagauugcagcaggcagu

SEQ ID NO: 2445733 - RNA, 19 nt, Homo sapiens
  misc_RNA (1)...(19): siRNA sense strand
cuuuagaauaugugcucuu

SEQ ID NO: 2445734 - RNA, 19 nt, Homo sapiens
  misc_RNA (1)...(19): siRNA sense strand
gauucagacgacagugauu

SEQ ID NO: 2445735 - RNA, 19 nt, Homo sapiens
  misc_RNA (1)...(19): siRNA sense strand
gcagcugaaggcagaagua

SEQ ID NO: 2445736 - RNA, 19 nt, Homo sapiens
  misc_RNA (1)...(19): siRNA sense strand
gagccuucuaauagugaau

SEQ ID NO: 2445737 - RNA, 19 nt, Homo sapiens
  misc_RNA (1)...(19): siRNA sense strand
ugaaguacgacgaggaucu

SEQ ID NO: 2445738 - RNA, 19 nt, Homo sapiens
  misc_RNA (1)...(19): siRNA sense strand
gcgaaauuacagagagaga

SEQ ID NO: 2445739 - RNA, 19 nt, Homo sapiens
  misc_RNA (1)...(19): siRNA sense strand
ggguaaaagagaaaaggaa

SEQ ID NO: 2445740 - RNA, 19 nt, Homo sapiens
  misc_RNA (1)...(19): siRNA sense strand
gaagaguggugauagggua

SEQ ID NO: 2445741 - RNA, 19 nt, Homo sapiens
  misc_RNA (1)...(19): siRNA sense strand
gggaaagaugucacaggaa

SEQ ID NO: 2445742 - RNA, 19 nt, Homo sapiens
  misc_RNA (1)...(19): siRNA sense strand
gguaaaagagaaaaggaau

SEQ ID NO: 2445743 - RNA, 19 nt, Homo sapiens
  misc_RNA (1)...(19): siRNA sense strand
ggagagaaggggacugaaa

SEQ ID NO: 2445744 - RNA, 19 nt, Homo sapiens
  misc_RNA (1)...(19): siRNA sense strand
aagaguggugauaggguaa

SEQ ID NO: 2445745 - RNA, 19 nt, Homo sapiens
  misc_RNA (1)...(19): siRNA sense strand
ugauaggguaaaagagaaa

SEQ ID NO: 2445746 - RNA, 19 nt, Homo sapiens
  misc_RNA (1)...(19): siRNA sense strand
acgaugaaccggagaagga

SEQ ID NO: 2445747 - RNA, 19 nt, Homo sapiens
  misc_RNA (1)...(19): siRNA sense strand
agaagaaaauggagagaag

SEQ ID NO: 2445748 - RNA, 19 nt, Homo sapiens
  misc_RNA (1)...(19): siRNA sense strand
gagaaaaggaauaaaacca

SEQ ID NO: 2445749 - RNA, 19 nt, Homo sapiens
  misc_RNA (1)...(19): siRNA sense strand
acuucaggcugcuggagaa

SEQ ID NO: 2445750 - RNA, 19 nt, Homo sapiens
  misc_RNA (1)...(19): siRNA sense strand
ggaaagaugucacaggaag

SEQ ID NO: 2445751 - RNA, 19 nt, Homo sapiens
  misc_RNA (1)...(19): siRNA sense strand
agagaaggggacugaaaua

SEQ ID NO: 2445752 - RNA, 19 nt, Homo sapiens
  misc_RNA (1)...(19): siRNA sense strand
caucaacaagccagagaga

SEQ ID NO: 2445753 - RNA, 19 nt, Homo sapiens
  misc_RNA (1)...(19): siRNA sense strand
aagcaaaggaagauuuaca

SEQ ID NO: 2445754 - RNA, 19 nt, Homo sapiens
  misc_RNA (1)...(19): siRNA sense strand
ccacagaagaaaauggaga

SEQ ID NO: 2445755 - RNA, 19 nt, Homo sapiens
  misc_RNA (1)...(19): siRNA sense strand
ggaagaugauucugggccu

SEQ ID NO: 2445756 - RNA, 19 nt, Homo sapiens
  misc_RNA (1)...(19): siRNA sense strand
gagaaacugucgcuggaga

SEQ ID NO: 2445757 - RNA, 19 nt, Homo sapiens
  misc_RNA (1)...(19): siRNA sense strand
ucaauagagaacagagcau

SEQ ID NO: 2445758 - RNA, 19 nt, Homo sapiens
  misc_RNA (1)...(19): siRNA sense strand
agaaacugucgcuggagaa

SEQ ID NO: 2445759 - RNA, 19 nt, Homo sapiens
  misc_RNA (1)...(19): siRNA sense strand
cgccagcaacaguaagaaa

SEQ ID NO: 2445760 - RNA, 19 nt, Homo sapiens
  misc_RNA (1)...(19): siRNA sense strand
ucacuaugcuuauuggaga

SEQ ID NO: 2445761 - RNA, 19 nt, Homo sapiens
  misc_RNA (1)...(19): siRNA sense strand
cagugaacggagaguuaau

SEQ ID NO: 2445762 - RNA, 19 nt, Homo sapiens
  misc_RNA (1)...(19): siRNA sense strand
ggugauaggguaaaagaga

SEQ ID NO: 2445763 - RNA, 19 nt, Homo sapiens
  misc_RNA (1)...(19): siRNA sense strand
gggacauccagguucuaaa

SEQ ID NO: 2445764 - RNA, 19 nt, Homo sapiens
  misc_RNA (1)...(19): siRNA sense strand
gugauaggguaaaagagaa

SEQ ID NO: 2445765 - RNA, 19 nt, Homo sapiens
  misc_RNA (1)...(19): siRNA sense strand
aggaagaggcgcagagcug

SEQ ID NO: 2445766 - RNA, 19 nt, Homo sapiens
  misc_RNA (1)...(19): siRNA sense strand
uccaaauggccacaagaaa

SEQ ID NO: 2445767 - RNA, 19 nt, Homo sapiens
  misc_RNA (1)...(19): siRNA sense strand
cugcagugauucccagcaa

SEQ ID NO: 2445768 - RNA, 19 nt, Homo sapiens
  misc_RNA (1)...(19): siRNA sense strand
cuucacaacagcaggcaga

SEQ ID NO: 2445769 - RNA, 19 nt, Homo sapiens
  misc_RNA (1)...(19): siRNA sense strand
agaauggaauuuugggaga

SEQ ID NO: 2445770 - RNA, 19 nt, Homo sapiens
  misc_RNA (1)...(19): siRNA sense strand
cgaaauuacagagagagaa

SEQ ID NO: 2445771 - RNA, 19 nt, Homo sapiens
  misc_RNA (1)...(19): siRNA sense strand
gaacagagcauuggggaca

SEQ ID NO: 2445772 - RNA, 19 nt, Homo sapiens
  misc_RNA (1)...(19): siRNA sense strand
uggaaggaccacuugauau

SEQ ID NO: 2445773 - RNA, 19 nt, Homo sapiens
  misc_RNA (1)...(19): siRNA sense strand
gggaugggaaaguguacau

SEQ ID NO: 2445774 - RNA, 19 nt, Homo sapiens
  misc_RNA (1)...(19): siRNA sense strand
acauugaguuccagaugca

SEQ ID NO: 2445775 - RNA, 19 nt, Homo sapiens
  misc_RNA (1)...(19): siRNA sense strand
cccucaagauccucaacaa

SEQ ID NO: 2445776 - RNA, 19 nt, Homo sapiens
  misc_RNA (1)...(19): siRNA sense strand
gucuggaagcaaaggaaga

SEQ ID NO: 2445777 - RNA, 19 nt, Homo sapiens
  misc_RNA (1)...(19): siRNA sense strand
ucaucauccugaagacaga

SEQ ID NO: 2445778 - RNA, 19 nt, Homo sapiens
  misc_RNA (1)...(19): siRNA sense strand
cagcaagguacuagggaga

SEQ ID NO: 2445779 - RNA, 19 nt, Homo sapiens
  misc_RNA (1)...(19): siRNA sense strand
gggagcaacuggagggucu

SEQ ID NO: 2445780 - RNA, 19 nt, Homo sapiens
  misc_RNA (1)...(19): siRNA sense strand
ugacacuacgacaggguaa

SEQ ID NO: 2445781 - RNA, 19 nt, Homo sapiens
  misc_RNA (1)...(19): siRNA sense strand
acuaaaggaaggagccauu

SEQ ID NO: 2445782 - RNA, 19 nt, Homo sapiens
  misc_RNA (1)...(19): siRNA sense strand
uggugaaacagcugaguga

SEQ ID NO: 2445783 - RNA, 19 nt, Homo sapiens
  misc_RNA (1)...(19): siRNA sense strand
ucugaaaacuggaggacga

SEQ ID NO: 2445784 - RNA, 19 nt, Homo sapiens
  misc_RNA (1)...(19): siRNA sense strand
aggacgagcaugggagcaa

SEQ ID NO: 2445785 - RNA, 19 nt, Homo sapiens
  misc_RNA (1)...(19): siRNA sense strand
gagcaugggagcaaggcca

SEQ ID NO: 2445786 - RNA, 19 nt, Homo sapiens
  misc_RNA (1)...(19): siRNA sense strand
cgacaggguaagcggccuu

SEQ ID NO: 2445787 - RNA, 19 nt, Homo sapiens
  misc_RNA (1)...(19): siRNA sense strand
uucccuugguggagagcua

SEQ ID NO: 2445788 - RNA, 19 nt, Homo sapiens
  misc_RNA (1)...(19): siRNA sense strand
ugacagaacugaagagcca

SEQ ID NO: 2445789 - RNA, 19 nt, Homo sapiens
  misc_RNA (1)...(19): siRNA sense strand
aggaggaggucgaggagga

SEQ ID NO: 2445790 - RNA, 19 nt, Homo sapiens
  misc_RNA (1)...(19): siRNA sense strand
ggaggacagagaugaguua

SEQ ID NO: 2445791 - RNA, 19 nt, Homo sapiens
  misc_RNA (1)...(19): siRNA sense strand
gugcagaagaugaaagcca

SEQ ID NO: 2445792 - RNA, 19 nt, Homo sapiens
  misc_RNA (1)...(19): siRNA sense strand
augaagacuacgaggguga

SEQ ID NO: 2445793 - RNA, 19 nt, Homo sapiens
  misc_RNA (1)...(19): siRNA sense strand
aggaggaagaccuggacua

SEQ ID NO: 2445794 - RNA, 19 nt, Homo sapiens
  misc_RNA (1)...(19): siRNA sense strand
aggaggacgaggaggaaga

SEQ ID NO: 2445795 - RNA, 19 nt, Homo sapiens
  misc_RNA (1)...(19): siRNA sense strand
gggaggaugaggaggacga

SEQ ID NO: 2445796 - RNA, 19 nt, Homo sapiens
  misc_RNA (1)...(19): siRNA sense strand
aggcagugcagaagaugaa

SEQ ID NO: 2445797 - RNA, 19 nt, Homo sapiens
  misc_RNA (1)...(19): siRNA sense strand
gugaagagguacagcugca

SEQ ID NO: 2445798 - RNA, 19 nt, Homo sapiens
  misc_RNA (1)...(19): siRNA sense strand
aggaugaggaggacagaga

SEQ ID NO: 2445799 - RNA, 19 nt, Homo sapiens
  misc_RNA (1)...(19): siRNA sense strand
gggacauggaggaggagga

SEQ ID NO: 2445800 - RNA, 19 nt, Homo sapiens
  misc_RNA (1)...(19): siRNA sense strand
agaugaaagccaaggagga

SEQ ID NO: 2445801 - RNA, 19 nt, Homo sapiens
  misc_RNA (1)...(19): siRNA sense strand
acggagaggaggaggaagu

SEQ ID NO: 2445802 - RNA, 19 nt, Homo sapiens
  misc_RNA (1)...(19): siRNA sense strand
aggaagugcuggaggaggu

SEQ ID NO: 2445803 - RNA, 19 nt, Homo sapiens
  misc_RNA (1)...(19): siRNA sense strand
aggaggaggaggacggaga

SEQ ID NO: 2445804 - RNA, 19 nt, Homo sapiens
  misc_RNA (1)...(19): siRNA sense strand
aggaggaaguggaggcugu

SEQ ID NO: 2445805 - RNA, 19 nt, Homo sapiens
  misc_RNA (1)...(19): siRNA sense strand
aggaggaggacgaggagga

SEQ ID NO: 2445806 - RNA, 19 nt, Homo sapiens
  misc_RNA (1)...(19): siRNA sense strand
aggaggaagaagagggugu

SEQ ID NO: 2445807 - RNA, 19 nt, Homo sapiens
  misc_RNA (1)...(19): siRNA sense strand
aggaggaagugcuggagga

SEQ ID NO: 2445808 - RNA, 19 nt, Homo sapiens
  misc_RNA (1)...(19): siRNA sense strand
ggaggagaggcgagugaca

SEQ ID NO: 2445809 - RNA, 19 nt, Homo sapiens
  misc_RNA (1)...(19): siRNA sense strand
agguagacgaagaggccau

SEQ ID NO: 2445810 - RNA, 19 nt, Homo sapiens
  misc_RNA (1)...(19): siRNA sense strand
ggaagcaccuggaggcagu

SEQ ID NO: 2445811 - RNA, 19 nt, Homo sapiens
  misc_RNA (1)...(19): siRNA sense strand
cgagaauccaggagccaca

SEQ ID NO: 2445812 - RNA, 19 nt, Homo sapiens
  misc_RNA (1)...(19): siRNA sense strand
uggaggagguggugcagga

SEQ ID NO: 2445813 - RNA, 19 nt, Homo sapiens
  misc_RNA (1)...(19): siRNA sense strand
gugcaggaguacaaggcca

SEQ ID NO: 2445814 - RNA, 19 nt, Homo sapiens
  misc_RNA (1)...(19): siRNA sense strand
gagaugaguuagaucggga

SEQ ID NO: 2445815 - RNA, 19 nt, Homo sapiens
  misc_RNA (1)...(19): siRNA sense strand
aggucgaggaggaagaaga

SEQ ID NO: 2445816 - RNA, 19 nt, Homo sapiens
  misc_RNA (1)...(19): siRNA sense strand
aguuagaucgggaggagga

SEQ ID NO: 2445817 - RNA, 19 nt, Homo sapiens
  misc_RNA (1)...(19): siRNA sense strand
aggaggucgaggaggaaga

SEQ ID NO: 2445818 - RNA, 19 nt, Homo sapiens
  misc_RNA (1)...(19): siRNA sense strand
aggaggacgaggaggaagu

SEQ ID NO: 2445819 - RNA, 19 nt, Homo sapiens
  misc_RNA (1)...(19): siRNA sense strand
agguugaggaagaggaucu

SEQ ID NO: 2445820 - RNA, 19 nt, Homo sapiens
  misc_RNA (1)...(19): siRNA sense strand
agguggugcaggaguacaa

SEQ ID NO: 2445821 - RNA, 19 nt, Homo sapiens
  misc_RNA (1)...(19): siRNA sense strand
acauggaggaggaggucga

SEQ ID NO: 2445822 - RNA, 19 nt, Homo sapiens
  misc_RNA (1)...(19): siRNA sense strand
augaggaggacgaggagga

SEQ ID NO: 2445823 - RNA, 19 nt, Homo sapiens
  misc_RNA (1)...(19): siRNA sense strand
aggagaggcgagugacaga

SEQ ID NO: 2445824 - RNA, 19 nt, Homo sapiens
  misc_RNA (1)...(19): siRNA sense strand
aggacagagaugaguuaga

SEQ ID NO: 2445825 - RNA, 19 nt, Homo sapiens
  misc_RNA (1)...(19): siRNA sense strand
ggacggagaggaggaggaa

SEQ ID NO: 2445826 - RNA, 19 nt, Homo sapiens
  misc_RNA (1)...(19): siRNA sense strand
gagaggaggaggaagugga

SEQ ID NO: 2445827 - RNA, 19 nt, Homo sapiens
  misc_RNA (1)...(19): siRNA sense strand
agggugacauggaggagga

SEQ ID NO: 2445828 - RNA, 19 nt, Homo sapiens
  misc_RNA (1)...(19): siRNA sense strand
ugcagaagaugaaagccaa

SEQ ID NO: 2445829 - RNA, 19 nt, Homo sapiens
  misc_RNA (1)...(19): siRNA sense strand
ugacagaacugaagagcca

SEQ ID NO: 2445830 - RNA, 19 nt, Homo sapiens
  misc_RNA (1)...(19): siRNA sense strand
aggaggaggucgaggagga

SEQ ID NO: 2445831 - RNA, 19 nt, Homo sapiens
  misc_RNA (1)...(19): siRNA sense strand
ggaggacagagaugaguua

SEQ ID NO: 2445832 - RNA, 19 nt, Homo sapiens
  misc_RNA (1)...(19): siRNA sense strand
gugcagaagaugaaagcca

SEQ ID NO: 2445833 - RNA, 19 nt, Homo sapiens
  misc_RNA (1)...(19): siRNA sense strand
augaagacuacgaggguga

SEQ ID NO: 2445834 - RNA, 19 nt, Homo sapiens
  misc_RNA (1)...(19): siRNA sense strand
aggaggaagaccuggacua

SEQ ID NO: 2445835 - RNA, 19 nt, Homo sapiens
  misc_RNA (1)...(19): siRNA sense strand
aggaggacgaggaggaaga

SEQ ID NO: 2445836 - RNA, 19 nt, Homo sapiens
  misc_RNA (1)...(19): siRNA sense strand
gggaggaugaggaggacga

SEQ ID NO: 2445837 - RNA, 19 nt, Homo sapiens
  misc_RNA (1)...(19): siRNA sense strand
aggcagugcagaagaugaa

SEQ ID NO: 2445838 - RNA, 19 nt, Homo sapiens
  misc_RNA (1)...(19): siRNA sense strand
gugaagagguacagcugca

SEQ ID NO: 2445839 - RNA, 19 nt, Homo sapiens
  misc_RNA (1)...(19): siRNA sense strand
aggaugaggaggacagaga

SEQ ID NO: 2445840 - RNA, 19 nt, Homo sapiens
  misc_RNA (1)...(19): siRNA sense strand
gggacauggaggaggagga

SEQ ID NO: 2445841 - RNA, 19 nt, Homo sapiens
  misc_RNA (1)...(19): siRNA sense strand
agaugaaagccaaggagga

SEQ ID NO: 2445842 - RNA, 19 nt, Homo sapiens
  misc_RNA (1)...(19): siRNA sense strand
acggagaggaggaggaagu

SEQ ID NO: 2445843 - RNA, 19 nt, Homo sapiens
  misc_RNA (1)...(19): siRNA sense strand
aggaagugcuggaggaggu

SEQ ID NO: 2445844 - RNA, 19 nt, Homo sapiens
  misc_RNA (1)...(19): siRNA sense strand
aggaggaggaggacggaga

SEQ ID NO: 2445845 - RNA, 19 nt, Homo sapiens
  misc_RNA (1)...(19): siRNA sense strand
aggaggaaguggaggcugu

SEQ ID NO: 2445846 - RNA, 19 nt, Homo sapiens
  misc_RNA (1)...(19): siRNA sense strand
aggaggaggacgaggagga

SEQ ID NO: 2445847 - RNA, 19 nt, Homo sapiens
  misc_RNA (1)...(19): siRNA sense strand
aggaggaagaagagggugu

SEQ ID NO: 2445848 - RNA, 19 nt, Homo sapiens
  misc_RNA (1)...(19): siRNA sense strand
aggaggaagugcuggagga

SEQ ID NO: 2445849 - RNA, 19 nt, Homo sapiens
  misc_RNA (1)...(19): siRNA sense strand
ggaggagaggcgagugaca

SEQ ID NO: 2445850 - RNA, 19 nt, Homo sapiens
  misc_RNA (1)...(19): siRNA sense strand
agguagacgaagaggccau

SEQ ID NO: 2445851 - RNA, 19 nt, Homo sapiens
  misc_RNA (1)...(19): siRNA sense strand
ggaagcaccuggaggcagu

SEQ ID NO: 2445852 - RNA, 19 nt, Homo sapiens
  misc_RNA (1)...(19): siRNA sense strand
cgagaauccaggagccaca

SEQ ID NO: 2445853 - RNA, 19 nt, Homo sapiens
  misc_RNA (1)...(19): siRNA sense strand
uggaggagguggugcagga

SEQ ID NO: 2445854 - RNA, 19 nt, Homo sapiens
  misc_RNA (1)...(19): siRNA sense strand
gugcaggaguacaaggcca

SEQ ID NO: 2445855 - RNA, 19 nt, Homo sapiens
  misc_RNA (1)...(19): siRNA sense strand
cggccagaauuuagcuuca

SEQ ID NO: 2445856 - RNA, 19 nt, Homo sapiens
  misc_RNA (1)...(19): siRNA sense strand
gagaugaguuagaucggga

SEQ ID NO: 2445857 - RNA, 19 nt, Homo sapiens
  misc_RNA (1)...(19): siRNA sense strand
aggucgaggaggaagaaga

SEQ ID NO: 2445858 - RNA, 19 nt, Homo sapiens
  misc_RNA (1)...(19): siRNA sense strand
aguuagaucgggaggagga

SEQ ID NO: 2445859 - RNA, 19 nt, Homo sapiens
  misc_RNA (1)...(19): siRNA sense strand
aggaggucgaggaggaaga

SEQ ID NO: 2445860 - RNA, 19 nt, Homo sapiens
  misc_RNA (1)...(19): siRNA sense strand
aggaggacgaggaggaagu

SEQ ID NO: 2445861 - RNA, 19 nt, Homo sapiens
  misc_RNA (1)...(19): siRNA sense strand
agguugaggaagaggaucu

SEQ ID NO: 2445862 - RNA, 19 nt, Homo sapiens
  misc_RNA (1)...(19): siRNA sense strand
agguggugcaggaguacaa

SEQ ID NO: 2445863 - RNA, 19 nt, Homo sapiens
  misc_RNA (1)...(19): siRNA sense strand
acauggaggaggaggucga

SEQ ID NO: 2445864 - RNA, 19 nt, Homo sapiens
  misc_RNA (1)...(19): siRNA sense strand
augaggaggacgaggagga

SEQ ID NO: 2445865 - RNA, 19 nt, Homo sapiens
  misc_RNA (1)...(19): siRNA sense strand
aggagaggcgagugacaga

SEQ ID NO: 2445866 - RNA, 19 nt, Homo sapiens
  misc_RNA (1)...(19): siRNA sense strand
aggacagagaugaguuaga

SEQ ID NO: 2445867 - RNA, 19 nt, Homo sapiens
  misc_RNA (1)...(19): siRNA sense strand
ggacggagaggaggaggaa

SEQ ID NO: 2445868 - RNA, 19 nt, Homo sapiens
  misc_RNA (1)...(19): siRNA sense strand
gagaggaggaggaagugga

SEQ ID NO: 2445869 - RNA, 19 nt, Homo sapiens
  misc_RNA (1)...(19): siRNA sense strand
agggugacauggaggagga

SEQ ID NO: 2445870 - RNA, 19 nt, Homo sapiens
  misc_RNA (1)...(19): siRNA sense strand
ugcagaagaugaaagccaa

SEQ ID NO: 2445871 - RNA, 19 nt, Homo sapiens
  misc_RNA (1)...(19): siRNA sense strand
caggaaaucagcaggcaca

SEQ ID NO: 2445872 - RNA, 19 nt, Homo sapiens
  misc_RNA (1)...(19): siRNA sense strand
caggaggccuugaugguga

SEQ ID NO: 2445873 - RNA, 19 nt, Homo sapiens
  misc_RNA (1)...(19): siRNA sense strand
ucugcagaguccaggaaau

SEQ ID NO: 2445874 - RNA, 19 nt, Homo sapiens
  misc_RNA (1)...(19): siRNA sense strand
aggccuugauggugaagau

SEQ ID NO: 2445875 - RNA, 19 nt, Homo sapiens
  misc_RNA (1)...(19): siRNA sense strand
ggugcaguacuaugggaau

SEQ ID NO: 2445876 - RNA, 19 nt, Homo sapiens
  misc_RNA (1)...(19): siRNA sense strand
aggaacaaguggacggccu

SEQ ID NO: 2445877 - RNA, 19 nt, Homo sapiens
  misc_RNA (1)...(19): siRNA sense strand
gagaauaaauugugggaug

SEQ ID NO: 2445878 - RNA, 19 nt, Homo sapiens
  misc_RNA (1)...(19): siRNA sense strand
gagcaaagcaaguggcaca

SEQ ID NO: 2445879 - RNA, 19 nt, Homo sapiens
  misc_RNA (1)...(19): siRNA sense strand
augaaaagcuaaagggaga

SEQ ID NO: 2445880 - RNA, 19 nt, Homo sapiens
  misc_RNA (1)...(19): siRNA sense strand
guuacagggaagaaagaaa

SEQ ID NO: 2445881 - RNA, 19 nt, Homo sapiens
  misc_RNA (1)...(19): siRNA sense strand
ccagaagcacaguaagaaa

SEQ ID NO: 2445882 - RNA, 19 nt, Homo sapiens
  misc_RNA (1)...(19): siRNA sense strand
agaacauguaucagaguua

SEQ ID NO: 2445883 - RNA, 19 nt, Homo sapiens
  misc_RNA (1)...(19): siRNA sense strand
agacaggacaagacugaaa

SEQ ID NO: 2445884 - RNA, 19 nt, Homo sapiens
  misc_RNA (1)...(19): siRNA sense strand
gcaugaaagauguacaaau

SEQ ID NO: 2445885 - RNA, 19 nt, Homo sapiens
  misc_RNA (1)...(19): siRNA sense strand
ccucaaauaaggucagaau

SEQ ID NO: 2445886 - RNA, 19 nt, Homo sapiens
  misc_RNA (1)...(19): siRNA sense strand
agaagaaacagcagagcuu

SEQ ID NO: 2445887 - RNA, 19 nt, Homo sapiens
  misc_RNA (1)...(19): siRNA sense strand
ggcuagaagaacucagaaa

SEQ ID NO: 2445888 - RNA, 19 nt, Homo sapiens
  misc_RNA (1)...(19): siRNA sense strand
auaugaagagagagagcaa

SEQ ID NO: 2445889 - RNA, 19 nt, Homo sapiens
  misc_RNA (1)...(19): siRNA sense strand
gcacugaaauuaagccaga

SEQ ID NO: 2445890 - RNA, 19 nt, Homo sapiens
  misc_RNA (1)...(19): siRNA sense strand
ggaagaaagaaaagacauu

SEQ ID NO: 2445891 - RNA, 19 nt, Homo sapiens
  misc_RNA (1)...(19): siRNA sense strand
ggauaaaguuacugaugcu

SEQ ID NO: 2445892 - RNA, 19 nt, Homo sapiens
  misc_RNA (1)...(19): siRNA sense strand
gcauuaggagaaagaacua

SEQ ID NO: 2445893 - RNA, 19 nt, Homo sapiens
  misc_RNA (1)...(19): siRNA sense strand
aggcaacagcaaaggguau

SEQ ID NO: 2445894 - RNA, 19 nt, Homo sapiens
  misc_RNA (1)...(19): siRNA sense strand
caggagugcaucagagaau

SEQ ID NO: 2445895 - RNA, 19 nt, Homo sapiens
  misc_RNA (1)...(19): siRNA sense strand
uguaaaugguaucaagaga

SEQ ID NO: 2445896 - RNA, 19 nt, Homo sapiens
  misc_RNA (1)...(19): siRNA sense strand
cuagaagaacucagaaaca

SEQ ID NO: 2445897 - RNA, 19 nt, Homo sapiens
  misc_RNA (1)...(19): siRNA sense strand
cuguacagauugagcccua

SEQ ID NO: 2445898 - RNA, 19 nt, Homo sapiens
  misc_RNA (1)...(19): siRNA sense strand
cacauugacugcagagaau

SEQ ID NO: 2445899 - RNA, 19 nt, Homo sapiens
  misc_RNA (1)...(19): siRNA sense strand
ggaucagguugaaagguca

SEQ ID NO: 2445900 - RNA, 19 nt, Homo sapiens
  misc_RNA (1)...(19): siRNA sense strand
uuucagaccuagaaugcaa

SEQ ID NO: 2445901 - RNA, 19 nt, Homo sapiens
  misc_RNA (1)...(19): siRNA sense strand
ccauaaaugucuggcuaau

SEQ ID NO: 2445902 - RNA, 19 nt, Homo sapiens
  misc_RNA (1)...(19): siRNA sense strand
agaaaagacauuugaguga

SEQ ID NO: 2445903 - RNA, 19 nt, Homo sapiens
  misc_RNA (1)...(19): siRNA sense strand
cauugacugcagagaauaa

SEQ ID NO: 2445904 - RNA, 19 nt, Homo sapiens
  misc_RNA (1)...(19): siRNA sense strand
augacgauuuggaugaaua

SEQ ID NO: 2445905 - RNA, 19 nt, Homo sapiens
  misc_RNA (1)...(19): siRNA sense strand
ccaacaacuaacagacauu

SEQ ID NO: 2445906 - RNA, 19 nt, Homo sapiens
  misc_RNA (1)...(19): siRNA sense strand
ucaaauaaggucagaaucu

SEQ ID NO: 2445907 - RNA, 19 nt, Homo sapiens
  misc_RNA (1)...(19): siRNA sense strand
gugcaugaaagauguacaa

SEQ ID NO: 2445908 - RNA, 19 nt, Homo sapiens
  misc_RNA (1)...(19): siRNA sense strand
cagcaaaggguaucagcuu

SEQ ID NO: 2445909 - RNA, 19 nt, Homo sapiens
  misc_RNA (1)...(19): siRNA sense strand
cuucaguagcagucagcaa

SEQ ID NO: 2445910 - RNA, 19 nt, Homo sapiens
  misc_RNA (1)...(19): siRNA sense strand
uggaauggaagaauacaaa

SEQ ID NO: 2445911 - RNA, 19 nt, Homo sapiens
  misc_RNA (1)...(19): siRNA sense strand
uuguguaagcaaacagaaa

SEQ ID NO: 2445912 - RNA, 19 nt, Homo sapiens
  misc_RNA (1)...(19): siRNA sense strand
agaagaacucagaaacauu

SEQ ID NO: 2445913 - RNA, 19 nt, Homo sapiens
  misc_RNA (1)...(19): siRNA sense strand
uccaaauccuguagccaua

SEQ ID NO: 2445914 - RNA, 19 nt, Homo sapiens
  misc_RNA (1)...(19): siRNA sense strand
cacuaaacauucuagggaa

SEQ ID NO: 2445915 - RNA, 19 nt, Homo sapiens
  misc_RNA (1)...(19): siRNA sense strand
gugaaacagcauuaggaga

SEQ ID NO: 2445916 - RNA, 19 nt, Homo sapiens
  misc_RNA (1)...(19): siRNA sense strand
agucagauggaauggaaga

SEQ ID NO: 2445917 - RNA, 19 nt, Homo sapiens
  misc_RNA (1)...(19): siRNA sense strand
aguuacugaugcugagauu

SEQ ID NO: 2445918 - RNA, 19 nt, Homo sapiens
  misc_RNA (1)...(19): siRNA sense strand
gcacagaagaaacagcaga

SEQ ID NO: 2445919 - RNA, 19 nt, Homo sapiens
  misc_RNA (1)...(19): siRNA sense strand
cuguauaauggcagcaaca

SEQ ID NO: 2445920 - RNA, 19 nt, Homo sapiens
  misc_RNA (1)...(19): siRNA sense strand
gcuuguagacagagcacga

SEQ ID NO: 2445921 - RNA, 19 nt, Homo sapiens
  misc_RNA (1)...(19): siRNA sense strand
acucugaaucaauggagaa

SEQ ID NO: 2445922 - RNA, 19 nt, Homo sapiens
  misc_RNA (1)...(19): siRNA sense strand
ccagaacuguagaugaaaa

SEQ ID NO: 2445923 - RNA, 19 nt, Homo sapiens
  misc_RNA (1)...(19): siRNA sense strand
ugcagaugcuccuggcaaa

SEQ ID NO: 2445924 - RNA, 19 nt, Homo sapiens
  misc_RNA (1)...(19): siRNA sense strand
ccuagaagaaugucagcuu

SEQ ID NO: 2445925 - RNA, 19 nt, Homo sapiens
  misc_RNA (1)...(19): siRNA sense strand
agcaaguggcacagaagaa

SEQ ID NO: 2445926 - RNA, 19 nt, Homo sapiens
  misc_RNA (1)...(19): siRNA sense strand
ccuauuaagagaacaugua

SEQ ID NO: 2445927 - RNA, 19 nt, Homo sapiens
  misc_RNA (1)...(19): siRNA sense strand
agacugaaauaaaaggcaa

SEQ ID NO: 2445928 - RNA, 19 nt, Homo sapiens
  misc_RNA (1)...(19): siRNA sense strand
accuaaaugcacugaaauu

SEQ ID NO: 2445929 - RNA, 19 nt, Homo sapiens
  misc_RNA (1)...(19): siRNA sense strand
agccagaaguuaacacauu

SEQ ID NO: 2445930 - RNA, 19 nt, Homo sapiens
  misc_RNA (1)...(19): siRNA sense strand
acacauugacugcagagaa

SEQ ID NO: 2445931 - RNA, 19 nt, Homo sapiens
  misc_RNA (1)...(19): siRNA sense strand
gagaaugcacuuuuggaua

SEQ ID NO: 2445932 - RNA, 19 nt, Homo sapiens
  misc_RNA (1)...(19): siRNA sense strand
ugaaauuaagccagaaguu

SEQ ID NO: 2445933 - RNA, 19 nt, Homo sapiens
  misc_RNA (1)...(19): siRNA sense strand
cugaugacgauuuggauga

SEQ ID NO: 2445934 - RNA, 19 nt, Homo sapiens
  misc_RNA (1)...(19): siRNA sense strand
ccagaauucaucacgaaau

SEQ ID NO: 2445935 - RNA, 19 nt, Homo sapiens
  misc_RNA (1)...(19): siRNA sense strand
uaggcaaagaagagauaga

SEQ ID NO: 2445936 - RNA, 19 nt, Homo sapiens
  misc_RNA (1)...(19): siRNA sense strand
cuucagagaaccaggaucu

SEQ ID NO: 2445937 - RNA, 19 nt, Homo sapiens
  misc_RNA (1)...(19): siRNA sense strand
cagaagcacaguaagaaaa

SEQ ID NO: 2445938 - RNA, 19 nt, Homo sapiens
  misc_RNA (1)...(19): siRNA sense strand
ccauggagucugacaagau

SEQ ID NO: 2445939 - RNA, 19 nt, Homo sapiens
  misc_RNA (1)...(19): siRNA sense strand
acagacauucacaggcaaa

SEQ ID NO: 2445940 - RNA, 19 nt, Homo sapiens
  misc_RNA (1)...(19): siRNA sense strand
acaucaaccuggagaaaga

SEQ ID NO: 2445941 - RNA, 19 nt, Homo sapiens
  misc_RNA (1)...(19): siRNA sense strand
caagaaauggaauggagaa

SEQ ID NO: 2445942 - RNA, 19 nt, Homo sapiens
  misc_RNA (1)...(19): siRNA sense strand
ugaagaaagugaacuggaa

SEQ ID NO: 2445943 - RNA, 19 nt, Homo sapiens
  misc_RNA (1)...(19): siRNA sense strand
gggaccugguagagcgaau

SEQ ID NO: 2445944 - RNA, 19 nt, Homo sapiens
  misc_RNA (1)...(19): siRNA sense strand
cgacaucaaccuggagaaa

SEQ ID NO: 2445945 - RNA, 19 nt, Homo sapiens
  misc_RNA (1)...(19): siRNA sense strand
agcaagaacugaagaaagu

SEQ ID NO: 2445946 - RNA, 19 nt, Homo sapiens
  misc_RNA (1)...(19): siRNA sense strand
gcucagaacaacugcacuu

SEQ ID NO: 2445947 - RNA, 19 nt, Homo sapiens
  misc_RNA (1)...(19): siRNA sense strand
uggucaaccucguggacuu

SEQ ID NO: 2445948 - RNA, 19 nt, Homo sapiens
  misc_RNA (1)...(19): siRNA sense strand
acacacagcgugaggacuu

SEQ ID NO: 2445949 - RNA, 19 nt, Homo sapiens
  misc_RNA (1)...(19): siRNA sense strand
ccugguagagcgaaugaaa

SEQ ID NO: 2445950 - RNA, 19 nt, Homo sapiens
  misc_RNA (1)...(19): siRNA sense strand
acuaaauguggcagcggaa

SEQ ID NO: 2445951 - RNA, 19 nt, Homo sapiens
  misc_RNA (1)...(19): siRNA sense strand
agaagcaagaacugaagaa

SEQ ID NO: 2445952 - RNA, 19 nt, Homo sapiens
  misc_RNA (1)...(19): siRNA sense strand
gggucaacgacuuguguca

SEQ ID NO: 2445953 - RNA, 19 nt, Homo sapiens
  misc_RNA (1)...(19): siRNA sense strand
ugaaccacuuggaagcaaa

SEQ ID NO: 2445954 - RNA, 19 nt, Homo sapiens
  misc_RNA (1)...(19): siRNA sense strand
uguacagaguggaaggcuu

SEQ ID NO: 2445955 - RNA, 19 nt, Homo sapiens
  misc_RNA (1)...(19): siRNA sense strand
uggagaagcaagaacugaa

SEQ ID NO: 2445956 - RNA, 19 nt, Homo sapiens
  misc_RNA (1)...(19): siRNA sense strand
gugucauuacugugagaau

SEQ ID NO: 2445957 - RNA, 19 nt, Homo sapiens
  misc_RNA (1)...(19): siRNA sense strand
gaagcaagaacugaagaaa

SEQ ID NO: 2445958 - RNA, 19 nt, Homo sapiens
  misc_RNA (1)...(19): siRNA sense strand
guucugacccugcgggaga

SEQ ID NO: 2445959 - RNA, 19 nt, Homo sapiens
  misc_RNA (1)...(19): siRNA sense strand
cugagaaccccucggaaua

SEQ ID NO: 2445960 - RNA, 19 nt, Homo sapiens
  misc_RNA (1)...(19): siRNA sense strand
aaacaacuccagugaccua

SEQ ID NO: 2445961 - RNA, 19 nt, Homo sapiens
  misc_RNA (1)...(19): siRNA sense strand
ucaacgugguggaggucau

SEQ ID NO: 2445962 - RNA, 19 nt, Homo sapiens
  misc_RNA (1)...(19): siRNA sense strand
acaagaaauggaauggaga

SEQ ID NO: 2445963 - RNA, 19 nt, Homo sapiens
  misc_RNA (1)...(19): siRNA sense strand
gagcuaacaagaaauggaa

SEQ ID NO: 2445964 - RNA, 19 nt, Homo sapiens
  misc_RNA (1)...(19): siRNA sense strand
gugagaauccggaggccca

SEQ ID NO: 2445965 - RNA, 19 nt, Homo sapiens
  misc_RNA (1)...(19): siRNA sense strand
gcuaacaagaaauggaaug

SEQ ID NO: 2445966 - RNA, 19 nt, Homo sapiens
  misc_RNA (1)...(19): siRNA sense strand
gacaacagcaaguagucaa

SEQ ID NO: 2445967 - RNA, 19 nt, Homo sapiens
  misc_RNA (1)...(19): siRNA sense strand
gcuaugacacgcaggagga

SEQ ID NO: 2445968 - RNA, 19 nt, Homo sapiens
  misc_RNA (1)...(19): siRNA sense strand
ccaauaugcuugaaccacu

SEQ ID NO: 2445969 - RNA, 19 nt, Homo sapiens
  misc_RNA (1)...(19): siRNA sense strand
ccgacaucaaccuggagaa

SEQ ID NO: 2445970 - RNA, 19 nt, Homo sapiens
  misc_RNA (1)...(19): siRNA sense strand
ggaccugagagcagagaug

SEQ ID NO: 2445971 - RNA, 19 nt, Homo sapiens
  misc_RNA (1)...(19): siRNA sense strand
aggccagcguuuuguguaa

SEQ ID NO: 2445972 - RNA, 19 nt, Homo sapiens
  misc_RNA (1)...(19): siRNA sense strand
caagaacugaagaaaguga

SEQ ID NO: 2445973 - RNA, 19 nt, Homo sapiens
  misc_RNA (1)...(19): siRNA sense strand
ggagcuaacaagaaaugga

SEQ ID NO: 2445974 - RNA, 19 nt, Homo sapiens
  misc_RNA (1)...(19): siRNA sense strand
cccacuuggccacggaaua

SEQ ID NO: 2445975 - RNA, 19 nt, Homo sapiens
  misc_RNA (1)...(19): siRNA sense strand
gcgaagucgacgaggagga

SEQ ID NO: 2445976 - RNA, 19 nt, Homo sapiens
  misc_RNA (1)...(19): siRNA sense strand
ucaagaaacugacuggaca

SEQ ID NO: 2445977 - RNA, 19 nt, Homo sapiens
  misc_RNA (1)...(19): siRNA sense strand
caagaaacugacuggacau

SEQ ID NO: 2445978 - RNA, 19 nt, Homo sapiens
  misc_RNA (1)...(19): siRNA sense strand
uuaaagaguugcaugcuga

SEQ ID NO: 2445979 - RNA, 19 nt, Homo sapiens
  misc_RNA (1)...(19): siRNA sense strand
cugccagguucaagaaacu

SEQ ID NO: 2445980 - RNA, 19 nt, Homo sapiens
  misc_RNA (1)...(19): siRNA sense strand
aguugcaugcugagaauuu

SEQ ID NO: 2445981 - RNA, 19 nt, Homo sapiens
  misc_RNA (1)...(19): siRNA sense strand
gggcuauagcauggcgauu

SEQ ID NO: 2445982 - RNA, 19 nt, Homo sapiens
  misc_RNA (1)...(19): siRNA sense strand
gagcaaaucucaaacggau

SEQ ID NO: 2445983 - RNA, 19 nt, Homo sapiens
  misc_RNA (1)...(19): siRNA sense strand
cuguauggaauguggacua

SEQ ID NO: 2445984 - RNA, 19 nt, Homo sapiens
  misc_RNA (1)...(19): siRNA sense strand
cauccaagggcaagcacaa

SEQ ID NO: 2445985 - RNA, 19 nt, Homo sapiens
  misc_RNA (1)...(19): siRNA sense strand
gcacagaaccuagaggcua

SEQ ID NO: 2445986 - RNA, 19 nt, Homo sapiens
  misc_RNA (1)...(19): siRNA sense strand
cauaaagaacagagaugca

SEQ ID NO: 2445987 - RNA, 19 nt, Homo sapiens
  misc_RNA (1)...(19): siRNA sense strand
acauuacaguugaggacau

SEQ ID NO: 2445988 - RNA, 19 nt, Homo sapiens
  misc_RNA (1)...(19): siRNA sense strand
ugaaugaaauggaaaggca

SEQ ID NO: 2445989 - RNA, 19 nt, Homo sapiens
  misc_RNA (1)...(19): siRNA sense strand
ucuuagaaccacaguaaaa

SEQ ID NO: 2445990 - RNA, 19 nt, Homo sapiens
  misc_RNA (1)...(19): siRNA sense strand
gcuccuuagcagaugacaa

SEQ ID NO: 2445991 - RNA, 19 nt, Homo sapiens
  misc_RNA (1)...(19): siRNA sense strand
augugugaccuuagcaaua

SEQ ID NO: 2445992 - RNA, 19 nt, Homo sapiens
  misc_RNA (1)...(19): siRNA sense strand
ggacauuacaguugaggac

SEQ ID NO: 2445993 - RNA, 19 nt, Homo sapiens
  misc_RNA (1)...(19): siRNA sense strand
gaaugaaauggaaaggcau

SEQ ID NO: 2445994 - RNA, 19 nt, Homo sapiens
  misc_RNA (1)...(19): siRNA sense strand
ccuuagcagaugacaacaa

SEQ ID NO: 2445995 - RNA, 19 nt, Homo sapiens
  misc_RNA (1)...(19): siRNA sense strand
cgagaaaagaggaagagca

SEQ ID NO: 2445996 - RNA, 19 nt, Homo sapiens
  misc_RNA (1)...(19): siRNA sense strand
gcuaacagcugaaugugca

SEQ ID NO: 2445997 - RNA, 19 nt, Homo sapiens
  misc_RNA (1)...(19): siRNA sense strand
agcaugauccugagcacaa

SEQ ID NO: 2445998 - RNA, 19 nt, Homo sapiens
  misc_RNA (1)...(19): siRNA sense strand
aagaaagagcacagaaccu

SEQ ID NO: 2445999 - RNA, 19 nt, Homo sapiens
  misc_RNA (1)...(19): siRNA sense strand
gaggaauacuuuaagcaug

SEQ ID NO: 2446000 - RNA, 19 nt, Homo sapiens
  misc_RNA (1)...(19): siRNA sense strand
augacaacaaccugaauuu

SEQ ID NO: 2446001 - RNA, 19 nt, Homo sapiens
  misc_RNA (1)...(19): siRNA sense strand
ggugaaugaacuaaagaaa

SEQ ID NO: 2446002 - RNA, 19 nt, Homo sapiens
  misc_RNA (1)...(19): siRNA sense strand
gagaaagaucaaagagaca

SEQ ID NO: 2446003 - RNA, 19 nt, Homo sapiens
  misc_RNA (1)...(19): siRNA sense strand
ccaccaaagauaauggaaa

SEQ ID NO: 2446004 - RNA, 19 nt, Homo sapiens
  misc_RNA (1)...(19): siRNA sense strand
gaaagaaaguaaaccggaa

SEQ ID NO: 2446005 - RNA, 19 nt, Homo sapiens
  misc_RNA (1)...(19): siRNA sense strand
ccucaggaauuaagagaca

SEQ ID NO: 2446006 - RNA, 19 nt, Homo sapiens
  misc_RNA (1)...(19): siRNA sense strand
aguaaagcuucuagacaga

SEQ ID NO: 2446007 - RNA, 19 nt, Homo sapiens
  misc_RNA (1)...(19): siRNA sense strand
cggaaguguuauuucuuaa

SEQ ID NO: 2446008 - RNA, 19 nt, Homo sapiens
  misc_RNA (1)...(19): siRNA sense strand
guaaauuugauaaggguca

SEQ ID NO: 2446009 - RNA, 19 nt, Homo sapiens
  misc_RNA (1)...(19): siRNA sense strand
ccuaguaaugugacugaaa

SEQ ID NO: 2446010 - RNA, 19 nt, Homo sapiens
  misc_RNA (1)...(19): siRNA sense strand
agcaagaagaaacgaauua

SEQ ID NO: 2446011 - RNA, 19 nt, Homo sapiens
  misc_RNA (1)...(19): siRNA sense strand
gagaaaaugcagugugaca

SEQ ID NO: 2446012 - RNA, 19 nt, Homo sapiens
  misc_RNA (1)...(19): siRNA sense strand
aucccaaaguucagguaaa

SEQ ID NO: 2446013 - RNA, 19 nt, Homo sapiens
  misc_RNA (1)...(19): siRNA sense strand
guaaaccggaagacagaaa

SEQ ID NO: 2446014 - RNA, 19 nt, Homo sapiens
  misc_RNA (1)...(19): siRNA sense strand
auugaaaacaggacagaaa

SEQ ID NO: 2446015 - RNA, 19 nt, Homo sapiens
  misc_RNA (1)...(19): siRNA sense strand
uaaugagugagaugagaaa

SEQ ID NO: 2446016 - RNA, 19 nt, Homo sapiens
  misc_RNA (1)...(19): siRNA sense strand
aauuucaccaggagaguaa

SEQ ID NO: 2446017 - RNA, 19 nt, Homo sapiens
  misc_RNA (1)...(19): siRNA sense strand
ucgaagaauuacaacugaa

SEQ ID NO: 2446018 - RNA, 19 nt, Homo sapiens
  misc_RNA (1)...(19): siRNA sense strand
ucaaaacccaagaggauaa

SEQ ID NO: 2446019 - RNA, 19 nt, Homo sapiens
  misc_RNA (1)...(19): siRNA sense strand
uauucaacccucagagcaa

SEQ ID NO: 2446020 - RNA, 19 nt, Homo sapiens
  misc_RNA (1)...(19): siRNA sense strand
aaguaaaccggaagacaga

SEQ ID NO: 2446021 - RNA, 19 nt, Homo sapiens
  misc_RNA (1)...(19): siRNA sense strand
gggaaaagauugaaaacag

SEQ ID NO: 2446022 - RNA, 19 nt, Homo sapiens
  misc_RNA (1)...(19): siRNA sense strand
uggcaaaaggggugcagaa

SEQ ID NO: 2446023 - RNA, 19 nt, Homo sapiens
  misc_RNA (1)...(19): siRNA sense strand
acaaaugagcaagaggaaa

SEQ ID NO: 2446024 - RNA, 19 nt, Homo sapiens
  misc_RNA (1)...(19): siRNA sense strand
acauagaagcucucaugaa

SEQ ID NO: 2446025 - RNA, 19 nt, Homo sapiens
  misc_RNA (1)...(19): siRNA sense strand
agaccaaaguucuaagacu

SEQ ID NO: 2446026 - RNA, 19 nt, Homo sapiens
  misc_RNA (1)...(19): siRNA sense strand
ccagagaaccuaaugcaga

SEQ ID NO: 2446027 - RNA, 19 nt, Homo sapiens
  misc_RNA (1)...(19): siRNA sense strand
cuaaugagugagaugagaa

SEQ ID NO: 2446028 - RNA, 19 nt, Homo sapiens
  misc_RNA (1)...(19): siRNA sense strand
accacauguaugaggauaa

SEQ ID NO: 2446029 - RNA, 19 nt, Homo sapiens
  misc_RNA (1)...(19): siRNA sense strand
gaacacauuucuucgccua

SEQ ID NO: 2446030 - RNA, 19 nt, Homo sapiens
  misc_RNA (1)...(19): siRNA sense strand
cugauguccuggauggcaa

SEQ ID NO: 2446031 - RNA, 19 nt, Homo sapiens
  misc_RNA (1)...(19): siRNA sense strand
aaaccggaagacagaaaua

SEQ ID NO: 2446032 - RNA, 19 nt, Homo sapiens
  misc_RNA (1)...(19): siRNA sense strand
ugauaaagauguggugcau

SEQ ID NO: 2446033 - RNA, 19 nt, Homo sapiens
  misc_RNA (1)...(19): siRNA sense strand
gggcauuagcucaggcucu

SEQ ID NO: 2446034 - RNA, 19 nt, Homo sapiens
  misc_RNA (1)...(19): siRNA sense strand
agagacauuugaaagacaa

SEQ ID NO: 2446035 - RNA, 19 nt, Homo sapiens
  misc_RNA (1)...(19): siRNA sense strand
gauguaccucccagagaaa

SEQ ID NO: 2446036 - RNA, 19 nt, Homo sapiens
  misc_RNA (1)...(19): siRNA sense strand
aagcacaacaacagggcau

SEQ ID NO: 2446037 - RNA, 19 nt, Homo sapiens
  misc_RNA (1)...(19): siRNA sense strand
aguaaacagugcaaguuga

SEQ ID NO: 2446038 - RNA, 19 nt, Homo sapiens
  misc_RNA (1)...(19): siRNA sense strand
cgugggucaucuugggaau

SEQ ID NO: 2446039 - RNA, 19 nt, Homo sapiens
  misc_RNA (1)...(19): siRNA sense strand
gugcagaagaucccgguuu

SEQ ID NO: 2446040 - RNA, 19 nt, Homo sapiens
  misc_RNA (1)...(19): siRNA sense strand
aacaaaugagcaagaggaa

SEQ ID NO: 2446041 - RNA, 19 nt, Homo sapiens
  misc_RNA (1)...(19): siRNA sense strand
gaauuaguaaacagugcaa

SEQ ID NO: 2446042 - RNA, 19 nt, Homo sapiens
  misc_RNA (1)...(19): siRNA sense strand
ccggaagacagaaauaauu

SEQ ID NO: 2446043 - RNA, 19 nt, Homo sapiens
  misc_RNA (1)...(19): siRNA sense strand
caaauaaucuuucugcaga

SEQ ID NO: 2446044 - RNA, 19 nt, Homo sapiens
  misc_RNA (1)...(19): siRNA sense strand
agaucaaagagacaguuua

SEQ ID NO: 2446045 - RNA, 19 nt, Homo sapiens
  misc_RNA (1)...(19): siRNA sense strand
aaggaagaagcguggguca

SEQ ID NO: 2446046 - RNA, 19 nt, Homo sapiens
  misc_RNA (1)...(19): siRNA sense strand
aagagacauuugaaagaca

SEQ ID NO: 2446047 - RNA, 19 nt, Homo sapiens
  misc_RNA (1)...(19): siRNA sense strand
ucccaaaccaaaaggauaa

SEQ ID NO: 2446048 - RNA, 19 nt, Homo sapiens
  misc_RNA (1)...(19): siRNA sense strand
gcuagcaagaagaaacgaa

SEQ ID NO: 2446049 - RNA, 19 nt, Homo sapiens
  misc_RNA (1)...(19): siRNA sense strand
gcagacacucccugugcaa

SEQ ID NO: 2446050 - RNA, 19 nt, Homo sapiens
  misc_RNA (1)...(19): siRNA sense strand
cgauauuggggaaaagauu

SEQ ID NO: 2446051 - RNA, 19 nt, Homo sapiens
  misc_RNA (1)...(19): siRNA sense strand
aagauaacuuacucccaaa

SEQ ID NO: 2446052 - RNA, 19 nt, Homo sapiens
  misc_RNA (1)...(19): siRNA sense strand
gaguaaauuugauaagggu

SEQ ID NO: 2446053 - RNA, 19 nt, Homo sapiens
  misc_RNA (1)...(19): siRNA sense strand
uuucaaaacccaagaggau

SEQ ID NO: 2446054 - RNA, 19 nt, Homo sapiens
  misc_RNA (1)...(19): siRNA sense strand
gguaaauuucaccaggaga

SEQ ID NO: 2446055 - RNA, 19 nt, Homo sapiens
  misc_RNA (1)...(19): siRNA sense strand
agagaaagaucaaagagac

SEQ ID NO: 2446056 - RNA, 19 nt, Homo sapiens
  misc_RNA (1)...(19): siRNA sense strand
gcaaaaggggugcagaaga

SEQ ID NO: 2446057 - RNA, 19 nt, Homo sapiens
  misc_RNA (1)...(19): siRNA sense strand
ugaaugaacagcuggcuca

SEQ ID NO: 2446058 - RNA, 19 nt, Homo sapiens
  misc_RNA (1)...(19): siRNA sense strand
ucaggaauuaagagacauu

SEQ ID NO: 2446059 - RNA, 19 nt, Homo sapiens
  misc_RNA (1)...(19): siRNA sense strand
aagagaaaaugcaguguga

SEQ ID NO: 2446060 - RNA, 19 nt, Homo sapiens
  misc_RNA (1)...(19): siRNA sense strand
acaaggugacagagaaaau

SEQ ID NO: 2446061 - RNA, 19 nt, Homo sapiens
  misc_RNA (1)...(19): siRNA sense strand
agaaguagagaaacugaau

SEQ ID NO: 2446062 - RNA, 19 nt, Homo sapiens
  misc_RNA (1)...(19): siRNA sense strand
agagaagaaaagagagaaa

SEQ ID NO: 2446063 - RNA, 19 nt, Homo sapiens
  misc_RNA (1)...(19): siRNA sense strand
agagagaaagagaagaaaa

SEQ ID NO: 2446064 - RNA, 19 nt, Homo sapiens
  misc_RNA (1)...(19): siRNA sense strand
agaagaaaagagagaaaga

SEQ ID NO: 2446065 - RNA, 19 nt, Homo sapiens
  misc_RNA (1)...(19): siRNA sense strand
aaagagaagaaaagagaga

SEQ ID NO: 2446066 - RNA, 19 nt, Homo sapiens
  misc_RNA (1)...(19): siRNA sense strand
gaggcaagaggcugcgaau

SEQ ID NO: 2446067 - RNA, 19 nt, Homo sapiens
  misc_RNA (1)...(19): siRNA sense strand
cagccaacuaaacggagua

SEQ ID NO: 2446068 - RNA, 19 nt, Homo sapiens
  misc_RNA (1)...(19): siRNA sense strand
uggaauggcuggaagaauu

SEQ ID NO: 2446069 - RNA, 19 nt, Homo sapiens
  misc_RNA (1)...(19): siRNA sense strand
ucaugaagauauuggguau

SEQ ID NO: 2446070 - RNA, 19 nt, Homo sapiens
  misc_RNA (1)...(19): siRNA sense strand
gcauugaacaccuggccaa

SEQ ID NO: 2446071 - RNA, 19 nt, Homo sapiens
  misc_RNA (1)...(19): siRNA sense strand
agaacaauccagaagaaaa

SEQ ID NO: 2446072 - RNA, 19 nt, Homo sapiens
  misc_RNA (1)...(19): siRNA sense strand
ugacugugcugcugaagua

SEQ ID NO: 2446073 - RNA, 19 nt, Homo sapiens
  misc_RNA (1)...(19): siRNA sense strand
gcuuuacaugauaggaaua

SEQ ID NO: 2446074 - RNA, 19 nt, Homo sapiens
  misc_RNA (1)...(19): siRNA sense strand
agggaagaacagaagagaa

SEQ ID NO: 2446075 - RNA, 19 nt, Homo sapiens
  misc_RNA (1)...(19): siRNA sense strand
cugaagacuugguuggcau

SEQ ID NO: 2446076 - RNA, 19 nt, Homo sapiens
  misc_RNA (1)...(19): siRNA sense strand
uugcauuaguguuuggaau

SEQ ID NO: 2446077 - RNA, 19 nt, Homo sapiens
  misc_RNA (1)...(19): siRNA sense strand
gugcauuaucucuucauua

SEQ ID NO: 2446078 - RNA, 19 nt, Homo sapiens
  misc_RNA (1)...(19): siRNA sense strand
ggucauggugggcagguau

SEQ ID NO: 2446079 - RNA, 19 nt, Homo sapiens
  misc_RNA (1)...(19): siRNA sense strand
gaagauauuggguaugauu

SEQ ID NO: 2446080 - RNA, 19 nt, Homo sapiens
  misc_RNA (1)...(19): siRNA sense strand
ccguagugacugaagacuu

SEQ ID NO: 2446081 - RNA, 19 nt, Homo sapiens
  misc_RNA (1)...(19): siRNA sense strand
gaacagaagagaaggaugg

SEQ ID NO: 2446082 - RNA, 19 nt, Homo sapiens
  misc_RNA (1)...(19): siRNA sense strand
agagaaggauggugggcuc

SEQ ID NO: 2446083 - RNA, 19 nt, Homo sapiens
  misc_RNA (1)...(19): siRNA sense strand
ccuaaugcccguagugacu

SEQ ID NO: 2446084 - RNA, 19 nt, Homo sapiens
  misc_RNA (1)...(19): siRNA sense strand
aagaagaagcaccggagga

SEQ ID NO: 2446085 - RNA, 19 nt, Homo sapiens
  misc_RNA (1)...(19): siRNA sense strand
aggaagugaaggugagugu

SEQ ID NO: 2446086 - RNA, 19 nt, Homo sapiens
  misc_RNA (1)...(19): siRNA sense strand
uugcaagagccgaagcauu

SEQ ID NO: 2446087 - RNA, 19 nt, Homo sapiens
  misc_RNA (1)...(19): siRNA sense strand
agugaaggugagugugaau

SEQ ID NO: 2446088 - RNA, 19 nt, Homo sapiens
  misc_RNA (1)...(19): siRNA sense strand
gcaagauggucaugcugca

SEQ ID NO: 2446089 - RNA, 19 nt, Homo sapiens
  misc_RNA (1)...(19): siRNA sense strand
gagaguacccagcuggaca

SEQ ID NO: 2446090 - RNA, 19 nt, Homo sapiens
  misc_RNA (1)...(19): siRNA sense strand
gcaugguggacgcuggcaa

SEQ ID NO: 2446091 - RNA, 19 nt, Homo sapiens
  misc_RNA (1)...(19): siRNA sense strand
guggagggcagcagagagu

SEQ ID NO: 2446092 - RNA, 19 nt, Homo sapiens
  misc_RNA (1)...(19): siRNA sense strand
aagaagaagaggaggacau

SEQ ID NO: 2446093 - RNA, 19 nt, Homo sapiens
  misc_RNA (1)...(19): siRNA sense strand
aagaagaagaagaggagga

SEQ ID NO: 2446094 - RNA, 19 nt, Homo sapiens
  misc_RNA (1)...(19): siRNA sense strand
ggauaaaagaacacaguga

SEQ ID NO: 2446095 - RNA, 19 nt, Homo sapiens
  misc_RNA (1)...(19): siRNA sense strand
auaaaauguuuguggguga

SEQ ID NO: 2446096 - RNA, 19 nt, Homo sapiens
  misc_RNA (1)...(19): siRNA sense strand
aagaagaagaagaagagga

SEQ ID NO: 2446097 - RNA, 19 nt, Homo sapiens
  misc_RNA (1)...(19): siRNA sense strand
accagaauucaaugagaaa

SEQ ID NO: 2446098 - RNA, 19 nt, Homo sapiens
  misc_RNA (1)...(19): siRNA sense strand
agcagaagaagaagaagaa

SEQ ID NO: 2446099 - RNA, 19 nt, Homo sapiens
  misc_RNA (1)...(19): siRNA sense strand
aaguagucccagaguggaa

SEQ ID NO: 2446100 - RNA, 19 nt, Homo sapiens
  misc_RNA (1)...(19): siRNA sense strand
augagaaagaagaugauga

SEQ ID NO: 2446101 - RNA, 19 nt, Homo sapiens
  misc_RNA (1)...(19): siRNA sense strand
cgcccuucccaguggauaa

SEQ ID NO: 2446102 - RNA, 19 nt, Homo sapiens
  misc_RNA (1)...(19): siRNA sense strand
gaugaauuacauagcccaa

SEQ ID NO: 2446103 - RNA, 19 nt, Homo sapiens
  misc_RNA (1)...(19): siRNA sense strand
aaaagaacacagugaaaga

SEQ ID NO: 2446104 - RNA, 19 nt, Homo sapiens
  misc_RNA (1)...(19): siRNA sense strand
accaagaaccagaauucaa

SEQ ID NO: 2446105 - RNA, 19 nt, Homo sapiens
  misc_RNA (1)...(19): siRNA sense strand
auggaggagagcugguuua

SEQ ID NO: 2446106 - RNA, 19 nt, Homo sapiens
  misc_RNA (1)...(19): siRNA sense strand
caaagaaggauaugagaau

SEQ ID NO: 2446107 - RNA, 19 nt, Homo sapiens
  misc_RNA (1)...(19): siRNA sense strand
gauggugccuugaggaaua

SEQ ID NO: 2446108 - RNA, 19 nt, Homo sapiens
  misc_RNA (1)...(19): siRNA sense strand
cugccaaacuucagauaau

SEQ ID NO: 2446109 - RNA, 19 nt, Homo sapiens
  misc_RNA (1)...(19): siRNA sense strand
uuaaagaaauuguggcaga

SEQ ID NO: 2446110 - RNA, 19 nt, Homo sapiens
  misc_RNA (1)...(19): siRNA sense strand
caaaggauuuaaaggagaa

SEQ ID NO: 2446111 - RNA, 19 nt, Homo sapiens
  misc_RNA (1)...(19): siRNA sense strand
acauaauucuucugggaga

SEQ ID NO: 2446112 - RNA, 19 nt, Homo sapiens
  misc_RNA (1)...(19): siRNA sense strand
cggcgauguacuagaggaa

SEQ ID NO: 2446113 - RNA, 19 nt, Homo sapiens
  misc_RNA (1)...(19): siRNA sense strand
gcgauguacuagaggaagu

SEQ ID NO: 2446114 - RNA, 19 nt, Homo sapiens
  misc_RNA (1)...(19): siRNA sense strand
caaaggaggagcugccaaa

SEQ ID NO: 2446115 - RNA, 19 nt, Homo sapiens
  misc_RNA (1)...(19): siRNA sense strand
gcucaaaggauuuaaagga

SEQ ID NO: 2446116 - RNA, 19 nt, Homo sapiens
  misc_RNA (1)...(19): siRNA sense strand
aggauuuaaaggagaacua

SEQ ID NO: 2446117 - RNA, 19 nt, Homo sapiens
  misc_RNA (1)...(19): siRNA sense strand
ucaaagaaggauaugagaa

SEQ ID NO: 2446118 - RNA, 19 nt, Homo sapiens
  misc_RNA (1)...(19): siRNA sense strand
ucaaaggauuuaaaggaga

SEQ ID NO: 2446119 - RNA, 19 nt, Homo sapiens
  misc_RNA (1)...(19): siRNA sense strand
gaagagaaguacccuuaua

SEQ ID NO: 2446120 - RNA, 19 nt, Homo sapiens
  misc_RNA (1)...(19): siRNA sense strand
guggaaugguauacuaaau

SEQ ID NO: 2446121 - RNA, 19 nt, Homo sapiens
  misc_RNA (1)...(19): siRNA sense strand
cuugaggaauacagaauau

SEQ ID NO: 2446122 - RNA, 19 nt, Homo sapiens
  misc_RNA (1)...(19): siRNA sense strand
agaaauuaucuguggucuu

SEQ ID NO: 2446123 - RNA, 19 nt, Homo sapiens
  misc_RNA (1)...(19): siRNA sense strand
cuuauaugguggaauggua

SEQ ID NO: 2446124 - RNA, 19 nt, Homo sapiens
  misc_RNA (1)...(19): siRNA sense strand
ucgucaagcugguguuuau

SEQ ID NO: 2446125 - RNA, 19 nt, Homo sapiens
  misc_RNA (1)...(19): siRNA sense strand
augucaaaguuguguccaa

SEQ ID NO: 2446126 - RNA, 19 nt, Homo sapiens
  misc_RNA (1)...(19): siRNA sense strand
ugauagaguggaugagcuu

SEQ ID NO: 2446127 - RNA, 19 nt, Homo sapiens
  misc_RNA (1)...(19): siRNA sense strand
gaaauuaucuguggucuua

SEQ ID NO: 2446128 - RNA, 19 nt, Homo sapiens
  misc_RNA (1)...(19): siRNA sense strand
agaggaaguuauucgucaa

SEQ ID NO: 2446129 - RNA, 19 nt, Homo sapiens
  misc_RNA (1)...(19): siRNA sense strand
uagaagagaaguacccuua

SEQ ID NO: 2446130 - RNA, 19 nt, Homo sapiens
  misc_RNA (1)...(19): siRNA sense strand
gggaaaagaugcccaacau

SEQ ID NO: 2446131 - RNA, 19 nt, Homo sapiens
  misc_RNA (1)...(19): siRNA sense strand
caagaacccuacaagagua

SEQ ID NO: 2446132 - RNA, 19 nt, Homo sapiens
  misc_RNA (1)...(19): siRNA sense strand
uugauaagcuccaacaaca

SEQ ID NO: 2446133 - RNA, 19 nt, Homo sapiens
  misc_RNA (1)...(19): siRNA sense strand
gccaaacuucagauaauaa

SEQ ID NO: 2446134 - RNA, 19 nt, Homo sapiens
  misc_RNA (1)...(19): siRNA sense strand
uaaagaaauuguggcagaa

SEQ ID NO: 2446135 - RNA, 19 nt, Homo sapiens
  misc_RNA (1)...(19): siRNA sense strand
cccaaggagacuuaagaau

SEQ ID NO: 2446136 - RNA, 19 nt, Homo sapiens
  misc_RNA (1)...(19): siRNA sense strand
aaucauuagaaguagccaa

SEQ ID NO: 2446137 - RNA, 19 nt, Homo sapiens
  misc_RNA (1)...(19): siRNA sense strand
guggaugagcuuuuagaaa

SEQ ID NO: 2446138 - RNA, 19 nt, Homo sapiens
  misc_RNA (1)...(19): siRNA sense strand
ucagcaagcuuuaccaaaa

SEQ ID NO: 2446139 - RNA, 19 nt, Homo sapiens
  misc_RNA (1)...(19): siRNA sense strand
acuuaaagaaauuguggca

SEQ ID NO: 2446140 - RNA, 19 nt, Homo sapiens
  misc_RNA (1)...(19): siRNA sense strand
ccagaaaaguucaguucga

SEQ ID NO: 2446141 - RNA, 19 nt, Homo sapiens
  misc_RNA (1)...(19): siRNA sense strand
uaacauaauucuucuggga

SEQ ID NO: 2446142 - RNA, 19 nt, Homo sapiens
  misc_RNA (1)...(19): siRNA sense strand
aaucugacguuaugcucaa

SEQ ID NO: 2446143 - RNA, 19 nt, Homo sapiens
  misc_RNA (1)...(19): siRNA sense strand
ggaaugguauacuaaauca

SEQ ID NO: 2446144 - RNA, 19 nt, Homo sapiens
  misc_RNA (1)...(19): siRNA sense strand
agaaauuguggcagaaucu

SEQ ID NO: 2446145 - RNA, 19 nt, Homo sapiens
  misc_RNA (1)...(19): siRNA sense strand
gccuugaggaauacagaau

SEQ ID NO: 2446146 - RNA, 19 nt, Homo sapiens
  misc_RNA (1)...(19): siRNA sense strand
cguuaugcucaaagaagga

SEQ ID NO: 2446147 - RNA, 19 nt, Homo sapiens
  misc_RNA (1)...(19): siRNA sense strand
ccuugaggaauacagaaua

SEQ ID NO: 2446148 - RNA, 19 nt, Homo sapiens
  misc_RNA (1)...(19): siRNA sense strand
agauaauaacggacuuuga

SEQ ID NO: 2446149 - RNA, 19 nt, Homo sapiens
  misc_RNA (1)...(19): siRNA sense strand
ucaaaguuguguccaauuu

SEQ ID NO: 2446150 - RNA, 19 nt, Homo sapiens
  misc_RNA (1)...(19): siRNA sense strand
cuuaagaauggcagaugga

SEQ ID NO: 2446151 - RNA, 19 nt, Homo sapiens
  misc_RNA (1)...(19): siRNA sense strand
uaaaugauagaguggauga

SEQ ID NO: 2446152 - RNA, 19 nt, Homo sapiens
  misc_RNA (1)...(19): siRNA sense strand
cagaagaagccaugggaac

SEQ ID NO: 2446153 - RNA, 19 nt, Homo sapiens
  misc_RNA (1)...(19): siRNA sense strand
ccagaagaagccaugggaa

SEQ ID NO: 2446154 - RNA, 19 nt, Homo sapiens
  misc_RNA (1)...(19): siRNA sense strand
aauaauuaaagcagggacu

SEQ ID NO: 2446155 - RNA, 19 nt, Homo sapiens
  misc_RNA (1)...(19): siRNA sense strand
agucgucuguggaggucaa

SEQ ID NO: 2446156 - RNA, 19 nt, Homo sapiens
  misc_RNA (1)...(19): siRNA sense strand
augauuggcugcaggcuga

SEQ ID NO: 2446157 - RNA, 19 nt, Homo sapiens
  misc_RNA (1)...(19): siRNA sense strand
gggacaaccucgugugcca

SEQ ID NO: 2446158 - RNA, 19 nt, Homo sapiens
  misc_RNA (1)...(19): siRNA sense strand
ccaaauaccagauccgcua

SEQ ID NO: 2446159 - RNA, 19 nt, Homo sapiens
  misc_RNA (1)...(19): siRNA sense strand
acuggaaggugguggacga

SEQ ID NO: 2446160 - RNA, 19 nt, Homo sapiens
  misc_RNA (1)...(19): siRNA sense strand
ugguggacgaugugagcaa

SEQ ID NO: 2446161 - RNA, 19 nt, Homo sapiens
  misc_RNA (1)...(19): siRNA sense strand
ggugguauggccaggacaa

SEQ ID NO: 2446162 - RNA, 19 nt, Homo sapiens
  misc_RNA (1)...(19): siRNA sense strand
ggacaacacaugugaggag

SEQ ID NO: 2446163 - RNA, 19 nt, Homo sapiens
  misc_RNA (1)...(19): siRNA sense strand
acaacacaugugaggagua

SEQ ID NO: 2446164 - RNA, 19 nt, Homo sapiens
  misc_RNA (1)...(19): siRNA sense strand
gggaaagaaugucugggaa

SEQ ID NO: 2446165 - RNA, 19 nt, Homo sapiens
  misc_RNA (1)...(19): siRNA sense strand
ucgagaagcccgaugggaa

SEQ ID NO: 2446166 - RNA, 19 nt, Homo sapiens
  misc_RNA (1)...(19): siRNA sense strand
ggaaagaaugucugggaag

SEQ ID NO: 2446167 - RNA, 19 nt, Homo sapiens
  misc_RNA (1)...(19): siRNA sense strand
ggaaggacgucaugcccga

SEQ ID NO: 2446168 - RNA, 19 nt, Homo sapiens
  misc_RNA (1)...(19): siRNA sense strand
cagagaagucagagggccu

SEQ ID NO: 2446169 - RNA, 19 nt, Homo sapiens
  misc_RNA (1)...(19): siRNA sense strand
aaauaggggaggucagaaa

SEQ ID NO: 2446170 - RNA, 19 nt, Homo sapiens
  misc_RNA (1)...(19): siRNA sense strand
ggauccacguccaggcuca

SEQ ID NO: 2446171 - RNA, 19 nt, Homo sapiens
  misc_RNA (1)...(19): siRNA sense strand
cugaaagcuugguggaaag

SEQ ID NO: 2446172 - RNA, 19 nt, Homo sapiens
  misc_RNA (1)...(19): siRNA sense strand
uaguaauccagaaggaaca

SEQ ID NO: 2446173 - RNA, 19 nt, Homo sapiens
  misc_RNA (1)...(19): siRNA sense strand
agaacaaagaugagguaac

SEQ ID NO: 2446174 - RNA, 19 nt, Homo sapiens
  misc_RNA (1)...(19): siRNA sense strand
accaagagugcaucagaaa

SEQ ID NO: 2446175 - RNA, 19 nt, Homo sapiens
  misc_RNA (1)...(19): siRNA sense strand
aggacaaugaacccaauaa

SEQ ID NO: 2446176 - RNA, 19 nt, Homo sapiens
  misc_RNA (1)...(19): siRNA sense strand
cgcgugaggcugagaagau

SEQ ID NO: 2446177 - RNA, 19 nt, Homo sapiens
  misc_RNA (1)...(19): siRNA sense strand
gcucugaggccaaggguca

SEQ ID NO: 2446178 - RNA, 19 nt, Homo sapiens
  misc_RNA (1)...(19): siRNA sense strand
aggaggaggaagaagaaga

SEQ ID NO: 2446179 - RNA, 19 nt, Homo sapiens
  misc_RNA (1)...(19): siRNA sense strand
ggacagagguuuugggcuc

SEQ ID NO: 2446180 - RNA, 19 nt, Homo sapiens
  misc_RNA (1)...(19): siRNA sense strand
aggaggaagaggaggagga

SEQ ID NO: 2446181 - RNA, 19 nt, Homo sapiens
  misc_RNA (1)...(19): siRNA sense strand
ccgacgaacuagagaggac

SEQ ID NO: 2446182 - RNA, 19 nt, Homo sapiens
  misc_RNA (1)...(19): siRNA sense strand
gcgcugaccucauccgcaa

SEQ ID NO: 2446183 - RNA, 19 nt, Homo sapiens
  misc_RNA (1)...(19): siRNA sense strand
gaggauaauuauucccaga

SEQ ID NO: 2446184 - RNA, 19 nt, Homo sapiens
  misc_RNA (1)...(19): siRNA sense strand
cagucguguccuuaagaaa

SEQ ID NO: 2446185 - RNA, 19 nt, Homo sapiens
  misc_RNA (1)...(19): siRNA sense strand
gcuauaaccuccaaccuga

SEQ ID NO: 2446186 - RNA, 19 nt, Homo sapiens
  misc_RNA (1)...(19): siRNA sense strand
ggcaggaggaagaggagga

SEQ ID NO: 2446187 - RNA, 19 nt, Homo sapiens
  misc_RNA (1)...(19): siRNA sense strand
ggacaacagagguagccau

SEQ ID NO: 2446188 - RNA, 19 nt, Homo sapiens
  misc_RNA (1)...(19): siRNA sense strand
augaguuggagaauggaua

SEQ ID NO: 2446189 - RNA, 19 nt, Homo sapiens
  misc_RNA (1)...(19): siRNA sense strand
cagaguaugagcugguaca

SEQ ID NO: 2446190 - RNA, 19 nt, Homo sapiens
  misc_RNA (1)...(19): siRNA sense strand
gaggaagauugcacgggca

SEQ ID NO: 2446191 - RNA, 19 nt, Homo sapiens
  misc_RNA (1)...(19): siRNA sense strand
cagugaagguggugcccaa

SEQ ID NO: 2446192 - RNA, 19 nt, Homo sapiens
  misc_RNA (1)...(19): siRNA sense strand
gggacagcuggcagggaaa

SEQ ID NO: 2446193 - RNA, 19 nt, Homo sapiens
  misc_RNA (1)...(19): siRNA sense strand
agguggugcccaagguaaa

SEQ ID NO: 2446194 - RNA, 19 nt, Homo sapiens
  misc_RNA (1)...(19): siRNA sense strand
cgagaugugaagauggaga

SEQ ID NO: 2446195 - RNA, 19 nt, Homo sapiens
  misc_RNA (1)...(19): siRNA sense strand
cuacagagggauaccguga

SEQ ID NO: 2446196 - RNA, 19 nt, Homo sapiens
  misc_RNA (1)...(19): siRNA sense strand
gcuagauugcacccagaaa

SEQ ID NO: 2446197 - RNA, 19 nt, Homo sapiens
  misc_RNA (1)...(19): siRNA sense strand
gcauccagcgacagaucaa

SEQ ID NO: 2446198 - RNA, 19 nt, Homo sapiens
  misc_RNA (1)...(19): siRNA sense strand
caugggugagagagguuaa

SEQ ID NO: 2446199 - RNA, 19 nt, Homo sapiens
  misc_RNA (1)...(19): siRNA sense strand
agguuagcauccagcgaca

SEQ ID NO: 2446200 - RNA, 19 nt, Homo sapiens
  misc_RNA (1)...(19): siRNA sense strand
auauaaagaacguggcaaa

SEQ ID NO: 2446201 - RNA, 19 nt, Homo sapiens
  misc_RNA (1)...(19): siRNA sense strand
aggugaaggugaaggacaa

SEQ ID NO: 2446202 - RNA, 19 nt, Homo sapiens
  misc_RNA (1)...(19): siRNA sense strand
auguaaagaauguggcaaa

SEQ ID NO: 2446203 - RNA, 19 nt, Homo sapiens
  misc_RNA (1)...(19): siRNA sense strand
auguaaagaauguggcaaa

SEQ ID NO: 2446204 - RNA, 19 nt, Homo sapiens
  misc_RNA (1)...(19): siRNA sense strand
auguaaagaauguggcaaa

SEQ ID NO: 2446205 - RNA, 19 nt, Homo sapiens
  misc_RNA (1)...(19): siRNA sense strand
guguaaggaauguggcaaa

SEQ ID NO: 2446206 - RNA, 19 nt, Homo sapiens
  misc_RNA (1)...(19): siRNA sense strand
guguaaggaauguggcaaa

SEQ ID NO: 2446207 - RNA, 19 nt, Homo sapiens
  misc_RNA (1)...(19): siRNA sense strand
aaugcauacuggagagaaa

SEQ ID NO: 2446208 - RNA, 19 nt, Homo sapiens
  misc_RNA (1)...(19): siRNA sense strand
aauccauaccggagagaaa

SEQ ID NO: 2446209 - RNA, 19 nt, Homo sapiens
  misc_RNA (1)...(19): siRNA sense strand
gauaauuaacacuggagaa

SEQ ID NO: 2446210 - RNA, 19 nt, Homo sapiens
  misc_RNA (1)...(19): siRNA sense strand
cugggaaaguauaggugaa

SEQ ID NO: 2446211 - RNA, 19 nt, Homo sapiens
  misc_RNA (1)...(19): siRNA sense strand
auguaaggaauguggcaaa

SEQ ID NO: 2446212 - RNA, 19 nt, Homo sapiens
  misc_RNA (1)...(19): siRNA sense strand
augugauguuggagaacua

SEQ ID NO: 2446213 - RNA, 19 nt, Homo sapiens
  misc_RNA (1)...(19): siRNA sense strand
augugaagaauguggcaaa

SEQ ID NO: 2446214 - RNA, 19 nt, Homo sapiens
  misc_RNA (1)...(19): siRNA sense strand
augugaagaauguggcaaa

SEQ ID NO: 2446215 - RNA, 19 nt, Homo sapiens
  misc_RNA (1)...(19): siRNA sense strand
gugaaaggagacaaagaau

SEQ ID NO: 2446216 - RNA, 19 nt, Homo sapiens
  misc_RNA (1)...(19): siRNA sense strand
agccaauauuugacaacua

SEQ ID NO: 2446217 - RNA, 19 nt, Homo sapiens
  misc_RNA (1)...(19): siRNA sense strand
uguuggagaacuacagaaa

SEQ ID NO: 2446218 - RNA, 19 nt, Homo sapiens
  misc_RNA (1)...(19): siRNA sense strand
aaucacaucuaaagggaca

SEQ ID NO: 2446219 - RNA, 19 nt, Homo sapiens
  misc_RNA (1)...(19): siRNA sense strand
ggaaaguauaggugaaggu

SEQ ID NO: 2446220 - RNA, 19 nt, Homo sapiens
  misc_RNA (1)...(19): siRNA sense strand
acaccuuacucgacaucaa

SEQ ID NO: 2446221 - RNA, 19 nt, Homo sapiens
  misc_RNA (1)...(19): siRNA sense strand
cugugaaaggagacaaaga

SEQ ID NO: 2446222 - RNA, 19 nt, Homo sapiens
  misc_RNA (1)...(19): siRNA sense strand
ugugaaaggagacaaagaa

SEQ ID NO: 2446223 - RNA, 19 nt, Homo sapiens
  misc_RNA (1)...(19): siRNA sense strand
acaucuuggacaucagaaa

SEQ ID NO: 2446224 - RNA, 19 nt, Homo sapiens
  misc_RNA (1)...(19): siRNA sense strand
ccauagaauucucuccaga

SEQ ID NO: 2446225 - RNA, 19 nt, Homo sapiens
  misc_RNA (1)...(19): siRNA sense strand
ggugaaggacaaaaggaau

SEQ ID NO: 2446226 - RNA, 19 nt, Homo sapiens
  misc_RNA (1)...(19): siRNA sense strand
uggugaaacuucugaccca

SEQ ID NO: 2446227 - RNA, 19 nt, Homo sapiens
  misc_RNA (1)...(19): siRNA sense strand
uuacucaacaucagagaau

SEQ ID NO: 2446228 - RNA, 19 nt, Homo sapiens
  misc_RNA (1)...(19): siRNA sense strand
uuacucaacaccagagaau

SEQ ID NO: 2446229 - RNA, 19 nt, Homo sapiens
  misc_RNA (1)...(19): siRNA sense strand
uuacucagcaucagagaau

SEQ ID NO: 2446230 - RNA, 19 nt, Homo sapiens
  misc_RNA (1)...(19): siRNA sense strand
uuacucaacaucagagaau

SEQ ID NO: 2446231 - RNA, 19 nt, Homo sapiens
  misc_RNA (1)...(19): siRNA sense strand
uuacucaacaucagagaau

SEQ ID NO: 2446232 - RNA, 19 nt, Homo sapiens
  misc_RNA (1)...(19): siRNA sense strand
gagcuguggccuugaaaau

SEQ ID NO: 2446233 - RNA, 19 nt, Homo sapiens
  misc_RNA (1)...(19): siRNA sense strand
cauacuggagagagagcuu

SEQ ID NO: 2446234 - RNA, 19 nt, Homo sapiens
  misc_RNA (1)...(19): siRNA sense strand
ggugaaggugaaggacaaa

SEQ ID NO: 2446235 - RNA, 19 nt, Homo sapiens
  misc_RNA (1)...(19): siRNA sense strand
cucuaaugaauguggugaa

SEQ ID NO: 2446236 - RNA, 19 nt, Homo sapiens
  misc_RNA (1)...(19): siRNA sense strand
gagaagaagcugaagagga

SEQ ID NO: 2446237 - RNA, 19 nt, Homo sapiens
  misc_RNA (1)...(19): siRNA sense strand
agaagaagcugaagaggag

SEQ ID NO: 2446238 - RNA, 19 nt, Homo sapiens
  misc_RNA (1)...(19): siRNA sense strand
cccuggaggaggaggagaa

SEQ ID NO: 2446239 - RNA, 19 nt, Homo sapiens
  misc_RNA (1)...(19): siRNA sense strand
cagaugaacaggaugccua

SEQ ID NO: 2446240 - RNA, 19 nt, Homo sapiens
  misc_RNA (1)...(19): siRNA sense strand
uggaggaggaggagaagca

SEQ ID NO: 2446241 - RNA, 19 nt, Homo sapiens
  misc_RNA (1)...(19): siRNA sense strand
gaggagaggagcaggguug

SEQ ID NO: 2446242 - RNA, 19 nt, Homo sapiens
  misc_RNA (1)...(19): siRNA sense strand
ugaaggagcugcuggccga

SEQ ID NO: 2446243 - RNA, 19 nt, Homo sapiens
  misc_RNA (1)...(19): siRNA sense strand
ccacaugcuucgcgggaug

SEQ ID NO: 2446244 - RNA, 19 nt, Homo sapiens
  misc_RNA (1)...(19): siRNA sense strand
agaucagcaaugaggguga

SEQ ID NO: 2446245 - RNA, 19 nt, Homo sapiens
  misc_RNA (1)...(19): siRNA sense strand
acuccaucuacgagaggaa

SEQ ID NO: 2446246 - RNA, 19 nt, Homo sapiens
  misc_RNA (1)...(19): siRNA sense strand
ugaaggaguuccagagccu

SEQ ID NO: 2446247 - RNA, 19 nt, Homo sapiens
  misc_RNA (1)...(19): siRNA sense strand
caccgguaccugauggaaa

SEQ ID NO: 2446248 - RNA, 19 nt, Homo sapiens
  misc_RNA (1)...(19): siRNA sense strand
acgagaggaaggagaggga

SEQ ID NO: 2446249 - RNA, 19 nt, Homo sapiens
  misc_RNA (1)...(19): siRNA sense strand
gggaggauuuugugggcca

SEQ ID NO: 2446250 - RNA, 19 nt, Homo sapiens
  misc_RNA (1)...(19): siRNA sense strand
gggaacugguguggaggau

SEQ ID NO: 2446251 - RNA, 19 nt, Homo sapiens
  misc_RNA (1)...(19): siRNA sense strand
gauccagaguccagaggcu

SEQ ID NO: 2446252 - RNA, 19 nt, Homo sapiens
  misc_RNA (1)...(19): siRNA sense strand
ggaaggagagggaggagag

SEQ ID NO: 2446253 - RNA, 19 nt, Homo sapiens
  misc_RNA (1)...(19): siRNA sense strand
gagagggaggagaggagca

SEQ ID NO: 2446254 - RNA, 19 nt, Homo sapiens
  misc_RNA (1)...(19): siRNA sense strand
gggccaagcgcaucaugaa

SEQ ID NO: 2446255 - RNA, 19 nt, Homo sapiens
  misc_RNA (1)...(19): siRNA sense strand
gcaucaugaaggaagcuuu

SEQ ID NO: 2446256 - RNA, 19 nt, Homo sapiens
  misc_RNA (1)...(19): siRNA sense strand
cggaucgaagcgugaggaa

SEQ ID NO: 2446257 - RNA, 19 nt, Homo sapiens
  misc_RNA (1)...(19): siRNA sense strand
ucgugagacauaugagaaa

SEQ ID NO: 2446258 - RNA, 19 nt, Homo sapiens
  misc_RNA (1)...(19): siRNA sense strand
agaaggcgcugaagggcaa

SEQ ID NO: 2446259 - RNA, 19 nt, Homo sapiens
  misc_RNA (1)...(19): siRNA sense strand
ggauaguggagaagggguu

SEQ ID NO: 2446260 - RNA, 19 nt, Homo sapiens
  misc_RNA (1)...(19): siRNA sense strand
aagagaaggcaacuggcaa

SEQ ID NO: 2446261 - RNA, 19 nt, Homo sapiens
  misc_RNA (1)...(19): siRNA sense strand
gucaagaugaggaguccaa

SEQ ID NO: 2446262 - RNA, 19 nt, Homo sapiens
  misc_RNA (1)...(19): siRNA sense strand
gcugugaaguguaucccua

SEQ ID NO: 2446263 - RNA, 19 nt, Homo sapiens
  misc_RNA (1)...(19): siRNA sense strand
caaaagacuucauucggaa

SEQ ID NO: 2446264 - RNA, 19 nt, Homo sapiens
  misc_RNA (1)...(19): siRNA sense strand
auucggaaccugauggaga

SEQ ID NO: 2446265 - RNA, 19 nt, Homo sapiens
  misc_RNA (1)...(19): siRNA sense strand
aguucaaaugcaaguguuu

SEQ ID NO: 2446266 - RNA, 19 nt, Homo sapiens
  misc_RNA (1)...(19): siRNA sense strand
aggaaagcagcauagagaa

SEQ ID NO: 2446267 - RNA, 19 nt, Homo sapiens
  misc_RNA (1)...(19): siRNA sense strand
aaauggagggcaaaggaga

SEQ ID NO: 2446268 - RNA, 19 nt, Homo sapiens
  misc_RNA (1)...(19): siRNA sense strand
aggcggaauaugaguuuga

SEQ ID NO: 2446269 - RNA, 19 nt, Homo sapiens
  misc_RNA (1)...(19): siRNA sense strand
ccugagaaagauuaagcau

SEQ ID NO: 2446270 - RNA, 19 nt, Homo sapiens
  misc_RNA (1)...(19): siRNA sense strand
ucgugagacauaugagaaa

SEQ ID NO: 2446271 - RNA, 19 nt, Homo sapiens
  misc_RNA (1)...(19): siRNA sense strand
agaaggcgcugaagggcaa

SEQ ID NO: 2446272 - RNA, 19 nt, Homo sapiens
  misc_RNA (1)...(19): siRNA sense strand
ggauaguggagaagggguu

SEQ ID NO: 2446273 - RNA, 19 nt, Homo sapiens
  misc_RNA (1)...(19): siRNA sense strand
aagagaaggcaacuggcaa

SEQ ID NO: 2446274 - RNA, 19 nt, Homo sapiens
  misc_RNA (1)...(19): siRNA sense strand
gucaagaugaggaguccaa

SEQ ID NO: 2446275 - RNA, 19 nt, Homo sapiens
  misc_RNA (1)...(19): siRNA sense strand
gcugugaaguguaucccua

SEQ ID NO: 2446276 - RNA, 19 nt, Homo sapiens
  misc_RNA (1)...(19): siRNA sense strand
caaaagacuucauucggaa

SEQ ID NO: 2446277 - RNA, 19 nt, Homo sapiens
  misc_RNA (1)...(19): siRNA sense strand
auucggaaccugauggaga

SEQ ID NO: 2446278 - RNA, 19 nt, Homo sapiens
  misc_RNA (1)...(19): siRNA sense strand
aguucaaaugcaaguguuu

SEQ ID NO: 2446279 - RNA, 19 nt, Homo sapiens
  misc_RNA (1)...(19): siRNA sense strand
aggaaagcagcauagagaa

SEQ ID NO: 2446280 - RNA, 19 nt, Homo sapiens
  misc_RNA (1)...(19): siRNA sense strand
aaauggagggcaaaggaga

SEQ ID NO: 2446281 - RNA, 19 nt, Homo sapiens
  misc_RNA (1)...(19): siRNA sense strand
aggcggaauaugaguuuga

SEQ ID NO: 2446282 - RNA, 19 nt, Homo sapiens
  misc_RNA (1)...(19): siRNA sense strand
ccugagaaagauuaagcau

SEQ ID NO: 2446283 - RNA, 19 nt, Homo sapiens
  misc_RNA (1)...(19): siRNA sense strand
aggaaaggcugacggguga

SEQ ID NO: 2446284 - RNA, 19 nt, Homo sapiens
  misc_RNA (1)...(19): siRNA sense strand
ggacacuggaagaugggaa

SEQ ID NO: 2446285 - RNA, 19 nt, Homo sapiens
  misc_RNA (1)...(19): siRNA sense strand
gaucauauucauuggagga

SEQ ID NO: 2446286 - RNA, 19 nt, Homo sapiens
  misc_RNA (1)...(19): siRNA sense strand
gcaaagcucuaaagcccaa

SEQ ID NO: 2446287 - RNA, 19 nt, Homo sapiens
  misc_RNA (1)...(19): siRNA sense strand
uggaaaggguuuuggagau

SEQ ID NO: 2446288 - RNA, 19 nt, Homo sapiens
  misc_RNA (1)...(19): siRNA sense strand
uugcagaaucuacggaaau

SEQ ID NO: 2446289 - RNA, 19 nt, Homo sapiens
  misc_RNA (1)...(19): siRNA sense strand
ugauggacauaaugggcuu

SEQ ID NO: 2446290 - RNA, 19 nt, Homo sapiens
  misc_RNA (1)...(19): siRNA sense strand
aggaugaagaggaacccaa

SEQ ID NO: 2446291 - RNA, 19 nt, Homo sapiens
  misc_RNA (1)...(19): siRNA sense strand
gaaagaagcagcugccagu

SEQ ID NO: 2446292 - RNA, 19 nt, Homo sapiens
  misc_RNA (1)...(19): siRNA sense strand
uuugcagaaucuacggaaa

SEQ ID NO: 2446293 - RNA, 19 nt, Homo sapiens
  misc_RNA (1)...(19): siRNA sense strand
augaaggaagcucaggaaa

SEQ ID NO: 2446294 - RNA, 19 nt, Homo sapiens
  misc_RNA (1)...(19): siRNA sense strand
acauaaugggcuuggaaag

SEQ ID NO: 2446295 - RNA, 19 nt, Homo sapiens
  misc_RNA (1)...(19): siRNA sense strand
gagcagaugaggagcccua

SEQ ID NO: 2446296 - RNA, 19 nt, Homo sapiens
  misc_RNA (1)...(19): siRNA sense strand
ugguauggacccugagcaa

SEQ ID NO: 2446297 - RNA, 19 nt, Homo sapiens
  misc_RNA (1)...(19): siRNA sense strand
gagcaacggaaguggcaga

SEQ ID NO: 2446298 - RNA, 19 nt, Homo sapiens
  misc_RNA (1)...(19): siRNA sense strand
aaucugaagccuuggacau

SEQ ID NO: 2446299 - RNA, 19 nt, Homo sapiens
  misc_RNA (1)...(19): siRNA sense strand
aaauacugguuuaagccaa

SEQ ID NO: 2446300 - RNA, 19 nt, Homo sapiens
  misc_RNA (1)...(19): siRNA sense strand
cggaaguggcagaaguacu

SEQ ID NO: 2446301 - RNA, 19 nt, Homo sapiens
  misc_RNA (1)...(19): siRNA sense strand
ggacauacccauugugcug

SEQ ID NO: 2446302 - RNA, 19 nt, Homo sapiens
  misc_RNA (1)...(19): siRNA sense strand
ucaccaucccacagagaga

SEQ ID NO: 2446303 - RNA, 19 nt, Homo sapiens
  misc_RNA (1)...(19): siRNA sense strand
ccuuggacauaaaguacau

SEQ ID NO: 2446304 - RNA, 19 nt, Homo sapiens
  misc_RNA (1)...(19): siRNA sense strand
ccaccaccuuugagaggga

SEQ ID NO: 2446305 - RNA, 19 nt, Homo sapiens
  misc_RNA (1)...(19): siRNA sense strand
ugucaaugagaaagaagga

SEQ ID NO: 2446306 - RNA, 19 nt, Homo sapiens
  misc_RNA (1)...(19): siRNA sense strand
cgagagacacgaagcagca

SEQ ID NO: 2446307 - RNA, 19 nt, Homo sapiens
  misc_RNA (1)...(19): siRNA sense strand
gaccaggugaggacagcaa

SEQ ID NO: 2446308 - RNA, 19 nt, Homo sapiens
  misc_RNA (1)...(19): siRNA sense strand
ucaaaggagcagaugagga

SEQ ID NO: 2446309 - RNA, 19 nt, Homo sapiens
  misc_RNA (1)...(19): siRNA sense strand
gagagaacugggaggugca

SEQ ID NO: 2446310 - RNA, 19 nt, Homo sapiens
  misc_RNA (1)...(19): siRNA sense strand
caaugagaaagaaggagga

SEQ ID NO: 2446311 - RNA, 19 nt, Homo sapiens
  misc_RNA (1)...(19): siRNA sense strand
ugggaaucuuagucggaaa

SEQ ID NO: 2446312 - RNA, 19 nt, Homo sapiens
  misc_RNA (1)...(19): siRNA sense strand
aauucaaagagcugggcaa

SEQ ID NO: 2446313 - RNA, 19 nt, Homo sapiens
  misc_RNA (1)...(19): siRNA sense strand
aggcaaagaaguauggguu

SEQ ID NO: 2446314 - RNA, 19 nt, Homo sapiens
  misc_RNA (1)...(19): siRNA sense strand
uugaugugguacagagcaa

SEQ ID NO: 2446315 - RNA, 19 nt, Homo sapiens
  misc_RNA (1)...(19): siRNA sense strand
gcagaauauauuugcccua

SEQ ID NO: 2446316 - RNA, 19 nt, Homo sapiens
  misc_RNA (1)...(19): siRNA sense strand
ugccaaguuucaagaggaa

SEQ ID NO: 2446317 - RNA, 19 nt, Homo sapiens
  misc_RNA (1)...(19): siRNA sense strand
auuccaagguggugaucuu

SEQ ID NO: 2446318 - RNA, 19 nt, Homo sapiens
  misc_RNA (1)...(19): siRNA sense strand
gcgagcaaggagaagacaa

SEQ ID NO: 2446319 - RNA, 19 nt, Homo sapiens
  misc_RNA (1)...(19): siRNA sense strand
gcucacauggaguggccaa

SEQ ID NO: 2446320 - RNA, 19 nt, Homo sapiens
  misc_RNA (1)...(19): siRNA sense strand
caauuucagcaaaggguau

SEQ ID NO: 2446321 - RNA, 19 nt, Homo sapiens
  misc_RNA (1)...(19): siRNA sense strand
ccuaacuguggaagaacua

SEQ ID NO: 2446322 - RNA, 19 nt, Homo sapiens
  misc_RNA (1)...(19): siRNA sense strand
gcaaaucgagugaucggaa

SEQ ID NO: 2446323 - RNA, 19 nt, Homo sapiens
  misc_RNA (1)...(19): siRNA sense strand
auggaguggccaagaagaa

SEQ ID NO: 2446324 - RNA, 19 nt, Homo sapiens
  misc_RNA (1)...(19): siRNA sense strand
agguagacuugcuagccua

SEQ ID NO: 2446325 - RNA, 19 nt, Homo sapiens
  misc_RNA (1)...(19): siRNA sense strand
ccacgauggaccuugaaau

SEQ ID NO: 2446326 - RNA, 19 nt, Homo sapiens
  misc_RNA (1)...(19): siRNA sense strand
auucaaagagcugggcaaa

SEQ ID NO: 2446327 - RNA, 19 nt, Homo sapiens
  misc_RNA (1)...(19): siRNA sense strand
ggauauguucagagcccuu

SEQ ID NO: 2446328 - RNA, 19 nt, Homo sapiens
  misc_RNA (1)...(19): siRNA sense strand
acauggaaacugaguacau

SEQ ID NO: 2446329 - RNA, 19 nt, Homo sapiens
  misc_RNA (1)...(19): siRNA sense strand
cugggcaaaucaugagaau

SEQ ID NO: 2446330 - RNA, 19 nt, Homo sapiens
  misc_RNA (1)...(19): siRNA sense strand
gggaccuaacuguggaaga

SEQ ID NO: 2446331 - RNA, 19 nt, Homo sapiens
  misc_RNA (1)...(19): siRNA sense strand
gguacagagcaauguggau

SEQ ID NO: 2446332 - RNA, 19 nt, Homo sapiens
  misc_RNA (1)...(19): siRNA sense strand
aggcacagacuucaggcaa

SEQ ID NO: 2446333 - RNA, 19 nt, Homo sapiens
  misc_RNA (1)...(19): siRNA sense strand
uguggaugcucaaggcaga

SEQ ID NO: 2446334 - RNA, 19 nt, Homo sapiens
  misc_RNA (1)...(19): siRNA sense strand
guucagagcccuuguccca

SEQ ID NO: 2446335 - RNA, 19 nt, Homo sapiens
  misc_RNA (1)...(19): siRNA sense strand
gggaaucuuagucggaaaa

SEQ ID NO: 2446336 - RNA, 19 nt, Homo sapiens
  misc_RNA (1)...(19): siRNA sense strand
gcaauuucagcaaagggua

SEQ ID NO: 2446337 - RNA, 19 nt, Homo sapiens
  misc_RNA (1)...(19): siRNA sense strand
cuaauguggagaucagcaa

SEQ ID NO: 2446338 - RNA, 19 nt, Homo sapiens
  misc_RNA (1)...(19): siRNA sense strand
gauacaaauucaaagagcu

SEQ ID NO: 2446339 - RNA, 19 nt, Homo sapiens
  misc_RNA (1)...(19): siRNA sense strand
ugugguuggagguggagaa

SEQ ID NO: 2446340 - RNA, 19 nt, Homo sapiens
  misc_RNA (1)...(19): siRNA sense strand
ggguauugcagacaggcuu

SEQ ID NO: 2446341 - RNA, 19 nt, Homo sapiens
  misc_RNA (1)...(19): siRNA sense strand
aaguauggguuauuggcga

SEQ ID NO: 2446342 - RNA, 19 nt, Homo sapiens
  misc_RNA (1)...(19): siRNA sense strand
gagaagauguugacgcgaa

SEQ ID NO: 2446343 - RNA, 19 nt, Homo sapiens
  misc_RNA (1)...(19): siRNA sense strand
cuaaggaagccgagcggaa

SEQ ID NO: 2446344 - RNA, 19 nt, Homo sapiens
  misc_RNA (1)...(19): siRNA sense strand
ucggcaaaguacagggcaa

SEQ ID NO: 2446345 - RNA, 19 nt, Homo sapiens
  misc_RNA (1)...(19): siRNA sense strand
ugaaagugcuggagcggga

SEQ ID NO: 2446346 - RNA, 19 nt, Homo sapiens
  misc_RNA (1)...(19): siRNA sense strand
cagaagugguggggagaua

SEQ ID NO: 2446347 - RNA, 19 nt, Homo sapiens
  misc_RNA (1)...(19): siRNA sense strand
cugaggaauucgagaccau

SEQ ID NO: 2446348 - RNA, 19 nt, Homo sapiens
  misc_RNA (1)...(19): siRNA sense strand
aggaugggucugaggaauu

SEQ ID NO: 2446349 - RNA, 19 nt, Homo sapiens
  misc_RNA (1)...(19): siRNA sense strand
aggcgaagcccgagaucga

SEQ ID NO: 2446350 - RNA, 19 nt, Homo sapiens
  misc_RNA (1)...(19): siRNA sense strand
agaucgucaucgugagcaa

SEQ ID NO: 2446351 - RNA, 19 nt, Homo sapiens
  misc_RNA (1)...(19): siRNA sense strand
aggcccagguggagaggau

SEQ ID NO: 2446352 - RNA, 19 nt, Homo sapiens
  misc_RNA (1)...(19): siRNA sense strand
gcaagaugaugaaggacgu

SEQ ID NO: 2446353 - RNA, 19 nt, Homo sapiens
  misc_RNA (1)...(19): siRNA sense strand
gagaaggagcagagcugga

SEQ ID NO: 2446354 - RNA, 19 nt, Homo sapiens
  misc_RNA (1)...(19): siRNA sense strand
ggccugaguucgugcgcuu

SEQ ID NO: 2446355 - RNA, 19 nt, Homo sapiens
  misc_RNA (1)...(19): siRNA sense strand
gcuagggacaagcgggaga

SEQ ID NO: 2446356 - RNA, 19 nt, Homo sapiens
  misc_RNA (1)...(19): siRNA sense strand
gccauguacuucugggaga

SEQ ID NO: 2446357 - RNA, 19 nt, Homo sapiens
  misc_RNA (1)...(19): siRNA sense strand
ugggcaacguggucagcua

SEQ ID NO: 2446358 - RNA, 19 nt, Homo sapiens
  misc_RNA (1)...(19): siRNA sense strand
ccacacgggaggagcuaga

SEQ ID NO: 2446359 - RNA, 19 nt, Homo sapiens
  misc_RNA (1)...(19): siRNA sense strand
cgugggagggacuggaauu

SEQ ID NO: 2446360 - RNA, 19 nt, Homo sapiens
  misc_RNA (1)...(19): siRNA sense strand
ggugaugagaagauguuga

SEQ ID NO: 2446361 - RNA, 19 nt, Homo sapiens
  misc_RNA (1)...(19): siRNA sense strand
aagaagaagaccugcacga

SEQ ID NO: 2446362 - RNA, 19 nt, Homo sapiens
  misc_RNA (1)...(19): siRNA sense strand
ggaggaaagaccuggcguu

SEQ ID NO: 2446363 - RNA, 19 nt, Homo sapiens
  misc_RNA (1)...(19): siRNA sense strand
ccaccgaugccuacggaga

SEQ ID NO: 2446364 - RNA, 19 nt, Homo sapiens
  misc_RNA (1)...(19): siRNA sense strand
cggagaaggagcagagcug

SEQ ID NO: 2446365 - RNA, 19 nt, Homo sapiens
  misc_RNA (1)...(19): siRNA sense strand
aaucggugcauaaggagaa

SEQ ID NO: 2446366 - RNA, 19 nt, Homo sapiens
  misc_RNA (1)...(19): siRNA sense strand
ugaugaaggacguguucuu

SEQ ID NO: 2446367 - RNA, 19 nt, Homo sapiens
  misc_RNA (1)...(19): siRNA sense strand
cacugaaacagcugggaca

SEQ ID NO: 2446368 - RNA, 19 nt, Homo sapiens
  misc_RNA (1)...(19): siRNA sense strand
agucuauucuucugaggau

SEQ ID NO: 2446369 - RNA, 19 nt, Homo sapiens
  misc_RNA (1)...(19): siRNA sense strand
gcguugaccucuuuggcga

SEQ ID NO: 2446370 - RNA, 19 nt, Homo sapiens
  misc_RNA (1)...(19): siRNA sense strand
ggagggaccuugugccagu

SEQ ID NO: 2446371 - RNA, 19 nt, Homo sapiens
  misc_RNA (1)...(19): siRNA sense strand
caguuacacauucggcaaa

SEQ ID NO: 2446372 - RNA, 19 nt, Homo sapiens
  misc_RNA (1)...(19): siRNA sense strand
guggugaccgugugggaca

SEQ ID NO: 2446373 - RNA, 19 nt, Homo sapiens
  misc_RNA (1)...(19): siRNA sense strand
guacagggcaacagcgauc

SEQ ID NO: 2446374 - RNA, 19 nt, Homo sapiens
  misc_RNA (1)...(19): siRNA sense strand
uggacuuggcacugaaaca

SEQ ID NO: 2446375 - RNA, 19 nt, Homo sapiens
  misc_RNA (1)...(19): siRNA sense strand
auguaaugaaugugggaaa

SEQ ID NO: 2446376 - RNA, 19 nt, Homo sapiens
  misc_RNA (1)...(19): siRNA sense strand
aauucauacuggagaaaga

SEQ ID NO: 2446377 - RNA, 19 nt, Homo sapiens
  misc_RNA (1)...(19): siRNA sense strand
aggauaggauagagaggca

SEQ ID NO: 2446378 - RNA, 19 nt, Homo sapiens
  misc_RNA (1)...(19): siRNA sense strand
ggggaaaccucuuaggaga

SEQ ID NO: 2446379 - RNA, 19 nt, Homo sapiens
  misc_RNA (1)...(19): siRNA sense strand
ccauucuauuggagagaca

SEQ ID NO: 2446380 - RNA, 19 nt, Homo sapiens
  misc_RNA (1)...(19): siRNA sense strand
auagagaggcaguggggaa

SEQ ID NO: 2446381 - RNA, 19 nt, Homo sapiens
  misc_RNA (1)...(19): siRNA sense strand
aaugaaaguggaagcaaaa

SEQ ID NO: 2446382 - RNA, 19 nt, Homo sapiens
  misc_RNA (1)...(19): siRNA sense strand
guuggugaacauaaggaua

SEQ ID NO: 2446383 - RNA, 19 nt, Homo sapiens
  misc_RNA (1)...(19): siRNA sense strand
acauggagaaguuggugaa

SEQ ID NO: 2446384 - RNA, 19 nt, Homo sapiens
  misc_RNA (1)...(19): siRNA sense strand
ugaacauaaggauaggaua

SEQ ID NO: 2446385 - RNA, 19 nt, Homo sapiens
  misc_RNA (1)...(19): siRNA sense strand
agaguuggugcuaaggaaa

SEQ ID NO: 2446386 - RNA, 19 nt, Homo sapiens
  misc_RNA (1)...(19): siRNA sense strand
ggaaaauguuuaaugagca

SEQ ID NO: 2446387 - RNA, 19 nt, Homo sapiens
  misc_RNA (1)...(19): siRNA sense strand
cagucgaaguucuggucuu

SEQ ID NO: 2446388 - RNA, 19 nt, Homo sapiens
  misc_RNA (1)...(19): siRNA sense strand
agagaauccacaaaggaga

SEQ ID NO: 2446389 - RNA, 19 nt, Homo sapiens
  misc_RNA (1)...(19): siRNA sense strand
ggaaaagcuuuaaucgaca

SEQ ID NO: 2446390 - RNA, 19 nt, Homo sapiens
  misc_RNA (1)...(19): siRNA sense strand
gaacaucagagaagccaca

SEQ ID NO: 2446391 - RNA, 19 nt, Homo sapiens
  misc_RNA (1)...(19): siRNA sense strand
gcaucagagaauccacaaa

SEQ ID NO: 2446392 - RNA, 19 nt, Homo sapiens
  misc_RNA (1)...(19): siRNA sense strand
gcucaggucucauucgaca

SEQ ID NO: 2446393 - RNA, 19 nt, Homo sapiens
  misc_RNA (1)...(19): siRNA sense strand
acaauauacagaaacggua

SEQ ID NO: 2446394 - RNA, 19 nt, Homo sapiens
  misc_RNA (1)...(19): siRNA sense strand
uggagaaagaccuuaugaa

SEQ ID NO: 2446395 - RNA, 19 nt, Homo sapiens
  misc_RNA (1)...(19): siRNA sense strand
cugcaaggagugugggaag

SEQ ID NO: 2446396 - RNA, 19 nt, Homo sapiens
  misc_RNA (1)...(19): siRNA sense strand
augaaguaaccaagacuga

SEQ ID NO: 2446397 - RNA, 19 nt, Homo sapiens
  misc_RNA (1)...(19): siRNA sense strand
acacagacaaggagcgcua

SEQ ID NO: 2446398 - RNA, 19 nt, Homo sapiens
  misc_RNA (1)...(19): siRNA sense strand
gugcuauguguguguuaaa

SEQ ID NO: 2446399 - RNA, 19 nt, Homo sapiens
  misc_RNA (1)...(19): siRNA sense strand
aagacaacgaggaugacaa

SEQ ID NO: 2446400 - RNA, 19 nt, Homo sapiens
  misc_RNA (1)...(19): siRNA sense strand
cacaagaacuggaagugga

SEQ ID NO: 2446401 - RNA, 19 nt, Homo sapiens
  misc_RNA (1)...(19): siRNA sense strand
ggucuaugaaugagucaca

SEQ ID NO: 2446402 - RNA, 19 nt, Homo sapiens
  misc_RNA (1)...(19): siRNA sense strand
acugcuagcaaaugaagaa

SEQ ID NO: 2446403 - RNA, 19 nt, Homo sapiens
  misc_RNA (1)...(19): siRNA sense strand
uguuuggagauaagaagaa

SEQ ID NO: 2446404 - RNA, 19 nt, Homo sapiens
  misc_RNA (1)...(19): siRNA sense strand
augaagaaaccugggaaga

SEQ ID NO: 2446405 - RNA, 19 nt, Homo sapiens
  misc_RNA (1)...(19): siRNA sense strand
gcgcuaugaaaaugaagaa

SEQ ID NO: 2446406 - RNA, 19 nt, Homo sapiens
  misc_RNA (1)...(19): siRNA sense strand
caccaagagccaagaggaa

SEQ ID NO: 2446407 - RNA, 19 nt, Homo sapiens
  misc_RNA (1)...(19): siRNA sense strand
agauguggaagcaggguua

SEQ ID NO: 2446408 - RNA, 19 nt, Homo sapiens
  misc_RNA (1)...(19): siRNA sense strand
aggaacagacagugaccaa

SEQ ID NO: 2446409 - RNA, 19 nt, Homo sapiens
  misc_RNA (1)...(19): siRNA sense strand
gaccagaggaggaggacga

SEQ ID NO: 2446410 - RNA, 19 nt, Homo sapiens
  misc_RNA (1)...(19): siRNA sense strand
ccauugaggcccuggcaga

SEQ ID NO: 2446411 - RNA, 19 nt, Homo sapiens
  misc_RNA (1)...(19): siRNA sense strand
agaacgagguggagagcag

SEQ ID NO: 2446412 - RNA, 19 nt, Homo sapiens
  misc_RNA (1)...(19): siRNA sense strand
cagaugguguggaaggaga

SEQ ID NO: 2446413 - RNA, 19 nt, Homo sapiens
  misc_RNA (1)...(19): siRNA sense strand
aggaggaggacgaugauga

SEQ ID NO: 2446414 - RNA, 19 nt, Homo sapiens
  misc_RNA (1)...(19): siRNA sense strand
gagccaagaggaagaggga

SEQ ID NO: 2446415 - RNA, 19 nt, Homo sapiens
  misc_RNA (1)...(19): siRNA sense strand
ccuccaagaacaagaagga

SEQ ID NO: 2446416 - RNA, 19 nt, Homo sapiens
  misc_RNA (1)...(19): siRNA sense strand
agacagugcccgaacacau

SEQ ID NO: 2446417 - RNA, 19 nt, Homo sapiens
  misc_RNA (1)...(19): siRNA sense strand
gugugaguucugugaguuu

SEQ ID NO: 2446418 - RNA, 19 nt, Homo sapiens
  misc_RNA (1)...(19): siRNA sense strand
gcuuccuaggcaagaaaua

SEQ ID NO: 2446419 - RNA, 19 nt, Homo sapiens
  misc_RNA (1)...(19): siRNA sense strand
ccaacaugcugguguccga

SEQ ID NO: 2446420 - RNA, 19 nt, Homo sapiens
  misc_RNA (1)...(19): siRNA sense strand
uugaugaccuggaggagga

SEQ ID NO: 2446421 - RNA, 19 nt, Homo sapiens
  misc_RNA (1)...(19): siRNA sense strand
cggaagaagaggccagauc

SEQ ID NO: 2446422 - RNA, 19 nt, Homo sapiens
  misc_RNA (1)...(19): siRNA sense strand
cuacggaaguggagcaccu

SEQ ID NO: 2446423 - RNA, 19 nt, Homo sapiens
  misc_RNA (1)...(19): siRNA sense strand
gcaccuuccgagaggacuu

SEQ ID NO: 2446424 - RNA, 19 nt, Homo sapiens
  misc_RNA (1)...(19): siRNA sense strand
cagcaguucaaaugcaaga

SEQ ID NO: 2446425 - RNA, 19 nt, Homo sapiens
  misc_RNA (1)...(19): siRNA sense strand
gugaagacaagaaggcacu

SEQ ID NO: 2446426 - RNA, 19 nt, Homo sapiens
  misc_RNA (1)...(19): siRNA sense strand
gcugagauggagagucaca

SEQ ID NO: 2446427 - RNA, 19 nt, Homo sapiens
  misc_RNA (1)...(19): siRNA sense strand
gcccaggaacagacaguga

SEQ ID NO: 2446428 - RNA, 19 nt, Homo sapiens
  misc_RNA (1)...(19): siRNA sense strand
ccuacagggcccagaugau

SEQ ID NO: 2446429 - RNA, 19 nt, Homo sapiens
  misc_RNA (1)...(19): siRNA sense strand
augcagaauuucagggaga

SEQ ID NO: 2446430 - RNA, 19 nt, Homo sapiens
  misc_RNA (1)...(19): siRNA sense strand
caucaauauagguggguuu

SEQ ID NO: 2446431 - RNA, 19 nt, Homo sapiens
  misc_RNA (1)...(19): siRNA sense strand
uggacaaggcagaggugaa

SEQ ID NO: 2446432 - RNA, 19 nt, Homo sapiens
  misc_RNA (1)...(19): siRNA sense strand
agaaagggacaaagggaca

SEQ ID NO: 2446433 - RNA, 19 nt, Homo sapiens
  misc_RNA (1)...(19): siRNA sense strand
cagaagacaaguagcaaaa

SEQ ID NO: 2446434 - RNA, 19 nt, Homo sapiens
  misc_RNA (1)...(19): siRNA sense strand
acagaagacaaguagcaaa

SEQ ID NO: 2446435 - RNA, 19 nt, Homo sapiens
  misc_RNA (1)...(19): siRNA sense strand
ccuuggagacccugaacaa

SEQ ID NO: 2446436 - RNA, 19 nt, Homo sapiens
  misc_RNA (1)...(19): siRNA sense strand
cucaauacguguaggcuga

SEQ ID NO: 2446437 - RNA, 19 nt, Homo sapiens
  misc_RNA (1)...(19): siRNA sense strand
ggcacgagauagaggcuca

SEQ ID NO: 2446438 - RNA, 19 nt, Homo sapiens
  misc_RNA (1)...(19): siRNA sense strand
ccgaacagaaagggacaaa

SEQ ID NO: 2446439 - RNA, 19 nt, Homo sapiens
  misc_RNA (1)...(19): siRNA sense strand
cagccagggaagaagguau

SEQ ID NO: 2446440 - RNA, 19 nt, Homo sapiens
  misc_RNA (1)...(19): siRNA sense strand
ucgcacagcucaaggagga

SEQ ID NO: 2446441 - RNA, 19 nt, Homo sapiens
  misc_RNA (1)...(19): siRNA sense strand
gggaugaguugguggaagc

SEQ ID NO: 2446442 - RNA, 19 nt, Homo sapiens
  misc_RNA (1)...(19): siRNA sense strand
uguuguuuacuuugggaaa

SEQ ID NO: 2446443 - RNA, 19 nt, Homo sapiens
  misc_RNA (1)...(19): siRNA sense strand
aguccaaggccaugaacga

SEQ ID NO: 2446444 - RNA, 19 nt, Homo sapiens
  misc_RNA (1)...(19): siRNA sense strand
uguucaggcacgagauaga

SEQ ID NO: 2446445 - RNA, 19 nt, Homo sapiens
  misc_RNA (1)...(19): siRNA sense strand
cggcaguucaugcagaauu

SEQ ID NO: 2446446 - RNA, 19 nt, Homo sapiens
  misc_RNA (1)...(19): siRNA sense strand
acagaaagggacaaaggga

SEQ ID NO: 2446447 - RNA, 19 nt, Homo sapiens
  misc_RNA (1)...(19): siRNA sense strand
ucaccuucgcaaacagaaa

SEQ ID NO: 2446448 - RNA, 19 nt, Homo sapiens
  misc_RNA (1)...(19): siRNA sense strand
caguacaauccuggcauaa

SEQ ID NO: 2446449 - RNA, 19 nt, Homo sapiens
  misc_RNA (1)...(19): siRNA sense strand
aggacaagcgggaugaguu

SEQ ID NO: 2446450 - RNA, 19 nt, Homo sapiens
  misc_RNA (1)...(19): siRNA sense strand
auacacagccagggaagaa

SEQ ID NO: 2446451 - RNA, 19 nt, Homo sapiens
  misc_RNA (1)...(19): siRNA sense strand
gcggagaggaugugcaccu

SEQ ID NO: 2446452 - RNA, 19 nt, Homo sapiens
  misc_RNA (1)...(19): siRNA sense strand
caaggaggaugaaggcgaa

SEQ ID NO: 2446453 - RNA, 19 nt, Homo sapiens
  misc_RNA (1)...(19): siRNA sense strand
gcauugaaaacgugagaga

SEQ ID NO: 2446454 - RNA, 19 nt, Homo sapiens
  misc_RNA (1)...(19): siRNA sense strand
ccaaagaccagguugcuga

SEQ ID NO: 2446455 - RNA, 19 nt, Homo sapiens
  misc_RNA (1)...(19): siRNA sense strand
acaaggaggaugaaggcga

SEQ ID NO: 2446456 - RNA, 19 nt, Homo sapiens
  misc_RNA (1)...(19): siRNA sense strand
auugaaaacgugagagaga

SEQ ID NO: 2446457 - RNA, 19 nt, Homo sapiens
  misc_RNA (1)...(19): siRNA sense strand
gcgaaauucaaccagaaaa

SEQ ID NO: 2446458 - RNA, 19 nt, Homo sapiens
  misc_RNA (1)...(19): siRNA sense strand
ugaaaacgugagagagaca

SEQ ID NO: 2446459 - RNA, 19 nt, Homo sapiens
  misc_RNA (1)...(19): siRNA sense strand
aggccagggacgaguguaa

SEQ ID NO: 2446460 - RNA, 19 nt, Homo sapiens
  misc_RNA (1)...(19): siRNA sense strand
ggccaggagaagaggaaca

SEQ ID NO: 2446461 - RNA, 19 nt, Homo sapiens
  misc_RNA (1)...(19): siRNA sense strand
aggaagacaagcagcagaa

SEQ ID NO: 2446462 - RNA, 19 nt, Homo sapiens
  misc_RNA (1)...(19): siRNA sense strand
gagaagagaacaaaggcca

SEQ ID NO: 2446463 - RNA, 19 nt, Homo sapiens
  misc_RNA (1)...(19): siRNA sense strand
agauggaggcugaagucaa

SEQ ID NO: 2446464 - RNA, 19 nt, Homo sapiens
  misc_RNA (1)...(19): siRNA sense strand
auggagaagcagaaggaca

SEQ ID NO: 2446465 - RNA, 19 nt, Homo sapiens
  misc_RNA (1)...(19): siRNA sense strand
aggaagaagacgccgguca

SEQ ID NO: 2446466 - RNA, 19 nt, Homo sapiens
  misc_RNA (1)...(19): siRNA sense strand
gugaaggcugggagcagaa

SEQ ID NO: 2446467 - RNA, 19 nt, Homo sapiens
  misc_RNA (1)...(19): siRNA sense strand
acaacagccaugagggcau

SEQ ID NO: 2446468 - RNA, 19 nt, Homo sapiens
  misc_RNA (1)...(19): siRNA sense strand
ggcucggagaagagaacaa

SEQ ID NO: 2446469 - RNA, 19 nt, Homo sapiens
  misc_RNA (1)...(19): siRNA sense strand
gugcgaaggagcaagggau

SEQ ID NO: 2446470 - RNA, 19 nt, Homo sapiens
  misc_RNA (1)...(19): siRNA sense strand
acaugaacgaguuugacaa

SEQ ID NO: 2446471 - RNA, 19 nt, Homo sapiens
  misc_RNA (1)...(19): siRNA sense strand
ggcucguacucaaggucaa

SEQ ID NO: 2446472 - RNA, 19 nt, Homo sapiens
  misc_RNA (1)...(19): siRNA sense strand
cagcagagccaguggaacc

SEQ ID NO: 2446473 - RNA, 19 nt, Homo sapiens
  misc_RNA (1)...(19): siRNA sense strand
gagaagaggaacagcggac

SEQ ID NO: 2446474 - RNA, 19 nt, Homo sapiens
  misc_RNA (1)...(19): siRNA sense strand
aguauaaaggcgugggcgu

SEQ ID NO: 2446475 - RNA, 19 nt, Homo sapiens
  misc_RNA (1)...(19): siRNA sense strand
aggaaaggccaggagaaga

SEQ ID NO: 2446476 - RNA, 19 nt, Homo sapiens
  misc_RNA (1)...(19): siRNA sense strand
agaagagaacaaaggccau

SEQ ID NO: 2446477 - RNA, 19 nt, Homo sapiens
  misc_RNA (1)...(19): siRNA sense strand
gcuucuuggccguggagga

SEQ ID NO: 2446478 - RNA, 19 nt, Homo sapiens
  misc_RNA (1)...(19): siRNA sense strand
acaguuacuacaagugcaa

SEQ ID NO: 2446479 - RNA, 19 nt, Homo sapiens
  misc_RNA (1)...(19): siRNA sense strand
ggacaugaauaauggcagu

SEQ ID NO: 2446480 - RNA, 19 nt, Homo sapiens
  misc_RNA (1)...(19): siRNA sense strand
ugaaaagaguggauggaga

SEQ ID NO: 2446481 - RNA, 19 nt, Homo sapiens
  misc_RNA (1)...(19): siRNA sense strand
uggagaugucagugaagua

SEQ ID NO: 2446482 - RNA, 19 nt, Homo sapiens
  misc_RNA (1)...(19): siRNA sense strand
agugaagaggacaugaaua

SEQ ID NO: 2446483 - RNA, 19 nt, Homo sapiens
  misc_RNA (1)...(19): siRNA sense strand
ugucagcaacacagaggaa

SEQ ID NO: 2446484 - RNA, 19 nt, Homo sapiens
  misc_RNA (1)...(19): siRNA sense strand
gugacagugaagaggacau

SEQ ID NO: 2446485 - RNA, 19 nt, Homo sapiens
  misc_RNA (1)...(19): siRNA sense strand
acauaucugcauuggaaaa

SEQ ID NO: 2446486 - RNA, 19 nt, Homo sapiens
  misc_RNA (1)...(19): siRNA sense strand
ugaugauauguuaguggaa

SEQ ID NO: 2446487 - RNA, 19 nt, Homo sapiens
  misc_RNA (1)...(19): siRNA sense strand
uggcagagaagaauggcua

SEQ ID NO: 2446488 - RNA, 19 nt, Homo sapiens
  misc_RNA (1)...(19): siRNA sense strand
gcgccaucgccaagaagaa

SEQ ID NO: 2446489 - RNA, 19 nt, Homo sapiens
  misc_RNA (1)...(19): siRNA sense strand
uggacauguucaagaccaa

SEQ ID NO: 2446490 - RNA, 19 nt, Homo sapiens
  misc_RNA (1)...(19): siRNA sense strand
ucaagaaacuaaaggcacu

SEQ ID NO: 2446491 - RNA, 19 nt, Homo sapiens
  misc_RNA (1)...(19): siRNA sense strand
ucggaauggaggucugaua

SEQ ID NO: 2446492 - RNA, 19 nt, Homo sapiens
  misc_RNA (1)...(19): siRNA sense strand
agaaacuugcagaggccaa

SEQ ID NO: 2446493 - RNA, 19 nt, Homo sapiens
  misc_RNA (1)...(19): siRNA sense strand
ggucugagaugcugggcgu

SEQ ID NO: 2446494 - RNA, 19 nt, Homo sapiens
  misc_RNA (1)...(19): siRNA sense strand
gagaagaauggcuacguga

SEQ ID NO: 2446495 - RNA, 19 nt, Homo sapiens
  misc_RNA (1)...(19): siRNA sense strand
ugauaacuuuggaggaacu

SEQ ID NO: 2446496 - RNA, 19 nt, Homo sapiens
  misc_RNA (1)...(19): siRNA sense strand
aaguauaaggagcgaggga

SEQ ID NO: 2446497 - RNA, 19 nt, Homo sapiens
  misc_RNA (1)...(19): siRNA sense strand
caucaagaaacuaaaggca

SEQ ID NO: 2446498 - RNA, 19 nt, Homo sapiens
  misc_RNA (1)...(19): siRNA sense strand
gugugcaguuccaggacau

SEQ ID NO: 2446499 - RNA, 19 nt, Homo sapiens
  misc_RNA (1)...(19): siRNA sense strand
acuaaaggcacuuggcacu

SEQ ID NO: 2446500 - RNA, 19 nt, Homo sapiens
  misc_RNA (1)...(19): siRNA sense strand
cagcuagcccagaugucaa

SEQ ID NO: 2446501 - RNA, 19 nt, Homo sapiens
  misc_RNA (1)...(19): siRNA sense strand
aagcaggagauccggaaga

SEQ ID NO: 2446502 - RNA, 19 nt, Homo sapiens
  misc_RNA (1)...(19): siRNA sense strand
ccagcaaacacaagcagga

SEQ ID NO: 2446503 - RNA, 19 nt, Homo sapiens
  misc_RNA (1)...(19): siRNA sense strand
agacagaauccuaugguga

SEQ ID NO: 2446504 - RNA, 19 nt, Homo sapiens
  misc_RNA (1)...(19): siRNA sense strand
gagcugagagugaggcaga

SEQ ID NO: 2446505 - RNA, 19 nt, Homo sapiens
  misc_RNA (1)...(19): siRNA sense strand
gugcaagaagaaagacaga

SEQ ID NO: 2446506 - RNA, 19 nt, Homo sapiens
  misc_RNA (1)...(19): siRNA sense strand
cgggcaggguggaaugaau

SEQ ID NO: 2446507 - RNA, 19 nt, Homo sapiens
  misc_RNA (1)...(19): siRNA sense strand
acagaggagccgagagcga

SEQ ID NO: 2446508 - RNA, 19 nt, Homo sapiens
  misc_RNA (1)...(19): siRNA sense strand
uugaaugggccaagcguau

SEQ ID NO: 2446509 - RNA, 19 nt, Homo sapiens
  misc_RNA (1)...(19): siRNA sense strand
gugacaugaauauggagaa

SEQ ID NO: 2446510 - RNA, 19 nt, Homo sapiens
  misc_RNA (1)...(19): siRNA sense strand
aagacaugcagauggacaa

SEQ ID NO: 2446511 - RNA, 19 nt, Homo sapiens
  misc_RNA (1)...(19): siRNA sense strand
gauaauaaagacugccuca

SEQ ID NO: 2446512 - RNA, 19 nt, Homo sapiens
  misc_RNA (1)...(19): siRNA sense strand
auauggagaacucgacaaa

SEQ ID NO: 2446513 - RNA, 19 nt, Homo sapiens
  misc_RNA (1)...(19): siRNA sense strand
ugaaaugccuggagcaccu

SEQ ID NO: 2446514 - RNA, 19 nt, Homo sapiens
  misc_RNA (1)...(19): siRNA sense strand
cgauaaggaaggaccucau

SEQ ID NO: 2446515 - RNA, 19 nt, Homo sapiens
  misc_RNA (1)...(19): siRNA sense strand
aggccuacaccaagcagaa

SEQ ID NO: 2446516 - RNA, 19 nt, Homo sapiens
  misc_RNA (1)...(19): siRNA sense strand
aaaugaaagacaugcagau

SEQ ID NO: 2446517 - RNA, 19 nt, Homo sapiens
  misc_RNA (1)...(19): siRNA sense strand
aucuacacgugucgggaua

SEQ ID NO: 2446518 - RNA, 19 nt, Homo sapiens
  misc_RNA (1)...(19): siRNA sense strand
agguggagacucugcgaga

SEQ ID NO: 2446519 - RNA, 19 nt, Homo sapiens
  misc_RNA (1)...(19): siRNA sense strand
ggugacaugaauauggaga

SEQ ID NO: 2446520 - RNA, 19 nt, Homo sapiens
  misc_RNA (1)...(19): siRNA sense strand
uggaaacagaagucauaaa

SEQ ID NO: 2446521 - RNA, 19 nt, Homo sapiens
  misc_RNA (1)...(19): siRNA sense strand
acugagaacgagauggcua

SEQ ID NO: 2446522 - RNA, 19 nt, Homo sapiens
  misc_RNA (1)...(19): siRNA sense strand
ccucauggugaauaaacaa

SEQ ID NO: 2446523 - RNA, 19 nt, Homo sapiens
  misc_RNA (1)...(19): siRNA sense strand
gguuggaguuaaugacacu

SEQ ID NO: 2446524 - RNA, 19 nt, Homo sapiens
  misc_RNA (1)...(19): siRNA sense strand
cugagaacgagauggcuau

SEQ ID NO: 2446525 - RNA, 19 nt, Homo sapiens
  misc_RNA (1)...(19): siRNA sense strand
agugagugaauuagaugua

SEQ ID NO: 2446526 - RNA, 19 nt, Homo sapiens
  misc_RNA (1)...(19): siRNA sense strand
gugaauaaacaagggcaga

SEQ ID NO: 2446527 - RNA, 19 nt, Homo sapiens
  misc_RNA (1)...(19): siRNA sense strand
cauucauaacuuuguggaa

SEQ ID NO: 2446528 - RNA, 19 nt, Homo sapiens
  misc_RNA (1)...(19): siRNA sense strand
aguuaaugacacugagaac

SEQ ID NO: 2446529 - RNA, 19 nt, Homo sapiens
  misc_RNA (1)...(19): siRNA sense strand
gcguacacuucuggaaaca

SEQ ID NO: 2446530 - RNA, 19 nt, Homo sapiens
  misc_RNA (1)...(19): siRNA sense strand
aggaaaagcaagaguuaaa

SEQ ID NO: 2446531 - RNA, 19 nt, Homo sapiens
  misc_RNA (1)...(19): siRNA sense strand
cugaagaauuagaagauca

SEQ ID NO: 2446532 - RNA, 19 nt, Homo sapiens
  misc_RNA (1)...(19): siRNA sense strand
aagaagaugccuauggaaa

SEQ ID NO: 2446533 - RNA, 19 nt, Homo sapiens
  misc_RNA (1)...(19): siRNA sense strand
acaaagaagaagucaacaa

SEQ ID NO: 2446534 - RNA, 19 nt, Homo sapiens
  misc_RNA (1)...(19): siRNA sense strand
gagaagaagaagaugccua

SEQ ID NO: 2446535 - RNA, 19 nt, Homo sapiens
  misc_RNA (1)...(19): siRNA sense strand
gaauauucuuuaagggcau

SEQ ID NO: 2446536 - RNA, 19 nt, Homo sapiens
  misc_RNA (1)...(19): siRNA sense strand
uggaagaauugaagagaac

SEQ ID NO: 2446537 - RNA, 19 nt, Homo sapiens
  misc_RNA (1)...(19): siRNA sense strand
cauccaaaguacaggagau

SEQ ID NO: 2446538 - RNA, 19 nt, Homo sapiens
  misc_RNA (1)...(19): siRNA sense strand
cuggaagaauugaagagaa

SEQ ID NO: 2446539 - RNA, 19 nt, Homo sapiens
  misc_RNA (1)...(19): siRNA sense strand
uugaagagaaccacagaaa

SEQ ID NO: 2446540 - RNA, 19 nt, Homo sapiens
  misc_RNA (1)...(19): siRNA sense strand
aggaguaauuggagucauu

SEQ ID NO: 2446541 - RNA, 19 nt, Homo sapiens
  misc_RNA (1)...(19): siRNA sense strand
caagaauacaggucagaau

SEQ ID NO: 2446542 - RNA, 19 nt, Homo sapiens
  misc_RNA (1)...(19): siRNA sense strand
gccaaagguguuagagauu

SEQ ID NO: 2446543 - RNA, 19 nt, Homo sapiens
  misc_RNA (1)...(19): siRNA sense strand
caccaaaguugaagaacca

SEQ ID NO: 2446544 - RNA, 19 nt, Homo sapiens
  misc_RNA (1)...(19): siRNA sense strand
cagaacaaguggaugggau

SEQ ID NO: 2446545 - RNA, 19 nt, Homo sapiens
  misc_RNA (1)...(19): siRNA sense strand
ggauugaauaacaagacaa

SEQ ID NO: 2446546 - RNA, 19 nt, Homo sapiens
  misc_RNA (1)...(19): siRNA sense strand
caauuggauaugagggaau

SEQ ID NO: 2446547 - RNA, 19 nt, Homo sapiens
  misc_RNA (1)...(19): siRNA sense strand
gaagaaucuaacagaggua

SEQ ID NO: 2446548 - RNA, 19 nt, Homo sapiens
  misc_RNA (1)...(19): siRNA sense strand
aagagaaacugaaggaaac

SEQ ID NO: 2446549 - RNA, 19 nt, Homo sapiens
  misc_RNA (1)...(19): siRNA sense strand
aguugaagaaccagagaga

SEQ ID NO: 2446550 - RNA, 19 nt, Homo sapiens
  misc_RNA (1)...(19): siRNA sense strand
cuguugaggagaagaagaa

SEQ ID NO: 2446551 - RNA, 19 nt, Homo sapiens
  misc_RNA (1)...(19): siRNA sense strand
acaaauggauccuagguga

SEQ ID NO: 2446552 - RNA, 19 nt, Homo sapiens
  misc_RNA (1)...(19): siRNA sense strand
ccaaagaggaaaagcaaga

SEQ ID NO: 2446553 - RNA, 19 nt, Homo sapiens
  misc_RNA (1)...(19): siRNA sense strand
aaugcuuacuggaaggaaa

SEQ ID NO: 2446554 - RNA, 19 nt, Homo sapiens
  misc_RNA (1)...(19): siRNA sense strand
agaagaugccuauggaaaa

SEQ ID NO: 2446555 - RNA, 19 nt, Homo sapiens
  misc_RNA (1)...(19): siRNA sense strand
ccauaaacaaagaagaagu

SEQ ID NO: 2446556 - RNA, 19 nt, Homo sapiens
  misc_RNA (1)...(19): siRNA sense strand
ugagcaaagcuaagaaaca

SEQ ID NO: 2446557 - RNA, 19 nt, Homo sapiens
  misc_RNA (1)...(19): siRNA sense strand
gcaagaguuaaaagagaaa

SEQ ID NO: 2446558 - RNA, 19 nt, Homo sapiens
  misc_RNA (1)...(19): siRNA sense strand
ugaaggaaacagagacaca

SEQ ID NO: 2446559 - RNA, 19 nt, Homo sapiens
  misc_RNA (1)...(19): siRNA sense strand
cgguguuaccucugagcua

SEQ ID NO: 2446560 - RNA, 19 nt, Homo sapiens
  misc_RNA (1)...(19): siRNA sense strand
ggagaagguguaggaguaa

SEQ ID NO: 2446561 - RNA, 19 nt, Homo sapiens
  misc_RNA (1)...(19): siRNA sense strand
gaagaauugaagagaacca

SEQ ID NO: 2446562 - RNA, 19 nt, Homo sapiens
  misc_RNA (1)...(19): siRNA sense strand
cggguaugacucagaacaa

SEQ ID NO: 2446563 - RNA, 19 nt, Homo sapiens
  misc_RNA (1)...(19): siRNA sense strand
agacuuugacacagaagaa

SEQ ID NO: 2446564 - RNA, 19 nt, Homo sapiens
  misc_RNA (1)...(19): siRNA sense strand
acacauggguuaucgccaa

SEQ ID NO: 2446565 - RNA, 19 nt, Homo sapiens
  misc_RNA (1)...(19): siRNA sense strand
caaauggauccuaggugaa

SEQ ID NO: 2446566 - RNA, 19 nt, Homo sapiens
  misc_RNA (1)...(19): siRNA sense strand
agucugaauucaagaaagu

SEQ ID NO: 2446567 - RNA, 19 nt, Homo sapiens
  misc_RNA (1)...(19): siRNA sense strand
ugaagaaccgguggagaaa

SEQ ID NO: 2446568 - RNA, 19 nt, Homo sapiens
  misc_RNA (1)...(19): siRNA sense strand
uguuguggguguugccaaa

SEQ ID NO: 2446569 - RNA, 19 nt, Homo sapiens
  misc_RNA (1)...(19): siRNA sense strand
agcuaagaaacaagaacaa

SEQ ID NO: 2446570 - RNA, 19 nt, Homo sapiens
  misc_RNA (1)...(19): siRNA sense strand
acaaauaagcaggugagaa

SEQ ID NO: 2446571 - RNA, 19 nt, Homo sapiens
  misc_RNA (1)...(19): siRNA sense strand
ugccaaagguguuagagau

SEQ ID NO: 2446572 - RNA, 19 nt, Homo sapiens
  misc_RNA (1)...(19): siRNA sense strand
agcuggaacaggagaggaa

SEQ ID NO: 2446573 - RNA, 19 nt, Homo sapiens
  misc_RNA (1)...(19): siRNA sense strand
agaggaaaagcaagaguua

SEQ ID NO: 2446574 - RNA, 19 nt, Homo sapiens
  misc_RNA (1)...(19): siRNA sense strand
aagcaagaguuaaaagaga

SEQ ID NO: 2446575 - RNA, 19 nt, Homo sapiens
  misc_RNA (1)...(19): siRNA sense strand
agaagguguaggaguaauu

SEQ ID NO: 2446576 - RNA, 19 nt, Homo sapiens
  misc_RNA (1)...(19): siRNA sense strand
agaagaagaagaugccuau

SEQ ID NO: 2446577 - RNA, 19 nt, Homo sapiens
  misc_RNA (1)...(19): siRNA sense strand
acgaagaaggcuccagaau

SEQ ID NO: 2446578 - RNA, 19 nt, Homo sapiens
  misc_RNA (1)...(19): siRNA sense strand
ggucagaauagggagguuu

SEQ ID NO: 2446579 - RNA, 19 nt, Homo sapiens
  misc_RNA (1)...(19): siRNA sense strand
gggagaaagcaagaggcua

SEQ ID NO: 2446580 - RNA, 19 nt, Homo sapiens
  misc_RNA (1)...(19): siRNA sense strand
aacaugaauuggugaucua

SEQ ID NO: 2446581 - RNA, 19 nt, Homo sapiens
  misc_RNA (1)...(19): siRNA sense strand
acugaaggaaacagagaca

SEQ ID NO: 2446582 - RNA, 19 nt, Homo sapiens
  misc_RNA (1)...(19): siRNA sense strand
gcuaccagaaacagaauau

SEQ ID NO: 2446583 - RNA, 19 nt, Homo sapiens
  misc_RNA (1)...(19): siRNA sense strand
aaacuguugaggagaagaa

SEQ ID NO: 2446584 - RNA, 19 nt, Homo sapiens
  misc_RNA (1)...(19): siRNA sense strand
guugaggagaagaagaaga

SEQ ID NO: 2446585 - RNA, 19 nt, Homo sapiens
  misc_RNA (1)...(19): siRNA sense strand
gcaagaggcuaugaggaga

SEQ ID NO: 2446586 - RNA, 19 nt, Homo sapiens
  misc_RNA (1)...(19): siRNA sense strand
agguggaggagcuggaaca

SEQ ID NO: 2446587 - RNA, 19 nt, Homo sapiens
  misc_RNA (1)...(19): siRNA sense strand
cagagacacaccuggaaau

SEQ ID NO: 2446588 - RNA, 19 nt, Homo sapiens
  misc_RNA (1)...(19): siRNA sense strand
ucuaacagagguagcacaa

SEQ ID NO: 2446589 - RNA, 19 nt, Homo sapiens
  misc_RNA (1)...(19): siRNA sense strand
agaaaguccaacaugaauu

SEQ ID NO: 2446590 - RNA, 19 nt, Homo sapiens
  misc_RNA (1)...(19): siRNA sense strand
cugagaaagucguuccaga

SEQ ID NO: 2446591 - RNA, 19 nt, Homo sapiens
  misc_RNA (1)...(19): siRNA sense strand
uggagaugcccgugcugaa

SEQ ID NO: 2446592 - RNA, 19 nt, Homo sapiens
  misc_RNA (1)...(19): siRNA sense strand
ggauauaccaacugggcua

SEQ ID NO: 2446593 - RNA, 19 nt, Homo sapiens
  misc_RNA (1)...(19): siRNA sense strand
cuggaaacuaaguggauua

SEQ ID NO: 2446594 - RNA, 19 nt, Homo sapiens
  misc_RNA (1)...(19): siRNA sense strand
aagauaagcuuaaaggaga

SEQ ID NO: 2446595 - RNA, 19 nt, Homo sapiens
  misc_RNA (1)...(19): siRNA sense strand
cuaucagcauucugggaaa

SEQ ID NO: 2446596 - RNA, 19 nt, Homo sapiens
  misc_RNA (1)...(19): siRNA sense strand
caacaaugguaaaggggau

SEQ ID NO: 2446597 - RNA, 19 nt, Homo sapiens
  misc_RNA (1)...(19): siRNA sense strand
auuggaaggaagugcauaa

SEQ ID NO: 2446598 - RNA, 19 nt, Homo sapiens
  misc_RNA (1)...(19): siRNA sense strand
acugacaaugauagugaaa

SEQ ID NO: 2446599 - RNA, 19 nt, Homo sapiens
  misc_RNA (1)...(19): siRNA sense strand
ugggaaagucucuggcuga

SEQ ID NO: 2446600 - RNA, 19 nt, Homo sapiens
  misc_RNA (1)...(19): siRNA sense strand
gagaaaugauggaucugca

SEQ ID NO: 2446601 - RNA, 19 nt, Homo sapiens
  misc_RNA (1)...(19): siRNA sense strand
acuaaguggauuacccaaa

SEQ ID NO: 2446602 - RNA, 19 nt, Homo sapiens
  misc_RNA (1)...(19): siRNA sense strand
cgugauuggaaguggaugu

SEQ ID NO: 2446603 - RNA, 19 nt, Homo sapiens
  misc_RNA (1)...(19): siRNA sense strand
uuaucaaccagaagcuaaa

SEQ ID NO: 2446604 - RNA, 19 nt, Homo sapiens
  misc_RNA (1)...(19): siRNA sense strand
cagaaaugggaacugacaa

SEQ ID NO: 2446605 - RNA, 19 nt, Homo sapiens
  misc_RNA (1)...(19): siRNA sense strand
uguguggaguggugugaau

SEQ ID NO: 2446606 - RNA, 19 nt, Homo sapiens
  misc_RNA (1)...(19): siRNA sense strand
gaagauaagcuuaaaggag

SEQ ID NO: 2446607 - RNA, 19 nt, Homo sapiens
  misc_RNA (1)...(19): siRNA sense strand
ccgugucaacaaugguaaa

SEQ ID NO: 2446608 - RNA, 19 nt, Homo sapiens
  misc_RNA (1)...(19): siRNA sense strand
uucuaagauuguaguggua

SEQ ID NO: 2446609 - RNA, 19 nt, Homo sapiens
  misc_RNA (1)...(19): siRNA sense strand
caucaagcuaaaaggauau

SEQ ID NO: 2446610 - RNA, 19 nt, Homo sapiens
  misc_RNA (1)...(19): siRNA sense strand
ggcaaaagccaaagagauu

SEQ ID NO: 2446611 - RNA, 19 nt, Homo sapiens
  misc_RNA (1)...(19): siRNA sense strand
augaagaaguagagaugga

SEQ ID NO: 2446612 - RNA, 19 nt, Homo sapiens
  misc_RNA (1)...(19): siRNA sense strand
ccuuauaauucaaugggau

SEQ ID NO: 2446613 - RNA, 19 nt, Homo sapiens
  misc_RNA (1)...(19): siRNA sense strand
ggauugaacuagaugcuca

SEQ ID NO: 2446614 - RNA, 19 nt, Homo sapiens
  misc_RNA (1)...(19): siRNA sense strand
cuguagaagacaagacuga

SEQ ID NO: 2446615 - RNA, 19 nt, Homo sapiens
  misc_RNA (1)...(19): siRNA sense strand
gguuugagcuaaugcgguu

SEQ ID NO: 2446616 - RNA, 19 nt, Homo sapiens
  misc_RNA (1)...(19): siRNA sense strand
gggcaaaagccaaagagau

SEQ ID NO: 2446617 - RNA, 19 nt, Homo sapiens
  misc_RNA (1)...(19): siRNA sense strand
agaagaaauaccagcccaa

SEQ ID NO: 2446618 - RNA, 19 nt, Homo sapiens
  misc_RNA (1)...(19): siRNA sense strand
ucaccuauaaagagaagaa

SEQ ID NO: 2446619 - RNA, 19 nt, Homo sapiens
  misc_RNA (1)...(19): siRNA sense strand
aagaagaugaagaaguaga

SEQ ID NO: 2446620 - RNA, 19 nt, Homo sapiens
  misc_RNA (1)...(19): siRNA sense strand
gugcagagcuggcugagga

SEQ ID NO: 2446621 - RNA, 19 nt, Homo sapiens
  misc_RNA (1)...(19): siRNA sense strand
ugaggaucccugagaagaa

SEQ ID NO: 2446622 - RNA, 19 nt, Homo sapiens
  misc_RNA (1)...(19): siRNA sense strand
agaugaagaaguagagaug

SEQ ID NO: 2446623 - RNA, 19 nt, Homo sapiens
  misc_RNA (1)...(19): siRNA sense strand
cuccaaagccagcgugaga

SEQ ID NO: 2446624 - RNA, 19 nt, Homo sapiens
  misc_RNA (1)...(19): siRNA sense strand
cugagaagaccuugccuuu

SEQ ID NO: 2446625 - RNA, 19 nt, Homo sapiens
  misc_RNA (1)...(19): siRNA sense strand
gaucauuuaagaagaggga

SEQ ID NO: 2446626 - RNA, 19 nt, Homo sapiens
  misc_RNA (1)...(19): siRNA sense strand
gcagagagggaacagguga

SEQ ID NO: 2446627 - RNA, 19 nt, Homo sapiens
  misc_RNA (1)...(19): siRNA sense strand
uuacaguggaugucagaga

SEQ ID NO: 2446628 - RNA, 19 nt, Homo sapiens
  misc_RNA (1)...(19): siRNA sense strand
aguggaugucagagaugaa

SEQ ID NO: 2446629 - RNA, 19 nt, Homo sapiens
  misc_RNA (1)...(19): siRNA sense strand
uugggaagcaucuggcuaa

SEQ ID NO: 2446630 - RNA, 19 nt, Homo sapiens
  misc_RNA (1)...(19): siRNA sense strand
ggauaaaccgacugccgga

SEQ ID NO: 2446631 - RNA, 19 nt, Homo sapiens
  misc_RNA (1)...(19): siRNA sense strand
ccaccaauuacgaugacuu

SEQ ID NO: 2446632 - RNA, 19 nt, Homo sapiens
  misc_RNA (1)...(19): siRNA sense strand
ccaaugauguugaggaucc

SEQ ID NO: 2446633 - RNA, 19 nt, Homo sapiens
  misc_RNA (1)...(19): siRNA sense strand
augaaauaguuuugaggca

SEQ ID NO: 2446634 - RNA, 19 nt, Homo sapiens
  misc_RNA (1)...(19): siRNA sense strand
gagaauggcagaauccaca

SEQ ID NO: 2446635 - RNA, 19 nt, Homo sapiens
  misc_RNA (1)...(19): siRNA sense strand
accuauaaagagaagaaga

SEQ ID NO: 2446636 - RNA, 19 nt, Homo sapiens
  misc_RNA (1)...(19): siRNA sense strand
cagagagggaacaggugau

SEQ ID NO: 2446637 - RNA, 19 nt, Homo sapiens
  misc_RNA (1)...(19): siRNA sense strand
agugaaaggagcagaacaa

SEQ ID NO: 2446638 - RNA, 19 nt, Homo sapiens
  misc_RNA (1)...(19): siRNA sense strand
cguuaaugguaaagcugaa

SEQ ID NO: 2446639 - RNA, 19 nt, Homo sapiens
  misc_RNA (1)...(19): siRNA sense strand
ugauaugaccaaagaggaa

SEQ ID NO: 2446640 - RNA, 19 nt, Homo sapiens
  misc_RNA (1)...(19): siRNA sense strand
uggcagaagcacugaagaa

SEQ ID NO: 2446641 - RNA, 19 nt, Homo sapiens
  misc_RNA (1)...(19): siRNA sense strand
uagaagaggaagaggacau

SEQ ID NO: 2446642 - RNA, 19 nt, Homo sapiens
  misc_RNA (1)...(19): siRNA sense strand
ucaaagaaggagaagaaaa

SEQ ID NO: 2446643 - RNA, 19 nt, Homo sapiens
  misc_RNA (1)...(19): siRNA sense strand
ggcccaagaagaagugaaa

SEQ ID NO: 2446644 - RNA, 19 nt, Homo sapiens
  misc_RNA (1)...(19): siRNA sense strand
cacuaauggcuaugauaaa

SEQ ID NO: 2446645 - RNA, 19 nt, Homo sapiens
  misc_RNA (1)...(19): siRNA sense strand
cugaagaaguaaagcccau

SEQ ID NO: 2446646 - RNA, 19 nt, Homo sapiens
  misc_RNA (1)...(19): siRNA sense strand
ggugggaaguggaggugau

SEQ ID NO: 2446647 - RNA, 19 nt, Homo sapiens
  misc_RNA (1)...(19): siRNA sense strand
gguugcaguugaaggaaaa

SEQ ID NO: 2446648 - RNA, 19 nt, Homo sapiens
  misc_RNA (1)...(19): siRNA sense strand
aguaaagcccauugaugaa

SEQ ID NO: 2446649 - RNA, 19 nt, Homo sapiens
  misc_RNA (1)...(19): siRNA sense strand
ugguugcaguugaaggaaa

SEQ ID NO: 2446650 - RNA, 19 nt, Homo sapiens
  misc_RNA (1)...(19): siRNA sense strand
cagcauuugacaagcgauu

SEQ ID NO: 2446651 - RNA, 19 nt, Homo sapiens
  misc_RNA (1)...(19): siRNA sense strand
agaagugaaaggagcagaa

SEQ ID NO: 2446652 - RNA, 19 nt, Homo sapiens
  misc_RNA (1)...(19): siRNA sense strand
ugguaaagcugaaagcagu

SEQ ID NO: 2446653 - RNA, 19 nt, Homo sapiens
  misc_RNA (1)...(19): siRNA sense strand
gaauaacagcggagcacca

SEQ ID NO: 2446654 - RNA, 19 nt, Homo sapiens
  misc_RNA (1)...(19): siRNA sense strand
uugcauucaccaagauaua

SEQ ID NO: 2446655 - RNA, 19 nt, Homo sapiens
  misc_RNA (1)...(19): siRNA sense strand
uggauuucgugaagauauu

SEQ ID NO: 2446656 - RNA, 19 nt, Homo sapiens
  misc_RNA (1)...(19): siRNA sense strand
uaauguuagaagaggaaga

SEQ ID NO: 2446657 - RNA, 19 nt, Homo sapiens
  misc_RNA (1)...(19): siRNA sense strand
uggaagauauaaaugggau

SEQ ID NO: 2446658 - RNA, 19 nt, Homo sapiens
  misc_RNA (1)...(19): siRNA sense strand
ggauccuauuggaagauau

SEQ ID NO: 2446659 - RNA, 19 nt, Homo sapiens
  misc_RNA (1)...(19): siRNA sense strand
ggaugcaacacuugagcga

SEQ ID NO: 2446660 - RNA, 19 nt, Homo sapiens
  misc_RNA (1)...(19): siRNA sense strand
ugaugagacugcaggagga

SEQ ID NO: 2446661 - RNA, 19 nt, Homo sapiens
  misc_RNA (1)...(19): siRNA sense strand
ccaaagaggaagccaugau

SEQ ID NO: 2446662 - RNA, 19 nt, Homo sapiens
  misc_RNA (1)...(19): siRNA sense strand
agaagaagugaaaggagca

SEQ ID NO: 2446663 - RNA, 19 nt, Homo sapiens
  misc_RNA (1)...(19): siRNA sense strand
uguucaggauauacagaau

SEQ ID NO: 2446664 - RNA, 19 nt, Homo sapiens
  misc_RNA (1)...(19): siRNA sense strand
caagcauggaggagaagau

SEQ ID NO: 2446665 - RNA, 19 nt, Homo sapiens
  misc_RNA (1)...(19): siRNA sense strand
uguuagaagaggaagagga

SEQ ID NO: 2446666 - RNA, 19 nt, Homo sapiens
  misc_RNA (1)...(19): siRNA sense strand
aggaagaagaggcccaaga

SEQ ID NO: 2446667 - RNA, 19 nt, Homo sapiens
  misc_RNA (1)...(19): siRNA sense strand
agaagucagcagaccauaa

SEQ ID NO: 2446668 - RNA, 19 nt, Homo sapiens
  misc_RNA (1)...(19): siRNA sense strand
caggauauacagaaugaca

SEQ ID NO: 2446669 - RNA, 19 nt, Homo sapiens
  misc_RNA (1)...(19): siRNA sense strand
agugaaguuuacugugauu

SEQ ID NO: 2446670 - RNA, 19 nt, Homo sapiens
  misc_RNA (1)...(19): siRNA sense strand
guugaagauguuacaggaa

SEQ ID NO: 2446671 - RNA, 19 nt, Homo sapiens
  misc_RNA (1)...(19): siRNA sense strand
ggaagauauaaaugggaug

SEQ ID NO: 2446672 - RNA, 19 nt, Homo sapiens
  misc_RNA (1)...(19): siRNA sense strand
agaauguccuucagagacu

SEQ ID NO: 2446673 - RNA, 19 nt, Homo sapiens
  misc_RNA (1)...(19): siRNA sense strand
ugaccaaagaggaagccau

SEQ ID NO: 2446674 - RNA, 19 nt, Homo sapiens
  misc_RNA (1)...(19): siRNA sense strand
uugaagaauugcugcgugu

SEQ ID NO: 2446675 - RNA, 19 nt, Homo sapiens
  misc_RNA (1)...(19): siRNA sense strand
ccagucaacccauggaaaa

SEQ ID NO: 2446676 - RNA, 19 nt, Homo sapiens
  misc_RNA (1)...(19): siRNA sense strand
gaggagaagauggcaggaa

SEQ ID NO: 2446677 - RNA, 19 nt, Homo sapiens
  misc_RNA (1)...(19): siRNA sense strand
caaagaaggagaagaaaac

SEQ ID NO: 2446678 - RNA, 19 nt, Homo sapiens
  misc_RNA (1)...(19): siRNA sense strand
caaaaccguuaaugguaaa

SEQ ID NO: 2446679 - RNA, 19 nt, Homo sapiens
  misc_RNA (1)...(19): siRNA sense strand
gcauuugacaagcgauuca

SEQ ID NO: 2446680 - RNA, 19 nt, Homo sapiens
  misc_RNA (1)...(19): siRNA sense strand
aggcggagaaacugacgaa

SEQ ID NO: 2446681 - RNA, 19 nt, Homo sapiens
  misc_RNA (1)...(19): siRNA sense strand
ugccaaugacugagaaagu

SEQ ID NO: 2446682 - RNA, 19 nt, Homo sapiens
  misc_RNA (1)...(19): siRNA sense strand
cugaggaagaagaggccca

SEQ ID NO: 2446683 - RNA, 19 nt, Homo sapiens
  misc_RNA (1)...(19): siRNA sense strand
cuauggaacaauuuggaca

SEQ ID NO: 2446684 - RNA, 19 nt, Homo sapiens
  misc_RNA (1)...(19): siRNA sense strand
aggaagaggacauaggaug

SEQ ID NO: 2446685 - RNA, 19 nt, Homo sapiens
  misc_RNA (1)...(19): siRNA sense strand
ggaugauguaacagggaca

SEQ ID NO: 2446686 - RNA, 19 nt, Homo sapiens
  misc_RNA (1)...(19): siRNA sense strand
ggacaauaacagaagccga

SEQ ID NO: 2446687 - RNA, 19 nt, Homo sapiens
  misc_RNA (1)...(19): siRNA sense strand
gacaauaacagaagccgaa

SEQ ID NO: 2446688 - RNA, 19 nt, Homo sapiens
  misc_RNA (1)...(19): siRNA sense strand
ccgaagaaacugaggacug

SEQ ID NO: 2446689 - RNA, 19 nt, Homo sapiens
  misc_RNA (1)...(19): siRNA sense strand
cgaugaagagugacgagga

SEQ ID NO: 2446690 - RNA, 19 nt, Homo sapiens
  misc_RNA (1)...(19): siRNA sense strand
cauucaggagagcaggaaa

SEQ ID NO: 2446691 - RNA, 19 nt, Homo sapiens
  misc_RNA (1)...(19): siRNA sense strand
gggucaugaaagaaggaaa

SEQ ID NO: 2446692 - RNA, 19 nt, Homo sapiens
  misc_RNA (1)...(19): siRNA sense strand
ggucaugaaagaaggaaaa

SEQ ID NO: 2446693 - RNA, 19 nt, Homo sapiens
  misc_RNA (1)...(19): siRNA sense strand
gaaugauagaagaggaaga

SEQ ID NO: 2446694 - RNA, 19 nt, Homo sapiens
  misc_RNA (1)...(19): siRNA sense strand
cgagaaaucaccaggguca

SEQ ID NO: 2446695 - RNA, 19 nt, Homo sapiens
  misc_RNA (1)...(19): siRNA sense strand
gggaaaugcuauacugcca

SEQ ID NO: 2446696 - RNA, 19 nt, Homo sapiens
  misc_RNA (1)...(19): siRNA sense strand
cuuuaaagaugaaggguug

SEQ ID NO: 2446697 - RNA, 19 nt, Homo sapiens
  misc_RNA (1)...(19): siRNA sense strand
gggaccuaauggugagaga

SEQ ID NO: 2446698 - RNA, 19 nt, Homo sapiens
  misc_RNA (1)...(19): siRNA sense strand
cagaagcagccauggaaaa

SEQ ID NO: 2446699 - RNA, 19 nt, Homo sapiens
  misc_RNA (1)...(19): siRNA sense strand
ggccaaaggaucaggugga

SEQ ID NO: 2446700 - RNA, 19 nt, Homo sapiens
  misc_RNA (1)...(19): siRNA sense strand
gauaaagcauauacaggca

SEQ ID NO: 2446701 - RNA, 19 nt, Homo sapiens
  misc_RNA (1)...(19): siRNA sense strand
aggcauuugcaaaggccaa

SEQ ID NO: 2446702 - RNA, 19 nt, Homo sapiens
  misc_RNA (1)...(19): siRNA sense strand
uggaggacugggaagguua

SEQ ID NO: 2446703 - RNA, 19 nt, Homo sapiens
  misc_RNA (1)...(19): siRNA sense strand
ugauagaagaggaagaauc

SEQ ID NO: 2446704 - RNA, 19 nt, Homo sapiens
  misc_RNA (1)...(19): siRNA sense strand
uggaggugcuggaggagga

SEQ ID NO: 2446705 - RNA, 19 nt, Homo sapiens
  misc_RNA (1)...(19): siRNA sense strand
cuggaaacacccacaggaa

SEQ ID NO: 2446706 - RNA, 19 nt, Homo sapiens
  misc_RNA (1)...(19): siRNA sense strand
cgccgacaccugaaggaaa

SEQ ID NO: 2446707 - RNA, 19 nt, Homo sapiens
  misc_RNA (1)...(19): siRNA sense strand
ugcaaaggccaaaggauca

SEQ ID NO: 2446708 - RNA, 19 nt, Homo sapiens
  misc_RNA (1)...(19): siRNA sense strand
agguggaggugcuggagga

SEQ ID NO: 2446709 - RNA, 19 nt, Homo sapiens
  misc_RNA (1)...(19): siRNA sense strand
acuuuaaagaugaaggguu

SEQ ID NO: 2446710 - RNA, 19 nt, Homo sapiens
  misc_RNA (1)...(19): siRNA sense strand
acagaagcagccauggaaa

SEQ ID NO: 2446711 - RNA, 19 nt, Homo sapiens
  misc_RNA (1)...(19): siRNA sense strand
ugggaaugauagaagagga

SEQ ID NO: 2446712 - RNA, 19 nt, Homo sapiens
  misc_RNA (1)...(19): siRNA sense strand
aagaugaaggguugggcau

SEQ ID NO: 2446713 - RNA, 19 nt, Homo sapiens
  misc_RNA (1)...(19): siRNA sense strand
uagcugaaagaaugggaau

SEQ ID NO: 2446714 - RNA, 19 nt, Homo sapiens
  misc_RNA (1)...(19): siRNA sense strand
gauucagugcagauagcua

SEQ ID NO: 2446715 - RNA, 19 nt, Homo sapiens
  misc_RNA (1)...(19): siRNA sense strand
aaagaaugggaaugauaga

SEQ ID NO: 2446716 - RNA, 19 nt, Homo sapiens
  misc_RNA (1)...(19): siRNA sense strand
aggaaaauucauugacaga

SEQ ID NO: 2446717 - RNA, 19 nt, Homo sapiens
  misc_RNA (1)...(19): siRNA sense strand
uugcaaaggccaaaggauc

SEQ ID NO: 2446718 - RNA, 19 nt, Homo sapiens
  misc_RNA (1)...(19): siRNA sense strand
agaggaagaaucagaucau

SEQ ID NO: 2446719 - RNA, 19 nt, Homo sapiens
  misc_RNA (1)...(19): siRNA sense strand
agauagcuacccugagcaa

SEQ ID NO: 2446720 - RNA, 19 nt, Homo sapiens
  misc_RNA (1)...(19): siRNA sense strand
aagagaaacgguugcuaca

SEQ ID NO: 2446721 - RNA, 19 nt, Homo sapiens
  misc_RNA (1)...(19): siRNA sense strand
gcaugcugaggaagcguaa

SEQ ID NO: 2446722 - RNA, 19 nt, Homo sapiens
  misc_RNA (1)...(19): siRNA sense strand
agaaagaagcugaggaggc

SEQ ID NO: 2446723 - RNA, 19 nt, Homo sapiens
  misc_RNA (1)...(19): siRNA sense strand
augaaauggagaagaacaa

SEQ ID NO: 2446724 - RNA, 19 nt, Homo sapiens
  misc_RNA (1)...(19): siRNA sense strand
ccuucauguuggagccaga

SEQ ID NO: 2446725 - RNA, 19 nt, Homo sapiens
  misc_RNA (1)...(19): siRNA sense strand
ggacagggccaaugggguu

SEQ ID NO: 2446726 - RNA, 19 nt, Homo sapiens
  misc_RNA (1)...(19): siRNA sense strand
agaggaggcaguagagcuu

SEQ ID NO: 2446727 - RNA, 19 nt, Homo sapiens
  misc_RNA (1)...(19): siRNA sense strand
ggacgaggaugcagaggag

SEQ ID NO: 2446728 - RNA, 19 nt, Homo sapiens
  misc_RNA (1)...(19): siRNA sense strand
gcgaggacgaggaugcaga

SEQ ID NO: 2446729 - RNA, 19 nt, Homo sapiens
  misc_RNA (1)...(19): siRNA sense strand
augaaauggagaagaacaa

SEQ ID NO: 2446730 - RNA, 19 nt, Homo sapiens
  misc_RNA (1)...(19): siRNA sense strand
ccuucauguuggagccaga

SEQ ID NO: 2446731 - RNA, 19 nt, Homo sapiens
  misc_RNA (1)...(19): siRNA sense strand
ggacagggccaaugggguu

SEQ ID NO: 2446732 - RNA, 19 nt, Homo sapiens
  misc_RNA (1)...(19): siRNA sense strand
agaggaggcaguagagcuu

SEQ ID NO: 2446733 - RNA, 19 nt, Homo sapiens
  misc_RNA (1)...(19): siRNA sense strand
ggacgaggaugcagaggag

SEQ ID NO: 2446734 - RNA, 19 nt, Homo sapiens
  misc_RNA (1)...(19): siRNA sense strand
gcgaggacgaggaugcaga

SEQ ID NO: 2446735 - RNA, 19 nt, Homo sapiens
  misc_RNA (1)...(19): siRNA sense strand
ccaaagaagaaaagcauaa

SEQ ID NO: 2446736 - RNA, 19 nt, Homo sapiens
  misc_RNA (1)...(19): siRNA sense strand
augaagagguccaagggaa

SEQ ID NO: 2446737 - RNA, 19 nt, Homo sapiens
  misc_RNA (1)...(19): siRNA sense strand
gaagaaagauuaugggaag

SEQ ID NO: 2446738 - RNA, 19 nt, Homo sapiens
  misc_RNA (1)...(19): siRNA sense strand
uggaagacuuacagagaca

SEQ ID NO: 2446739 - RNA, 19 nt, Homo sapiens
  misc_RNA (1)...(19): siRNA sense strand
cagcuaaagagcagccaaa

SEQ ID NO: 2446740 - RNA, 19 nt, Homo sapiens
  misc_RNA (1)...(19): siRNA sense strand
cauaaagagaagaagucaa

SEQ ID NO: 2446741 - RNA, 19 nt, Homo sapiens
  misc_RNA (1)...(19): siRNA sense strand
agaagaaagauuaugggaa

SEQ ID NO: 2446742 - RNA, 19 nt, Homo sapiens
  misc_RNA (1)...(19): siRNA sense strand
uggaagacuaugagccuaa

SEQ ID NO: 2446743 - RNA, 19 nt, Homo sapiens
  misc_RNA (1)...(19): siRNA sense strand
ugaagagguccaagggaau

SEQ ID NO: 2446744 - RNA, 19 nt, Homo sapiens
  misc_RNA (1)...(19): siRNA sense strand
agaacgaagagcuggaaau

SEQ ID NO: 2446745 - RNA, 19 nt, Homo sapiens
  misc_RNA (1)...(19): siRNA sense strand
ugagaaagaucaugggaag

SEQ ID NO: 2446746 - RNA, 19 nt, Homo sapiens
  misc_RNA (1)...(19): siRNA sense strand
ggaagauagcucuggagau

SEQ ID NO: 2446747 - RNA, 19 nt, Homo sapiens
  misc_RNA (1)...(19): siRNA sense strand
guauagauuacguagagaa

SEQ ID NO: 2446748 - RNA, 19 nt, Homo sapiens
  misc_RNA (1)...(19): siRNA sense strand
aggaggagcugcagaucau

SEQ ID NO: 2446749 - RNA, 19 nt, Homo sapiens
  misc_RNA (1)...(19): siRNA sense strand
gcaugaagugugaaggcau

SEQ ID NO: 2446750 - RNA, 19 nt, Homo sapiens
  misc_RNA (1)...(19): siRNA sense strand
gggauaaaggauuugucua

SEQ ID NO: 2446751 - RNA, 19 nt, Homo sapiens
  misc_RNA (1)...(19): siRNA sense strand
uacuaaagcaagugaugaa

SEQ ID NO: 2446752 - RNA, 19 nt, Homo sapiens
  misc_RNA (1)...(19): siRNA sense strand
ugucugaugaugagaaaga

SEQ ID NO: 2446753 - RNA, 19 nt, Homo sapiens
  misc_RNA (1)...(19): siRNA sense strand
agcuggaaauaaagaacaa

SEQ ID NO: 2446754 - RNA, 19 nt, Homo sapiens
  misc_RNA (1)...(19): siRNA sense strand
gagaaagaucaugggaaga

SEQ ID NO: 2446755 - RNA, 19 nt, Homo sapiens
  misc_RNA (1)...(19): siRNA sense strand
gaauuaaaucaaaggugga

SEQ ID NO: 2446756 - RNA, 19 nt, Homo sapiens
  misc_RNA (1)...(19): siRNA sense strand
uuuccaaagaagagaugaa

SEQ ID NO: 2446757 - RNA, 19 nt, Homo sapiens
  misc_RNA (1)...(19): siRNA sense strand
aagaaaagcacaaagaaga

SEQ ID NO: 2446758 - RNA, 19 nt, Homo sapiens
  misc_RNA (1)...(19): siRNA sense strand
agaaaagcacaaagaagaa

SEQ ID NO: 2446759 - RNA, 19 nt, Homo sapiens
  misc_RNA (1)...(19): siRNA sense strand
uggaaggaaaagaagaaaa

SEQ ID NO: 2446760 - RNA, 19 nt, Homo sapiens
  misc_RNA (1)...(19): siRNA sense strand
cuaaaagacaggaguguga

SEQ ID NO: 2446761 - RNA, 19 nt, Homo sapiens
  misc_RNA (1)...(19): siRNA sense strand
aaucaaagguggaugagcu

SEQ ID NO: 2446762 - RNA, 19 nt, Homo sapiens
  misc_RNA (1)...(19): siRNA sense strand
aagaacugccagaauguaa

SEQ ID NO: 2446763 - RNA, 19 nt, Homo sapiens
  misc_RNA (1)...(19): siRNA sense strand
agaucugcagggugggaua

SEQ ID NO: 2446764 - RNA, 19 nt, Homo sapiens
  misc_RNA (1)...(19): siRNA sense strand
caggcaaggagccggcaaa

SEQ ID NO: 2446765 - RNA, 19 nt, Homo sapiens
  misc_RNA (1)...(19): siRNA sense strand
agagcgagagcgagaguga

SEQ ID NO: 2446766 - RNA, 19 nt, Homo sapiens
  misc_RNA (1)...(19): siRNA sense strand
agagugaggaugaggagga

SEQ ID NO: 2446767 - RNA, 19 nt, Homo sapiens
  misc_RNA (1)...(19): siRNA sense strand
agugucugaugaugagaaa

SEQ ID NO: 2446768 - RNA, 19 nt, Homo sapiens
  misc_RNA (1)...(19): siRNA sense strand
ccgugaauguauagauuac

SEQ ID NO: 2446769 - RNA, 19 nt, Homo sapiens
  misc_RNA (1)...(19): siRNA sense strand
acguagagaaguauggcau

SEQ ID NO: 2446770 - RNA, 19 nt, Homo sapiens
  misc_RNA (1)...(19): siRNA sense strand
cgggaggagucuacaaacu

SEQ ID NO: 2446771 - RNA, 19 nt, Homo sapiens
  misc_RNA (1)...(19): siRNA sense strand
agggugggauaaaggauuu

SEQ ID NO: 2446772 - RNA, 19 nt, Homo sapiens
  misc_RNA (1)...(19): siRNA sense strand
ugggaaguacaaagaauuu

SEQ ID NO: 2446773 - RNA, 19 nt, Homo sapiens
  misc_RNA (1)...(19): siRNA sense strand
uugcaaaggaacuggaaac

SEQ ID NO: 2446774 - RNA, 19 nt, Homo sapiens
  misc_RNA (1)...(19): siRNA sense strand
agagcgagagugaggauga

SEQ ID NO: 2446775 - RNA, 19 nt, Homo sapiens
  misc_RNA (1)...(19): siRNA sense strand
uuaaacaguggaaggaaaa

SEQ ID NO: 2446776 - RNA, 19 nt, Homo sapiens
  misc_RNA (1)...(19): siRNA sense strand
ccaaagagcuuaugcccag

SEQ ID NO: 2446777 - RNA, 19 nt, Homo sapiens
  misc_RNA (1)...(19): siRNA sense strand
ccaugucauugcaaaggaa

SEQ ID NO: 2446778 - RNA, 19 nt, Homo sapiens
  misc_RNA (1)...(19): siRNA sense strand
ucaaaagaaaacugagaga

SEQ ID NO: 2446779 - RNA, 19 nt, Homo sapiens
  misc_RNA (1)...(19): siRNA sense strand
ccaucgcccagcagggaua

SEQ ID NO: 2446780 - RNA, 19 nt, Homo sapiens
  misc_RNA (1)...(19): siRNA sense strand
uuaaaucaaagguggauga

SEQ ID NO: 2446781 - RNA, 19 nt, Homo sapiens
  misc_RNA (1)...(19): siRNA sense strand
gaacauuucuauagugcuc

SEQ ID NO: 2446782 - RNA, 19 nt, Homo sapiens
  misc_RNA (1)...(19): siRNA sense strand
aaaugugguacuaaagcaa

SEQ ID NO: 2446783 - RNA, 19 nt, Homo sapiens
  misc_RNA (1)...(19): siRNA sense strand
aggaggagaucaggagaca

SEQ ID NO: 2446784 - RNA, 19 nt, Homo sapiens
  misc_RNA (1)...(19): siRNA sense strand
aagaagagauugaacgccu

SEQ ID NO: 2446785 - RNA, 19 nt, Homo sapiens
  misc_RNA (1)...(19): siRNA sense strand
gaagaaaagcauaaagaag

SEQ ID NO: 2446786 - RNA, 19 nt, Homo sapiens
  misc_RNA (1)...(19): siRNA sense strand
aagauuaugggaaguacaa

SEQ ID NO: 2446787 - RNA, 19 nt, Homo sapiens
  misc_RNA (1)...(19): siRNA sense strand
gaccacggagacugagaaa

SEQ ID NO: 2446788 - RNA, 19 nt, Homo sapiens
  misc_RNA (1)...(19): siRNA sense strand
gcaucaaggaggagaucag

SEQ ID NO: 2446789 - RNA, 19 nt, Homo sapiens
  misc_RNA (1)...(19): siRNA sense strand
agacaaugcuaaaggcaga

SEQ ID NO: 2446790 - RNA, 19 nt, Homo sapiens
  misc_RNA (1)...(19): siRNA sense strand
cauaauuauuggaagcaga

SEQ ID NO: 2446791 - RNA, 19 nt, Homo sapiens
  misc_RNA (1)...(19): siRNA sense strand
gagcauaauuauuggaagc

SEQ ID NO: 2446792 - RNA, 19 nt, Homo sapiens
  misc_RNA (1)...(19): siRNA sense strand
uuauuaaagcccaggucaa

SEQ ID NO: 2446793 - RNA, 19 nt, Homo sapiens
  misc_RNA (1)...(19): siRNA sense strand
gaauuuuggcgaaaggaaa

SEQ ID NO: 2446794 - RNA, 19 nt, Homo sapiens
  misc_RNA (1)...(19): siRNA sense strand
ggacaacugaacaggcaga

SEQ ID NO: 2446795 - RNA, 19 nt, Homo sapiens
  misc_RNA (1)...(19): siRNA sense strand
cuuacaguucagauggaaa

SEQ ID NO: 2446796 - RNA, 19 nt, Homo sapiens
  misc_RNA (1)...(19): siRNA sense strand
aguagaagaauaugaacca

SEQ ID NO: 2446797 - RNA, 19 nt, Homo sapiens
  misc_RNA (1)...(19): siRNA sense strand
cuugaugauuccacgguau

SEQ ID NO: 2446798 - RNA, 19 nt, Homo sapiens
  misc_RNA (1)...(19): siRNA sense strand
uagaagaauaugaaccaga

SEQ ID NO: 2446799 - RNA, 19 nt, Homo sapiens
  misc_RNA (1)...(19): siRNA sense strand
ggaagaaaagagggaguau

SEQ ID NO: 2446800 - RNA, 19 nt, Homo sapiens
  misc_RNA (1)...(19): siRNA sense strand
aaucaugaauuuuggcgaa

SEQ ID NO: 2446801 - RNA, 19 nt, Homo sapiens
  misc_RNA (1)...(19): siRNA sense strand
ccuucuggaucguggacaa

SEQ ID NO: 2446802 - RNA, 19 nt, Homo sapiens
  misc_RNA (1)...(19): siRNA sense strand
ccaaaauaaaugucgguaa

SEQ ID NO: 2446803 - RNA, 19 nt, Homo sapiens
  misc_RNA (1)...(19): siRNA sense strand
aauaaaugucgguaagaga

SEQ ID NO: 2446804 - RNA, 19 nt, Homo sapiens
  misc_RNA (1)...(19): siRNA sense strand
ugaucuggaaagagagaau

SEQ ID NO: 2446805 - RNA, 19 nt, Homo sapiens
  misc_RNA (1)...(19): siRNA sense strand
agagagaaugcuugugcua

SEQ ID NO: 2446806 - RNA, 19 nt, Homo sapiens
  misc_RNA (1)...(19): siRNA sense strand
cugccugguccuagauuua

SEQ ID NO: 2446807 - RNA, 19 nt, Homo sapiens
  misc_RNA (1)...(19): siRNA sense strand
ccuagauuuacaaaggaua

SEQ ID NO: 2446808 - RNA, 19 nt, Homo sapiens
  misc_RNA (1)...(19): siRNA sense strand
aggaacaacagaagcauca

SEQ ID NO: 2446809 - RNA, 19 nt, Homo sapiens
  misc_RNA (1)...(19): siRNA sense strand
cuauggagucuaugacaau

SEQ ID NO: 2446810 - RNA, 19 nt, Homo sapiens
  misc_RNA (1)...(19): siRNA sense strand
cagaagcaucauuaagcaa

SEQ ID NO: 2446811 - RNA, 19 nt, Homo sapiens
  misc_RNA (1)...(19): siRNA sense strand
aaauauuccugaaggccuu

SEQ ID NO: 2446812 - RNA, 19 nt, Homo sapiens
  misc_RNA (1)...(19): siRNA sense strand
cagcugauucaaagguauu

SEQ ID NO: 2446813 - RNA, 19 nt, Homo sapiens
  misc_RNA (1)...(19): siRNA sense strand
cgcaacaaguacaugguga

SEQ ID NO: 2446814 - RNA, 19 nt, Homo sapiens
  misc_RNA (1)...(19): siRNA sense strand
gugaggaacaacagaagca

SEQ ID NO: 2446815 - RNA, 19 nt, Homo sapiens
  misc_RNA (1)...(19): siRNA sense strand
uuugaaagggacugguauu

SEQ ID NO: 2446816 - RNA, 19 nt, Homo sapiens
  misc_RNA (1)...(19): siRNA sense strand
uaaaugucgguaagagaau

SEQ ID NO: 2446817 - RNA, 19 nt, Homo sapiens
  misc_RNA (1)...(19): siRNA sense strand
gugugauagaugaugccaa

SEQ ID NO: 2446818 - RNA, 19 nt, Homo sapiens
  misc_RNA (1)...(19): siRNA sense strand
uggacaaacagcacgugua

SEQ ID NO: 2446819 - RNA, 19 nt, Homo sapiens
  misc_RNA (1)...(19): siRNA sense strand
cuacagugugauagaugau

SEQ ID NO: 2446820 - RNA, 19 nt, Homo sapiens
  misc_RNA (1)...(19): siRNA sense strand
agacagacccagagggaga

SEQ ID NO: 2446821 - RNA, 19 nt, Homo sapiens
  misc_RNA (1)...(19): siRNA sense strand
gggagaagauugaggcuug

SEQ ID NO: 2446822 - RNA, 19 nt, Homo sapiens
  misc_RNA (1)...(19): siRNA sense strand
cagaagacgucaaagccau

SEQ ID NO: 2446823 - RNA, 19 nt, Homo sapiens
  misc_RNA (1)...(19): siRNA sense strand
auuauaaagaagaggcuga

SEQ ID NO: 2446824 - RNA, 19 nt, Homo sapiens
  misc_RNA (1)...(19): siRNA sense strand
gggaagaagcaauccagga

SEQ ID NO: 2446825 - RNA, 19 nt, Homo sapiens
  misc_RNA (1)...(19): siRNA sense strand
gaggcauguuggaggugau

SEQ ID NO: 2446826 - RNA, 19 nt, Homo sapiens
  misc_RNA (1)...(19): siRNA sense strand
uguuguagguggagagcag

SEQ ID NO: 2446827 - RNA, 19 nt, Homo sapiens
  misc_RNA (1)...(19): siRNA sense strand
caaucuucucggaguacaa

SEQ ID NO: 2446828 - RNA, 19 nt, Homo sapiens
  misc_RNA (1)...(19): siRNA sense strand
cauuagaaaccgacaucca

SEQ ID NO: 2446829 - RNA, 19 nt, Homo sapiens
  misc_RNA (1)...(19): siRNA sense strand
gcagaagacgucaaagcca

SEQ ID NO: 2446830 - RNA, 19 nt, Homo sapiens
  misc_RNA (1)...(19): siRNA sense strand
aggaacucacagaggauga

SEQ ID NO: 2446831 - RNA, 19 nt, Homo sapiens
  misc_RNA (1)...(19): siRNA sense strand
ggaagaaagagcacaggcu

SEQ ID NO: 2446832 - RNA, 19 nt, Homo sapiens
  misc_RNA (1)...(19): siRNA sense strand
aggcaaagcucgaugcuca

SEQ ID NO: 2446833 - RNA, 19 nt, Homo sapiens
  misc_RNA (1)...(19): siRNA sense strand
cacaaauacuccaggguca

SEQ ID NO: 2446834 - RNA, 19 nt, Homo sapiens
  misc_RNA (1)...(19): siRNA sense strand
cagagauggccaaaggcua

SEQ ID NO: 2446835 - RNA, 19 nt, Homo sapiens
  misc_RNA (1)...(19): siRNA sense strand
cuucauugccauauaguca

SEQ ID NO: 2446836 - RNA, 19 nt, Homo sapiens
  misc_RNA (1)...(19): siRNA sense strand
gugugaaauacccgggaca

SEQ ID NO: 2446837 - RNA, 19 nt, Homo sapiens
  misc_RNA (1)...(19): siRNA sense strand
cugccaaagaccugggacu

SEQ ID NO: 2446838 - RNA, 19 nt, Homo sapiens
  misc_RNA (1)...(19): siRNA sense strand
cgccgcaagagcaggcaaa

SEQ ID NO: 2446839 - RNA, 19 nt, Homo sapiens
  misc_RNA (1)...(19): siRNA sense strand
ggcaaagcucgaugcucaa

SEQ ID NO: 2446840 - RNA, 19 nt, Homo sapiens
  misc_RNA (1)...(19): siRNA sense strand
gcaagaggaugcugggaaa

SEQ ID NO: 2446841 - RNA, 19 nt, Homo sapiens
  misc_RNA (1)...(19): siRNA sense strand
ccgaaaugccuuagaggaa

SEQ ID NO: 2446842 - RNA, 19 nt, Homo sapiens
  misc_RNA (1)...(19): siRNA sense strand
cugaagaaggugacgauaa

SEQ ID NO: 2446843 - RNA, 19 nt, Homo sapiens
  misc_RNA (1)...(19): siRNA sense strand
uaacaaagagagagcagaa

SEQ ID NO: 2446844 - RNA, 19 nt, Homo sapiens
  misc_RNA (1)...(19): siRNA sense strand
uggcaaaucaggaagcaaa

SEQ ID NO: 2446845 - RNA, 19 nt, Homo sapiens
  misc_RNA (1)...(19): siRNA sense strand
agaacaacacugagaagaa

SEQ ID NO: 2446846 - RNA, 19 nt, Homo sapiens
  misc_RNA (1)...(19): siRNA sense strand
ggcacaagcuauagcaauu

SEQ ID NO: 2446847 - RNA, 19 nt, Homo sapiens
  misc_RNA (1)...(19): siRNA sense strand
gaauggaguuucaggauca

SEQ ID NO: 2446848 - RNA, 19 nt, Homo sapiens
  misc_RNA (1)...(19): siRNA sense strand
agaauuauguccagcgaau

SEQ ID NO: 2446849 - RNA, 19 nt, Homo sapiens
  misc_RNA (1)...(19): siRNA sense strand
caucaagaacauagcacaa

SEQ ID NO: 2446850 - RNA, 19 nt, Homo sapiens
  misc_RNA (1)...(19): siRNA sense strand
ccaacugcauuguaggaaa

SEQ ID NO: 2446851 - RNA, 19 nt, Homo sapiens
  misc_RNA (1)...(19): siRNA sense strand
cagagggacagcagggaaa

SEQ ID NO: 2446852 - RNA, 19 nt, Homo sapiens
  misc_RNA (1)...(19): siRNA sense strand
uuaaaagaccuguggaaaa

SEQ ID NO: 2446853 - RNA, 19 nt, Homo sapiens
  misc_RNA (1)...(19): siRNA sense strand
ugaagaaggugacgauaau

SEQ ID NO: 2446854 - RNA, 19 nt, Homo sapiens
  misc_RNA (1)...(19): siRNA sense strand
cuaugacuguagugagaaa

SEQ ID NO: 2446855 - RNA, 19 nt, Homo sapiens
  misc_RNA (1)...(19): siRNA sense strand
uaguaaaacaagagaggaa

SEQ ID NO: 2446856 - RNA, 19 nt, Homo sapiens
  misc_RNA (1)...(19): siRNA sense strand
ccaaagaguagcagcccua

SEQ ID NO: 2446857 - RNA, 19 nt, Homo sapiens
  misc_RNA (1)...(19): siRNA sense strand
aggaaaucauggaggggaa

SEQ ID NO: 2446858 - RNA, 19 nt, Homo sapiens
  misc_RNA (1)...(19): siRNA sense strand
guaaaacaagagaggaaaa

SEQ ID NO: 2446859 - RNA, 19 nt, Homo sapiens
  misc_RNA (1)...(19): siRNA sense strand
uggaagaaggugaguucaa

SEQ ID NO: 2446860 - RNA, 19 nt, Homo sapiens
  misc_RNA (1)...(19): siRNA sense strand
ccacugaggaugaacgcaa

SEQ ID NO: 2446861 - RNA, 19 nt, Homo sapiens
  misc_RNA (1)...(19): siRNA sense strand
acauauuccugguguagaa

SEQ ID NO: 2446862 - RNA, 19 nt, Homo sapiens
  misc_RNA (1)...(19): siRNA sense strand
gagaagggugagcaggaaa

SEQ ID NO: 2446863 - RNA, 19 nt, Homo sapiens
  misc_RNA (1)...(19): siRNA sense strand
gaggaagaauucagcccaa

SEQ ID NO: 2446864 - RNA, 19 nt, Homo sapiens
  misc_RNA (1)...(19): siRNA sense strand
cagaaggaggccagggaga

SEQ ID NO: 2446865 - RNA, 19 nt, Homo sapiens
  misc_RNA (1)...(19): siRNA sense strand
cuggaaaauuuaugggcua

SEQ ID NO: 2446866 - RNA, 19 nt, Homo sapiens
  misc_RNA (1)...(19): siRNA sense strand
agcuauagcaauuggacaa

SEQ ID NO: 2446867 - RNA, 19 nt, Homo sapiens
  misc_RNA (1)...(19): siRNA sense strand
auggagaacaggaggaaga

SEQ ID NO: 2446868 - RNA, 19 nt, Homo sapiens
  misc_RNA (1)...(19): siRNA sense strand
cuacuaugcgggagaguuu

SEQ ID NO: 2446869 - RNA, 19 nt, Homo sapiens
  misc_RNA (1)...(19): siRNA sense strand
agaacuggauugagaagau

SEQ ID NO: 2446870 - RNA, 19 nt, Homo sapiens
  misc_RNA (1)...(19): siRNA sense strand
ccggaguuguacaggacua

SEQ ID NO: 2446871 - RNA, 19 nt, Homo sapiens
  misc_RNA (1)...(19): siRNA sense strand
aggcaauggacaaguauuu

SEQ ID NO: 2446872 - RNA, 19 nt, Homo sapiens
  misc_RNA (1)...(19): siRNA sense strand
agauaagagccuuuagaga

SEQ ID NO: 2446873 - RNA, 19 nt, Homo sapiens
  misc_RNA (1)...(19): siRNA sense strand
ugugaaaucaacaggaauu

SEQ ID NO: 2446874 - RNA, 19 nt, Homo sapiens
  misc_RNA (1)...(19): siRNA sense strand
ucaagaaaucccuggaaaa

SEQ ID NO: 2446875 - RNA, 19 nt, Homo sapiens
  misc_RNA (1)...(19): siRNA sense strand
cugcauuguaggaaaggaa

SEQ ID NO: 2446876 - RNA, 19 nt, Homo sapiens
  misc_RNA (1)...(19): siRNA sense strand
acaaaucguacaacagaaa

SEQ ID NO: 2446877 - RNA, 19 nt, Homo sapiens
  misc_RNA (1)...(19): siRNA sense strand
auaagaacucucagaacaa

SEQ ID NO: 2446878 - RNA, 19 nt, Homo sapiens
  misc_RNA (1)...(19): siRNA sense strand
ccacaagggcacaagcuau

SEQ ID NO: 2446879 - RNA, 19 nt, Homo sapiens
  misc_RNA (1)...(19): siRNA sense strand
gauugagggacgagggcau

SEQ ID NO: 2446880 - RNA, 19 nt, Homo sapiens
  misc_RNA (1)...(19): siRNA sense strand
gcgcuuuguucauggccaa

SEQ ID NO: 2446881 - RNA, 19 nt, Homo sapiens
  misc_RNA (1)...(19): siRNA sense strand
guuguaaagaauaccgaaa

SEQ ID NO: 2446882 - RNA, 19 nt, Homo sapiens
  misc_RNA (1)...(19): siRNA sense strand
cauccagauuccucaaaua

SEQ ID NO: 2446883 - RNA, 19 nt, Homo sapiens
  misc_RNA (1)...(19): siRNA sense strand
cuuaggaaucggaauguaa

SEQ ID NO: 2446884 - RNA, 19 nt, Homo sapiens
  misc_RNA (1)...(19): siRNA sense strand
caguaauucuauuggggaa

SEQ ID NO: 2446885 - RNA, 19 nt, Homo sapiens
  misc_RNA (1)...(19): siRNA sense strand
ggaauuagucaacuggcua

SEQ ID NO: 2446886 - RNA, 19 nt, Homo sapiens
  misc_RNA (1)...(19): siRNA sense strand
gcuugagaugguugugaaa

SEQ ID NO: 2446887 - RNA, 19 nt, Homo sapiens
  misc_RNA (1)...(19): siRNA sense strand
caggaaaaggguagaaaga

SEQ ID NO: 2446888 - RNA, 19 nt, Homo sapiens
  misc_RNA (1)...(19): siRNA sense strand
ugaaaugaguggaggacag

SEQ ID NO: 2446889 - RNA, 19 nt, Homo sapiens
  misc_RNA (1)...(19): siRNA sense strand
caacagaaacagaaccaca

SEQ ID NO: 2446890 - RNA, 19 nt, Homo sapiens
  misc_RNA (1)...(19): siRNA sense strand
gcauuguaggaaaggaauu

SEQ ID NO: 2446891 - RNA, 19 nt, Homo sapiens
  misc_RNA (1)...(19): siRNA sense strand
acagauagcugaagaaggu

SEQ ID NO: 2446892 - RNA, 19 nt, Homo sapiens
  misc_RNA (1)...(19): siRNA sense strand
agccagaggaggaagaauu

SEQ ID NO: 2446893 - RNA, 19 nt, Homo sapiens
  misc_RNA (1)...(19): siRNA sense strand
ugaugaagagagagggcuu

SEQ ID NO: 2446894 - RNA, 19 nt, Homo sapiens
  misc_RNA (1)...(19): siRNA sense strand
gcgagcugccagagaguuu

SEQ ID NO: 2446895 - RNA, 19 nt, Homo sapiens
  misc_RNA (1)...(19): siRNA sense strand
cgggagaguuucauaagau

SEQ ID NO: 2446896 - RNA, 19 nt, Homo sapiens
  misc_RNA (1)...(19): siRNA sense strand
cagcagccuuugaguggaa

SEQ ID NO: 2446897 - RNA, 19 nt, Homo sapiens
  misc_RNA (1)...(19): siRNA sense strand
ggucuaugucauuugcaaa

SEQ ID NO: 2446898 - RNA, 19 nt, Homo sapiens
  misc_RNA (1)...(19): siRNA sense strand
cuaaagaugguucgagaca

SEQ ID NO: 2446899 - RNA, 19 nt, Homo sapiens
  misc_RNA (1)...(19): siRNA sense strand
ggaaaucuccugcucgaaa

SEQ ID NO: 2446900 - RNA, 19 nt, Homo sapiens
  misc_RNA (1)...(19): siRNA sense strand
gggcacaagcuauagcaau

SEQ ID NO: 2446901 - RNA, 19 nt, Homo sapiens
  misc_RNA (1)...(19): siRNA sense strand
caguauacucgcagagcca

SEQ ID NO: 2446902 - RNA, 19 nt, Homo sapiens
  misc_RNA (1)...(19): siRNA sense strand
gggaagaaagcaagauaag

SEQ ID NO: 2446903 - RNA, 19 nt, Homo sapiens
  misc_RNA (1)...(19): siRNA sense strand
cagaauugguuauaagaac

SEQ ID NO: 2446904 - RNA, 19 nt, Homo sapiens
  misc_RNA (1)...(19): siRNA sense strand
gauagugaccugaaacaau

SEQ ID NO: 2446905 - RNA, 19 nt, Homo sapiens
  misc_RNA (1)...(19): siRNA sense strand
cagaacagauagcugaaga

SEQ ID NO: 2446906 - RNA, 19 nt, Homo sapiens
  misc_RNA (1)...(19): siRNA sense strand
gcauuagacacaagaagga

SEQ ID NO: 2446907 - RNA, 19 nt, Homo sapiens
  misc_RNA (1)...(19): siRNA sense strand
cacaagaaggaaagcagaa

SEQ ID NO: 2446908 - RNA, 19 nt, Homo sapiens
  misc_RNA (1)...(19): siRNA sense strand
ggaaaagccaggauaguga

SEQ ID NO: 2446909 - RNA, 19 nt, Homo sapiens
  misc_RNA (1)...(19): siRNA sense strand
agauauuucaguugccuaa

SEQ ID NO: 2446910 - RNA, 19 nt, Homo sapiens
  misc_RNA (1)...(19): siRNA sense strand
gaggaauugucuaaagcga

SEQ ID NO: 2446911 - RNA, 19 nt, Homo sapiens
  misc_RNA (1)...(19): siRNA sense strand
gggagagagaagcgagaaa

SEQ ID NO: 2446912 - RNA, 19 nt, Homo sapiens
  misc_RNA (1)...(19): siRNA sense strand
auguagugauugugggaaa

SEQ ID NO: 2446913 - RNA, 19 nt, Homo sapiens
  misc_RNA (1)...(19): siRNA sense strand
ggagaaagacugaacagga

SEQ ID NO: 2446914 - RNA, 19 nt, Homo sapiens
  misc_RNA (1)...(19): siRNA sense strand
cggaaggaguggaagcguu

SEQ ID NO: 2446915 - RNA, 19 nt, Homo sapiens
  misc_RNA (1)...(19): siRNA sense strand
aagugacaguugaggagaa

SEQ ID NO: 2446916 - RNA, 19 nt, Homo sapiens
  misc_RNA (1)...(19): siRNA sense strand
ugaaaaggccgcuggggaa

SEQ ID NO: 2446917 - RNA, 19 nt, Homo sapiens
  misc_RNA (1)...(19): siRNA sense strand
ggaagauuucaaaaggaua

SEQ ID NO: 2446918 - RNA, 19 nt, Homo sapiens
  misc_RNA (1)...(19): siRNA sense strand
ggggaaaagcccuaugaau

SEQ ID NO: 2446919 - RNA, 19 nt, Homo sapiens
  misc_RNA (1)...(19): siRNA sense strand
cugcaaugaaugugggaag

SEQ ID NO: 2446920 - RNA, 19 nt, Homo sapiens
  misc_RNA (1)...(19): siRNA sense strand
ugguaaccuuugaggaugu

SEQ ID NO: 2446921 - RNA, 19 nt, Homo sapiens
  misc_RNA (1)...(19): siRNA sense strand
gaauguaaugaguguggga

SEQ ID NO: 2446922 - RNA, 19 nt, Homo sapiens
  misc_RNA (1)...(19): siRNA sense strand
gaauguaaugaguguggga

SEQ ID NO: 2446923 - RNA, 19 nt, Homo sapiens
  misc_RNA (1)...(19): siRNA sense strand
gggagagagaagcgagaaa

SEQ ID NO: 2446924 - RNA, 19 nt, Homo sapiens
  misc_RNA (1)...(19): siRNA sense strand
auguagugauugugggaaa

SEQ ID NO: 2446925 - RNA, 19 nt, Homo sapiens
  misc_RNA (1)...(19): siRNA sense strand
ggagaaagacugaacagga

SEQ ID NO: 2446926 - RNA, 19 nt, Homo sapiens
  misc_RNA (1)...(19): siRNA sense strand
cggaaggaguggaagcguu

SEQ ID NO: 2446927 - RNA, 19 nt, Homo sapiens
  misc_RNA (1)...(19): siRNA sense strand
aagugacaguugaggagaa

SEQ ID NO: 2446928 - RNA, 19 nt, Homo sapiens
  misc_RNA (1)...(19): siRNA sense strand
ugaaaaggccgcuggggaa

SEQ ID NO: 2446929 - RNA, 19 nt, Homo sapiens
  misc_RNA (1)...(19): siRNA sense strand
ggaagauuucaaaaggaua

SEQ ID NO: 2446930 - RNA, 19 nt, Homo sapiens
  misc_RNA (1)...(19): siRNA sense strand
ggggaaaagcccuaugaau

SEQ ID NO: 2446931 - RNA, 19 nt, Homo sapiens
  misc_RNA (1)...(19): siRNA sense strand
cugcaaugaaugugggaag

SEQ ID NO: 2446932 - RNA, 19 nt, Homo sapiens
  misc_RNA (1)...(19): siRNA sense strand
ugguaaccuuugaggaugu

SEQ ID NO: 2446933 - RNA, 19 nt, Homo sapiens
  misc_RNA (1)...(19): siRNA sense strand
gaauguaaugaguguggga

SEQ ID NO: 2446934 - RNA, 19 nt, Homo sapiens
  misc_RNA (1)...(19): siRNA sense strand
gaauguaaugaguguggga

SEQ ID NO: 2446935 - RNA, 19 nt, Homo sapiens
  misc_RNA (1)...(19): siRNA sense strand
gugagauaccagagagcua

SEQ ID NO: 2446936 - RNA, 19 nt, Homo sapiens
  misc_RNA (1)...(19): siRNA sense strand
cugaagaaucggagccuga

SEQ ID NO: 2446937 - RNA, 19 nt, Homo sapiens
  misc_RNA (1)...(19): siRNA sense strand
ugaacgagccuuaagggua

SEQ ID NO: 2446938 - RNA, 19 nt, Homo sapiens
  misc_RNA (1)...(19): siRNA sense strand
uaguaagacaagauggcua

SEQ ID NO: 2446939 - RNA, 19 nt, Homo sapiens
  misc_RNA (1)...(19): siRNA sense strand
ggagaagacuacagagugc

SEQ ID NO: 2446940 - RNA, 19 nt, Homo sapiens
  misc_RNA (1)...(19): siRNA sense strand
ggguaaaagcuguuaaacu

SEQ ID NO: 2446941 - RNA, 19 nt, Homo sapiens
  misc_RNA (1)...(19): siRNA sense strand
aaucggagccugaggacca

SEQ ID NO: 2446942 - RNA, 19 nt, Homo sapiens
  misc_RNA (1)...(19): siRNA sense strand
caagcauggccuggagaaa

SEQ ID NO: 2446943 - RNA, 19 nt, Homo sapiens
  misc_RNA (1)...(19): siRNA sense strand
gaaaacauaaggaggcgaa

SEQ ID NO: 2446944 - RNA, 19 nt, Homo sapiens
  misc_RNA (1)...(19): siRNA sense strand
gagaacugcuggugaggac

SEQ ID NO: 2446945 - RNA, 19 nt, Homo sapiens
  misc_RNA (1)...(19): siRNA sense strand
guaaggacuugguggaggu

SEQ ID NO: 2446946 - RNA, 19 nt, Homo sapiens
  misc_RNA (1)...(19): siRNA sense strand
ccaagauuuaacagugaga

SEQ ID NO: 2446947 - RNA, 19 nt, Homo sapiens
  misc_RNA (1)...(19): siRNA sense strand
gugccaagacacagugaau

SEQ ID NO: 2446948 - RNA, 19 nt, Homo sapiens
  misc_RNA (1)...(19): siRNA sense strand
aaggagaugaagaggaaaa

SEQ ID NO: 2446949 - RNA, 19 nt, Homo sapiens
  misc_RNA (1)...(19): siRNA sense strand
ccuacuaugaacugaacaa

SEQ ID NO: 2446950 - RNA, 19 nt, Homo sapiens
  misc_RNA (1)...(19): siRNA sense strand
ccuucaaauaacaggaaca

SEQ ID NO: 2446951 - RNA, 19 nt, Homo sapiens
  misc_RNA (1)...(19): siRNA sense strand
agaaacucaacgauagaaa

SEQ ID NO: 2446952 - RNA, 19 nt, Homo sapiens
  misc_RNA (1)...(19): siRNA sense strand
cuggaagcaaggagaugaa

SEQ ID NO: 2446953 - RNA, 19 nt, Homo sapiens
  misc_RNA (1)...(19): siRNA sense strand
ggguuggggugcugaguau

SEQ ID NO: 2446954 - RNA, 19 nt, Homo sapiens
  misc_RNA (1)...(19): siRNA sense strand
guguaugaacugaccaaga

SEQ ID NO: 2446955 - RNA, 19 nt, Homo sapiens
  misc_RNA (1)...(19): siRNA sense strand
cagagaaggcaguggacuc

SEQ ID NO: 2446956 - RNA, 19 nt, Homo sapiens
  misc_RNA (1)...(19): siRNA sense strand
guguaugccgagugcguga

SEQ ID NO: 2446957 - RNA, 19 nt, Homo sapiens
  misc_RNA (1)...(19): siRNA sense strand
gcaacuaucaacacggcuu

SEQ ID NO: 2446958 - RNA, 19 nt, Homo sapiens
  misc_RNA (1)...(19): siRNA sense strand
aggaaaagugggcagagaa

SEQ ID NO: 2446959 - RNA, 19 nt, Homo sapiens
  misc_RNA (1)...(19): siRNA sense strand
gggcagagaaggcagugga

SEQ ID NO: 2446960 - RNA, 19 nt, Homo sapiens
  misc_RNA (1)...(19): siRNA sense strand
aagaagaagaagggagcca

SEQ ID NO: 2446961 - RNA, 19 nt, Homo sapiens
  misc_RNA (1)...(19): siRNA sense strand
cugaccaagauguguacua

SEQ ID NO: 2446962 - RNA, 19 nt, Homo sapiens
  misc_RNA (1)...(19): siRNA sense strand
cagaacugauagaagaaua

SEQ ID NO: 2446963 - RNA, 19 nt, Homo sapiens
  misc_RNA (1)...(19): siRNA sense strand
gggcaaacgcuuagggauc

SEQ ID NO: 2446964 - RNA, 19 nt, Homo sapiens
  misc_RNA (1)...(19): siRNA sense strand
uggcagaacugauagaaga

SEQ ID NO: 2446965 - RNA, 19 nt, Homo sapiens
  misc_RNA (1)...(19): siRNA sense strand
ucucagagguccuggccua

SEQ ID NO: 2446966 - RNA, 19 nt, Homo sapiens
  misc_RNA (1)...(19): siRNA sense strand
ggcagaacugauagaagaa

SEQ ID NO: 2446967 - RNA, 19 nt, Homo sapiens
  misc_RNA (1)...(19): siRNA sense strand
guggacuagugguggugaa

SEQ ID NO: 2446968 - RNA, 19 nt, Homo sapiens
  misc_RNA (1)...(19): siRNA sense strand
acuuucugccuguggauaa

SEQ ID NO: 2446969 - RNA, 19 nt, Homo sapiens
  misc_RNA (1)...(19): siRNA sense strand
ccagcaggaucauaaaaua

SEQ ID NO: 2446970 - RNA, 19 nt, Homo sapiens
  misc_RNA (1)...(19): siRNA sense strand
agaacuucguggaggaaca

SEQ ID NO: 2446971 - RNA, 19 nt, Homo sapiens
  misc_RNA (1)...(19): siRNA sense strand
ggagagaauauuacgagga

SEQ ID NO: 2446972 - RNA, 19 nt, Homo sapiens
  misc_RNA (1)...(19): siRNA sense strand
gagaugaggucaaugugga

SEQ ID NO: 2446973 - RNA, 19 nt, Homo sapiens
  misc_RNA (1)...(19): siRNA sense strand
uugagaacuucguggagga

SEQ ID NO: 2446974 - RNA, 19 nt, Homo sapiens
  misc_RNA (1)...(19): siRNA sense strand
agaugaggucaauguggaa

SEQ ID NO: 2446975 - RNA, 19 nt, Homo sapiens
  misc_RNA (1)...(19): siRNA sense strand
aggcagaagcuucggguug

SEQ ID NO: 2446976 - RNA, 19 nt, Homo sapiens
  misc_RNA (1)...(19): siRNA sense strand
gacaagaaguuuacgcguu

SEQ ID NO: 2446977 - RNA, 19 nt, Homo sapiens
  misc_RNA (1)...(19): siRNA sense strand
ucaaagaacuggaggcuga

SEQ ID NO: 2446978 - RNA, 19 nt, Homo sapiens
  misc_RNA (1)...(19): siRNA sense strand
ggggagaaagagaggcaaa

SEQ ID NO: 2446979 - RNA, 19 nt, Homo sapiens
  misc_RNA (1)...(19): siRNA sense strand
cuguggaaagugagaagua

SEQ ID NO: 2446980 - RNA, 19 nt, Homo sapiens
  misc_RNA (1)...(19): siRNA sense strand
gggaaaacccaagaggaaa

SEQ ID NO: 2446981 - RNA, 19 nt, Homo sapiens
  misc_RNA (1)...(19): siRNA sense strand
caagaggaaaagaagaaaa

SEQ ID NO: 2446982 - RNA, 19 nt, Homo sapiens
  misc_RNA (1)...(19): siRNA sense strand
gugaaaagaaggcgaacau

SEQ ID NO: 2446983 - RNA, 19 nt, Homo sapiens
  misc_RNA (1)...(19): siRNA sense strand
auaaggagaaauuggaaca

SEQ ID NO: 2446984 - RNA, 19 nt, Homo sapiens
  misc_RNA (1)...(19): siRNA sense strand
cccaagaggaaaagaagaa

SEQ ID NO: 2446985 - RNA, 19 nt, Homo sapiens
  misc_RNA (1)...(19): siRNA sense strand
gagcuguucuguugcgaca

SEQ ID NO: 2446986 - RNA, 19 nt, Homo sapiens
  misc_RNA (1)...(19): siRNA sense strand
guguauacagacugaggau

SEQ ID NO: 2446987 - RNA, 19 nt, Homo sapiens
  misc_RNA (1)...(19): siRNA sense strand
cagaaaagaguccgaucaa

SEQ ID NO: 2446988 - RNA, 19 nt, Homo sapiens
  misc_RNA (1)...(19): siRNA sense strand
agaaauuggaacaaggaac

SEQ ID NO: 2446989 - RNA, 19 nt, Homo sapiens
  misc_RNA (1)...(19): siRNA sense strand
aggaaggaucucuaccuaa

SEQ ID NO: 2446990 - RNA, 19 nt, Homo sapiens
  misc_RNA (1)...(19): siRNA sense strand
cagcaaagccgauggccag

SEQ ID NO: 2446991 - RNA, 19 nt, Homo sapiens
  misc_RNA (1)...(19): siRNA sense strand
agccaauucuacagcuaaa

SEQ ID NO: 2446992 - RNA, 19 nt, Homo sapiens
  misc_RNA (1)...(19): siRNA sense strand
uguaaagaugagagcuauu

SEQ ID NO: 2446993 - RNA, 19 nt, Homo sapiens
  misc_RNA (1)...(19): siRNA sense strand
acaucagguacaacaaaua

SEQ ID NO: 2446994 - RNA, 19 nt, Homo sapiens
  misc_RNA (1)...(19): siRNA sense strand
ggcacaagcaccaggucaa

SEQ ID NO: 2446995 - RNA, 19 nt, Homo sapiens
  misc_RNA (1)...(19): siRNA sense strand
gcaccaggucaaagggcau

SEQ ID NO: 2446996 - RNA, 19 nt, Homo sapiens
  misc_RNA (1)...(19): siRNA sense strand
ugguguggcgacaggguaa

SEQ ID NO: 2446997 - RNA, 19 nt, Homo sapiens
  misc_RNA (1)...(19): siRNA sense strand
ggcgacaggguaagggaga

SEQ ID NO: 2446998 - RNA, 19 nt, Homo sapiens
  misc_RNA (1)...(19): siRNA sense strand
ggaugaagcuggaggccau

SEQ ID NO: 2446999 - RNA, 19 nt, Homo sapiens
  misc_RNA (1)...(19): siRNA sense strand
ggaugaagguggaggugcu

SEQ ID NO: 2447000 - RNA, 19 nt, Homo sapiens
  misc_RNA (1)...(19): siRNA sense strand
ggacaggacagcuggcaga

SEQ ID NO: 2447001 - RNA, 19 nt, Homo sapiens
  misc_RNA (1)...(19): siRNA sense strand
gcaugaagcuggaggccgu

SEQ ID NO: 2447002 - RNA, 19 nt, Homo sapiens
  misc_RNA (1)...(19): siRNA sense strand
cgacaaggcuucaagucca

SEQ ID NO: 2447003 - RNA, 19 nt, Homo sapiens
  misc_RNA (1)...(19): siRNA sense strand
aggaagaggaagaugacga

SEQ ID NO: 2447004 - RNA, 19 nt, Homo sapiens
  misc_RNA (1)...(19): siRNA sense strand
cauccagacagcaggguau

SEQ ID NO: 2447005 - RNA, 19 nt, Homo sapiens
  misc_RNA (1)...(19): siRNA sense strand
ugggagaacuacuuggaga

SEQ ID NO: 2447006 - RNA, 19 nt, Homo sapiens
  misc_RNA (1)...(19): siRNA sense strand
cuucagaaccaauggagga

SEQ ID NO: 2447007 - RNA, 19 nt, Homo sapiens
  misc_RNA (1)...(19): siRNA sense strand
ccacaccgcugaaggccaa

SEQ ID NO: 2447008 - RNA, 19 nt, Homo sapiens
  misc_RNA (1)...(19): siRNA sense strand
ccucagggugccaggaaga

SEQ ID NO: 2447009 - RNA, 19 nt, Homo sapiens
  misc_RNA (1)...(19): siRNA sense strand
ugaaagggaugaaggugga

SEQ ID NO: 2447010 - RNA, 19 nt, Homo sapiens
  misc_RNA (1)...(19): siRNA sense strand
gccaaaagguuaugaggca

SEQ ID NO: 2447011 - RNA, 19 nt, Homo sapiens
  misc_RNA (1)...(19): siRNA sense strand
gguaugaaggcuuugaaaa

SEQ ID NO: 2447012 - RNA, 19 nt, Homo sapiens
  misc_RNA (1)...(19): siRNA sense strand
cuuucaacugggagaacua

SEQ ID NO: 2447013 - RNA, 19 nt, Homo sapiens
  misc_RNA (1)...(19): siRNA sense strand
uggaggaagaggaagauga

SEQ ID NO: 2447014 - RNA, 19 nt, Homo sapiens
  misc_RNA (1)...(19): siRNA sense strand
acaucaagcaggaaacaga

SEQ ID NO: 2447015 - RNA, 19 nt, Homo sapiens
  misc_RNA (1)...(19): siRNA sense strand
cgguaugaaggcuuugaaa

SEQ ID NO: 2447016 - RNA, 19 nt, Homo sapiens
  misc_RNA (1)...(19): siRNA sense strand
agugggaggaugugaugaa

SEQ ID NO: 2447017 - RNA, 19 nt, Homo sapiens
  misc_RNA (1)...(19): siRNA sense strand
gugugaaggaagagcaucu

SEQ ID NO: 2447018 - RNA, 19 nt, Homo sapiens
  misc_RNA (1)...(19): siRNA sense strand
ucuccaagaccaagagguu

SEQ ID NO: 2447019 - RNA, 19 nt, Homo sapiens
  misc_RNA (1)...(19): siRNA sense strand
uaucguggguacaagggaa

SEQ ID NO: 2447020 - RNA, 19 nt, Homo sapiens
  misc_RNA (1)...(19): siRNA sense strand
ccuccacucucaagggaca

SEQ ID NO: 2447021 - RNA, 19 nt, Homo sapiens
  misc_RNA (1)...(19): siRNA sense strand
gguuugaggaagggaugaa

SEQ ID NO: 2447022 - RNA, 19 nt, Homo sapiens
  misc_RNA (1)...(19): siRNA sense strand
agguucuccuggauggaua

SEQ ID NO: 2447023 - RNA, 19 nt, Homo sapiens
  misc_RNA (1)...(19): siRNA sense strand
cggugaaacgaguggugca

SEQ ID NO: 2447024 - RNA, 19 nt, Homo sapiens
  misc_RNA (1)...(19): siRNA sense strand
accaauggaggaagaggaa

SEQ ID NO: 2447025 - RNA, 19 nt, Homo sapiens
  misc_RNA (1)...(19): siRNA sense strand
ugggacaccaacaggacaa

SEQ ID NO: 2447026 - RNA, 19 nt, Homo sapiens
  misc_RNA (1)...(19): siRNA sense strand
ugaagguggaggugcucaa

SEQ ID NO: 2447027 - RNA, 19 nt, Homo sapiens
  misc_RNA (1)...(19): siRNA sense strand
aggaagggaugaagcugga

SEQ ID NO: 2447028 - RNA, 19 nt, Homo sapiens
  misc_RNA (1)...(19): siRNA sense strand
agaacuacuuggagaagac

SEQ ID NO: 2447029 - RNA, 19 nt, Homo sapiens
  misc_RNA (1)...(19): siRNA sense strand
aagaggaagaugacgacuu

SEQ ID NO: 2447030 - RNA, 19 nt, Homo sapiens
  misc_RNA (1)...(19): siRNA sense strand
ucaccgacuggaagggcua

SEQ ID NO: 2447031 - RNA, 19 nt, Homo sapiens
  misc_RNA (1)...(19): siRNA sense strand
gcgugugaaggaagagcau

SEQ ID NO: 2447032 - RNA, 19 nt, Homo sapiens
  misc_RNA (1)...(19): siRNA sense strand
ucgagaacaucaagcagga

SEQ ID NO: 2447033 - RNA, 19 nt, Homo sapiens
  misc_RNA (1)...(19): siRNA sense strand
cuucauuaacacagccaaa

SEQ ID NO: 2447034 - RNA, 19 nt, Homo sapiens
  misc_RNA (1)...(19): siRNA sense strand
ugaagagagaagaaggaga

SEQ ID NO: 2447035 - RNA, 19 nt, Homo sapiens
  misc_RNA (1)...(19): siRNA sense strand
uaucaugcucauugggaau

SEQ ID NO: 2447036 - RNA, 19 nt, Homo sapiens
  misc_RNA (1)...(19): siRNA sense strand
ugggaauaagagugaccua

SEQ ID NO: 2447037 - RNA, 19 nt, Homo sapiens
  misc_RNA (1)...(19): siRNA sense strand
acaaugaggcaaauggcau

SEQ ID NO: 2447038 - RNA, 19 nt, Homo sapiens
  misc_RNA (1)...(19): siRNA sense strand
auuaacacagccaaagaaa

SEQ ID NO: 2447039 - RNA, 19 nt, Homo sapiens
  misc_RNA (1)...(19): siRNA sense strand
ugugaagagagaagaagga

SEQ ID NO: 2447040 - RNA, 19 nt, Homo sapiens
  misc_RNA (1)...(19): siRNA sense strand
gcaauguugaagaggccuu

SEQ ID NO: 2447041 - RNA, 19 nt, Homo sapiens
  misc_RNA (1)...(19): siRNA sense strand
cugugaagcaacugaagaa

SEQ ID NO: 2447042 - RNA, 19 nt, Homo sapiens
  misc_RNA (1)...(19): siRNA sense strand
gugaagcaacugaagaaaa

SEQ ID NO: 2447043 - RNA, 19 nt, Homo sapiens
  misc_RNA (1)...(19): siRNA sense strand
gcucagaggacgaggguga

SEQ ID NO: 2447044 - RNA, 19 nt, Homo sapiens
  misc_RNA (1)...(19): siRNA sense strand
acgaaaaugagcuggaaaa

SEQ ID NO: 2447045 - RNA, 19 nt, Homo sapiens
  misc_RNA (1)...(19): siRNA sense strand
uggaaacauaacaggcuua

SEQ ID NO: 2447046 - RNA, 19 nt, Homo sapiens
  misc_RNA (1)...(19): siRNA sense strand
cguuauuaggagaugaaga

SEQ ID NO: 2447047 - RNA, 19 nt, Homo sapiens
  misc_RNA (1)...(19): siRNA sense strand
aagaagaaacugaaggaag

SEQ ID NO: 2447048 - RNA, 19 nt, Homo sapiens
  misc_RNA (1)...(19): siRNA sense strand
gagaugaagaagagggcuc

SEQ ID NO: 2447049 - RNA, 19 nt, Homo sapiens
  misc_RNA (1)...(19): siRNA sense strand
uggcacaggcugaggaaag

SEQ ID NO: 2447050 - RNA, 19 nt, Homo sapiens
  misc_RNA (1)...(19): siRNA sense strand
ggauaccguuauuaggaga

SEQ ID NO: 2447051 - RNA, 19 nt, Homo sapiens
  misc_RNA (1)...(19): siRNA sense strand
uauuaggagaugaagaaga

SEQ ID NO: 2447052 - RNA, 19 nt, Homo sapiens
  misc_RNA (1)...(19): siRNA sense strand
cugauaugugggauggcaa

SEQ ID NO: 2447053 - RNA, 19 nt, Homo sapiens
  misc_RNA (1)...(19): siRNA sense strand
ugauauaucgacuggcaca

SEQ ID NO: 2447054 - RNA, 19 nt, Homo sapiens
  misc_RNA (1)...(19): siRNA sense strand
aggaaagacaacagcucga

SEQ ID NO: 2447055 - RNA, 19 nt, Homo sapiens
  misc_RNA (1)...(19): siRNA sense strand
aacugaaggaagagcaaaa

SEQ ID NO: 2447056 - RNA, 19 nt, Homo sapiens
  misc_RNA (1)...(19): siRNA sense strand
ccuuaugaguguagagaau

SEQ ID NO: 2447057 - RNA, 19 nt, Homo sapiens
  misc_RNA (1)...(19): siRNA sense strand
guguagagaauaugggaaa

SEQ ID NO: 2447058 - RNA, 19 nt, Homo sapiens
  misc_RNA (1)...(19): siRNA sense strand
gguaauaagaacugcguga

SEQ ID NO: 2447059 - RNA, 19 nt, Homo sapiens
  misc_RNA (1)...(19): siRNA sense strand
gugcagugauuguggaaaa

SEQ ID NO: 2447060 - RNA, 19 nt, Homo sapiens
  misc_RNA (1)...(19): siRNA sense strand
ccguaugagugcagugaau

SEQ ID NO: 2447061 - RNA, 19 nt, Homo sapiens
  misc_RNA (1)...(19): siRNA sense strand
ccuuguaagcagagaauuu

SEQ ID NO: 2447062 - RNA, 19 nt, Homo sapiens
  misc_RNA (1)...(19): siRNA sense strand
gugcagugaaugugguaaa

SEQ ID NO: 2447063 - RNA, 19 nt, Homo sapiens
  misc_RNA (1)...(19): siRNA sense strand
gugugagguaugugggaaa

SEQ ID NO: 2447064 - RNA, 19 nt, Homo sapiens
  misc_RNA (1)...(19): siRNA sense strand
gaguggagcauguggaaaa

SEQ ID NO: 2447065 - RNA, 19 nt, Homo sapiens
  misc_RNA (1)...(19): siRNA sense strand
uuguagggaaugugggaaa

SEQ ID NO: 2447066 - RNA, 19 nt, Homo sapiens
  misc_RNA (1)...(19): siRNA sense strand
gugcagugaauguggaaaa

SEQ ID NO: 2447067 - RNA, 19 nt, Homo sapiens
  misc_RNA (1)...(19): siRNA sense strand
guaaagaaacguaagcuca

SEQ ID NO: 2447068 - RNA, 19 nt, Homo sapiens
  misc_RNA (1)...(19): siRNA sense strand
agucgaaagagcagccuua

SEQ ID NO: 2447069 - RNA, 19 nt, Homo sapiens
  misc_RNA (1)...(19): siRNA sense strand
ccuuaugaauguaccaaau

SEQ ID NO: 2447070 - RNA, 19 nt, Homo sapiens
  misc_RNA (1)...(19): siRNA sense strand
aggucacacuggagagaga

SEQ ID NO: 2447071 - RNA, 19 nt, Homo sapiens
  misc_RNA (1)...(19): siRNA sense strand
acuaauuacaguuguggaa

SEQ ID NO: 2447072 - RNA, 19 nt, Homo sapiens
  misc_RNA (1)...(19): siRNA sense strand
guguggagaauguggaaaa

SEQ ID NO: 2447073 - RNA, 19 nt, Homo sapiens
  misc_RNA (1)...(19): siRNA sense strand
uuguggagagugugggaaa

SEQ ID NO: 2447074 - RNA, 19 nt, Homo sapiens
  misc_RNA (1)...(19): siRNA sense strand
ccuuacaaguguggagaau

SEQ ID NO: 2447075 - RNA, 19 nt, Homo sapiens
  misc_RNA (1)...(19): siRNA sense strand
cccuaugagugcaaggaau

SEQ ID NO: 2447076 - RNA, 19 nt, Homo sapiens
  misc_RNA (1)...(19): siRNA sense strand
uguuaugugugcagugauu

SEQ ID NO: 2447077 - RNA, 19 nt, Homo sapiens
  misc_RNA (1)...(19): siRNA sense strand
gcgaggucauacuggagaa

SEQ ID NO: 2447078 - RNA, 19 nt, Homo sapiens
  misc_RNA (1)...(19): siRNA sense strand
agaaagagugucagagaag

SEQ ID NO: 2447079 - RNA, 19 nt, Homo sapiens
  misc_RNA (1)...(19): siRNA sense strand
cugugaggagugcgggaaa

SEQ ID NO: 2447080 - RNA, 19 nt, Homo sapiens
  misc_RNA (1)...(19): siRNA sense strand
cuacagaaagagugucaga

SEQ ID NO: 2447081 - RNA, 19 nt, Homo sapiens
  misc_RNA (1)...(19): siRNA sense strand
ugggaaaucuuuuggucaa

SEQ ID NO: 2447082 - RNA, 19 nt, Homo sapiens
  misc_RNA (1)...(19): siRNA sense strand
gccauaugcgugugaggua

SEQ ID NO: 2447083 - RNA, 19 nt, Homo sapiens
  misc_RNA (1)...(19): siRNA sense strand
gaggauucacacuggagaa

SEQ ID NO: 2447084 - RNA, 19 nt, Homo sapiens
  misc_RNA (1)...(19): siRNA sense strand
aaacguaagcucagggugu

SEQ ID NO: 2447085 - RNA, 19 nt, Homo sapiens
  misc_RNA (1)...(19): siRNA sense strand
gggaaaucuuuuagucaga

SEQ ID NO: 2447086 - RNA, 19 nt, Homo sapiens
  misc_RNA (1)...(19): siRNA sense strand
aagaguucauucuggacaa

SEQ ID NO: 2447087 - RNA, 19 nt, Homo sapiens
  misc_RNA (1)...(19): siRNA sense strand
ggggaaagaccuuacaauu

SEQ ID NO: 2447088 - RNA, 19 nt, Homo sapiens
  misc_RNA (1)...(19): siRNA sense strand
ugacuauacaucagaggau

SEQ ID NO: 2447089 - RNA, 19 nt, Homo sapiens
  misc_RNA (1)...(19): siRNA sense strand
caucacaagcagaagcuga

SEQ ID NO: 2447090 - RNA, 19 nt, Homo sapiens
  misc_RNA (1)...(19): siRNA sense strand
cucauuaaacacaggagaa

SEQ ID NO: 2447091 - RNA, 19 nt, Homo sapiens
  misc_RNA (1)...(19): siRNA sense strand
cagaguucacacaggagaa

SEQ ID NO: 2447092 - RNA, 19 nt, Homo sapiens
  misc_RNA (1)...(19): siRNA sense strand
aagcagaagcugaacagga

SEQ ID NO: 2447093 - RNA, 19 nt, Homo sapiens
  misc_RNA (1)...(19): siRNA sense strand
gguuguugguguggaucaa

SEQ ID NO: 2447094 - RNA, 19 nt, Homo sapiens
  misc_RNA (1)...(19): siRNA sense strand
ccucauucaacaucagcaa

SEQ ID NO: 2447095 - RNA, 19 nt, Homo sapiens
  misc_RNA (1)...(19): siRNA sense strand
ucacugaacaccagagacu

SEQ ID NO: 2447096 - RNA, 19 nt, Homo sapiens
  misc_RNA (1)...(19): siRNA sense strand
ucauuaaacacaggagaau

SEQ ID NO: 2447097 - RNA, 19 nt, Homo sapiens
  misc_RNA (1)...(19): siRNA sense strand
aguuauuccacaccagaaa

SEQ ID NO: 2447098 - RNA, 19 nt, Homo sapiens
  misc_RNA (1)...(19): siRNA sense strand
aagauguggcugugaacuu

SEQ ID NO: 2447099 - RNA, 19 nt, Homo sapiens
  misc_RNA (1)...(19): siRNA sense strand
cauuaaacacaggagaauu

SEQ ID NO: 2447100 - RNA, 19 nt, Homo sapiens
  misc_RNA (1)...(19): siRNA sense strand
ggagaaaggccauaugcgu

SEQ ID NO: 2447101 - RNA, 19 nt, Homo sapiens
  misc_RNA (1)...(19): siRNA sense strand
ccauaugcgugugagguau

SEQ ID NO: 2447102 - RNA, 19 nt, Homo sapiens
  misc_RNA (1)...(19): siRNA sense strand
auaagaacugcgugacuau

SEQ ID NO: 2447103 - RNA, 19 nt, Homo sapiens
  misc_RNA (1)...(19): siRNA sense strand
uggaaaauccuuugcugaa

SEQ ID NO: 2447104 - RNA, 19 nt, Homo sapiens
  misc_RNA (1)...(19): siRNA sense strand
aaagagugucagagaagca

SEQ ID NO: 2447105 - RNA, 19 nt, Homo sapiens
  misc_RNA (1)...(19): siRNA sense strand
uguagagaauaugggaaau

SEQ ID NO: 2447106 - RNA, 19 nt, Homo sapiens
  misc_RNA (1)...(19): siRNA sense strand
cuguggggaaugugggaaa

SEQ ID NO: 2447107 - RNA, 19 nt, Homo sapiens
  misc_RNA (1)...(19): siRNA sense strand
agggaaugugggaaauuau

SEQ ID NO: 2447108 - RNA, 19 nt, Homo sapiens
  misc_RNA (1)...(19): siRNA sense strand
auauaaggacugugggaaa

SEQ ID NO: 2447109 - RNA, 19 nt, Homo sapiens
  misc_RNA (1)...(19): siRNA sense strand
guguaaggaaugugguaaa

SEQ ID NO: 2447110 - RNA, 19 nt, Homo sapiens
  misc_RNA (1)...(19): siRNA sense strand
auguaaggacugugggaaa

SEQ ID NO: 2447111 - RNA, 19 nt, Homo sapiens
  misc_RNA (1)...(19): siRNA sense strand
auguaugaaaugugggaaa

SEQ ID NO: 2447112 - RNA, 19 nt, Homo sapiens
  misc_RNA (1)...(19): siRNA sense strand
cccuauaaauguaaggaau

SEQ ID NO: 2447113 - RNA, 19 nt, Homo sapiens
  misc_RNA (1)...(19): siRNA sense strand
aaaccaaaauggagaggaa

SEQ ID NO: 2447114 - RNA, 19 nt, Homo sapiens
  misc_RNA (1)...(19): siRNA sense strand
augugaugcuggagaacua

SEQ ID NO: 2447115 - RNA, 19 nt, Homo sapiens
  misc_RNA (1)...(19): siRNA sense strand
auguucagguccagagaaa

SEQ ID NO: 2447116 - RNA, 19 nt, Homo sapiens
  misc_RNA (1)...(19): siRNA sense strand
agucauaccuugaagcaca

SEQ ID NO: 2447117 - RNA, 19 nt, Homo sapiens
  misc_RNA (1)...(19): siRNA sense strand
agauaagcccuaugaauau

SEQ ID NO: 2447118 - RNA, 19 nt, Homo sapiens
  misc_RNA (1)...(19): siRNA sense strand
aaguaacacaggacagaaa

SEQ ID NO: 2447119 - RNA, 19 nt, Homo sapiens
  misc_RNA (1)...(19): siRNA sense strand
ccuugaagcacacaggaaa

SEQ ID NO: 2447120 - RNA, 19 nt, Homo sapiens
  misc_RNA (1)...(19): siRNA sense strand
guguuacaaaugugggaaa

SEQ ID NO: 2447121 - RNA, 19 nt, Homo sapiens
  misc_RNA (1)...(19): siRNA sense strand
aggcacugacuaugggaaa

SEQ ID NO: 2447122 - RNA, 19 nt, Homo sapiens
  misc_RNA (1)...(19): siRNA sense strand
aacacacgcuggagagaaa

SEQ ID NO: 2447123 - RNA, 19 nt, Homo sapiens
  misc_RNA (1)...(19): siRNA sense strand
cccuauggguguaaggaau

SEQ ID NO: 2447124 - RNA, 19 nt, Homo sapiens
  misc_RNA (1)...(19): siRNA sense strand
agaaaguguacacaagaua

SEQ ID NO: 2447125 - RNA, 19 nt, Homo sapiens
  misc_RNA (1)...(19): siRNA sense strand
auguaagcacuguggcaaa

SEQ ID NO: 2447126 - RNA, 19 nt, Homo sapiens
  misc_RNA (1)...(19): siRNA sense strand
caauguaagaaauguggua

SEQ ID NO: 2447127 - RNA, 19 nt, Homo sapiens
  misc_RNA (1)...(19): siRNA sense strand
gccauaugaauguaagaaa

SEQ ID NO: 2447128 - RNA, 19 nt, Homo sapiens
  misc_RNA (1)...(19): siRNA sense strand
aagaagaagaguugagaac

SEQ ID NO: 2447129 - RNA, 19 nt, Homo sapiens
  misc_RNA (1)...(19): siRNA sense strand
ggcuggaggaagaggaaga

SEQ ID NO: 2447130 - RNA, 19 nt, Homo sapiens
  misc_RNA (1)...(19): siRNA sense strand
agauagaagaaguaacaca

SEQ ID NO: 2447131 - RNA, 19 nt, Homo sapiens
  misc_RNA (1)...(19): siRNA sense strand
cccuaugaauguaaggaau

SEQ ID NO: 2447132 - RNA, 19 nt, Homo sapiens
  misc_RNA (1)...(19): siRNA sense strand
auguaaggaauguggaaaa

SEQ ID NO: 2447133 - RNA, 19 nt, Homo sapiens
  misc_RNA (1)...(19): siRNA sense strand
augucacgccagagagaaa

SEQ ID NO: 2447134 - RNA, 19 nt, Homo sapiens
  misc_RNA (1)...(19): siRNA sense strand
ggguguaaggaauguggua

SEQ ID NO: 2447135 - RNA, 19 nt, Homo sapiens
  misc_RNA (1)...(19): siRNA sense strand
ccagagaaaguguacacaa

SEQ ID NO: 2447136 - RNA, 19 nt, Homo sapiens
  misc_RNA (1)...(19): siRNA sense strand
gaauauaaggacuguggga

SEQ ID NO: 2447137 - RNA, 19 nt, Homo sapiens
  misc_RNA (1)...(19): siRNA sense strand
auguaacgcauguggaaau

SEQ ID NO: 2447138 - RNA, 19 nt, Homo sapiens
  misc_RNA (1)...(19): siRNA sense strand
uggaaaaugugccugaaaa

SEQ ID NO: 2447139 - RNA, 19 nt, Homo sapiens
  misc_RNA (1)...(19): siRNA sense strand
cgaagacacacuggagaua

SEQ ID NO: 2447140 - RNA, 19 nt, Homo sapiens
  misc_RNA (1)...(19): siRNA sense strand
gcuuacugccugacaaauu

SEQ ID NO: 2447141 - RNA, 19 nt, Homo sapiens
  misc_RNA (1)...(19): siRNA sense strand
uuacuaaucaugugcgaau

SEQ ID NO: 2447142 - RNA, 19 nt, Homo sapiens
  misc_RNA (1)...(19): siRNA sense strand
gguuggaagaagaagaguu

SEQ ID NO: 2447143 - RNA, 19 nt, Homo sapiens
  misc_RNA (1)...(19): siRNA sense strand
ccuuaauaaucacaugcaa

SEQ ID NO: 2447144 - RNA, 19 nt, Homo sapiens
  misc_RNA (1)...(19): siRNA sense strand
gagagaagccauaugagca

SEQ ID NO: 2447145 - RNA, 19 nt, Homo sapiens
  misc_RNA (1)...(19): siRNA sense strand
cccuaugaauguaugaaau

SEQ ID NO: 2447146 - RNA, 19 nt, Homo sapiens
  misc_RNA (1)...(19): siRNA sense strand
cuuaagaccaacaugagua

SEQ ID NO: 2447147 - RNA, 19 nt, Homo sapiens
  misc_RNA (1)...(19): siRNA sense strand
gaggaagaguugagcacac

SEQ ID NO: 2447148 - RNA, 19 nt, Homo sapiens
  misc_RNA (1)...(19): siRNA sense strand
cuuugaaggcacugacuau

SEQ ID NO: 2447149 - RNA, 19 nt, Homo sapiens
  misc_RNA (1)...(19): siRNA sense strand
aggccuuauugaacauaua

SEQ ID NO: 2447150 - RNA, 19 nt, Homo sapiens
  misc_RNA (1)...(19): siRNA sense strand
guucagguccagagaaagu

SEQ ID NO: 2447151 - RNA, 19 nt, Homo sapiens
  misc_RNA (1)...(19): siRNA sense strand
cccuauaaauguaaggacu

SEQ ID NO: 2447152 - RNA, 19 nt, Homo sapiens
  misc_RNA (1)...(19): siRNA sense strand
acucuaugacuguaagcaa

SEQ ID NO: 2447153 - RNA, 19 nt, Homo sapiens
  misc_RNA (1)...(19): siRNA sense strand
guucaguaagcauggaaaa

SEQ ID NO: 2447154 - RNA, 19 nt, Homo sapiens
  misc_RNA (1)...(19): siRNA sense strand
ugggaaggccuuugguaca

SEQ ID NO: 2447155 - RNA, 19 nt, Homo sapiens
  misc_RNA (1)...(19): siRNA sense strand
uggacccaguucagagaaa

SEQ ID NO: 2447156 - RNA, 19 nt, Homo sapiens
  misc_RNA (1)...(19): siRNA sense strand
cucaaugaauggaagcaau

SEQ ID NO: 2447157 - RNA, 19 nt, Homo sapiens
  misc_RNA (1)...(19): siRNA sense strand
auuaugagaacguggccaa

SEQ ID NO: 2447158 - RNA, 19 nt, Homo sapiens
  misc_RNA (1)...(19): siRNA sense strand
auacaaauggaccugguaa

SEQ ID NO: 2447159 - RNA, 19 nt, Homo sapiens
  misc_RNA (1)...(19): siRNA sense strand
agagaagccauaugagcau

SEQ ID NO: 2447160 - RNA, 19 nt, Homo sapiens
  misc_RNA (1)...(19): siRNA sense strand
acgaagacacacuggagau

SEQ ID NO: 2447161 - RNA, 19 nt, Homo sapiens
  misc_RNA (1)...(19): siRNA sense strand
cccuauaaauguaaugcau

SEQ ID NO: 2447162 - RNA, 19 nt, Homo sapiens
  misc_RNA (1)...(19): siRNA sense strand
ucguauugcacauuugaaa

SEQ ID NO: 2447163 - RNA, 19 nt, Homo sapiens
  misc_RNA (1)...(19): siRNA sense strand
auacaaacuucuaauggga

SEQ ID NO: 2447164 - RNA, 19 nt, Homo sapiens
  misc_RNA (1)...(19): siRNA sense strand
cuguaagcaaugugaagau

SEQ ID NO: 2447165 - RNA, 19 nt, Homo sapiens
  misc_RNA (1)...(19): siRNA sense strand
aggaauaugggaaggccuu

SEQ ID NO: 2447166 - RNA, 19 nt, Homo sapiens
  misc_RNA (1)...(19): siRNA sense strand
aggacguauucaacauuua

SEQ ID NO: 2447167 - RNA, 19 nt, Homo sapiens
  misc_RNA (1)...(19): siRNA sense strand
ccugaaaaccaaagggcca

SEQ ID NO: 2447168 - RNA, 19 nt, Homo sapiens
  misc_RNA (1)...(19): siRNA sense strand
gguguaaggaaugugguaa

SEQ ID NO: 2447169 - RNA, 19 nt, Homo sapiens
  misc_RNA (1)...(19): siRNA sense strand
uguaaacauccaugccuua

SEQ ID NO: 2447170 - RNA, 19 nt, Homo sapiens
  misc_RNA (1)...(19): siRNA sense strand
guguaaagaaugcgggaaa

SEQ ID NO: 2447171 - RNA, 19 nt, Homo sapiens
  misc_RNA (1)...(19): siRNA sense strand
cuuauuggagcaagggaaa

SEQ ID NO: 2447172 - RNA, 19 nt, Homo sapiens
  misc_RNA (1)...(19): siRNA sense strand
cccuaugaguguaaagaau

SEQ ID NO: 2447173 - RNA, 19 nt, Homo sapiens
  misc_RNA (1)...(19): siRNA sense strand
cccuaugaguguaaggaau

SEQ ID NO: 2447174 - RNA, 19 nt, Homo sapiens
  misc_RNA (1)...(19): siRNA sense strand
augucaugaaugugggaaa

SEQ ID NO: 2447175 - RNA, 19 nt, Homo sapiens
  misc_RNA (1)...(19): siRNA sense strand
acuucauacuggugucaaa

SEQ ID NO: 2447176 - RNA, 19 nt, Homo sapiens
  misc_RNA (1)...(19): siRNA sense strand
gcucagaaguuacucgaca

SEQ ID NO: 2447177 - RNA, 19 nt, Homo sapiens
  misc_RNA (1)...(19): siRNA sense strand
gggaggugacucuggagaa

SEQ ID NO: 2447178 - RNA, 19 nt, Homo sapiens
  misc_RNA (1)...(19): siRNA sense strand
ccuuauucaacaucagaaa

SEQ ID NO: 2447179 - RNA, 19 nt, Homo sapiens
  misc_RNA (1)...(19): siRNA sense strand
aauucauacaggugacaaa

SEQ ID NO: 2447180 - RNA, 19 nt, Homo sapiens
  misc_RNA (1)...(19): siRNA sense strand
gaguguaaggaaugcggaa

SEQ ID NO: 2447181 - RNA, 19 nt, Homo sapiens
  misc_RNA (1)...(19): siRNA sense strand
uuaccgaacaucagagaau

SEQ ID NO: 2447182 - RNA, 19 nt, Homo sapiens
  misc_RNA (1)...(19): siRNA sense strand
gcauuuagucguagcucau

SEQ ID NO: 2447183 - RNA, 19 nt, Homo sapiens
  misc_RNA (1)...(19): siRNA sense strand
ucauugaacacuacagaau

SEQ ID NO: 2447184 - RNA, 19 nt, Homo sapiens
  misc_RNA (1)...(19): siRNA sense strand
aguccaggugugagaaauu

SEQ ID NO: 2447185 - RNA, 19 nt, Homo sapiens
  misc_RNA (1)...(19): siRNA sense strand
auguaaagaaugugggaag

SEQ ID NO: 2447186 - RNA, 19 nt, Homo sapiens
  misc_RNA (1)...(19): siRNA sense strand
gggaagaccuuuaggcagc

SEQ ID NO: 2447187 - RNA, 19 nt, Homo sapiens
  misc_RNA (1)...(19): siRNA sense strand
cauucaacugggagauaau

SEQ ID NO: 2447188 - RNA, 19 nt, Homo sapiens
  misc_RNA (1)...(19): siRNA sense strand
aagucaaugaagagugcua

SEQ ID NO: 2447189 - RNA, 19 nt, Homo sapiens
  misc_RNA (1)...(19): siRNA sense strand
guguaaggaaugugggaag

SEQ ID NO: 2447190 - RNA, 19 nt, Homo sapiens
  misc_RNA (1)...(19): siRNA sense strand
ccuuacgaauguagagagu

SEQ ID NO: 2447191 - RNA, 19 nt, Homo sapiens
  misc_RNA (1)...(19): siRNA sense strand
gggagauaauggaaagccu

SEQ ID NO: 2447192 - RNA, 19 nt, Homo sapiens
  misc_RNA (1)...(19): siRNA sense strand
cuuuauucguaguucacaa

SEQ ID NO: 2447193 - RNA, 19 nt, Homo sapiens
  misc_RNA (1)...(19): siRNA sense strand
cuguaaggacugugggaag

SEQ ID NO: 2447194 - RNA, 19 nt, Homo sapiens
  misc_RNA (1)...(19): siRNA sense strand
gaaugcagggaguguggaa

SEQ ID NO: 2447195 - RNA, 19 nt, Homo sapiens
  misc_RNA (1)...(19): siRNA sense strand
ggaguccaggugugagaaa

SEQ ID NO: 2447196 - RNA, 19 nt, Homo sapiens
  misc_RNA (1)...(19): siRNA sense strand
aggaaugcggaaagggcuu

SEQ ID NO: 2447197 - RNA, 19 nt, Homo sapiens
  misc_RNA (1)...(19): siRNA sense strand
gcucagagggacuuguaca

SEQ ID NO: 2447198 - RNA, 19 nt, Homo sapiens
  misc_RNA (1)...(19): siRNA sense strand
ggagauaauggaaagccuu

SEQ ID NO: 2447199 - RNA, 19 nt, Homo sapiens
  misc_RNA (1)...(19): siRNA sense strand
ugacuguacaccagcgaau

SEQ ID NO: 2447200 - RNA, 19 nt, Homo sapiens
  misc_RNA (1)...(19): siRNA sense strand
aguccauacuggcgacaga

SEQ ID NO: 2447201 - RNA, 19 nt, Homo sapiens
  misc_RNA (1)...(19): siRNA sense strand
aaggccaguuugagagaca

SEQ ID NO: 2447202 - RNA, 19 nt, Homo sapiens
  misc_RNA (1)...(19): siRNA sense strand
agaaacccuacgaguguaa

SEQ ID NO: 2447203 - RNA, 19 nt, Homo sapiens
  misc_RNA (1)...(19): siRNA sense strand
agaaacccuaugaguguaa

SEQ ID NO: 2447204 - RNA, 19 nt, Homo sapiens
  misc_RNA (1)...(19): siRNA sense strand
guacgucagagcagggaga

SEQ ID NO: 2447205 - RNA, 19 nt, Homo sapiens
  misc_RNA (1)...(19): siRNA sense strand
cuuuauucguguuucacaa

SEQ ID NO: 2447206 - RNA, 19 nt, Homo sapiens
  misc_RNA (1)...(19): siRNA sense strand
gguaucaaaccuuacgaau

SEQ ID NO: 2447207 - RNA, 19 nt, Homo sapiens
  misc_RNA (1)...(19): siRNA sense strand
ggauguaaggaauguggga

SEQ ID NO: 2447208 - RNA, 19 nt, Homo sapiens
  misc_RNA (1)...(19): siRNA sense strand
caugaaugugggaaagcau

SEQ ID NO: 2447209 - RNA, 19 nt, Homo sapiens
  misc_RNA (1)...(19): siRNA sense strand
gcaucaaagaacucacaca

SEQ ID NO: 2447210 - RNA, 19 nt, Homo sapiens
  misc_RNA (1)...(19): siRNA sense strand
gcucacacgacaucagaga

SEQ ID NO: 2447211 - RNA, 19 nt, Homo sapiens
  misc_RNA (1)...(19): siRNA sense strand
cccuacgaguguaaggaau

SEQ ID NO: 2447212 - RNA, 19 nt, Homo sapiens
  misc_RNA (1)...(19): siRNA sense strand
auguaaagacuguggcaag

SEQ ID NO: 2447213 - RNA, 19 nt, Homo sapiens
  misc_RNA (1)...(19): siRNA sense strand
aggugacucuggagaacuu

SEQ ID NO: 2447214 - RNA, 19 nt, Homo sapiens
  misc_RNA (1)...(19): siRNA sense strand
ggugacaaacccuacgaau

SEQ ID NO: 2447215 - RNA, 19 nt, Homo sapiens
  misc_RNA (1)...(19): siRNA sense strand
gaaccugcucagagggacu

SEQ ID NO: 2447216 - RNA, 19 nt, Homo sapiens
  misc_RNA (1)...(19): siRNA sense strand
auguaauguuugugggaaa

SEQ ID NO: 2447217 - RNA, 19 nt, Homo sapiens
  misc_RNA (1)...(19): siRNA sense strand
aguucauacuggagagaaa

SEQ ID NO: 2447218 - RNA, 19 nt, Homo sapiens
  misc_RNA (1)...(19): siRNA sense strand
guguaaugugugugggaaa

SEQ ID NO: 2447219 - RNA, 19 nt, Homo sapiens
  misc_RNA (1)...(19): siRNA sense strand
auguaaagauugcaggaaa

SEQ ID NO: 2447220 - RNA, 19 nt, Homo sapiens
  misc_RNA (1)...(19): siRNA sense strand
uguaaagauugcaggaaau

SEQ ID NO: 2447221 - RNA, 19 nt, Homo sapiens
  misc_RNA (1)...(19): siRNA sense strand
guguaaggaauguaggaaa

SEQ ID NO: 2447222 - RNA, 19 nt, Homo sapiens
  misc_RNA (1)...(19): siRNA sense strand
cauuauuggagcaaggaaa

SEQ ID NO: 2447223 - RNA, 19 nt, Homo sapiens
  misc_RNA (1)...(19): siRNA sense strand
uguaaggaauguaggaaaa

SEQ ID NO: 2447224 - RNA, 19 nt, Homo sapiens
  misc_RNA (1)...(19): siRNA sense strand
aauucauacaggagagaaa

SEQ ID NO: 2447225 - RNA, 19 nt, Homo sapiens
  misc_RNA (1)...(19): siRNA sense strand
aguucauacuggagagaga

SEQ ID NO: 2447226 - RNA, 19 nt, Homo sapiens
  misc_RNA (1)...(19): siRNA sense strand
aagugauguuggagaacua

SEQ ID NO: 2447227 - RNA, 19 nt, Homo sapiens
  misc_RNA (1)...(19): siRNA sense strand
gugcaaacuuggcgcaaca

SEQ ID NO: 2447228 - RNA, 19 nt, Homo sapiens
  misc_RNA (1)...(19): siRNA sense strand
ccuuaucaguguaaagaau

SEQ ID NO: 2447229 - RNA, 19 nt, Homo sapiens
  misc_RNA (1)...(19): siRNA sense strand
aauucauacuggagagaga

SEQ ID NO: 2447230 - RNA, 19 nt, Homo sapiens
  misc_RNA (1)...(19): siRNA sense strand
auguaaggaauguaggaaa

SEQ ID NO: 2447231 - RNA, 19 nt, Homo sapiens
  misc_RNA (1)...(19): siRNA sense strand
aauucauacuggagaaaga

SEQ ID NO: 2447232 - RNA, 19 nt, Homo sapiens
  misc_RNA (1)...(19): siRNA sense strand
gggaaaacguucagccaga

SEQ ID NO: 2447233 - RNA, 19 nt, Homo sapiens
  misc_RNA (1)...(19): siRNA sense strand
cccuauauguguaaggaau

SEQ ID NO: 2447234 - RNA, 19 nt, Homo sapiens
  misc_RNA (1)...(19): siRNA sense strand
gugaagaaggagggaacaa

SEQ ID NO: 2447235 - RNA, 19 nt, Homo sapiens
  misc_RNA (1)...(19): siRNA sense strand
gcaugaaccacaaaagaaa

SEQ ID NO: 2447236 - RNA, 19 nt, Homo sapiens
  misc_RNA (1)...(19): siRNA sense strand
cauccaaaguugugacagu

SEQ ID NO: 2447237 - RNA, 19 nt, Homo sapiens
  misc_RNA (1)...(19): siRNA sense strand
uguaaagaauguaggaaag

SEQ ID NO: 2447238 - RNA, 19 nt, Homo sapiens
  misc_RNA (1)...(19): siRNA sense strand
caaagugaggacugguaua

SEQ ID NO: 2447239 - RNA, 19 nt, Homo sapiens
  misc_RNA (1)...(19): siRNA sense strand
ucucaagaggaaugggaau

SEQ ID NO: 2447240 - RNA, 19 nt, Homo sapiens
  misc_RNA (1)...(19): siRNA sense strand
cccuaugaauguaaagaau

SEQ ID NO: 2447241 - RNA, 19 nt, Homo sapiens
  misc_RNA (1)...(19): siRNA sense strand
aggaaagccuucagccaga

SEQ ID NO: 2447242 - RNA, 19 nt, Homo sapiens
  misc_RNA (1)...(19): siRNA sense strand
gugagaaagucuucaacca

SEQ ID NO: 2447243 - RNA, 19 nt, Homo sapiens
  misc_RNA (1)...(19): siRNA sense strand
auguguugaaugugggaaa

SEQ ID NO: 2447244 - RNA, 19 nt, Homo sapiens
  misc_RNA (1)...(19): siRNA sense strand
gcucagaggaauuuguaca

SEQ ID NO: 2447245 - RNA, 19 nt, Homo sapiens
  misc_RNA (1)...(19): siRNA sense strand
agaggaauuuguacaggaa

SEQ ID NO: 2447246 - RNA, 19 nt, Homo sapiens
  misc_RNA (1)...(19): siRNA sense strand
gugggaaggccuuuagcaa

SEQ ID NO: 2447247 - RNA, 19 nt, Homo sapiens
  misc_RNA (1)...(19): siRNA sense strand
uauaagaaccagcugggaa

SEQ ID NO: 2447248 - RNA, 19 nt, Homo sapiens
  misc_RNA (1)...(19): siRNA sense strand
gagaaagucuucaaccaga

SEQ ID NO: 2447249 - RNA, 19 nt, Homo sapiens
  misc_RNA (1)...(19): siRNA sense strand
aggaaaacauuuagccaga

SEQ ID NO: 2447250 - RNA, 19 nt, Homo sapiens
  misc_RNA (1)...(19): siRNA sense strand
aggaaagugauguuggaga

SEQ ID NO: 2447251 - RNA, 19 nt, Homo sapiens
  misc_RNA (1)...(19): siRNA sense strand
uguaaggaauguaggaaag

SEQ ID NO: 2447252 - RNA, 19 nt, Homo sapiens
  misc_RNA (1)...(19): siRNA sense strand
acauaagcaugaaccacaa

SEQ ID NO: 2447253 - RNA, 19 nt, Homo sapiens
  misc_RNA (1)...(19): siRNA sense strand
ccuaauuguacaucagaga

SEQ ID NO: 2447254 - RNA, 19 nt, Homo sapiens
  misc_RNA (1)...(19): siRNA sense strand
uggcgcaacauaagagaau

SEQ ID NO: 2447255 - RNA, 19 nt, Homo sapiens
  misc_RNA (1)...(19): siRNA sense strand
gcucaacaucagagaguuc

SEQ ID NO: 2447256 - RNA, 19 nt, Homo sapiens
  misc_RNA (1)...(19): siRNA sense strand
uguaaaguauguaggaaag

SEQ ID NO: 2447257 - RNA, 19 nt, Homo sapiens
  misc_RNA (1)...(19): siRNA sense strand
gcgcaacauaagagaauac

SEQ ID NO: 2447258 - RNA, 19 nt, Homo sapiens
  misc_RNA (1)...(19): siRNA sense strand
ggagggaacaagaggccca

SEQ ID NO: 2447259 - RNA, 19 nt, Homo sapiens
  misc_RNA (1)...(19): siRNA sense strand
aggaauuuguacaggaaag

SEQ ID NO: 2447260 - RNA, 19 nt, Homo sapiens
  misc_RNA (1)...(19): siRNA sense strand
gcucaacaucagagaauuc

SEQ ID NO: 2447261 - RNA, 19 nt, Homo sapiens
  misc_RNA (1)...(19): siRNA sense strand
uggugaagaaggagggaac

SEQ ID NO: 2447262 - RNA, 19 nt, Homo sapiens
  misc_RNA (1)...(19): siRNA sense strand
gagaauacauacuggagag

SEQ ID NO: 2447263 - RNA, 19 nt, Homo sapiens
  misc_RNA (1)...(19): siRNA sense strand
gaucaacaucagaggguuc

SEQ ID NO: 2447264 - RNA, 19 nt, Homo sapiens
  misc_RNA (1)...(19): siRNA sense strand
acguucagccagagugcaa

SEQ ID NO: 2447265 - RNA, 19 nt, Homo sapiens
  misc_RNA (1)...(19): siRNA sense strand
gaaugcaggccuugcucaa

SEQ ID NO: 2447266 - RNA, 19 nt, Homo sapiens
  misc_RNA (1)...(19): siRNA sense strand
ccuggauggugaagaagga

SEQ ID NO: 2447267 - RNA, 19 nt, Homo sapiens
  misc_RNA (1)...(19): siRNA sense strand
agcaagagacauaugaaga

SEQ ID NO: 2447268 - RNA, 19 nt, Homo sapiens
  misc_RNA (1)...(19): siRNA sense strand
guaaugauugugagaaagu

SEQ ID NO: 2447269 - RNA, 19 nt, Homo sapiens
  misc_RNA (1)...(19): siRNA sense strand
uggagaagcagcagggcaa

SEQ ID NO: 2447270 - RNA, 19 nt, Homo sapiens
  misc_RNA (1)...(19): siRNA sense strand
agucggagcugguaaacua

SEQ ID NO: 2447271 - RNA, 19 nt, Homo sapiens
  misc_RNA (1)...(19): siRNA sense strand
cguucaaggcagagggcca

SEQ ID NO: 2447272 - RNA, 19 nt, Homo sapiens
  misc_RNA (1)...(19): siRNA sense strand
ugacucagcugaagaugaa

SEQ ID NO: 2447273 - RNA, 19 nt, Homo sapiens
  misc_RNA (1)...(19): siRNA sense strand
ucaagguacuggagaagca

SEQ ID NO: 2447274 - RNA, 19 nt, Homo sapiens
  misc_RNA (1)...(19): siRNA sense strand
gagaagaaguuccgggagg

SEQ ID NO: 2447275 - RNA, 19 nt, Homo sapiens
  misc_RNA (1)...(19): siRNA sense strand
acaccaaugugcuccgcua

SEQ ID NO: 2447276 - RNA, 19 nt, Homo sapiens
  misc_RNA (1)...(19): siRNA sense strand
augcaaucgcaaugggaaa

SEQ ID NO: 2447277 - RNA, 19 nt, Homo sapiens
  misc_RNA (1)...(19): siRNA sense strand
ggaaguggcauuuaggaga

SEQ ID NO: 2447278 - RNA, 19 nt, Homo sapiens
  misc_RNA (1)...(19): siRNA sense strand
caggaaagucccagaggca

SEQ ID NO: 2447279 - RNA, 19 nt, Homo sapiens
  misc_RNA (1)...(19): siRNA sense strand
ggagagugguccaggagcu

SEQ ID NO: 2447280 - RNA, 19 nt, Homo sapiens
  misc_RNA (1)...(19): siRNA sense strand
agacacagaaggaggugga

SEQ ID NO: 2447281 - RNA, 19 nt, Homo sapiens
  misc_RNA (1)...(19): siRNA sense strand
cacagaaggagguggaagu

SEQ ID NO: 2447282 - RNA, 19 nt, Homo sapiens
  misc_RNA (1)...(19): siRNA sense strand
cagccuugcucuugggaag

SEQ ID NO: 2447283 - RNA, 19 nt, Homo sapiens
  misc_RNA (1)...(19): siRNA sense strand
ucuccaugccucaggguga

SEQ ID NO: 2447284 - RNA, 19 nt, Homo sapiens
  misc_RNA (1)...(19): siRNA sense strand
acgaguuugcugagugaaa

SEQ ID NO: 2447285 - RNA, 19 nt, Homo sapiens
  misc_RNA (1)...(19): siRNA sense strand
agguagaugucuugggaac

SEQ ID NO: 2447286 - RNA, 19 nt, Homo sapiens
  misc_RNA (1)...(19): siRNA sense strand
cauuggagugagagaaaga

SEQ ID NO: 2447287 - RNA, 19 nt, Homo sapiens
  misc_RNA (1)...(19): siRNA sense strand
cauacagagaagagcgaga

SEQ ID NO: 2447288 - RNA, 19 nt, Homo sapiens
  misc_RNA (1)...(19): siRNA sense strand
cagaaaacaaagauagaga

SEQ ID NO: 2447289 - RNA, 19 nt, Homo sapiens
  misc_RNA (1)...(19): siRNA sense strand
guuucuagccuuugcaaaa

SEQ ID NO: 2447290 - RNA, 19 nt, Homo sapiens
  misc_RNA (1)...(19): siRNA sense strand
aaaccaaaucacauggaga

SEQ ID NO: 2447291 - RNA, 19 nt, Homo sapiens
  misc_RNA (1)...(19): siRNA sense strand
uggacgacccaguguggaa

SEQ ID NO: 2447292 - RNA, 19 nt, Homo sapiens
  misc_RNA (1)...(19): siRNA sense strand
acaggaaaguuuaugacca

SEQ ID NO: 2447293 - RNA, 19 nt, Homo sapiens
  misc_RNA (1)...(19): siRNA sense strand
uagagaaagaagaggcacu

SEQ ID NO: 2447294 - RNA, 19 nt, Homo sapiens
  misc_RNA (1)...(19): siRNA sense strand
gauccgagucagaggcagu

SEQ ID NO: 2447295 - RNA, 19 nt, Homo sapiens
  misc_RNA (1)...(19): siRNA sense strand
uguaaccagagaagacaaa

SEQ ID NO: 2447296 - RNA, 19 nt, Homo sapiens
  misc_RNA (1)...(19): siRNA sense strand
aaacaaagauagagaucgg

SEQ ID NO: 2447297 - RNA, 19 nt, Homo sapiens
  misc_RNA (1)...(19): siRNA sense strand
ccuagagaaagaagaggca

SEQ ID NO: 2447298 - RNA, 19 nt, Homo sapiens
  misc_RNA (1)...(19): siRNA sense strand
cagccaggaacaagagaaa

SEQ ID NO: 2447299 - RNA, 19 nt, Homo sapiens
  misc_RNA (1)...(19): siRNA sense strand
aauucgagguuaagagauu

SEQ ID NO: 2447300 - RNA, 19 nt, Homo sapiens
  misc_RNA (1)...(19): siRNA sense strand
uggaaagaccaaugaccaa

SEQ ID NO: 2447301 - RNA, 19 nt, Homo sapiens
  misc_RNA (1)...(19): siRNA sense strand
agaaagaggucaucgagga

SEQ ID NO: 2447302 - RNA, 19 nt, Homo sapiens
  misc_RNA (1)...(19): siRNA sense strand
agacguuggugaagacgaa

SEQ ID NO: 2447303 - RNA, 19 nt, Homo sapiens
  misc_RNA (1)...(19): siRNA sense strand
cgggaagauuauauaugaa

SEQ ID NO: 2447304 - RNA, 19 nt, Homo sapiens
  misc_RNA (1)...(19): siRNA sense strand
aagucauagaaaugggaaa

SEQ ID NO: 2447305 - RNA, 19 nt, Homo sapiens
  misc_RNA (1)...(19): siRNA sense strand
gggaaaagcaaauggucau

SEQ ID NO: 2447306 - RNA, 19 nt, Homo sapiens
  misc_RNA (1)...(19): siRNA sense strand
ggaccaaaugcaucagaau

SEQ ID NO: 2447307 - RNA, 19 nt, Homo sapiens
  misc_RNA (1)...(19): siRNA sense strand
guagauaauaugaagcaga

SEQ ID NO: 2447308 - RNA, 19 nt, Homo sapiens
  misc_RNA (1)...(19): siRNA sense strand
ggacaguaccaaggaggaa

SEQ ID NO: 2447309 - RNA, 19 nt, Homo sapiens
  misc_RNA (1)...(19): siRNA sense strand
aagaauggacuaagaacau

SEQ ID NO: 2447310 - RNA, 19 nt, Homo sapiens
  misc_RNA (1)...(19): siRNA sense strand
cauugauucugaaggaaga

SEQ ID NO: 2447311 - RNA, 19 nt, Homo sapiens
  misc_RNA (1)...(19): siRNA sense strand
cagaaaagcagcaaauaau

SEQ ID NO: 2447312 - RNA, 19 nt, Homo sapiens
  misc_RNA (1)...(19): siRNA sense strand
gcaucagaauuuugaagaa

SEQ ID NO: 2447313 - RNA, 19 nt, Homo sapiens
  misc_RNA (1)...(19): siRNA sense strand
caugaaaauugauguggaa

SEQ ID NO: 2447314 - RNA, 19 nt, Homo sapiens
  misc_RNA (1)...(19): siRNA sense strand
cgaacuaccauguacaaau

SEQ ID NO: 2447315 - RNA, 19 nt, Homo sapiens
  misc_RNA (1)...(19): siRNA sense strand
gugaauugucagaauaaga

SEQ ID NO: 2447316 - RNA, 19 nt, Homo sapiens
  misc_RNA (1)...(19): siRNA sense strand
aggaacaagagaaaagaaa

SEQ ID NO: 2447317 - RNA, 19 nt, Homo sapiens
  misc_RNA (1)...(19): siRNA sense strand
cugaaaucaaucaagcaaa

SEQ ID NO: 2447318 - RNA, 19 nt, Homo sapiens
  misc_RNA (1)...(19): siRNA sense strand
ucaucaaggagauagcaaa

SEQ ID NO: 2447319 - RNA, 19 nt, Homo sapiens
  misc_RNA (1)...(19): siRNA sense strand
gguaauguggaccgaacua

SEQ ID NO: 2447320 - RNA, 19 nt, Homo sapiens
  misc_RNA (1)...(19): siRNA sense strand
ucagaaaagcagcaaauaa

SEQ ID NO: 2447321 - RNA, 19 nt, Homo sapiens
  misc_RNA (1)...(19): siRNA sense strand
ugguaaaaugcaaggaauu

SEQ ID NO: 2447322 - RNA, 19 nt, Homo sapiens
  misc_RNA (1)...(19): siRNA sense strand
gcuccaagucauagaaaug

SEQ ID NO: 2447323 - RNA, 19 nt, Homo sapiens
  misc_RNA (1)...(19): siRNA sense strand
ccugaaaucaaucaagcaa

SEQ ID NO: 2447324 - RNA, 19 nt, Homo sapiens
  misc_RNA (1)...(19): siRNA sense strand
guaccaaggaggaaagaac

SEQ ID NO: 2447325 - RNA, 19 nt, Homo sapiens
  misc_RNA (1)...(19): siRNA sense strand
agaaaugggaaaagcaaau

SEQ ID NO: 2447326 - RNA, 19 nt, Homo sapiens
  misc_RNA (1)...(19): siRNA sense strand
augaaacugcaguggaaau

SEQ ID NO: 2447327 - RNA, 19 nt, Homo sapiens
  misc_RNA (1)...(19): siRNA sense strand
ccaagauaauccaggguug

SEQ ID NO: 2447328 - RNA, 19 nt, Homo sapiens
  misc_RNA (1)...(19): siRNA sense strand
agaaagcuguugugggcca

SEQ ID NO: 2447329 - RNA, 19 nt, Homo sapiens
  misc_RNA (1)...(19): siRNA sense strand
gcaaauaauggaaaagcau

SEQ ID NO: 2447330 - RNA, 19 nt, Homo sapiens
  misc_RNA (1)...(19): siRNA sense strand
cuggaagaauggacuaaga

SEQ ID NO: 2447331 - RNA, 19 nt, Homo sapiens
  misc_RNA (1)...(19): siRNA sense strand
auaugaacaagaaggagua

SEQ ID NO: 2447332 - RNA, 19 nt, Homo sapiens
  misc_RNA (1)...(19): siRNA sense strand
agaaagcaagcauggaaau

SEQ ID NO: 2447333 - RNA, 19 nt, Homo sapiens
  misc_RNA (1)...(19): siRNA sense strand
ggaacaagagaaaagaaau

SEQ ID NO: 2447334 - RNA, 19 nt, Homo sapiens
  misc_RNA (1)...(19): siRNA sense strand
uggaagauauacucugcaa

SEQ ID NO: 2447335 - RNA, 19 nt, Homo sapiens
  misc_RNA (1)...(19): siRNA sense strand
gaaagaggucaucgaggau

SEQ ID NO: 2447336 - RNA, 19 nt, Homo sapiens
  misc_RNA (1)...(19): siRNA sense strand
gguuaagagauuauagaag

SEQ ID NO: 2447337 - RNA, 19 nt, Homo sapiens
  misc_RNA (1)...(19): siRNA sense strand
ugaaaauugauguggaaga

SEQ ID NO: 2447338 - RNA, 19 nt, Homo sapiens
  misc_RNA (1)...(19): siRNA sense strand
agucauagaaaugggaaaa

SEQ ID NO: 2447339 - RNA, 19 nt, Homo sapiens
  misc_RNA (1)...(19): siRNA sense strand
ccaaugaccaagacggcuu

SEQ ID NO: 2447340 - RNA, 19 nt, Homo sapiens
  misc_RNA (1)...(19): siRNA sense strand
aagaggucaucgaggauca

SEQ ID NO: 2447341 - RNA, 19 nt, Homo sapiens
  misc_RNA (1)...(19): siRNA sense strand
agcaaaacaaagaggguau

SEQ ID NO: 2447342 - RNA, 19 nt, Homo sapiens
  misc_RNA (1)...(19): siRNA sense strand
auagcaaacuacugauuga

SEQ ID NO: 2447343 - RNA, 19 nt, Homo sapiens
  misc_RNA (1)...(19): siRNA sense strand
aagcagcaaauaauggaaa

SEQ ID NO: 2447344 - RNA, 19 nt, Homo sapiens
  misc_RNA (1)...(19): siRNA sense strand
cagcauaugguuuaauaca

SEQ ID NO: 2447345 - RNA, 19 nt, Homo sapiens
  misc_RNA (1)...(19): siRNA sense strand
cccaauuacaaaagcaaaa

SEQ ID NO: 2447346 - RNA, 19 nt, Homo sapiens
  misc_RNA (1)...(19): siRNA sense strand
ccgaaguaauaguggacug

SEQ ID NO: 2447347 - RNA, 19 nt, Homo sapiens
  misc_RNA (1)...(19): siRNA sense strand
uuccaggucuaaagauaaa

SEQ ID NO: 2447348 - RNA, 19 nt, Homo sapiens
  misc_RNA (1)...(19): siRNA sense strand
cgguaucacuggaagaaug

SEQ ID NO: 2447349 - RNA, 19 nt, Homo sapiens
  misc_RNA (1)...(19): siRNA sense strand
guggaaagaccaaugacca

SEQ ID NO: 2447350 - RNA, 19 nt, Homo sapiens
  misc_RNA (1)...(19): siRNA sense strand
auuguuagacaguggauuu

SEQ ID NO: 2447351 - RNA, 19 nt, Homo sapiens
  misc_RNA (1)...(19): siRNA sense strand
ucaucgaggaucagaacau

SEQ ID NO: 2447352 - RNA, 19 nt, Homo sapiens
  misc_RNA (1)...(19): siRNA sense strand
aguuacaacaccagauuca

SEQ ID NO: 2447353 - RNA, 19 nt, Homo sapiens
  misc_RNA (1)...(19): siRNA sense strand
ucuugugaauugucagaau

SEQ ID NO: 2447354 - RNA, 19 nt, Homo sapiens
  misc_RNA (1)...(19): siRNA sense strand
gcauugagaaagcaagcau

SEQ ID NO: 2447355 - RNA, 19 nt, Homo sapiens
  misc_RNA (1)...(19): siRNA sense strand
gggagaaggugaagcagca

SEQ ID NO: 2447356 - RNA, 19 nt, Homo sapiens
  misc_RNA (1)...(19): siRNA sense strand
agagugaggaggaggacaa

SEQ ID NO: 2447357 - RNA, 19 nt, Homo sapiens
  misc_RNA (1)...(19): siRNA sense strand
gggcgaugcaaguggccaa

SEQ ID NO: 2447358 - RNA, 19 nt, Homo sapiens
  misc_RNA (1)...(19): siRNA sense strand
aggagaagaaacuggagaa

SEQ ID NO: 2447359 - RNA, 19 nt, Homo sapiens
  misc_RNA (1)...(19): siRNA sense strand
ggaccaaacaugagcugga

SEQ ID NO: 2447360 - RNA, 19 nt, Homo sapiens
  misc_RNA (1)...(19): siRNA sense strand
acgaagagagugaggagga

SEQ ID NO: 2447361 - RNA, 19 nt, Homo sapiens
  misc_RNA (1)...(19): siRNA sense strand
gcuacauaagugagugcaa

SEQ ID NO: 2447362 - RNA, 19 nt, Homo sapiens
  misc_RNA (1)...(19): siRNA sense strand
cggcugagggagaagguga

SEQ ID NO: 2447363 - RNA, 19 nt, Homo sapiens
  misc_RNA (1)...(19): siRNA sense strand
uggccaagaccaugcggaa

SEQ ID NO: 2447364 - RNA, 19 nt, Homo sapiens
  misc_RNA (1)...(19): siRNA sense strand
gcagauaacuaugugccaa

SEQ ID NO: 2447365 - RNA, 19 nt, Homo sapiens
  misc_RNA (1)...(19): siRNA sense strand
gcgccgaggagaagaaacu

SEQ ID NO: 2447366 - RNA, 19 nt, Homo sapiens
  misc_RNA (1)...(19): siRNA sense strand
ggcugaagcaggagaagca
